United States Patent Application Publication US 2005/0244851 A1 - sequence listing, part 148

SEQ ID NO: 5779236 - DNA, 25 bp, Homo sapien
gtttgattgtgtttggctcttcgct

SEQ ID NO: 5779237 - DNA, 25 bp, Homo sapien
tttccaatttaataagcaaaggctg

SEQ ID NO: 5779238 - DNA, 25 bp, Homo sapien
cccgggaggcgcgagcccgcgtccg

SEQ ID NO: 5779239 - DNA, 25 bp, Homo sapien
atcaagaagtgaacgttgtgatatt

SEQ ID NO: 5779240 - DNA, 25 bp, Homo sapien
attatgtgcggctcggccctggctt

SEQ ID NO: 5779241 - DNA, 25 bp, Homo sapien
ccgaaaggattcataatcaatgcag

SEQ ID NO: 5779242 - DNA, 25 bp, Homo sapien
atagacagaagatctctggaaacat

SEQ ID NO: 5779243 - DNA, 25 bp, Homo sapien
ctcttttctttgtcccggagcaggc

SEQ ID NO: 5779244 - DNA, 25 bp, Homo sapien
ttccgttggaaacgatttatctaga

SEQ ID NO: 5779245 - DNA, 25 bp, Homo sapien
gttcctctgggcagcctgggtgttt

SEQ ID NO: 5779246 - DNA, 25 bp, Homo sapien
cgctgctccgcagacggggctgcaa

SEQ ID NO: 5779247 - DNA, 25 bp, Homo sapien
aaccaggtacaaggcatctatttta

SEQ ID NO: 5779248 - DNA, 25 bp, Homo sapien
ttttcccctcgacctcgccggcgtc

SEQ ID NO: 5779249 - DNA, 25 bp, Homo sapien
gccagccaggacgctgccgacttgt

SEQ ID NO: 5779250 - DNA, 25 bp, Homo sapien
tcaataatttggtagtggaagccta

SEQ ID NO: 5779251 - DNA, 25 bp, Homo sapien
gggacccgccgtgccgagccgggag

SEQ ID NO: 5779252 - DNA, 25 bp, Homo sapien
gatacaccagaaggaggttttgacg

SEQ ID NO: 5779253 - DNA, 25 bp, Homo sapien
ttttaacattaccgccatctgtcca

SEQ ID NO: 5779254 - DNA, 25 bp, Homo sapien
ggccctggctttttttaccgctgca

SEQ ID NO: 5779255 - DNA, 25 bp, Homo sapien
taatttggtagtggaagcctatcag

SEQ ID NO: 5779256 - DNA, 25 bp, Homo sapien
gagcccgcgtccggaaggcagccag

SEQ ID NO: 5779257 - DNA, 25 bp, Homo sapien
aatagacaacaacattaatgtcatc

SEQ ID NO: 5779258 - DNA, 25 bp, Homo sapien
catatcggatggcgaaaagaggcta

SEQ ID NO: 5779259 - DNA, 25 bp, Homo sapien
cctgcggaaaacgtcctagcgacac

SEQ ID NO: 5779260 - DNA, 25 bp, Homo sapien
gtgaagacaatagatgtgcatcttc

SEQ ID NO: 5779261 - DNA, 25 bp, Homo sapien
caactttcagagaaattaatagaca

SEQ ID NO: 5779262 - DNA, 25 bp, Homo sapien
ccaatgacggaaactgtcatctgaa

SEQ ID NO: 5779263 - DNA, 25 bp, Homo sapien
caagaagtgaacgttgtgatattgt

SEQ ID NO: 5779264 - DNA, 25 bp, Homo sapien
gtctatgtcaaatcgacaaccatgg

SEQ ID NO: 5779265 - DNA, 25 bp, Homo sapien
atgccgagcggtgcccgggcccgct

SEQ ID NO: 5779266 - DNA, 25 bp, Homo sapien
acagtttcaccatacattagcatcc

SEQ ID NO: 5779267 - DNA, 25 bp, Homo sapien
aagtcatatcggatggcgaaaagag

SEQ ID NO: 5779268 - DNA, 25 bp, Homo sapien
agagccgcctccccctgttgctggc

SEQ ID NO: 5779269 - DNA, 25 bp, Homo sapien
tatcggatggcgaaaagaggctaaa

SEQ ID NO: 5779270 - DNA, 25 bp, Homo sapien
aggctgcaaacctcaataatttggt

SEQ ID NO: 5779271 - DNA, 25 bp, Homo sapien
gtgcccaatgacggaaactgtcatc

SEQ ID NO: 5779272 - DNA, 25 bp, Homo sapien
gctaattttatgctgaaagttcatc

SEQ ID NO: 5779273 - DNA, 25 bp, Homo sapien
agagaacatcactgagtttgagaaa

SEQ ID NO: 5779274 - DNA, 25 bp, Homo sapien
cgggctttgtttgggtttgattgtg

SEQ ID NO: 5779275 - DNA, 25 bp, Homo sapien
tgatgtctcagcatcaatgcacaat

SEQ ID NO: 5779276 - DNA, 25 bp, Homo sapien
ttggccgtcgaaggaggtgcttctc

SEQ ID NO: 5779277 - DNA, 25 bp, Homo sapien
ccttggccgtcgaaggaggtgcttc

SEQ ID NO: 5779278 - DNA, 25 bp, Homo sapien
gctaagctgatttatgcagcagaag

SEQ ID NO: 5779279 - DNA, 25 bp, Homo sapien
catagatacaccagaaggaggtttt

SEQ ID NO: 5779280 - DNA, 25 bp, Homo sapien
ggctaaaagattgctgctggtgatg

SEQ ID NO: 5779281 - DNA, 25 bp, Homo sapien
taagcaaaggctgctcagttgattc

SEQ ID NO: 5779282 - DNA, 25 bp, Homo sapien
gtgtttggctcttcgctaagctgat

SEQ ID NO: 5779283 - DNA, 25 bp, Homo sapien
tgctggtgatgacagatcagacgtc

SEQ ID NO: 5779284 - DNA, 25 bp, Homo sapien
gtgctgtctttgacagagaacatca

SEQ ID NO: 5779285 - DNA, 25 bp, Homo sapien
atctttattatcttgttgatgtctc

SEQ ID NO: 5779286 - DNA, 25 bp, Homo sapien
ctccccatggatacatccatgtgct

SEQ ID NO: 5779287 - DNA, 25 bp, Homo sapien
agcctgggtgttttcacttgttctt

SEQ ID NO: 5779288 - DNA, 25 bp, Homo sapien
gccgagcggtgcccgggcccgctta

SEQ ID NO: 5779289 - DNA, 25 bp, Homo sapien
aatttcattggtataaggatcttct

SEQ ID NO: 5779290 - DNA, 25 bp, Homo sapien
tccaatttaataagcaaaggctgct

SEQ ID NO: 5779291 - DNA, 25 bp, Homo sapien
ctgcatttgtctgcctgcaaaacga

SEQ ID NO: 5779292 - DNA, 25 bp, Homo sapien
tgcgccacagacttttttcccctcg

SEQ ID NO: 5779293 - DNA, 25 bp, Homo sapien
aaatagaatcaaaggctgcaaacct

SEQ ID NO: 5779294 - DNA, 25 bp, Homo sapien
aggagccgaagctaattttatgctg

SEQ ID NO: 5779295 - DNA, 25 bp, Homo sapien
aatggcatttttctcccgtgacttt

SEQ ID NO: 5779296 - DNA, 25 bp, Homo sapien
ggaggtgcttctcgcggagaccgcg

SEQ ID NO: 5779297 - DNA, 25 bp, Homo sapien
attggcaggcatagtggtgcccaat

SEQ ID NO: 5779298 - DNA, 25 bp, Homo sapien
actgtcatctgaaaaacaacgtcta

SEQ ID NO: 5779299 - DNA, 25 bp, Homo sapien
gccctgagatgccgagcggtgcccg

SEQ ID NO: 5779300 - DNA, 25 bp, Homo sapien
atccatgtgctgtctttgacagaga

SEQ ID NO: 5779301 - DNA, 25 bp, Homo sapien
cgggcgcggggcgggctgttttgca

SEQ ID NO: 5779302 - DNA, 25 bp, Homo sapien
agcggtgcccgggcccgcttacctg

SEQ ID NO: 5779303 - DNA, 25 bp, Homo sapien
caaacctcaataatttggtagtgga

SEQ ID NO: 5779304 - DNA, 25 bp, Homo sapien
gccaactttcagagaaattaataga

SEQ ID NO: 5779305 - DNA, 25 bp, Homo sapien
cctctctccagtcgccgccggggcc

SEQ ID NO: 5779306 - DNA, 25 bp, Homo sapien
cactcggcccgcgggccccgaggtg

SEQ ID NO: 5779307 - DNA, 25 bp, Homo sapien
aatcgacaaccatggaacacccctc

SEQ ID NO: 5779308 - DNA, 25 bp, Homo sapien
gttttgacgccatgcttcaggcagc

SEQ ID NO: 5779309 - DNA, 25 bp, Homo sapien
cctgagatgccgagcggtgcccggg

SEQ ID NO: 5779310 - DNA, 25 bp, Homo sapien
gtctgtgaaagtcatatcggatggc

SEQ ID NO: 5779311 - DNA, 25 bp, Homo sapien
ctgatttatgcagcagaagccccac

SEQ ID NO: 5779312 - DNA, 25 bp, Homo sapien
tatgcagcagaagccccaccggctg

SEQ ID NO: 5779313 - DNA, 25 bp, Homo sapien
cccacctgtggaagcaactgcgctg

SEQ ID NO: 5779314 - DNA, 25 bp, Homo sapien
gaaagttcatcctctgaagaaatat

SEQ ID NO: 5779315 - DNA, 25 bp, Homo sapien
ggcgggcgcggggcgggctgttttg

SEQ ID NO: 5779316 - DNA, 25 bp, Homo sapien
tccctgcccacctgtggaagcaact

SEQ ID NO: 5779317 - DNA, 25 bp, Homo sapien
tgctggcatcccgagcttcctccct

SEQ ID NO: 5779318 - DNA, 25 bp, Homo sapien
ctgcaccgcttgctccgagccgcgg

SEQ ID NO: 5779319 - DNA, 25 bp, Homo sapien
acatccatgtgctgtctttgacaga

SEQ ID NO: 5779320 - DNA, 25 bp, Homo sapien
cgcctcgttcctctgggcagcctgg

SEQ ID NO: 5779321 - DNA, 25 bp, Homo sapien
atacatccatgtgctgtctttgaca

SEQ ID NO: 5779322 - DNA, 25 bp, Homo sapien
tgtggaagcaactgcgctgattgat

SEQ ID NO: 5779323 - DNA, 25 bp, Homo sapien
gaaagttcaggtggaaaaccaggta

SEQ ID NO: 5779324 - DNA, 25 bp, Homo sapien
aaggcagccaggcggcgggcgcggg

SEQ ID NO: 5779325 - DNA, 25 bp, Homo sapien
ggccgtcgaaggaggtgcttctcgc

SEQ ID NO: 5779326 - DNA, 25 bp, Homo sapien
tcatagacagaagatctctggaaac

SEQ ID NO: 5779327 - DNA, 25 bp, Homo sapien
agcaggctgcggagcccttgcagag

SEQ ID NO: 5779328 - DNA, 25 bp, Homo sapien
gctgttttgcattatgtgcggctcg

SEQ ID NO: 5779329 - DNA, 25 bp, Homo sapien
tacccaggtgacaccaggagaagtg

SEQ ID NO: 5779330 - DNA, 25 bp, Homo sapien
gaggatttcatttcaggtggatcaa

SEQ ID NO: 5779331 - DNA, 25 bp, Homo sapien
gtgggtgtgcatttttcccttttaa

SEQ ID NO: 5779332 - DNA, 25 bp, Homo sapien
cagagccctctctccagtcgccgcc

SEQ ID NO: 5779333 - DNA, 25 bp, Homo sapien
catcccgagcttcctcccttgccag

SEQ ID NO: 5779334 - DNA, 25 bp, Homo sapien
gggcccttggccgtcgaaggaggtg

SEQ ID NO: 5779335 - DNA, 25 bp, Homo sapien
ataaggatcttctacccctcttgcc

SEQ ID NO: 5779336 - DNA, 25 bp, Homo sapien
agaaagcagttcatagacagaagat

SEQ ID NO: 5779337 - DNA, 25 bp, Homo sapien
caaggtgaagacaatagatgtgcat

SEQ ID NO: 5779338 - DNA, 25 bp, Homo sapien
aggtggatcaagaagtgaacgttgt

SEQ ID NO: 5779339 - DNA, 25 bp, Homo sapien
gaagctcatttcagaagtgaaagtt

SEQ ID NO: 5779340 - DNA, 25 bp, Homo sapien
ctacaatttagactgcatgcctccc

SEQ ID NO: 5779341 - DNA, 25 bp, Homo sapien
gcttacctgcaccgcttgctccgag

SEQ ID NO: 5779342 - DNA, 25 bp, Homo sapien
taatggtgttggcctccctgcccac

SEQ ID NO: 5779343 - DNA, 25 bp, Homo sapien
ctccccctgttgctggcatcccgag

SEQ ID NO: 5779344 - DNA, 25 bp, Homo sapien
aggtggaaaaccaggtacaaggcat

SEQ ID NO: 5779345 - DNA, 25 bp, Homo sapien
agctcttttctttgtcccggagcag

SEQ ID NO: 5779346 - DNA, 25 bp, Homo sapien
cagacttttttcccctcgacctcgc

SEQ ID NO: 5779347 - DNA, 25 bp, Homo sapien
ctgctcagttgattcaatagaatac

SEQ ID NO: 5779348 - DNA, 25 bp, Homo sapien
tgatgacagatcagacgtctcatct

SEQ ID NO: 5779349 - DNA, 25 bp, Homo sapien
ttgccaggcaccattgctggtgaaa

SEQ ID NO: 5779350 - DNA, 25 bp, Homo sapien
gtggaagcctatcagaagctcattt

SEQ ID NO: 5779351 - DNA, 25 bp, Homo sapien
gtccggaaggcagccaggcggcggg

SEQ ID NO: 5779352 - DNA, 25 bp, Homo sapien
tatgtgcggctcggccctggctttt

SEQ ID NO: 5779353 - DNA, 25 bp, Homo sapien
gaaaaatggcatttttctcccgtga

SEQ ID NO: 5779354 - DNA, 25 bp, Homo sapien
gcggagcccttgcagagccctctct

SEQ ID NO: 5779355 - DNA, 25 bp, Homo sapien
ggcgggtgcttctagggcgctccca

SEQ ID NO: 5779356 - DNA, 25 bp, Homo sapien
tttgacgccatgcttcaggcagctg

SEQ ID NO: 5779357 - DNA, 25 bp, Homo sapien
tttgagaaagcagttcatagacaga

SEQ ID NO: 5779358 - DNA, 25 bp, Homo sapien
ctgaaagttcatcctctgaagaaat

SEQ ID NO: 5779359 - DNA, 25 bp, Homo sapien
tccaccccgaaaggattcataatca

SEQ ID NO: 5779360 - DNA, 25 bp, Homo sapien
tagggcgctcccagagccgcctccc

SEQ ID NO: 5779361 - DNA, 25 bp, Homo sapien
gttgctggcatcccgagcttcctcc

SEQ ID NO: 5779362 - DNA, 25 bp, Homo sapien
aaaagaggctaaaagattgctgctg

SEQ ID NO: 5779363 - DNA, 25 bp, Homo sapien
tacattagcatccaccccgaaagga

SEQ ID NO: 5779364 - DNA, 25 bp, Homo sapien
gagccgaagctaattttatgctgaa

SEQ ID NO: 5779365 - DNA, 25 bp, Homo sapien
tgcagtgactacaatttagactgca

SEQ ID NO: 5779366 - DNA, 25 bp, Homo sapien
gatccagcatcacccagtgaatgta

SEQ ID NO: 5779367 - DNA, 25 bp, Homo sapien
cccatctgtgcatgttataataccc

SEQ ID NO: 5779368 - DNA, 25 bp, Homo sapien
cgaccggcgaggtcccgcctcgttc

SEQ ID NO: 5779369 - DNA, 25 bp, Homo sapien
acggaaactgtcatctgaaaaacaa

SEQ ID NO: 5779370 - DNA, 25 bp, Homo sapien
gttgtgatattgtttccaatttaat

SEQ ID NO: 5779371 - DNA, 25 bp, Homo sapien
cagcatcacccagtgaatgtacatt

SEQ ID NO: 5779372 - DNA, 25 bp, Homo sapien
catctattttaacattaccgccatc

SEQ ID NO: 5779373 - DNA, 25 bp, Homo sapien
gtctatccagctgcgtccaggagcc

SEQ ID NO: 5779374 - DNA, 25 bp, Homo sapien
accgcttgctccgagccgcggggtc

SEQ ID NO: 5779375 - DNA, 25 bp, Homo sapien
ggctcatacgttgataaaacagttt

SEQ ID NO: 5779376 - DNA, 25 bp, Homo sapien
ggaaactgtcatctgaaaaacaacg

SEQ ID NO: 5779377 - DNA, 25 bp, Homo sapien
gttgatgtctcagcatcaatgcaca

SEQ ID NO: 5779378 - DNA, 25 bp, Homo sapien
ctggctttttttaccgctgcatttg

SEQ ID NO: 5779379 - DNA, 25 bp, Homo sapien
ctcatctcgctcttgatagcaaatt

SEQ ID NO: 5779380 - DNA, 25 bp, Homo sapien
aacattaatgtcatctttgcagttc

SEQ ID NO: 5779381 - DNA, 25 bp, Homo sapien
gtcccgcctcgttcctctgggcagc

SEQ ID NO: 5779382 - DNA, 25 bp, Homo sapien
ctcagcatcaatgcacaataatata

SEQ ID NO: 5779383 - DNA, 25 bp, Homo sapien
cccttgcagagccctctctccagtc

SEQ ID NO: 5779384 - DNA, 25 bp, Homo sapien
gcagttcaaggaaaacaatttcatt

SEQ ID NO: 5779385 - DNA, 25 bp, Homo sapien
atctgtccagatgggtccagaaagc

SEQ ID NO: 5779386 - DNA, 25 bp, Homo sapien
ggcatctattttaacattaccgcca

SEQ ID NO: 5779387 - DNA, 25 bp, Homo sapien
gaaatatcctgtggatctttattat

SEQ ID NO: 5779388 - DNA, 25 bp, Homo sapien
atggtgttggcctccctgcccacct

SEQ ID NO: 5779389 - DNA, 25 bp, Homo sapien
agttcaaggaaaacaatttcattgg

SEQ ID NO: 5779390 - DNA, 25 bp, Homo sapien
tggatggtgtgttcaagaggatttc

SEQ ID NO: 5779391 - DNA, 25 bp, Homo sapien
caccccgaaaggattcataatcaat

SEQ ID NO: 5779392 - DNA, 25 bp, Homo sapien
agctgcgtccaggagccgaagctaa

SEQ ID NO: 5779393 - DNA, 25 bp, Homo sapien
tggtgcccaatgacggaaactgtca

SEQ ID NO: 5779394 - DNA, 25 bp, Homo sapien
aagtgaacgttgtgatattgtttcc

SEQ ID NO: 5779395 - DNA, 25 bp, Homo sapien
tgaaatagaatcaaaggctgcaaac

SEQ ID NO: 5779396 - DNA, 25 bp, Homo sapien
attatcttgttgatgtctcagcatc

SEQ ID NO: 5779397 - DNA, 25 bp, Homo sapien
cggggctgcaaagctgcaactaatg

SEQ ID NO: 5779398 - DNA, 25 bp, Homo sapien
cacagacttttttcccctcgacctc

SEQ ID NO: 5779399 - DNA, 25 bp, Homo sapien
aaacgtcctagcgacactcggcccg

SEQ ID NO: 5779400 - DNA, 25 bp, Homo sapien
gtggatcaagaagtgaacgttgtga

SEQ ID NO: 5779401 - DNA, 25 bp, Homo sapien
atagaatacccatctgtgcatgtta

SEQ ID NO: 5779402 - DNA, 25 bp, Homo sapien
tgtggatggtgtgttcaagaggatt

SEQ ID NO: 5779403 - DNA, 25 bp, Homo sapien
aacaacgtctatgtcaaatcgacaa

SEQ ID NO: 5779404 - DNA, 25 bp, Homo sapien
ggccgtaggggccctgagatgccga

SEQ ID NO: 5779405 - DNA, 25 bp, Homo sapien
tgttataatacccactgaaaatgaa

SEQ ID NO: 5779406 - DNA, 25 bp, Homo sapien
ctgttgctggcatcccgagcttcct

SEQ ID NO: 5779407 - DNA, 25 bp, Homo sapien
gcagaaacgtgacgagcaatgatga

SEQ ID NO: 5779408 - DNA, 25 bp, Homo sapien
gacagatcagacgtctcatctcgct

SEQ ID NO: 5779409 - DNA, 25 bp, Homo sapien
ggatctttattatcttgttgatgtc

SEQ ID NO: 5779410 - DNA, 25 bp, Homo sapien
tgagatgccgagcggtgcccgggcc

SEQ ID NO: 5779411 - DNA, 25 bp, Homo sapien
aatcaatgcagtgactacaatttag

SEQ ID NO: 5779412 - DNA, 25 bp, Homo sapien
ccagaaggaggttttgacgccatgc

SEQ ID NO: 5779413 - DNA, 25 bp, Homo sapien
ctgaaaaacaacgtctatgtcaaat

SEQ ID NO: 5779414 - DNA, 25 bp, Homo sapien
accaggagaagtgtctatccagctg

SEQ ID NO: 5779415 - DNA, 25 bp, Homo sapien
gcccaatgacggaaactgtcatctg

SEQ ID NO: 5779416 - DNA, 25 bp, Homo sapien
tttcaccatacattagcatccaccc

SEQ ID NO: 5779417 - DNA, 25 bp, Homo sapien
ccgggcccgcttacctgcaccgctt

SEQ ID NO: 5779418 - DNA, 25 bp, Homo sapien
cagcatcaatgcacaataatataga

SEQ ID NO: 5779419 - DNA, 25 bp, Homo sapien
cagatccagcatcacccagtgaatg

SEQ ID NO: 5779420 - DNA, 25 bp, Homo sapien
gctgcaactaatggtgttggcctcc

SEQ ID NO: 5779421 - DNA, 25 bp, Homo sapien
cccaggtgacaccaggagaagtgtc

SEQ ID NO: 5779422 - DNA, 25 bp, Homo sapien
ggaaaaccaggtacaaggcatctat

SEQ ID NO: 5779423 - DNA, 25 bp, Homo sapien
ttttcacttgttcttggactgggcc

SEQ ID NO: 5779424 - DNA, 25 bp, Homo sapien
tgtctttgacagagaacatcactga

SEQ ID NO: 5779425 - DNA, 25 bp, Homo sapien
ggaggcgcgagcccgcgtccggaag

SEQ ID NO: 5779426 - DNA, 25 bp, Homo sapien
ccgagccgcggggtccgcctgctag

SEQ ID NO: 5779427 - DNA, 25 bp, Homo sapien
ggtgcgcccgggaggcgcgagcccg

SEQ ID NO: 5779428 - DNA, 25 bp, Homo sapien
gattcaatagaatacccatctgtgc

SEQ ID NO: 5779429 - DNA, 25 bp, Homo sapien
gaagacaatagatgtgcatcttcaa

SEQ ID NO: 5779430 - DNA, 25 bp, Homo sapien
tgcggaaaacgtcctagcgacactc

SEQ ID NO: 5779431 - DNA, 25 bp, Homo sapien
gcctccccatggatacatccatgtg

SEQ ID NO: 5779432 - DNA, 25 bp, Homo sapien
ctcccacagatccagcatcacccag

SEQ ID NO: 5779433 - DNA, 25 bp, Homo sapien
tcatctttgcagttcaaggaaaaca

SEQ ID NO: 5779434 - DNA, 25 bp, Homo sapien
tttgtcccggagcaggctgcggagc

SEQ ID NO: 5779435 - DNA, 25 bp, Homo sapien
aaagccaggcatggaaggatgcaga

SEQ ID NO: 5779436 - DNA, 25 bp, Homo sapien
atttaataagcaaaggctgctcagt

SEQ ID NO: 5779437 - DNA, 25 bp, Homo sapien
tctcgctcttgatagcaaattggca

SEQ ID NO: 5779438 - DNA, 25 bp, Homo sapien
ttaatacccaggtgacaccaggaga

SEQ ID NO: 5779439 - DNA, 25 bp, Homo sapien
ttgccagccaggacgctgccgactt

SEQ ID NO: 5779440 - DNA, 25 bp, Homo sapien
ttttaccgctgcatttgtctgcctg

SEQ ID NO: 5779441 - DNA, 25 bp, Homo sapien
tctgtgcatgttataatacccactg

SEQ ID NO: 5779442 - DNA, 25 bp, Homo sapien
tttgcccgctgctccgcagacgggg

SEQ ID NO: 5779443 - DNA, 25 bp, Homo sapien
ttaatgtcatctttgcagttcaagg

SEQ ID NO: 5779444 - DNA, 25 bp, Homo sapien
aaacagtttcaccatacattagcat

SEQ ID NO: 5779445 - DNA, 25 bp, Homo sapien
ccagagccgcctccccctgttgctg

SEQ ID NO: 5779446 - DNA, 25 bp, Homo sapien
aacgatttatctagaaaaatggcat

SEQ ID NO: 5779447 - DNA, 25 bp, Homo sapien
atgatgaagtatgtgggtgtgcatt

SEQ ID NO: 5779448 - DNA, 25 bp, Homo sapien
gcgtccggaaggcagccaggcggcg

SEQ ID NO: 5779449 - DNA, 25 bp, Homo sapien
gggcgggctgttttgcattatgtgc

SEQ ID NO: 5779450 - DNA, 25 bp, Homo sapien
ccggcgtcccctcccacagatccag

SEQ ID NO: 5779451 - DNA, 25 bp, Homo sapien
acgccatgcttcaggcagctgtctg

SEQ ID NO: 5779452 - DNA, 25 bp, Homo sapien
caaccatggaacacccctcactagg

SEQ ID NO: 5779453 - DNA, 25 bp, Homo sapien
ctgggtccagaatgtggatggtgtg

SEQ ID NO: 5779454 - DNA, 25 bp, Homo sapien
tgcgctgattgatgcgccacagact

SEQ ID NO: 5779455 - DNA, 25 bp, Homo sapien
cagaagctcatttcagaagtgaaag

SEQ ID NO: 5779456 - DNA, 25 bp, Homo sapien
taaattccgttggaaacgatttatc

SEQ ID NO: 5779457 - DNA, 25 bp, Homo sapien
ccccatggatacatccatgtgctgt

SEQ ID NO: 5779458 - DNA, 25 bp, Homo sapien
tcagacgtctcatctcgctcttgat

SEQ ID NO: 5779459 - DNA, 25 bp, Homo sapien
aatcaaaggctgcaaacctcaataa

SEQ ID NO: 5779460 - DNA, 25 bp, Homo sapien
tgtttggcgtactttcttacagaaa

SEQ ID NO: 5779461 - DNA, 25 bp, Homo sapien
aaacaatttcattggtataaggatc

SEQ ID NO: 5779462 - DNA, 25 bp, Homo sapien
ccatctgtccagatgggtccagaaa

SEQ ID NO: 5779463 - DNA, 25 bp, Homo sapien
caccggctggagagaaacaaaagct

SEQ ID NO: 5779464 - DNA, 25 bp, Homo sapien
tgtgccaggtgccttgcgctgggtc

SEQ ID NO: 5779465 - DNA, 25 bp, Homo sapien
cgaaggaggtgcttctcgcggagac

SEQ ID NO: 5779466 - DNA, 25 bp, Homo sapien
gcaggcatagtggtgcccaatgacg

SEQ ID NO: 5779467 - DNA, 25 bp, Homo sapien
gaatgtacattagggtggtttcccc

SEQ ID NO: 5779468 - DNA, 25 bp, Homo sapien
aagattgctgctggtgatgacagat

SEQ ID NO: 5779469 - DNA, 25 bp, Homo sapien
ccaggagccgaagctaattttatgc

SEQ ID NO: 5779470 - DNA, 25 bp, Homo sapien
ggctttgtttgggtttgattgtgtt

SEQ ID NO: 5779471 - DNA, 25 bp, Homo sapien
tttttctcccgtgactttcgtcttg

SEQ ID NO: 5779472 - DNA, 25 bp, Homo sapien
atgtgggtgtgcatttttccctttt

SEQ ID NO: 5779473 - DNA, 25 bp, Homo sapien
ttggatttggctcatacgttgataa

SEQ ID NO: 5779474 - DNA, 25 bp, Homo sapien
agtttcaccatacattagcatccac

SEQ ID NO: 5779475 - DNA, 25 bp, Homo sapien
atgtcaaatcgacaaccatggaaca

SEQ ID NO: 5779476 - DNA, 25 bp, Homo sapien
cccactgaaaatgaaattaataccc

SEQ ID NO: 5779477 - DNA, 25 bp, Homo sapien
gcccgcttacctgcaccgcttgctc

SEQ ID NO: 5779478 - DNA, 25 bp, Homo sapien
ctatgtcaaatcgacaaccatggaa

SEQ ID NO: 5779479 - DNA, 25 bp, Homo sapien
aattaatacccaggtgacaccagga

SEQ ID NO: 5779480 - DNA, 25 bp, Homo sapien
cagcagaagccccaccggctggaga

SEQ ID NO: 5779481 - DNA, 25 bp, Homo sapien
tgtttccaatttaataagcaaaggc

SEQ ID NO: 5779482 - DNA, 25 bp, Homo sapien
cattagcatccaccccgaaaggatt

SEQ ID NO: 5779483 - DNA, 25 bp, Homo sapien
aatatcctgtggatctttattatct

SEQ ID NO: 5779484 - DNA, 25 bp, Homo sapien
ttgggtttgattgtgtttggctctt

SEQ ID NO: 5779485 - DNA, 25 bp, Homo sapien
cccagtgaatgtacattagggtggt

SEQ ID NO: 5779486 - DNA, 25 bp, Homo sapien
aagtgtctatccagctgcgtccagg

SEQ ID NO: 5779487 - DNA, 25 bp, Homo sapien
ccgcctccccctgttgctggcatcc

SEQ ID NO: 5779488 - DNA, 25 bp, Homo sapien
gacaaccatggaacacccctcacta

SEQ ID NO: 5779489 - DNA, 25 bp, Homo sapien
gctcttgatagcaaattggcaggca

SEQ ID NO: 5779490 - DNA, 25 bp, Homo sapien
agccgcctccccctgttgctggcat

SEQ ID NO: 5779491 - DNA, 25 bp, Homo sapien
tggaaacatagatacaccagaagga

SEQ ID NO: 5779492 - DNA, 25 bp, Homo sapien
cctcaataatttggtagtggaagcc

SEQ ID NO: 5779493 - DNA, 25 bp, Homo sapien
gggcccgcttacctgcaccgcttgc

SEQ ID NO: 5779494 - DNA, 25 bp, Homo sapien
cacccagtgaatgtacattagggtg

SEQ ID NO: 5779495 - DNA, 25 bp, Homo sapien
ctgctccgcagacggggctgcaaag

SEQ ID NO: 5779496 - DNA, 25 bp, Homo sapien
ttcaaggaaaacaatttcattggta

SEQ ID NO: 5779497 - DNA, 25 bp, Homo sapien
tagacaacaacattaatgtcatctt

SEQ ID NO: 5779498 - DNA, 25 bp, Homo sapien
tttggcgtactttcttacagaaaaa

SEQ ID NO: 5779499 - DNA, 25 bp, Homo sapien
tcagagaaattaatagacaacaaca

SEQ ID NO: 5779500 - DNA, 25 bp, Homo sapien
tgcacacccacatacttcatcattg

SEQ ID NO: 5779501 - DNA, 25 bp, Homo sapien
caaatgcagcggtaaaaaaagccag

SEQ ID NO: 5779502 - DNA, 25 bp, Homo sapien
gccaaatccaagacgaaagtcacgg

SEQ ID NO: 5779503 - DNA, 25 bp, Homo sapien
tcaacaagataataaagatccacag

SEQ ID NO: 5779504 - DNA, 25 bp, Homo sapien
tgtctattaatttctctgaaagttg

SEQ ID NO: 5779505 - DNA, 25 bp, Homo sapien
tcctcttgaacacaccatccacatt

SEQ ID NO: 5779506 - DNA, 25 bp, Homo sapien
ctgcatttgaagatgcacatctatt

SEQ ID NO: 5779507 - DNA, 25 bp, Homo sapien
acataatgcaaaacagcccgccccg

SEQ ID NO: 5779508 - DNA, 25 bp, Homo sapien
cgagccgcacataatgcaaaacagc

SEQ ID NO: 5779509 - DNA, 25 bp, Homo sapien
cacaatcaaacccaaacaaagcccg

SEQ ID NO: 5779510 - DNA, 25 bp, Homo sapien
tgaggtttgcagcctttgattctat

SEQ ID NO: 5779511 - DNA, 25 bp, Homo sapien
attctatttcaccagcaatggtgcc

SEQ ID NO: 5779512 - DNA, 25 bp, Homo sapien
atcaacgtatgagccaaatccaaga

SEQ ID NO: 5779513 - DNA, 25 bp, Homo sapien
ttggcccagtccaagaacaagtgaa

SEQ ID NO: 5779514 - DNA, 25 bp, Homo sapien
ttcagcataaaattagcttcggctc

SEQ ID NO: 5779515 - DNA, 25 bp, Homo sapien
taagaaagtacgccaaacaacttag

SEQ ID NO: 5779516 - DNA, 25 bp, Homo sapien
gttgtctattaatttctctgaaagt

SEQ ID NO: 5779517 - DNA, 25 bp, Homo sapien
agcaggcggaccccgcggctcggag

SEQ ID NO: 5779518 - DNA, 25 bp, Homo sapien
ctgcggagcagcgggcaaagacaag

SEQ ID NO: 5779519 - DNA, 25 bp, Homo sapien
gccatccgatatgactttcacagac

SEQ ID NO: 5779520 - DNA, 25 bp, Homo sapien
aattagcttcggctcctggacgcag

SEQ ID NO: 5779521 - DNA, 25 bp, Homo sapien
aactttcagcataaaattagcttcg

SEQ ID NO: 5779522 - DNA, 25 bp, Homo sapien
atggtgaaactgttttatcaacgta

SEQ ID NO: 5779523 - DNA, 25 bp, Homo sapien
gccagcaacagggggaggcggctct

SEQ ID NO: 5779524 - DNA, 25 bp, Homo sapien
gggtattaatttcattttcagtggg

SEQ ID NO: 5779525 - DNA, 25 bp, Homo sapien
tgcattgatgctgagacatcaacaa

SEQ ID NO: 5779526 - DNA, 25 bp, Homo sapien
tctccagccggtggggcttctgctg

SEQ ID NO: 5779527 - DNA, 25 bp, Homo sapien
acgggagaaaaatgccatttttcta

SEQ ID NO: 5779528 - DNA, 25 bp, Homo sapien
agccccgtctgcggagcagcgggca

SEQ ID NO: 5779529 - DNA, 25 bp, Homo sapien
tttccacctgaactttcacttctga

SEQ ID NO: 5779530 - DNA, 25 bp, Homo sapien
ggggcccgcgggccgagtgtcgcta

SEQ ID NO: 5779531 - DNA, 25 bp, Homo sapien
gctttctggacccatctggacagat

SEQ ID NO: 5779532 - DNA, 25 bp, Homo sapien
tatattattgtgcattgatgctgag

SEQ ID NO: 5779533 - DNA, 25 bp, Homo sapien
tcaccagcagcaatcttttagcctc

SEQ ID NO: 5779534 - DNA, 25 bp, Homo sapien
gcacaggatgctgcatttgaagatg

SEQ ID NO: 5779535 - DNA, 25 bp, Homo sapien
agctttgcagccccgtctgcggagc

SEQ ID NO: 5779536 - DNA, 25 bp, Homo sapien
ggctcctggacgcagctggatagac

SEQ ID NO: 5779537 - DNA, 25 bp, Homo sapien
tctgtaagaaagtacgccaaacaac

SEQ ID NO: 5779538 - DNA, 25 bp, Homo sapien
cccgcgggccgagtgtcgctaggac

SEQ ID NO: 5779539 - DNA, 25 bp, Homo sapien
gcagctttgcagccccgtctgcgga

SEQ ID NO: 5779540 - DNA, 25 bp, Homo sapien
ggaggaagctcgggatgccagcaac

SEQ ID NO: 5779541 - DNA, 25 bp, Homo sapien
tatgaatcctttcggggtggatgct

SEQ ID NO: 5779542 - DNA, 25 bp, Homo sapien
aggggtagaagatccttataccaat

SEQ ID NO: 5779543 - DNA, 25 bp, Homo sapien
ggtcgttttgcaggcagacaaatgc

SEQ ID NO: 5779544 - DNA, 25 bp, Homo sapien
catagacgttgtttttcagatgaca

SEQ ID NO: 5779545 - DNA, 25 bp, Homo sapien
ggctcgcgcctcccgggcgcacctc

SEQ ID NO: 5779546 - DNA, 25 bp, Homo sapien
gcctagcaggcggaccccgcggctc

SEQ ID NO: 5779547 - DNA, 25 bp, Homo sapien
cttccggacgcgggctcgcgcctcc

SEQ ID NO: 5779548 - DNA, 25 bp, Homo sapien
tctgcatccttccatgcctggcttt

SEQ ID NO: 5779549 - DNA, 25 bp, Homo sapien
cagctggatagacacttctcctggt

SEQ ID NO: 5779550 - DNA, 25 bp, Homo sapien
cgccggtcgttttgcaggcagacaa

SEQ ID NO: 5779551 - DNA, 25 bp, Homo sapien
atgccatttttctagataaatcgtt

SEQ ID NO: 5779552 - DNA, 25 bp, Homo sapien
gtgaaaacacccaggctgcccagag

SEQ ID NO: 5779553 - DNA, 25 bp, Homo sapien
gttctctgtcaaagacagcacatgg

SEQ ID NO: 5779554 - DNA, 25 bp, Homo sapien
ttcagtgggtattataacatgcaca

SEQ ID NO: 5779555 - DNA, 25 bp, Homo sapien
gctctgggagcgccctagaagcacc

SEQ ID NO: 5779556 - DNA, 25 bp, Homo sapien
cgggcgcacctcggggcccgcgggc

SEQ ID NO: 5779557 - DNA, 25 bp, Homo sapien
atgtttccagagatcttctgtctat

SEQ ID NO: 5779558 - DNA, 25 bp, Homo sapien
gggccgagccgcacataatgcaaaa

SEQ ID NO: 5779559 - DNA, 25 bp, Homo sapien
cctgaagcatggcgtcaaaacctcc

SEQ ID NO: 5779560 - DNA, 25 bp, Homo sapien
atcattgctcgtcacgtttctgcat

SEQ ID NO: 5779561 - DNA, 25 bp, Homo sapien
taacatgcacagatgggtattctat

SEQ ID NO: 5779562 - DNA, 25 bp, Homo sapien
ccctaatgtacattcactgggtgat

SEQ ID NO: 5779563 - DNA, 25 bp, Homo sapien
agtcacgggagaaaaatgccatttt

SEQ ID NO: 5779564 - DNA, 25 bp, Homo sapien
gaggggacgccggcgaggtcgaggg

SEQ ID NO: 5779565 - DNA, 25 bp, Homo sapien
gagaagcacctccttcgacggccaa

SEQ ID NO: 5779566 - DNA, 25 bp, Homo sapien
cttctggtgtatctatgtttccaga

SEQ ID NO: 5779567 - DNA, 25 bp, Homo sapien
agcgtcctggctggcaagggaggaa

SEQ ID NO: 5779568 - DNA, 25 bp, Homo sapien
atttgacatagacgttgtttttcag

SEQ ID NO: 5779569 - DNA, 25 bp, Homo sapien
aaattgtagtcactgcattgattat

SEQ ID NO: 5779570 - DNA, 25 bp, Homo sapien
tgttttccttgaactgcaaagatga

SEQ ID NO: 5779571 - DNA, 25 bp, Homo sapien
agcagcctttgcttattaaattgga

SEQ ID NO: 5779572 - DNA, 25 bp, Homo sapien
catccttccatgcctggctttctgg

SEQ ID NO: 5779573 - DNA, 25 bp, Homo sapien
tcacaacgttcacttcttgatccac

SEQ ID NO: 5779574 - DNA, 25 bp, Homo sapien
gcacataatgcaaaacagcccgccc

SEQ ID NO: 5779575 - DNA, 25 bp, Homo sapien
gccgagccgcacataatgcaaaaca

SEQ ID NO: 5779576 - DNA, 25 bp, Homo sapien
ataaatcagcttagcgaagagccaa

SEQ ID NO: 5779577 - DNA, 25 bp, Homo sapien
attaatttcattttcagtgggtatt

SEQ ID NO: 5779578 - DNA, 25 bp, Homo sapien
cttttgtttctctccagccggtggg

SEQ ID NO: 5779579 - DNA, 25 bp, Homo sapien
acacccaggctgcccagaggaacga

SEQ ID NO: 5779580 - DNA, 25 bp, Homo sapien
caagataataaagatccacaggata

SEQ ID NO: 5779581 - DNA, 25 bp, Homo sapien
atcaatcagcgcagttgcttccaca

SEQ ID NO: 5779582 - DNA, 25 bp, Homo sapien
agaggatgaactttcagcataaaat

SEQ ID NO: 5779583 - DNA, 25 bp, Homo sapien
tccgatatgactttcacagacagct

SEQ ID NO: 5779584 - DNA, 25 bp, Homo sapien
ttgttgtctattaatttctctgaaa

SEQ ID NO: 5779585 - DNA, 25 bp, Homo sapien
ttccacaggtgggcagggaggccaa

SEQ ID NO: 5779586 - DNA, 25 bp, Homo sapien
agagcttttgtttctctccagccgg

SEQ ID NO: 5779587 - DNA, 25 bp, Homo sapien
ttgtttttcagatgacagtttccgt

SEQ ID NO: 5779588 - DNA, 25 bp, Homo sapien
gtcgctaggacgttttccgcaggcc

SEQ ID NO: 5779589 - DNA, 25 bp, Homo sapien
ctgcaagggctccgcagcctgctcc

SEQ ID NO: 5779590 - DNA, 25 bp, Homo sapien
gaacaagtgaaaacacccaggctgc

SEQ ID NO: 5779591 - DNA, 25 bp, Homo sapien
atagatgccttgtacctggttttcc

SEQ ID NO: 5779592 - DNA, 25 bp, Homo sapien
caggcggaccccgcggctcggagca

SEQ ID NO: 5779593 - DNA, 25 bp, Homo sapien
tacattcactgggtgatgctggatc

SEQ ID NO: 5779594 - DNA, 25 bp, Homo sapien
tcagaggatgaactttcagcataaa

SEQ ID NO: 5779595 - DNA, 25 bp, Homo sapien
ccagagatcttctgtctatgaactg

SEQ ID NO: 5779596 - DNA, 25 bp, Homo sapien
ctcggagcaagcggtgcaggtaagc

SEQ ID NO: 5779597 - DNA, 25 bp, Homo sapien
gctcgtcacgtttctgcatccttcc

SEQ ID NO: 5779598 - DNA, 25 bp, Homo sapien
tctggtgtatctatgtttccagaga

SEQ ID NO: 5779599 - DNA, 25 bp, Homo sapien
aacacaatcaaacccaaacaaagcc

SEQ ID NO: 5779600 - DNA, 25 bp, Homo sapien
gcaagcggtgcaggtaagcgggccc

SEQ ID NO: 5779601 - DNA, 25 bp, Homo sapien
tcctttcggggtggatgctaatgta

SEQ ID NO: 5779602 - DNA, 25 bp, Homo sapien
gcggtgcaggtaagcgggcccgggc

SEQ ID NO: 5779603 - DNA, 25 bp, Homo sapien
catcaacaagataataaagatccac

SEQ ID NO: 5779604 - DNA, 25 bp, Homo sapien
gtcccgcggtctccgcgagaagcac

SEQ ID NO: 5779605 - DNA, 25 bp, Homo sapien
gcctgctccgggacaaagaaaagag

SEQ ID NO: 5779606 - DNA, 25 bp, Homo sapien
gagcttctgataggcttccactacc

SEQ ID NO: 5779607 - DNA, 25 bp, Homo sapien
gaatcaactgagcagcctttgctta

SEQ ID NO: 5779608 - DNA, 25 bp, Homo sapien
ggcaccgctcggcatctcagggccc

SEQ ID NO: 5779609 - DNA, 25 bp, Homo sapien
agggctctgcaagggctccgcagcc

SEQ ID NO: 5779610 - DNA, 25 bp, Homo sapien
gatgctgagacatcaacaagataat

SEQ ID NO: 5779611 - DNA, 25 bp, Homo sapien
gcatggcgtcaaaacctccttctgg

SEQ ID NO: 5779612 - DNA, 25 bp, Homo sapien
cttttagcctcttttcgccatccga

SEQ ID NO: 5779613 - DNA, 25 bp, Homo sapien
cgctaggacgttttccgcaggccta

SEQ ID NO: 5779614 - DNA, 25 bp, Homo sapien
gccatttttctagataaatcgtttc

SEQ ID NO: 5779615 - DNA, 25 bp, Homo sapien
atgcacagatgggtattctattgaa

SEQ ID NO: 5779616 - DNA, 25 bp, Homo sapien
tattgaatcaactgagcagcctttg

SEQ ID NO: 5779617 - DNA, 25 bp, Homo sapien
cacttctgaaatgagcttctgatag

SEQ ID NO: 5779618 - DNA, 25 bp, Homo sapien
gaggaacgaggcgggacctcgccgg

SEQ ID NO: 5779619 - DNA, 25 bp, Homo sapien
ggcccagtccaagaacaagtgaaaa

SEQ ID NO: 5779620 - DNA, 25 bp, Homo sapien
gagccaaatccaagacgaaagtcac

SEQ ID NO: 5779621 - DNA, 25 bp, Homo sapien
gctcggcatctcagggcccctacgg

SEQ ID NO: 5779622 - DNA, 25 bp, Homo sapien
ttagcgaagagccaaacacaatcaa

SEQ ID NO: 5779623 - DNA, 25 bp, Homo sapien
ggggtgttccatggttgtcgatttg

SEQ ID NO: 5779624 - DNA, 25 bp, Homo sapien
gacgttttccgcaggcctagcaggc

SEQ ID NO: 5779625 - DNA, 25 bp, Homo sapien
ccacaggtgggcagggaggccaaca

SEQ ID NO: 5779626 - DNA, 25 bp, Homo sapien
cagcctgctccgggacaaagaaaag

SEQ ID NO: 5779627 - DNA, 25 bp, Homo sapien
aggcctagcaggcggaccccgcggc

SEQ ID NO: 5779628 - DNA, 25 bp, Homo sapien
cccagaggaacgaggcgggacctcg

SEQ ID NO: 5779629 - DNA, 25 bp, Homo sapien
ggagagagggctctgcaagggctcc

SEQ ID NO: 5779630 - DNA, 25 bp, Homo sapien
tccacctgaactttcacttctgaaa

SEQ ID NO: 5779631 - DNA, 25 bp, Homo sapien
ccaatttgctatcaagagcgagatg

SEQ ID NO: 5779632 - DNA, 25 bp, Homo sapien
tgaactgctttctcaaactcagtga

SEQ ID NO: 5779633 - DNA, 25 bp, Homo sapien
ctcgccggtcgttttgcaggcagac

SEQ ID NO: 5779634 - DNA, 25 bp, Homo sapien
aggtttgcagcctttgattctattt

SEQ ID NO: 5779635 - DNA, 25 bp, Homo sapien
tcacctgggtattaatttcattttc

SEQ ID NO: 5779636 - DNA, 25 bp, Homo sapien
cttgaacacaccatccacattctgg

SEQ ID NO: 5779637 - DNA, 25 bp, Homo sapien
gatagacacttctcctggtgtcacc

SEQ ID NO: 5779638 - DNA, 25 bp, Homo sapien
aaatgagcttctgataggcttccac

SEQ ID NO: 5779639 - DNA, 25 bp, Homo sapien
ccgcctggctgccttccggacgcgg

SEQ ID NO: 5779640 - DNA, 25 bp, Homo sapien
agggaggccaacaccattagttgca

SEQ ID NO: 5779641 - DNA, 25 bp, Homo sapien
attctattgaatcaactgagcagcc

SEQ ID NO: 5779642 - DNA, 25 bp, Homo sapien
cattgctcgtcacgtttctgcatcc

SEQ ID NO: 5779643 - DNA, 25 bp, Homo sapien
cttcggctcctggacgcagctggat

SEQ ID NO: 5779644 - DNA, 25 bp, Homo sapien
gctgcctgaagcatggcgtcaaaac

SEQ ID NO: 5779645 - DNA, 25 bp, Homo sapien
cacctgaaatgaaatcctcttgaac

SEQ ID NO: 5779646 - DNA, 25 bp, Homo sapien
aacgttcacttcttgatccacctga

SEQ ID NO: 5779647 - DNA, 25 bp, Homo sapien
tttccgtcattgggcaccactatgc

SEQ ID NO: 5779648 - DNA, 25 bp, Homo sapien
ctggctgccttccggacgcgggctc

SEQ ID NO: 5779649 - DNA, 25 bp, Homo sapien
aatttctctgaaagttggcctagtg

SEQ ID NO: 5779650 - DNA, 25 bp, Homo sapien
gcataaatcagcttagcgaagagcc

SEQ ID NO: 5779651 - DNA, 25 bp, Homo sapien
cgcagctggatagacacttctcctg

SEQ ID NO: 5779652 - DNA, 25 bp, Homo sapien
tcccgggcgcacctcggggcccgcg

SEQ ID NO: 5779653 - DNA, 25 bp, Homo sapien
gaaaaaagtctgtggcgcatcaatc

SEQ ID NO: 5779654 - DNA, 25 bp, Homo sapien
ttttcagatgacagtttccgtcatt

SEQ ID NO: 5779655 - DNA, 25 bp, Homo sapien
atgttctctgtcaaagacagcacat

SEQ ID NO: 5779656 - DNA, 25 bp, Homo sapien
ttgcagcctttgattctatttcacc

SEQ ID NO: 5779657 - DNA, 25 bp, Homo sapien
ggacctcgccggtcgttttgcaggc

SEQ ID NO: 5779658 - DNA, 25 bp, Homo sapien
agatgagacgtctgatctgtcatca

SEQ ID NO: 5779659 - DNA, 25 bp, Homo sapien
agagagggctctgcaagggctccgc

SEQ ID NO: 5779660 - DNA, 25 bp, Homo sapien
ttcactgggtgatgctggatctgtg

SEQ ID NO: 5779661 - DNA, 25 bp, Homo sapien
aaaagccagggccgagccgcacata

SEQ ID NO: 5779662 - DNA, 25 bp, Homo sapien
gcgcaaggcacctggcacaggatgc

SEQ ID NO: 5779663 - DNA, 25 bp, Homo sapien
aatgtacattcactgggtgatgctg

SEQ ID NO: 5779664 - DNA, 25 bp, Homo sapien
aaagacaagtcggcagcgtcctggc

SEQ ID NO: 5779665 - DNA, 25 bp, Homo sapien
ctggatctgtgggaggggacgccgg

SEQ ID NO: 5779666 - DNA, 25 bp, Homo sapien
tggctttctggacccatctggacag

SEQ ID NO: 5779667 - DNA, 25 bp, Homo sapien
tgttttatcaacgtatgagccaaat

SEQ ID NO: 5779668 - DNA, 25 bp, Homo sapien
tgcaggcagacaaatgcagcggtaa

SEQ ID NO: 5779669 - DNA, 25 bp, Homo sapien
gtgggaggggacgccggcgaggtcg

SEQ ID NO: 5779670 - DNA, 25 bp, Homo sapien
ttcacttctgaaatgagcttctgat

SEQ ID NO: 5779671 - DNA, 25 bp, Homo sapien
caccctaatgtacattcactgggtg

SEQ ID NO: 5779672 - DNA, 25 bp, Homo sapien
ggatctgtgggaggggacgccggcg

SEQ ID NO: 5779673 - DNA, 25 bp, Homo sapien
atgaaatcctcttgaacacaccatc

SEQ ID NO: 5779674 - DNA, 25 bp, Homo sapien
caactgagcagcctttgcttattaa

SEQ ID NO: 5779675 - DNA, 25 bp, Homo sapien
ggcaagaggggtagaagatccttat

SEQ ID NO: 5779676 - DNA, 25 bp, Homo sapien
gatgacagtttccgtcattgggcac

SEQ ID NO: 5779677 - DNA, 25 bp, Homo sapien
gatgaactttcagcataaaattagc

SEQ ID NO: 5779678 - DNA, 25 bp, Homo sapien
ttcattttcagtgggtattataaca

SEQ ID NO: 5779679 - DNA, 25 bp, Homo sapien
atctgtgggaggggacgccggcgag

SEQ ID NO: 5779680 - DNA, 25 bp, Homo sapien
tataacatgcacagatgggtattct

SEQ ID NO: 5779681 - DNA, 25 bp, Homo sapien
agacaagtcggcagcgtcctggctg

SEQ ID NO: 5779682 - DNA, 25 bp, Homo sapien
tcgacggccaagggccccggcggcg

SEQ ID NO: 5779683 - DNA, 25 bp, Homo sapien
ggcgtcaaaacctccttctggtgta

SEQ ID NO: 5779684 - DNA, 25 bp, Homo sapien
gctgcccagaggaacgaggcgggac

SEQ ID NO: 5779685 - DNA, 25 bp, Homo sapien
gaaaagagcttttgtttctctccag

SEQ ID NO: 5779686 - DNA, 25 bp, Homo sapien
tggatgtatccatggggaggcatgc

SEQ ID NO: 5779687 - DNA, 25 bp, Homo sapien
cacaccatccacattctggacccag

SEQ ID NO: 5779688 - DNA, 25 bp, Homo sapien
cattcactgggtgatgctggatctg

SEQ ID NO: 5779689 - DNA, 25 bp, Homo sapien
gcttctgataggcttccactaccaa

SEQ ID NO: 5779690 - DNA, 25 bp, Homo sapien
ggggcttctgctgcataaatcagct

SEQ ID NO: 5779691 - DNA, 25 bp, Homo sapien
aagggaaaaatgcacacccacatac

SEQ ID NO: 5779692 - DNA, 25 bp, Homo sapien
gccttccggacgcgggctcgcgcct

SEQ ID NO: 5779693 - DNA, 25 bp, Homo sapien
gcaagggctccgcagcctgctccgg

SEQ ID NO: 5779694 - DNA, 25 bp, Homo sapien
gttttccacctgaactttcacttct

SEQ ID NO: 5779695 - DNA, 25 bp, Homo sapien
ggcccgggcaccgctcggcatctca

SEQ ID NO: 5779696 - DNA, 25 bp, Homo sapien
ctgggtgatgctggatctgtgggag

SEQ ID NO: 5779697 - DNA, 25 bp, Homo sapien
ttaatttctctgaaagttggcctag

SEQ ID NO: 5779698 - DNA, 25 bp, Homo sapien
atatttcttcagaggatgaactttc

SEQ ID NO: 5779699 - DNA, 25 bp, Homo sapien
cactaccaaattattgaggtttgca

SEQ ID NO: 5779700 - DNA, 25 bp, Homo sapien
aaacaatatcacaacgttcacttct

SEQ ID NO: 5779701 - DNA, 25 bp, Homo sapien
ccggcggcgactggagagagggctc

SEQ ID NO: 5779702 - DNA, 25 bp, Homo sapien
agagggctctgcaagggctccgcag

SEQ ID NO: 5779703 - DNA, 25 bp, Homo sapien
cccggctcggcacggcgggtcccgc

SEQ ID NO: 5779704 - DNA, 25 bp, Homo sapien
tttgattctatttcaccagcaatgg

SEQ ID NO: 5779705 - DNA, 25 bp, Homo sapien
gctttctcaaactcagtgatgttct

SEQ ID NO: 5779706 - DNA, 25 bp, Homo sapien
agttgcagctttgcagccccgtctg

SEQ ID NO: 5779707 - DNA, 25 bp, Homo sapien
ttcggggtggatgctaatgtatggt

SEQ ID NO: 5779708 - DNA, 25 bp, Homo sapien
cgcacctcggggcccgcgggccgag

SEQ ID NO: 5779709 - DNA, 25 bp, Homo sapien
ttctgataggcttccactaccaaat

SEQ ID NO: 5779710 - DNA, 25 bp, Homo sapien
tgaaattgttttccttgaactgcaa

SEQ ID NO: 5779711 - DNA, 25 bp, Homo sapien
cgggcaccgctcggcatctcagggc

SEQ ID NO: 5779712 - DNA, 25 bp, Homo sapien
tgcctgccaatttgctatcaagagc

SEQ ID NO: 5779713 - DNA, 25 bp, Homo sapien
gccggtggggcttctgctgcataaa

SEQ ID NO: 5779714 - DNA, 25 bp, Homo sapien
cacctcggggcccgcgggccgagtg

SEQ ID NO: 5779715 - DNA, 25 bp, Homo sapien
atgagccaaatccaagacgaaagtc

SEQ ID NO: 5779716 - DNA, 25 bp, Homo sapien
ggcaagggaggaagctcgggatgcc

SEQ ID NO: 5779717 - DNA, 25 bp, Homo sapien
gctccgcagcctgctccgggacaaa

SEQ ID NO: 5779718 - DNA, 25 bp, Homo sapien
accattagttgcagctttgcagccc

SEQ ID NO: 5779719 - DNA, 25 bp, Homo sapien
tatcacaacgttcacttcttgatcc

SEQ ID NO: 5779720 - DNA, 25 bp, Homo sapien
cagatggcggtaatgttaaaataga

SEQ ID NO: 5779721 - DNA, 25 bp, Homo sapien
gacccatctggacagatggcggtaa

SEQ ID NO: 5779722 - DNA, 25 bp, Homo sapien
aagatccttataccaatgaaattgt

SEQ ID NO: 5779723 - DNA, 25 bp, Homo sapien
tgacattaatgttgttgtctattaa

SEQ ID NO: 5779724 - DNA, 25 bp, Homo sapien
aacctccttctggtgtatctatgtt

SEQ ID NO: 5779725 - DNA, 25 bp, Homo sapien
agggccccggcggcgactggagaga

SEQ ID NO: 5779726 - DNA, 25 bp, Homo sapien
gatccacctgaaatgaaatcctctt

SEQ ID NO: 5779727 - DNA, 25 bp, Homo sapien
aattggaaacaatatcacaacgttc

SEQ ID NO: 5779728 - DNA, 25 bp, Homo sapien
tcacgggagaaaaatgccatttttc

SEQ ID NO: 5779729 - DNA, 25 bp, Homo sapien
cctggcacaggatgctgcatttgaa

SEQ ID NO: 5779730 - DNA, 25 bp, Homo sapien
aaactgttttatcaacgtatgagcc

SEQ ID NO: 5779731 - DNA, 25 bp, Homo sapien
accagcaatggtgcctggcaagagg

SEQ ID NO: 5779732 - DNA, 25 bp, Homo sapien
agcacatggatgtatccatggggag

SEQ ID NO: 5779733 - DNA, 25 bp, Homo sapien
tttgtttctctccagccggtggggc

SEQ ID NO: 5779734 - DNA, 25 bp, Homo sapien
tgatctgtcatcaccagcagcaatc

SEQ ID NO: 5779735 - DNA, 25 bp, Homo sapien
aagatgacattaatgttgttgtcta

SEQ ID NO: 5779736 - DNA, 25 bp, Homo sapien
cttccactaccaaattattgaggtt

SEQ ID NO: 5779737 - DNA, 25 bp, Homo sapien
gcttagcgaagagccaaacacaatc

SEQ ID NO: 5779738 - DNA, 25 bp, Homo sapien
agagcgagatgagacgtctgatctg

SEQ ID NO: 5779739 - DNA, 25 bp, Homo sapien
aatttgctatcaagagcgagatgag

SEQ ID NO: 5779740 - DNA, 25 bp, Homo sapien
cttctgaaatgagcttctgataggc

SEQ ID NO: 5779741 - DNA, 25 bp, Homo sapien
catctggacagatggcggtaatgtt

SEQ ID NO: 5779742 - DNA, 25 bp, Homo sapien
gcaaagacaagtcggcagcgtcctg

SEQ ID NO: 5779743 - DNA, 25 bp, Homo sapien
ccgcaggcctagcaggcggaccccg

SEQ ID NO: 5779744 - DNA, 25 bp, Homo sapien
aatggtgcctggcaagaggggtaga

SEQ ID NO: 5779745 - DNA, 25 bp, Homo sapien
tagtcactgcattgattatgaatcc

SEQ ID NO: 5779746 - DNA, 25 bp, Homo sapien
ttttccgcaggcctagcaggcggac

SEQ ID NO: 5779747 - DNA, 25 bp, Homo sapien
aggatgctgcatttgaagatgcaca

SEQ ID NO: 5779748 - DNA, 25 bp, Homo sapien
gtctaaattgtagtcactgcattga

SEQ ID NO: 5779749 - DNA, 25 bp, Homo sapien
gaactgcaaagatgacattaatgtt

SEQ ID NO: 5779750 - DNA, 25 bp, Homo sapien
gaagcacctccttcgacggccaagg

SEQ ID NO: 5779751 - DNA, 25 bp, Homo sapien
gggaggcggctctgggagcgcccta

SEQ ID NO: 5779752 - DNA, 25 bp, Homo sapien
tgtgcattgatgctgagacatcaac

SEQ ID NO: 5779753 - DNA, 25 bp, Homo sapien
tctctgtcaaagacagcacatggat

SEQ ID NO: 5779754 - DNA, 25 bp, Homo sapien
gaaatcctcttgaacacaccatcca

SEQ ID NO: 5779755 - DNA, 25 bp, Homo sapien
ttgacatagacgttgtttttcagat

SEQ ID NO: 5779756 - DNA, 25 bp, Homo sapien
tccgggacaaagaaaagagcttttg

SEQ ID NO: 5779757 - DNA, 25 bp, Homo sapien
gacgccggcgaggtcgaggggaaaa

SEQ ID NO: 5779758 - DNA, 25 bp, Homo sapien
taaaaaaagccagggccgagccgca

SEQ ID NO: 5779759 - DNA, 25 bp, Homo sapien
gcgagaagcacctccttcgacggcc

SEQ ID NO: 5779760 - DNA, 25 bp, Homo sapien
tcatcattgctcgtcacgtttctgc

SEQ ID NO: 5779761 - DNA, 25 bp, Homo sapien
aaattgttttccttgaactgcaaag

SEQ ID NO: 5779762 - DNA, 25 bp, Homo sapien
agcagcgggcaaagacaagtcggca

SEQ ID NO: 5779763 - DNA, 25 bp, Homo sapien
gacgcagctggatagacacttctcc

SEQ ID NO: 5779764 - DNA, 25 bp, Homo sapien
agttggcctagtgaggggtgttcca

SEQ ID NO: 5779765 - DNA, 25 bp, Homo sapien
tggcggtaatgttaaaatagatgcc

SEQ ID NO: 5779766 - DNA, 25 bp, Homo sapien
agtttccgtcattgggcaccactat

SEQ ID NO: 5779767 - DNA, 25 bp, Homo sapien
caaattattgaggtttgcagccttt

SEQ ID NO: 5779768 - DNA, 25 bp, Homo sapien
cttcagaggatgaactttcagcata

SEQ ID NO: 5779769 - DNA, 25 bp, Homo sapien
atttgaagatgcacatctattgtct

SEQ ID NO: 5779770 - DNA, 25 bp, Homo sapien
tgtacattcactgggtgatgctgga

SEQ ID NO: 5779771 - DNA, 25 bp, Homo sapien
aatgcagcggtaaaaaaagccaggg

SEQ ID NO: 5779772 - DNA, 25 bp, Homo sapien
agcgaagagccaaacacaatcaaac

SEQ ID NO: 5779773 - DNA, 25 bp, Homo sapien
ataaaattagcttcggctcctggac

SEQ ID NO: 5779774 - DNA, 25 bp, Homo sapien
gccaaacacaatcaaacccaaacaa

SEQ ID NO: 5779775 - DNA, 25 bp, Homo sapien
tctgaaagttggcctagtgaggggt

SEQ ID NO: 5779776 - DNA, 25 bp, Homo sapien
cgcgcccgccgcctggctgccttcc

SEQ ID NO: 5779777 - DNA, 25 bp, Homo sapien
agttgcttccacaggtgggcaggga

SEQ ID NO: 5779778 - DNA, 25 bp, Homo sapien
gcggctcggagcaagcggtgcaggt

SEQ ID NO: 5779779 - DNA, 25 bp, Homo sapien
tcaaactcagtgatgttctctgtca

SEQ ID NO: 5779780 - DNA, 25 bp, Homo sapien
cgggccgagtgtcgctaggacgttt

SEQ ID NO: 5779781 - DNA, 25 bp, Homo sapien
tccaacggaatttaatttttctata

SEQ ID NO: 5779782 - DNA, 25 bp, Homo sapien
cgggcccgggcaccgctcggcatct

SEQ ID NO: 5779783 - DNA, 25 bp, Homo sapien
cacagacagctgcctgaagcatggc

SEQ ID NO: 5779784 - DNA, 25 bp, Homo sapien
aatgcacacccacatacttcatcat

SEQ ID NO: 5779785 - DNA, 25 bp, Homo sapien
tctcaaactcagtgatgttctctgt

SEQ ID NO: 5779786 - DNA, 25 bp, Homo sapien
cagggccgagccgcacataatgcaa

SEQ ID NO: 5779787 - DNA, 25 bp, Homo sapien
tggttttccacctgaactttcactt

SEQ ID NO: 5779788 - DNA, 25 bp, Homo sapien
ttatcaacgtatgagccaaatccaa

SEQ ID NO: 5779789 - DNA, 25 bp, Homo sapien
gcagcctttgattctatttcaccag

SEQ ID NO: 5779790 - DNA, 25 bp, Homo sapien
tgtcttcaccttggcccagtccaag

SEQ ID NO: 5779791 - DNA, 25 bp, Homo sapien
cggctctgggagcgccctagaagca

SEQ ID NO: 5779792 - DNA, 25 bp, Homo sapien
ctattgtcttcaccttggcccagtc

SEQ ID NO: 5779793 - DNA, 25 bp, Homo sapien
gcgcatcaatcagcgcagttgcttc

SEQ ID NO: 5779794 - DNA, 25 bp, Homo sapien
attataacatgcacagatgggtatt

SEQ ID NO: 5779795 - DNA, 25 bp, Homo sapien
aagaacaagtgaaaacacccaggct

SEQ ID NO: 5779796 - DNA, 25 bp, Homo sapien
gacggccaagggccccggcggcgac

SEQ ID NO: 5779797 - DNA, 25 bp, Homo sapien
tctgtcaaagacagcacatggatgt

SEQ ID NO: 5779798 - DNA, 25 bp, Homo sapien
cgaaagtcacgggagaaaaatgcca

SEQ ID NO: 5779799 - DNA, 25 bp, Homo sapien
cagaggaacgaggcgggacctcgcc

SEQ ID NO: 5779800 - DNA, 25 bp, Homo sapien
aggatgaactttcagcataaaatta

SEQ ID NO: 5779801 - DNA, 25 bp, Homo sapien
taaaatagatgccttgtacctggtt

SEQ ID NO: 5779802 - DNA, 25 bp, Homo sapien
tttctgtaagaaagtacgccaaaca

SEQ ID NO: 5779803 - DNA, 25 bp, Homo sapien
ccccgtctgcggagcagcgggcaaa

SEQ ID NO: 5779804 - DNA, 25 bp, Homo sapien
aaaaagtctgtggcgcatcaatcag

SEQ ID NO: 5779805 - DNA, 25 bp, Homo sapien
gatccttataccaatgaaattgttt

SEQ ID NO: 5779806 - DNA, 25 bp, Homo sapien
catccgatatgactttcacagacag

SEQ ID NO: 5779807 - DNA, 25 bp, Homo sapien
ctatgtttccagagatcttctgtct

SEQ ID NO: 5779808 - DNA, 25 bp, Homo sapien
taatgtatggtgaaactgttttatc

SEQ ID NO: 5779809 - DNA, 25 bp, Homo sapien
tgcaaaacagcccgccccgcgcccg

SEQ ID NO: 5779810 - DNA, 25 bp, Homo sapien
gcacatctattgtcttcaccttggc

SEQ ID NO: 5779811 - DNA, 25 bp, Homo sapien
ctaatgtacattcactgggtgatgc

SEQ ID NO: 5779812 - DNA, 25 bp, Homo sapien
catggggaggcatgcagtctaaatt

SEQ ID NO: 5779813 - DNA, 25 bp, Homo sapien
catttttctagataaatcgtttcca

SEQ ID NO: 5779814 - DNA, 25 bp, Homo sapien
ctaccaaattattgaggtttgcagc

SEQ ID NO: 5779815 - DNA, 25 bp, Homo sapien
ttcagatgacagtttccgtcattgg

SEQ ID NO: 5779816 - DNA, 25 bp, Homo sapien
ctttcagcataaaattagcttcggc

SEQ ID NO: 5779817 - DNA, 25 bp, Homo sapien
cggtggggcttctgctgcataaatc

SEQ ID NO: 5779818 - DNA, 25 bp, Homo sapien
gtgggcagggaggccaacaccatta

SEQ ID NO: 5779819 - DNA, 25 bp, Homo sapien
tgaatcctttcggggtggatgctaa

SEQ ID NO: 5779820 - DNA, 25 bp, Homo sapien
cacctgaactttcacttctgaaatg

SEQ ID NO: 5779821 - DNA, 25 bp, Homo sapien
gtggggcttctgctgcataaatcag

SEQ ID NO: 5779822 - DNA, 25 bp, Homo sapien
ggaggccaacaccattagttgcagc

SEQ ID NO: 5779823 - DNA, 25 bp, Homo sapien
caatcaaacccaaacaaagcccgaa

SEQ ID NO: 5779824 - DNA, 25 bp, Homo sapien
gagacatcaacaagataataaagat

SEQ ID NO: 5779825 - DNA, 25 bp, Homo sapien
gggctccgcagcctgctccgggaca

SEQ ID NO: 5779826 - DNA, 25 bp, Homo sapien
cccgcggtctccgcgagaagcacct

SEQ ID NO: 5779827 - DNA, 25 bp, Homo sapien
ccctacggccctcccggctcggcac

SEQ ID NO: 5779828 - DNA, 25 bp, Homo sapien
ttattaaattggaaacaatatcaca

SEQ ID NO: 5779829 - DNA, 25 bp, Homo sapien
cacaggatatttcttcagaggatga

SEQ ID NO: 5779830 - DNA, 25 bp, Homo sapien
taaagatccacaggatatttcttca

SEQ ID NO: 5779831 - DNA, 25 bp, Homo sapien
taatgttaaaatagatgccttgtac

SEQ ID NO: 5779832 - DNA, 25 bp, Homo sapien
tttagcctcttttcgccatccgata

SEQ ID NO: 5779833 - DNA, 25 bp, Homo sapien
gacccagcgcaaggcacctggcaca

SEQ ID NO: 5779834 - DNA, 25 bp, Homo sapien
acaccattagttgcagctttgcagc

SEQ ID NO: 5779835 - DNA, 25 bp, Homo sapien
atgagcttctgataggcttccacta

SEQ ID NO: 5779836 - DNA, 25 bp, Homo sapien
cgcgggccgagtgtcgctaggacgt

SEQ ID NO: 5779837 - DNA, 25 bp, Homo sapien
aagaaaagagcttttgtttctctcc

SEQ ID NO: 5779838 - DNA, 25 bp, Homo sapien
aaaaatgccatttttctagataaat

SEQ ID NO: 5779839 - DNA, 25 bp, Homo sapien
cgccgcctggctgccttccggacgc

SEQ ID NO: 5779840 - DNA, 25 bp, Homo sapien
tggatagacacttctcctggtgtca

SEQ ID NO: 5779841 - DNA, 25 bp, Homo sapien
aacagggggaggcggctctgggagc

SEQ ID NO: 5779842 - DNA, 25 bp, Homo sapien
tccacctgaaatgaaatcctcttga

SEQ ID NO: 5779843 - DNA, 25 bp, Homo sapien
tccggacgcgggctcgcgcctcccg

SEQ ID NO: 5779844 - DNA, 25 bp, Homo sapien
ctttcacagacagctgcctgaagca

SEQ ID NO: 5779845 - DNA, 25 bp, Homo sapien
aactgctttctcaaactcagtgatg

SEQ ID NO: 5779846 - DNA, 25 bp, Homo sapien
tgaagcatggcgtcaaaacctcctt

SEQ ID NO: 5779847 - DNA, 25 bp, Homo sapien
cgtttctgcatccttccatgcctgg

SEQ ID NO: 5779848 - DNA, 25 bp, Homo sapien
gaagctcgggatgccagcaacaggg

SEQ ID NO: 5779849 - DNA, 25 bp, Homo sapien
tctattgaatcaactgagcagcctt

SEQ ID NO: 5779850 - DNA, 25 bp, Homo sapien
tcggcatctcagggcccctacggcc

SEQ ID NO: 5779851 - DNA, 25 bp, Homo sapien
cgcgggctcgcgcctcccgggcgca

SEQ ID NO: 5779852 - DNA, 25 bp, Homo sapien
tcgccatccgatatgactttcacag

SEQ ID NO: 5779853 - DNA, 25 bp, Homo sapien
ttagttgcagctttgcagccccgtc

SEQ ID NO: 5779854 - DNA, 25 bp, Homo sapien
cagcgcaaggcacctggcacaggat

SEQ ID NO: 5779855 - DNA, 25 bp, Homo sapien
agagatcttctgtctatgaactgct

SEQ ID NO: 5779856 - DNA, 25 bp, Homo sapien
cagtccaagaacaagtgaaaacacc

SEQ ID NO: 5779857 - DNA, 25 bp, Homo sapien
tgaaatgaaatcctcttgaacacac

SEQ ID NO: 5779858 - DNA, 25 bp, Homo sapien
cacttcttgatccacctgaaatgaa

SEQ ID NO: 5779859 - DNA, 25 bp, Homo sapien
ggtgcaggtaagcgggcccgggcac

SEQ ID NO: 5779860 - DNA, 25 bp, Homo sapien
tttctggacccatctggacagatgg

SEQ ID NO: 5779861 - DNA, 25 bp, Homo sapien
tcttgatccacctgaaatgaaatcc

SEQ ID NO: 5779862 - DNA, 25 bp, Homo sapien
gtgtcgctaggacgttttccgcagg

SEQ ID NO: 5779863 - DNA, 25 bp, Homo sapien
cggaccccgcggctcggagcaagcg

SEQ ID NO: 5779864 - DNA, 25 bp, Homo sapien
cagacagctgcctgaagcatggcgt

SEQ ID NO: 5779865 - DNA, 25 bp, Homo sapien
caacaccattagttgcagctttgca

SEQ ID NO: 5779866 - DNA, 25 bp, Homo sapien
tcttcaccttggcccagtccaagaa

SEQ ID NO: 5779867 - DNA, 25 bp, Homo sapien
taaattggaaacaatatcacaacgt

SEQ ID NO: 5779868 - DNA, 25 bp, Homo sapien
attgtagtcactgcattgattatga

SEQ ID NO: 5779869 - DNA, 25 bp, Homo sapien
gcctcccgggcgcacctcggggccc

SEQ ID NO: 5779870 - DNA, 25 bp, Homo sapien
ctgccttccggacgcgggctcgcgc

SEQ ID NO: 5779871 - DNA, 25 bp, Homo sapien
agatcttctgtctatgaactgcttt

SEQ ID NO: 5779872 - DNA, 25 bp, Homo sapien
ccgctcggcatctcagggcccctac

SEQ ID NO: 5779873 - DNA, 25 bp, Homo sapien
gactttcacagacagctgcctgaag

SEQ ID NO: 5779874 - DNA, 25 bp, Homo sapien
tgacagtttccgtcattgggcacca

SEQ ID NO: 5779875 - DNA, 25 bp, Homo sapien
tattaatttctctgaaagttggcct

SEQ ID NO: 5779876 - DNA, 25 bp, Homo sapien
cggacgcgggctcgcgcctcccggg

SEQ ID NO: 5779877 - DNA, 25 bp, Homo sapien
caaacacaatcaaacccaaacaaag

SEQ ID NO: 5779878 - DNA, 25 bp, Homo sapien
acatgcacagatgggtattctattg

SEQ ID NO: 5779879 - DNA, 25 bp, Homo sapien
gctaatgtatggtgaaactgtttta

SEQ ID NO: 5779880 - DNA, 25 bp, Homo sapien
atttcattttcagtgggtattataa

SEQ ID NO: 5779881 - DNA, 25 bp, Homo sapien
tctggacccatctggacagatggcg

SEQ ID NO: 5779882 - DNA, 25 bp, Homo sapien
attgattatgaatcctttcggggtg

SEQ ID NO: 5779883 - DNA, 25 bp, Homo sapien
gctcggcacggcgggtcccgcggtc

SEQ ID NO: 5779884 - DNA, 25 bp, Homo sapien
gggagaaaaatgccatttttctaga

SEQ ID NO: 5779885 - DNA, 25 bp, Homo sapien
cttctgctgcataaatcagcttagc

SEQ ID NO: 5779886 - DNA, 25 bp, Homo sapien
ctagcaggcggaccccgcggctcgg

SEQ ID NO: 5779887 - DNA, 25 bp, Homo sapien
tgcctgaagcatggcgtcaaaacct

SEQ ID NO: 5779888 - DNA, 25 bp, Homo sapien
cacatggatgtatccatggggaggc

SEQ ID NO: 5779889 - DNA, 25 bp, Homo sapien
tgcagtctaaattgtagtcactgca

SEQ ID NO: 5779890 - DNA, 25 bp, Homo sapien
atttcttcagaggatgaactttcag

SEQ ID NO: 5779891 - DNA, 25 bp, Homo sapien
ggctctgcaagggctccgcagcctg

SEQ ID NO: 5779892 - DNA, 25 bp, Homo sapien
ggtaatgttaaaatagatgccttgt

SEQ ID NO: 5779893 - DNA, 25 bp, Homo sapien
atgagacgtctgatctgtcatcacc

SEQ ID NO: 5779894 - DNA, 25 bp, Homo sapien
gaggcatgcagtctaaattgtagtc

SEQ ID NO: 5779895 - DNA, 25 bp, Homo sapien
cccatctggacagatggcggtaatg

SEQ ID NO: 5779896 - DNA, 25 bp, Homo sapien
aagcatggcgtcaaaacctccttct

SEQ ID NO: 5779897 - DNA, 25 bp, Homo sapien
tgatgttctctgtcaaagacagcac

SEQ ID NO: 5779898 - DNA, 25 bp, Homo sapien
ggatgctaatgtatggtgaaactgt

SEQ ID NO: 5779899 - DNA, 25 bp, Homo sapien
acaagtgaaaacacccaggctgccc

SEQ ID NO: 5779900 - DNA, 25 bp, Homo sapien
cagcttagcgaagagccaaacacaa

SEQ ID NO: 5779901 - DNA, 25 bp, Homo sapien
cctgaaatgaaatcctcttgaacac

SEQ ID NO: 5779902 - DNA, 25 bp, Homo sapien
tctctccagccggtggggcttctgc

SEQ ID NO: 5779903 - DNA, 25 bp, Homo sapien
gacgttgtttttcagatgacagttt

SEQ ID NO: 5779904 - DNA, 25 bp, Homo sapien
tctggacagatggcggtaatgttaa

SEQ ID NO: 5779905 - DNA, 25 bp, Homo sapien
ccggtcgttttgcaggcagacaaat

SEQ ID NO: 5779906 - DNA, 25 bp, Homo sapien
tattttaaaagggaaaaatgcacac

SEQ ID NO: 5779907 - DNA, 25 bp, Homo sapien
agataataaagatccacaggatatt

SEQ ID NO: 5779908 - DNA, 25 bp, Homo sapien
tctgctgcataaatcagcttagcga

SEQ ID NO: 5779909 - DNA, 25 bp, Homo sapien
gtgatgctggatctgtgggagggga

SEQ ID NO: 5779910 - DNA, 25 bp, Homo sapien
tgggagcgccctagaagcacccgcc

SEQ ID NO: 5779911 - DNA, 25 bp, Homo sapien
tacctggttttccacctgaactttc

SEQ ID NO: 5779912 - DNA, 25 bp, Homo sapien
tagtgaggggtgttccatggttgtc

SEQ ID NO: 5779913 - DNA, 25 bp, Homo sapien
ttccgcaggcctagcaggcggaccc

SEQ ID NO: 5779914 - DNA, 25 bp, Homo sapien
cgttcacttcttgatccacctgaaa

SEQ ID NO: 5779915 - DNA, 25 bp, Homo sapien
tggacccagcgcaaggcacctggca

SEQ ID NO: 5779916 - DNA, 25 bp, Homo sapien
tgcatccttccatgcctggctttct

SEQ ID NO: 5779917 - DNA, 25 bp, Homo sapien
gatgctggatctgtgggaggggacg

SEQ ID NO: 5779918 - DNA, 25 bp, Homo sapien
ccccgcggctcggagcaagcggtgc

SEQ ID NO: 5779919 - DNA, 25 bp, Homo sapien
ggcggaccccgcggctcggagcaag

SEQ ID NO: 5779920 - DNA, 25 bp, Homo sapien
aaaattagcttcggctcctggacgc

SEQ ID NO: 5779921 - DNA, 25 bp, Homo sapien
ttccatggttgtcgatttgacatag

SEQ ID NO: 5779922 - DNA, 25 bp, Homo sapien
atgccagcaacagggggaggcggct

SEQ ID NO: 5779923 - DNA, 25 bp, Homo sapien
gcagccccgtctgcggagcagcggg

SEQ ID NO: 5779924 - DNA, 25 bp, Homo sapien
taagcgggcccgggcaccgctcggc

SEQ ID NO: 5779925 - DNA, 25 bp, Homo sapien
acaggtgggcagggaggccaacacc

SEQ ID NO: 5779926 - DNA, 25 bp, Homo sapien
gccttgtacctggttttccacctga

SEQ ID NO: 5779927 - DNA, 25 bp, Homo sapien
tgcaggtaagcgggcccgggcaccg

SEQ ID NO: 5779928 - DNA, 25 bp, Homo sapien
gaggcggctctgggagcgccctaga

SEQ ID NO: 5779929 - DNA, 25 bp, Homo sapien
cttcttgatccacctgaaatgaaat

SEQ ID NO: 5779930 - DNA, 25 bp, Homo sapien
attgaggtttgcagcctttgattct

SEQ ID NO: 5779931 - DNA, 25 bp, Homo sapien
ttgcttccacaggtgggcagggagg

SEQ ID NO: 5779932 - DNA, 25 bp, Homo sapien
gcctggctgccttccggacgcgggc

SEQ ID NO: 5779933 - DNA, 25 bp, Homo sapien
cctttgattctatttcaccagcaat

SEQ ID NO: 5779934 - DNA, 25 bp, Homo sapien
aggccaacaccattagttgcagctt

SEQ ID NO: 5779935 - DNA, 25 bp, Homo sapien
attatgaatcctttcggggtggatg

SEQ ID NO: 5779936 - DNA, 25 bp, Homo sapien
gactggagagagggctctgcaaggg

SEQ ID NO: 5779937 - DNA, 25 bp, Homo sapien
aaatagatgccttgtacctggtttt

SEQ ID NO: 5779938 - DNA, 25 bp, Homo sapien
gtattaatttcattttcagtgggta

SEQ ID NO: 5779939 - DNA, 25 bp, Homo sapien
cctagtgaggggtgttccatggttg

SEQ ID NO: 5779940 - DNA, 25 bp, Homo sapien
gcagcgtcctggctggcaagggagg

SEQ ID NO: 5779941 - DNA, 25 bp, Homo sapien
caggcagacaaatgcagcggtaaaa

SEQ ID NO: 5779942 - DNA, 25 bp, Homo sapien
gcctttgcttattaaattggaaaca

SEQ ID NO: 5779943 - DNA, 25 bp, Homo sapien
ttgatgctgagacatcaacaagata

SEQ ID NO: 5779944 - DNA, 25 bp, Homo sapien
gatgacattaatgttgttgtctatt

SEQ ID NO: 5779945 - DNA, 25 bp, Homo sapien
gggacgccggcgaggtcgaggggaa

SEQ ID NO: 5779946 - DNA, 25 bp, Homo sapien
ggatgccagcaacagggggaggcgg

SEQ ID NO: 5779947 - DNA, 25 bp, Homo sapien
cagtgggtattataacatgcacaga

SEQ ID NO: 5779948 - DNA, 25 bp, Homo sapien
gggtggatgctaatgtatggtgaaa

SEQ ID NO: 5779949 - DNA, 25 bp, Homo sapien
acaatatcacaacgttcacttcttg

SEQ ID NO: 5779950 - DNA, 25 bp, Homo sapien
cttccatgcctggctttctggaccc

SEQ ID NO: 5779951 - DNA, 25 bp, Homo sapien
ccgcgagaagcacctccttcgacgg

SEQ ID NO: 5779952 - DNA, 25 bp, Homo sapien
ggcttccactaccaaattattgagg

SEQ ID NO: 5779953 - DNA, 25 bp, Homo sapien
gtattctattgaatcaactgagcag

SEQ ID NO: 5779954 - DNA, 25 bp, Homo sapien
tgagcagcctttgcttattaaattg

SEQ ID NO: 5779955 - DNA, 25 bp, Homo sapien
gtatggtgaaactgttttatcaacg

SEQ ID NO: 5779956 - DNA, 25 bp, Homo sapien
cctgccaatttgctatcaagagcga

SEQ ID NO: 5779957 - DNA, 25 bp, Homo sapien
gtatgagccaaatccaagacgaaag

SEQ ID NO: 5779958 - DNA, 25 bp, Homo sapien
aagagccaaacacaatcaaacccaa

SEQ ID NO: 5779959 - DNA, 25 bp, Homo sapien
ccgagtgtcgctaggacgttttccg

SEQ ID NO: 5779960 - DNA, 25 bp, Homo sapien
tattattgtgcattgatgctgagac

SEQ ID NO: 5779961 - DNA, 25 bp, Homo sapien
ggcggcgactggagagagggctctg

SEQ ID NO: 5779962 - DNA, 25 bp, Homo sapien
attgttttccttgaactgcaaagat

SEQ ID NO: 5779963 - DNA, 25 bp, Homo sapien
caaacccaaacaaagcccgaagctg

SEQ ID NO: 5779964 - DNA, 25 bp, Homo sapien
gggaggggacgccggcgaggtcgag

SEQ ID NO: 5779965 - DNA, 25 bp, Homo sapien
acaacgttcacttcttgatccacct

SEQ ID NO: 5779966 - DNA, 25 bp, Homo sapien
acatctattgtcttcaccttggccc

SEQ ID NO: 5779967 - DNA, 25 bp, Homo sapien
ggtgtcacctgggtattaatttcat

SEQ ID NO: 5779968 - DNA, 25 bp, Homo sapien
ctgggtattaatttcattttcagtg

SEQ ID NO: 5779969 - DNA, 25 bp, Homo sapien
agcacctccttcgacggccaagggc

SEQ ID NO: 5779970 - DNA, 25 bp, Homo sapien
gggaggcatgcagtctaaattgtag

SEQ ID NO: 5779971 - DNA, 25 bp, Homo sapien
actgagcagcctttgcttattaaat

SEQ ID NO: 5779972 - DNA, 25 bp, Homo sapien
aaacacccaggctgcccagaggaac

SEQ ID NO: 5779973 - DNA, 25 bp, Homo sapien
cctcggggcccgcgggccgagtgtc

SEQ ID NO: 5779974 - DNA, 25 bp, Homo sapien
cgttttccgcaggcctagcaggcgg

SEQ ID NO: 5779975 - DNA, 25 bp, Homo sapien
gagcaagcggtgcaggtaagcgggc

SEQ ID NO: 5779976 - DNA, 25 bp, Homo sapien
cacttctcctggtgtcacctgggta

SEQ ID NO: 5779977 - DNA, 25 bp, Homo sapien
gcgactggagagagggctctgcaag

SEQ ID NO: 5779978 - DNA, 25 bp, Homo sapien
aagtcggcagcgtcctggctggcaa

SEQ ID NO: 5779979 - DNA, 25 bp, Homo sapien
gacacttctcctggtgtcacctggg

SEQ ID NO: 5779980 - DNA, 25 bp, Homo sapien
ctttgcagccccgtctgcggagcag

SEQ ID NO: 5779981 - DNA, 25 bp, Homo sapien
cggtctccgcgagaagcacctcctt

SEQ ID NO: 5779982 - DNA, 25 bp, Homo sapien
acggccctcccggctcggcacggcg

SEQ ID NO: 5779983 - DNA, 25 bp, Homo sapien
gaaaaatgcacacccacatacttca

SEQ ID NO: 5779984 - DNA, 25 bp, Homo sapien
gcaacagggggaggcggctctggga

SEQ ID NO: 5779985 - DNA, 25 bp, Homo sapien
gcatcaatcagcgcagttgcttcca

SEQ ID NO: 5779986 - DNA, 25 bp, Homo sapien
aaagtcacgggagaaaaatgccatt

SEQ ID NO: 5779987 - DNA, 25 bp, Homo sapien
ccaggctgcccagaggaacgaggcg

SEQ ID NO: 5779988 - DNA, 25 bp, Homo sapien
cctccttctggtgtatctatgtttc

SEQ ID NO: 5779989 - DNA, 25 bp, Homo sapien
aaaccaccctaatgtacattcactg

SEQ ID NO: 5779990 - DNA, 25 bp, Homo sapien
atatgactttcacagacagctgcct

SEQ ID NO: 5779991 - DNA, 25 bp, Homo sapien
tctatttcaccagcaatggtgcctg

SEQ ID NO: 5779992 - DNA, 25 bp, Homo sapien
gcgggcaaagacaagtcggcagcgt

SEQ ID NO: 5779993 - DNA, 25 bp, Homo sapien
agcttcggctcctggacgcagctgg

SEQ ID NO: 5779994 - DNA, 25 bp, Homo sapien
ctaggacgttttccgcaggcctagc

SEQ ID NO: 5779995 - DNA, 25 bp, Homo sapien
cgtcctggctggcaagggaggaagc

SEQ ID NO: 5779996 - DNA, 25 bp, Homo sapien
ctgagacatcaacaagataataaag

SEQ ID NO: 5779997 - DNA, 25 bp, Homo sapien
cttataccaatgaaattgttttcct

SEQ ID NO: 5779998 - DNA, 25 bp, Homo sapien
accaccctaatgtacattcactggg

SEQ ID NO: 5779999 - DNA, 25 bp, Homo sapien
aatgaaattgttttccttgaactgc

SEQ ID NO: 5780000 - DNA, 25 bp, Homo sapien
ggctgccttccggacgcgggctcgc

SEQ ID NO: 5780001 - DNA, 25 bp, Homo sapien
gacatagacgttgtttttcagatga

SEQ ID NO: 5780002 - DNA, 25 bp, Homo sapien
attgtgcattgatgctgagacatca

SEQ ID NO: 5780003 - DNA, 25 bp, Homo sapien
tgaactttcacttctgaaatgagct

SEQ ID NO: 5780004 - DNA, 25 bp, Homo sapien
cagtctaaattgtagtcactgcatt

SEQ ID NO: 5780005 - DNA, 25 bp, Homo sapien
tggtgcctggcaagaggggtagaag

SEQ ID NO: 5780006 - DNA, 25 bp, Homo sapien
cgggctcgcgcctcccgggcgcacc

SEQ ID NO: 5780007 - DNA, 25 bp, Homo sapien
ggtgttccatggttgtcgatttgac

SEQ ID NO: 5780008 - DNA, 25 bp, Homo sapien
tggacagatggcggtaatgttaaaa

SEQ ID NO: 5780009 - DNA, 25 bp, Homo sapien
cgtcattgggcaccactatgcctgc

SEQ ID NO: 5780010 - DNA, 25 bp, Homo sapien
ctttgcttattaaattggaaacaat

SEQ ID NO: 5780011 - DNA, 25 bp, Homo sapien
aaaacctccttctggtgtatctatg

SEQ ID NO: 5780012 - DNA, 25 bp, Homo sapien
gtcactgcattgattatgaatcctt

SEQ ID NO: 5780013 - DNA, 25 bp, Homo sapien
cattttcagtgggtattataacatg

SEQ ID NO: 5780014 - DNA, 25 bp, Homo sapien
aaagttggcctagtgaggggtgttc

SEQ ID NO: 5780015 - DNA, 25 bp, Homo sapien
ctcttttcgccatccgatatgactt

SEQ ID NO: 5780016 - DNA, 25 bp, Homo sapien
tccactaccaaattattgaggtttg

SEQ ID NO: 5780017 - DNA, 25 bp, Homo sapien
ctttcggggtggatgctaatgtatg

SEQ ID NO: 5780018 - DNA, 25 bp, Homo sapien
cagcggtaaaaaaagccagggccga

SEQ ID NO: 5780019 - DNA, 25 bp, Homo sapien
caaagaaaagagcttttgtttctct

SEQ ID NO: 5780020 - DNA, 25 bp, Homo sapien
tttcaccagcaatggtgcctggcaa

SEQ ID NO: 5780021 - DNA, 25 bp, Homo sapien
tctctgaaagttggcctagtgaggg

SEQ ID NO: 5780022 - DNA, 25 bp, Homo sapien
atctattgtcttcaccttggcccag

SEQ ID NO: 5780023 - DNA, 25 bp, Homo sapien
tcggggcccgcgggccgagtgtcgc

SEQ ID NO: 5780024 - DNA, 25 bp, Homo sapien
caggtaagcgggcccgggcaccgct

SEQ ID NO: 5780025 - DNA, 25 bp, Homo sapien
ttgctcgtcacgtttctgcatcctt

SEQ ID NO: 5780026 - DNA, 25 bp, Homo sapien
cagacaaatgcagcggtaaaaaaag

SEQ ID NO: 5780027 - DNA, 25 bp, Homo sapien
taatttcattttcagtgggtattat

SEQ ID NO: 5780028 - DNA, 25 bp, Homo sapien
ggaaacaatatcacaacgttcactt

SEQ ID NO: 5780029 - DNA, 25 bp, Homo sapien
gcagcaatcttttagcctcttttcg

SEQ ID NO: 5780030 - DNA, 25 bp, Homo sapien
ccgcacataatgcaaaacagcccgc

SEQ ID NO: 5780031 - DNA, 25 bp, Homo sapien
acccaggctgcccagaggaacgagg

SEQ ID NO: 5780032 - DNA, 25 bp, Homo sapien
actatgcctgccaatttgctatcaa

SEQ ID NO: 5780033 - DNA, 25 bp, Homo sapien
ctgctttctcaaactcagtgatgtt

SEQ ID NO: 5780034 - DNA, 25 bp, Homo sapien
ctgataggcttccactaccaaatta

SEQ ID NO: 5780035 - DNA, 25 bp, Homo sapien
tgcaaagatgacattaatgttgttg

SEQ ID NO: 5780036 - DNA, 25 bp, Homo sapien
tacttcatcattgctcgtcacgttt

SEQ ID NO: 5780037 - DNA, 25 bp, Homo sapien
ggcgggacctcgccggtcgttttgc

SEQ ID NO: 5780038 - DNA, 25 bp, Homo sapien
ccatccacattctggacccagcgca

SEQ ID NO: 5780039 - DNA, 25 bp, Homo sapien
ctgcattgattatgaatcctttcgg

SEQ ID NO: 5780040 - DNA, 25 bp, Homo sapien
gacagatggcggtaatgttaaaata

SEQ ID NO: 5780041 - DNA, 25 bp, Homo sapien
tgaaactgttttatcaacgtatgag

SEQ ID NO: 5780042 - DNA, 25 bp, Homo sapien
gacaaatgcagcggtaaaaaaagcc

SEQ ID NO: 5780043 - DNA, 25 bp, Homo sapien
cactgggtgatgctggatctgtggg

SEQ ID NO: 5780044 - DNA, 25 bp, Homo sapien
agatgggtattctattgaatcaact

SEQ ID NO: 5780045 - DNA, 25 bp, Homo sapien
cgggatgccagcaacagggggaggc

SEQ ID NO: 5780046 - DNA, 25 bp, Homo sapien
cccagcgcaaggcacctggcacagg

SEQ ID NO: 5780047 - DNA, 25 bp, Homo sapien
cttttcgccatccgatatgactttc

SEQ ID NO: 5780048 - DNA, 25 bp, Homo sapien
ggaaaccaccctaatgtacattcac

SEQ ID NO: 5780049 - DNA, 25 bp, Homo sapien
tctatgaactgctttctcaaactca

SEQ ID NO: 5780050 - DNA, 25 bp, Homo sapien
tctatattattgtgcattgatgctg

SEQ ID NO: 5780051 - DNA, 25 bp, Homo sapien
tttctctgaaagttggcctagtgag

SEQ ID NO: 5780052 - DNA, 25 bp, Homo sapien
ttcaccttggcccagtccaagaaca

SEQ ID NO: 5780053 - DNA, 25 bp, Homo sapien
aagatccacaggatatttcttcaga

SEQ ID NO: 5780054 - DNA, 25 bp, Homo sapien
caccgctcggcatctcagggcccct

SEQ ID NO: 5780055 - DNA, 25 bp, Homo sapien
ccccggcggcgactggagagagggc

SEQ ID NO: 5780056 - DNA, 25 bp, Homo sapien
cggccaagggccccggcggcgactg

SEQ ID NO: 5780057 - DNA, 25 bp, Homo sapien
gaggtcgaggggaaaaaagtctgtg

SEQ ID NO: 5780058 - DNA, 25 bp, Homo sapien
tgaactttcagcataaaattagctt

SEQ ID NO: 5780059 - DNA, 25 bp, Homo sapien
ggtaagcgggcccgggcaccgctcg

SEQ ID NO: 5780060 - DNA, 25 bp, Homo sapien
tccaagacgaaagtcacgggagaaa

SEQ ID NO: 5780061 - DNA, 25 bp, Homo sapien
gcagggaggccaacaccattagttg

SEQ ID NO: 5780062 - DNA, 25 bp, Homo sapien
agccgcacataatgcaaaacagccc

SEQ ID NO: 5780063 - DNA, 25 bp, Homo sapien
tagcctcttttcgccatccgatatg

SEQ ID NO: 5780064 - DNA, 25 bp, Homo sapien
tctgaaatgagcttctgataggctt

SEQ ID NO: 5780065 - DNA, 25 bp, Homo sapien
cacccacatacttcatcattgctcg

SEQ ID NO: 5780066 - DNA, 25 bp, Homo sapien
cggagcaagcggtgcaggtaagcgg

SEQ ID NO: 5780067 - DNA, 25 bp, Homo sapien
cacctggcacaggatgctgcatttg

SEQ ID NO: 5780068 - DNA, 25 bp, Homo sapien
gcaaggcacctggcacaggatgctg

SEQ ID NO: 5780069 - DNA, 25 bp, Homo sapien
agcgagatgagacgtctgatctgtc

SEQ ID NO: 5780070 - DNA, 25 bp, Homo sapien
cattagttgcagctttgcagccccg

SEQ ID NO: 5780071 - DNA, 25 bp, Homo sapien
gcattgattatgaatcctttcgggg

SEQ ID NO: 5780072 - DNA, 25 bp, Homo sapien
cacatacttcatcattgctcgtcac

SEQ ID NO: 5780073 - DNA, 25 bp, Homo sapien
tgaaagttggcctagtgaggggtgt

SEQ ID NO: 5780074 - DNA, 25 bp, Homo sapien
caagggaggaagctcgggatgccag

SEQ ID NO: 5780075 - DNA, 25 bp, Homo sapien
ctttcacttctgaaatgagcttctg

SEQ ID NO: 5780076 - DNA, 25 bp, Homo sapien
atgggtattctattgaatcaactga

SEQ ID NO: 5780077 - DNA, 25 bp, Homo sapien
tgtaagaaagtacgccaaacaactt

SEQ ID NO: 5780078 - DNA, 25 bp, Homo sapien
ctcccggctcggcacggcgggtccc

SEQ ID NO: 5780079 - DNA, 25 bp, Homo sapien
acctcgccggtcgttttgcaggcag

SEQ ID NO: 5780080 - DNA, 25 bp, Homo sapien
aacacaccatccacattctggaccc

SEQ ID NO: 5780081 - DNA, 25 bp, Homo sapien
attgggcaccactatgcctgccaat

SEQ ID NO: 5780082 - DNA, 25 bp, Homo sapien
ctctgcaagggctccgcagcctgct

SEQ ID NO: 5780083 - DNA, 25 bp, Homo sapien
agtgatgttctctgtcaaagacagc

SEQ ID NO: 5780084 - DNA, 25 bp, Homo sapien
ggtgaaactgttttatcaacgtatg

SEQ ID NO: 5780085 - DNA, 25 bp, Homo sapien
tagataaatcgtttccaacggaatt

SEQ ID NO: 5780086 - DNA, 25 bp, Homo sapien
ctacggccctcccggctcggcacgg

SEQ ID NO: 5780087 - DNA, 25 bp, Homo sapien
caggatatttcttcagaggatgaac

SEQ ID NO: 5780088 - DNA, 25 bp, Homo sapien
cagccggtggggcttctgctgcata

SEQ ID NO: 5780089 - DNA, 25 bp, Homo sapien
aatatcacaacgttcacttcttgat

SEQ ID NO: 5780090 - DNA, 25 bp, Homo sapien
cagcagcaatcttttagcctctttt

SEQ ID NO: 5780091 - DNA, 25 bp, Homo sapien
aaaagggaaaaatgcacacccacat

SEQ ID NO: 5780092 - DNA, 25 bp, Homo sapien
gcttattaaattggaaacaatatca

SEQ ID NO: 5780093 - DNA, 25 bp, Homo sapien
gtttttcagatgacagtttccgtca

SEQ ID NO: 5780094 - DNA, 25 bp, Homo sapien
gtttgcagcctttgattctatttca

SEQ ID NO: 5780095 - DNA, 25 bp, Homo sapien
tccttctggtgtatctatgtttcca

SEQ ID NO: 5780096 - DNA, 25 bp, Homo sapien
cgatatgactttcacagacagctgc

SEQ ID NO: 5780097 - DNA, 25 bp, Homo sapien
ttgaatcaactgagcagcctttgct

SEQ ID NO: 5780098 - DNA, 25 bp, Homo sapien
atggttgtcgatttgacatagacgt

SEQ ID NO: 5780099 - DNA, 25 bp, Homo sapien
cccacatacttcatcattgctcgtc

SEQ ID NO: 5780100 - DNA, 25 bp, Homo sapien
aggacgttttccgcaggcctagcag

SEQ ID NO: 5780101 - DNA, 25 bp, Homo sapien
atcaagagcgagatgagacgtctga

SEQ ID NO: 5780102 - DNA, 25 bp, Homo sapien
ggagcagcgggcaaagacaagtcgg

SEQ ID NO: 5780103 - DNA, 25 bp, Homo sapien
aatcctcttgaacacaccatccaca

SEQ ID NO: 5780104 - DNA, 25 bp, Homo sapien
tctgtctatgaactgctttctcaaa

SEQ ID NO: 5780105 - DNA, 25 bp, Homo sapien
tttgcaggcagacaaatgcagcggt

SEQ ID NO: 5780106 - DNA, 25 bp, Homo sapien
tgctatcaagagcgagatgagacgt

SEQ ID NO: 5780107 - DNA, 25 bp, Homo sapien
gttaaaatagatgccttgtacctgg

SEQ ID NO: 5780108 - DNA, 25 bp, Homo sapien
tcggcacggcgggtcccgcggtctc

SEQ ID NO: 5780109 - DNA, 25 bp, Homo sapien
tgcagcggtaaaaaaagccagggcc

SEQ ID NO: 5780110 - DNA, 25 bp, Homo sapien
tgccaatttgctatcaagagcgaga

SEQ ID NO: 5780111 - DNA, 25 bp, Homo sapien
cagctgcctgaagcatggcgtcaaa

SEQ ID NO: 5780112 - DNA, 25 bp, Homo sapien
cgagatgagacgtctgatctgtcat

SEQ ID NO: 5780113 - DNA, 25 bp, Homo sapien
ccttgaactgcaaagatgacattaa

SEQ ID NO: 5780114 - DNA, 25 bp, Homo sapien
gacgtctgatctgtcatcaccagca

SEQ ID NO: 5780115 - DNA, 25 bp, Homo sapien
tccttcgacggccaagggccccggc

SEQ ID NO: 5780116 - DNA, 25 bp, Homo sapien
ttaaaagggaaaaatgcacacccac

SEQ ID NO: 5780117 - DNA, 25 bp, Homo sapien
acagcacatggatgtatccatgggg

SEQ ID NO: 5780118 - DNA, 25 bp, Homo sapien
gcacagatgggtattctattgaatc

SEQ ID NO: 5780119 - DNA, 25 bp, Homo sapien
gtggatgctaatgtatggtgaaact

SEQ ID NO: 5780120 - DNA, 25 bp, Homo sapien
tctggacccagcgcaaggcacctgg

SEQ ID NO: 5780121 - DNA, 25 bp, Homo sapien
caagacgaaagtcacgggagaaaaa

SEQ ID NO: 5780122 - DNA, 25 bp, Homo sapien
ggcacctggcacaggatgctgcatt

SEQ ID NO: 5780123 - DNA, 25 bp, Homo sapien
atggcgtcaaaacctccttctggtg

SEQ ID NO: 5780124 - DNA, 25 bp, Homo sapien
cactgcattgattatgaatcctttc

SEQ ID NO: 5780125 - DNA, 25 bp, Homo sapien
gaagatgcacatctattgtcttcac

SEQ ID NO: 5780126 - DNA, 25 bp, Homo sapien
actcagtgatgttctctgtcaaaga

SEQ ID NO: 5780127 - DNA, 25 bp, Homo sapien
atcagcgcagttgcttccacaggtg

SEQ ID NO: 5780128 - DNA, 25 bp, Homo sapien
tgtctatgaactgctttctcaaact

SEQ ID NO: 5780129 - DNA, 25 bp, Homo sapien
catacttcatcattgctcgtcacgt

SEQ ID NO: 5780130 - DNA, 25 bp, Homo sapien
gcggtaatgttaaaatagatgcctt

SEQ ID NO: 5780131 - DNA, 25 bp, Homo sapien
ctaaattgtagtcactgcattgatt

SEQ ID NO: 5780132 - DNA, 25 bp, Homo sapien
gacagctgcctgaagcatggcgtca

SEQ ID NO: 5780133 - DNA, 25 bp, Homo sapien
gcgcagttgcttccacaggtgggca

SEQ ID NO: 5780134 - DNA, 25 bp, Homo sapien
tttctcaaactcagtgatgttctct

SEQ ID NO: 5780135 - DNA, 25 bp, Homo sapien
gggaaaaaagtctgtggcgcatcaa

SEQ ID NO: 5780136 - DNA, 25 bp, Homo sapien
ctgtgggaggggacgccggcgaggt

SEQ ID NO: 5780137 - DNA, 25 bp, Homo sapien
ttcttcagaggatgaactttcagca

SEQ ID NO: 5780138 - DNA, 25 bp, Homo sapien
catggatgtatccatggggaggcat

SEQ ID NO: 5780139 - DNA, 25 bp, Homo sapien
tctagataaatcgtttccaacggaa

SEQ ID NO: 5780140 - DNA, 25 bp, Homo sapien
catcaccagcagcaatcttttagcc

SEQ ID NO: 5780141 - DNA, 25 bp, Homo sapien
agcttttgtttctctccagccggtg

SEQ ID NO: 5780142 - DNA, 25 bp, Homo sapien
acgtatgagccaaatccaagacgaa

SEQ ID NO: 5780143 - DNA, 25 bp, Homo sapien
ggatatttcttcagaggatgaactt

SEQ ID NO: 5780144 - DNA, 25 bp, Homo sapien
ttgcagccccgtctgcggagcagcg

SEQ ID NO: 5780145 - DNA, 25 bp, Homo sapien
ccaagaacaagtgaaaacacccagg

SEQ ID NO: 5780146 - DNA, 25 bp, Homo sapien
gctccgggacaaagaaaagagcttt

SEQ ID NO: 5780147 - DNA, 25 bp, Homo sapien
agcgggcccgggcaccgctcggcat

SEQ ID NO: 5780148 - DNA, 25 bp, Homo sapien
cagcctttgcttattaaattggaaa

SEQ ID NO: 5780149 - DNA, 25 bp, Homo sapien
cggcagcgtcctggctggcaaggga

SEQ ID NO: 5780150 - DNA, 25 bp, Homo sapien
gcctggcaagaggggtagaagatcc

SEQ ID NO: 5780151 - DNA, 25 bp, Homo sapien
tgtatccatggggaggcatgcagtc

SEQ ID NO: 5780152 - DNA, 25 bp, Homo sapien
agaagatccttataccaatgaaatt

SEQ ID NO: 5780153 - DNA, 25 bp, Homo sapien
caagggccccggcggcgactggaga

SEQ ID NO: 5780154 - DNA, 25 bp, Homo sapien
gacatcaacaagataataaagatcc

SEQ ID NO: 5780155 - DNA, 25 bp, Homo sapien
gcttccacaggtgggcagggaggcc

SEQ ID NO: 5780156 - DNA, 25 bp, Homo sapien
tccgcagcctgctccgggacaaaga

SEQ ID NO: 5780157 - DNA, 25 bp, Homo sapien
gtccaagaacaagtgaaaacaccca

SEQ ID NO: 5780158 - DNA, 25 bp, Homo sapien
aaagagcttttgtttctctccagcc

SEQ ID NO: 5780159 - DNA, 25 bp, Homo sapien
tggacccatctggacagatggcggt

SEQ ID NO: 5780160 - DNA, 25 bp, Homo sapien
atccacattctggacccagcgcaag

SEQ ID NO: 5780161 - DNA, 25 bp, Homo sapien
caatcagcgcagttgcttccacagg

SEQ ID NO: 5780162 - DNA, 25 bp, Homo sapien
gcataaaattagcttcggctcctgg

SEQ ID NO: 5780163 - DNA, 25 bp, Homo sapien
cagggggaggcggctctgggagcgc

SEQ ID NO: 5780164 - DNA, 25 bp, Homo sapien
aataaagatccacaggatatttctt

SEQ ID NO: 5780165 - DNA, 25 bp, Homo sapien
cgcggtctccgcgagaagcacctcc

SEQ ID NO: 5780166 - DNA, 25 bp, Homo sapien
aagtgaaaacacccaggctgcccag

SEQ ID NO: 5780167 - DNA, 25 bp, Homo sapien
ggcttctgctgcataaatcagctta

SEQ ID NO: 5780168 - DNA, 25 bp, Homo sapien
ctccgcgagaagcacctccttcgac

SEQ ID NO: 5780169 - DNA, 25 bp, Homo sapien
tgtcacctgggtattaatttcattt

SEQ ID NO: 5780170 - DNA, 25 bp, Homo sapien
tgtttctctccagccggtggggctt

SEQ ID NO: 5780171 - DNA, 25 bp, Homo sapien
tcgcgcctcccgggcgcacctcggg

SEQ ID NO: 5780172 - DNA, 25 bp, Homo sapien
ggcaccactatgcctgccaatttgc

SEQ ID NO: 5780173 - DNA, 25 bp, Homo sapien
tccatgcctggctttctggacccat

SEQ ID NO: 5780174 - DNA, 25 bp, Homo sapien
tagacacttctcctggtgtcacctg

SEQ ID NO: 5780175 - DNA, 25 bp, Homo sapien
gggtattataacatgcacagatggg

SEQ ID NO: 5780176 - DNA, 25 bp, Homo sapien
ttgcttattaaattggaaacaatat

SEQ ID NO: 5780177 - DNA, 25 bp, Homo sapien
gccagggccgagccgcacataatgc

SEQ ID NO: 5780178 - DNA, 25 bp, Homo sapien
aaggcacctggcacaggatgctgca

SEQ ID NO: 5780179 - DNA, 25 bp, Homo sapien
ggcatgcagtctaaattgtagtcac

SEQ ID NO: 5780180 - DNA, 25 bp, Homo sapien
gcctcttttcgccatccgatatgac

SEQ ID NO: 5780181 - DNA, 25 bp, Homo sapien
agaggggtagaagatccttatacca

SEQ ID NO: 5780182 - DNA, 25 bp, Homo sapien
ccgcggctcggagcaagcggtgcag

SEQ ID NO: 5780183 - DNA, 25 bp, Homo sapien
catgcagtctaaattgtagtcactg

SEQ ID NO: 5780184 - DNA, 25 bp, Homo sapien
ttggaaacaatatcacaacgttcac

SEQ ID NO: 5780185 - DNA, 25 bp, Homo sapien
ctgcataaatcagcttagcgaagag

SEQ ID NO: 5780186 - DNA, 25 bp, Homo sapien
gggtgatgctggatctgtgggaggg

SEQ ID NO: 5780187 - DNA, 25 bp, Homo sapien
atgtatggtgaaactgttttatcaa

SEQ ID NO: 5780188 - DNA, 25 bp, Homo sapien
tggggaggcatgcagtctaaattgt

SEQ ID NO: 5780189 - DNA, 25 bp, Homo sapien
cgaagagccaaacacaatcaaaccc

SEQ ID NO: 5780190 - DNA, 25 bp, Homo sapien
gaacgaggcgggacctcgccggtcg

SEQ ID NO: 5780191 - DNA, 25 bp, Homo sapien
ctcgggatgccagcaacagggggag

SEQ ID NO: 5780192 - DNA, 25 bp, Homo sapien
caagaggggtagaagatccttatac

SEQ ID NO: 5780193 - DNA, 25 bp, Homo sapien
gcgaggtcgaggggaaaaaagtctg

SEQ ID NO: 5780194 - DNA, 25 bp, Homo sapien
aaacagcccgccccgcgcccgccgc

SEQ ID NO: 5780195 - DNA, 25 bp, Homo sapien
tcagtgatgttctctgtcaaagaca

SEQ ID NO: 5780196 - DNA, 25 bp, Homo sapien
gttttgcaggcagacaaatgcagcg

SEQ ID NO: 5780197 - DNA, 25 bp, Homo sapien
cccgcgcccgccgcctggctgcctt

SEQ ID NO: 5780198 - DNA, 25 bp, Homo sapien
ttattgaggtttgcagcctttgatt

SEQ ID NO: 5780199 - DNA, 25 bp, Homo sapien
ggctggcaagggaggaagctcggga

SEQ ID NO: 5780200 - DNA, 25 bp, Homo sapien
tcgttttgcaggcagacaaatgcag

SEQ ID NO: 5780201 - DNA, 25 bp, Homo sapien
tgctggatctgtgggaggggacgcc

SEQ ID NO: 5780202 - DNA, 25 bp, Homo sapien
tttctgcatccttccatgcctggct

SEQ ID NO: 5780203 - DNA, 25 bp, Homo sapien
tgtggcgcatcaatcagcgcagttg

SEQ ID NO: 5780204 - DNA, 25 bp, Homo sapien
gtgcctggcaagaggggtagaagat

SEQ ID NO: 5780205 - DNA, 25 bp, Homo sapien
gtcatcaccagcagcaatcttttag

SEQ ID NO: 5780206 - DNA, 25 bp, Homo sapien
ggcacggcgggtcccgcggtctccg

SEQ ID NO: 5780207 - DNA, 25 bp, Homo sapien
gcgggtcccgcggtctccgcgagaa

SEQ ID NO: 5780208 - DNA, 25 bp, Homo sapien
aattattgaggtttgcagcctttga

SEQ ID NO: 5780209 - DNA, 25 bp, Homo sapien
ctgctccgggacaaagaaaagagct

SEQ ID NO: 5780210 - DNA, 25 bp, Homo sapien
ttattgtgcattgatgctgagacat

SEQ ID NO: 5780211 - DNA, 25 bp, Homo sapien
cagatgacagtttccgtcattgggc

SEQ ID NO: 5780212 - DNA, 25 bp, Homo sapien
gtattataacatgcacagatgggta

SEQ ID NO: 5780213 - DNA, 25 bp, Homo sapien
gcagttgcttccacaggtgggcagg

SEQ ID NO: 5780214 - DNA, 25 bp, Homo sapien
gggcaaagacaagtcggcagcgtcc

SEQ ID NO: 5780215 - DNA, 25 bp, Homo sapien
tccagccggtggggcttctgctgca

SEQ ID NO: 5780216 - DNA, 25 bp, Homo sapien
tccgtcattgggcaccactatgcct

SEQ ID NO: 5780217 - DNA, 25 bp, Homo sapien
gcatttgaagatgcacatctattgt

SEQ ID NO: 5780218 - DNA, 25 bp, Homo sapien
atcttttagcctcttttcgccatcc

SEQ ID NO: 5780219 - DNA, 25 bp, Homo sapien
ggccccggcggcgactggagagagg

SEQ ID NO: 5780220 - DNA, 25 bp, Homo sapien
gaggggtgttccatggttgtcgatt

SEQ ID NO: 5780221 - DNA, 25 bp, Homo sapien
ctggctggcaagggaggaagctcgg

SEQ ID NO: 5780222 - DNA, 25 bp, Homo sapien
cgaggggaaaaaagtctgtggcgca

SEQ ID NO: 5780223 - DNA, 25 bp, Homo sapien
atgcacatctattgtcttcaccttg

SEQ ID NO: 5780224 - DNA, 25 bp, Homo sapien
ccgtctgcggagcagcgggcaaaga

SEQ ID NO: 5780225 - DNA, 25 bp, Homo sapien
tctgggagcgccctagaagcacccg

SEQ ID NO: 5780226 - DNA, 25 bp, Homo sapien
tgattatgaatcctttcggggtgga

SEQ ID NO: 5780227 - DNA, 25 bp, Homo sapien
cagcgcagttgcttccacaggtggg

SEQ ID NO: 5780228 - DNA, 25 bp, Homo sapien
caaagatgacattaatgttgttgtc

SEQ ID NO: 5780229 - DNA, 25 bp, Homo sapien
gggggaggcggctctgggagcgccc

SEQ ID NO: 5780230 - DNA, 25 bp, Homo sapien
agacagcacatggatgtatccatgg

SEQ ID NO: 5780231 - DNA, 25 bp, Homo sapien
atctgtcatcaccagcagcaatctt

SEQ ID NO: 5780232 - DNA, 25 bp, Homo sapien
gtttccagagatcttctgtctatga

SEQ ID NO: 5780233 - DNA, 25 bp, Homo sapien
tgttgttgtctattaatttctctga

SEQ ID NO: 5780234 - DNA, 25 bp, Homo sapien
atcaactgagcagcctttgcttatt

SEQ ID NO: 5780235 - DNA, 25 bp, Homo sapien
ttccttgaactgcaaagatgacatt

SEQ ID NO: 5780236 - DNA, 25 bp, Homo sapien
tgtcaaagacagcacatggatgtat

SEQ ID NO: 5780237 - DNA, 25 bp, Homo sapien
atcttctgtctatgaactgctttct

SEQ ID NO: 5780238 - DNA, 25 bp, Homo sapien
tgctgcataaatcagcttagcgaag

SEQ ID NO: 5780239 - DNA, 25 bp, Homo sapien
aagcggtgcaggtaagcgggcccgg

SEQ ID NO: 5780240 - DNA, 25 bp, Homo sapien
caaaacagcccgccccgcgcccgcc

SEQ ID NO: 5780241 - DNA, 25 bp, Homo sapien
agtctgtggcgcatcaatcagcgca

SEQ ID NO: 5780242 - DNA, 25 bp, Homo sapien
tatttcaccagcaatggtgcctggc

SEQ ID NO: 5780243 - DNA, 25 bp, Homo sapien
cggcgactggagagagggctctgca

SEQ ID NO: 5780244 - DNA, 25 bp, Homo sapien
aatcctttcggggtggatgctaatg

SEQ ID NO: 5780245 - DNA, 25 bp, Homo sapien
gatccacaggatatttcttcagagg

SEQ ID NO: 5780246 - DNA, 25 bp, Homo sapien
tggcacaggatgctgcatttgaaga

SEQ ID NO: 5780247 - DNA, 25 bp, Homo sapien
actgcaaagatgacattaatgttgt

SEQ ID NO: 5780248 - DNA, 25 bp, Homo sapien
cctgaactttcacttctgaaatgag

SEQ ID NO: 5780249 - DNA, 25 bp, Homo sapien
tgtagtcactgcattgattatgaat

SEQ ID NO: 5780250 - DNA, 25 bp, Homo sapien
gtctccgcgagaagcacctccttcg

SEQ ID NO: 5780251 - DNA, 25 bp, Homo sapien
gggcagggaggccaacaccattagt

SEQ ID NO: 5780252 - DNA, 25 bp, Homo sapien
tgaacacaccatccacattctggac

SEQ ID NO: 5780253 - DNA, 25 bp, Homo sapien
tggcgcatcaatcagcgcagttgct

SEQ ID NO: 5780254 - DNA, 25 bp, Homo sapien
tgggcaccactatgcctgccaattt

SEQ ID NO: 5780255 - DNA, 25 bp, Homo sapien
ggccgagtgtcgctaggacgttttc

SEQ ID NO: 5780256 - DNA, 25 bp, Homo sapien
ggcggctctgggagcgccctagaag

SEQ ID NO: 5780257 - DNA, 25 bp, Homo sapien
gtatctatgtttccagagatcttct

SEQ ID NO: 5780258 - DNA, 25 bp, Homo sapien
gctggatagacacttctcctggtgt

SEQ ID NO: 5780259 - DNA, 25 bp, Homo sapien
ttcacagacagctgcctgaagcatg

SEQ ID NO: 5780260 - DNA, 25 bp, Homo sapien
gcaatggtgcctggcaagaggggta

SEQ ID NO: 5780261 - DNA, 25 bp, Homo sapien
acctgggtattaatttcattttcag

SEQ ID NO: 5780262 - DNA, 25 bp, Homo sapien
ttagcttcggctcctggacgcagct

SEQ ID NO: 5780263 - DNA, 25 bp, Homo sapien
gacgcgggctcgcgcctcccgggcg

SEQ ID NO: 5780264 - DNA, 25 bp, Homo sapien
aggggaaaaaagtctgtggcgcatc

SEQ ID NO: 5780265 - DNA, 25 bp, Homo sapien
aatccaagacgaaagtcacgggaga

SEQ ID NO: 5780266 - DNA, 25 bp, Homo sapien
ggcagacaaatgcagcggtaaaaaa

SEQ ID NO: 5780267 - DNA, 25 bp, Homo sapien
tggtgtatctatgtttccagagatc

SEQ ID NO: 5780268 - DNA, 25 bp, Homo sapien
ccctcccggctcggcacggcgggtc

SEQ ID NO: 5780269 - DNA, 25 bp, Homo sapien
cttgtacctggttttccacctgaac

SEQ ID NO: 5780270 - DNA, 25 bp, Homo sapien
aacaagataataaagatccacagga

SEQ ID NO: 5780271 - DNA, 25 bp, Homo sapien
gtagaagatccttataccaatgaaa

SEQ ID NO: 5780272 - DNA, 25 bp, Homo sapien
ctggtgtcacctgggtattaatttc

SEQ ID NO: 5780273 - DNA, 25 bp, Homo sapien
tggacgcagctggatagacacttct

SEQ ID NO: 5780274 - DNA, 25 bp, Homo sapien
ggttgtcgatttgacatagacgttg

SEQ ID NO: 5780275 - DNA, 25 bp, Homo sapien
tcattgggcaccactatgcctgcca

SEQ ID NO: 5780276 - DNA, 25 bp, Homo sapien
gagtgtcgctaggacgttttccgca

SEQ ID NO: 5780277 - DNA, 25 bp, Homo sapien
tctgtggcgcatcaatcagcgcagt

SEQ ID NO: 5780278 - DNA, 25 bp, Homo sapien
tgcccagaggaacgaggcgggacct

SEQ ID NO: 5780279 - DNA, 25 bp, Homo sapien
agatgccttgtacctggttttccac

SEQ ID NO: 5780280 - DNA, 25 bp, Homo sapien
gtgtatctatgtttccagagatctt

SEQ ID NO: 5780281 - DNA, 25 bp, Homo sapien
tgattctatttcaccagcaatggtg

SEQ ID NO: 5780282 - DNA, 25 bp, Homo sapien
cggctcggcacggcgggtcccgcgg

SEQ ID NO: 5780283 - DNA, 25 bp, Homo sapien
cgttgtttttcagatgacagtttcc

SEQ ID NO: 5780284 - DNA, 25 bp, Homo sapien
gaaaacacccaggctgcccagagga

SEQ ID NO: 5780285 - DNA, 25 bp, Homo sapien
aaactcagtgatgttctctgtcaaa

SEQ ID NO: 5780286 - DNA, 25 bp, Homo sapien
gagacgtctgatctgtcatcaccag

SEQ ID NO: 5780287 - DNA, 25 bp, Homo sapien
cccgggcaccgctcggcatctcagg

SEQ ID NO: 5780288 - DNA, 25 bp, Homo sapien
gacgaaagtcacgggagaaaaatgc

SEQ ID NO: 5780289 - DNA, 25 bp, Homo sapien
tatgaactgctttctcaaactcagt

SEQ ID NO: 5780290 - DNA, 25 bp, Homo sapien
gggtagaagatccttataccaatga

SEQ ID NO: 5780291 - DNA, 25 bp, Homo sapien
ggctcggagcaagcggtgcaggtaa

SEQ ID NO: 5780292 - DNA, 25 bp, Homo sapien
tttctctccagccggtggggcttct

SEQ ID NO: 5780293 - DNA, 25 bp, Homo sapien
tcggctcctggacgcagctggatag

SEQ ID NO: 5780294 - DNA, 25 bp, Homo sapien
tataccaatgaaattgttttccttg

SEQ ID NO: 5780295 - DNA, 25 bp, Homo sapien
gatgtatccatggggaggcatgcag

SEQ ID NO: 5780296 - DNA, 25 bp, Homo sapien
tcctggctggcaagggaggaagctc

SEQ ID NO: 5780297 - DNA, 25 bp, Homo sapien
ttgatccacctgaaatgaaatcctc

SEQ ID NO: 5780298 - DNA, 25 bp, Homo sapien
tccttataccaatgaaattgttttc

SEQ ID NO: 5780299 - DNA, 25 bp, Homo sapien
aaagtctgtggcgcatcaatcagcg

SEQ ID NO: 5780300 - DNA, 25 bp, Homo sapien
tcaccagcaatggtgcctggcaaga

SEQ ID NO: 5780301 - DNA, 25 bp, Homo sapien
tgtacctggttttccacctgaactt

SEQ ID NO: 5780302 - DNA, 25 bp, Homo sapien
cgggacctcgccggtcgttttgcag

SEQ ID NO: 5780303 - DNA, 25 bp, Homo sapien
ggcgcacctcggggcccgcgggccg

SEQ ID NO: 5780304 - DNA, 25 bp, Homo sapien
cctggttttccacctgaactttcac

SEQ ID NO: 5780305 - DNA, 25 bp, Homo sapien
tctattaatttctctgaaagttggc

SEQ ID NO: 5780306 - DNA, 25 bp, Homo sapien
gagccaaacacaatcaaacccaaac

SEQ ID NO: 5780307 - DNA, 25 bp, Homo sapien
cagcaacagggggaggcggctctgg

SEQ ID NO: 5780308 - DNA, 25 bp, Homo sapien
tccacaggatatttcttcagaggat

SEQ ID NO: 5780309 - DNA, 25 bp, Homo sapien
atgctaatgtatggtgaaactgttt

SEQ ID NO: 5780310 - DNA, 25 bp, Homo sapien
gtcgaggggaaaaaagtctgtggcg

SEQ ID NO: 5780311 - DNA, 25 bp, Homo sapien
tttttctagataaatcgtttccaac

SEQ ID NO: 5780312 - DNA, 25 bp, Homo sapien
cccgccgcctggctgccttccggac

SEQ ID NO: 5780313 - DNA, 25 bp, Homo sapien
tgctgcatttgaagatgcacatcta

SEQ ID NO: 5780314 - DNA, 25 bp, Homo sapien
caacgtatgagccaaatccaagacg

SEQ ID NO: 5780315 - DNA, 25 bp, Homo sapien
actgttttatcaacgtatgagccaa

SEQ ID NO: 5780316 - DNA, 25 bp, Homo sapien
acaggatgctgcatttgaagatgca

SEQ ID NO: 5780317 - DNA, 25 bp, Homo sapien
cttcatcattgctcgtcacgtttct

SEQ ID NO: 5780318 - DNA, 25 bp, Homo sapien
ttggcctagtgaggggtgttccatg

SEQ ID NO: 5780319 - DNA, 25 bp, Homo sapien
gggtcccgcggtctccgcgagaagc

SEQ ID NO: 5780320 - DNA, 25 bp, Homo sapien
caaatccaagacgaaagtcacggga

SEQ ID NO: 5780321 - DNA, 25 bp, Homo sapien
acagtttccgtcattgggcaccact

SEQ ID NO: 5780322 - DNA, 25 bp, Homo sapien
aggaagctcgggatgccagcaacag

SEQ ID NO: 5780323 - DNA, 25 bp, Homo sapien
aggctgcccagaggaacgaggcggg

SEQ ID NO: 5780324 - DNA, 25 bp, Homo sapien
cgtcaaaacctccttctggtgtatc

SEQ ID NO: 5780325 - DNA, 25 bp, Homo sapien
gtctgcggagcagcgggcaaagaca

SEQ ID NO: 5780326 - DNA, 25 bp, Homo sapien
tttcgccatccgatatgactttcac

SEQ ID NO: 5780327 - DNA, 25 bp, Homo sapien
aactttcacttctgaaatgagcttc

SEQ ID NO: 5780328 - DNA, 25 bp, Homo sapien
atgccttgtacctggttttccacct

SEQ ID NO: 5780329 - DNA, 25 bp, Homo sapien
caagagcgagatgagacgtctgatc

SEQ ID NO: 5780330 - DNA, 25 bp, Homo sapien
cagcaatggtgcctggcaagagggg

SEQ ID NO: 5780331 - DNA, 25 bp, Homo sapien
gtgggtattataacatgcacagatg

SEQ ID NO: 5780332 - DNA, 25 bp, Homo sapien
aagccagggccgagccgcacataat

SEQ ID NO: 5780333 - DNA, 25 bp, Homo sapien
attaaattggaaacaatatcacaac

SEQ ID NO: 5780334 - DNA, 25 bp, Homo sapien
gccaacaccattagttgcagctttg

SEQ ID NO: 5780335 - DNA, 25 bp, Homo sapien
cgatttgacatagacgttgtttttc

SEQ ID NO: 5780336 - DNA, 25 bp, Homo sapien
cacgtttctgcatccttccatgcct

SEQ ID NO: 5780337 - DNA, 25 bp, Homo sapien
tatccatggggaggcatgcagtcta

SEQ ID NO: 5780338 - DNA, 25 bp, Homo sapien
cacacccacatacttcatcattgct

SEQ ID NO: 5780339 - DNA, 25 bp, Homo sapien
caccttggcccagtccaagaacaag

SEQ ID NO: 5780340 - DNA, 25 bp, Homo sapien
gccaagggccccggcggcgactgga

SEQ ID NO: 5780341 - DNA, 25 bp, Homo sapien
tatgcctgccaatttgctatcaaga

SEQ ID NO: 5780342 - DNA, 25 bp, Homo sapien
gcggtaaaaaaagccagggccgagc

SEQ ID NO: 5780343 - DNA, 25 bp, Homo sapien
attgtcttcaccttggcccagtcca

SEQ ID NO: 5780344 - DNA, 25 bp, Homo sapien
aaaaaagccagggccgagccgcaca

SEQ ID NO: 5780345 - DNA, 25 bp, Homo sapien
cttctgtctatgaactgctttctca

SEQ ID NO: 5780346 - DNA, 25 bp, Homo sapien
catgcctggctttctggacccatct

SEQ ID NO: 5780347 - DNA, 25 bp, Homo sapien
cattgatgctgagacatcaacaaga

SEQ ID NO: 5780348 - DNA, 25 bp, Homo sapien
cacggcgggtcccgcggtctccgcg

SEQ ID NO: 5780349 - DNA, 25 bp, Homo sapien
tcaaaacctccttctggtgtatcta

SEQ ID NO: 5780350 - DNA, 25 bp, Homo sapien
gaccccgcggctcggagcaagcggt

SEQ ID NO: 5780351 - DNA, 25 bp, Homo sapien
aaatgccatttttctagataaatcg

SEQ ID NO: 5780352 - DNA, 25 bp, Homo sapien
cagcataaaattagcttcggctcct

SEQ ID NO: 5780353 - DNA, 25 bp, Homo sapien
accaaattattgaggtttgcagcct

SEQ ID NO: 5780354 - DNA, 25 bp, Homo sapien
gcaggcctagcaggcggaccccgcg

SEQ ID NO: 5780355 - DNA, 25 bp, Homo sapien
gggtattctattgaatcaactgagc

SEQ ID NO: 5780356 - DNA, 25 bp, Homo sapien
tgaaatgagcttctgataggcttcc

SEQ ID NO: 5780357 - DNA, 25 bp, Homo sapien
agcctttgattctatttcaccagca

SEQ ID NO: 5780358 - DNA, 25 bp, Homo sapien
ccatggttgtcgatttgacatagac

SEQ ID NO: 5780359 - DNA, 25 bp, Homo sapien
gtgaggggtgttccatggttgtcga

SEQ ID NO: 5780360 - DNA, 25 bp, Homo sapien
accagcagcaatcttttagcctctt

SEQ ID NO: 5780361 - DNA, 25 bp, Homo sapien
aaatgaaatcctcttgaacacacca

SEQ ID NO: 5780362 - DNA, 25 bp, Homo sapien
caccactatgcctgccaatttgcta

SEQ ID NO: 5780363 - DNA, 25 bp, Homo sapien
agctcgggatgccagcaacaggggg

SEQ ID NO: 5780364 - DNA, 25 bp, Homo sapien
tgcctggctttctggacccatctgg

SEQ ID NO: 5780365 - DNA, 25 bp, Homo sapien
cgcagcctgctccgggacaaagaaa

SEQ ID NO: 5780366 - DNA, 25 bp, Homo sapien
ctatcaagagcgagatgagacgtct

SEQ ID NO: 5780367 - DNA, 25 bp, Homo sapien
atcagcttagcgaagagccaaacac

SEQ ID NO: 5780368 - DNA, 25 bp, Homo sapien
ctggcaagggaggaagctcgggatg

SEQ ID NO: 5780369 - DNA, 25 bp, Homo sapien
ctgtcatcaccagcagcaatctttt

SEQ ID NO: 5780370 - DNA, 25 bp, Homo sapien
ttcacttcttgatccacctgaaatg

SEQ ID NO: 5780371 - DNA, 25 bp, Homo sapien
gcgcctcccgggcgcacctcggggc

SEQ ID NO: 5780372 - DNA, 25 bp, Homo sapien
ttgtcgatttgacatagacgttgtt

SEQ ID NO: 5780373 - DNA, 25 bp, Homo sapien
cgcccgccgcctggctgccttccgg

SEQ ID NO: 5780374 - DNA, 25 bp, Homo sapien
cgtctgatctgtcatcaccagcagc

SEQ ID NO: 5780375 - DNA, 25 bp, Homo sapien
tgttccatggttgtcgatttgacat

SEQ ID NO: 5780376 - DNA, 25 bp, Homo sapien
tcgtcacgtttctgcatccttccat

SEQ ID NO: 5780377 - DNA, 25 bp, Homo sapien
atctatgtttccagagatcttctgt

SEQ ID NO: 5780378 - DNA, 25 bp, Homo sapien
ggccctcccggctcggcacggcggg

SEQ ID NO: 5780379 - DNA, 25 bp, Homo sapien
aatgttgttgtctattaatttctct

SEQ ID NO: 5780380 - DNA, 25 bp, Homo sapien
cttctcctggtgtcacctgggtatt

SEQ ID NO: 5780381 - DNA, 25 bp, Homo sapien
ttttatcaacgtatgagccaaatcc

SEQ ID NO: 5780382 - DNA, 25 bp, Homo sapien
aaagacagcacatggatgtatccat

SEQ ID NO: 5780383 - DNA, 25 bp, Homo sapien
ttttcagtgggtattataacatgca

SEQ ID NO: 5780384 - DNA, 25 bp, Homo sapien
tttttctgtaagaaagtacgccaaa

SEQ ID NO: 5780385 - DNA, 25 bp, Homo sapien
caccatccacattctggacccagcg

SEQ ID NO: 5780386 - DNA, 25 bp, Homo sapien
tccatggggaggcatgcagtctaaa

SEQ ID NO: 5780387 - DNA, 25 bp, Homo sapien
atcaaacccaaacaaagcccgaagc

SEQ ID NO: 5780388 - DNA, 25 bp, Homo sapien
taggcttccactaccaaattattga

SEQ ID NO: 5780389 - DNA, 25 bp, Homo sapien
ttgaagatgcacatctattgtcttc

SEQ ID NO: 5780390 - DNA, 25 bp, Homo sapien
cctggacgcagctggatagacactt

SEQ ID NO: 5780391 - DNA, 25 bp, Homo sapien
acattctggacccagcgcaaggcac

SEQ ID NO: 5780392 - DNA, 25 bp, Homo sapien
tcaaagacagcacatggatgtatcc

SEQ ID NO: 5780393 - DNA, 25 bp, Homo sapien
ccacattctggacccagcgcaaggc

SEQ ID NO: 5780394 - DNA, 25 bp, Homo sapien
gtcacgtttctgcatccttccatgc

SEQ ID NO: 5780395 - DNA, 25 bp, Homo sapien
gcggagcagcgggcaaagacaagtc

SEQ ID NO: 5780396 - DNA, 25 bp, Homo sapien
aaatcagcttagcgaagagccaaac

SEQ ID NO: 5780397 - DNA, 25 bp, Homo sapien
gtcggcagcgtcctggctggcaagg

SEQ ID NO: 5780398 - DNA, 25 bp, Homo sapien
ctcctggacgcagctggatagacac

SEQ ID NO: 5780399 - DNA, 25 bp, Homo sapien
atgttaaaatagatgccttgtacct

SEQ ID NO: 5780400 - DNA, 25 bp, Homo sapien
gatggcggtaatgttaaaatagatg

SEQ ID NO: 5780401 - DNA, 25 bp, Homo sapien
ttccagagatcttctgtctatgaac

SEQ ID NO: 5780402 - DNA, 25 bp, Homo sapien
aaaatgcacacccacatacttcatc

SEQ ID NO: 5780403 - DNA, 25 bp, Homo sapien
acaagtcggcagcgtcctggctggc

SEQ ID NO: 5780404 - DNA, 25 bp, Homo sapien
ccttggcccagtccaagaacaagtg

SEQ ID NO: 5780405 - DNA, 25 bp, Homo sapien
tctcctggtgtcacctgggtattaa

SEQ ID NO: 5780406 - DNA, 25 bp, Homo sapien
cagcgggcaaagacaagtcggcagc

SEQ ID NO: 5780407 - DNA, 25 bp, Homo sapien
tttctatattattgtgcattgatgc

SEQ ID NO: 5780408 - DNA, 25 bp, Homo sapien
cggggtggatgctaatgtatggtga

SEQ ID NO: 5780409 - DNA, 25 bp, Homo sapien
ttttccttgaactgcaaagatgaca

SEQ ID NO: 5780410 - DNA, 25 bp, Homo sapien
ggcctagtgaggggtgttccatggt

SEQ ID NO: 5780411 - DNA, 25 bp, Homo sapien
gtcgatttgacatagacgttgtttt

SEQ ID NO: 5780412 - DNA, 25 bp, Homo sapien
ttgaactgcaaagatgacattaatg

SEQ ID NO: 5780413 - DNA, 25 bp, Homo sapien
attctggacccagcgcaaggcacct

SEQ ID NO: 5780414 - DNA, 25 bp, Homo sapien
tttgctatcaagagcgagatgagac

SEQ ID NO: 5780415 - DNA, 25 bp, Homo sapien
tctgatctgtcatcaccagcagcaa

SEQ ID NO: 5780416 - DNA, 25 bp, Homo sapien
ttgcagctttgcagccccgtctgcg

SEQ ID NO: 5780417 - DNA, 25 bp, Homo sapien
gggaaaaatgcacacccacatactt

SEQ ID NO: 5780418 - DNA, 25 bp, Homo sapien
gacaaagaaaagagcttttgtttct

SEQ ID NO: 5780419 - DNA, 25 bp, Homo sapien
caatcttttagcctcttttcgccat

SEQ ID NO: 5780420 - DNA, 25 bp, Homo sapien
gatgctgcatttgaagatgcacatc

SEQ ID NO: 5780421 - DNA, 25 bp, Homo sapien
ggggaaaccaccctaatgtacattc

SEQ ID NO: 5780422 - DNA, 25 bp, Homo sapien
aatgcaaaacagcccgccccgcgcc

SEQ ID NO: 5780423 - DNA, 25 bp, Homo sapien
ccactatgcctgccaatttgctatc

SEQ ID NO: 5780424 - DNA, 25 bp, Homo sapien
agatgcacatctattgtcttcacct

SEQ ID NO: 5780425 - DNA, 25 bp, Homo sapien
agggaggaagctcgggatgccagca

SEQ ID NO: 5780426 - DNA, 25 bp, Homo sapien
tccttccatgcctggctttctggac

SEQ ID NO: 5780427 - DNA, 25 bp, Homo sapien
ctggcaagaggggtagaagatcctt

SEQ ID NO: 5780428 - DNA, 25 bp, Homo sapien
atgactttcacagacagctgcctga

SEQ ID NO: 5780429 - DNA, 25 bp, Homo sapien
ccaatgaaattgttttccttgaact

SEQ ID NO: 5780430 - DNA, 25 bp, Homo sapien
ataatgcaaaacagcccgccccgcg

SEQ ID NO: 5780431 - DNA, 25 bp, Homo sapien
gataaatcgtttccaacggaattta

SEQ ID NO: 5780432 - DNA, 25 bp, Homo sapien
cggcgggtcccgcggtctccgcgag

SEQ ID NO: 5780433 - DNA, 25 bp, Homo sapien
cccagtccaagaacaagtgaaaaca

SEQ ID NO: 5780434 - DNA, 25 bp, Homo sapien
tagacgttgtttttcagatgacagt

SEQ ID NO: 5780435 - DNA, 25 bp, Homo sapien
tttctagataaatcgtttccaacgg

SEQ ID NO: 5780436 - DNA, 25 bp, Homo sapien
tcctggtgtcacctgggtattaatt

SEQ ID NO: 5780437 - DNA, 25 bp, Homo sapien
ctggagagagggctctgcaagggct

SEQ ID NO: 5780438 - DNA, 25 bp, Homo sapien
aggtgggcagggaggccaacaccat

SEQ ID NO: 5780439 - DNA, 25 bp, Homo sapien
ataataaagatccacaggatatttc

SEQ ID NO: 5780440 - DNA, 25 bp, Homo sapien
ctcttgaacacaccatccacattct

SEQ ID NO: 5780441 - DNA, 25 bp, Homo sapien
tttttttctgtaagaaagtacgcca

SEQ ID NO: 5780442 - DNA, 25 bp, Homo sapien
cctggctttctggacccatctggac

SEQ ID NO: 5780443 - DNA, 25 bp, Homo sapien
gataggcttccactaccaaattatt

SEQ ID NO: 5780444 - DNA, 25 bp, Homo sapien
acagatgggtattctattgaatcaa

SEQ ID NO: 5780445 - DNA, 25 bp, Homo sapien
tgctgagacatcaacaagataataa

SEQ ID NO: 5780446 - DNA, 25 bp, Homo sapien
cacctccttcgacggccaagggccc

SEQ ID NO: 5780447 - DNA, 25 bp, Homo sapien
ggcccgcgggccgagtgtcgctagg

SEQ ID NO: 5780448 - DNA, 25 bp, Homo sapien
aagggctccgcagcctgctccggga

SEQ ID NO: 5780449 - DNA, 25 bp, Homo sapien
taccaatgaaattgttttccttgaa

SEQ ID NO: 5780450 - DNA, 25 bp, Homo sapien
agcaatcttttagcctcttttcgcc

SEQ ID NO: 5780451 - DNA, 25 bp, Homo sapien
tatcagtacagagaccacattaaag

SEQ ID NO: 5780452 - DNA, 25 bp, Homo sapien
ctttaatgtggtctctgtactgata

SEQ ID NO: 5780453 - DNA, 25 bp, Homo sapien
ctagaacaatgctgaggcgggtgag

SEQ ID NO: 5780454 - DNA, 25 bp, Homo sapien
aggagcccttgagctagggaggtgg

SEQ ID NO: 5780455 - DNA, 25 bp, Homo sapien
gagctagaggcagaggagtggtaca

SEQ ID NO: 5780456 - DNA, 25 bp, Homo sapien
ccaggacctgcttgaactaccaggg

SEQ ID NO: 5780457 - DNA, 25 bp, Homo sapien
gccccaaggtgactgagatcagcaa

SEQ ID NO: 5780458 - DNA, 25 bp, Homo sapien
aggactgccgtggggagcacccctg

SEQ ID NO: 5780459 - DNA, 25 bp, Homo sapien
gtgggaacagaccttcttgtaaata

SEQ ID NO: 5780460 - DNA, 25 bp, Homo sapien
gctgattacctcagccatgtggagg

SEQ ID NO: 5780461 - DNA, 25 bp, Homo sapien
cttctcagttcctctgggcctggag

SEQ ID NO: 5780462 - DNA, 25 bp, Homo sapien
tcccctcaccctcaccccatccttc

SEQ ID NO: 5780463 - DNA, 25 bp, Homo sapien
atccacaacccccgtgtgaagctcg

SEQ ID NO: 5780464 - DNA, 25 bp, Homo sapien
ccatcccagtgaccacagtgctggc

SEQ ID NO: 5780465 - DNA, 25 bp, Homo sapien
ccttcccattcctcctccccacatg

SEQ ID NO: 5780466 - DNA, 25 bp, Homo sapien
tgatttgtgggaacagaccttcttg

SEQ ID NO: 5780467 - DNA, 25 bp, Homo sapien
ccggaacagcaggtggcttctcagt

SEQ ID NO: 5780468 - DNA, 25 bp, Homo sapien
aacccccgtgtgaagctcgtctcgt

SEQ ID NO: 5780469 - DNA, 25 bp, Homo sapien
cacgatgacgcatgaaggagattat

SEQ ID NO: 5780470 - DNA, 25 bp, Homo sapien
gctatggccgggatgccacacgctt

SEQ ID NO: 5780471 - DNA, 25 bp, Homo sapien
acagtgctggcgagcaccgatgact

SEQ ID NO: 5780472 - DNA, 25 bp, Homo sapien
gcacacccacgaccatgctgccgcg

SEQ ID NO: 5780473 - DNA, 25 bp, Homo sapien
gctggtgttccggaaatcctccagc

SEQ ID NO: 5780474 - DNA, 25 bp, Homo sapien
gcagtcagcctcgctctcaacgtga

SEQ ID NO: 5780475 - DNA, 25 bp, Homo sapien
ggtgaaaatctggttttaaaatgta

SEQ ID NO: 5780476 - DNA, 25 bp, Homo sapien
tcccctcgcctctgccaggccccgc

SEQ ID NO: 5780477 - DNA, 25 bp, Homo sapien
cctctgggcctggagtgacacagga

SEQ ID NO: 5780478 - DNA, 25 bp, Homo sapien
gccgtggggagcacccctgctgccc

SEQ ID NO: 5780479 - DNA, 25 bp, Homo sapien
cagctcggaaacagacctcctcaac

SEQ ID NO: 5780480 - DNA, 25 bp, Homo sapien
gctgaggcgggtgaggtgaggagca

SEQ ID NO: 5780481 - DNA, 25 bp, Homo sapien
agaccttcttgtaaataaccactat

SEQ ID NO: 5780482 - DNA, 25 bp, Homo sapien
tgccccctccttgcccccaaggatg

SEQ ID NO: 5780483 - DNA, 25 bp, Homo sapien
cggggaatgaccacccagagggatg

SEQ ID NO: 5780484 - DNA, 25 bp, Homo sapien
gctgcccccctctcactgaccaggg

SEQ ID NO: 5780485 - DNA, 25 bp, Homo sapien
gcacccctgctgcccccctctcact

SEQ ID NO: 5780486 - DNA, 25 bp, Homo sapien
tgcgccgctatggccgggatgccac

SEQ ID NO: 5780487 - DNA, 25 bp, Homo sapien
cacaagagggggagcagatttacca

SEQ ID NO: 5780488 - DNA, 25 bp, Homo sapien
gagcacccctgctgcccccctctca

SEQ ID NO: 5780489 - DNA, 25 bp, Homo sapien
cggccaagagcctggagaaagggag

SEQ ID NO: 5780490 - DNA, 25 bp, Homo sapien
agtgcctactggcaccacatcactg

SEQ ID NO: 5780491 - DNA, 25 bp, Homo sapien
actttagggtcctgatttgtgggaa

SEQ ID NO: 5780492 - DNA, 25 bp, Homo sapien
agcctggagaaagggagcaagctgc

SEQ ID NO: 5780493 - DNA, 25 bp, Homo sapien
tcagcaacgtcaagtgtgttacgcg

SEQ ID NO: 5780494 - DNA, 25 bp, Homo sapien
aatatatatggcttatgacatactc

SEQ ID NO: 5780495 - DNA, 25 bp, Homo sapien
acaggctccttcctgctttgtaggc

SEQ ID NO: 5780496 - DNA, 25 bp, Homo sapien
gctcagctaagtggcacgatgacgc

SEQ ID NO: 5780497 - DNA, 25 bp, Homo sapien
atctggttttaaaatgtaacttctg

SEQ ID NO: 5780498 - DNA, 25 bp, Homo sapien
aaggagattatgttgtgctctttat

SEQ ID NO: 5780499 - DNA, 25 bp, Homo sapien
cagcaggtggcttctcagttcctct

SEQ ID NO: 5780500 - DNA, 25 bp, Homo sapien
ttccccaccaatacacacaaatttt

SEQ ID NO: 5780501 - DNA, 25 bp, Homo sapien
tgggacatccacaacccccgtgtga

SEQ ID NO: 5780502 - DNA, 25 bp, Homo sapien
agaacatctacctctgggacatcca

SEQ ID NO: 5780503 - DNA, 25 bp, Homo sapien
ggcgcggggcgaaggagctgctaga

SEQ ID NO: 5780504 - DNA, 25 bp, Homo sapien
gccggagacccaggcacctgggcat

SEQ ID NO: 5780505 - DNA, 25 bp, Homo sapien
cttcacctgcgactcagagctagag

SEQ ID NO: 5780506 - DNA, 25 bp, Homo sapien
gagatcccctcaccctcaccccatc

SEQ ID NO: 5780507 - DNA, 25 bp, Homo sapien
ggctccccaaggagaccaagcggca

SEQ ID NO: 5780508 - DNA, 25 bp, Homo sapien
ccggggctgccccaaggtgactgag

SEQ ID NO: 5780509 - DNA, 25 bp, Homo sapien
gggagcaagctgccccctccttgcc

SEQ ID NO: 5780510 - DNA, 25 bp, Homo sapien
tgaaaatctggttttaaaatgtaac

SEQ ID NO: 5780511 - DNA, 25 bp, Homo sapien
aacagcaggtggcttctcagttcct

SEQ ID NO: 5780512 - DNA, 25 bp, Homo sapien
tacctcagccatgtggaggaaggct

SEQ ID NO: 5780513 - DNA, 25 bp, Homo sapien
ggaaacagacctcctcaacagattc

SEQ ID NO: 5780514 - DNA, 25 bp, Homo sapien
gggatctaccggaggtgctggctgg

SEQ ID NO: 5780515 - DNA, 25 bp, Homo sapien
ggggtcccgcctcaacgacatcagt

SEQ ID NO: 5780516 - DNA, 25 bp, Homo sapien
cccaggcacctgggcatccttcccc

SEQ ID NO: 5780517 - DNA, 25 bp, Homo sapien
ggggagcagatttaccagcgcgtcc

SEQ ID NO: 5780518 - DNA, 25 bp, Homo sapien
ctgccgtggggagcacccctgctgc

SEQ ID NO: 5780519 - DNA, 25 bp, Homo sapien
aagccaaagcccagccagggggaca

SEQ ID NO: 5780520 - DNA, 25 bp, Homo sapien
atggggcagcccaggccagctcgga

SEQ ID NO: 5780521 - DNA, 25 bp, Homo sapien
gagtgacacaggaaggatctgcact

SEQ ID NO: 5780522 - DNA, 25 bp, Homo sapien
gtgcctccggggctgccccaaggtg

SEQ ID NO: 5780523 - DNA, 25 bp, Homo sapien
ctggcgagcaccgatgactgctggg

SEQ ID NO: 5780524 - DNA, 25 bp, Homo sapien
gattcatcctgctaaagccaaagcc

SEQ ID NO: 5780525 - DNA, 25 bp, Homo sapien
cgagaacatctacctctgggacatc

SEQ ID NO: 5780526 - DNA, 25 bp, Homo sapien
gcaggtggcttctcagttcctctgg

SEQ ID NO: 5780527 - DNA, 25 bp, Homo sapien
tggctcagctaagtggcacgatgac

SEQ ID NO: 5780528 - DNA, 25 bp, Homo sapien
ccccatcccagtgaccacagtgctg

SEQ ID NO: 5780529 - DNA, 25 bp, Homo sapien
aagtcggtgtgcctccggggctgcc

SEQ ID NO: 5780530 - DNA, 25 bp, Homo sapien
ccctgctgcaatgcaattaaagcaa

SEQ ID NO: 5780531 - DNA, 25 bp, Homo sapien
attttctagtgctggtatttgttga

SEQ ID NO: 5780532 - DNA, 25 bp, Homo sapien
tgtggagtgtctggggtcccgcctc

SEQ ID NO: 5780533 - DNA, 25 bp, Homo sapien
ctaccgtgggactatatactgttaa

SEQ ID NO: 5780534 - DNA, 25 bp, Homo sapien
tcctgctttgtaggctgggaagatg

SEQ ID NO: 5780535 - DNA, 25 bp, Homo sapien
ctgagatcagcaacgtcaagtgtgt

SEQ ID NO: 5780536 - DNA, 25 bp, Homo sapien
acgacatcagtctgggagaacctga

SEQ ID NO: 5780537 - DNA, 25 bp, Homo sapien
tgggactatatactgttaatgattt

SEQ ID NO: 5780538 - DNA, 25 bp, Homo sapien
ggtcctgctggaaatggagaagaac

SEQ ID NO: 5780539 - DNA, 25 bp, Homo sapien
agaagtcggtgtgcctccggggctg

SEQ ID NO: 5780540 - DNA, 25 bp, Homo sapien
aggtgattggaggagccggagaccc

SEQ ID NO: 5780541 - DNA, 25 bp, Homo sapien
atggcgagtgcaagctgcagatcac

SEQ ID NO: 5780542 - DNA, 25 bp, Homo sapien
cacagtgccaccctggccatcgcag

SEQ ID NO: 5780543 - DNA, 25 bp, Homo sapien
gctctttattgccaaaaataaacac

SEQ ID NO: 5780544 - DNA, 25 bp, Homo sapien
cagcaaggggccccagcggctggag

SEQ ID NO: 5780545 - DNA, 25 bp, Homo sapien
tcctgctgccaggacctgcttgaac

SEQ ID NO: 5780546 - DNA, 25 bp, Homo sapien
cctctgccaggccccgcgcccctaa

SEQ ID NO: 5780547 - DNA, 25 bp, Homo sapien
acatggtgctgaggctccctgctgc

SEQ ID NO: 5780548 - DNA, 25 bp, Homo sapien
agcggcaggcggtggccatcatatt

SEQ ID NO: 5780549 - DNA, 25 bp, Homo sapien
aagctcgtctcgtggcccctctgct

SEQ ID NO: 5780550 - DNA, 25 bp, Homo sapien
ctgctgcccccctctcactgaccag

SEQ ID NO: 5780551 - DNA, 25 bp, Homo sapien
catcctccatggcacagccctcctg

SEQ ID NO: 5780552 - DNA, 25 bp, Homo sapien
ccaaaggagcccttgagctagggag

SEQ ID NO: 5780553 - DNA, 25 bp, Homo sapien
agcagatttaccagcgcgtccacag

SEQ ID NO: 5780554 - DNA, 25 bp, Homo sapien
aggagcagcccctcgcggcagcccc

SEQ ID NO: 5780555 - DNA, 25 bp, Homo sapien
atcaatgagatcccctcaccctcac

SEQ ID NO: 5780556 - DNA, 25 bp, Homo sapien
aggtgctggctggtgttccggaaat

SEQ ID NO: 5780557 - DNA, 25 bp, Homo sapien
acaacccccgtgtgaagctcgtctc

SEQ ID NO: 5780558 - DNA, 25 bp, Homo sapien
tggcgaccaatttcagtgacatcgt

SEQ ID NO: 5780559 - DNA, 25 bp, Homo sapien
agccatgtggaggaaggctggagct

SEQ ID NO: 5780560 - DNA, 25 bp, Homo sapien
acagaccttcttgtaaataaccact

SEQ ID NO: 5780561 - DNA, 25 bp, Homo sapien
cggcgccgccgccgccctgccgccc

SEQ ID NO: 5780562 - DNA, 25 bp, Homo sapien
ttcttgtaaataaccactatttgag

SEQ ID NO: 5780563 - DNA, 25 bp, Homo sapien
tggtgttccggaaatcctccagcaa

SEQ ID NO: 5780564 - DNA, 25 bp, Homo sapien
cagatcgcttcaatgtcttcctgct

SEQ ID NO: 5780565 - DNA, 25 bp, Homo sapien
cagtgaggccaagaccccatcccag

SEQ ID NO: 5780566 - DNA, 25 bp, Homo sapien
agtcagcctcgctctcaacgtgacc

SEQ ID NO: 5780567 - DNA, 25 bp, Homo sapien
caggaataggccaggagggaaggcc

SEQ ID NO: 5780568 - DNA, 25 bp, Homo sapien
ccaatttcagtgacatcgtcaagca

SEQ ID NO: 5780569 - DNA, 25 bp, Homo sapien
tgattacctcagccatgtggaggaa

SEQ ID NO: 5780570 - DNA, 25 bp, Homo sapien
gcaaagggctggccacaccacctga

SEQ ID NO: 5780571 - DNA, 25 bp, Homo sapien
acgtcaagtgtgttacgcggctccc

SEQ ID NO: 5780572 - DNA, 25 bp, Homo sapien
gccttgcagttggagttttaagcag

SEQ ID NO: 5780573 - DNA, 25 bp, Homo sapien
gtatcaatgagatcccctcaccctc

SEQ ID NO: 5780574 - DNA, 25 bp, Homo sapien
aagggcacggaacattactcgtatc

SEQ ID NO: 5780575 - DNA, 25 bp, Homo sapien
ccacatcactggttcccagaacatc

SEQ ID NO: 5780576 - DNA, 25 bp, Homo sapien
gatttaccagcgcgtccacagtgcc

SEQ ID NO: 5780577 - DNA, 25 bp, Homo sapien
gcctccggggctgccccaaggtgac

SEQ ID NO: 5780578 - DNA, 25 bp, Homo sapien
gcagcacaagcgggtcctgctggaa

SEQ ID NO: 5780579 - DNA, 25 bp, Homo sapien
gagaaagggagcaagctgccccctc

SEQ ID NO: 5780580 - DNA, 25 bp, Homo sapien
cggcaggcggtggccatcatattca

SEQ ID NO: 5780581 - DNA, 25 bp, Homo sapien
aaggagaccaagcggcaggcggtgg

SEQ ID NO: 5780582 - DNA, 25 bp, Homo sapien
cctcctggccccaggggtgcagtgt

SEQ ID NO: 5780583 - DNA, 25 bp, Homo sapien
agggggacagcagtgaggccaagac

SEQ ID NO: 5780584 - DNA, 25 bp, Homo sapien
tcggaaacagacctcctcaacagat

SEQ ID NO: 5780585 - DNA, 25 bp, Homo sapien
ctgctgccctgccccaacctggacg

SEQ ID NO: 5780586 - DNA, 25 bp, Homo sapien
gtcaagtgtgttacgcggctcccca

SEQ ID NO: 5780587 - DNA, 25 bp, Homo sapien
ccctcaccccatccttccccaccaa

SEQ ID NO: 5780588 - DNA, 25 bp, Homo sapien
catcatattcactgatgactcggca

SEQ ID NO: 5780589 - DNA, 25 bp, Homo sapien
tttcccaaacagcccaagggccgga

SEQ ID NO: 5780590 - DNA, 25 bp, Homo sapien
tggagcttgttcctgccccaggaat

SEQ ID NO: 5780591 - DNA, 25 bp, Homo sapien
ctccctgctgcaatgcaattaaagc

SEQ ID NO: 5780592 - DNA, 25 bp, Homo sapien
tgttgtgctctttattgccaaaaat

SEQ ID NO: 5780593 - DNA, 25 bp, Homo sapien
ggctgccccaaggtgactgagatca

SEQ ID NO: 5780594 - DNA, 25 bp, Homo sapien
ctggttcccagaacatcgccgaagc

SEQ ID NO: 5780595 - DNA, 25 bp, Homo sapien
tgctgggggctgcctgctgcggggc

SEQ ID NO: 5780596 - DNA, 25 bp, Homo sapien
gaaggagctgctagaacaatgctga

SEQ ID NO: 5780597 - DNA, 25 bp, Homo sapien
tcccaaaggagcccttgagctaggg

SEQ ID NO: 5780598 - DNA, 25 bp, Homo sapien
gccacggtcaaggctgtttttgagt

SEQ ID NO: 5780599 - DNA, 25 bp, Homo sapien
gaacagaccttcttgtaaataacca

SEQ ID NO: 5780600 - DNA, 25 bp, Homo sapien
cacgagaacatctacctctgggaca

SEQ ID NO: 5780601 - DNA, 25 bp, Homo sapien
tggctggtgttccggaaatcctcca

SEQ ID NO: 5780602 - DNA, 25 bp, Homo sapien
ccaaggatgaggctggactgaggca

SEQ ID NO: 5780603 - DNA, 25 bp, Homo sapien
acagcagtgaggccaagaccccatc

SEQ ID NO: 5780604 - DNA, 25 bp, Homo sapien
agtgtgttacgcggctccccaagga

SEQ ID NO: 5780605 - DNA, 25 bp, Homo sapien
ctcagagctagaggcagaggagtgg

SEQ ID NO: 5780606 - DNA, 25 bp, Homo sapien
atcagagcttgaggctggcactctg

SEQ ID NO: 5780607 - DNA, 25 bp, Homo sapien
taggccaggagggaaggccgcagca

SEQ ID NO: 5780608 - DNA, 25 bp, Homo sapien
ctcaacgacatcagtctgggagaac

SEQ ID NO: 5780609 - DNA, 25 bp, Homo sapien
gaagtatccagatgagaagtcggtg

SEQ ID NO: 5780610 - DNA, 25 bp, Homo sapien
ccacatggtgctgaggctccctgct

SEQ ID NO: 5780611 - DNA, 25 bp, Homo sapien
aagcactctgaaaccaagaccttcc

SEQ ID NO: 5780612 - DNA, 25 bp, Homo sapien
gaccttcccattcctcctccccaca

SEQ ID NO: 5780613 - DNA, 25 bp, Homo sapien
cccaccaatacacacaaatttttta

SEQ ID NO: 5780614 - DNA, 25 bp, Homo sapien
gacctgcttgaactaccagggccac

SEQ ID NO: 5780615 - DNA, 25 bp, Homo sapien
gcgaccaatttcagtgacatcgtca

SEQ ID NO: 5780616 - DNA, 25 bp, Homo sapien
tggggagcacccctgctgcccccct

SEQ ID NO: 5780617 - DNA, 25 bp, Homo sapien
gagcaggcgctcctggcccgggcct

SEQ ID NO: 5780618 - DNA, 25 bp, Homo sapien
ccggaggtgctggctggtgttccgg

SEQ ID NO: 5780619 - DNA, 25 bp, Homo sapien
acgaccatgctgccgcgcagtgcct

SEQ ID NO: 5780620 - DNA, 25 bp, Homo sapien
ttgccctgtttggccaccctctggc

SEQ ID NO: 5780621 - DNA, 25 bp, Homo sapien
cctcaggtgaaaatctggttttaaa

SEQ ID NO: 5780622 - DNA, 25 bp, Homo sapien
gaaggactctataccttccagacac

SEQ ID NO: 5780623 - DNA, 25 bp, Homo sapien
tcctggcccgggcctcggcgcccag

SEQ ID NO: 5780624 - DNA, 25 bp, Homo sapien
gcggcccctcccaaaggagcccttg

SEQ ID NO: 5780625 - DNA, 25 bp, Homo sapien
ggaaggatctgcacttcctctgtgc

SEQ ID NO: 5780626 - DNA, 25 bp, Homo sapien
acggaacattactcgtatccctgca

SEQ ID NO: 5780627 - DNA, 25 bp, Homo sapien
tgggcatccttcccctcgcctctgc

SEQ ID NO: 5780628 - DNA, 25 bp, Homo sapien
gggggataatcagagcttgaggctg

SEQ ID NO: 5780629 - DNA, 25 bp, Homo sapien
ggggcagcccaggccagctcggaaa

SEQ ID NO: 5780630 - DNA, 25 bp, Homo sapien
acgtaccttcacctgcgactcagag

SEQ ID NO: 5780631 - DNA, 25 bp, Homo sapien
gcccaggccagctcggaaacagacc

SEQ ID NO: 5780632 - DNA, 25 bp, Homo sapien
gagggaggcagagctggctggctca

SEQ ID NO: 5780633 - DNA, 25 bp, Homo sapien
gacctcctggccccaggggtgcagt

SEQ ID NO: 5780634 - DNA, 25 bp, Homo sapien
gtgggaaaaccatggcgaccaattt

SEQ ID NO: 5780635 - DNA, 25 bp, Homo sapien
tcccatgaccaggccacggtcaagg

SEQ ID NO: 5780636 - DNA, 25 bp, Homo sapien
ggtggacaatgcccaagcagaggga

SEQ ID NO: 5780637 - DNA, 25 bp, Homo sapien
gatgactgctgggggctgcctgctg

SEQ ID NO: 5780638 - DNA, 25 bp, Homo sapien
tacacacaaattttttaatcccatg

SEQ ID NO: 5780639 - DNA, 25 bp, Homo sapien
agatcacccacgagaacatctacct

SEQ ID NO: 5780640 - DNA, 25 bp, Homo sapien
accagggccacaggagggggataat

SEQ ID NO: 5780641 - DNA, 25 bp, Homo sapien
gagctagcctgtagaggggaactgg

SEQ ID NO: 5780642 - DNA, 25 bp, Homo sapien
acaccacctgagcatgtgtgagggg

SEQ ID NO: 5780643 - DNA, 25 bp, Homo sapien
taatgattttaatatatatggctta

SEQ ID NO: 5780644 - DNA, 25 bp, Homo sapien
gcacaggctccttcctgctttgtag

SEQ ID NO: 5780645 - DNA, 25 bp, Homo sapien
acatctggttgacgcctcaggtgaa

SEQ ID NO: 5780646 - DNA, 25 bp, Homo sapien
caaagcccagccagggggacagcag

SEQ ID NO: 5780647 - DNA, 25 bp, Homo sapien
ccaagaccccatcccagtgaccaca

SEQ ID NO: 5780648 - DNA, 25 bp, Homo sapien
acgtgaagatgaagagcaggaagct

SEQ ID NO: 5780649 - DNA, 25 bp, Homo sapien
ccctccttgcccccaaggatgaggc

SEQ ID NO: 5780650 - DNA, 25 bp, Homo sapien
tcacctgcgactcagagctagaggc

SEQ ID NO: 5780651 - DNA, 25 bp, Homo sapien
aggggtgctgattacctcagccatg

SEQ ID NO: 5780652 - DNA, 25 bp, Homo sapien
atgctggggaaggactctatacctt

SEQ ID NO: 5780653 - DNA, 25 bp, Homo sapien
gactctataccttccagacacaaga

SEQ ID NO: 5780654 - DNA, 25 bp, Homo sapien
tggggaaggactctataccttccag

SEQ ID NO: 5780655 - DNA, 25 bp, Homo sapien
atgaccacccagagggatgagctag

SEQ ID NO: 5780656 - DNA, 25 bp, Homo sapien
gctggagaagtatccagatgagaag

SEQ ID NO: 5780657 - DNA, 25 bp, Homo sapien
cagagctagaggcagaggagtggta

SEQ ID NO: 5780658 - DNA, 25 bp, Homo sapien
cgtgggactatatactgttaatgat

SEQ ID NO: 5780659 - DNA, 25 bp, Homo sapien
ccaggggtgcagtgtgaacagacag

SEQ ID NO: 5780660 - DNA, 25 bp, Homo sapien
ggcagcccaggccagctcggaaaca

SEQ ID NO: 5780661 - DNA, 25 bp, Homo sapien
gccagccttgcagttggagttttaa

SEQ ID NO: 5780662 - DNA, 25 bp, Homo sapien
taggctgggaagatgcccctggggt

SEQ ID NO: 5780663 - DNA, 25 bp, Homo sapien
tggggtaggggtgctgattacctca

SEQ ID NO: 5780664 - DNA, 25 bp, Homo sapien
atgagcctgctccgcggcgccgctg

SEQ ID NO: 5780665 - DNA, 25 bp, Homo sapien
cgggcctcggcgcccagcaggcgcg

SEQ ID NO: 5780666 - DNA, 25 bp, Homo sapien
ctggctgcagtgtaccgtggacagc

SEQ ID NO: 5780667 - DNA, 25 bp, Homo sapien
ctttaccttcgaggctggccggatg

SEQ ID NO: 5780668 - DNA, 25 bp, Homo sapien
gccgggatgccacacgctttacctt

SEQ ID NO: 5780669 - DNA, 25 bp, Homo sapien
cagatttaccagcgcgtccacagtg

SEQ ID NO: 5780670 - DNA, 25 bp, Homo sapien
cctggagaaagggagcaagctgccc

SEQ ID NO: 5780671 - DNA, 25 bp, Homo sapien
ggactatatactgttaatgatttta

SEQ ID NO: 5780672 - DNA, 25 bp, Homo sapien
ggtggccatcatattcactgatgac

SEQ ID NO: 5780673 - DNA, 25 bp, Homo sapien
gctcgtctcgtggcccctctgctca

SEQ ID NO: 5780674 - DNA, 25 bp, Homo sapien
aggacctgcttgaactaccagggcc

SEQ ID NO: 5780675 - DNA, 25 bp, Homo sapien
agtatccagatgagaagtcggtgtg

SEQ ID NO: 5780676 - DNA, 25 bp, Homo sapien
aagaccttcccattcctcctcccca

SEQ ID NO: 5780677 - DNA, 25 bp, Homo sapien
caccccatccttccccaccaataca

SEQ ID NO: 5780678 - DNA, 25 bp, Homo sapien
tgaaggagattatgttgtgctcttt

SEQ ID NO: 5780679 - DNA, 25 bp, Homo sapien
cctgatttgtgggaacagaccttct

SEQ ID NO: 5780680 - DNA, 25 bp, Homo sapien
atttgagttgtggcaggaggatgat

SEQ ID NO: 5780681 - DNA, 25 bp, Homo sapien
cctgctgcggggctggctgcagtgt

SEQ ID NO: 5780682 - DNA, 25 bp, Homo sapien
gggcacggaacattactcgtatccc

SEQ ID NO: 5780683 - DNA, 25 bp, Homo sapien
cgggatgccacacgctttaccttcg

SEQ ID NO: 5780684 - DNA, 25 bp, Homo sapien
gtcctgatttgtgggaacagacctt

SEQ ID NO: 5780685 - DNA, 25 bp, Homo sapien
agagggatgagctagcctgtagagg

SEQ ID NO: 5780686 - DNA, 25 bp, Homo sapien
aggctgctgaacaagggcacggaac

SEQ ID NO: 5780687 - DNA, 25 bp, Homo sapien
cacacgctttaccttcgaggctggc

SEQ ID NO: 5780688 - DNA, 25 bp, Homo sapien
ctggcccgggcctcggcgcccagca

SEQ ID NO: 5780689 - DNA, 25 bp, Homo sapien
ccctgccgcccccgccagccgcgcc

SEQ ID NO: 5780690 - DNA, 25 bp, Homo sapien
gattggaggagccggagacccaggc

SEQ ID NO: 5780691 - DNA, 25 bp, Homo sapien
aacagattcatcctgctaaagccaa

SEQ ID NO: 5780692 - DNA, 25 bp, Homo sapien
atgactcggcacgtaccttcacctg

SEQ ID NO: 5780693 - DNA, 25 bp, Homo sapien
tggccgggatgccacacgctttacc

SEQ ID NO: 5780694 - DNA, 25 bp, Homo sapien
ctgccccaacctggacgtgtatggc

SEQ ID NO: 5780695 - DNA, 25 bp, Homo sapien
agcagtgaggccaagaccccatccc

SEQ ID NO: 5780696 - DNA, 25 bp, Homo sapien
tccagatgagaagtcggtgtgcctc

SEQ ID NO: 5780697 - DNA, 25 bp, Homo sapien
caccgatgactgctgggggctgcct

SEQ ID NO: 5780698 - DNA, 25 bp, Homo sapien
ggcactctgactgctggcttttccc

SEQ ID NO: 5780699 - DNA, 25 bp, Homo sapien
cacagccctcctgctgccaggacct

SEQ ID NO: 5780700 - DNA, 25 bp, Homo sapien
caagcggcaggcggtggccatcata

SEQ ID NO: 5780701 - DNA, 25 bp, Homo sapien
gtgctggctggtgttccggaaatcc

SEQ ID NO: 5780702 - DNA, 25 bp, Homo sapien
attgattttctagtgctggtatttg

SEQ ID NO: 5780703 - DNA, 25 bp, Homo sapien
gcttatgacatactctgtatcaatg

SEQ ID NO: 5780704 - DNA, 25 bp, Homo sapien
aagctgccccctccttgcccccaag

SEQ ID NO: 5780705 - DNA, 25 bp, Homo sapien
tggcttttcccaaacagcccaaggg

SEQ ID NO: 5780706 - DNA, 25 bp, Homo sapien
cggtgtgcctccggggctgccccaa

SEQ ID NO: 5780707 - DNA, 25 bp, Homo sapien
acagcccaagggccggaacagcagg

SEQ ID NO: 5780708 - DNA, 25 bp, Homo sapien
gacgcatgaaggagattatgttgtg

SEQ ID NO: 5780709 - DNA, 25 bp, Homo sapien
aacgtgaggctgctgaacaagggca

SEQ ID NO: 5780710 - DNA, 25 bp, Homo sapien
cctctgggacatccacaacccccgt

SEQ ID NO: 5780711 - DNA, 25 bp, Homo sapien
tactggcaccacatcactggttccc

SEQ ID NO: 5780712 - DNA, 25 bp, Homo sapien
ctataccttccagacacaagagggg

SEQ ID NO: 5780713 - DNA, 25 bp, Homo sapien
tcactgatgactcggcacgtacctt

SEQ ID NO: 5780714 - DNA, 25 bp, Homo sapien
gggataatcagagcttgaggctggc

SEQ ID NO: 5780715 - DNA, 25 bp, Homo sapien
ctggccggatgtgtgatgctgggga

SEQ ID NO: 5780716 - DNA, 25 bp, Homo sapien
atactttagggtcctgatttgtggg

SEQ ID NO: 5780717 - DNA, 25 bp, Homo sapien
agcctcagggggctgtcggccaaga

SEQ ID NO: 5780718 - DNA, 25 bp, Homo sapien
caaggtgactgagatcagcaacgtc

SEQ ID NO: 5780719 - DNA, 25 bp, Homo sapien
tctttctattcacgtcaaacttttg

SEQ ID NO: 5780720 - DNA, 25 bp, Homo sapien
gactgccgtggggagcacccctgct

SEQ ID NO: 5780721 - DNA, 25 bp, Homo sapien
actgaccaggggtggacaatgccca

SEQ ID NO: 5780722 - DNA, 25 bp, Homo sapien
gccaagagcctggagaaagggagca

SEQ ID NO: 5780723 - DNA, 25 bp, Homo sapien
gcacgcggcccctcccaaaggagcc

SEQ ID NO: 5780724 - DNA, 25 bp, Homo sapien
tcagggggctgtcggccaagagcct

SEQ ID NO: 5780725 - DNA, 25 bp, Homo sapien
gacacaagagggggagcagatttac

SEQ ID NO: 5780726 - DNA, 25 bp, Homo sapien
cccaaggtgactgagatcagcaacg

SEQ ID NO: 5780727 - DNA, 25 bp, Homo sapien
acgcggctccccaaggagaccaagc

SEQ ID NO: 5780728 - DNA, 25 bp, Homo sapien
atgattttaatatatatggcttatg

SEQ ID NO: 5780729 - DNA, 25 bp, Homo sapien
ggctgggaagatgcccctggggtag

SEQ ID NO: 5780730 - DNA, 25 bp, Homo sapien
gtggaggaaggctggagcttgttcc

SEQ ID NO: 5780731 - DNA, 25 bp, Homo sapien
gcgccgctgagcaggcgctcctggc

SEQ ID NO: 5780732 - DNA, 25 bp, Homo sapien
agagggggagcagatttaccagcgc

SEQ ID NO: 5780733 - DNA, 25 bp, Homo sapien
cggtcaaggctgtttttgagtatga

SEQ ID NO: 5780734 - DNA, 25 bp, Homo sapien
ccagccgcgccgtgacgcgggcatg

SEQ ID NO: 5780735 - DNA, 25 bp, Homo sapien
tgaccaggggtggacaatgcccaag

SEQ ID NO: 5780736 - DNA, 25 bp, Homo sapien
gaacatcgccgaagcctccagctat

SEQ ID NO: 5780737 - DNA, 25 bp, Homo sapien
aactaccagggccacaggaggggga

SEQ ID NO: 5780738 - DNA, 25 bp, Homo sapien
tctggaacaggtgattggaggagcc

SEQ ID NO: 5780739 - DNA, 25 bp, Homo sapien
cttcctgctgccctgccccaacctg

SEQ ID NO: 5780740 - DNA, 25 bp, Homo sapien
gggaaggactctataccttccagac

SEQ ID NO: 5780741 - DNA, 25 bp, Homo sapien
tgaagctcgtctcgtggcccctctg

SEQ ID NO: 5780742 - DNA, 25 bp, Homo sapien
tgaggctgctgaacaagggcacgga

SEQ ID NO: 5780743 - DNA, 25 bp, Homo sapien
acccagagggatgagctagcctgta

SEQ ID NO: 5780744 - DNA, 25 bp, Homo sapien
cccctcccaaaggagcccttgagct

SEQ ID NO: 5780745 - DNA, 25 bp, Homo sapien
aagacactatctgtggagtgtctgg

SEQ ID NO: 5780746 - DNA, 25 bp, Homo sapien
ggccccagcggctggagaagtatcc

SEQ ID NO: 5780747 - DNA, 25 bp, Homo sapien
gagggaaggccgcagcaggactgcc

SEQ ID NO: 5780748 - DNA, 25 bp, Homo sapien
ggacgtgtatggcgagtgcaagctg

SEQ ID NO: 5780749 - DNA, 25 bp, Homo sapien
tgagtatgagtgcagtcgtgtccat

SEQ ID NO: 5780750 - DNA, 25 bp, Homo sapien
tgccaggacctgcttgaactaccag

SEQ ID NO: 5780751 - DNA, 25 bp, Homo sapien
cacgctttaccttcgaggctggccg

SEQ ID NO: 5780752 - DNA, 25 bp, Homo sapien
gctggtatttgttgactaccatgca

SEQ ID NO: 5780753 - DNA, 25 bp, Homo sapien
tctgggacatccacaacccccgtgt

SEQ ID NO: 5780754 - DNA, 25 bp, Homo sapien
tccagacacaagagggggagcagat

SEQ ID NO: 5780755 - DNA, 25 bp, Homo sapien
cagccttgcagttggagttttaagc

SEQ ID NO: 5780756 - DNA, 25 bp, Homo sapien
ctccggggctgccccaaggtgactg

SEQ ID NO: 5780757 - DNA, 25 bp, Homo sapien
ggaacattactcgtatccctgcaca

SEQ ID NO: 5780758 - DNA, 25 bp, Homo sapien
ctccttgcccccaaggatgaggctg

SEQ ID NO: 5780759 - DNA, 25 bp, Homo sapien
tggcttatgacatactctgtatcaa

SEQ ID NO: 5780760 - DNA, 25 bp, Homo sapien
taccagcgcgtccacagtgccaccc

SEQ ID NO: 5780761 - DNA, 25 bp, Homo sapien
gcacgtaccttcacctgcgactcag

SEQ ID NO: 5780762 - DNA, 25 bp, Homo sapien
gtgattggaggagccggagacccag

SEQ ID NO: 5780763 - DNA, 25 bp, Homo sapien
agccagggggacagcagtgaggcca

SEQ ID NO: 5780764 - DNA, 25 bp, Homo sapien
ttatgacatactctgtatcaatgag

SEQ ID NO: 5780765 - DNA, 25 bp, Homo sapien
tgtaacttctgcacaggctccttcc

SEQ ID NO: 5780766 - DNA, 25 bp, Homo sapien
tcagccatgtggaggaaggctggag

SEQ ID NO: 5780767 - DNA, 25 bp, Homo sapien
gagccggagacccaggcacctgggc

SEQ ID NO: 5780768 - DNA, 25 bp, Homo sapien
ggccagccaaaagcactctgaaacc

SEQ ID NO: 5780769 - DNA, 25 bp, Homo sapien
gtatttgttgactaccatgcagaag

SEQ ID NO: 5780770 - DNA, 25 bp, Homo sapien
gttttaagcagaggtgacatctggt

SEQ ID NO: 5780771 - DNA, 25 bp, Homo sapien
tcagtgacatcgtcaagcaaggcta

SEQ ID NO: 5780772 - DNA, 25 bp, Homo sapien
tcctggccccaggggtgcagtgtga

SEQ ID NO: 5780773 - DNA, 25 bp, Homo sapien
tgtaggctgggaagatgcccctggg

SEQ ID NO: 5780774 - DNA, 25 bp, Homo sapien
gccctgtttggccaccctctggcca

SEQ ID NO: 5780775 - DNA, 25 bp, Homo sapien
tgaaaccaagaccttcccattcctc

SEQ ID NO: 5780776 - DNA, 25 bp, Homo sapien
cccaacctggacgtgtatggcgagt

SEQ ID NO: 5780777 - DNA, 25 bp, Homo sapien
ttgcccccaaggatgaggctggact

SEQ ID NO: 5780778 - DNA, 25 bp, Homo sapien
gcgctcctggcccgggcctcggcgc

SEQ ID NO: 5780779 - DNA, 25 bp, Homo sapien
ggctccctgctgcaatgcaattaaa

SEQ ID NO: 5780780 - DNA, 25 bp, Homo sapien
ccaggagggaaggccgcagcaggac

SEQ ID NO: 5780781 - DNA, 25 bp, Homo sapien
gctggcttttcccaaacagcccaag

SEQ ID NO: 5780782 - DNA, 25 bp, Homo sapien
actgctgggggctgcctgctgcggg

SEQ ID NO: 5780783 - DNA, 25 bp, Homo sapien
accgtgggactatatactgttaatg

SEQ ID NO: 5780784 - DNA, 25 bp, Homo sapien
aagcagagggagcccccttgccctg

SEQ ID NO: 5780785 - DNA, 25 bp, Homo sapien
ttggaggagccggagacccaggcac

SEQ ID NO: 5780786 - DNA, 25 bp, Homo sapien
ctccagcaaggggccccagcggctg

SEQ ID NO: 5780787 - DNA, 25 bp, Homo sapien
ctgtcggccaagagcctggagaaag

SEQ ID NO: 5780788 - DNA, 25 bp, Homo sapien
acatcgccgaagcctccagctatgc

SEQ ID NO: 5780789 - DNA, 25 bp, Homo sapien
gtgacccggggaatgaccacccaga

SEQ ID NO: 5780790 - DNA, 25 bp, Homo sapien
gggtgcagtgtgaacagacagatcg

SEQ ID NO: 5780791 - DNA, 25 bp, Homo sapien
ctggccatcgcagagcagcacaagc

SEQ ID NO: 5780792 - DNA, 25 bp, Homo sapien
tgtgaagctcgtctcgtggcccctc

SEQ ID NO: 5780793 - DNA, 25 bp, Homo sapien
caatgtcttcctgctgccctgcccc

SEQ ID NO: 5780794 - DNA, 25 bp, Homo sapien
gaggccaagaccccatcccagtgac

SEQ ID NO: 5780795 - DNA, 25 bp, Homo sapien
taatactttagggtcctgatttgtg

SEQ ID NO: 5780796 - DNA, 25 bp, Homo sapien
ccacgaccatgctgccgcgcagtgc

SEQ ID NO: 5780797 - DNA, 25 bp, Homo sapien
gatgagaagtcggtgtgcctccggg

SEQ ID NO: 5780798 - DNA, 25 bp, Homo sapien
agcaattgattttctagtgctggta

SEQ ID NO: 5780799 - DNA, 25 bp, Homo sapien
acctgacctcctggccccaggggtg

SEQ ID NO: 5780800 - DNA, 25 bp, Homo sapien
gcttgttcctgccccaggaataggc

SEQ ID NO: 5780801 - DNA, 25 bp, Homo sapien
caggagggggataatcagagcttga

SEQ ID NO: 5780802 - DNA, 25 bp, Homo sapien
caagagggggagcagatttaccagc

SEQ ID NO: 5780803 - DNA, 25 bp, Homo sapien
gaggtgaggagcagcccctcgcggc

SEQ ID NO: 5780804 - DNA, 25 bp, Homo sapien
tgtttggccaccctctggccagcca

SEQ ID NO: 5780805 - DNA, 25 bp, Homo sapien
tctgccaggccccgcgcccctaaaa

SEQ ID NO: 5780806 - DNA, 25 bp, Homo sapien
cacggtcaaggctgtttttgagtat

SEQ ID NO: 5780807 - DNA, 25 bp, Homo sapien
cccctcgcggcagccccgacagagt

SEQ ID NO: 5780808 - DNA, 25 bp, Homo sapien
attatgttgtgctctttattgccaa

SEQ ID NO: 5780809 - DNA, 25 bp, Homo sapien
gtgcagtgtgaacagacagatcgct

SEQ ID NO: 5780810 - DNA, 25 bp, Homo sapien
gaagagcaggaagctcgggatctac

SEQ ID NO: 5780811 - DNA, 25 bp, Homo sapien
aacagacagatcgcttcaatgtctt

SEQ ID NO: 5780812 - DNA, 25 bp, Homo sapien
tcaacgtgacccggggaatgaccac

SEQ ID NO: 5780813 - DNA, 25 bp, Homo sapien
tgctgaacaagggcacggaacatta

SEQ ID NO: 5780814 - DNA, 25 bp, Homo sapien
ggcctggagtgacacaggaaggatc

SEQ ID NO: 5780815 - DNA, 25 bp, Homo sapien
aataaccactatttgagttgtggca

SEQ ID NO: 5780816 - DNA, 25 bp, Homo sapien
tcctccagcaaggggccccagcggc

SEQ ID NO: 5780817 - DNA, 25 bp, Homo sapien
gtgtgcctccggggctgccccaagg

SEQ ID NO: 5780818 - DNA, 25 bp, Homo sapien
acgcgggcatgagcctgctccgcgg

SEQ ID NO: 5780819 - DNA, 25 bp, Homo sapien
gaagcctccagctatgctggtgagg

SEQ ID NO: 5780820 - DNA, 25 bp, Homo sapien
ctgccccaggaataggccaggaggg

SEQ ID NO: 5780821 - DNA, 25 bp, Homo sapien
cgccgaagcctccagctatgctggt

SEQ ID NO: 5780822 - DNA, 25 bp, Homo sapien
gacccggggaatgaccacccagagg

SEQ ID NO: 5780823 - DNA, 25 bp, Homo sapien
gacagatcgcttcaatgtcttcctg

SEQ ID NO: 5780824 - DNA, 25 bp, Homo sapien
aaacagacctcctcaacagattcat

SEQ ID NO: 5780825 - DNA, 25 bp, Homo sapien
ttgaggctggcactctgactgctgg

SEQ ID NO: 5780826 - DNA, 25 bp, Homo sapien
gctgcctgctgcggggctggctgca

SEQ ID NO: 5780827 - DNA, 25 bp, Homo sapien
ttcaatgtcttcctgctgccctgcc

SEQ ID NO: 5780828 - DNA, 25 bp, Homo sapien
agcagaggtgacatctggttgacgc

SEQ ID NO: 5780829 - DNA, 25 bp, Homo sapien
ggccaggagggaaggccgcagcagg

SEQ ID NO: 5780830 - DNA, 25 bp, Homo sapien
gaggctggcactctgactgctggct

SEQ ID NO: 5780831 - DNA, 25 bp, Homo sapien
ggaacagcaggtggcttctcagttc

SEQ ID NO: 5780832 - DNA, 25 bp, Homo sapien
ccagagggatgagctagcctgtaga

SEQ ID NO: 5780833 - DNA, 25 bp, Homo sapien
gctgccaggacctgcttgaactacc

SEQ ID NO: 5780834 - DNA, 25 bp, Homo sapien
actgaggcaaagggctggccacacc

SEQ ID NO: 5780835 - DNA, 25 bp, Homo sapien
ggacagcagtgaggccaagacccca

SEQ ID NO: 5780836 - DNA, 25 bp, Homo sapien
tcagcctcgctctcaacgtgacccg

SEQ ID NO: 5780837 - DNA, 25 bp, Homo sapien
aaggggccccagcggctggagaagt

SEQ ID NO: 5780838 - DNA, 25 bp, Homo sapien
agtgcagtcgtgtccatcctccatg

SEQ ID NO: 5780839 - DNA, 25 bp, Homo sapien
atgaggctggactgaggcaaagggc

SEQ ID NO: 5780840 - DNA, 25 bp, Homo sapien
gcagagggagcccccttgccctgtt

SEQ ID NO: 5780841 - DNA, 25 bp, Homo sapien
ggatgataaagcacgcggcccctcc

SEQ ID NO: 5780842 - DNA, 25 bp, Homo sapien
ctggccagccaaaagcactctgaaa

SEQ ID NO: 5780843 - DNA, 25 bp, Homo sapien
tgccctgccccaacctggacgtgta

SEQ ID NO: 5780844 - DNA, 25 bp, Homo sapien
caagtgtgttacgcggctccccaag

SEQ ID NO: 5780845 - DNA, 25 bp, Homo sapien
ctctgctcactgcgccgctatggcc

SEQ ID NO: 5780846 - DNA, 25 bp, Homo sapien
ctgctttgtaggctgggaagatgcc

SEQ ID NO: 5780847 - DNA, 25 bp, Homo sapien
tcaggtgaaaatctggttttaaaat

SEQ ID NO: 5780848 - DNA, 25 bp, Homo sapien
caggaagctcgggatctaccggagg

SEQ ID NO: 5780849 - DNA, 25 bp, Homo sapien
caggcacctgggcatccttcccctc

SEQ ID NO: 5780850 - DNA, 25 bp, Homo sapien
acttctgcacaggctccttcctgct

SEQ ID NO: 5780851 - DNA, 25 bp, Homo sapien
ggggctgccccaaggtgactgagat

SEQ ID NO: 5780852 - DNA, 25 bp, Homo sapien
gctgctagaacaatgctgaggcggg

SEQ ID NO: 5780853 - DNA, 25 bp, Homo sapien
cagagcagcacaagcgggtcctgct

SEQ ID NO: 5780854 - DNA, 25 bp, Homo sapien
acagcctcagggggctgtcggccaa

SEQ ID NO: 5780855 - DNA, 25 bp, Homo sapien
gagaagtatccagatgagaagtcgg

SEQ ID NO: 5780856 - DNA, 25 bp, Homo sapien
tttaccagcgcgtccacagtgccac

SEQ ID NO: 5780857 - DNA, 25 bp, Homo sapien
tgcaatgcaattaaagcaattgatt

SEQ ID NO: 5780858 - DNA, 25 bp, Homo sapien
ggccatcgcagagcagcacaagcgg

SEQ ID NO: 5780859 - DNA, 25 bp, Homo sapien
cccgtgtgaagctcgtctcgtggcc

SEQ ID NO: 5780860 - DNA, 25 bp, Homo sapien
ccctcaccctcaccccatccttccc

SEQ ID NO: 5780861 - DNA, 25 bp, Homo sapien
atggtgctgaggctccctgctgcaa

SEQ ID NO: 5780862 - DNA, 25 bp, Homo sapien
agggctggccacaccacctgagcat

SEQ ID NO: 5780863 - DNA, 25 bp, Homo sapien
tgttacgcggctccccaaggagacc

SEQ ID NO: 5780864 - DNA, 25 bp, Homo sapien
aggtgggaaaaccatggcgaccaat

SEQ ID NO: 5780865 - DNA, 25 bp, Homo sapien
tagtgctggtatttgttgactacca

SEQ ID NO: 5780866 - DNA, 25 bp, Homo sapien
aattttttaatcccatgaccaggcc

SEQ ID NO: 5780867 - DNA, 25 bp, Homo sapien
gctgccctgccccaacctggacgtg

SEQ ID NO: 5780868 - DNA, 25 bp, Homo sapien
gcaggactgccgtggggagcacccc

SEQ ID NO: 5780869 - DNA, 25 bp, Homo sapien
agagcctggagaaagggagcaagct

SEQ ID NO: 5780870 - DNA, 25 bp, Homo sapien
accaagcggcaggcggtggccatca

SEQ ID NO: 5780871 - DNA, 25 bp, Homo sapien
gtggcacgatgacgcatgaaggaga

SEQ ID NO: 5780872 - DNA, 25 bp, Homo sapien
gggccacaggagggggataatcaga

SEQ ID NO: 5780873 - DNA, 25 bp, Homo sapien
accttcacctgcgactcagagctag

SEQ ID NO: 5780874 - DNA, 25 bp, Homo sapien
ctgcagtgtaccgtggacagcctca

SEQ ID NO: 5780875 - DNA, 25 bp, Homo sapien
aggtggcttctcagttcctctgggc

SEQ ID NO: 5780876 - DNA, 25 bp, Homo sapien
tcctgccccaggaataggccaggag

SEQ ID NO: 5780877 - DNA, 25 bp, Homo sapien
tggtacaagacactatctgtggagt

SEQ ID NO: 5780878 - DNA, 25 bp, Homo sapien
tctagtgctggtatttgttgactac

SEQ ID NO: 5780879 - DNA, 25 bp, Homo sapien
cactctgactgctggcttttcccaa

SEQ ID NO: 5780880 - DNA, 25 bp, Homo sapien
acatcactggttcccagaacatcgc

SEQ ID NO: 5780881 - DNA, 25 bp, Homo sapien
gctggggaaggactctataccttcc

SEQ ID NO: 5780882 - DNA, 25 bp, Homo sapien
ggcccgggcctcggcgcccagcagg

SEQ ID NO: 5780883 - DNA, 25 bp, Homo sapien
tgtttttgagtatgagtgcagtcgt

SEQ ID NO: 5780884 - DNA, 25 bp, Homo sapien
gccctcctgctgccaggacctgctt

SEQ ID NO: 5780885 - DNA, 25 bp, Homo sapien
ctaccagggccacaggagggggata

SEQ ID NO: 5780886 - DNA, 25 bp, Homo sapien
gcggggctggctgcagtgtaccgtg

SEQ ID NO: 5780887 - DNA, 25 bp, Homo sapien
caatgcaattaaagcaattgatttt

SEQ ID NO: 5780888 - DNA, 25 bp, Homo sapien
cacaagcgggtcctgctggaaatgg

SEQ ID NO: 5780889 - DNA, 25 bp, Homo sapien
gaaggccgcagcaggactgccgtgg

SEQ ID NO: 5780890 - DNA, 25 bp, Homo sapien
cacaaattttttaatcccatgacca

SEQ ID NO: 5780891 - DNA, 25 bp, Homo sapien
aagggagcaagctgccccctccttg

SEQ ID NO: 5780892 - DNA, 25 bp, Homo sapien
caacgacatcagtctgggagaacct

SEQ ID NO: 5780893 - DNA, 25 bp, Homo sapien
gttcctgccccaggaataggccagg

SEQ ID NO: 5780894 - DNA, 25 bp, Homo sapien
tgggcctggagtgacacaggaagga

SEQ ID NO: 5780895 - DNA, 25 bp, Homo sapien
aatttcagtgacatcgtcaagcaag

SEQ ID NO: 5780896 - DNA, 25 bp, Homo sapien
ggccccaggggtgcagtgtgaacag

SEQ ID NO: 5780897 - DNA, 25 bp, Homo sapien
aagcccagccagggggacagcagtg

SEQ ID NO: 5780898 - DNA, 25 bp, Homo sapien
tgaactaccagggccacaggagggg

SEQ ID NO: 5780899 - DNA, 25 bp, Homo sapien
aggcggtggccatcatattcactga

SEQ ID NO: 5780900 - DNA, 25 bp, Homo sapien
attcactgatgactcggcacgtacc

SEQ ID NO: 5780901 - DNA, 25 bp, Homo sapien
gcccaagcagagggagcccccttgc

SEQ ID NO: 5780902 - DNA, 25 bp, Homo sapien
ggagtggtacaagacactatctgtg

SEQ ID NO: 5780903 - DNA, 25 bp, Homo sapien
ggtgaggagcagcccctcgcggcag

SEQ ID NO: 5780904 - DNA, 25 bp, Homo sapien
gttccggaaatcctccagcaagggg

SEQ ID NO: 5780905 - DNA, 25 bp, Homo sapien
ggcctcggcgcccagcaggcgcggg

SEQ ID NO: 5780906 - DNA, 25 bp, Homo sapien
cctcctgctgccaggacctgcttga

SEQ ID NO: 5780907 - DNA, 25 bp, Homo sapien
tctttattgccaaaaataaacactt

SEQ ID NO: 5780908 - DNA, 25 bp, Homo sapien
tccttcctgctttgtaggctgggaa

SEQ ID NO: 5780909 - DNA, 25 bp, Homo sapien
ggctgtcggccaagagcctggagaa

SEQ ID NO: 5780910 - DNA, 25 bp, Homo sapien
ggcagaggagtggtacaagacacta

SEQ ID NO: 5780911 - DNA, 25 bp, Homo sapien
agcaccgatgactgctgggggctgc

SEQ ID NO: 5780912 - DNA, 25 bp, Homo sapien
tccttcccctcgcctctgccaggcc

SEQ ID NO: 5780913 - DNA, 25 bp, Homo sapien
atccctgcacacccacgaccatgct

SEQ ID NO: 5780914 - DNA, 25 bp, Homo sapien
ctggccccaggggtgcagtgtgaac

SEQ ID NO: 5780915 - DNA, 25 bp, Homo sapien
aaggatgaggctggactgaggcaaa

SEQ ID NO: 5780916 - DNA, 25 bp, Homo sapien
tgcagtcgtgtccatcctccatggc

SEQ ID NO: 5780917 - DNA, 25 bp, Homo sapien
tgacgcgggcatgagcctgctccgc

SEQ ID NO: 5780918 - DNA, 25 bp, Homo sapien
ccttgccctgtttggccaccctctg

SEQ ID NO: 5780919 - DNA, 25 bp, Homo sapien
gaatgaccacccagagggatgagct

SEQ ID NO: 5780920 - DNA, 25 bp, Homo sapien
tcagtctgggagaacctgacctcct

SEQ ID NO: 5780921 - DNA, 25 bp, Homo sapien
acagagtgtctggaacaggtgattg

SEQ ID NO: 5780922 - DNA, 25 bp, Homo sapien
tatggcttatgacatactctgtatc

SEQ ID NO: 5780923 - DNA, 25 bp, Homo sapien
acagacctcctcaacagattcatcc

SEQ ID NO: 5780924 - DNA, 25 bp, Homo sapien
tgagtgcagtcgtgtccatcctcca

SEQ ID NO: 5780925 - DNA, 25 bp, Homo sapien
gaggctccctgctgcaatgcaatta

SEQ ID NO: 5780926 - DNA, 25 bp, Homo sapien
agagcaggaagctcgggatctaccg

SEQ ID NO: 5780927 - DNA, 25 bp, Homo sapien
cccaagggccggaacagcaggtggc

SEQ ID NO: 5780928 - DNA, 25 bp, Homo sapien
cactatttgagttgtggcaggagga

SEQ ID NO: 5780929 - DNA, 25 bp, Homo sapien
ggcacagccctcctgctgccaggac

SEQ ID NO: 5780930 - DNA, 25 bp, Homo sapien
ctgtatcaatgagatcccctcaccc

SEQ ID NO: 5780931 - DNA, 25 bp, Homo sapien
gggaggtggtgcagtcagcctcgct

SEQ ID NO: 5780932 - DNA, 25 bp, Homo sapien
tggagtgtctggggtcccgcctcaa

SEQ ID NO: 5780933 - DNA, 25 bp, Homo sapien
gtatggggcagcccaggccagctcg

SEQ ID NO: 5780934 - DNA, 25 bp, Homo sapien
caaaggtctttggggagggaggcag

SEQ ID NO: 5780935 - DNA, 25 bp, Homo sapien
ctgagcaggcgctcctggcccgggc

SEQ ID NO: 5780936 - DNA, 25 bp, Homo sapien
caggcgcggggcgaaggagctgcta

SEQ ID NO: 5780937 - DNA, 25 bp, Homo sapien
ccccaaggatgaggctggactgagg

SEQ ID NO: 5780938 - DNA, 25 bp, Homo sapien
tgtgatgctggggaaggactctata

SEQ ID NO: 5780939 - DNA, 25 bp, Homo sapien
gtatggcgagtgcaagctgcagatc

SEQ ID NO: 5780940 - DNA, 25 bp, Homo sapien
ggccggatgtgtgatgctggggaag

SEQ ID NO: 5780941 - DNA, 25 bp, Homo sapien
taagcagaggtgacatctggttgac

SEQ ID NO: 5780942 - DNA, 25 bp, Homo sapien
gcgccgtgacgcgggcatgagcctg

SEQ ID NO: 5780943 - DNA, 25 bp, Homo sapien
ccgctatggccgggatgccacacgc

SEQ ID NO: 5780944 - DNA, 25 bp, Homo sapien
tagggtcctgatttgtgggaacaga

SEQ ID NO: 5780945 - DNA, 25 bp, Homo sapien
ctaaaaggtgggaaaaccatggcga

SEQ ID NO: 5780946 - DNA, 25 bp, Homo sapien
cgtgaggctgctgaacaagggcacg

SEQ ID NO: 5780947 - DNA, 25 bp, Homo sapien
ttattgccaaaaataaacactttta

SEQ ID NO: 5780948 - DNA, 25 bp, Homo sapien
gcagtgtgaacagacagatcgcttc

SEQ ID NO: 5780949 - DNA, 25 bp, Homo sapien
tgcagttggagttttaagcagaggt

SEQ ID NO: 5780950 - DNA, 25 bp, Homo sapien
ccttcttgtaaataaccactatttg

SEQ ID NO: 5780951 - DNA, 25 bp, Homo sapien
cagctatgctggtgaggggtatggg

SEQ ID NO: 5780952 - DNA, 25 bp, Homo sapien
ccaaaagcactctgaaaccaagacc

SEQ ID NO: 5780953 - DNA, 25 bp, Homo sapien
tttgtaggctgggaagatgcccctg

SEQ ID NO: 5780954 - DNA, 25 bp, Homo sapien
cgctttaccttcgaggctggccgga

SEQ ID NO: 5780955 - DNA, 25 bp, Homo sapien
agtgtctggaacaggtgattggagg

SEQ ID NO: 5780956 - DNA, 25 bp, Homo sapien
cctcaacagattcatcctgctaaag

SEQ ID NO: 5780957 - DNA, 25 bp, Homo sapien
agaccaagcggcaggcggtggccat

SEQ ID NO: 5780958 - DNA, 25 bp, Homo sapien
ccaaacagcccaagggccggaacag

SEQ ID NO: 5780959 - DNA, 25 bp, Homo sapien
aaagcaattgattttctagtgctgg

SEQ ID NO: 5780960 - DNA, 25 bp, Homo sapien
ggcatccttcccctcgcctctgcca

SEQ ID NO: 5780961 - DNA, 25 bp, Homo sapien
tagggaggtggtgcagtcagcctcg

SEQ ID NO: 5780962 - DNA, 25 bp, Homo sapien
tcccgcctcaacgacatcagtctgg

SEQ ID NO: 5780963 - DNA, 25 bp, Homo sapien
aggagccggagacccaggcacctgg

SEQ ID NO: 5780964 - DNA, 25 bp, Homo sapien
tgccgcgcagtgcctactggcacca

SEQ ID NO: 5780965 - DNA, 25 bp, Homo sapien
ccctctggccagccaaaagcactct

SEQ ID NO: 5780966 - DNA, 25 bp, Homo sapien
acaagggcacggaacattactcgta

SEQ ID NO: 5780967 - DNA, 25 bp, Homo sapien
cgtgacgcgggcatgagcctgctcc

SEQ ID NO: 5780968 - DNA, 25 bp, Homo sapien
ggatctgcacttcctctgtgctgct

SEQ ID NO: 5780969 - DNA, 25 bp, Homo sapien
acaagacactatctgtggagtgtct

SEQ ID NO: 5780970 - DNA, 25 bp, Homo sapien
agaacgtgaggctgctgaacaaggg

SEQ ID NO: 5780971 - DNA, 25 bp, Homo sapien
ggctggccacaccacctgagcatgt

SEQ ID NO: 5780972 - DNA, 25 bp, Homo sapien
tctgtgctgcttgccagccttgcag

SEQ ID NO: 5780973 - DNA, 25 bp, Homo sapien
taccggaggtgctggctggtgttcc

SEQ ID NO: 5780974 - DNA, 25 bp, Homo sapien
cgcggggcgaaggagctgctagaac

SEQ ID NO: 5780975 - DNA, 25 bp, Homo sapien
gtgctctttattgccaaaaataaac

SEQ ID NO: 5780976 - DNA, 25 bp, Homo sapien
aggcaaagggctggccacaccacct

SEQ ID NO: 5780977 - DNA, 25 bp, Homo sapien
cagagcttgaggctggcactctgac

SEQ ID NO: 5780978 - DNA, 25 bp, Homo sapien
cttcgaggctggccggatgtgtgat

SEQ ID NO: 5780979 - DNA, 25 bp, Homo sapien
aagcacgcggcccctcccaaaggag

SEQ ID NO: 5780980 - DNA, 25 bp, Homo sapien
ttgtgggaacagaccttcttgtaaa

SEQ ID NO: 5780981 - DNA, 25 bp, Homo sapien
aggctgtttttgagtatgagtgcag

SEQ ID NO: 5780982 - DNA, 25 bp, Homo sapien
agcggctggagaagtatccagatga

SEQ ID NO: 5780983 - DNA, 25 bp, Homo sapien
ttaatcccatgaccaggccacggtc

SEQ ID NO: 5780984 - DNA, 25 bp, Homo sapien
ctgcggggctggctgcagtgtaccg

SEQ ID NO: 5780985 - DNA, 25 bp, Homo sapien
tgcctactggcaccacatcactggt

SEQ ID NO: 5780986 - DNA, 25 bp, Homo sapien
cccccgtgtgaagctcgtctcgtgg

SEQ ID NO: 5780987 - DNA, 25 bp, Homo sapien
agtgctggcgagcaccgatgactgc

SEQ ID NO: 5780988 - DNA, 25 bp, Homo sapien
gtgaagatgaagagcaggaagctcg

SEQ ID NO: 5780989 - DNA, 25 bp, Homo sapien
gatcagcaacgtcaagtgtgttacg

SEQ ID NO: 5780990 - DNA, 25 bp, Homo sapien
cagagctggctggctcagctaagtg

SEQ ID NO: 5780991 - DNA, 25 bp, Homo sapien
ccaaggagaccaagcggcaggcggt

SEQ ID NO: 5780992 - DNA, 25 bp, Homo sapien
cggcacgtaccttcacctgcgactc

SEQ ID NO: 5780993 - DNA, 25 bp, Homo sapien
cagaggtgacatctggttgacgcct

SEQ ID NO: 5780994 - DNA, 25 bp, Homo sapien
tcaagcaaggctacgtgaagatgaa

SEQ ID NO: 5780995 - DNA, 25 bp, Homo sapien
tgtggcaggaggatgataaagcacg

SEQ ID NO: 5780996 - DNA, 25 bp, Homo sapien
gagtgtctggggtcccgcctcaacg

SEQ ID NO: 5780997 - DNA, 25 bp, Homo sapien
gacacaggaaggatctgcacttcct

SEQ ID NO: 5780998 - DNA, 25 bp, Homo sapien
caggaaggatctgcacttcctctgt

SEQ ID NO: 5780999 - DNA, 25 bp, Homo sapien
acatcgtcaagcaaggctacgtgaa

SEQ ID NO: 5781000 - DNA, 25 bp, Homo sapien
gccaccctctggccagccaaaagca

SEQ ID NO: 5781001 - DNA, 25 bp, Homo sapien
tggccatcatattcactgatgactc

SEQ ID NO: 5781002 - DNA, 25 bp, Homo sapien
acctggacgtgtatggcgagtgcaa

SEQ ID NO: 5781003 - DNA, 25 bp, Homo sapien
gcttcaatgtcttcctgctgccctg

SEQ ID NO: 5781004 - DNA, 25 bp, Homo sapien
gagggggataatcagagcttgaggc

SEQ ID NO: 5781005 - DNA, 25 bp, Homo sapien
ggagctaccgtgggactatatactg

SEQ ID NO: 5781006 - DNA, 25 bp, Homo sapien
atgacatactctgtatcaatgagat

SEQ ID NO: 5781007 - DNA, 25 bp, Homo sapien
gtgccaccctggccatcgcagagca

SEQ ID NO: 5781008 - DNA, 25 bp, Homo sapien
ctggttgacgcctcaggtgaaaatc

SEQ ID NO: 5781009 - DNA, 25 bp, Homo sapien
agggccggaacagcaggtggcttct

SEQ ID NO: 5781010 - DNA, 25 bp, Homo sapien
cgcatgaaggagattatgttgtgct

SEQ ID NO: 5781011 - DNA, 25 bp, Homo sapien
gaacaagggcacggaacattactcg

SEQ ID NO: 5781012 - DNA, 25 bp, Homo sapien
gggagggaggcagagctggctggct

SEQ ID NO: 5781013 - DNA, 25 bp, Homo sapien
ccatgcagaagggctatctttctat

SEQ ID NO: 5781014 - DNA, 25 bp, Homo sapien
aggcgggtgaggtgaggagcagccc

SEQ ID NO: 5781015 - DNA, 25 bp, Homo sapien
ggaggtgctggctggtgttccggaa

SEQ ID NO: 5781016 - DNA, 25 bp, Homo sapien
tggagttttaagcagaggtgacatc

SEQ ID NO: 5781017 - DNA, 25 bp, Homo sapien
caaggctgtttttgagtatgagtgc

SEQ ID NO: 5781018 - DNA, 25 bp, Homo sapien
gttgactaccatgcagaagggctat

SEQ ID NO: 5781019 - DNA, 25 bp, Homo sapien
ggctggactgaggcaaagggctggc

SEQ ID NO: 5781020 - DNA, 25 bp, Homo sapien
gtctcgtggcccctctgctcactgc

SEQ ID NO: 5781021 - DNA, 25 bp, Homo sapien
caagggccggaacagcaggtggctt

SEQ ID NO: 5781022 - DNA, 25 bp, Homo sapien
atgcaattaaagcaattgattttct

SEQ ID NO: 5781023 - DNA, 25 bp, Homo sapien
gctatctttctattcacgtcaaact

SEQ ID NO: 5781024 - DNA, 25 bp, Homo sapien
tgctgaggctccctgctgcaatgca

SEQ ID NO: 5781025 - DNA, 25 bp, Homo sapien
ctgaacaagggcacggaacattact

SEQ ID NO: 5781026 - DNA, 25 bp, Homo sapien
gagaagaacgtgaggctgctgaaca

SEQ ID NO: 5781027 - DNA, 25 bp, Homo sapien
atctggttgacgcctcaggtgaaaa

SEQ ID NO: 5781028 - DNA, 25 bp, Homo sapien
tgaacagacagatcgcttcaatgtc

SEQ ID NO: 5781029 - DNA, 25 bp, Homo sapien
gaggctggactgaggcaaagggctg

SEQ ID NO: 5781030 - DNA, 25 bp, Homo sapien
gctgccccctccttgcccccaagga

SEQ ID NO: 5781031 - DNA, 25 bp, Homo sapien
cacaggagggggataatcagagctt

SEQ ID NO: 5781032 - DNA, 25 bp, Homo sapien
gtcgtgtccatcctccatggcacag

SEQ ID NO: 5781033 - DNA, 25 bp, Homo sapien
ggtcccgcctcaacgacatcagtct

SEQ ID NO: 5781034 - DNA, 25 bp, Homo sapien
gctaaagccaaagcccagccagggg

SEQ ID NO: 5781035 - DNA, 25 bp, Homo sapien
ggctggccggatgtgtgatgctggg

SEQ ID NO: 5781036 - DNA, 25 bp, Homo sapien
atgctgaggcgggtgaggtgaggag

SEQ ID NO: 5781037 - DNA, 25 bp, Homo sapien
gcaggcggtggccatcatattcact

SEQ ID NO: 5781038 - DNA, 25 bp, Homo sapien
aaccaagaccttcccattcctcctc

SEQ ID NO: 5781039 - DNA, 25 bp, Homo sapien
gaggcagaggagtggtacaagacac

SEQ ID NO: 5781040 - DNA, 25 bp, Homo sapien
gagcagcccctcgcggcagccccga

SEQ ID NO: 5781041 - DNA, 25 bp, Homo sapien
cacctgggcatccttcccctcgcct

SEQ ID NO: 5781042 - DNA, 25 bp, Homo sapien
tgacatcgtcaagcaaggctacgtg

SEQ ID NO: 5781043 - DNA, 25 bp, Homo sapien
agtctgggagaacctgacctcctgg

SEQ ID NO: 5781044 - DNA, 25 bp, Homo sapien
tcgtatccctgcacacccacgacca

SEQ ID NO: 5781045 - DNA, 25 bp, Homo sapien
caggggtggacaatgcccaagcaga

SEQ ID NO: 5781046 - DNA, 25 bp, Homo sapien
cctctcactgaccaggggtggacaa

SEQ ID NO: 5781047 - DNA, 25 bp, Homo sapien
agacctcctcaacagattcatcctg

SEQ ID NO: 5781048 - DNA, 25 bp, Homo sapien
aacatctacctctgggacatccaca

SEQ ID NO: 5781049 - DNA, 25 bp, Homo sapien
tgtaccgtggacagcctcagggggc

SEQ ID NO: 5781050 - DNA, 25 bp, Homo sapien
ctccatggcacagccctcctgctgc

SEQ ID NO: 5781051 - DNA, 25 bp, Homo sapien
aaagggctggccacaccacctgagc

SEQ ID NO: 5781052 - DNA, 25 bp, Homo sapien
ccacaacccccgtgtgaagctcgtc

SEQ ID NO: 5781053 - DNA, 25 bp, Homo sapien
tatggccgggatgccacacgcttta

SEQ ID NO: 5781054 - DNA, 25 bp, Homo sapien
aggaaggctggagcttgttcctgcc

SEQ ID NO: 5781055 - DNA, 25 bp, Homo sapien
atttgtgggaacagaccttcttgta

SEQ ID NO: 5781056 - DNA, 25 bp, Homo sapien
gtgactgagatcagcaacgtcaagt

SEQ ID NO: 5781057 - DNA, 25 bp, Homo sapien
gactgctggcttttcccaaacagcc

SEQ ID NO: 5781058 - DNA, 25 bp, Homo sapien
gacatcagtctgggagaacctgacc

SEQ ID NO: 5781059 - DNA, 25 bp, Homo sapien
tcgcttcaatgtcttcctgctgccc

SEQ ID NO: 5781060 - DNA, 25 bp, Homo sapien
aatacacacaaattttttaatccca

SEQ ID NO: 5781061 - DNA, 25 bp, Homo sapien
ccatgaccaggccacggtcaaggct

SEQ ID NO: 5781062 - DNA, 25 bp, Homo sapien
cagccccgacagagtgtctggaaca

SEQ ID NO: 5781063 - DNA, 25 bp, Homo sapien
attacctcagccatgtggaggaagg

SEQ ID NO: 5781064 - DNA, 25 bp, Homo sapien
gcttgaggctggcactctgactgct

SEQ ID NO: 5781065 - DNA, 25 bp, Homo sapien
ggcagagctggctggctcagctaag

SEQ ID NO: 5781066 - DNA, 25 bp, Homo sapien
ccaagaccttcccattcctcctccc

SEQ ID NO: 5781067 - DNA, 25 bp, Homo sapien
cccctctcactgaccaggggtggac

SEQ ID NO: 5781068 - DNA, 25 bp, Homo sapien
tcctccccacatggtgctgaggctc

SEQ ID NO: 5781069 - DNA, 25 bp, Homo sapien
tgctgcttgccagccttgcagttgg

SEQ ID NO: 5781070 - DNA, 25 bp, Homo sapien
tctgtggagtgtctggggtcccgcc

SEQ ID NO: 5781071 - DNA, 25 bp, Homo sapien
tggagaagaacgtgaggctgctgaa

SEQ ID NO: 5781072 - DNA, 25 bp, Homo sapien
ccccaggggtgcagtgtgaacagac

SEQ ID NO: 5781073 - DNA, 25 bp, Homo sapien
ctgctcactgcgccgctatggccgg

SEQ ID NO: 5781074 - DNA, 25 bp, Homo sapien
catctacctctgggacatccacaac

SEQ ID NO: 5781075 - DNA, 25 bp, Homo sapien
acacccacgaccatgctgccgcgca

SEQ ID NO: 5781076 - DNA, 25 bp, Homo sapien
atgataaagcacgcggcccctccca

SEQ ID NO: 5781077 - DNA, 25 bp, Homo sapien
gccccaggaataggccaggagggaa

SEQ ID NO: 5781078 - DNA, 25 bp, Homo sapien
gagcctgctccgcggcgccgctgag

SEQ ID NO: 5781079 - DNA, 25 bp, Homo sapien
ccctgctgcccccctctcactgacc

SEQ ID NO: 5781080 - DNA, 25 bp, Homo sapien
gatcgcttcaatgtcttcctgctgc

SEQ ID NO: 5781081 - DNA, 25 bp, Homo sapien
cgtgtgaagctcgtctcgtggcccc

SEQ ID NO: 5781082 - DNA, 25 bp, Homo sapien
tatgagtgcagtcgtgtccatcctc

SEQ ID NO: 5781083 - DNA, 25 bp, Homo sapien
gactcggcacgtaccttcacctgcg

SEQ ID NO: 5781084 - DNA, 25 bp, Homo sapien
tttggccaccctctggccagccaaa

SEQ ID NO: 5781085 - DNA, 25 bp, Homo sapien
ggctgcagtgtaccgtggacagcct

SEQ ID NO: 5781086 - DNA, 25 bp, Homo sapien
cgcagcaggactgccgtggggagca

SEQ ID NO: 5781087 - DNA, 25 bp, Homo sapien
gcccccaaggatgaggctggactga

SEQ ID NO: 5781088 - DNA, 25 bp, Homo sapien
ccagcgcgtccacagtgccaccctg

SEQ ID NO: 5781089 - DNA, 25 bp, Homo sapien
ctggcactctgactgctggcttttc

SEQ ID NO: 5781090 - DNA, 25 bp, Homo sapien
gagctagggaggtggtgcagtcagc

SEQ ID NO: 5781091 - DNA, 25 bp, Homo sapien
gccccgacagagtgtctggaacagg

SEQ ID NO: 5781092 - DNA, 25 bp, Homo sapien
cctcccaaaggagcccttgagctag

SEQ ID NO: 5781093 - DNA, 25 bp, Homo sapien
gggagcacccctgctgcccccctct

SEQ ID NO: 5781094 - DNA, 25 bp, Homo sapien
agatgaagagcaggaagctcgggat

SEQ ID NO: 5781095 - DNA, 25 bp, Homo sapien
gaggatgataaagcacgcggcccct

SEQ ID NO: 5781096 - DNA, 25 bp, Homo sapien
tcgaggctggccggatgtgtgatgc

SEQ ID NO: 5781097 - DNA, 25 bp, Homo sapien
gcgggcatgagcctgctccgcggcg

SEQ ID NO: 5781098 - DNA, 25 bp, Homo sapien
ggctggcactctgactgctggcttt

SEQ ID NO: 5781099 - DNA, 25 bp, Homo sapien
ttcctcctccccacatggtgctgag

SEQ ID NO: 5781100 - DNA, 25 bp, Homo sapien
gggaacagaccttcttgtaaataac

SEQ ID NO: 5781101 - DNA, 25 bp, Homo sapien
tctattcacgtcaaacttttggttg

SEQ ID NO: 5781102 - DNA, 25 bp, Homo sapien
gtgacacaggaaggatctgcacttc

SEQ ID NO: 5781103 - DNA, 25 bp, Homo sapien
ttgccagccttgcagttggagtttt

SEQ ID NO: 5781104 - DNA, 25 bp, Homo sapien
gcaattaaagcaattgattttctag

SEQ ID NO: 5781105 - DNA, 25 bp, Homo sapien
atgacgcatgaaggagattatgttg

SEQ ID NO: 5781106 - DNA, 25 bp, Homo sapien
ctggcaccacatcactggttcccag

SEQ ID NO: 5781107 - DNA, 25 bp, Homo sapien
gccaccctggccatcgcagagcagc

SEQ ID NO: 5781108 - DNA, 25 bp, Homo sapien
ttggagctaccgtgggactatatac

SEQ ID NO: 5781109 - DNA, 25 bp, Homo sapien
ccccatccttccccaccaatacaca

SEQ ID NO: 5781110 - DNA, 25 bp, Homo sapien
cgtggggagcacccctgctgccccc

SEQ ID NO: 5781111 - DNA, 25 bp, Homo sapien
cagacacaagagggggagcagattt

SEQ ID NO: 5781112 - DNA, 25 bp, Homo sapien
acgtgacccggggaatgaccaccca

SEQ ID NO: 5781113 - DNA, 25 bp, Homo sapien
ggcaccacatcactggttcccagaa

SEQ ID NO: 5781114 - DNA, 25 bp, Homo sapien
ctgccccaaggtgactgagatcagc

SEQ ID NO: 5781115 - DNA, 25 bp, Homo sapien
ccaatacacacaaattttttaatcc

SEQ ID NO: 5781116 - DNA, 25 bp, Homo sapien
gctccttcctgctttgtaggctggg

SEQ ID NO: 5781117 - DNA, 25 bp, Homo sapien
tggacaatgcccaagcagagggagc

SEQ ID NO: 5781118 - DNA, 25 bp, Homo sapien
ggatgagctagcctgtagaggggaa

SEQ ID NO: 5781119 - DNA, 25 bp, Homo sapien
ccgatgactgctgggggctgcctgc

SEQ ID NO: 5781120 - DNA, 25 bp, Homo sapien
gagacccaggcacctgggcatcctt

SEQ ID NO: 5781121 - DNA, 25 bp, Homo sapien
cggatgtgtgatgctggggaaggac

SEQ ID NO: 5781122 - DNA, 25 bp, Homo sapien
gccccaacctggacgtgtatggcga

SEQ ID NO: 5781123 - DNA, 25 bp, Homo sapien
agcctcgctctcaacgtgacccggg

SEQ ID NO: 5781124 - DNA, 25 bp, Homo sapien
aattaaagcaattgattttctagtg

SEQ ID NO: 5781125 - DNA, 25 bp, Homo sapien
gggaggcagagctggctggctcagc

SEQ ID NO: 5781126 - DNA, 25 bp, Homo sapien
ccatcgcagagcagcacaagcgggt

SEQ ID NO: 5781127 - DNA, 25 bp, Homo sapien
aggagggaaggccgcagcaggactg

SEQ ID NO: 5781128 - DNA, 25 bp, Homo sapien
gtggcttctcagttcctctgggcct

SEQ ID NO: 5781129 - DNA, 25 bp, Homo sapien
ctacgtgaagatgaagagcaggaag

SEQ ID NO: 5781130 - DNA, 25 bp, Homo sapien
gcaaggggccccagcggctggagaa

SEQ ID NO: 5781131 - DNA, 25 bp, Homo sapien
gctcgggatctaccggaggtgctgg

SEQ ID NO: 5781132 - DNA, 25 bp, Homo sapien
gtgtgaggggttggagctaccgtgg

SEQ ID NO: 5781133 - DNA, 25 bp, Homo sapien
caagcgggtcctgctggaaatggag

SEQ ID NO: 5781134 - DNA, 25 bp, Homo sapien
ctcggcacgtaccttcacctgcgac

SEQ ID NO: 5781135 - DNA, 25 bp, Homo sapien
cttcctgctttgtaggctgggaaga

SEQ ID NO: 5781136 - DNA, 25 bp, Homo sapien
aagcaaggctacgtgaagatgaaga

SEQ ID NO: 5781137 - DNA, 25 bp, Homo sapien
gactcagagctagaggcagaggagt

SEQ ID NO: 5781138 - DNA, 25 bp, Homo sapien
cccggggaatgaccacccagaggga

SEQ ID NO: 5781139 - DNA, 25 bp, Homo sapien
gggtgctgattacctcagccatgtg

SEQ ID NO: 5781140 - DNA, 25 bp, Homo sapien
tttgagtatgagtgcagtcgtgtcc

SEQ ID NO: 5781141 - DNA, 25 bp, Homo sapien
tgccaggccccgcgcccctaaaagg

SEQ ID NO: 5781142 - DNA, 25 bp, Homo sapien
aggctccttcctgctttgtaggctg

SEQ ID NO: 5781143 - DNA, 25 bp, Homo sapien
cgagtgcaagctgcagatcacccac

SEQ ID NO: 5781144 - DNA, 25 bp, Homo sapien
tgatgactcggcacgtaccttcacc

SEQ ID NO: 5781145 - DNA, 25 bp, Homo sapien
agaacaatgctgaggcgggtgaggt

SEQ ID NO: 5781146 - DNA, 25 bp, Homo sapien
cctcgctctcaacgtgacccgggga

SEQ ID NO: 5781147 - DNA, 25 bp, Homo sapien
gcgccgccgccgccctgccgccccc

SEQ ID NO: 5781148 - DNA, 25 bp, Homo sapien
ggagcagatttaccagcgcgtccac

SEQ ID NO: 5781149 - DNA, 25 bp, Homo sapien
gaccacagtgctggcgagcaccgat

SEQ ID NO: 5781150 - DNA, 25 bp, Homo sapien
atgcccaagcagagggagccccctt

SEQ ID NO: 5781151 - DNA, 25 bp, Homo sapien
agaacctgacctcctggccccaggg

SEQ ID NO: 5781152 - DNA, 25 bp, Homo sapien
ggtgacatctggttgacgcctcagg

SEQ ID NO: 5781153 - DNA, 25 bp, Homo sapien
gcgggtgaggtgaggagcagcccct

SEQ ID NO: 5781154 - DNA, 25 bp, Homo sapien
actaccatgcagaagggctatcttt

SEQ ID NO: 5781155 - DNA, 25 bp, Homo sapien
agctgcagatcacccacgagaacat

SEQ ID NO: 5781156 - DNA, 25 bp, Homo sapien
agtgtaccgtggacagcctcagggg

SEQ ID NO: 5781157 - DNA, 25 bp, Homo sapien
tctcagttcctctgggcctggagtg

SEQ ID NO: 5781158 - DNA, 25 bp, Homo sapien
ccctggccatcgcagagcagcacaa

SEQ ID NO: 5781159 - DNA, 25 bp, Homo sapien
ctggccacaccacctgagcatgtgt

SEQ ID NO: 5781160 - DNA, 25 bp, Homo sapien
gaggcagagctggctggctcagcta

SEQ ID NO: 5781161 - DNA, 25 bp, Homo sapien
gacgcctcaggtgaaaatctggttt

SEQ ID NO: 5781162 - DNA, 25 bp, Homo sapien
gcaggcgctcctggcccgggcctcg

SEQ ID NO: 5781163 - DNA, 25 bp, Homo sapien
ctgctgccaggacctgcttgaacta

SEQ ID NO: 5781164 - DNA, 25 bp, Homo sapien
ctgctggcttttcccaaacagccca

SEQ ID NO: 5781165 - DNA, 25 bp, Homo sapien
tgatgctggggaaggactctatacc

SEQ ID NO: 5781166 - DNA, 25 bp, Homo sapien
ccaagcagagggagcccccttgccc

SEQ ID NO: 5781167 - DNA, 25 bp, Homo sapien
gataaagcacgcggcccctcccaaa

SEQ ID NO: 5781168 - DNA, 25 bp, Homo sapien
tcctccatggcacagccctcctgct

SEQ ID NO: 5781169 - DNA, 25 bp, Homo sapien
catcctgctaaagccaaagcccagc

SEQ ID NO: 5781170 - DNA, 25 bp, Homo sapien
aaggatctgcacttcctctgtgctg

SEQ ID NO: 5781171 - DNA, 25 bp, Homo sapien
gttgtggcaggaggatgataaagca

SEQ ID NO: 5781172 - DNA, 25 bp, Homo sapien
ttgagttgtggcaggaggatgataa

SEQ ID NO: 5781173 - DNA, 25 bp, Homo sapien
tgtgtgatgctggggaaggactcta

SEQ ID NO: 5781174 - DNA, 25 bp, Homo sapien
ctgcgactcagagctagaggcagag

SEQ ID NO: 5781175 - DNA, 25 bp, Homo sapien
gaaatcctccagcaaggggccccag

SEQ ID NO: 5781176 - DNA, 25 bp, Homo sapien
agaagggctatctttctattcacgt

SEQ ID NO: 5781177 - DNA, 25 bp, Homo sapien
actgcgccgctatggccgggatgcc

SEQ ID NO: 5781178 - DNA, 25 bp, Homo sapien
accatggcgaccaatttcagtgaca

SEQ ID NO: 5781179 - DNA, 25 bp, Homo sapien
tggaaatggagaagaacgtgaggct

SEQ ID NO: 5781180 - DNA, 25 bp, Homo sapien
tctaccggaggtgctggctggtgtt

SEQ ID NO: 5781181 - DNA, 25 bp, Homo sapien
caccctcaccccatccttccccacc

SEQ ID NO: 5781182 - DNA, 25 bp, Homo sapien
tttctattcacgtcaaacttttggt

SEQ ID NO: 5781183 - DNA, 25 bp, Homo sapien
tggagtgacacaggaaggatctgca

SEQ ID NO: 5781184 - DNA, 25 bp, Homo sapien
tactctgtatcaatgagatcccctc

SEQ ID NO: 5781185 - DNA, 25 bp, Homo sapien
gcggtggccatcatattcactgatg

SEQ ID NO: 5781186 - DNA, 25 bp, Homo sapien
ctgcagatcacccacgagaacatct

SEQ ID NO: 5781187 - DNA, 25 bp, Homo sapien
ctggttttaaaatgtaacttctgca

SEQ ID NO: 5781188 - DNA, 25 bp, Homo sapien
gccgctgagcaggcgctcctggccc

SEQ ID NO: 5781189 - DNA, 25 bp, Homo sapien
cgctgagcaggcgctcctggcccgg

SEQ ID NO: 5781190 - DNA, 25 bp, Homo sapien
gatcccctcaccctcaccccatcct

SEQ ID NO: 5781191 - DNA, 25 bp, Homo sapien
cttgcagttggagttttaagcagag

SEQ ID NO: 5781192 - DNA, 25 bp, Homo sapien
gaggagtggtacaagacactatctg

SEQ ID NO: 5781193 - DNA, 25 bp, Homo sapien
agcaacgtcaagtgtgttacgcggc

SEQ ID NO: 5781194 - DNA, 25 bp, Homo sapien
gaaggctggagcttgttcctgcccc

SEQ ID NO: 5781195 - DNA, 25 bp, Homo sapien
gcaaggctacgtgaagatgaagagc

SEQ ID NO: 5781196 - DNA, 25 bp, Homo sapien
ccccaaggagaccaagcggcaggcg

SEQ ID NO: 5781197 - DNA, 25 bp, Homo sapien
gaggctggccggatgtgtgatgctg

SEQ ID NO: 5781198 - DNA, 25 bp, Homo sapien
accttcgaggctggccggatgtgtg

SEQ ID NO: 5781199 - DNA, 25 bp, Homo sapien
acctgcgactcagagctagaggcag

SEQ ID NO: 5781200 - DNA, 25 bp, Homo sapien
ctgggggctgcctgctgcggggctg

SEQ ID NO: 5781201 - DNA, 25 bp, Homo sapien
ttcccattcctcctccccacatggt

SEQ ID NO: 5781202 - DNA, 25 bp, Homo sapien
ctgcacaggctccttcctgctttgt

SEQ ID NO: 5781203 - DNA, 25 bp, Homo sapien
gggctatctttctattcacgtcaaa

SEQ ID NO: 5781204 - DNA, 25 bp, Homo sapien
ctgctgcaatgcaattaaagcaatt

SEQ ID NO: 5781205 - DNA, 25 bp, Homo sapien
gaccatgctgccgcgcagtgcctac

SEQ ID NO: 5781206 - DNA, 25 bp, Homo sapien
tcgggatctaccggaggtgctggct

SEQ ID NO: 5781207 - DNA, 25 bp, Homo sapien
gccgccctgccgcccccgccagccg

SEQ ID NO: 5781208 - DNA, 25 bp, Homo sapien
atgagatcccctcaccctcacccca

SEQ ID NO: 5781209 - DNA, 25 bp, Homo sapien
tggtatttgttgactaccatgcaga

SEQ ID NO: 5781210 - DNA, 25 bp, Homo sapien
caaattttttaatcccatgaccagg

SEQ ID NO: 5781211 - DNA, 25 bp, Homo sapien
cagatgagaagtcggtgtgcctccg

SEQ ID NO: 5781212 - DNA, 25 bp, Homo sapien
gctggctggtgttccggaaatcctc

SEQ ID NO: 5781213 - DNA, 25 bp, Homo sapien
tgctggcgagcaccgatgactgctg

SEQ ID NO: 5781214 - DNA, 25 bp, Homo sapien
agctaccgtgggactatatactgtt

SEQ ID NO: 5781215 - DNA, 25 bp, Homo sapien
ccacagtgctggcgagcaccgatga

SEQ ID NO: 5781216 - DNA, 25 bp, Homo sapien
atgtcttcctgctgccctgccccaa

SEQ ID NO: 5781217 - DNA, 25 bp, Homo sapien
tttaatactttagggtcctgatttg

SEQ ID NO: 5781218 - DNA, 25 bp, Homo sapien
ctctgactgctggcttttcccaaac

SEQ ID NO: 5781219 - DNA, 25 bp, Homo sapien
cccattcctcctccccacatggtgc

SEQ ID NO: 5781220 - DNA, 25 bp, Homo sapien
cctcgcggcagccccgacagagtgt

SEQ ID NO: 5781221 - DNA, 25 bp, Homo sapien
cctctgtgctgcttgccagccttgc

SEQ ID NO: 5781222 - DNA, 25 bp, Homo sapien
aaaggtgggaaaaccatggcgacca

SEQ ID NO: 5781223 - DNA, 25 bp, Homo sapien
atcgcagagcagcacaagcgggtcc

SEQ ID NO: 5781224 - DNA, 25 bp, Homo sapien
ccatgctgccgcgcagtgcctactg

SEQ ID NO: 5781225 - DNA, 25 bp, Homo sapien
agggggagcagatttaccagcgcgt

SEQ ID NO: 5781226 - DNA, 25 bp, Homo sapien
ttaatatatatggcttatgacatac

SEQ ID NO: 5781227 - DNA, 25 bp, Homo sapien
tttctagtgctggtatttgttgact

SEQ ID NO: 5781228 - DNA, 25 bp, Homo sapien
cggagacccaggcacctgggcatcc

SEQ ID NO: 5781229 - DNA, 25 bp, Homo sapien
gccacacgctttaccttcgaggctg

SEQ ID NO: 5781230 - DNA, 25 bp, Homo sapien
aatcccatgaccaggccacggtcaa

SEQ ID NO: 5781231 - DNA, 25 bp, Homo sapien
ggacatccacaacccccgtgtgaag

SEQ ID NO: 5781232 - DNA, 25 bp, Homo sapien
cagccctcctgctgccaggacctgc

SEQ ID NO: 5781233 - DNA, 25 bp, Homo sapien
gctcctggcccgggcctcggcgccc

SEQ ID NO: 5781234 - DNA, 25 bp, Homo sapien
cagggccacaggagggggataatca

SEQ ID NO: 5781235 - DNA, 25 bp, Homo sapien
tctacctctgggacatccacaaccc

SEQ ID NO: 5781236 - DNA, 25 bp, Homo sapien
ttgagctagggaggtggtgcagtca

SEQ ID NO: 5781237 - DNA, 25 bp, Homo sapien
ttcctctgggcctggagtgacacag

SEQ ID NO: 5781238 - DNA, 25 bp, Homo sapien
tgtaaataaccactatttgagttgt

SEQ ID NO: 5781239 - DNA, 25 bp, Homo sapien
tgagaagtcggtgtgcctccggggc

SEQ ID NO: 5781240 - DNA, 25 bp, Homo sapien
taccgtggacagcctcagggggctg

SEQ ID NO: 5781241 - DNA, 25 bp, Homo sapien
ttgttgactaccatgcagaagggct

SEQ ID NO: 5781242 - DNA, 25 bp, Homo sapien
tttttgagtatgagtgcagtcgtgt

SEQ ID NO: 5781243 - DNA, 25 bp, Homo sapien
gataatcagagcttgaggctggcac

SEQ ID NO: 5781244 - DNA, 25 bp, Homo sapien
ctggggtcccgcctcaacgacatca

SEQ ID NO: 5781245 - DNA, 25 bp, Homo sapien
tatccagatgagaagtcggtgtgcc

SEQ ID NO: 5781246 - DNA, 25 bp, Homo sapien
ttttaatcccatgaccaggccacgg

SEQ ID NO: 5781247 - DNA, 25 bp, Homo sapien
cacccacgagaacatctacctctgg

SEQ ID NO: 5781248 - DNA, 25 bp, Homo sapien
ctccccacatggtgctgaggctccc

SEQ ID NO: 5781249 - DNA, 25 bp, Homo sapien
ctcctcaacagattcatcctgctaa

SEQ ID NO: 5781250 - DNA, 25 bp, Homo sapien
tgaggcgggtgaggtgaggagcagc

SEQ ID NO: 5781251 - DNA, 25 bp, Homo sapien
agcgcgtccacagtgccaccctggc

SEQ ID NO: 5781252 - DNA, 25 bp, Homo sapien
cgcccccgccagccgcgccgtgacg

SEQ ID NO: 5781253 - DNA, 25 bp, Homo sapien
cattcctcctccccacatggtgctg

SEQ ID NO: 5781254 - DNA, 25 bp, Homo sapien
agattatgttgtgctctttattgcc

SEQ ID NO: 5781255 - DNA, 25 bp, Homo sapien
ccccagcggctggagaagtatccag

SEQ ID NO: 5781256 - DNA, 25 bp, Homo sapien
gggcgaaggagctgctagaacaatg

SEQ ID NO: 5781257 - DNA, 25 bp, Homo sapien
tttagggtcctgatttgtgggaaca

SEQ ID NO: 5781258 - DNA, 25 bp, Homo sapien
gttggagttttaagcagaggtgaca

SEQ ID NO: 5781259 - DNA, 25 bp, Homo sapien
catcagtctgggagaacctgacctc

SEQ ID NO: 5781260 - DNA, 25 bp, Homo sapien
ccgcctcaacgacatcagtctggga

SEQ ID NO: 5781261 - DNA, 25 bp, Homo sapien
atgagctagcctgtagaggggaact

SEQ ID NO: 5781262 - DNA, 25 bp, Homo sapien
ttcccagaacatcgccgaagcctcc

SEQ ID NO: 5781263 - DNA, 25 bp, Homo sapien
gctgctgaacaagggcacggaacat

SEQ ID NO: 5781264 - DNA, 25 bp, Homo sapien
ttctgcacaggctccttcctgcttt

SEQ ID NO: 5781265 - DNA, 25 bp, Homo sapien
tgcccccctctcactgaccaggggt

SEQ ID NO: 5781266 - DNA, 25 bp, Homo sapien
tctgggcctggagtgacacaggaag

SEQ ID NO: 5781267 - DNA, 25 bp, Homo sapien
tcaacagattcatcctgctaaagcc

SEQ ID NO: 5781268 - DNA, 25 bp, Homo sapien
tgtgctgcttgccagccttgcagtt

SEQ ID NO: 5781269 - DNA, 25 bp, Homo sapien
gggtgaggtgaggagcagcccctcg

SEQ ID NO: 5781270 - DNA, 25 bp, Homo sapien
tgacatctggttgacgcctcaggtg

SEQ ID NO: 5781271 - DNA, 25 bp, Homo sapien
ctgcttgccagccttgcagttggag

SEQ ID NO: 5781272 - DNA, 25 bp, Homo sapien
aacattactcgtatccctgcacacc

SEQ ID NO: 5781273 - DNA, 25 bp, Homo sapien
tgtccatcctccatggcacagccct

SEQ ID NO: 5781274 - DNA, 25 bp, Homo sapien
tgaggcaaagggctggccacaccac

SEQ ID NO: 5781275 - DNA, 25 bp, Homo sapien
gctcggaaacagacctcctcaacag

SEQ ID NO: 5781276 - DNA, 25 bp, Homo sapien
cgagcaccgatgactgctgggggct

SEQ ID NO: 5781277 - DNA, 25 bp, Homo sapien
tcactgcgccgctatggccgggatg

SEQ ID NO: 5781278 - DNA, 25 bp, Homo sapien
gagcttgaggctggcactctgactg

SEQ ID NO: 5781279 - DNA, 25 bp, Homo sapien
gctggctggctcagctaagtggcac

SEQ ID NO: 5781280 - DNA, 25 bp, Homo sapien
tggccaccctctggccagccaaaag

SEQ ID NO: 5781281 - DNA, 25 bp, Homo sapien
gagcccttgagctagggaggtggtg

SEQ ID NO: 5781282 - DNA, 25 bp, Homo sapien
aagaccccatcccagtgaccacagt

SEQ ID NO: 5781283 - DNA, 25 bp, Homo sapien
gaggtgacatctggttgacgcctca

SEQ ID NO: 5781284 - DNA, 25 bp, Homo sapien
cctgcttgaactaccagggccacag

SEQ ID NO: 5781285 - DNA, 25 bp, Homo sapien
ccatgtggaggaaggctggagcttg

SEQ ID NO: 5781286 - DNA, 25 bp, Homo sapien
gaccaggccacggtcaaggctgttt

SEQ ID NO: 5781287 - DNA, 25 bp, Homo sapien
taaccactatttgagttgtggcagg

SEQ ID NO: 5781288 - DNA, 25 bp, Homo sapien
ctctataccttccagacacaagagg

SEQ ID NO: 5781289 - DNA, 25 bp, Homo sapien
ttcctctgtgctgcttgccagcctt

SEQ ID NO: 5781290 - DNA, 25 bp, Homo sapien
aataggccaggagggaaggccgcag

SEQ ID NO: 5781291 - DNA, 25 bp, Homo sapien
tatatatggcttatgacatactctg

SEQ ID NO: 5781292 - DNA, 25 bp, Homo sapien
gcttgccagccttgcagttggagtt

SEQ ID NO: 5781293 - DNA, 25 bp, Homo sapien
ggttcccagaacatcgccgaagcct

SEQ ID NO: 5781294 - DNA, 25 bp, Homo sapien
acccctgctgcccccctctcactga

SEQ ID NO: 5781295 - DNA, 25 bp, Homo sapien
cttgtaaataaccactatttgagtt

SEQ ID NO: 5781296 - DNA, 25 bp, Homo sapien
tgctgcggggctggctgcagtgtac

SEQ ID NO: 5781297 - DNA, 25 bp, Homo sapien
gtacaagacactatctgtggagtgt

SEQ ID NO: 5781298 - DNA, 25 bp, Homo sapien
aaaatgtaacttctgcacaggctcc

SEQ ID NO: 5781299 - DNA, 25 bp, Homo sapien
gggtcctgatttgtgggaacagacc

SEQ ID NO: 5781300 - DNA, 25 bp, Homo sapien
aagctcgggatctaccggaggtgct

SEQ ID NO: 5781301 - DNA, 25 bp, Homo sapien
cgccgccgccctgccgcccccgcca

SEQ ID NO: 5781302 - DNA, 25 bp, Homo sapien
gcgaaggagctgctagaacaatgct

SEQ ID NO: 5781303 - DNA, 25 bp, Homo sapien
aaaggagcccttgagctagggaggt

SEQ ID NO: 5781304 - DNA, 25 bp, Homo sapien
ctgcacttcctctgtgctgcttgcc

SEQ ID NO: 5781305 - DNA, 25 bp, Homo sapien
tgcttgaactaccagggccacagga

SEQ ID NO: 5781306 - DNA, 25 bp, Homo sapien
ggttgacgcctcaggtgaaaatctg

SEQ ID NO: 5781307 - DNA, 25 bp, Homo sapien
tgactaccatgcagaagggctatct

SEQ ID NO: 5781308 - DNA, 25 bp, Homo sapien
ggagcccccttgccctgtttggcca

SEQ ID NO: 5781309 - DNA, 25 bp, Homo sapien
cgcagagcagcacaagcgggtcctg

SEQ ID NO: 5781310 - DNA, 25 bp, Homo sapien
gtgttccggaaatcctccagcaagg

SEQ ID NO: 5781311 - DNA, 25 bp, Homo sapien
cgtgtccatcctccatggcacagcc

SEQ ID NO: 5781312 - DNA, 25 bp, Homo sapien
ttaaagcaattgattttctagtgct

SEQ ID NO: 5781313 - DNA, 25 bp, Homo sapien
gcaagctgccccctccttgccccca

SEQ ID NO: 5781314 - DNA, 25 bp, Homo sapien
aaggctacgtgaagatgaagagcag

SEQ ID NO: 5781315 - DNA, 25 bp, Homo sapien
ggaggaaggctggagcttgttcctg

SEQ ID NO: 5781316 - DNA, 25 bp, Homo sapien
cagcccaggccagctcggaaacaga

SEQ ID NO: 5781317 - DNA, 25 bp, Homo sapien
atgaagagcaggaagctcgggatct

SEQ ID NO: 5781318 - DNA, 25 bp, Homo sapien
atggcacagccctcctgctgccagg

SEQ ID NO: 5781319 - DNA, 25 bp, Homo sapien
gctgcaatgcaattaaagcaattga

SEQ ID NO: 5781320 - DNA, 25 bp, Homo sapien
atcactggttcccagaacatcgccg

SEQ ID NO: 5781321 - DNA, 25 bp, Homo sapien
tgtgaacagacagatcgcttcaatg

SEQ ID NO: 5781322 - DNA, 25 bp, Homo sapien
agcgggtcctgctggaaatggagaa

SEQ ID NO: 5781323 - DNA, 25 bp, Homo sapien
catactctgtatcaatgagatcccc

SEQ ID NO: 5781324 - DNA, 25 bp, Homo sapien
acaggtgattggaggagccggagac

SEQ ID NO: 5781325 - DNA, 25 bp, Homo sapien
gagctgctagaacaatgctgaggcg

SEQ ID NO: 5781326 - DNA, 25 bp, Homo sapien
caagctgcagatcacccacgagaac

SEQ ID NO: 5781327 - DNA, 25 bp, Homo sapien
cccccgccagccgcgccgtgacgcg

SEQ ID NO: 5781328 - DNA, 25 bp, Homo sapien
gctctcaacgtgacccggggaatga

SEQ ID NO: 5781329 - DNA, 25 bp, Homo sapien
ggctacgtgaagatgaagagcagga

SEQ ID NO: 5781330 - DNA, 25 bp, Homo sapien
ccctgccccaacctggacgtgtatg

SEQ ID NO: 5781331 - DNA, 25 bp, Homo sapien
cagaacatcgccgaagcctccagct

SEQ ID NO: 5781332 - DNA, 25 bp, Homo sapien
aaaccatggcgaccaatttcagtga

SEQ ID NO: 5781333 - DNA, 25 bp, Homo sapien
tggaacaggtgattggaggagccgg

SEQ ID NO: 5781334 - DNA, 25 bp, Homo sapien
ccagccaaaagcactctgaaaccaa

SEQ ID NO: 5781335 - DNA, 25 bp, Homo sapien
cactggttcccagaacatcgccgaa

SEQ ID NO: 5781336 - DNA, 25 bp, Homo sapien
gagcttgttcctgccccaggaatag

SEQ ID NO: 5781337 - DNA, 25 bp, Homo sapien
gctgccgcgcagtgcctactggcac

SEQ ID NO: 5781338 - DNA, 25 bp, Homo sapien
ggcttctcagttcctctgggcctgg

SEQ ID NO: 5781339 - DNA, 25 bp, Homo sapien
ggggacagcagtgaggccaagaccc

SEQ ID NO: 5781340 - DNA, 25 bp, Homo sapien
atttgttgactaccatgcagaaggg

SEQ ID NO: 5781341 - DNA, 25 bp, Homo sapien
ctggacgtgtatggcgagtgcaagc

SEQ ID NO: 5781342 - DNA, 25 bp, Homo sapien
gacccaggcacctgggcatccttcc

SEQ ID NO: 5781343 - DNA, 25 bp, Homo sapien
cctcctccccacatggtgctgaggc

SEQ ID NO: 5781344 - DNA, 25 bp, Homo sapien
tccgcggcgccgctgagcaggcgct

SEQ ID NO: 5781345 - DNA, 25 bp, Homo sapien
ggggctggctgcagtgtaccgtgga

SEQ ID NO: 5781346 - DNA, 25 bp, Homo sapien
actcgtatccctgcacacccacgac

SEQ ID NO: 5781347 - DNA, 25 bp, Homo sapien
taccatgcagaagggctatctttct

SEQ ID NO: 5781348 - DNA, 25 bp, Homo sapien
gcccttgagctagggaggtggtgca

SEQ ID NO: 5781349 - DNA, 25 bp, Homo sapien
ccaggccacggtcaaggctgttttt

SEQ ID NO: 5781350 - DNA, 25 bp, Homo sapien
cttgaactaccagggccacaggagg

SEQ ID NO: 5781351 - DNA, 25 bp, Homo sapien
cgccgctatggccgggatgccacac

SEQ ID NO: 5781352 - DNA, 25 bp, Homo sapien
agtgacatcgtcaagcaaggctacg

SEQ ID NO: 5781353 - DNA, 25 bp, Homo sapien
gacaatgcccaagcagagggagccc

SEQ ID NO: 5781354 - DNA, 25 bp, Homo sapien
atgtggaggaaggctggagcttgtt

SEQ ID NO: 5781355 - DNA, 25 bp, Homo sapien
aacaatgctgaggcgggtgaggtga

SEQ ID NO: 5781356 - DNA, 25 bp, Homo sapien
aggggtgcagtgtgaacagacagat

SEQ ID NO: 5781357 - DNA, 25 bp, Homo sapien
ggccggaacagcaggtggcttctca

SEQ ID NO: 5781358 - DNA, 25 bp, Homo sapien
gtgcagtcagcctcgctctcaacgt

SEQ ID NO: 5781359 - DNA, 25 bp, Homo sapien
ggttttaaaatgtaacttctgcaca

SEQ ID NO: 5781360 - DNA, 25 bp, Homo sapien
accttccagacacaagagggggagc

SEQ ID NO: 5781361 - DNA, 25 bp, Homo sapien
gaaagggagcaagctgccccctcct

SEQ ID NO: 5781362 - DNA, 25 bp, Homo sapien
agagggagcccccttgccctgtttg

SEQ ID NO: 5781363 - DNA, 25 bp, Homo sapien
gccacaggagggggataatcagagc

SEQ ID NO: 5781364 - DNA, 25 bp, Homo sapien
cccgacagagtgtctggaacaggtg

SEQ ID NO: 5781365 - DNA, 25 bp, Homo sapien
ccaggccagctcggaaacagacctc

SEQ ID NO: 5781366 - DNA, 25 bp, Homo sapien
accaggggtggacaatgcccaagca

SEQ ID NO: 5781367 - DNA, 25 bp, Homo sapien
gctgtttttgagtatgagtgcagtc

SEQ ID NO: 5781368 - DNA, 25 bp, Homo sapien
gaaatggagaagaacgtgaggctgc

SEQ ID NO: 5781369 - DNA, 25 bp, Homo sapien
caacctggacgtgtatggcgagtgc

SEQ ID NO: 5781370 - DNA, 25 bp, Homo sapien
aagggctatctttctattcacgtca

SEQ ID NO: 5781371 - DNA, 25 bp, Homo sapien
gggaaggccgcagcaggactgccgt

SEQ ID NO: 5781372 - DNA, 25 bp, Homo sapien
ctgaggctccctgctgcaatgcaat

SEQ ID NO: 5781373 - DNA, 25 bp, Homo sapien
tgtgttacgcggctccccaaggaga

SEQ ID NO: 5781374 - DNA, 25 bp, Homo sapien
cacaggaaggatctgcacttcctct

SEQ ID NO: 5781375 - DNA, 25 bp, Homo sapien
aagtggcacgatgacgcatgaagga

SEQ ID NO: 5781376 - DNA, 25 bp, Homo sapien
tcagctaagtggcacgatgacgcat

SEQ ID NO: 5781377 - DNA, 25 bp, Homo sapien
gagcaagctgccccctccttgcccc

SEQ ID NO: 5781378 - DNA, 25 bp, Homo sapien
gagctggctggctcagctaagtggc

SEQ ID NO: 5781379 - DNA, 25 bp, Homo sapien
ggactgaggcaaagggctggccaca

SEQ ID NO: 5781380 - DNA, 25 bp, Homo sapien
gctggaaatggagaagaacgtgagg

SEQ ID NO: 5781381 - DNA, 25 bp, Homo sapien
ttaaaatgtaacttctgcacaggct

SEQ ID NO: 5781382 - DNA, 25 bp, Homo sapien
gtgaggtgaggagcagcccctcgcg

SEQ ID NO: 5781383 - DNA, 25 bp, Homo sapien
aatcctccagcaaggggccccagcg

SEQ ID NO: 5781384 - DNA, 25 bp, Homo sapien
gatgtgtgatgctggggaaggactc

SEQ ID NO: 5781385 - DNA, 25 bp, Homo sapien
gaagatgaagagcaggaagctcggg

SEQ ID NO: 5781386 - DNA, 25 bp, Homo sapien
cctcagggggctgtcggccaagagc

SEQ ID NO: 5781387 - DNA, 25 bp, Homo sapien
gcctcaacgacatcagtctgggaga

SEQ ID NO: 5781388 - DNA, 25 bp, Homo sapien
gggtaggggtgctgattacctcagc

SEQ ID NO: 5781389 - DNA, 25 bp, Homo sapien
gggcatgagcctgctccgcggcgcc

SEQ ID NO: 5781390 - DNA, 25 bp, Homo sapien
ctgctggaaatggagaagaacgtga

SEQ ID NO: 5781391 - DNA, 25 bp, Homo sapien
atctgcacttcctctgtgctgcttg

SEQ ID NO: 5781392 - DNA, 25 bp, Homo sapien
tgggagaacctgacctcctggcccc

SEQ ID NO: 5781393 - DNA, 25 bp, Homo sapien
caatgcccaagcagagggagccccc

SEQ ID NO: 5781394 - DNA, 25 bp, Homo sapien
agccgcgccgtgacgcgggcatgag

SEQ ID NO: 5781395 - DNA, 25 bp, Homo sapien
gcagcccctcgcggcagccccgaca

SEQ ID NO: 5781396 - DNA, 25 bp, Homo sapien
tcctgctggaaatggagaagaacgt

SEQ ID NO: 5781397 - DNA, 25 bp, Homo sapien
gtgaccacagtgctggcgagcaccg

SEQ ID NO: 5781398 - DNA, 25 bp, Homo sapien
ctcaccccatccttccccaccaata

SEQ ID NO: 5781399 - DNA, 25 bp, Homo sapien
cccaggaataggccaggagggaagg

SEQ ID NO: 5781400 - DNA, 25 bp, Homo sapien
cctgggcatccttcccctcgcctct

SEQ ID NO: 5781401 - DNA, 25 bp, Homo sapien
atgtgtgaggggttggagctaccgt

SEQ ID NO: 5781402 - DNA, 25 bp, Homo sapien
agagtgtctggaacaggtgattgga

SEQ ID NO: 5781403 - DNA, 25 bp, Homo sapien
tcagttcctctgggcctggagtgac

SEQ ID NO: 5781404 - DNA, 25 bp, Homo sapien
caatgagatcccctcaccctcaccc

SEQ ID NO: 5781405 - DNA, 25 bp, Homo sapien
atcgccgaagcctccagctatgctg

SEQ ID NO: 5781406 - DNA, 25 bp, Homo sapien
ccagggggacagcagtgaggccaag

SEQ ID NO: 5781407 - DNA, 25 bp, Homo sapien
tctcaacgtgacccggggaatgacc

SEQ ID NO: 5781408 - DNA, 25 bp, Homo sapien
gggaatgaccacccagagggatgag

SEQ ID NO: 5781409 - DNA, 25 bp, Homo sapien
cggcgccgctgagcaggcgctcctg

SEQ ID NO: 5781410 - DNA, 25 bp, Homo sapien
tccatcctccatggcacagccctcc

SEQ ID NO: 5781411 - DNA, 25 bp, Homo sapien
tcgtctcgtggcccctctgctcact

SEQ ID NO: 5781412 - DNA, 25 bp, Homo sapien
aggagctgctagaacaatgctgagg

SEQ ID NO: 5781413 - DNA, 25 bp, Homo sapien
actatctgtggagtgtctggggtcc

SEQ ID NO: 5781414 - DNA, 25 bp, Homo sapien
aaacagcccaagggccggaacagca

SEQ ID NO: 5781415 - DNA, 25 bp, Homo sapien
ccctgcacacccacgaccatgctgc

SEQ ID NO: 5781416 - DNA, 25 bp, Homo sapien
gattttaatatatatggcttatgac

SEQ ID NO: 5781417 - DNA, 25 bp, Homo sapien
cagattcatcctgctaaagccaaag

SEQ ID NO: 5781418 - DNA, 25 bp, Homo sapien
gtctggggtcccgcctcaacgacat

SEQ ID NO: 5781419 - DNA, 25 bp, Homo sapien
ccgaagcctccagctatgctggtga

SEQ ID NO: 5781420 - DNA, 25 bp, Homo sapien
actgatgactcggcacgtaccttca

SEQ ID NO: 5781421 - DNA, 25 bp, Homo sapien
gcacttcctctgtgctgcttgccag

SEQ ID NO: 5781422 - DNA, 25 bp, Homo sapien
aggaggatgataaagcacgcggccc

SEQ ID NO: 5781423 - DNA, 25 bp, Homo sapien
caatgctgaggcgggtgaggtgagg

SEQ ID NO: 5781424 - DNA, 25 bp, Homo sapien
ccagcggctggagaagtatccagat

SEQ ID NO: 5781425 - DNA, 25 bp, Homo sapien
cgtcaagcaaggctacgtgaagatg

SEQ ID NO: 5781426 - DNA, 25 bp, Homo sapien
caccctggccatcgcagagcagcac

SEQ ID NO: 5781427 - DNA, 25 bp, Homo sapien
cccgggcctcggcgcccagcaggcg

SEQ ID NO: 5781428 - DNA, 25 bp, Homo sapien
tctgaaaccaagaccttcccattcc

SEQ ID NO: 5781429 - DNA, 25 bp, Homo sapien
ctcaccctcaccccatccttcccca

SEQ ID NO: 5781430 - DNA, 25 bp, Homo sapien
cgccctgccgcccccgccagccgcg

SEQ ID NO: 5781431 - DNA, 25 bp, Homo sapien
gcacggaacattactcgtatccctg

SEQ ID NO: 5781432 - DNA, 25 bp, Homo sapien
tggctggctcagctaagtggcacga

SEQ ID NO: 5781433 - DNA, 25 bp, Homo sapien
ctgccgcccccgccagccgcgccgt

SEQ ID NO: 5781434 - DNA, 25 bp, Homo sapien
gaccacccagagggatgagctagcc

SEQ ID NO: 5781435 - DNA, 25 bp, Homo sapien
atcgtcaagcaaggctacgtgaaga

SEQ ID NO: 5781436 - DNA, 25 bp, Homo sapien
ttttttaatcccatgaccaggccac

SEQ ID NO: 5781437 - DNA, 25 bp, Homo sapien
atgctgccgcgcagtgcctactggc

SEQ ID NO: 5781438 - DNA, 25 bp, Homo sapien
taaagccaaagcccagccaggggga

SEQ ID NO: 5781439 - DNA, 25 bp, Homo sapien
gctcactgcgccgctatggccggga

SEQ ID NO: 5781440 - DNA, 25 bp, Homo sapien
ctgactgctggcttttcccaaacag

SEQ ID NO: 5781441 - DNA, 25 bp, Homo sapien
cggaaatcctccagcaaggggcccc

SEQ ID NO: 5781442 - DNA, 25 bp, Homo sapien
aggccagctcggaaacagacctcct

SEQ ID NO: 5781443 - DNA, 25 bp, Homo sapien
gcccctctgctcactgcgccgctat

SEQ ID NO: 5781444 - DNA, 25 bp, Homo sapien
gtcggccaagagcctggagaaaggg

SEQ ID NO: 5781445 - DNA, 25 bp, Homo sapien
gctttgtaggctgggaagatgcccc

SEQ ID NO: 5781446 - DNA, 25 bp, Homo sapien
cctggagtgacacaggaaggatctg

SEQ ID NO: 5781447 - DNA, 25 bp, Homo sapien
taaataaccactatttgagttgtgg

SEQ ID NO: 5781448 - DNA, 25 bp, Homo sapien
agcacaagcgggtcctgctggaaat

SEQ ID NO: 5781449 - DNA, 25 bp, Homo sapien
cagaggagtggtacaagacactatc

SEQ ID NO: 5781450 - DNA, 25 bp, Homo sapien
gcggcagccccgacagagtgtctgg

SEQ ID NO: 5781451 - DNA, 25 bp, Homo sapien
cacacaaattttttaatcccatgac

SEQ ID NO: 5781452 - DNA, 25 bp, Homo sapien
ctgctaaagccaaagcccagccagg

SEQ ID NO: 5781453 - DNA, 25 bp, Homo sapien
tgcctgctgcggggctggctgcagt

SEQ ID NO: 5781454 - DNA, 25 bp, Homo sapien
atgaccaggccacggtcaaggctgt

SEQ ID NO: 5781455 - DNA, 25 bp, Homo sapien
gtatccctgcacacccacgaccatg

SEQ ID NO: 5781456 - DNA, 25 bp, Homo sapien
ccccttgccctgtttggccaccctc

SEQ ID NO: 5781457 - DNA, 25 bp, Homo sapien
gaaaaccatggcgaccaatttcagt

SEQ ID NO: 5781458 - DNA, 25 bp, Homo sapien
tacctctgggacatccacaaccccc

SEQ ID NO: 5781459 - DNA, 25 bp, Homo sapien
atgccacacgctttaccttcgaggc

SEQ ID NO: 5781460 - DNA, 25 bp, Homo sapien
gggtatggggcagcccaggccagct

SEQ ID NO: 5781461 - DNA, 25 bp, Homo sapien
tgaggagcagcccctcgcggcagcc

SEQ ID NO: 5781462 - DNA, 25 bp, Homo sapien
ggatgaggctggactgaggcaaagg

SEQ ID NO: 5781463 - DNA, 25 bp, Homo sapien
ccgcgccgtgacgcgggcatgagcc

SEQ ID NO: 5781464 - DNA, 25 bp, Homo sapien
tattcacgtcaaacttttggttgtg

SEQ ID NO: 5781465 - DNA, 25 bp, Homo sapien
gagttttaagcagaggtgacatctg

SEQ ID NO: 5781466 - DNA, 25 bp, Homo sapien
gatctaccggaggtgctggctggtg

SEQ ID NO: 5781467 - DNA, 25 bp, Homo sapien
ttacgcggctccccaaggagaccaa

SEQ ID NO: 5781468 - DNA, 25 bp, Homo sapien
cgcggcgccgctgagcaggcgctcc

SEQ ID NO: 5781469 - DNA, 25 bp, Homo sapien
tcatattcactgatgactcggcacg

SEQ ID NO: 5781470 - DNA, 25 bp, Homo sapien
caccaatacacacaaattttttaat

SEQ ID NO: 5781471 - DNA, 25 bp, Homo sapien
ggctggctgcagtgtaccgtggaca

SEQ ID NO: 5781472 - DNA, 25 bp, Homo sapien
gaggggttggagctaccgtgggact

SEQ ID NO: 5781473 - DNA, 25 bp, Homo sapien
tagaggcagaggagtggtacaagac

SEQ ID NO: 5781474 - DNA, 25 bp, Homo sapien
cccagaacatcgccgaagcctccag

SEQ ID NO: 5781475 - DNA, 25 bp, Homo sapien
gctagaggcagaggagtggtacaag

SEQ ID NO: 5781476 - DNA, 25 bp, Homo sapien
cgtccacagtgccaccctggccatc

SEQ ID NO: 5781477 - DNA, 25 bp, Homo sapien
tcctgctaaagccaaagcccagcca

SEQ ID NO: 5781478 - DNA, 25 bp, Homo sapien
aggtgactgagatcagcaacgtcaa

SEQ ID NO: 5781479 - DNA, 25 bp, Homo sapien
tgctagaacaatgctgaggcgggtg

SEQ ID NO: 5781480 - DNA, 25 bp, Homo sapien
taatcagagcttgaggctggcactc

SEQ ID NO: 5781481 - DNA, 25 bp, Homo sapien
ttaccttcgaggctggccggatgtg

SEQ ID NO: 5781482 - DNA, 25 bp, Homo sapien
ttcacgtcaaacttttggttgtgtg

SEQ ID NO: 5781483 - DNA, 25 bp, Homo sapien
agcccctcgcggcagccccgacaga

SEQ ID NO: 5781484 - DNA, 25 bp, Homo sapien
ctcgcctctgccaggccccgcgccc

SEQ ID NO: 5781485 - DNA, 25 bp, Homo sapien
gggctgcctgctgcggggctggctg

SEQ ID NO: 5781486 - DNA, 25 bp, Homo sapien
caattgattttctagtgctggtatt

SEQ ID NO: 5781487 - DNA, 25 bp, Homo sapien
agtgcaagctgcagatcacccacga

SEQ ID NO: 5781488 - DNA, 25 bp, Homo sapien
ttcatcctgctaaagccaaagccca

SEQ ID NO: 5781489 - DNA, 25 bp, Homo sapien
aatgtaacttctgcacaggctcctt

SEQ ID NO: 5781490 - DNA, 25 bp, Homo sapien
gctggagcttgttcctgccccagga

SEQ ID NO: 5781491 - DNA, 25 bp, Homo sapien
ttactcgtatccctgcacacccacg

SEQ ID NO: 5781492 - DNA, 25 bp, Homo sapien
cgtggcccctctgctcactgcgccg

SEQ ID NO: 5781493 - DNA, 25 bp, Homo sapien
agggagcccccttgccctgtttggc

SEQ ID NO: 5781494 - DNA, 25 bp, Homo sapien
ccgccgccctgccgcccccgccagc

SEQ ID NO: 5781495 - DNA, 25 bp, Homo sapien
ggggttggagctaccgtgggactat

SEQ ID NO: 5781496 - DNA, 25 bp, Homo sapien
cgggtcctgctggaaatggagaaga

SEQ ID NO: 5781497 - DNA, 25 bp, Homo sapien
cgacagagtgtctggaacaggtgat

SEQ ID NO: 5781498 - DNA, 25 bp, Homo sapien
ttgtgctctttattgccaaaaataa

SEQ ID NO: 5781499 - DNA, 25 bp, Homo sapien
ggccaagaccccatcccagtgacca

SEQ ID NO: 5781500 - DNA, 25 bp, Homo sapien
ggtgctgaggctccctgctgcaatg

SEQ ID NO: 5781501 - DNA, 25 bp, Homo sapien
gcagatcacccacgagaacatctac

SEQ ID NO: 5781502 - DNA, 25 bp, Homo sapien
tggcaggaggatgataaagcacgcg

SEQ ID NO: 5781503 - DNA, 25 bp, Homo sapien
gtgaggggttggagctaccgtggga

SEQ ID NO: 5781504 - DNA, 25 bp, Homo sapien
atcacccacgagaacatctacctct

SEQ ID NO: 5781505 - DNA, 25 bp, Homo sapien
aaaagcactctgaaaccaagacctt

SEQ ID NO: 5781506 - DNA, 25 bp, Homo sapien
ccttgagctagggaggtggtgcagt

SEQ ID NO: 5781507 - DNA, 25 bp, Homo sapien
agggatgagctagcctgtagagggg

SEQ ID NO: 5781508 - DNA, 25 bp, Homo sapien
gtaggggtgctgattacctcagcca

SEQ ID NO: 5781509 - DNA, 25 bp, Homo sapien
ccttccccaccaatacacacaaatt

SEQ ID NO: 5781510 - DNA, 25 bp, Homo sapien
tcactgaccaggggtggacaatgcc

SEQ ID NO: 5781511 - DNA, 25 bp, Homo sapien
aggccacggtcaaggctgtttttga

SEQ ID NO: 5781512 - DNA, 25 bp, Homo sapien
tggcccctctgctcactgcgccgct

SEQ ID NO: 5781513 - DNA, 25 bp, Homo sapien
cagtgccaccctggccatcgcagag

SEQ ID NO: 5781514 - DNA, 25 bp, Homo sapien
gagatcagcaacgtcaagtgtgtta

SEQ ID NO: 5781515 - DNA, 25 bp, Homo sapien
ggcacgatgacgcatgaaggagatt

SEQ ID NO: 5781516 - DNA, 25 bp, Homo sapien
gccaaagcccagccagggggacagc

SEQ ID NO: 5781517 - DNA, 25 bp, Homo sapien
tatgttgtgctctttattgccaaaa

SEQ ID NO: 5781518 - DNA, 25 bp, Homo sapien
tcgctctcaacgtgacccggggaat

SEQ ID NO: 5781519 - DNA, 25 bp, Homo sapien
ggcagccccgacagagtgtctggaa

SEQ ID NO: 5781520 - DNA, 25 bp, Homo sapien
ggcccctcccaaaggagcccttgag

SEQ ID NO: 5781521 - DNA, 25 bp, Homo sapien
gagttgtggcaggaggatgataaag

SEQ ID NO: 5781522 - DNA, 25 bp, Homo sapien
ctaagtggcacgatgacgcatgaag

SEQ ID NO: 5781523 - DNA, 25 bp, Homo sapien
cttcccctcgcctctgccaggcccc

SEQ ID NO: 5781524 - DNA, 25 bp, Homo sapien
gcaggaggatgataaagcacgcggc

SEQ ID NO: 5781525 - DNA, 25 bp, Homo sapien
ctcgtggcccctctgctcactgcgc

SEQ ID NO: 5781526 - DNA, 25 bp, Homo sapien
gacatactctgtatcaatgagatcc

SEQ ID NO: 5781527 - DNA, 25 bp, Homo sapien
cctcagccatgtggaggaaggctgg

SEQ ID NO: 5781528 - DNA, 25 bp, Homo sapien
gtgctgattacctcagccatgtgga

SEQ ID NO: 5781529 - DNA, 25 bp, Homo sapien
accacctgagcatgtgtgaggggtt

SEQ ID NO: 5781530 - DNA, 25 bp, Homo sapien
tctcactgaccaggggtggacaatg

SEQ ID NO: 5781531 - DNA, 25 bp, Homo sapien
ggtggtgcagtcagcctcgctctca

SEQ ID NO: 5781532 - DNA, 25 bp, Homo sapien
ccttgcccccaaggatgaggctgga

SEQ ID NO: 5781533 - DNA, 25 bp, Homo sapien
ggatgccacacgctttaccttcgag

SEQ ID NO: 5781534 - DNA, 25 bp, Homo sapien
gtcggtgtgcctccggggctgcccc

SEQ ID NO: 5781535 - DNA, 25 bp, Homo sapien
gcactctgaaaccaagaccttccca

SEQ ID NO: 5781536 - DNA, 25 bp, Homo sapien
gtgtctggggtcccgcctcaacgac

SEQ ID NO: 5781537 - DNA, 25 bp, Homo sapien
cgcctctgccaggccccgcgcccct

SEQ ID NO: 5781538 - DNA, 25 bp, Homo sapien
gggaaaaccatggcgaccaatttca

SEQ ID NO: 5781539 - DNA, 25 bp, Homo sapien
cccccctctcactgaccaggggtgg

SEQ ID NO: 5781540 - DNA, 25 bp, Homo sapien
ggggccccagcggctggagaagtat

SEQ ID NO: 5781541 - DNA, 25 bp, Homo sapien
cccggcgccgccgccgccctgccgc

SEQ ID NO: 5781542 - DNA, 25 bp, Homo sapien
ccatggcacagccctcctgctgcca

SEQ ID NO: 5781543 - DNA, 25 bp, Homo sapien
gctccgcggcgccgctgagcaggcg

SEQ ID NO: 5781544 - DNA, 25 bp, Homo sapien
gtcaaggctgtttttgagtatgagt

SEQ ID NO: 5781545 - DNA, 25 bp, Homo sapien
tgattttctagtgctggtatttgtt

SEQ ID NO: 5781546 - DNA, 25 bp, Homo sapien
ccacccagagggatgagctagcctg

SEQ ID NO: 5781547 - DNA, 25 bp, Homo sapien
ctatttgagttgtggcaggaggatg

SEQ ID NO: 5781548 - DNA, 25 bp, Homo sapien
ggcgagtgcaagctgcagatcaccc

SEQ ID NO: 5781549 - DNA, 25 bp, Homo sapien
gtgctggtatttgttgactaccatg

SEQ ID NO: 5781550 - DNA, 25 bp, Homo sapien
gccatcatattcactgatgactcgg

SEQ ID NO: 5781551 - DNA, 25 bp, Homo sapien
agtgtgaacagacagatcgcttcaa

SEQ ID NO: 5781552 - DNA, 25 bp, Homo sapien
tttcagtgacatcgtcaagcaaggc

SEQ ID NO: 5781553 - DNA, 25 bp, Homo sapien
ttgttcctgccccaggaataggcca

SEQ ID NO: 5781554 - DNA, 25 bp, Homo sapien
cacgtcaaacttttggttgtgtggg

SEQ ID NO: 5781555 - DNA, 25 bp, Homo sapien
agttcctctgggcctggagtgacac

SEQ ID NO: 5781556 - DNA, 25 bp, Homo sapien
ctgcacacccacgaccatgctgccg

SEQ ID NO: 5781557 - DNA, 25 bp, Homo sapien
tgcaagctgcagatcacccacgaga

SEQ ID NO: 5781558 - DNA, 25 bp, Homo sapien
gaggtggtgcagtcagcctcgctct

SEQ ID NO: 5781559 - DNA, 25 bp, Homo sapien
ccctcgcctctgccaggccccgcgc

SEQ ID NO: 5781560 - DNA, 25 bp, Homo sapien
cagttggagttttaagcagaggtga

SEQ ID NO: 5781561 - DNA, 25 bp, Homo sapien
ggagattatgttgtgctctttattg

SEQ ID NO: 5781562 - DNA, 25 bp, Homo sapien
atgcagaagggctatctttctattc

SEQ ID NO: 5781563 - DNA, 25 bp, Homo sapien
ctgctccgcggcgccgctgagcagg

SEQ ID NO: 5781564 - DNA, 25 bp, Homo sapien
catccttcccctcgcctctgccagg

SEQ ID NO: 5781565 - DNA, 25 bp, Homo sapien
gaccaatttcagtgacatcgtcaag

SEQ ID NO: 5781566 - DNA, 25 bp, Homo sapien
ggccacaccacctgagcatgtgtga

SEQ ID NO: 5781567 - DNA, 25 bp, Homo sapien
gggggctgcctgctgcggggctggc

SEQ ID NO: 5781568 - DNA, 25 bp, Homo sapien
cttccagacacaagagggggagcag

SEQ ID NO: 5781569 - DNA, 25 bp, Homo sapien
aggactctataccttccagacacaa

SEQ ID NO: 5781570 - DNA, 25 bp, Homo sapien
tggagaagtatccagatgagaagtc

SEQ ID NO: 5781571 - DNA, 25 bp, Homo sapien
cgcctcaggtgaaaatctggtttta

SEQ ID NO: 5781572 - DNA, 25 bp, Homo sapien
accactatttgagttgtggcaggag

SEQ ID NO: 5781573 - DNA, 25 bp, Homo sapien
gctggctcagctaagtggcacgatg

SEQ ID NO: 5781574 - DNA, 25 bp, Homo sapien
cctgtttggccaccctctggccagc

SEQ ID NO: 5781575 - DNA, 25 bp, Homo sapien
cattactcgtatccctgcacaccca

SEQ ID NO: 5781576 - DNA, 25 bp, Homo sapien
atcccagtgaccacagtgctggcga

SEQ ID NO: 5781577 - DNA, 25 bp, Homo sapien
ggagaccaagcggcaggcggtggcc

SEQ ID NO: 5781578 - DNA, 25 bp, Homo sapien
tccggaaatcctccagcaaggggcc

SEQ ID NO: 5781579 - DNA, 25 bp, Homo sapien
ccgcgcagtgcctactggcaccaca

SEQ ID NO: 5781580 - DNA, 25 bp, Homo sapien
ggcacctgggcatccttcccctcgc

SEQ ID NO: 5781581 - DNA, 25 bp, Homo sapien
tccacagtgccaccctggccatcgc

SEQ ID NO: 5781582 - DNA, 25 bp, Homo sapien
caccctctggccagccaaaagcact

SEQ ID NO: 5781583 - DNA, 25 bp, Homo sapien
gcatgagcctgctccgcggcgccgc

SEQ ID NO: 5781584 - DNA, 25 bp, Homo sapien
gcagaagggctatctttctattcac

SEQ ID NO: 5781585 - DNA, 25 bp, Homo sapien
agccaaaagcactctgaaaccaaga

SEQ ID NO: 5781586 - DNA, 25 bp, Homo sapien
ccatccttccccaccaatacacaca

SEQ ID NO: 5781587 - DNA, 25 bp, Homo sapien
aggctggagcttgttcctgccccag

SEQ ID NO: 5781588 - DNA, 25 bp, Homo sapien
ccacaccacctgagcatgtgtgagg

SEQ ID NO: 5781589 - DNA, 25 bp, Homo sapien
tcgcggcagccccgacagagtgtct

SEQ ID NO: 5781590 - DNA, 25 bp, Homo sapien
agggggctgtcggccaagagcctgg

SEQ ID NO: 5781591 - DNA, 25 bp, Homo sapien
tggagaaagggagcaagctgccccc

SEQ ID NO: 5781592 - DNA, 25 bp, Homo sapien
gccgcagcaggactgccgtggggag

SEQ ID NO: 5781593 - DNA, 25 bp, Homo sapien
tatatggcttatgacatactctgta

SEQ ID NO: 5781594 - DNA, 25 bp, Homo sapien
tcccaaacagcccaagggccggaac

SEQ ID NO: 5781595 - DNA, 25 bp, Homo sapien
gtgtatggcgagtgcaagctgcaga

SEQ ID NO: 5781596 - DNA, 25 bp, Homo sapien
aatggagaagaacgtgaggctgctg

SEQ ID NO: 5781597 - DNA, 25 bp, Homo sapien
tgactgctgggggctgcctgctgcg

SEQ ID NO: 5781598 - DNA, 25 bp, Homo sapien
ggaataggccaggagggaaggccgc

SEQ ID NO: 5781599 - DNA, 25 bp, Homo sapien
ggggtggacaatgcccaagcagagg

SEQ ID NO: 5781600 - DNA, 25 bp, Homo sapien
ggaagctcgggatctaccggaggtg

SEQ ID NO: 5781601 - DNA, 25 bp, Homo sapien
acactatctgtggagtgtctggggt

SEQ ID NO: 5781602 - DNA, 25 bp, Homo sapien
gtaccttcacctgcgactcagagct

SEQ ID NO: 5781603 - DNA, 25 bp, Homo sapien
gcagtgtaccgtggacagcctcagg

SEQ ID NO: 5781604 - DNA, 25 bp, Homo sapien
aggccgcagcaggactgccgtgggg

SEQ ID NO: 5781605 - DNA, 25 bp, Homo sapien
cccagtgaccacagtgctggcgagc

SEQ ID NO: 5781606 - DNA, 25 bp, Homo sapien
cccacgagaacatctacctctggga

SEQ ID NO: 5781607 - DNA, 25 bp, Homo sapien
actctgaaaccaagaccttcccatt

SEQ ID NO: 5781608 - DNA, 25 bp, Homo sapien
catggcgaccaatttcagtgacatc

SEQ ID NO: 5781609 - DNA, 25 bp, Homo sapien
cgcgtccacagtgccaccctggcca

SEQ ID NO: 5781610 - DNA, 25 bp, Homo sapien
tctgggagaacctgacctcctggcc

SEQ ID NO: 5781611 - DNA, 25 bp, Homo sapien
agcatgtgtgaggggttggagctac

SEQ ID NO: 5781612 - DNA, 25 bp, Homo sapien
cagacagatcgcttcaatgtcttcc

SEQ ID NO: 5781613 - DNA, 25 bp, Homo sapien
agcccccttgccctgtttggccacc

SEQ ID NO: 5781614 - DNA, 25 bp, Homo sapien
gctagggaggtggtgcagtcagcct

SEQ ID NO: 5781615 - DNA, 25 bp, Homo sapien
agctaagtggcacgatgacgcatga

SEQ ID NO: 5781616 - DNA, 25 bp, Homo sapien
ctgacctcctggccccaggggtgca

SEQ ID NO: 5781617 - DNA, 25 bp, Homo sapien
gcggctccccaaggagaccaagcgg

SEQ ID NO: 5781618 - DNA, 25 bp, Homo sapien
ccccacatggtgctgaggctccctg

SEQ ID NO: 5781619 - DNA, 25 bp, Homo sapien
actatatactgttaatgattttaat

SEQ ID NO: 5781620 - DNA, 25 bp, Homo sapien
acgtgtatggcgagtgcaagctgca

SEQ ID NO: 5781621 - DNA, 25 bp, Homo sapien
gcttttcccaaacagcccaagggcc

SEQ ID NO: 5781622 - DNA, 25 bp, Homo sapien
ggggctgtcggccaagagcctggag

SEQ ID NO: 5781623 - DNA, 25 bp, Homo sapien
taaagcacgcggcccctcccaaagg

SEQ ID NO: 5781624 - DNA, 25 bp, Homo sapien
agcccaagggccggaacagcaggtg

SEQ ID NO: 5781625 - DNA, 25 bp, Homo sapien
ataccttccagacacaagaggggga

SEQ ID NO: 5781626 - DNA, 25 bp, Homo sapien
atattcactgatgactcggcacgta

SEQ ID NO: 5781627 - DNA, 25 bp, Homo sapien
tatctgtggagtgtctggggtcccg

SEQ ID NO: 5781628 - DNA, 25 bp, Homo sapien
acttcctctgtgctgcttgccagcc

SEQ ID NO: 5781629 - DNA, 25 bp, Homo sapien
cgccagccgcgccgtgacgcgggca

SEQ ID NO: 5781630 - DNA, 25 bp, Homo sapien
gaccccatcccagtgaccacagtgc

SEQ ID NO: 5781631 - DNA, 25 bp, Homo sapien
gcctgctccgcggcgccgctgagca

SEQ ID NO: 5781632 - DNA, 25 bp, Homo sapien
gcgcagtgcctactggcaccacatc

SEQ ID NO: 5781633 - DNA, 25 bp, Homo sapien
atccttccccaccaatacacacaaa

SEQ ID NO: 5781634 - DNA, 25 bp, Homo sapien
ctctggccagccaaaagcactctga

SEQ ID NO: 5781635 - DNA, 25 bp, Homo sapien
gccgcccccgccagccgcgccgtga

SEQ ID NO: 5781636 - DNA, 25 bp, Homo sapien
aggcgctcctggcccgggcctcggc

SEQ ID NO: 5781637 - DNA, 25 bp, Homo sapien
agtggtacaagacactatctgtgga

SEQ ID NO: 5781638 - DNA, 25 bp, Homo sapien
gagcagcacaagcgggtcctgctgg

SEQ ID NO: 5781639 - DNA, 25 bp, Homo sapien
ctccccaaggagaccaagcggcagg

SEQ ID NO: 5781640 - DNA, 25 bp, Homo sapien
cagtgaccacagtgctggcgagcac

SEQ ID NO: 5781641 - DNA, 25 bp, Homo sapien
cggggcgaaggagctgctagaacaa

SEQ ID NO: 5781642 - DNA, 25 bp, Homo sapien
gccagctcggaaacagacctcctca

SEQ ID NO: 5781643 - DNA, 25 bp, Homo sapien
gtcttcctgctgccctgccccaacc

SEQ ID NO: 5781644 - DNA, 25 bp, Homo sapien
caagagcctggagaaagggagcaag

SEQ ID NO: 5781645 - DNA, 25 bp, Homo sapien
caacgtcaagtgtgttacgcggctc

SEQ ID NO: 5781646 - DNA, 25 bp, Homo sapien
tgtctggaacaggtgattggaggag

SEQ ID NO: 5781647 - DNA, 25 bp, Homo sapien
ggttggagctaccgtgggactatat

SEQ ID NO: 5781648 - DNA, 25 bp, Homo sapien
gaagaacgtgaggctgctgaacaag

SEQ ID NO: 5781649 - DNA, 25 bp, Homo sapien
agtatgagtgcagtcgtgtccatcc

SEQ ID NO: 5781650 - DNA, 25 bp, Homo sapien
taacttctgcacaggctccttcctg

SEQ ID NO: 5781651 - DNA, 25 bp, Homo sapien
gccgtgacgcgggcatgagcctgct

SEQ ID NO: 5781652 - DNA, 25 bp, Homo sapien
ttttaatatatatggcttatgacat

SEQ ID NO: 5781653 - DNA, 25 bp, Homo sapien
acatccacaacccccgtgtgaagct

SEQ ID NO: 5781654 - DNA, 25 bp, Homo sapien
ctggactgaggcaaagggctggcca

SEQ ID NO: 5781655 - DNA, 25 bp, Homo sapien
gactgagatcagcaacgtcaagtgt

SEQ ID NO: 5781656 - DNA, 25 bp, Homo sapien
gaacaggtgattggaggagccggag

SEQ ID NO: 5781657 - DNA, 25 bp, Homo sapien
caccacatcactggttcccagaaca

SEQ ID NO: 5781658 - DNA, 25 bp, Homo sapien
acccacgaccatgctgccgcgcagt

SEQ ID NO: 5781659 - DNA, 25 bp, Homo sapien
cagcaggactgccgtggggagcacc

SEQ ID NO: 5781660 - DNA, 25 bp, Homo sapien
tttaagcagaggtgacatctggttg

SEQ ID NO: 5781661 - DNA, 25 bp, Homo sapien
ggaggagccggagacccaggcacct

SEQ ID NO: 5781662 - DNA, 25 bp, Homo sapien
catgaaggagattatgttgtgctct

SEQ ID NO: 5781663 - DNA, 25 bp, Homo sapien
gcgactcagagctagaggcagagga

SEQ ID NO: 5781664 - DNA, 25 bp, Homo sapien
gtgaggccaagaccccatcccagtg

SEQ ID NO: 5781665 - DNA, 25 bp, Homo sapien
tatctttctattcacgtcaaacttt

SEQ ID NO: 5781666 - DNA, 25 bp, Homo sapien
ggagaacctgacctcctggccccag

SEQ ID NO: 5781667 - DNA, 25 bp, Homo sapien
agcaggaagctcgggatctaccgga

SEQ ID NO: 5781668 - DNA, 25 bp, Homo sapien
acctcctcaacagattcatcctgct

SEQ ID NO: 5781669 - DNA, 25 bp, Homo sapien
tcctgctgccctgccccaacctgga

SEQ ID NO: 5781670 - DNA, 25 bp, Homo sapien
cgatgacgcatgaaggagattatgt

SEQ ID NO: 5781671 - DNA, 25 bp, Homo sapien
ccctctgctcactgcgccgctatgg

SEQ ID NO: 5781672 - DNA, 25 bp, Homo sapien
gccgccgccgccctgccgcccccgc

SEQ ID NO: 5781673 - DNA, 25 bp, Homo sapien
cccgccagccgcgccgtgacgcggg

SEQ ID NO: 5781674 - DNA, 25 bp, Homo sapien
ttgacgcctcaggtgaaaatctggt

SEQ ID NO: 5781675 - DNA, 25 bp, Homo sapien
gcagtgcctactggcaccacatcac

SEQ ID NO: 5781676 - DNA, 25 bp, Homo sapien
ggcgagcaccgatgactgctggggg

SEQ ID NO: 5781677 - DNA, 25 bp, Homo sapien
ttttaaaatgtaacttctgcacagg

SEQ ID NO: 5781678 - DNA, 25 bp, Homo sapien
cggctggagaagtatccagatgaga

SEQ ID NO: 5781679 - DNA, 25 bp, Homo sapien
tggtgcagtcagcctcgctctcaac

SEQ ID NO: 5781680 - DNA, 25 bp, Homo sapien
ctctgtatcaatgagatcccctcac

SEQ ID NO: 5781681 - DNA, 25 bp, Homo sapien
ctttggggagggaggcagagctggc

SEQ ID NO: 5781682 - DNA, 25 bp, Homo sapien
ccccctccttgcccccaaggatgag

SEQ ID NO: 5781683 - DNA, 25 bp, Homo sapien
cctactggcaccacatcactggttc

SEQ ID NO: 5781684 - DNA, 25 bp, Homo sapien
cagtcgtgtccatcctccatggcac

SEQ ID NO: 5781685 - DNA, 25 bp, Homo sapien
gctggtaaatctgctccccctcttg

SEQ ID NO: 5781686 - DNA, 25 bp, Homo sapien
tggtcactgggatggggtcttggcc

SEQ ID NO: 5781687 - DNA, 25 bp, Homo sapien
gtagctccaacccctcacacatgct

SEQ ID NO: 5781688 - DNA, 25 bp, Homo sapien
cacaacataatctccttcatgcgtc

SEQ ID NO: 5781689 - DNA, 25 bp, Homo sapien
ctctgcgatggccagggtggcactg

SEQ ID NO: 5781690 - DNA, 25 bp, Homo sapien
agtcaacaaataccagcactagaaa

SEQ ID NO: 5781691 - DNA, 25 bp, Homo sapien
tcttggtttcagagtgcttttggct

SEQ ID NO: 5781692 - DNA, 25 bp, Homo sapien
ttggtttcagagtgcttttggctgg

SEQ ID NO: 5781693 - DNA, 25 bp, Homo sapien
cctgctgggcgccgaggcccgggcc

SEQ ID NO: 5781694 - DNA, 25 bp, Homo sapien
agcatggtcgtgggtgtgcagggat

SEQ ID NO: 5781695 - DNA, 25 bp, Homo sapien
ctcctcacctcacccgcctcagcat

SEQ ID NO: 5781696 - DNA, 25 bp, Homo sapien
atcccgagcttcctgctcttcatct

SEQ ID NO: 5781697 - DNA, 25 bp, Homo sapien
gtctccggctcctccaatcacctgt

SEQ ID NO: 5781698 - DNA, 25 bp, Homo sapien
caggacccgcttgtgctgctctgcg

SEQ ID NO: 5781699 - DNA, 25 bp, Homo sapien
atgttctcgtgggtgatctgcagct

SEQ ID NO: 5781700 - DNA, 25 bp, Homo sapien
gagggtgaggggatctcattgatac

SEQ ID NO: 5781701 - DNA, 25 bp, Homo sapien
agcccttctgcatggtagtcaacaa

SEQ ID NO: 5781702 - DNA, 25 bp, Homo sapien
gtcgttgaggcgggaccccagacac

SEQ ID NO: 5781703 - DNA, 25 bp, Homo sapien
gagtcatcagtgaatatgatggcca

SEQ ID NO: 5781704 - DNA, 25 bp, Homo sapien
tccgagctggcctgggctgccccat

SEQ ID NO: 5781705 - DNA, 25 bp, Homo sapien
ggtggccaaacagggcaagggggct

SEQ ID NO: 5781706 - DNA, 25 bp, Homo sapien
ccttccctcctggcctattcctggg

SEQ ID NO: 5781707 - DNA, 25 bp, Homo sapien
ctggatacttctccagccgctgggg

SEQ ID NO: 5781708 - DNA, 25 bp, Homo sapien
gaatagaaagatagcccttctgcat

SEQ ID NO: 5781709 - DNA, 25 bp, Homo sapien
ataatctccttcatgcgtcatcgtg

SEQ ID NO: 5781710 - DNA, 25 bp, Homo sapien
cagatagtgtcttgtaccactcctc

SEQ ID NO: 5781711 - DNA, 25 bp, Homo sapien
ggggaaggatgcccaggtgcctggg

SEQ ID NO: 5781712 - DNA, 25 bp, Homo sapien
ttggggcagggcagcaggaagacat

SEQ ID NO: 5781713 - DNA, 25 bp, Homo sapien
atttccggaacaccagccagcacct

SEQ ID NO: 5781714 - DNA, 25 bp, Homo sapien
ggagcctgtgcagaagttacatttt

SEQ ID NO: 5781715 - DNA, 25 bp, Homo sapien
cttggcctcactgctgtccccctgg

SEQ ID NO: 5781716 - DNA, 25 bp, Homo sapien
taattgcattgcagcagggagcctc

SEQ ID NO: 5781717 - DNA, 25 bp, Homo sapien
tcaagctctgattatccccctcctg

SEQ ID NO: 5781718 - DNA, 25 bp, Homo sapien
gttacattttaaaaccagattttca

SEQ ID NO: 5781719 - DNA, 25 bp, Homo sapien
tacacgtccaggttggggcagggca

SEQ ID NO: 5781720 - DNA, 25 bp, Homo sapien
cctgaggctgtccacggtacactgc

SEQ ID NO: 5781721 - DNA, 25 bp, Homo sapien
ccctagctcaagggctcctttggga

SEQ ID NO: 5781722 - DNA, 25 bp, Homo sapien
gcagtgagcagaggggccacgagac

SEQ ID NO: 5781723 - DNA, 25 bp, Homo sapien
tcctctgcctctagctctgagtcgc

SEQ ID NO: 5781724 - DNA, 25 bp, Homo sapien
gggtgagggtgaggggatctcattg

SEQ ID NO: 5781725 - DNA, 25 bp, Homo sapien
tccggcccttgggctgtttgggaaa

SEQ ID NO: 5781726 - DNA, 25 bp, Homo sapien
cgaggctgactgcaccacctcccta

SEQ ID NO: 5781727 - DNA, 25 bp, Homo sapien
gccagctctgcctccctccccaaag

SEQ ID NO: 5781728 - DNA, 25 bp, Homo sapien
cgggaccccagacactccacagata

SEQ ID NO: 5781729 - DNA, 25 bp, Homo sapien
cataagccatatatattaaaatcat

SEQ ID NO: 5781730 - DNA, 25 bp, Homo sapien
ccgtggcctggtcatgggattaaaa

SEQ ID NO: 5781731 - DNA, 25 bp, Homo sapien
gtggccctggtagttcaagcaggtc

SEQ ID NO: 5781732 - DNA, 25 bp, Homo sapien
gaggtctgtttccgagctggcctgg

SEQ ID NO: 5781733 - DNA, 25 bp, Homo sapien
gtgatgtggtgccagtaggcactgc

SEQ ID NO: 5781734 - DNA, 25 bp, Homo sapien
cccttctgcatggtagtcaacaaat

SEQ ID NO: 5781735 - DNA, 25 bp, Homo sapien
ctgcctccctccccaaagacctttg

SEQ ID NO: 5781736 - DNA, 25 bp, Homo sapien
ctggaaggtatagagtccttcccca

SEQ ID NO: 5781737 - DNA, 25 bp, Homo sapien
aatgggaaggtcttggtttcagagt

SEQ ID NO: 5781738 - DNA, 25 bp, Homo sapien
caaatcaggaccctaaagtattaaa

SEQ ID NO: 5781739 - DNA, 25 bp, Homo sapien
ggtcagtgagaggggggcagcaggg

SEQ ID NO: 5781740 - DNA, 25 bp, Homo sapien
gtcgtgggtgtgcagggatacgagt

SEQ ID NO: 5781741 - DNA, 25 bp, Homo sapien
ccacctccctagctcaagggctcct

SEQ ID NO: 5781742 - DNA, 25 bp, Homo sapien
agcttgctccctttctccaggctct

SEQ ID NO: 5781743 - DNA, 25 bp, Homo sapien
cccagcctacaaagcaggaaggagc

SEQ ID NO: 5781744 - DNA, 25 bp, Homo sapien
cttgggcattgtccacccctggtca

SEQ ID NO: 5781745 - DNA, 25 bp, Homo sapien
agaggtagatgttctcgtgggtgat

SEQ ID NO: 5781746 - DNA, 25 bp, Homo sapien
aatatgatggccaccgcctgccgct

SEQ ID NO: 5781747 - DNA, 25 bp, Homo sapien
agctcatccctctgggtggtcattc

SEQ ID NO: 5781748 - DNA, 25 bp, Homo sapien
ctccggctcctccaatcacctgttc

SEQ ID NO: 5781749 - DNA, 25 bp, Homo sapien
ctgtttgggaaaagccagcagtcag

SEQ ID NO: 5781750 - DNA, 25 bp, Homo sapien
ttaaaactccaactgcaaggctggc

SEQ ID NO: 5781751 - DNA, 25 bp, Homo sapien
aaatcattaacagtatatagtccca

SEQ ID NO: 5781752 - DNA, 25 bp, Homo sapien
gccccggaggcacaccgacttctca

SEQ ID NO: 5781753 - DNA, 25 bp, Homo sapien
gccacttagctgagccagccagctc

SEQ ID NO: 5781754 - DNA, 25 bp, Homo sapien
gctctgattatccccctcctgtggc

SEQ ID NO: 5781755 - DNA, 25 bp, Homo sapien
ttgtccacccctggtcagtgagagg

SEQ ID NO: 5781756 - DNA, 25 bp, Homo sapien
tggcctattcctggggcaggaacaa

SEQ ID NO: 5781757 - DNA, 25 bp, Homo sapien
tgtggggaggaggaatgggaaggtc

SEQ ID NO: 5781758 - DNA, 25 bp, Homo sapien
ccgcttgtgctgctctgcgatggcc

SEQ ID NO: 5781759 - DNA, 25 bp, Homo sapien
tgccgagtcatcagtgaatatgatg

SEQ ID NO: 5781760 - DNA, 25 bp, Homo sapien
gtgtggcatcccggccatagcggcg

SEQ ID NO: 5781761 - DNA, 25 bp, Homo sapien
ttctgggaaccagtgatgtggtgcc

SEQ ID NO: 5781762 - DNA, 25 bp, Homo sapien
cgaggcccgggccaggagcgcctgc

SEQ ID NO: 5781763 - DNA, 25 bp, Homo sapien
tcggggctgccgcgaggggctgctc

SEQ ID NO: 5781764 - DNA, 25 bp, Homo sapien
cctcagcattgttctagcagctcct

SEQ ID NO: 5781765 - DNA, 25 bp, Homo sapien
gcctcatccttgggggcaaggaggg

SEQ ID NO: 5781766 - DNA, 25 bp, Homo sapien
aggatggggtgagggtgaggggatc

SEQ ID NO: 5781767 - DNA, 25 bp, Homo sapien
tcctcctgccacaactcaaatagtg

SEQ ID NO: 5781768 - DNA, 25 bp, Homo sapien
ccagcactagaaaatcaattgcttt

SEQ ID NO: 5781769 - DNA, 25 bp, Homo sapien
cactgctgtccccctggctgggctt

SEQ ID NO: 5781770 - DNA, 25 bp, Homo sapien
tggccagggtggcactgtggacgcg

SEQ ID NO: 5781771 - DNA, 25 bp, Homo sapien
gtgtcttgtaccactcctctgcctc

SEQ ID NO: 5781772 - DNA, 25 bp, Homo sapien
ggctcctccaatcacctgttccaga

SEQ ID NO: 5781773 - DNA, 25 bp, Homo sapien
ctccctagctcaagggctcctttgg

SEQ ID NO: 5781774 - DNA, 25 bp, Homo sapien
atttttggcaataaagagcacaaca

SEQ ID NO: 5781775 - DNA, 25 bp, Homo sapien
aaagcaggaaggagcctgtgcagaa

SEQ ID NO: 5781776 - DNA, 25 bp, Homo sapien
ctcagcaccatgtggggaggaggaa

SEQ ID NO: 5781777 - DNA, 25 bp, Homo sapien
cacaaatcaggaccctaaagtatta

SEQ ID NO: 5781778 - DNA, 25 bp, Homo sapien
cagagtatgtcataagccatatata

SEQ ID NO: 5781779 - DNA, 25 bp, Homo sapien
accccagacactccacagatagtgt

SEQ ID NO: 5781780 - DNA, 25 bp, Homo sapien
catccctctgggtggtcattccccg

SEQ ID NO: 5781781 - DNA, 25 bp, Homo sapien
cgtgggtgtgcagggatacgagtaa

SEQ ID NO: 5781782 - DNA, 25 bp, Homo sapien
gcgctggtaaatctgctccccctct

SEQ ID NO: 5781783 - DNA, 25 bp, Homo sapien
gcgggggcggcagggcggcggcggc

SEQ ID NO: 5781784 - DNA, 25 bp, Homo sapien
ccagcagtcagagtgccagcctcaa

SEQ ID NO: 5781785 - DNA, 25 bp, Homo sapien
cccttgggctgtttgggaaaagcca

SEQ ID NO: 5781786 - DNA, 25 bp, Homo sapien
catcttcacgtagccttgcttgacg

SEQ ID NO: 5781787 - DNA, 25 bp, Homo sapien
gccgcgaggggctgctcctcacctc

SEQ ID NO: 5781788 - DNA, 25 bp, Homo sapien
tgtcccagaggtagatgttctcgtg

SEQ ID NO: 5781789 - DNA, 25 bp, Homo sapien
accagcatagctggaggcttcggcg

SEQ ID NO: 5781790 - DNA, 25 bp, Homo sapien
agaaagatagcccttctgcatggta

SEQ ID NO: 5781791 - DNA, 25 bp, Homo sapien
gcttgcactcgccatacacgtccag

SEQ ID NO: 5781792 - DNA, 25 bp, Homo sapien
tctagcagctccttcgccccgcgcc

SEQ ID NO: 5781793 - DNA, 25 bp, Homo sapien
ctgcaaggctggcaagcagcacaga

SEQ ID NO: 5781794 - DNA, 25 bp, Homo sapien
agttcccctctacaggctagctcat

SEQ ID NO: 5781795 - DNA, 25 bp, Homo sapien
cccctctacaggctagctcatccct

SEQ ID NO: 5781796 - DNA, 25 bp, Homo sapien
atagtcccacggtagctccaacccc

SEQ ID NO: 5781797 - DNA, 25 bp, Homo sapien
gcacagaggaagtgcagatccttcc

SEQ ID NO: 5781798 - DNA, 25 bp, Homo sapien
cgcgtaacacacttgacgttgctga

SEQ ID NO: 5781799 - DNA, 25 bp, Homo sapien
tgagaggggggcagcaggggtgctc

SEQ ID NO: 5781800 - DNA, 25 bp, Homo sapien
gccgcgtaacacacttgacgttgct

SEQ ID NO: 5781801 - DNA, 25 bp, Homo sapien
gggcagcaggggtgctccccacggc

SEQ ID NO: 5781802 - DNA, 25 bp, Homo sapien
ggggatctcattgatacagagtatg

SEQ ID NO: 5781803 - DNA, 25 bp, Homo sapien
ggctttagcaggatgaatctgttga

SEQ ID NO: 5781804 - DNA, 25 bp, Homo sapien
tgtggatgtcccagaggtagatgtt

SEQ ID NO: 5781805 - DNA, 25 bp, Homo sapien
ctgtgtcactccaggcccagaggaa

SEQ ID NO: 5781806 - DNA, 25 bp, Homo sapien
gcagcagggagcctcagcaccatgt

SEQ ID NO: 5781807 - DNA, 25 bp, Homo sapien
ggagcgcctgctcagcggcgccgcg

SEQ ID NO: 5781808 - DNA, 25 bp, Homo sapien
tgtggccagccctttgcctcagtcc

SEQ ID NO: 5781809 - DNA, 25 bp, Homo sapien
ggacacgactgcactcatactcaaa

SEQ ID NO: 5781810 - DNA, 25 bp, Homo sapien
ctttagcaggatgaatctgttgagg

SEQ ID NO: 5781811 - DNA, 25 bp, Homo sapien
caggaaggagcctgtgcagaagtta

SEQ ID NO: 5781812 - DNA, 25 bp, Homo sapien
tctgttcccacaaatcaggacccta

SEQ ID NO: 5781813 - DNA, 25 bp, Homo sapien
tctgtcggggctgccgcgaggggct

SEQ ID NO: 5781814 - DNA, 25 bp, Homo sapien
ttcctccacatggctgaggtaatca

SEQ ID NO: 5781815 - DNA, 25 bp, Homo sapien
gcgtgtggcatcccggccatagcgg

SEQ ID NO: 5781816 - DNA, 25 bp, Homo sapien
caagctccagccttcctccacatgg

SEQ ID NO: 5781817 - DNA, 25 bp, Homo sapien
tcctggggcaggaacaagctccagc

SEQ ID NO: 5781818 - DNA, 25 bp, Homo sapien
gttccggcccttgggctgtttggga

SEQ ID NO: 5781819 - DNA, 25 bp, Homo sapien
cacctgaggcgtcaaccagatgtca

SEQ ID NO: 5781820 - DNA, 25 bp, Homo sapien
ttctccagccgctggggccccttgc

SEQ ID NO: 5781821 - DNA, 25 bp, Homo sapien
ttcatcttcacgtagccttgcttga

SEQ ID NO: 5781822 - DNA, 25 bp, Homo sapien
acctcacccgcctcagcattgttct

SEQ ID NO: 5781823 - DNA, 25 bp, Homo sapien
cttctcatctggatacttctccagc

SEQ ID NO: 5781824 - DNA, 25 bp, Homo sapien
cagtcagagtgccagcctcaagctc

SEQ ID NO: 5781825 - DNA, 25 bp, Homo sapien
gtcgcaggtgaaggtacgtgccgag

SEQ ID NO: 5781826 - DNA, 25 bp, Homo sapien
cctggctgggctttggctttagcag

SEQ ID NO: 5781827 - DNA, 25 bp, Homo sapien
gcttggtctccttggggagccgcgt

SEQ ID NO: 5781828 - DNA, 25 bp, Homo sapien
ccagaggtagatgttctcgtgggtg

SEQ ID NO: 5781829 - DNA, 25 bp, Homo sapien
gctgctcctcacctcacccgcctca

SEQ ID NO: 5781830 - DNA, 25 bp, Homo sapien
gtatgtcataagccatatatattaa

SEQ ID NO: 5781831 - DNA, 25 bp, Homo sapien
tcacctcacccgcctcagcattgtt

SEQ ID NO: 5781832 - DNA, 25 bp, Homo sapien
tcagcattgttctagcagctccttc

SEQ ID NO: 5781833 - DNA, 25 bp, Homo sapien
cacgtagccttgcttgacgatgtca

SEQ ID NO: 5781834 - DNA, 25 bp, Homo sapien
gcagcaggggtgctccccacggcag

SEQ ID NO: 5781835 - DNA, 25 bp, Homo sapien
cccctcctgtggccctggtagttca

SEQ ID NO: 5781836 - DNA, 25 bp, Homo sapien
agggctgtgccatggaggatggaca

SEQ ID NO: 5781837 - DNA, 25 bp, Homo sapien
tcaaaaacagccttgaccgtggcct

SEQ ID NO: 5781838 - DNA, 25 bp, Homo sapien
cagcctacaaagcaggaaggagcct

SEQ ID NO: 5781839 - DNA, 25 bp, Homo sapien
actcgccatacacgtccaggttggg

SEQ ID NO: 5781840 - DNA, 25 bp, Homo sapien
gcgatgttctgggaaccagtgatgt

SEQ ID NO: 5781841 - DNA, 25 bp, Homo sapien
tgacgatgtcactgaaattggtcgc

SEQ ID NO: 5781842 - DNA, 25 bp, Homo sapien
ctagctcaagggctcctttgggagg

SEQ ID NO: 5781843 - DNA, 25 bp, Homo sapien
atagcccttctgcatggtagtcaac

SEQ ID NO: 5781844 - DNA, 25 bp, Homo sapien
cgcctgctcagcggcgccgcggagc

SEQ ID NO: 5781845 - DNA, 25 bp, Homo sapien
ggatttccggaacaccagccagcac

SEQ ID NO: 5781846 - DNA, 25 bp, Homo sapien
ggccccttgctggaggatttccgga

SEQ ID NO: 5781847 - DNA, 25 bp, Homo sapien
ggggcagggcagcaggaagacattg

SEQ ID NO: 5781848 - DNA, 25 bp, Homo sapien
ttgtgctgctctgcgatggccaggg

SEQ ID NO: 5781849 - DNA, 25 bp, Homo sapien
cccacaaatcaggaccctaaagtat

SEQ ID NO: 5781850 - DNA, 25 bp, Homo sapien
atctgctccccctcttgtgtctgga

SEQ ID NO: 5781851 - DNA, 25 bp, Homo sapien
agccagcagtcagagtgccagcctc

SEQ ID NO: 5781852 - DNA, 25 bp, Homo sapien
tccacatggctgaggtaatcagcac

SEQ ID NO: 5781853 - DNA, 25 bp, Homo sapien
tccgtgcccttgttcagcagcctca

SEQ ID NO: 5781854 - DNA, 25 bp, Homo sapien
ggtgaaggtacgtgccgagtcatca

SEQ ID NO: 5781855 - DNA, 25 bp, Homo sapien
cctccggtagatcccgagcttcctg

SEQ ID NO: 5781856 - DNA, 25 bp, Homo sapien
cagcatcacacatccggccagcctc

SEQ ID NO: 5781857 - DNA, 25 bp, Homo sapien
tcatgcgtcatcgtgccacttagct

SEQ ID NO: 5781858 - DNA, 25 bp, Homo sapien
gctcgccagcactgtggtcactggg

SEQ ID NO: 5781859 - DNA, 25 bp, Homo sapien
tgtttccgagctggcctgggctgcc

SEQ ID NO: 5781860 - DNA, 25 bp, Homo sapien
aaggtacgtgccgagtcatcagtga

SEQ ID NO: 5781861 - DNA, 25 bp, Homo sapien
tatgatggccaccgcctgccgcttg

SEQ ID NO: 5781862 - DNA, 25 bp, Homo sapien
ctcctttgggaggggccgcgtgctt

SEQ ID NO: 5781863 - DNA, 25 bp, Homo sapien
cctgctgttccggcccttgggctgt

SEQ ID NO: 5781864 - DNA, 25 bp, Homo sapien
ctgggtctccggctcctccaatcac

SEQ ID NO: 5781865 - DNA, 25 bp, Homo sapien
gggatacgagtaatgttccgtgccc

SEQ ID NO: 5781866 - DNA, 25 bp, Homo sapien
agcactagaaaatcaattgctttaa

SEQ ID NO: 5781867 - DNA, 25 bp, Homo sapien
gcctctagctctgagtcgcaggtga

SEQ ID NO: 5781868 - DNA, 25 bp, Homo sapien
tgggctttggctttagcaggatgaa

SEQ ID NO: 5781869 - DNA, 25 bp, Homo sapien
ctccagccgctggggccccttgctg

SEQ ID NO: 5781870 - DNA, 25 bp, Homo sapien
taaaaaatttgtgtgtattggtggg

SEQ ID NO: 5781871 - DNA, 25 bp, Homo sapien
tgcatggtagtcaacaaataccagc

SEQ ID NO: 5781872 - DNA, 25 bp, Homo sapien
gatggggtgagggtgaggggatctc

SEQ ID NO: 5781873 - DNA, 25 bp, Homo sapien
accagtgatgtggtgccagtaggca

SEQ ID NO: 5781874 - DNA, 25 bp, Homo sapien
cgtagccttgcttgacgatgtcact

SEQ ID NO: 5781875 - DNA, 25 bp, Homo sapien
gtgctgctctgcgatggccagggtg

SEQ ID NO: 5781876 - DNA, 25 bp, Homo sapien
ccatttccagcaggacccgcttgtg

SEQ ID NO: 5781877 - DNA, 25 bp, Homo sapien
ggcagggcagcaggaagacattgaa

SEQ ID NO: 5781878 - DNA, 25 bp, Homo sapien
gagtatgtcataagccatatatatt

SEQ ID NO: 5781879 - DNA, 25 bp, Homo sapien
ggcattgtccacccctggtcagtga

SEQ ID NO: 5781880 - DNA, 25 bp, Homo sapien
gggcaagggggctccctctgcttgg

SEQ ID NO: 5781881 - DNA, 25 bp, Homo sapien
tgggcattgtccacccctggtcagt

SEQ ID NO: 5781882 - DNA, 25 bp, Homo sapien
cgttgaggcgggaccccagacactc

SEQ ID NO: 5781883 - DNA, 25 bp, Homo sapien
aggaggtctgtttccgagctggcct

SEQ ID NO: 5781884 - DNA, 25 bp, Homo sapien
ttccggaacaccagccagcacctcc

SEQ ID NO: 5781885 - DNA, 25 bp, Homo sapien
tgaggaggtctgtttccgagctggc

SEQ ID NO: 5781886 - DNA, 25 bp, Homo sapien
gcactcgccatacacgtccaggttg

SEQ ID NO: 5781887 - DNA, 25 bp, Homo sapien
taacacacttgacgttgctgatctc

SEQ ID NO: 5781888 - DNA, 25 bp, Homo sapien
tgttctgggaaccagtgatgtggtg

SEQ ID NO: 5781889 - DNA, 25 bp, Homo sapien
gggtggcactgtggacgcgctggta

SEQ ID NO: 5781890 - DNA, 25 bp, Homo sapien
ccacccctggtcagtgagagggggg

SEQ ID NO: 5781891 - DNA, 25 bp, Homo sapien
catccttgggggcaaggagggggca

SEQ ID NO: 5781892 - DNA, 25 bp, Homo sapien
tggggtgagggtgaggggatctcat

SEQ ID NO: 5781893 - DNA, 25 bp, Homo sapien
ccaggaggtcaggttctcccagact

SEQ ID NO: 5781894 - DNA, 25 bp, Homo sapien
cagcagtcatcggtgctcgccagca

SEQ ID NO: 5781895 - DNA, 25 bp, Homo sapien
tggtagtcaacaaataccagcacta

SEQ ID NO: 5781896 - DNA, 25 bp, Homo sapien
cagggagcctcagcaccatgtgggg

SEQ ID NO: 5781897 - DNA, 25 bp, Homo sapien
accatgtggggaggaggaatgggaa

SEQ ID NO: 5781898 - DNA, 25 bp, Homo sapien
aggctcttggccgacagccccctga

SEQ ID NO: 5781899 - DNA, 25 bp, Homo sapien
taaaatcattaacagtatatagtcc

SEQ ID NO: 5781900 - DNA, 25 bp, Homo sapien
cattgcagcagggagcctcagcacc

SEQ ID NO: 5781901 - DNA, 25 bp, Homo sapien
agaggaagtgcagatccttcctgtg

SEQ ID NO: 5781902 - DNA, 25 bp, Homo sapien
ctgcgatggccagggtggcactgtg

SEQ ID NO: 5781903 - DNA, 25 bp, Homo sapien
gaaaagccagcagtcagagtgccag

SEQ ID NO: 5781904 - DNA, 25 bp, Homo sapien
tgtgtgtattggtggggaaggatgg

SEQ ID NO: 5781905 - DNA, 25 bp, Homo sapien
tcacacatgctcaggtggtgtggcc

SEQ ID NO: 5781906 - DNA, 25 bp, Homo sapien
tcttcatcttcacgtagccttgctt

SEQ ID NO: 5781907 - DNA, 25 bp, Homo sapien
aaattggtcgccatggttttcccac

SEQ ID NO: 5781908 - DNA, 25 bp, Homo sapien
catggtcgtgggtgtgcagggatac

SEQ ID NO: 5781909 - DNA, 25 bp, Homo sapien
gtcatcagtgaatatgatggccacc

SEQ ID NO: 5781910 - DNA, 25 bp, Homo sapien
tgacgtgaatagaaagatagccctt

SEQ ID NO: 5781911 - DNA, 25 bp, Homo sapien
tatccccctcctgtggccctggtag

SEQ ID NO: 5781912 - DNA, 25 bp, Homo sapien
agaggggggcagcaggggtgctccc

SEQ ID NO: 5781913 - DNA, 25 bp, Homo sapien
agagtgcttttggctggccagaggg

SEQ ID NO: 5781914 - DNA, 25 bp, Homo sapien
gcatagctggaggcttcggcgatgt

SEQ ID NO: 5781915 - DNA, 25 bp, Homo sapien
ggccctggtagttcaagcaggtcct

SEQ ID NO: 5781916 - DNA, 25 bp, Homo sapien
aaggagcctgtgcagaagttacatt

SEQ ID NO: 5781917 - DNA, 25 bp, Homo sapien
gaagtgcagatccttcctgtgtcac

SEQ ID NO: 5781918 - DNA, 25 bp, Homo sapien
gccatggaggatggacacgactgca

SEQ ID NO: 5781919 - DNA, 25 bp, Homo sapien
gcctacaaagcaggaaggagcctgt

SEQ ID NO: 5781920 - DNA, 25 bp, Homo sapien
ctggaggcttcggcgatgttctggg

SEQ ID NO: 5781921 - DNA, 25 bp, Homo sapien
gctgtccccctggctgggctttggc

SEQ ID NO: 5781922 - DNA, 25 bp, Homo sapien
gggaaaagccagcagtcagagtgcc

SEQ ID NO: 5781923 - DNA, 25 bp, Homo sapien
taagccatatatattaaaatcatta

SEQ ID NO: 5781924 - DNA, 25 bp, Homo sapien
acactgcagccagccccgcagcagg

SEQ ID NO: 5781925 - DNA, 25 bp, Homo sapien
ggtcacgttgagagcgaggctgact

SEQ ID NO: 5781926 - DNA, 25 bp, Homo sapien
tggggaaggatggggtgagggtgag

SEQ ID NO: 5781927 - DNA, 25 bp, Homo sapien
ggcgcggctggcgggggcggcaggg

SEQ ID NO: 5781928 - DNA, 25 bp, Homo sapien
aggctgtccacggtacactgcagcc

SEQ ID NO: 5781929 - DNA, 25 bp, Homo sapien
gttctcccagactgatgtcgttgag

SEQ ID NO: 5781930 - DNA, 25 bp, Homo sapien
ggcatcttcccagcctacaaagcag

SEQ ID NO: 5781931 - DNA, 25 bp, Homo sapien
gcctcagcaccatgtggggaggagg

SEQ ID NO: 5781932 - DNA, 25 bp, Homo sapien
cagtcaccttggggcagccccggag

SEQ ID NO: 5781933 - DNA, 25 bp, Homo sapien
catacacgtccaggttggggcaggg

SEQ ID NO: 5781934 - DNA, 25 bp, Homo sapien
cgcctgccgcttggtctccttgggg

SEQ ID NO: 5781935 - DNA, 25 bp, Homo sapien
agaggcgaggggaaggatgcccagg

SEQ ID NO: 5781936 - DNA, 25 bp, Homo sapien
gctccctctgcttgggcattgtcca

SEQ ID NO: 5781937 - DNA, 25 bp, Homo sapien
tcaggtggtgtggccagccctttgc

SEQ ID NO: 5781938 - DNA, 25 bp, Homo sapien
cagcctcatccttgggggcaaggag

SEQ ID NO: 5781939 - DNA, 25 bp, Homo sapien
cagaggggccacgagacgagcttca

SEQ ID NO: 5781940 - DNA, 25 bp, Homo sapien
cctcaccagcatagctggaggcttc

SEQ ID NO: 5781941 - DNA, 25 bp, Homo sapien
cgtgccgagtcatcagtgaatatga

SEQ ID NO: 5781942 - DNA, 25 bp, Homo sapien
ccagcaggacccgcttgtgctgctc

SEQ ID NO: 5781943 - DNA, 25 bp, Homo sapien
acagaggaagtgcagatccttcctg

SEQ ID NO: 5781944 - DNA, 25 bp, Homo sapien
cagccccggaggcacaccgacttct

SEQ ID NO: 5781945 - DNA, 25 bp, Homo sapien
gggaggaggaatgggaaggtcttgg

SEQ ID NO: 5781946 - DNA, 25 bp, Homo sapien
cctgctgcggccttccctcctggcc

SEQ ID NO: 5781947 - DNA, 25 bp, Homo sapien
gggcgcggggcctggcagaggcgag

SEQ ID NO: 5781948 - DNA, 25 bp, Homo sapien
aaacagccttgaccgtggcctggtc

SEQ ID NO: 5781949 - DNA, 25 bp, Homo sapien
gtgagggtgaggggatctcattgat

SEQ ID NO: 5781950 - DNA, 25 bp, Homo sapien
catggctgaggtaatcagcacccct

SEQ ID NO: 5781951 - DNA, 25 bp, Homo sapien
taccactcctctgcctctagctctg

SEQ ID NO: 5781952 - DNA, 25 bp, Homo sapien
cgtgctttatcatcctcctgccaca

SEQ ID NO: 5781953 - DNA, 25 bp, Homo sapien
aataccagcactagaaaatcaattg

SEQ ID NO: 5781954 - DNA, 25 bp, Homo sapien
gggcgccgaggcccgggccaggagc

SEQ ID NO: 5781955 - DNA, 25 bp, Homo sapien
tgcctcagtccagcctcatccttgg

SEQ ID NO: 5781956 - DNA, 25 bp, Homo sapien
cagccagccccgcagcaggcagccc

SEQ ID NO: 5781957 - DNA, 25 bp, Homo sapien
tgcagaagttacattttaaaaccag

SEQ ID NO: 5781958 - DNA, 25 bp, Homo sapien
agcaggaagacattgaagcgatctg

SEQ ID NO: 5781959 - DNA, 25 bp, Homo sapien
tattggtggggaaggatggggtgag

SEQ ID NO: 5781960 - DNA, 25 bp, Homo sapien
ggggccaggaggtcaggttctccca

SEQ ID NO: 5781961 - DNA, 25 bp, Homo sapien
agcacaacataatctccttcatgcg

SEQ ID NO: 5781962 - DNA, 25 bp, Homo sapien
cctttgcctcagtccagcctcatcc

SEQ ID NO: 5781963 - DNA, 25 bp, Homo sapien
caggtgaaggtacgtgccgagtcat

SEQ ID NO: 5781964 - DNA, 25 bp, Homo sapien
tggatgtcccagaggtagatgttct

SEQ ID NO: 5781965 - DNA, 25 bp, Homo sapien
cctcagtccagcctcatccttgggg

SEQ ID NO: 5781966 - DNA, 25 bp, Homo sapien
ttatttttggcaataaagagcacaa

SEQ ID NO: 5781967 - DNA, 25 bp, Homo sapien
tggttatttacaagaaggtctgttc

SEQ ID NO: 5781968 - DNA, 25 bp, Homo sapien
ttttggcaataaagagcacaacata

SEQ ID NO: 5781969 - DNA, 25 bp, Homo sapien
gccatacacgtccaggttggggcag

SEQ ID NO: 5781970 - DNA, 25 bp, Homo sapien
actgtggtcactgggatggggtctt

SEQ ID NO: 5781971 - DNA, 25 bp, Homo sapien
cgccgcggagcaggctcatgcccgc

SEQ ID NO: 5781972 - DNA, 25 bp, Homo sapien
tgagcagaggggccacgagacgagc

SEQ ID NO: 5781973 - DNA, 25 bp, Homo sapien
gtaggcactgcgcggcagcatggtc

SEQ ID NO: 5781974 - DNA, 25 bp, Homo sapien
caatcacctgttccagacactctgt

SEQ ID NO: 5781975 - DNA, 25 bp, Homo sapien
tggcgggggcggcagggcggcggcg

SEQ ID NO: 5781976 - DNA, 25 bp, Homo sapien
ttcccacaaatcaggaccctaaagt

SEQ ID NO: 5781977 - DNA, 25 bp, Homo sapien
gctttaattgcattgcagcagggag

SEQ ID NO: 5781978 - DNA, 25 bp, Homo sapien
aattgctttaattgcattgcagcag

SEQ ID NO: 5781979 - DNA, 25 bp, Homo sapien
gctcttggccgacagccccctgagg

SEQ ID NO: 5781980 - DNA, 25 bp, Homo sapien
actcaaaaacagccttgaccgtggc

SEQ ID NO: 5781981 - DNA, 25 bp, Homo sapien
aggggccgcgtgctttatcatcctc

SEQ ID NO: 5781982 - DNA, 25 bp, Homo sapien
ggctgccgcgaggggctgctcctca

SEQ ID NO: 5781983 - DNA, 25 bp, Homo sapien
cggtagatcccgagcttcctgctct

SEQ ID NO: 5781984 - DNA, 25 bp, Homo sapien
tgggctgtttgggaaaagccagcag

SEQ ID NO: 5781985 - DNA, 25 bp, Homo sapien
tcgtgggtgatctgcagcttgcact

SEQ ID NO: 5781986 - DNA, 25 bp, Homo sapien
gtagatcccgagcttcctgctcttc

SEQ ID NO: 5781987 - DNA, 25 bp, Homo sapien
cgcggcagcatggtcgtgggtgtgc

SEQ ID NO: 5781988 - DNA, 25 bp, Homo sapien
tggccaaacagggcaagggggctcc

SEQ ID NO: 5781989 - DNA, 25 bp, Homo sapien
gagcctcagcaccatgtggggagga

SEQ ID NO: 5781990 - DNA, 25 bp, Homo sapien
gtgaggggatctcattgatacagag

SEQ ID NO: 5781991 - DNA, 25 bp, Homo sapien
cctctgcttgggcattgtccacccc

SEQ ID NO: 5781992 - DNA, 25 bp, Homo sapien
ttcccctctacaggctagctcatcc

SEQ ID NO: 5781993 - DNA, 25 bp, Homo sapien
aactgcaaggctggcaagcagcaca

SEQ ID NO: 5781994 - DNA, 25 bp, Homo sapien
accagattttcacctgaggcgtcaa

SEQ ID NO: 5781995 - DNA, 25 bp, Homo sapien
ccagccttcctccacatggctgagg

SEQ ID NO: 5781996 - DNA, 25 bp, Homo sapien
ggtgtggccagccctttgcctcagt

SEQ ID NO: 5781997 - DNA, 25 bp, Homo sapien
cacctgttccagacactctgtcggg

SEQ ID NO: 5781998 - DNA, 25 bp, Homo sapien
actcatactcaaaaacagccttgac

SEQ ID NO: 5781999 - DNA, 25 bp, Homo sapien
ctcatgcccgcgtcacggcgcggct

SEQ ID NO: 5782000 - DNA, 25 bp, Homo sapien
accccaggggcatcttcccagccta

SEQ ID NO: 5782001 - DNA, 25 bp, Homo sapien
caccacctccctagctcaagggctc

SEQ ID NO: 5782002 - DNA, 25 bp, Homo sapien
ctccatttccagcaggacccgcttg

SEQ ID NO: 5782003 - DNA, 25 bp, Homo sapien
gtcaccttggggcagccccggaggc

SEQ ID NO: 5782004 - DNA, 25 bp, Homo sapien
ctgcctctagctctgagtcgcaggt

SEQ ID NO: 5782005 - DNA, 25 bp, Homo sapien
gtcatcgtgccacttagctgagcca

SEQ ID NO: 5782006 - DNA, 25 bp, Homo sapien
cgttgctgatctcagtcaccttggg

SEQ ID NO: 5782007 - DNA, 25 bp, Homo sapien
attcctggggcaggaacaagctcca

SEQ ID NO: 5782008 - DNA, 25 bp, Homo sapien
cagccccctgaggctgtccacggta

SEQ ID NO: 5782009 - DNA, 25 bp, Homo sapien
ctctagctctgagtcgcaggtgaag

SEQ ID NO: 5782010 - DNA, 25 bp, Homo sapien
agcctgtgcagaagttacattttaa

SEQ ID NO: 5782011 - DNA, 25 bp, Homo sapien
cttgggctgtttgggaaaagccagc

SEQ ID NO: 5782012 - DNA, 25 bp, Homo sapien
cctctacaggctagctcatccctct

SEQ ID NO: 5782013 - DNA, 25 bp, Homo sapien
tgatggccaccgcctgccgcttggt

SEQ ID NO: 5782014 - DNA, 25 bp, Homo sapien
gaggatggacacgactgcactcata

SEQ ID NO: 5782015 - DNA, 25 bp, Homo sapien
gcttaaaactccaactgcaaggctg

SEQ ID NO: 5782016 - DNA, 25 bp, Homo sapien
actgagaagccacctgctgttccgg

SEQ ID NO: 5782017 - DNA, 25 bp, Homo sapien
ccttggggcagccccggaggcacac

SEQ ID NO: 5782018 - DNA, 25 bp, Homo sapien
tgatctcagtcaccttggggcagcc

SEQ ID NO: 5782019 - DNA, 25 bp, Homo sapien
ggtctgttcccacaaatcaggaccc

SEQ ID NO: 5782020 - DNA, 25 bp, Homo sapien
caggctagctcatccctctgggtgg

SEQ ID NO: 5782021 - DNA, 25 bp, Homo sapien
gaggggaaggatgcccaggtgcctg

SEQ ID NO: 5782022 - DNA, 25 bp, Homo sapien
catcagtgaatatgatggccaccgc

SEQ ID NO: 5782023 - DNA, 25 bp, Homo sapien
cagcaccatgtggggaggaggaatg

SEQ ID NO: 5782024 - DNA, 25 bp, Homo sapien
tcacgttcttctccatttccagcag

SEQ ID NO: 5782025 - DNA, 25 bp, Homo sapien
tttgtgtgtattggtggggaaggat

SEQ ID NO: 5782026 - DNA, 25 bp, Homo sapien
tacgagtaatgttccgtgcccttgt

SEQ ID NO: 5782027 - DNA, 25 bp, Homo sapien
aacaaataccagcactagaaaatca

SEQ ID NO: 5782028 - DNA, 25 bp, Homo sapien
aacaccagccagcacctccggtaga

SEQ ID NO: 5782029 - DNA, 25 bp, Homo sapien
agtgagcagaggggccacgagacga

SEQ ID NO: 5782030 - DNA, 25 bp, Homo sapien
caccgacttctcatctggatacttc

SEQ ID NO: 5782031 - DNA, 25 bp, Homo sapien
ggcaaggagggggcagcttgctccc

SEQ ID NO: 5782032 - DNA, 25 bp, Homo sapien
cccaggggcatcttcccagcctaca

SEQ ID NO: 5782033 - DNA, 25 bp, Homo sapien
gggtctccggctcctccaatcacct

SEQ ID NO: 5782034 - DNA, 25 bp, Homo sapien
tgcttgacgatgtcactgaaattgg

SEQ ID NO: 5782035 - DNA, 25 bp, Homo sapien
tccggccagcctcgaaggtaaagcg

SEQ ID NO: 5782036 - DNA, 25 bp, Homo sapien
tgactgcaccacctccctagctcaa

SEQ ID NO: 5782037 - DNA, 25 bp, Homo sapien
cgagcttcctgctcttcatcttcac

SEQ ID NO: 5782038 - DNA, 25 bp, Homo sapien
cagccccgcagcaggcagcccccag

SEQ ID NO: 5782039 - DNA, 25 bp, Homo sapien
gggctccctctgcttgggcattgtc

SEQ ID NO: 5782040 - DNA, 25 bp, Homo sapien
agagcacaacataatctccttcatg

SEQ ID NO: 5782041 - DNA, 25 bp, Homo sapien
agtgcttttggctggccagagggtg

SEQ ID NO: 5782042 - DNA, 25 bp, Homo sapien
ttccagcaggacccgcttgtgctgc

SEQ ID NO: 5782043 - DNA, 25 bp, Homo sapien
tgagagcgaggctgactgcaccacc

SEQ ID NO: 5782044 - DNA, 25 bp, Homo sapien
aatcaattgctttaattgcattgca

SEQ ID NO: 5782045 - DNA, 25 bp, Homo sapien
cacctccggtagatcccgagcttcc

SEQ ID NO: 5782046 - DNA, 25 bp, Homo sapien
agcgcctgctcagcggcgccgcgga

SEQ ID NO: 5782047 - DNA, 25 bp, Homo sapien
tcacacgggggttgtggatgtccca

SEQ ID NO: 5782048 - DNA, 25 bp, Homo sapien
agcaggctcatgcccgcgtcacggc

SEQ ID NO: 5782049 - DNA, 25 bp, Homo sapien
ccgcttggtctccttggggagccgc

SEQ ID NO: 5782050 - DNA, 25 bp, Homo sapien
aagacattgaagcgatctgtctgtt

SEQ ID NO: 5782051 - DNA, 25 bp, Homo sapien
ttaacagtatatagtcccacggtag

SEQ ID NO: 5782052 - DNA, 25 bp, Homo sapien
gcctgggtctccggctcctccaatc

SEQ ID NO: 5782053 - DNA, 25 bp, Homo sapien
cctcctgtggccctggtagttcaag

SEQ ID NO: 5782054 - DNA, 25 bp, Homo sapien
ggatctcattgatacagagtatgtc

SEQ ID NO: 5782055 - DNA, 25 bp, Homo sapien
cttcacacgggggttgtggatgtcc

SEQ ID NO: 5782056 - DNA, 25 bp, Homo sapien
agaagccacctgctgttccggccct

SEQ ID NO: 5782057 - DNA, 25 bp, Homo sapien
aaggtaaagcgtgtggcatcccggc

SEQ ID NO: 5782058 - DNA, 25 bp, Homo sapien
cagcacagaggaagtgcagatcctt

SEQ ID NO: 5782059 - DNA, 25 bp, Homo sapien
tgttcccacaaatcaggaccctaaa

SEQ ID NO: 5782060 - DNA, 25 bp, Homo sapien
ggggcaaggagggggcagcttgctc

SEQ ID NO: 5782061 - DNA, 25 bp, Homo sapien
cctcacgttcttctccatttccagc

SEQ ID NO: 5782062 - DNA, 25 bp, Homo sapien
ggaatgggaaggtcttggtttcaga

SEQ ID NO: 5782063 - DNA, 25 bp, Homo sapien
taccagcactagaaaatcaattgct

SEQ ID NO: 5782064 - DNA, 25 bp, Homo sapien
tggcctcactgctgtccccctggct

SEQ ID NO: 5782065 - DNA, 25 bp, Homo sapien
tccctctgggtggtcattccccggg

SEQ ID NO: 5782066 - DNA, 25 bp, Homo sapien
gctggaggatttccggaacaccagc

SEQ ID NO: 5782067 - DNA, 25 bp, Homo sapien
aaggatgcccaggtgcctgggtctc

SEQ ID NO: 5782068 - DNA, 25 bp, Homo sapien
cattgttctagcagctccttcgccc

SEQ ID NO: 5782069 - DNA, 25 bp, Homo sapien
tgtggtgccagtaggcactgcgcgg

SEQ ID NO: 5782070 - DNA, 25 bp, Homo sapien
ggggtgctccccacggcagtcctgc

SEQ ID NO: 5782071 - DNA, 25 bp, Homo sapien
gcagcaggaagacattgaagcgatc

SEQ ID NO: 5782072 - DNA, 25 bp, Homo sapien
acgtgaatagaaagatagcccttct

SEQ ID NO: 5782073 - DNA, 25 bp, Homo sapien
ggagggctgtgccatggaggatgga

SEQ ID NO: 5782074 - DNA, 25 bp, Homo sapien
acaaagcaggaaggagcctgtgcag

SEQ ID NO: 5782075 - DNA, 25 bp, Homo sapien
tcaccagcatagctggaggcttcgg

SEQ ID NO: 5782076 - DNA, 25 bp, Homo sapien
cttgcttgacgatgtcactgaaatt

SEQ ID NO: 5782077 - DNA, 25 bp, Homo sapien
gagtccttccccagcatcacacatc

SEQ ID NO: 5782078 - DNA, 25 bp, Homo sapien
gccgcgtgctttatcatcctcctgc

SEQ ID NO: 5782079 - DNA, 25 bp, Homo sapien
tcatctggatacttctccagccgct

SEQ ID NO: 5782080 - DNA, 25 bp, Homo sapien
ggcactgtggacgcgctggtaaatc

SEQ ID NO: 5782081 - DNA, 25 bp, Homo sapien
gcggccttccctcctggcctattcc

SEQ ID NO: 5782082 - DNA, 25 bp, Homo sapien
cagtcctgctgcggccttccctcct

SEQ ID NO: 5782083 - DNA, 25 bp, Homo sapien
ttggccgacagccccctgaggctgt

SEQ ID NO: 5782084 - DNA, 25 bp, Homo sapien
gggttgtggatgtcccagaggtaga

SEQ ID NO: 5782085 - DNA, 25 bp, Homo sapien
ccttgaccgtggcctggtcatggga

SEQ ID NO: 5782086 - DNA, 25 bp, Homo sapien
cgagctggcctgggctgccccatac

SEQ ID NO: 5782087 - DNA, 25 bp, Homo sapien
gccaaacagggcaagggggctccct

SEQ ID NO: 5782088 - DNA, 25 bp, Homo sapien
tgggggcaaggagggggcagcttgc

SEQ ID NO: 5782089 - DNA, 25 bp, Homo sapien
gccgctggggccccttgctggagga

SEQ ID NO: 5782090 - DNA, 25 bp, Homo sapien
ggtctccttggggagccgcgtaaca

SEQ ID NO: 5782091 - DNA, 25 bp, Homo sapien
cacatccggccagcctcgaaggtaa

SEQ ID NO: 5782092 - DNA, 25 bp, Homo sapien
tccaatcacctgttccagacactct

SEQ ID NO: 5782093 - DNA, 25 bp, Homo sapien
gttgtggatgtcccagaggtagatg

SEQ ID NO: 5782094 - DNA, 25 bp, Homo sapien
gggtgaggggatctcattgatacag

SEQ ID NO: 5782095 - DNA, 25 bp, Homo sapien
cagcctcgaaggtaaagcgtgtggc

SEQ ID NO: 5782096 - DNA, 25 bp, Homo sapien
ccacggcagtcctgctgcggccttc

SEQ ID NO: 5782097 - DNA, 25 bp, Homo sapien
agaaaatcaattgctttaattgcat

SEQ ID NO: 5782098 - DNA, 25 bp, Homo sapien
ctgcggccttccctcctggcctatt

SEQ ID NO: 5782099 - DNA, 25 bp, Homo sapien
aagcaggtcctggcagcaggagggc

SEQ ID NO: 5782100 - DNA, 25 bp, Homo sapien
cttcctgtgtcactccaggcccaga

SEQ ID NO: 5782101 - DNA, 25 bp, Homo sapien
aggttctcccagactgatgtcgttg

SEQ ID NO: 5782102 - DNA, 25 bp, Homo sapien
caccttggggcagccccggaggcac

SEQ ID NO: 5782103 - DNA, 25 bp, Homo sapien
tgatgtcgttgaggcgggaccccag

SEQ ID NO: 5782104 - DNA, 25 bp, Homo sapien
ggatggacacgactgcactcatact

SEQ ID NO: 5782105 - DNA, 25 bp, Homo sapien
tggggagccgcgtaacacacttgac

SEQ ID NO: 5782106 - DNA, 25 bp, Homo sapien
ttgctggaggatttccggaacacca

SEQ ID NO: 5782107 - DNA, 25 bp, Homo sapien
gggggcagcttgctccctttctcca

SEQ ID NO: 5782108 - DNA, 25 bp, Homo sapien
ctggggccaggaggtcaggttctcc

SEQ ID NO: 5782109 - DNA, 25 bp, Homo sapien
agcagcacagaggaagtgcagatcc

SEQ ID NO: 5782110 - DNA, 25 bp, Homo sapien
caaacagggcaagggggctccctct

SEQ ID NO: 5782111 - DNA, 25 bp, Homo sapien
gtgatctgcagcttgcactcgccat

SEQ ID NO: 5782112 - DNA, 25 bp, Homo sapien
cttttggctggccagagggtggcca

SEQ ID NO: 5782113 - DNA, 25 bp, Homo sapien
caaccaaaagtttgacgtgaataga

SEQ ID NO: 5782114 - DNA, 25 bp, Homo sapien
ctgctcttcatcttcacgtagcctt

SEQ ID NO: 5782115 - DNA, 25 bp, Homo sapien
agctggaggcttcggcgatgttctg

SEQ ID NO: 5782116 - DNA, 25 bp, Homo sapien
gccctttgcctcagtccagcctcat

SEQ ID NO: 5782117 - DNA, 25 bp, Homo sapien
ctgtggacgcgctggtaaatctgct

SEQ ID NO: 5782118 - DNA, 25 bp, Homo sapien
gcggcgccgcggagcaggctcatgc

SEQ ID NO: 5782119 - DNA, 25 bp, Homo sapien
cctctgggtggtcattccccgggtc

SEQ ID NO: 5782120 - DNA, 25 bp, Homo sapien
ctcagtcaccttggggcagccccgg

SEQ ID NO: 5782121 - DNA, 25 bp, Homo sapien
tcttcacgtagccttgcttgacgat

SEQ ID NO: 5782122 - DNA, 25 bp, Homo sapien
agcaggagggctgtgccatggagga

SEQ ID NO: 5782123 - DNA, 25 bp, Homo sapien
aaagatagcccttctgcatggtagt

SEQ ID NO: 5782124 - DNA, 25 bp, Homo sapien
cactgtggacgcgctggtaaatctg

SEQ ID NO: 5782125 - DNA, 25 bp, Homo sapien
ctctgcttaaaactccaactgcaag

SEQ ID NO: 5782126 - DNA, 25 bp, Homo sapien
atcacctgttccagacactctgtcg

SEQ ID NO: 5782127 - DNA, 25 bp, Homo sapien
accagatgtcacctctgcttaaaac

SEQ ID NO: 5782128 - DNA, 25 bp, Homo sapien
ttcacctgaggcgtcaaccagatgt

SEQ ID NO: 5782129 - DNA, 25 bp, Homo sapien
tccttcctgtgtcactccaggccca

SEQ ID NO: 5782130 - DNA, 25 bp, Homo sapien
accgcctgccgcttggtctccttgg

SEQ ID NO: 5782131 - DNA, 25 bp, Homo sapien
atcggtgctcgccagcactgtggtc

SEQ ID NO: 5782132 - DNA, 25 bp, Homo sapien
tccccagcatcacacatccggccag

SEQ ID NO: 5782133 - DNA, 25 bp, Homo sapien
tgctctgcgatggccagggtggcac

SEQ ID NO: 5782134 - DNA, 25 bp, Homo sapien
caggatgaatctgttgaggaggtct

SEQ ID NO: 5782135 - DNA, 25 bp, Homo sapien
acactccacagatagtgtcttgtac

SEQ ID NO: 5782136 - DNA, 25 bp, Homo sapien
ttccctcctggcctattcctggggc

SEQ ID NO: 5782137 - DNA, 25 bp, Homo sapien
tcccagactgatgtcgttgaggcgg

SEQ ID NO: 5782138 - DNA, 25 bp, Homo sapien
tgccgcttggtctccttggggagcc

SEQ ID NO: 5782139 - DNA, 25 bp, Homo sapien
ggatgaatctgttgaggaggtctgt

SEQ ID NO: 5782140 - DNA, 25 bp, Homo sapien
ggtatagagtccttccccagcatca

SEQ ID NO: 5782141 - DNA, 25 bp, Homo sapien
cacaccgacttctcatctggatact

SEQ ID NO: 5782142 - DNA, 25 bp, Homo sapien
ggggcaggaacaagctccagccttc

SEQ ID NO: 5782143 - DNA, 25 bp, Homo sapien
cctggcagcaggagggctgtgccat

SEQ ID NO: 5782144 - DNA, 25 bp, Homo sapien
gcgtcatcgtgccacttagctgagc

SEQ ID NO: 5782145 - DNA, 25 bp, Homo sapien
agacactccacagatagtgtcttgt

SEQ ID NO: 5782146 - DNA, 25 bp, Homo sapien
gagtcgcaggtgaaggtacgtgccg

SEQ ID NO: 5782147 - DNA, 25 bp, Homo sapien
tccagcctcatccttgggggcaagg

SEQ ID NO: 5782148 - DNA, 25 bp, Homo sapien
caataaagagcacaacataatctcc

SEQ ID NO: 5782149 - DNA, 25 bp, Homo sapien
gctgtccacggtacactgcagccag

SEQ ID NO: 5782150 - DNA, 25 bp, Homo sapien
ccacggtagctccaacccctcacac

SEQ ID NO: 5782151 - DNA, 25 bp, Homo sapien
ttcacgtagccttgcttgacgatgt

SEQ ID NO: 5782152 - DNA, 25 bp, Homo sapien
gcagcctcacgttcttctccatttc

SEQ ID NO: 5782153 - DNA, 25 bp, Homo sapien
tctcgtgggtgatctgcagcttgca

SEQ ID NO: 5782154 - DNA, 25 bp, Homo sapien
ctgcactcatactcaaaaacagcct

SEQ ID NO: 5782155 - DNA, 25 bp, Homo sapien
gtgtcactccaggcccagaggaact

SEQ ID NO: 5782156 - DNA, 25 bp, Homo sapien
atctcattgatacagagtatgtcat

SEQ ID NO: 5782157 - DNA, 25 bp, Homo sapien
tcatactcaaaaacagccttgaccg

SEQ ID NO: 5782158 - DNA, 25 bp, Homo sapien
aggcccagaggaactgagaagccac

SEQ ID NO: 5782159 - DNA, 25 bp, Homo sapien
tagttcaagcaggtcctggcagcag

SEQ ID NO: 5782160 - DNA, 25 bp, Homo sapien
ggtgtgcagggatacgagtaatgtt

SEQ ID NO: 5782161 - DNA, 25 bp, Homo sapien
gggccgcgtgctttatcatcctcct

SEQ ID NO: 5782162 - DNA, 25 bp, Homo sapien
agacactctgtcggggctgccgcga

SEQ ID NO: 5782163 - DNA, 25 bp, Homo sapien
ccaactgcaaggctggcaagcagca

SEQ ID NO: 5782164 - DNA, 25 bp, Homo sapien
agcaggatgaatctgttgaggaggt

SEQ ID NO: 5782165 - DNA, 25 bp, Homo sapien
cctttgggaggggccgcgtgcttta

SEQ ID NO: 5782166 - DNA, 25 bp, Homo sapien
catgcccgcgtcacggcgcggctgg

SEQ ID NO: 5782167 - DNA, 25 bp, Homo sapien
ctgcttaaaactccaactgcaaggc

SEQ ID NO: 5782168 - DNA, 25 bp, Homo sapien
ctgagtcgcaggtgaaggtacgtgc

SEQ ID NO: 5782169 - DNA, 25 bp, Homo sapien
agcctcacgttcttctccatttcca

SEQ ID NO: 5782170 - DNA, 25 bp, Homo sapien
attaaaatcattaacagtatatagt

SEQ ID NO: 5782171 - DNA, 25 bp, Homo sapien
acggcgcggctggcgggggcggcag

SEQ ID NO: 5782172 - DNA, 25 bp, Homo sapien
ctccccacggcagtcctgctgcggc

SEQ ID NO: 5782173 - DNA, 25 bp, Homo sapien
gggaaccagtgatgtggtgccagta

SEQ ID NO: 5782174 - DNA, 25 bp, Homo sapien
tcagtgagaggggggcagcaggggt

SEQ ID NO: 5782175 - DNA, 25 bp, Homo sapien
accaaaagtttgacgtgaatagaaa

SEQ ID NO: 5782176 - DNA, 25 bp, Homo sapien
gaatctgttgaggaggtctgtttcc

SEQ ID NO: 5782177 - DNA, 25 bp, Homo sapien
acggcagtcctgctgcggccttccc

SEQ ID NO: 5782178 - DNA, 25 bp, Homo sapien
gcggggcctggcagaggcgagggga

SEQ ID NO: 5782179 - DNA, 25 bp, Homo sapien
acagccttgaccgtggcctggtcat

SEQ ID NO: 5782180 - DNA, 25 bp, Homo sapien
gtacactgcagccagccccgcagca

SEQ ID NO: 5782181 - DNA, 25 bp, Homo sapien
ggctcctttgggaggggccgcgtgc

SEQ ID NO: 5782182 - DNA, 25 bp, Homo sapien
atctgttgaggaggtctgtttccga

SEQ ID NO: 5782183 - DNA, 25 bp, Homo sapien
caggctcatgcccgcgtcacggcgc

SEQ ID NO: 5782184 - DNA, 25 bp, Homo sapien
cacaaccaaaagtttgacgtgaata

SEQ ID NO: 5782185 - DNA, 25 bp, Homo sapien
ctcctgccacaactcaaatagtggt

SEQ ID NO: 5782186 - DNA, 25 bp, Homo sapien
ctttggctttagcaggatgaatctg

SEQ ID NO: 5782187 - DNA, 25 bp, Homo sapien
cagggcagcaggaagacattgaagc

SEQ ID NO: 5782188 - DNA, 25 bp, Homo sapien
agcttcacacgggggttgtggatgt

SEQ ID NO: 5782189 - DNA, 25 bp, Homo sapien
gccaggagcgcctgctcagcggcgc

SEQ ID NO: 5782190 - DNA, 25 bp, Homo sapien
ccagccagcacctccggtagatccc

SEQ ID NO: 5782191 - DNA, 25 bp, Homo sapien
ctttatcatcctcctgccacaactc

SEQ ID NO: 5782192 - DNA, 25 bp, Homo sapien
tggtcgccatggttttcccaccttt

SEQ ID NO: 5782193 - DNA, 25 bp, Homo sapien
tctgggtggtcattccccgggtcac

SEQ ID NO: 5782194 - DNA, 25 bp, Homo sapien
cagattttcacctgaggcgtcaacc

SEQ ID NO: 5782195 - DNA, 25 bp, Homo sapien
ctcgaaggtaaagcgtgtggcatcc

SEQ ID NO: 5782196 - DNA, 25 bp, Homo sapien
ttggctttagcaggatgaatctgtt

SEQ ID NO: 5782197 - DNA, 25 bp, Homo sapien
tccttcatgcgtcatcgtgccactt

SEQ ID NO: 5782198 - DNA, 25 bp, Homo sapien
attccccgggtcacgttgagagcga

SEQ ID NO: 5782199 - DNA, 25 bp, Homo sapien
tcagtccagcctcatccttgggggc

SEQ ID NO: 5782200 - DNA, 25 bp, Homo sapien
cccagcagtcatcggtgctcgccag

SEQ ID NO: 5782201 - DNA, 25 bp, Homo sapien
ctcaaatagtggttatttacaagaa

SEQ ID NO: 5782202 - DNA, 25 bp, Homo sapien
gcagcttgctccctttctccaggct

SEQ ID NO: 5782203 - DNA, 25 bp, Homo sapien
ggagcaggctcatgcccgcgtcacg

SEQ ID NO: 5782204 - DNA, 25 bp, Homo sapien
cttgttcagcagcctcacgttcttc

SEQ ID NO: 5782205 - DNA, 25 bp, Homo sapien
catcgtgccacttagctgagccagc

SEQ ID NO: 5782206 - DNA, 25 bp, Homo sapien
ctagctcatccctctgggtggtcat

SEQ ID NO: 5782207 - DNA, 25 bp, Homo sapien
gcgtcaaccagatgtcacctctgct

SEQ ID NO: 5782208 - DNA, 25 bp, Homo sapien
ccagaggaactgagaagccacctgc

SEQ ID NO: 5782209 - DNA, 25 bp, Homo sapien
cagccctttgcctcagtccagcctc

SEQ ID NO: 5782210 - DNA, 25 bp, Homo sapien
acataatctccttcatgcgtcatcg

SEQ ID NO: 5782211 - DNA, 25 bp, Homo sapien
gtcctggcagcaggagggctgtgcc

SEQ ID NO: 5782212 - DNA, 25 bp, Homo sapien
ggcacaccgacttctcatctggata

SEQ ID NO: 5782213 - DNA, 25 bp, Homo sapien
tctcccagactgatgtcgttgaggc

SEQ ID NO: 5782214 - DNA, 25 bp, Homo sapien
ccgcggagcaggctcatgcccgcgt

SEQ ID NO: 5782215 - DNA, 25 bp, Homo sapien
tgtggtcactgggatggggtcttgg

SEQ ID NO: 5782216 - DNA, 25 bp, Homo sapien
gtcataagccatatatattaaaatc

SEQ ID NO: 5782217 - DNA, 25 bp, Homo sapien
cgcggctggcgggggcggcagggcg

SEQ ID NO: 5782218 - DNA, 25 bp, Homo sapien
aggggggcagcaggggtgctcccca

SEQ ID NO: 5782219 - DNA, 25 bp, Homo sapien
aactcaaatagtggttatttacaag

SEQ ID NO: 5782220 - DNA, 25 bp, Homo sapien
gatgttctgggaaccagtgatgtgg

SEQ ID NO: 5782221 - DNA, 25 bp, Homo sapien
gtgccagcctcaagctctgattatc

SEQ ID NO: 5782222 - DNA, 25 bp, Homo sapien
gaaggatggggtgagggtgagggga

SEQ ID NO: 5782223 - DNA, 25 bp, Homo sapien
acccctggtcagtgagaggggggca

SEQ ID NO: 5782224 - DNA, 25 bp, Homo sapien
ctccctttctccaggctcttggccg

SEQ ID NO: 5782225 - DNA, 25 bp, Homo sapien
tagagtccttccccagcatcacaca

SEQ ID NO: 5782226 - DNA, 25 bp, Homo sapien
acttctccagccgctggggcccctt

SEQ ID NO: 5782227 - DNA, 25 bp, Homo sapien
tttcagagtgcttttggctggccag

SEQ ID NO: 5782228 - DNA, 25 bp, Homo sapien
gggcggcagggcggcggcggcgccg

SEQ ID NO: 5782229 - DNA, 25 bp, Homo sapien
agatcccgagcttcctgctcttcat

SEQ ID NO: 5782230 - DNA, 25 bp, Homo sapien
tccctctgcttgggcattgtccacc

SEQ ID NO: 5782231 - DNA, 25 bp, Homo sapien
ttctccaggctcttggccgacagcc

SEQ ID NO: 5782232 - DNA, 25 bp, Homo sapien
ctcctggcctattcctggggcagga

SEQ ID NO: 5782233 - DNA, 25 bp, Homo sapien
tagtgtcttgtaccactcctctgcc

SEQ ID NO: 5782234 - DNA, 25 bp, Homo sapien
aggcttcggcgatgttctgggaacc

SEQ ID NO: 5782235 - DNA, 25 bp, Homo sapien
caggggcatcttcccagcctacaaa

SEQ ID NO: 5782236 - DNA, 25 bp, Homo sapien
gtgcctgggtctccggctcctccaa

SEQ ID NO: 5782237 - DNA, 25 bp, Homo sapien
ttagcaggatgaatctgttgaggag

SEQ ID NO: 5782238 - DNA, 25 bp, Homo sapien
aagctctgattatccccctcctgtg

SEQ ID NO: 5782239 - DNA, 25 bp, Homo sapien
cctggcagaggcgaggggaaggatg

SEQ ID NO: 5782240 - DNA, 25 bp, Homo sapien
ggacgcgctggtaaatctgctcccc

SEQ ID NO: 5782241 - DNA, 25 bp, Homo sapien
aggaggtcaggttctcccagactga

SEQ ID NO: 5782242 - DNA, 25 bp, Homo sapien
gtggacgcgctggtaaatctgctcc

SEQ ID NO: 5782243 - DNA, 25 bp, Homo sapien
caacataatctccttcatgcgtcat

SEQ ID NO: 5782244 - DNA, 25 bp, Homo sapien
ggcgccgcggagcaggctcatgccc

SEQ ID NO: 5782245 - DNA, 25 bp, Homo sapien
cccctcacacatgctcaggtggtgt

SEQ ID NO: 5782246 - DNA, 25 bp, Homo sapien
tcactgaaattggtcgccatggttt

SEQ ID NO: 5782247 - DNA, 25 bp, Homo sapien
tcacctctgcttaaaactccaactg

SEQ ID NO: 5782248 - DNA, 25 bp, Homo sapien
ctcacccgcctcagcattgttctag

SEQ ID NO: 5782249 - DNA, 25 bp, Homo sapien
tgggtggtcattccccgggtcacgt

SEQ ID NO: 5782250 - DNA, 25 bp, Homo sapien
gggagcctcagcaccatgtggggag

SEQ ID NO: 5782251 - DNA, 25 bp, Homo sapien
ttatcatcctcctgccacaactcaa

SEQ ID NO: 5782252 - DNA, 25 bp, Homo sapien
ctaccccaggggcatcttcccagcc

SEQ ID NO: 5782253 - DNA, 25 bp, Homo sapien
cgggtcacgttgagagcgaggctga

SEQ ID NO: 5782254 - DNA, 25 bp, Homo sapien
gccagagggtggccaaacagggcaa

SEQ ID NO: 5782255 - DNA, 25 bp, Homo sapien
agcacctccggtagatcccgagctt

SEQ ID NO: 5782256 - DNA, 25 bp, Homo sapien
atacttctccagccgctggggcccc

SEQ ID NO: 5782257 - DNA, 25 bp, Homo sapien
ggaaggtatagagtccttccccagc

SEQ ID NO: 5782258 - DNA, 25 bp, Homo sapien
ggtttcagagtgcttttggctggcc

SEQ ID NO: 5782259 - DNA, 25 bp, Homo sapien
tccccctcctgtggccctggtagtt

SEQ ID NO: 5782260 - DNA, 25 bp, Homo sapien
aggagggggcagcttgctccctttc

SEQ ID NO: 5782261 - DNA, 25 bp, Homo sapien
catcccggccatagcggcgcagtga

SEQ ID NO: 5782262 - DNA, 25 bp, Homo sapien
cgcgcctgctgggcgccgaggcccg

SEQ ID NO: 5782263 - DNA, 25 bp, Homo sapien
cagcggcgccgcggagcaggctcat

SEQ ID NO: 5782264 - DNA, 25 bp, Homo sapien
gtcctgctgcggccttccctcctgg

SEQ ID NO: 5782265 - DNA, 25 bp, Homo sapien
tgtcacctctgcttaaaactccaac

SEQ ID NO: 5782266 - DNA, 25 bp, Homo sapien
tggaggatttccggaacaccagcca

SEQ ID NO: 5782267 - DNA, 25 bp, Homo sapien
tacaagaaggtctgttcccacaaat

SEQ ID NO: 5782268 - DNA, 25 bp, Homo sapien
gtttatttttggcaataaagagcac

SEQ ID NO: 5782269 - DNA, 25 bp, Homo sapien
ccggaacaccagccagcacctccgg

SEQ ID NO: 5782270 - DNA, 25 bp, Homo sapien
tgtgcagaagttacattttaaaacc

SEQ ID NO: 5782271 - DNA, 25 bp, Homo sapien
agtgcagatccttcctgtgtcactc

SEQ ID NO: 5782272 - DNA, 25 bp, Homo sapien
tgttccagacactctgtcggggctg

SEQ ID NO: 5782273 - DNA, 25 bp, Homo sapien
tcctgtgtcactccaggcccagagg

SEQ ID NO: 5782274 - DNA, 25 bp, Homo sapien
aacaagctccagccttcctccacat

SEQ ID NO: 5782275 - DNA, 25 bp, Homo sapien
ttgcactcgccatacacgtccaggt

SEQ ID NO: 5782276 - DNA, 25 bp, Homo sapien
tccccgggtcacgttgagagcgagg

SEQ ID NO: 5782277 - DNA, 25 bp, Homo sapien
agcagggagcctcagcaccatgtgg

SEQ ID NO: 5782278 - DNA, 25 bp, Homo sapien
agcagaggggccacgagacgagctt

SEQ ID NO: 5782279 - DNA, 25 bp, Homo sapien
ggccacgagacgagcttcacacggg

SEQ ID NO: 5782280 - DNA, 25 bp, Homo sapien
ggaggcttcggcgatgttctgggaa

SEQ ID NO: 5782281 - DNA, 25 bp, Homo sapien
agcgatctgtctgttcacactgcac

SEQ ID NO: 5782282 - DNA, 25 bp, Homo sapien
caggaagacattgaagcgatctgtc

SEQ ID NO: 5782283 - DNA, 25 bp, Homo sapien
tggctgggctttggctttagcagga

SEQ ID NO: 5782284 - DNA, 25 bp, Homo sapien
actgcaccacctccctagctcaagg

SEQ ID NO: 5782285 - DNA, 25 bp, Homo sapien
gggggctccctctgcttgggcattg

SEQ ID NO: 5782286 - DNA, 25 bp, Homo sapien
tggaggatggacacgactgcactca

SEQ ID NO: 5782287 - DNA, 25 bp, Homo sapien
tgcaccacctccctagctcaagggc

SEQ ID NO: 5782288 - DNA, 25 bp, Homo sapien
agtgagaggggggcagcaggggtgc

SEQ ID NO: 5782289 - DNA, 25 bp, Homo sapien
cttccccagcatcacacatccggcc

SEQ ID NO: 5782290 - DNA, 25 bp, Homo sapien
ggattaaaaaatttgtgtgtattgg

SEQ ID NO: 5782291 - DNA, 25 bp, Homo sapien
attttaaaaccagattttcacctga

SEQ ID NO: 5782292 - DNA, 25 bp, Homo sapien
agtgaatatgatggccaccgcctgc

SEQ ID NO: 5782293 - DNA, 25 bp, Homo sapien
tgggaggggccgcgtgctttatcat

SEQ ID NO: 5782294 - DNA, 25 bp, Homo sapien
ctattcctggggcaggaacaagctc

SEQ ID NO: 5782295 - DNA, 25 bp, Homo sapien
tgctcagcggcgccgcggagcaggc

SEQ ID NO: 5782296 - DNA, 25 bp, Homo sapien
ttgggaaaagccagcagtcagagtg

SEQ ID NO: 5782297 - DNA, 25 bp, Homo sapien
gcagcaggagggctgtgccatggag

SEQ ID NO: 5782298 - DNA, 25 bp, Homo sapien
aactccaactgcaaggctggcaagc

SEQ ID NO: 5782299 - DNA, 25 bp, Homo sapien
catcttcccagcctacaaagcagga

SEQ ID NO: 5782300 - DNA, 25 bp, Homo sapien
tctcatctggatacttctccagccg

SEQ ID NO: 5782301 - DNA, 25 bp, Homo sapien
agtggttatttacaagaaggtctgt

SEQ ID NO: 5782302 - DNA, 25 bp, Homo sapien
cccacacaaccaaaagtttgacgtg

SEQ ID NO: 5782303 - DNA, 25 bp, Homo sapien
ggaggggccgcgtgctttatcatcc

SEQ ID NO: 5782304 - DNA, 25 bp, Homo sapien
aagtgtttatttttggcaataaaga

SEQ ID NO: 5782305 - DNA, 25 bp, Homo sapien
gccagcctcaagctctgattatccc

SEQ ID NO: 5782306 - DNA, 25 bp, Homo sapien
ccagactgatgtcgttgaggcggga

SEQ ID NO: 5782307 - DNA, 25 bp, Homo sapien
ccggccatagcggcgcagtgagcag

SEQ ID NO: 5782308 - DNA, 25 bp, Homo sapien
ctggcaagcagcacagaggaagtgc

SEQ ID NO: 5782309 - DNA, 25 bp, Homo sapien
gtgggtgatctgcagcttgcactcg

SEQ ID NO: 5782310 - DNA, 25 bp, Homo sapien
ctttctccaggctcttggccgacag

SEQ ID NO: 5782311 - DNA, 25 bp, Homo sapien
agccttcctccacatggctgaggta

SEQ ID NO: 5782312 - DNA, 25 bp, Homo sapien
ggacccgcttgtgctgctctgcgat

SEQ ID NO: 5782313 - DNA, 25 bp, Homo sapien
cagtgatgtggtgccagtaggcact

SEQ ID NO: 5782314 - DNA, 25 bp, Homo sapien
gaggtcaggttctcccagactgatg

SEQ ID NO: 5782315 - DNA, 25 bp, Homo sapien
taaaagtgtttatttttggcaataa

SEQ ID NO: 5782316 - DNA, 25 bp, Homo sapien
tgagaagccacctgctgttccggcc

SEQ ID NO: 5782317 - DNA, 25 bp, Homo sapien
tccaggttggggcagggcagcagga

SEQ ID NO: 5782318 - DNA, 25 bp, Homo sapien
gtagtcaacaaataccagcactaga

SEQ ID NO: 5782319 - DNA, 25 bp, Homo sapien
ggaagacattgaagcgatctgtctg

SEQ ID NO: 5782320 - DNA, 25 bp, Homo sapien
tgttcagcagcctcacgttcttctc

SEQ ID NO: 5782321 - DNA, 25 bp, Homo sapien
ctgtgccatggaggatggacacgac

SEQ ID NO: 5782322 - DNA, 25 bp, Homo sapien
gacttctcatctggatacttctcca

SEQ ID NO: 5782323 - DNA, 25 bp, Homo sapien
cagccgctggggccccttgctggag

SEQ ID NO: 5782324 - DNA, 25 bp, Homo sapien
ggccaccgcctgccgcttggtctcc

SEQ ID NO: 5782325 - DNA, 25 bp, Homo sapien
caggggtgctccccacggcagtcct

SEQ ID NO: 5782326 - DNA, 25 bp, Homo sapien
aggggcgcggggcctggcagaggcg

SEQ ID NO: 5782327 - DNA, 25 bp, Homo sapien
tggggtcttggcctcactgctgtcc

SEQ ID NO: 5782328 - DNA, 25 bp, Homo sapien
cggcgcagtgagcagaggggccacg

SEQ ID NO: 5782329 - DNA, 25 bp, Homo sapien
ttgcagcagggagcctcagcaccat

SEQ ID NO: 5782330 - DNA, 25 bp, Homo sapien
ccagcacctccggtagatcccgagc

SEQ ID NO: 5782331 - DNA, 25 bp, Homo sapien
caaatagtggttatttacaagaagg

SEQ ID NO: 5782332 - DNA, 25 bp, Homo sapien
ccgggccaggagcgcctgctcagcg

SEQ ID NO: 5782333 - DNA, 25 bp, Homo sapien
aacccctcacacatgctcaggtggt

SEQ ID NO: 5782334 - DNA, 25 bp, Homo sapien
tgaggtaatcagcacccctacccca

SEQ ID NO: 5782335 - DNA, 25 bp, Homo sapien
cctcacctcacccgcctcagcattg

SEQ ID NO: 5782336 - DNA, 25 bp, Homo sapien
tacattttaaaaccagattttcacc

SEQ ID NO: 5782337 - DNA, 25 bp, Homo sapien
acacatgctcaggtggtgtggccag

SEQ ID NO: 5782338 - DNA, 25 bp, Homo sapien
cctgctcagcggcgccgcggagcag

SEQ ID NO: 5782339 - DNA, 25 bp, Homo sapien
gcctcgaaggtaaagcgtgtggcat

SEQ ID NO: 5782340 - DNA, 25 bp, Homo sapien
gttccgtgcccttgttcagcagcct

SEQ ID NO: 5782341 - DNA, 25 bp, Homo sapien
ctccagccttcctccacatggctga

SEQ ID NO: 5782342 - DNA, 25 bp, Homo sapien
gatgtcacctctgcttaaaactcca

SEQ ID NO: 5782343 - DNA, 25 bp, Homo sapien
gtggtgtggccagccctttgcctca

SEQ ID NO: 5782344 - DNA, 25 bp, Homo sapien
atggccaccgcctgccgcttggtct

SEQ ID NO: 5782345 - DNA, 25 bp, Homo sapien
cccttgttcagcagcctcacgttct

SEQ ID NO: 5782346 - DNA, 25 bp, Homo sapien
aacagtatatagtcccacggtagct

SEQ ID NO: 5782347 - DNA, 25 bp, Homo sapien
cgcctgctgggcgccgaggcccggg

SEQ ID NO: 5782348 - DNA, 25 bp, Homo sapien
tgctccctttctccaggctcttggc

SEQ ID NO: 5782349 - DNA, 25 bp, Homo sapien
atagctggaggcttcggcgatgttc

SEQ ID NO: 5782350 - DNA, 25 bp, Homo sapien
cgagtaatgttccgtgcccttgttc

SEQ ID NO: 5782351 - DNA, 25 bp, Homo sapien
ctcattgatacagagtatgtcataa

SEQ ID NO: 5782352 - DNA, 25 bp, Homo sapien
ccccttgctggaggatttccggaac

SEQ ID NO: 5782353 - DNA, 25 bp, Homo sapien
gatgtcactgaaattggtcgccatg

SEQ ID NO: 5782354 - DNA, 25 bp, Homo sapien
cgagcttcacacgggggttgtggat

SEQ ID NO: 5782355 - DNA, 25 bp, Homo sapien
acatgctcaggtggtgtggccagcc

SEQ ID NO: 5782356 - DNA, 25 bp, Homo sapien
agcaggaaggagcctgtgcagaagt

SEQ ID NO: 5782357 - DNA, 25 bp, Homo sapien
ctctgagtcgcaggtgaaggtacgt

SEQ ID NO: 5782358 - DNA, 25 bp, Homo sapien
gaggaggaatgggaaggtcttggtt

SEQ ID NO: 5782359 - DNA, 25 bp, Homo sapien
gtgtctggaaggtatagagtccttc

SEQ ID NO: 5782360 - DNA, 25 bp, Homo sapien
gcaggcagcccccagcagtcatcgg

SEQ ID NO: 5782361 - DNA, 25 bp, Homo sapien
gagtgccagcctcaagctctgatta

SEQ ID NO: 5782362 - DNA, 25 bp, Homo sapien
tgcccgcgtcacggcgcggctggcg

SEQ ID NO: 5782363 - DNA, 25 bp, Homo sapien
gctgggctttggctttagcaggatg

SEQ ID NO: 5782364 - DNA, 25 bp, Homo sapien
gacgagcttcacacgggggttgtgg

SEQ ID NO: 5782365 - DNA, 25 bp, Homo sapien
gcgcggggcctggcagaggcgaggg

SEQ ID NO: 5782366 - DNA, 25 bp, Homo sapien
attgcattgcagcagggagcctcag

SEQ ID NO: 5782367 - DNA, 25 bp, Homo sapien
agaaggtctgttcccacaaatcagg

SEQ ID NO: 5782368 - DNA, 25 bp, Homo sapien
tatttacaagaaggtctgttcccac

SEQ ID NO: 5782369 - DNA, 25 bp, Homo sapien
cggaggcacaccgacttctcatctg

SEQ ID NO: 5782370 - DNA, 25 bp, Homo sapien
tctgcagcttgcactcgccatacac

SEQ ID NO: 5782371 - DNA, 25 bp, Homo sapien
ccgacttctcatctggatacttctc

SEQ ID NO: 5782372 - DNA, 25 bp, Homo sapien
agctctgagtcgcaggtgaaggtac

SEQ ID NO: 5782373 - DNA, 25 bp, Homo sapien
taaaaccagattttcacctgaggcg

SEQ ID NO: 5782374 - DNA, 25 bp, Homo sapien
gggggcggcagggcggcggcggcgc

SEQ ID NO: 5782375 - DNA, 25 bp, Homo sapien
ggctggcaagcagcacagaggaagt

SEQ ID NO: 5782376 - DNA, 25 bp, Homo sapien
actcctctgcctctagctctgagtc

SEQ ID NO: 5782377 - DNA, 25 bp, Homo sapien
cattgatacagagtatgtcataagc

SEQ ID NO: 5782378 - DNA, 25 bp, Homo sapien
aaagccagcagtcagagtgccagcc

SEQ ID NO: 5782379 - DNA, 25 bp, Homo sapien
ctgttgaggaggtctgtttccgagc

SEQ ID NO: 5782380 - DNA, 25 bp, Homo sapien
ctgtggccctggtagttcaagcagg

SEQ ID NO: 5782381 - DNA, 25 bp, Homo sapien
ctcatccctctgggtggtcattccc

SEQ ID NO: 5782382 - DNA, 25 bp, Homo sapien
caggaacaagctccagccttcctcc

SEQ ID NO: 5782383 - DNA, 25 bp, Homo sapien
cttgtaccactcctctgcctctagc

SEQ ID NO: 5782384 - DNA, 25 bp, Homo sapien
aggcactgcgcggcagcatggtcgt

SEQ ID NO: 5782385 - DNA, 25 bp, Homo sapien
ttccagacactctgtcggggctgcc

SEQ ID NO: 5782386 - DNA, 25 bp, Homo sapien
caggagcgcctgctcagcggcgccg

SEQ ID NO: 5782387 - DNA, 25 bp, Homo sapien
cccctcttgtgtctggaaggtatag

SEQ ID NO: 5782388 - DNA, 25 bp, Homo sapien
cactccaggcccagaggaactgaga

SEQ ID NO: 5782389 - DNA, 25 bp, Homo sapien
gaggaatgggaaggtcttggtttca

SEQ ID NO: 5782390 - DNA, 25 bp, Homo sapien
catgggattaaaaaatttgtgtgta

SEQ ID NO: 5782391 - DNA, 25 bp, Homo sapien
ccctcctggcctattcctggggcag

SEQ ID NO: 5782392 - DNA, 25 bp, Homo sapien
ccaccgcctgccgcttggtctcctt

SEQ ID NO: 5782393 - DNA, 25 bp, Homo sapien
agctcaagggctcctttgggagggg

SEQ ID NO: 5782394 - DNA, 25 bp, Homo sapien
actctgtcggggctgccgcgagggg

SEQ ID NO: 5782395 - DNA, 25 bp, Homo sapien
cctggtcatgggattaaaaaatttg

SEQ ID NO: 5782396 - DNA, 25 bp, Homo sapien
acactctgtcggggctgccgcgagg

SEQ ID NO: 5782397 - DNA, 25 bp, Homo sapien
caaccagatgtcacctctgcttaaa

SEQ ID NO: 5782398 - DNA, 25 bp, Homo sapien
cccctggctgggctttggctttagc

SEQ ID NO: 5782399 - DNA, 25 bp, Homo sapien
agccagccagctctgcctccctccc

SEQ ID NO: 5782400 - DNA, 25 bp, Homo sapien
gtgccacttagctgagccagccagc

SEQ ID NO: 5782401 - DNA, 25 bp, Homo sapien
tttgcctcagtccagcctcatcctt

SEQ ID NO: 5782402 - DNA, 25 bp, Homo sapien
atgttccgtgcccttgttcagcagc

SEQ ID NO: 5782403 - DNA, 25 bp, Homo sapien
gcaaggctggcaagcagcacagagg

SEQ ID NO: 5782404 - DNA, 25 bp, Homo sapien
gccagccctttgcctcagtccagcc

SEQ ID NO: 5782405 - DNA, 25 bp, Homo sapien
agcgaggctgactgcaccacctccc

SEQ ID NO: 5782406 - DNA, 25 bp, Homo sapien
gatccttcctgtgtcactccaggcc

SEQ ID NO: 5782407 - DNA, 25 bp, Homo sapien
ccggctcctccaatcacctgttcca

SEQ ID NO: 5782408 - DNA, 25 bp, Homo sapien
ttttaggggcgcggggcctggcaga

SEQ ID NO: 5782409 - DNA, 25 bp, Homo sapien
gggcagcaggaagacattgaagcga

SEQ ID NO: 5782410 - DNA, 25 bp, Homo sapien
tgcattgcagcagggagcctcagca

SEQ ID NO: 5782411 - DNA, 25 bp, Homo sapien
tagccttgcttgacgatgtcactga

SEQ ID NO: 5782412 - DNA, 25 bp, Homo sapien
aaaccagattttcacctgaggcgtc

SEQ ID NO: 5782413 - DNA, 25 bp, Homo sapien
catggaggatggacacgactgcact

SEQ ID NO: 5782414 - DNA, 25 bp, Homo sapien
cccgcagcaggcagcccccagcagt

SEQ ID NO: 5782415 - DNA, 25 bp, Homo sapien
ggatgcccaggtgcctgggtctccg

SEQ ID NO: 5782416 - DNA, 25 bp, Homo sapien
atggacacgactgcactcatactca

SEQ ID NO: 5782417 - DNA, 25 bp, Homo sapien
cccagcatcacacatccggccagcc

SEQ ID NO: 5782418 - DNA, 25 bp, Homo sapien
ttggcaataaagagcacaacataat

SEQ ID NO: 5782419 - DNA, 25 bp, Homo sapien
acgttcttctccatttccagcagga

SEQ ID NO: 5782420 - DNA, 25 bp, Homo sapien
gtctggaaggtatagagtccttccc

SEQ ID NO: 5782421 - DNA, 25 bp, Homo sapien
ttgaggcgggaccccagacactcca

SEQ ID NO: 5782422 - DNA, 25 bp, Homo sapien
cctgttccagacactctgtcggggc

SEQ ID NO: 5782423 - DNA, 25 bp, Homo sapien
tcaagcaggtcctggcagcaggagg

SEQ ID NO: 5782424 - DNA, 25 bp, Homo sapien
cctcacacatgctcaggtggtgtgg

SEQ ID NO: 5782425 - DNA, 25 bp, Homo sapien
cccatacccctcaccagcatagctg

SEQ ID NO: 5782426 - DNA, 25 bp, Homo sapien
acgggggttgtggatgtcccagagg

SEQ ID NO: 5782427 - DNA, 25 bp, Homo sapien
atctggatacttctccagccgctgg

SEQ ID NO: 5782428 - DNA, 25 bp, Homo sapien
aggaactgagaagccacctgctgtt

SEQ ID NO: 5782429 - DNA, 25 bp, Homo sapien
cgcgtgctttatcatcctcctgcca

SEQ ID NO: 5782430 - DNA, 25 bp, Homo sapien
aaggtcttggtttcagagtgctttt

SEQ ID NO: 5782431 - DNA, 25 bp, Homo sapien
gaggcgggaccccagacactccaca

SEQ ID NO: 5782432 - DNA, 25 bp, Homo sapien
tgaatatgatggccaccgcctgccg

SEQ ID NO: 5782433 - DNA, 25 bp, Homo sapien
acaactcaaatagtggttatttaca

SEQ ID NO: 5782434 - DNA, 25 bp, Homo sapien
attggtcgccatggttttcccacct

SEQ ID NO: 5782435 - DNA, 25 bp, Homo sapien
catgtggggaggaggaatgggaagg

SEQ ID NO: 5782436 - DNA, 25 bp, Homo sapien
tcctgtggccctggtagttcaagca

SEQ ID NO: 5782437 - DNA, 25 bp, Homo sapien
ttggtctccttggggagccgcgtaa

SEQ ID NO: 5782438 - DNA, 25 bp, Homo sapien
ccagacactctgtcggggctgccgc

SEQ ID NO: 5782439 - DNA, 25 bp, Homo sapien
aggctgactgcaccacctccctagc

SEQ ID NO: 5782440 - DNA, 25 bp, Homo sapien
tcttgtgtctggaaggtatagagtc

SEQ ID NO: 5782441 - DNA, 25 bp, Homo sapien
cccgagcttcctgctcttcatcttc

SEQ ID NO: 5782442 - DNA, 25 bp, Homo sapien
gcccagaggaactgagaagccacct

SEQ ID NO: 5782443 - DNA, 25 bp, Homo sapien
cagcatagctggaggcttcggcgat

SEQ ID NO: 5782444 - DNA, 25 bp, Homo sapien
gatggggtcttggcctcactgctgt

SEQ ID NO: 5782445 - DNA, 25 bp, Homo sapien
tgtccacggtacactgcagccagcc

SEQ ID NO: 5782446 - DNA, 25 bp, Homo sapien
ttttcacctgaggcgtcaaccagat

SEQ ID NO: 5782447 - DNA, 25 bp, Homo sapien
atactcaaaaacagccttgaccgtg

SEQ ID NO: 5782448 - DNA, 25 bp, Homo sapien
gggggttgtggatgtcccagaggta

SEQ ID NO: 5782449 - DNA, 25 bp, Homo sapien
tcgtgccacttagctgagccagcca

SEQ ID NO: 5782450 - DNA, 25 bp, Homo sapien
ctcctccaatcacctgttccagaca

SEQ ID NO: 5782451 - DNA, 25 bp, Homo sapien
gtcactccaggcccagaggaactga

SEQ ID NO: 5782452 - DNA, 25 bp, Homo sapien
ccttcctccacatggctgaggtaat

SEQ ID NO: 5782453 - DNA, 25 bp, Homo sapien
acacacttgacgttgctgatctcag

SEQ ID NO: 5782454 - DNA, 25 bp, Homo sapien
aggcagcccccagcagtcatcggtg

SEQ ID NO: 5782455 - DNA, 25 bp, Homo sapien
gtttgggaaaagccagcagtcagag

SEQ ID NO: 5782456 - DNA, 25 bp, Homo sapien
tgtccccctggctgggctttggctt

SEQ ID NO: 5782457 - DNA, 25 bp, Homo sapien
ctgctgtccccctggctgggctttg

SEQ ID NO: 5782458 - DNA, 25 bp, Homo sapien
tgtattggtggggaaggatggggtg

SEQ ID NO: 5782459 - DNA, 25 bp, Homo sapien
cacacaaccaaaagtttgacgtgaa

SEQ ID NO: 5782460 - DNA, 25 bp, Homo sapien
cactgggatggggtcttggcctcac

SEQ ID NO: 5782461 - DNA, 25 bp, Homo sapien
tgattatccccctcctgtggccctg

SEQ ID NO: 5782462 - DNA, 25 bp, Homo sapien
gtccacccctggtcagtgagagggg

SEQ ID NO: 5782463 - DNA, 25 bp, Homo sapien
cccggaggcacaccgacttctcatc

SEQ ID NO: 5782464 - DNA, 25 bp, Homo sapien
ctgggatggggtcttggcctcactg

SEQ ID NO: 5782465 - DNA, 25 bp, Homo sapien
atatagtcccacggtagctccaacc

SEQ ID NO: 5782466 - DNA, 25 bp, Homo sapien
gccagcctcgaaggtaaagcgtgtg

SEQ ID NO: 5782467 - DNA, 25 bp, Homo sapien
tggctgaggtaatcagcacccctac

SEQ ID NO: 5782468 - DNA, 25 bp, Homo sapien
cacctgctgttccggcccttgggct

SEQ ID NO: 5782469 - DNA, 25 bp, Homo sapien
gatagtgtcttgtaccactcctctg

SEQ ID NO: 5782470 - DNA, 25 bp, Homo sapien
aatttgtgtgtattggtggggaagg

SEQ ID NO: 5782471 - DNA, 25 bp, Homo sapien
gtggcctggtcatgggattaaaaaa

SEQ ID NO: 5782472 - DNA, 25 bp, Homo sapien
gtgaatagaaagatagcccttctgc

SEQ ID NO: 5782473 - DNA, 25 bp, Homo sapien
ctccaactgcaaggctggcaagcag

SEQ ID NO: 5782474 - DNA, 25 bp, Homo sapien
cccgcgtcacggcgcggctggcggg

SEQ ID NO: 5782475 - DNA, 25 bp, Homo sapien
gtggcatcccggccatagcggcgca

SEQ ID NO: 5782476 - DNA, 25 bp, Homo sapien
cttagctgagccagccagctctgcc

SEQ ID NO: 5782477 - DNA, 25 bp, Homo sapien
ccagacactccacagatagtgtctt

SEQ ID NO: 5782478 - DNA, 25 bp, Homo sapien
caagaaggtctgttcccacaaatca

SEQ ID NO: 5782479 - DNA, 25 bp, Homo sapien
aaaatttgtgtgtattggtggggaa

SEQ ID NO: 5782480 - DNA, 25 bp, Homo sapien
atgtcataagccatatatattaaaa

SEQ ID NO: 5782481 - DNA, 25 bp, Homo sapien
tcctgctcttcatcttcacgtagcc

SEQ ID NO: 5782482 - DNA, 25 bp, Homo sapien
gctgctctgcgatggccagggtggc

SEQ ID NO: 5782483 - DNA, 25 bp, Homo sapien
agcagtcagagtgccagcctcaagc

SEQ ID NO: 5782484 - DNA, 25 bp, Homo sapien
ggctagctcatccctctgggtggtc

SEQ ID NO: 5782485 - DNA, 25 bp, Homo sapien
cgaggggctgctcctcacctcaccc

SEQ ID NO: 5782486 - DNA, 25 bp, Homo sapien
tcgccagcactgtggtcactgggat

SEQ ID NO: 5782487 - DNA, 25 bp, Homo sapien
cctgtgcagaagttacattttaaaa

SEQ ID NO: 5782488 - DNA, 25 bp, Homo sapien
cggtacactgcagccagccccgcag

SEQ ID NO: 5782489 - DNA, 25 bp, Homo sapien
tggtaaatctgctccccctcttgtg

SEQ ID NO: 5782490 - DNA, 25 bp, Homo sapien
agcggcgcagtgagcagaggggcca

SEQ ID NO: 5782491 - DNA, 25 bp, Homo sapien
ggctcatgcccgcgtcacggcgcgg

SEQ ID NO: 5782492 - DNA, 25 bp, Homo sapien
gctggccagagggtggccaaacagg

SEQ ID NO: 5782493 - DNA, 25 bp, Homo sapien
aggaagtgcagatccttcctgtgtc

SEQ ID NO: 5782494 - DNA, 25 bp, Homo sapien
tctgattatccccctcctgtggccc

SEQ ID NO: 5782495 - DNA, 25 bp, Homo sapien
cccctgaggctgtccacggtacact

SEQ ID NO: 5782496 - DNA, 25 bp, Homo sapien
gggagccgcgtaacacacttgacgt

SEQ ID NO: 5782497 - DNA, 25 bp, Homo sapien
cagggtggcactgtggacgcgctgg

SEQ ID NO: 5782498 - DNA, 25 bp, Homo sapien
tgctttatcatcctcctgccacaac

SEQ ID NO: 5782499 - DNA, 25 bp, Homo sapien
gcttgtgctgctctgcgatggccag

SEQ ID NO: 5782500 - DNA, 25 bp, Homo sapien
ctgctccccctcttgtgtctggaag

SEQ ID NO: 5782501 - DNA, 25 bp, Homo sapien
tccttggggagccgcgtaacacact

SEQ ID NO: 5782502 - DNA, 25 bp, Homo sapien
cgaaggtaaagcgtgtggcatcccg

SEQ ID NO: 5782503 - DNA, 25 bp, Homo sapien
cgtcacggcgcggctggcgggggcg

SEQ ID NO: 5782504 - DNA, 25 bp, Homo sapien
gatggccagggtggcactgtggacg

SEQ ID NO: 5782505 - DNA, 25 bp, Homo sapien
tgcagatccttcctgtgtcactcca

SEQ ID NO: 5782506 - DNA, 25 bp, Homo sapien
ggaccccagacactccacagatagt

SEQ ID NO: 5782507 - DNA, 25 bp, Homo sapien
cctcttgtgtctggaaggtatagag

SEQ ID NO: 5782508 - DNA, 25 bp, Homo sapien
cattaacagtatatagtcccacggt

SEQ ID NO: 5782509 - DNA, 25 bp, Homo sapien
ggaaggagcctgtgcagaagttaca

SEQ ID NO: 5782510 - DNA, 25 bp, Homo sapien
gaggggccacgagacgagcttcaca

SEQ ID NO: 5782511 - DNA, 25 bp, Homo sapien
ccaggcccagaggaactgagaagcc

SEQ ID NO: 5782512 - DNA, 25 bp, Homo sapien
attatccccctcctgtggccctggt

SEQ ID NO: 5782513 - DNA, 25 bp, Homo sapien
taatgttccgtgcccttgttcagca

SEQ ID NO: 5782514 - DNA, 25 bp, Homo sapien
cacgtccaggttggggcagggcagc

SEQ ID NO: 5782515 - DNA, 25 bp, Homo sapien
aggtggtgtggccagccctttgcct

SEQ ID NO: 5782516 - DNA, 25 bp, Homo sapien
gctcaggtggtgtggccagcccttt

SEQ ID NO: 5782517 - DNA, 25 bp, Homo sapien
tgaaattggtcgccatggttttccc

SEQ ID NO: 5782518 - DNA, 25 bp, Homo sapien
gggtgatctgcagcttgcactcgcc

SEQ ID NO: 5782519 - DNA, 25 bp, Homo sapien
ccatagcggcgcagtgagcagaggg

SEQ ID NO: 5782520 - DNA, 25 bp, Homo sapien
acacgggggttgtggatgtcccaga

SEQ ID NO: 5782521 - DNA, 25 bp, Homo sapien
gcaagggggctccctctgcttgggc

SEQ ID NO: 5782522 - DNA, 25 bp, Homo sapien
cccgcctcagcattgttctagcagc

SEQ ID NO: 5782523 - DNA, 25 bp, Homo sapien
gttatttacaagaaggtctgttccc

SEQ ID NO: 5782524 - DNA, 25 bp, Homo sapien
ctgggaaccagtgatgtggtgccag

SEQ ID NO: 5782525 - DNA, 25 bp, Homo sapien
tgcagcttgcactcgccatacacgt

SEQ ID NO: 5782526 - DNA, 25 bp, Homo sapien
tctccttggggagccgcgtaacaca

SEQ ID NO: 5782527 - DNA, 25 bp, Homo sapien
gacattgaagcgatctgtctgttca

SEQ ID NO: 5782528 - DNA, 25 bp, Homo sapien
atgtcgttgaggcgggaccccagac

SEQ ID NO: 5782529 - DNA, 25 bp, Homo sapien
aaaaacagccttgaccgtggcctgg

SEQ ID NO: 5782530 - DNA, 25 bp, Homo sapien
ctgtctgttcacactgcacccctgg

SEQ ID NO: 5782531 - DNA, 25 bp, Homo sapien
cctgccacaactcaaatagtggtta

SEQ ID NO: 5782532 - DNA, 25 bp, Homo sapien
ataaagagcacaacataatctcctt

SEQ ID NO: 5782533 - DNA, 25 bp, Homo sapien
cagaagttacattttaaaaccagat

SEQ ID NO: 5782534 - DNA, 25 bp, Homo sapien
aagccacctgctgttccggcccttg

SEQ ID NO: 5782535 - DNA, 25 bp, Homo sapien
acggtagctccaacccctcacacat

SEQ ID NO: 5782536 - DNA, 25 bp, Homo sapien
cgctggggccccttgctggaggatt

SEQ ID NO: 5782537 - DNA, 25 bp, Homo sapien
tatagagtccttccccagcatcaca

SEQ ID NO: 5782538 - DNA, 25 bp, Homo sapien
catccggccagcctcgaaggtaaag

SEQ ID NO: 5782539 - DNA, 25 bp, Homo sapien
ccctggtagttcaagcaggtcctgg

SEQ ID NO: 5782540 - DNA, 25 bp, Homo sapien
gttcaagcaggtcctggcagcagga

SEQ ID NO: 5782541 - DNA, 25 bp, Homo sapien
ttgatacagagtatgtcataagcca

SEQ ID NO: 5782542 - DNA, 25 bp, Homo sapien
aagcgtgtggcatcccggccatagc

SEQ ID NO: 5782543 - DNA, 25 bp, Homo sapien
ctagaaaatcaattgctttaattgc

SEQ ID NO: 5782544 - DNA, 25 bp, Homo sapien
ggtagttcaagcaggtcctggcagc

SEQ ID NO: 5782545 - DNA, 25 bp, Homo sapien
tgaggctgtccacggtacactgcag

SEQ ID NO: 5782546 - DNA, 25 bp, Homo sapien
cttgctccctttctccaggctcttg

SEQ ID NO: 5782547 - DNA, 25 bp, Homo sapien
gtcaaccagatgtcacctctgctta

SEQ ID NO: 5782548 - DNA, 25 bp, Homo sapien
tcaattgctttaattgcattgcagc

SEQ ID NO: 5782549 - DNA, 25 bp, Homo sapien
tgctgcggccttccctcctggccta

SEQ ID NO: 5782550 - DNA, 25 bp, Homo sapien
cacggtacactgcagccagccccgc

SEQ ID NO: 5782551 - DNA, 25 bp, Homo sapien
ctcatccttgggggcaaggaggggg

SEQ ID NO: 5782552 - DNA, 25 bp, Homo sapien
gcgccgaggcccgggccaggagcgc

SEQ ID NO: 5782553 - DNA, 25 bp, Homo sapien
ttgaagcgatctgtctgttcacact

SEQ ID NO: 5782554 - DNA, 25 bp, Homo sapien
tttccgagctggcctgggctgcccc

SEQ ID NO: 5782555 - DNA, 25 bp, Homo sapien
gttcttctccatttccagcaggacc

SEQ ID NO: 5782556 - DNA, 25 bp, Homo sapien
cacacatccggccagcctcgaaggt

SEQ ID NO: 5782557 - DNA, 25 bp, Homo sapien
tcccagaggtagatgttctcgtggg

SEQ ID NO: 5782558 - DNA, 25 bp, Homo sapien
gtggtcattccccgggtcacgttga

SEQ ID NO: 5782559 - DNA, 25 bp, Homo sapien
gcgatggccagggtggcactgtgga

SEQ ID NO: 5782560 - DNA, 25 bp, Homo sapien
cttctgcatggtagtcaacaaatac

SEQ ID NO: 5782561 - DNA, 25 bp, Homo sapien
acgatgtcactgaaattggtcgcca

SEQ ID NO: 5782562 - DNA, 25 bp, Homo sapien
ttcagcagcctcacgttcttctcca

SEQ ID NO: 5782563 - DNA, 25 bp, Homo sapien
aggtcctggcagcaggagggctgtg

SEQ ID NO: 5782564 - DNA, 25 bp, Homo sapien
ccctttctccaggctcttggccgac

SEQ ID NO: 5782565 - DNA, 25 bp, Homo sapien
ggcagtcctgctgcggccttccctc

SEQ ID NO: 5782566 - DNA, 25 bp, Homo sapien
cttggggagccgcgtaacacacttg

SEQ ID NO: 5782567 - DNA, 25 bp, Homo sapien
tcattccccgggtcacgttgagagc

SEQ ID NO: 5782568 - DNA, 25 bp, Homo sapien
ggggccacgagacgagcttcacacg

SEQ ID NO: 5782569 - DNA, 25 bp, Homo sapien
gtcactgggatggggtcttggcctc

SEQ ID NO: 5782570 - DNA, 25 bp, Homo sapien
agatgttctcgtgggtgatctgcag

SEQ ID NO: 5782571 - DNA, 25 bp, Homo sapien
gggtcttggcctcactgctgtcccc

SEQ ID NO: 5782572 - DNA, 25 bp, Homo sapien
ttgtgtctggaaggtatagagtcct

SEQ ID NO: 5782573 - DNA, 25 bp, Homo sapien
cttgacgatgtcactgaaattggtc

SEQ ID NO: 5782574 - DNA, 25 bp, Homo sapien
tgtcactgaaattggtcgccatggt

SEQ ID NO: 5782575 - DNA, 25 bp, Homo sapien
tccccctcttgtgtctggaaggtat

SEQ ID NO: 5782576 - DNA, 25 bp, Homo sapien
tcgccatggttttcccaccttttag

SEQ ID NO: 5782577 - DNA, 25 bp, Homo sapien
gaggggatctcattgatacagagta

SEQ ID NO: 5782578 - DNA, 25 bp, Homo sapien
cgcaggtgaaggtacgtgccgagtc

SEQ ID NO: 5782579 - DNA, 25 bp, Homo sapien
ctccaggcccagaggaactgagaag

SEQ ID NO: 5782580 - DNA, 25 bp, Homo sapien
ttgctttaattgcattgcagcaggg

SEQ ID NO: 5782581 - DNA, 25 bp, Homo sapien
tggctggccagagggtggccaaaca

SEQ ID NO: 5782582 - DNA, 25 bp, Homo sapien
gttgagagcgaggctgactgcacca

SEQ ID NO: 5782583 - DNA, 25 bp, Homo sapien
tgcccttgttcagcagcctcacgtt

SEQ ID NO: 5782584 - DNA, 25 bp, Homo sapien
tctgtttccgagctggcctgggctg

SEQ ID NO: 5782585 - DNA, 25 bp, Homo sapien
gtgctcgccagcactgtggtcactg

SEQ ID NO: 5782586 - DNA, 25 bp, Homo sapien
acgcgctggtaaatctgctccccct

SEQ ID NO: 5782587 - DNA, 25 bp, Homo sapien
gccccctgaggctgtccacggtaca

SEQ ID NO: 5782588 - DNA, 25 bp, Homo sapien
ggcaggaacaagctccagccttcct

SEQ ID NO: 5782589 - DNA, 25 bp, Homo sapien
gttgaggaggtctgtttccgagctg

SEQ ID NO: 5782590 - DNA, 25 bp, Homo sapien
aagggggctccctctgcttgggcat

SEQ ID NO: 5782591 - DNA, 25 bp, Homo sapien
gatacgagtaatgttccgtgccctt

SEQ ID NO: 5782592 - DNA, 25 bp, Homo sapien
ggggccccttgctggaggatttccg

SEQ ID NO: 5782593 - DNA, 25 bp, Homo sapien
cagatgtcacctctgcttaaaactc

SEQ ID NO: 5782594 - DNA, 25 bp, Homo sapien
ggccatagcggcgcagtgagcagag

SEQ ID NO: 5782595 - DNA, 25 bp, Homo sapien
tagcagctccttcgccccgcgcctg

SEQ ID NO: 5782596 - DNA, 25 bp, Homo sapien
ctgccgcgaggggctgctcctcacc

SEQ ID NO: 5782597 - DNA, 25 bp, Homo sapien
gtatatagtcccacggtagctccaa

SEQ ID NO: 5782598 - DNA, 25 bp, Homo sapien
ctgttccggcccttgggctgtttgg

SEQ ID NO: 5782599 - DNA, 25 bp, Homo sapien
agactgatgtcgttgaggcgggacc

SEQ ID NO: 5782600 - DNA, 25 bp, Homo sapien
gcaggtcctggcagcaggagggctg

SEQ ID NO: 5782601 - DNA, 25 bp, Homo sapien
atctcagtcaccttggggcagcccc

SEQ ID NO: 5782602 - DNA, 25 bp, Homo sapien
cggccagcctcgaaggtaaagcgtg

SEQ ID NO: 5782603 - DNA, 25 bp, Homo sapien
gcactgcgcggcagcatggtcgtgg

SEQ ID NO: 5782604 - DNA, 25 bp, Homo sapien
ttaggggcgcggggcctggcagagg

SEQ ID NO: 5782605 - DNA, 25 bp, Homo sapien
cctccacatggctgaggtaatcagc

SEQ ID NO: 5782606 - DNA, 25 bp, Homo sapien
cggtgctcgccagcactgtggtcac

SEQ ID NO: 5782607 - DNA, 25 bp, Homo sapien
gaactgagaagccacctgctgttcc

SEQ ID NO: 5782608 - DNA, 25 bp, Homo sapien
ggcatcccggccatagcggcgcagt

SEQ ID NO: 5782609 - DNA, 25 bp, Homo sapien
gccgaggcccgggccaggagcgcct

SEQ ID NO: 5782610 - DNA, 25 bp, Homo sapien
gatacagagtatgtcataagccata

SEQ ID NO: 5782611 - DNA, 25 bp, Homo sapien
acccgcttgtgctgctctgcgatgg

SEQ ID NO: 5782612 - DNA, 25 bp, Homo sapien
acttgacgttgctgatctcagtcac

SEQ ID NO: 5782613 - DNA, 25 bp, Homo sapien
cccgcgcctgctgggcgccgaggcc

SEQ ID NO: 5782614 - DNA, 25 bp, Homo sapien
ccaggctcttggccgacagccccct

SEQ ID NO: 5782615 - DNA, 25 bp, Homo sapien
gtcatgggattaaaaaatttgtgtg

SEQ ID NO: 5782616 - DNA, 25 bp, Homo sapien
ttggggcagccccggaggcacaccg

SEQ ID NO: 5782617 - DNA, 25 bp, Homo sapien
atcatcctcctgccacaactcaaat

SEQ ID NO: 5782618 - DNA, 25 bp, Homo sapien
acgagacgagcttcacacgggggtt

SEQ ID NO: 5782619 - DNA, 25 bp, Homo sapien
ccagttcccctctacaggctagctc

SEQ ID NO: 5782620 - DNA, 25 bp, Homo sapien
tcacgttgagagcgaggctgactgc

SEQ ID NO: 5782621 - DNA, 25 bp, Homo sapien
acactgcacccctggggccaggagg

SEQ ID NO: 5782622 - DNA, 25 bp, Homo sapien
ccaggtgcctgggtctccggctcct

SEQ ID NO: 5782623 - DNA, 25 bp, Homo sapien
tgagccagccagctctgcctccctc

SEQ ID NO: 5782624 - DNA, 25 bp, Homo sapien
agctccagccttcctccacatggct

SEQ ID NO: 5782625 - DNA, 25 bp, Homo sapien
ggtcaggttctcccagactgatgtc

SEQ ID NO: 5782626 - DNA, 25 bp, Homo sapien
gccagtaggcactgcgcggcagcat

SEQ ID NO: 5782627 - DNA, 25 bp, Homo sapien
gcagtcatcggtgctcgccagcact

SEQ ID NO: 5782628 - DNA, 25 bp, Homo sapien
actgcacccctggggccaggaggtc

SEQ ID NO: 5782629 - DNA, 25 bp, Homo sapien
tgtaccactcctctgcctctagctc

SEQ ID NO: 5782630 - DNA, 25 bp, Homo sapien
acacgactgcactcatactcaaaaa

SEQ ID NO: 5782631 - DNA, 25 bp, Homo sapien
tttgggaggggccgcgtgctttatc

SEQ ID NO: 5782632 - DNA, 25 bp, Homo sapien
acctctgcttaaaactccaactgca

SEQ ID NO: 5782633 - DNA, 25 bp, Homo sapien
ccacgagacgagcttcacacggggg

SEQ ID NO: 5782634 - DNA, 25 bp, Homo sapien
ccacaactcaaatagtggttattta

SEQ ID NO: 5782635 - DNA, 25 bp, Homo sapien
ccttttaggggcgcggggcctggca

SEQ ID NO: 5782636 - DNA, 25 bp, Homo sapien
gctgactgcaccacctccctagctc

SEQ ID NO: 5782637 - DNA, 25 bp, Homo sapien
tggcagaggcgaggggaaggatgcc

SEQ ID NO: 5782638 - DNA, 25 bp, Homo sapien
ctccaggctcttggccgacagcccc

SEQ ID NO: 5782639 - DNA, 25 bp, Homo sapien
ggtctgtttccgagctggcctgggc

SEQ ID NO: 5782640 - DNA, 25 bp, Homo sapien
aacagggcaagggggctccctctgc

SEQ ID NO: 5782641 - DNA, 25 bp, Homo sapien
aaaactccaactgcaaggctggcaa

SEQ ID NO: 5782642 - DNA, 25 bp, Homo sapien
gcactcatactcaaaaacagccttg

SEQ ID NO: 5782643 - DNA, 25 bp, Homo sapien
gctgatctcagtcaccttggggcag

SEQ ID NO: 5782644 - DNA, 25 bp, Homo sapien
tggccagccctttgcctcagtccag

SEQ ID NO: 5782645 - DNA, 25 bp, Homo sapien
gcagaggcgaggggaaggatgccca

SEQ ID NO: 5782646 - DNA, 25 bp, Homo sapien
tcaggttctcccagactgatgtcgt

SEQ ID NO: 5782647 - DNA, 25 bp, Homo sapien
taaagcgtgtggcatcccggccata

SEQ ID NO: 5782648 - DNA, 25 bp, Homo sapien
gtgtttatttttggcaataaagagc

SEQ ID NO: 5782649 - DNA, 25 bp, Homo sapien
gcggagcaggctcatgcccgcgtca

SEQ ID NO: 5782650 - DNA, 25 bp, Homo sapien
ggctttggctttagcaggatgaatc

SEQ ID NO: 5782651 - DNA, 25 bp, Homo sapien
catggtagtcaacaaataccagcac

SEQ ID NO: 5782652 - DNA, 25 bp, Homo sapien
tgaaggtacgtgccgagtcatcagt

SEQ ID NO: 5782653 - DNA, 25 bp, Homo sapien
tgtgcagggatacgagtaatgttcc

SEQ ID NO: 5782654 - DNA, 25 bp, Homo sapien
tacaggctagctcatccctctgggt

SEQ ID NO: 5782655 - DNA, 25 bp, Homo sapien
caggttggggcagggcagcaggaag

SEQ ID NO: 5782656 - DNA, 25 bp, Homo sapien
tcttcccagcctacaaagcaggaag

SEQ ID NO: 5782657 - DNA, 25 bp, Homo sapien
gggggcagcaggggtgctccccacg

SEQ ID NO: 5782658 - DNA, 25 bp, Homo sapien
tggccagagggtggccaaacagggc

SEQ ID NO: 5782659 - DNA, 25 bp, Homo sapien
cagggatacgagtaatgttccgtgc

SEQ ID NO: 5782660 - DNA, 25 bp, Homo sapien
tccacggtacactgcagccagcccc

SEQ ID NO: 5782661 - DNA, 25 bp, Homo sapien
agagcgaggctgactgcaccacctc

SEQ ID NO: 5782662 - DNA, 25 bp, Homo sapien
atcattaacagtatatagtcccacg

SEQ ID NO: 5782663 - DNA, 25 bp, Homo sapien
gtaaatctgctccccctcttgtgtc

SEQ ID NO: 5782664 - DNA, 25 bp, Homo sapien
ggttggggcagggcagcaggaagac

SEQ ID NO: 5782665 - DNA, 25 bp, Homo sapien
agccagcacctccggtagatcccga

SEQ ID NO: 5782666 - DNA, 25 bp, Homo sapien
ggaacaagctccagccttcctccac

SEQ ID NO: 5782667 - DNA, 25 bp, Homo sapien
tgcagccagccccgcagcaggcagc

SEQ ID NO: 5782668 - DNA, 25 bp, Homo sapien
cacttagctgagccagccagctctg

SEQ ID NO: 5782669 - DNA, 25 bp, Homo sapien
gggatggggtcttggcctcactgct

SEQ ID NO: 5782670 - DNA, 25 bp, Homo sapien
agtaatgttccgtgcccttgttcag

SEQ ID NO: 5782671 - DNA, 25 bp, Homo sapien
tttaaaaccagattttcacctgagg

SEQ ID NO: 5782672 - DNA, 25 bp, Homo sapien
cgcctcagcattgttctagcagctc

SEQ ID NO: 5782673 - DNA, 25 bp, Homo sapien
ggtggggaaggatggggtgagggtg

SEQ ID NO: 5782674 - DNA, 25 bp, Homo sapien
gttctcgtgggtgatctgcagcttg

SEQ ID NO: 5782675 - DNA, 25 bp, Homo sapien
agtttgacgtgaatagaaagatagc

SEQ ID NO: 5782676 - DNA, 25 bp, Homo sapien
cattgtccacccctggtcagtgaga

SEQ ID NO: 5782677 - DNA, 25 bp, Homo sapien
aaggctggcaagcagcacagaggaa

SEQ ID NO: 5782678 - DNA, 25 bp, Homo sapien
gcatcacacatccggccagcctcga

SEQ ID NO: 5782679 - DNA, 25 bp, Homo sapien
gagccgcgtaacacacttgacgttg

SEQ ID NO: 5782680 - DNA, 25 bp, Homo sapien
tggcagcaggagggctgtgccatgg

SEQ ID NO: 5782681 - DNA, 25 bp, Homo sapien
ggtcttggtttcagagtgcttttgg

SEQ ID NO: 5782682 - DNA, 25 bp, Homo sapien
tcttctccatttccagcaggacccg

SEQ ID NO: 5782683 - DNA, 25 bp, Homo sapien
tggtcatgggattaaaaaatttgtg

SEQ ID NO: 5782684 - DNA, 25 bp, Homo sapien
cagggcaagggggctccctctgctt

SEQ ID NO: 5782685 - DNA, 25 bp, Homo sapien
aaggtctgttcccacaaatcaggac

SEQ ID NO: 5782686 - DNA, 25 bp, Homo sapien
tgaggcgtcaaccagatgtcacctc

SEQ ID NO: 5782687 - DNA, 25 bp, Homo sapien
caagcagcacagaggaagtgcagat

SEQ ID NO: 5782688 - DNA, 25 bp, Homo sapien
acctccctagctcaagggctccttt

SEQ ID NO: 5782689 - DNA, 25 bp, Homo sapien
tcacactgcacccctggggccagga

SEQ ID NO: 5782690 - DNA, 25 bp, Homo sapien
gagggggcagcttgctccctttctc

SEQ ID NO: 5782691 - DNA, 25 bp, Homo sapien
cccccagcagtcatcggtgctcgcc

SEQ ID NO: 5782692 - DNA, 25 bp, Homo sapien
ttgaccgtggcctggtcatgggatt

SEQ ID NO: 5782693 - DNA, 25 bp, Homo sapien
tttggctggccagagggtggccaaa

SEQ ID NO: 5782694 - DNA, 25 bp, Homo sapien
gccccgcagcaggcagcccccagca

SEQ ID NO: 5782695 - DNA, 25 bp, Homo sapien
agcattgttctagcagctccttcgc

SEQ ID NO: 5782696 - DNA, 25 bp, Homo sapien
caaggagggggcagcttgctccctt

SEQ ID NO: 5782697 - DNA, 25 bp, Homo sapien
tgcacccctggggccaggaggtcag

SEQ ID NO: 5782698 - DNA, 25 bp, Homo sapien
cgtaacacacttgacgttgctgatc

SEQ ID NO: 5782699 - DNA, 25 bp, Homo sapien
tcaacaaataccagcactagaaaat

SEQ ID NO: 5782700 - DNA, 25 bp, Homo sapien
cagtatatagtcccacggtagctcc

SEQ ID NO: 5782701 - DNA, 25 bp, Homo sapien
gatctgcagcttgcactcgccatac

SEQ ID NO: 5782702 - DNA, 25 bp, Homo sapien
gcggcagggcggcggcggcgccggg

SEQ ID NO: 5782703 - DNA, 25 bp, Homo sapien
tcccacggtagctccaacccctcac

SEQ ID NO: 5782704 - DNA, 25 bp, Homo sapien
gcagcatggtcgtgggtgtgcaggg

SEQ ID NO: 5782705 - DNA, 25 bp, Homo sapien
ccccacggcagtcctgctgcggcct

SEQ ID NO: 5782706 - DNA, 25 bp, Homo sapien
gaccgtggcctggtcatgggattaa

SEQ ID NO: 5782707 - DNA, 25 bp, Homo sapien
cctgccgcttggtctccttggggag

SEQ ID NO: 5782708 - DNA, 25 bp, Homo sapien
tgctgggcgccgaggcccgggccag

SEQ ID NO: 5782709 - DNA, 25 bp, Homo sapien
gccagggtggcactgtggacgcgct

SEQ ID NO: 5782710 - DNA, 25 bp, Homo sapien
tgctcctcacctcacccgcctcagc

SEQ ID NO: 5782711 - DNA, 25 bp, Homo sapien
atgcccaggtgcctgggtctccggc

SEQ ID NO: 5782712 - DNA, 25 bp, Homo sapien
ctggtagttcaagcaggtcctggca

SEQ ID NO: 5782713 - DNA, 25 bp, Homo sapien
gtcttgtaccactcctctgcctcta

SEQ ID NO: 5782714 - DNA, 25 bp, Homo sapien
ggcagccccggaggcacaccgactt

SEQ ID NO: 5782715 - DNA, 25 bp, Homo sapien
ggtcattccccgggtcacgttgaga

SEQ ID NO: 5782716 - DNA, 25 bp, Homo sapien
tctgcttgggcattgtccacccctg

SEQ ID NO: 5782717 - DNA, 25 bp, Homo sapien
gggccaggagcgcctgctcagcggc

SEQ ID NO: 5782718 - DNA, 25 bp, Homo sapien
cgcagcaggcagcccccagcagtca

SEQ ID NO: 5782719 - DNA, 25 bp, Homo sapien
gccagccccgcagcaggcagccccc

SEQ ID NO: 5782720 - DNA, 25 bp, Homo sapien
atgcgtcatcgtgccacttagctga

SEQ ID NO: 5782721 - DNA, 25 bp, Homo sapien
cgcgtcacggcgcggctggcggggg

SEQ ID NO: 5782722 - DNA, 25 bp, Homo sapien
gggcagcttgctccctttctccagg

SEQ ID NO: 5782723 - DNA, 25 bp, Homo sapien
cagagggtggccaaacagggcaagg

SEQ ID NO: 5782724 - DNA, 25 bp, Homo sapien
atagaaagatagcccttctgcatgg

SEQ ID NO: 5782725 - DNA, 25 bp, Homo sapien
tgccacaactcaaatagtggttatt

SEQ ID NO: 5782726 - DNA, 25 bp, Homo sapien
tggtcgtgggtgtgcagggatacga

SEQ ID NO: 5782727 - DNA, 25 bp, Homo sapien
cagcagcctcacgttcttctccatt

SEQ ID NO: 5782728 - DNA, 25 bp, Homo sapien
cacccctggggccaggaggtcaggt

SEQ ID NO: 5782729 - DNA, 25 bp, Homo sapien
tttgacgtgaatagaaagatagccc

SEQ ID NO: 5782730 - DNA, 25 bp, Homo sapien
ttctccatttccagcaggacccgct

SEQ ID NO: 5782731 - DNA, 25 bp, Homo sapien
actgaaattggtcgccatggttttc

SEQ ID NO: 5782732 - DNA, 25 bp, Homo sapien
ctacaaagcaggaaggagcctgtgc

SEQ ID NO: 5782733 - DNA, 25 bp, Homo sapien
cctgaggcgtcaaccagatgtcacc

SEQ ID NO: 5782734 - DNA, 25 bp, Homo sapien
cagatccttcctgtgtcactccagg

SEQ ID NO: 5782735 - DNA, 25 bp, Homo sapien
ggccaggaggtcaggttctcccaga

SEQ ID NO: 5782736 - DNA, 25 bp, Homo sapien
cacccgcctcagcattgttctagca

SEQ ID NO: 5782737 - DNA, 25 bp, Homo sapien
gctgagccagccagctctgcctccc

SEQ ID NO: 5782738 - DNA, 25 bp, Homo sapien
aggcgtcaaccagatgtcacctctg

SEQ ID NO: 5782739 - DNA, 25 bp, Homo sapien
caaataccagcactagaaaatcaat

SEQ ID NO: 5782740 - DNA, 25 bp, Homo sapien
ggtaaagcgtgtggcatcccggcca

SEQ ID NO: 5782741 - DNA, 25 bp, Homo sapien
tctccttcatgcgtcatcgtgccac

SEQ ID NO: 5782742 - DNA, 25 bp, Homo sapien
atctgtctgttcacactgcacccct

SEQ ID NO: 5782743 - DNA, 25 bp, Homo sapien
tgcttgggcattgtccacccctggt

SEQ ID NO: 5782744 - DNA, 25 bp, Homo sapien
tgcagggatacgagtaatgttccgt

SEQ ID NO: 5782745 - DNA, 25 bp, Homo sapien
cactagaaaatcaattgctttaatt

SEQ ID NO: 5782746 - DNA, 25 bp, Homo sapien
tacagagtatgtcataagccatata

SEQ ID NO: 5782747 - DNA, 25 bp, Homo sapien
ggtacgtgccgagtcatcagtgaat

SEQ ID NO: 5782748 - DNA, 25 bp, Homo sapien
actgcgcggcagcatggtcgtgggt

SEQ ID NO: 5782749 - DNA, 25 bp, Homo sapien
catcctcctgccacaactcaaatag

SEQ ID NO: 5782750 - DNA, 25 bp, Homo sapien
gggaaggatggggtgagggtgaggg

SEQ ID NO: 5782751 - DNA, 25 bp, Homo sapien
ttggtggggaaggatggggtgaggg

SEQ ID NO: 5782752 - DNA, 25 bp, Homo sapien
agccttgaccgtggcctggtcatgg

SEQ ID NO: 5782753 - DNA, 25 bp, Homo sapien
gcttcggcgatgttctgggaaccag

SEQ ID NO: 5782754 - DNA, 25 bp, Homo sapien
ctctgcctctagctctgagtcgcag

SEQ ID NO: 5782755 - DNA, 25 bp, Homo sapien
atgaatctgttgaggaggtctgttt

SEQ ID NO: 5782756 - DNA, 25 bp, Homo sapien
agatagcccttctgcatggtagtca

SEQ ID NO: 5782757 - DNA, 25 bp, Homo sapien
gtggcactgtggacgcgctggtaaa

SEQ ID NO: 5782758 - DNA, 25 bp, Homo sapien
cccgggtcacgttgagagcgaggct

SEQ ID NO: 5782759 - DNA, 25 bp, Homo sapien
ttcccagcctacaaagcaggaagga

SEQ ID NO: 5782760 - DNA, 25 bp, Homo sapien
gggctgctcctcacctcacccgcct

SEQ ID NO: 5782761 - DNA, 25 bp, Homo sapien
aggggctgctcctcacctcacccgc

SEQ ID NO: 5782762 - DNA, 25 bp, Homo sapien
ggcaataaagagcacaacataatct

SEQ ID NO: 5782763 - DNA, 25 bp, Homo sapien
ggggctgccgcgaggggctgctcct

SEQ ID NO: 5782764 - DNA, 25 bp, Homo sapien
gccagcactgtggtcactgggatgg

SEQ ID NO: 5782765 - DNA, 25 bp, Homo sapien
gtgccagtaggcactgcgcggcagc

SEQ ID NO: 5782766 - DNA, 25 bp, Homo sapien
tgggattaaaaaatttgtgtgtatt

SEQ ID NO: 5782767 - DNA, 25 bp, Homo sapien
tggtgccagtaggcactgcgcggca

SEQ ID NO: 5782768 - DNA, 25 bp, Homo sapien
aaatctgctccccctcttgtgtctg

SEQ ID NO: 5782769 - DNA, 25 bp, Homo sapien
ccctggggccaggaggtcaggttct

SEQ ID NO: 5782770 - DNA, 25 bp, Homo sapien
cgtccaggttggggcagggcagcag

SEQ ID NO: 5782771 - DNA, 25 bp, Homo sapien
gttctagcagctccttcgccccgcg

SEQ ID NO: 5782772 - DNA, 25 bp, Homo sapien
gcctcaagctctgattatccccctc

SEQ ID NO: 5782773 - DNA, 25 bp, Homo sapien
gtagatgttctcgtgggtgatctgc

SEQ ID NO: 5782774 - DNA, 25 bp, Homo sapien
ggaacaccagccagcacctccggta

SEQ ID NO: 5782775 - DNA, 25 bp, Homo sapien
caagggctcctttgggaggggccgc

SEQ ID NO: 5782776 - DNA, 25 bp, Homo sapien
gaggatttccggaacaccagccagc

SEQ ID NO: 5782777 - DNA, 25 bp, Homo sapien
agcaggggtgctccccacggcagtc

SEQ ID NO: 5782778 - DNA, 25 bp, Homo sapien
gtcagagtgccagcctcaagctctg

SEQ ID NO: 5782779 - DNA, 25 bp, Homo sapien
ggcaagcagcacagaggaagtgcag

SEQ ID NO: 5782780 - DNA, 25 bp, Homo sapien
ctgttcacactgcacccctggggcc

SEQ ID NO: 5782781 - DNA, 25 bp, Homo sapien
gctccccctcttgtgtctggaaggt

SEQ ID NO: 5782782 - DNA, 25 bp, Homo sapien
ctggtcagtgagaggggggcagcag

SEQ ID NO: 5782783 - DNA, 25 bp, Homo sapien
aggcccgggccaggagcgcctgctc

SEQ ID NO: 5782784 - DNA, 25 bp, Homo sapien
gcagcccccagcagtcatcggtgct

SEQ ID NO: 5782785 - DNA, 25 bp, Homo sapien
tgtcggggctgccgcgaggggctgc

SEQ ID NO: 5782786 - DNA, 25 bp, Homo sapien
acgttgagagcgaggctgactgcac

SEQ ID NO: 5782787 - DNA, 25 bp, Homo sapien
gagacgagcttcacacgggggttgt

SEQ ID NO: 5782788 - DNA, 25 bp, Homo sapien
cgtgcccttgttcagcagcctcacg

SEQ ID NO: 5782789 - DNA, 25 bp, Homo sapien
ggcctggcagaggcgaggggaagga

SEQ ID NO: 5782790 - DNA, 25 bp, Homo sapien
gtcttggcctcactgctgtccccct

SEQ ID NO: 5782791 - DNA, 25 bp, Homo sapien
agcaggacccgcttgtgctgctctg

SEQ ID NO: 5782792 - DNA, 25 bp, Homo sapien
cggctggcgggggcggcagggcggc

SEQ ID NO: 5782793 - DNA, 25 bp, Homo sapien
cagagtgccagcctcaagctctgat

SEQ ID NO: 5782794 - DNA, 25 bp, Homo sapien
tctacaggctagctcatccctctgg

SEQ ID NO: 5782795 - DNA, 25 bp, Homo sapien
tgcttttggctggccagagggtggc

SEQ ID NO: 5782796 - DNA, 25 bp, Homo sapien
tccggtagatcccgagcttcctgct

SEQ ID NO: 5782797 - DNA, 25 bp, Homo sapien
cagcctcaagctctgattatccccc

SEQ ID NO: 5782798 - DNA, 25 bp, Homo sapien
cacagatagtgtcttgtaccactcc

SEQ ID NO: 5782799 - DNA, 25 bp, Homo sapien
ggaaggtcttggtttcagagtgctt

SEQ ID NO: 5782800 - DNA, 25 bp, Homo sapien
ggctgtgccatggaggatggacacg

SEQ ID NO: 5782801 - DNA, 25 bp, Homo sapien
caaaagtttgacgtgaatagaaaga

SEQ ID NO: 5782802 - DNA, 25 bp, Homo sapien
tcagtgaatatgatggccaccgcct

SEQ ID NO: 5782803 - DNA, 25 bp, Homo sapien
ggtgctccccacggcagtcctgctg

SEQ ID NO: 5782804 - DNA, 25 bp, Homo sapien
gatgtcccagaggtagatgttctcg

SEQ ID NO: 5782805 - DNA, 25 bp, Homo sapien
tcccggccatagcggcgcagtgagc

SEQ ID NO: 5782806 - DNA, 25 bp, Homo sapien
gatgtggtgccagtaggcactgcgc

SEQ ID NO: 5782807 - DNA, 25 bp, Homo sapien
tttacaagaaggtctgttcccacaa

SEQ ID NO: 5782808 - DNA, 25 bp, Homo sapien
ccactcctctgcctctagctctgag

SEQ ID NO: 5782809 - DNA, 25 bp, Homo sapien
gattttcacctgaggcgtcaaccag

SEQ ID NO: 5782810 - DNA, 25 bp, Homo sapien
ttgctgatctcagtcaccttggggc

SEQ ID NO: 5782811 - DNA, 25 bp, Homo sapien
ggaaggatgcccaggtgcctgggtc

SEQ ID NO: 5782812 - DNA, 25 bp, Homo sapien
tctgcatggtagtcaacaaatacca

SEQ ID NO: 5782813 - DNA, 25 bp, Homo sapien
aatctccttcatgcgtcatcgtgcc

SEQ ID NO: 5782814 - DNA, 25 bp, Homo sapien
ctcaagggctcctttgggaggggcc

SEQ ID NO: 5782815 - DNA, 25 bp, Homo sapien
cctccaatcacctgttccagacact

SEQ ID NO: 5782816 - DNA, 25 bp, Homo sapien
gctggcgggggcggcagggcggcgg

SEQ ID NO: 5782817 - DNA, 25 bp, Homo sapien
atgctcaggtggtgtggccagccct

SEQ ID NO: 5782818 - DNA, 25 bp, Homo sapien
agcttcctgctcttcatcttcacgt

SEQ ID NO: 5782819 - DNA, 25 bp, Homo sapien
tgtgtattggtggggaaggatgggg

SEQ ID NO: 5782820 - DNA, 25 bp, Homo sapien
ggcctggtcatgggattaaaaaatt

SEQ ID NO: 5782821 - DNA, 25 bp, Homo sapien
ccttgctggaggatttccggaacac

SEQ ID NO: 5782822 - DNA, 25 bp, Homo sapien
tttaattgcattgcagcagggagcc

SEQ ID NO: 5782823 - DNA, 25 bp, Homo sapien
ggcccttgggctgtttgggaaaagc

SEQ ID NO: 5782824 - DNA, 25 bp, Homo sapien
cggcagcatggtcgtgggtgtgcag

SEQ ID NO: 5782825 - DNA, 25 bp, Homo sapien
gcaccatgtggggaggaggaatggg

SEQ ID NO: 5782826 - DNA, 25 bp, Homo sapien
ggctgtttgggaaaagccagcagtc

SEQ ID NO: 5782827 - DNA, 25 bp, Homo sapien
aggtagatgttctcgtgggtgatct

SEQ ID NO: 5782828 - DNA, 25 bp, Homo sapien
tcatcggtgctcgccagcactgtgg

SEQ ID NO: 5782829 - DNA, 25 bp, Homo sapien
agtccagcctcatccttgggggcaa

SEQ ID NO: 5782830 - DNA, 25 bp, Homo sapien
atagtggttatttacaagaaggtct

SEQ ID NO: 5782831 - DNA, 25 bp, Homo sapien
cttgggggcaaggagggggcagctt

SEQ ID NO: 5782832 - DNA, 25 bp, Homo sapien
aggtgcctgggtctccggctcctcc

SEQ ID NO: 5782833 - DNA, 25 bp, Homo sapien
tagctgagccagccagctctgcctc

SEQ ID NO: 5782834 - DNA, 25 bp, Homo sapien
ctagctctgagtcgcaggtgaaggt

SEQ ID NO: 5782835 - DNA, 25 bp, Homo sapien
atagcggcgcagtgagcagaggggc

SEQ ID NO: 5782836 - DNA, 25 bp, Homo sapien
actgatgtcgttgaggcgggacccc

SEQ ID NO: 5782837 - DNA, 25 bp, Homo sapien
cagcactgtggtcactgggatgggg

SEQ ID NO: 5782838 - DNA, 25 bp, Homo sapien
cagtaggcactgcgcggcagcatgg

SEQ ID NO: 5782839 - DNA, 25 bp, Homo sapien
cctggcctattcctggggcaggaac

SEQ ID NO: 5782840 - DNA, 25 bp, Homo sapien
tgggtgtgcagggatacgagtaatg

SEQ ID NO: 5782841 - DNA, 25 bp, Homo sapien
actccacagatagtgtcttgtacca

SEQ ID NO: 5782842 - DNA, 25 bp, Homo sapien
tccacagatagtgtcttgtaccact

SEQ ID NO: 5782843 - DNA, 25 bp, Homo sapien
atttccagcaggacccgcttgtgct

SEQ ID NO: 5782844 - DNA, 25 bp, Homo sapien
aaaatcaattgctttaattgcattg

SEQ ID NO: 5782845 - DNA, 25 bp, Homo sapien
gttcacactgcacccctggggccag

SEQ ID NO: 5782846 - DNA, 25 bp, Homo sapien
cattgaagcgatctgtctgttcaca

SEQ ID NO: 5782847 - DNA, 25 bp, Homo sapien
cggcgatgttctgggaaccagtgat

SEQ ID NO: 5782848 - DNA, 25 bp, Homo sapien
acgactgcactcatactcaaaaaca

SEQ ID NO: 5782849 - DNA, 25 bp, Homo sapien
tcttggccgacagccccctgaggct

SEQ ID NO: 5782850 - DNA, 25 bp, Homo sapien
tgctgttccggcccttgggctgttt

SEQ ID NO: 5782851 - DNA, 25 bp, Homo sapien
ggcgggaccccagacactccacaga

SEQ ID NO: 5782852 - DNA, 25 bp, Homo sapien
gccttgcttgacgatgtcactgaaa

SEQ ID NO: 5782853 - DNA, 25 bp, Homo sapien
gacgttgctgatctcagtcaccttg

SEQ ID NO: 5782854 - DNA, 25 bp, Homo sapien
aaagtttgacgtgaatagaaagata

SEQ ID NO: 5782855 - DNA, 25 bp, Homo sapien
ccgagtcatcagtgaatatgatggc

SEQ ID NO: 5782856 - DNA, 25 bp, Homo sapien
agtcatcggtgctcgccagcactgt

SEQ ID NO: 5782857 - DNA, 25 bp, Homo sapien
agaggaactgagaagccacctgctg

SEQ ID NO: 5782858 - DNA, 25 bp, Homo sapien
acacttgacgttgctgatctcagtc

SEQ ID NO: 5782859 - DNA, 25 bp, Homo sapien
tccttgggggcaaggagggggcagc

SEQ ID NO: 5782860 - DNA, 25 bp, Homo sapien
tacgtgccgagtcatcagtgaatat

SEQ ID NO: 5782861 - DNA, 25 bp, Homo sapien
gctcttcatcttcacgtagccttgc

SEQ ID NO: 5782862 - DNA, 25 bp, Homo sapien
ggccttccctcctggcctattcctg

SEQ ID NO: 5782863 - DNA, 25 bp, Homo sapien
ctggggccccttgctggaggatttc

SEQ ID NO: 5782864 - DNA, 25 bp, Homo sapien
cgcgaggggctgctcctcacctcac

SEQ ID NO: 5782865 - DNA, 25 bp, Homo sapien
gaagcgatctgtctgttcacactgc

SEQ ID NO: 5782866 - DNA, 25 bp, Homo sapien
gtgccatggaggatggacacgactg

SEQ ID NO: 5782867 - DNA, 25 bp, Homo sapien
caggagggctgtgccatggaggatg

SEQ ID NO: 5782868 - DNA, 25 bp, Homo sapien
ctggggcaggaacaagctccagcct

SEQ ID NO: 5782869 - DNA, 25 bp, Homo sapien
ttcggcgatgttctgggaaccagtg

SEQ ID NO: 5782870 - DNA, 25 bp, Homo sapien
gccacctgctgttccggcccttggg

SEQ ID NO: 5782871 - DNA, 25 bp, Homo sapien
agctggcctgggctgccccataccc

SEQ ID NO: 5782872 - DNA, 25 bp, Homo sapien
gcgaggggaaggatgcccaggtgcc

SEQ ID NO: 5782873 - DNA, 25 bp, Homo sapien
tccccctggctgggctttggcttta

SEQ ID NO: 5782874 - DNA, 25 bp, Homo sapien
attaaaaaatttgtgtgtattggtg

SEQ ID NO: 5782875 - DNA, 25 bp, Homo sapien
tgcgcggcagcatggtcgtgggtgt

SEQ ID NO: 5782876 - DNA, 25 bp, Homo sapien
agcccccagcagtcatcggtgctcg

SEQ ID NO: 5782877 - DNA, 25 bp, Homo sapien
caccagccagcacctccggtagatc

SEQ ID NO: 5782878 - DNA, 25 bp, Homo sapien
gcactgtggtcactgggatggggtc

SEQ ID NO: 5782879 - DNA, 25 bp, Homo sapien
agtcccacggtagctccaacccctc

SEQ ID NO: 5782880 - DNA, 25 bp, Homo sapien
tcgccatacacgtccaggttggggc

SEQ ID NO: 5782881 - DNA, 25 bp, Homo sapien
gaggcacaccgacttctcatctgga

SEQ ID NO: 5782882 - DNA, 25 bp, Homo sapien
tgctccccacggcagtcctgctgcg

SEQ ID NO: 5782883 - DNA, 25 bp, Homo sapien
ggggcctggcagaggcgaggggaag

SEQ ID NO: 5782884 - DNA, 25 bp, Homo sapien
gtctgttcacactgcacccctgggg

SEQ ID NO: 5782885 - DNA, 25 bp, Homo sapien
ccctggtcagtgagaggggggcagc

SEQ ID NO: 5782886 - DNA, 25 bp, Homo sapien
ggatacttctccagccgctggggcc

SEQ ID NO: 5782887 - DNA, 25 bp, Homo sapien
gcccgggccaggagcgcctgctcag

SEQ ID NO: 5782888 - DNA, 25 bp, Homo sapien
aaggtatagagtccttccccagcat

SEQ ID NO: 5782889 - DNA, 25 bp, Homo sapien
tcacggcgcggctggcgggggcggc

SEQ ID NO: 5782890 - DNA, 25 bp, Homo sapien
ggggcatcttcccagcctacaaagc

SEQ ID NO: 5782891 - DNA, 25 bp, Homo sapien
ggggcagccccggaggcacaccgac

SEQ ID NO: 5782892 - DNA, 25 bp, Homo sapien
atcacacatccggccagcctcgaag

SEQ ID NO: 5782893 - DNA, 25 bp, Homo sapien
cagcaggcagcccccagcagtcatc

SEQ ID NO: 5782894 - DNA, 25 bp, Homo sapien
tggggaggaggaatgggaaggtctt

SEQ ID NO: 5782895 - DNA, 25 bp, Homo sapien
gaaccagtgatgtggtgccagtagg

SEQ ID NO: 5782896 - DNA, 25 bp, Homo sapien
tcagagtgcttttggctggccagag

SEQ ID NO: 5782897 - DNA, 25 bp, Homo sapien
ttgttctagcagctccttcgccccg

SEQ ID NO: 5782898 - DNA, 25 bp, Homo sapien
ctgggcgccgaggcccgggccagga

SEQ ID NO: 5782899 - DNA, 25 bp, Homo sapien
ttgacgttgctgatctcagtcacct

SEQ ID NO: 5782900 - DNA, 25 bp, Homo sapien
cacatggctgaggtaatcagcaccc

SEQ ID NO: 5782901 - DNA, 25 bp, Homo sapien
aggcgaggggaaggatgcccaggtg

SEQ ID NO: 5782902 - DNA, 25 bp, Homo sapien
cgatctgtctgttcacactgcaccc

SEQ ID NO: 5782903 - DNA, 25 bp, Homo sapien
cttcatgcgtcatcgtgccacttag

SEQ ID NO: 5782904 - DNA, 25 bp, Homo sapien
gcgcagtgagcagaggggccacgag

SEQ ID NO: 5782905 - DNA, 25 bp, Homo sapien
ctcagcggcgccgcggagcaggctc

SEQ ID NO: 5782906 - DNA, 25 bp, Homo sapien
actgcagccagccccgcagcaggca

SEQ ID NO: 5782907 - DNA, 25 bp, Homo sapien
gtccttccccagcatcacacatccg

SEQ ID NO: 5782908 - DNA, 25 bp, Homo sapien
gcctattcctggggcaggaacaagc

SEQ ID NO: 5782909 - DNA, 25 bp, Homo sapien
tgggaaggtcttggtttcagagtgc

SEQ ID NO: 5782910 - DNA, 25 bp, Homo sapien
gcccaggtgcctgggtctccggctc

SEQ ID NO: 5782911 - DNA, 25 bp, Homo sapien
gctgaggtaatcagcacccctaccc

SEQ ID NO: 5782912 - DNA, 25 bp, Homo sapien
aaagagcacaacataatctccttca

SEQ ID NO: 5782913 - DNA, 25 bp, Homo sapien
gagggtggccaaacagggcaagggg

SEQ ID NO: 5782914 - DNA, 25 bp, Homo sapien
gactgcactcatactcaaaaacagc

SEQ ID NO: 5782915 - DNA, 25 bp, Homo sapien
cagcttgcactcgccatacacgtcc

SEQ ID NO: 5782916 - DNA, 25 bp, Homo sapien
cttcctgctcttcatcttcacgtag

SEQ ID NO: 5782917 - DNA, 25 bp, Homo sapien
gaactagaccaaagaaactcgaaag

SEQ ID NO: 5782918 - DNA, 25 bp, Homo sapien
ctttcgagtttctttggtctagttc

SEQ ID NO: 5782919 - DNA, 25 bp, Homo sapien
aggtgagtgcgaaagtcgaggtccc

SEQ ID NO: 5782920 - DNA, 25 bp, Homo sapien
gggacctcgactttcgcactcacct

SEQ ID NO: 5782921 - DNA, 25 bp, Homo sapien
ctcatcccggtgcactgtacctcga

SEQ ID NO: 5782922 - DNA, 25 bp, Homo sapien
tcgaggtacagtgcaccgggatgag

SEQ ID NO: 5782923 - DNA, 25 bp, Homo sapien
ctaacctcctccgctacggcggctc

SEQ ID NO: 5782924 - DNA, 25 bp, Homo sapien
gagccgccgtagcggaggaggttag

SEQ ID NO: 5782925 - DNA, 25 bp, Homo sapien
agttcgccacagccgtcgggacccg

SEQ ID NO: 5782926 - DNA, 25 bp, Homo sapien
cgggtcccgacggctgtggcgaact

SEQ ID NO: 5782927 - DNA, 25 bp, Homo sapien
tccaggaggtaggcctgttacaccg

SEQ ID NO: 5782928 - DNA, 25 bp, Homo sapien
cggtgtaacaggcctacctcctgga

SEQ ID NO: 5782929 - DNA, 25 bp, Homo sapien
gtaggttagccgcgcgccgtggtct

SEQ ID NO: 5782930 - DNA, 25 bp, Homo sapien
agaccacggcgcgcggctaacctac

SEQ ID NO: 5782931 - DNA, 25 bp, Homo sapien
ggttgtcgaaaaagcgggtcatcat

SEQ ID NO: 5782932 - DNA, 25 bp, Homo sapien
atgatgacccgctttttcgacaacc

SEQ ID NO: 5782933 - DNA, 25 bp, Homo sapien
gtgccccgaccgactgtccgtgccc

SEQ ID NO: 5782934 - DNA, 25 bp, Homo sapien
gggcacggacagtcggtcggggcac

SEQ ID NO: 5782935 - DNA, 25 bp, Homo sapien
aacttgttcaacatccagcgactgc

SEQ ID NO: 5782936 - DNA, 25 bp, Homo sapien
ccgtggccctgcaggccctcaaggg

SEQ ID NO: 5782937 - DNA, 25 bp, Homo sapien
gtcatcctccacgtcccccagagcc

SEQ ID NO: 5782938 - DNA, 25 bp, Homo sapien
gtttccagcagagggcggcaccact

SEQ ID NO: 5782939 - DNA, 25 bp, Homo sapien
ggaaggtggaggtgtggtgcatcca

SEQ ID NO: 5782940 - DNA, 25 bp, Homo sapien
aacgtggtggtggtcgtgcacagat

SEQ ID NO: 5782941 - DNA, 25 bp, Homo sapien
gtgcatccaggacttacacaggcag

SEQ ID NO: 5782942 - DNA, 25 bp, Homo sapien
gaacaactgatgcaccaggctgttg

SEQ ID NO: 5782943 - DNA, 25 bp, Homo sapien
gccactgaggtggagctctcctgga

SEQ ID NO: 5782944 - DNA, 25 bp, Homo sapien
tttgggaaatccaaggaggaattct

SEQ ID NO: 5782945 - DNA, 25 bp, Homo sapien
ctgggcttcttctgaacccaagccc

SEQ ID NO: 5782946 - DNA, 25 bp, Homo sapien
tctctcagactctgacttccaagat

SEQ ID NO: 5782947 - DNA, 25 bp, Homo sapien
ttgacctacagcctccgggacaggg

SEQ ID NO: 5782948 - DNA, 25 bp, Homo sapien
agaactctggctgttgttccttgtg

SEQ ID NO: 5782949 - DNA, 25 bp, Homo sapien
gacgagctggggggccagaccgtgc

SEQ ID NO: 5782950 - DNA, 25 bp, Homo sapien
cccaagaccagcatttctgagaagg

SEQ ID NO: 5782951 - DNA, 25 bp, Homo sapien
acttgggacccctacaagtggacta

SEQ ID NO: 5782952 - DNA, 25 bp, Homo sapien
tcagtaaaagcaggcagcccataaa

SEQ ID NO: 5782953 - DNA, 25 bp, Homo sapien
agcagaagtcaacaacttgcggcta

SEQ ID NO: 5782954 - DNA, 25 bp, Homo sapien
aagggtgacatcttcctgctggacc

SEQ ID NO: 5782955 - DNA, 25 bp, Homo sapien
atccaaggaggaattctacagcatg

SEQ ID NO: 5782956 - DNA, 25 bp, Homo sapien
gcagaaggccaatgttcgcctgtac

SEQ ID NO: 5782957 - DNA, 25 bp, Homo sapien
agcctccaggagagaaaggctgcct

SEQ ID NO: 5782958 - DNA, 25 bp, Homo sapien
agcgcagggcgctgcggaggccttc

SEQ ID NO: 5782959 - DNA, 25 bp, Homo sapien
aagcagggccatgagcctcccacct

SEQ ID NO: 5782960 - DNA, 25 bp, Homo sapien
tgggaggccctgggaggccgggccc

SEQ ID NO: 5782961 - DNA, 25 bp, Homo sapien
ctagcatctgacctcaagcatgtgg

SEQ ID NO: 5782962 - DNA, 25 bp, Homo sapien
cgggaacttttttgaggaacactgc

SEQ ID NO: 5782963 - DNA, 25 bp, Homo sapien
cgtgagatggcacgggtggtggtca

SEQ ID NO: 5782964 - DNA, 25 bp, Homo sapien
gcagcatcaaccatctctgagataa

SEQ ID NO: 5782965 - DNA, 25 bp, Homo sapien
tgcagctacttccgcccgggaatca

SEQ ID NO: 5782966 - DNA, 25 bp, Homo sapien
ccagctgcagaaggccaatgttcgc

SEQ ID NO: 5782967 - DNA, 25 bp, Homo sapien
aacggtgctggagggtcaggagcct

SEQ ID NO: 5782968 - DNA, 25 bp, Homo sapien
tggcagggacgcatgtctagcctcc

SEQ ID NO: 5782969 - DNA, 25 bp, Homo sapien
gagcatgtgaccatgggcagcgagc

SEQ ID NO: 5782970 - DNA, 25 bp, Homo sapien
tgaacccaagccctctcgactgccc

SEQ ID NO: 5782971 - DNA, 25 bp, Homo sapien
cgcagaagtggggttcttcagccag

SEQ ID NO: 5782972 - DNA, 25 bp, Homo sapien
tgaggaggtccccagcttccagcca

SEQ ID NO: 5782973 - DNA, 25 bp, Homo sapien
aaccatctctgagataacagcagaa

SEQ ID NO: 5782974 - DNA, 25 bp, Homo sapien
gctccagccacatgggctgcctggt

SEQ ID NO: 5782975 - DNA, 25 bp, Homo sapien
gcagcgagcccccccacttcctcgc

SEQ ID NO: 5782976 - DNA, 25 bp, Homo sapien
caagtggactagccacccgtcccac

SEQ ID NO: 5782977 - DNA, 25 bp, Homo sapien
gatgtcatgtatggtggcgtcctag

SEQ ID NO: 5782978 - DNA, 25 bp, Homo sapien
gtgggcaagctgcacacccagccta

SEQ ID NO: 5782979 - DNA, 25 bp, Homo sapien
cttccactcccctcagaggcttttg

SEQ ID NO: 5782980 - DNA, 25 bp, Homo sapien
cagctcttccggacttggtctgaga

SEQ ID NO: 5782981 - DNA, 25 bp, Homo sapien
cgacctacaccaacgtggaggtggt

SEQ ID NO: 5782982 - DNA, 25 bp, Homo sapien
agagaaaggctgccttcagccgggc

SEQ ID NO: 5782983 - DNA, 25 bp, Homo sapien
tctacatcctggaccagggtggctt

SEQ ID NO: 5782984 - DNA, 25 bp, Homo sapien
aggcaactgctaccttgtgctctac

SEQ ID NO: 5782985 - DNA, 25 bp, Homo sapien
cagggaggcctccacatatggatct

SEQ ID NO: 5782986 - DNA, 25 bp, Homo sapien
cagagcccgaaggccacgcaggggg

SEQ ID NO: 5782987 - DNA, 25 bp, Homo sapien
ggcctgcgatggacatcagcaaggg

SEQ ID NO: 5782988 - DNA, 25 bp, Homo sapien
tgcttccactcccctcagaggcttt

SEQ ID NO: 5782989 - DNA, 25 bp, Homo sapien
tgacatcatgttactggacacctgg

SEQ ID NO: 5782990 - DNA, 25 bp, Homo sapien
gaggtccccagcttccagccacgac

SEQ ID NO: 5782991 - DNA, 25 bp, Homo sapien
cgatggacatcagcaagggcctccc

SEQ ID NO: 5782992 - DNA, 25 bp, Homo sapien
agaagcggcgcaggaaccagaagct

SEQ ID NO: 5782993 - DNA, 25 bp, Homo sapien
cctcatgcagatcatggaggctgtg

SEQ ID NO: 5782994 - DNA, 25 bp, Homo sapien
cgaaggccacgcagggggcgtccag

SEQ ID NO: 5782995 - DNA, 25 bp, Homo sapien
tagcggcccagctcaggatggtgga

SEQ ID NO: 5782996 - DNA, 25 bp, Homo sapien
tgctatgtcatcctccacgtccccc

SEQ ID NO: 5782997 - DNA, 25 bp, Homo sapien
cctagtacaggagcatgtgaccatg

SEQ ID NO: 5782998 - DNA, 25 bp, Homo sapien
aacgacggcgccgagtcggccgcgt

SEQ ID NO: 5782999 - DNA, 25 bp, Homo sapien
acgcagggggcgtccagcgacctgc

SEQ ID NO: 5783000 - DNA, 25 bp, Homo sapien
ccagaggctgggccgtgtccagtac

SEQ ID NO: 5783001 - DNA, 25 bp, Homo sapien
ggaggacctggacaagtatgacatc

SEQ ID NO: 5783002 - DNA, 25 bp, Homo sapien
gggccagctggtgatcttccaggag

SEQ ID NO: 5783003 - DNA, 25 bp, Homo sapien
ctcccctcagaggcttttggtcatc

SEQ ID NO: 5783004 - DNA, 25 bp, Homo sapien
acatcagcaagggcctcccaggcat

SEQ ID NO: 5783005 - DNA, 25 bp, Homo sapien
ggatgagattgaggccctgaacagc

SEQ ID NO: 5783006 - DNA, 25 bp, Homo sapien
gaacagcaacgctgaggaactagat

SEQ ID NO: 5783007 - DNA, 25 bp, Homo sapien
tacaagtggactagccacccgtccc

SEQ ID NO: 5783008 - DNA, 25 bp, Homo sapien
cagctcagagaatgatctggtgcga

SEQ ID NO: 5783009 - DNA, 25 bp, Homo sapien
gctccgtcagcagcaccagcgccac

SEQ ID NO: 5783010 - DNA, 25 bp, Homo sapien
ccatggaaactgagcaagttgtaca

SEQ ID NO: 5783011 - DNA, 25 bp, Homo sapien
ggagcctccccacttctgggaggcc

SEQ ID NO: 5783012 - DNA, 25 bp, Homo sapien
caacatccagcgactgctgcacatc

SEQ ID NO: 5783013 - DNA, 25 bp, Homo sapien
tctgagaaggctcgggggctggctt

SEQ ID NO: 5783014 - DNA, 25 bp, Homo sapien
ccctgaacagcaacgctgaggaact

SEQ ID NO: 5783015 - DNA, 25 bp, Homo sapien
tggggggccagaccgtgctgcaccg

SEQ ID NO: 5783016 - DNA, 25 bp, Homo sapien
actgcccctatcccctggaccccaa

SEQ ID NO: 5783017 - DNA, 25 bp, Homo sapien
tggcgtcctagtacaggagcatgtg

SEQ ID NO: 5783018 - DNA, 25 bp, Homo sapien
ctcaagcatgtggagaccaacttgt

SEQ ID NO: 5783019 - DNA, 25 bp, Homo sapien
gagggcgtggaccctgcccgcaggg

SEQ ID NO: 5783020 - DNA, 25 bp, Homo sapien
ctggaacagctttaataagggtgac

SEQ ID NO: 5783021 - DNA, 25 bp, Homo sapien
gctcaggatggtggacgacggctct

SEQ ID NO: 5783022 - DNA, 25 bp, Homo sapien
gggaagcaggcgggtgcggaagcgc

SEQ ID NO: 5783023 - DNA, 25 bp, Homo sapien
ggagagaaaggctgccttcagccgg

SEQ ID NO: 5783024 - DNA, 25 bp, Homo sapien
gaaggaggcggtggcctggggccag

SEQ ID NO: 5783025 - DNA, 25 bp, Homo sapien
cttccgcccgggaatcatctacagg

SEQ ID NO: 5783026 - DNA, 25 bp, Homo sapien
ctgtgctgggccgcagggtgggcag

SEQ ID NO: 5783027 - DNA, 25 bp, Homo sapien
ggaggtggtgaacgacggcgccgag

SEQ ID NO: 5783028 - DNA, 25 bp, Homo sapien
aacaccaggaccatggaggtgccag

SEQ ID NO: 5783029 - DNA, 25 bp, Homo sapien
caagccctctcgactgcccctatcc

SEQ ID NO: 5783030 - DNA, 25 bp, Homo sapien
tctttgggaaatccaaggaggaatt

SEQ ID NO: 5783031 - DNA, 25 bp, Homo sapien
gcagggcaggtgccgtggccctgca

SEQ ID NO: 5783032 - DNA, 25 bp, Homo sapien
gagtcggccgcgttcaagcagctct

SEQ ID NO: 5783033 - DNA, 25 bp, Homo sapien
aatgttcgcctgtaccatgtctatg

SEQ ID NO: 5783034 - DNA, 25 bp, Homo sapien
ccagcagcgcctacaggacgagctg

SEQ ID NO: 5783035 - DNA, 25 bp, Homo sapien
gtgtctgccactgaggtggagctct

SEQ ID NO: 5783036 - DNA, 25 bp, Homo sapien
ctatggcagggccaccaggccactg

SEQ ID NO: 5783037 - DNA, 25 bp, Homo sapien
caagcatgtggagaccaacttgttc

SEQ ID NO: 5783038 - DNA, 25 bp, Homo sapien
tacatcctgtacctatggcagggcc

SEQ ID NO: 5783039 - DNA, 25 bp, Homo sapien
cagagggcgtggaccctgcccgcag

SEQ ID NO: 5783040 - DNA, 25 bp, Homo sapien
attcatgtaaagctggacgtgggca

SEQ ID NO: 5783041 - DNA, 25 bp, Homo sapien
gcaggccctcaagggctcccaggac

SEQ ID NO: 5783042 - DNA, 25 bp, Homo sapien
gaaacggtgctggagggtcaggagc

SEQ ID NO: 5783043 - DNA, 25 bp, Homo sapien
ccacccgtcccacaaggaagtggtg

SEQ ID NO: 5783044 - DNA, 25 bp, Homo sapien
gctccctgaggaggtccccagcttc

SEQ ID NO: 5783045 - DNA, 25 bp, Homo sapien
ctgcagaaggccaatgttcgcctgt

SEQ ID NO: 5783046 - DNA, 25 bp, Homo sapien
gtgtgcaggcaactgctaccttgtg

SEQ ID NO: 5783047 - DNA, 25 bp, Homo sapien
ttcctgtggcttggggaagctgcaa

SEQ ID NO: 5783048 - DNA, 25 bp, Homo sapien
ggggctggctttgacctacagcctc

SEQ ID NO: 5783049 - DNA, 25 bp, Homo sapien
aggatggtggacgacggctctggga

SEQ ID NO: 5783050 - DNA, 25 bp, Homo sapien
ggtcgggaagcaggcgggtgcggaa

SEQ ID NO: 5783051 - DNA, 25 bp, Homo sapien
ggcaccactccctgctccatggaaa

SEQ ID NO: 5783052 - DNA, 25 bp, Homo sapien
ggcgcaggaaccagaagctcggcgg

SEQ ID NO: 5783053 - DNA, 25 bp, Homo sapien
ggtggagctctcctggaacagcttt

SEQ ID NO: 5783054 - DNA, 25 bp, Homo sapien
cctatcccctggaccccaacatact

SEQ ID NO: 5783055 - DNA, 25 bp, Homo sapien
atcgtgctggtcaagcagggccatg

SEQ ID NO: 5783056 - DNA, 25 bp, Homo sapien
tttaataagggtgacatcttcctgc

SEQ ID NO: 5783057 - DNA, 25 bp, Homo sapien
catcaaccatctctgagataacagc

SEQ ID NO: 5783058 - DNA, 25 bp, Homo sapien
catcctccacgtcccccagagcccg

SEQ ID NO: 5783059 - DNA, 25 bp, Homo sapien
gtggtgaacgacggcgccgagtcgg

SEQ ID NO: 5783060 - DNA, 25 bp, Homo sapien
tgcaaggcactgacagccacaacac

SEQ ID NO: 5783061 - DNA, 25 bp, Homo sapien
gacttctacatcctggaccagggtg

SEQ ID NO: 5783062 - DNA, 25 bp, Homo sapien
gggacccctacaagtggactagcca

SEQ ID NO: 5783063 - DNA, 25 bp, Homo sapien
gagtggaaggaggcggtggcctggg

SEQ ID NO: 5783064 - DNA, 25 bp, Homo sapien
tcggctggcagcagaaccagcagct

SEQ ID NO: 5783065 - DNA, 25 bp, Homo sapien
caaagggaggaagcacgtgtctgcc

SEQ ID NO: 5783066 - DNA, 25 bp, Homo sapien
cataccagaggctgggccgtgtcca

SEQ ID NO: 5783067 - DNA, 25 bp, Homo sapien
gacagctcagagaatgatctggtgc

SEQ ID NO: 5783068 - DNA, 25 bp, Homo sapien
ccaatgttcgcctgtaccatgtcta

SEQ ID NO: 5783069 - DNA, 25 bp, Homo sapien
ggtgccgtggccctgcaggccctca

SEQ ID NO: 5783070 - DNA, 25 bp, Homo sapien
gctggtgatcttccaggagagagct

SEQ ID NO: 5783071 - DNA, 25 bp, Homo sapien
caggcatgcagggaggcctccacat

SEQ ID NO: 5783072 - DNA, 25 bp, Homo sapien
tgggaaggtggaggtgtggtgcatc

SEQ ID NO: 5783073 - DNA, 25 bp, Homo sapien
tcaaccagctgcagaaggccaatgt

SEQ ID NO: 5783074 - DNA, 25 bp, Homo sapien
gaggaggacttctacatcctggacc

SEQ ID NO: 5783075 - DNA, 25 bp, Homo sapien
tcacttgggacccctacaagtggac

SEQ ID NO: 5783076 - DNA, 25 bp, Homo sapien
ccaggtgtcggtctccagcctgaga

SEQ ID NO: 5783077 - DNA, 25 bp, Homo sapien
tgcacagattggtgtggtggatgat

SEQ ID NO: 5783078 - DNA, 25 bp, Homo sapien
cagccaggaggacctggacaagtat

SEQ ID NO: 5783079 - DNA, 25 bp, Homo sapien
tccaggccaagggctacccgaccta

SEQ ID NO: 5783080 - DNA, 25 bp, Homo sapien
gtaatggtgatcagcgtgagatggc

SEQ ID NO: 5783081 - DNA, 25 bp, Homo sapien
gttcttcagccaggaggacctggac

SEQ ID NO: 5783082 - DNA, 25 bp, Homo sapien
cccctatcccctggaccccaacata

SEQ ID NO: 5783083 - DNA, 25 bp, Homo sapien
gaccaacttgttcaacatccagcga

SEQ ID NO: 5783084 - DNA, 25 bp, Homo sapien
gggccaccaggccactgcggatgag

SEQ ID NO: 5783085 - DNA, 25 bp, Homo sapien
agcagctccgtcagcagcaccagcg

SEQ ID NO: 5783086 - DNA, 25 bp, Homo sapien
atgtaaagctggacgtgggcaagct

SEQ ID NO: 5783087 - DNA, 25 bp, Homo sapien
aagatgatgattcagtggaatgggc

SEQ ID NO: 5783088 - DNA, 25 bp, Homo sapien
tgctccatggaaactgagcaagttg

SEQ ID NO: 5783089 - DNA, 25 bp, Homo sapien
cactactgggtcgggaagcaggcgg

SEQ ID NO: 5783090 - DNA, 25 bp, Homo sapien
aggatatcaaccagctgcagaaggc

SEQ ID NO: 5783091 - DNA, 25 bp, Homo sapien
tagtacaggagcatgtgaccatggg

SEQ ID NO: 5783092 - DNA, 25 bp, Homo sapien
ggctggctttgacctacagcctccg

SEQ ID NO: 5783093 - DNA, 25 bp, Homo sapien
cctgcccgcagggagttctatctct

SEQ ID NO: 5783094 - DNA, 25 bp, Homo sapien
tacacataccagaggctgggccgtg

SEQ ID NO: 5783095 - DNA, 25 bp, Homo sapien
tggcagggcaggtgccgtggccctg

SEQ ID NO: 5783096 - DNA, 25 bp, Homo sapien
agtaaaagcaggcagcccataaaaa

SEQ ID NO: 5783097 - DNA, 25 bp, Homo sapien
tgctggggaggccctgcttccactc

SEQ ID NO: 5783098 - DNA, 25 bp, Homo sapien
ggaaaggggcagtcagcatccacca

SEQ ID NO: 5783099 - DNA, 25 bp, Homo sapien
tgctgcaggaggaggacttctacat

SEQ ID NO: 5783100 - DNA, 25 bp, Homo sapien
atcgattcatgtaaagctggacgtg

SEQ ID NO: 5783101 - DNA, 25 bp, Homo sapien
gccacgagtccgactgcttctgcag

SEQ ID NO: 5783102 - DNA, 25 bp, Homo sapien
agaaaggctgccttcagccgggctg

SEQ ID NO: 5783103 - DNA, 25 bp, Homo sapien
acgtgggcaagctgcacacccagcc

SEQ ID NO: 5783104 - DNA, 25 bp, Homo sapien
agccacgactgtttgagtgctccag

SEQ ID NO: 5783105 - DNA, 25 bp, Homo sapien
gtgatcttccaggagagagctgggc

SEQ ID NO: 5783106 - DNA, 25 bp, Homo sapien
ggtcatcctctgcgtgtcagtaaaa

SEQ ID NO: 5783107 - DNA, 25 bp, Homo sapien
ctctgagataacagcagaagtcaac

SEQ ID NO: 5783108 - DNA, 25 bp, Homo sapien
ccatcttccagggccagctggtgat

SEQ ID NO: 5783109 - DNA, 25 bp, Homo sapien
gctgaggaactagatgtcatgtatg

SEQ ID NO: 5783110 - DNA, 25 bp, Homo sapien
agcgagcccccccacttcctcgcca

SEQ ID NO: 5783111 - DNA, 25 bp, Homo sapien
acgcccagcaaggatatcaaccagc

SEQ ID NO: 5783112 - DNA, 25 bp, Homo sapien
cagggcgctgcggaggccttccagc

SEQ ID NO: 5783113 - DNA, 25 bp, Homo sapien
gaagtggtggatggcagcccggcag

SEQ ID NO: 5783114 - DNA, 25 bp, Homo sapien
ggagcagtttccagcagagggcggc

SEQ ID NO: 5783115 - DNA, 25 bp, Homo sapien
atgagcctcccaccttcattggatg

SEQ ID NO: 5783116 - DNA, 25 bp, Homo sapien
tcaagggctcccaggacagctcaga

SEQ ID NO: 5783117 - DNA, 25 bp, Homo sapien
gtctgctacctctggtttgggaagg

SEQ ID NO: 5783118 - DNA, 25 bp, Homo sapien
tggtttgggaagggctgtaatggtg

SEQ ID NO: 5783119 - DNA, 25 bp, Homo sapien
aaatccaaggaggaattctacagca

SEQ ID NO: 5783120 - DNA, 25 bp, Homo sapien
ccttcagccgggctgtgggcttcat

SEQ ID NO: 5783121 - DNA, 25 bp, Homo sapien
gcagggaggagcccggccacaccca

SEQ ID NO: 5783122 - DNA, 25 bp, Homo sapien
ggtctgagaagcggcgcaggaacca

SEQ ID NO: 5783123 - DNA, 25 bp, Homo sapien
ggccatgagcctcccaccttcattg

SEQ ID NO: 5783124 - DNA, 25 bp, Homo sapien
atggacatcagcaagggcctcccag

SEQ ID NO: 5783125 - DNA, 25 bp, Homo sapien
ggctatccagatggccgggcaatgg

SEQ ID NO: 5783126 - DNA, 25 bp, Homo sapien
tggtggacgacggctctgggaaggt

SEQ ID NO: 5783127 - DNA, 25 bp, Homo sapien
ccagcagctccgtcagcagcaccag

SEQ ID NO: 5783128 - DNA, 25 bp, Homo sapien
accagcgccacgatcaacgggggcc

SEQ ID NO: 5783129 - DNA, 25 bp, Homo sapien
ccgtcccacaaggaagtggtggatg

SEQ ID NO: 5783130 - DNA, 25 bp, Homo sapien
tgggccgtgtccagtacatcctgta

SEQ ID NO: 5783131 - DNA, 25 bp, Homo sapien
gattcagtggaatgggcccaagacc

SEQ ID NO: 5783132 - DNA, 25 bp, Homo sapien
ctagcctccaggagagaaaggctgc

SEQ ID NO: 5783133 - DNA, 25 bp, Homo sapien
ttcttctgaacccaagccctctcga

SEQ ID NO: 5783134 - DNA, 25 bp, Homo sapien
gtatggtggcgtcctagtacaggag

SEQ ID NO: 5783135 - DNA, 25 bp, Homo sapien
ctgccagagggcgtggaccctgccc

SEQ ID NO: 5783136 - DNA, 25 bp, Homo sapien
atgtctagcctccaggagagaaagg

SEQ ID NO: 5783137 - DNA, 25 bp, Homo sapien
ccgtgcctcatccctcaactccagt

SEQ ID NO: 5783138 - DNA, 25 bp, Homo sapien
ggcgaaggcgcgggagcagtttcca

SEQ ID NO: 5783139 - DNA, 25 bp, Homo sapien
gccaggaggacctggacaagtatga

SEQ ID NO: 5783140 - DNA, 25 bp, Homo sapien
tagatgtcatgtatggtggcgtcct

SEQ ID NO: 5783141 - DNA, 25 bp, Homo sapien
aagcggcgcaggaaccagaagctcg

SEQ ID NO: 5783142 - DNA, 25 bp, Homo sapien
cagaagtggggttcttcagccagga

SEQ ID NO: 5783143 - DNA, 25 bp, Homo sapien
tcaacaacttgcggctatccagatg

SEQ ID NO: 5783144 - DNA, 25 bp, Homo sapien
cgaagccccaagtcggctggcagca

SEQ ID NO: 5783145 - DNA, 25 bp, Homo sapien
cacaaggaagtggtggatggcagcc

SEQ ID NO: 5783146 - DNA, 25 bp, Homo sapien
catcttcctgctggacctaggcaag

SEQ ID NO: 5783147 - DNA, 25 bp, Homo sapien
gatgatgattcagtggaatgggccc

SEQ ID NO: 5783148 - DNA, 25 bp, Homo sapien
ctccgggacagggaacgtggtggtg

SEQ ID NO: 5783149 - DNA, 25 bp, Homo sapien
gctcagagaatgatctggtgcgaag

SEQ ID NO: 5783150 - DNA, 25 bp, Homo sapien
accaacgtggaggtggtgaacgacg

SEQ ID NO: 5783151 - DNA, 25 bp, Homo sapien
ccagtacatcctgtacctatggcag

SEQ ID NO: 5783152 - DNA, 25 bp, Homo sapien
tcaacgggggcctgcgccgggaaca

SEQ ID NO: 5783153 - DNA, 25 bp, Homo sapien
tgtaccatgtctatgagaagggcaa

SEQ ID NO: 5783154 - DNA, 25 bp, Homo sapien
tggggccaggagtacctgaagactc

SEQ ID NO: 5783155 - DNA, 25 bp, Homo sapien
cagcaagggcctcccaggcatgcag

SEQ ID NO: 5783156 - DNA, 25 bp, Homo sapien
cgttcaagcagctcttccggacttg

SEQ ID NO: 5783157 - DNA, 25 bp, Homo sapien
ccttccagcagcgcctacaggacga

SEQ ID NO: 5783158 - DNA, 25 bp, Homo sapien
caggagtacctgaagactcacccag

SEQ ID NO: 5783159 - DNA, 25 bp, Homo sapien
ggaacagctttaataagggtgacat

SEQ ID NO: 5783160 - DNA, 25 bp, Homo sapien
ttcatccaggccaagggctacccga

SEQ ID NO: 5783161 - DNA, 25 bp, Homo sapien
aatgatctggtgcgaagccccaagt

SEQ ID NO: 5783162 - DNA, 25 bp, Homo sapien
ggaccccaacatacttacaatgctg

SEQ ID NO: 5783163 - DNA, 25 bp, Homo sapien
ctctggctgttgttccttgtgtcgt

SEQ ID NO: 5783164 - DNA, 25 bp, Homo sapien
agaggcttttggtcatcctctgcgt

SEQ ID NO: 5783165 - DNA, 25 bp, Homo sapien
ctgcgtgccgccacgcccagcaagg

SEQ ID NO: 5783166 - DNA, 25 bp, Homo sapien
atgtgaccatgggcagcgagccccc

SEQ ID NO: 5783167 - DNA, 25 bp, Homo sapien
gtcccccagagcccgaaggccacgc

SEQ ID NO: 5783168 - DNA, 25 bp, Homo sapien
gcaagatgatgattcagtggaatgg

SEQ ID NO: 5783169 - DNA, 25 bp, Homo sapien
gctacctctggtttgggaagggctg

SEQ ID NO: 5783170 - DNA, 25 bp, Homo sapien
aatgctggggaggccctgcttccac

SEQ ID NO: 5783171 - DNA, 25 bp, Homo sapien
ggaggagcccggccacacccatcgt

SEQ ID NO: 5783172 - DNA, 25 bp, Homo sapien
ccggacttggtctgagaagcggcgc

SEQ ID NO: 5783173 - DNA, 25 bp, Homo sapien
ggccgtgtccagtacatcctgtacc

SEQ ID NO: 5783174 - DNA, 25 bp, Homo sapien
agcgcctacaggacgagctgggggg

SEQ ID NO: 5783175 - DNA, 25 bp, Homo sapien
ggatggcagcccggcagcagcatca

SEQ ID NO: 5783176 - DNA, 25 bp, Homo sapien
gtggaatgggcccaagaccagcatt

SEQ ID NO: 5783177 - DNA, 25 bp, Homo sapien
ctcgggggctggctttgacctacag

SEQ ID NO: 5783178 - DNA, 25 bp, Homo sapien
gaggcctccacatatggatctctga

SEQ ID NO: 5783179 - DNA, 25 bp, Homo sapien
gagggcggcaccactccctgctcca

SEQ ID NO: 5783180 - DNA, 25 bp, Homo sapien
cgggggctggctttgacctacagcc

SEQ ID NO: 5783181 - DNA, 25 bp, Homo sapien
acttacaatgctggggaggccctgc

SEQ ID NO: 5783182 - DNA, 25 bp, Homo sapien
ggggcgtccagcgacctgcactact

SEQ ID NO: 5783183 - DNA, 25 bp, Homo sapien
gcaggagatcttcctgtggcttggg

SEQ ID NO: 5783184 - DNA, 25 bp, Homo sapien
aggaggtccccagcttccagccacg

SEQ ID NO: 5783185 - DNA, 25 bp, Homo sapien
actgctatgtcatcctccacgtccc

SEQ ID NO: 5783186 - DNA, 25 bp, Homo sapien
agaaggctcgggggctggctttgac

SEQ ID NO: 5783187 - DNA, 25 bp, Homo sapien
ctggcctgcgatggacatcagcaag

SEQ ID NO: 5783188 - DNA, 25 bp, Homo sapien
gacttacacaggcagcccgtggacc

SEQ ID NO: 5783189 - DNA, 25 bp, Homo sapien
ctaagttagcggcccagctcaggat

SEQ ID NO: 5783190 - DNA, 25 bp, Homo sapien
cacgggtggtggtcactgtcatttc

SEQ ID NO: 5783191 - DNA, 25 bp, Homo sapien
ccatattcctgcctggcctgcgatg

SEQ ID NO: 5783192 - DNA, 25 bp, Homo sapien
ggtgcgaagccccaagtcggctggc

SEQ ID NO: 5783193 - DNA, 25 bp, Homo sapien
ccagtgacatcttcttgctggtcac

SEQ ID NO: 5783194 - DNA, 25 bp, Homo sapien
ttgggacccctacaagtggactagc

SEQ ID NO: 5783195 - DNA, 25 bp, Homo sapien
cgtcccatattcctgcctggcctgc

SEQ ID NO: 5783196 - DNA, 25 bp, Homo sapien
cagcagaaccagcagctccgtcagc

SEQ ID NO: 5783197 - DNA, 25 bp, Homo sapien
ggcgcagggccacgagtccgactgc

SEQ ID NO: 5783198 - DNA, 25 bp, Homo sapien
ccaaggaggaattctacagcatggc

SEQ ID NO: 5783199 - DNA, 25 bp, Homo sapien
gggaagctgcaagtgagtggaagga

SEQ ID NO: 5783200 - DNA, 25 bp, Homo sapien
agcagcgcctacaggacgagctggg

SEQ ID NO: 5783201 - DNA, 25 bp, Homo sapien
caagtgcaaggcactgacagccaca

SEQ ID NO: 5783202 - DNA, 25 bp, Homo sapien
ctcacccagcagggaggagcccggc

SEQ ID NO: 5783203 - DNA, 25 bp, Homo sapien
cccagcttccagccacgactgtttg

SEQ ID NO: 5783204 - DNA, 25 bp, Homo sapien
gatcttccaggagagagctgggcac

SEQ ID NO: 5783205 - DNA, 25 bp, Homo sapien
ggcaaagacctgctgcaggaggagg

SEQ ID NO: 5783206 - DNA, 25 bp, Homo sapien
tatctctcagactctgacttccaag

SEQ ID NO: 5783207 - DNA, 25 bp, Homo sapien
tctgacctcaagcatgtggagacca

SEQ ID NO: 5783208 - DNA, 25 bp, Homo sapien
aggagcccggccacacccatcgtgc

SEQ ID NO: 5783209 - DNA, 25 bp, Homo sapien
ctggaccagggtggcttcaagatct

SEQ ID NO: 5783210 - DNA, 25 bp, Homo sapien
agggggcgtccagcgacctgcacta

SEQ ID NO: 5783211 - DNA, 25 bp, Homo sapien
ttcagtggaatgggcccaagaccag

SEQ ID NO: 5783212 - DNA, 25 bp, Homo sapien
gtcaggagcctccccacttctggga

SEQ ID NO: 5783213 - DNA, 25 bp, Homo sapien
ctagccacccgtcccacaaggaagt

SEQ ID NO: 5783214 - DNA, 25 bp, Homo sapien
tgtcatttccaggaagaatgaggaa

SEQ ID NO: 5783215 - DNA, 25 bp, Homo sapien
atggttcttcacttgggacccctac

SEQ ID NO: 5783216 - DNA, 25 bp, Homo sapien
gcatggccacgtggaggcagcggca

SEQ ID NO: 5783217 - DNA, 25 bp, Homo sapien
gcgtcctagtacaggagcatgtgac

SEQ ID NO: 5783218 - DNA, 25 bp, Homo sapien
cagcagggaggagcccggccacacc

SEQ ID NO: 5783219 - DNA, 25 bp, Homo sapien
cgcagggagttctatctctcagact

SEQ ID NO: 5783220 - DNA, 25 bp, Homo sapien
caccacaaggcttttccaagtgcaa

SEQ ID NO: 5783221 - DNA, 25 bp, Homo sapien
gatctatgtgtggcagggacgcatg

SEQ ID NO: 5783222 - DNA, 25 bp, Homo sapien
accctgcccgcagggagttctatct

SEQ ID NO: 5783223 - DNA, 25 bp, Homo sapien
gcaggaggaggacttctacatcctg

SEQ ID NO: 5783224 - DNA, 25 bp, Homo sapien
cccaagtcggctggcagcagaacca

SEQ ID NO: 5783225 - DNA, 25 bp, Homo sapien
cagggtggcttcaagatctatgtgt

SEQ ID NO: 5783226 - DNA, 25 bp, Homo sapien
agcgtcatggacagctgtgtgcagg

SEQ ID NO: 5783227 - DNA, 25 bp, Homo sapien
gttctatctctcagactctgacttc

SEQ ID NO: 5783228 - DNA, 25 bp, Homo sapien
gctaccttgtgctctacacatacca

SEQ ID NO: 5783229 - DNA, 25 bp, Homo sapien
cccctacaagtggactagccacccg

SEQ ID NO: 5783230 - DNA, 25 bp, Homo sapien
tgagatggcacgggtggtggtcact

SEQ ID NO: 5783231 - DNA, 25 bp, Homo sapien
aatgaggaaacggtgctggagggtc

SEQ ID NO: 5783232 - DNA, 25 bp, Homo sapien
aagcagctgggcttcttctgaaccc

SEQ ID NO: 5783233 - DNA, 25 bp, Homo sapien
tctgcgtgtcagtaaaagcaggcag

SEQ ID NO: 5783234 - DNA, 25 bp, Homo sapien
caggaaccagaagctcggcgggagg

SEQ ID NO: 5783235 - DNA, 25 bp, Homo sapien
atccagcgactgctgcacatcaaag

SEQ ID NO: 5783236 - DNA, 25 bp, Homo sapien
ccctggaccccaacatacttacaat

SEQ ID NO: 5783237 - DNA, 25 bp, Homo sapien
gcgaggcgcagggccacgagtccga

SEQ ID NO: 5783238 - DNA, 25 bp, Homo sapien
ggaggacttctacatcctggaccag

SEQ ID NO: 5783239 - DNA, 25 bp, Homo sapien
cacatgggctgcctggtcctcgcag

SEQ ID NO: 5783240 - DNA, 25 bp, Homo sapien
gtcctagtacaggagcatgtgacca

SEQ ID NO: 5783241 - DNA, 25 bp, Homo sapien
ggtggaggtgtggtgcatccaggac

SEQ ID NO: 5783242 - DNA, 25 bp, Homo sapien
aggaattctacagcatggccacgtg

SEQ ID NO: 5783243 - DNA, 25 bp, Homo sapien
ctgtttgagtgctccagccacatgg

SEQ ID NO: 5783244 - DNA, 25 bp, Homo sapien
gaagctgcaagtgagtggaaggagg

SEQ ID NO: 5783245 - DNA, 25 bp, Homo sapien
aagctgcacacccagcctaagttag

SEQ ID NO: 5783246 - DNA, 25 bp, Homo sapien
gagctggggggccagaccgtgctgc

SEQ ID NO: 5783247 - DNA, 25 bp, Homo sapien
cacctggcaggagatcttcctgtgg

SEQ ID NO: 5783248 - DNA, 25 bp, Homo sapien
tccctgctccatggaaactgagcaa

SEQ ID NO: 5783249 - DNA, 25 bp, Homo sapien
acttgcggctatccagatggccggg

SEQ ID NO: 5783250 - DNA, 25 bp, Homo sapien
gatcttcctgtggcttggggaagct

SEQ ID NO: 5783251 - DNA, 25 bp, Homo sapien
ttcctgctggacctaggcaagatga

SEQ ID NO: 5783252 - DNA, 25 bp, Homo sapien
cagctcaggatggtggacgacggct

SEQ ID NO: 5783253 - DNA, 25 bp, Homo sapien
caccttcattggatggttcttcact

SEQ ID NO: 5783254 - DNA, 25 bp, Homo sapien
tggtgcatccaggacttacacaggc

SEQ ID NO: 5783255 - DNA, 25 bp, Homo sapien
acagctgtgtgcaggcaactgctac

SEQ ID NO: 5783256 - DNA, 25 bp, Homo sapien
cacagattggtgtggtggatgatga

SEQ ID NO: 5783257 - DNA, 25 bp, Homo sapien
ttgtgtcgtcccatattcctgcctg

SEQ ID NO: 5783258 - DNA, 25 bp, Homo sapien
catgtggagaccaacttgttcaaca

SEQ ID NO: 5783259 - DNA, 25 bp, Homo sapien
aggaacactgctatgtcatcctcca

SEQ ID NO: 5783260 - DNA, 25 bp, Homo sapien
ggaggccgggccccctaccccagca

SEQ ID NO: 5783261 - DNA, 25 bp, Homo sapien
tctgacttccaagatatctttggga

SEQ ID NO: 5783262 - DNA, 25 bp, Homo sapien
gcttttggtcatcctctgcgtgtca

SEQ ID NO: 5783263 - DNA, 25 bp, Homo sapien
gactgtttgagtgctccagccacat

SEQ ID NO: 5783264 - DNA, 25 bp, Homo sapien
accccagcaacaagaggctccctga

SEQ ID NO: 5783265 - DNA, 25 bp, Homo sapien
caccactccctgctccatggaaact

SEQ ID NO: 5783266 - DNA, 25 bp, Homo sapien
gagaccaacttgttcaacatccagc

SEQ ID NO: 5783267 - DNA, 25 bp, Homo sapien
gatggtggacgacggctctgggaag

SEQ ID NO: 5783268 - DNA, 25 bp, Homo sapien
cagctccgtcagcagcaccagcgcc

SEQ ID NO: 5783269 - DNA, 25 bp, Homo sapien
gggccaggagtacctgaagactcac

SEQ ID NO: 5783270 - DNA, 25 bp, Homo sapien
caacatacttacaatgctggggagg

SEQ ID NO: 5783271 - DNA, 25 bp, Homo sapien
tctgcagctacttccgcccgggaat

SEQ ID NO: 5783272 - DNA, 25 bp, Homo sapien
agcatccaccacaaggcttttccaa

SEQ ID NO: 5783273 - DNA, 25 bp, Homo sapien
aaagcaggcagcccataaaaaaaaa

SEQ ID NO: 5783274 - DNA, 25 bp, Homo sapien
ttccagcagagggcggcaccactcc

SEQ ID NO: 5783275 - DNA, 25 bp, Homo sapien
gcaactgctaccttgtgctctacac

SEQ ID NO: 5783276 - DNA, 25 bp, Homo sapien
ttccttgtgtcgtcccatattcctg

SEQ ID NO: 5783277 - DNA, 25 bp, Homo sapien
ggcgggtgcggaagcgcagggcgct

SEQ ID NO: 5783278 - DNA, 25 bp, Homo sapien
cgtgctggtcaagcagggccatgag

SEQ ID NO: 5783279 - DNA, 25 bp, Homo sapien
caacgctgaggaactagatgtcatg

SEQ ID NO: 5783280 - DNA, 25 bp, Homo sapien
atgggcagcgagcccccccacttcc

SEQ ID NO: 5783281 - DNA, 25 bp, Homo sapien
atggaaaggggcagtcagcatccac

SEQ ID NO: 5783282 - DNA, 25 bp, Homo sapien
cacataccagaggctgggccgtgtc

SEQ ID NO: 5783283 - DNA, 25 bp, Homo sapien
gccaggagtacctgaagactcaccc

SEQ ID NO: 5783284 - DNA, 25 bp, Homo sapien
ggaagcacgtgtctgccactgaggt

SEQ ID NO: 5783285 - DNA, 25 bp, Homo sapien
cccacttctgggaggccctgggagg

SEQ ID NO: 5783286 - DNA, 25 bp, Homo sapien
gttagcggcccagctcaggatggtg

SEQ ID NO: 5783287 - DNA, 25 bp, Homo sapien
agtgcaaggcactgacagccacaac

SEQ ID NO: 5783288 - DNA, 25 bp, Homo sapien
gagaaaaagcagctgggcttcttct

SEQ ID NO: 5783289 - DNA, 25 bp, Homo sapien
gtggccctgcaggccctcaagggct

SEQ ID NO: 5783290 - DNA, 25 bp, Homo sapien
ctggacgtgggcaagctgcacaccc

SEQ ID NO: 5783291 - DNA, 25 bp, Homo sapien
tcagcgtgagatggcacgggtggtg

SEQ ID NO: 5783292 - DNA, 25 bp, Homo sapien
ctgcggatgagattgaggccctgaa

SEQ ID NO: 5783293 - DNA, 25 bp, Homo sapien
actgctgcacatcaaagggaggaag

SEQ ID NO: 5783294 - DNA, 25 bp, Homo sapien
ggtcactgtcatttccaggaagaat

SEQ ID NO: 5783295 - DNA, 25 bp, Homo sapien
tgagaaccggaagatggtgccggta

SEQ ID NO: 5783296 - DNA, 25 bp, Homo sapien
caggagcctccccacttctgggagg

SEQ ID NO: 5783297 - DNA, 25 bp, Homo sapien
actgtcatttccaggaagaatgagg

SEQ ID NO: 5783298 - DNA, 25 bp, Homo sapien
ctggaccccaacatacttacaatgc

SEQ ID NO: 5783299 - DNA, 25 bp, Homo sapien
ttgagtgctccagccacatgggctg

SEQ ID NO: 5783300 - DNA, 25 bp, Homo sapien
gccagcccgtgcctcatccctcaac

SEQ ID NO: 5783301 - DNA, 25 bp, Homo sapien
tcaactccagtgacatcttcttgct

SEQ ID NO: 5783302 - DNA, 25 bp, Homo sapien
ccaggaccatggaggtgccagcccg

SEQ ID NO: 5783303 - DNA, 25 bp, Homo sapien
ctctcgactgcccctatcccctgga

SEQ ID NO: 5783304 - DNA, 25 bp, Homo sapien
gcagctgggcttcttctgaacccaa

SEQ ID NO: 5783305 - DNA, 25 bp, Homo sapien
gcaccagcgccacgatcaacggggg

SEQ ID NO: 5783306 - DNA, 25 bp, Homo sapien
cagggagttctatctctcagactct

SEQ ID NO: 5783307 - DNA, 25 bp, Homo sapien
cgggggcctgcgccgggaacaactg

SEQ ID NO: 5783308 - DNA, 25 bp, Homo sapien
gctcccaggacagctcagagaatga

SEQ ID NO: 5783309 - DNA, 25 bp, Homo sapien
gggcagcgagcccccccacttcctc

SEQ ID NO: 5783310 - DNA, 25 bp, Homo sapien
caagttgtacaggtagccaggtgtc

SEQ ID NO: 5783311 - DNA, 25 bp, Homo sapien
aagtgagtggaaggaggcggtggcc

SEQ ID NO: 5783312 - DNA, 25 bp, Homo sapien
gtaaagctggacgtgggcaagctgc

SEQ ID NO: 5783313 - DNA, 25 bp, Homo sapien
acgtgtctgccactgaggtggagct

SEQ ID NO: 5783314 - DNA, 25 bp, Homo sapien
agctgtgtgcaggcaactgctacct

SEQ ID NO: 5783315 - DNA, 25 bp, Homo sapien
ggaccctgcccgcagggagttctat

SEQ ID NO: 5783316 - DNA, 25 bp, Homo sapien
acatacttacaatgctggggaggcc

SEQ ID NO: 5783317 - DNA, 25 bp, Homo sapien
cctctgcgtgtcagtaaaagcaggc

SEQ ID NO: 5783318 - DNA, 25 bp, Homo sapien
ctggtgcgaagccccaagtcggctg

SEQ ID NO: 5783319 - DNA, 25 bp, Homo sapien
aacccaagccctctcgactgcccct

SEQ ID NO: 5783320 - DNA, 25 bp, Homo sapien
tgaggccaaagccccggacctcatg

SEQ ID NO: 5783321 - DNA, 25 bp, Homo sapien
tgtggtggatgatgaggccaaagcc

SEQ ID NO: 5783322 - DNA, 25 bp, Homo sapien
gcatgtctagcctccaggagagaaa

SEQ ID NO: 5783323 - DNA, 25 bp, Homo sapien
aggaactagatgtcatgtatggtgg

SEQ ID NO: 5783324 - DNA, 25 bp, Homo sapien
ggagtacctgaagactcacccagca

SEQ ID NO: 5783325 - DNA, 25 bp, Homo sapien
ggaaccagaagctcggcgggaggga

SEQ ID NO: 5783326 - DNA, 25 bp, Homo sapien
ggacatcagcaagggcctcccaggc

SEQ ID NO: 5783327 - DNA, 25 bp, Homo sapien
ggcgccgagtcggccgcgttcaagc

SEQ ID NO: 5783328 - DNA, 25 bp, Homo sapien
ccggcagcagcatcaaccatctctg

SEQ ID NO: 5783329 - DNA, 25 bp, Homo sapien
ggacctaggcaagatgatgattcag

SEQ ID NO: 5783330 - DNA, 25 bp, Homo sapien
cagcctaagttagcggcccagctca

SEQ ID NO: 5783331 - DNA, 25 bp, Homo sapien
cttcaagatctatgtgtggcaggga

SEQ ID NO: 5783332 - DNA, 25 bp, Homo sapien
tcagagaatgatctggtgcgaagcc

SEQ ID NO: 5783333 - DNA, 25 bp, Homo sapien
gctgggcaccatggaaaggggcagt

SEQ ID NO: 5783334 - DNA, 25 bp, Homo sapien
tcttccggacttggtctgagaagcg

SEQ ID NO: 5783335 - DNA, 25 bp, Homo sapien
atggacagctgtgtgcaggcaactg

SEQ ID NO: 5783336 - DNA, 25 bp, Homo sapien
agtacatcctgtacctatggcaggg

SEQ ID NO: 5783337 - DNA, 25 bp, Homo sapien
agggaggagcccggccacacccatc

SEQ ID NO: 5783338 - DNA, 25 bp, Homo sapien
cccaggcatgcagggaggcctccac

SEQ ID NO: 5783339 - DNA, 25 bp, Homo sapien
aagggcctcccaggcatgcagggag

SEQ ID NO: 5783340 - DNA, 25 bp, Homo sapien
acgactgtttgagtgctccagccac

SEQ ID NO: 5783341 - DNA, 25 bp, Homo sapien
cagggccacgagtccgactgcttct

SEQ ID NO: 5783342 - DNA, 25 bp, Homo sapien
gaagtggggttcttcagccaggagg

SEQ ID NO: 5783343 - DNA, 25 bp, Homo sapien
tacagcctccgggacagggaacgtg

SEQ ID NO: 5783344 - DNA, 25 bp, Homo sapien
atacttacaatgctggggaggccct

SEQ ID NO: 5783345 - DNA, 25 bp, Homo sapien
gtacaggtagccaggtgtcggtctc

SEQ ID NO: 5783346 - DNA, 25 bp, Homo sapien
ctcccaggcatgcagggaggcctcc

SEQ ID NO: 5783347 - DNA, 25 bp, Homo sapien
tgctggacctaggcaagatgatgat

SEQ ID NO: 5783348 - DNA, 25 bp, Homo sapien
gtcacagccagcgtctgctacctct

SEQ ID NO: 5783349 - DNA, 25 bp, Homo sapien
gggcctcccaggcatgcagggaggc

SEQ ID NO: 5783350 - DNA, 25 bp, Homo sapien
gacatcttcctgctggacctaggca

SEQ ID NO: 5783351 - DNA, 25 bp, Homo sapien
ctgaggtggagctctcctggaacag

SEQ ID NO: 5783352 - DNA, 25 bp, Homo sapien
agaatgatctggtgcgaagccccaa

SEQ ID NO: 5783353 - DNA, 25 bp, Homo sapien
tcctcgccatcttccagggccagct

SEQ ID NO: 5783354 - DNA, 25 bp, Homo sapien
gtgctccagccacatgggctgcctg

SEQ ID NO: 5783355 - DNA, 25 bp, Homo sapien
tggtgccggtacccgagggggctta

SEQ ID NO: 5783356 - DNA, 25 bp, Homo sapien
caggcgggtgcggaagcgcagggcg

SEQ ID NO: 5783357 - DNA, 25 bp, Homo sapien
tcttcctgctggacctaggcaagat

SEQ ID NO: 5783358 - DNA, 25 bp, Homo sapien
ttggatggttcttcacttgggaccc

SEQ ID NO: 5783359 - DNA, 25 bp, Homo sapien
ggaccccaagcgtcatggacagctg

SEQ ID NO: 5783360 - DNA, 25 bp, Homo sapien
cactgaggtggagctctcctggaac

SEQ ID NO: 5783361 - DNA, 25 bp, Homo sapien
ccacgcagggggcgtccagcgacct

SEQ ID NO: 5783362 - DNA, 25 bp, Homo sapien
ccactccctgctccatggaaactga

SEQ ID NO: 5783363 - DNA, 25 bp, Homo sapien
atgtcatcctccacgtcccccagag

SEQ ID NO: 5783364 - DNA, 25 bp, Homo sapien
gattggtgtggtggatgatgaggcc

SEQ ID NO: 5783365 - DNA, 25 bp, Homo sapien
actggacacctggcaggagatcttc

SEQ ID NO: 5783366 - DNA, 25 bp, Homo sapien
tgttactggacacctggcaggagat

SEQ ID NO: 5783367 - DNA, 25 bp, Homo sapien
tatgtgtggcagggacgcatgtcta

SEQ ID NO: 5783368 - DNA, 25 bp, Homo sapien
gtagccaggtgtcggtctccagcct

SEQ ID NO: 5783369 - DNA, 25 bp, Homo sapien
cgcgttcaagcagctcttccggact

SEQ ID NO: 5783370 - DNA, 25 bp, Homo sapien
aggacttctacatcctggaccaggg

SEQ ID NO: 5783371 - DNA, 25 bp, Homo sapien
gatatcaaccagctgcagaaggcca

SEQ ID NO: 5783372 - DNA, 25 bp, Homo sapien
tggagaccaacttgttcaacatcca

SEQ ID NO: 5783373 - DNA, 25 bp, Homo sapien
cactgcggatgagattgaggccctg

SEQ ID NO: 5783374 - DNA, 25 bp, Homo sapien
gagagctgggcaccatggaaagggg

SEQ ID NO: 5783375 - DNA, 25 bp, Homo sapien
cgccgagtcggccgcgttcaagcag

SEQ ID NO: 5783376 - DNA, 25 bp, Homo sapien
ctaccccagcaacaagaggctccct

SEQ ID NO: 5783377 - DNA, 25 bp, Homo sapien
ttacaatgctggggaggccctgctt

SEQ ID NO: 5783378 - DNA, 25 bp, Homo sapien
ttcaacatccagcgactgctgcaca

SEQ ID NO: 5783379 - DNA, 25 bp, Homo sapien
gtttgggaagggctgtaatggtgat

SEQ ID NO: 5783380 - DNA, 25 bp, Homo sapien
ggaggccctgcttccactcccctca

SEQ ID NO: 5783381 - DNA, 25 bp, Homo sapien
aacagctttaataagggtgacatct

SEQ ID NO: 5783382 - DNA, 25 bp, Homo sapien
aggtgccagcccgtgcctcatccct

SEQ ID NO: 5783383 - DNA, 25 bp, Homo sapien
cgggacagggaacgtggtggtggtc

SEQ ID NO: 5783384 - DNA, 25 bp, Homo sapien
caagtcggctggcagcagaaccagc

SEQ ID NO: 5783385 - DNA, 25 bp, Homo sapien
agtggggttcttcagccaggaggac

SEQ ID NO: 5783386 - DNA, 25 bp, Homo sapien
gaccatgggcagcgagcccccccac

SEQ ID NO: 5783387 - DNA, 25 bp, Homo sapien
tgaggaaacggtgctggagggtcag

SEQ ID NO: 5783388 - DNA, 25 bp, Homo sapien
tatcaaccagctgcagaaggccaat

SEQ ID NO: 5783389 - DNA, 25 bp, Homo sapien
tgctgcacatcaaagggaggaagca

SEQ ID NO: 5783390 - DNA, 25 bp, Homo sapien
tgacatcttcttgctggtcacagcc

SEQ ID NO: 5783391 - DNA, 25 bp, Homo sapien
gaaaaagcagctgggcttcttctga

SEQ ID NO: 5783392 - DNA, 25 bp, Homo sapien
aggccaaagccccggacctcatgca

SEQ ID NO: 5783393 - DNA, 25 bp, Homo sapien
atctacaggaagggaggcctagcat

SEQ ID NO: 5783394 - DNA, 25 bp, Homo sapien
tgcggaggccttccagcagcgccta

SEQ ID NO: 5783395 - DNA, 25 bp, Homo sapien
gcatccaggacttacacaggcagcc

SEQ ID NO: 5783396 - DNA, 25 bp, Homo sapien
cgactgcccctatcccctggacccc

SEQ ID NO: 5783397 - DNA, 25 bp, Homo sapien
cgggagcagtttccagcagagggcg

SEQ ID NO: 5783398 - DNA, 25 bp, Homo sapien
ctgtaatggtgatcagcgtgagatg

SEQ ID NO: 5783399 - DNA, 25 bp, Homo sapien
tctcagactctgacttccaagatat

SEQ ID NO: 5783400 - DNA, 25 bp, Homo sapien
gtacctatggcagggccaccaggcc

SEQ ID NO: 5783401 - DNA, 25 bp, Homo sapien
ccgagtcggccgcgttcaagcagct

SEQ ID NO: 5783402 - DNA, 25 bp, Homo sapien
gggccgcagggtgggcagcctgcgt

SEQ ID NO: 5783403 - DNA, 25 bp, Homo sapien
ctggggaggccctgcttccactccc

SEQ ID NO: 5783404 - DNA, 25 bp, Homo sapien
gcagcggcaggagaaaaagcagctg

SEQ ID NO: 5783405 - DNA, 25 bp, Homo sapien
agggaacgtggtggtggtcgtgcac

SEQ ID NO: 5783406 - DNA, 25 bp, Homo sapien
tgcactactgggtcgggaagcaggc

SEQ ID NO: 5783407 - DNA, 25 bp, Homo sapien
gtctatgagaagggcaaagacctgc

SEQ ID NO: 5783408 - DNA, 25 bp, Homo sapien
gtggatggcagcccggcagcagcat

SEQ ID NO: 5783409 - DNA, 25 bp, Homo sapien
catggaggctgtgctgggccgcagg

SEQ ID NO: 5783410 - DNA, 25 bp, Homo sapien
agatggtgccggtacccgagggggc

SEQ ID NO: 5783411 - DNA, 25 bp, Homo sapien
acctcaagcatgtggagaccaactt

SEQ ID NO: 5783412 - DNA, 25 bp, Homo sapien
ccagccacgactgtttgagtgctcc

SEQ ID NO: 5783413 - DNA, 25 bp, Homo sapien
cgtgtcagtaaaagcaggcagccca

SEQ ID NO: 5783414 - DNA, 25 bp, Homo sapien
gctggtcacagccagcgtctgctac

SEQ ID NO: 5783415 - DNA, 25 bp, Homo sapien
gtacaggagcatgtgaccatgggca

SEQ ID NO: 5783416 - DNA, 25 bp, Homo sapien
actgggtcgggaagcaggcgggtgc

SEQ ID NO: 5783417 - DNA, 25 bp, Homo sapien
ggccgggcaatggcagggcaggtgc

SEQ ID NO: 5783418 - DNA, 25 bp, Homo sapien
aggcagcggcaggagaaaaagcagc

SEQ ID NO: 5783419 - DNA, 25 bp, Homo sapien
ggccgggccccctaccccagcaaca

SEQ ID NO: 5783420 - DNA, 25 bp, Homo sapien
ggcagggccaccaggccactgcgga

SEQ ID NO: 5783421 - DNA, 25 bp, Homo sapien
acgctgaggaactagatgtcatgta

SEQ ID NO: 5783422 - DNA, 25 bp, Homo sapien
agaaccggaagatggtgccggtacc

SEQ ID NO: 5783423 - DNA, 25 bp, Homo sapien
cagccacatgggctgcctggtcctc

SEQ ID NO: 5783424 - DNA, 25 bp, Homo sapien
ggggcctgcgccgggaacaactgat

SEQ ID NO: 5783425 - DNA, 25 bp, Homo sapien
gaccatggaggtgccagcccgtgcc

SEQ ID NO: 5783426 - DNA, 25 bp, Homo sapien
ccaggagagagctgggcaccatgga

SEQ ID NO: 5783427 - DNA, 25 bp, Homo sapien
gaacactgctatgtcatcctccacg

SEQ ID NO: 5783428 - DNA, 25 bp, Homo sapien
tcttccaggagagagctgggcacca

SEQ ID NO: 5783429 - DNA, 25 bp, Homo sapien
gcaggagaaaaagcagctgggcttc

SEQ ID NO: 5783430 - DNA, 25 bp, Homo sapien
tcagaggcttttggtcatcctctgc

SEQ ID NO: 5783431 - DNA, 25 bp, Homo sapien
cttcctcgccatcttccagggccag

SEQ ID NO: 5783432 - DNA, 25 bp, Homo sapien
gtgggcttcatccaggccaagggct

SEQ ID NO: 5783433 - DNA, 25 bp, Homo sapien
cgactgctgcacatcaaagggagga

SEQ ID NO: 5783434 - DNA, 25 bp, Homo sapien
tgccgtggccctgcaggccctcaag

SEQ ID NO: 5783435 - DNA, 25 bp, Homo sapien
ttgctggtcacagccagcgtctgct

SEQ ID NO: 5783436 - DNA, 25 bp, Homo sapien
tggtggtggtcgtgcacagattggt

SEQ ID NO: 5783437 - DNA, 25 bp, Homo sapien
cctgtggcttggggaagctgcaagt

SEQ ID NO: 5783438 - DNA, 25 bp, Homo sapien
cctgcttccactcccctcagaggct

SEQ ID NO: 5783439 - DNA, 25 bp, Homo sapien
ggccctgcaggccctcaagggctcc

SEQ ID NO: 5783440 - DNA, 25 bp, Homo sapien
gcaacaagaggctccctgaggaggt

SEQ ID NO: 5783441 - DNA, 25 bp, Homo sapien
tgctggtcaagcagggccatgagcc

SEQ ID NO: 5783442 - DNA, 25 bp, Homo sapien
ctcatccctcaactccagtgacatc

SEQ ID NO: 5783443 - DNA, 25 bp, Homo sapien
gcagatcatggaggctgtgctgggc

SEQ ID NO: 5783444 - DNA, 25 bp, Homo sapien
gtggtggtcgtgcacagattggtgt

SEQ ID NO: 5783445 - DNA, 25 bp, Homo sapien
agcaaggatatcaaccagctgcaga

SEQ ID NO: 5783446 - DNA, 25 bp, Homo sapien
ggcgtccagcgacctgcactactgg

SEQ ID NO: 5783447 - DNA, 25 bp, Homo sapien
cctgctgcaggaggaggacttctac

SEQ ID NO: 5783448 - DNA, 25 bp, Homo sapien
catccaccacaaggcttttccaagt

SEQ ID NO: 5783449 - DNA, 25 bp, Homo sapien
tcctggaacagctttaataagggtg

SEQ ID NO: 5783450 - DNA, 25 bp, Homo sapien
cttctgggaggccctgggaggccgg

SEQ ID NO: 5783451 - DNA, 25 bp, Homo sapien
aaaggctgccttcagccgggctgtg

SEQ ID NO: 5783452 - DNA, 25 bp, Homo sapien
agaggctgggccgtgtccagtacat

SEQ ID NO: 5783453 - DNA, 25 bp, Homo sapien
gccaccaggccactgcggatgagat

SEQ ID NO: 5783454 - DNA, 25 bp, Homo sapien
acaggagcatgtgaccatgggcagc

SEQ ID NO: 5783455 - DNA, 25 bp, Homo sapien
gcagggccatgagcctcccaccttc

SEQ ID NO: 5783456 - DNA, 25 bp, Homo sapien
tttttgaggaacactgctatgtcat

SEQ ID NO: 5783457 - DNA, 25 bp, Homo sapien
atgcagatcatggaggctgtgctgg

SEQ ID NO: 5783458 - DNA, 25 bp, Homo sapien
cttccagggccagctggtgatcttc

SEQ ID NO: 5783459 - DNA, 25 bp, Homo sapien
gtcggtctccagcctgagaactctg

SEQ ID NO: 5783460 - DNA, 25 bp, Homo sapien
gtgtcggtctccagcctgagaactc

SEQ ID NO: 5783461 - DNA, 25 bp, Homo sapien
gagcctcccaccttcattggatggt

SEQ ID NO: 5783462 - DNA, 25 bp, Homo sapien
gggcggcaccactccctgctccatg

SEQ ID NO: 5783463 - DNA, 25 bp, Homo sapien
gccagaccgtgctgcaccgcgaggc

SEQ ID NO: 5783464 - DNA, 25 bp, Homo sapien
tctgggaggccctgggaggccgggc

SEQ ID NO: 5783465 - DNA, 25 bp, Homo sapien
ctccagtgacatcttcttgctggtc

SEQ ID NO: 5783466 - DNA, 25 bp, Homo sapien
accggaagatggtgccggtacccga

SEQ ID NO: 5783467 - DNA, 25 bp, Homo sapien
cctgctggacctaggcaagatgatg

SEQ ID NO: 5783468 - DNA, 25 bp, Homo sapien
ggaatcatctacaggaagggaggcc

SEQ ID NO: 5783469 - DNA, 25 bp, Homo sapien
cttcttgctggtcacagccagcgtc

SEQ ID NO: 5783470 - DNA, 25 bp, Homo sapien
ggcagcccgtggaccccaagcgtca

SEQ ID NO: 5783471 - DNA, 25 bp, Homo sapien
cgggccccctaccccagcaacaaga

SEQ ID NO: 5783472 - DNA, 25 bp, Homo sapien
cgccgggaacaactgatgcaccagg

SEQ ID NO: 5783473 - DNA, 25 bp, Homo sapien
agctgcaagtgagtggaaggaggcg

SEQ ID NO: 5783474 - DNA, 25 bp, Homo sapien
atctggtgcgaagccccaagtcggc

SEQ ID NO: 5783475 - DNA, 25 bp, Homo sapien
tggtcacagccagcgtctgctacct

SEQ ID NO: 5783476 - DNA, 25 bp, Homo sapien
cctggacaagtatgacatcatgtta

SEQ ID NO: 5783477 - DNA, 25 bp, Homo sapien
gcaatggcagggcaggtgccgtggc

SEQ ID NO: 5783478 - DNA, 25 bp, Homo sapien
cgcccgggaatcatctacaggaagg

SEQ ID NO: 5783479 - DNA, 25 bp, Homo sapien
ggagggataaatcgattcatgtaaa

SEQ ID NO: 5783480 - DNA, 25 bp, Homo sapien
gtgaccatgggcagcgagccccccc

SEQ ID NO: 5783481 - DNA, 25 bp, Homo sapien
gggcgctgcggaggccttccagcag

SEQ ID NO: 5783482 - DNA, 25 bp, Homo sapien
ttggtctgagaagcggcgcaggaac

SEQ ID NO: 5783483 - DNA, 25 bp, Homo sapien
agagaatgatctggtgcgaagcccc

SEQ ID NO: 5783484 - DNA, 25 bp, Homo sapien
tgagaactctggctgttgttccttg

SEQ ID NO: 5783485 - DNA, 25 bp, Homo sapien
gtgccagcccgtgcctcatccctca

SEQ ID NO: 5783486 - DNA, 25 bp, Homo sapien
cgcaggaaccagaagctcggcggga

SEQ ID NO: 5783487 - DNA, 25 bp, Homo sapien
cttctgaacccaagccctctcgact

SEQ ID NO: 5783488 - DNA, 25 bp, Homo sapien
ggtggcgtcctagtacaggagcatg

SEQ ID NO: 5783489 - DNA, 25 bp, Homo sapien
gtctccagcctgagaactctggctg

SEQ ID NO: 5783490 - DNA, 25 bp, Homo sapien
aggcaagatgatgattcagtggaat

SEQ ID NO: 5783491 - DNA, 25 bp, Homo sapien
cccacttcctcgccatcttccaggg

SEQ ID NO: 5783492 - DNA, 25 bp, Homo sapien
tcaaccatctctgagataacagcag

SEQ ID NO: 5783493 - DNA, 25 bp, Homo sapien
ctgaacagcaacgctgaggaactag

SEQ ID NO: 5783494 - DNA, 25 bp, Homo sapien
ccagcgactgctgcacatcaaaggg

SEQ ID NO: 5783495 - DNA, 25 bp, Homo sapien
gactcacccagcagggaggagcccg

SEQ ID NO: 5783496 - DNA, 25 bp, Homo sapien
ctgctaccttgtgctctacacatac

SEQ ID NO: 5783497 - DNA, 25 bp, Homo sapien
caccaggctgttgaggacctgccag

SEQ ID NO: 5783498 - DNA, 25 bp, Homo sapien
agtccgactgcttctgcagctactt

SEQ ID NO: 5783499 - DNA, 25 bp, Homo sapien
gtggatgatgaggccaaagccccgg

SEQ ID NO: 5783500 - DNA, 25 bp, Homo sapien
gaagatggtgccggtacccgagggg

SEQ ID NO: 5783501 - DNA, 25 bp, Homo sapien
tgagaaggctcgggggctggctttg

SEQ ID NO: 5783502 - DNA, 25 bp, Homo sapien
ctgctacctctggtttgggaagggc

SEQ ID NO: 5783503 - DNA, 25 bp, Homo sapien
cagcccgtgcctcatccctcaactc

SEQ ID NO: 5783504 - DNA, 25 bp, Homo sapien
atggccgggcaatggcagggcaggt

SEQ ID NO: 5783505 - DNA, 25 bp, Homo sapien
ataaatcgattcatgtaaagctgga

SEQ ID NO: 5783506 - DNA, 25 bp, Homo sapien
tccaccacaaggcttttccaagtgc

SEQ ID NO: 5783507 - DNA, 25 bp, Homo sapien
agtggtggatggcagcccggcagca

SEQ ID NO: 5783508 - DNA, 25 bp, Homo sapien
cgtcagcagcaccagcgccacgatc

SEQ ID NO: 5783509 - DNA, 25 bp, Homo sapien
aagccccggacctcatgcagatcat

SEQ ID NO: 5783510 - DNA, 25 bp, Homo sapien
tcagcagcaccagcgccacgatcaa

SEQ ID NO: 5783511 - DNA, 25 bp, Homo sapien
cccagcagggaggagcccggccaca

SEQ ID NO: 5783512 - DNA, 25 bp, Homo sapien
cccagagcccgaaggccacgcaggg

SEQ ID NO: 5783513 - DNA, 25 bp, Homo sapien
tggaggtgtggtgcatccaggactt

SEQ ID NO: 5783514 - DNA, 25 bp, Homo sapien
ggtcctcgcagaagtggggttcttc

SEQ ID NO: 5783515 - DNA, 25 bp, Homo sapien
cgaaggcgcgggagcagtttccagc

SEQ ID NO: 5783516 - DNA, 25 bp, Homo sapien
gatgcaccaggctgttgaggacctg

SEQ ID NO: 5783517 - DNA, 25 bp, Homo sapien
tcgggaagcaggcgggtgcggaagc

SEQ ID NO: 5783518 - DNA, 25 bp, Homo sapien
aggggcagtcagcatccaccacaag

SEQ ID NO: 5783519 - DNA, 25 bp, Homo sapien
gggaggaagcacgtgtctgccactg

SEQ ID NO: 5783520 - DNA, 25 bp, Homo sapien
gggtcaggagcctccccacttctgg

SEQ ID NO: 5783521 - DNA, 25 bp, Homo sapien
agcccccccacttcctcgccatctt

SEQ ID NO: 5783522 - DNA, 25 bp, Homo sapien
gggctcccaggacagctcagagaat

SEQ ID NO: 5783523 - DNA, 25 bp, Homo sapien
cctgtaccatgtctatgagaagggc

SEQ ID NO: 5783524 - DNA, 25 bp, Homo sapien
gaggaagcacgtgtctgccactgag

SEQ ID NO: 5783525 - DNA, 25 bp, Homo sapien
accccaagcgtcatggacagctgtg

SEQ ID NO: 5783526 - DNA, 25 bp, Homo sapien
tcatcctctgcgtgtcagtaaaagc

SEQ ID NO: 5783527 - DNA, 25 bp, Homo sapien
ggccacgcagggggcgtccagcgac

SEQ ID NO: 5783528 - DNA, 25 bp, Homo sapien
tggtggatggcagcccggcagcagc

SEQ ID NO: 5783529 - DNA, 25 bp, Homo sapien
gacctacagcctccgggacagggaa

SEQ ID NO: 5783530 - DNA, 25 bp, Homo sapien
gaattctacagcatggccacgtgga

SEQ ID NO: 5783531 - DNA, 25 bp, Homo sapien
cacccagcctaagttagcggcccag

SEQ ID NO: 5783532 - DNA, 25 bp, Homo sapien
tcttcctgtggcttggggaagctgc

SEQ ID NO: 5783533 - DNA, 25 bp, Homo sapien
ctggctttgacctacagcctccggg

SEQ ID NO: 5783534 - DNA, 25 bp, Homo sapien
ctcccaccttcattggatggttctt

SEQ ID NO: 5783535 - DNA, 25 bp, Homo sapien
ggaaactgagcaagttgtacaggta

SEQ ID NO: 5783536 - DNA, 25 bp, Homo sapien
tggcaggagatcttcctgtggcttg

SEQ ID NO: 5783537 - DNA, 25 bp, Homo sapien
acatcatgttactggacacctggca

SEQ ID NO: 5783538 - DNA, 25 bp, Homo sapien
gaggacctgccagagggcgtggacc

SEQ ID NO: 5783539 - DNA, 25 bp, Homo sapien
cattggatggttcttcacttgggac

SEQ ID NO: 5783540 - DNA, 25 bp, Homo sapien
ggggaggccctgcttccactcccct

SEQ ID NO: 5783541 - DNA, 25 bp, Homo sapien
ggtgaacgacggcgccgagtcggcc

SEQ ID NO: 5783542 - DNA, 25 bp, Homo sapien
catgcagggaggcctccacatatgg

SEQ ID NO: 5783543 - DNA, 25 bp, Homo sapien
ggcttttccaagtgcaaggcactga

SEQ ID NO: 5783544 - DNA, 25 bp, Homo sapien
caccatggaaaggggcagtcagcat

SEQ ID NO: 5783545 - DNA, 25 bp, Homo sapien
cctgcactactgggtcgggaagcag

SEQ ID NO: 5783546 - DNA, 25 bp, Homo sapien
tcatctacaggaagggaggcctagc

SEQ ID NO: 5783547 - DNA, 25 bp, Homo sapien
cacgagtccgactgcttctgcagct

SEQ ID NO: 5783548 - DNA, 25 bp, Homo sapien
cagcccgtggaccccaagcgtcatg

SEQ ID NO: 5783549 - DNA, 25 bp, Homo sapien
gtggacgacggctctgggaaggtgg

SEQ ID NO: 5783550 - DNA, 25 bp, Homo sapien
gggctacccgacctacaccaacgtg

SEQ ID NO: 5783551 - DNA, 25 bp, Homo sapien
ggacctgccagagggcgtggaccct

SEQ ID NO: 5783552 - DNA, 25 bp, Homo sapien
agaatgaggaaacggtgctggaggg

SEQ ID NO: 5783553 - DNA, 25 bp, Homo sapien
aggcctagcatctgacctcaagcat

SEQ ID NO: 5783554 - DNA, 25 bp, Homo sapien
agcaacgctgaggaactagatgtca

SEQ ID NO: 5783555 - DNA, 25 bp, Homo sapien
atgatgaggccaaagccccggacct

SEQ ID NO: 5783556 - DNA, 25 bp, Homo sapien
cccgaaggccacgcagggggcgtcc

SEQ ID NO: 5783557 - DNA, 25 bp, Homo sapien
gctacttccgcccgggaatcatcta

SEQ ID NO: 5783558 - DNA, 25 bp, Homo sapien
tgcccgcagggagttctatctctca

SEQ ID NO: 5783559 - DNA, 25 bp, Homo sapien
tgacctcaagcatgtggagaccaac

SEQ ID NO: 5783560 - DNA, 25 bp, Homo sapien
gccccggacctcatgcagatcatgg

SEQ ID NO: 5783561 - DNA, 25 bp, Homo sapien
aggacctggacaagtatgacatcat

SEQ ID NO: 5783562 - DNA, 25 bp, Homo sapien
ctggacctaggcaagatgatgattc

SEQ ID NO: 5783563 - DNA, 25 bp, Homo sapien
tatcccctggaccccaacatactta

SEQ ID NO: 5783564 - DNA, 25 bp, Homo sapien
tccagccacatgggctgcctggtcc

SEQ ID NO: 5783565 - DNA, 25 bp, Homo sapien
aggtggtgaacgacggcgccgagtc

SEQ ID NO: 5783566 - DNA, 25 bp, Homo sapien
atggcacgggtggtggtcactgtca

SEQ ID NO: 5783567 - DNA, 25 bp, Homo sapien
cacttctgggaggccctgggaggcc

SEQ ID NO: 5783568 - DNA, 25 bp, Homo sapien
gaagggcaaagacctgctgcaggag

SEQ ID NO: 5783569 - DNA, 25 bp, Homo sapien
agccacaacaccaggaccatggagg

SEQ ID NO: 5783570 - DNA, 25 bp, Homo sapien
agcatcaaccatctctgagataaca

SEQ ID NO: 5783571 - DNA, 25 bp, Homo sapien
tacagcatggccacgtggaggcagc

SEQ ID NO: 5783572 - DNA, 25 bp, Homo sapien
atgtatggtggcgtcctagtacagg

SEQ ID NO: 5783573 - DNA, 25 bp, Homo sapien
ttcgcctgtaccatgtctatgagaa

SEQ ID NO: 5783574 - DNA, 25 bp, Homo sapien
agcaggcgggtgcggaagcgcaggg

SEQ ID NO: 5783575 - DNA, 25 bp, Homo sapien
ttcttcacttgggacccctacaagt

SEQ ID NO: 5783576 - DNA, 25 bp, Homo sapien
ctgttgttccttgtgtcgtcccata

SEQ ID NO: 5783577 - DNA, 25 bp, Homo sapien
agcgactgctgcacatcaaagggag

SEQ ID NO: 5783578 - DNA, 25 bp, Homo sapien
caggagagaaaggctgccttcagcc

SEQ ID NO: 5783579 - DNA, 25 bp, Homo sapien
tcatgtatggtggcgtcctagtaca

SEQ ID NO: 5783580 - DNA, 25 bp, Homo sapien
tacttccgcccgggaatcatctaca

SEQ ID NO: 5783581 - DNA, 25 bp, Homo sapien
ccacgactgtttgagtgctccagcc

SEQ ID NO: 5783582 - DNA, 25 bp, Homo sapien
ggaggaattctacagcatggccacg

SEQ ID NO: 5783583 - DNA, 25 bp, Homo sapien
acttccaagatatctttgggaaatc

SEQ ID NO: 5783584 - DNA, 25 bp, Homo sapien
agcatctgacctcaagcatgtggag

SEQ ID NO: 5783585 - DNA, 25 bp, Homo sapien
gaggtggagctctcctggaacagct

SEQ ID NO: 5783586 - DNA, 25 bp, Homo sapien
tggagctctcctggaacagctttaa

SEQ ID NO: 5783587 - DNA, 25 bp, Homo sapien
tcaagatctatgtgtggcagggacg

SEQ ID NO: 5783588 - DNA, 25 bp, Homo sapien
aatcatctacaggaagggaggccta

SEQ ID NO: 5783589 - DNA, 25 bp, Homo sapien
ccatgtctatgagaagggcaaagac

SEQ ID NO: 5783590 - DNA, 25 bp, Homo sapien
gcctggcctgcgatggacatcagca

SEQ ID NO: 5783591 - DNA, 25 bp, Homo sapien
ccacaaggcttttccaagtgcaagg

SEQ ID NO: 5783592 - DNA, 25 bp, Homo sapien
atcatggaggctgtgctgggccgca

SEQ ID NO: 5783593 - DNA, 25 bp, Homo sapien
tccctgaggaggtccccagcttcca

SEQ ID NO: 5783594 - DNA, 25 bp, Homo sapien
aaggccaatgttcgcctgtaccatg

SEQ ID NO: 5783595 - DNA, 25 bp, Homo sapien
tctatgtgtggcagggacgcatgtc

SEQ ID NO: 5783596 - DNA, 25 bp, Homo sapien
aaggtggaggtgtggtgcatccagg

SEQ ID NO: 5783597 - DNA, 25 bp, Homo sapien
gcggcaccactccctgctccatgga

SEQ ID NO: 5783598 - DNA, 25 bp, Homo sapien
acctatggcagggccaccaggccac

SEQ ID NO: 5783599 - DNA, 25 bp, Homo sapien
gtctgccactgaggtggagctctcc

SEQ ID NO: 5783600 - DNA, 25 bp, Homo sapien
gcagggggcgtccagcgacctgcac

SEQ ID NO: 5783601 - DNA, 25 bp, Homo sapien
aggagagagctgggcaccatggaaa

SEQ ID NO: 5783602 - DNA, 25 bp, Homo sapien
tcatggacagctgtgtgcaggcaac

SEQ ID NO: 5783603 - DNA, 25 bp, Homo sapien
gtcccacaaggaagtggtggatggc

SEQ ID NO: 5783604 - DNA, 25 bp, Homo sapien
atgtctatgagaagggcaaagacct

SEQ ID NO: 5783605 - DNA, 25 bp, Homo sapien
caaggaagtggtggatggcagcccg

SEQ ID NO: 5783606 - DNA, 25 bp, Homo sapien
acctaggcaagatgatgattcagtg

SEQ ID NO: 5783607 - DNA, 25 bp, Homo sapien
gcagaaccagcagctccgtcagcag

SEQ ID NO: 5783608 - DNA, 25 bp, Homo sapien
ggcgggagggataaatcgattcatg

SEQ ID NO: 5783609 - DNA, 25 bp, Homo sapien
atggcagggccaccaggccactgcg

SEQ ID NO: 5783610 - DNA, 25 bp, Homo sapien
gctgttgaggacctgccagagggcg

SEQ ID NO: 5783611 - DNA, 25 bp, Homo sapien
agcaagttgtacaggtagccaggtg

SEQ ID NO: 5783612 - DNA, 25 bp, Homo sapien
ccctaccccagcaacaagaggctcc

SEQ ID NO: 5783613 - DNA, 25 bp, Homo sapien
ttgaggccctgaacagcaacgctga

SEQ ID NO: 5783614 - DNA, 25 bp, Homo sapien
ttggtgtggtggatgatgaggccaa

SEQ ID NO: 5783615 - DNA, 25 bp, Homo sapien
gaagggctgtaatggtgatcagcgt

SEQ ID NO: 5783616 - DNA, 25 bp, Homo sapien
cacttcctcgccatcttccagggcc

SEQ ID NO: 5783617 - DNA, 25 bp, Homo sapien
gcctcatccctcaactccagtgaca

SEQ ID NO: 5783618 - DNA, 25 bp, Homo sapien
actgacagccacaacaccaggacca

SEQ ID NO: 5783619 - DNA, 25 bp, Homo sapien
catccctcaactccagtgacatctt

SEQ ID NO: 5783620 - DNA, 25 bp, Homo sapien
tcttgctggtcacagccagcgtctg

SEQ ID NO: 5783621 - DNA, 25 bp, Homo sapien
cctcagaggcttttggtcatcctct

SEQ ID NO: 5783622 - DNA, 25 bp, Homo sapien
caggtgccgtggccctgcaggccct

SEQ ID NO: 5783623 - DNA, 25 bp, Homo sapien
caagaggctccctgaggaggtcccc

SEQ ID NO: 5783624 - DNA, 25 bp, Homo sapien
tcctcgcagaagtggggttcttcag

SEQ ID NO: 5783625 - DNA, 25 bp, Homo sapien
gatcaacgggggcctgcgccgggaa

SEQ ID NO: 5783626 - DNA, 25 bp, Homo sapien
actgagcaagttgtacaggtagcca

SEQ ID NO: 5783627 - DNA, 25 bp, Homo sapien
cgtgcacagattggtgtggtggatg

SEQ ID NO: 5783628 - DNA, 25 bp, Homo sapien
cgggaatcatctacaggaagggagg

SEQ ID NO: 5783629 - DNA, 25 bp, Homo sapien
gtgcctcatccctcaactccagtga

SEQ ID NO: 5783630 - DNA, 25 bp, Homo sapien
tgggcaccatggaaaggggcagtca

SEQ ID NO: 5783631 - DNA, 25 bp, Homo sapien
aggagatcttcctgtggcttgggga

SEQ ID NO: 5783632 - DNA, 25 bp, Homo sapien
ggtcaagcagggccatgagcctccc

SEQ ID NO: 5783633 - DNA, 25 bp, Homo sapien
caccaggaccatggaggtgccagcc

SEQ ID NO: 5783634 - DNA, 25 bp, Homo sapien
ggcatgcagggaggcctccacatat

SEQ ID NO: 5783635 - DNA, 25 bp, Homo sapien
cccgggaatcatctacaggaaggga

SEQ ID NO: 5783636 - DNA, 25 bp, Homo sapien
acagggaacgtggtggtggtcgtgc

SEQ ID NO: 5783637 - DNA, 25 bp, Homo sapien
tcaagcagggccatgagcctcccac

SEQ ID NO: 5783638 - DNA, 25 bp, Homo sapien
gagcccggccacacccatcgtgctg

SEQ ID NO: 5783639 - DNA, 25 bp, Homo sapien
cttctgcagctacttccgcccggga

SEQ ID NO: 5783640 - DNA, 25 bp, Homo sapien
gcgtctgctacctctggtttgggaa

SEQ ID NO: 5783641 - DNA, 25 bp, Homo sapien
tacatcctggaccagggtggcttca

SEQ ID NO: 5783642 - DNA, 25 bp, Homo sapien
aggacagctcagagaatgatctggt

SEQ ID NO: 5783643 - DNA, 25 bp, Homo sapien
tctggtttgggaagggctgtaatgg

SEQ ID NO: 5783644 - DNA, 25 bp, Homo sapien
tggaggctgtgctgggccgcagggt

SEQ ID NO: 5783645 - DNA, 25 bp, Homo sapien
gggaagggctgtaatggtgatcagc

SEQ ID NO: 5783646 - DNA, 25 bp, Homo sapien
aggccctgcttccactcccctcaga

SEQ ID NO: 5783647 - DNA, 25 bp, Homo sapien
ctgcctggcctgcgatggacatcag

SEQ ID NO: 5783648 - DNA, 25 bp, Homo sapien
atctctgagataacagcagaagtca

SEQ ID NO: 5783649 - DNA, 25 bp, Homo sapien
catgggctgcctggtcctcgcagaa

SEQ ID NO: 5783650 - DNA, 25 bp, Homo sapien
cctgcgatggacatcagcaagggcc

SEQ ID NO: 5783651 - DNA, 25 bp, Homo sapien
ggaggtgccagcccgtgcctcatcc

SEQ ID NO: 5783652 - DNA, 25 bp, Homo sapien
acggcgccgagtcggccgcgttcaa

SEQ ID NO: 5783653 - DNA, 25 bp, Homo sapien
ggcagcagaaccagcagctccgtca

SEQ ID NO: 5783654 - DNA, 25 bp, Homo sapien
acgatcaacgggggcctgcgccggg

SEQ ID NO: 5783655 - DNA, 25 bp, Homo sapien
cctcaagggctcccaggacagctca

SEQ ID NO: 5783656 - DNA, 25 bp, Homo sapien
gcactgacagccacaacaccaggac

SEQ ID NO: 5783657 - DNA, 25 bp, Homo sapien
tcatgcagatcatggaggctgtgct

SEQ ID NO: 5783658 - DNA, 25 bp, Homo sapien
ccttgtgctctacacataccagagg

SEQ ID NO: 5783659 - DNA, 25 bp, Homo sapien
ctacaggaagggaggcctagcatct

SEQ ID NO: 5783660 - DNA, 25 bp, Homo sapien
cctgaagactcacccagcagggagg

SEQ ID NO: 5783661 - DNA, 25 bp, Homo sapien
tggtcgtgcacagattggtgtggtg

SEQ ID NO: 5783662 - DNA, 25 bp, Homo sapien
ggaaatccaaggaggaattctacag

SEQ ID NO: 5783663 - DNA, 25 bp, Homo sapien
tgaacgacggcgccgagtcggccgc

SEQ ID NO: 5783664 - DNA, 25 bp, Homo sapien
aactccagtgacatcttcttgctgg

SEQ ID NO: 5783665 - DNA, 25 bp, Homo sapien
ccaagggctacccgacctacaccaa

SEQ ID NO: 5783666 - DNA, 25 bp, Homo sapien
cagattggtgtggtggatgatgagg

SEQ ID NO: 5783667 - DNA, 25 bp, Homo sapien
tctgagaaccggaagatggtgccgg

SEQ ID NO: 5783668 - DNA, 25 bp, Homo sapien
cctacagcctccgggacagggaacg

SEQ ID NO: 5783669 - DNA, 25 bp, Homo sapien
acctacaccaacgtggaggtggtga

SEQ ID NO: 5783670 - DNA, 25 bp, Homo sapien
gtgtcgtcccatattcctgcctggc

SEQ ID NO: 5783671 - DNA, 25 bp, Homo sapien
cccaacatacttacaatgctgggga

SEQ ID NO: 5783672 - DNA, 25 bp, Homo sapien
ctgagataacagcagaagtcaacaa

SEQ ID NO: 5783673 - DNA, 25 bp, Homo sapien
cggacctcatgcagatcatggaggc

SEQ ID NO: 5783674 - DNA, 25 bp, Homo sapien
cctctggtttgggaagggctgtaat

SEQ ID NO: 5783675 - DNA, 25 bp, Homo sapien
cgggagggataaatcgattcatgta

SEQ ID NO: 5783676 - DNA, 25 bp, Homo sapien
cttgttcaacatccagcgactgctg

SEQ ID NO: 5783677 - DNA, 25 bp, Homo sapien
ggatggttcttcacttgggacccct

SEQ ID NO: 5783678 - DNA, 25 bp, Homo sapien
aggccctcaagggctcccaggacag

SEQ ID NO: 5783679 - DNA, 25 bp, Homo sapien
agcagagggcggcaccactccctgc

SEQ ID NO: 5783680 - DNA, 25 bp, Homo sapien
cttttttgaggaacactgctatgtc

SEQ ID NO: 5783681 - DNA, 25 bp, Homo sapien
aagctcggcgggagggataaatcga

SEQ ID NO: 5783682 - DNA, 25 bp, Homo sapien
atccaggacttacacaggcagcccg

SEQ ID NO: 5783683 - DNA, 25 bp, Homo sapien
aatggtgatcagcgtgagatggcac

SEQ ID NO: 5783684 - DNA, 25 bp, Homo sapien
tgcgatggacatcagcaagggcctc

SEQ ID NO: 5783685 - DNA, 25 bp, Homo sapien
aggaccatggaggtgccagcccgtg

SEQ ID NO: 5783686 - DNA, 25 bp, Homo sapien
gcctagcatctgacctcaagcatgt

SEQ ID NO: 5783687 - DNA, 25 bp, Homo sapien
agggcaaagacctgctgcaggagga

SEQ ID NO: 5783688 - DNA, 25 bp, Homo sapien
ccacgcccagcaaggatatcaacca

SEQ ID NO: 5783689 - DNA, 25 bp, Homo sapien
aaggcttttccaagtgcaaggcact

SEQ ID NO: 5783690 - DNA, 25 bp, Homo sapien
cgattcatgtaaagctggacgtggg

SEQ ID NO: 5783691 - DNA, 25 bp, Homo sapien
cgccatcttccagggccagctggtg

SEQ ID NO: 5783692 - DNA, 25 bp, Homo sapien
cgactgcttctgcagctacttccgc

SEQ ID NO: 5783693 - DNA, 25 bp, Homo sapien
gtggcctggggccaggagtacctga

SEQ ID NO: 5783694 - DNA, 25 bp, Homo sapien
ttccagcagcgcctacaggacgagc

SEQ ID NO: 5783695 - DNA, 25 bp, Homo sapien
ttgcggctatccagatggccgggca

SEQ ID NO: 5783696 - DNA, 25 bp, Homo sapien
ctggtcctcgcagaagtggggttct

SEQ ID NO: 5783697 - DNA, 25 bp, Homo sapien
gaggtgtggtgcatccaggacttac

SEQ ID NO: 5783698 - DNA, 25 bp, Homo sapien
aagcacgtgtctgccactgaggtgg

SEQ ID NO: 5783699 - DNA, 25 bp, Homo sapien
gaggctgtgctgggccgcagggtgg

SEQ ID NO: 5783700 - DNA, 25 bp, Homo sapien
ccctctcgactgcccctatcccctg

SEQ ID NO: 5783701 - DNA, 25 bp, Homo sapien
gcctgcgtgccgccacgcccagcaa

SEQ ID NO: 5783702 - DNA, 25 bp, Homo sapien
cgtccagcgacctgcactactgggt

SEQ ID NO: 5783703 - DNA, 25 bp, Homo sapien
ggtgcggaagcgcagggcgctgcgg

SEQ ID NO: 5783704 - DNA, 25 bp, Homo sapien
cagtggaatgggcccaagaccagca

SEQ ID NO: 5783705 - DNA, 25 bp, Homo sapien
ggtccccagcttccagccacgactg

SEQ ID NO: 5783706 - DNA, 25 bp, Homo sapien
ctggtcaagcagggccatgagcctc

SEQ ID NO: 5783707 - DNA, 25 bp, Homo sapien
tgggaaatccaaggaggaattctac

SEQ ID NO: 5783708 - DNA, 25 bp, Homo sapien
gacacctggcaggagatcttcctgt

SEQ ID NO: 5783709 - DNA, 25 bp, Homo sapien
ccaggacagctcagagaatgatctg

SEQ ID NO: 5783710 - DNA, 25 bp, Homo sapien
ggcccagctcaggatggtggacgac

SEQ ID NO: 5783711 - DNA, 25 bp, Homo sapien
gagttctatctctcagactctgact

SEQ ID NO: 5783712 - DNA, 25 bp, Homo sapien
cggctctgggaaggtggaggtgtgg

SEQ ID NO: 5783713 - DNA, 25 bp, Homo sapien
cccagctcaggatggtggacgacgg

SEQ ID NO: 5783714 - DNA, 25 bp, Homo sapien
atggaggtgccagcccgtgcctcat

SEQ ID NO: 5783715 - DNA, 25 bp, Homo sapien
agaggctccctgaggaggtccccag

SEQ ID NO: 5783716 - DNA, 25 bp, Homo sapien
agccaggtgtcggtctccagcctga

SEQ ID NO: 5783717 - DNA, 25 bp, Homo sapien
gcctccgggacagggaacgtggtgg

SEQ ID NO: 5783718 - DNA, 25 bp, Homo sapien
cctccaggagagaaaggctgccttc

SEQ ID NO: 5783719 - DNA, 25 bp, Homo sapien
gcctggtcctcgcagaagtggggtt

SEQ ID NO: 5783720 - DNA, 25 bp, Homo sapien
acatcttcttgctggtcacagccag

SEQ ID NO: 5783721 - DNA, 25 bp, Homo sapien
ctgtgtgcaggcaactgctaccttg

SEQ ID NO: 5783722 - DNA, 25 bp, Homo sapien
gcagggacgcatgtctagcctccag

SEQ ID NO: 5783723 - DNA, 25 bp, Homo sapien
gcttccagccacgactgtttgagtg

SEQ ID NO: 5783724 - DNA, 25 bp, Homo sapien
cagcatggccacgtggaggcagcgg

SEQ ID NO: 5783725 - DNA, 25 bp, Homo sapien
cgcgggagcagtttccagcagaggg

SEQ ID NO: 5783726 - DNA, 25 bp, Homo sapien
tgacttccaagatatctttgggaaa

SEQ ID NO: 5783727 - DNA, 25 bp, Homo sapien
catatggatctctgagaaccggaag

SEQ ID NO: 5783728 - DNA, 25 bp, Homo sapien
tcggcgggagggataaatcgattca

SEQ ID NO: 5783729 - DNA, 25 bp, Homo sapien
ggcagcagcatcaaccatctctgag

SEQ ID NO: 5783730 - DNA, 25 bp, Homo sapien
gcagggcgaaggcgcgggagcagtt

SEQ ID NO: 5783731 - DNA, 25 bp, Homo sapien
ttccaggaagaatgaggaaacggtg

SEQ ID NO: 5783732 - DNA, 25 bp, Homo sapien
tggcttggggaagctgcaagtgagt

SEQ ID NO: 5783733 - DNA, 25 bp, Homo sapien
gcctcccaccttcattggatggttc

SEQ ID NO: 5783734 - DNA, 25 bp, Homo sapien
tccagcgacctgcactactgggtcg

SEQ ID NO: 5783735 - DNA, 25 bp, Homo sapien
ggcctgcgccgggaacaactgatgc

SEQ ID NO: 5783736 - DNA, 25 bp, Homo sapien
acaacaccaggaccatggaggtgcc

SEQ ID NO: 5783737 - DNA, 25 bp, Homo sapien
cggtctccagcctgagaactctggc

SEQ ID NO: 5783738 - DNA, 25 bp, Homo sapien
aactgctaccttgtgctctacacat

SEQ ID NO: 5783739 - DNA, 25 bp, Homo sapien
ctgcacatcaaagggaggaagcacg

SEQ ID NO: 5783740 - DNA, 25 bp, Homo sapien
gagggtcaggagcctccccacttct

SEQ ID NO: 5783741 - DNA, 25 bp, Homo sapien
ctttgacctacagcctccgggacag

SEQ ID NO: 5783742 - DNA, 25 bp, Homo sapien
ttttggtcatcctctgcgtgtcagt

SEQ ID NO: 5783743 - DNA, 25 bp, Homo sapien
gagataacagcagaagtcaacaact

SEQ ID NO: 5783744 - DNA, 25 bp, Homo sapien
gtggaggtggtgaacgacggcgccg

SEQ ID NO: 5783745 - DNA, 25 bp, Homo sapien
ctactgggtcgggaagcaggcgggt

SEQ ID NO: 5783746 - DNA, 25 bp, Homo sapien
ggctggcagcagaaccagcagctcc

SEQ ID NO: 5783747 - DNA, 25 bp, Homo sapien
accccaacatacttacaatgctggg

SEQ ID NO: 5783748 - DNA, 25 bp, Homo sapien
agcctccccacttctgggaggccct

SEQ ID NO: 5783749 - DNA, 25 bp, Homo sapien
atccagatggccgggcaatggcagg

SEQ ID NO: 5783750 - DNA, 25 bp, Homo sapien
ctgtacctatggcagggccaccagg

SEQ ID NO: 5783751 - DNA, 25 bp, Homo sapien
tacctgaagactcacccagcaggga

SEQ ID NO: 5783752 - DNA, 25 bp, Homo sapien
gctcttccggacttggtctgagaag

SEQ ID NO: 5783753 - DNA, 25 bp, Homo sapien
cggccgcgttcaagcagctcttccg

SEQ ID NO: 5783754 - DNA, 25 bp, Homo sapien
ttgtacaggtagccaggtgtcggtc

SEQ ID NO: 5783755 - DNA, 25 bp, Homo sapien
ttcattggatggttcttcacttggg

SEQ ID NO: 5783756 - DNA, 25 bp, Homo sapien
tcatgtaaagctggacgtgggcaag

SEQ ID NO: 5783757 - DNA, 25 bp, Homo sapien
cgagtccgactgcttctgcagctac

SEQ ID NO: 5783758 - DNA, 25 bp, Homo sapien
accagggtggcttcaagatctatgt

SEQ ID NO: 5783759 - DNA, 25 bp, Homo sapien
gtttgagtgctccagccacatgggc

SEQ ID NO: 5783760 - DNA, 25 bp, Homo sapien
ctgcaggccctcaagggctcccagg

SEQ ID NO: 5783761 - DNA, 25 bp, Homo sapien
tgagaagcggcgcaggaaccagaag

SEQ ID NO: 5783762 - DNA, 25 bp, Homo sapien
aggagcatgtgaccatgggcagcga

SEQ ID NO: 5783763 - DNA, 25 bp, Homo sapien
acatcaaagggaggaagcacgtgtc

SEQ ID NO: 5783764 - DNA, 25 bp, Homo sapien
tcctgcctggcctgcgatggacatc

SEQ ID NO: 5783765 - DNA, 25 bp, Homo sapien
ctgatgcaccaggctgttgaggacc

SEQ ID NO: 5783766 - DNA, 25 bp, Homo sapien
tcatttccaggaagaatgaggaaac

SEQ ID NO: 5783767 - DNA, 25 bp, Homo sapien
ggctttgacctacagcctccgggac

SEQ ID NO: 5783768 - DNA, 25 bp, Homo sapien
ggtgtggtggatgatgaggccaaag

SEQ ID NO: 5783769 - DNA, 25 bp, Homo sapien
agggccatgagcctcccaccttcat

SEQ ID NO: 5783770 - DNA, 25 bp, Homo sapien
tggatctctgagaaccggaagatgg

SEQ ID NO: 5783771 - DNA, 25 bp, Homo sapien
tggacacctggcaggagatcttcct

SEQ ID NO: 5783772 - DNA, 25 bp, Homo sapien
gccctgcttccactcccctcagagg

SEQ ID NO: 5783773 - DNA, 25 bp, Homo sapien
tcctggaccagggtggcttcaagat

SEQ ID NO: 5783774 - DNA, 25 bp, Homo sapien
gctctcctggaacagctttaataag

SEQ ID NO: 5783775 - DNA, 25 bp, Homo sapien
gacggctctgggaaggtggaggtgt

SEQ ID NO: 5783776 - DNA, 25 bp, Homo sapien
tatctttgggaaatccaaggaggaa

SEQ ID NO: 5783777 - DNA, 25 bp, Homo sapien
ccgcgaggcgcagggccacgagtcc

SEQ ID NO: 5783778 - DNA, 25 bp, Homo sapien
aggcactgacagccacaacaccagg

SEQ ID NO: 5783779 - DNA, 25 bp, Homo sapien
cagaagtcaacaacttgcggctatc

SEQ ID NO: 5783780 - DNA, 25 bp, Homo sapien
catcctgtacctatggcagggccac

SEQ ID NO: 5783781 - DNA, 25 bp, Homo sapien
ctggctgttgttccttgtgtcgtcc

SEQ ID NO: 5783782 - DNA, 25 bp, Homo sapien
ctatgtcatcctccacgtcccccag

SEQ ID NO: 5783783 - DNA, 25 bp, Homo sapien
ggtggtcgtgcacagattggtgtgg

SEQ ID NO: 5783784 - DNA, 25 bp, Homo sapien
cagcctgcgtgccgccacgcccagc

SEQ ID NO: 5783785 - DNA, 25 bp, Homo sapien
ccgggcaatggcagggcaggtgccg

SEQ ID NO: 5783786 - DNA, 25 bp, Homo sapien
gcccgtgcctcatccctcaactcca

SEQ ID NO: 5783787 - DNA, 25 bp, Homo sapien
cacaggcagcccgtggaccccaagc

SEQ ID NO: 5783788 - DNA, 25 bp, Homo sapien
tatgacatcatgttactggacacct

SEQ ID NO: 5783789 - DNA, 25 bp, Homo sapien
cacagccagcgtctgctacctctgg

SEQ ID NO: 5783790 - DNA, 25 bp, Homo sapien
acctgccagagggcgtggaccctgc

SEQ ID NO: 5783791 - DNA, 25 bp, Homo sapien
agtgacatcttcttgctggtcacag

SEQ ID NO: 5783792 - DNA, 25 bp, Homo sapien
ccgtggaccccaagcgtcatggaca

SEQ ID NO: 5783793 - DNA, 25 bp, Homo sapien
gtggtcactgtcatttccaggaaga

SEQ ID NO: 5783794 - DNA, 25 bp, Homo sapien
gacaagtatgacatcatgttactgg

SEQ ID NO: 5783795 - DNA, 25 bp, Homo sapien
aaccagcagctccgtcagcagcacc

SEQ ID NO: 5783796 - DNA, 25 bp, Homo sapien
acgtggaggcagcggcaggagaaaa

SEQ ID NO: 5783797 - DNA, 25 bp, Homo sapien
gcccggcagcagcatcaaccatctc

SEQ ID NO: 5783798 - DNA, 25 bp, Homo sapien
ccatgagcctcccaccttcattgga

SEQ ID NO: 5783799 - DNA, 25 bp, Homo sapien
ctgcaagtgagtggaaggaggcggt

SEQ ID NO: 5783800 - DNA, 25 bp, Homo sapien
ccgggaacaactgatgcaccaggct

SEQ ID NO: 5783801 - DNA, 25 bp, Homo sapien
tctacacataccagaggctgggccg

SEQ ID NO: 5783802 - DNA, 25 bp, Homo sapien
agatggccgggcaatggcagggcag

SEQ ID NO: 5783803 - DNA, 25 bp, Homo sapien
ctgccactgaggtggagctctcctg

SEQ ID NO: 5783804 - DNA, 25 bp, Homo sapien
cagagggcggcaccactccctgctc

SEQ ID NO: 5783805 - DNA, 25 bp, Homo sapien
ttggtcatcctctgcgtgtcagtaa

SEQ ID NO: 5783806 - DNA, 25 bp, Homo sapien
ggcttcaagatctatgtgtggcagg

SEQ ID NO: 5783807 - DNA, 25 bp, Homo sapien
gtggaccccaagcgtcatggacagc

SEQ ID NO: 5783808 - DNA, 25 bp, Homo sapien
caggcagcccgtggaccccaagcgt

SEQ ID NO: 5783809 - DNA, 25 bp, Homo sapien
agggataaatcgattcatgtaaagc

SEQ ID NO: 5783810 - DNA, 25 bp, Homo sapien
gtgccgccacgcccagcaaggatat

SEQ ID NO: 5783811 - DNA, 25 bp, Homo sapien
actctgacttccaagatatctttgg

SEQ ID NO: 5783812 - DNA, 25 bp, Homo sapien
cccctcagaggcttttggtcatcct

SEQ ID NO: 5783813 - DNA, 25 bp, Homo sapien
aaggcgcgggagcagtttccagcag

SEQ ID NO: 5783814 - DNA, 25 bp, Homo sapien
ttcagccgggctgtgggcttcatcc

SEQ ID NO: 5783815 - DNA, 25 bp, Homo sapien
atggaaactgagcaagttgtacagg

SEQ ID NO: 5783816 - DNA, 25 bp, Homo sapien
ttcaagcagctcttccggacttggt

SEQ ID NO: 5783817 - DNA, 25 bp, Homo sapien
tggactagccacccgtcccacaagg

SEQ ID NO: 5783818 - DNA, 25 bp, Homo sapien
atgagattgaggccctgaacagcaa

SEQ ID NO: 5783819 - DNA, 25 bp, Homo sapien
tgggcagcctgcgtgccgccacgcc

SEQ ID NO: 5783820 - DNA, 25 bp, Homo sapien
cagaccgtgctgcaccgcgaggcgc

SEQ ID NO: 5783821 - DNA, 25 bp, Homo sapien
gtgacatcttcctgctggacctagg

SEQ ID NO: 5783822 - DNA, 25 bp, Homo sapien
gtgcaggcaactgctaccttgtgct

SEQ ID NO: 5783823 - DNA, 25 bp, Homo sapien
ggccacacccatcgtgctggtcaag

SEQ ID NO: 5783824 - DNA, 25 bp, Homo sapien
gtgatcagcgtgagatggcacgggt

SEQ ID NO: 5783825 - DNA, 25 bp, Homo sapien
gggtgacatcttcctgctggaccta

SEQ ID NO: 5783826 - DNA, 25 bp, Homo sapien
ggacagggaacgtggtggtggtcgt

SEQ ID NO: 5783827 - DNA, 25 bp, Homo sapien
agtatgacatcatgttactggacac

SEQ ID NO: 5783828 - DNA, 25 bp, Homo sapien
tggagggtcaggagcctccccactt

SEQ ID NO: 5783829 - DNA, 25 bp, Homo sapien
cctggcaggagatcttcctgtggct

SEQ ID NO: 5783830 - DNA, 25 bp, Homo sapien
gggcagtcagcatccaccacaaggc

SEQ ID NO: 5783831 - DNA, 25 bp, Homo sapien
tacacaggcagcccgtggaccccaa

SEQ ID NO: 5783832 - DNA, 25 bp, Homo sapien
gcggctatccagatggccgggcaat

SEQ ID NO: 5783833 - DNA, 25 bp, Homo sapien
gccactgcggatgagattgaggccc

SEQ ID NO: 5783834 - DNA, 25 bp, Homo sapien
agccctctcgactgcccctatcccc

SEQ ID NO: 5783835 - DNA, 25 bp, Homo sapien
cgggtggtggtcactgtcatttcca

SEQ ID NO: 5783836 - DNA, 25 bp, Homo sapien
gcagggtgggcagcctgcgtgccgc

SEQ ID NO: 5783837 - DNA, 25 bp, Homo sapien
ggcctccacatatggatctctgaga

SEQ ID NO: 5783838 - DNA, 25 bp, Homo sapien
gcaagctgcacacccagcctaagtt

SEQ ID NO: 5783839 - DNA, 25 bp, Homo sapien
tcccaggacagctcagagaatgatc

SEQ ID NO: 5783840 - DNA, 25 bp, Homo sapien
tgcagggaggcctccacatatggat

SEQ ID NO: 5783841 - DNA, 25 bp, Homo sapien
atggtggcgtcctagtacaggagca

SEQ ID NO: 5783842 - DNA, 25 bp, Homo sapien
tgacagccacaacaccaggaccatg

SEQ ID NO: 5783843 - DNA, 25 bp, Homo sapien
ggcctggggccaggagtacctgaag

SEQ ID NO: 5783844 - DNA, 25 bp, Homo sapien
gatatctttgggaaatccaaggagg

SEQ ID NO: 5783845 - DNA, 25 bp, Homo sapien
caggaggacctggacaagtatgaca

SEQ ID NO: 5783846 - DNA, 25 bp, Homo sapien
gtgagtggaaggaggcggtggcctg

SEQ ID NO: 5783847 - DNA, 25 bp, Homo sapien
agactctgacttccaagatatcttt

SEQ ID NO: 5783848 - DNA, 25 bp, Homo sapien
aactctggctgttgttccttgtgtc

SEQ ID NO: 5783849 - DNA, 25 bp, Homo sapien
ccagatggccgggcaatggcagggc

SEQ ID NO: 5783850 - DNA, 25 bp, Homo sapien
gccacatgggctgcctggtcctcgc

SEQ ID NO: 5783851 - DNA, 25 bp, Homo sapien
gcttcatccaggccaagggctaccc

SEQ ID NO: 5783852 - DNA, 25 bp, Homo sapien
gcggatgagattgaggccctgaaca

SEQ ID NO: 5783853 - DNA, 25 bp, Homo sapien
ggctcgggggctggctttgacctac

SEQ ID NO: 5783854 - DNA, 25 bp, Homo sapien
cagcaccagcgccacgatcaacggg

SEQ ID NO: 5783855 - DNA, 25 bp, Homo sapien
ccccctaccccagcaacaagaggct

SEQ ID NO: 5783856 - DNA, 25 bp, Homo sapien
cgccacgatcaacgggggcctgcgc

SEQ ID NO: 5783857 - DNA, 25 bp, Homo sapien
acatccagcgactgctgcacatcaa

SEQ ID NO: 5783858 - DNA, 25 bp, Homo sapien
tatggatctctgagaaccggaagat

SEQ ID NO: 5783859 - DNA, 25 bp, Homo sapien
cggaagatggtgccggtacccgagg

SEQ ID NO: 5783860 - DNA, 25 bp, Homo sapien
gagtgctccagccacatgggctgcc

SEQ ID NO: 5783861 - DNA, 25 bp, Homo sapien
ccacgatcaacgggggcctgcgccg

SEQ ID NO: 5783862 - DNA, 25 bp, Homo sapien
ggaggcctagcatctgacctcaagc

SEQ ID NO: 5783863 - DNA, 25 bp, Homo sapien
caccgcgaggcgcagggccacgagt

SEQ ID NO: 5783864 - DNA, 25 bp, Homo sapien
ctgtgggcttcatccaggccaaggg

SEQ ID NO: 5783865 - DNA, 25 bp, Homo sapien
gactagccacccgtcccacaaggaa

SEQ ID NO: 5783866 - DNA, 25 bp, Homo sapien
tctctgagaaccggaagatggtgcc

SEQ ID NO: 5783867 - DNA, 25 bp, Homo sapien
aacttttttgaggaacactgctatg

SEQ ID NO: 5783868 - DNA, 25 bp, Homo sapien
agaaccagcagctccgtcagcagca

SEQ ID NO: 5783869 - DNA, 25 bp, Homo sapien
gcgctgcggaggccttccagcagcg

SEQ ID NO: 5783870 - DNA, 25 bp, Homo sapien
ctatccagatggccgggcaatggca

SEQ ID NO: 5783871 - DNA, 25 bp, Homo sapien
tccagggccagctggtgatcttcca

SEQ ID NO: 5783872 - DNA, 25 bp, Homo sapien
aggctccctgaggaggtccccagct

SEQ ID NO: 5783873 - DNA, 25 bp, Homo sapien
acaaggcttttccaagtgcaaggca

SEQ ID NO: 5783874 - DNA, 25 bp, Homo sapien
aaagctggacgtgggcaagctgcac

SEQ ID NO: 5783875 - DNA, 25 bp, Homo sapien
ccacaacaccaggaccatggaggtg

SEQ ID NO: 5783876 - DNA, 25 bp, Homo sapien
aaaggggcagtcagcatccaccaca

SEQ ID NO: 5783877 - DNA, 25 bp, Homo sapien
cccacaaggaagtggtggatggcag

SEQ ID NO: 5783878 - DNA, 25 bp, Homo sapien
caacgtggaggtggtgaacgacggc

SEQ ID NO: 5783879 - DNA, 25 bp, Homo sapien
cagcaacaagaggctccctgaggag

SEQ ID NO: 5783880 - DNA, 25 bp, Homo sapien
ttgtgctctacacataccagaggct

SEQ ID NO: 5783881 - DNA, 25 bp, Homo sapien
acaccaacgtggaggtggtgaacga

SEQ ID NO: 5783882 - DNA, 25 bp, Homo sapien
cccccccacttcctcgccatcttcc

SEQ ID NO: 5783883 - DNA, 25 bp, Homo sapien
cactcccctcagaggcttttggtca

SEQ ID NO: 5783884 - DNA, 25 bp, Homo sapien
tgcccctatcccctggaccccaaca

SEQ ID NO: 5783885 - DNA, 25 bp, Homo sapien
gggaacaactgatgcaccaggctgt

SEQ ID NO: 5783886 - DNA, 25 bp, Homo sapien
tgcgccgggaacaactgatgcacca

SEQ ID NO: 5783887 - DNA, 25 bp, Homo sapien
ggccaatgttcgcctgtaccatgtc

SEQ ID NO: 5783888 - DNA, 25 bp, Homo sapien
cgcctgtaccatgtctatgagaagg

SEQ ID NO: 5783889 - DNA, 25 bp, Homo sapien
ccatctctgagataacagcagaagt

SEQ ID NO: 5783890 - DNA, 25 bp, Homo sapien
caaggcactgacagccacaacacca

SEQ ID NO: 5783891 - DNA, 25 bp, Homo sapien
ctatgagaagggcaaagacctgctg

SEQ ID NO: 5783892 - DNA, 25 bp, Homo sapien
tcccctggaccccaacatacttaca

SEQ ID NO: 5783893 - DNA, 25 bp, Homo sapien
tggtgatcttccaggagagagctgg

SEQ ID NO: 5783894 - DNA, 25 bp, Homo sapien
aaggccacgcagggggcgtccagcg

SEQ ID NO: 5783895 - DNA, 25 bp, Homo sapien
agggcaggtgccgtggccctgcagg

SEQ ID NO: 5783896 - DNA, 25 bp, Homo sapien
ctacaccaacgtggaggtggtgaac

SEQ ID NO: 5783897 - DNA, 25 bp, Homo sapien
cggaggccttccagcagcgcctaca

SEQ ID NO: 5783898 - DNA, 25 bp, Homo sapien
ccagcaaggatatcaaccagctgca

SEQ ID NO: 5783899 - DNA, 25 bp, Homo sapien
ggcgcgggagcagtttccagcagag

SEQ ID NO: 5783900 - DNA, 25 bp, Homo sapien
tccccagcttccagccacgactgtt

SEQ ID NO: 5783901 - DNA, 25 bp, Homo sapien
gtccagtacatcctgtacctatggc

SEQ ID NO: 5783902 - DNA, 25 bp, Homo sapien
ttccagccacgactgtttgagtgct

SEQ ID NO: 5783903 - DNA, 25 bp, Homo sapien
tgttcaacatccagcgactgctgca

SEQ ID NO: 5783904 - DNA, 25 bp, Homo sapien
gaggccctgaacagcaacgctgagg

SEQ ID NO: 5783905 - DNA, 25 bp, Homo sapien
tacctctggtttgggaagggctgta

SEQ ID NO: 5783906 - DNA, 25 bp, Homo sapien
caaggatatcaaccagctgcagaag

SEQ ID NO: 5783907 - DNA, 25 bp, Homo sapien
aggtagccaggtgtcggtctccagc

SEQ ID NO: 5783908 - DNA, 25 bp, Homo sapien
ggacttggtctgagaagcggcgcag

SEQ ID NO: 5783909 - DNA, 25 bp, Homo sapien
tgttgaggacctgccagagggcgtg

SEQ ID NO: 5783910 - DNA, 25 bp, Homo sapien
aggacttacacaggcagcccgtgga

SEQ ID NO: 5783911 - DNA, 25 bp, Homo sapien
acaactgatgcaccaggctgttgag

SEQ ID NO: 5783912 - DNA, 25 bp, Homo sapien
cctgagaactctggctgttgttcct

SEQ ID NO: 5783913 - DNA, 25 bp, Homo sapien
atggcagcccggcagcagcatcaac

SEQ ID NO: 5783914 - DNA, 25 bp, Homo sapien
aggaagtggtggatggcagcccggc

SEQ ID NO: 5783915 - DNA, 25 bp, Homo sapien
cgagcccccccacttcctcgccatc

SEQ ID NO: 5783916 - DNA, 25 bp, Homo sapien
gagaagggcaaagacctgctgcagg

SEQ ID NO: 5783917 - DNA, 25 bp, Homo sapien
taccttgtgctctacacataccaga

SEQ ID NO: 5783918 - DNA, 25 bp, Homo sapien
agcaggcagcccataaaaaaaaaaa

SEQ ID NO: 5783919 - DNA, 25 bp, Homo sapien
acactgctatgtcatcctccacgtc

SEQ ID NO: 5783920 - DNA, 25 bp, Homo sapien
ccggccacacccatcgtgctggtca

SEQ ID NO: 5783921 - DNA, 25 bp, Homo sapien
gacctcatgcagatcatggaggctg

SEQ ID NO: 5783922 - DNA, 25 bp, Homo sapien
ttccggacttggtctgagaagcggc

SEQ ID NO: 5783923 - DNA, 25 bp, Homo sapien
aggcttttggtcatcctctgcgtgt

SEQ ID NO: 5783924 - DNA, 25 bp, Homo sapien
ggcccaagaccagcatttctgagaa

SEQ ID NO: 5783925 - DNA, 25 bp, Homo sapien
cagcgacctgcactactgggtcggg

SEQ ID NO: 5783926 - DNA, 25 bp, Homo sapien
aaactgagcaagttgtacaggtagc

SEQ ID NO: 5783927 - DNA, 25 bp, Homo sapien
aacaacttgcggctatccagatggc

SEQ ID NO: 5783928 - DNA, 25 bp, Homo sapien
gagattgaggccctgaacagcaacg

SEQ ID NO: 5783929 - DNA, 25 bp, Homo sapien
ctgcaggaggaggacttctacatcc

SEQ ID NO: 5783930 - DNA, 25 bp, Homo sapien
aggctgttgaggacctgccagaggg

SEQ ID NO: 5783931 - DNA, 25 bp, Homo sapien
agcggcaggagaaaaagcagctggg

SEQ ID NO: 5783932 - DNA, 25 bp, Homo sapien
atcaaagggaggaagcacgtgtctg

SEQ ID NO: 5783933 - DNA, 25 bp, Homo sapien
tccgcccgggaatcatctacaggaa

SEQ ID NO: 5783934 - DNA, 25 bp, Homo sapien
gttgttccttgtgtcgtcccatatt

SEQ ID NO: 5783935 - DNA, 25 bp, Homo sapien
atttccaggaagaatgaggaaacgg

SEQ ID NO: 5783936 - DNA, 25 bp, Homo sapien
cttacacaggcagcccgtggacccc

SEQ ID NO: 5783937 - DNA, 25 bp, Homo sapien
gcctacaggacgagctggggggcca

SEQ ID NO: 5783938 - DNA, 25 bp, Homo sapien
cagtttccagcagagggcggcacca

SEQ ID NO: 5783939 - DNA, 25 bp, Homo sapien
ggaacgtggtggtggtcgtgcacag

SEQ ID NO: 5783940 - DNA, 25 bp, Homo sapien
aagatatctttgggaaatccaagga

SEQ ID NO: 5783941 - DNA, 25 bp, Homo sapien
ccacgtggaggcagcggcaggagaa

SEQ ID NO: 5783942 - DNA, 25 bp, Homo sapien
tgcgtgtcagtaaaagcaggcagcc

SEQ ID NO: 5783943 - DNA, 25 bp, Homo sapien
gcaggcaactgctaccttgtgctct

SEQ ID NO: 5783944 - DNA, 25 bp, Homo sapien
tctgggaaggtggaggtgtggtgca

SEQ ID NO: 5783945 - DNA, 25 bp, Homo sapien
gtgtccagtacatcctgtacctatg

SEQ ID NO: 5783946 - DNA, 25 bp, Homo sapien
gcgtggaccctgcccgcagggagtt

SEQ ID NO: 5783947 - DNA, 25 bp, Homo sapien
gggggccagaccgtgctgcaccgcg

SEQ ID NO: 5783948 - DNA, 25 bp, Homo sapien
tggggttcttcagccaggaggacct

SEQ ID NO: 5783949 - DNA, 25 bp, Homo sapien
agaccagcatttctgagaaggctcg

SEQ ID NO: 5783950 - DNA, 25 bp, Homo sapien
acttggtctgagaagcggcgcagga

SEQ ID NO: 5783951 - DNA, 25 bp, Homo sapien
tctgagaagcggcgcaggaaccaga

SEQ ID NO: 5783952 - DNA, 25 bp, Homo sapien
aacaagaggctccctgaggaggtcc

SEQ ID NO: 5783953 - DNA, 25 bp, Homo sapien
ggttcttcacttgggacccctacaa

SEQ ID NO: 5783954 - DNA, 25 bp, Homo sapien
ctcgactgcccctatcccctggacc

SEQ ID NO: 5783955 - DNA, 25 bp, Homo sapien
cagccagcgtctgctacctctggtt

SEQ ID NO: 5783956 - DNA, 25 bp, Homo sapien
ttccaggagagagctgggcaccatg

SEQ ID NO: 5783957 - DNA, 25 bp, Homo sapien
gcagtcagcatccaccacaaggctt

SEQ ID NO: 5783958 - DNA, 25 bp, Homo sapien
ttgggaagggctgtaatggtgatca

SEQ ID NO: 5783959 - DNA, 25 bp, Homo sapien
catctgacctcaagcatgtggagac

SEQ ID NO: 5783960 - DNA, 25 bp, Homo sapien
gcatttctgagaaggctcgggggct

SEQ ID NO: 5783961 - DNA, 25 bp, Homo sapien
agcgtgagatggcacgggtggtggt

SEQ ID NO: 5783962 - DNA, 25 bp, Homo sapien
gccctcaagggctcccaggacagct

SEQ ID NO: 5783963 - DNA, 25 bp, Homo sapien
cggcaggagaaaaagcagctgggct

SEQ ID NO: 5783964 - DNA, 25 bp, Homo sapien
aactgatgcaccaggctgttgagga

SEQ ID NO: 5783965 - DNA, 25 bp, Homo sapien
acagcaacgctgaggaactagatgt

SEQ ID NO: 5783966 - DNA, 25 bp, Homo sapien
gagctgggcaccatggaaaggggca

SEQ ID NO: 5783967 - DNA, 25 bp, Homo sapien
gaagcgcagggcgctgcggaggcct

SEQ ID NO: 5783968 - DNA, 25 bp, Homo sapien
taacagcagaagtcaacaacttgcg

SEQ ID NO: 5783969 - DNA, 25 bp, Homo sapien
taataagggtgacatcttcctgctg

SEQ ID NO: 5783970 - DNA, 25 bp, Homo sapien
tggtgatcagcgtgagatggcacgg

SEQ ID NO: 5783971 - DNA, 25 bp, Homo sapien
gctttaataagggtgacatcttcct

SEQ ID NO: 5783972 - DNA, 25 bp, Homo sapien
gaggccttccagcagcgcctacagg

SEQ ID NO: 5783973 - DNA, 25 bp, Homo sapien
cttcacttgggacccctacaagtgg

SEQ ID NO: 5783974 - DNA, 25 bp, Homo sapien
ccttcattggatggttcttcacttg

SEQ ID NO: 5783975 - DNA, 25 bp, Homo sapien
cctgctccatggaaactgagcaagt

SEQ ID NO: 5783976 - DNA, 25 bp, Homo sapien
ggtgggcagcctgcgtgccgccacg

SEQ ID NO: 5783977 - DNA, 25 bp, Homo sapien
gcctaagttagcggcccagctcagg

SEQ ID NO: 5783978 - DNA, 25 bp, Homo sapien
caaagccccggacctcatgcagatc

SEQ ID NO: 5783979 - DNA, 25 bp, Homo sapien
gccagcgtctgctacctctggtttg

SEQ ID NO: 5783980 - DNA, 25 bp, Homo sapien
tgaggaactagatgtcatgtatggt

SEQ ID NO: 5783981 - DNA, 25 bp, Homo sapien
gcccgtggaccccaagcgtcatgga

SEQ ID NO: 5783982 - DNA, 25 bp, Homo sapien
cctggggccaggagtacctgaagac

SEQ ID NO: 5783983 - DNA, 25 bp, Homo sapien
tgcgaagccccaagtcggctggcag

SEQ ID NO: 5783984 - DNA, 25 bp, Homo sapien
actgcttctgcagctacttccgccc

SEQ ID NO: 5783985 - DNA, 25 bp, Homo sapien
tccgtcagcagcaccagcgccacga

SEQ ID NO: 5783986 - DNA, 25 bp, Homo sapien
cccaccttcattggatggttcttca

SEQ ID NO: 5783987 - DNA, 25 bp, Homo sapien
gcacgtgtctgccactgaggtggag

SEQ ID NO: 5783988 - DNA, 25 bp, Homo sapien
acgtcccccagagcccgaaggccac

SEQ ID NO: 5783989 - DNA, 25 bp, Homo sapien
ttccaagatatctttgggaaatcca

SEQ ID NO: 5783990 - DNA, 25 bp, Homo sapien
cagcgtctgctacctctggtttggg

SEQ ID NO: 5783991 - DNA, 25 bp, Homo sapien
agtggactagccacccgtcccacaa

SEQ ID NO: 5783992 - DNA, 25 bp, Homo sapien
tgcggaagcgcagggcgctgcggag

SEQ ID NO: 5783993 - DNA, 25 bp, Homo sapien
gtgctggagggtcaggagcctcccc

SEQ ID NO: 5783994 - DNA, 25 bp, Homo sapien
gggccacgagtccgactgcttctgc

SEQ ID NO: 5783995 - DNA, 25 bp, Homo sapien
agctggacgtgggcaagctgcacac

SEQ ID NO: 5783996 - DNA, 25 bp, Homo sapien
aggctgccttcagccgggctgtggg

SEQ ID NO: 5783997 - DNA, 25 bp, Homo sapien
gggcaatggcagggcaggtgccgtg

SEQ ID NO: 5783998 - DNA, 25 bp, Homo sapien
ggccaagggctacccgacctacacc

SEQ ID NO: 5783999 - DNA, 25 bp, Homo sapien
catccaggccaagggctacccgacc

SEQ ID NO: 5784000 - DNA, 25 bp, Homo sapien
tgccttcagccgggctgtgggcttc

SEQ ID NO: 5784001 - DNA, 25 bp, Homo sapien
cggtgctggagggtcaggagcctcc

SEQ ID NO: 5784002 - DNA, 25 bp, Homo sapien
ctccagcctgagaactctggctgtt

SEQ ID NO: 5784003 - DNA, 25 bp, Homo sapien
taccagaggctgggccgtgtccagt

SEQ ID NO: 5784004 - DNA, 25 bp, Homo sapien
gtcgtcccatattcctgcctggcct

SEQ ID NO: 5784005 - DNA, 25 bp, Homo sapien
gctgggccgtgtccagtacatcctg

SEQ ID NO: 5784006 - DNA, 25 bp, Homo sapien
aagacctgctgcaggaggaggactt

SEQ ID NO: 5784007 - DNA, 25 bp, Homo sapien
tcttcagccaggaggacctggacaa

SEQ ID NO: 5784008 - DNA, 25 bp, Homo sapien
acaggaagggaggcctagcatctga

SEQ ID NO: 5784009 - DNA, 25 bp, Homo sapien
atggccacgtggaggcagcggcagg

SEQ ID NO: 5784010 - DNA, 25 bp, Homo sapien
cgacggcgccgagtcggccgcgttc

SEQ ID NO: 5784011 - DNA, 25 bp, Homo sapien
aagatctatgtgtggcagggacgca

SEQ ID NO: 5784012 - DNA, 25 bp, Homo sapien
tcctccacgtcccccagagcccgaa

SEQ ID NO: 5784013 - DNA, 25 bp, Homo sapien
ccttgtgtcgtcccatattcctgcc

SEQ ID NO: 5784014 - DNA, 25 bp, Homo sapien
ggctgtgggcttcatccaggccaag

SEQ ID NO: 5784015 - DNA, 25 bp, Homo sapien
ggaccagggtggcttcaagatctat

SEQ ID NO: 5784016 - DNA, 25 bp, Homo sapien
tgatctggtgcgaagccccaagtcg

SEQ ID NO: 5784017 - DNA, 25 bp, Homo sapien
gcaagggcctcccaggcatgcaggg

SEQ ID NO: 5784018 - DNA, 25 bp, Homo sapien
cagcatttctgagaaggctcggggg

SEQ ID NO: 5784019 - DNA, 25 bp, Homo sapien
ggccccctaccccagcaacaagagg

SEQ ID NO: 5784020 - DNA, 25 bp, Homo sapien
agcagtttccagcagagggcggcac

SEQ ID NO: 5784021 - DNA, 25 bp, Homo sapien
tgggctgcctggtcctcgcagaagt

SEQ ID NO: 5784022 - DNA, 25 bp, Homo sapien
gaggcgcagggccacgagtccgact

SEQ ID NO: 5784023 - DNA, 25 bp, Homo sapien
gagctctcctggaacagctttaata

SEQ ID NO: 5784024 - DNA, 25 bp, Homo sapien
aaccagaagctcggcgggagggata

SEQ ID NO: 5784025 - DNA, 25 bp, Homo sapien
ctaggcaagatgatgattcagtgga

SEQ ID NO: 5784026 - DNA, 25 bp, Homo sapien
gacctgctgcaggaggaggacttct

SEQ ID NO: 5784027 - DNA, 25 bp, Homo sapien
gccgccacgcccagcaaggatatca

SEQ ID NO: 5784028 - DNA, 25 bp, Homo sapien
ccatcgtgctggtcaagcagggcca

SEQ ID NO: 5784029 - DNA, 25 bp, Homo sapien
ataagggtgacatcttcctgctgga

SEQ ID NO: 5784030 - DNA, 25 bp, Homo sapien
acaggtagccaggtgtcggtctcca

SEQ ID NO: 5784031 - DNA, 25 bp, Homo sapien
cacacccagcctaagttagcggccc

SEQ ID NO: 5784032 - DNA, 25 bp, Homo sapien
tcagcatccaccacaaggcttttcc

SEQ ID NO: 5784033 - DNA, 25 bp, Homo sapien
catgttactggacacctggcaggag

SEQ ID NO: 5784034 - DNA, 25 bp, Homo sapien
cctccacatatggatctctgagaac

SEQ ID NO: 5784035 - DNA, 25 bp, Homo sapien
gggcttcttctgaacccaagccctc

SEQ ID NO: 5784036 - DNA, 25 bp, Homo sapien
agctgcagaaggccaatgttcgcct

SEQ ID NO: 5784037 - DNA, 25 bp, Homo sapien
acccgtcccacaaggaagtggtgga

SEQ ID NO: 5784038 - DNA, 25 bp, Homo sapien
cagcagcatcaaccatctctgagat

SEQ ID NO: 5784039 - DNA, 25 bp, Homo sapien
ttcagccaggaggacctggacaagt

SEQ ID NO: 5784040 - DNA, 25 bp, Homo sapien
aggagaaaaagcagctgggcttctt

SEQ ID NO: 5784041 - DNA, 25 bp, Homo sapien
ttgaggacctgccagagggcgtgga

SEQ ID NO: 5784042 - DNA, 25 bp, Homo sapien
tgaggaacactgctatgtcatcctc

SEQ ID NO: 5784043 - DNA, 25 bp, Homo sapien
tctacagcatggccacgtggaggca

SEQ ID NO: 5784044 - DNA, 25 bp, Homo sapien
tacccgacctacaccaacgtggagg

SEQ ID NO: 5784045 - DNA, 25 bp, Homo sapien
agttgtacaggtagccaggtgtcgg

SEQ ID NO: 5784046 - DNA, 25 bp, Homo sapien
ggcaggtgccgtggccctgcaggcc

SEQ ID NO: 5784047 - DNA, 25 bp, Homo sapien
accagcatttctgagaaggctcggg

SEQ ID NO: 5784048 - DNA, 25 bp, Homo sapien
cagctacttccgcccgggaatcatc

SEQ ID NO: 5784049 - DNA, 25 bp, Homo sapien
caagtatgacatcatgttactggac

SEQ ID NO: 5784050 - DNA, 25 bp, Homo sapien
tttccaagtgcaaggcactgacagc

SEQ ID NO: 5784051 - DNA, 25 bp, Homo sapien
gcgtgccgccacgcccagcaaggat

SEQ ID NO: 5784052 - DNA, 25 bp, Homo sapien
gggtggcttcaagatctatgtgtgg

SEQ ID NO: 5784053 - DNA, 25 bp, Homo sapien
tccaagtgcaaggcactgacagcca

SEQ ID NO: 5784054 - DNA, 25 bp, Homo sapien
ccagcctgagaactctggctgttgt

SEQ ID NO: 5784055 - DNA, 25 bp, Homo sapien
atattcctgcctggcctgcgatgga

SEQ ID NO: 5784056 - DNA, 25 bp, Homo sapien
agcctgagaactctggctgttgttc

SEQ ID NO: 5784057 - DNA, 25 bp, Homo sapien
caaagacctgctgcaggaggaggac

SEQ ID NO: 5784058 - DNA, 25 bp, Homo sapien
ctgcctggtcctcgcagaagtgggg

SEQ ID NO: 5784059 - DNA, 25 bp, Homo sapien
gggaggcctccacatatggatctct

SEQ ID NO: 5784060 - DNA, 25 bp, Homo sapien
aaggctcgggggctggctttgacct

SEQ ID NO: 5784061 - DNA, 25 bp, Homo sapien
gctctgggaaggtggaggtgtggtg

SEQ ID NO: 5784062 - DNA, 25 bp, Homo sapien
cagcttccagccacgactgtttgag

SEQ ID NO: 5784063 - DNA, 25 bp, Homo sapien
gctcggcgggagggataaatcgatt

SEQ ID NO: 5784064 - DNA, 25 bp, Homo sapien
ctcgccatcttccagggccagctgg

SEQ ID NO: 5784065 - DNA, 25 bp, Homo sapien
acgacggctctgggaaggtggaggt

SEQ ID NO: 5784066 - DNA, 25 bp, Homo sapien
gcctcccaggcatgcagggaggcct

SEQ ID NO: 5784067 - DNA, 25 bp, Homo sapien
gcgacctgcactactgggtcgggaa

SEQ ID NO: 5784068 - DNA, 25 bp, Homo sapien
tgtcagtaaaagcaggcagcccata

SEQ ID NO: 5784069 - DNA, 25 bp, Homo sapien
gaagtcaacaacttgcggctatcca

SEQ ID NO: 5784070 - DNA, 25 bp, Homo sapien
cagggccagctggtgatcttccagg

SEQ ID NO: 5784071 - DNA, 25 bp, Homo sapien
cccaagcgtcatggacagctgtgtg

SEQ ID NO: 5784072 - DNA, 25 bp, Homo sapien
gctgcaccgcgaggcgcagggccac

SEQ ID NO: 5784073 - DNA, 25 bp, Homo sapien
aaccagctgcagaaggccaatgttc

SEQ ID NO: 5784074 - DNA, 25 bp, Homo sapien
attctacagcatggccacgtggagg

SEQ ID NO: 5784075 - DNA, 25 bp, Homo sapien
acaatgctggggaggccctgcttcc

SEQ ID NO: 5784076 - DNA, 25 bp, Homo sapien
ggacgcatgtctagcctccaggaga

SEQ ID NO: 5784077 - DNA, 25 bp, Homo sapien
tgtggcagggacgcatgtctagcct

SEQ ID NO: 5784078 - DNA, 25 bp, Homo sapien
ccaggacttacacaggcagcccgtg

SEQ ID NO: 5784079 - DNA, 25 bp, Homo sapien
cccccagagcccgaaggccacgcag

SEQ ID NO: 5784080 - DNA, 25 bp, Homo sapien
ggaacttttttgaggaacactgcta

SEQ ID NO: 5784081 - DNA, 25 bp, Homo sapien
gtcggccgcgttcaagcagctcttc

SEQ ID NO: 5784082 - DNA, 25 bp, Homo sapien
atgagaagggcaaagacctgctgca

SEQ ID NO: 5784083 - DNA, 25 bp, Homo sapien
aaggaggaattctacagcatggcca

SEQ ID NO: 5784084 - DNA, 25 bp, Homo sapien
cccagcctaagttagcggcccagct

SEQ ID NO: 5784085 - DNA, 25 bp, Homo sapien
tccaggagagaaaggctgccttcag

SEQ ID NO: 5784086 - DNA, 25 bp, Homo sapien
cagccgggctgtgggcttcatccag

SEQ ID NO: 5784087 - DNA, 25 bp, Homo sapien
cgtggtggtggtcgtgcacagattg

SEQ ID NO: 5784088 - DNA, 25 bp, Homo sapien
gcaagtgagtggaaggaggcggtgg

SEQ ID NO: 5784089 - DNA, 25 bp, Homo sapien
ggctgtaatggtgatcagcgtgaga

SEQ ID NO: 5784090 - DNA, 25 bp, Homo sapien
cttctacatcctggaccagggtggc

SEQ ID NO: 5784091 - DNA, 25 bp, Homo sapien
ggccacgtggaggcagcggcaggag

SEQ ID NO: 5784092 - DNA, 25 bp, Homo sapien
tgcttctgcagctacttccgcccgg

SEQ ID NO: 5784093 - DNA, 25 bp, Homo sapien
gagagagctgggcaccatggaaagg

SEQ ID NO: 5784094 - DNA, 25 bp, Homo sapien
gacccctacaagtggactagccacc

SEQ ID NO: 5784095 - DNA, 25 bp, Homo sapien
cctacaagtggactagccacccgtc

SEQ ID NO: 5784096 - DNA, 25 bp, Homo sapien
ggcaccatggaaaggggcagtcagc

SEQ ID NO: 5784097 - DNA, 25 bp, Homo sapien
agcatgtggagaccaacttgttcaa

SEQ ID NO: 5784098 - DNA, 25 bp, Homo sapien
tgggcccaagaccagcatttctgag

SEQ ID NO: 5784099 - DNA, 25 bp, Homo sapien
caacttgcggctatccagatggccg

SEQ ID NO: 5784100 - DNA, 25 bp, Homo sapien
ccgtgtccagtacatcctgtaccta

SEQ ID NO: 5784101 - DNA, 25 bp, Homo sapien
gctggagggtcaggagcctccccac

SEQ ID NO: 5784102 - DNA, 25 bp, Homo sapien
cctgcgccgggaacaactgatgcac

SEQ ID NO: 5784103 - DNA, 25 bp, Homo sapien
tgttccttgtgtcgtcccatattcc

SEQ ID NO: 5784104 - DNA, 25 bp, Homo sapien
aagactcacccagcagggaggagcc

SEQ ID NO: 5784105 - DNA, 25 bp, Homo sapien
ggataaatcgattcatgtaaagctg

SEQ ID NO: 5784106 - DNA, 25 bp, Homo sapien
caggccaagggctacccgacctaca

SEQ ID NO: 5784107 - DNA, 25 bp, Homo sapien
gaagcaggcgggtgcggaagcgcag

SEQ ID NO: 5784108 - DNA, 25 bp, Homo sapien
ttactggacacctggcaggagatct

SEQ ID NO: 5784109 - DNA, 25 bp, Homo sapien
ggacgacggctctgggaaggtggag

SEQ ID NO: 5784110 - DNA, 25 bp, Homo sapien
gtcgtgcacagattggtgtggtgga

SEQ ID NO: 5784111 - DNA, 25 bp, Homo sapien
gctgcacacccagcctaagttagcg

SEQ ID NO: 5784112 - DNA, 25 bp, Homo sapien
ccacacccatcgtgctggtcaagca

SEQ ID NO: 5784113 - DNA, 25 bp, Homo sapien
gggccagaccgtgctgcaccgcgag

SEQ ID NO: 5784114 - DNA, 25 bp, Homo sapien
gacctgcactactgggtcgggaagc

SEQ ID NO: 5784115 - DNA, 25 bp, Homo sapien
gtggcttcaagatctatgtgtggca

SEQ ID NO: 5784116 - DNA, 25 bp, Homo sapien
ccaagatatctttgggaaatccaag

SEQ ID NO: 5784117 - DNA, 25 bp, Homo sapien
ccatggaaaggggcagtcagcatcc

SEQ ID NO: 5784118 - DNA, 25 bp, Homo sapien
caagaccagcatttctgagaaggct

SEQ ID NO: 5784119 - DNA, 25 bp, Homo sapien
gaactagatgtcatgtatggtggcg

SEQ ID NO: 5784120 - DNA, 25 bp, Homo sapien
gtgctctacacataccagaggctgg

SEQ ID NO: 5784121 - DNA, 25 bp, Homo sapien
aggaagaatgaggaaacggtgctgg

SEQ ID NO: 5784122 - DNA, 25 bp, Homo sapien
ccaggaagaatgaggaaacggtgct

SEQ ID NO: 5784123 - DNA, 25 bp, Homo sapien
atgattcagtggaatgggcccaaga

SEQ ID NO: 5784124 - DNA, 25 bp, Homo sapien
cctcaactccagtgacatcttcttg

SEQ ID NO: 5784125 - DNA, 25 bp, Homo sapien
atcttcttgctggtcacagccagcg

SEQ ID NO: 5784126 - DNA, 25 bp, Homo sapien
gatgaggccaaagccccggacctca

SEQ ID NO: 5784127 - DNA, 25 bp, Homo sapien
ggctgttgttccttgtgtcgtccca

SEQ ID NO: 5784128 - DNA, 25 bp, Homo sapien
cctgaggaggtccccagcttccagc

SEQ ID NO: 5784129 - DNA, 25 bp, Homo sapien
cgggtgcggaagcgcagggcgctgc

SEQ ID NO: 5784130 - DNA, 25 bp, Homo sapien
gtctagcctccaggagagaaaggct

SEQ ID NO: 5784131 - DNA, 25 bp, Homo sapien
actagatgtcatgtatggtggcgtc

SEQ ID NO: 5784132 - DNA, 25 bp, Homo sapien
atttctgagaaggctcgggggctgg

SEQ ID NO: 5784133 - DNA, 25 bp, Homo sapien
acgtggaggtggtgaacgacggcgc

SEQ ID NO: 5784134 - DNA, 25 bp, Homo sapien
taccatgtctatgagaagggcaaag

SEQ ID NO: 5784135 - DNA, 25 bp, Homo sapien
gtgctgggccgcagggtgggcagcc

SEQ ID NO: 5784136 - DNA, 25 bp, Homo sapien
agatcatggaggctgtgctgggccg

SEQ ID NO: 5784137 - DNA, 25 bp, Homo sapien
tctatctctcagactctgacttcca

SEQ ID NO: 5784138 - DNA, 25 bp, Homo sapien
gtgctgcaccgcgaggcgcagggcc

SEQ ID NO: 5784139 - DNA, 25 bp, Homo sapien
agtcagcatccaccacaaggctttt

SEQ ID NO: 5784140 - DNA, 25 bp, Homo sapien
aatgggcccaagaccagcatttctg

SEQ ID NO: 5784141 - DNA, 25 bp, Homo sapien
agcagctcttccggacttggtctga

SEQ ID NO: 5784142 - DNA, 25 bp, Homo sapien
tttgaggaacactgctatgtcatcc

SEQ ID NO: 5784143 - DNA, 25 bp, Homo sapien
ggtgtggtgcatccaggacttacac

SEQ ID NO: 5784144 - DNA, 25 bp, Homo sapien
ggaggcagcggcaggagaaaaagca

SEQ ID NO: 5784145 - DNA, 25 bp, Homo sapien
ccaggccactgcggatgagattgag

SEQ ID NO: 5784146 - DNA, 25 bp, Homo sapien
gccccaagtcggctggcagcagaac

SEQ ID NO: 5784147 - DNA, 25 bp, Homo sapien
tccccacttctgggaggccctggga

SEQ ID NO: 5784148 - DNA, 25 bp, Homo sapien
cagcctccgggacagggaacgtggt

SEQ ID NO: 5784149 - DNA, 25 bp, Homo sapien
cagcgccacgatcaacgggggcctg

SEQ ID NO: 5784150 - DNA, 25 bp, Homo sapien
gatcagcgtgagatggcacgggtgg

SEQ ID NO: 5784151 - DNA, 25 bp, Homo sapien
gaagaatgaggaaacggtgctggag

SEQ ID NO: 5784152 - DNA, 25 bp, Homo sapien
gggcaagctgcacacccagcctaag

SEQ ID NO: 5784153 - DNA, 25 bp, Homo sapien
gcttcttctgaacccaagccctctc

SEQ ID NO: 5784154 - DNA, 25 bp, Homo sapien
aggccactgcggatgagattgaggc

SEQ ID NO: 5784155 - DNA, 25 bp, Homo sapien
aggaagggaggcctagcatctgacc

SEQ ID NO: 5784156 - DNA, 25 bp, Homo sapien
aagggaggaagcacgtgtctgccac

SEQ ID NO: 5784157 - DNA, 25 bp, Homo sapien
gctacccgacctacaccaacgtgga

SEQ ID NO: 5784158 - DNA, 25 bp, Homo sapien
ggatgatgaggccaaagccccggac

SEQ ID NO: 5784159 - DNA, 25 bp, Homo sapien
cacccagcagggaggagcccggcca

SEQ ID NO: 5784160 - DNA, 25 bp, Homo sapien
ggacgtgggcaagctgcacacccag

SEQ ID NO: 5784161 - DNA, 25 bp, Homo sapien
tctcctggaacagctttaataaggg

SEQ ID NO: 5784162 - DNA, 25 bp, Homo sapien
gctctacacataccagaggctgggc

SEQ ID NO: 5784163 - DNA, 25 bp, Homo sapien
gctgcggaggccttccagcagcgcc

SEQ ID NO: 5784164 - DNA, 25 bp, Homo sapien
tcccatattcctgcctggcctgcga

SEQ ID NO: 5784165 - DNA, 25 bp, Homo sapien
ggctgtgctgggccgcagggtgggc

SEQ ID NO: 5784166 - DNA, 25 bp, Homo sapien
gctgccttcagccgggctgtgggct

SEQ ID NO: 5784167 - DNA, 25 bp, Homo sapien
tccgactgcttctgcagctacttcc

SEQ ID NO: 5784168 - DNA, 25 bp, Homo sapien
tcagactctgacttccaagatatct

SEQ ID NO: 5784169 - DNA, 25 bp, Homo sapien
cagggccaccaggccactgcggatg

SEQ ID NO: 5784170 - DNA, 25 bp, Homo sapien
caagcagctcttccggacttggtct

SEQ ID NO: 5784171 - DNA, 25 bp, Homo sapien
agggcgaaggcgcgggagcagtttc

SEQ ID NO: 5784172 - DNA, 25 bp, Homo sapien
tcactgtcatttccaggaagaatga

SEQ ID NO: 5784173 - DNA, 25 bp, Homo sapien
atcatgttactggacacctggcagg

SEQ ID NO: 5784174 - DNA, 25 bp, Homo sapien
agccacccgtcccacaaggaagtgg

SEQ ID NO: 5784175 - DNA, 25 bp, Homo sapien
ccatgggcagcgagcccccccactt

SEQ ID NO: 5784176 - DNA, 25 bp, Homo sapien
ttggggaagctgcaagtgagtggaa

SEQ ID NO: 5784177 - DNA, 25 bp, Homo sapien
cgggctgtgggcttcatccaggcca

SEQ ID NO: 5784178 - DNA, 25 bp, Homo sapien
ctccatggaaactgagcaagttgta

SEQ ID NO: 5784179 - DNA, 25 bp, Homo sapien
agggtgggcagcctgcgtgccgcca

SEQ ID NO: 5784180 - DNA, 25 bp, Homo sapien
atcttccagggccagctggtgatct

SEQ ID NO: 5784181 - DNA, 25 bp, Homo sapien
cctccccacttctgggaggccctgg

SEQ ID NO: 5784182 - DNA, 25 bp, Homo sapien
catcctggaccagggtggcttcaag

SEQ ID NO: 5784183 - DNA, 25 bp, Homo sapien
acacccatcgtgctggtcaagcagg

SEQ ID NO: 5784184 - DNA, 25 bp, Homo sapien
agtcaacaacttgcggctatccaga

SEQ ID NO: 5784185 - DNA, 25 bp, Homo sapien
caccaggccactgcggatgagattg

SEQ ID NO: 5784186 - DNA, 25 bp, Homo sapien
tgcaccgcgaggcgcagggccacga

SEQ ID NO: 5784187 - DNA, 25 bp, Homo sapien
aagccccaagtcggctggcagcaga

SEQ ID NO: 5784188 - DNA, 25 bp, Homo sapien
gtggaccctgcccgcagggagttct

SEQ ID NO: 5784189 - DNA, 25 bp, Homo sapien
gggcgtggaccctgcccgcagggag

SEQ ID NO: 5784190 - DNA, 25 bp, Homo sapien
ccatggaggtgccagcccgtgcctc

SEQ ID NO: 5784191 - DNA, 25 bp, Homo sapien
gcggcccagctcaggatggtggacg

SEQ ID NO: 5784192 - DNA, 25 bp, Homo sapien
tcctgtacctatggcagggccacca

SEQ ID NO: 5784193 - DNA, 25 bp, Homo sapien
agtacctgaagactcacccagcagg

SEQ ID NO: 5784194 - DNA, 25 bp, Homo sapien
atcctctgcgtgtcagtaaaagcag

SEQ ID NO: 5784195 - DNA, 25 bp, Homo sapien
acagcagaagtcaacaacttgcggc

SEQ ID NO: 5784196 - DNA, 25 bp, Homo sapien
cccagcaacaagaggctccctgagg

SEQ ID NO: 5784197 - DNA, 25 bp, Homo sapien
cccgcagggagttctatctctcaga

SEQ ID NO: 5784198 - DNA, 25 bp, Homo sapien
tccacatatggatctctgagaaccg

SEQ ID NO: 5784199 - DNA, 25 bp, Homo sapien
cagctggtgatcttccaggagagag

SEQ ID NO: 5784200 - DNA, 25 bp, Homo sapien
ccagcagagggcggcaccactccct

SEQ ID NO: 5784201 - DNA, 25 bp, Homo sapien
agggctgtaatggtgatcagcgtga

SEQ ID NO: 5784202 - DNA, 25 bp, Homo sapien
gataacagcagaagtcaacaacttg

SEQ ID NO: 5784203 - DNA, 25 bp, Homo sapien
tgggtcgggaagcaggcgggtgcgg

SEQ ID NO: 5784204 - DNA, 25 bp, Homo sapien
atcagcaagggcctcccaggcatgc

SEQ ID NO: 5784205 - DNA, 25 bp, Homo sapien
tctgaacccaagccctctcgactgc

SEQ ID NO: 5784206 - DNA, 25 bp, Homo sapien
tgcacacccagcctaagttagcggc

SEQ ID NO: 5784207 - DNA, 25 bp, Homo sapien
ccagaagctcggcgggagggataaa

SEQ ID NO: 5784208 - DNA, 25 bp, Homo sapien
aggaaacggtgctggagggtcagga

SEQ ID NO: 5784209 - DNA, 25 bp, Homo sapien
ctcgcagaagtggggttcttcagcc

SEQ ID NO: 5784210 - DNA, 25 bp, Homo sapien
cgcagggcgctgcggaggccttcca

SEQ ID NO: 5784211 - DNA, 25 bp, Homo sapien
aaatcgattcatgtaaagctggacg

SEQ ID NO: 5784212 - DNA, 25 bp, Homo sapien
ggctgcctggtcctcgcagaagtgg

SEQ ID NO: 5784213 - DNA, 25 bp, Homo sapien
attcctgcctggcctgcgatggaca

SEQ ID NO: 5784214 - DNA, 25 bp, Homo sapien
ggtggtggtcactgtcatttccagg

SEQ ID NO: 5784215 - DNA, 25 bp, Homo sapien
actccctgctccatggaaactgagc

SEQ ID NO: 5784216 - DNA, 25 bp, Homo sapien
ggcacgggtggtggtcactgtcatt

SEQ ID NO: 5784217 - DNA, 25 bp, Homo sapien
tgtcatgtatggtggcgtcctagta

SEQ ID NO: 5784218 - DNA, 25 bp, Homo sapien
gccaaagccccggacctcatgcaga

SEQ ID NO: 5784219 - DNA, 25 bp, Homo sapien
gctggggggccagaccgtgctgcac

SEQ ID NO: 5784220 - DNA, 25 bp, Homo sapien
gattgaggccctgaacagcaacgct

SEQ ID NO: 5784221 - DNA, 25 bp, Homo sapien
tggacaagtatgacatcatgttact

SEQ ID NO: 5784222 - DNA, 25 bp, Homo sapien
cccccacttcctcgccatcttccag

SEQ ID NO: 5784223 - DNA, 25 bp, Homo sapien
gcccagcaaggatatcaaccagctg

SEQ ID NO: 5784224 - DNA, 25 bp, Homo sapien
gacctggacaagtatgacatcatgt

SEQ ID NO: 5784225 - DNA, 25 bp, Homo sapien
gggcttcatccaggccaagggctac

SEQ ID NO: 5784226 - DNA, 25 bp, Homo sapien
gtggaggcagcggcaggagaaaaag

SEQ ID NO: 5784227 - DNA, 25 bp, Homo sapien
tcaggatggtggacgacggctctgg

SEQ ID NO: 5784228 - DNA, 25 bp, Homo sapien
agaagctcggcgggagggataaatc

SEQ ID NO: 5784229 - DNA, 25 bp, Homo sapien
gctgggccgcagggtgggcagcctg

SEQ ID NO: 5784230 - DNA, 25 bp, Homo sapien
gagatcttcctgtggcttggggaag

SEQ ID NO: 5784231 - DNA, 25 bp, Homo sapien
tgtggtgcatccaggacttacacag

SEQ ID NO: 5784232 - DNA, 25 bp, Homo sapien
ggccctgaacagcaacgctgaggaa

SEQ ID NO: 5784233 - DNA, 25 bp, Homo sapien
cgtcatggacagctgtgtgcaggca

SEQ ID NO: 5784234 - DNA, 25 bp, Homo sapien
tccactcccctcagaggcttttggt

SEQ ID NO: 5784235 - DNA, 25 bp, Homo sapien
tggtggatgatgaggccaaagcccc

SEQ ID NO: 5784236 - DNA, 25 bp, Homo sapien
aatggcagggcaggtgccgtggccc

SEQ ID NO: 5784237 - DNA, 25 bp, Homo sapien
agggacgcatgtctagcctccagga

SEQ ID NO: 5784238 - DNA, 25 bp, Homo sapien
cgccacgcccagcaaggatatcaac

SEQ ID NO: 5784239 - DNA, 25 bp, Homo sapien
caagcgtcatggacagctgtgtgca

SEQ ID NO: 5784240 - DNA, 25 bp, Homo sapien
ggaatgggcccaagaccagcatttc

SEQ ID NO: 5784241 - DNA, 25 bp, Homo sapien
tgagcaagttgtacaggtagccagg

SEQ ID NO: 5784242 - DNA, 25 bp, Homo sapien
agatggcacgggtggtggtcactgt

SEQ ID NO: 5784243 - DNA, 25 bp, Homo sapien
ccaggctgttgaggacctgccagag

SEQ ID NO: 5784244 - DNA, 25 bp, Homo sapien
ccacgtcccccagagcccgaaggcc

SEQ ID NO: 5784245 - DNA, 25 bp, Homo sapien
aggctgggccgtgtccagtacatcc

SEQ ID NO: 5784246 - DNA, 25 bp, Homo sapien
tgtggagaccaacttgttcaacatc

SEQ ID NO: 5784247 - DNA, 25 bp, Homo sapien
gcggcgcaggaaccagaagctcggc

SEQ ID NO: 5784248 - DNA, 25 bp, Homo sapien
cagctttaataagggtgacatcttc

SEQ ID NO: 5784249 - DNA, 25 bp, Homo sapien
gcccggccacacccatcgtgctggt

SEQ ID NO: 5784250 - DNA, 25 bp, Homo sapien
gccgcgttcaagcagctcttccgga

SEQ ID NO: 5784251 - DNA, 25 bp, Homo sapien
tgatgattcagtggaatgggcccaa

SEQ ID NO: 5784252 - DNA, 25 bp, Homo sapien
ccgtgctgcaccgcgaggcgcaggg

SEQ ID NO: 5784253 - DNA, 25 bp, Homo sapien
gcacatcaaagggaggaagcacgtg

SEQ ID NO: 5784254 - DNA, 25 bp, Homo sapien
gaagggaggcctagcatctgacctc

SEQ ID NO: 5784255 - DNA, 25 bp, Homo sapien
ctggcagcagaaccagcagctccgt

SEQ ID NO: 5784256 - DNA, 25 bp, Homo sapien
ccctgcaggccctcaagggctccca

SEQ ID NO: 5784257 - DNA, 25 bp, Homo sapien
cagcccggcagcagcatcaaccatc

SEQ ID NO: 5784258 - DNA, 25 bp, Homo sapien
gccagagggcgtggaccctgcccgc

SEQ ID NO: 5784259 - DNA, 25 bp, Homo sapien
ctccacgtcccccagagcccgaagg

SEQ ID NO: 5784260 - DNA, 25 bp, Homo sapien
tggtggtcactgtcatttccaggaa

SEQ ID NO: 5784261 - DNA, 25 bp, Homo sapien
cggaagcgcagggcgctgcggaggc

SEQ ID NO: 5784262 - DNA, 25 bp, Homo sapien
ggccttccagcagcgcctacaggac

SEQ ID NO: 5784263 - DNA, 25 bp, Homo sapien
agggaggcctagcatctgacctcaa

SEQ ID NO: 5784264 - DNA, 25 bp, Homo sapien
acccatcgtgctggtcaagcagggc

SEQ ID NO: 5784265 - DNA, 25 bp, Homo sapien
tgcaccaggctgttgaggacctgcc

SEQ ID NO: 5784266 - DNA, 25 bp, Homo sapien
aagttagcggcccagctcaggatgg

SEQ ID NO: 5784267 - DNA, 25 bp, Homo sapien
tgttcgcctgtaccatgtctatgag

SEQ ID NO: 5784268 - DNA, 25 bp, Homo sapien
cccgacctacaccaacgtggaggtg

SEQ ID NO: 5784269 - DNA, 25 bp, Homo sapien
gatctctgagaaccggaagatggtg

SEQ ID NO: 5784270 - DNA, 25 bp, Homo sapien
tgaagactcacccagcagggaggag

SEQ ID NO: 5784271 - DNA, 25 bp, Homo sapien
cttttccaagtgcaaggcactgaca

SEQ ID NO: 5784272 - DNA, 25 bp, Homo sapien
acgcatgtctagcctccaggagaga

SEQ ID NO: 5784273 - DNA, 25 bp, Homo sapien
agaaggccaatgttcgcctgtacca

SEQ ID NO: 5784274 - DNA, 25 bp, Homo sapien
ggcagcccggcagcagcatcaacca

SEQ ID NO: 5784275 - DNA, 25 bp, Homo sapien
aggtgtcggtctccagcctgagaac

SEQ ID NO: 5784276 - DNA, 25 bp, Homo sapien
agcagcaccagcgccacgatcaacg

SEQ ID NO: 5784277 - DNA, 25 bp, Homo sapien
gggttcttcagccaggaggacctgg

SEQ ID NO: 5784278 - DNA, 25 bp, Homo sapien
tccctcaactccagtgacatcttct

SEQ ID NO: 5784279 - DNA, 25 bp, Homo sapien
agtcggctggcagcagaaccagcag

SEQ ID NO: 5784280 - DNA, 25 bp, Homo sapien
agctgggcttcttctgaacccaagc

SEQ ID NO: 5784281 - DNA, 25 bp, Homo sapien
cccggacctcatgcagatcatggag

SEQ ID NO: 5784282 - DNA, 25 bp, Homo sapien
ggcagcctgcgtgccgccacgccca

SEQ ID NO: 5784283 - DNA, 25 bp, Homo sapien
ccaacttgttcaacatccagcgact

SEQ ID NO: 5784284 - DNA, 25 bp, Homo sapien
gccagctggtgatcttccaggagag

SEQ ID NO: 5784285 - DNA, 25 bp, Homo sapien
gggagttctatctctcagactctga

SEQ ID NO: 5784286 - DNA, 25 bp, Homo sapien
cccaagccctctcgactgcccctat

SEQ ID NO: 5784287 - DNA, 25 bp, Homo sapien
ggacagctgtgtgcaggcaactgct

SEQ ID NO: 5784288 - DNA, 25 bp, Homo sapien
gcatgtgaccatgggcagcgagccc

SEQ ID NO: 5784289 - DNA, 25 bp, Homo sapien
gccgggctgtgggcttcatccaggc

SEQ ID NO: 5784290 - DNA, 25 bp, Homo sapien
acagccacaacaccaggaccatgga

SEQ ID NO: 5784291 - DNA, 25 bp, Homo sapien
aggaggaggacttctacatcctgga

SEQ ID NO: 5784292 - DNA, 25 bp, Homo sapien
cacatatggatctctgagaaccgga

SEQ ID NO: 5784293 - DNA, 25 bp, Homo sapien
taaaagcaggcagcccataaaaaaa

SEQ ID NO: 5784294 - DNA, 25 bp, Homo sapien
tgtgtggcagggacgcatgtctagc

SEQ ID NO: 5784295 - DNA, 25 bp, Homo sapien
aagggctcccaggacagctcagaga

SEQ ID NO: 5784296 - DNA, 25 bp, Homo sapien
gaccgtgctgcaccgcgaggcgcag

SEQ ID NO: 5784297 - DNA, 25 bp, Homo sapien
cgcagggccacgagtccgactgctt

SEQ ID NO: 5784298 - DNA, 25 bp, Homo sapien
aaaagcagctgggcttcttctgaac

SEQ ID NO: 5784299 - DNA, 25 bp, Homo sapien
tccatgacgcttggggtccacgggc

SEQ ID NO: 5784300 - DNA, 25 bp, Homo sapien
gggcccattccactgaatcatcatc

SEQ ID NO: 5784301 - DNA, 25 bp, Homo sapien
gggcttgggttcagaagaagcccag

SEQ ID NO: 5784302 - DNA, 25 bp, Homo sapien
tcctgcgccgcttctcagaccaagt

SEQ ID NO: 5784303 - DNA, 25 bp, Homo sapien
gcctcaatctcatccgcagtggcct

SEQ ID NO: 5784304 - DNA, 25 bp, Homo sapien
acacatagatcttgaagccaccctg

SEQ ID NO: 5784305 - DNA, 25 bp, Homo sapien
atgaggcacgggctggcacctccat

SEQ ID NO: 5784306 - DNA, 25 bp, Homo sapien
gaagatcaccagctggccctggaag

SEQ ID NO: 5784307 - DNA, 25 bp, Homo sapien
catagcagtgttcctcaaaaaagtt

SEQ ID NO: 5784308 - DNA, 25 bp, Homo sapien
caccacacctccaccttcccagagc

SEQ ID NO: 5784309 - DNA, 25 bp, Homo sapien
agagccgtcgtccaccatcctgagc

SEQ ID NO: 5784310 - DNA, 25 bp, Homo sapien
gcagggagtggtgccgccctctgct

SEQ ID NO: 5784311 - DNA, 25 bp, Homo sapien
gaaggcagcctttctctcctggagg

SEQ ID NO: 5784312 - DNA, 25 bp, Homo sapien
acgcaggctgcccaccctgcggccc

SEQ ID NO: 5784313 - DNA, 25 bp, Homo sapien
gcggccgactcggcgccgtcgttca

SEQ ID NO: 5784314 - DNA, 25 bp, Homo sapien
ggatgtactggacacggcccagcct

SEQ ID NO: 5784315 - DNA, 25 bp, Homo sapien
gaccctccagcaccgtttcctcatt

SEQ ID NO: 5784316 - DNA, 25 bp, Homo sapien
catagacatggtacaggcgaacatt

SEQ ID NO: 5784317 - DNA, 25 bp, Homo sapien
tgtcatacttgtccaggtcctcctg

SEQ ID NO: 5784318 - DNA, 25 bp, Homo sapien
atgtggctggagcactcaaacagtc

SEQ ID NO: 5784319 - DNA, 25 bp, Homo sapien
ttcctcattcttcctggaaatgaca

SEQ ID NO: 5784320 - DNA, 25 bp, Homo sapien
gcgcaggcccccgttgatcgtggcg

SEQ ID NO: 5784321 - DNA, 25 bp, Homo sapien
cggcccagcctctggtatgtgtaga

SEQ ID NO: 5784322 - DNA, 25 bp, Homo sapien
tccactgaatcatcatcttgcctag

SEQ ID NO: 5784323 - DNA, 25 bp, Homo sapien
atgatctgcatgaggtccggggctt

SEQ ID NO: 5784324 - DNA, 25 bp, Homo sapien
cctcccagggcctcccagaagtggg

SEQ ID NO: 5784325 - DNA, 25 bp, Homo sapien
cgccctctgctggaaactgctcccg

SEQ ID NO: 5784326 - DNA, 25 bp, Homo sapien
aggaacaacagccagagttctcagg

SEQ ID NO: 5784327 - DNA, 25 bp, Homo sapien
ctgggtgtgcagcttgcccacgtcc

SEQ ID NO: 5784328 - DNA, 25 bp, Homo sapien
gtcctgtaggcgctgctggaaggcc

SEQ ID NO: 5784329 - DNA, 25 bp, Homo sapien
acctgccctgccattgcccggccat

SEQ ID NO: 5784330 - DNA, 25 bp, Homo sapien
gaggaagtgggggggctcgctgccc

SEQ ID NO: 5784331 - DNA, 25 bp, Homo sapien
ctggggacctcctcagggagcctct

SEQ ID NO: 5784332 - DNA, 25 bp, Homo sapien
agatgctaggcctcccttcctgtag

SEQ ID NO: 5784333 - DNA, 25 bp, Homo sapien
tggaagatcaccagctggccctgga

SEQ ID NO: 5784334 - DNA, 25 bp, Homo sapien
agcagttgcctgcacacagctgtcc

SEQ ID NO: 5784335 - DNA, 25 bp, Homo sapien
gctgactgcccctttccatggtgcc

SEQ ID NO: 5784336 - DNA, 25 bp, Homo sapien
acatagatcttgaagccaccctggt

SEQ ID NO: 5784337 - DNA, 25 bp, Homo sapien
gggccgctaacttaggctgggtgtg

SEQ ID NO: 5784338 - DNA, 25 bp, Homo sapien
ctgctgttatctcagagatggttga

SEQ ID NO: 5784339 - DNA, 25 bp, Homo sapien
ctgctggaaggcctccgcagcgccc

SEQ ID NO: 5784340 - DNA, 25 bp, Homo sapien
ccacttctgcgaggaccaggcagcc

SEQ ID NO: 5784341 - DNA, 25 bp, Homo sapien
tgtggccgggctcctccctgctggg

SEQ ID NO: 5784342 - DNA, 25 bp, Homo sapien
ccttctcagaaatgctggtcttggg

SEQ ID NO: 5784343 - DNA, 25 bp, Homo sapien
ctgcgcctcgcggtgcagcacggtc

SEQ ID NO: 5784344 - DNA, 25 bp, Homo sapien
tcatcttgcctaggtccagcaggaa

SEQ ID NO: 5784345 - DNA, 25 bp, Homo sapien
ctcagaaatgctggtcttgggccca

SEQ ID NO: 5784346 - DNA, 25 bp, Homo sapien
ggatgacatagcagtgttcctcaaa

SEQ ID NO: 5784347 - DNA, 25 bp, Homo sapien
aagatggcgaggaagtgggggggct

SEQ ID NO: 5784348 - DNA, 25 bp, Homo sapien
atagaactccctgcgggcagggtcc

SEQ ID NO: 5784349 - DNA, 25 bp, Homo sapien
caccctggtccaggatgtagaagtc

SEQ ID NO: 5784350 - DNA, 25 bp, Homo sapien
ttgtccaggtcctcctggctgaaga

SEQ ID NO: 5784351 - DNA, 25 bp, Homo sapien
ccagtaacatgatgtcatacttgtc

SEQ ID NO: 5784352 - DNA, 25 bp, Homo sapien
gttgatatccttgctgggcgtggcg

SEQ ID NO: 5784353 - DNA, 25 bp, Homo sapien
gggcagtcgagagggcttgggttca

SEQ ID NO: 5784354 - DNA, 25 bp, Homo sapien
gcagtcgagagggcttgggttcaga

SEQ ID NO: 5784355 - DNA, 25 bp, Homo sapien
ccagcaagaagatgtcactggagtt

SEQ ID NO: 5784356 - DNA, 25 bp, Homo sapien
aggggtcccaagtgaagaaccatcc

SEQ ID NO: 5784357 - DNA, 25 bp, Homo sapien
cctgtagatgattcccgggcggaag

SEQ ID NO: 5784358 - DNA, 25 bp, Homo sapien
cttggatttcccaaagatatcttgg

SEQ ID NO: 5784359 - DNA, 25 bp, Homo sapien
cgcctccttccactcacttgcagct

SEQ ID NO: 5784360 - DNA, 25 bp, Homo sapien
agtggtgccgccctctgctggaaac

SEQ ID NO: 5784361 - DNA, 25 bp, Homo sapien
cgcttctcagaccaagtccggaaga

SEQ ID NO: 5784362 - DNA, 25 bp, Homo sapien
catcatcttgcctaggtccagcagg

SEQ ID NO: 5784363 - DNA, 25 bp, Homo sapien
agctgcagaagcagtcggactcgtg

SEQ ID NO: 5784364 - DNA, 25 bp, Homo sapien
gttgagggatgaggcacgggctggc

SEQ ID NO: 5784365 - DNA, 25 bp, Homo sapien
ttggaaaagccttgtggtggatgct

SEQ ID NO: 5784366 - DNA, 25 bp, Homo sapien
gtcctgggagcccttgagggcctgc

SEQ ID NO: 5784367 - DNA, 25 bp, Homo sapien
cctgtaggcgctgctggaaggcctc

SEQ ID NO: 5784368 - DNA, 25 bp, Homo sapien
caccatcctgagctgggccgctaac

SEQ ID NO: 5784369 - DNA, 25 bp, Homo sapien
cctccacgtggccatgctgtagaat

SEQ ID NO: 5784370 - DNA, 25 bp, Homo sapien
ggaggcctccctgcatgcctgggag

SEQ ID NO: 5784371 - DNA, 25 bp, Homo sapien
gtaagtcctggatgcaccacacctc

SEQ ID NO: 5784372 - DNA, 25 bp, Homo sapien
cttcccagagccgtcgtccaccatc

SEQ ID NO: 5784373 - DNA, 25 bp, Homo sapien
gctttacatgaatcgatttatccct

SEQ ID NO: 5784374 - DNA, 25 bp, Homo sapien
aagttggtctccacatgcttgaggt

SEQ ID NO: 5784375 - DNA, 25 bp, Homo sapien
agcctggtgcatcagttgttcccgg

SEQ ID NO: 5784376 - DNA, 25 bp, Homo sapien
gcaggtctttgcccttctcatagac

SEQ ID NO: 5784377 - DNA, 25 bp, Homo sapien
aggtctttgcccttctcatagacat

SEQ ID NO: 5784378 - DNA, 25 bp, Homo sapien
cccagctgctttttctcctgccgct

SEQ ID NO: 5784379 - DNA, 25 bp, Homo sapien
cttccccaagccacaggaagatctc

SEQ ID NO: 5784380 - DNA, 25 bp, Homo sapien
caccaccacgttccctgtcccggag

SEQ ID NO: 5784381 - DNA, 25 bp, Homo sapien
tagcagtgttcctcaaaaaagttcc

SEQ ID NO: 5784382 - DNA, 25 bp, Homo sapien
cctaggtccagcaggaagatgtcac

SEQ ID NO: 5784383 - DNA, 25 bp, Homo sapien
agcaagaagatgtcactggagttga

SEQ ID NO: 5784384 - DNA, 25 bp, Homo sapien
aggtgtccagtaacatgatgtcata

SEQ ID NO: 5784385 - DNA, 25 bp, Homo sapien
gaagagctgcttgaacgcggccgac

SEQ ID NO: 5784386 - DNA, 25 bp, Homo sapien
gttcctgcgccgcttctcagaccaa

SEQ ID NO: 5784387 - DNA, 25 bp, Homo sapien
gaatcatcatcttgcctaggtccag

SEQ ID NO: 5784388 - DNA, 25 bp, Homo sapien
aacttaggctgggtgtgcagcttgc

SEQ ID NO: 5784389 - DNA, 25 bp, Homo sapien
aagccaccctggtccaggatgtaga

SEQ ID NO: 5784390 - DNA, 25 bp, Homo sapien
ggctcctccctgctgggtgagtctt

SEQ ID NO: 5784391 - DNA, 25 bp, Homo sapien
atatcttggaagtcagagtctgaga

SEQ ID NO: 5784392 - DNA, 25 bp, Homo sapien
caggtcctcaacagcctggtgcatc

SEQ ID NO: 5784393 - DNA, 25 bp, Homo sapien
gtccggggctttggcctcatcatcc

SEQ ID NO: 5784394 - DNA, 25 bp, Homo sapien
tgacttctgctgttatctcagagat

SEQ ID NO: 5784395 - DNA, 25 bp, Homo sapien
agaaccccacttctgcgaggaccag

SEQ ID NO: 5784396 - DNA, 25 bp, Homo sapien
caaacagtcgtggctggaagctggg

SEQ ID NO: 5784397 - DNA, 25 bp, Homo sapien
ctggccccaggccaccgcctccttc

SEQ ID NO: 5784398 - DNA, 25 bp, Homo sapien
taggtcgggtagcccttggcctgga

SEQ ID NO: 5784399 - DNA, 25 bp, Homo sapien
gctggttgatatccttgctgggcgt

SEQ ID NO: 5784400 - DNA, 25 bp, Homo sapien
cctttctctcctggaggctagacat

SEQ ID NO: 5784401 - DNA, 25 bp, Homo sapien
ctgaaggcagcctttctctcctgga

SEQ ID NO: 5784402 - DNA, 25 bp, Homo sapien
ccccacttctgcgaggaccaggcag

SEQ ID NO: 5784403 - DNA, 25 bp, Homo sapien
ttgatgtgcagcagtcgctggatgt

SEQ ID NO: 5784404 - DNA, 25 bp, Homo sapien
acaggcgaacattggccttctgcag

SEQ ID NO: 5784405 - DNA, 25 bp, Homo sapien
agcctctggtatgtgtagagcacaa

SEQ ID NO: 5784406 - DNA, 25 bp, Homo sapien
catggccctgcttgaccagcacgat

SEQ ID NO: 5784407 - DNA, 25 bp, Homo sapien
gtttcctcattcttcctggaaatga

SEQ ID NO: 5784408 - DNA, 25 bp, Homo sapien
gccatctcacgctgatcaccattac

SEQ ID NO: 5784409 - DNA, 25 bp, Homo sapien
atatccttgctgggcgtggcggcac

SEQ ID NO: 5784410 - DNA, 25 bp, Homo sapien
ctctgctggaaactgctcccgcgcc

SEQ ID NO: 5784411 - DNA, 25 bp, Homo sapien
tactaggacgccaccatacatgaca

SEQ ID NO: 5784412 - DNA, 25 bp, Homo sapien
cttgagggcctgcagggccacggca

SEQ ID NO: 5784413 - DNA, 25 bp, Homo sapien
gctaggcctcccttcctgtagatga

SEQ ID NO: 5784414 - DNA, 25 bp, Homo sapien
attcccgggcggaagtagctgcaga

SEQ ID NO: 5784415 - DNA, 25 bp, Homo sapien
ctccagcaccgtttcctcattcttc

SEQ ID NO: 5784416 - DNA, 25 bp, Homo sapien
gctcctgaccctccagcaccgtttc

SEQ ID NO: 5784417 - DNA, 25 bp, Homo sapien
catacatgacatctagttcctcagc

SEQ ID NO: 5784418 - DNA, 25 bp, Homo sapien
tccggttctcagagatccatatgtg

SEQ ID NO: 5784419 - DNA, 25 bp, Homo sapien
ggatgaggcacgggctggcacctcc

SEQ ID NO: 5784420 - DNA, 25 bp, Homo sapien
gatgcaccacacctccaccttccca

SEQ ID NO: 5784421 - DNA, 25 bp, Homo sapien
gcacgaccaccaccacgttccctgt

SEQ ID NO: 5784422 - DNA, 25 bp, Homo sapien
gaacgcggccgactcggcgccgtcg

SEQ ID NO: 5784423 - DNA, 25 bp, Homo sapien
agggtccacgccctctggcaggtcc

SEQ ID NO: 5784424 - DNA, 25 bp, Homo sapien
agtctgagagatagaactccctgcg

SEQ ID NO: 5784425 - DNA, 25 bp, Homo sapien
agagtctgagagatagaactccctg

SEQ ID NO: 5784426 - DNA, 25 bp, Homo sapien
tgggcgtggcggcacgcaggctgcc

SEQ ID NO: 5784427 - DNA, 25 bp, Homo sapien
tccccaagccacaggaagatctcct

SEQ ID NO: 5784428 - DNA, 25 bp, Homo sapien
gatgggtgtggccgggctcctccct

SEQ ID NO: 5784429 - DNA, 25 bp, Homo sapien
gtcgtggctggaagctggggacctc

SEQ ID NO: 5784430 - DNA, 25 bp, Homo sapien
atctagttcctcagcgttgctgttc

SEQ ID NO: 5784431 - DNA, 25 bp, Homo sapien
cccacagcccggctgaaggcagcct

SEQ ID NO: 5784432 - DNA, 25 bp, Homo sapien
caccattacagcccttcccaaacca

SEQ ID NO: 5784433 - DNA, 25 bp, Homo sapien
ctccgcagcgccctgcgcttccgca

SEQ ID NO: 5784434 - DNA, 25 bp, Homo sapien
gacgccaccatacatgacatctagt

SEQ ID NO: 5784435 - DNA, 25 bp, Homo sapien
caaaccagaggtagcagacgctggc

SEQ ID NO: 5784436 - DNA, 25 bp, Homo sapien
acaggaagatctcctgccaggtgtc

SEQ ID NO: 5784437 - DNA, 25 bp, Homo sapien
gtggcgctggtgctgctgacggagc

SEQ ID NO: 5784438 - DNA, 25 bp, Homo sapien
accttcccagagccgtcgtccacca

SEQ ID NO: 5784439 - DNA, 25 bp, Homo sapien
ggctgaaggcagcctttctctcctg

SEQ ID NO: 5784440 - DNA, 25 bp, Homo sapien
gtaggggtcccaagtgaagaaccat

SEQ ID NO: 5784441 - DNA, 25 bp, Homo sapien
tttttttatgggctgcctgctttta

SEQ ID NO: 5784442 - DNA, 25 bp, Homo sapien
gcatgcctgggaggcccttgctgat

SEQ ID NO: 5784443 - DNA, 25 bp, Homo sapien
ttgaacgcggccgactcggcgccgt

SEQ ID NO: 5784444 - DNA, 25 bp, Homo sapien
tacagcccttcccaaaccagaggta

SEQ ID NO: 5784445 - DNA, 25 bp, Homo sapien
ttcctccttggatttcccaaagata

SEQ ID NO: 5784446 - DNA, 25 bp, Homo sapien
ccgtttcctcattcttcctggaaat

SEQ ID NO: 5784447 - DNA, 25 bp, Homo sapien
aagaagcccagctgctttttctcct

SEQ ID NO: 5784448 - DNA, 25 bp, Homo sapien
gttcaccacctccacgttggtgtag

SEQ ID NO: 5784449 - DNA, 25 bp, Homo sapien
cagatcattctctgagctgtcctgg

SEQ ID NO: 5784450 - DNA, 25 bp, Homo sapien
tcattctctgagctgtcctgggagc

SEQ ID NO: 5784451 - DNA, 25 bp, Homo sapien
catctcacgctgatcaccattacag

SEQ ID NO: 5784452 - DNA, 25 bp, Homo sapien
gtcccggaggctgtaggtcaaagcc

SEQ ID NO: 5784453 - DNA, 25 bp, Homo sapien
agaagaagcccagctgctttttctc

SEQ ID NO: 5784454 - DNA, 25 bp, Homo sapien
tggccttctgcagctggttgatatc

SEQ ID NO: 5784455 - DNA, 25 bp, Homo sapien
cctgccattgcccggccatctggat

SEQ ID NO: 5784456 - DNA, 25 bp, Homo sapien
tttccatggtgcccagctctctcct

SEQ ID NO: 5784457 - DNA, 25 bp, Homo sapien
gcctccgcagcgccctgcgcttccg

SEQ ID NO: 5784458 - DNA, 25 bp, Homo sapien
aaccagaggtagcagacgctggctg

SEQ ID NO: 5784459 - DNA, 25 bp, Homo sapien
gtgcccagctctctcctggaagatc

SEQ ID NO: 5784460 - DNA, 25 bp, Homo sapien
gtcctcctcctgcagcaggtctttg

SEQ ID NO: 5784461 - DNA, 25 bp, Homo sapien
ggctgcctgtgtaagtcctggatgc

SEQ ID NO: 5784462 - DNA, 25 bp, Homo sapien
ggaaaagccttgtggtggatgctga

SEQ ID NO: 5784463 - DNA, 25 bp, Homo sapien
ataggggcagtcgagagggcttggg

SEQ ID NO: 5784464 - DNA, 25 bp, Homo sapien
ccgtcgtccaccatcctgagctggg

SEQ ID NO: 5784465 - DNA, 25 bp, Homo sapien
ggggaggctcctgaccctccagcac

SEQ ID NO: 5784466 - DNA, 25 bp, Homo sapien
ggagagctccacctcagtggcagac

SEQ ID NO: 5784467 - DNA, 25 bp, Homo sapien
tcgctgcccatggtcacatgctcct

SEQ ID NO: 5784468 - DNA, 25 bp, Homo sapien
gctggttctgctgccagccgacttg

SEQ ID NO: 5784469 - DNA, 25 bp, Homo sapien
cccgttgatcgtggcgctggtgctg

SEQ ID NO: 5784470 - DNA, 25 bp, Homo sapien
ctctcctggaagatcaccagctggc

SEQ ID NO: 5784471 - DNA, 25 bp, Homo sapien
ctcaatctcatccgcagtggcctgg

SEQ ID NO: 5784472 - DNA, 25 bp, Homo sapien
agagatccatatgtggaggcctccc

SEQ ID NO: 5784473 - DNA, 25 bp, Homo sapien
gaccgacacctggctacctgtacaa

SEQ ID NO: 5784474 - DNA, 25 bp, Homo sapien
cggcgccgtcgttcaccacctccac

SEQ ID NO: 5784475 - DNA, 25 bp, Homo sapien
ctgcccaccctgcggcccagcacag

SEQ ID NO: 5784476 - DNA, 25 bp, Homo sapien
atgcctgggaggcccttgctgatgt

SEQ ID NO: 5784477 - DNA, 25 bp, Homo sapien
tatgggctgcctgcttttactgaca

SEQ ID NO: 5784478 - DNA, 25 bp, Homo sapien
cgacttggggcttcgcaccagatca

SEQ ID NO: 5784479 - DNA, 25 bp, Homo sapien
tcatcatccaccacaccaatctgtg

SEQ ID NO: 5784480 - DNA, 25 bp, Homo sapien
tggccgggctcctccctgctgggtg

SEQ ID NO: 5784481 - DNA, 25 bp, Homo sapien
ggaagtagctgcagaagcagtcgga

SEQ ID NO: 5784482 - DNA, 25 bp, Homo sapien
ttggggtccacgggctgcctgtgta

SEQ ID NO: 5784483 - DNA, 25 bp, Homo sapien
gtaggtcaaagccagcccccgagcc

SEQ ID NO: 5784484 - DNA, 25 bp, Homo sapien
tcagaccaagtccggaagagctgct

SEQ ID NO: 5784485 - DNA, 25 bp, Homo sapien
tggtacaggcgaacattggccttct

SEQ ID NO: 5784486 - DNA, 25 bp, Homo sapien
agcgttgctgttcagggcctcaatc

SEQ ID NO: 5784487 - DNA, 25 bp, Homo sapien
tgctgggtgagtcttcaggtactcc

SEQ ID NO: 5784488 - DNA, 25 bp, Homo sapien
gttctcagagatccatatgtggagg

SEQ ID NO: 5784489 - DNA, 25 bp, Homo sapien
gacgtggaggatgacatagcagtgt

SEQ ID NO: 5784490 - DNA, 25 bp, Homo sapien
ggccctgccataggtacaggatgta

SEQ ID NO: 5784491 - DNA, 25 bp, Homo sapien
catggtgcccagctctctcctggaa

SEQ ID NO: 5784492 - DNA, 25 bp, Homo sapien
aaaagccttgtggtggatgctgact

SEQ ID NO: 5784493 - DNA, 25 bp, Homo sapien
tcatacttgtccaggtcctcctggc

SEQ ID NO: 5784494 - DNA, 25 bp, Homo sapien
gtggggaggctcctgaccctccagc

SEQ ID NO: 5784495 - DNA, 25 bp, Homo sapien
gggacgggtggctagtccacttgta

SEQ ID NO: 5784496 - DNA, 25 bp, Homo sapien
tgaagccaccctggtccaggatgta

SEQ ID NO: 5784497 - DNA, 25 bp, Homo sapien
agttcctcagcgttgctgttcaggg

SEQ ID NO: 5784498 - DNA, 25 bp, Homo sapien
cctgagctgggccgctaacttaggc

SEQ ID NO: 5784499 - DNA, 25 bp, Homo sapien
agctggggacctcctcagggagcct

SEQ ID NO: 5784500 - DNA, 25 bp, Homo sapien
ctgggccgctaacttaggctgggtg

SEQ ID NO: 5784501 - DNA, 25 bp, Homo sapien
taggcgctgctggaaggcctccgca

SEQ ID NO: 5784502 - DNA, 25 bp, Homo sapien
gctcgtcctgtaggcgctgctggaa

SEQ ID NO: 5784503 - DNA, 25 bp, Homo sapien
caatctgtgcacgaccaccaccacg

SEQ ID NO: 5784504 - DNA, 25 bp, Homo sapien
ctccctgcatgcctgggaggccctt

SEQ ID NO: 5784505 - DNA, 25 bp, Homo sapien
ctccaccttcccagagccgtcgtcc

SEQ ID NO: 5784506 - DNA, 25 bp, Homo sapien
aggtcctcctggctgaagaacccca

SEQ ID NO: 5784507 - DNA, 25 bp, Homo sapien
atctcagagatggttgatgctgctg

SEQ ID NO: 5784508 - DNA, 25 bp, Homo sapien
tcagagatccatatgtggaggcctc

SEQ ID NO: 5784509 - DNA, 25 bp, Homo sapien
ccaggtgtccagtaacatgatgtca

SEQ ID NO: 5784510 - DNA, 25 bp, Homo sapien
tgccaggtgtccagtaacatgatgt

SEQ ID NO: 5784511 - DNA, 25 bp, Homo sapien
acttgctcagtttccatggagcagg

SEQ ID NO: 5784512 - DNA, 25 bp, Homo sapien
gaggcacgggctggcacctccatgg

SEQ ID NO: 5784513 - DNA, 25 bp, Homo sapien
gaagcccagctgctttttctcctgc

SEQ ID NO: 5784514 - DNA, 25 bp, Homo sapien
cacggcccagcctctggtatgtgta

SEQ ID NO: 5784515 - DNA, 25 bp, Homo sapien
ccgactcggcgccgtcgttcaccac

SEQ ID NO: 5784516 - DNA, 25 bp, Homo sapien
ttcctgtagatgattcccgggcgga

SEQ ID NO: 5784517 - DNA, 25 bp, Homo sapien
ggcaccatcttccggttctcagaga

SEQ ID NO: 5784518 - DNA, 25 bp, Homo sapien
gcagggcctccccagcattgtaagt

SEQ ID NO: 5784519 - DNA, 25 bp, Homo sapien
ctccacctcagtggcagacacgtgc

SEQ ID NO: 5784520 - DNA, 25 bp, Homo sapien
ggccctgcgcctcgcggtgcagcac

SEQ ID NO: 5784521 - DNA, 25 bp, Homo sapien
ctgggaggcccttgctgatgtccat

SEQ ID NO: 5784522 - DNA, 25 bp, Homo sapien
gaccagcaagaagatgtcactggag

SEQ ID NO: 5784523 - DNA, 25 bp, Homo sapien
ggatgctgactgcccctttccatgg

SEQ ID NO: 5784524 - DNA, 25 bp, Homo sapien
tgagggcctgcagggccacggcacc

SEQ ID NO: 5784525 - DNA, 25 bp, Homo sapien
gctcgctgcccatggtcacatgctc

SEQ ID NO: 5784526 - DNA, 25 bp, Homo sapien
gctcagtttccatggagcagggagt

SEQ ID NO: 5784527 - DNA, 25 bp, Homo sapien
atgtgtagagcacaaggtagcagtt

SEQ ID NO: 5784528 - DNA, 25 bp, Homo sapien
tagacatgcgtccctgccacacata

SEQ ID NO: 5784529 - DNA, 25 bp, Homo sapien
aggtagcagttgcctgcacacagct

SEQ ID NO: 5784530 - DNA, 25 bp, Homo sapien
aatgctggtcttgggcccattccac

SEQ ID NO: 5784531 - DNA, 25 bp, Homo sapien
tggatgcaccacacctccaccttcc

SEQ ID NO: 5784532 - DNA, 25 bp, Homo sapien
gtgggacgggtggctagtccacttg

SEQ ID NO: 5784533 - DNA, 25 bp, Homo sapien
gcttggggtccacgggctgcctgtg

SEQ ID NO: 5784534 - DNA, 25 bp, Homo sapien
atacttgtccaggtcctcctggctg

SEQ ID NO: 5784535 - DNA, 25 bp, Homo sapien
tctcaggctggagaccgacacctgg

SEQ ID NO: 5784536 - DNA, 25 bp, Homo sapien
gtactggacacggcccagcctctgg

SEQ ID NO: 5784537 - DNA, 25 bp, Homo sapien
ctcaacagcctggtgcatcagttgt

SEQ ID NO: 5784538 - DNA, 25 bp, Homo sapien
ttctcagaaatgctggtcttgggcc

SEQ ID NO: 5784539 - DNA, 25 bp, Homo sapien
gatttatccctcccgccgagcttct

SEQ ID NO: 5784540 - DNA, 25 bp, Homo sapien
gacgggtggctagtccacttgtagg

SEQ ID NO: 5784541 - DNA, 25 bp, Homo sapien
gctgatcaccattacagcccttccc

SEQ ID NO: 5784542 - DNA, 25 bp, Homo sapien
ttgcagcttccccaagccacaggaa

SEQ ID NO: 5784543 - DNA, 25 bp, Homo sapien
tgctgtagaattcctccttggattt

SEQ ID NO: 5784544 - DNA, 25 bp, Homo sapien
cagcacgatgggtgtggccgggctc

SEQ ID NO: 5784545 - DNA, 25 bp, Homo sapien
gaggctgtaggtcaaagccagcccc

SEQ ID NO: 5784546 - DNA, 25 bp, Homo sapien
ggctgtgaccagcaagaagatgtca

SEQ ID NO: 5784547 - DNA, 25 bp, Homo sapien
tcagagtctgagagatagaactccc

SEQ ID NO: 5784548 - DNA, 25 bp, Homo sapien
cgagccttctcagaaatgctggtct

SEQ ID NO: 5784549 - DNA, 25 bp, Homo sapien
acttccttgtgggacgggtggctag

SEQ ID NO: 5784550 - DNA, 25 bp, Homo sapien
agaattcctccttggatttcccaaa

SEQ ID NO: 5784551 - DNA, 25 bp, Homo sapien
cgctggtgctgctgacggagctgct

SEQ ID NO: 5784552 - DNA, 25 bp, Homo sapien
ccgctgcctccacgtggccatgctg

SEQ ID NO: 5784553 - DNA, 25 bp, Homo sapien
ctggctgtgaccagcaagaagatgt

SEQ ID NO: 5784554 - DNA, 25 bp, Homo sapien
cgttccctgtcccggaggctgtagg

SEQ ID NO: 5784555 - DNA, 25 bp, Homo sapien
acggagctgctggttctgctgccag

SEQ ID NO: 5784556 - DNA, 25 bp, Homo sapien
gtgggggggctcgctgcccatggtc

SEQ ID NO: 5784557 - DNA, 25 bp, Homo sapien
gctgttcagggcctcaatctcatcc

SEQ ID NO: 5784558 - DNA, 25 bp, Homo sapien
gaggatgacatagcagtgttcctca

SEQ ID NO: 5784559 - DNA, 25 bp, Homo sapien
gtagaagtcctcctcctgcagcagg

SEQ ID NO: 5784560 - DNA, 25 bp, Homo sapien
caccacaccaatctgtgcacgacca

SEQ ID NO: 5784561 - DNA, 25 bp, Homo sapien
cataggtacaggatgtactggacac

SEQ ID NO: 5784562 - DNA, 25 bp, Homo sapien
gatgtcactggagttgagggatgag

SEQ ID NO: 5784563 - DNA, 25 bp, Homo sapien
gcccagctctctcctggaagatcac

SEQ ID NO: 5784564 - DNA, 25 bp, Homo sapien
gccatctggatagccgcaagttgtt

SEQ ID NO: 5784565 - DNA, 25 bp, Homo sapien
tggacacggcccagcctctggtatg

SEQ ID NO: 5784566 - DNA, 25 bp, Homo sapien
tttatccctcccgccgagcttctgg

SEQ ID NO: 5784567 - DNA, 25 bp, Homo sapien
ggtaccggcaccatcttccggttct

SEQ ID NO: 5784568 - DNA, 25 bp, Homo sapien
agcccagctgctttttctcctgccg

SEQ ID NO: 5784569 - DNA, 25 bp, Homo sapien
agtaacatgatgtcatacttgtcca

SEQ ID NO: 5784570 - DNA, 25 bp, Homo sapien
ctcctgccgctgcctccacgtggcc

SEQ ID NO: 5784571 - DNA, 25 bp, Homo sapien
gttggtctccacatgcttgaggtca

SEQ ID NO: 5784572 - DNA, 25 bp, Homo sapien
tatgggacgacacaaggaacaacag

SEQ ID NO: 5784573 - DNA, 25 bp, Homo sapien
ggtcttgggcccattccactgaatc

SEQ ID NO: 5784574 - DNA, 25 bp, Homo sapien
ctgctgacggagctgctggttctgc

SEQ ID NO: 5784575 - DNA, 25 bp, Homo sapien
ttgctcagtttccatggagcaggga

SEQ ID NO: 5784576 - DNA, 25 bp, Homo sapien
gtggaggcctccctgcatgcctggg

SEQ ID NO: 5784577 - DNA, 25 bp, Homo sapien
tggctgtcagtgccttgcacttgga

SEQ ID NO: 5784578 - DNA, 25 bp, Homo sapien
ctcggcgccgtcgttcaccacctcc

SEQ ID NO: 5784579 - DNA, 25 bp, Homo sapien
caggcagcccatgtggctggagcac

SEQ ID NO: 5784580 - DNA, 25 bp, Homo sapien
gtccagtaacatgatgtcatacttg

SEQ ID NO: 5784581 - DNA, 25 bp, Homo sapien
tccaggggataggggcagtcgagag

SEQ ID NO: 5784582 - DNA, 25 bp, Homo sapien
cttggaagtcagagtctgagagata

SEQ ID NO: 5784583 - DNA, 25 bp, Homo sapien
aatatgggacgacacaaggaacaac

SEQ ID NO: 5784584 - DNA, 25 bp, Homo sapien
cccagcattgtaagtatgttggggt

SEQ ID NO: 5784585 - DNA, 25 bp, Homo sapien
tcccagaagtggggaggctcctgac

SEQ ID NO: 5784586 - DNA, 25 bp, Homo sapien
tggcggcacgcaggctgcccaccct

SEQ ID NO: 5784587 - DNA, 25 bp, Homo sapien
gttgtggctgtcagtgccttgcact

SEQ ID NO: 5784588 - DNA, 25 bp, Homo sapien
acaagttggtctccacatgcttgag

SEQ ID NO: 5784589 - DNA, 25 bp, Homo sapien
gccatgctgtagaattcctccttgg

SEQ ID NO: 5784590 - DNA, 25 bp, Homo sapien
ccggcctcccagggcctcccagaag

SEQ ID NO: 5784591 - DNA, 25 bp, Homo sapien
aaagctgttccaggagagctccacc

SEQ ID NO: 5784592 - DNA, 25 bp, Homo sapien
tgttggggtccaggggataggggca

SEQ ID NO: 5784593 - DNA, 25 bp, Homo sapien
taacatgatgtcatacttgtccagg

SEQ ID NO: 5784594 - DNA, 25 bp, Homo sapien
tcagtttccatggagcagggagtgg

SEQ ID NO: 5784595 - DNA, 25 bp, Homo sapien
cttgaccagcacgatgggtgtggcc

SEQ ID NO: 5784596 - DNA, 25 bp, Homo sapien
ccctgtcccggaggctgtaggtcaa

SEQ ID NO: 5784597 - DNA, 25 bp, Homo sapien
ttggggtccaggggataggggcagt

SEQ ID NO: 5784598 - DNA, 25 bp, Homo sapien
tccctcccgccgagcttctggttcc

SEQ ID NO: 5784599 - DNA, 25 bp, Homo sapien
ccgcctgcttcccgacccagtagtg

SEQ ID NO: 5784600 - DNA, 25 bp, Homo sapien
gacgctggctgtgaccagcaagaag

SEQ ID NO: 5784601 - DNA, 25 bp, Homo sapien
agaagtcctcctcctgcagcaggtc

SEQ ID NO: 5784602 - DNA, 25 bp, Homo sapien
tgtcagtgccttgcacttggaaaag

SEQ ID NO: 5784603 - DNA, 25 bp, Homo sapien
agggagcctcttgttgctggggtag

SEQ ID NO: 5784604 - DNA, 25 bp, Homo sapien
cttattaaagctgttccaggagagc

SEQ ID NO: 5784605 - DNA, 25 bp, Homo sapien
gttgacttctgctgttatctcagag

SEQ ID NO: 5784606 - DNA, 25 bp, Homo sapien
ctccatgatctgcatgaggtccggg

SEQ ID NO: 5784607 - DNA, 25 bp, Homo sapien
gtcgtccaccatcctgagctgggcc

SEQ ID NO: 5784608 - DNA, 25 bp, Homo sapien
ctgcgcttccgcacccgcctgcttc

SEQ ID NO: 5784609 - DNA, 25 bp, Homo sapien
tgtcactggagttgagggatgaggc

SEQ ID NO: 5784610 - DNA, 25 bp, Homo sapien
gcctgtgtaagtcctggatgcacca

SEQ ID NO: 5784611 - DNA, 25 bp, Homo sapien
ccaccacgttccctgtcccggaggc

SEQ ID NO: 5784612 - DNA, 25 bp, Homo sapien
catgacatctagttcctcagcgttg

SEQ ID NO: 5784613 - DNA, 25 bp, Homo sapien
tgggctgcctgcttttactgacacg

SEQ ID NO: 5784614 - DNA, 25 bp, Homo sapien
agctggccctggaagatggcgagga

SEQ ID NO: 5784615 - DNA, 25 bp, Homo sapien
ttgaggtcagatgctaggcctccct

SEQ ID NO: 5784616 - DNA, 25 bp, Homo sapien
cccccgttgatcgtggcgctggtgc

SEQ ID NO: 5784617 - DNA, 25 bp, Homo sapien
catgctgtagaattcctccttggat

SEQ ID NO: 5784618 - DNA, 25 bp, Homo sapien
catgcgtccctgccacacatagatc

SEQ ID NO: 5784619 - DNA, 25 bp, Homo sapien
ttggggcttcgcaccagatcattct

SEQ ID NO: 5784620 - DNA, 25 bp, Homo sapien
tccatcgcaggccaggcaggaatat

SEQ ID NO: 5784621 - DNA, 25 bp, Homo sapien
agggagtggtgccgccctctgctgg

SEQ ID NO: 5784622 - DNA, 25 bp, Homo sapien
tacaggatgtactggacacggccca

SEQ ID NO: 5784623 - DNA, 25 bp, Homo sapien
ggctgcctgcttttactgacacgca

SEQ ID NO: 5784624 - DNA, 25 bp, Homo sapien
agggcctccccagcattgtaagtat

SEQ ID NO: 5784625 - DNA, 25 bp, Homo sapien
atgtcacccttattaaagctgttcc

SEQ ID NO: 5784626 - DNA, 25 bp, Homo sapien
agatcaccagctggccctggaagat

SEQ ID NO: 5784627 - DNA, 25 bp, Homo sapien
aatgacagtgaccaccacccgtgcc

SEQ ID NO: 5784628 - DNA, 25 bp, Homo sapien
ttttctcctgccgctgcctccacgt

SEQ ID NO: 5784629 - DNA, 25 bp, Homo sapien
cctcagggagcctcttgttgctggg

SEQ ID NO: 5784630 - DNA, 25 bp, Homo sapien
tcccagggcctcccagaagtgggga

SEQ ID NO: 5784631 - DNA, 25 bp, Homo sapien
caacttgctcagtttccatggagca

SEQ ID NO: 5784632 - DNA, 25 bp, Homo sapien
gtgtgcagcttgcccacgtccagct

SEQ ID NO: 5784633 - DNA, 25 bp, Homo sapien
acgcttggggtccacgggctgcctg

SEQ ID NO: 5784634 - DNA, 25 bp, Homo sapien
gtgaccagcaagaagatgtcactgg

SEQ ID NO: 5784635 - DNA, 25 bp, Homo sapien
ggctgtaggtcaaagccagcccccg

SEQ ID NO: 5784636 - DNA, 25 bp, Homo sapien
gctggaaactgctcccgcgccttcg

SEQ ID NO: 5784637 - DNA, 25 bp, Homo sapien
cgttgatcgtggcgctggtgctgct

SEQ ID NO: 5784638 - DNA, 25 bp, Homo sapien
ggcctcccttcctgtagatgattcc

SEQ ID NO: 5784639 - DNA, 25 bp, Homo sapien
aggctagacatgcgtccctgccaca

SEQ ID NO: 5784640 - DNA, 25 bp, Homo sapien
tacctgtacaacttgctcagtttcc

SEQ ID NO: 5784641 - DNA, 25 bp, Homo sapien
ctgcgaggaccaggcagcccatgtg

SEQ ID NO: 5784642 - DNA, 25 bp, Homo sapien
gcccatgtggctggagcactcaaac

SEQ ID NO: 5784643 - DNA, 25 bp, Homo sapien
tgagctgtcctgggagcccttgagg

SEQ ID NO: 5784644 - DNA, 25 bp, Homo sapien
tcgctggatgttgaacaagttggtc

SEQ ID NO: 5784645 - DNA, 25 bp, Homo sapien
agcttccccaagccacaggaagatc

SEQ ID NO: 5784646 - DNA, 25 bp, Homo sapien
gacacggcccagcctctggtatgtg

SEQ ID NO: 5784647 - DNA, 25 bp, Homo sapien
tggtggatgctgactgcccctttcc

SEQ ID NO: 5784648 - DNA, 25 bp, Homo sapien
gcatcagttgttcccggcgcaggcc

SEQ ID NO: 5784649 - DNA, 25 bp, Homo sapien
cttcctccctttgatgtgcagcagt

SEQ ID NO: 5784650 - DNA, 25 bp, Homo sapien
aagtcctcctcctgcagcaggtctt

SEQ ID NO: 5784651 - DNA, 25 bp, Homo sapien
gaggaccaggcagcccatgtggctg

SEQ ID NO: 5784652 - DNA, 25 bp, Homo sapien
cctgcggcccagcacagcctccatg

SEQ ID NO: 5784653 - DNA, 25 bp, Homo sapien
cgtgcttcctccctttgatgtgcag

SEQ ID NO: 5784654 - DNA, 25 bp, Homo sapien
atctcctgccaggtgtccagtaaca

SEQ ID NO: 5784655 - DNA, 25 bp, Homo sapien
tgcaccacacctccaccttcccaga

SEQ ID NO: 5784656 - DNA, 25 bp, Homo sapien
tgtgcagcagtcgctggatgttgaa

SEQ ID NO: 5784657 - DNA, 25 bp, Homo sapien
gaagctggggacctcctcagggagc

SEQ ID NO: 5784658 - DNA, 25 bp, Homo sapien
ttcccaaaccagaggtagcagacgc

SEQ ID NO: 5784659 - DNA, 25 bp, Homo sapien
ctcctcagggagcctcttgttgctg

SEQ ID NO: 5784660 - DNA, 25 bp, Homo sapien
gacatggtacaggcgaacattggcc

SEQ ID NO: 5784661 - DNA, 25 bp, Homo sapien
ggagtggtgccgccctctgctggaa

SEQ ID NO: 5784662 - DNA, 25 bp, Homo sapien
tggcgaggaagtgggggggctcgct

SEQ ID NO: 5784663 - DNA, 25 bp, Homo sapien
cacagcccggctgaaggcagccttt

SEQ ID NO: 5784664 - DNA, 25 bp, Homo sapien
gcccagcacagcctccatgatctgc

SEQ ID NO: 5784665 - DNA, 25 bp, Homo sapien
tgccacacatagatcttgaagccac

SEQ ID NO: 5784666 - DNA, 25 bp, Homo sapien
cagtggcagacacgtgcttcctccc

SEQ ID NO: 5784667 - DNA, 25 bp, Homo sapien
agatcttgaagccaccctggtccag

SEQ ID NO: 5784668 - DNA, 25 bp, Homo sapien
gatcattctctgagctgtcctggga

SEQ ID NO: 5784669 - DNA, 25 bp, Homo sapien
gcctggatgaagcccacagcccggc

SEQ ID NO: 5784670 - DNA, 25 bp, Homo sapien
tcgtcctgtaggcgctgctggaagg

SEQ ID NO: 5784671 - DNA, 25 bp, Homo sapien
agttgttgacttctgctgttatctc

SEQ ID NO: 5784672 - DNA, 25 bp, Homo sapien
acattggccttctgcagctggttga

SEQ ID NO: 5784673 - DNA, 25 bp, Homo sapien
ggctctgggggacgtggaggatgac

SEQ ID NO: 5784674 - DNA, 25 bp, Homo sapien
cccttggcctggatgaagcccacag

SEQ ID NO: 5784675 - DNA, 25 bp, Homo sapien
gtgcatcagttgttcccggcgcagg

SEQ ID NO: 5784676 - DNA, 25 bp, Homo sapien
cacgtggccatgctgtagaattcct

SEQ ID NO: 5784677 - DNA, 25 bp, Homo sapien
tggctacctgtacaacttgctcagt

SEQ ID NO: 5784678 - DNA, 25 bp, Homo sapien
cgagcttctggttcctgcgccgctt

SEQ ID NO: 5784679 - DNA, 25 bp, Homo sapien
tcgggtaccggcaccatcttccggt

SEQ ID NO: 5784680 - DNA, 25 bp, Homo sapien
caggatgtagaagtcctcctcctgc

SEQ ID NO: 5784681 - DNA, 25 bp, Homo sapien
cccaggccaccgcctccttccactc

SEQ ID NO: 5784682 - DNA, 25 bp, Homo sapien
cccaagccacaggaagatctcctgc

SEQ ID NO: 5784683 - DNA, 25 bp, Homo sapien
ggggtccaggggataggggcagtcg

SEQ ID NO: 5784684 - DNA, 25 bp, Homo sapien
aaagcctctgaggggagtggaagca

SEQ ID NO: 5784685 - DNA, 25 bp, Homo sapien
gctgacggagctgctggttctgctg

SEQ ID NO: 5784686 - DNA, 25 bp, Homo sapien
gcggaagtagctgcagaagcagtcg

SEQ ID NO: 5784687 - DNA, 25 bp, Homo sapien
catgctcctgtactaggacgccacc

SEQ ID NO: 5784688 - DNA, 25 bp, Homo sapien
tctggatagccgcaagttgttgact

SEQ ID NO: 5784689 - DNA, 25 bp, Homo sapien
atgtactggacacggcccagcctct

SEQ ID NO: 5784690 - DNA, 25 bp, Homo sapien
cacagctgtccatgacgcttggggt

SEQ ID NO: 5784691 - DNA, 25 bp, Homo sapien
ccggcaccatcttccggttctcaga

SEQ ID NO: 5784692 - DNA, 25 bp, Homo sapien
aagccagcccccgagccttctcaga

SEQ ID NO: 5784693 - DNA, 25 bp, Homo sapien
tgcggcccagcacagcctccatgat

SEQ ID NO: 5784694 - DNA, 25 bp, Homo sapien
gaagaaccccacttctgcgaggacc

SEQ ID NO: 5784695 - DNA, 25 bp, Homo sapien
ctctggcaggtcctcaacagcctgg

SEQ ID NO: 5784696 - DNA, 25 bp, Homo sapien
tccacgtggccatgctgtagaattc

SEQ ID NO: 5784697 - DNA, 25 bp, Homo sapien
catggtacaggcgaacattggcctt

SEQ ID NO: 5784698 - DNA, 25 bp, Homo sapien
ttggtgtaggtcgggtagcccttgg

SEQ ID NO: 5784699 - DNA, 25 bp, Homo sapien
acacgcagaggatgaccaaaagcct

SEQ ID NO: 5784700 - DNA, 25 bp, Homo sapien
ctgaagaaccccacttctgcgagga

SEQ ID NO: 5784701 - DNA, 25 bp, Homo sapien
gctgcctccacgtggccatgctgta

SEQ ID NO: 5784702 - DNA, 25 bp, Homo sapien
tcctccctttgatgtgcagcagtcg

SEQ ID NO: 5784703 - DNA, 25 bp, Homo sapien
tcccgggcggaagtagctgcagaag

SEQ ID NO: 5784704 - DNA, 25 bp, Homo sapien
cacgttggtgtaggtcgggtagccc

SEQ ID NO: 5784705 - DNA, 25 bp, Homo sapien
tgctgccgggctgccatccaccact

SEQ ID NO: 5784706 - DNA, 25 bp, Homo sapien
ctggatgaagcccacagcccggctg

SEQ ID NO: 5784707 - DNA, 25 bp, Homo sapien
gaggtcagatgctaggcctcccttc

SEQ ID NO: 5784708 - DNA, 25 bp, Homo sapien
cagctggttgatatccttgctgggc

SEQ ID NO: 5784709 - DNA, 25 bp, Homo sapien
tgcctccacgtggccatgctgtaga

SEQ ID NO: 5784710 - DNA, 25 bp, Homo sapien
ctgttccaggagagctccacctcag

SEQ ID NO: 5784711 - DNA, 25 bp, Homo sapien
gcattgtaagtatgttggggtccag

SEQ ID NO: 5784712 - DNA, 25 bp, Homo sapien
tggaaatgacagtgaccaccacccg

SEQ ID NO: 5784713 - DNA, 25 bp, Homo sapien
gagaccgacacctggctacctgtac

SEQ ID NO: 5784714 - DNA, 25 bp, Homo sapien
ccgtgccatctcacgctgatcacca

SEQ ID NO: 5784715 - DNA, 25 bp, Homo sapien
aattcctccttggatttcccaaaga

SEQ ID NO: 5784716 - DNA, 25 bp, Homo sapien
ctagttcctcagcgttgctgttcag

SEQ ID NO: 5784717 - DNA, 25 bp, Homo sapien
atccttgctgggcgtggcggcacgc

SEQ ID NO: 5784718 - DNA, 25 bp, Homo sapien
cgggctgcctgtgtaagtcctggat

SEQ ID NO: 5784719 - DNA, 25 bp, Homo sapien
gcccttcccaaaccagaggtagcag

SEQ ID NO: 5784720 - DNA, 25 bp, Homo sapien
cgtggctggaagctggggacctcct

SEQ ID NO: 5784721 - DNA, 25 bp, Homo sapien
gcctcgcggtgcagcacggtctggc

SEQ ID NO: 5784722 - DNA, 25 bp, Homo sapien
agcactcaaacagtcgtggctggaa

SEQ ID NO: 5784723 - DNA, 25 bp, Homo sapien
tcagggagcctcttgttgctggggt

SEQ ID NO: 5784724 - DNA, 25 bp, Homo sapien
gtagcagttgcctgcacacagctgt

SEQ ID NO: 5784725 - DNA, 25 bp, Homo sapien
gtgttgtggctgtcagtgccttgca

SEQ ID NO: 5784726 - DNA, 25 bp, Homo sapien
tgtagatgattcccgggcggaagta

SEQ ID NO: 5784727 - DNA, 25 bp, Homo sapien
aagaaccatccaatgaaggtgggag

SEQ ID NO: 5784728 - DNA, 25 bp, Homo sapien
cgctaacttaggctgggtgtgcagc

SEQ ID NO: 5784729 - DNA, 25 bp, Homo sapien
ggagcctcttgttgctggggtaggg

SEQ ID NO: 5784730 - DNA, 25 bp, Homo sapien
tgacacgcagaggatgaccaaaagc

SEQ ID NO: 5784731 - DNA, 25 bp, Homo sapien
agctgctggttctgctgccagccga

SEQ ID NO: 5784732 - DNA, 25 bp, Homo sapien
gggggctcgctgcccatggtcacat

SEQ ID NO: 5784733 - DNA, 25 bp, Homo sapien
ggcccttgctgatgtccatcgcagg

SEQ ID NO: 5784734 - DNA, 25 bp, Homo sapien
ggtccagcaggaagatgtcaccctt

SEQ ID NO: 5784735 - DNA, 25 bp, Homo sapien
tgttgctggggtagggggcccggcc

SEQ ID NO: 5784736 - DNA, 25 bp, Homo sapien
atgtggaggcctccctgcatgcctg

SEQ ID NO: 5784737 - DNA, 25 bp, Homo sapien
tccttggatttcccaaagatatctt

SEQ ID NO: 5784738 - DNA, 25 bp, Homo sapien
tggctagtccacttgtaggggtccc

SEQ ID NO: 5784739 - DNA, 25 bp, Homo sapien
agaggtagcagacgctggctgtgac

SEQ ID NO: 5784740 - DNA, 25 bp, Homo sapien
gcctgggaggcccttgctgatgtcc

SEQ ID NO: 5784741 - DNA, 25 bp, Homo sapien
atcttggaagtcagagtctgagaga

SEQ ID NO: 5784742 - DNA, 25 bp, Homo sapien
gatgaccaaaagcctctgaggggag

SEQ ID NO: 5784743 - DNA, 25 bp, Homo sapien
ttctgctgttatctcagagatggtt

SEQ ID NO: 5784744 - DNA, 25 bp, Homo sapien
aacagccagagttctcaggctggag

SEQ ID NO: 5784745 - DNA, 25 bp, Homo sapien
cgttgctgttcagggcctcaatctc

SEQ ID NO: 5784746 - DNA, 25 bp, Homo sapien
cctccctgctgggtgagtcttcagg

SEQ ID NO: 5784747 - DNA, 25 bp, Homo sapien
agcccccgagccttctcagaaatgc

SEQ ID NO: 5784748 - DNA, 25 bp, Homo sapien
cctccttccactcacttgcagcttc

SEQ ID NO: 5784749 - DNA, 25 bp, Homo sapien
tccacgttggtgtaggtcgggtagc

SEQ ID NO: 5784750 - DNA, 25 bp, Homo sapien
aacagtcgtggctggaagctgggga

SEQ ID NO: 5784751 - DNA, 25 bp, Homo sapien
gcttttactgacacgcagaggatga

SEQ ID NO: 5784752 - DNA, 25 bp, Homo sapien
tcgttcaccacctccacgttggtgt

SEQ ID NO: 5784753 - DNA, 25 bp, Homo sapien
ctgtaggtcaaagccagcccccgag

SEQ ID NO: 5784754 - DNA, 25 bp, Homo sapien
tcttgttgctggggtagggggcccg

SEQ ID NO: 5784755 - DNA, 25 bp, Homo sapien
cctcatcatccaccacaccaatctg

SEQ ID NO: 5784756 - DNA, 25 bp, Homo sapien
cagcccttcccaaaccagaggtagc

SEQ ID NO: 5784757 - DNA, 25 bp, Homo sapien
tgagctgggccgctaacttaggctg

SEQ ID NO: 5784758 - DNA, 25 bp, Homo sapien
ggctggagcactcaaacagtcgtgg

SEQ ID NO: 5784759 - DNA, 25 bp, Homo sapien
ccacccgtgccatctcacgctgatc

SEQ ID NO: 5784760 - DNA, 25 bp, Homo sapien
ccctctggcaggtcctcaacagcct

SEQ ID NO: 5784761 - DNA, 25 bp, Homo sapien
tccaggatgtagaagtcctcctcct

SEQ ID NO: 5784762 - DNA, 25 bp, Homo sapien
acgcagaggatgaccaaaagcctct

SEQ ID NO: 5784763 - DNA, 25 bp, Homo sapien
ttgtaggggtcccaagtgaagaacc

SEQ ID NO: 5784764 - DNA, 25 bp, Homo sapien
caagaagatgtcactggagttgagg

SEQ ID NO: 5784765 - DNA, 25 bp, Homo sapien
cgtccaccatcctgagctgggccgc

SEQ ID NO: 5784766 - DNA, 25 bp, Homo sapien
agctctctcctggaagatcaccagc

SEQ ID NO: 5784767 - DNA, 25 bp, Homo sapien
ccacttccttgtgggacgggtggct

SEQ ID NO: 5784768 - DNA, 25 bp, Homo sapien
acttgcagcttccccaagccacagg

SEQ ID NO: 5784769 - DNA, 25 bp, Homo sapien
ccatatgtggaggcctccctgcatg

SEQ ID NO: 5784770 - DNA, 25 bp, Homo sapien
acccgtgccatctcacgctgatcac

SEQ ID NO: 5784771 - DNA, 25 bp, Homo sapien
gtgggaggctcatggccctgcttga

SEQ ID NO: 5784772 - DNA, 25 bp, Homo sapien
ctgtcccggaggctgtaggtcaaag

SEQ ID NO: 5784773 - DNA, 25 bp, Homo sapien
catggtcctggtgttgtggctgtca

SEQ ID NO: 5784774 - DNA, 25 bp, Homo sapien
ctcctccctgctgggtgagtcttca

SEQ ID NO: 5784775 - DNA, 25 bp, Homo sapien
cctgcacacagctgtccatgacgct

SEQ ID NO: 5784776 - DNA, 25 bp, Homo sapien
gaaatgctggtcttgggcccattcc

SEQ ID NO: 5784777 - DNA, 25 bp, Homo sapien
cccaagtgaagaaccatccaatgaa

SEQ ID NO: 5784778 - DNA, 25 bp, Homo sapien
aggtccggggctttggcctcatcat

SEQ ID NO: 5784779 - DNA, 25 bp, Homo sapien
tgctggtcttgggcccattccactg

SEQ ID NO: 5784780 - DNA, 25 bp, Homo sapien
catgaggtccggggctttggcctca

SEQ ID NO: 5784781 - DNA, 25 bp, Homo sapien
ctgtgcacgaccaccaccacgttcc

SEQ ID NO: 5784782 - DNA, 25 bp, Homo sapien
cagcccatgtggctggagcactcaa

SEQ ID NO: 5784783 - DNA, 25 bp, Homo sapien
tgaccaccacccgtgccatctcacg

SEQ ID NO: 5784784 - DNA, 25 bp, Homo sapien
tcctggaggctagacatgcgtccct

SEQ ID NO: 5784785 - DNA, 25 bp, Homo sapien
gcagtcgctggatgttgaacaagtt

SEQ ID NO: 5784786 - DNA, 25 bp, Homo sapien
tacaacttgctcagtttccatggag

SEQ ID NO: 5784787 - DNA, 25 bp, Homo sapien
ccacaccaatctgtgcacgaccacc

SEQ ID NO: 5784788 - DNA, 25 bp, Homo sapien
agtgaagaaccatccaatgaaggtg

SEQ ID NO: 5784789 - DNA, 25 bp, Homo sapien
tgggagcccttgagggcctgcaggg

SEQ ID NO: 5784790 - DNA, 25 bp, Homo sapien
cacgtccagctttacatgaatcgat

SEQ ID NO: 5784791 - DNA, 25 bp, Homo sapien
agggatgaggcacgggctggcacct

SEQ ID NO: 5784792 - DNA, 25 bp, Homo sapien
ccgcacccgcctgcttcccgaccca

SEQ ID NO: 5784793 - DNA, 25 bp, Homo sapien
gccgctaacttaggctgggtgtgca

SEQ ID NO: 5784794 - DNA, 25 bp, Homo sapien
cctcctggctgaagaaccccacttc

SEQ ID NO: 5784795 - DNA, 25 bp, Homo sapien
caccagctggccctggaagatggcg

SEQ ID NO: 5784796 - DNA, 25 bp, Homo sapien
gcagggtccacgccctctggcaggt

SEQ ID NO: 5784797 - DNA, 25 bp, Homo sapien
cgggctgccatccaccacttccttg

SEQ ID NO: 5784798 - DNA, 25 bp, Homo sapien
ctctgggggacgtggaggatgacat

SEQ ID NO: 5784799 - DNA, 25 bp, Homo sapien
tccatggagcagggagtggtgccgc

SEQ ID NO: 5784800 - DNA, 25 bp, Homo sapien
ttatctcagagatggttgatgctgc

SEQ ID NO: 5784801 - DNA, 25 bp, Homo sapien
ccctgcgggcagggtccacgccctc

SEQ ID NO: 5784802 - DNA, 25 bp, Homo sapien
tctctgagctgtcctgggagccctt

SEQ ID NO: 5784803 - DNA, 25 bp, Homo sapien
acccgcctgcttcccgacccagtag

SEQ ID NO: 5784804 - DNA, 25 bp, Homo sapien
gcgtggccttcgggctctgggggac

SEQ ID NO: 5784805 - DNA, 25 bp, Homo sapien
tccctgctgggtgagtcttcaggta

SEQ ID NO: 5784806 - DNA, 25 bp, Homo sapien
ctgcctgtgtaagtcctggatgcac

SEQ ID NO: 5784807 - DNA, 25 bp, Homo sapien
tgttcagggcctcaatctcatccgc

SEQ ID NO: 5784808 - DNA, 25 bp, Homo sapien
aggccaggcaggaatatgggacgac

SEQ ID NO: 5784809 - DNA, 25 bp, Homo sapien
tgaggggagtggaagcagggcctcc

SEQ ID NO: 5784810 - DNA, 25 bp, Homo sapien
tcctggctgaagaaccccacttctg

SEQ ID NO: 5784811 - DNA, 25 bp, Homo sapien
gacatagcagtgttcctcaaaaaag

SEQ ID NO: 5784812 - DNA, 25 bp, Homo sapien
agggcctcccagaagtggggaggct

SEQ ID NO: 5784813 - DNA, 25 bp, Homo sapien
gaagatctcctgccaggtgtccagt

SEQ ID NO: 5784814 - DNA, 25 bp, Homo sapien
gaacattggccttctgcagctggtt

SEQ ID NO: 5784815 - DNA, 25 bp, Homo sapien
agtgaccaccacccgtgccatctca

SEQ ID NO: 5784816 - DNA, 25 bp, Homo sapien
cctccttggatttcccaaagatatc

SEQ ID NO: 5784817 - DNA, 25 bp, Homo sapien
gatgttgaacaagttggtctccaca

SEQ ID NO: 5784818 - DNA, 25 bp, Homo sapien
gggccacggcacctgccctgccatt

SEQ ID NO: 5784819 - DNA, 25 bp, Homo sapien
gtgcagcacggtctggccccccagc

SEQ ID NO: 5784820 - DNA, 25 bp, Homo sapien
ccttcgggctctgggggacgtggag

SEQ ID NO: 5784821 - DNA, 25 bp, Homo sapien
cctcgggtaccggcaccatcttccg

SEQ ID NO: 5784822 - DNA, 25 bp, Homo sapien
gtgtccagtaacatgatgtcatact

SEQ ID NO: 5784823 - DNA, 25 bp, Homo sapien
acaccaatctgtgcacgaccaccac

SEQ ID NO: 5784824 - DNA, 25 bp, Homo sapien
acttgtccaggtcctcctggctgaa

SEQ ID NO: 5784825 - DNA, 25 bp, Homo sapien
ttctcatagacatggtacaggcgaa

SEQ ID NO: 5784826 - DNA, 25 bp, Homo sapien
gcccttctcatagacatggtacagg

SEQ ID NO: 5784827 - DNA, 25 bp, Homo sapien
gtgccgccctctgctggaaactgct

SEQ ID NO: 5784828 - DNA, 25 bp, Homo sapien
cggccatctggatagccgcaagttg

SEQ ID NO: 5784829 - DNA, 25 bp, Homo sapien
ctgcttgaacgcggccgactcggcg

SEQ ID NO: 5784830 - DNA, 25 bp, Homo sapien
gtcgctggacgccccctgcgtggcc

SEQ ID NO: 5784831 - DNA, 25 bp, Homo sapien
gtgcacgaccaccaccacgttccct

SEQ ID NO: 5784832 - DNA, 25 bp, Homo sapien
tatccctcccgccgagcttctggtt

SEQ ID NO: 5784833 - DNA, 25 bp, Homo sapien
gaggcccttgctgatgtccatcgca

SEQ ID NO: 5784834 - DNA, 25 bp, Homo sapien
cgcagtggcctggtggccctgccat

SEQ ID NO: 5784835 - DNA, 25 bp, Homo sapien
gaaatgacagtgaccaccacccgtg

SEQ ID NO: 5784836 - DNA, 25 bp, Homo sapien
cagttgttcccggcgcaggcccccg

SEQ ID NO: 5784837 - DNA, 25 bp, Homo sapien
aggctggagaccgacacctggctac

SEQ ID NO: 5784838 - DNA, 25 bp, Homo sapien
tgacagtgaccaccacccgtgccat

SEQ ID NO: 5784839 - DNA, 25 bp, Homo sapien
cggcccagcacagcctccatgatct

SEQ ID NO: 5784840 - DNA, 25 bp, Homo sapien
cttgcctaggtccagcaggaagatg

SEQ ID NO: 5784841 - DNA, 25 bp, Homo sapien
ccagctggccctggaagatggcgag

SEQ ID NO: 5784842 - DNA, 25 bp, Homo sapien
cgccaccatacatgacatctagttc

SEQ ID NO: 5784843 - DNA, 25 bp, Homo sapien
acatgcttgaggtcagatgctaggc

SEQ ID NO: 5784844 - DNA, 25 bp, Homo sapien
aaccccacttctgcgaggaccaggc

SEQ ID NO: 5784845 - DNA, 25 bp, Homo sapien
cggaagagctgcttgaacgcggccg

SEQ ID NO: 5784846 - DNA, 25 bp, Homo sapien
ctgccataggtacaggatgtactgg

SEQ ID NO: 5784847 - DNA, 25 bp, Homo sapien
gtagaattcctccttggatttccca

SEQ ID NO: 5784848 - DNA, 25 bp, Homo sapien
tgtaagtatgttggggtccagggga

SEQ ID NO: 5784849 - DNA, 25 bp, Homo sapien
tctcacgctgatcaccattacagcc

SEQ ID NO: 5784850 - DNA, 25 bp, Homo sapien
ctcagtggcagacacgtgcttcctc

SEQ ID NO: 5784851 - DNA, 25 bp, Homo sapien
ggcacgggctggcacctccatggtc

SEQ ID NO: 5784852 - DNA, 25 bp, Homo sapien
ggtacaggatgtactggacacggcc

SEQ ID NO: 5784853 - DNA, 25 bp, Homo sapien
ttgctgggcgtggcggcacgcaggc

SEQ ID NO: 5784854 - DNA, 25 bp, Homo sapien
tcattcttcctggaaatgacagtga

SEQ ID NO: 5784855 - DNA, 25 bp, Homo sapien
tctggtatgtgtagagcacaaggta

SEQ ID NO: 5784856 - DNA, 25 bp, Homo sapien
tgtggtggatgctgactgccccttt

SEQ ID NO: 5784857 - DNA, 25 bp, Homo sapien
aagtgggggggctcgctgcccatgg

SEQ ID NO: 5784858 - DNA, 25 bp, Homo sapien
tccccagcattgtaagtatgttggg

SEQ ID NO: 5784859 - DNA, 25 bp, Homo sapien
gtcacccttattaaagctgttccag

SEQ ID NO: 5784860 - DNA, 25 bp, Homo sapien
ctgcctgcttttactgacacgcaga

SEQ ID NO: 5784861 - DNA, 25 bp, Homo sapien
gctggatgttgaacaagttggtctc

SEQ ID NO: 5784862 - DNA, 25 bp, Homo sapien
gccagagttctcaggctggagaccg

SEQ ID NO: 5784863 - DNA, 25 bp, Homo sapien
ggatgaagcccacagcccggctgaa

SEQ ID NO: 5784864 - DNA, 25 bp, Homo sapien
gctgctgccgggctgccatccacca

SEQ ID NO: 5784865 - DNA, 25 bp, Homo sapien
acgcggccgactcggcgccgtcgtt

SEQ ID NO: 5784866 - DNA, 25 bp, Homo sapien
tcccttcctgtagatgattcccggg

SEQ ID NO: 5784867 - DNA, 25 bp, Homo sapien
tacatgacatctagttcctcagcgt

SEQ ID NO: 5784868 - DNA, 25 bp, Homo sapien
ccgcagcgccctgcgcttccgcacc

SEQ ID NO: 5784869 - DNA, 25 bp, Homo sapien
cacaaggaacaacagccagagttct

SEQ ID NO: 5784870 - DNA, 25 bp, Homo sapien
gcccagcctctggtatgtgtagagc

SEQ ID NO: 5784871 - DNA, 25 bp, Homo sapien
gcccaccctgcggcccagcacagcc

SEQ ID NO: 5784872 - DNA, 25 bp, Homo sapien
cctgccgctgcctccacgtggccat

SEQ ID NO: 5784873 - DNA, 25 bp, Homo sapien
acctccaccttcccagagccgtcgt

SEQ ID NO: 5784874 - DNA, 25 bp, Homo sapien
cctggtgcatcagttgttcccggcg

SEQ ID NO: 5784875 - DNA, 25 bp, Homo sapien
agcgccctgcgcttccgcacccgcc

SEQ ID NO: 5784876 - DNA, 25 bp, Homo sapien
cgtccagctttacatgaatcgattt

SEQ ID NO: 5784877 - DNA, 25 bp, Homo sapien
atgaagcccacagcccggctgaagg

SEQ ID NO: 5784878 - DNA, 25 bp, Homo sapien
tccagctttacatgaatcgatttat

SEQ ID NO: 5784879 - DNA, 25 bp, Homo sapien
cccggcgcaggcccccgttgatcgt

SEQ ID NO: 5784880 - DNA, 25 bp, Homo sapien
ctgcttcccgacccagtagtgcagg

SEQ ID NO: 5784881 - DNA, 25 bp, Homo sapien
caggaatatgggacgacacaaggaa

SEQ ID NO: 5784882 - DNA, 25 bp, Homo sapien
agtccggaagagctgcttgaacgcg

SEQ ID NO: 5784883 - DNA, 25 bp, Homo sapien
ggtccacgccctctggcaggtcctc

SEQ ID NO: 5784884 - DNA, 25 bp, Homo sapien
aggtcaaagccagcccccgagcctt

SEQ ID NO: 5784885 - DNA, 25 bp, Homo sapien
gtcctggatgcaccacacctccacc

SEQ ID NO: 5784886 - DNA, 25 bp, Homo sapien
tcctcctgcagcaggtctttgccct

SEQ ID NO: 5784887 - DNA, 25 bp, Homo sapien
ggccgactcggcgccgtcgttcacc

SEQ ID NO: 5784888 - DNA, 25 bp, Homo sapien
tcccaaagatatcttggaagtcaga

SEQ ID NO: 5784889 - DNA, 25 bp, Homo sapien
gtgccatctcacgctgatcaccatt

SEQ ID NO: 5784890 - DNA, 25 bp, Homo sapien
ctttgatgtgcagcagtcgctggat

SEQ ID NO: 5784891 - DNA, 25 bp, Homo sapien
ccaaagatatcttggaagtcagagt

SEQ ID NO: 5784892 - DNA, 25 bp, Homo sapien
tccggaagagctgcttgaacgcggc

SEQ ID NO: 5784893 - DNA, 25 bp, Homo sapien
ctgtgaccagcaagaagatgtcact

SEQ ID NO: 5784894 - DNA, 25 bp, Homo sapien
ctttgcccttctcatagacatggta

SEQ ID NO: 5784895 - DNA, 25 bp, Homo sapien
cccgagccttctcagaaatgctggt

SEQ ID NO: 5784896 - DNA, 25 bp, Homo sapien
aatcgatttatccctcccgccgagc

SEQ ID NO: 5784897 - DNA, 25 bp, Homo sapien
cacggcacctgccctgccattgccc

SEQ ID NO: 5784898 - DNA, 25 bp, Homo sapien
gccgggctcctccctgctgggtgag

SEQ ID NO: 5784899 - DNA, 25 bp, Homo sapien
tgatcaccattacagcccttcccaa

SEQ ID NO: 5784900 - DNA, 25 bp, Homo sapien
acctcctcagggagcctcttgttgc

SEQ ID NO: 5784901 - DNA, 25 bp, Homo sapien
ggcctcccagaagtggggaggctcc

SEQ ID NO: 5784902 - DNA, 25 bp, Homo sapien
cagcccggctgaaggcagcctttct

SEQ ID NO: 5784903 - DNA, 25 bp, Homo sapien
cacctccatggtcctggtgttgtgg

SEQ ID NO: 5784904 - DNA, 25 bp, Homo sapien
gactcggcgccgtcgttcaccacct

SEQ ID NO: 5784905 - DNA, 25 bp, Homo sapien
acttggaaaagccttgtggtggatg

SEQ ID NO: 5784906 - DNA, 25 bp, Homo sapien
tcagcgttgctgttcagggcctcaa

SEQ ID NO: 5784907 - DNA, 25 bp, Homo sapien
ggctgccatccaccacttccttgtg

SEQ ID NO: 5784908 - DNA, 25 bp, Homo sapien
catccgcagtggcctggtggccctg

SEQ ID NO: 5784909 - DNA, 25 bp, Homo sapien
tccatggtgcccagctctctcctgg

SEQ ID NO: 5784910 - DNA, 25 bp, Homo sapien
caggcccccgttgatcgtggcgctg

SEQ ID NO: 5784911 - DNA, 25 bp, Homo sapien
cctggaagatcaccagctggccctg

SEQ ID NO: 5784912 - DNA, 25 bp, Homo sapien
caggctgcccaccctgcggcccagc

SEQ ID NO: 5784913 - DNA, 25 bp, Homo sapien
tcccagagccgtcgtccaccatcct

SEQ ID NO: 5784914 - DNA, 25 bp, Homo sapien
gttgcctgcacacagctgtccatga

SEQ ID NO: 5784915 - DNA, 25 bp, Homo sapien
attgcccggccatctggatagccgc

SEQ ID NO: 5784916 - DNA, 25 bp, Homo sapien
cttaggctgggtgtgcagcttgccc

SEQ ID NO: 5784917 - DNA, 25 bp, Homo sapien
gctggagaccgacacctggctacct

SEQ ID NO: 5784918 - DNA, 25 bp, Homo sapien
ctggcacctccatggtcctggtgtt

SEQ ID NO: 5784919 - DNA, 25 bp, Homo sapien
gatggcgaggaagtgggggggctcg

SEQ ID NO: 5784920 - DNA, 25 bp, Homo sapien
tcggactcgtggccctgcgcctcgc

SEQ ID NO: 5784921 - DNA, 25 bp, Homo sapien
caggatgtactggacacggcccagc

SEQ ID NO: 5784922 - DNA, 25 bp, Homo sapien
ccatcttccggttctcagagatcca

SEQ ID NO: 5784923 - DNA, 25 bp, Homo sapien
tgcccacgtccagctttacatgaat

SEQ ID NO: 5784924 - DNA, 25 bp, Homo sapien
tgcttcctccctttgatgtgcagca

SEQ ID NO: 5784925 - DNA, 25 bp, Homo sapien
catgaatcgatttatccctcccgcc

SEQ ID NO: 5784926 - DNA, 25 bp, Homo sapien
gtggcagacacgtgcttcctccctt

SEQ ID NO: 5784927 - DNA, 25 bp, Homo sapien
cactcaaacagtcgtggctggaagc

SEQ ID NO: 5784928 - DNA, 25 bp, Homo sapien
agtcagagtctgagagatagaactc

SEQ ID NO: 5784929 - DNA, 25 bp, Homo sapien
cagcaggtctttgcccttctcatag

SEQ ID NO: 5784930 - DNA, 25 bp, Homo sapien
accaatctgtgcacgaccaccacca

SEQ ID NO: 5784931 - DNA, 25 bp, Homo sapien
caagtccggaagagctgcttgaacg

SEQ ID NO: 5784932 - DNA, 25 bp, Homo sapien
tctcagaccaagtccggaagagctg

SEQ ID NO: 5784933 - DNA, 25 bp, Homo sapien
gctggaaggcctccgcagcgccctg

SEQ ID NO: 5784934 - DNA, 25 bp, Homo sapien
tttatgggctgcctgcttttactga

SEQ ID NO: 5784935 - DNA, 25 bp, Homo sapien
gctagtccacttgtaggggtcccaa

SEQ ID NO: 5784936 - DNA, 25 bp, Homo sapien
ctcctgtactaggacgccaccatac

SEQ ID NO: 5784937 - DNA, 25 bp, Homo sapien
gccagccgacttggggcttcgcacc

SEQ ID NO: 5784938 - DNA, 25 bp, Homo sapien
caggcaggaatatgggacgacacaa

SEQ ID NO: 5784939 - DNA, 25 bp, Homo sapien
tgaatcgatttatccctcccgccga

SEQ ID NO: 5784940 - DNA, 25 bp, Homo sapien
ttcccgacccagtagtgcaggtcgc

SEQ ID NO: 5784941 - DNA, 25 bp, Homo sapien
ctgccatccaccacttccttgtggg

SEQ ID NO: 5784942 - DNA, 25 bp, Homo sapien
tggtatgtgtagagcacaaggtagc

SEQ ID NO: 5784943 - DNA, 25 bp, Homo sapien
gcctgcttcccgacccagtagtgca

SEQ ID NO: 5784944 - DNA, 25 bp, Homo sapien
tgcagctggttgatatccttgctgg

SEQ ID NO: 5784945 - DNA, 25 bp, Homo sapien
taggcctcccttcctgtagatgatt

SEQ ID NO: 5784946 - DNA, 25 bp, Homo sapien
ttctcctgccgctgcctccacgtgg

SEQ ID NO: 5784947 - DNA, 25 bp, Homo sapien
ctgcgccgcttctcagaccaagtcc

SEQ ID NO: 5784948 - DNA, 25 bp, Homo sapien
agcagacgctggctgtgaccagcaa

SEQ ID NO: 5784949 - DNA, 25 bp, Homo sapien
gaagtcagagtctgagagatagaac

SEQ ID NO: 5784950 - DNA, 25 bp, Homo sapien
ctgccagccgacttggggcttcgca

SEQ ID NO: 5784951 - DNA, 25 bp, Homo sapien
tgcatgaggtccggggctttggcct

SEQ ID NO: 5784952 - DNA, 25 bp, Homo sapien
gccaccctggtccaggatgtagaag

SEQ ID NO: 5784953 - DNA, 25 bp, Homo sapien
gctgttatctcagagatggttgatg

SEQ ID NO: 5784954 - DNA, 25 bp, Homo sapien
ccacacctccaccttcccagagccg

SEQ ID NO: 5784955 - DNA, 25 bp, Homo sapien
tagatgattcccgggcggaagtagc

SEQ ID NO: 5784956 - DNA, 25 bp, Homo sapien
tttccatggagcagggagtggtgcc

SEQ ID NO: 5784957 - DNA, 25 bp, Homo sapien
agccgtcgtccaccatcctgagctg

SEQ ID NO: 5784958 - DNA, 25 bp, Homo sapien
cagccagagttctcaggctggagac

SEQ ID NO: 5784959 - DNA, 25 bp, Homo sapien
gccttgtggtggatgctgactgccc

SEQ ID NO: 5784960 - DNA, 25 bp, Homo sapien
ggtccaggatgtagaagtcctcctc

SEQ ID NO: 5784961 - DNA, 25 bp, Homo sapien
cgtggcggcacgcaggctgcccacc

SEQ ID NO: 5784962 - DNA, 25 bp, Homo sapien
atcagttgttcccggcgcaggcccc

SEQ ID NO: 5784963 - DNA, 25 bp, Homo sapien
tctgagagatagaactccctgcggg

SEQ ID NO: 5784964 - DNA, 25 bp, Homo sapien
atgcttgaggtcagatgctaggcct

SEQ ID NO: 5784965 - DNA, 25 bp, Homo sapien
ggcgtggcggcacgcaggctgccca

SEQ ID NO: 5784966 - DNA, 25 bp, Homo sapien
tccttccactcacttgcagcttccc

SEQ ID NO: 5784967 - DNA, 25 bp, Homo sapien
tgggtgtggccgggctcctccctgc

SEQ ID NO: 5784968 - DNA, 25 bp, Homo sapien
gctgggcgtggcggcacgcaggctg

SEQ ID NO: 5784969 - DNA, 25 bp, Homo sapien
gtggctggagcactcaaacagtcgt

SEQ ID NO: 5784970 - DNA, 25 bp, Homo sapien
gcttgaggtcagatgctaggcctcc

SEQ ID NO: 5784971 - DNA, 25 bp, Homo sapien
actgcccctttccatggtgcccagc

SEQ ID NO: 5784972 - DNA, 25 bp, Homo sapien
tcacgctgatcaccattacagccct

SEQ ID NO: 5784973 - DNA, 25 bp, Homo sapien
ccaccgcctccttccactcacttgc

SEQ ID NO: 5784974 - DNA, 25 bp, Homo sapien
tccaccacaccaatctgtgcacgac

SEQ ID NO: 5784975 - DNA, 25 bp, Homo sapien
agaggatgaccaaaagcctctgagg

SEQ ID NO: 5784976 - DNA, 25 bp, Homo sapien
ttttactgacacgcagaggatgacc

SEQ ID NO: 5784977 - DNA, 25 bp, Homo sapien
accaagtccggaagagctgcttgaa

SEQ ID NO: 5784978 - DNA, 25 bp, Homo sapien
gcagaggatgaccaaaagcctctga

SEQ ID NO: 5784979 - DNA, 25 bp, Homo sapien
gtgcagcttgcccacgtccagcttt

SEQ ID NO: 5784980 - DNA, 25 bp, Homo sapien
ggtcagatgctaggcctcccttcct

SEQ ID NO: 5784981 - DNA, 25 bp, Homo sapien
catccaccacttccttgtgggacgg

SEQ ID NO: 5784982 - DNA, 25 bp, Homo sapien
agccttctcagaaatgctggtcttg

SEQ ID NO: 5784983 - DNA, 25 bp, Homo sapien
cctgcagcaggtctttgcccttctc

SEQ ID NO: 5784984 - DNA, 25 bp, Homo sapien
tctctcctggaggctagacatgcgt

SEQ ID NO: 5784985 - DNA, 25 bp, Homo sapien
tgctttttctcctgccgctgcctcc

SEQ ID NO: 5784986 - DNA, 25 bp, Homo sapien
gtcaaagccagcccccgagccttct

SEQ ID NO: 5784987 - DNA, 25 bp, Homo sapien
cggcgcaggcccccgttgatcgtgg

SEQ ID NO: 5784988 - DNA, 25 bp, Homo sapien
gggaggcccttgctgatgtccatcg

SEQ ID NO: 5784989 - DNA, 25 bp, Homo sapien
aggcctccgcagcgccctgcgcttc

SEQ ID NO: 5784990 - DNA, 25 bp, Homo sapien
ggtcgggtagcccttggcctggatg

SEQ ID NO: 5784991 - DNA, 25 bp, Homo sapien
atcatccaccacaccaatctgtgca

SEQ ID NO: 5784992 - DNA, 25 bp, Homo sapien
ccattgcccggccatctggatagcc

SEQ ID NO: 5784993 - DNA, 25 bp, Homo sapien
ccctgcgtggccttcgggctctggg

SEQ ID NO: 5784994 - DNA, 25 bp, Homo sapien
ctaggacgccaccatacatgacatc

SEQ ID NO: 5784995 - DNA, 25 bp, Homo sapien
ggcccccgttgatcgtggcgctggt

SEQ ID NO: 5784996 - DNA, 25 bp, Homo sapien
gcagcttgcccacgtccagctttac

SEQ ID NO: 5784997 - DNA, 25 bp, Homo sapien
gtagcagacgctggctgtgaccagc

SEQ ID NO: 5784998 - DNA, 25 bp, Homo sapien
tggttcctgcgccgcttctcagacc

SEQ ID NO: 5784999 - DNA, 25 bp, Homo sapien
cgtccctgccacacatagatcttga

SEQ ID NO: 5785000 - DNA, 25 bp, Homo sapien
ctaacttaggctgggtgtgcagctt

SEQ ID NO: 5785001 - DNA, 25 bp, Homo sapien
cccctttccatggtgcccagctctc

SEQ ID NO: 5785002 - DNA, 25 bp, Homo sapien
tggttgatgctgctgccgggctgcc

SEQ ID NO: 5785003 - DNA, 25 bp, Homo sapien
gacatgcgtccctgccacacataga

SEQ ID NO: 5785004 - DNA, 25 bp, Homo sapien
tcgcaccagatcattctctgagctg

SEQ ID NO: 5785005 - DNA, 25 bp, Homo sapien
gtgtaagtcctggatgcaccacacc

SEQ ID NO: 5785006 - DNA, 25 bp, Homo sapien
acccagtagtgcaggtcgctggacg

SEQ ID NO: 5785007 - DNA, 25 bp, Homo sapien
ttcgggctctgggggacgtggagga

SEQ ID NO: 5785008 - DNA, 25 bp, Homo sapien
ctcatggccctgcttgaccagcacg

SEQ ID NO: 5785009 - DNA, 25 bp, Homo sapien
cccggccatctggatagccgcaagt

SEQ ID NO: 5785010 - DNA, 25 bp, Homo sapien
gggcccggcctcccagggcctccca

SEQ ID NO: 5785011 - DNA, 25 bp, Homo sapien
cgtggccatgctgtagaattcctcc

SEQ ID NO: 5785012 - DNA, 25 bp, Homo sapien
cttgcccacgtccagctttacatga

SEQ ID NO: 5785013 - DNA, 25 bp, Homo sapien
tggaggatgacatagcagtgttcct

SEQ ID NO: 5785014 - DNA, 25 bp, Homo sapien
acaacagccagagttctcaggctgg

SEQ ID NO: 5785015 - DNA, 25 bp, Homo sapien
gcgaggaccaggcagcccatgtggc

SEQ ID NO: 5785016 - DNA, 25 bp, Homo sapien
tgcagcaggtctttgcccttctcat

SEQ ID NO: 5785017 - DNA, 25 bp, Homo sapien
gctgctttttctcctgccgctgcct

SEQ ID NO: 5785018 - DNA, 25 bp, Homo sapien
gcgccgtcgttcaccacctccacgt

SEQ ID NO: 5785019 - DNA, 25 bp, Homo sapien
ggtccacgggctgcctgtgtaagtc

SEQ ID NO: 5785020 - DNA, 25 bp, Homo sapien
gggggggctcgctgcccatggtcac

SEQ ID NO: 5785021 - DNA, 25 bp, Homo sapien
cccagctcgtcctgtaggcgctgct

SEQ ID NO: 5785022 - DNA, 25 bp, Homo sapien
ccagctctctcctggaagatcacca

SEQ ID NO: 5785023 - DNA, 25 bp, Homo sapien
aggcctccctgcatgcctgggaggc

SEQ ID NO: 5785024 - DNA, 25 bp, Homo sapien
ctccacatgcttgaggtcagatgct

SEQ ID NO: 5785025 - DNA, 25 bp, Homo sapien
agtcggactcgtggccctgcgcctc

SEQ ID NO: 5785026 - DNA, 25 bp, Homo sapien
catggagcagggagtggtgccgccc

SEQ ID NO: 5785027 - DNA, 25 bp, Homo sapien
tgaccaaaagcctctgaggggagtg

SEQ ID NO: 5785028 - DNA, 25 bp, Homo sapien
tcttgggcccattccactgaatcat

SEQ ID NO: 5785029 - DNA, 25 bp, Homo sapien
tgctgatgtccatcgcaggccaggc

SEQ ID NO: 5785030 - DNA, 25 bp, Homo sapien
agggcctgcagggccacggcacctg

SEQ ID NO: 5785031 - DNA, 25 bp, Homo sapien
cagttgcctgcacacagctgtccat

SEQ ID NO: 5785032 - DNA, 25 bp, Homo sapien
ggcctggtggccctgccataggtac

SEQ ID NO: 5785033 - DNA, 25 bp, Homo sapien
cagcagtcgctggatgttgaacaag

SEQ ID NO: 5785034 - DNA, 25 bp, Homo sapien
gatgattcccgggcggaagtagctg

SEQ ID NO: 5785035 - DNA, 25 bp, Homo sapien
agcctctgaggggagtggaagcagg

SEQ ID NO: 5785036 - DNA, 25 bp, Homo sapien
gcacccgcctgcttcccgacccagt

SEQ ID NO: 5785037 - DNA, 25 bp, Homo sapien
gtggccctgcgcctcgcggtgcagc

SEQ ID NO: 5785038 - DNA, 25 bp, Homo sapien
aagtggggaggctcctgaccctcca

SEQ ID NO: 5785039 - DNA, 25 bp, Homo sapien
ccacttgtaggggtcccaagtgaag

SEQ ID NO: 5785040 - DNA, 25 bp, Homo sapien
ccccccagctcgtcctgtaggcgct

SEQ ID NO: 5785041 - DNA, 25 bp, Homo sapien
ccctggtccaggatgtagaagtcct

SEQ ID NO: 5785042 - DNA, 25 bp, Homo sapien
actgacacgcagaggatgaccaaaa

SEQ ID NO: 5785043 - DNA, 25 bp, Homo sapien
agagcacaaggtagcagttgcctgc

SEQ ID NO: 5785044 - DNA, 25 bp, Homo sapien
ttcccggcgcaggcccccgttgatc

SEQ ID NO: 5785045 - DNA, 25 bp, Homo sapien
cacatgctcctgtactaggacgcca

SEQ ID NO: 5785046 - DNA, 25 bp, Homo sapien
agcaccgtttcctcattcttcctgg

SEQ ID NO: 5785047 - DNA, 25 bp, Homo sapien
cagggcctcaatctcatccgcagtg

SEQ ID NO: 5785048 - DNA, 25 bp, Homo sapien
cagtggcctggtggccctgccatag

SEQ ID NO: 5785049 - DNA, 25 bp, Homo sapien
ttgttgacttctgctgttatctcag

SEQ ID NO: 5785050 - DNA, 25 bp, Homo sapien
ctcctgccaggtgtccagtaacatg

SEQ ID NO: 5785051 - DNA, 25 bp, Homo sapien
gagcagggagtggtgccgccctctg

SEQ ID NO: 5785052 - DNA, 25 bp, Homo sapien
cgcaagttgttgacttctgctgtta

SEQ ID NO: 5785053 - DNA, 25 bp, Homo sapien
ctgtcctgggagcccttgagggcct

SEQ ID NO: 5785054 - DNA, 25 bp, Homo sapien
agtatgttggggtccaggggatagg

SEQ ID NO: 5785055 - DNA, 25 bp, Homo sapien
ttggcctcatcatccaccacaccaa

SEQ ID NO: 5785056 - DNA, 25 bp, Homo sapien
cctgggagcccttgagggcctgcag

SEQ ID NO: 5785057 - DNA, 25 bp, Homo sapien
ggggctttggcctcatcatccacca

SEQ ID NO: 5785058 - DNA, 25 bp, Homo sapien
caaggaacaacagccagagttctca

SEQ ID NO: 5785059 - DNA, 25 bp, Homo sapien
ggaagcagggcctccccagcattgt

SEQ ID NO: 5785060 - DNA, 25 bp, Homo sapien
aactgctcccgcgccttcgccctgc

SEQ ID NO: 5785061 - DNA, 25 bp, Homo sapien
cctggtgttgtggctgtcagtgcct

SEQ ID NO: 5785062 - DNA, 25 bp, Homo sapien
cctgcagggccacggcacctgccct

SEQ ID NO: 5785063 - DNA, 25 bp, Homo sapien
cctctggtatgtgtagagcacaagg

SEQ ID NO: 5785064 - DNA, 25 bp, Homo sapien
tgacgcttggggtccacgggctgcc

SEQ ID NO: 5785065 - DNA, 25 bp, Homo sapien
agatgtcacccttattaaagctgtt

SEQ ID NO: 5785066 - DNA, 25 bp, Homo sapien
cagctcgtcctgtaggcgctgctgg

SEQ ID NO: 5785067 - DNA, 25 bp, Homo sapien
tggccatgctgtagaattcctcctt

SEQ ID NO: 5785068 - DNA, 25 bp, Homo sapien
caggagagctccacctcagtggcag

SEQ ID NO: 5785069 - DNA, 25 bp, Homo sapien
ctgtgtaagtcctggatgcaccaca

SEQ ID NO: 5785070 - DNA, 25 bp, Homo sapien
cgccctgcgcttccgcacccgcctg

SEQ ID NO: 5785071 - DNA, 25 bp, Homo sapien
cttccggttctcagagatccatatg

SEQ ID NO: 5785072 - DNA, 25 bp, Homo sapien
accagcacgatgggtgtggccgggc

SEQ ID NO: 5785073 - DNA, 25 bp, Homo sapien
aggaagatgtcacccttattaaagc

SEQ ID NO: 5785074 - DNA, 25 bp, Homo sapien
caacagcctggtgcatcagttgttc

SEQ ID NO: 5785075 - DNA, 25 bp, Homo sapien
tgtccatcgcaggccaggcaggaat

SEQ ID NO: 5785076 - DNA, 25 bp, Homo sapien
ggaggctcctgaccctccagcaccg

SEQ ID NO: 5785077 - DNA, 25 bp, Homo sapien
ctgcatgcctgggaggcccttgctg

SEQ ID NO: 5785078 - DNA, 25 bp, Homo sapien
tgacggagctgctggttctgctgcc

SEQ ID NO: 5785079 - DNA, 25 bp, Homo sapien
atcaccagctggccctggaagatgg

SEQ ID NO: 5785080 - DNA, 25 bp, Homo sapien
gtgcaggtcgctggacgccccctgc

SEQ ID NO: 5785081 - DNA, 25 bp, Homo sapien
gcagcacggtctggccccccagctc

SEQ ID NO: 5785082 - DNA, 25 bp, Homo sapien
cggttctcagagatccatatgtgga

SEQ ID NO: 5785083 - DNA, 25 bp, Homo sapien
gttcagaagaagcccagctgctttt

SEQ ID NO: 5785084 - DNA, 25 bp, Homo sapien
gtggccctgccataggtacaggatg

SEQ ID NO: 5785085 - DNA, 25 bp, Homo sapien
atcctgagctgggccgctaacttag

SEQ ID NO: 5785086 - DNA, 25 bp, Homo sapien
attacagcccttcccaaaccagagg

SEQ ID NO: 5785087 - DNA, 25 bp, Homo sapien
cctcagcgttgctgttcagggcctc

SEQ ID NO: 5785088 - DNA, 25 bp, Homo sapien
ggtgctgctgacggagctgctggtt

SEQ ID NO: 5785089 - DNA, 25 bp, Homo sapien
cgctgctggaaggcctccgcagcgc

SEQ ID NO: 5785090 - DNA, 25 bp, Homo sapien
ggcttcgcaccagatcattctctga

SEQ ID NO: 5785091 - DNA, 25 bp, Homo sapien
ccagcctctggtatgtgtagagcac

SEQ ID NO: 5785092 - DNA, 25 bp, Homo sapien
ggaggctagacatgcgtccctgcca

SEQ ID NO: 5785093 - DNA, 25 bp, Homo sapien
gaaggtgggaggctcatggccctgc

SEQ ID NO: 5785094 - DNA, 25 bp, Homo sapien
gccgcaagttgttgacttctgctgt

SEQ ID NO: 5785095 - DNA, 25 bp, Homo sapien
agaccaagtccggaagagctgcttg

SEQ ID NO: 5785096 - DNA, 25 bp, Homo sapien
tttttatgggctgcctgcttttact

SEQ ID NO: 5785097 - DNA, 25 bp, Homo sapien
gttgatgctgctgccgggctgccat

SEQ ID NO: 5785098 - DNA, 25 bp, Homo sapien
tgttatctcagagatggttgatgct

SEQ ID NO: 5785099 - DNA, 25 bp, Homo sapien
cttctggttcctgcgccgcttctca

SEQ ID NO: 5785100 - DNA, 25 bp, Homo sapien
tccaggagagctccacctcagtggc

SEQ ID NO: 5785101 - DNA, 25 bp, Homo sapien
acacctccaccttcccagagccgtc

SEQ ID NO: 5785102 - DNA, 25 bp, Homo sapien
gatagccgcaagttgttgacttctg

SEQ ID NO: 5785103 - DNA, 25 bp, Homo sapien
catggtcacatgctcctgtactagg

SEQ ID NO: 5785104 - DNA, 25 bp, Homo sapien
gcggcacgcaggctgcccaccctgc

SEQ ID NO: 5785105 - DNA, 25 bp, Homo sapien
cacagcctccatgatctgcatgagg

SEQ ID NO: 5785106 - DNA, 25 bp, Homo sapien
ctggctgaagaaccccacttctgcg

SEQ ID NO: 5785107 - DNA, 25 bp, Homo sapien
ttgctgttcagggcctcaatctcat

SEQ ID NO: 5785108 - DNA, 25 bp, Homo sapien
actggagttgagggatgaggcacgg

SEQ ID NO: 5785109 - DNA, 25 bp, Homo sapien
cgggctctgggggacgtggaggatg

SEQ ID NO: 5785110 - DNA, 25 bp, Homo sapien
cttcaggtactcctggccccaggcc

SEQ ID NO: 5785111 - DNA, 25 bp, Homo sapien
ggcctcatcatccaccacaccaatc

SEQ ID NO: 5785112 - DNA, 25 bp, Homo sapien
ggctttggcctcatcatccaccaca

SEQ ID NO: 5785113 - DNA, 25 bp, Homo sapien
ccagcacagcctccatgatctgcat

SEQ ID NO: 5785114 - DNA, 25 bp, Homo sapien
tgaccagcacgatgggtgtggccgg

SEQ ID NO: 5785115 - DNA, 25 bp, Homo sapien
ctttggcctcatcatccaccacacc

SEQ ID NO: 5785116 - DNA, 25 bp, Homo sapien
tccaccatcctgagctgggccgcta

SEQ ID NO: 5785117 - DNA, 25 bp, Homo sapien
tccacgccctctggcaggtcctcaa

SEQ ID NO: 5785118 - DNA, 25 bp, Homo sapien
cgctggctgtgaccagcaagaagat

SEQ ID NO: 5785119 - DNA, 25 bp, Homo sapien
ccttgctgggcgtggcggcacgcag

SEQ ID NO: 5785120 - DNA, 25 bp, Homo sapien
ggcaggaatatgggacgacacaagg

SEQ ID NO: 5785121 - DNA, 25 bp, Homo sapien
gatggttgatgctgctgccgggctg

SEQ ID NO: 5785122 - DNA, 25 bp, Homo sapien
gcttccgcacccgcctgcttcccga

SEQ ID NO: 5785123 - DNA, 25 bp, Homo sapien
ccctttgatgtgcagcagtcgctgg

SEQ ID NO: 5785124 - DNA, 25 bp, Homo sapien
ccgggcggaagtagctgcagaagca

SEQ ID NO: 5785125 - DNA, 25 bp, Homo sapien
tcctgaccctccagcaccgtttcct

SEQ ID NO: 5785126 - DNA, 25 bp, Homo sapien
atgtagaagtcctcctcctgcagca

SEQ ID NO: 5785127 - DNA, 25 bp, Homo sapien
ccttctcatagacatggtacaggcg

SEQ ID NO: 5785128 - DNA, 25 bp, Homo sapien
tcgagagggcttgggttcagaagaa

SEQ ID NO: 5785129 - DNA, 25 bp, Homo sapien
aactccctgcgggcagggtccacgc

SEQ ID NO: 5785130 - DNA, 25 bp, Homo sapien
tctgctgccagccgacttggggctt

SEQ ID NO: 5785131 - DNA, 25 bp, Homo sapien
tgccttgcacttggaaaagccttgt

SEQ ID NO: 5785132 - DNA, 25 bp, Homo sapien
tcaggtactcctggccccaggccac

SEQ ID NO: 5785133 - DNA, 25 bp, Homo sapien
ctggcaggtcctcaacagcctggtg

SEQ ID NO: 5785134 - DNA, 25 bp, Homo sapien
gggtagcccttggcctggatgaagc

SEQ ID NO: 5785135 - DNA, 25 bp, Homo sapien
agctgtcctgggagcccttgagggc

SEQ ID NO: 5785136 - DNA, 25 bp, Homo sapien
gccttctgcagctggttgatatcct

SEQ ID NO: 5785137 - DNA, 25 bp, Homo sapien
ctggaggctagacatgcgtccctgc

SEQ ID NO: 5785138 - DNA, 25 bp, Homo sapien
tctgagctgtcctgggagcccttga

SEQ ID NO: 5785139 - DNA, 25 bp, Homo sapien
cttgaagccaccctggtccaggatg

SEQ ID NO: 5785140 - DNA, 25 bp, Homo sapien
tggtgccgccctctgctggaaactg

SEQ ID NO: 5785141 - DNA, 25 bp, Homo sapien
agctgcttgaacgcggccgactcgg

SEQ ID NO: 5785142 - DNA, 25 bp, Homo sapien
tgttgaacaagttggtctccacatg

SEQ ID NO: 5785143 - DNA, 25 bp, Homo sapien
ggcctgcagggccacggcacctgcc

SEQ ID NO: 5785144 - DNA, 25 bp, Homo sapien
gcacctgccctgccattgcccggcc

SEQ ID NO: 5785145 - DNA, 25 bp, Homo sapien
gaagatgtcacccttattaaagctg

SEQ ID NO: 5785146 - DNA, 25 bp, Homo sapien
acttctgctgttatctcagagatgg

SEQ ID NO: 5785147 - DNA, 25 bp, Homo sapien
agatccatatgtggaggcctccctg

SEQ ID NO: 5785148 - DNA, 25 bp, Homo sapien
tgttcccggcgcaggcccccgttga

SEQ ID NO: 5785149 - DNA, 25 bp, Homo sapien
tgcccctttccatggtgcccagctc

SEQ ID NO: 5785150 - DNA, 25 bp, Homo sapien
caaggtagcagttgcctgcacacag

SEQ ID NO: 5785151 - DNA, 25 bp, Homo sapien
ctgcagaagcagtcggactcgtggc

SEQ ID NO: 5785152 - DNA, 25 bp, Homo sapien
tggccccccagctcgtcctgtaggc

SEQ ID NO: 5785153 - DNA, 25 bp, Homo sapien
gcaccagatcattctctgagctgtc

SEQ ID NO: 5785154 - DNA, 25 bp, Homo sapien
gtagagcacaaggtagcagttgcct

SEQ ID NO: 5785155 - DNA, 25 bp, Homo sapien
agcccttgagggcctgcagggccac

SEQ ID NO: 5785156 - DNA, 25 bp, Homo sapien
tttttttttatgggctgcctgcttt

SEQ ID NO: 5785157 - DNA, 25 bp, Homo sapien
tagccgcaagttgttgacttctgct

SEQ ID NO: 5785158 - DNA, 25 bp, Homo sapien
gctacctgtacaacttgctcagttt

SEQ ID NO: 5785159 - DNA, 25 bp, Homo sapien
cgggtggctagtccacttgtagggg

SEQ ID NO: 5785160 - DNA, 25 bp, Homo sapien
ccctgcgcctcgcggtgcagcacgg

SEQ ID NO: 5785161 - DNA, 25 bp, Homo sapien
tggagttgagggatgaggcacgggc

SEQ ID NO: 5785162 - DNA, 25 bp, Homo sapien
aagtcctggatgcaccacacctcca

SEQ ID NO: 5785163 - DNA, 25 bp, Homo sapien
tggtgcatcagttgttcccggcgca

SEQ ID NO: 5785164 - DNA, 25 bp, Homo sapien
aagtagctgcagaagcagtcggact

SEQ ID NO: 5785165 - DNA, 25 bp, Homo sapien
gttctcaggctggagaccgacacct

SEQ ID NO: 5785166 - DNA, 25 bp, Homo sapien
gcccggctgaaggcagcctttctct

SEQ ID NO: 5785167 - DNA, 25 bp, Homo sapien
attcttcctggaaatgacagtgacc

SEQ ID NO: 5785168 - DNA, 25 bp, Homo sapien
acagtgaccaccacccgtgccatct

SEQ ID NO: 5785169 - DNA, 25 bp, Homo sapien
ccctccagcaccgtttcctcattct

SEQ ID NO: 5785170 - DNA, 25 bp, Homo sapien
gtatgtgtagagcacaaggtagcag

SEQ ID NO: 5785171 - DNA, 25 bp, Homo sapien
tggttctgctgccagccgacttggg

SEQ ID NO: 5785172 - DNA, 25 bp, Homo sapien
gcagcctttctctcctggaggctag

SEQ ID NO: 5785173 - DNA, 25 bp, Homo sapien
cctcccgccgagcttctggttcctg

SEQ ID NO: 5785174 - DNA, 25 bp, Homo sapien
cccctcgggtaccggcaccatcttc

SEQ ID NO: 5785175 - DNA, 25 bp, Homo sapien
ccttcccaaaccagaggtagcagac

SEQ ID NO: 5785176 - DNA, 25 bp, Homo sapien
tcgtggccctgcgcctcgcggtgca

SEQ ID NO: 5785177 - DNA, 25 bp, Homo sapien
cctccatggtcctggtgttgtggct

SEQ ID NO: 5785178 - DNA, 25 bp, Homo sapien
ccctggaagatggcgaggaagtggg

SEQ ID NO: 5785179 - DNA, 25 bp, Homo sapien
ttactgacacgcagaggatgaccaa

SEQ ID NO: 5785180 - DNA, 25 bp, Homo sapien
tcttcctggaaatgacagtgaccac

SEQ ID NO: 5785181 - DNA, 25 bp, Homo sapien
tgtaggtcgggtagcccttggcctg

SEQ ID NO: 5785182 - DNA, 25 bp, Homo sapien
attccactgaatcatcatcttgcct

SEQ ID NO: 5785183 - DNA, 25 bp, Homo sapien
tgcttgaccagcacgatgggtgtgg

SEQ ID NO: 5785184 - DNA, 25 bp, Homo sapien
gtcctggtgttgtggctgtcagtgc

SEQ ID NO: 5785185 - DNA, 25 bp, Homo sapien
caagttgttgacttctgctgttatc

SEQ ID NO: 5785186 - DNA, 25 bp, Homo sapien
gcctccatgatctgcatgaggtccg

SEQ ID NO: 5785187 - DNA, 25 bp, Homo sapien
attggccttctgcagctggttgata

SEQ ID NO: 5785188 - DNA, 25 bp, Homo sapien
gcaggtcgctggacgccccctgcgt

SEQ ID NO: 5785189 - DNA, 25 bp, Homo sapien
gatgtcatacttgtccaggtcctcc

SEQ ID NO: 5785190 - DNA, 25 bp, Homo sapien
taccggcaccatcttccggttctca

SEQ ID NO: 5785191 - DNA, 25 bp, Homo sapien
agatatcttggaagtcagagtctga

SEQ ID NO: 5785192 - DNA, 25 bp, Homo sapien
tccctgccacacatagatcttgaag

SEQ ID NO: 5785193 - DNA, 25 bp, Homo sapien
cttgctgatgtccatcgcaggccag

SEQ ID NO: 5785194 - DNA, 25 bp, Homo sapien
agcttctggttcctgcgccgcttct

SEQ ID NO: 5785195 - DNA, 25 bp, Homo sapien
ctgggggacgtggaggatgacatag

SEQ ID NO: 5785196 - DNA, 25 bp, Homo sapien
ttctgcgaggaccaggcagcccatg

SEQ ID NO: 5785197 - DNA, 25 bp, Homo sapien
ccattacagcccttcccaaaccaga

SEQ ID NO: 5785198 - DNA, 25 bp, Homo sapien
gtagctgcagaagcagtcggactcg

SEQ ID NO: 5785199 - DNA, 25 bp, Homo sapien
caaagccagcccccgagccttctca

SEQ ID NO: 5785200 - DNA, 25 bp, Homo sapien
gcttgaacgcggccgactcggcgcc

SEQ ID NO: 5785201 - DNA, 25 bp, Homo sapien
gcgcttccgcacccgcctgcttccc

SEQ ID NO: 5785202 - DNA, 25 bp, Homo sapien
agtcgagagggcttgggttcagaag

SEQ ID NO: 5785203 - DNA, 25 bp, Homo sapien
atctcatccgcagtggcctggtggc

SEQ ID NO: 5785204 - DNA, 25 bp, Homo sapien
cttcgcaccagatcattctctgagc

SEQ ID NO: 5785205 - DNA, 25 bp, Homo sapien
tgctgccagccgacttggggcttcg

SEQ ID NO: 5785206 - DNA, 25 bp, Homo sapien
tctgcatgaggtccggggctttggc

SEQ ID NO: 5785207 - DNA, 25 bp, Homo sapien
atcatcatcttgcctaggtccagca

SEQ ID NO: 5785208 - DNA, 25 bp, Homo sapien
accacctccacgttggtgtaggtcg

SEQ ID NO: 5785209 - DNA, 25 bp, Homo sapien
gagagggcttgggttcagaagaagc

SEQ ID NO: 5785210 - DNA, 25 bp, Homo sapien
tgcagggccacggcacctgccctgc

SEQ ID NO: 5785211 - DNA, 25 bp, Homo sapien
agaagtggggaggctcctgaccctc

SEQ ID NO: 5785212 - DNA, 25 bp, Homo sapien
gcaggccaggcaggaatatgggacg

SEQ ID NO: 5785213 - DNA, 25 bp, Homo sapien
gaacaagttggtctccacatgcttg

SEQ ID NO: 5785214 - DNA, 25 bp, Homo sapien
gtcttcaggtactcctggccccagg

SEQ ID NO: 5785215 - DNA, 25 bp, Homo sapien
gagtcttcaggtactcctggcccca

SEQ ID NO: 5785216 - DNA, 25 bp, Homo sapien
tatgttggggtccaggggatagggg

SEQ ID NO: 5785217 - DNA, 25 bp, Homo sapien
gcccggcctcccagggcctcccaga

SEQ ID NO: 5785218 - DNA, 25 bp, Homo sapien
gaaggcctccgcagcgccctgcgct

SEQ ID NO: 5785219 - DNA, 25 bp, Homo sapien
gggcggaagtagctgcagaagcagt

SEQ ID NO: 5785220 - DNA, 25 bp, Homo sapien
gtacaggcgaacattggccttctgc

SEQ ID NO: 5785221 - DNA, 25 bp, Homo sapien
gcgaacattggccttctgcagctgg

SEQ ID NO: 5785222 - DNA, 25 bp, Homo sapien
tgaggtccggggctttggcctcatc

SEQ ID NO: 5785223 - DNA, 25 bp, Homo sapien
ttgaacaagttggtctccacatgct

SEQ ID NO: 5785224 - DNA, 25 bp, Homo sapien
aggacgccaccatacatgacatcta

SEQ ID NO: 5785225 - DNA, 25 bp, Homo sapien
gaaactgctcccgcgccttcgccct

SEQ ID NO: 5785226 - DNA, 25 bp, Homo sapien
cctggatgcaccacacctccacctt

SEQ ID NO: 5785227 - DNA, 25 bp, Homo sapien
cagagatggttgatgctgctgccgg

SEQ ID NO: 5785228 - DNA, 25 bp, Homo sapien
ccatgtggctggagcactcaaacag

SEQ ID NO: 5785229 - DNA, 25 bp, Homo sapien
gtggaagcagggcctccccagcatt

SEQ ID NO: 5785230 - DNA, 25 bp, Homo sapien
cagccgacttggggcttcgcaccag

SEQ ID NO: 5785231 - DNA, 25 bp, Homo sapien
ggcagcccatgtggctggagcactc

SEQ ID NO: 5785232 - DNA, 25 bp, Homo sapien
tcagtgccttgcacttggaaaagcc

SEQ ID NO: 5785233 - DNA, 25 bp, Homo sapien
taggtacaggatgtactggacacgg

SEQ ID NO: 5785234 - DNA, 25 bp, Homo sapien
ccaccctgcggcccagcacagcctc

SEQ ID NO: 5785235 - DNA, 25 bp, Homo sapien
tccacgggctgcctgtgtaagtcct

SEQ ID NO: 5785236 - DNA, 25 bp, Homo sapien
acagcctggtgcatcagttgttccc

SEQ ID NO: 5785237 - DNA, 25 bp, Homo sapien
accctgcggcccagcacagcctcca

SEQ ID NO: 5785238 - DNA, 25 bp, Homo sapien
gggtgagtcttcaggtactcctggc

SEQ ID NO: 5785239 - DNA, 25 bp, Homo sapien
ctgtagaattcctccttggatttcc

SEQ ID NO: 5785240 - DNA, 25 bp, Homo sapien
tgcccggccatctggatagccgcaa

SEQ ID NO: 5785241 - DNA, 25 bp, Homo sapien
gacacgtgcttcctccctttgatgt

SEQ ID NO: 5785242 - DNA, 25 bp, Homo sapien
cctggctacctgtacaacttgctca

SEQ ID NO: 5785243 - DNA, 25 bp, Homo sapien
tgattcccgggcggaagtagctgca

SEQ ID NO: 5785244 - DNA, 25 bp, Homo sapien
gtccaggtcctcctggctgaagaac

SEQ ID NO: 5785245 - DNA, 25 bp, Homo sapien
actggacacggcccagcctctggta

SEQ ID NO: 5785246 - DNA, 25 bp, Homo sapien
aggatgaccaaaagcctctgagggg

SEQ ID NO: 5785247 - DNA, 25 bp, Homo sapien
atctgtgcacgaccaccaccacgtt

SEQ ID NO: 5785248 - DNA, 25 bp, Homo sapien
cctcttgttgctggggtagggggcc

SEQ ID NO: 5785249 - DNA, 25 bp, Homo sapien
ggctgaagaaccccacttctgcgag

SEQ ID NO: 5785250 - DNA, 25 bp, Homo sapien
tgctgctgacggagctgctggttct

SEQ ID NO: 5785251 - DNA, 25 bp, Homo sapien
gccgacttggggcttcgcaccagat

SEQ ID NO: 5785252 - DNA, 25 bp, Homo sapien
ctgatgtccatcgcaggccaggcag

SEQ ID NO: 5785253 - DNA, 25 bp, Homo sapien
tccatggtcctggtgttgtggctgt

SEQ ID NO: 5785254 - DNA, 25 bp, Homo sapien
gaagcccacagcccggctgaaggca

SEQ ID NO: 5785255 - DNA, 25 bp, Homo sapien
tggaaggcctccgcagcgccctgcg

SEQ ID NO: 5785256 - DNA, 25 bp, Homo sapien
ggcaggtcctcaacagcctggtgca

SEQ ID NO: 5785257 - DNA, 25 bp, Homo sapien
atgctaggcctcccttcctgtagat

SEQ ID NO: 5785258 - DNA, 25 bp, Homo sapien
agccacaggaagatctcctgccagg

SEQ ID NO: 5785259 - DNA, 25 bp, Homo sapien
cttctgcagctggttgatatccttg

SEQ ID NO: 5785260 - DNA, 25 bp, Homo sapien
ttccttgtgggacgggtggctagtc

SEQ ID NO: 5785261 - DNA, 25 bp, Homo sapien
gcttcccgacccagtagtgcaggtc

SEQ ID NO: 5785262 - DNA, 25 bp, Homo sapien
tgctcctgtactaggacgccaccat

SEQ ID NO: 5785263 - DNA, 25 bp, Homo sapien
gctgtcagtgccttgcacttggaaa

SEQ ID NO: 5785264 - DNA, 25 bp, Homo sapien
ccaccatacatgacatctagttcct

SEQ ID NO: 5785265 - DNA, 25 bp, Homo sapien
ctccctttgatgtgcagcagtcgct

SEQ ID NO: 5785266 - DNA, 25 bp, Homo sapien
ctgccgggctgccatccaccacttc

SEQ ID NO: 5785267 - DNA, 25 bp, Homo sapien
tgactgcccctttccatggtgccca

SEQ ID NO: 5785268 - DNA, 25 bp, Homo sapien
tgtccatgacgcttggggtccacgg

SEQ ID NO: 5785269 - DNA, 25 bp, Homo sapien
attctctgagctgtcctgggagccc

SEQ ID NO: 5785270 - DNA, 25 bp, Homo sapien
agcccacagcccggctgaaggcagc

SEQ ID NO: 5785271 - DNA, 25 bp, Homo sapien
cccttgagggcctgcagggccacgg

SEQ ID NO: 5785272 - DNA, 25 bp, Homo sapien
ctcctggaagatcaccagctggccc

SEQ ID NO: 5785273 - DNA, 25 bp, Homo sapien
tgggacgacacaaggaacaacagcc

SEQ ID NO: 5785274 - DNA, 25 bp, Homo sapien
tggaagctggggacctcctcaggga

SEQ ID NO: 5785275 - DNA, 25 bp, Homo sapien
caggggataggggcagtcgagaggg

SEQ ID NO: 5785276 - DNA, 25 bp, Homo sapien
agcacagcctccatgatctgcatga

SEQ ID NO: 5785277 - DNA, 25 bp, Homo sapien
tttctctcctggaggctagacatgc

SEQ ID NO: 5785278 - DNA, 25 bp, Homo sapien
atgaaggtgggaggctcatggccct

SEQ ID NO: 5785279 - DNA, 25 bp, Homo sapien
tcccgccgagcttctggttcctgcg

SEQ ID NO: 5785280 - DNA, 25 bp, Homo sapien
ggaatatgggacgacacaaggaaca

SEQ ID NO: 5785281 - DNA, 25 bp, Homo sapien
tgcacacagctgtccatgacgcttg

SEQ ID NO: 5785282 - DNA, 25 bp, Homo sapien
aggtgggaggctcatggccctgctt

SEQ ID NO: 5785283 - DNA, 25 bp, Homo sapien
catcgcaggccaggcaggaatatgg

SEQ ID NO: 5785284 - DNA, 25 bp, Homo sapien
cgggctggcacctccatggtcctgg

SEQ ID NO: 5785285 - DNA, 25 bp, Homo sapien
gatgtccatcgcaggccaggcagga

SEQ ID NO: 5785286 - DNA, 25 bp, Homo sapien
cgccctctggcaggtcctcaacagc

SEQ ID NO: 5785287 - DNA, 25 bp, Homo sapien
cctccccagcattgtaagtatgttg

SEQ ID NO: 5785288 - DNA, 25 bp, Homo sapien
ctggtcttgggcccattccactgaa

SEQ ID NO: 5785289 - DNA, 25 bp, Homo sapien
ttccgcacccgcctgcttcccgacc

SEQ ID NO: 5785290 - DNA, 25 bp, Homo sapien
cccttattaaagctgttccaggaga

SEQ ID NO: 5785291 - DNA, 25 bp, Homo sapien
tcgcaggccaggcaggaatatggga

SEQ ID NO: 5785292 - DNA, 25 bp, Homo sapien
ccggggctttggcctcatcatccac

SEQ ID NO: 5785293 - DNA, 25 bp, Homo sapien
cagtcgtggctggaagctggggacc

SEQ ID NO: 5785294 - DNA, 25 bp, Homo sapien
ggccctggaagatggcgaggaagtg

SEQ ID NO: 5785295 - DNA, 25 bp, Homo sapien
cacacagctgtccatgacgcttggg

SEQ ID NO: 5785296 - DNA, 25 bp, Homo sapien
cacaaggtagcagttgcctgcacac

SEQ ID NO: 5785297 - DNA, 25 bp, Homo sapien
tggaagtcagagtctgagagataga

SEQ ID NO: 5785298 - DNA, 25 bp, Homo sapien
tagtccacttgtaggggtcccaagt

SEQ ID NO: 5785299 - DNA, 25 bp, Homo sapien
ggggtccacgggctgcctgtgtaag

SEQ ID NO: 5785300 - DNA, 25 bp, Homo sapien
ctcgcggtgcagcacggtctggccc

SEQ ID NO: 5785301 - DNA, 25 bp, Homo sapien
aggaagatctcctgccaggtgtcca

SEQ ID NO: 5785302 - DNA, 25 bp, Homo sapien
ggcgctgctggaaggcctccgcagc

SEQ ID NO: 5785303 - DNA, 25 bp, Homo sapien
tggtcacatgctcctgtactaggac

SEQ ID NO: 5785304 - DNA, 25 bp, Homo sapien
cagctgctttttctcctgccgctgc

SEQ ID NO: 5785305 - DNA, 25 bp, Homo sapien
ccagtagtgcaggtcgctggacgcc

SEQ ID NO: 5785306 - DNA, 25 bp, Homo sapien
gcttgggttcagaagaagcccagct

SEQ ID NO: 5785307 - DNA, 25 bp, Homo sapien
cacgggctgcctgtgtaagtcctgg

SEQ ID NO: 5785308 - DNA, 25 bp, Homo sapien
tgagagatagaactccctgcgggca

SEQ ID NO: 5785309 - DNA, 25 bp, Homo sapien
tgcctaggtccagcaggaagatgtc

SEQ ID NO: 5785310 - DNA, 25 bp, Homo sapien
gaacaacagccagagttctcaggct

SEQ ID NO: 5785311 - DNA, 25 bp, Homo sapien
agtttccatggagcagggagtggtg

SEQ ID NO: 5785312 - DNA, 25 bp, Homo sapien
cacgttccctgtcccggaggctgta

SEQ ID NO: 5785313 - DNA, 25 bp, Homo sapien
cagacacgtgcttcctccctttgat

SEQ ID NO: 5785314 - DNA, 25 bp, Homo sapien
tgcagcagtcgctggatgttgaaca

SEQ ID NO: 5785315 - DNA, 25 bp, Homo sapien
gtggcctggtggccctgccataggt

SEQ ID NO: 5785316 - DNA, 25 bp, Homo sapien
accatacatgacatctagttcctca

SEQ ID NO: 5785317 - DNA, 25 bp, Homo sapien
actcgtggccctgcgcctcgcggtg

SEQ ID NO: 5785318 - DNA, 25 bp, Homo sapien
cccggaggctgtaggtcaaagccag

SEQ ID NO: 5785319 - DNA, 25 bp, Homo sapien
cgtggaggatgacatagcagtgttc

SEQ ID NO: 5785320 - DNA, 25 bp, Homo sapien
gccataggtacaggatgtactggac

SEQ ID NO: 5785321 - DNA, 25 bp, Homo sapien
gggacgtggaggatgacatagcagt

SEQ ID NO: 5785322 - DNA, 25 bp, Homo sapien
ggactcgtggccctgcgcctcgcgg

SEQ ID NO: 5785323 - DNA, 25 bp, Homo sapien
ggagcactcaaacagtcgtggctgg

SEQ ID NO: 5785324 - DNA, 25 bp, Homo sapien
gccgccctctgctggaaactgctcc

SEQ ID NO: 5785325 - DNA, 25 bp, Homo sapien
aagcagggcctccccagcattgtaa

SEQ ID NO: 5785326 - DNA, 25 bp, Homo sapien
ctctctcctggaagatcaccagctg

SEQ ID NO: 5785327 - DNA, 25 bp, Homo sapien
gcccattccactgaatcatcatctt

SEQ ID NO: 5785328 - DNA, 25 bp, Homo sapien
tgtggctgtcagtgccttgcacttg

SEQ ID NO: 5785329 - DNA, 25 bp, Homo sapien
gccgagcttctggttcctgcgccgc

SEQ ID NO: 5785330 - DNA, 25 bp, Homo sapien
agcttgcccacgtccagctttacat

SEQ ID NO: 5785331 - DNA, 25 bp, Homo sapien
ttgatcgtggcgctggtgctgctga

SEQ ID NO: 5785332 - DNA, 25 bp, Homo sapien
gtgagtcttcaggtactcctggccc

SEQ ID NO: 5785333 - DNA, 25 bp, Homo sapien
tagtgcaggtcgctggacgccccct

SEQ ID NO: 5785334 - DNA, 25 bp, Homo sapien
gggtgtgcagcttgcccacgtccag

SEQ ID NO: 5785335 - DNA, 25 bp, Homo sapien
ttcctggaaatgacagtgaccacca

SEQ ID NO: 5785336 - DNA, 25 bp, Homo sapien
gatgtgcagcagtcgctggatgttg

SEQ ID NO: 5785337 - DNA, 25 bp, Homo sapien
ccacacatagatcttgaagccaccc

SEQ ID NO: 5785338 - DNA, 25 bp, Homo sapien
cagcaggaagatgtcacccttatta

SEQ ID NO: 5785339 - DNA, 25 bp, Homo sapien
atgacatagcagtgttcctcaaaaa

SEQ ID NO: 5785340 - DNA, 25 bp, Homo sapien
gccgggctgccatccaccacttcct

SEQ ID NO: 5785341 - DNA, 25 bp, Homo sapien
ccaggtcctcctggctgaagaaccc

SEQ ID NO: 5785342 - DNA, 25 bp, Homo sapien
aagatgtcactggagttgagggatg

SEQ ID NO: 5785343 - DNA, 25 bp, Homo sapien
ttgtgggacgggtggctagtccact

SEQ ID NO: 5785344 - DNA, 25 bp, Homo sapien
tgaagaaccatccaatgaaggtggg

SEQ ID NO: 5785345 - DNA, 25 bp, Homo sapien
cctgtacaacttgctcagtttccat

SEQ ID NO: 5785346 - DNA, 25 bp, Homo sapien
atatgtggaggcctccctgcatgcc

SEQ ID NO: 5785347 - DNA, 25 bp, Homo sapien
tcagatgctaggcctcccttcctgt

SEQ ID NO: 5785348 - DNA, 25 bp, Homo sapien
aaagatatcttggaagtcagagtct

SEQ ID NO: 5785349 - DNA, 25 bp, Homo sapien
gtctttgcccttctcatagacatgg

SEQ ID NO: 5785350 - DNA, 25 bp, Homo sapien
cctcattcttcctggaaatgacagt

SEQ ID NO: 5785351 - DNA, 25 bp, Homo sapien
caggccaccgcctccttccactcac

SEQ ID NO: 5785352 - DNA, 25 bp, Homo sapien
agaactccctgcgggcagggtccac

SEQ ID NO: 5785353 - DNA, 25 bp, Homo sapien
gccctgcttgaccagcacgatgggt

SEQ ID NO: 5785354 - DNA, 25 bp, Homo sapien
cacgtgcttcctccctttgatgtgc

SEQ ID NO: 5785355 - DNA, 25 bp, Homo sapien
gggctcgctgcccatggtcacatgc

SEQ ID NO: 5785356 - DNA, 25 bp, Homo sapien
ttgggttcagaagaagcccagctgc

SEQ ID NO: 5785357 - DNA, 25 bp, Homo sapien
ctcatagacatggtacaggcgaaca

SEQ ID NO: 5785358 - DNA, 25 bp, Homo sapien
tgatgctgctgccgggctgccatcc

SEQ ID NO: 5785359 - DNA, 25 bp, Homo sapien
tgtactaggacgccaccatacatga

SEQ ID NO: 5785360 - DNA, 25 bp, Homo sapien
gcacgatgggtgtggccgggctcct

SEQ ID NO: 5785361 - DNA, 25 bp, Homo sapien
ggtcctcaacagcctggtgcatcag

SEQ ID NO: 5785362 - DNA, 25 bp, Homo sapien
accagatcattctctgagctgtcct

SEQ ID NO: 5785363 - DNA, 25 bp, Homo sapien
tggatgttgaacaagttggtctcca

SEQ ID NO: 5785364 - DNA, 25 bp, Homo sapien
tccaccacttccttgtgggacgggt

SEQ ID NO: 5785365 - DNA, 25 bp, Homo sapien
tttttttttttatgggctgcctgct

SEQ ID NO: 5785366 - DNA, 25 bp, Homo sapien
cttctcagaccaagtccggaagagc

SEQ ID NO: 5785367 - DNA, 25 bp, Homo sapien
acgctgatcaccattacagcccttc

SEQ ID NO: 5785368 - DNA, 25 bp, Homo sapien
gtggccttcgggctctgggggacgt

SEQ ID NO: 5785369 - DNA, 25 bp, Homo sapien
ctttttctcctgccgctgcctccac

SEQ ID NO: 5785370 - DNA, 25 bp, Homo sapien
ctgctggaaactgctcccgcgcctt

SEQ ID NO: 5785371 - DNA, 25 bp, Homo sapien
aagccttgtggtggatgctgactgc

SEQ ID NO: 5785372 - DNA, 25 bp, Homo sapien
caccgtttcctcattcttcctggaa

SEQ ID NO: 5785373 - DNA, 25 bp, Homo sapien
gcacttggaaaagccttgtggtgga

SEQ ID NO: 5785374 - DNA, 25 bp, Homo sapien
ctcaaacagtcgtggctggaagctg

SEQ ID NO: 5785375 - DNA, 25 bp, Homo sapien
gcgccgcttctcagaccaagtccgg

SEQ ID NO: 5785376 - DNA, 25 bp, Homo sapien
ggacgacacaaggaacaacagccag

SEQ ID NO: 5785377 - DNA, 25 bp, Homo sapien
gcagcgccctgcgcttccgcacccg

SEQ ID NO: 5785378 - DNA, 25 bp, Homo sapien
ggctgcccaccctgcggcccagcac

SEQ ID NO: 5785379 - DNA, 25 bp, Homo sapien
tttacatgaatcgatttatccctcc

SEQ ID NO: 5785380 - DNA, 25 bp, Homo sapien
gagggcttgggttcagaagaagccc

SEQ ID NO: 5785381 - DNA, 25 bp, Homo sapien
ggacgccccctgcgtggccttcggg

SEQ ID NO: 5785382 - DNA, 25 bp, Homo sapien
ggaccaggcagcccatgtggctgga

SEQ ID NO: 5785383 - DNA, 25 bp, Homo sapien
gcagaagcagtcggactcgtggccc

SEQ ID NO: 5785384 - DNA, 25 bp, Homo sapien
ccacaggaagatctcctgccaggtg

SEQ ID NO: 5785385 - DNA, 25 bp, Homo sapien
aggggcagtcgagagggcttgggtt

SEQ ID NO: 5785386 - DNA, 25 bp, Homo sapien
agagatagaactccctgcgggcagg

SEQ ID NO: 5785387 - DNA, 25 bp, Homo sapien
actcacttgcagcttccccaagcca

SEQ ID NO: 5785388 - DNA, 25 bp, Homo sapien
ccctgcgcttccgcacccgcctgct

SEQ ID NO: 5785389 - DNA, 25 bp, Homo sapien
gccgtcgttcaccacctccacgttg

SEQ ID NO: 5785390 - DNA, 25 bp, Homo sapien
ctcatccgcagtggcctggtggccc

SEQ ID NO: 5785391 - DNA, 25 bp, Homo sapien
ccacatgcttgaggtcagatgctag

SEQ ID NO: 5785392 - DNA, 25 bp, Homo sapien
gggcctcaatctcatccgcagtggc

SEQ ID NO: 5785393 - DNA, 25 bp, Homo sapien
tggtggccctgccataggtacagga

SEQ ID NO: 5785394 - DNA, 25 bp, Homo sapien
cgcggtgcagcacggtctggccccc

SEQ ID NO: 5785395 - DNA, 25 bp, Homo sapien
ggtgtaggtcgggtagcccttggcc

SEQ ID NO: 5785396 - DNA, 25 bp, Homo sapien
tggtgttgtggctgtcagtgccttg

SEQ ID NO: 5785397 - DNA, 25 bp, Homo sapien
cttgtggtggatgctgactgcccct

SEQ ID NO: 5785398 - DNA, 25 bp, Homo sapien
atcaccattacagcccttcccaaac

SEQ ID NO: 5785399 - DNA, 25 bp, Homo sapien
gggcagggtccacgccctctggcag

SEQ ID NO: 5785400 - DNA, 25 bp, Homo sapien
cttggcctggatgaagcccacagcc

SEQ ID NO: 5785401 - DNA, 25 bp, Homo sapien
tttcccaaagatatcttggaagtca

SEQ ID NO: 5785402 - DNA, 25 bp, Homo sapien
tcaggctggagaccgacacctggct

SEQ ID NO: 5785403 - DNA, 25 bp, Homo sapien
ctgaatcatcatcttgcctaggtcc

SEQ ID NO: 5785404 - DNA, 25 bp, Homo sapien
atgctgctgccgggctgccatccac

SEQ ID NO: 5785405 - DNA, 25 bp, Homo sapien
ccttcctgtagatgattcccgggcg

SEQ ID NO: 5785406 - DNA, 25 bp, Homo sapien
agatagaactccctgcgggcagggt

SEQ ID NO: 5785407 - DNA, 25 bp, Homo sapien
ggcctcccagggcctcccagaagtg

SEQ ID NO: 5785408 - DNA, 25 bp, Homo sapien
cctgctgggtgagtcttcaggtact

SEQ ID NO: 5785409 - DNA, 25 bp, Homo sapien
tggctggaagctggggacctcctca

SEQ ID NO: 5785410 - DNA, 25 bp, Homo sapien
gggggacgtggaggatgacatagca

SEQ ID NO: 5785411 - DNA, 25 bp, Homo sapien
tctgcagctggttgatatccttgct

SEQ ID NO: 5785412 - DNA, 25 bp, Homo sapien
accaggcagcccatgtggctggagc

SEQ ID NO: 5785413 - DNA, 25 bp, Homo sapien
taggtccagcaggaagatgtcaccc

SEQ ID NO: 5785414 - DNA, 25 bp, Homo sapien
aggcagcctttctctcctggaggct

SEQ ID NO: 5785415 - DNA, 25 bp, Homo sapien
ccgccgagcttctggttcctgcgcc

SEQ ID NO: 5785416 - DNA, 25 bp, Homo sapien
cagacgctggctgtgaccagcaaga

SEQ ID NO: 5785417 - DNA, 25 bp, Homo sapien
tctggttcctgcgccgcttctcaga

SEQ ID NO: 5785418 - DNA, 25 bp, Homo sapien
ctgcgggcagggtccacgccctctg

SEQ ID NO: 5785419 - DNA, 25 bp, Homo sapien
agtagtgcaggtcgctggacgcccc

SEQ ID NO: 5785420 - DNA, 25 bp, Homo sapien
agatctcctgccaggtgtccagtaa

SEQ ID NO: 5785421 - DNA, 25 bp, Homo sapien
tgccattgcccggccatctggatag

SEQ ID NO: 5785422 - DNA, 25 bp, Homo sapien
tgcgtccctgccacacatagatctt

SEQ ID NO: 5785423 - DNA, 25 bp, Homo sapien
caccatcttccggttctcagagatc

SEQ ID NO: 5785424 - DNA, 25 bp, Homo sapien
tgctggggtagggggcccggcctcc

SEQ ID NO: 5785425 - DNA, 25 bp, Homo sapien
gagttgagggatgaggcacgggctg

SEQ ID NO: 5785426 - DNA, 25 bp, Homo sapien
accgcctccttccactcacttgcag

SEQ ID NO: 5785427 - DNA, 25 bp, Homo sapien
gccgcttctcagaccaagtccggaa

SEQ ID NO: 5785428 - DNA, 25 bp, Homo sapien
ggaagtgggggggctcgctgcccat

SEQ ID NO: 5785429 - DNA, 25 bp, Homo sapien
ccttgcacttggaaaagccttgtgg

SEQ ID NO: 5785430 - DNA, 25 bp, Homo sapien
cctgccaggtgtccagtaacatgat

SEQ ID NO: 5785431 - DNA, 25 bp, Homo sapien
cagcctccatgatctgcatgaggtc

SEQ ID NO: 5785432 - DNA, 25 bp, Homo sapien
aggtcgctggacgccccctgcgtgg

SEQ ID NO: 5785433 - DNA, 25 bp, Homo sapien
gcctgcttttactgacacgcagagg

SEQ ID NO: 5785434 - DNA, 25 bp, Homo sapien
acctcagtggcagacacgtgcttcc

SEQ ID NO: 5785435 - DNA, 25 bp, Homo sapien
cctcccagaagtggggaggctcctg

SEQ ID NO: 5785436 - DNA, 25 bp, Homo sapien
tctcctggaggctagacatgcgtcc

SEQ ID NO: 5785437 - DNA, 25 bp, Homo sapien
caagccacaggaagatctcctgcca

SEQ ID NO: 5785438 - DNA, 25 bp, Homo sapien
ggctcatggccctgcttgaccagca

SEQ ID NO: 5785439 - DNA, 25 bp, Homo sapien
cacctccacgttggtgtaggtcggg

SEQ ID NO: 5785440 - DNA, 25 bp, Homo sapien
ggacctcctcagggagcctcttgtt

SEQ ID NO: 5785441 - DNA, 25 bp, Homo sapien
cctggaaatgacagtgaccaccacc

SEQ ID NO: 5785442 - DNA, 25 bp, Homo sapien
ctggtccaggatgtagaagtcctcc

SEQ ID NO: 5785443 - DNA, 25 bp, Homo sapien
ctgaccctccagcaccgtttcctca

SEQ ID NO: 5785444 - DNA, 25 bp, Homo sapien
cagagttctcaggctggagaccgac

SEQ ID NO: 5785445 - DNA, 25 bp, Homo sapien
ccattccactgaatcatcatcttgc

SEQ ID NO: 5785446 - DNA, 25 bp, Homo sapien
gtggatgctgactgcccctttccat

SEQ ID NO: 5785447 - DNA, 25 bp, Homo sapien
ggataggggcagtcgagagggcttg

SEQ ID NO: 5785448 - DNA, 25 bp, Homo sapien
attgtaagtatgttggggtccaggg

SEQ ID NO: 5785449 - DNA, 25 bp, Homo sapien
aggctcctgaccctccagcaccgtt

SEQ ID NO: 5785450 - DNA, 25 bp, Homo sapien
agcacaaggtagcagttgcctgcac

SEQ ID NO: 5785451 - DNA, 25 bp, Homo sapien
gaaccatccaatgaaggtgggaggc

SEQ ID NO: 5785452 - DNA, 25 bp, Homo sapien
taagtatgttggggtccaggggata

SEQ ID NO: 5785453 - DNA, 25 bp, Homo sapien
gggttcagaagaagcccagctgctt

SEQ ID NO: 5785454 - DNA, 25 bp, Homo sapien
ctgggtgagtcttcaggtactcctg

SEQ ID NO: 5785455 - DNA, 25 bp, Homo sapien
gaccaccaccacgttccctgtcccg

SEQ ID NO: 5785456 - DNA, 25 bp, Homo sapien
ggtccaggggataggggcagtcgag

SEQ ID NO: 5785457 - DNA, 25 bp, Homo sapien
cctggtggccctgccataggtacag

SEQ ID NO: 5785458 - DNA, 25 bp, Homo sapien
ctgcttttactgacacgcagaggat

SEQ ID NO: 5785459 - DNA, 25 bp, Homo sapien
gatctgcatgaggtccggggctttg

SEQ ID NO: 5785460 - DNA, 25 bp, Homo sapien
tgatatccttgctgggcgtggcggc

SEQ ID NO: 5785461 - DNA, 25 bp, Homo sapien
tggatagccgcaagttgttgacttc

SEQ ID NO: 5785462 - DNA, 25 bp, Homo sapien
agagctgcttgaacgcggccgactc

SEQ ID NO: 5785463 - DNA, 25 bp, Homo sapien
gttccaggagagctccacctcagtg

SEQ ID NO: 5785464 - DNA, 25 bp, Homo sapien
acttctgcgaggaccaggcagccca

SEQ ID NO: 5785465 - DNA, 25 bp, Homo sapien
gagtggaagcagggcctccccagca

SEQ ID NO: 5785466 - DNA, 25 bp, Homo sapien
gctgcccatggtcacatgctcctgt

SEQ ID NO: 5785467 - DNA, 25 bp, Homo sapien
ctcagagatggttgatgctgctgcc

SEQ ID NO: 5785468 - DNA, 25 bp, Homo sapien
cacgggctggcacctccatggtcct

SEQ ID NO: 5785469 - DNA, 25 bp, Homo sapien
ctggccctggaagatggcgaggaag

SEQ ID NO: 5785470 - DNA, 25 bp, Homo sapien
gtcacatgctcctgtactaggacgc

SEQ ID NO: 5785471 - DNA, 25 bp, Homo sapien
tgagggatgaggcacgggctggcac

SEQ ID NO: 5785472 - DNA, 25 bp, Homo sapien
agaagcagtcggactcgtggccctg

SEQ ID NO: 5785473 - DNA, 25 bp, Homo sapien
ggggataggggcagtcgagagggct

SEQ ID NO: 5785474 - DNA, 25 bp, Homo sapien
ccagcaccgtttcctcattcttcct

SEQ ID NO: 5785475 - DNA, 25 bp, Homo sapien
ggagcccttgagggcctgcagggcc

SEQ ID NO: 5785476 - DNA, 25 bp, Homo sapien
caccacttccttgtgggacgggtgg

SEQ ID NO: 5785477 - DNA, 25 bp, Homo sapien
cctctgaggggagtggaagcagggc

SEQ ID NO: 5785478 - DNA, 25 bp, Homo sapien
gggaggctcatggccctgcttgacc

SEQ ID NO: 5785479 - DNA, 25 bp, Homo sapien
gggtcccaagtgaagaaccatccaa

SEQ ID NO: 5785480 - DNA, 25 bp, Homo sapien
ctgctggttctgctgccagccgact

SEQ ID NO: 5785481 - DNA, 25 bp, Homo sapien
ttaaagctgttccaggagagctcca

SEQ ID NO: 5785482 - DNA, 25 bp, Homo sapien
ccctgccataggtacaggatgtact

SEQ ID NO: 5785483 - DNA, 25 bp, Homo sapien
cctgcttgaccagcacgatgggtgt

SEQ ID NO: 5785484 - DNA, 25 bp, Homo sapien
cagaaatgctggtcttgggcccatt

SEQ ID NO: 5785485 - DNA, 25 bp, Homo sapien
catgacgcttggggtccacgggctg

SEQ ID NO: 5785486 - DNA, 25 bp, Homo sapien
ttcctcagcgttgctgttcagggcc

SEQ ID NO: 5785487 - DNA, 25 bp, Homo sapien
cgctggacgccccctgcgtggcctt

SEQ ID NO: 5785488 - DNA, 25 bp, Homo sapien
ccccctgcgtggccttcgggctctg

SEQ ID NO: 5785489 - DNA, 25 bp, Homo sapien
tggccctgcttgaccagcacgatgg

SEQ ID NO: 5785490 - DNA, 25 bp, Homo sapien
ttgggcccattccactgaatcatca

SEQ ID NO: 5785491 - DNA, 25 bp, Homo sapien
gcctccctgcatgcctgggaggccc

SEQ ID NO: 5785492 - DNA, 25 bp, Homo sapien
tccgcagtggcctggtggccctgcc

SEQ ID NO: 5785493 - DNA, 25 bp, Homo sapien
acgatgggtgtggccgggctcctcc

SEQ ID NO: 5785494 - DNA, 25 bp, Homo sapien
tctgaggggagtggaagcagggcct

SEQ ID NO: 5785495 - DNA, 25 bp, Homo sapien
ggctgggtgtgcagcttgcccacgt

SEQ ID NO: 5785496 - DNA, 25 bp, Homo sapien
gacacctggctacctgtacaacttg

SEQ ID NO: 5785497 - DNA, 25 bp, Homo sapien
ccagggcctcccagaagtggggagg

SEQ ID NO: 5785498 - DNA, 25 bp, Homo sapien
cacgccctctggcaggtcctcaaca

SEQ ID NO: 5785499 - DNA, 25 bp, Homo sapien
atcttccggttctcagagatccata

SEQ ID NO: 5785500 - DNA, 25 bp, Homo sapien
gaggctcatggccctgcttgaccag

SEQ ID NO: 5785501 - DNA, 25 bp, Homo sapien
taagccccctcgggtaccggcacca

SEQ ID NO: 5785502 - DNA, 25 bp, Homo sapien
catccaatgaaggtgggaggctcat

SEQ ID NO: 5785503 - DNA, 25 bp, Homo sapien
ggagctgctggttctgctgccagcc

SEQ ID NO: 5785504 - DNA, 25 bp, Homo sapien
ttgcacttggaaaagccttgtggtg

SEQ ID NO: 5785505 - DNA, 25 bp, Homo sapien
acgaccaccaccacgttccctgtcc

SEQ ID NO: 5785506 - DNA, 25 bp, Homo sapien
gcgggcagggtccacgccctctggc

SEQ ID NO: 5785507 - DNA, 25 bp, Homo sapien
ggcagacacgtgcttcctccctttg

SEQ ID NO: 5785508 - DNA, 25 bp, Homo sapien
ggggcttcgcaccagatcattctct

SEQ ID NO: 5785509 - DNA, 25 bp, Homo sapien
tgccgctgcctccacgtggccatgc

SEQ ID NO: 5785510 - DNA, 25 bp, Homo sapien
ggaagatggcgaggaagtggggggg

SEQ ID NO: 5785511 - DNA, 25 bp, Homo sapien
gccctgccattgcccggccatctgg

SEQ ID NO: 5785512 - DNA, 25 bp, Homo sapien
ggccaccgcctccttccactcactt

SEQ ID NO: 5785513 - DNA, 25 bp, Homo sapien
cacccttattaaagctgttccagga

SEQ ID NO: 5785514 - DNA, 25 bp, Homo sapien
tcctcaacagcctggtgcatcagtt

SEQ ID NO: 5785515 - DNA, 25 bp, Homo sapien
tggagaccgacacctggctacctgt

SEQ ID NO: 5785516 - DNA, 25 bp, Homo sapien
gcacggtctggccccccagctcgtc

SEQ ID NO: 5785517 - DNA, 25 bp, Homo sapien
gtagcccttggcctggatgaagccc

SEQ ID NO: 5785518 - DNA, 25 bp, Homo sapien
cccccgagccttctcagaaatgctg

SEQ ID NO: 5785519 - DNA, 25 bp, Homo sapien
atagatcttgaagccaccctggtcc

SEQ ID NO: 5785520 - DNA, 25 bp, Homo sapien
tgcccatggtcacatgctcctgtac

SEQ ID NO: 5785521 - DNA, 25 bp, Homo sapien
cagctgtccatgacgcttggggtcc

SEQ ID NO: 5785522 - DNA, 25 bp, Homo sapien
cctccacgttggtgtaggtcgggta

SEQ ID NO: 5785523 - DNA, 25 bp, Homo sapien
tcaccacctccacgttggtgtaggt

SEQ ID NO: 5785524 - DNA, 25 bp, Homo sapien
gtgtagagcacaaggtagcagttgc

SEQ ID NO: 5785525 - DNA, 25 bp, Homo sapien
tgcctgcacacagctgtccatgacg

SEQ ID NO: 5785526 - DNA, 25 bp, Homo sapien
ccctgcatgcctgggaggcccttgc

SEQ ID NO: 5785527 - DNA, 25 bp, Homo sapien
tcagaagaagcccagctgctttttc

SEQ ID NO: 5785528 - DNA, 25 bp, Homo sapien
ctggtgctgctgacggagctgctgg

SEQ ID NO: 5785529 - DNA, 25 bp, Homo sapien
ccacctcagtggcagacacgtgctt

SEQ ID NO: 5785530 - DNA, 25 bp, Homo sapien
cccgacccagtagtgcaggtcgctg

SEQ ID NO: 5785531 - DNA, 25 bp, Homo sapien
cggtgcagcacggtctggcccccca

SEQ ID NO: 5785532 - DNA, 25 bp, Homo sapien
ggcctccccagcattgtaagtatgt

SEQ ID NO: 5785533 - DNA, 25 bp, Homo sapien
ttccctgtcccggaggctgtaggtc

SEQ ID NO: 5785534 - DNA, 25 bp, Homo sapien
ccagaggtagcagacgctggctgtg

SEQ ID NO: 5785535 - DNA, 25 bp, Homo sapien
cagctttacatgaatcgatttatcc

SEQ ID NO: 5785536 - DNA, 25 bp, Homo sapien
gtcctcctggctgaagaaccccact

SEQ ID NO: 5785537 - DNA, 25 bp, Homo sapien
ccctctgctggaaactgctcccgcg

SEQ ID NO: 5785538 - DNA, 25 bp, Homo sapien
gcgaggaagtgggggggctcgctgc

SEQ ID NO: 5785539 - DNA, 25 bp, Homo sapien
ttgcccttctcatagacatggtaca

SEQ ID NO: 5785540 - DNA, 25 bp, Homo sapien
gacacaaggaacaacagccagagtt

SEQ ID NO: 5785541 - DNA, 25 bp, Homo sapien
gcagtgttcctcaaaaaagttcccg

SEQ ID NO: 5785542 - DNA, 25 bp, Homo sapien
ctccctgcgggcagggtccacgccc

SEQ ID NO: 5785543 - DNA, 25 bp, Homo sapien
ggccttcgggctctgggggacgtgg

SEQ ID NO: 5785544 - DNA, 25 bp, Homo sapien
tagacatggtacaggcgaacattgg

SEQ ID NO: 5785545 - DNA, 25 bp, Homo sapien
tggagcagggagtggtgccgccctc

SEQ ID NO: 5785546 - DNA, 25 bp, Homo sapien
taggctgggtgtgcagcttgcccac

SEQ ID NO: 5785547 - DNA, 25 bp, Homo sapien
accatccaatgaaggtgggaggctc

SEQ ID NO: 5785548 - DNA, 25 bp, Homo sapien
agcctttctctcctggaggctagac

SEQ ID NO: 5785549 - DNA, 25 bp, Homo sapien
caccacccgtgccatctcacgctga

SEQ ID NO: 5785550 - DNA, 25 bp, Homo sapien
catctggatagccgcaagttgttga

SEQ ID NO: 5785551 - DNA, 25 bp, Homo sapien
gatcgtggcgctggtgctgctgacg

SEQ ID NO: 5785552 - DNA, 25 bp, Homo sapien
ccatcctgagctgggccgctaactt

SEQ ID NO: 5785553 - DNA, 25 bp, Homo sapien
aagcagtcggactcgtggccctgcg

SEQ ID NO: 5785554 - DNA, 25 bp, Homo sapien
ggtggctagtccacttgtaggggtc

SEQ ID NO: 5785555 - DNA, 25 bp, Homo sapien
atgatgtcatacttgtccaggtcct

SEQ ID NO: 5785556 - DNA, 25 bp, Homo sapien
ggctggcacctccatggtcctggtg

SEQ ID NO: 5785557 - DNA, 25 bp, Homo sapien
ttccactcacttgcagcttccccaa

SEQ ID NO: 5785558 - DNA, 25 bp, Homo sapien
tggtctccacatgcttgaggtcaga

SEQ ID NO: 5785559 - DNA, 25 bp, Homo sapien
gcagcttccccaagccacaggaaga

SEQ ID NO: 5785560 - DNA, 25 bp, Homo sapien
gggagtggaagcagggcctccccag

SEQ ID NO: 5785561 - DNA, 25 bp, Homo sapien
ccaccttcccagagccgtcgtccac

SEQ ID NO: 5785562 - DNA, 25 bp, Homo sapien
tgacatctagttcctcagcgttgct

SEQ ID NO: 5785563 - DNA, 25 bp, Homo sapien
ggtgtggccgggctcctccctgctg

SEQ ID NO: 5785564 - DNA, 25 bp, Homo sapien
ccttgtgggacgggtggctagtcca

SEQ ID NO: 5785565 - DNA, 25 bp, Homo sapien
accaaaagcctctgaggggagtgga

SEQ ID NO: 5785566 - DNA, 25 bp, Homo sapien
tggaaactgctcccgcgccttcgcc

SEQ ID NO: 5785567 - DNA, 25 bp, Homo sapien
cccttgctgatgtccatcgcaggcc

SEQ ID NO: 5785568 - DNA, 25 bp, Homo sapien
ctggagcactcaaacagtcgtggct

SEQ ID NO: 5785569 - DNA, 25 bp, Homo sapien
atcttgcctaggtccagcaggaaga

SEQ ID NO: 5785570 - DNA, 25 bp, Homo sapien
ctcctgcagcaggtctttgcccttc

SEQ ID NO: 5785571 - DNA, 25 bp, Homo sapien
tacatgaatcgatttatccctcccg

SEQ ID NO: 5785572 - DNA, 25 bp, Homo sapien
gccccctcgggtaccggcaccatct

SEQ ID NO: 5785573 - DNA, 25 bp, Homo sapien
ccagaagtggggaggctcctgaccc

SEQ ID NO: 5785574 - DNA, 25 bp, Homo sapien
atcttgaagccaccctggtccagga

SEQ ID NO: 5785575 - DNA, 25 bp, Homo sapien
gctggaagctggggacctcctcagg

SEQ ID NO: 5785576 - DNA, 25 bp, Homo sapien
cagggccacggcacctgccctgcca

SEQ ID NO: 5785577 - DNA, 25 bp, Homo sapien
ccagcccccgagccttctcagaaat

SEQ ID NO: 5785578 - DNA, 25 bp, Homo sapien
gtccacttgtaggggtcccaagtga

SEQ ID NO: 5785579 - DNA, 25 bp, Homo sapien
cgtcgttcaccacctccacgttggt

SEQ ID NO: 5785580 - DNA, 25 bp, Homo sapien
acttgtaggggtcccaagtgaagaa

SEQ ID NO: 5785581 - DNA, 25 bp, Homo sapien
cgacccagtagtgcaggtcgctgga

SEQ ID NO: 5785582 - DNA, 25 bp, Homo sapien
agtcgctggatgttgaacaagttgg

SEQ ID NO: 5785583 - DNA, 25 bp, Homo sapien
cgggctcctccctgctgggtgagtc

SEQ ID NO: 5785584 - DNA, 25 bp, Homo sapien
agctccacctcagtggcagacacgt

SEQ ID NO: 5785585 - DNA, 25 bp, Homo sapien
tggtcctggtgttgtggctgtcagt

SEQ ID NO: 5785586 - DNA, 25 bp, Homo sapien
ggatgtagaagtcctcctcctgcag

SEQ ID NO: 5785587 - DNA, 25 bp, Homo sapien
gctagacatgcgtccctgccacaca

SEQ ID NO: 5785588 - DNA, 25 bp, Homo sapien
tcactggagttgagggatgaggcac

SEQ ID NO: 5785589 - DNA, 25 bp, Homo sapien
gcaggaagatgtcacccttattaaa

SEQ ID NO: 5785590 - DNA, 25 bp, Homo sapien
cctcctcctgcagcaggtctttgcc

SEQ ID NO: 5785591 - DNA, 25 bp, Homo sapien
accaccacccgtgccatctcacgct

SEQ ID NO: 5785592 - DNA, 25 bp, Homo sapien
ctggaagatggcgaggaagtggggg

SEQ ID NO: 5785593 - DNA, 25 bp, Homo sapien
ccggctgaaggcagcctttctctcc

SEQ ID NO: 5785594 - DNA, 25 bp, Homo sapien
tctcagagatccatatgtggaggcc

SEQ ID NO: 5785595 - DNA, 25 bp, Homo sapien
caatctcatccgcagtggcctggtg

SEQ ID NO: 5785596 - DNA, 25 bp, Homo sapien
tggcctggatgaagcccacagcccg

SEQ ID NO: 5785597 - DNA, 25 bp, Homo sapien
gatttcccaaagatatcttggaagt

SEQ ID NO: 5785598 - DNA, 25 bp, Homo sapien
cctttccatggtgcccagctctctc

SEQ ID NO: 5785599 - DNA, 25 bp, Homo sapien
cagcattgtaagtatgttggggtcc

SEQ ID NO: 5785600 - DNA, 25 bp, Homo sapien
agtgccttgcacttggaaaagcctt

SEQ ID NO: 5785601 - DNA, 25 bp, Homo sapien
gtcccaagtgaagaaccatccaatg

SEQ ID NO: 5785602 - DNA, 25 bp, Homo sapien
cctgtactaggacgccaccatacat

SEQ ID NO: 5785603 - DNA, 25 bp, Homo sapien
tgtaggcgctgctggaaggcctccg

SEQ ID NO: 5785604 - DNA, 25 bp, Homo sapien
gttctgctgccagccgacttggggc

SEQ ID NO: 5785605 - DNA, 25 bp, Homo sapien
tcgggtagcccttggcctggatgaa

SEQ ID NO: 5785606 - DNA, 25 bp, Homo sapien
tcgatttatccctcccgccgagctt

SEQ ID NO: 5785607 - DNA, 25 bp, Homo sapien
caatgaaggtgggaggctcatggcc

SEQ ID NO: 5785608 - DNA, 25 bp, Homo sapien
acgacacaaggaacaacagccagag

SEQ ID NO: 5785609 - DNA, 25 bp, Homo sapien
gccacggcacctgccctgccattgc

SEQ ID NO: 5785610 - DNA, 25 bp, Homo sapien
agaagatgtcactggagttgaggga

SEQ ID NO: 5785611 - DNA, 25 bp, Homo sapien
ctggacgccccctgcgtggccttcg

SEQ ID NO: 5785612 - DNA, 25 bp, Homo sapien
cccacgtccagctttacatgaatcg

SEQ ID NO: 5785613 - DNA, 25 bp, Homo sapien
gctgtccatgacgcttggggtccac

SEQ ID NO: 5785614 - DNA, 25 bp, Homo sapien
ggcgctggtgctgctgacggagctg

SEQ ID NO: 5785615 - DNA, 25 bp, Homo sapien
acttggggcttcgcaccagatcatt

SEQ ID NO: 5785616 - DNA, 25 bp, Homo sapien
tggtgcccagctctctcctggaaga

SEQ ID NO: 5785617 - DNA, 25 bp, Homo sapien
agctgttccaggagagctccacctc

SEQ ID NO: 5785618 - DNA, 25 bp, Homo sapien
cctcccttcctgtagatgattcccg

SEQ ID NO: 5785619 - DNA, 25 bp, Homo sapien
cctgccacacatagatcttgaagcc

SEQ ID NO: 5785620 - DNA, 25 bp, Homo sapien
atgctgactgcccctttccatggtg

SEQ ID NO: 5785621 - DNA, 25 bp, Homo sapien
accacgttccctgtcccggaggctg

SEQ ID NO: 5785622 - DNA, 25 bp, Homo sapien
caagtgaagaaccatccaatgaagg

SEQ ID NO: 5785623 - DNA, 25 bp, Homo sapien
aggcgaacattggccttctgcagct

SEQ ID NO: 5785624 - DNA, 25 bp, Homo sapien
gccatccaccacttccttgtgggac

SEQ ID NO: 5785625 - DNA, 25 bp, Homo sapien
gccaggcaggaatatgggacgacac

SEQ ID NO: 5785626 - DNA, 25 bp, Homo sapien
ccgacacctggctacctgtacaact

SEQ ID NO: 5785627 - DNA, 25 bp, Homo sapien
cacctggctacctgtacaacttgct

SEQ ID NO: 5785628 - DNA, 25 bp, Homo sapien
ccatgatctgcatgaggtccggggc

SEQ ID NO: 5785629 - DNA, 25 bp, Homo sapien
gcagtcggactcgtggccctgcgcc

SEQ ID NO: 5785630 - DNA, 25 bp, Homo sapien
cccatggtcacatgctcctgtacta

SEQ ID NO: 5785631 - DNA, 25 bp, Homo sapien
cggaggctgtaggtcaaagccagcc

SEQ ID NO: 5785632 - DNA, 25 bp, Homo sapien
ccagagccgtcgtccaccatcctga

SEQ ID NO: 5785633 - DNA, 25 bp, Homo sapien
acatctagttcctcagcgttgctgt

SEQ ID NO: 5785634 - DNA, 25 bp, Homo sapien
agcctcttgttgctggggtaggggg

SEQ ID NO: 5785635 - DNA, 25 bp, Homo sapien
tgtacaacttgctcagtttccatgg

SEQ ID NO: 5785636 - DNA, 25 bp, Homo sapien
tcgtggcgctggtgctgctgacgga

SEQ ID NO: 5785637 - DNA, 25 bp, Homo sapien
ctgccctgccattgcccggccatct

SEQ ID NO: 5785638 - DNA, 25 bp, Homo sapien
cccaaaccagaggtagcagacgctg

SEQ ID NO: 5785639 - DNA, 25 bp, Homo sapien
ggggacctcctcagggagcctcttg

SEQ ID NO: 5785640 - DNA, 25 bp, Homo sapien
atccatatgtggaggcctccctgca

SEQ ID NO: 5785641 - DNA, 25 bp, Homo sapien
gagttctcaggctggagaccgacac

SEQ ID NO: 5785642 - DNA, 25 bp, Homo sapien
agcccttggcctggatgaagcccac

SEQ ID NO: 5785643 - DNA, 25 bp, Homo sapien
ctgcgtggccttcgggctctggggg

SEQ ID NO: 5785644 - DNA, 25 bp, Homo sapien
gagatggttgatgctgctgccgggc

SEQ ID NO: 5785645 - DNA, 25 bp, Homo sapien
tggttgatatccttgctgggcgtgg

SEQ ID NO: 5785646 - DNA, 25 bp, Homo sapien
tccagcaggaagatgtcacccttat

SEQ ID NO: 5785647 - DNA, 25 bp, Homo sapien
ggcacctccatggtcctggtgttgt

SEQ ID NO: 5785648 - DNA, 25 bp, Homo sapien
tggatttcccaaagatatcttggaa

SEQ ID NO: 5785649 - DNA, 25 bp, Homo sapien
ttcagggcctcaatctcatccgcag

SEQ ID NO: 5785650 - DNA, 25 bp, Homo sapien
cactgaatcatcatcttgcctaggt

SEQ ID NO: 5785651 - DNA, 25 bp, Homo sapien
tccaatgaaggtgggaggctcatgg

SEQ ID NO: 5785652 - DNA, 25 bp, Homo sapien
agagctccacctcagtggcagacac

SEQ ID NO: 5785653 - DNA, 25 bp, Homo sapien
caaaagcctctgaggggagtggaag

SEQ ID NO: 5785654 - DNA, 25 bp, Homo sapien
tattaaagctgttccaggagagctc

SEQ ID NO: 5785655 - DNA, 25 bp, Homo sapien
catccaccacaccaatctgtgcacg

SEQ ID NO: 5785656 - DNA, 25 bp, Homo sapien
agctgggccgctaacttaggctggg

SEQ ID NO: 5785657 - DNA, 25 bp, Homo sapien
cggcacctgccctgccattgcccgg

SEQ ID NO: 5785658 - DNA, 25 bp, Homo sapien
acatgatgtcatacttgtccaggtc

SEQ ID NO: 5785659 - DNA, 25 bp, Homo sapien
aggggagtggaagcagggcctcccc

SEQ ID NO: 5785660 - DNA, 25 bp, Homo sapien
gcgcctcgcggtgcagcacggtctg

SEQ ID NO: 5785661 - DNA, 25 bp, Homo sapien
gtctccacatgcttgaggtcagatg

SEQ ID NO: 5785662 - DNA, 25 bp, Homo sapien
aggtagcagacgctggctgtgacca

SEQ ID NO: 5785663 - DNA, 25 bp, Homo sapien
ttccacagggtattctgtttttaat

SEQ ID NO: 5785664 - DNA, 25 bp, Homo sapien
attaaaaacagaataccctgtggaa

SEQ ID NO: 5785665 - DNA, 25 bp, Homo sapien
tcttctaacagctggagggtgaacc

SEQ ID NO: 5785666 - DNA, 25 bp, Homo sapien
ggttcaccctccagctgttagaaga

SEQ ID NO: 5785667 - DNA, 25 bp, Homo sapien
actactctagaaggggatgtctacc

SEQ ID NO: 5785668 - DNA, 25 bp, Homo sapien
ggtagacatccccttctagagtagt

SEQ ID NO: 5785669 - DNA, 25 bp, Homo sapien
tggagaataacttcttgctacagca

SEQ ID NO: 5785670 - DNA, 25 bp, Homo sapien
tggacgaggttttgtaaggaaaata

SEQ ID NO: 5785671 - DNA, 25 bp, Homo sapien
tcgggagaggctgcaccgccgcgcc

SEQ ID NO: 5785672 - DNA, 25 bp, Homo sapien
gaactggttcactatagttgcggag

SEQ ID NO: 5785673 - DNA, 25 bp, Homo sapien
tgatgacagttttcccatggaaatc

SEQ ID NO: 5785674 - DNA, 25 bp, Homo sapien
ccttgctcctggctggggcctgttg

SEQ ID NO: 5785675 - DNA, 25 bp, Homo sapien
aagtgttatgggaccgcaccttcag

SEQ ID NO: 5785676 - DNA, 25 bp, Homo sapien
atttgaaagtcaaagtcttatttga

SEQ ID NO: 5785677 - DNA, 25 bp, Homo sapien
cttcttgctacagcataacataagg

SEQ ID NO: 5785678 - DNA, 25 bp, Homo sapien
ctcagaggccgctggtcttgaagac

SEQ ID NO: 5785679 - DNA, 25 bp, Homo sapien
cagatgtctatgatcatttacagct

SEQ ID NO: 5785680 - DNA, 25 bp, Homo sapien
ctccaccatgtgcacgatgggctca

SEQ ID NO: 5785681 - DNA, 25 bp, Homo sapien
atgcttgtattttacttttccattg

SEQ ID NO: 5785682 - DNA, 25 bp, Homo sapien
gatttacaagatgaatatgacttca

SEQ ID NO: 5785683 - DNA, 25 bp, Homo sapien
atccccgtgttactgcctatcagca

SEQ ID NO: 5785684 - DNA, 25 bp, Homo sapien
ccttgcagaacagagaacacgagac

SEQ ID NO: 5785685 - DNA, 25 bp, Homo sapien
cggaacccaggaatctgtccttctt

SEQ ID NO: 5785686 - DNA, 25 bp, Homo sapien
gtgaagttgagactgttggtgaaat

SEQ ID NO: 5785687 - DNA, 25 bp, Homo sapien
cagccctgcatgccaacgcaccctc

SEQ ID NO: 5785688 - DNA, 25 bp, Homo sapien
gcgagagcgtgccctgttgaaggac

SEQ ID NO: 5785689 - DNA, 25 bp, Homo sapien
gaatgtcactgaacttacccagaat

SEQ ID NO: 5785690 - DNA, 25 bp, Homo sapien
tgtctgaaggaagaaaggaaaattc

SEQ ID NO: 5785691 - DNA, 25 bp, Homo sapien
gaatctgtccttcttcctgactcca

SEQ ID NO: 5785692 - DNA, 25 bp, Homo sapien
caaggttatgtgtatagagcatgaa

SEQ ID NO: 5785693 - DNA, 25 bp, Homo sapien
ttgacagtaaagtcagaaatgtgaa

SEQ ID NO: 5785694 - DNA, 25 bp, Homo sapien
aggcgaacctgacttccatgcggtt

SEQ ID NO: 5785695 - DNA, 25 bp, Homo sapien
ctaggttaacgttcgcactctgtgt

SEQ ID NO: 5785696 - DNA, 25 bp, Homo sapien
ttcctggagcaggttcaccagcttt

SEQ ID NO: 5785697 - DNA, 25 bp, Homo sapien
ttacccagaatgccctgattaatga

SEQ ID NO: 5785698 - DNA, 25 bp, Homo sapien
aaattctggaaaacgcccagagatt

SEQ ID NO: 5785699 - DNA, 25 bp, Homo sapien
caaagtcttatttgataaagatgtg

SEQ ID NO: 5785700 - DNA, 25 bp, Homo sapien
agcgtaatcttcaggataattttca

SEQ ID NO: 5785701 - DNA, 25 bp, Homo sapien
agttttcttctgtcaccaaaagagg

SEQ ID NO: 5785702 - DNA, 25 bp, Homo sapien
ttcagcagcttgactcaaaattcct

SEQ ID NO: 5785703 - DNA, 25 bp, Homo sapien
gatgggtgcatcatgggcttcatca

SEQ ID NO: 5785704 - DNA, 25 bp, Homo sapien
aagagaaaggaagtagttcacaaaa

SEQ ID NO: 5785705 - DNA, 25 bp, Homo sapien
gcacacaaaagtgatgaacatggag

SEQ ID NO: 5785706 - DNA, 25 bp, Homo sapien
cacagtggttagaaaagcaagactg

SEQ ID NO: 5785707 - DNA, 25 bp, Homo sapien
cggcacctgcaattgaaagaacaga

SEQ ID NO: 5785708 - DNA, 25 bp, Homo sapien
agctggatgatcaatatagtcgctt

SEQ ID NO: 5785709 - DNA, 25 bp, Homo sapien
tcctctcatcgttactgaagagctt

SEQ ID NO: 5785710 - DNA, 25 bp, Homo sapien
agagatttaatcaggctcagtcggg

SEQ ID NO: 5785711 - DNA, 25 bp, Homo sapien
ctgggagcacgctgccaatgatgtt

SEQ ID NO: 5785712 - DNA, 25 bp, Homo sapien
gggggccgcccaatgcttgcttgga

SEQ ID NO: 5785713 - DNA, 25 bp, Homo sapien
agtgctgagttggcagttttcttct

SEQ ID NO: 5785714 - DNA, 25 bp, Homo sapien
ggaagttcaacattttgggcacgca

SEQ ID NO: 5785715 - DNA, 25 bp, Homo sapien
aacccaattgtgccagcctggtttg

SEQ ID NO: 5785716 - DNA, 25 bp, Homo sapien
gtctgcagcaagttcggcagcagct

SEQ ID NO: 5785717 - DNA, 25 bp, Homo sapien
cgttttcatgacctcctgtcacagc

SEQ ID NO: 5785718 - DNA, 25 bp, Homo sapien
gccatcacagctgaacttgttgaga

SEQ ID NO: 5785719 - DNA, 25 bp, Homo sapien
atttctgtgtctgaagtgtaagtga

SEQ ID NO: 5785720 - DNA, 25 bp, Homo sapien
gtgaaggacaaggttatgtgtatag

SEQ ID NO: 5785721 - DNA, 25 bp, Homo sapien
aagcatcctagaactcattaaaaaa

SEQ ID NO: 5785722 - DNA, 25 bp, Homo sapien
gaggagtccaccaatggcagtctgg

SEQ ID NO: 5785723 - DNA, 25 bp, Homo sapien
ttttcttctgtcaccaaaagaggtc

SEQ ID NO: 5785724 - DNA, 25 bp, Homo sapien
gaaagtcaaagtcttatttgataaa

SEQ ID NO: 5785725 - DNA, 25 bp, Homo sapien
ttgtggtggaaagacagccctgcat

SEQ ID NO: 5785726 - DNA, 25 bp, Homo sapien
tgacatgtttacaaacctcaagcca

SEQ ID NO: 5785727 - DNA, 25 bp, Homo sapien
ctgagaatattcctgagaatcccct

SEQ ID NO: 5785728 - DNA, 25 bp, Homo sapien
ccaacgcaccctcagaggccgctgg

SEQ ID NO: 5785729 - DNA, 25 bp, Homo sapien
ggcggaacccaggaatctgtccttc

SEQ ID NO: 5785730 - DNA, 25 bp, Homo sapien
ttgacaataagagaaaggaagtagt

SEQ ID NO: 5785731 - DNA, 25 bp, Homo sapien
aggaatctgtccttcttcctgactc

SEQ ID NO: 5785732 - DNA, 25 bp, Homo sapien
tcctttggtacaacatgctggtggc

SEQ ID NO: 5785733 - DNA, 25 bp, Homo sapien
acctcaagccagccttgctcctggc

SEQ ID NO: 5785734 - DNA, 25 bp, Homo sapien
gagagaagcttcttggtcctaacgc

SEQ ID NO: 5785735 - DNA, 25 bp, Homo sapien
aagatttacaagatgaatatgactt

SEQ ID NO: 5785736 - DNA, 25 bp, Homo sapien
gaccaatggtgtggcaaagagtgat

SEQ ID NO: 5785737 - DNA, 25 bp, Homo sapien
gaacacgagaccaatggtgtggcaa

SEQ ID NO: 5785738 - DNA, 25 bp, Homo sapien
gagcgtgccctgttgaaggaccagc

SEQ ID NO: 5785739 - DNA, 25 bp, Homo sapien
gaacctgacttccatgcggttgaac

SEQ ID NO: 5785740 - DNA, 25 bp, Homo sapien
ccaatggcagtctggcggctgaatt

SEQ ID NO: 5785741 - DNA, 25 bp, Homo sapien
agatgcttgtattttacttttccat

SEQ ID NO: 5785742 - DNA, 25 bp, Homo sapien
gatatatcaagactgagttgatttc

SEQ ID NO: 5785743 - DNA, 25 bp, Homo sapien
cggttgggcctccatcctttggtac

SEQ ID NO: 5785744 - DNA, 25 bp, Homo sapien
tgctgaatgtcactgaacttaccca

SEQ ID NO: 5785745 - DNA, 25 bp, Homo sapien
tgctgcggttcagtgagagctcccg

SEQ ID NO: 5785746 - DNA, 25 bp, Homo sapien
aaacaagtgttatgggaccgcacct

SEQ ID NO: 5785747 - DNA, 25 bp, Homo sapien
acttacccagaatgccctgattaat

SEQ ID NO: 5785748 - DNA, 25 bp, Homo sapien
gcaagagctgaattataatttgaaa

SEQ ID NO: 5785749 - DNA, 25 bp, Homo sapien
gaatgatgggtgcatcatgggcttc

SEQ ID NO: 5785750 - DNA, 25 bp, Homo sapien
atggccctaaaggaactggatatat

SEQ ID NO: 5785751 - DNA, 25 bp, Homo sapien
ctgagttggcagttttcttctgtca

SEQ ID NO: 5785752 - DNA, 25 bp, Homo sapien
aggaattggaacagaaatacaccta

SEQ ID NO: 5785753 - DNA, 25 bp, Homo sapien
gttagacaaacagaaagagcttgac

SEQ ID NO: 5785754 - DNA, 25 bp, Homo sapien
attacaaagtcatggctgctgagaa

SEQ ID NO: 5785755 - DNA, 25 bp, Homo sapien
gaactcattaaaaaacacctgctcc

SEQ ID NO: 5785756 - DNA, 25 bp, Homo sapien
ggaccgcaccttcagtcttttccag

SEQ ID NO: 5785757 - DNA, 25 bp, Homo sapien
gtgaaattgcaagagctgaattata

SEQ ID NO: 5785758 - DNA, 25 bp, Homo sapien
tcctgactccaccatgtgcacgatg

SEQ ID NO: 5785759 - DNA, 25 bp, Homo sapien
ctgcaccgccgcgcccccgcctagc

SEQ ID NO: 5785760 - DNA, 25 bp, Homo sapien
cctaacgtgctgtgcgtagctgctc

SEQ ID NO: 5785761 - DNA, 25 bp, Homo sapien
catgcggttgaaccctacacgaaga

SEQ ID NO: 5785762 - DNA, 25 bp, Homo sapien
ggctgaatttcggcacctgcaattg

SEQ ID NO: 5785763 - DNA, 25 bp, Homo sapien
ggaggggctcggctgcaccgggggg

SEQ ID NO: 5785764 - DNA, 25 bp, Homo sapien
ggagcggtcccagaacggaggcgaa

SEQ ID NO: 5785765 - DNA, 25 bp, Homo sapien
atccccaggcccttgttggggcaca

SEQ ID NO: 5785766 - DNA, 25 bp, Homo sapien
gggtccagttcactgtgaagttgag

SEQ ID NO: 5785767 - DNA, 25 bp, Homo sapien
tatgggaccgcaccttcagtctttt

SEQ ID NO: 5785768 - DNA, 25 bp, Homo sapien
acattcacatgggtggagcggtccc

SEQ ID NO: 5785769 - DNA, 25 bp, Homo sapien
gcaaaaccttgcagaacagagaaca

SEQ ID NO: 5785770 - DNA, 25 bp, Homo sapien
tcggggaatattcagagcacagtga

SEQ ID NO: 5785771 - DNA, 25 bp, Homo sapien
gaaggaccagcagccggggaccttc

SEQ ID NO: 5785772 - DNA, 25 bp, Homo sapien
acacgagaccaatggtgtggcaaag

SEQ ID NO: 5785773 - DNA, 25 bp, Homo sapien
ctgttggtgaaattgcaagagctga

SEQ ID NO: 5785774 - DNA, 25 bp, Homo sapien
ctcggctgcaccggggggatcgcgc

SEQ ID NO: 5785775 - DNA, 25 bp, Homo sapien
ttggtcctaacgccagccccgatgg

SEQ ID NO: 5785776 - DNA, 25 bp, Homo sapien
tgtgccagcctggtttggtaattga

SEQ ID NO: 5785777 - DNA, 25 bp, Homo sapien
gaagttgagactgttggtgaaattg

SEQ ID NO: 5785778 - DNA, 25 bp, Homo sapien
tggagcaggttcaccagctttatga

SEQ ID NO: 5785779 - DNA, 25 bp, Homo sapien
ccaggaatctgtccttcttcctgac

SEQ ID NO: 5785780 - DNA, 25 bp, Homo sapien
agaactttctgctgttactttccct

SEQ ID NO: 5785781 - DNA, 25 bp, Homo sapien
tcaccaaaagaggtctcaatgtgga

SEQ ID NO: 5785782 - DNA, 25 bp, Homo sapien
ctggtcttgaagacaggggtccagt

SEQ ID NO: 5785783 - DNA, 25 bp, Homo sapien
tttggagaataacttcttgctacag

SEQ ID NO: 5785784 - DNA, 25 bp, Homo sapien
tcgtttgtggtggaaagacagccct

SEQ ID NO: 5785785 - DNA, 25 bp, Homo sapien
ttgagactgttggtgaaattgcaag

SEQ ID NO: 5785786 - DNA, 25 bp, Homo sapien
cgagacgacctctctgcccgttgtg

SEQ ID NO: 5785787 - DNA, 25 bp, Homo sapien
ttcccttctggctttggattgaaag

SEQ ID NO: 5785788 - DNA, 25 bp, Homo sapien
ccttcagtcttttccagcagctcat

SEQ ID NO: 5785789 - DNA, 25 bp, Homo sapien
gcttcatcagcaaggagcgagagcg

SEQ ID NO: 5785790 - DNA, 25 bp, Homo sapien
ccgagcagaggcgacccagcgcgct

SEQ ID NO: 5785791 - DNA, 25 bp, Homo sapien
caaaagaggtctcaatgtggaccag

SEQ ID NO: 5785792 - DNA, 25 bp, Homo sapien
gagctcgtttgtggtggaaagacag

SEQ ID NO: 5785793 - DNA, 25 bp, Homo sapien
gttgctgaatgtcactgaacttacc

SEQ ID NO: 5785794 - DNA, 25 bp, Homo sapien
gtttggtaattgacctcgagacgac

SEQ ID NO: 5785795 - DNA, 25 bp, Homo sapien
ggcacctaacgtgctgtgcgtagct

SEQ ID NO: 5785796 - DNA, 25 bp, Homo sapien
acgaagaaagaactttctgctgtta

SEQ ID NO: 5785797 - DNA, 25 bp, Homo sapien
cattttgggcacgcacacaaaagtg

SEQ ID NO: 5785798 - DNA, 25 bp, Homo sapien
tcccgggaaggggccatcacattca

SEQ ID NO: 5785799 - DNA, 25 bp, Homo sapien
atgcaaaaccttgcagaacagagaa

SEQ ID NO: 5785800 - DNA, 25 bp, Homo sapien
gcgaacctgacttccatgcggttga

SEQ ID NO: 5785801 - DNA, 25 bp, Homo sapien
gagcagaggcgacccagcgcgctcg

SEQ ID NO: 5785802 - DNA, 25 bp, Homo sapien
gggagaggctgcaccgccgcgcccc

SEQ ID NO: 5785803 - DNA, 25 bp, Homo sapien
ggaagtagttcacaaaataatagag

SEQ ID NO: 5785804 - DNA, 25 bp, Homo sapien
gtggagtggaagcggagacagcaga

SEQ ID NO: 5785805 - DNA, 25 bp, Homo sapien
gagtgatcagaaacaagaacagctg

SEQ ID NO: 5785806 - DNA, 25 bp, Homo sapien
caccagaacgaatgagggtcctctc

SEQ ID NO: 5785807 - DNA, 25 bp, Homo sapien
ccagttcactgtgaagttgagactg

SEQ ID NO: 5785808 - DNA, 25 bp, Homo sapien
aagatgtatttaatgcttgacaata

SEQ ID NO: 5785809 - DNA, 25 bp, Homo sapien
gctcccgggaaggggccatcacatt

SEQ ID NO: 5785810 - DNA, 25 bp, Homo sapien
attgaaagaacagaaaaatgctggc

SEQ ID NO: 5785811 - DNA, 25 bp, Homo sapien
gagttggcagttttcttctgtcacc

SEQ ID NO: 5785812 - DNA, 25 bp, Homo sapien
ccttcctgctgcggttcagtgagag

SEQ ID NO: 5785813 - DNA, 25 bp, Homo sapien
tgccaccatccgttttcatgacctc

SEQ ID NO: 5785814 - DNA, 25 bp, Homo sapien
aaagttggaggaattggaacagaaa

SEQ ID NO: 5785815 - DNA, 25 bp, Homo sapien
gctgaattataatttgaaagtcaaa

SEQ ID NO: 5785816 - DNA, 25 bp, Homo sapien
cttctggctttggattgaaagcatc

SEQ ID NO: 5785817 - DNA, 25 bp, Homo sapien
gagtctgcggaggggctcggctgca

SEQ ID NO: 5785818 - DNA, 25 bp, Homo sapien
aagactgggagcacgctgccaatga

SEQ ID NO: 5785819 - DNA, 25 bp, Homo sapien
tgggcctccatcctttggtacaaca

SEQ ID NO: 5785820 - DNA, 25 bp, Homo sapien
acttcagcagcttgactcaaaattc

SEQ ID NO: 5785821 - DNA, 25 bp, Homo sapien
ttcactcccttagttttgaaaccca

SEQ ID NO: 5785822 - DNA, 25 bp, Homo sapien
gaatccccaggcccttgttggggca

SEQ ID NO: 5785823 - DNA, 25 bp, Homo sapien
cagtcttttccagcagctcattcag

SEQ ID NO: 5785824 - DNA, 25 bp, Homo sapien
caacatgctggtggcggaacccagg

SEQ ID NO: 5785825 - DNA, 25 bp, Homo sapien
catcagcaaggagcgagagcgtgcc

SEQ ID NO: 5785826 - DNA, 25 bp, Homo sapien
acagctgaacttgttgagatccccg

SEQ ID NO: 5785827 - DNA, 25 bp, Homo sapien
catgcctttggaaagtattactcca

SEQ ID NO: 5785828 - DNA, 25 bp, Homo sapien
accatgcctttggaaagtattactc

SEQ ID NO: 5785829 - DNA, 25 bp, Homo sapien
gttactgaagagcttcactccctta

SEQ ID NO: 5785830 - DNA, 25 bp, Homo sapien
ccggggggatcgcgcctggcagacc

SEQ ID NO: 5785831 - DNA, 25 bp, Homo sapien
atgacttcaaatgcaaaaccttgca

SEQ ID NO: 5785832 - DNA, 25 bp, Homo sapien
aatcaagagcctggaagatttacaa

SEQ ID NO: 5785833 - DNA, 25 bp, Homo sapien
gacaaggttatgtgtatagagcatg

SEQ ID NO: 5785834 - DNA, 25 bp, Homo sapien
gtgttatgggaccgcaccttcagtc

SEQ ID NO: 5785835 - DNA, 25 bp, Homo sapien
tggaaagtattactccaggccaaag

SEQ ID NO: 5785836 - DNA, 25 bp, Homo sapien
caaaataatagagttgctgaatgtc

SEQ ID NO: 5785837 - DNA, 25 bp, Homo sapien
tctgcccgttgtggtgatctccaac

SEQ ID NO: 5785838 - DNA, 25 bp, Homo sapien
gaacttacccagaatgccctgatta

SEQ ID NO: 5785839 - DNA, 25 bp, Homo sapien
acctgcaattgaaagaacagaaaaa

SEQ ID NO: 5785840 - DNA, 25 bp, Homo sapien
gccatcacattcacatgggtggagc

SEQ ID NO: 5785841 - DNA, 25 bp, Homo sapien
caagttcggcagcagcttaaaaagt

SEQ ID NO: 5785842 - DNA, 25 bp, Homo sapien
tgctcctttggttgaatccccaggc

SEQ ID NO: 5785843 - DNA, 25 bp, Homo sapien
tacagctgtctgaaggaagaaagga

SEQ ID NO: 5785844 - DNA, 25 bp, Homo sapien
catcatgggcttcatcagcaaggag

SEQ ID NO: 5785845 - DNA, 25 bp, Homo sapien
gtggtgatctccaacgtcagccagc

SEQ ID NO: 5785846 - DNA, 25 bp, Homo sapien
aatagagttgctgaatgtcactgaa

SEQ ID NO: 5785847 - DNA, 25 bp, Homo sapien
cttcaggataattttcaggaagacc

SEQ ID NO: 5785848 - DNA, 25 bp, Homo sapien
gcagttttcttctgtcaccaaaaga

SEQ ID NO: 5785849 - DNA, 25 bp, Homo sapien
tagagttgctgaatgtcactgaact

SEQ ID NO: 5785850 - DNA, 25 bp, Homo sapien
cagcgcgctcgggagaggctgcacc

SEQ ID NO: 5785851 - DNA, 25 bp, Homo sapien
cagaacggaggcgaacctgacttcc

SEQ ID NO: 5785852 - DNA, 25 bp, Homo sapien
gagaccaatggtgtggcaaagagtg

SEQ ID NO: 5785853 - DNA, 25 bp, Homo sapien
gagttgatttctgtgtctgaagtgt

SEQ ID NO: 5785854 - DNA, 25 bp, Homo sapien
gtcatggctgctgagaatattcctg

SEQ ID NO: 5785855 - DNA, 25 bp, Homo sapien
aacagagaacacgagaccaatggtg

SEQ ID NO: 5785856 - DNA, 25 bp, Homo sapien
gagagtctgcagcaagttcggcagc

SEQ ID NO: 5785857 - DNA, 25 bp, Homo sapien
ggcctgttgaagatgcttgtatttt

SEQ ID NO: 5785858 - DNA, 25 bp, Homo sapien
gggccgcccaatgcttgcttggatc

SEQ ID NO: 5785859 - DNA, 25 bp, Homo sapien
cagaaagagcttgacagtaaagtca

SEQ ID NO: 5785860 - DNA, 25 bp, Homo sapien
attactccaggccaaaggaagcacc

SEQ ID NO: 5785861 - DNA, 25 bp, Homo sapien
ctaacgccagccccgatggtctcat

SEQ ID NO: 5785862 - DNA, 25 bp, Homo sapien
tccatcctttggtacaacatgctgg

SEQ ID NO: 5785863 - DNA, 25 bp, Homo sapien
gcacctgcaattgaaagaacagaaa

SEQ ID NO: 5785864 - DNA, 25 bp, Homo sapien
acgttcgcactctgtgtatataacc

SEQ ID NO: 5785865 - DNA, 25 bp, Homo sapien
gggagagaagcttcttggtcctaac

SEQ ID NO: 5785866 - DNA, 25 bp, Homo sapien
acagtcttggcacctaacgtgctgt

SEQ ID NO: 5785867 - DNA, 25 bp, Homo sapien
tcgccatcacagctgaacttgttga

SEQ ID NO: 5785868 - DNA, 25 bp, Homo sapien
tgctgtatgccatcctcgagagctg

SEQ ID NO: 5785869 - DNA, 25 bp, Homo sapien
caagaagatgtatttaatgcttgac

SEQ ID NO: 5785870 - DNA, 25 bp, Homo sapien
tgttgaaggaccagcagccggggac

SEQ ID NO: 5785871 - DNA, 25 bp, Homo sapien
accagagccaatggaacttgatggc

SEQ ID NO: 5785872 - DNA, 25 bp, Homo sapien
atcgcgcctggcagaccccagaccg

SEQ ID NO: 5785873 - DNA, 25 bp, Homo sapien
cctggcagaccccagaccgagcaga

SEQ ID NO: 5785874 - DNA, 25 bp, Homo sapien
taatttgaaagtcaaagtcttattt

SEQ ID NO: 5785875 - DNA, 25 bp, Homo sapien
ccaccatccgttttcatgacctcct

SEQ ID NO: 5785876 - DNA, 25 bp, Homo sapien
ctgaacttgttgagatccccgtgtt

SEQ ID NO: 5785877 - DNA, 25 bp, Homo sapien
tcaagactgagttgatttctgtgtc

SEQ ID NO: 5785878 - DNA, 25 bp, Homo sapien
tggtggcggaacccaggaatctgtc

SEQ ID NO: 5785879 - DNA, 25 bp, Homo sapien
gaaaacgcccagagatttaatcagg

SEQ ID NO: 5785880 - DNA, 25 bp, Homo sapien
agctgaacttgttgagatccccgtg

SEQ ID NO: 5785881 - DNA, 25 bp, Homo sapien
actcattaaaaaacacctgctccct

SEQ ID NO: 5785882 - DNA, 25 bp, Homo sapien
ctggaagatttacaagatgaatatg

SEQ ID NO: 5785883 - DNA, 25 bp, Homo sapien
cctgtcacagctggatgatcaatat

SEQ ID NO: 5785884 - DNA, 25 bp, Homo sapien
tggtctcattccgtggacgaggttt

SEQ ID NO: 5785885 - DNA, 25 bp, Homo sapien
tcttggcacctaacgtgctgtgcgt

SEQ ID NO: 5785886 - DNA, 25 bp, Homo sapien
gacgaggttttgtaaggaaaatata

SEQ ID NO: 5785887 - DNA, 25 bp, Homo sapien
catttgctgtatgccatcctcgaga

SEQ ID NO: 5785888 - DNA, 25 bp, Homo sapien
ttgtattttacttttccattgtaat

SEQ ID NO: 5785889 - DNA, 25 bp, Homo sapien
tggctgctgagaatattcctgagaa

SEQ ID NO: 5785890 - DNA, 25 bp, Homo sapien
gcaccgccgcgcccccgcctagccc

SEQ ID NO: 5785891 - DNA, 25 bp, Homo sapien
tgccaatgatgtttcatttgccacc

SEQ ID NO: 5785892 - DNA, 25 bp, Homo sapien
gaagaaagaactttctgctgttact

SEQ ID NO: 5785893 - DNA, 25 bp, Homo sapien
tacaagatgaatatgacttcaaatg

SEQ ID NO: 5785894 - DNA, 25 bp, Homo sapien
ttcatttgccaccatccgttttcat

SEQ ID NO: 5785895 - DNA, 25 bp, Homo sapien
agcgcctgtattggggggccgccca

SEQ ID NO: 5785896 - DNA, 25 bp, Homo sapien
cttttccagcagctcattcagagct

SEQ ID NO: 5785897 - DNA, 25 bp, Homo sapien
cctatcacaaaaaacaaacaagtgt

SEQ ID NO: 5785898 - DNA, 25 bp, Homo sapien
aggatgtctcagtggtacgaacttc

SEQ ID NO: 5785899 - DNA, 25 bp, Homo sapien
aagagctgaattataatttgaaagt

SEQ ID NO: 5785900 - DNA, 25 bp, Homo sapien
caatgcttgcttggatcagctgcag

SEQ ID NO: 5785901 - DNA, 25 bp, Homo sapien
gtggaccagctgaacatgttgggag

SEQ ID NO: 5785902 - DNA, 25 bp, Homo sapien
ctgctgttactttccctgacatcat

SEQ ID NO: 5785903 - DNA, 25 bp, Homo sapien
ctgaatttcggcacctgcaattgaa

SEQ ID NO: 5785904 - DNA, 25 bp, Homo sapien
ctcctgtcacagctggatgatcaat

SEQ ID NO: 5785905 - DNA, 25 bp, Homo sapien
ttgggagagaagcttcttggtccta

SEQ ID NO: 5785906 - DNA, 25 bp, Homo sapien
actagtggagtggaagcggagacag

SEQ ID NO: 5785907 - DNA, 25 bp, Homo sapien
ttcagagcacagtgatgttagacaa

SEQ ID NO: 5785908 - DNA, 25 bp, Homo sapien
gagagcgtgccctgttgaaggacca

SEQ ID NO: 5785909 - DNA, 25 bp, Homo sapien
ccagaatgccctgattaatgatgaa

SEQ ID NO: 5785910 - DNA, 25 bp, Homo sapien
tcagaaacaagaacagctgttactc

SEQ ID NO: 5785911 - DNA, 25 bp, Homo sapien
tggaaagacagccctgcatgccaac

SEQ ID NO: 5785912 - DNA, 25 bp, Homo sapien
gatcaatatagtcgcttttctttgg

SEQ ID NO: 5785913 - DNA, 25 bp, Homo sapien
tccagatgtctatgatcatttacag

SEQ ID NO: 5785914 - DNA, 25 bp, Homo sapien
gttggcagttttcttctgtcaccaa

SEQ ID NO: 5785915 - DNA, 25 bp, Homo sapien
aatgatgtttcatttgccaccatcc

SEQ ID NO: 5785916 - DNA, 25 bp, Homo sapien
cgcccaatgcttgcttggatcagct

SEQ ID NO: 5785917 - DNA, 25 bp, Homo sapien
gtccagttcactgtgaagttgagac

SEQ ID NO: 5785918 - DNA, 25 bp, Homo sapien
gttcactatagttgcggagagtctg

SEQ ID NO: 5785919 - DNA, 25 bp, Homo sapien
gtctgaagtgtaagtgaacacagaa

SEQ ID NO: 5785920 - DNA, 25 bp, Homo sapien
tcctggctggggcctgttgaagatg

SEQ ID NO: 5785921 - DNA, 25 bp, Homo sapien
tttacagctgtctgaaggaagaaag

SEQ ID NO: 5785922 - DNA, 25 bp, Homo sapien
acgctgccaatgatgtttcatttgc

SEQ ID NO: 5785923 - DNA, 25 bp, Homo sapien
gcttgacagtaaagtcagaaatgtg

SEQ ID NO: 5785924 - DNA, 25 bp, Homo sapien
cccttctggctttggattgaaagca

SEQ ID NO: 5785925 - DNA, 25 bp, Homo sapien
tgagatccccgtgttactgcctatc

SEQ ID NO: 5785926 - DNA, 25 bp, Homo sapien
cgtaatcttcaggataattttcagg

SEQ ID NO: 5785927 - DNA, 25 bp, Homo sapien
gacttcaaatgcaaaaccttgcaga

SEQ ID NO: 5785928 - DNA, 25 bp, Homo sapien
agaacagagaacacgagaccaatgg

SEQ ID NO: 5785929 - DNA, 25 bp, Homo sapien
gattgaaagcatcctagaactcatt

SEQ ID NO: 5785930 - DNA, 25 bp, Homo sapien
ttcatcagcaaggagcgagagcgtg

SEQ ID NO: 5785931 - DNA, 25 bp, Homo sapien
gggagcacgctgccaatgatgtttc

SEQ ID NO: 5785932 - DNA, 25 bp, Homo sapien
gttcaccagctttatgatgacagtt

SEQ ID NO: 5785933 - DNA, 25 bp, Homo sapien
ccttcttcctgactccaccatgtgc

SEQ ID NO: 5785934 - DNA, 25 bp, Homo sapien
gaagcggagacagcagagcgcctgt

SEQ ID NO: 5785935 - DNA, 25 bp, Homo sapien
aatgatgaactagtggagtggaagc

SEQ ID NO: 5785936 - DNA, 25 bp, Homo sapien
gaccttcctgctgcggttcagtgag

SEQ ID NO: 5785937 - DNA, 25 bp, Homo sapien
cagtggttagaaaagcaagactggg

SEQ ID NO: 5785938 - DNA, 25 bp, Homo sapien
ctgcctatcagcattttactacttt

SEQ ID NO: 5785939 - DNA, 25 bp, Homo sapien
cttcctgactccaccatgtgcacga

SEQ ID NO: 5785940 - DNA, 25 bp, Homo sapien
tataaatgataaaaattttcccttc

SEQ ID NO: 5785941 - DNA, 25 bp, Homo sapien
tcctaacgccagccccgatggtctc

SEQ ID NO: 5785942 - DNA, 25 bp, Homo sapien
ctttggttgaatccccaggcccttg

SEQ ID NO: 5785943 - DNA, 25 bp, Homo sapien
gcttggatcagctgcagaactggtt

SEQ ID NO: 5785944 - DNA, 25 bp, Homo sapien
ggtcttgaagacaggggtccagttc

SEQ ID NO: 5785945 - DNA, 25 bp, Homo sapien
ggccgctggtcttgaagacaggggt

SEQ ID NO: 5785946 - DNA, 25 bp, Homo sapien
ccagccccgatggtctcattccgtg

SEQ ID NO: 5785947 - DNA, 25 bp, Homo sapien
aggataattttcaggaagacccaat

SEQ ID NO: 5785948 - DNA, 25 bp, Homo sapien
caattgtgccagcctggtttggtaa

SEQ ID NO: 5785949 - DNA, 25 bp, Homo sapien
tgggaccgcaccttcagtcttttcc

SEQ ID NO: 5785950 - DNA, 25 bp, Homo sapien
ttacaaacctcaagccagccttgct

SEQ ID NO: 5785951 - DNA, 25 bp, Homo sapien
tccgttttcatgacctcctgtcaca

SEQ ID NO: 5785952 - DNA, 25 bp, Homo sapien
tcaatatagtcgcttttctttggag

SEQ ID NO: 5785953 - DNA, 25 bp, Homo sapien
ccaatccagatgtctatgatcattt

SEQ ID NO: 5785954 - DNA, 25 bp, Homo sapien
ccctcagaggccgctggtcttgaag

SEQ ID NO: 5785955 - DNA, 25 bp, Homo sapien
agtgaacacagaagagtgacatgtt

SEQ ID NO: 5785956 - DNA, 25 bp, Homo sapien
gtgtctgaagtgtaagtgaacacag

SEQ ID NO: 5785957 - DNA, 25 bp, Homo sapien
ctccaacgtcagccagctcccgagc

SEQ ID NO: 5785958 - DNA, 25 bp, Homo sapien
gtctcaatgtggaccagctgaacat

SEQ ID NO: 5785959 - DNA, 25 bp, Homo sapien
aaaagtttcatttgctgtatgccat

SEQ ID NO: 5785960 - DNA, 25 bp, Homo sapien
acctcgacagtcttggcacctaacg

SEQ ID NO: 5785961 - DNA, 25 bp, Homo sapien
cctttggaaagtattactccaggcc

SEQ ID NO: 5785962 - DNA, 25 bp, Homo sapien
accaaaagaggtctcaatgtggacc

SEQ ID NO: 5785963 - DNA, 25 bp, Homo sapien
gccgcccaatgcttgcttggatcag

SEQ ID NO: 5785964 - DNA, 25 bp, Homo sapien
cctgaagtatctgtatccaaatatt

SEQ ID NO: 5785965 - DNA, 25 bp, Homo sapien
gatgtgaatgagagaaatacagtaa

SEQ ID NO: 5785966 - DNA, 25 bp, Homo sapien
aattgctatcgccatcacagctgaa

SEQ ID NO: 5785967 - DNA, 25 bp, Homo sapien
caccaatggcagtctggcggctgaa

SEQ ID NO: 5785968 - DNA, 25 bp, Homo sapien
aaaagtgatgaacatggaggagtcc

SEQ ID NO: 5785969 - DNA, 25 bp, Homo sapien
tagacaaacagaaagagcttgacag

SEQ ID NO: 5785970 - DNA, 25 bp, Homo sapien
cgctggtcttgaagacaggggtcca

SEQ ID NO: 5785971 - DNA, 25 bp, Homo sapien
atgccatcctcgagagctgtctagg

SEQ ID NO: 5785972 - DNA, 25 bp, Homo sapien
gccgcgcccccgcctagcccttccg

SEQ ID NO: 5785973 - DNA, 25 bp, Homo sapien
ctagcccttccggatcctgcgcgca

SEQ ID NO: 5785974 - DNA, 25 bp, Homo sapien
cagcagagcgcctgtattggggggc

SEQ ID NO: 5785975 - DNA, 25 bp, Homo sapien
caaacagaaagagcttgacagtaaa

SEQ ID NO: 5785976 - DNA, 25 bp, Homo sapien
acatgtttacaaacctcaagccagc

SEQ ID NO: 5785977 - DNA, 25 bp, Homo sapien
gaaagagcttgacagtaaagtcaga

SEQ ID NO: 5785978 - DNA, 25 bp, Homo sapien
aggttaacgttcgcactctgtgtat

SEQ ID NO: 5785979 - DNA, 25 bp, Homo sapien
acaagaacagctgttactcaagaag

SEQ ID NO: 5785980 - DNA, 25 bp, Homo sapien
atttcggcacctgcaattgaaagaa

SEQ ID NO: 5785981 - DNA, 25 bp, Homo sapien
gcacaaggtggcaggatgtctcagt

SEQ ID NO: 5785982 - DNA, 25 bp, Homo sapien
tgctgagaatattcctgagaatccc

SEQ ID NO: 5785983 - DNA, 25 bp, Homo sapien
aaaatgctggcaccagaacgaatga

SEQ ID NO: 5785984 - DNA, 25 bp, Homo sapien
agaaatacacctacgaacatgaccc

SEQ ID NO: 5785985 - DNA, 25 bp, Homo sapien
aaacgcccagagatttaatcaggct

SEQ ID NO: 5785986 - DNA, 25 bp, Homo sapien
gagcaggttcaccagctttatgatg

SEQ ID NO: 5785987 - DNA, 25 bp, Homo sapien
ctatcagcattttactactttaaaa

SEQ ID NO: 5785988 - DNA, 25 bp, Homo sapien
gtccttcttcctgactccaccatgt

SEQ ID NO: 5785989 - DNA, 25 bp, Homo sapien
ggggcctgttgaagatgcttgtatt

SEQ ID NO: 5785990 - DNA, 25 bp, Homo sapien
tcaggctcagtcggggaatattcag

SEQ ID NO: 5785991 - DNA, 25 bp, Homo sapien
tgtgtatataacctcgacagtcttg

SEQ ID NO: 5785992 - DNA, 25 bp, Homo sapien
aaggaagtagttcacaaaataatag

SEQ ID NO: 5785993 - DNA, 25 bp, Homo sapien
cctggagcaggttcaccagctttat

SEQ ID NO: 5785994 - DNA, 25 bp, Homo sapien
agaccatgcctttggaaagtattac

SEQ ID NO: 5785995 - DNA, 25 bp, Homo sapien
taaggaaaagcaagcgtaatcttca

SEQ ID NO: 5785996 - DNA, 25 bp, Homo sapien
tggtttggtaattgacctcgagacg

SEQ ID NO: 5785997 - DNA, 25 bp, Homo sapien
tcatgggcttcatcagcaaggagcg

SEQ ID NO: 5785998 - DNA, 25 bp, Homo sapien
ccccgtgttactgcctatcagcatt

SEQ ID NO: 5785999 - DNA, 25 bp, Homo sapien
ccagctcccgagcggttgggcctcc

SEQ ID NO: 5786000 - DNA, 25 bp, Homo sapien
gagcgagagcgtgccctgttgaagg

SEQ ID NO: 5786001 - DNA, 25 bp, Homo sapien
catcctcgagagctgtctaggttaa

SEQ ID NO: 5786002 - DNA, 25 bp, Homo sapien
ggtggcaggatgtctcagtggtacg

SEQ ID NO: 5786003 - DNA, 25 bp, Homo sapien
tggttcactatagttgcggagagtc

SEQ ID NO: 5786004 - DNA, 25 bp, Homo sapien
ccaggcccttgttggggcacaaggt

SEQ ID NO: 5786005 - DNA, 25 bp, Homo sapien
gtctgcggaggggctcggctgcacc

SEQ ID NO: 5786006 - DNA, 25 bp, Homo sapien
cccttccggatcctgcgcgcagaaa

SEQ ID NO: 5786007 - DNA, 25 bp, Homo sapien
aggaaaagcaagcgtaatcttcagg

SEQ ID NO: 5786008 - DNA, 25 bp, Homo sapien
gatcagaaacaagaacagctgttac

SEQ ID NO: 5786009 - DNA, 25 bp, Homo sapien
agaaaagtttcatttgctgtatgcc

SEQ ID NO: 5786010 - DNA, 25 bp, Homo sapien
ctgcagcaagttcggcagcagctta

SEQ ID NO: 5786011 - DNA, 25 bp, Homo sapien
tggatatatcaagactgagttgatt

SEQ ID NO: 5786012 - DNA, 25 bp, Homo sapien
tggcagtctggcggctgaatttcgg

SEQ ID NO: 5786013 - DNA, 25 bp, Homo sapien
cagccggggaccttcctgctgcggt

SEQ ID NO: 5786014 - DNA, 25 bp, Homo sapien
ccgcctagcccttccggatcctgcg

SEQ ID NO: 5786015 - DNA, 25 bp, Homo sapien
gcagaaaagtttcatttgctgtatg

SEQ ID NO: 5786016 - DNA, 25 bp, Homo sapien
tcacagctgaacttgttgagatccc

SEQ ID NO: 5786017 - DNA, 25 bp, Homo sapien
aggggtccagttcactgtgaagttg

SEQ ID NO: 5786018 - DNA, 25 bp, Homo sapien
ataacataaggaaaagcaagcgtaa

SEQ ID NO: 5786019 - DNA, 25 bp, Homo sapien
tgacatcattcgcaattacaaagtc

SEQ ID NO: 5786020 - DNA, 25 bp, Homo sapien
ctgaacttacccagaatgccctgat

SEQ ID NO: 5786021 - DNA, 25 bp, Homo sapien
ccagccttgctcctggctggggcct

SEQ ID NO: 5786022 - DNA, 25 bp, Homo sapien
gagttgctgaatgtcactgaactta

SEQ ID NO: 5786023 - DNA, 25 bp, Homo sapien
cattccgtggacgaggttttgtaag

SEQ ID NO: 5786024 - DNA, 25 bp, Homo sapien
ctgtgaagttgagactgttggtgaa

SEQ ID NO: 5786025 - DNA, 25 bp, Homo sapien
tatataacctcgacagtcttggcac

SEQ ID NO: 5786026 - DNA, 25 bp, Homo sapien
ctttcagaagtgctgagttggcagt

SEQ ID NO: 5786027 - DNA, 25 bp, Homo sapien
ctcatcgttactgaagagcttcact

SEQ ID NO: 5786028 - DNA, 25 bp, Homo sapien
agaggtctcaatgtggaccagctga

SEQ ID NO: 5786029 - DNA, 25 bp, Homo sapien
ctggggcctgttgaagatgcttgta

SEQ ID NO: 5786030 - DNA, 25 bp, Homo sapien
agaacgaatgagggtcctctcatcg

SEQ ID NO: 5786031 - DNA, 25 bp, Homo sapien
tgaacacagaagagtgacatgttta

SEQ ID NO: 5786032 - DNA, 25 bp, Homo sapien
cgcctggcagaccccagaccgagca

SEQ ID NO: 5786033 - DNA, 25 bp, Homo sapien
gacctctctgcccgttgtggtgatc

SEQ ID NO: 5786034 - DNA, 25 bp, Homo sapien
atcagctgcagaactggttcactat

SEQ ID NO: 5786035 - DNA, 25 bp, Homo sapien
atgcttgcttggatcagctgcagaa

SEQ ID NO: 5786036 - DNA, 25 bp, Homo sapien
acagctgttactcaagaagatgtat

SEQ ID NO: 5786037 - DNA, 25 bp, Homo sapien
atattgacaaagaccatgcctttgg

SEQ ID NO: 5786038 - DNA, 25 bp, Homo sapien
aggaaaattctggaaaacgcccaga

SEQ ID NO: 5786039 - DNA, 25 bp, Homo sapien
cccagaccgagcagaggcgacccag

SEQ ID NO: 5786040 - DNA, 25 bp, Homo sapien
gagaaaggaagtagttcacaaaata

SEQ ID NO: 5786041 - DNA, 25 bp, Homo sapien
atcatttacagctgtctgaaggaag

SEQ ID NO: 5786042 - DNA, 25 bp, Homo sapien
acccagaatgccctgattaatgatg

SEQ ID NO: 5786043 - DNA, 25 bp, Homo sapien
gaaatcaagagcctggaagatttac

SEQ ID NO: 5786044 - DNA, 25 bp, Homo sapien
gaagacccaatccagatgtctatga

SEQ ID NO: 5786045 - DNA, 25 bp, Homo sapien
gagaatcccctgaagtatctgtatc

SEQ ID NO: 5786046 - DNA, 25 bp, Homo sapien
tccatgcggttgaaccctacacgaa

SEQ ID NO: 5786047 - DNA, 25 bp, Homo sapien
aacacagaagagtgacatgtttaca

SEQ ID NO: 5786048 - DNA, 25 bp, Homo sapien
gaacccaggaatctgtccttcttcc

SEQ ID NO: 5786049 - DNA, 25 bp, Homo sapien
gagaagcttcttggtcctaacgcca

SEQ ID NO: 5786050 - DNA, 25 bp, Homo sapien
agcaaggagcgagagcgtgccctgt

SEQ ID NO: 5786051 - DNA, 25 bp, Homo sapien
aaagcaagcgtaatcttcaggataa

SEQ ID NO: 5786052 - DNA, 25 bp, Homo sapien
agttggaggaattggaacagaaata

SEQ ID NO: 5786053 - DNA, 25 bp, Homo sapien
aagagtgatcagaaacaagaacagc

SEQ ID NO: 5786054 - DNA, 25 bp, Homo sapien
ttcagtcttttccagcagctcattc

SEQ ID NO: 5786055 - DNA, 25 bp, Homo sapien
tgcctttggaaagtattactccagg

SEQ ID NO: 5786056 - DNA, 25 bp, Homo sapien
cacctaacgtgctgtgcgtagctgc

SEQ ID NO: 5786057 - DNA, 25 bp, Homo sapien
ttgcaagagctgaattataatttga

SEQ ID NO: 5786058 - DNA, 25 bp, Homo sapien
tgacaaagaccatgcctttggaaag

SEQ ID NO: 5786059 - DNA, 25 bp, Homo sapien
gagaataacttcttgctacagcata

SEQ ID NO: 5786060 - DNA, 25 bp, Homo sapien
aagtcttatttgataaagatgtgaa

SEQ ID NO: 5786061 - DNA, 25 bp, Homo sapien
ttcagtgagagctcccgggaagggg

SEQ ID NO: 5786062 - DNA, 25 bp, Homo sapien
gcttgacaataagagaaaggaagta

SEQ ID NO: 5786063 - DNA, 25 bp, Homo sapien
gtggttagaaaagcaagactgggag

SEQ ID NO: 5786064 - DNA, 25 bp, Homo sapien
tgctggcaccagaacgaatgagggt

SEQ ID NO: 5786065 - DNA, 25 bp, Homo sapien
aaatattgacaaagaccatgccttt

SEQ ID NO: 5786066 - DNA, 25 bp, Homo sapien
ttggttgaatccccaggcccttgtt

SEQ ID NO: 5786067 - DNA, 25 bp, Homo sapien
gaagagcttcactcccttagttttg

SEQ ID NO: 5786068 - DNA, 25 bp, Homo sapien
gtgttactgcctatcagcattttac

SEQ ID NO: 5786069 - DNA, 25 bp, Homo sapien
ggcaccagaacgaatgagggtcctc

SEQ ID NO: 5786070 - DNA, 25 bp, Homo sapien
aacgccagccccgatggtctcattc

SEQ ID NO: 5786071 - DNA, 25 bp, Homo sapien
accgcaccttcagtcttttccagca

SEQ ID NO: 5786072 - DNA, 25 bp, Homo sapien
gagactgttggtgaaattgcaagag

SEQ ID NO: 5786073 - DNA, 25 bp, Homo sapien
ttgctcctggctggggcctgttgaa

SEQ ID NO: 5786074 - DNA, 25 bp, Homo sapien
acacaaaagtgatgaacatggagga

SEQ ID NO: 5786075 - DNA, 25 bp, Homo sapien
acaaggtggcaggatgtctcagtgg

SEQ ID NO: 5786076 - DNA, 25 bp, Homo sapien
ttgaaagtcaaagtcttatttgata

SEQ ID NO: 5786077 - DNA, 25 bp, Homo sapien
ctgagttgatttctgtgtctgaagt

SEQ ID NO: 5786078 - DNA, 25 bp, Homo sapien
aagagcctggaagatttacaagatg

SEQ ID NO: 5786079 - DNA, 25 bp, Homo sapien
ggccctaaaggaactggatatatca

SEQ ID NO: 5786080 - DNA, 25 bp, Homo sapien
tcaccagctttatgatgacagtttt

SEQ ID NO: 5786081 - DNA, 25 bp, Homo sapien
agttttgaaacccaattgtgccagc

SEQ ID NO: 5786082 - DNA, 25 bp, Homo sapien
actggatatatcaagactgagttga

SEQ ID NO: 5786083 - DNA, 25 bp, Homo sapien
cggggaccttcctgctgcggttcag

SEQ ID NO: 5786084 - DNA, 25 bp, Homo sapien
tgaaagaacagaaaaatgctggcac

SEQ ID NO: 5786085 - DNA, 25 bp, Homo sapien
tctggctttggattgaaagcatcct

SEQ ID NO: 5786086 - DNA, 25 bp, Homo sapien
agctgtctaggttaacgttcgcact

SEQ ID NO: 5786087 - DNA, 25 bp, Homo sapien
gcagagcgcctgtattggggggccg

SEQ ID NO: 5786088 - DNA, 25 bp, Homo sapien
tccctgacatcattcgcaattacaa

SEQ ID NO: 5786089 - DNA, 25 bp, Homo sapien
tagtggagtggaagcggagacagca

SEQ ID NO: 5786090 - DNA, 25 bp, Homo sapien
tatcgccatcacagctgaacttgtt

SEQ ID NO: 5786091 - DNA, 25 bp, Homo sapien
cgcccccgcctagcccttccggatc

SEQ ID NO: 5786092 - DNA, 25 bp, Homo sapien
taacgttcgcactctgtgtatataa

SEQ ID NO: 5786093 - DNA, 25 bp, Homo sapien
gggccatcacattcacatgggtgga

SEQ ID NO: 5786094 - DNA, 25 bp, Homo sapien
cgcaccctcagaggccgctggtctt

SEQ ID NO: 5786095 - DNA, 25 bp, Homo sapien
ctccaggccaaaggaagcaccagag

SEQ ID NO: 5786096 - DNA, 25 bp, Homo sapien
ctgcggaggggctcggctgcaccgg

SEQ ID NO: 5786097 - DNA, 25 bp, Homo sapien
ctgcaattgaaagaacagaaaaatg

SEQ ID NO: 5786098 - DNA, 25 bp, Homo sapien
gctacagcataacataaggaaaagc

SEQ ID NO: 5786099 - DNA, 25 bp, Homo sapien
gctgcagaactggttcactatagtt

SEQ ID NO: 5786100 - DNA, 25 bp, Homo sapien
cagcataacataaggaaaagcaagc

SEQ ID NO: 5786101 - DNA, 25 bp, Homo sapien
aaacaaacaagtgttatgggaccgc

SEQ ID NO: 5786102 - DNA, 25 bp, Homo sapien
cagctgaacatgttgggagagaagc

SEQ ID NO: 5786103 - DNA, 25 bp, Homo sapien
agcttcttggtcctaacgccagccc

SEQ ID NO: 5786104 - DNA, 25 bp, Homo sapien
agtcttggcacctaacgtgctgtgc

SEQ ID NO: 5786105 - DNA, 25 bp, Homo sapien
gttgggcctccatcctttggtacaa

SEQ ID NO: 5786106 - DNA, 25 bp, Homo sapien
gcaccagagccaatggaacttgatg

SEQ ID NO: 5786107 - DNA, 25 bp, Homo sapien
gggcacgcacacaaaagtgatgaac

SEQ ID NO: 5786108 - DNA, 25 bp, Homo sapien
tcaagagcctggaagatttacaaga

SEQ ID NO: 5786109 - DNA, 25 bp, Homo sapien
ccagagatttaatcaggctcagtcg

SEQ ID NO: 5786110 - DNA, 25 bp, Homo sapien
aaacaagaacagctgttactcaaga

SEQ ID NO: 5786111 - DNA, 25 bp, Homo sapien
aatgagggtcctctcatcgttactg

SEQ ID NO: 5786112 - DNA, 25 bp, Homo sapien
ggaccagctgaacatgttgggagag

SEQ ID NO: 5786113 - DNA, 25 bp, Homo sapien
tatgtgtatagagcatgaaatcaag

SEQ ID NO: 5786114 - DNA, 25 bp, Homo sapien
cgttgtggtgatctccaacgtcagc

SEQ ID NO: 5786115 - DNA, 25 bp, Homo sapien
gtgccctgttgaaggaccagcagcc

SEQ ID NO: 5786116 - DNA, 25 bp, Homo sapien
taaatgataaaaattttcccttctg

SEQ ID NO: 5786117 - DNA, 25 bp, Homo sapien
agctcccgagcggttgggcctccat

SEQ ID NO: 5786118 - DNA, 25 bp, Homo sapien
agcagccggggaccttcctgctgcg

SEQ ID NO: 5786119 - DNA, 25 bp, Homo sapien
gcacgcacacaaaagtgatgaacat

SEQ ID NO: 5786120 - DNA, 25 bp, Homo sapien
agagctgtctaggttaacgttcgca

SEQ ID NO: 5786121 - DNA, 25 bp, Homo sapien
ttgtaattgctatcgccatcacagc

SEQ ID NO: 5786122 - DNA, 25 bp, Homo sapien
tacaaagtcatggctgctgagaata

SEQ ID NO: 5786123 - DNA, 25 bp, Homo sapien
catgccaacgcaccctcagaggccg

SEQ ID NO: 5786124 - DNA, 25 bp, Homo sapien
aagcaccagagccaatggaacttga

SEQ ID NO: 5786125 - DNA, 25 bp, Homo sapien
tatgatcatttacagctgtctgaag

SEQ ID NO: 5786126 - DNA, 25 bp, Homo sapien
cgcttttctttggagaataacttct

SEQ ID NO: 5786127 - DNA, 25 bp, Homo sapien
agcttcactcccttagttttgaaac

SEQ ID NO: 5786128 - DNA, 25 bp, Homo sapien
ggcctccatcctttggtacaacatg

SEQ ID NO: 5786129 - DNA, 25 bp, Homo sapien
gccaaaggaagcaccagagccaatg

SEQ ID NO: 5786130 - DNA, 25 bp, Homo sapien
gaatattcctgagaatcccctgaag

SEQ ID NO: 5786131 - DNA, 25 bp, Homo sapien
cgatgggctcagctttcagaagtgc

SEQ ID NO: 5786132 - DNA, 25 bp, Homo sapien
atgaccctatcacaaaaaacaaaca

SEQ ID NO: 5786133 - DNA, 25 bp, Homo sapien
aaccttgcagaacagagaacacgag

SEQ ID NO: 5786134 - DNA, 25 bp, Homo sapien
agtggtacgaacttcagcagcttga

SEQ ID NO: 5786135 - DNA, 25 bp, Homo sapien
attttcaggaagacccaatccagat

SEQ ID NO: 5786136 - DNA, 25 bp, Homo sapien
aaacctcaagccagccttgctcctg

SEQ ID NO: 5786137 - DNA, 25 bp, Homo sapien
accagctgaacatgttgggagagaa

SEQ ID NO: 5786138 - DNA, 25 bp, Homo sapien
ttgttgagatccccgtgttactgcc

SEQ ID NO: 5786139 - DNA, 25 bp, Homo sapien
gaaaattctggaaaacgcccagaga

SEQ ID NO: 5786140 - DNA, 25 bp, Homo sapien
cagaagagtgacatgtttacaaacc

SEQ ID NO: 5786141 - DNA, 25 bp, Homo sapien
ctgaagtgtaagtgaacacagaaga

SEQ ID NO: 5786142 - DNA, 25 bp, Homo sapien
ctgtatgccatcctcgagagctgtc

SEQ ID NO: 5786143 - DNA, 25 bp, Homo sapien
tacagtaaaaggatttaggaagttc

SEQ ID NO: 5786144 - DNA, 25 bp, Homo sapien
gtatctgtatccaaatattgacaaa

SEQ ID NO: 5786145 - DNA, 25 bp, Homo sapien
gacagccctgcatgccaacgcaccc

SEQ ID NO: 5786146 - DNA, 25 bp, Homo sapien
tcgctttcctgcgcagagtctgcgg

SEQ ID NO: 5786147 - DNA, 25 bp, Homo sapien
aggatttaggaagttcaacattttg

SEQ ID NO: 5786148 - DNA, 25 bp, Homo sapien
gcaattgaaagaacagaaaaatgct

SEQ ID NO: 5786149 - DNA, 25 bp, Homo sapien
gcagcaagttcggcagcagcttaaa

SEQ ID NO: 5786150 - DNA, 25 bp, Homo sapien
actcaaaattcctggagcaggttca

SEQ ID NO: 5786151 - DNA, 25 bp, Homo sapien
agtgatgttagacaaacagaaagag

SEQ ID NO: 5786152 - DNA, 25 bp, Homo sapien
gcggctgaatttcggcacctgcaat

SEQ ID NO: 5786153 - DNA, 25 bp, Homo sapien
aatcaggctcagtcggggaatattc

SEQ ID NO: 5786154 - DNA, 25 bp, Homo sapien
ccagcagccggggaccttcctgctg

SEQ ID NO: 5786155 - DNA, 25 bp, Homo sapien
ggctgcaccgccgcgcccccgccta

SEQ ID NO: 5786156 - DNA, 25 bp, Homo sapien
tcctgagaatcccctgaagtatctg

SEQ ID NO: 5786157 - DNA, 25 bp, Homo sapien
ctggcacagtggttagaaaagcaag

SEQ ID NO: 5786158 - DNA, 25 bp, Homo sapien
acctggcacagtggttagaaaagca

SEQ ID NO: 5786159 - DNA, 25 bp, Homo sapien
gagcttgacagtaaagtcagaaatg

SEQ ID NO: 5786160 - DNA, 25 bp, Homo sapien
atgtcactgaacttacccagaatgc

SEQ ID NO: 5786161 - DNA, 25 bp, Homo sapien
tcgcactctgtgtatataacctcga

SEQ ID NO: 5786162 - DNA, 25 bp, Homo sapien
gaccagcagccggggaccttcctgc

SEQ ID NO: 5786163 - DNA, 25 bp, Homo sapien
cccagaacggaggcgaacctgactt

SEQ ID NO: 5786164 - DNA, 25 bp, Homo sapien
gtgatcagaaacaagaacagctgtt

SEQ ID NO: 5786165 - DNA, 25 bp, Homo sapien
gaaagacagccctgcatgccaacgc

SEQ ID NO: 5786166 - DNA, 25 bp, Homo sapien
gtatgccatcctcgagagctgtcta

SEQ ID NO: 5786167 - DNA, 25 bp, Homo sapien
caagatgaatatgacttcaaatgca

SEQ ID NO: 5786168 - DNA, 25 bp, Homo sapien
gcttgcttggatcagctgcagaact

SEQ ID NO: 5786169 - DNA, 25 bp, Homo sapien
gattaatgatgaactagtggagtgg

SEQ ID NO: 5786170 - DNA, 25 bp, Homo sapien
catgacctcctgtcacagctggatg

SEQ ID NO: 5786171 - DNA, 25 bp, Homo sapien
caagcgtaatcttcaggataatttt

SEQ ID NO: 5786172 - DNA, 25 bp, Homo sapien
ggttcagtgagagctcccgggaagg

SEQ ID NO: 5786173 - DNA, 25 bp, Homo sapien
gagctcccgggaaggggccatcaca

SEQ ID NO: 5786174 - DNA, 25 bp, Homo sapien
taagtgaacacagaagagtgacatg

SEQ ID NO: 5786175 - DNA, 25 bp, Homo sapien
tggaaaacgcccagagatttaatca

SEQ ID NO: 5786176 - DNA, 25 bp, Homo sapien
atgatcaatatagtcgcttttcttt

SEQ ID NO: 5786177 - DNA, 25 bp, Homo sapien
gcggttcagtgagagctcccgggaa

SEQ ID NO: 5786178 - DNA, 25 bp, Homo sapien
gctttcctgcgcagagtctgcggag

SEQ ID NO: 5786179 - DNA, 25 bp, Homo sapien
tataacctcgacagtcttggcacct

SEQ ID NO: 5786180 - DNA, 25 bp, Homo sapien
ttcggcacctgcaattgaaagaaca

SEQ ID NO: 5786181 - DNA, 25 bp, Homo sapien
gggaaggggccatcacattcacatg

SEQ ID NO: 5786182 - DNA, 25 bp, Homo sapien
aacgtcagccagctcccgagcggtt

SEQ ID NO: 5786183 - DNA, 25 bp, Homo sapien
tattcagagcacagtgatgttagac

SEQ ID NO: 5786184 - DNA, 25 bp, Homo sapien
attcacatgggtggagcggtcccag

SEQ ID NO: 5786185 - DNA, 25 bp, Homo sapien
acaaagaccatgcctttggaaagta

SEQ ID NO: 5786186 - DNA, 25 bp, Homo sapien
aacagaaaaatgctggcaccagaac

SEQ ID NO: 5786187 - DNA, 25 bp, Homo sapien
ctgaagagcttcactcccttagttt

SEQ ID NO: 5786188 - DNA, 25 bp, Homo sapien
atggaacttgatggccctaaaggaa

SEQ ID NO: 5786189 - DNA, 25 bp, Homo sapien
agcagcttaaaaagttggaggaatt

SEQ ID NO: 5786190 - DNA, 25 bp, Homo sapien
ttcagagctcgtttgtggtggaaag

SEQ ID NO: 5786191 - DNA, 25 bp, Homo sapien
ccttagttttgaaacccaattgtgc

SEQ ID NO: 5786192 - DNA, 25 bp, Homo sapien
ctcattccgtggacgaggttttgta

SEQ ID NO: 5786193 - DNA, 25 bp, Homo sapien
tgcatgccaacgcaccctcagaggc

SEQ ID NO: 5786194 - DNA, 25 bp, Homo sapien
atgctggtggcggaacccaggaatc

SEQ ID NO: 5786195 - DNA, 25 bp, Homo sapien
cccaatgcttgcttggatcagctgc

SEQ ID NO: 5786196 - DNA, 25 bp, Homo sapien
agtcagaaatgtgaaggacaaggtt

SEQ ID NO: 5786197 - DNA, 25 bp, Homo sapien
gagtctgcagcaagttcggcagcag

SEQ ID NO: 5786198 - DNA, 25 bp, Homo sapien
gacagtacctggcacagtggttaga

SEQ ID NO: 5786199 - DNA, 25 bp, Homo sapien
tacttttccattgtaattgctatcg

SEQ ID NO: 5786200 - DNA, 25 bp, Homo sapien
cggatcctgcgcgcagaaaagtttc

SEQ ID NO: 5786201 - DNA, 25 bp, Homo sapien
tatagttgcggagagtctgcagcaa

SEQ ID NO: 5786202 - DNA, 25 bp, Homo sapien
aggaagacccaatccagatgtctat

SEQ ID NO: 5786203 - DNA, 25 bp, Homo sapien
gcaggatgtctcagtggtacgaact

SEQ ID NO: 5786204 - DNA, 25 bp, Homo sapien
agacccaatccagatgtctatgatc

SEQ ID NO: 5786205 - DNA, 25 bp, Homo sapien
attgacctcgagacgacctctctgc

SEQ ID NO: 5786206 - DNA, 25 bp, Homo sapien
atgaactagtggagtggaagcggag

SEQ ID NO: 5786207 - DNA, 25 bp, Homo sapien
cagacagtacctggcacagtggtta

SEQ ID NO: 5786208 - DNA, 25 bp, Homo sapien
acctgacttccatgcggttgaaccc

SEQ ID NO: 5786209 - DNA, 25 bp, Homo sapien
atgttagacaaacagaaagagcttg

SEQ ID NO: 5786210 - DNA, 25 bp, Homo sapien
agtggaagcggagacagcagagcgc

SEQ ID NO: 5786211 - DNA, 25 bp, Homo sapien
aagttcaacattttgggcacgcaca

SEQ ID NO: 5786212 - DNA, 25 bp, Homo sapien
acaaacctcaagccagccttgctcc

SEQ ID NO: 5786213 - DNA, 25 bp, Homo sapien
gtattggggggccgcccaatgcttg

SEQ ID NO: 5786214 - DNA, 25 bp, Homo sapien
gttactcaagaagatgtatttaatg

SEQ ID NO: 5786215 - DNA, 25 bp, Homo sapien
tgcccgttgtggtgatctccaacgt

SEQ ID NO: 5786216 - DNA, 25 bp, Homo sapien
agaaatgtgaaggacaaggttatgt

SEQ ID NO: 5786217 - DNA, 25 bp, Homo sapien
cggcagcagcttaaaaagttggagg

SEQ ID NO: 5786218 - DNA, 25 bp, Homo sapien
cctgacatcattcgcaattacaaag

SEQ ID NO: 5786219 - DNA, 25 bp, Homo sapien
aaacacctgctccctctctggaatg

SEQ ID NO: 5786220 - DNA, 25 bp, Homo sapien
ttgctatcgccatcacagctgaact

SEQ ID NO: 5786221 - DNA, 25 bp, Homo sapien
gaagacaggggtccagttcactgtg

SEQ ID NO: 5786222 - DNA, 25 bp, Homo sapien
cagttttcccatggaaatcagacag

SEQ ID NO: 5786223 - DNA, 25 bp, Homo sapien
gactccaccatgtgcacgatgggct

SEQ ID NO: 5786224 - DNA, 25 bp, Homo sapien
tgaaccctacacgaagaaagaactt

SEQ ID NO: 5786225 - DNA, 25 bp, Homo sapien
acccaatccagatgtctatgatcat

SEQ ID NO: 5786226 - DNA, 25 bp, Homo sapien
ttaaaaagttggaggaattggaaca

SEQ ID NO: 5786227 - DNA, 25 bp, Homo sapien
aatatagtcgcttttctttggagaa

SEQ ID NO: 5786228 - DNA, 25 bp, Homo sapien
gagaacacgagaccaatggtgtggc

SEQ ID NO: 5786229 - DNA, 25 bp, Homo sapien
ggaggaattggaacagaaatacacc

SEQ ID NO: 5786230 - DNA, 25 bp, Homo sapien
ttaatcaggctcagtcggggaatat

SEQ ID NO: 5786231 - DNA, 25 bp, Homo sapien
tagtcgcttttctttggagaataac

SEQ ID NO: 5786232 - DNA, 25 bp, Homo sapien
tactgaagagcttcactcccttagt

SEQ ID NO: 5786233 - DNA, 25 bp, Homo sapien
gcctatcagcattttactactttaa

SEQ ID NO: 5786234 - DNA, 25 bp, Homo sapien
ggtaattgacctcgagacgacctct

SEQ ID NO: 5786235 - DNA, 25 bp, Homo sapien
tgtctcagtggtacgaacttcagca

SEQ ID NO: 5786236 - DNA, 25 bp, Homo sapien
tctggcggctgaatttcggcacctg

SEQ ID NO: 5786237 - DNA, 25 bp, Homo sapien
aagtcaaagtcttatttgataaaga

SEQ ID NO: 5786238 - DNA, 25 bp, Homo sapien
cccaattgtgccagcctggtttggt

SEQ ID NO: 5786239 - DNA, 25 bp, Homo sapien
cggttgaaccctacacgaagaaaga

SEQ ID NO: 5786240 - DNA, 25 bp, Homo sapien
ttcttctgtcaccaaaagaggtctc

SEQ ID NO: 5786241 - DNA, 25 bp, Homo sapien
tcgttactgaagagcttcactccct

SEQ ID NO: 5786242 - DNA, 25 bp, Homo sapien
gcagaggcgacccagcgcgctcggg

SEQ ID NO: 5786243 - DNA, 25 bp, Homo sapien
gcatgaaatcaagagcctggaagat

SEQ ID NO: 5786244 - DNA, 25 bp, Homo sapien
tgacctcgagacgacctctctgccc

SEQ ID NO: 5786245 - DNA, 25 bp, Homo sapien
taattgacctcgagacgacctctct

SEQ ID NO: 5786246 - DNA, 25 bp, Homo sapien
tttatgatgacagttttcccatgga

SEQ ID NO: 5786247 - DNA, 25 bp, Homo sapien
atggaaatcagacagtacctggcac

SEQ ID NO: 5786248 - DNA, 25 bp, Homo sapien
ctggcaccagaacgaatgagggtcc

SEQ ID NO: 5786249 - DNA, 25 bp, Homo sapien
aatgccctgattaatgatgaactag

SEQ ID NO: 5786250 - DNA, 25 bp, Homo sapien
gcccagagatttaatcaggctcagt

SEQ ID NO: 5786251 - DNA, 25 bp, Homo sapien
tgcaccggggggatcgcgcctggca

SEQ ID NO: 5786252 - DNA, 25 bp, Homo sapien
gaccctatcacaaaaaacaaacaag

SEQ ID NO: 5786253 - DNA, 25 bp, Homo sapien
aatccagatgtctatgatcatttac

SEQ ID NO: 5786254 - DNA, 25 bp, Homo sapien
agatttaatcaggctcagtcgggga

SEQ ID NO: 5786255 - DNA, 25 bp, Homo sapien
gtgagagctcccgggaaggggccat

SEQ ID NO: 5786256 - DNA, 25 bp, Homo sapien
gcagaccccagaccgagcagaggcg

SEQ ID NO: 5786257 - DNA, 25 bp, Homo sapien
catcacattcacatgggtggagcgg

SEQ ID NO: 5786258 - DNA, 25 bp, Homo sapien
aacttgatggccctaaaggaactgg

SEQ ID NO: 5786259 - DNA, 25 bp, Homo sapien
cagagtctgcggaggggctcggctg

SEQ ID NO: 5786260 - DNA, 25 bp, Homo sapien
tatgatgacagttttcccatggaaa

SEQ ID NO: 5786261 - DNA, 25 bp, Homo sapien
agcttgactcaaaattcctggagca

SEQ ID NO: 5786262 - DNA, 25 bp, Homo sapien
ttgctacagcataacataaggaaaa

SEQ ID NO: 5786263 - DNA, 25 bp, Homo sapien
gacagttttcccatggaaatcagac

SEQ ID NO: 5786264 - DNA, 25 bp, Homo sapien
agacaggggtccagttcactgtgaa

SEQ ID NO: 5786265 - DNA, 25 bp, Homo sapien
ggggaatattcagagcacagtgatg

SEQ ID NO: 5786266 - DNA, 25 bp, Homo sapien
atgaatatgacttcaaatgcaaaac

SEQ ID NO: 5786267 - DNA, 25 bp, Homo sapien
atctgtccttcttcctgactccacc

SEQ ID NO: 5786268 - DNA, 25 bp, Homo sapien
ccgatggtctcattccgtggacgag

SEQ ID NO: 5786269 - DNA, 25 bp, Homo sapien
ttttcatgacctcctgtcacagctg

SEQ ID NO: 5786270 - DNA, 25 bp, Homo sapien
acatgggtggagcggtcccagaacg

SEQ ID NO: 5786271 - DNA, 25 bp, Homo sapien
gagctgaattataatttgaaagtca

SEQ ID NO: 5786272 - DNA, 25 bp, Homo sapien
acctcctgtcacagctggatgatca

SEQ ID NO: 5786273 - DNA, 25 bp, Homo sapien
catccgttttcatgacctcctgtca

SEQ ID NO: 5786274 - DNA, 25 bp, Homo sapien
gggcacaaggtggcaggatgtctca

SEQ ID NO: 5786275 - DNA, 25 bp, Homo sapien
aaaaacacctgctccctctctggaa

SEQ ID NO: 5786276 - DNA, 25 bp, Homo sapien
cacgatgggctcagctttcagaagt

SEQ ID NO: 5786277 - DNA, 25 bp, Homo sapien
ttgaagacaggggtccagttcactg

SEQ ID NO: 5786278 - DNA, 25 bp, Homo sapien
tcaaaattcctggagcaggttcacc

SEQ ID NO: 5786279 - DNA, 25 bp, Homo sapien
tgatgtttcatttgccaccatccgt

SEQ ID NO: 5786280 - DNA, 25 bp, Homo sapien
ctcgagacgacctctctgcccgttg

SEQ ID NO: 5786281 - DNA, 25 bp, Homo sapien
cttgatggccctaaaggaactggat

SEQ ID NO: 5786282 - DNA, 25 bp, Homo sapien
ctgcgcgcagaaaagtttcatttgc

SEQ ID NO: 5786283 - DNA, 25 bp, Homo sapien
tgaacatgttgggagagaagcttct

SEQ ID NO: 5786284 - DNA, 25 bp, Homo sapien
tctggaatgatgggtgcatcatggg

SEQ ID NO: 5786285 - DNA, 25 bp, Homo sapien
ataatagagttgctgaatgtcactg

SEQ ID NO: 5786286 - DNA, 25 bp, Homo sapien
tggcagaccccagaccgagcagagg

SEQ ID NO: 5786287 - DNA, 25 bp, Homo sapien
agccccgatggtctcattccgtgga

SEQ ID NO: 5786288 - DNA, 25 bp, Homo sapien
tagaactcattaaaaaacacctgct

SEQ ID NO: 5786289 - DNA, 25 bp, Homo sapien
tcacagctggatgatcaatatagtc

SEQ ID NO: 5786290 - DNA, 25 bp, Homo sapien
aacataaggaaaagcaagcgtaatc

SEQ ID NO: 5786291 - DNA, 25 bp, Homo sapien
attggaacagaaatacacctacgaa

SEQ ID NO: 5786292 - DNA, 25 bp, Homo sapien
cccgagcggttgggcctccatcctt

SEQ ID NO: 5786293 - DNA, 25 bp, Homo sapien
agcccttccggatcctgcgcgcaga

SEQ ID NO: 5786294 - DNA, 25 bp, Homo sapien
ttgaaggaccagcagccggggacct

SEQ ID NO: 5786295 - DNA, 25 bp, Homo sapien
ctgcggttcagtgagagctcccggg

SEQ ID NO: 5786296 - DNA, 25 bp, Homo sapien
tcaacattttgggcacgcacacaaa

SEQ ID NO: 5786297 - DNA, 25 bp, Homo sapien
acgagaccaatggtgtggcaaagag

SEQ ID NO: 5786298 - DNA, 25 bp, Homo sapien
gcgcgctcgggagaggctgcaccgc

SEQ ID NO: 5786299 - DNA, 25 bp, Homo sapien
gtcccagaacggaggcgaacctgac

SEQ ID NO: 5786300 - DNA, 25 bp, Homo sapien
gaagatgcttgtattttacttttcc

SEQ ID NO: 5786301 - DNA, 25 bp, Homo sapien
gaatcccctgaagtatctgtatcca

SEQ ID NO: 5786302 - DNA, 25 bp, Homo sapien
agagcttcactcccttagttttgaa

SEQ ID NO: 5786303 - DNA, 25 bp, Homo sapien
ttcggcagcagcttaaaaagttgga

SEQ ID NO: 5786304 - DNA, 25 bp, Homo sapien
ttcacaaaataatagagttgctgaa

SEQ ID NO: 5786305 - DNA, 25 bp, Homo sapien
caattacaaagtcatggctgctgag

SEQ ID NO: 5786306 - DNA, 25 bp, Homo sapien
ttcgcaattacaaagtcatggctgc

SEQ ID NO: 5786307 - DNA, 25 bp, Homo sapien
cctccatcctttggtacaacatgct

SEQ ID NO: 5786308 - DNA, 25 bp, Homo sapien
tgatcatttacagctgtctgaagga

SEQ ID NO: 5786309 - DNA, 25 bp, Homo sapien
atgtttacaaacctcaagccagcct

SEQ ID NO: 5786310 - DNA, 25 bp, Homo sapien
ggtgatctccaacgtcagccagctc

SEQ ID NO: 5786311 - DNA, 25 bp, Homo sapien
gttggggcacaaggtggcaggatgt

SEQ ID NO: 5786312 - DNA, 25 bp, Homo sapien
gaaacccaattgtgccagcctggtt

SEQ ID NO: 5786313 - DNA, 25 bp, Homo sapien
gaggctgcaccgccgcgcccccgcc

SEQ ID NO: 5786314 - DNA, 25 bp, Homo sapien
aatattcagagcacagtgatgttag

SEQ ID NO: 5786315 - DNA, 25 bp, Homo sapien
aatggcagtctggcggctgaatttc

SEQ ID NO: 5786316 - DNA, 25 bp, Homo sapien
agaaaagcaagactgggagcacgct

SEQ ID NO: 5786317 - DNA, 25 bp, Homo sapien
gtgtggcaaagagtgatcagaaaca

SEQ ID NO: 5786318 - DNA, 25 bp, Homo sapien
cccgttgtggtgatctccaacgtca

SEQ ID NO: 5786319 - DNA, 25 bp, Homo sapien
tgctgagttggcagttttcttctgt

SEQ ID NO: 5786320 - DNA, 25 bp, Homo sapien
attgtgccagcctggtttggtaatt

SEQ ID NO: 5786321 - DNA, 25 bp, Homo sapien
agcggtcccagaacggaggcgaacc

SEQ ID NO: 5786322 - DNA, 25 bp, Homo sapien
gtgctgtgcgtagctgctcctttgg

SEQ ID NO: 5786323 - DNA, 25 bp, Homo sapien
acatgctggtggcggaacccaggaa

SEQ ID NO: 5786324 - DNA, 25 bp, Homo sapien
tagagcatgaaatcaagagcctgga

SEQ ID NO: 5786325 - DNA, 25 bp, Homo sapien
cactgtgaagttgagactgttggtg

SEQ ID NO: 5786326 - DNA, 25 bp, Homo sapien
tacagcataacataaggaaaagcaa

SEQ ID NO: 5786327 - DNA, 25 bp, Homo sapien
cttttctttggagaataacttcttg

SEQ ID NO: 5786328 - DNA, 25 bp, Homo sapien
gcctagcccttccggatcctgcgcg

SEQ ID NO: 5786329 - DNA, 25 bp, Homo sapien
gaagagtgacatgtttacaaacctc

SEQ ID NO: 5786330 - DNA, 25 bp, Homo sapien
taacgtgctgtgcgtagctgctcct

SEQ ID NO: 5786331 - DNA, 25 bp, Homo sapien
gactgttggtgaaattgcaagagct

SEQ ID NO: 5786332 - DNA, 25 bp, Homo sapien
atgggctcagctttcagaagtgctg

SEQ ID NO: 5786333 - DNA, 25 bp, Homo sapien
gaagtgtaagtgaacacagaagagt

SEQ ID NO: 5786334 - DNA, 25 bp, Homo sapien
aatgataaaaattttcccttctggc

SEQ ID NO: 5786335 - DNA, 25 bp, Homo sapien
aacgcaccctcagaggccgctggtc

SEQ ID NO: 5786336 - DNA, 25 bp, Homo sapien
gccaatggaacttgatggccctaaa

SEQ ID NO: 5786337 - DNA, 25 bp, Homo sapien
aggagcgagagcgtgccctgttgaa

SEQ ID NO: 5786338 - DNA, 25 bp, Homo sapien
gcgcagaaaagtttcatttgctgta

SEQ ID NO: 5786339 - DNA, 25 bp, Homo sapien
tggcggctgaatttcggcacctgca

SEQ ID NO: 5786340 - DNA, 25 bp, Homo sapien
gatcctgcgcgcagaaaagtttcat

SEQ ID NO: 5786341 - DNA, 25 bp, Homo sapien
tggtgtggcaaagagtgatcagaaa

SEQ ID NO: 5786342 - DNA, 25 bp, Homo sapien
ttgcagaacagagaacacgagacca

SEQ ID NO: 5786343 - DNA, 25 bp, Homo sapien
cagctttatgatgacagttttccca

SEQ ID NO: 5786344 - DNA, 25 bp, Homo sapien
ccctaaaggaactggatatatcaag

SEQ ID NO: 5786345 - DNA, 25 bp, Homo sapien
tgtatataacctcgacagtcttggc

SEQ ID NO: 5786346 - DNA, 25 bp, Homo sapien
ccgccgcgcccccgcctagcccttc

SEQ ID NO: 5786347 - DNA, 25 bp, Homo sapien
atattcctgagaatcccctgaagta

SEQ ID NO: 5786348 - DNA, 25 bp, Homo sapien
tctatgatcatttacagctgtctga

SEQ ID NO: 5786349 - DNA, 25 bp, Homo sapien
gtaattgctatcgccatcacagctg

SEQ ID NO: 5786350 - DNA, 25 bp, Homo sapien
tcaaatgcaaaaccttgcagaacag

SEQ ID NO: 5786351 - DNA, 25 bp, Homo sapien
agttcactgtgaagttgagactgtt

SEQ ID NO: 5786352 - DNA, 25 bp, Homo sapien
agctttcagaagtgctgagttggca

SEQ ID NO: 5786353 - DNA, 25 bp, Homo sapien
tttctttggagaataacttcttgct

SEQ ID NO: 5786354 - DNA, 25 bp, Homo sapien
caccggggggatcgcgcctggcaga

SEQ ID NO: 5786355 - DNA, 25 bp, Homo sapien
agaagatgtatttaatgcttgacaa

SEQ ID NO: 5786356 - DNA, 25 bp, Homo sapien
cgcaccttcagtcttttccagcagc

SEQ ID NO: 5786357 - DNA, 25 bp, Homo sapien
cactgaacttacccagaatgccctg

SEQ ID NO: 5786358 - DNA, 25 bp, Homo sapien
gttggtgaaattgcaagagctgaat

SEQ ID NO: 5786359 - DNA, 25 bp, Homo sapien
agaatgccctgattaatgatgaact

SEQ ID NO: 5786360 - DNA, 25 bp, Homo sapien
gaagtgctgagttggcagttttctt

SEQ ID NO: 5786361 - DNA, 25 bp, Homo sapien
tttcaggaagacccaatccagatgt

SEQ ID NO: 5786362 - DNA, 25 bp, Homo sapien
agaacagaaaaatgctggcaccaga

SEQ ID NO: 5786363 - DNA, 25 bp, Homo sapien
acctacgaacatgaccctatcacaa

SEQ ID NO: 5786364 - DNA, 25 bp, Homo sapien
taaaaaacacctgctccctctctgg

SEQ ID NO: 5786365 - DNA, 25 bp, Homo sapien
aaagaactttctgctgttactttcc

SEQ ID NO: 5786366 - DNA, 25 bp, Homo sapien
gttactgcctatcagcattttacta

SEQ ID NO: 5786367 - DNA, 25 bp, Homo sapien
gttatgggaccgcaccttcagtctt

SEQ ID NO: 5786368 - DNA, 25 bp, Homo sapien
cacaaaataatagagttgctgaatg

SEQ ID NO: 5786369 - DNA, 25 bp, Homo sapien
caaagtcatggctgctgagaatatt

SEQ ID NO: 5786370 - DNA, 25 bp, Homo sapien
ggaacttgatggccctaaaggaact

SEQ ID NO: 5786371 - DNA, 25 bp, Homo sapien
atgacagttttcccatggaaatcag

SEQ ID NO: 5786372 - DNA, 25 bp, Homo sapien
catttgccaccatccgttttcatga

SEQ ID NO: 5786373 - DNA, 25 bp, Homo sapien
cctgttgaagatgcttgtattttac

SEQ ID NO: 5786374 - DNA, 25 bp, Homo sapien
ctgagaatcccctgaagtatctgta

SEQ ID NO: 5786375 - DNA, 25 bp, Homo sapien
gacagtaaagtcagaaatgtgaagg

SEQ ID NO: 5786376 - DNA, 25 bp, Homo sapien
gctgcaccggggggatcgcgcctgg

SEQ ID NO: 5786377 - DNA, 25 bp, Homo sapien
agccttgctcctggctggggcctgt

SEQ ID NO: 5786378 - DNA, 25 bp, Homo sapien
aggacaaggttatgtgtatagagca

SEQ ID NO: 5786379 - DNA, 25 bp, Homo sapien
tgcacgatgggctcagctttcagaa

SEQ ID NO: 5786380 - DNA, 25 bp, Homo sapien
tactccaggccaaaggaagcaccag

SEQ ID NO: 5786381 - DNA, 25 bp, Homo sapien
gtaaaaggatttaggaagttcaaca

SEQ ID NO: 5786382 - DNA, 25 bp, Homo sapien
atatgacttcaaatgcaaaaccttg

SEQ ID NO: 5786383 - DNA, 25 bp, Homo sapien
aaataatagagttgctgaatgtcac

SEQ ID NO: 5786384 - DNA, 25 bp, Homo sapien
agtccaccaatggcagtctggcggc

SEQ ID NO: 5786385 - DNA, 25 bp, Homo sapien
catggctgctgagaatattcctgag

SEQ ID NO: 5786386 - DNA, 25 bp, Homo sapien
ctcaagccagccttgctcctggctg

SEQ ID NO: 5786387 - DNA, 25 bp, Homo sapien
cacagaagagtgacatgtttacaaa

SEQ ID NO: 5786388 - DNA, 25 bp, Homo sapien
ccctgattaatgatgaactagtgga

SEQ ID NO: 5786389 - DNA, 25 bp, Homo sapien
gaaagtattactccaggccaaagga

SEQ ID NO: 5786390 - DNA, 25 bp, Homo sapien
caatggaacttgatggccctaaagg

SEQ ID NO: 5786391 - DNA, 25 bp, Homo sapien
tttacaagatgaatatgacttcaaa

SEQ ID NO: 5786392 - DNA, 25 bp, Homo sapien
cagaagtgctgagttggcagttttc

SEQ ID NO: 5786393 - DNA, 25 bp, Homo sapien
tgactcaaaattcctggagcaggtt

SEQ ID NO: 5786394 - DNA, 25 bp, Homo sapien
agttcggcagcagcttaaaaagttg

SEQ ID NO: 5786395 - DNA, 25 bp, Homo sapien
tcaggaagacccaatccagatgtct

SEQ ID NO: 5786396 - DNA, 25 bp, Homo sapien
aaatacacctacgaacatgacccta

SEQ ID NO: 5786397 - DNA, 25 bp, Homo sapien
aagagcttgacagtaaagtcagaaa

SEQ ID NO: 5786398 - DNA, 25 bp, Homo sapien
ccaacgtcagccagctcccgagcgg

SEQ ID NO: 5786399 - DNA, 25 bp, Homo sapien
cttttccattgtaattgctatcgcc

SEQ ID NO: 5786400 - DNA, 25 bp, Homo sapien
attttacttttccattgtaattgct

SEQ ID NO: 5786401 - DNA, 25 bp, Homo sapien
ttagttttgaaacccaattgtgcca

SEQ ID NO: 5786402 - DNA, 25 bp, Homo sapien
cataaggaaaagcaagcgtaatctt

SEQ ID NO: 5786403 - DNA, 25 bp, Homo sapien
aatgctggcaccagaacgaatgagg

SEQ ID NO: 5786404 - DNA, 25 bp, Homo sapien
gatgtatttaatgcttgacaataag

SEQ ID NO: 5786405 - DNA, 25 bp, Homo sapien
agtgtaagtgaacacagaagagtga

SEQ ID NO: 5786406 - DNA, 25 bp, Homo sapien
aaatgcaaaaccttgcagaacagag

SEQ ID NO: 5786407 - DNA, 25 bp, Homo sapien
gttcaacattttgggcacgcacaca

SEQ ID NO: 5786408 - DNA, 25 bp, Homo sapien
tactcaagaagatgtatttaatgct

SEQ ID NO: 5786409 - DNA, 25 bp, Homo sapien
gggaccttcctgctgcggttcagtg

SEQ ID NO: 5786410 - DNA, 25 bp, Homo sapien
tgtatttaatgcttgacaataagag

SEQ ID NO: 5786411 - DNA, 25 bp, Homo sapien
attggggggccgcccaatgcttgct

SEQ ID NO: 5786412 - DNA, 25 bp, Homo sapien
aaatgtgaaggacaaggttatgtgt

SEQ ID NO: 5786413 - DNA, 25 bp, Homo sapien
cgagagctgtctaggttaacgttcg

SEQ ID NO: 5786414 - DNA, 25 bp, Homo sapien
tgatggccctaaaggaactggatat

SEQ ID NO: 5786415 - DNA, 25 bp, Homo sapien
tgtaagtgaacacagaagagtgaca

SEQ ID NO: 5786416 - DNA, 25 bp, Homo sapien
tgtgtatagagcatgaaatcaagag

SEQ ID NO: 5786417 - DNA, 25 bp, Homo sapien
tctttggagaataacttcttgctac

SEQ ID NO: 5786418 - DNA, 25 bp, Homo sapien
cattcagagctcgtttgtggtggaa

SEQ ID NO: 5786419 - DNA, 25 bp, Homo sapien
ggctggggcctgttgaagatgcttg

SEQ ID NO: 5786420 - DNA, 25 bp, Homo sapien
tggtacgaacttcagcagcttgact

SEQ ID NO: 5786421 - DNA, 25 bp, Homo sapien
ttggcacctaacgtgctgtgcgtag

SEQ ID NO: 5786422 - DNA, 25 bp, Homo sapien
agatgaatatgacttcaaatgcaaa

SEQ ID NO: 5786423 - DNA, 25 bp, Homo sapien
gcgtgccctgttgaaggaccagcag

SEQ ID NO: 5786424 - DNA, 25 bp, Homo sapien
ctgctccctctctggaatgatgggt

SEQ ID NO: 5786425 - DNA, 25 bp, Homo sapien
aaaagcaagactgggagcacgctgc

SEQ ID NO: 5786426 - DNA, 25 bp, Homo sapien
tcaggataattttcaggaagaccca

SEQ ID NO: 5786427 - DNA, 25 bp, Homo sapien
catgttgggagagaagcttcttggt

SEQ ID NO: 5786428 - DNA, 25 bp, Homo sapien
ataacttcttgctacagcataacat

SEQ ID NO: 5786429 - DNA, 25 bp, Homo sapien
tctggaaaacgcccagagatttaat

SEQ ID NO: 5786430 - DNA, 25 bp, Homo sapien
aagacagccctgcatgccaacgcac

SEQ ID NO: 5786431 - DNA, 25 bp, Homo sapien
aagtcatggctgctgagaatattcc

SEQ ID NO: 5786432 - DNA, 25 bp, Homo sapien
tttccattgtaattgctatcgccat

SEQ ID NO: 5786433 - DNA, 25 bp, Homo sapien
tgtctatgatcatttacagctgtct

SEQ ID NO: 5786434 - DNA, 25 bp, Homo sapien
gctcgtttgtggtggaaagacagcc

SEQ ID NO: 5786435 - DNA, 25 bp, Homo sapien
ctgtatccaaatattgacaaagacc

SEQ ID NO: 5786436 - DNA, 25 bp, Homo sapien
ccgtgttactgcctatcagcatttt

SEQ ID NO: 5786437 - DNA, 25 bp, Homo sapien
taatgcttgacaataagagaaagga

SEQ ID NO: 5786438 - DNA, 25 bp, Homo sapien
tcagctttcagaagtgctgagttgg

SEQ ID NO: 5786439 - DNA, 25 bp, Homo sapien
cagagccaatggaacttgatggccc

SEQ ID NO: 5786440 - DNA, 25 bp, Homo sapien
ctaaaggaactggatatatcaagac

SEQ ID NO: 5786441 - DNA, 25 bp, Homo sapien
atcagacagtacctggcacagtggt

SEQ ID NO: 5786442 - DNA, 25 bp, Homo sapien
caaagagtgatcagaaacaagaaca

SEQ ID NO: 5786443 - DNA, 25 bp, Homo sapien
gaaattgcaagagctgaattataat

SEQ ID NO: 5786444 - DNA, 25 bp, Homo sapien
ataagagaaaggaagtagttcacaa

SEQ ID NO: 5786445 - DNA, 25 bp, Homo sapien
tcctcgagagctgtctaggttaacg

SEQ ID NO: 5786446 - DNA, 25 bp, Homo sapien
ttcttcctgactccaccatgtgcac

SEQ ID NO: 5786447 - DNA, 25 bp, Homo sapien
aggttcaccagctttatgatgacag

SEQ ID NO: 5786448 - DNA, 25 bp, Homo sapien
acgaacatgaccctatcacaaaaaa

SEQ ID NO: 5786449 - DNA, 25 bp, Homo sapien
ctctcatcgttactgaagagcttca

SEQ ID NO: 5786450 - DNA, 25 bp, Homo sapien
gagaatattcctgagaatcccctga

SEQ ID NO: 5786451 - DNA, 25 bp, Homo sapien
ggagtccaccaatggcagtctggcg

SEQ ID NO: 5786452 - DNA, 25 bp, Homo sapien
acaaaagtgatgaacatggaggagt

SEQ ID NO: 5786453 - DNA, 25 bp, Homo sapien
gctgctcctttggttgaatccccag

SEQ ID NO: 5786454 - DNA, 25 bp, Homo sapien
ggtggaaagacagccctgcatgcca

SEQ ID NO: 5786455 - DNA, 25 bp, Homo sapien
atcttcaggataattttcaggaaga

SEQ ID NO: 5786456 - DNA, 25 bp, Homo sapien
agctcattcagagctcgtttgtggt

SEQ ID NO: 5786457 - DNA, 25 bp, Homo sapien
gatgaacatggaggagtccaccaat

SEQ ID NO: 5786458 - DNA, 25 bp, Homo sapien
catcacagctgaacttgttgagatc

SEQ ID NO: 5786459 - DNA, 25 bp, Homo sapien
tttccctgacatcattcgcaattac

SEQ ID NO: 5786460 - DNA, 25 bp, Homo sapien
cagcttaaaaagttggaggaattgg

SEQ ID NO: 5786461 - DNA, 25 bp, Homo sapien
tggaggagtccaccaatggcagtct

SEQ ID NO: 5786462 - DNA, 25 bp, Homo sapien
tgccctgattaatgatgaactagtg

SEQ ID NO: 5786463 - DNA, 25 bp, Homo sapien
gaacggaggcgaacctgacttccat

SEQ ID NO: 5786464 - DNA, 25 bp, Homo sapien
catcctttggtacaacatgctggtg

SEQ ID NO: 5786465 - DNA, 25 bp, Homo sapien
aagactgagttgatttctgtgtctg

SEQ ID NO: 5786466 - DNA, 25 bp, Homo sapien
tggggcacaaggtggcaggatgtct

SEQ ID NO: 5786467 - DNA, 25 bp, Homo sapien
accagctttatgatgacagttttcc

SEQ ID NO: 5786468 - DNA, 25 bp, Homo sapien
tcctgcgcgcagaaaagtttcattt

SEQ ID NO: 5786469 - DNA, 25 bp, Homo sapien
aagtgatgaacatggaggagtccac

SEQ ID NO: 5786470 - DNA, 25 bp, Homo sapien
atctgtatccaaatattgacaaaga

SEQ ID NO: 5786471 - DNA, 25 bp, Homo sapien
tcttgctacagcataacataaggaa

SEQ ID NO: 5786472 - DNA, 25 bp, Homo sapien
cggctgcaccggggggatcgcgcct

SEQ ID NO: 5786473 - DNA, 25 bp, Homo sapien
gagaggctgcaccgccgcgcccccg

SEQ ID NO: 5786474 - DNA, 25 bp, Homo sapien
gatggtctcattccgtggacgaggt

SEQ ID NO: 5786475 - DNA, 25 bp, Homo sapien
ggcacagtggttagaaaagcaagac

SEQ ID NO: 5786476 - DNA, 25 bp, Homo sapien
cttcttggtcctaacgccagccccg

SEQ ID NO: 5786477 - DNA, 25 bp, Homo sapien
gggtggagcggtcccagaacggagg

SEQ ID NO: 5786478 - DNA, 25 bp, Homo sapien
ctcgacagtcttggcacctaacgtg

SEQ ID NO: 5786479 - DNA, 25 bp, Homo sapien
gactgagttgatttctgtgtctgaa

SEQ ID NO: 5786480 - DNA, 25 bp, Homo sapien
accccagaccgagcagaggcgaccc

SEQ ID NO: 5786481 - DNA, 25 bp, Homo sapien
ttttcccttctggctttggattgaa

SEQ ID NO: 5786482 - DNA, 25 bp, Homo sapien
accatccgttttcatgacctcctgt

SEQ ID NO: 5786483 - DNA, 25 bp, Homo sapien
cgcagagtctgcggaggggctcggc

SEQ ID NO: 5786484 - DNA, 25 bp, Homo sapien
gagccaatggaacttgatggcccta

SEQ ID NO: 5786485 - DNA, 25 bp, Homo sapien
tttgctgtatgccatcctcgagagc

SEQ ID NO: 5786486 - DNA, 25 bp, Homo sapien
aaaaagttggaggaattggaacaga

SEQ ID NO: 5786487 - DNA, 25 bp, Homo sapien
gaatatgacttcaaatgcaaaacct

SEQ ID NO: 5786488 - DNA, 25 bp, Homo sapien
tcattaaaaaacacctgctccctct

SEQ ID NO: 5786489 - DNA, 25 bp, Homo sapien
gcgctcgggagaggctgcaccgccg

SEQ ID NO: 5786490 - DNA, 25 bp, Homo sapien
tggcagttttcttctgtcaccaaaa

SEQ ID NO: 5786491 - DNA, 25 bp, Homo sapien
ttgttggggcacaaggtggcaggat

SEQ ID NO: 5786492 - DNA, 25 bp, Homo sapien
aacttcttgctacagcataacataa

SEQ ID NO: 5786493 - DNA, 25 bp, Homo sapien
gagcctggaagatttacaagatgaa

SEQ ID NO: 5786494 - DNA, 25 bp, Homo sapien
tgggtgcatcatgggcttcatcagc

SEQ ID NO: 5786495 - DNA, 25 bp, Homo sapien
tgccaacgcaccctcagaggccgct

SEQ ID NO: 5786496 - DNA, 25 bp, Homo sapien
tgcagaactggttcactatagttgc

SEQ ID NO: 5786497 - DNA, 25 bp, Homo sapien
gctgccaatgatgtttcatttgcca

SEQ ID NO: 5786498 - DNA, 25 bp, Homo sapien
agcggagacagcagagcgcctgtat

SEQ ID NO: 5786499 - DNA, 25 bp, Homo sapien
tttacttttccattgtaattgctat

SEQ ID NO: 5786500 - DNA, 25 bp, Homo sapien
ctgtgtctgaagtgtaagtgaacac

SEQ ID NO: 5786501 - DNA, 25 bp, Homo sapien
gagacagcagagcgcctgtattggg

SEQ ID NO: 5786502 - DNA, 25 bp, Homo sapien
gcttgtattttacttttccattgta

SEQ ID NO: 5786503 - DNA, 25 bp, Homo sapien
tgttgaagatgcttgtattttactt

SEQ ID NO: 5786504 - DNA, 25 bp, Homo sapien
gaaaagcaagcgtaatcttcaggat

SEQ ID NO: 5786505 - DNA, 25 bp, Homo sapien
acctcgagacgacctctctgcccgt

SEQ ID NO: 5786506 - DNA, 25 bp, Homo sapien
acaagtgttatgggaccgcaccttc

SEQ ID NO: 5786507 - DNA, 25 bp, Homo sapien
aagaacagctgttactcaagaagat

SEQ ID NO: 5786508 - DNA, 25 bp, Homo sapien
acccaggaatctgtccttcttcctg

SEQ ID NO: 5786509 - DNA, 25 bp, Homo sapien
gctttatgatgacagttttcccatg

SEQ ID NO: 5786510 - DNA, 25 bp, Homo sapien
aaggtggcaggatgtctcagtggta

SEQ ID NO: 5786511 - DNA, 25 bp, Homo sapien
ctggatgatcaatatagtcgctttt

SEQ ID NO: 5786512 - DNA, 25 bp, Homo sapien
ttcctgctgcggttcagtgagagct

SEQ ID NO: 5786513 - DNA, 25 bp, Homo sapien
catgtgcacgatgggctcagctttc

SEQ ID NO: 5786514 - DNA, 25 bp, Homo sapien
acatgaccctatcacaaaaaacaaa

SEQ ID NO: 5786515 - DNA, 25 bp, Homo sapien
acgaacttcagcagcttgactcaaa

SEQ ID NO: 5786516 - DNA, 25 bp, Homo sapien
gagagctcccgggaaggggccatca

SEQ ID NO: 5786517 - DNA, 25 bp, Homo sapien
tcagccagctcccgagcggttgggc

SEQ ID NO: 5786518 - DNA, 25 bp, Homo sapien
agtcggggaatattcagagcacagt

SEQ ID NO: 5786519 - DNA, 25 bp, Homo sapien
cggagacagcagagcgcctgtattg

SEQ ID NO: 5786520 - DNA, 25 bp, Homo sapien
gcactctgtgtatataacctcgaca

SEQ ID NO: 5786521 - DNA, 25 bp, Homo sapien
tatagtcgcttttctttggagaata

SEQ ID NO: 5786522 - DNA, 25 bp, Homo sapien
gaggccgctggtcttgaagacaggg

SEQ ID NO: 5786523 - DNA, 25 bp, Homo sapien
cggagagtctgcagcaagttcggca

SEQ ID NO: 5786524 - DNA, 25 bp, Homo sapien
tgccagcctggtttggtaattgacc

SEQ ID NO: 5786525 - DNA, 25 bp, Homo sapien
taggaagttcaacattttgggcacg

SEQ ID NO: 5786526 - DNA, 25 bp, Homo sapien
gcggaggggctcggctgcaccgggg

SEQ ID NO: 5786527 - DNA, 25 bp, Homo sapien
tatagagcatgaaatcaagagcctg

SEQ ID NO: 5786528 - DNA, 25 bp, Homo sapien
gctgttactttccctgacatcattc

SEQ ID NO: 5786529 - DNA, 25 bp, Homo sapien
ccaccatgtgcacgatgggctcagc

SEQ ID NO: 5786530 - DNA, 25 bp, Homo sapien
ctcattcagagctcgtttgtggtgg

SEQ ID NO: 5786531 - DNA, 25 bp, Homo sapien
aaagaggtctcaatgtggaccagct

SEQ ID NO: 5786532 - DNA, 25 bp, Homo sapien
tgacctcctgtcacagctggatgat

SEQ ID NO: 5786533 - DNA, 25 bp, Homo sapien
ctgactccaccatgtgcacgatggg

SEQ ID NO: 5786534 - DNA, 25 bp, Homo sapien
acgcacacaaaagtgatgaacatgg

SEQ ID NO: 5786535 - DNA, 25 bp, Homo sapien
aagcaagactgggagcacgctgcca

SEQ ID NO: 5786536 - DNA, 25 bp, Homo sapien
ttactttccctgacatcattcgcaa

SEQ ID NO: 5786537 - DNA, 25 bp, Homo sapien
cagtaaaaggatttaggaagttcaa

SEQ ID NO: 5786538 - DNA, 25 bp, Homo sapien
atcccctgaagtatctgtatccaaa

SEQ ID NO: 5786539 - DNA, 25 bp, Homo sapien
ttgaagatgcttgtattttactttt

SEQ ID NO: 5786540 - DNA, 25 bp, Homo sapien
cagctgtctgaaggaagaaaggaaa

SEQ ID NO: 5786541 - DNA, 25 bp, Homo sapien
gaataacttcttgctacagcataac

SEQ ID NO: 5786542 - DNA, 25 bp, Homo sapien
gtggcaaagagtgatcagaaacaag

SEQ ID NO: 5786543 - DNA, 25 bp, Homo sapien
tccaccaatggcagtctggcggctg

SEQ ID NO: 5786544 - DNA, 25 bp, Homo sapien
actggttcactatagttgcggagag

SEQ ID NO: 5786545 - DNA, 25 bp, Homo sapien
ctcgagagctgtctaggttaacgtt

SEQ ID NO: 5786546 - DNA, 25 bp, Homo sapien
cccctgaagtatctgtatccaaata

SEQ ID NO: 5786547 - DNA, 25 bp, Homo sapien
agaggcgacccagcgcgctcgggag

SEQ ID NO: 5786548 - DNA, 25 bp, Homo sapien
gttaacgttcgcactctgtgtatat

SEQ ID NO: 5786549 - DNA, 25 bp, Homo sapien
tttaatgcttgacaataagagaaag

SEQ ID NO: 5786550 - DNA, 25 bp, Homo sapien
tctgtcaccaaaagaggtctcaatg

SEQ ID NO: 5786551 - DNA, 25 bp, Homo sapien
tgaagtatctgtatccaaatattga

SEQ ID NO: 5786552 - DNA, 25 bp, Homo sapien
gtcgcttttctttggagaataactt

SEQ ID NO: 5786553 - DNA, 25 bp, Homo sapien
tggattgaaagcatcctagaactca

SEQ ID NO: 5786554 - DNA, 25 bp, Homo sapien
atcagcattttactactttaaaaaa

SEQ ID NO: 5786555 - DNA, 25 bp, Homo sapien
acatcattcgcaattacaaagtcat

SEQ ID NO: 5786556 - DNA, 25 bp, Homo sapien
aaagaccatgcctttggaaagtatt

SEQ ID NO: 5786557 - DNA, 25 bp, Homo sapien
ccccgcctagcccttccggatcctg

SEQ ID NO: 5786558 - DNA, 25 bp, Homo sapien
ttttgaaacccaattgtgccagcct

SEQ ID NO: 5786559 - DNA, 25 bp, Homo sapien
gttgagatccccgtgttactgccta

SEQ ID NO: 5786560 - DNA, 25 bp, Homo sapien
gttcgcactctgtgtatataacctc

SEQ ID NO: 5786561 - DNA, 25 bp, Homo sapien
aaatcagacagtacctggcacagtg

SEQ ID NO: 5786562 - DNA, 25 bp, Homo sapien
catttacagctgtctgaaggaagaa

SEQ ID NO: 5786563 - DNA, 25 bp, Homo sapien
cgcgcctggcagaccccagaccgag

SEQ ID NO: 5786564 - DNA, 25 bp, Homo sapien
gagcatgaaatcaagagcctggaag

SEQ ID NO: 5786565 - DNA, 25 bp, Homo sapien
aaaggaactggatatatcaagactg

SEQ ID NO: 5786566 - DNA, 25 bp, Homo sapien
ttcatgacctcctgtcacagctgga

SEQ ID NO: 5786567 - DNA, 25 bp, Homo sapien
cagagaacacgagaccaatggtgtg

SEQ ID NO: 5786568 - DNA, 25 bp, Homo sapien
tccggatcctgcgcgcagaaaagtt

SEQ ID NO: 5786569 - DNA, 25 bp, Homo sapien
agcctggtttggtaattgacctcga

SEQ ID NO: 5786570 - DNA, 25 bp, Homo sapien
gatttaggaagttcaacattttggg

SEQ ID NO: 5786571 - DNA, 25 bp, Homo sapien
gcgacccagcgcgctcgggagaggc

SEQ ID NO: 5786572 - DNA, 25 bp, Homo sapien
gtatccaaatattgacaaagaccat

SEQ ID NO: 5786573 - DNA, 25 bp, Homo sapien
cagcagctcattcagagctcgtttg

SEQ ID NO: 5786574 - DNA, 25 bp, Homo sapien
tactgcctatcagcattttactact

SEQ ID NO: 5786575 - DNA, 25 bp, Homo sapien
cagaccgagcagaggcgacccagcg

SEQ ID NO: 5786576 - DNA, 25 bp, Homo sapien
tggaagcggagacagcagagcgcct

SEQ ID NO: 5786577 - DNA, 25 bp, Homo sapien
acacctgctccctctctggaatgat

SEQ ID NO: 5786578 - DNA, 25 bp, Homo sapien
ggaagcaccagagccaatggaactt

SEQ ID NO: 5786579 - DNA, 25 bp, Homo sapien
ggtcctaacgccagccccgatggtc

SEQ ID NO: 5786580 - DNA, 25 bp, Homo sapien
ggttgaatccccaggcccttgttgg

SEQ ID NO: 5786581 - DNA, 25 bp, Homo sapien
ggaagatttacaagatgaatatgac

SEQ ID NO: 5786582 - DNA, 25 bp, Homo sapien
gctgaacatgttgggagagaagctt

SEQ ID NO: 5786583 - DNA, 25 bp, Homo sapien
aggggccatcacattcacatgggtg

SEQ ID NO: 5786584 - DNA, 25 bp, Homo sapien
aggtctcaatgtggaccagctgaac

SEQ ID NO: 5786585 - DNA, 25 bp, Homo sapien
aggcgacccagcgcgctcgggagag

SEQ ID NO: 5786586 - DNA, 25 bp, Homo sapien
aaaattcctggagcaggttcaccag

SEQ ID NO: 5786587 - DNA, 25 bp, Homo sapien
gtgatgaacatggaggagtccacca

SEQ ID NO: 5786588 - DNA, 25 bp, Homo sapien
agggtcctctcatcgttactgaaga

SEQ ID NO: 5786589 - DNA, 25 bp, Homo sapien
ggatgatcaatatagtcgcttttct

SEQ ID NO: 5786590 - DNA, 25 bp, Homo sapien
gtctaggttaacgttcgcactctgt

SEQ ID NO: 5786591 - DNA, 25 bp, Homo sapien
cctctctggaatgatgggtgcatca

SEQ ID NO: 5786592 - DNA, 25 bp, Homo sapien
gcagcagcttaaaaagttggaggaa

SEQ ID NO: 5786593 - DNA, 25 bp, Homo sapien
gctggtggcggaacccaggaatctg

SEQ ID NO: 5786594 - DNA, 25 bp, Homo sapien
agccagctcccgagcggttgggcct

SEQ ID NO: 5786595 - DNA, 25 bp, Homo sapien
gtggagcggtcccagaacggaggcg

SEQ ID NO: 5786596 - DNA, 25 bp, Homo sapien
tcagtggtacgaacttcagcagctt

SEQ ID NO: 5786597 - DNA, 25 bp, Homo sapien
gctgctgagaatattcctgagaatc

SEQ ID NO: 5786598 - DNA, 25 bp, Homo sapien
cgtagctgctcctttggttgaatcc

SEQ ID NO: 5786599 - DNA, 25 bp, Homo sapien
agaccccagaccgagcagaggcgac

SEQ ID NO: 5786600 - DNA, 25 bp, Homo sapien
agtctggcggctgaatttcggcacc

SEQ ID NO: 5786601 - DNA, 25 bp, Homo sapien
ggaatattcagagcacagtgatgtt

SEQ ID NO: 5786602 - DNA, 25 bp, Homo sapien
tagctgctcctttggttgaatcccc

SEQ ID NO: 5786603 - DNA, 25 bp, Homo sapien
cagaaaaatgctggcaccagaacga

SEQ ID NO: 5786604 - DNA, 25 bp, Homo sapien
ctttggtacaacatgctggtggcgg

SEQ ID NO: 5786605 - DNA, 25 bp, Homo sapien
ccccgatggtctcattccgtggacg

SEQ ID NO: 5786606 - DNA, 25 bp, Homo sapien
cagaggccgctggtcttgaagacag

SEQ ID NO: 5786607 - DNA, 25 bp, Homo sapien
aatggtgtggcaaagagtgatcaga

SEQ ID NO: 5786608 - DNA, 25 bp, Homo sapien
gttgatttctgtgtctgaagtgtaa

SEQ ID NO: 5786609 - DNA, 25 bp, Homo sapien
gggctcggctgcaccggggggatcg

SEQ ID NO: 5786610 - DNA, 25 bp, Homo sapien
ggggatcgcgcctggcagaccccag

SEQ ID NO: 5786611 - DNA, 25 bp, Homo sapien
atgggtggagcggtcccagaacgga

SEQ ID NO: 5786612 - DNA, 25 bp, Homo sapien
tcacatgggtggagcggtcccagaa

SEQ ID NO: 5786613 - DNA, 25 bp, Homo sapien
tggtgaaattgcaagagctgaatta

SEQ ID NO: 5786614 - DNA, 25 bp, Homo sapien
aacagaaagagcttgacagtaaagt

SEQ ID NO: 5786615 - DNA, 25 bp, Homo sapien
cagcagcttgactcaaaattcctgg

SEQ ID NO: 5786616 - DNA, 25 bp, Homo sapien
tccctctctggaatgatgggtgcat

SEQ ID NO: 5786617 - DNA, 25 bp, Homo sapien
tcccatggaaatcagacagtacctg

SEQ ID NO: 5786618 - DNA, 25 bp, Homo sapien
tagttgcggagagtctgcagcaagt

SEQ ID NO: 5786619 - DNA, 25 bp, Homo sapien
ctcctttggttgaatccccaggccc

SEQ ID NO: 5786620 - DNA, 25 bp, Homo sapien
ctcaatgtggaccagctgaacatgt

SEQ ID NO: 5786621 - DNA, 25 bp, Homo sapien
agctgttactcaagaagatgtattt

SEQ ID NO: 5786622 - DNA, 25 bp, Homo sapien
ttcactgtgaagttgagactgttgg

SEQ ID NO: 5786623 - DNA, 25 bp, Homo sapien
gctcagctttcagaagtgctgagtt

SEQ ID NO: 5786624 - DNA, 25 bp, Homo sapien
gcctggaagatttacaagatgaata

SEQ ID NO: 5786625 - DNA, 25 bp, Homo sapien
agtgacatgtttacaaacctcaagc

SEQ ID NO: 5786626 - DNA, 25 bp, Homo sapien
ttggtaattgacctcgagacgacct

SEQ ID NO: 5786627 - DNA, 25 bp, Homo sapien
catcgttactgaagagcttcactcc

SEQ ID NO: 5786628 - DNA, 25 bp, Homo sapien
attaaaaaacacctgctccctctct

SEQ ID NO: 5786629 - DNA, 25 bp, Homo sapien
gggctcagctttcagaagtgctgag

SEQ ID NO: 5786630 - DNA, 25 bp, Homo sapien
atctccaacgtcagccagctcccga

SEQ ID NO: 5786631 - DNA, 25 bp, Homo sapien
tctctgcccgttgtggtgatctcca

SEQ ID NO: 5786632 - DNA, 25 bp, Homo sapien
gtggcggaacccaggaatctgtcct

SEQ ID NO: 5786633 - DNA, 25 bp, Homo sapien
gaactagtggagtggaagcggagac

SEQ ID NO: 5786634 - DNA, 25 bp, Homo sapien
ccccaggcccttgttggggcacaag

SEQ ID NO: 5786635 - DNA, 25 bp, Homo sapien
tgatgaactagtggagtggaagcgg

SEQ ID NO: 5786636 - DNA, 25 bp, Homo sapien
ttctgtgtctgaagtgtaagtgaac

SEQ ID NO: 5786637 - DNA, 25 bp, Homo sapien
ttgcttggatcagctgcagaactgg

SEQ ID NO: 5786638 - DNA, 25 bp, Homo sapien
cgccagccccgatggtctcattccg

SEQ ID NO: 5786639 - DNA, 25 bp, Homo sapien
aacgaatgagggtcctctcatcgtt

SEQ ID NO: 5786640 - DNA, 25 bp, Homo sapien
tgtatagagcatgaaatcaagagcc

SEQ ID NO: 5786641 - DNA, 25 bp, Homo sapien
gaagcttcttggtcctaacgccagc

SEQ ID NO: 5786642 - DNA, 25 bp, Homo sapien
gtacctggcacagtggttagaaaag

SEQ ID NO: 5786643 - DNA, 25 bp, Homo sapien
gaacagctgttactcaagaagatgt

SEQ ID NO: 5786644 - DNA, 25 bp, Homo sapien
ttcagaagtgctgagttggcagttt

SEQ ID NO: 5786645 - DNA, 25 bp, Homo sapien
acaaacaagtgttatgggaccgcac

SEQ ID NO: 5786646 - DNA, 25 bp, Homo sapien
ttgaaacccaattgtgccagcctgg

SEQ ID NO: 5786647 - DNA, 25 bp, Homo sapien
ttgaaagcatcctagaactcattaa

SEQ ID NO: 5786648 - DNA, 25 bp, Homo sapien
ccagaacgaatgagggtcctctcat

SEQ ID NO: 5786649 - DNA, 25 bp, Homo sapien
gaatttcggcacctgcaattgaaag

SEQ ID NO: 5786650 - DNA, 25 bp, Homo sapien
cagctgcagaactggttcactatag

SEQ ID NO: 5786651 - DNA, 25 bp, Homo sapien
caataagagaaaggaagtagttcac

SEQ ID NO: 5786652 - DNA, 25 bp, Homo sapien
tgtcacagctggatgatcaatatag

SEQ ID NO: 5786653 - DNA, 25 bp, Homo sapien
ctgaatgtcactgaacttacccaga

SEQ ID NO: 5786654 - DNA, 25 bp, Homo sapien
agaaagaactttctgctgttacttt

SEQ ID NO: 5786655 - DNA, 25 bp, Homo sapien
tgatctccaacgtcagccagctccc

SEQ ID NO: 5786656 - DNA, 25 bp, Homo sapien
taatcttcaggataattttcaggaa

SEQ ID NO: 5786657 - DNA, 25 bp, Homo sapien
ggtacaacatgctggtggcggaacc

SEQ ID NO: 5786658 - DNA, 25 bp, Homo sapien
ggttagaaaagcaagactgggagca

SEQ ID NO: 5786659 - DNA, 25 bp, Homo sapien
gcttaaaaagttggaggaattggaa

SEQ ID NO: 5786660 - DNA, 25 bp, Homo sapien
tgagggtcctctcatcgttactgaa

SEQ ID NO: 5786661 - DNA, 25 bp, Homo sapien
ggatcagctgcagaactggttcact

SEQ ID NO: 5786662 - DNA, 25 bp, Homo sapien
tgcggttgaaccctacacgaagaaa

SEQ ID NO: 5786663 - DNA, 25 bp, Homo sapien
atgtttcatttgccaccatccgttt

SEQ ID NO: 5786664 - DNA, 25 bp, Homo sapien
ctacacgaagaaagaactttctgct

SEQ ID NO: 5786665 - DNA, 25 bp, Homo sapien
agccagccttgctcctggctggggc

SEQ ID NO: 5786666 - DNA, 25 bp, Homo sapien
tccattgtaattgctatcgccatca

SEQ ID NO: 5786667 - DNA, 25 bp, Homo sapien
ggaggcgaacctgacttccatgcgg

SEQ ID NO: 5786668 - DNA, 25 bp, Homo sapien
cctctctgcccgttgtggtgatctc

SEQ ID NO: 5786669 - DNA, 25 bp, Homo sapien
ctgtctaggttaacgttcgcactct

SEQ ID NO: 5786670 - DNA, 25 bp, Homo sapien
gaacttgttgagatccccgtgttac

SEQ ID NO: 5786671 - DNA, 25 bp, Homo sapien
cgagcggttgggcctccatcctttg

SEQ ID NO: 5786672 - DNA, 25 bp, Homo sapien
ccgggaaggggccatcacattcaca

SEQ ID NO: 5786673 - DNA, 25 bp, Homo sapien
aagtatctgtatccaaatattgaca

SEQ ID NO: 5786674 - DNA, 25 bp, Homo sapien
gagcacgctgccaatgatgtttcat

SEQ ID NO: 5786675 - DNA, 25 bp, Homo sapien
acgacctctctgcccgttgtggtga

SEQ ID NO: 5786676 - DNA, 25 bp, Homo sapien
gtctcattccgtggacgaggttttg

SEQ ID NO: 5786677 - DNA, 25 bp, Homo sapien
tttgccaccatccgttttcatgacc

SEQ ID NO: 5786678 - DNA, 25 bp, Homo sapien
gtttcatttgctgtatgccatcctc

SEQ ID NO: 5786679 - DNA, 25 bp, Homo sapien
gtttacaaacctcaagccagccttg

SEQ ID NO: 5786680 - DNA, 25 bp, Homo sapien
tgttgggagagaagcttcttggtcc

SEQ ID NO: 5786681 - DNA, 25 bp, Homo sapien
tgtgcgtagctgctcctttggttga

SEQ ID NO: 5786682 - DNA, 25 bp, Homo sapien
gaaagcatcctagaactcattaaaa

SEQ ID NO: 5786683 - DNA, 25 bp, Homo sapien
aattttcccttctggctttggattg

SEQ ID NO: 5786684 - DNA, 25 bp, Homo sapien
ctgacttccatgcggttgaacccta

SEQ ID NO: 5786685 - DNA, 25 bp, Homo sapien
cattcgcaattacaaagtcatggct

SEQ ID NO: 5786686 - DNA, 25 bp, Homo sapien
tttaggaagttcaacattttgggca

SEQ ID NO: 5786687 - DNA, 25 bp, Homo sapien
gagcacagtgatgttagacaaacag

SEQ ID NO: 5786688 - DNA, 25 bp, Homo sapien
cctagaactcattaaaaaacacctg

SEQ ID NO: 5786689 - DNA, 25 bp, Homo sapien
tgatttctgtgtctgaagtgtaagt

SEQ ID NO: 5786690 - DNA, 25 bp, Homo sapien
ctggctggggcctgttgaagatgct

SEQ ID NO: 5786691 - DNA, 25 bp, Homo sapien
gttttcccatggaaatcagacagta

SEQ ID NO: 5786692 - DNA, 25 bp, Homo sapien
cagagcacagtgatgttagacaaac

SEQ ID NO: 5786693 - DNA, 25 bp, Homo sapien
tcactatagttgcggagagtctgca

SEQ ID NO: 5786694 - DNA, 25 bp, Homo sapien
ttgggcacgcacacaaaagtgatga

SEQ ID NO: 5786695 - DNA, 25 bp, Homo sapien
ctgtccttcttcctgactccaccat

SEQ ID NO: 5786696 - DNA, 25 bp, Homo sapien
ggcaaagagtgatcagaaacaagaa

SEQ ID NO: 5786697 - DNA, 25 bp, Homo sapien
gctgtgcgtagctgctcctttggtt

SEQ ID NO: 5786698 - DNA, 25 bp, Homo sapien
gataattttcaggaagacccaatcc

SEQ ID NO: 5786699 - DNA, 25 bp, Homo sapien
ccctacacgaagaaagaactttctg

SEQ ID NO: 5786700 - DNA, 25 bp, Homo sapien
gacagcagagcgcctgtattggggg

SEQ ID NO: 5786701 - DNA, 25 bp, Homo sapien
tgcggagagtctgcagcaagttcgg

SEQ ID NO: 5786702 - DNA, 25 bp, Homo sapien
aggaactggatatatcaagactgag

SEQ ID NO: 5786703 - DNA, 25 bp, Homo sapien
ggaaatcagacagtacctggcacag

SEQ ID NO: 5786704 - DNA, 25 bp, Homo sapien
gactgggagcacgctgccaatgatg

SEQ ID NO: 5786705 - DNA, 25 bp, Homo sapien
aattgcaagagctgaattataattt

SEQ ID NO: 5786706 - DNA, 25 bp, Homo sapien
gttatgtgtatagagcatgaaatca

SEQ ID NO: 5786707 - DNA, 25 bp, Homo sapien
aggccaaaggaagcaccagagccaa

SEQ ID NO: 5786708 - DNA, 25 bp, Homo sapien
gtattttacttttccattgtaattg

SEQ ID NO: 5786709 - DNA, 25 bp, Homo sapien
gcagctcattcagagctcgtttgtg

SEQ ID NO: 5786710 - DNA, 25 bp, Homo sapien
gctcgggagaggctgcaccgccgcg

SEQ ID NO: 5786711 - DNA, 25 bp, Homo sapien
tcagtcggggaatattcagagcaca

SEQ ID NO: 5786712 - DNA, 25 bp, Homo sapien
attcctgagaatcccctgaagtatc

SEQ ID NO: 5786713 - DNA, 25 bp, Homo sapien
gacccagcgcgctcgggagaggctg

SEQ ID NO: 5786714 - DNA, 25 bp, Homo sapien
tatcaagactgagttgatttctgtg

SEQ ID NO: 5786715 - DNA, 25 bp, Homo sapien
gcaggttcaccagctttatgatgac

SEQ ID NO: 5786716 - DNA, 25 bp, Homo sapien
gaaaaatgctggcaccagaacgaat

SEQ ID NO: 5786717 - DNA, 25 bp, Homo sapien
ggatcgcgcctggcagaccccagac

SEQ ID NO: 5786718 - DNA, 25 bp, Homo sapien
atgatgggtgcatcatgggcttcat

SEQ ID NO: 5786719 - DNA, 25 bp, Homo sapien
tacaacatgctggtggcggaaccca

SEQ ID NO: 5786720 - DNA, 25 bp, Homo sapien
gctcagtcggggaatattcagagca

SEQ ID NO: 5786721 - DNA, 25 bp, Homo sapien
cctgttgaaggaccagcagccgggg

SEQ ID NO: 5786722 - DNA, 25 bp, Homo sapien
gaacagaaatacacctacgaacatg

SEQ ID NO: 5786723 - DNA, 25 bp, Homo sapien
acggaggcgaacctgacttccatgc

SEQ ID NO: 5786724 - DNA, 25 bp, Homo sapien
tgaacatggaggagtccaccaatgg

SEQ ID NO: 5786725 - DNA, 25 bp, Homo sapien
actatagttgcggagagtctgcagc

SEQ ID NO: 5786726 - DNA, 25 bp, Homo sapien
ttagaaaagcaagactgggagcacg

SEQ ID NO: 5786727 - DNA, 25 bp, Homo sapien
tgtcaccaaaagaggtctcaatgtg

SEQ ID NO: 5786728 - DNA, 25 bp, Homo sapien
cgaatgagggtcctctcatcgttac

SEQ ID NO: 5786729 - DNA, 25 bp, Homo sapien
cttgactcaaaattcctggagcagg

SEQ ID NO: 5786730 - DNA, 25 bp, Homo sapien
gtacgaacttcagcagcttgactca

SEQ ID NO: 5786731 - DNA, 25 bp, Homo sapien
atacacctacgaacatgaccctatc

SEQ ID NO: 5786732 - DNA, 25 bp, Homo sapien
tgtgcacgatgggctcagctttcag

SEQ ID NO: 5786733 - DNA, 25 bp, Homo sapien
gacttccatgcggttgaaccctaca

SEQ ID NO: 5786734 - DNA, 25 bp, Homo sapien
aaggaagcaccagagccaatggaac

SEQ ID NO: 5786735 - DNA, 25 bp, Homo sapien
ggggggatcgcgcctggcagacccc

SEQ ID NO: 5786736 - DNA, 25 bp, Homo sapien
actttccctgacatcattcgcaatt

SEQ ID NO: 5786737 - DNA, 25 bp, Homo sapien
ttggaggaattggaacagaaataca

SEQ ID NO: 5786738 - DNA, 25 bp, Homo sapien
gtcactgaacttacccagaatgccc

SEQ ID NO: 5786739 - DNA, 25 bp, Homo sapien
tgttactttccctgacatcattcgc

SEQ ID NO: 5786740 - DNA, 25 bp, Homo sapien
acacgaagaaagaactttctgctgt

SEQ ID NO: 5786741 - DNA, 25 bp, Homo sapien
tggctttggattgaaagcatcctag

SEQ ID NO: 5786742 - DNA, 25 bp, Homo sapien
ctcccgagcggttgggcctccatcc

SEQ ID NO: 5786743 - DNA, 25 bp, Homo sapien
caccctcagaggccgctggtcttga

SEQ ID NO: 5786744 - DNA, 25 bp, Homo sapien
cgacagtcttggcacctaacgtgct

SEQ ID NO: 5786745 - DNA, 25 bp, Homo sapien
gaaggacaaggttatgtgtatagag

SEQ ID NO: 5786746 - DNA, 25 bp, Homo sapien
tcttgaagacaggggtccagttcac

SEQ ID NO: 5786747 - DNA, 25 bp, Homo sapien
caaaggaagcaccagagccaatgga

SEQ ID NO: 5786748 - DNA, 25 bp, Homo sapien
gtattactccaggccaaaggaagca

SEQ ID NO: 5786749 - DNA, 25 bp, Homo sapien
gtcttttccagcagctcattcagag

SEQ ID NO: 5786750 - DNA, 25 bp, Homo sapien
atgcttgacaataagagaaaggaag

SEQ ID NO: 5786751 - DNA, 25 bp, Homo sapien
tttccagcagctcattcagagctcg

SEQ ID NO: 5786752 - DNA, 25 bp, Homo sapien
cctgtattggggggccgcccaatgc

SEQ ID NO: 5786753 - DNA, 25 bp, Homo sapien
aaaaccttgcagaacagagaacacg

SEQ ID NO: 5786754 - DNA, 25 bp, Homo sapien
acaggggtccagttcactgtgaagt

SEQ ID NO: 5786755 - DNA, 25 bp, Homo sapien
acagaaatacacctacgaacatgac

SEQ ID NO: 5786756 - DNA, 25 bp, Homo sapien
gcgcgcagaaaagtttcatttgctg

SEQ ID NO: 5786757 - DNA, 25 bp, Homo sapien
tggaatgatgggtgcatcatgggct

SEQ ID NO: 5786758 - DNA, 25 bp, Homo sapien
gccatcctcgagagctgtctaggtt

SEQ ID NO: 5786759 - DNA, 25 bp, Homo sapien
gtaaagtcagaaatgtgaaggacaa

SEQ ID NO: 5786760 - DNA, 25 bp, Homo sapien
gaactggatatatcaagactgagtt

SEQ ID NO: 5786761 - DNA, 25 bp, Homo sapien
ccagcctggtttggtaattgacctc

SEQ ID NO: 5786762 - DNA, 25 bp, Homo sapien
tatatcaagactgagttgatttctg

SEQ ID NO: 5786763 - DNA, 25 bp, Homo sapien
ccaggccaaaggaagcaccagagcc

SEQ ID NO: 5786764 - DNA, 25 bp, Homo sapien
gcaagactgggagcacgctgccaat

SEQ ID NO: 5786765 - DNA, 25 bp, Homo sapien
aacatgttgggagagaagcttcttg

SEQ ID NO: 5786766 - DNA, 25 bp, Homo sapien
gccctgcatgccaacgcaccctcag

SEQ ID NO: 5786767 - DNA, 25 bp, Homo sapien
agcggttgggcctccatcctttggt

SEQ ID NO: 5786768 - DNA, 25 bp, Homo sapien
acacctacgaacatgaccctatcac

SEQ ID NO: 5786769 - DNA, 25 bp, Homo sapien
caccttcagtcttttccagcagctc

SEQ ID NO: 5786770 - DNA, 25 bp, Homo sapien
caatgtggaccagctgaacatgttg

SEQ ID NO: 5786771 - DNA, 25 bp, Homo sapien
tcagaaatgtgaaggacaaggttat

SEQ ID NO: 5786772 - DNA, 25 bp, Homo sapien
atcctagaactcattaaaaaacacc

SEQ ID NO: 5786773 - DNA, 25 bp, Homo sapien
tatttaatgcttgacaataagagaa

SEQ ID NO: 5786774 - DNA, 25 bp, Homo sapien
ttctgctgttactttccctgacatc

SEQ ID NO: 5786775 - DNA, 25 bp, Homo sapien
aacattttgggcacgcacacaaaag

SEQ ID NO: 5786776 - DNA, 25 bp, Homo sapien
gtcaaagtcttatttgataaagatg

SEQ ID NO: 5786777 - DNA, 25 bp, Homo sapien
tttggaaagtattactccaggccaa

SEQ ID NO: 5786778 - DNA, 25 bp, Homo sapien
gcacagtgatgttagacaaacagaa

SEQ ID NO: 5786779 - DNA, 25 bp, Homo sapien
cttctgtcaccaaaagaggtctcaa

SEQ ID NO: 5786780 - DNA, 25 bp, Homo sapien
gaacatgaccctatcacaaaaaaca

SEQ ID NO: 5786781 - DNA, 25 bp, Homo sapien
atttaatcaggctcagtcggggaat

SEQ ID NO: 5786782 - DNA, 25 bp, Homo sapien
gggcttcatcagcaaggagcgagag

SEQ ID NO: 5786783 - DNA, 25 bp, Homo sapien
cagtgagagctcccgggaaggggcc

SEQ ID NO: 5786784 - DNA, 25 bp, Homo sapien
attgacaaagaccatgcctttggaa

SEQ ID NO: 5786785 - DNA, 25 bp, Homo sapien
ttccgtggacgaggttttgtaagga

SEQ ID NO: 5786786 - DNA, 25 bp, Homo sapien
tttcctgcgcagagtctgcggaggg

SEQ ID NO: 5786787 - DNA, 25 bp, Homo sapien
caagccagccttgctcctggctggg

SEQ ID NO: 5786788 - DNA, 25 bp, Homo sapien
agatccccgtgttactgcctatcag

SEQ ID NO: 5786789 - DNA, 25 bp, Homo sapien
gatgtctcagtggtacgaacttcag

SEQ ID NO: 5786790 - DNA, 25 bp, Homo sapien
attctggaaaacgcccagagattta

SEQ ID NO: 5786791 - DNA, 25 bp, Homo sapien
taattttcaggaagacccaatccag

SEQ ID NO: 5786792 - DNA, 25 bp, Homo sapien
acgcccagagatttaatcaggctca

SEQ ID NO: 5786793 - DNA, 25 bp, Homo sapien
gtttcatttgccaccatccgttttc

SEQ ID NO: 5786794 - DNA, 25 bp, Homo sapien
cttccatgcggttgaaccctacacg

SEQ ID NO: 5786795 - DNA, 25 bp, Homo sapien
tttggattgaaagcatcctagaact

SEQ ID NO: 5786796 - DNA, 25 bp, Homo sapien
gtttgtggtggaaagacagccctgc

SEQ ID NO: 5786797 - DNA, 25 bp, Homo sapien
ccaatggtgtggcaaagagtgatca

SEQ ID NO: 5786798 - DNA, 25 bp, Homo sapien
tctctggaatgatgggtgcatcatg

SEQ ID NO: 5786799 - DNA, 25 bp, Homo sapien
gctcctggctggggcctgttgaaga

SEQ ID NO: 5786800 - DNA, 25 bp, Homo sapien
cttcaaatgcaaaaccttgcagaac

SEQ ID NO: 5786801 - DNA, 25 bp, Homo sapien
atgtgaaggacaaggttatgtgtat

SEQ ID NO: 5786802 - DNA, 25 bp, Homo sapien
gcagcttgactcaaaattcctggag

SEQ ID NO: 5786803 - DNA, 25 bp, Homo sapien
ctgttactcaagaagatgtatttaa

SEQ ID NO: 5786804 - DNA, 25 bp, Homo sapien
tcttggtcctaacgccagccccgat

SEQ ID NO: 5786805 - DNA, 25 bp, Homo sapien
caaaaaacaaacaagtgttatggga

SEQ ID NO: 5786806 - DNA, 25 bp, Homo sapien
ccaaatattgacaaagaccatgcct

SEQ ID NO: 5786807 - DNA, 25 bp, Homo sapien
tttcccatggaaatcagacagtacc

SEQ ID NO: 5786808 - DNA, 25 bp, Homo sapien
cttccggatcctgcgcgcagaaaag

SEQ ID NO: 5786809 - DNA, 25 bp, Homo sapien
cgcaattacaaagtcatggctgctg

SEQ ID NO: 5786810 - DNA, 25 bp, Homo sapien
agttcacaaaataatagagttgctg

SEQ ID NO: 5786811 - DNA, 25 bp, Homo sapien
aactttctgctgttactttccctga

SEQ ID NO: 5786812 - DNA, 25 bp, Homo sapien
ttaatgatgaactagtggagtggaa

SEQ ID NO: 5786813 - DNA, 25 bp, Homo sapien
ttgtggtgatctccaacgtcagcca

SEQ ID NO: 5786814 - DNA, 25 bp, Homo sapien
atccaaatattgacaaagaccatgc

SEQ ID NO: 5786815 - DNA, 25 bp, Homo sapien
gaacttcagcagcttgactcaaaat

SEQ ID NO: 5786816 - DNA, 25 bp, Homo sapien
ttggtacaacatgctggtggcggaa

SEQ ID NO: 5786817 - DNA, 25 bp, Homo sapien
cagtaaagtcagaaatgtgaaggac

SEQ ID NO: 5786818 - DNA, 25 bp, Homo sapien
ccatggaaatcagacagtacctggc

SEQ ID NO: 5786819 - DNA, 25 bp, Homo sapien
gctgtctgaaggaagaaaggaaaat

SEQ ID NO: 5786820 - DNA, 25 bp, Homo sapien
ctacgaacatgaccctatcacaaaa

SEQ ID NO: 5786821 - DNA, 25 bp, Homo sapien
ctgattaatgatgaactagtggagt

SEQ ID NO: 5786822 - DNA, 25 bp, Homo sapien
agacgacctctctgcccgttgtggt

SEQ ID NO: 5786823 - DNA, 25 bp, Homo sapien
cagagctcgtttgtggtggaaagac

SEQ ID NO: 5786824 - DNA, 25 bp, Homo sapien
cattgtaattgctatcgccatcaca

SEQ ID NO: 5786825 - DNA, 25 bp, Homo sapien
gccggggaccttcctgctgcggttc

SEQ ID NO: 5786826 - DNA, 25 bp, Homo sapien
caaggagcgagagcgtgccctgttg

SEQ ID NO: 5786827 - DNA, 25 bp, Homo sapien
cgtcagccagctcccgagcggttgg

SEQ ID NO: 5786828 - DNA, 25 bp, Homo sapien
gcagaacagagaacacgagaccaat

SEQ ID NO: 5786829 - DNA, 25 bp, Homo sapien
gctatcgccatcacagctgaacttg

SEQ ID NO: 5786830 - DNA, 25 bp, Homo sapien
gcagtctggcggctgaatttcggca

SEQ ID NO: 5786831 - DNA, 25 bp, Homo sapien
tggggggccgcccaatgcttgcttg

SEQ ID NO: 5786832 - DNA, 25 bp, Homo sapien
tgatgttagacaaacagaaagagct

SEQ ID NO: 5786833 - DNA, 25 bp, Homo sapien
tgcgtagctgctcctttggttgaat

SEQ ID NO: 5786834 - DNA, 25 bp, Homo sapien
aaagtcagaaatgtgaaggacaagg

SEQ ID NO: 5786835 - DNA, 25 bp, Homo sapien
cagtacctggcacagtggttagaaa

SEQ ID NO: 5786836 - DNA, 25 bp, Homo sapien
gaaaggaagtagttcacaaaataat

SEQ ID NO: 5786837 - DNA, 25 bp, Homo sapien
gaattggaacagaaatacacctacg

SEQ ID NO: 5786838 - DNA, 25 bp, Homo sapien
tggaacagaaatacacctacgaaca

SEQ ID NO: 5786839 - DNA, 25 bp, Homo sapien
agaaacaagaacagctgttactcaa

SEQ ID NO: 5786840 - DNA, 25 bp, Homo sapien
acctgctccctctctggaatgatgg

SEQ ID NO: 5786841 - DNA, 25 bp, Homo sapien
aattcctggagcaggttcaccagct

SEQ ID NO: 5786842 - DNA, 25 bp, Homo sapien
atgggcttcatcagcaaggagcgag

SEQ ID NO: 5786843 - DNA, 25 bp, Homo sapien
aacatggaggagtccaccaatggca

SEQ ID NO: 5786844 - DNA, 25 bp, Homo sapien
ttcatttgctgtatgccatcctcga

SEQ ID NO: 5786845 - DNA, 25 bp, Homo sapien
cagaactggttcactatagttgcgg

SEQ ID NO: 5786846 - DNA, 25 bp, Homo sapien
tcagcaaggagcgagagcgtgccct

SEQ ID NO: 5786847 - DNA, 25 bp, Homo sapien
ccaatgatgtttcatttgccaccat

SEQ ID NO: 5786848 - DNA, 25 bp, Homo sapien
cctggtttggtaattgacctcgaga

SEQ ID NO: 5786849 - DNA, 25 bp, Homo sapien
aagtagttcacaaaataatagagtt

SEQ ID NO: 5786850 - DNA, 25 bp, Homo sapien
atgtggaccagctgaacatgttggg

SEQ ID NO: 5786851 - DNA, 25 bp, Homo sapien
agcaagttcggcagcagcttaaaaa

SEQ ID NO: 5786852 - DNA, 25 bp, Homo sapien
atgaaatcaagagcctggaagattt

SEQ ID NO: 5786853 - DNA, 25 bp, Homo sapien
tcacattcacatgggtggagcggtc

SEQ ID NO: 5786854 - DNA, 25 bp, Homo sapien
ttttgggcacgcacacaaaagtgat

SEQ ID NO: 5786855 - DNA, 25 bp, Homo sapien
cctgctgcggttcagtgagagctcc

SEQ ID NO: 5786856 - DNA, 25 bp, Homo sapien
ggagtggaagcggagacagcagagc

SEQ ID NO: 5786857 - DNA, 25 bp, Homo sapien
gtagttcacaaaataatagagttgc

SEQ ID NO: 5786858 - DNA, 25 bp, Homo sapien
agcaagcgtaatcttcaggataatt

SEQ ID NO: 5786859 - DNA, 25 bp, Homo sapien
gctccctctctggaatgatgggtgc

SEQ ID NO: 5786860 - DNA, 25 bp, Homo sapien
gttgaaccctacacgaagaaagaac

SEQ ID NO: 5786861 - DNA, 25 bp, Homo sapien
aggaccagcagccggggaccttcct

SEQ ID NO: 5786862 - DNA, 25 bp, Homo sapien
agagcgcctgtattggggggccgcc

SEQ ID NO: 5786863 - DNA, 25 bp, Homo sapien
ctttctgctgttactttccctgaca

SEQ ID NO: 5786864 - DNA, 25 bp, Homo sapien
acgtgctgtgcgtagctgctccttt

SEQ ID NO: 5786865 - DNA, 25 bp, Homo sapien
gtggtggaaagacagccctgcatgc

SEQ ID NO: 5786866 - DNA, 25 bp, Homo sapien
gatgtctatgatcatttacagctgt

SEQ ID NO: 5786867 - DNA, 25 bp, Homo sapien
gcataacataaggaaaagcaagcgt

SEQ ID NO: 5786868 - DNA, 25 bp, Homo sapien
aggggctcggctgcaccggggggat

SEQ ID NO: 5786869 - DNA, 25 bp, Homo sapien
cctgcatgccaacgcaccctcagag

SEQ ID NO: 5786870 - DNA, 25 bp, Homo sapien
gccctgttgaaggaccagcagccgg

SEQ ID NO: 5786871 - DNA, 25 bp, Homo sapien
tctcagtggtacgaacttcagcagc

SEQ ID NO: 5786872 - DNA, 25 bp, Homo sapien
gaccgagcagaggcgacccagcgcg

SEQ ID NO: 5786873 - DNA, 25 bp, Homo sapien
cgcgcccccgcctagcccttccgga

SEQ ID NO: 5786874 - DNA, 25 bp, Homo sapien
ggtcctctcatcgttactgaagagc

SEQ ID NO: 5786875 - DNA, 25 bp, Homo sapien
gacaaacagaaagagcttgacagta

SEQ ID NO: 5786876 - DNA, 25 bp, Homo sapien
ttgaatccccaggcccttgttgggg

SEQ ID NO: 5786877 - DNA, 25 bp, Homo sapien
ttggatcagctgcagaactggttca

SEQ ID NO: 5786878 - DNA, 25 bp, Homo sapien
aagtattactccaggccaaaggaag

SEQ ID NO: 5786879 - DNA, 25 bp, Homo sapien
gaaggggccatcacattcacatggg

SEQ ID NO: 5786880 - DNA, 25 bp, Homo sapien
aggttatgtgtatagagcatgaaat

SEQ ID NO: 5786881 - DNA, 25 bp, Homo sapien
taacctcgacagtcttggcacctaa

SEQ ID NO: 5786882 - DNA, 25 bp, Homo sapien
acagctggatgatcaatatagtcgc

SEQ ID NO: 5786883 - DNA, 25 bp, Homo sapien
gcacgctgccaatgatgtttcattt

SEQ ID NO: 5786884 - DNA, 25 bp, Homo sapien
tgataaaaattttcccttctggctt

SEQ ID NO: 5786885 - DNA, 25 bp, Homo sapien
aggctcagtcggggaatattcagag

SEQ ID NO: 5786886 - DNA, 25 bp, Homo sapien
tgcatcatgggcttcatcagcaagg

SEQ ID NO: 5786887 - DNA, 25 bp, Homo sapien
tctgtgtatataacctcgacagtct

SEQ ID NO: 5786888 - DNA, 25 bp, Homo sapien
gcatcctagaactcattaaaaaaca

SEQ ID NO: 5786889 - DNA, 25 bp, Homo sapien
aaagaacagaaaaatgctggcacca

SEQ ID NO: 5786890 - DNA, 25 bp, Homo sapien
aagtttcatttgctgtatgccatcc

SEQ ID NO: 5786891 - DNA, 25 bp, Homo sapien
agttgagactgttggtgaaattgca

SEQ ID NO: 5786892 - DNA, 25 bp, Homo sapien
tggcaggatgtctcagtggtacgaa

SEQ ID NO: 5786893 - DNA, 25 bp, Homo sapien
cggtcccagaacggaggcgaacctg

SEQ ID NO: 5786894 - DNA, 25 bp, Homo sapien
ctcaagaagatgtatttaatgcttg

SEQ ID NO: 5786895 - DNA, 25 bp, Homo sapien
atcattcgcaattacaaagtcatgg

SEQ ID NO: 5786896 - DNA, 25 bp, Homo sapien
tccagcagctcattcagagctcgtt

SEQ ID NO: 5786897 - DNA, 25 bp, Homo sapien
gctttggattgaaagcatcctagaa

SEQ ID NO: 5786898 - DNA, 25 bp, Homo sapien
gttgcggagagtctgcagcaagttc

SEQ ID NO: 5786899 - DNA, 25 bp, Homo sapien
cccagcgcgctcgggagaggctgca

SEQ ID NO: 5786900 - DNA, 25 bp, Homo sapien
acttgttgagatccccgtgttactg

SEQ ID NO: 5786901 - DNA, 25 bp, Homo sapien
catggaggagtccaccaatggcagt

SEQ ID NO: 5786902 - DNA, 25 bp, Homo sapien
accatgtgcacgatgggctcagctt

SEQ ID NO: 5786903 - DNA, 25 bp, Homo sapien
cgcctgtattggggggccgcccaat

SEQ ID NO: 5786904 - DNA, 25 bp, Homo sapien
agagtgacatgtttacaaacctcaa

SEQ ID NO: 5786905 - DNA, 25 bp, Homo sapien
actctgtgtatataacctcgacagt

SEQ ID NO: 5786906 - DNA, 25 bp, Homo sapien
acagtgatgttagacaaacagaaag

SEQ ID NO: 5786907 - DNA, 25 bp, Homo sapien
ggtgcatcatgggcttcatcagcaa

SEQ ID NO: 5786908 - DNA, 25 bp, Homo sapien
gggcattctgggtaagttcagtgac

SEQ ID NO: 5786909 - DNA, 25 bp, Homo sapien
ggaaaactgtcatcataaagctggt

SEQ ID NO: 5786910 - DNA, 25 bp, Homo sapien
ctcttgatttcatgctctatacaca

SEQ ID NO: 5786911 - DNA, 25 bp, Homo sapien
ccaacaagggcctggggattcaacc

SEQ ID NO: 5786912 - DNA, 25 bp, Homo sapien
tcagacagctgtaaatgatcataga

SEQ ID NO: 5786913 - DNA, 25 bp, Homo sapien
ggcgcggcggtgcagcctctcccga

SEQ ID NO: 5786914 - DNA, 25 bp, Homo sapien
tcgaggtcaattaccaaaccaggct

SEQ ID NO: 5786915 - DNA, 25 bp, Homo sapien
cttcaagaccagcggcctctgaggg

SEQ ID NO: 5786916 - DNA, 25 bp, Homo sapien
tacaatggaaaagtaaaatacaagc

SEQ ID NO: 5786917 - DNA, 25 bp, Homo sapien
aagttccattggctctggtgcttcc

SEQ ID NO: 5786918 - DNA, 25 bp, Homo sapien
ctctgaatattccccgactgagcct

SEQ ID NO: 5786919 - DNA, 25 bp, Homo sapien
atggcatacagcaaatgaaactttt

SEQ ID NO: 5786920 - DNA, 25 bp, Homo sapien
cctcattcgttctggtgccagcatt

SEQ ID NO: 5786921 - DNA, 25 bp, Homo sapien
cacggaatgagaccatcggggctgg

SEQ ID NO: 5786922 - DNA, 25 bp, Homo sapien
agtcaagctgctgaagttcgtacca

SEQ ID NO: 5786923 - DNA, 25 bp, Homo sapien
ctttggcctggagtaatactttcca

SEQ ID NO: 5786924 - DNA, 25 bp, Homo sapien
cacagaaatcaactcagtcttgata

SEQ ID NO: 5786925 - DNA, 25 bp, Homo sapien
caacatgttcagctggtccacattg

SEQ ID NO: 5786926 - DNA, 25 bp, Homo sapien
ggctctggtgcttcctttggcctgg

SEQ ID NO: 5786927 - DNA, 25 bp, Homo sapien
taggcagtaacacggggatctcaac

SEQ ID NO: 5786928 - DNA, 25 bp, Homo sapien
ggcagtaacacggggatctcaacaa

SEQ ID NO: 5786929 - DNA, 25 bp, Homo sapien
atgagaggaccctcattcgttctgg

SEQ ID NO: 5786930 - DNA, 25 bp, Homo sapien
agctctcactgaaccgcagcaggaa

SEQ ID NO: 5786931 - DNA, 25 bp, Homo sapien
ggtccacattgagacctcttttggt

SEQ ID NO: 5786932 - DNA, 25 bp, Homo sapien
aactctattattttgtgaactactt

SEQ ID NO: 5786933 - DNA, 25 bp, Homo sapien
ttgtaccaaaggatggaggcccaac

SEQ ID NO: 5786934 - DNA, 25 bp, Homo sapien
cagcaactctattattttgtgaact

SEQ ID NO: 5786935 - DNA, 25 bp, Homo sapien
gaggtcatgaaaacggatggtggca

SEQ ID NO: 5786936 - DNA, 25 bp, Homo sapien
cagactctccgcaactatagtgaac

SEQ ID NO: 5786937 - DNA, 25 bp, Homo sapien
ttctttcaattgcaggtgccgaaat

SEQ ID NO: 5786938 - DNA, 25 bp, Homo sapien
gccgagcccctccgcagactctgcg

SEQ ID NO: 5786939 - DNA, 25 bp, Homo sapien
cgcgctgggtcgcctctgctcggtc

SEQ ID NO: 5786940 - DNA, 25 bp, Homo sapien
agaagaaaactgccaactcagcact

SEQ ID NO: 5786941 - DNA, 25 bp, Homo sapien
caagaagcttctctcccaacatgtt

SEQ ID NO: 5786942 - DNA, 25 bp, Homo sapien
ttggcctggagtaatactttccaaa

SEQ ID NO: 5786943 - DNA, 25 bp, Homo sapien
tcttctgtgttcacttacacttcag

SEQ ID NO: 5786944 - DNA, 25 bp, Homo sapien
tttctaaccactgtgccaggtactg

SEQ ID NO: 5786945 - DNA, 25 bp, Homo sapien
ccagactgccattggtggactcctc

SEQ ID NO: 5786946 - DNA, 25 bp, Homo sapien
tttgtcaatatttggatacagatac

SEQ ID NO: 5786947 - DNA, 25 bp, Homo sapien
ctgtgttcacttacacttcagacac

SEQ ID NO: 5786948 - DNA, 25 bp, Homo sapien
gtcatattcatcttgtaaatcttcc

SEQ ID NO: 5786949 - DNA, 25 bp, Homo sapien
accacaaacgagctctgaatgagct

SEQ ID NO: 5786950 - DNA, 25 bp, Homo sapien
cgccagactgccattggtggactcc

SEQ ID NO: 5786951 - DNA, 25 bp, Homo sapien
aattatcctgaagattacgcttgct

SEQ ID NO: 5786952 - DNA, 25 bp, Homo sapien
tgaaaattatcctgaagattacgct

SEQ ID NO: 5786953 - DNA, 25 bp, Homo sapien
atccagttcctttagggccatcaag

SEQ ID NO: 5786954 - DNA, 25 bp, Homo sapien
cccatcgtgcacatggtggagtcag

SEQ ID NO: 5786955 - DNA, 25 bp, Homo sapien
aacagtctcaacttcacagtgaact

SEQ ID NO: 5786956 - DNA, 25 bp, Homo sapien
agcgtgctcccagtcttgcttttct

SEQ ID NO: 5786957 - DNA, 25 bp, Homo sapien
actttcaaattataattcagctctt

SEQ ID NO: 5786958 - DNA, 25 bp, Homo sapien
ccactccactagttcatcattaatc

SEQ ID NO: 5786959 - DNA, 25 bp, Homo sapien
ttaaatacatcttcttgagtaacag

SEQ ID NO: 5786960 - DNA, 25 bp, Homo sapien
cctctgctcggtctggggtctgcca

SEQ ID NO: 5786961 - DNA, 25 bp, Homo sapien
ttgtgaactacttcctttctcttat

SEQ ID NO: 5786962 - DNA, 25 bp, Homo sapien
aatattctcagcagccatgactttg

SEQ ID NO: 5786963 - DNA, 25 bp, Homo sapien
tgcgcgcaggatccggaagggctag

SEQ ID NO: 5786964 - DNA, 25 bp, Homo sapien
taagggagtgaagctcttcagtaac

SEQ ID NO: 5786965 - DNA, 25 bp, Homo sapien
tcattcgttctggtgccagcatttt

SEQ ID NO: 5786966 - DNA, 25 bp, Homo sapien
ttaaagtagtaaaatgctgataggc

SEQ ID NO: 5786967 - DNA, 25 bp, Homo sapien
tccgttctgggaccgctccacccat

SEQ ID NO: 5786968 - DNA, 25 bp, Homo sapien
cagtaacgatgagaggaccctcatt

SEQ ID NO: 5786969 - DNA, 25 bp, Homo sapien
cccaatacaggcgctctgctgtctc

SEQ ID NO: 5786970 - DNA, 25 bp, Homo sapien
gtctggggtctgccaggcgcgatcc

SEQ ID NO: 5786971 - DNA, 25 bp, Homo sapien
ttcagtgacattcagcaactctatt

SEQ ID NO: 5786972 - DNA, 25 bp, Homo sapien
tgtcaatatttggatacagatactt

SEQ ID NO: 5786973 - DNA, 25 bp, Homo sapien
tgagcctgattaaatctctgggcgt

SEQ ID NO: 5786974 - DNA, 25 bp, Homo sapien
tgtcgaggttatatacacagagtgc

SEQ ID NO: 5786975 - DNA, 25 bp, Homo sapien
tgctttcaatccaaagccagaaggg

SEQ ID NO: 5786976 - DNA, 25 bp, Homo sapien
tgggtcttcctgaaaattatcctga

SEQ ID NO: 5786977 - DNA, 25 bp, Homo sapien
ctgagggtgcgttggcatgcagggc

SEQ ID NO: 5786978 - DNA, 25 bp, Homo sapien
gctgctgaagttcgtaccactgaga

SEQ ID NO: 5786979 - DNA, 25 bp, Homo sapien
agttcctttagggccatcaagttcc

SEQ ID NO: 5786980 - DNA, 25 bp, Homo sapien
ttgccacaccattggtctcgtgttc

SEQ ID NO: 5786981 - DNA, 25 bp, Homo sapien
cgcgcaggatccggaagggctaggc

SEQ ID NO: 5786982 - DNA, 25 bp, Homo sapien
tgcgtgcccaaaatgttgaacttcc

SEQ ID NO: 5786983 - DNA, 25 bp, Homo sapien
gccaggagcaaggctggcttgaggt

SEQ ID NO: 5786984 - DNA, 25 bp, Homo sapien
ttccaccacaaacgagctctgaatg

SEQ ID NO: 5786985 - DNA, 25 bp, Homo sapien
gaacttgctgcagactctccgcaac

SEQ ID NO: 5786986 - DNA, 25 bp, Homo sapien
ggcatacagcaaatgaaacttttct

SEQ ID NO: 5786987 - DNA, 25 bp, Homo sapien
ccctgtcttcaagaccagcggcctc

SEQ ID NO: 5786988 - DNA, 25 bp, Homo sapien
tgtgatggccccttcccgggagctc

SEQ ID NO: 5786989 - DNA, 25 bp, Homo sapien
ttcagacacagaaatcaactcagtc

SEQ ID NO: 5786990 - DNA, 25 bp, Homo sapien
agggaaagtaacagcagaaagttct

SEQ ID NO: 5786991 - DNA, 25 bp, Homo sapien
tcgaggttatatacacagagtgcga

SEQ ID NO: 5786992 - DNA, 25 bp, Homo sapien
ccagttctgcagctgatccaagcaa

SEQ ID NO: 5786993 - DNA, 25 bp, Homo sapien
agtgaagctcttcagtaacgatgag

SEQ ID NO: 5786994 - DNA, 25 bp, Homo sapien
gctgtgacaggaggtcatgaaaacg

SEQ ID NO: 5786995 - DNA, 25 bp, Homo sapien
cagtcttgcttttctaaccactgtg

SEQ ID NO: 5786996 - DNA, 25 bp, Homo sapien
gcgcgatccccccggtgcagccgag

SEQ ID NO: 5786997 - DNA, 25 bp, Homo sapien
aaaagcgactatattgatcatccag

SEQ ID NO: 5786998 - DNA, 25 bp, Homo sapien
gatccaagcaagcattgggcggccc

SEQ ID NO: 5786999 - DNA, 25 bp, Homo sapien
acttcacagtgaactggacccctgt

SEQ ID NO: 5787000 - DNA, 25 bp, Homo sapien
caagactgtcgaggttatatacaca

SEQ ID NO: 5787001 - DNA, 25 bp, Homo sapien
tgtgacaggaggtcatgaaaacgga

SEQ ID NO: 5787002 - DNA, 25 bp, Homo sapien
ctccaggaattttgagtcaagctgc

SEQ ID NO: 5787003 - DNA, 25 bp, Homo sapien
aacaagttcagctgtgatggcgata

SEQ ID NO: 5787004 - DNA, 25 bp, Homo sapien
aggggattctcaggaatattctcag

SEQ ID NO: 5787005 - DNA, 25 bp, Homo sapien
gagtaatactttccaaaggcatggt

SEQ ID NO: 5787006 - DNA, 25 bp, Homo sapien
cttccaggctcttgatttcatgctc

SEQ ID NO: 5787007 - DNA, 25 bp, Homo sapien
tccaggctcttgatttcatgctcta

SEQ ID NO: 5787008 - DNA, 25 bp, Homo sapien
ttctcagcagccatgactttgtaat

SEQ ID NO: 5787009 - DNA, 25 bp, Homo sapien
ctgatttccatgggaaaactgtcat

SEQ ID NO: 5787010 - DNA, 25 bp, Homo sapien
aggacagattcctgggttccgccac

SEQ ID NO: 5787011 - DNA, 25 bp, Homo sapien
ctggattgggtcttcctgaaaatta

SEQ ID NO: 5787012 - DNA, 25 bp, Homo sapien
tacagatacttcaggggattctcag

SEQ ID NO: 5787013 - DNA, 25 bp, Homo sapien
atggtggagtcaggaagaaggacag

SEQ ID NO: 5787014 - DNA, 25 bp, Homo sapien
tccacggaatgagaccatcggggct

SEQ ID NO: 5787015 - DNA, 25 bp, Homo sapien
ccgccaccagcatgttgtaccaaag

SEQ ID NO: 5787016 - DNA, 25 bp, Homo sapien
ctttccaaaggcatggtctttgtca

SEQ ID NO: 5787017 - DNA, 25 bp, Homo sapien
acgttggagatcaccacaacgggca

SEQ ID NO: 5787018 - DNA, 25 bp, Homo sapien
tctttgtcaatatttggatacagat

SEQ ID NO: 5787019 - DNA, 25 bp, Homo sapien
ctccatgttcatcacttttgtgtgc

SEQ ID NO: 5787020 - DNA, 25 bp, Homo sapien
aggcgctctgctgtctccgcttcca

SEQ ID NO: 5787021 - DNA, 25 bp, Homo sapien
ttttccttatgttatgctgtagcaa

SEQ ID NO: 5787022 - DNA, 25 bp, Homo sapien
ttatcctgaagattacgcttgcttt

SEQ ID NO: 5787023 - DNA, 25 bp, Homo sapien
actaagggagtgaagctcttcagta

SEQ ID NO: 5787024 - DNA, 25 bp, Homo sapien
ttccttatgttatgctgtagcaaga

SEQ ID NO: 5787025 - DNA, 25 bp, Homo sapien
acaggccccagccaggagcaaggct

SEQ ID NO: 5787026 - DNA, 25 bp, Homo sapien
tgttttttaatgagttctaggatgc

SEQ ID NO: 5787027 - DNA, 25 bp, Homo sapien
gaattttcctttcttccttcagaca

SEQ ID NO: 5787028 - DNA, 25 bp, Homo sapien
gactttgtaattgcgaatgatgtca

SEQ ID NO: 5787029 - DNA, 25 bp, Homo sapien
cgtgcccaaaatgttgaacttccta

SEQ ID NO: 5787030 - DNA, 25 bp, Homo sapien
cggggatctcaacaagttcagctgt

SEQ ID NO: 5787031 - DNA, 25 bp, Homo sapien
taaatctctgggcgttttccagaat

SEQ ID NO: 5787032 - DNA, 25 bp, Homo sapien
agaaaagcgactatattgatcatcc

SEQ ID NO: 5787033 - DNA, 25 bp, Homo sapien
cgaacgttaacctagacagctctcg

SEQ ID NO: 5787034 - DNA, 25 bp, Homo sapien
ttccaaaggcatggtctttgtcaat

SEQ ID NO: 5787035 - DNA, 25 bp, Homo sapien
ctctttgccacaccattggtctcgt

SEQ ID NO: 5787036 - DNA, 25 bp, Homo sapien
tcttcgtgtagggttcaaccgcatg

SEQ ID NO: 5787037 - DNA, 25 bp, Homo sapien
atagtgaaccagttctgcagctgat

SEQ ID NO: 5787038 - DNA, 25 bp, Homo sapien
agcccatgatgcacccatcattcca

SEQ ID NO: 5787039 - DNA, 25 bp, Homo sapien
ggaatattctcagcagccatgactt

SEQ ID NO: 5787040 - DNA, 25 bp, Homo sapien
tctgcaaggttttgcatttgaagtc

SEQ ID NO: 5787041 - DNA, 25 bp, Homo sapien
tcgggagctggctgacgttggagat

SEQ ID NO: 5787042 - DNA, 25 bp, Homo sapien
atggtggcaaatgaaacatcattgg

SEQ ID NO: 5787043 - DNA, 25 bp, Homo sapien
ctaggatgctttcaatccaaagcca

SEQ ID NO: 5787044 - DNA, 25 bp, Homo sapien
tcaagctgctgaagttcgtaccact

SEQ ID NO: 5787045 - DNA, 25 bp, Homo sapien
ggtgaacctgctccaggaattttga

SEQ ID NO: 5787046 - DNA, 25 bp, Homo sapien
ttggctctggtgcttcctttggcct

SEQ ID NO: 5787047 - DNA, 25 bp, Homo sapien
gcacccatcattccagagagggagc

SEQ ID NO: 5787048 - DNA, 25 bp, Homo sapien
aatatttggatacagatacttcagg

SEQ ID NO: 5787049 - DNA, 25 bp, Homo sapien
cagtgacattcagcaactctattat

SEQ ID NO: 5787050 - DNA, 25 bp, Homo sapien
tcaagttccattggctctggtgctt

SEQ ID NO: 5787051 - DNA, 25 bp, Homo sapien
tttgtaaacatgtcactcttctgtg

SEQ ID NO: 5787052 - DNA, 25 bp, Homo sapien
agctgtaaatgatcatagacatctg

SEQ ID NO: 5787053 - DNA, 25 bp, Homo sapien
gggccatcaagttccattggctctg

SEQ ID NO: 5787054 - DNA, 25 bp, Homo sapien
cccgagcgcgctgggtcgcctctgc

SEQ ID NO: 5787055 - DNA, 25 bp, Homo sapien
gtaccaaaggatggaggcccaaccg

SEQ ID NO: 5787056 - DNA, 25 bp, Homo sapien
gtcttgcttttctaaccactgtgcc

SEQ ID NO: 5787057 - DNA, 25 bp, Homo sapien
acccctgtcttcaagaccagcggcc

SEQ ID NO: 5787058 - DNA, 25 bp, Homo sapien
tccattggctctggtgcttcctttg

SEQ ID NO: 5787059 - DNA, 25 bp, Homo sapien
aagcttctctcccaacatgttcagc

SEQ ID NO: 5787060 - DNA, 25 bp, Homo sapien
ccgaacttgctgcagactctccgca

SEQ ID NO: 5787061 - DNA, 25 bp, Homo sapien
actgagacatcctgccaccttgtgc

SEQ ID NO: 5787062 - DNA, 25 bp, Homo sapien
agctgctgccgaacttgctgcagac

SEQ ID NO: 5787063 - DNA, 25 bp, Homo sapien
tgcaaggttttgcatttgaagtcat

SEQ ID NO: 5787064 - DNA, 25 bp, Homo sapien
tgctggaaaagactgaaggtgcggt

SEQ ID NO: 5787065 - DNA, 25 bp, Homo sapien
agcatgttgtaccaaaggatggagg

SEQ ID NO: 5787066 - DNA, 25 bp, Homo sapien
cacaacgggcagagaggtcgtctcg

SEQ ID NO: 5787067 - DNA, 25 bp, Homo sapien
tggtggactcctccatgttcatcac

SEQ ID NO: 5787068 - DNA, 25 bp, Homo sapien
gacacagaaatcaactcagtcttga

SEQ ID NO: 5787069 - DNA, 25 bp, Homo sapien
ggctgctggtccttcaacagggcac

SEQ ID NO: 5787070 - DNA, 25 bp, Homo sapien
taggaccaagaagcttctctcccaa

SEQ ID NO: 5787071 - DNA, 25 bp, Homo sapien
tctttcttcgtgtagggttcaaccg

SEQ ID NO: 5787072 - DNA, 25 bp, Homo sapien
gaggttatatacacagagtgcgaac

SEQ ID NO: 5787073 - DNA, 25 bp, Homo sapien
cgtctcgaggtcaattaccaaacca

SEQ ID NO: 5787074 - DNA, 25 bp, Homo sapien
cagctgtgatggcgatagcaattac

SEQ ID NO: 5787075 - DNA, 25 bp, Homo sapien
agttcatcattaatcagggcattct

SEQ ID NO: 5787076 - DNA, 25 bp, Homo sapien
gacctcttttggtgacagaagaaaa

SEQ ID NO: 5787077 - DNA, 25 bp, Homo sapien
gttctttcttcgtgtagggttcaac

SEQ ID NO: 5787078 - DNA, 25 bp, Homo sapien
agcctgattaaatctctgggcgttt

SEQ ID NO: 5787079 - DNA, 25 bp, Homo sapien
ctgaaccgcagcaggaaggtccccg

SEQ ID NO: 5787080 - DNA, 25 bp, Homo sapien
aagctcttcagtaacgatgagagga

SEQ ID NO: 5787081 - DNA, 25 bp, Homo sapien
ttccgccaccagcatgttgtaccaa

SEQ ID NO: 5787082 - DNA, 25 bp, Homo sapien
tgttttttgtgatagggtcatgttc

SEQ ID NO: 5787083 - DNA, 25 bp, Homo sapien
catcataaagctggtgaacctgctc

SEQ ID NO: 5787084 - DNA, 25 bp, Homo sapien
tgatttcatgctctatacacataac

SEQ ID NO: 5787085 - DNA, 25 bp, Homo sapien
agttcagtgacattcagcaactcta

SEQ ID NO: 5787086 - DNA, 25 bp, Homo sapien
catcactgtgctctgaatattcccc

SEQ ID NO: 5787087 - DNA, 25 bp, Homo sapien
cccgggagctctcactgaaccgcag

SEQ ID NO: 5787088 - DNA, 25 bp, Homo sapien
atgttcatcacttttgtgtgcgtgc

SEQ ID NO: 5787089 - DNA, 25 bp, Homo sapien
ttttgtgaactacttcctttctctt

SEQ ID NO: 5787090 - DNA, 25 bp, Homo sapien
ggaccaagaagcttctctcccaaca

SEQ ID NO: 5787091 - DNA, 25 bp, Homo sapien
gatagggtcatgttcgtaggtgtat

SEQ ID NO: 5787092 - DNA, 25 bp, Homo sapien
caagttcagctgtgatggcgatagc

SEQ ID NO: 5787093 - DNA, 25 bp, Homo sapien
tgtttgttttttgtgatagggtcat

SEQ ID NO: 5787094 - DNA, 25 bp, Homo sapien
caactttttaagctgctgccgaact

SEQ ID NO: 5787095 - DNA, 25 bp, Homo sapien
tgttccaattcctccaactttttaa

SEQ ID NO: 5787096 - DNA, 25 bp, Homo sapien
attctgggtaagttcagtgacattc

SEQ ID NO: 5787097 - DNA, 25 bp, Homo sapien
cacattgagacctcttttggtgaca

SEQ ID NO: 5787098 - DNA, 25 bp, Homo sapien
ccatgactttgtaattgcgaatgat

SEQ ID NO: 5787099 - DNA, 25 bp, Homo sapien
tttgtgtgcgtgcccaaaatgttga

SEQ ID NO: 5787100 - DNA, 25 bp, Homo sapien
ccggtgcagccgagcccctccgcag

SEQ ID NO: 5787101 - DNA, 25 bp, Homo sapien
aaccttgtccttcacatttctgact

SEQ ID NO: 5787102 - DNA, 25 bp, Homo sapien
gcacaattgggtttcaaaactaagg

SEQ ID NO: 5787103 - DNA, 25 bp, Homo sapien
gcggtcccataacacttgtttgttt

SEQ ID NO: 5787104 - DNA, 25 bp, Homo sapien
aaaatgctgataggcagtaacacgg

SEQ ID NO: 5787105 - DNA, 25 bp, Homo sapien
aaatcttccaggctcttgatttcat

SEQ ID NO: 5787106 - DNA, 25 bp, Homo sapien
tgacgttggagatcaccacaacggg

SEQ ID NO: 5787107 - DNA, 25 bp, Homo sapien
cagctgttcttgtttctgatcactc

SEQ ID NO: 5787108 - DNA, 25 bp, Homo sapien
tgctgaagttcgtaccactgagaca

SEQ ID NO: 5787109 - DNA, 25 bp, Homo sapien
ctgtcatcataaagctggtgaacct

SEQ ID NO: 5787110 - DNA, 25 bp, Homo sapien
tgtgtgcgtgcccaaaatgttgaac

SEQ ID NO: 5787111 - DNA, 25 bp, Homo sapien
acagggcacgctctcgctccttgct

SEQ ID NO: 5787112 - DNA, 25 bp, Homo sapien
gattacgcttgcttttccttatgtt

SEQ ID NO: 5787113 - DNA, 25 bp, Homo sapien
tattcatcttgtaaatcttccaggc

SEQ ID NO: 5787114 - DNA, 25 bp, Homo sapien
agactgccattggtggactcctcca

SEQ ID NO: 5787115 - DNA, 25 bp, Homo sapien
tctggtgccagcatttttctgttct

SEQ ID NO: 5787116 - DNA, 25 bp, Homo sapien
agcggcctctgagggtgcgttggca

SEQ ID NO: 5787117 - DNA, 25 bp, Homo sapien
ctttcaattgcaggtgccgaaattc

SEQ ID NO: 5787118 - DNA, 25 bp, Homo sapien
ggtgccgaaattcagccgccagact

SEQ ID NO: 5787119 - DNA, 25 bp, Homo sapien
accaagaagcttctctcccaacatg

SEQ ID NO: 5787120 - DNA, 25 bp, Homo sapien
acatggtggagtcaggaagaaggac

SEQ ID NO: 5787121 - DNA, 25 bp, Homo sapien
tgctcggtctggggtctgccaggcg

SEQ ID NO: 5787122 - DNA, 25 bp, Homo sapien
cctgctccaggaattttgagtcaag

SEQ ID NO: 5787123 - DNA, 25 bp, Homo sapien
cttacaaaacctcgtccacggaatg

SEQ ID NO: 5787124 - DNA, 25 bp, Homo sapien
gggctggcgttaggaccaagaagct

SEQ ID NO: 5787125 - DNA, 25 bp, Homo sapien
tatttctgttccaattcctccaact

SEQ ID NO: 5787126 - DNA, 25 bp, Homo sapien
gcttccactccactagttcatcatt

SEQ ID NO: 5787127 - DNA, 25 bp, Homo sapien
gcgttggcatgcagggctgtctttc

SEQ ID NO: 5787128 - DNA, 25 bp, Homo sapien
ctgaaagctgagcccatcgtgcaca

SEQ ID NO: 5787129 - DNA, 25 bp, Homo sapien
gggaccgctccacccatgtgaatgt

SEQ ID NO: 5787130 - DNA, 25 bp, Homo sapien
gactatattgatcatccagctgtga

SEQ ID NO: 5787131 - DNA, 25 bp, Homo sapien
gaaggtccccggctgctggtccttc

SEQ ID NO: 5787132 - DNA, 25 bp, Homo sapien
tggcttgaggtttgtaaacatgtca

SEQ ID NO: 5787133 - DNA, 25 bp, Homo sapien
caatggaaaagtaaaatacaagcat

SEQ ID NO: 5787134 - DNA, 25 bp, Homo sapien
aacatgtcactcttctgtgttcact

SEQ ID NO: 5787135 - DNA, 25 bp, Homo sapien
tccatgggaaaactgtcatcataaa

SEQ ID NO: 5787136 - DNA, 25 bp, Homo sapien
aatactttccaaaggcatggtcttt

SEQ ID NO: 5787137 - DNA, 25 bp, Homo sapien
attataattcagctcttgcaatttc

SEQ ID NO: 5787138 - DNA, 25 bp, Homo sapien
ggggtctgccaggcgcgatcccccc

SEQ ID NO: 5787139 - DNA, 25 bp, Homo sapien
gaaatcaactcagtcttgatatatc

SEQ ID NO: 5787140 - DNA, 25 bp, Homo sapien
gctgatgaagcccatgatgcaccca

SEQ ID NO: 5787141 - DNA, 25 bp, Homo sapien
ggaagaaggacagattcctgggttc

SEQ ID NO: 5787142 - DNA, 25 bp, Homo sapien
aagttctttcttcgtgtagggttca

SEQ ID NO: 5787143 - DNA, 25 bp, Homo sapien
ctcttgcaatttcaccaacagtctc

SEQ ID NO: 5787144 - DNA, 25 bp, Homo sapien
atgaaacttttctgcgcgcaggatc

SEQ ID NO: 5787145 - DNA, 25 bp, Homo sapien
cgagcgcgctgggtcgcctctgctc

SEQ ID NO: 5787146 - DNA, 25 bp, Homo sapien
gatctcaacaagttcagctgtgatg

SEQ ID NO: 5787147 - DNA, 25 bp, Homo sapien
agttctaggatgctttcaatccaaa

SEQ ID NO: 5787148 - DNA, 25 bp, Homo sapien
gttggcatgcagggctgtctttcca

SEQ ID NO: 5787149 - DNA, 25 bp, Homo sapien
ttgtaattgcgaatgatgtcaggga

SEQ ID NO: 5787150 - DNA, 25 bp, Homo sapien
gcaaatgaaacatcattggcagcgt

SEQ ID NO: 5787151 - DNA, 25 bp, Homo sapien
ggatggtggcaaatgaaacatcatt

SEQ ID NO: 5787152 - DNA, 25 bp, Homo sapien
tctgctcggtctggggtctgccagg

SEQ ID NO: 5787153 - DNA, 25 bp, Homo sapien
caattgcaggtgccgaaattcagcc

SEQ ID NO: 5787154 - DNA, 25 bp, Homo sapien
atacatcttcttgagtaacagctgt

SEQ ID NO: 5787155 - DNA, 25 bp, Homo sapien
tgatcatccagctgtgacaggaggt

SEQ ID NO: 5787156 - DNA, 25 bp, Homo sapien
ctcgtgttctctgttctgcaaggtt

SEQ ID NO: 5787157 - DNA, 25 bp, Homo sapien
ccactgagacatcctgccaccttgt

SEQ ID NO: 5787158 - DNA, 25 bp, Homo sapien
gcggtgcagcctctcccgagcgcgc

SEQ ID NO: 5787159 - DNA, 25 bp, Homo sapien
tctgctgtctccgcttccactccac

SEQ ID NO: 5787160 - DNA, 25 bp, Homo sapien
catgttgtaccaaaggatggaggcc

SEQ ID NO: 5787161 - DNA, 25 bp, Homo sapien
caggagcaaggctggcttgaggttt

SEQ ID NO: 5787162 - DNA, 25 bp, Homo sapien
cccagtcttgcttttctaaccactg

SEQ ID NO: 5787163 - DNA, 25 bp, Homo sapien
gctgtgatggcgatagcaattacaa

SEQ ID NO: 5787164 - DNA, 25 bp, Homo sapien
acttcagacacagaaatcaactcag

SEQ ID NO: 5787165 - DNA, 25 bp, Homo sapien
ctttcaatccaaagccagaagggaa

SEQ ID NO: 5787166 - DNA, 25 bp, Homo sapien
atgactttgtaattgcgaatgatgt

SEQ ID NO: 5787167 - DNA, 25 bp, Homo sapien
ttcatcattaatcagggcattctgg

SEQ ID NO: 5787168 - DNA, 25 bp, Homo sapien
ttaccaaaccaggctggcacaattg

SEQ ID NO: 5787169 - DNA, 25 bp, Homo sapien
gtcttcaagaccagcggcctctgag

SEQ ID NO: 5787170 - DNA, 25 bp, Homo sapien
attaatcagggcattctgggtaagt

SEQ ID NO: 5787171 - DNA, 25 bp, Homo sapien
gaagggaaaatttttatcatttata

SEQ ID NO: 5787172 - DNA, 25 bp, Homo sapien
aggtgcggtcccataacacttgttt

SEQ ID NO: 5787173 - DNA, 25 bp, Homo sapien
ggagctctcactgaaccgcagcagg

SEQ ID NO: 5787174 - DNA, 25 bp, Homo sapien
gcatggaagtcaggttcgcctccgt

SEQ ID NO: 5787175 - DNA, 25 bp, Homo sapien
tggagtaatactttccaaaggcatg

SEQ ID NO: 5787176 - DNA, 25 bp, Homo sapien
aaccgctcgggagctggctgacgtt

SEQ ID NO: 5787177 - DNA, 25 bp, Homo sapien
gataggcagtaacacggggatctca

SEQ ID NO: 5787178 - DNA, 25 bp, Homo sapien
gtgcggtcccataacacttgtttgt

SEQ ID NO: 5787179 - DNA, 25 bp, Homo sapien
agcagaaagttctttcttcgtgtag

SEQ ID NO: 5787180 - DNA, 25 bp, Homo sapien
tgaaccagttctgcagctgatccaa

SEQ ID NO: 5787181 - DNA, 25 bp, Homo sapien
tcagctggtccacattgagacctct

SEQ ID NO: 5787182 - DNA, 25 bp, Homo sapien
gcatggtctttgtcaatatttggat

SEQ ID NO: 5787183 - DNA, 25 bp, Homo sapien
cagcaaatgaaacttttctgcgcgc

SEQ ID NO: 5787184 - DNA, 25 bp, Homo sapien
ctcagcacttctgaaagctgagccc

SEQ ID NO: 5787185 - DNA, 25 bp, Homo sapien
cttcctttctcttattgtcaagcat

SEQ ID NO: 5787186 - DNA, 25 bp, Homo sapien
aaccaggctggcacaattgggtttc

SEQ ID NO: 5787187 - DNA, 25 bp, Homo sapien
attccccgactgagcctgattaaat

SEQ ID NO: 5787188 - DNA, 25 bp, Homo sapien
cggaagggctaggcgggggcgcggc

SEQ ID NO: 5787189 - DNA, 25 bp, Homo sapien
ctttctgtttgtctaacatcactgt

SEQ ID NO: 5787190 - DNA, 25 bp, Homo sapien
tattttgtgaactacttcctttctc

SEQ ID NO: 5787191 - DNA, 25 bp, Homo sapien
tgccaactcagcacttctgaaagct

SEQ ID NO: 5787192 - DNA, 25 bp, Homo sapien
ttctcaggaatattctcagcagcca

SEQ ID NO: 5787193 - DNA, 25 bp, Homo sapien
taggtgtatttctgttccaattcct

SEQ ID NO: 5787194 - DNA, 25 bp, Homo sapien
cattggctctggtgcttcctttggc

SEQ ID NO: 5787195 - DNA, 25 bp, Homo sapien
atgaaaacggatggtggcaaatgaa

SEQ ID NO: 5787196 - DNA, 25 bp, Homo sapien
cagctgtgacaggaggtcatgaaaa

SEQ ID NO: 5787197 - DNA, 25 bp, Homo sapien
caagcattaaatacatcttcttgag

SEQ ID NO: 5787198 - DNA, 25 bp, Homo sapien
gaatgagaccatcggggctggcgtt

SEQ ID NO: 5787199 - DNA, 25 bp, Homo sapien
tgttcttgtttctgatcactctttg

SEQ ID NO: 5787200 - DNA, 25 bp, Homo sapien
ggcctggagtaatactttccaaagg

SEQ ID NO: 5787201 - DNA, 25 bp, Homo sapien
cagcaggaaggtccccggctgctgg

SEQ ID NO: 5787202 - DNA, 25 bp, Homo sapien
ctccttgctgatgaagcccatgatg

SEQ ID NO: 5787203 - DNA, 25 bp, Homo sapien
accgcagcaggaaggtccccggctg

SEQ ID NO: 5787204 - DNA, 25 bp, Homo sapien
gggtgcgttggcatgcagggctgtc

SEQ ID NO: 5787205 - DNA, 25 bp, Homo sapien
ttcaaaactaagggagtgaagctct

SEQ ID NO: 5787206 - DNA, 25 bp, Homo sapien
ggtctgccaggcgcgatccccccgg

SEQ ID NO: 5787207 - DNA, 25 bp, Homo sapien
tttactgtcaagctctttctgtttg

SEQ ID NO: 5787208 - DNA, 25 bp, Homo sapien
atgaaacatcattggcagcgtgctc

SEQ ID NO: 5787209 - DNA, 25 bp, Homo sapien
tcttcctgaaaattatcctgaagat

SEQ ID NO: 5787210 - DNA, 25 bp, Homo sapien
ttcaccaacagtctcaacttcacag

SEQ ID NO: 5787211 - DNA, 25 bp, Homo sapien
atggtctttgtcaatatttggatac

SEQ ID NO: 5787212 - DNA, 25 bp, Homo sapien
gcctggggattcaaccaaaggagca

SEQ ID NO: 5787213 - DNA, 25 bp, Homo sapien
agctctgaatgagctgctggaaaag

SEQ ID NO: 5787214 - DNA, 25 bp, Homo sapien
ccattggtctcgtgttctctgttct

SEQ ID NO: 5787215 - DNA, 25 bp, Homo sapien
ctgtctttccaccacaaacgagctc

SEQ ID NO: 5787216 - DNA, 25 bp, Homo sapien
tcataaagctggtgaacctgctcca

SEQ ID NO: 5787217 - DNA, 25 bp, Homo sapien
tctgccaggcgcgatccccccggtg

SEQ ID NO: 5787218 - DNA, 25 bp, Homo sapien
cagtaacacggggatctcaacaagt

SEQ ID NO: 5787219 - DNA, 25 bp, Homo sapien
catgttcgtaggtgtatttctgttc

SEQ ID NO: 5787220 - DNA, 25 bp, Homo sapien
tcctttggcctggagtaatactttc

SEQ ID NO: 5787221 - DNA, 25 bp, Homo sapien
atgcacccatcattccagagaggga

SEQ ID NO: 5787222 - DNA, 25 bp, Homo sapien
aagttattctccaaagaaaagcgac

SEQ ID NO: 5787223 - DNA, 25 bp, Homo sapien
agttcgtaccactgagacatcctgc

SEQ ID NO: 5787224 - DNA, 25 bp, Homo sapien
ggtcttcctgaaaattatcctgaag

SEQ ID NO: 5787225 - DNA, 25 bp, Homo sapien
aacttttctgcgcgcaggatccgga

SEQ ID NO: 5787226 - DNA, 25 bp, Homo sapien
cattcagcaactctattattttgtg

SEQ ID NO: 5787227 - DNA, 25 bp, Homo sapien
ggcgatagcaattacaatggaaaag

SEQ ID NO: 5787228 - DNA, 25 bp, Homo sapien
aagcgactatattgatcatccagct

SEQ ID NO: 5787229 - DNA, 25 bp, Homo sapien
aaatgatcatagacatctggattgg

SEQ ID NO: 5787230 - DNA, 25 bp, Homo sapien
acttgctgcagactctccgcaacta

SEQ ID NO: 5787231 - DNA, 25 bp, Homo sapien
gtctaacatcactgtgctctgaata

SEQ ID NO: 5787232 - DNA, 25 bp, Homo sapien
gtttgtctaacatcactgtgctctg

SEQ ID NO: 5787233 - DNA, 25 bp, Homo sapien
tggagatcaccacaacgggcagaga

SEQ ID NO: 5787234 - DNA, 25 bp, Homo sapien
ttgagacctcttttggtgacagaag

SEQ ID NO: 5787235 - DNA, 25 bp, Homo sapien
gaaggtgcggtcccataacacttgt

SEQ ID NO: 5787236 - DNA, 25 bp, Homo sapien
ctgtcaagctctttctgtttgtcta

SEQ ID NO: 5787237 - DNA, 25 bp, Homo sapien
tcactcttctgtgttcacttacact

SEQ ID NO: 5787238 - DNA, 25 bp, Homo sapien
tttcctttcttccttcagacagctg

SEQ ID NO: 5787239 - DNA, 25 bp, Homo sapien
gtaaaatgctgataggcagtaacac

SEQ ID NO: 5787240 - DNA, 25 bp, Homo sapien
tgatcactctttgccacaccattgg

SEQ ID NO: 5787241 - DNA, 25 bp, Homo sapien
aagctgctgaagttcgtaccactga

SEQ ID NO: 5787242 - DNA, 25 bp, Homo sapien
actgtcgaggttatatacacagagt

SEQ ID NO: 5787243 - DNA, 25 bp, Homo sapien
atgagaccatcggggctggcgttag

SEQ ID NO: 5787244 - DNA, 25 bp, Homo sapien
cttcctttggcctggagtaatactt

SEQ ID NO: 5787245 - DNA, 25 bp, Homo sapien
cttgtttctgatcactctttgccac

SEQ ID NO: 5787246 - DNA, 25 bp, Homo sapien
tcttgagtaacagctgttcttgttt

SEQ ID NO: 5787247 - DNA, 25 bp, Homo sapien
aaaattatcctgaagattacgcttg

SEQ ID NO: 5787248 - DNA, 25 bp, Homo sapien
taattcagctcttgcaatttcacca

SEQ ID NO: 5787249 - DNA, 25 bp, Homo sapien
cgtccacggaatgagaccatcgggg

SEQ ID NO: 5787250 - DNA, 25 bp, Homo sapien
cgatccccccggtgcagccgagccc

SEQ ID NO: 5787251 - DNA, 25 bp, Homo sapien
tttaagctgctgccgaacttgctgc

SEQ ID NO: 5787252 - DNA, 25 bp, Homo sapien
ggaaaagactgaaggtgcggtccca

SEQ ID NO: 5787253 - DNA, 25 bp, Homo sapien
gatcaccacaacgggcagagaggtc

SEQ ID NO: 5787254 - DNA, 25 bp, Homo sapien
ccagcatgttgtaccaaaggatgga

SEQ ID NO: 5787255 - DNA, 25 bp, Homo sapien
catgggaaaactgtcatcataaagc

SEQ ID NO: 5787256 - DNA, 25 bp, Homo sapien
attcgttctggtgccagcatttttc

SEQ ID NO: 5787257 - DNA, 25 bp, Homo sapien
ctcactgaaccgcagcaggaaggtc

SEQ ID NO: 5787258 - DNA, 25 bp, Homo sapien
caatacaggcgctctgctgtctccg

SEQ ID NO: 5787259 - DNA, 25 bp, Homo sapien
gtccttcaacagggcacgctctcgc

SEQ ID NO: 5787260 - DNA, 25 bp, Homo sapien
tcagggaaagtaacagcagaaagtt

SEQ ID NO: 5787261 - DNA, 25 bp, Homo sapien
cacttttgtgtgcgtgcccaaaatg

SEQ ID NO: 5787262 - DNA, 25 bp, Homo sapien
actggacccctgtcttcaagaccag

SEQ ID NO: 5787263 - DNA, 25 bp, Homo sapien
gctggcgttaggaccaagaagcttc

SEQ ID NO: 5787264 - DNA, 25 bp, Homo sapien
ctcccaacatgttcagctggtccac

SEQ ID NO: 5787265 - DNA, 25 bp, Homo sapien
gggcctggggattcaaccaaaggag

SEQ ID NO: 5787266 - DNA, 25 bp, Homo sapien
ggggattcaaccaaaggagcagcta

SEQ ID NO: 5787267 - DNA, 25 bp, Homo sapien
gaggtttgtaaacatgtcactcttc

SEQ ID NO: 5787268 - DNA, 25 bp, Homo sapien
ggaggcccaaccgctcgggagctgg

SEQ ID NO: 5787269 - DNA, 25 bp, Homo sapien
tatattttccttacaaaacctcgtc

SEQ ID NO: 5787270 - DNA, 25 bp, Homo sapien
aagtcaggttcgcctccgttctggg

SEQ ID NO: 5787271 - DNA, 25 bp, Homo sapien
attgatcatccagctgtgacaggag

SEQ ID NO: 5787272 - DNA, 25 bp, Homo sapien
aacgatgagaggaccctcattcgtt

SEQ ID NO: 5787273 - DNA, 25 bp, Homo sapien
cgtaggtgtatttctgttccaattc

SEQ ID NO: 5787274 - DNA, 25 bp, Homo sapien
cccccaatacaggcgctctgctgtc

SEQ ID NO: 5787275 - DNA, 25 bp, Homo sapien
gggcagagaggtcgtctcgaggtca

SEQ ID NO: 5787276 - DNA, 25 bp, Homo sapien
aacgagctctgaatgagctgctgga

SEQ ID NO: 5787277 - DNA, 25 bp, Homo sapien
gaactggacccctgtcttcaagacc

SEQ ID NO: 5787278 - DNA, 25 bp, Homo sapien
caaggttttgcatttgaagtcatat

SEQ ID NO: 5787279 - DNA, 25 bp, Homo sapien
cagcacttctgaaagctgagcccat

SEQ ID NO: 5787280 - DNA, 25 bp, Homo sapien
gggtcatgttcgtaggtgtatttct

SEQ ID NO: 5787281 - DNA, 25 bp, Homo sapien
ggtttgtaaacatgtcactcttctg

SEQ ID NO: 5787282 - DNA, 25 bp, Homo sapien
ctatagtgaaccagttctgcagctg

SEQ ID NO: 5787283 - DNA, 25 bp, Homo sapien
tgccgaacttgctgcagactctccg

SEQ ID NO: 5787284 - DNA, 25 bp, Homo sapien
gacagctctcgaggatggcatacag

SEQ ID NO: 5787285 - DNA, 25 bp, Homo sapien
atcacttttgtgtgcgtgcccaaaa

SEQ ID NO: 5787286 - DNA, 25 bp, Homo sapien
attacaatggaaaagtaaaatacaa

SEQ ID NO: 5787287 - DNA, 25 bp, Homo sapien
caaggctggcttgaggtttgtaaac

SEQ ID NO: 5787288 - DNA, 25 bp, Homo sapien
aaaagactgaaggtgcggtcccata

SEQ ID NO: 5787289 - DNA, 25 bp, Homo sapien
gtcaggaagaaggacagattcctgg

SEQ ID NO: 5787290 - DNA, 25 bp, Homo sapien
gtgaactacttcctttctcttattg

SEQ ID NO: 5787291 - DNA, 25 bp, Homo sapien
cgttaacctagacagctctcgagga

SEQ ID NO: 5787292 - DNA, 25 bp, Homo sapien
acagcacgttaggtgccaagactgt

SEQ ID NO: 5787293 - DNA, 25 bp, Homo sapien
aatgagttctaggatgctttcaatc

SEQ ID NO: 5787294 - DNA, 25 bp, Homo sapien
ctccaaagaaaagcgactatattga

SEQ ID NO: 5787295 - DNA, 25 bp, Homo sapien
gactgaaggtgcggtcccataacac

SEQ ID NO: 5787296 - DNA, 25 bp, Homo sapien
ttcccgggagctctcactgaaccgc

SEQ ID NO: 5787297 - DNA, 25 bp, Homo sapien
cctagacagctctcgaggatggcat

SEQ ID NO: 5787298 - DNA, 25 bp, Homo sapien
gttttgcatttgaagtcatattcat

SEQ ID NO: 5787299 - DNA, 25 bp, Homo sapien
actgccattggtggactcctccatg

SEQ ID NO: 5787300 - DNA, 25 bp, Homo sapien
cgcctctgctcggtctggggtctgc

SEQ ID NO: 5787301 - DNA, 25 bp, Homo sapien
ccagagagggagcaggtgtttttta

SEQ ID NO: 5787302 - DNA, 25 bp, Homo sapien
ttcctgaaaattatcctgaagatta

SEQ ID NO: 5787303 - DNA, 25 bp, Homo sapien
ttcagctgtgatggcgatagcaatt

SEQ ID NO: 5787304 - DNA, 25 bp, Homo sapien
cttgcaatttcaccaacagtctcaa

SEQ ID NO: 5787305 - DNA, 25 bp, Homo sapien
aagattacgcttgcttttccttatg

SEQ ID NO: 5787306 - DNA, 25 bp, Homo sapien
atgatgtcagggaaagtaacagcag

SEQ ID NO: 5787307 - DNA, 25 bp, Homo sapien
tttggatacagatacttcaggggat

SEQ ID NO: 5787308 - DNA, 25 bp, Homo sapien
ggatggaggcccaaccgctcgggag

SEQ ID NO: 5787309 - DNA, 25 bp, Homo sapien
acagagtgcgaacgttaacctagac

SEQ ID NO: 5787310 - DNA, 25 bp, Homo sapien
tttgactttcaaattataattcagc

SEQ ID NO: 5787311 - DNA, 25 bp, Homo sapien
aggcgcgatccccccggtgcagccg

SEQ ID NO: 5787312 - DNA, 25 bp, Homo sapien
ggcacgctctcgctccttgctgatg

SEQ ID NO: 5787313 - DNA, 25 bp, Homo sapien
atggaaaagtaaaatacaagcatct

SEQ ID NO: 5787314 - DNA, 25 bp, Homo sapien
gaccagcggcctctgagggtgcgtt

SEQ ID NO: 5787315 - DNA, 25 bp, Homo sapien
tgatgcacccatcattccagagagg

SEQ ID NO: 5787316 - DNA, 25 bp, Homo sapien
ctctcgctccttgctgatgaagccc

SEQ ID NO: 5787317 - DNA, 25 bp, Homo sapien
cacatctttatcaaataagactttg

SEQ ID NO: 5787318 - DNA, 25 bp, Homo sapien
ccttcccgggagctctcactgaacc

SEQ ID NO: 5787319 - DNA, 25 bp, Homo sapien
attcaaccaaaggagcagctacgca

SEQ ID NO: 5787320 - DNA, 25 bp, Homo sapien
ctgctggtccttcaacagggcacgc

SEQ ID NO: 5787321 - DNA, 25 bp, Homo sapien
cagattcctgggttccgccaccagc

SEQ ID NO: 5787322 - DNA, 25 bp, Homo sapien
gcgactatattgatcatccagctgt

SEQ ID NO: 5787323 - DNA, 25 bp, Homo sapien
catttgaagtcatattcatcttgta

SEQ ID NO: 5787324 - DNA, 25 bp, Homo sapien
ccaaaggcatggtctttgtcaatat

SEQ ID NO: 5787325 - DNA, 25 bp, Homo sapien
gctggcttgaggtttgtaaacatgt

SEQ ID NO: 5787326 - DNA, 25 bp, Homo sapien
accacaacgggcagagaggtcgtct

SEQ ID NO: 5787327 - DNA, 25 bp, Homo sapien
tactgtctgatttccatgggaaaac

SEQ ID NO: 5787328 - DNA, 25 bp, Homo sapien
ttctcttattgtcaagcattaaata

SEQ ID NO: 5787329 - DNA, 25 bp, Homo sapien
gccagcatttttctgttctttcaat

SEQ ID NO: 5787330 - DNA, 25 bp, Homo sapien
tagggttcaaccgcatggaagtcag

SEQ ID NO: 5787331 - DNA, 25 bp, Homo sapien
cgggagctctcactgaaccgcagca

SEQ ID NO: 5787332 - DNA, 25 bp, Homo sapien
aggttttgcatttgaagtcatattc

SEQ ID NO: 5787333 - DNA, 25 bp, Homo sapien
tcaggggattctcaggaatattctc

SEQ ID NO: 5787334 - DNA, 25 bp, Homo sapien
ttcgtaggtgtatttctgttccaat

SEQ ID NO: 5787335 - DNA, 25 bp, Homo sapien
atattgatcatccagctgtgacagg

SEQ ID NO: 5787336 - DNA, 25 bp, Homo sapien
aggagcagctacgcacagcacgtta

SEQ ID NO: 5787337 - DNA, 25 bp, Homo sapien
tttccatgggaaaactgtcatcata

SEQ ID NO: 5787338 - DNA, 25 bp, Homo sapien
tttctgttctttcaattgcaggtgc

SEQ ID NO: 5787339 - DNA, 25 bp, Homo sapien
tgttgtaccaaaggatggaggccca

SEQ ID NO: 5787340 - DNA, 25 bp, Homo sapien
ccatgttcatcacttttgtgtgcgt

SEQ ID NO: 5787341 - DNA, 25 bp, Homo sapien
gggtcgcctctgctcggtctggggt

SEQ ID NO: 5787342 - DNA, 25 bp, Homo sapien
ggattcaaccaaaggagcagctacg

SEQ ID NO: 5787343 - DNA, 25 bp, Homo sapien
tccactagttcatcattaatcaggg

SEQ ID NO: 5787344 - DNA, 25 bp, Homo sapien
ccaggcgcgatccccccggtgcagc

SEQ ID NO: 5787345 - DNA, 25 bp, Homo sapien
aactatagtgaaccagttctgcagc

SEQ ID NO: 5787346 - DNA, 25 bp, Homo sapien
aacagctgttcttgtttctgatcac

SEQ ID NO: 5787347 - DNA, 25 bp, Homo sapien
ccaacagtctcaacttcacagtgaa

SEQ ID NO: 5787348 - DNA, 25 bp, Homo sapien
gagtcaggaagaaggacagattcct

SEQ ID NO: 5787349 - DNA, 25 bp, Homo sapien
gtctcgtgttctctgttctgcaagg

SEQ ID NO: 5787350 - DNA, 25 bp, Homo sapien
ctctggtgcttcctttggcctggag

SEQ ID NO: 5787351 - DNA, 25 bp, Homo sapien
caggtactgtctgatttccatggga

SEQ ID NO: 5787352 - DNA, 25 bp, Homo sapien
ttcagccgccagactgccattggtg

SEQ ID NO: 5787353 - DNA, 25 bp, Homo sapien
caaacgagctctgaatgagctgctg

SEQ ID NO: 5787354 - DNA, 25 bp, Homo sapien
tcaaataagactttgactttcaaat

SEQ ID NO: 5787355 - DNA, 25 bp, Homo sapien
ggcggccccccaatacaggcgctct

SEQ ID NO: 5787356 - DNA, 25 bp, Homo sapien
agagtgcgaacgttaacctagacag

SEQ ID NO: 5787357 - DNA, 25 bp, Homo sapien
cgtaccactgagacatcctgccacc

SEQ ID NO: 5787358 - DNA, 25 bp, Homo sapien
cagaaatcaactcagtcttgatata

SEQ ID NO: 5787359 - DNA, 25 bp, Homo sapien
tttgttttttgtgatagggtcatgt

SEQ ID NO: 5787360 - DNA, 25 bp, Homo sapien
gaagggctaggcgggggcgcggcgg

SEQ ID NO: 5787361 - DNA, 25 bp, Homo sapien
tgtaaacatgtcactcttctgtgtt

SEQ ID NO: 5787362 - DNA, 25 bp, Homo sapien
aagccagaagggaaaatttttatca

SEQ ID NO: 5787363 - DNA, 25 bp, Homo sapien
aaagtaacagcagaaagttctttct

SEQ ID NO: 5787364 - DNA, 25 bp, Homo sapien
ttacgcttgcttttccttatgttat

SEQ ID NO: 5787365 - DNA, 25 bp, Homo sapien
aaccgcatggaagtcaggttcgcct

SEQ ID NO: 5787366 - DNA, 25 bp, Homo sapien
gattctcaggaatattctcagcagc

SEQ ID NO: 5787367 - DNA, 25 bp, Homo sapien
ccccccggtgcagccgagcccctcc

SEQ ID NO: 5787368 - DNA, 25 bp, Homo sapien
attgcaggtgccgaaattcagccgc

SEQ ID NO: 5787369 - DNA, 25 bp, Homo sapien
tcctttcttccttcagacagctgta

SEQ ID NO: 5787370 - DNA, 25 bp, Homo sapien
ttctctcccaacatgttcagctggt

SEQ ID NO: 5787371 - DNA, 25 bp, Homo sapien
gctcttcagtaacgatgagaggacc

SEQ ID NO: 5787372 - DNA, 25 bp, Homo sapien
gtgccaagactgtcgaggttatata

SEQ ID NO: 5787373 - DNA, 25 bp, Homo sapien
atatccagttcctttagggccatca

SEQ ID NO: 5787374 - DNA, 25 bp, Homo sapien
caaaggatggaggcccaaccgctcg

SEQ ID NO: 5787375 - DNA, 25 bp, Homo sapien
gtgcgttggcatgcagggctgtctt

SEQ ID NO: 5787376 - DNA, 25 bp, Homo sapien
cttattgtcaagcattaaatacatc

SEQ ID NO: 5787377 - DNA, 25 bp, Homo sapien
gcgaatgatgtcagggaaagtaaca

SEQ ID NO: 5787378 - DNA, 25 bp, Homo sapien
agtgcgaacgttaacctagacagct

SEQ ID NO: 5787379 - DNA, 25 bp, Homo sapien
ctgtttgtctaacatcactgtgctc

SEQ ID NO: 5787380 - DNA, 25 bp, Homo sapien
gaggatggcatacagcaaatgaaac

SEQ ID NO: 5787381 - DNA, 25 bp, Homo sapien
cgctgggtcgcctctgctcggtctg

SEQ ID NO: 5787382 - DNA, 25 bp, Homo sapien
ctctattattttgtgaactacttcc

SEQ ID NO: 5787383 - DNA, 25 bp, Homo sapien
aagaccagcggcctctgagggtgcg

SEQ ID NO: 5787384 - DNA, 25 bp, Homo sapien
gccagaagggaaaatttttatcatt

SEQ ID NO: 5787385 - DNA, 25 bp, Homo sapien
gtcaggttcgcctccgttctgggac

SEQ ID NO: 5787386 - DNA, 25 bp, Homo sapien
tttcttcgtgtagggttcaaccgca

SEQ ID NO: 5787387 - DNA, 25 bp, Homo sapien
gcctctgagggtgcgttggcatgca

SEQ ID NO: 5787388 - DNA, 25 bp, Homo sapien
cagtcttgatatatccagttccttt

SEQ ID NO: 5787389 - DNA, 25 bp, Homo sapien
catcttgtaaatcttccaggctctt

SEQ ID NO: 5787390 - DNA, 25 bp, Homo sapien
tcaagaccagcggcctctgagggtg

SEQ ID NO: 5787391 - DNA, 25 bp, Homo sapien
attggtctcgtgttctctgttctgc

SEQ ID NO: 5787392 - DNA, 25 bp, Homo sapien
cgttctgggaccgctccacccatgt

SEQ ID NO: 5787393 - DNA, 25 bp, Homo sapien
cactctttgccacaccattggtctc

SEQ ID NO: 5787394 - DNA, 25 bp, Homo sapien
cggccccccaatacaggcgctctgc

SEQ ID NO: 5787395 - DNA, 25 bp, Homo sapien
gcagggctgtctttccaccacaaac

SEQ ID NO: 5787396 - DNA, 25 bp, Homo sapien
gctgcagactctccgcaactatagt

SEQ ID NO: 5787397 - DNA, 25 bp, Homo sapien
gtgaactggacccctgtcttcaaga

SEQ ID NO: 5787398 - DNA, 25 bp, Homo sapien
aaaggcatggtctttgtcaatattt

SEQ ID NO: 5787399 - DNA, 25 bp, Homo sapien
aagtcatattcatcttgtaaatctt

SEQ ID NO: 5787400 - DNA, 25 bp, Homo sapien
ttactgtatttctctcattcacatc

SEQ ID NO: 5787401 - DNA, 25 bp, Homo sapien
agactgtcgaggttatatacacaga

SEQ ID NO: 5787402 - DNA, 25 bp, Homo sapien
tacttcaggggattctcaggaatat

SEQ ID NO: 5787403 - DNA, 25 bp, Homo sapien
gtcaagctctttctgtttgtctaac

SEQ ID NO: 5787404 - DNA, 25 bp, Homo sapien
ccttcaacagggcacgctctcgctc

SEQ ID NO: 5787405 - DNA, 25 bp, Homo sapien
agctggtgaacctgctccaggaatt

SEQ ID NO: 5787406 - DNA, 25 bp, Homo sapien
cgcaggatccggaagggctaggcgg

SEQ ID NO: 5787407 - DNA, 25 bp, Homo sapien
aacatcactgtgctctgaatattcc

SEQ ID NO: 5787408 - DNA, 25 bp, Homo sapien
ggtggagtcaggaagaaggacagat

SEQ ID NO: 5787409 - DNA, 25 bp, Homo sapien
tctaaccactgtgccaggtactgtc

SEQ ID NO: 5787410 - DNA, 25 bp, Homo sapien
aacctagacagctctcgaggatggc

SEQ ID NO: 5787411 - DNA, 25 bp, Homo sapien
tgtgctctgaatattccccgactga

SEQ ID NO: 5787412 - DNA, 25 bp, Homo sapien
ctggtgaacctgctccaggaatttt

SEQ ID NO: 5787413 - DNA, 25 bp, Homo sapien
attgggcggccccccaatacaggcg

SEQ ID NO: 5787414 - DNA, 25 bp, Homo sapien
gtgccagcatttttctgttctttca

SEQ ID NO: 5787415 - DNA, 25 bp, Homo sapien
gctgctggaaaagactgaaggtgcg

SEQ ID NO: 5787416 - DNA, 25 bp, Homo sapien
tgtatttctgttccaattcctccaa

SEQ ID NO: 5787417 - DNA, 25 bp, Homo sapien
tgttgaacttcctaaatccttttac

SEQ ID NO: 5787418 - DNA, 25 bp, Homo sapien
gtcatcataaagctggtgaacctgc

SEQ ID NO: 5787419 - DNA, 25 bp, Homo sapien
gctggtccttcaacagggcacgctc

SEQ ID NO: 5787420 - DNA, 25 bp, Homo sapien
tggcatgcagggctgtctttccacc

SEQ ID NO: 5787421 - DNA, 25 bp, Homo sapien
tcatcacttttgtgtgcgtgcccaa

SEQ ID NO: 5787422 - DNA, 25 bp, Homo sapien
taccactgagacatcctgccacctt

SEQ ID NO: 5787423 - DNA, 25 bp, Homo sapien
ttgaacttcctaaatccttttactg

SEQ ID NO: 5787424 - DNA, 25 bp, Homo sapien
ggtctttgtcaatatttggatacag

SEQ ID NO: 5787425 - DNA, 25 bp, Homo sapien
tcttttggtgacagaagaaaactgc

SEQ ID NO: 5787426 - DNA, 25 bp, Homo sapien
gctgttcttgtttctgatcactctt

SEQ ID NO: 5787427 - DNA, 25 bp, Homo sapien
ctcttattgtcaagcattaaataca

SEQ ID NO: 5787428 - DNA, 25 bp, Homo sapien
acataaccttgtccttcacatttct

SEQ ID NO: 5787429 - DNA, 25 bp, Homo sapien
gagcagctacgcacagcacgttagg

SEQ ID NO: 5787430 - DNA, 25 bp, Homo sapien
acgcacagcacgttaggtgccaaga

SEQ ID NO: 5787431 - DNA, 25 bp, Homo sapien
ttctgggaccgctccacccatgtga

SEQ ID NO: 5787432 - DNA, 25 bp, Homo sapien
cggtctggggtctgccaggcgcgat

SEQ ID NO: 5787433 - DNA, 25 bp, Homo sapien
gagctggctgacgttggagatcacc

SEQ ID NO: 5787434 - DNA, 25 bp, Homo sapien
aaatgaaacatcattggcagcgtgc

SEQ ID NO: 5787435 - DNA, 25 bp, Homo sapien
ccaaaggagcagctacgcacagcac

SEQ ID NO: 5787436 - DNA, 25 bp, Homo sapien
gtcgcctctgctcggtctggggtct

SEQ ID NO: 5787437 - DNA, 25 bp, Homo sapien
ccgcttccactccactagttcatca

SEQ ID NO: 5787438 - DNA, 25 bp, Homo sapien
ggcgggggcgcggcggtgcagcctc

SEQ ID NO: 5787439 - DNA, 25 bp, Homo sapien
ccccggtgcagccgagcccctccgc

SEQ ID NO: 5787440 - DNA, 25 bp, Homo sapien
aatgtgatggccccttcccgggagc

SEQ ID NO: 5787441 - DNA, 25 bp, Homo sapien
gctctgctgtctccgcttccactcc

SEQ ID NO: 5787442 - DNA, 25 bp, Homo sapien
ttcaatccaaagccagaagggaaaa

SEQ ID NO: 5787443 - DNA, 25 bp, Homo sapien
tgatggcgatagcaattacaatgga

SEQ ID NO: 5787444 - DNA, 25 bp, Homo sapien
taagttcagtgacattcagcaactc

SEQ ID NO: 5787445 - DNA, 25 bp, Homo sapien
caggtgttttttaatgagttctagg

SEQ ID NO: 5787446 - DNA, 25 bp, Homo sapien
cagcctctcccgagcgcgctgggtc

SEQ ID NO: 5787447 - DNA, 25 bp, Homo sapien
ttgtccttcacatttctgactttac

SEQ ID NO: 5787448 - DNA, 25 bp, Homo sapien
ttcctgggttccgccaccagcatgt

SEQ ID NO: 5787449 - DNA, 25 bp, Homo sapien
ggaagtcaggttcgcctccgttctg

SEQ ID NO: 5787450 - DNA, 25 bp, Homo sapien
tacaagcatcttcaacaggccccag

SEQ ID NO: 5787451 - DNA, 25 bp, Homo sapien
aaatgaaacttttctgcgcgcagga

SEQ ID NO: 5787452 - DNA, 25 bp, Homo sapien
gtgatagggtcatgttcgtaggtgt

SEQ ID NO: 5787453 - DNA, 25 bp, Homo sapien
cgtgttctctgttctgcaaggtttt

SEQ ID NO: 5787454 - DNA, 25 bp, Homo sapien
ccgcaactatagtgaaccagttctg

SEQ ID NO: 5787455 - DNA, 25 bp, Homo sapien
ctgggtcgcctctgctcggtctggg

SEQ ID NO: 5787456 - DNA, 25 bp, Homo sapien
tgccccaacaagggcctggggattc

SEQ ID NO: 5787457 - DNA, 25 bp, Homo sapien
ccatcggggctggcgttaggaccaa

SEQ ID NO: 5787458 - DNA, 25 bp, Homo sapien
tcccataacacttgtttgttttttg

SEQ ID NO: 5787459 - DNA, 25 bp, Homo sapien
caagggcctggggattcaaccaaag

SEQ ID NO: 5787460 - DNA, 25 bp, Homo sapien
ctaacatcactgtgctctgaatatt

SEQ ID NO: 5787461 - DNA, 25 bp, Homo sapien
cggggctggcgttaggaccaagaag

SEQ ID NO: 5787462 - DNA, 25 bp, Homo sapien
tgaagattacgcttgcttttcctta

SEQ ID NO: 5787463 - DNA, 25 bp, Homo sapien
ctctccgcaactatagtgaaccagt

SEQ ID NO: 5787464 - DNA, 25 bp, Homo sapien
ctgaagttcgtaccactgagacatc

SEQ ID NO: 5787465 - DNA, 25 bp, Homo sapien
tgggttccgccaccagcatgttgta

SEQ ID NO: 5787466 - DNA, 25 bp, Homo sapien
ccatcattccagagagggagcaggt

SEQ ID NO: 5787467 - DNA, 25 bp, Homo sapien
aattaccaaaccaggctggcacaat

SEQ ID NO: 5787468 - DNA, 25 bp, Homo sapien
ggtgttttttaatgagttctaggat

SEQ ID NO: 5787469 - DNA, 25 bp, Homo sapien
caggaagaaggacagattcctgggt

SEQ ID NO: 5787470 - DNA, 25 bp, Homo sapien
gctcgggagctggctgacgttggag

SEQ ID NO: 5787471 - DNA, 25 bp, Homo sapien
aagaaggacagattcctgggttccg

SEQ ID NO: 5787472 - DNA, 25 bp, Homo sapien
gcctctcccgagcgcgctgggtcgc

SEQ ID NO: 5787473 - DNA, 25 bp, Homo sapien
agctacgcacagcacgttaggtgcc

SEQ ID NO: 5787474 - DNA, 25 bp, Homo sapien
tcaacaagttcagctgtgatggcga

SEQ ID NO: 5787475 - DNA, 25 bp, Homo sapien
gatttccatgggaaaactgtcatca

SEQ ID NO: 5787476 - DNA, 25 bp, Homo sapien
gtaacacggggatctcaacaagttc

SEQ ID NO: 5787477 - DNA, 25 bp, Homo sapien
gccatcaagttccattggctctggt

SEQ ID NO: 5787478 - DNA, 25 bp, Homo sapien
ctgtcttcaagaccagcggcctctg

SEQ ID NO: 5787479 - DNA, 25 bp, Homo sapien
ctgtgccaggtactgtctgatttcc

SEQ ID NO: 5787480 - DNA, 25 bp, Homo sapien
ctgtctgatttccatgggaaaactg

SEQ ID NO: 5787481 - DNA, 25 bp, Homo sapien
agacatcctgccaccttgtgcccca

SEQ ID NO: 5787482 - DNA, 25 bp, Homo sapien
ttcagtaacgatgagaggaccctca

SEQ ID NO: 5787483 - DNA, 25 bp, Homo sapien
catcattggcagcgtgctcccagtc

SEQ ID NO: 5787484 - DNA, 25 bp, Homo sapien
ccgctccacccatgtgaatgtgatg

SEQ ID NO: 5787485 - DNA, 25 bp, Homo sapien
aaccagttctgcagctgatccaagc

SEQ ID NO: 5787486 - DNA, 25 bp, Homo sapien
agccatgactttgtaattgcgaatg

SEQ ID NO: 5787487 - DNA, 25 bp, Homo sapien
gcttttccttatgttatgctgtagc

SEQ ID NO: 5787488 - DNA, 25 bp, Homo sapien
ctctcccaacatgttcagctggtcc

SEQ ID NO: 5787489 - DNA, 25 bp, Homo sapien
ttctgcagctgatccaagcaagcat

SEQ ID NO: 5787490 - DNA, 25 bp, Homo sapien
taggcgggggcgcggcggtgcagcc

SEQ ID NO: 5787491 - DNA, 25 bp, Homo sapien
tatgctgtagcaagaagttattctc

SEQ ID NO: 5787492 - DNA, 25 bp, Homo sapien
tgcccaaaatgttgaacttcctaaa

SEQ ID NO: 5787493 - DNA, 25 bp, Homo sapien
ggttatatacacagagtgcgaacgt

SEQ ID NO: 5787494 - DNA, 25 bp, Homo sapien
tattctcagcagccatgactttgta

SEQ ID NO: 5787495 - DNA, 25 bp, Homo sapien
tctgactttactgtcaagctctttc

SEQ ID NO: 5787496 - DNA, 25 bp, Homo sapien
agcgcgctgggtcgcctctgctcgg

SEQ ID NO: 5787497 - DNA, 25 bp, Homo sapien
gccccagccaggagcaaggctggct

SEQ ID NO: 5787498 - DNA, 25 bp, Homo sapien
caacagggcacgctctcgctccttg

SEQ ID NO: 5787499 - DNA, 25 bp, Homo sapien
cttgtgccccaacaagggcctgggg

SEQ ID NO: 5787500 - DNA, 25 bp, Homo sapien
gaggaccctcattcgttctggtgcc

SEQ ID NO: 5787501 - DNA, 25 bp, Homo sapien
tcttgtaaatcttccaggctcttga

SEQ ID NO: 5787502 - DNA, 25 bp, Homo sapien
agacagctgtaaatgatcatagaca

SEQ ID NO: 5787503 - DNA, 25 bp, Homo sapien
gaaaacggatggtggcaaatgaaac

SEQ ID NO: 5787504 - DNA, 25 bp, Homo sapien
ctcaacttcacagtgaactggaccc

SEQ ID NO: 5787505 - DNA, 25 bp, Homo sapien
acacagagtgcgaacgttaacctag

SEQ ID NO: 5787506 - DNA, 25 bp, Homo sapien
cactgaaccgcagcaggaaggtccc

SEQ ID NO: 5787507 - DNA, 25 bp, Homo sapien
tgctgtagcaagaagttattctcca

SEQ ID NO: 5787508 - DNA, 25 bp, Homo sapien
ttctctgttctgcaaggttttgcat

SEQ ID NO: 5787509 - DNA, 25 bp, Homo sapien
cacaaacgagctctgaatgagctgc

SEQ ID NO: 5787510 - DNA, 25 bp, Homo sapien
tattttccttacaaaacctcgtcca

SEQ ID NO: 5787511 - DNA, 25 bp, Homo sapien
caccagcatgttgtaccaaaggatg

SEQ ID NO: 5787512 - DNA, 25 bp, Homo sapien
acagaagaaaactgccaactcagca

SEQ ID NO: 5787513 - DNA, 25 bp, Homo sapien
acgggcagagaggtcgtctcgaggt

SEQ ID NO: 5787514 - DNA, 25 bp, Homo sapien
gaattttgagtcaagctgctgaagt

SEQ ID NO: 5787515 - DNA, 25 bp, Homo sapien
tcctttctcttattgtcaagcatta

SEQ ID NO: 5787516 - DNA, 25 bp, Homo sapien
tggtctcgtgttctctgttctgcaa

SEQ ID NO: 5787517 - DNA, 25 bp, Homo sapien
ttatgttatgctgtagcaagaagtt

SEQ ID NO: 5787518 - DNA, 25 bp, Homo sapien
agaagttattctccaaagaaaagcg

SEQ ID NO: 5787519 - DNA, 25 bp, Homo sapien
ttaacctagacagctctcgaggatg

SEQ ID NO: 5787520 - DNA, 25 bp, Homo sapien
tctttatcaaataagactttgactt

SEQ ID NO: 5787521 - DNA, 25 bp, Homo sapien
gttccattggctctggtgcttcctt

SEQ ID NO: 5787522 - DNA, 25 bp, Homo sapien
ccaattcctccaactttttaagctg

SEQ ID NO: 5787523 - DNA, 25 bp, Homo sapien
aacgttaacctagacagctctcgag

SEQ ID NO: 5787524 - DNA, 25 bp, Homo sapien
cgatgagaggaccctcattcgttct

SEQ ID NO: 5787525 - DNA, 25 bp, Homo sapien
gaatattccccgactgagcctgatt

SEQ ID NO: 5787526 - DNA, 25 bp, Homo sapien
ctattattttgtgaactacttcctt

SEQ ID NO: 5787527 - DNA, 25 bp, Homo sapien
gtgttcacttacacttcagacacag

SEQ ID NO: 5787528 - DNA, 25 bp, Homo sapien
agagaggtcgtctcgaggtcaatta

SEQ ID NO: 5787529 - DNA, 25 bp, Homo sapien
tgaagtcatattcatcttgtaaatc

SEQ ID NO: 5787530 - DNA, 25 bp, Homo sapien
accttgtgccccaacaagggcctgg

SEQ ID NO: 5787531 - DNA, 25 bp, Homo sapien
ggtgcttcctttggcctggagtaat

SEQ ID NO: 5787532 - DNA, 25 bp, Homo sapien
cttttctaaccactgtgccaggtac

SEQ ID NO: 5787533 - DNA, 25 bp, Homo sapien
tgccattggtggactcctccatgtt

SEQ ID NO: 5787534 - DNA, 25 bp, Homo sapien
cggcggtgcagcctctcccgagcgc

SEQ ID NO: 5787535 - DNA, 25 bp, Homo sapien
tataattcagctcttgcaatttcac

SEQ ID NO: 5787536 - DNA, 25 bp, Homo sapien
atacacataaccttgtccttcacat

SEQ ID NO: 5787537 - DNA, 25 bp, Homo sapien
ttttttaatgagttctaggatgctt

SEQ ID NO: 5787538 - DNA, 25 bp, Homo sapien
gtaaaatacaagcatcttcaacagg

SEQ ID NO: 5787539 - DNA, 25 bp, Homo sapien
tcgttctggtgccagcatttttctg

SEQ ID NO: 5787540 - DNA, 25 bp, Homo sapien
cgttaggtgccaagactgtcgaggt

SEQ ID NO: 5787541 - DNA, 25 bp, Homo sapien
gttggagatcaccacaacgggcaga

SEQ ID NO: 5787542 - DNA, 25 bp, Homo sapien
cgcggcggtgcagcctctcccgagc

SEQ ID NO: 5787543 - DNA, 25 bp, Homo sapien
ggtcatgaaaacggatggtggcaaa

SEQ ID NO: 5787544 - DNA, 25 bp, Homo sapien
aatgctgataggcagtaacacgggg

SEQ ID NO: 5787545 - DNA, 25 bp, Homo sapien
tgtgatggcgatagcaattacaatg

SEQ ID NO: 5787546 - DNA, 25 bp, Homo sapien
caagcatcttcaacaggccccagcc

SEQ ID NO: 5787547 - DNA, 25 bp, Homo sapien
gatgtcagggaaagtaacagcagaa

SEQ ID NO: 5787548 - DNA, 25 bp, Homo sapien
cgcagcaggaaggtccccggctgct

SEQ ID NO: 5787549 - DNA, 25 bp, Homo sapien
atcttcttgagtaacagctgttctt

SEQ ID NO: 5787550 - DNA, 25 bp, Homo sapien
cacgctctcgctccttgctgatgaa

SEQ ID NO: 5787551 - DNA, 25 bp, Homo sapien
cctttagggccatcaagttccattg

SEQ ID NO: 5787552 - DNA, 25 bp, Homo sapien
aagactgaaggtgcggtcccataac

SEQ ID NO: 5787553 - DNA, 25 bp, Homo sapien
tcaatatttggatacagatacttca

SEQ ID NO: 5787554 - DNA, 25 bp, Homo sapien
tggtccttcaacagggcacgctctc

SEQ ID NO: 5787555 - DNA, 25 bp, Homo sapien
tctgatcactctttgccacaccatt

SEQ ID NO: 5787556 - DNA, 25 bp, Homo sapien
caaaccaggctggcacaattgggtt

SEQ ID NO: 5787557 - DNA, 25 bp, Homo sapien
tccacccatgtgaatgtgatggccc

SEQ ID NO: 5787558 - DNA, 25 bp, Homo sapien
atacaggcgctctgctgtctccgct

SEQ ID NO: 5787559 - DNA, 25 bp, Homo sapien
aaataagactttgactttcaaatta

SEQ ID NO: 5787560 - DNA, 25 bp, Homo sapien
gcaggaaggtccccggctgctggtc

SEQ ID NO: 5787561 - DNA, 25 bp, Homo sapien
ggtaagttcagtgacattcagcaac

SEQ ID NO: 5787562 - DNA, 25 bp, Homo sapien
tgctgtctccgcttccactccacta

SEQ ID NO: 5787563 - DNA, 25 bp, Homo sapien
tctgggcgttttccagaattttcct

SEQ ID NO: 5787564 - DNA, 25 bp, Homo sapien
tttatcaaataagactttgactttc

SEQ ID NO: 5787565 - DNA, 25 bp, Homo sapien
gttatgctgtagcaagaagttattc

SEQ ID NO: 5787566 - DNA, 25 bp, Homo sapien
gggctaggcgggggcgcggcggtgc

SEQ ID NO: 5787567 - DNA, 25 bp, Homo sapien
aggtcgtctcgaggtcaattaccaa

SEQ ID NO: 5787568 - DNA, 25 bp, Homo sapien
ctctatacacataaccttgtccttc

SEQ ID NO: 5787569 - DNA, 25 bp, Homo sapien
ttgcttttccttatgttatgctgta

SEQ ID NO: 5787570 - DNA, 25 bp, Homo sapien
acagctgtaaatgatcatagacatc

SEQ ID NO: 5787571 - DNA, 25 bp, Homo sapien
tccttcagacagctgtaaatgatca

SEQ ID NO: 5787572 - DNA, 25 bp, Homo sapien
tgggtaagttcagtgacattcagca

SEQ ID NO: 5787573 - DNA, 25 bp, Homo sapien
ctgtctccgcttccactccactagt

SEQ ID NO: 5787574 - DNA, 25 bp, Homo sapien
ggtgacagaagaaaactgccaactc

SEQ ID NO: 5787575 - DNA, 25 bp, Homo sapien
agcacgttaggtgccaagactgtcg

SEQ ID NO: 5787576 - DNA, 25 bp, Homo sapien
ggctcttgatttcatgctctataca

SEQ ID NO: 5787577 - DNA, 25 bp, Homo sapien
tcattggcagcgtgctcccagtctt

SEQ ID NO: 5787578 - DNA, 25 bp, Homo sapien
ggtgcagccgagcccctccgcagac

SEQ ID NO: 5787579 - DNA, 25 bp, Homo sapien
ccgcagactctgcgcaggaaagcga

SEQ ID NO: 5787580 - DNA, 25 bp, Homo sapien
caggttcgcctccgttctgggaccg

SEQ ID NO: 5787581 - DNA, 25 bp, Homo sapien
acggatggtggcaaatgaaacatca

SEQ ID NO: 5787582 - DNA, 25 bp, Homo sapien
catctttatcaaataagactttgac

SEQ ID NO: 5787583 - DNA, 25 bp, Homo sapien
atgcagggctgtctttccaccacaa

SEQ ID NO: 5787584 - DNA, 25 bp, Homo sapien
aaattataattcagctcttgcaatt

SEQ ID NO: 5787585 - DNA, 25 bp, Homo sapien
gcacttctgaaagctgagcccatcg

SEQ ID NO: 5787586 - DNA, 25 bp, Homo sapien
aaactgccaactcagcacttctgaa

SEQ ID NO: 5787587 - DNA, 25 bp, Homo sapien
aactcagtcttgatatatccagttc

SEQ ID NO: 5787588 - DNA, 25 bp, Homo sapien
tgatggccccttcccgggagctctc

SEQ ID NO: 5787589 - DNA, 25 bp, Homo sapien
aatcaactcagtcttgatatatcca

SEQ ID NO: 5787590 - DNA, 25 bp, Homo sapien
actccactagttcatcattaatcag

SEQ ID NO: 5787591 - DNA, 25 bp, Homo sapien
ccctccgcagactctgcgcaggaaa

SEQ ID NO: 5787592 - DNA, 25 bp, Homo sapien
aggcatggtctttgtcaatatttgg

SEQ ID NO: 5787593 - DNA, 25 bp, Homo sapien
ctggggattcaaccaaaggagcagc

SEQ ID NO: 5787594 - DNA, 25 bp, Homo sapien
tcactgtgctctgaatattccccga

SEQ ID NO: 5787595 - DNA, 25 bp, Homo sapien
ggttcgcctccgttctgggaccgct

SEQ ID NO: 5787596 - DNA, 25 bp, Homo sapien
acgcttgcttttccttatgttatgc

SEQ ID NO: 5787597 - DNA, 25 bp, Homo sapien
ctcaggaatattctcagcagccatg

SEQ ID NO: 5787598 - DNA, 25 bp, Homo sapien
ctccgcttccactccactagttcat

SEQ ID NO: 5787599 - DNA, 25 bp, Homo sapien
aggtgccaagactgtcgaggttata

SEQ ID NO: 5787600 - DNA, 25 bp, Homo sapien
cagtctcaacttcacagtgaactgg

SEQ ID NO: 5787601 - DNA, 25 bp, Homo sapien
ctcagtcttgatatatccagttcct

SEQ ID NO: 5787602 - DNA, 25 bp, Homo sapien
cccaaaatgttgaacttcctaaatc

SEQ ID NO: 5787603 - DNA, 25 bp, Homo sapien
ttcgcctccgttctgggaccgctcc

SEQ ID NO: 5787604 - DNA, 25 bp, Homo sapien
ctccgcaactatagtgaaccagttc

SEQ ID NO: 5787605 - DNA, 25 bp, Homo sapien
ctggggtctgccaggcgcgatcccc

SEQ ID NO: 5787606 - DNA, 25 bp, Homo sapien
tgcagccgagcccctccgcagactc

SEQ ID NO: 5787607 - DNA, 25 bp, Homo sapien
cacggggatctcaacaagttcagct

SEQ ID NO: 5787608 - DNA, 25 bp, Homo sapien
gagaccatcggggctggcgttagga

SEQ ID NO: 5787609 - DNA, 25 bp, Homo sapien
cctccgttctgggaccgctccaccc

SEQ ID NO: 5787610 - DNA, 25 bp, Homo sapien
tgggcggccccccaatacaggcgct

SEQ ID NO: 5787611 - DNA, 25 bp, Homo sapien
gccaccagcatgttgtaccaaagga

SEQ ID NO: 5787612 - DNA, 25 bp, Homo sapien
attcagctcttgcaatttcaccaac

SEQ ID NO: 5787613 - DNA, 25 bp, Homo sapien
cctgaaaattatcctgaagattacg

SEQ ID NO: 5787614 - DNA, 25 bp, Homo sapien
tctctgggcgttttccagaattttc

SEQ ID NO: 5787615 - DNA, 25 bp, Homo sapien
tgcagactctccgcaactatagtga

SEQ ID NO: 5787616 - DNA, 25 bp, Homo sapien
ttgtctaacatcactgtgctctgaa

SEQ ID NO: 5787617 - DNA, 25 bp, Homo sapien
gccgccagactgccattggtggact

SEQ ID NO: 5787618 - DNA, 25 bp, Homo sapien
ttcgtaccactgagacatcctgcca

SEQ ID NO: 5787619 - DNA, 25 bp, Homo sapien
cagctctcgaggatggcatacagca

SEQ ID NO: 5787620 - DNA, 25 bp, Homo sapien
catgatgcacccatcattccagaga

SEQ ID NO: 5787621 - DNA, 25 bp, Homo sapien
tcctccatgttcatcacttttgtgt

SEQ ID NO: 5787622 - DNA, 25 bp, Homo sapien
gcccaaccgctcgggagctggctga

SEQ ID NO: 5787623 - DNA, 25 bp, Homo sapien
tccacattgagacctcttttggtga

SEQ ID NO: 5787624 - DNA, 25 bp, Homo sapien
cacatttctgactttactgtcaagc

SEQ ID NO: 5787625 - DNA, 25 bp, Homo sapien
ttctccaaagaaaagcgactatatt

SEQ ID NO: 5787626 - DNA, 25 bp, Homo sapien
gaaaactgccaactcagcacttctg

SEQ ID NO: 5787627 - DNA, 25 bp, Homo sapien
cgctctcgctccttgctgatgaagc

SEQ ID NO: 5787628 - DNA, 25 bp, Homo sapien
tctgttccaattcctccaacttttt

SEQ ID NO: 5787629 - DNA, 25 bp, Homo sapien
acacttcagacacagaaatcaactc

SEQ ID NO: 5787630 - DNA, 25 bp, Homo sapien
acatcctgccaccttgtgccccaac

SEQ ID NO: 5787631 - DNA, 25 bp, Homo sapien
tagtaaaatgctgataggcagtaac

SEQ ID NO: 5787632 - DNA, 25 bp, Homo sapien
ttcgtgtagggttcaaccgcatgga

SEQ ID NO: 5787633 - DNA, 25 bp, Homo sapien
tgagcccatcgtgcacatggtggag

SEQ ID NO: 5787634 - DNA, 25 bp, Homo sapien
agttctgcagctgatccaagcaagc

SEQ ID NO: 5787635 - DNA, 25 bp, Homo sapien
catcgtgcacatggtggagtcagga

SEQ ID NO: 5787636 - DNA, 25 bp, Homo sapien
agcattaaatacatcttcttgagta

SEQ ID NO: 5787637 - DNA, 25 bp, Homo sapien
agcaaggctggcttgaggtttgtaa

SEQ ID NO: 5787638 - DNA, 25 bp, Homo sapien
gaatgatgtcagggaaagtaacagc

SEQ ID NO: 5787639 - DNA, 25 bp, Homo sapien
tttctgatcactctttgccacacca

SEQ ID NO: 5787640 - DNA, 25 bp, Homo sapien
catgtgaatgtgatggccccttccc

SEQ ID NO: 5787641 - DNA, 25 bp, Homo sapien
tgttcgtaggtgtatttctgttcca

SEQ ID NO: 5787642 - DNA, 25 bp, Homo sapien
aaaactgtcatcataaagctggtga

SEQ ID NO: 5787643 - DNA, 25 bp, Homo sapien
ctttccaccacaaacgagctctgaa

SEQ ID NO: 5787644 - DNA, 25 bp, Homo sapien
gctaggcgggggcgcggcggtgcag

SEQ ID NO: 5787645 - DNA, 25 bp, Homo sapien
agaggtcgtctcgaggtcaattacc

SEQ ID NO: 5787646 - DNA, 25 bp, Homo sapien
cggcctctgagggtgcgttggcatg

SEQ ID NO: 5787647 - DNA, 25 bp, Homo sapien
aatctctgggcgttttccagaattt

SEQ ID NO: 5787648 - DNA, 25 bp, Homo sapien
agctctttctgtttgtctaacatca

SEQ ID NO: 5787649 - DNA, 25 bp, Homo sapien
catattcatcttgtaaatcttccag

SEQ ID NO: 5787650 - DNA, 25 bp, Homo sapien
catacagcaaatgaaacttttctgc

SEQ ID NO: 5787651 - DNA, 25 bp, Homo sapien
gaggtcaattaccaaaccaggctgg

SEQ ID NO: 5787652 - DNA, 25 bp, Homo sapien
ttctgtgttcacttacacttcagac

SEQ ID NO: 5787653 - DNA, 25 bp, Homo sapien
actgtgctctgaatattccccgact

SEQ ID NO: 5787654 - DNA, 25 bp, Homo sapien
acacttgtttgttttttgtgatagg

SEQ ID NO: 5787655 - DNA, 25 bp, Homo sapien
ttcacatctttatcaaataagactt

SEQ ID NO: 5787656 - DNA, 25 bp, Homo sapien
aaagtagtaaaatgctgataggcag

SEQ ID NO: 5787657 - DNA, 25 bp, Homo sapien
atcggggctggcgttaggaccaaga

SEQ ID NO: 5787658 - DNA, 25 bp, Homo sapien
tgacagaagaaaactgccaactcag

SEQ ID NO: 5787659 - DNA, 25 bp, Homo sapien
cctgaagattacgcttgcttttcct

SEQ ID NO: 5787660 - DNA, 25 bp, Homo sapien
tgtcactcttctgtgttcacttaca

SEQ ID NO: 5787661 - DNA, 25 bp, Homo sapien
tggacccctgtcttcaagaccagcg

SEQ ID NO: 5787662 - DNA, 25 bp, Homo sapien
acttacacttcagacacagaaatca

SEQ ID NO: 5787663 - DNA, 25 bp, Homo sapien
taacagcagaaagttctttcttcgt

SEQ ID NO: 5787664 - DNA, 25 bp, Homo sapien
ggctgtctttccaccacaaacgagc

SEQ ID NO: 5787665 - DNA, 25 bp, Homo sapien
tgattaaatctctgggcgttttcca

SEQ ID NO: 5787666 - DNA, 25 bp, Homo sapien
tgcaggtgccgaaattcagccgcca

SEQ ID NO: 5787667 - DNA, 25 bp, Homo sapien
ggccccttcccgggagctctcactg

SEQ ID NO: 5787668 - DNA, 25 bp, Homo sapien
aaacctcgtccacggaatgagacca

SEQ ID NO: 5787669 - DNA, 25 bp, Homo sapien
ccgaaattcagccgccagactgcca

SEQ ID NO: 5787670 - DNA, 25 bp, Homo sapien
atcattccagagagggagcaggtgt

SEQ ID NO: 5787671 - DNA, 25 bp, Homo sapien
caaaatgttgaacttcctaaatcct

SEQ ID NO: 5787672 - DNA, 25 bp, Homo sapien
gcgttaggaccaagaagcttctctc

SEQ ID NO: 5787673 - DNA, 25 bp, Homo sapien
gagacctcttttggtgacagaagaa

SEQ ID NO: 5787674 - DNA, 25 bp, Homo sapien
cctccaactttttaagctgctgccg

SEQ ID NO: 5787675 - DNA, 25 bp, Homo sapien
actgagcctgattaaatctctgggc

SEQ ID NO: 5787676 - DNA, 25 bp, Homo sapien
cagatacttcaggggattctcagga

SEQ ID NO: 5787677 - DNA, 25 bp, Homo sapien
tactgtcaagctctttctgtttgtc

SEQ ID NO: 5787678 - DNA, 25 bp, Homo sapien
tggcgttaggaccaagaagcttctc

SEQ ID NO: 5787679 - DNA, 25 bp, Homo sapien
gagggtgcgttggcatgcagggctg

SEQ ID NO: 5787680 - DNA, 25 bp, Homo sapien
tccaactttttaagctgctgccgaa

SEQ ID NO: 5787681 - DNA, 25 bp, Homo sapien
atcctgaagattacgcttgcttttc

SEQ ID NO: 5787682 - DNA, 25 bp, Homo sapien
tgcttcctttggcctggagtaatac

SEQ ID NO: 5787683 - DNA, 25 bp, Homo sapien
cattgagacctcttttggtgacaga

SEQ ID NO: 5787684 - DNA, 25 bp, Homo sapien
aggccccagccaggagcaaggctgg

SEQ ID NO: 5787685 - DNA, 25 bp, Homo sapien
gtagcaagaagttattctccaaaga

SEQ ID NO: 5787686 - DNA, 25 bp, Homo sapien
tgtgccccaacaagggcctggggat

SEQ ID NO: 5787687 - DNA, 25 bp, Homo sapien
ctctcccgagcgcgctgggtcgcct

SEQ ID NO: 5787688 - DNA, 25 bp, Homo sapien
acttctgaaagctgagcccatcgtg

SEQ ID NO: 5787689 - DNA, 25 bp, Homo sapien
attttcctttcttccttcagacagc

SEQ ID NO: 5787690 - DNA, 25 bp, Homo sapien
gaatgagctgctggaaaagactgaa

SEQ ID NO: 5787691 - DNA, 25 bp, Homo sapien
tgctcccagtcttgcttttctaacc

SEQ ID NO: 5787692 - DNA, 25 bp, Homo sapien
gtaatactttccaaaggcatggtct

SEQ ID NO: 5787693 - DNA, 25 bp, Homo sapien
gggattctcaggaatattctcagca

SEQ ID NO: 5787694 - DNA, 25 bp, Homo sapien
gttcatcacttttgtgtgcgtgccc

SEQ ID NO: 5787695 - DNA, 25 bp, Homo sapien
atattccccgactgagcctgattaa

SEQ ID NO: 5787696 - DNA, 25 bp, Homo sapien
gaccgctccacccatgtgaatgtga

SEQ ID NO: 5787697 - DNA, 25 bp, Homo sapien
ctatattgatcatccagctgtgaca

SEQ ID NO: 5787698 - DNA, 25 bp, Homo sapien
tgggaaaactgtcatcataaagctg

SEQ ID NO: 5787699 - DNA, 25 bp, Homo sapien
cacaccattggtctcgtgttctctg

SEQ ID NO: 5787700 - DNA, 25 bp, Homo sapien
agcaagcattgggcggccccccaat

SEQ ID NO: 5787701 - DNA, 25 bp, Homo sapien
tgaagctcttcagtaacgatgagag

SEQ ID NO: 5787702 - DNA, 25 bp, Homo sapien
ttttttgtgatagggtcatgttcgt

SEQ ID NO: 5787703 - DNA, 25 bp, Homo sapien
agtaacagcagaaagttctttcttc

SEQ ID NO: 5787704 - DNA, 25 bp, Homo sapien
ggattgggtcttcctgaaaattatc

SEQ ID NO: 5787705 - DNA, 25 bp, Homo sapien
attattttgtgaactacttcctttc

SEQ ID NO: 5787706 - DNA, 25 bp, Homo sapien
gtcaagcattaaatacatcttcttg

SEQ ID NO: 5787707 - DNA, 25 bp, Homo sapien
gacattcagcaactctattattttg

SEQ ID NO: 5787708 - DNA, 25 bp, Homo sapien
caggctcttgatttcatgctctata

SEQ ID NO: 5787709 - DNA, 25 bp, Homo sapien
tgctctgaatattccccgactgagc

SEQ ID NO: 5787710 - DNA, 25 bp, Homo sapien
gggagctggctgacgttggagatca

SEQ ID NO: 5787711 - DNA, 25 bp, Homo sapien
gatacagatacttcaggggattctc

SEQ ID NO: 5787712 - DNA, 25 bp, Homo sapien
agcaggtgttttttaatgagttcta

SEQ ID NO: 5787713 - DNA, 25 bp, Homo sapien
tgccaggcgcgatccccccggtgca

SEQ ID NO: 5787714 - DNA, 25 bp, Homo sapien
ggaaaagtaaaatacaagcatcttc

SEQ ID NO: 5787715 - DNA, 25 bp, Homo sapien
gacagattcctgggttccgccacca

SEQ ID NO: 5787716 - DNA, 25 bp, Homo sapien
gttctggtgccagcatttttctgtt

SEQ ID NO: 5787717 - DNA, 25 bp, Homo sapien
gcattgggcggccccccaatacagg

SEQ ID NO: 5787718 - DNA, 25 bp, Homo sapien
ttctgtttgtctaacatcactgtgc

SEQ ID NO: 5787719 - DNA, 25 bp, Homo sapien
acatcttcttgagtaacagctgttc

SEQ ID NO: 5787720 - DNA, 25 bp, Homo sapien
aacaagggcctggggattcaaccaa

SEQ ID NO: 5787721 - DNA, 25 bp, Homo sapien
cccgactgagcctgattaaatctct

SEQ ID NO: 5787722 - DNA, 25 bp, Homo sapien
tacttcctttctcttattgtcaagc

SEQ ID NO: 5787723 - DNA, 25 bp, Homo sapien
atcttccaggctcttgatttcatgc

SEQ ID NO: 5787724 - DNA, 25 bp, Homo sapien
ccttatgttatgctgtagcaagaag

SEQ ID NO: 5787725 - DNA, 25 bp, Homo sapien
tgaatgtgatggccccttcccggga

SEQ ID NO: 5787726 - DNA, 25 bp, Homo sapien
actttactgtcaagctctttctgtt

SEQ ID NO: 5787727 - DNA, 25 bp, Homo sapien
ttggtgacagaagaaaactgccaac

SEQ ID NO: 5787728 - DNA, 25 bp, Homo sapien
gaagcccatgatgcacccatcattc

SEQ ID NO: 5787729 - DNA, 25 bp, Homo sapien
ggtggcaaatgaaacatcattggca

SEQ ID NO: 5787730 - DNA, 25 bp, Homo sapien
ctgggaccgctccacccatgtgaat

SEQ ID NO: 5787731 - DNA, 25 bp, Homo sapien
tccggaagggctaggcgggggcgcg

SEQ ID NO: 5787732 - DNA, 25 bp, Homo sapien
tattctccaaagaaaagcgactata

SEQ ID NO: 5787733 - DNA, 25 bp, Homo sapien
ctgaatgagctgctggaaaagactg

SEQ ID NO: 5787734 - DNA, 25 bp, Homo sapien
gaccatcggggctggcgttaggacc

SEQ ID NO: 5787735 - DNA, 25 bp, Homo sapien
cttgcttttctaaccactgtgccag

SEQ ID NO: 5787736 - DNA, 25 bp, Homo sapien
gagaggaccctcattcgttctggtg

SEQ ID NO: 5787737 - DNA, 25 bp, Homo sapien
aaaatacaagcatcttcaacaggcc

SEQ ID NO: 5787738 - DNA, 25 bp, Homo sapien
ttctgaaagctgagcccatcgtgca

SEQ ID NO: 5787739 - DNA, 25 bp, Homo sapien
tgactttcaaattataattcagctc

SEQ ID NO: 5787740 - DNA, 25 bp, Homo sapien
tgctctatacacataaccttgtcct

SEQ ID NO: 5787741 - DNA, 25 bp, Homo sapien
tccttacaaaacctcgtccacggaa

SEQ ID NO: 5787742 - DNA, 25 bp, Homo sapien
ccccggctgctggtccttcaacagg

SEQ ID NO: 5787743 - DNA, 25 bp, Homo sapien
cttcaggggattctcaggaatattc

SEQ ID NO: 5787744 - DNA, 25 bp, Homo sapien
cttgatttcatgctctatacacata

SEQ ID NO: 5787745 - DNA, 25 bp, Homo sapien
gatacttcaggggattctcaggaat

SEQ ID NO: 5787746 - DNA, 25 bp, Homo sapien
cccaacatgttcagctggtccacat

SEQ ID NO: 5787747 - DNA, 25 bp, Homo sapien
tgcttttctaaccactgtgccaggt

SEQ ID NO: 5787748 - DNA, 25 bp, Homo sapien
agggagtgaagctcttcagtaacga

SEQ ID NO: 5787749 - DNA, 25 bp, Homo sapien
gatcatagacatctggattgggtct

SEQ ID NO: 5787750 - DNA, 25 bp, Homo sapien
tgagttctaggatgctttcaatcca

SEQ ID NO: 5787751 - DNA, 25 bp, Homo sapien
aggaattttgagtcaagctgctgaa

SEQ ID NO: 5787752 - DNA, 25 bp, Homo sapien
ttgtaaatcttccaggctcttgatt

SEQ ID NO: 5787753 - DNA, 25 bp, Homo sapien
ccttgtccttcacatttctgacttt

SEQ ID NO: 5787754 - DNA, 25 bp, Homo sapien
aattcagccgccagactgccattgg

SEQ ID NO: 5787755 - DNA, 25 bp, Homo sapien
cagtgaactggacccctgtcttcaa

SEQ ID NO: 5787756 - DNA, 25 bp, Homo sapien
ctcgctccttgctgatgaagcccat

SEQ ID NO: 5787757 - DNA, 25 bp, Homo sapien
gtgacattcagcaactctattattt

SEQ ID NO: 5787758 - DNA, 25 bp, Homo sapien
gaaagctgagcccatcgtgcacatg

SEQ ID NO: 5787759 - DNA, 25 bp, Homo sapien
ctgctgccgaacttgctgcagactc

SEQ ID NO: 5787760 - DNA, 25 bp, Homo sapien
tcattaatcagggcattctgggtaa

SEQ ID NO: 5787761 - DNA, 25 bp, Homo sapien
acaggaggtcatgaaaacggatggt

SEQ ID NO: 5787762 - DNA, 25 bp, Homo sapien
atgaagcccatgatgcacccatcat

SEQ ID NO: 5787763 - DNA, 25 bp, Homo sapien
ctgataggcagtaacacggggatct

SEQ ID NO: 5787764 - DNA, 25 bp, Homo sapien
aaatacatcttcttgagtaacagct

SEQ ID NO: 5787765 - DNA, 25 bp, Homo sapien
gaagttcgtaccactgagacatcct

SEQ ID NO: 5787766 - DNA, 25 bp, Homo sapien
tgacaggaggtcatgaaaacggatg

SEQ ID NO: 5787767 - DNA, 25 bp, Homo sapien
caaaactaagggagtgaagctcttc

SEQ ID NO: 5787768 - DNA, 25 bp, Homo sapien
ggaccctcattcgttctggtgccag

SEQ ID NO: 5787769 - DNA, 25 bp, Homo sapien
aaccaaaggagcagctacgcacagc

SEQ ID NO: 5787770 - DNA, 25 bp, Homo sapien
gcgctctgctgtctccgcttccact

SEQ ID NO: 5787771 - DNA, 25 bp, Homo sapien
ttccactccactagttcatcattaa

SEQ ID NO: 5787772 - DNA, 25 bp, Homo sapien
cctcttttggtgacagaagaaaact

SEQ ID NO: 5787773 - DNA, 25 bp, Homo sapien
ctatacacataaccttgtccttcac

SEQ ID NO: 5787774 - DNA, 25 bp, Homo sapien
ggtgcagcctctcccgagcgcgctg

SEQ ID NO: 5787775 - DNA, 25 bp, Homo sapien
acatgttcagctggtccacattgag

SEQ ID NO: 5787776 - DNA, 25 bp, Homo sapien
aactgtcatcataaagctggtgaac

SEQ ID NO: 5787777 - DNA, 25 bp, Homo sapien
gtaaatgatcatagacatctggatt

SEQ ID NO: 5787778 - DNA, 25 bp, Homo sapien
ctgcagctgatccaagcaagcattg

SEQ ID NO: 5787779 - DNA, 25 bp, Homo sapien
acagcagaaagttctttcttcgtgt

SEQ ID NO: 5787780 - DNA, 25 bp, Homo sapien
cggaatgagaccatcggggctggcg

SEQ ID NO: 5787781 - DNA, 25 bp, Homo sapien
ccgctcgggagctggctgacgttgg

SEQ ID NO: 5787782 - DNA, 25 bp, Homo sapien
ttgctgatgaagcccatgatgcacc

SEQ ID NO: 5787783 - DNA, 25 bp, Homo sapien
gggatctcaacaagttcagctgtga

SEQ ID NO: 5787784 - DNA, 25 bp, Homo sapien
atcactctttgccacaccattggtc

SEQ ID NO: 5787785 - DNA, 25 bp, Homo sapien
caccattggtctcgtgttctctgtt

SEQ ID NO: 5787786 - DNA, 25 bp, Homo sapien
cgactgagcctgattaaatctctgg

SEQ ID NO: 5787787 - DNA, 25 bp, Homo sapien
tcaactcagtcttgatatatccagt

SEQ ID NO: 5787788 - DNA, 25 bp, Homo sapien
aacctgctccaggaattttgagtca

SEQ ID NO: 5787789 - DNA, 25 bp, Homo sapien
ttaggtgccaagactgtcgaggtta

SEQ ID NO: 5787790 - DNA, 25 bp, Homo sapien
cgtgtagggttcaaccgcatggaag

SEQ ID NO: 5787791 - DNA, 25 bp, Homo sapien
agggcacgctctcgctccttgctga

SEQ ID NO: 5787792 - DNA, 25 bp, Homo sapien
tagggccatcaagttccattggctc

SEQ ID NO: 5787793 - DNA, 25 bp, Homo sapien
tgaacctgctccaggaattttgagt

SEQ ID NO: 5787794 - DNA, 25 bp, Homo sapien
ccagcggcctctgagggtgcgttgg

SEQ ID NO: 5787795 - DNA, 25 bp, Homo sapien
catccagctgtgacaggaggtcatg

SEQ ID NO: 5787796 - DNA, 25 bp, Homo sapien
acaggcgctctgctgtctccgcttc

SEQ ID NO: 5787797 - DNA, 25 bp, Homo sapien
gcttgaggtttgtaaacatgtcact

SEQ ID NO: 5787798 - DNA, 25 bp, Homo sapien
agcatttttctgttctttcaattgc

SEQ ID NO: 5787799 - DNA, 25 bp, Homo sapien
aagctgagcccatcgtgcacatggt

SEQ ID NO: 5787800 - DNA, 25 bp, Homo sapien
atttcaccaacagtctcaacttcac

SEQ ID NO: 5787801 - DNA, 25 bp, Homo sapien
tatttggatacagatacttcagggg

SEQ ID NO: 5787802 - DNA, 25 bp, Homo sapien
atatacacagagtgcgaacgttaac

SEQ ID NO: 5787803 - DNA, 25 bp, Homo sapien
cctggagtaatactttccaaaggca

SEQ ID NO: 5787804 - DNA, 25 bp, Homo sapien
agttcagctgtgatggcgatagcaa

SEQ ID NO: 5787805 - DNA, 25 bp, Homo sapien
tacagcaaatgaaacttttctgcgc

SEQ ID NO: 5787806 - DNA, 25 bp, Homo sapien
atggcgatagcaattacaatggaaa

SEQ ID NO: 5787807 - DNA, 25 bp, Homo sapien
gactctccgcaactatagtgaacca

SEQ ID NO: 5787808 - DNA, 25 bp, Homo sapien
tattgtcaagcattaaatacatctt

SEQ ID NO: 5787809 - DNA, 25 bp, Homo sapien
agagagggagcaggtgttttttaat

SEQ ID NO: 5787810 - DNA, 25 bp, Homo sapien
tggagtcaggaagaaggacagattc

SEQ ID NO: 5787811 - DNA, 25 bp, Homo sapien
gttaggaccaagaagcttctctccc

SEQ ID NO: 5787812 - DNA, 25 bp, Homo sapien
atagcaattacaatggaaaagtaaa

SEQ ID NO: 5787813 - DNA, 25 bp, Homo sapien
ctagttcatcattaatcagggcatt

SEQ ID NO: 5787814 - DNA, 25 bp, Homo sapien
agcccatcgtgcacatggtggagtc

SEQ ID NO: 5787815 - DNA, 25 bp, Homo sapien
cagacacagaaatcaactcagtctt

SEQ ID NO: 5787816 - DNA, 25 bp, Homo sapien
cccatgtgaatgtgatggccccttc

SEQ ID NO: 5787817 - DNA, 25 bp, Homo sapien
cgcctccgttctgggaccgctccac

SEQ ID NO: 5787818 - DNA, 25 bp, Homo sapien
cgatagcaattacaatggaaaagta

SEQ ID NO: 5787819 - DNA, 25 bp, Homo sapien
caagctctttctgtttgtctaacat

SEQ ID NO: 5787820 - DNA, 25 bp, Homo sapien
ggttccgccaccagcatgttgtacc

SEQ ID NO: 5787821 - DNA, 25 bp, Homo sapien
atcatccagctgtgacaggaggtca

SEQ ID NO: 5787822 - DNA, 25 bp, Homo sapien
tgccgaaattcagccgccagactgc

SEQ ID NO: 5787823 - DNA, 25 bp, Homo sapien
ttcatgctctatacacataaccttg

SEQ ID NO: 5787824 - DNA, 25 bp, Homo sapien
agggctgtctttccaccacaaacga

SEQ ID NO: 5787825 - DNA, 25 bp, Homo sapien
aaactaagggagtgaagctcttcag

SEQ ID NO: 5787826 - DNA, 25 bp, Homo sapien
cgagctctgaatgagctgctggaaa

SEQ ID NO: 5787827 - DNA, 25 bp, Homo sapien
cacccatgtgaatgtgatggcccct

SEQ ID NO: 5787828 - DNA, 25 bp, Homo sapien
cagaaagttctttcttcgtgtaggg

SEQ ID NO: 5787829 - DNA, 25 bp, Homo sapien
ctcggtctggggtctgccaggcgcg

SEQ ID NO: 5787830 - DNA, 25 bp, Homo sapien
ttcacagtgaactggacccctgtct

SEQ ID NO: 5787831 - DNA, 25 bp, Homo sapien
gatccggaagggctaggcgggggcg

SEQ ID NO: 5787832 - DNA, 25 bp, Homo sapien
ctgttctgcaaggttttgcatttga

SEQ ID NO: 5787833 - DNA, 25 bp, Homo sapien
ctttgccacaccattggtctcgtgt

SEQ ID NO: 5787834 - DNA, 25 bp, Homo sapien
catgtcactcttctgtgttcactta

SEQ ID NO: 5787835 - DNA, 25 bp, Homo sapien
tcacttacacttcagacacagaaat

SEQ ID NO: 5787836 - DNA, 25 bp, Homo sapien
cttgatatatccagttcctttaggg

SEQ ID NO: 5787837 - DNA, 25 bp, Homo sapien
tccagctgtgacaggaggtcatgaa

SEQ ID NO: 5787838 - DNA, 25 bp, Homo sapien
tagggtcatgttcgtaggtgtattt

SEQ ID NO: 5787839 - DNA, 25 bp, Homo sapien
tcgtgcacatggtggagtcaggaag

SEQ ID NO: 5787840 - DNA, 25 bp, Homo sapien
gttcacttacacttcagacacagaa

SEQ ID NO: 5787841 - DNA, 25 bp, Homo sapien
ggagcaaggctggcttgaggtttgt

SEQ ID NO: 5787842 - DNA, 25 bp, Homo sapien
ttccaattcctccaactttttaagc

SEQ ID NO: 5787843 - DNA, 25 bp, Homo sapien
cagccaggagcaaggctggcttgag

SEQ ID NO: 5787844 - DNA, 25 bp, Homo sapien
tttttctgttctttcaattgcaggt

SEQ ID NO: 5787845 - DNA, 25 bp, Homo sapien
gcagctacgcacagcacgttaggtg

SEQ ID NO: 5787846 - DNA, 25 bp, Homo sapien
tgatgaagcccatgatgcacccatc

SEQ ID NO: 5787847 - DNA, 25 bp, Homo sapien
ctcccagtcttgcttttctaaccac

SEQ ID NO: 5787848 - DNA, 25 bp, Homo sapien
ttctaggatgctttcaatccaaagc

SEQ ID NO: 5787849 - DNA, 25 bp, Homo sapien
gcaactctattattttgtgaactac

SEQ ID NO: 5787850 - DNA, 25 bp, Homo sapien
ggtgtatttctgttccaattcctcc

SEQ ID NO: 5787851 - DNA, 25 bp, Homo sapien
tgagacatcctgccaccttgtgccc

SEQ ID NO: 5787852 - DNA, 25 bp, Homo sapien
ctctgttctgcaaggttttgcattt

SEQ ID NO: 5787853 - DNA, 25 bp, Homo sapien
gctctcgaggatggcatacagcaaa

SEQ ID NO: 5787854 - DNA, 25 bp, Homo sapien
ttcttccttcagacagctgtaaatg

SEQ ID NO: 5787855 - DNA, 25 bp, Homo sapien
gcagctgatccaagcaagcattggg

SEQ ID NO: 5787856 - DNA, 25 bp, Homo sapien
gcatgcagggctgtctttccaccac

SEQ ID NO: 5787857 - DNA, 25 bp, Homo sapien
tttgagtcaagctgctgaagttcgt

SEQ ID NO: 5787858 - DNA, 25 bp, Homo sapien
agctggtccacattgagacctcttt

SEQ ID NO: 5787859 - DNA, 25 bp, Homo sapien
atgttatgctgtagcaagaagttat

SEQ ID NO: 5787860 - DNA, 25 bp, Homo sapien
ttgagtaacagctgttcttgtttct

SEQ ID NO: 5787861 - DNA, 25 bp, Homo sapien
aggaggtcatgaaaacggatggtgg

SEQ ID NO: 5787862 - DNA, 25 bp, Homo sapien
gcttgcttttccttatgttatgctg

SEQ ID NO: 5787863 - DNA, 25 bp, Homo sapien
gtaattgcgaatgatgtcagggaaa

SEQ ID NO: 5787864 - DNA, 25 bp, Homo sapien
ttcctttagggccatcaagttccat

SEQ ID NO: 5787865 - DNA, 25 bp, Homo sapien
tagacagctctcgaggatggcatac

SEQ ID NO: 5787866 - DNA, 25 bp, Homo sapien
aattcctccaactttttaagctgct

SEQ ID NO: 5787867 - DNA, 25 bp, Homo sapien
agggagcaggtgttttttaatgagt

SEQ ID NO: 5787868 - DNA, 25 bp, Homo sapien
aacacggggatctcaacaagttcag

SEQ ID NO: 5787869 - DNA, 25 bp, Homo sapien
tgactttactgtcaagctctttctg

SEQ ID NO: 5787870 - DNA, 25 bp, Homo sapien
ggactcctccatgttcatcactttt

SEQ ID NO: 5787871 - DNA, 25 bp, Homo sapien
gaaattcagccgccagactgccatt

SEQ ID NO: 5787872 - DNA, 25 bp, Homo sapien
ttgcgaatgatgtcagggaaagtaa

SEQ ID NO: 5787873 - DNA, 25 bp, Homo sapien
tgcagcctctcccgagcgcgctggg

SEQ ID NO: 5787874 - DNA, 25 bp, Homo sapien
caacttcacagtgaactggacccct

SEQ ID NO: 5787875 - DNA, 25 bp, Homo sapien
tgggtttcaaaactaagggagtgaa

SEQ ID NO: 5787876 - DNA, 25 bp, Homo sapien
tcatgaaaacggatggtggcaaatg

SEQ ID NO: 5787877 - DNA, 25 bp, Homo sapien
ggtcaattaccaaaccaggctggca

SEQ ID NO: 5787878 - DNA, 25 bp, Homo sapien
ctggtccacattgagacctcttttg

SEQ ID NO: 5787879 - DNA, 25 bp, Homo sapien
ggggcgcggcggtgcagcctctccc

SEQ ID NO: 5787880 - DNA, 25 bp, Homo sapien
gagctgctggaaaagactgaaggtg

SEQ ID NO: 5787881 - DNA, 25 bp, Homo sapien
gaacttcctaaatccttttactgta

SEQ ID NO: 5787882 - DNA, 25 bp, Homo sapien
caggaatattctcagcagccatgac

SEQ ID NO: 5787883 - DNA, 25 bp, Homo sapien
ccggctgctggtccttcaacagggc

SEQ ID NO: 5787884 - DNA, 25 bp, Homo sapien
accaaaggatggaggcccaaccgct

SEQ ID NO: 5787885 - DNA, 25 bp, Homo sapien
tgcaatttcaccaacagtctcaact

SEQ ID NO: 5787886 - DNA, 25 bp, Homo sapien
ttgtcaagcattaaatacatcttct

SEQ ID NO: 5787887 - DNA, 25 bp, Homo sapien
aactcagcacttctgaaagctgagc

SEQ ID NO: 5787888 - DNA, 25 bp, Homo sapien
cagcagccatgactttgtaattgcg

SEQ ID NO: 5787889 - DNA, 25 bp, Homo sapien
caacgggcagagaggtcgtctcgag

SEQ ID NO: 5787890 - DNA, 25 bp, Homo sapien
attgggtcttcctgaaaattatcct

SEQ ID NO: 5787891 - DNA, 25 bp, Homo sapien
catcttcaacaggccccagccagga

SEQ ID NO: 5787892 - DNA, 25 bp, Homo sapien
tggcagcgtgctcccagtcttgctt

SEQ ID NO: 5787893 - DNA, 25 bp, Homo sapien
caatccaaagccagaagggaaaatt

SEQ ID NO: 5787894 - DNA, 25 bp, Homo sapien
taatcagggcattctgggtaagttc

SEQ ID NO: 5787895 - DNA, 25 bp, Homo sapien
gtaacagctgttcttgtttctgatc

SEQ ID NO: 5787896 - DNA, 25 bp, Homo sapien
ccaggctggcacaattgggtttcaa

SEQ ID NO: 5787897 - DNA, 25 bp, Homo sapien
atacacagagtgcgaacgttaacct

SEQ ID NO: 5787898 - DNA, 25 bp, Homo sapien
tgatatatccagttcctttagggcc

SEQ ID NO: 5787899 - DNA, 25 bp, Homo sapien
tacaaaacctcgtccacggaatgag

SEQ ID NO: 5787900 - DNA, 25 bp, Homo sapien
ccccttcccgggagctctcactgaa

SEQ ID NO: 5787901 - DNA, 25 bp, Homo sapien
gccccccaatacaggcgctctgctg

SEQ ID NO: 5787902 - DNA, 25 bp, Homo sapien
taaccactgtgccaggtactgtctg

SEQ ID NO: 5787903 - DNA, 25 bp, Homo sapien
attggcagcgtgctcccagtcttgc

SEQ ID NO: 5787904 - DNA, 25 bp, Homo sapien
ctgaatattccccgactgagcctga

SEQ ID NO: 5787905 - DNA, 25 bp, Homo sapien
cctgggttccgccaccagcatgttg

SEQ ID NO: 5787906 - DNA, 25 bp, Homo sapien
tgttctctgttctgcaaggttttgc

SEQ ID NO: 5787907 - DNA, 25 bp, Homo sapien
atagacatctggattgggtcttcct

SEQ ID NO: 5787908 - DNA, 25 bp, Homo sapien
gagatcaccacaacgggcagagagg

SEQ ID NO: 5787909 - DNA, 25 bp, Homo sapien
tttcaaattataattcagctcttgc

SEQ ID NO: 5787910 - DNA, 25 bp, Homo sapien
cctgattaaatctctgggcgttttc

SEQ ID NO: 5787911 - DNA, 25 bp, Homo sapien
cagaagggaaaatttttatcattta

SEQ ID NO: 5787912 - DNA, 25 bp, Homo sapien
agcatcttcaacaggccccagccag

SEQ ID NO: 5787913 - DNA, 25 bp, Homo sapien
ataaagctggtgaacctgctccagg

SEQ ID NO: 5787914 - DNA, 25 bp, Homo sapien
ccattggtggactcctccatgttca

SEQ ID NO: 5787915 - DNA, 25 bp, Homo sapien
ttatatacacagagtgcgaacgtta

SEQ ID NO: 5787916 - DNA, 25 bp, Homo sapien
cgctccttgctgatgaagcccatga

SEQ ID NO: 5787917 - DNA, 25 bp, Homo sapien
ccaactcagcacttctgaaagctga

SEQ ID NO: 5787918 - DNA, 25 bp, Homo sapien
tcaaccaaaggagcagctacgcaca

SEQ ID NO: 5787919 - DNA, 25 bp, Homo sapien
attttgagtcaagctgctgaagttc

SEQ ID NO: 5787920 - DNA, 25 bp, Homo sapien
aggctggcacaattgggtttcaaaa

SEQ ID NO: 5787921 - DNA, 25 bp, Homo sapien
gttcagctggtccacattgagacct

SEQ ID NO: 5787922 - DNA, 25 bp, Homo sapien
gtcatgttcgtaggtgtatttctgt

SEQ ID NO: 5787923 - DNA, 25 bp, Homo sapien
cagggcattctgggtaagttcagtg

SEQ ID NO: 5787924 - DNA, 25 bp, Homo sapien
cagccgagcccctccgcagactctg

SEQ ID NO: 5787925 - DNA, 25 bp, Homo sapien
actgccaactcagcacttctgaaag

SEQ ID NO: 5787926 - DNA, 25 bp, Homo sapien
tgtgaatgtgatggccccttcccgg

SEQ ID NO: 5787927 - DNA, 25 bp, Homo sapien
tccaagcaagcattgggcggccccc

SEQ ID NO: 5787928 - DNA, 25 bp, Homo sapien
tctcgaggtcaattaccaaaccagg

SEQ ID NO: 5787929 - DNA, 25 bp, Homo sapien
atgagctgctggaaaagactgaagg

SEQ ID NO: 5787930 - DNA, 25 bp, Homo sapien
agacatctggattgggtcttcctga

SEQ ID NO: 5787931 - DNA, 25 bp, Homo sapien
gtgccaggtactgtctgatttccat

SEQ ID NO: 5787932 - DNA, 25 bp, Homo sapien
gtggactcctccatgttcatcactt

SEQ ID NO: 5787933 - DNA, 25 bp, Homo sapien
ttcctccaactttttaagctgctgc

SEQ ID NO: 5787934 - DNA, 25 bp, Homo sapien
ctcccgagcgcgctgggtcgcctct

SEQ ID NO: 5787935 - DNA, 25 bp, Homo sapien
catttttctgttctttcaattgcag

SEQ ID NO: 5787936 - DNA, 25 bp, Homo sapien
attaaatctctgggcgttttccaga

SEQ ID NO: 5787937 - DNA, 25 bp, Homo sapien
actcttctgtgttcacttacacttc

SEQ ID NO: 5787938 - DNA, 25 bp, Homo sapien
aagtaaaatacaagcatcttcaaca

SEQ ID NO: 5787939 - DNA, 25 bp, Homo sapien
gtccccggctgctggtccttcaaca

SEQ ID NO: 5787940 - DNA, 25 bp, Homo sapien
gaaacatcattggcagcgtgctccc

SEQ ID NO: 5787941 - DNA, 25 bp, Homo sapien
agctgatccaagcaagcattgggcg

SEQ ID NO: 5787942 - DNA, 25 bp, Homo sapien
tggatacagatacttcaggggattc

SEQ ID NO: 5787943 - DNA, 25 bp, Homo sapien
taaacatgtcactcttctgtgttca

SEQ ID NO: 5787944 - DNA, 25 bp, Homo sapien
gtaacgatgagaggaccctcattcg

SEQ ID NO: 5787945 - DNA, 25 bp, Homo sapien
tttgcatttgaagtcatattcatct

SEQ ID NO: 5787946 - DNA, 25 bp, Homo sapien
cacagtgaactggacccctgtcttc

SEQ ID NO: 5787947 - DNA, 25 bp, Homo sapien
ttgctgcagactctccgcaactata

SEQ ID NO: 5787948 - DNA, 25 bp, Homo sapien
gtcttgatatatccagttcctttag

SEQ ID NO: 5787949 - DNA, 25 bp, Homo sapien
atctggattgggtcttcctgaaaat

SEQ ID NO: 5787950 - DNA, 25 bp, Homo sapien
ggagcaggtgttttttaatgagttc

SEQ ID NO: 5787951 - DNA, 25 bp, Homo sapien
gcaactatagtgaaccagttctgca

SEQ ID NO: 5787952 - DNA, 25 bp, Homo sapien
tcaaccgcatggaagtcaggttcgc

SEQ ID NO: 5787953 - DNA, 25 bp, Homo sapien
catttctgactttactgtcaagctc

SEQ ID NO: 5787954 - DNA, 25 bp, Homo sapien
aggcccaaccgctcgggagctggct

SEQ ID NO: 5787955 - DNA, 25 bp, Homo sapien
cttgtttgttttttgtgatagggtc

SEQ ID NO: 5787956 - DNA, 25 bp, Homo sapien
ctggaaaagactgaaggtgcggtcc

SEQ ID NO: 5787957 - DNA, 25 bp, Homo sapien
catcattaatcagggcattctgggt

SEQ ID NO: 5787958 - DNA, 25 bp, Homo sapien
ctccgcagactctgcgcaggaaagc

SEQ ID NO: 5787959 - DNA, 25 bp, Homo sapien
gcacatggtggagtcaggaagaagg

SEQ ID NO: 5787960 - DNA, 25 bp, Homo sapien
gccacaccattggtctcgtgttctc

SEQ ID NO: 5787961 - DNA, 25 bp, Homo sapien
ggtactgtctgatttccatgggaaa

SEQ ID NO: 5787962 - DNA, 25 bp, Homo sapien
tctcgaggatggcatacagcaaatg

SEQ ID NO: 5787963 - DNA, 25 bp, Homo sapien
gaaccgcagcaggaaggtccccggc

SEQ ID NO: 5787964 - DNA, 25 bp, Homo sapien
gcacagcacgttaggtgccaagact

SEQ ID NO: 5787965 - DNA, 25 bp, Homo sapien
agcaattacaatggaaaagtaaaat

SEQ ID NO: 5787966 - DNA, 25 bp, Homo sapien
agaagcttctctcccaacatgttca

SEQ ID NO: 5787967 - DNA, 25 bp, Homo sapien
aaacggatggtggcaaatgaaacat

SEQ ID NO: 5787968 - DNA, 25 bp, Homo sapien
gtcgtctcgaggtcaattaccaaac

SEQ ID NO: 5787969 - DNA, 25 bp, Homo sapien
tcgaggatggcatacagcaaatgaa

SEQ ID NO: 5787970 - DNA, 25 bp, Homo sapien
ttgaggtttgtaaacatgtcactct

SEQ ID NO: 5787971 - DNA, 25 bp, Homo sapien
ccaggaattttgagtcaagctgctg

SEQ ID NO: 5787972 - DNA, 25 bp, Homo sapien
gaaacttttctgcgcgcaggatccg

SEQ ID NO: 5787973 - DNA, 25 bp, Homo sapien
atttcatgctctatacacataacct

SEQ ID NO: 5787974 - DNA, 25 bp, Homo sapien
aggctggcttgaggtttgtaaacat

SEQ ID NO: 5787975 - DNA, 25 bp, Homo sapien
gcagccatgactttgtaattgcgaa

SEQ ID NO: 5787976 - DNA, 25 bp, Homo sapien
actcctccatgttcatcacttttgt

SEQ ID NO: 5787977 - DNA, 25 bp, Homo sapien
ctctttctgtttgtctaacatcact

SEQ ID NO: 5787978 - DNA, 25 bp, Homo sapien
actttttaagctgctgccgaacttg

SEQ ID NO: 5787979 - DNA, 25 bp, Homo sapien
gggttcaaccgcatggaagtcaggt

SEQ ID NO: 5787980 - DNA, 25 bp, Homo sapien
tcttcagtaacgatgagaggaccct

SEQ ID NO: 5787981 - DNA, 25 bp, Homo sapien
ttgtgatagggtcatgttcgtaggt

SEQ ID NO: 5787982 - DNA, 25 bp, Homo sapien
ttttaaagtagtaaaatgctgatag

SEQ ID NO: 5787983 - DNA, 25 bp, Homo sapien
gtctgatttccatgggaaaactgtc

SEQ ID NO: 5787984 - DNA, 25 bp, Homo sapien
agcaagaagttattctccaaagaaa

SEQ ID NO: 5787985 - DNA, 25 bp, Homo sapien
aaagaaaagcgactatattgatcat

SEQ ID NO: 5787986 - DNA, 25 bp, Homo sapien
aaggatggaggcccaaccgctcggg

SEQ ID NO: 5787987 - DNA, 25 bp, Homo sapien
accactgtgccaggtactgtctgat

SEQ ID NO: 5787988 - DNA, 25 bp, Homo sapien
cactgtgccaggtactgtctgattt

SEQ ID NO: 5787989 - DNA, 25 bp, Homo sapien
catgctctatacacataaccttgtc

SEQ ID NO: 5787990 - DNA, 25 bp, Homo sapien
gccaagactgtcgaggttatataca

SEQ ID NO: 5787991 - DNA, 25 bp, Homo sapien
gctgacgttggagatcaccacaacg

SEQ ID NO: 5787992 - DNA, 25 bp, Homo sapien
cttccttcagacagctgtaaatgat

SEQ ID NO: 5787993 - DNA, 25 bp, Homo sapien
ttaatgagttctaggatgctttcaa

SEQ ID NO: 5787994 - DNA, 25 bp, Homo sapien
ataaccttgtccttcacatttctga

SEQ ID NO: 5787995 - DNA, 25 bp, Homo sapien
tgtgcgtgcccaaaatgttgaactt

SEQ ID NO: 5787996 - DNA, 25 bp, Homo sapien
acacataaccttgtccttcacattt

SEQ ID NO: 5787997 - DNA, 25 bp, Homo sapien
ttccagagagggagcaggtgttttt

SEQ ID NO: 5787998 - DNA, 25 bp, Homo sapien
ttcaattgcaggtgccgaaattcag

SEQ ID NO: 5787999 - DNA, 25 bp, Homo sapien
tgcatttgaagtcatattcatcttg

SEQ ID NO: 5788000 - DNA, 25 bp, Homo sapien
ctgatccaagcaagcattgggcggc

SEQ ID NO: 5788001 - DNA, 25 bp, Homo sapien
agagggagcaggtgttttttaatga

SEQ ID NO: 5788002 - DNA, 25 bp, Homo sapien
gcagcgtgctcccagtcttgctttt

SEQ ID NO: 5788003 - DNA, 25 bp, Homo sapien
cccagccaggagcaaggctggcttg

SEQ ID NO: 5788004 - DNA, 25 bp, Homo sapien
tttctgttccaattcctccaacttt

SEQ ID NO: 5788005 - DNA, 25 bp, Homo sapien
gcttctctcccaacatgttcagctg

SEQ ID NO: 5788006 - DNA, 25 bp, Homo sapien
aaagctggtgaacctgctccaggaa

SEQ ID NO: 5788007 - DNA, 25 bp, Homo sapien
ccttcacatttctgactttactgtc

SEQ ID NO: 5788008 - DNA, 25 bp, Homo sapien
ggagtgaagctcttcagtaacgatg

SEQ ID NO: 5788009 - DNA, 25 bp, Homo sapien
ttacacttcagacacagaaatcaac

SEQ ID NO: 5788010 - DNA, 25 bp, Homo sapien
ttcagcaactctattattttgtgaa

SEQ ID NO: 5788011 - DNA, 25 bp, Homo sapien
caacaggccccagccaggagcaagg

SEQ ID NO: 5788012 - DNA, 25 bp, Homo sapien
caatttcaccaacagtctcaacttc

SEQ ID NO: 5788013 - DNA, 25 bp, Homo sapien
aaaggagcagctacgcacagcacgt

SEQ ID NO: 5788014 - DNA, 25 bp, Homo sapien
ccaccacaaacgagctctgaatgag

SEQ ID NO: 5788015 - DNA, 25 bp, Homo sapien
accaaaccaggctggcacaattggg

SEQ ID NO: 5788016 - DNA, 25 bp, Homo sapien
caattacaatggaaaagtaaaatac

SEQ ID NO: 5788017 - DNA, 25 bp, Homo sapien
atccccccggtgcagccgagcccct

SEQ ID NO: 5788018 - DNA, 25 bp, Homo sapien
tgtttctgatcactctttgccacac

SEQ ID NO: 5788019 - DNA, 25 bp, Homo sapien
cttcagacagctgtaaatgatcata

SEQ ID NO: 5788020 - DNA, 25 bp, Homo sapien
ctttgtaattgcgaatgatgtcagg

SEQ ID NO: 5788021 - DNA, 25 bp, Homo sapien
taagctgctgccgaacttgctgcag

SEQ ID NO: 5788022 - DNA, 25 bp, Homo sapien
tatcaaataagactttgactttcaa

SEQ ID NO: 5788023 - DNA, 25 bp, Homo sapien
ctgtagcaagaagttattctccaaa

SEQ ID NO: 5788024 - DNA, 25 bp, Homo sapien
gtctttccaccacaaacgagctctg

SEQ ID NO: 5788025 - DNA, 25 bp, Homo sapien
gattcctgggttccgccaccagcat

SEQ ID NO: 5788026 - DNA, 25 bp, Homo sapien
tttagggccatcaagttccattggc

SEQ ID NO: 5788027 - DNA, 25 bp, Homo sapien
gtctccgcttccactccactagttc

SEQ ID NO: 5788028 - DNA, 25 bp, Homo sapien
ccttgctgatgaagcccatgatgca

SEQ ID NO: 5788029 - DNA, 25 bp, Homo sapien
atgatcatagacatctggattgggt

SEQ ID NO: 5788030 - DNA, 25 bp, Homo sapien
tgcgaacgttaacctagacagctct

SEQ ID NO: 5788031 - DNA, 25 bp, Homo sapien
gtctcaacttcacagtgaactggac

SEQ ID NO: 5788032 - DNA, 25 bp, Homo sapien
cttttgtgtgcgtgcccaaaatgtt

SEQ ID NO: 5788033 - DNA, 25 bp, Homo sapien
gtaaatcttccaggctcttgatttc

SEQ ID NO: 5788034 - DNA, 25 bp, Homo sapien
atggaggcccaaccgctcgggagct

SEQ ID NO: 5788035 - DNA, 25 bp, Homo sapien
tcagctcttgcaatttcaccaacag

SEQ ID NO: 5788036 - DNA, 25 bp, Homo sapien
gctgccgaacttgctgcagactctc

SEQ ID NO: 5788037 - DNA, 25 bp, Homo sapien
agtgaaccagttctgcagctgatcc

SEQ ID NO: 5788038 - DNA, 25 bp, Homo sapien
ccgcatggaagtcaggttcgcctcc

SEQ ID NO: 5788039 - DNA, 25 bp, Homo sapien
tgctgataggcagtaacacggggat

SEQ ID NO: 5788040 - DNA, 25 bp, Homo sapien
cacgttaggtgccaagactgtcgag

SEQ ID NO: 5788041 - DNA, 25 bp, Homo sapien
gaaggacagattcctgggttccgcc

SEQ ID NO: 5788042 - DNA, 25 bp, Homo sapien
tgttctttcaattgcaggtgccgaa

SEQ ID NO: 5788043 - DNA, 25 bp, Homo sapien
ttttgtgatagggtcatgttcgtag

SEQ ID NO: 5788044 - DNA, 25 bp, Homo sapien
cttcttgagtaacagctgttcttgt

SEQ ID NO: 5788045 - DNA, 25 bp, Homo sapien
ctctcactgaaccgcagcaggaagg

SEQ ID NO: 5788046 - DNA, 25 bp, Homo sapien
ttcaacaggccccagccaggagcaa

SEQ ID NO: 5788047 - DNA, 25 bp, Homo sapien
tcatagacatctggattgggtcttc

SEQ ID NO: 5788048 - DNA, 25 bp, Homo sapien
cgtgctcccagtcttgcttttctaa

SEQ ID NO: 5788049 - DNA, 25 bp, Homo sapien
atgttcagctggtccacattgagac

SEQ ID NO: 5788050 - DNA, 25 bp, Homo sapien
gagtaacagctgttcttgtttctga

SEQ ID NO: 5788051 - DNA, 25 bp, Homo sapien
ccaaagaaaagcgactatattgatc

SEQ ID NO: 5788052 - DNA, 25 bp, Homo sapien
agtagtaaaatgctgataggcagta

SEQ ID NO: 5788053 - DNA, 25 bp, Homo sapien
gttattctccaaagaaaagcgacta

SEQ ID NO: 5788054 - DNA, 25 bp, Homo sapien
gcattctgggtaagttcagtgacat

SEQ ID NO: 5788055 - DNA, 25 bp, Homo sapien
tgtagggttcaaccgcatggaagtc

SEQ ID NO: 5788056 - DNA, 25 bp, Homo sapien
cttttctgcgcgcaggatccggaag

SEQ ID NO: 5788057 - DNA, 25 bp, Homo sapien
tttctgactttactgtcaagctctt

SEQ ID NO: 5788058 - DNA, 25 bp, Homo sapien
caggtgccgaaattcagccgccaga

SEQ ID NO: 5788059 - DNA, 25 bp, Homo sapien
cgggggcgcggcggtgcagcctctc

SEQ ID NO: 5788060 - DNA, 25 bp, Homo sapien
gcagagaggtcgtctcgaggtcaat

SEQ ID NO: 5788061 - DNA, 25 bp, Homo sapien
tctgttctttcaattgcaggtgccg

SEQ ID NO: 5788062 - DNA, 25 bp, Homo sapien
tccccgactgagcctgattaaatct

SEQ ID NO: 5788063 - DNA, 25 bp, Homo sapien
ggaaagtaacagcagaaagttcttt

SEQ ID NO: 5788064 - DNA, 25 bp, Homo sapien
catcaagttccattggctctggtgc

SEQ ID NO: 5788065 - DNA, 25 bp, Homo sapien
ttcatcttgtaaatcttccaggctc

SEQ ID NO: 5788066 - DNA, 25 bp, Homo sapien
gcaaatgaaacttttctgcgcgcag

SEQ ID NO: 5788067 - DNA, 25 bp, Homo sapien
attggtggactcctccatgttcatc

SEQ ID NO: 5788068 - DNA, 25 bp, Homo sapien
aatacaagcatcttcaacaggcccc

SEQ ID NO: 5788069 - DNA, 25 bp, Homo sapien
aattgcgaatgatgtcagggaaagt

SEQ ID NO: 5788070 - DNA, 25 bp, Homo sapien
ccccaacaagggcctggggattcaa

SEQ ID NO: 5788071 - DNA, 25 bp, Homo sapien
tcaaattataattcagctcttgcaa

SEQ ID NO: 5788072 - DNA, 25 bp, Homo sapien
gctgagcccatcgtgcacatggtgg

SEQ ID NO: 5788073 - DNA, 25 bp, Homo sapien
aggtccccggctgctggtccttcaa

SEQ ID NO: 5788074 - DNA, 25 bp, Homo sapien
ctttctcttattgtcaagcattaaa

SEQ ID NO: 5788075 - DNA, 25 bp, Homo sapien
aaaagtaaaatacaagcatcttcaa

SEQ ID NO: 5788076 - DNA, 25 bp, Homo sapien
ctttcttccttcagacagctgtaaa

SEQ ID NO: 5788077 - DNA, 25 bp, Homo sapien
acccatcattccagagagggagcag

SEQ ID NO: 5788078 - DNA, 25 bp, Homo sapien
tctgggtaagttcagtgacattcag

SEQ ID NO: 5788079 - DNA, 25 bp, Homo sapien
gctccacccatgtgaatgtgatggc

SEQ ID NO: 5788080 - DNA, 25 bp, Homo sapien
tcaattaccaaaccaggctggcaca

SEQ ID NO: 5788081 - DNA, 25 bp, Homo sapien
cattccagagagggagcaggtgttt

SEQ ID NO: 5788082 - DNA, 25 bp, Homo sapien
agctcttgcaatttcaccaacagtc

SEQ ID NO: 5788083 - DNA, 25 bp, Homo sapien
atggaagtcaggttcgcctccgttc

SEQ ID NO: 5788084 - DNA, 25 bp, Homo sapien
atggccccttcccgggagctctcac

SEQ ID NO: 5788085 - DNA, 25 bp, Homo sapien
cagccgccagactgccattggtgga

SEQ ID NO: 5788086 - DNA, 25 bp, Homo sapien
tttgaagtcatattcatcttgtaaa

SEQ ID NO: 5788087 - DNA, 25 bp, Homo sapien
gttcaaccgcatggaagtcaggttc

SEQ ID NO: 5788088 - DNA, 25 bp, Homo sapien
acctcgtccacggaatgagaccatc

SEQ ID NO: 5788089 - DNA, 25 bp, Homo sapien
caagcaagcattgggcggcccccca

SEQ ID NO: 5788090 - DNA, 25 bp, Homo sapien
gctggcacaattgggtttcaaaact

SEQ ID NO: 5788091 - DNA, 25 bp, Homo sapien
tctcaacaagttcagctgtgatggc

SEQ ID NO: 5788092 - DNA, 25 bp, Homo sapien
ctgtaaatgatcatagacatctgga

SEQ ID NO: 5788093 - DNA, 25 bp, Homo sapien
tggctgacgttggagatcaccacaa

SEQ ID NO: 5788094 - DNA, 25 bp, Homo sapien
ctctgaatgagctgctggaaaagac

SEQ ID NO: 5788095 - DNA, 25 bp, Homo sapien
accctcattcgttctggtgccagca

SEQ ID NO: 5788096 - DNA, 25 bp, Homo sapien
ttcttgtttctgatcactctttgcc

SEQ ID NO: 5788097 - DNA, 25 bp, Homo sapien
atcctgccaccttgtgccccaacaa

SEQ ID NO: 5788098 - DNA, 25 bp, Homo sapien
ctgaaggtgcggtcccataacactt

SEQ ID NO: 5788099 - DNA, 25 bp, Homo sapien
ctctgagggtgcgttggcatgcagg

SEQ ID NO: 5788100 - DNA, 25 bp, Homo sapien
caaaacctcgtccacggaatgagac

SEQ ID NO: 5788101 - DNA, 25 bp, Homo sapien
tcaccacaacgggcagagaggtcgt

SEQ ID NO: 5788102 - DNA, 25 bp, Homo sapien
gttctgcaaggttttgcatttgaag

SEQ ID NO: 5788103 - DNA, 25 bp, Homo sapien
ccagttcctttagggccatcaagtt

SEQ ID NO: 5788104 - DNA, 25 bp, Homo sapien
aagaaaactgccaactcagcacttc

SEQ ID NO: 5788105 - DNA, 25 bp, Homo sapien
tggcaaatgaaacatcattggcagc

SEQ ID NO: 5788106 - DNA, 25 bp, Homo sapien
tgagtcaagctgctgaagttcgtac

SEQ ID NO: 5788107 - DNA, 25 bp, Homo sapien
gtttcaaaactaagggagtgaagct

SEQ ID NO: 5788108 - DNA, 25 bp, Homo sapien
caggatccggaagggctaggcgggg

SEQ ID NO: 5788109 - DNA, 25 bp, Homo sapien
aggatgctttcaatccaaagccaga

SEQ ID NO: 5788110 - DNA, 25 bp, Homo sapien
ccaaccgctcgggagctggctgacg

SEQ ID NO: 5788111 - DNA, 25 bp, Homo sapien
tttttaagctgctgccgaacttgct

SEQ ID NO: 5788112 - DNA, 25 bp, Homo sapien
gtccttcacatttctgactttactg

SEQ ID NO: 5788113 - DNA, 25 bp, Homo sapien
caagaagttattctccaaagaaaag

SEQ ID NO: 5788114 - DNA, 25 bp, Homo sapien
ttttggtgacagaagaaaactgcca

SEQ ID NO: 5788115 - DNA, 25 bp, Homo sapien
ttttaatgagttctaggatgctttc

SEQ ID NO: 5788116 - DNA, 25 bp, Homo sapien
caagcattgggcggccccccaatac

SEQ ID NO: 5788117 - DNA, 25 bp, Homo sapien
gtgcacatggtggagtcaggaagaa

SEQ ID NO: 5788118 - DNA, 25 bp, Homo sapien
ttcacatttctgactttactgtcaa

SEQ ID NO: 5788119 - DNA, 25 bp, Homo sapien
tggtgccagcatttttctgttcttt

SEQ ID NO: 5788120 - DNA, 25 bp, Homo sapien
gccaggtactgtctgatttccatgg

SEQ ID NO: 5788121 - DNA, 25 bp, Homo sapien
gctggctgacgttggagatcaccac

SEQ ID NO: 5788122 - DNA, 25 bp, Homo sapien
tgctccaggaattttgagtcaagct

SEQ ID NO: 5788123 - DNA, 25 bp, Homo sapien
ctcagcagccatgactttgtaattg

SEQ ID NO: 5788124 - DNA, 25 bp, Homo sapien
gatgctttcaatccaaagccagaag

SEQ ID NO: 5788125 - DNA, 25 bp, Homo sapien
ctacgcacagcacgttaggtgccaa

SEQ ID NO: 5788126 - DNA, 25 bp, Homo sapien
cccatgatgcacccatcattccaga

SEQ ID NO: 5788127 - DNA, 25 bp, Homo sapien
caccaacagtctcaacttcacagtg

SEQ ID NO: 5788128 - DNA, 25 bp, Homo sapien
tgtcagggaaagtaacagcagaaag

SEQ ID NO: 5788129 - DNA, 25 bp, Homo sapien
ctcgtccacggaatgagaccatcgg

SEQ ID NO: 5788130 - DNA, 25 bp, Homo sapien
ggatggcatacagcaaatgaaactt

SEQ ID NO: 5788131 - DNA, 25 bp, Homo sapien
cactagttcatcattaatcagggca

SEQ ID NO: 5788132 - DNA, 25 bp, Homo sapien
tactttccaaaggcatggtctttgt

SEQ ID NO: 5788133 - DNA, 25 bp, Homo sapien
atcagggcattctgggtaagttcag

SEQ ID NO: 5788134 - DNA, 25 bp, Homo sapien
ttcaacagggcacgctctcgctcct

SEQ ID NO: 5788135 - DNA, 25 bp, Homo sapien
tcttcaacaggccccagccaggagc

SEQ ID NO: 5788136 - DNA, 25 bp, Homo sapien
aacatcattggcagcgtgctcccag

SEQ ID NO: 5788137 - DNA, 25 bp, Homo sapien
ttttttaaagtagtaaaatgctgat

SEQ ID NO: 5788138 - DNA, 25 bp, Homo sapien
ctggtgcttcctttggcctggagta

SEQ ID NO: 5788139 - DNA, 25 bp, Homo sapien
acatctggattgggtcttcctgaaa

SEQ ID NO: 5788140 - DNA, 25 bp, Homo sapien
atatatccagttcctttagggccat

SEQ ID NO: 5788141 - DNA, 25 bp, Homo sapien
cattaaatacatcttcttgagtaac

SEQ ID NO: 5788142 - DNA, 25 bp, Homo sapien
tctgcgcgcaggatccggaagggct

SEQ ID NO: 5788143 - DNA, 25 bp, Homo sapien
aggaaggtccccggctgctggtcct

SEQ ID NO: 5788144 - DNA, 25 bp, Homo sapien
actacttcctttctcttattgtcaa

SEQ ID NO: 5788145 - DNA, 25 bp, Homo sapien
tggcacaattgggtttcaaaactaa

SEQ ID NO: 5788146 - DNA, 25 bp, Homo sapien
tttctgcgcgcaggatccggaaggg

SEQ ID NO: 5788147 - DNA, 25 bp, Homo sapien
agccggccgcgccggggccgccctg

SEQ ID NO: 5788148 - DNA, 25 bp, Homo sapien
gaagccctcagtcgccggccgggag

SEQ ID NO: 5788149 - DNA, 25 bp, Homo sapien
gcctgcatcccaggatgctgggtgg

SEQ ID NO: 5788150 - DNA, 25 bp, Homo sapien
ccaccagtgtggggttctgctggga

SEQ ID NO: 5788151 - DNA, 25 bp, Homo sapien
cggagcacagctccgagcccccgag

SEQ ID NO: 5788152 - DNA, 25 bp, Homo sapien
ggaccttggagagcctgcatcccag

SEQ ID NO: 5788153 - DNA, 25 bp, Homo sapien
cgttggtgacggttgggagcctctg

SEQ ID NO: 5788154 - DNA, 25 bp, Homo sapien
tgcagcctcctccacctcacctcca

SEQ ID NO: 5788155 - DNA, 25 bp, Homo sapien
tgatacccctggggaacatttctgt

SEQ ID NO: 5788156 - DNA, 25 bp, Homo sapien
tggaagttcatacctaagtactgta

SEQ ID NO: 5788157 - DNA, 25 bp, Homo sapien
cgcgggccgccaaccgccggttcca

SEQ ID NO: 5788158 - DNA, 25 bp, Homo sapien
ccactttgcacattttgattttttt

SEQ ID NO: 5788159 - DNA, 25 bp, Homo sapien
tggagcggcttctccgcccgcgaga

SEQ ID NO: 5788160 - DNA, 25 bp, Homo sapien
tgagcgagaagctgcagcacggccg

SEQ ID NO: 5788161 - DNA, 25 bp, Homo sapien
tggtaaagaatgagaaggccgccaa

SEQ ID NO: 5788162 - DNA, 25 bp, Homo sapien
cagtacctccggagaggacaccctg

SEQ ID NO: 5788163 - DNA, 25 bp, Homo sapien
tgagaaggccgccaaggtggtcatt

SEQ ID NO: 5788164 - DNA, 25 bp, Homo sapien
gcgtccccacgtccgctcaagagtg

SEQ ID NO: 5788165 - DNA, 25 bp, Homo sapien
ccagcgagctgatcctcaaacgatg

SEQ ID NO: 5788166 - DNA, 25 bp, Homo sapien
ccggccgcgccggggccgccctgcc

SEQ ID NO: 5788167 - DNA, 25 bp, Homo sapien
ccgccaaggtggtcattttgaaaaa

SEQ ID NO: 5788168 - DNA, 25 bp, Homo sapien
cagcagcagttgctaaagaaaattg

SEQ ID NO: 5788169 - DNA, 25 bp, Homo sapien
gtgtgttccaagtttccaaacaaca

SEQ ID NO: 5788170 - DNA, 25 bp, Homo sapien
ggggttctgctgggaccttggagag

SEQ ID NO: 5788171 - DNA, 25 bp, Homo sapien
ggacttgctagacgcttctcaaaac

SEQ ID NO: 5788172 - DNA, 25 bp, Homo sapien
ttcttacactgcctgtatactttag

SEQ ID NO: 5788173 - DNA, 25 bp, Homo sapien
cggccagtgccccggcggcgggccc

SEQ ID NO: 5788174 - DNA, 25 bp, Homo sapien
ccgcgccggggccgccctgcccgcc

SEQ ID NO: 5788175 - DNA, 25 bp, Homo sapien
gcttcgcggagcacagctccgagcc

SEQ ID NO: 5788176 - DNA, 25 bp, Homo sapien
ggccgccaaccgccggttccaccgc

SEQ ID NO: 5788177 - DNA, 25 bp, Homo sapien
cctcgagtttgactcgctacagccc

SEQ ID NO: 5788178 - DNA, 25 bp, Homo sapien
tccgccttttgtatacatcctgggt

SEQ ID NO: 5788179 - DNA, 25 bp, Homo sapien
ctgttgaagtcaccttgtgtgttcc

SEQ ID NO: 5788180 - DNA, 25 bp, Homo sapien
taaaatggtgcttaagttccagcag

SEQ ID NO: 5788181 - DNA, 25 bp, Homo sapien
gcgattcagatgatgaagatgatga

SEQ ID NO: 5788182 - DNA, 25 bp, Homo sapien
gaggtggcttttgcggccagtatta

SEQ ID NO: 5788183 - DNA, 25 bp, Homo sapien
ttcgtatgaaaatgagttgtgaaag

SEQ ID NO: 5788184 - DNA, 25 bp, Homo sapien
gcttttgctggaaaaggaaaaattg

SEQ ID NO: 5788185 - DNA, 25 bp, Homo sapien
gccgcgggccgccaaccgccggttc

SEQ ID NO: 5788186 - DNA, 25 bp, Homo sapien
ccagcagatgccacataaggggttt

SEQ ID NO: 5788187 - DNA, 25 bp, Homo sapien
cgtatgaaaatgagttgtgaaagtt

SEQ ID NO: 5788188 - DNA, 25 bp, Homo sapien
cctcacctccatgacagcgctaaac

SEQ ID NO: 5788189 - DNA, 25 bp, Homo sapien
aatttactatatatatatgcctttt

SEQ ID NO: 5788190 - DNA, 25 bp, Homo sapien
acatcctggagcgccagcgccgcaa

SEQ ID NO: 5788191 - DNA, 25 bp, Homo sapien
caacagaaagtcattccttcttttt

SEQ ID NO: 5788192 - DNA, 25 bp, Homo sapien
gctggagcgcgccgtgagcgagaag

SEQ ID NO: 5788193 - DNA, 25 bp, Homo sapien
gcccccgaaactctgactcggagga

SEQ ID NO: 5788194 - DNA, 25 bp, Homo sapien
cggcggcgggccctgcggtcgcctc

SEQ ID NO: 5788195 - DNA, 25 bp, Homo sapien
gcgaccacaaggccctcagtacctc

SEQ ID NO: 5788196 - DNA, 25 bp, Homo sapien
tgaagtcaccttgtgtgttccaagt

SEQ ID NO: 5788197 - DNA, 25 bp, Homo sapien
taaacaaacattgtgttgacattaa

SEQ ID NO: 5788198 - DNA, 25 bp, Homo sapien
actgcatgtggagcggcttctccgc

SEQ ID NO: 5788199 - DNA, 25 bp, Homo sapien
ccctgcttctacccggacgaagatg

SEQ ID NO: 5788200 - DNA, 25 bp, Homo sapien
ctcaatgtttgaggagcatgttttg

SEQ ID NO: 5788201 - DNA, 25 bp, Homo sapien
cacgctcagggaccacgtgccggag

SEQ ID NO: 5788202 - DNA, 25 bp, Homo sapien
tcctcctccaacaccaaggctgtca

SEQ ID NO: 5788203 - DNA, 25 bp, Homo sapien
gtacctccggagaggacaccctgag

SEQ ID NO: 5788204 - DNA, 25 bp, Homo sapien
cgcagccccggccagtgccccggcg

SEQ ID NO: 5788205 - DNA, 25 bp, Homo sapien
ctcgcccacccggccgccgagtgcg

SEQ ID NO: 5788206 - DNA, 25 bp, Homo sapien
ctgcctgtatactttagtatgacgc

SEQ ID NO: 5788207 - DNA, 25 bp, Homo sapien
cctccacctcacctccatgacagcg

SEQ ID NO: 5788208 - DNA, 25 bp, Homo sapien
cccgcgagaagctggagcgcgccgt

SEQ ID NO: 5788209 - DNA, 25 bp, Homo sapien
caggcggccgccagaccagcggcgg

SEQ ID NO: 5788210 - DNA, 25 bp, Homo sapien
ggcagtaggaccaccagtgtggggt

SEQ ID NO: 5788211 - DNA, 25 bp, Homo sapien
tctacttcggcggccccgactcgac

SEQ ID NO: 5788212 - DNA, 25 bp, Homo sapien
tggggcagcccggccgaggaggacg

SEQ ID NO: 5788213 - DNA, 25 bp, Homo sapien
acgtggtcactgtggagaagcggcg

SEQ ID NO: 5788214 - DNA, 25 bp, Homo sapien
ctgagtatgtccactccctccaggc

SEQ ID NO: 5788215 - DNA, 25 bp, Homo sapien
gcctttttcctagcctgtttcttcc

SEQ ID NO: 5788216 - DNA, 25 bp, Homo sapien
tcatcctccaggactgcatgtggag

SEQ ID NO: 5788217 - DNA, 25 bp, Homo sapien
ccgctcaagagtgtcatccccccaa

SEQ ID NO: 5788218 - DNA, 25 bp, Homo sapien
tccccccaaaggctaagagcttgag

SEQ ID NO: 5788219 - DNA, 25 bp, Homo sapien
gggaggacatctggaagaagtttga

SEQ ID NO: 5788220 - DNA, 25 bp, Homo sapien
tgacattaagaatgttggtttactt

SEQ ID NO: 5788221 - DNA, 25 bp, Homo sapien
ccccgagctgggtcacggagatgct

SEQ ID NO: 5788222 - DNA, 25 bp, Homo sapien
acccggtcatcctccaggactgcat

SEQ ID NO: 5788223 - DNA, 25 bp, Homo sapien
ggaagaagtttgagctgctgcccac

SEQ ID NO: 5788224 - DNA, 25 bp, Homo sapien
atccaccagcagcacaactatgccg

SEQ ID NO: 5788225 - DNA, 25 bp, Homo sapien
gagcgcgccgtgagcgagaagctgc

SEQ ID NO: 5788226 - DNA, 25 bp, Homo sapien
tgggtgggcagtaggaccaccagtg

SEQ ID NO: 5788227 - DNA, 25 bp, Homo sapien
cgcccagccgtggcttcgcggagca

SEQ ID NO: 5788228 - DNA, 25 bp, Homo sapien
atttgttcatgtttggtgcatagaa

SEQ ID NO: 5788229 - DNA, 25 bp, Homo sapien
cctccaacaccaaggctgtcaccac

SEQ ID NO: 5788230 - DNA, 25 bp, Homo sapien
tctgtgtttaatttcttcaaaatgt

SEQ ID NO: 5788231 - DNA, 25 bp, Homo sapien
atatatgcctttttcctagcctgtt

SEQ ID NO: 5788232 - DNA, 25 bp, Homo sapien
tatcactttttgaactaagaaactt

SEQ ID NO: 5788233 - DNA, 25 bp, Homo sapien
ccagctttctcacgctcagggacca

SEQ ID NO: 5788234 - DNA, 25 bp, Homo sapien
gtttcttcctgttaatgtatttgtt

SEQ ID NO: 5788235 - DNA, 25 bp, Homo sapien
gcggccagtattagactggaagttc

SEQ ID NO: 5788236 - DNA, 25 bp, Homo sapien
cccggcggcgggccctgcggtcgcc

SEQ ID NO: 5788237 - DNA, 25 bp, Homo sapien
ccacataaggggtttgccatttgat

SEQ ID NO: 5788238 - DNA, 25 bp, Homo sapien
caatgtttgaggagcatgttttgta

SEQ ID NO: 5788239 - DNA, 25 bp, Homo sapien
cgccgccagccctgcgggtcgcggg

SEQ ID NO: 5788240 - DNA, 25 bp, Homo sapien
agaggaagaaatcgacgtggtcact

SEQ ID NO: 5788241 - DNA, 25 bp, Homo sapien
tactgtaataatacctcaatgtttg

SEQ ID NO: 5788242 - DNA, 25 bp, Homo sapien
caaggtggtcattttgaaaaaggcc

SEQ ID NO: 5788243 - DNA, 25 bp, Homo sapien
gccgtggcttcgcggagcacagctc

SEQ ID NO: 5788244 - DNA, 25 bp, Homo sapien
ctaaagaaaattgaacacgctcgga

SEQ ID NO: 5788245 - DNA, 25 bp, Homo sapien
ggccgccaaggtggtcattttgaaa

SEQ ID NO: 5788246 - DNA, 25 bp, Homo sapien
tagacgcttctcaaaactggacagt

SEQ ID NO: 5788247 - DNA, 25 bp, Homo sapien
acggagatgctgcttgagaacgagc

SEQ ID NO: 5788248 - DNA, 25 bp, Homo sapien
tggccctgcagcctcctccacctca

SEQ ID NO: 5788249 - DNA, 25 bp, Homo sapien
gttcatgtttggtgcatagaactgg

SEQ ID NO: 5788250 - DNA, 25 bp, Homo sapien
gcctcacccccaacccggtcatcct

SEQ ID NO: 5788251 - DNA, 25 bp, Homo sapien
ttgcggccagtattagactggaagt

SEQ ID NO: 5788252 - DNA, 25 bp, Homo sapien
agcagttgctaaagaaaattgaaca

SEQ ID NO: 5788253 - DNA, 25 bp, Homo sapien
caccagcttttgctggaaaaggaaa

SEQ ID NO: 5788254 - DNA, 25 bp, Homo sapien
gcctgtatactttagtatgacgctg

SEQ ID NO: 5788255 - DNA, 25 bp, Homo sapien
tcctcaaacgatgccttcccatcca

SEQ ID NO: 5788256 - DNA, 25 bp, Homo sapien
ttttgcggccagtattagactggaa

SEQ ID NO: 5788257 - DNA, 25 bp, Homo sapien
aatcggtcccctgtcgagttcggct

SEQ ID NO: 5788258 - DNA, 25 bp, Homo sapien
cccgctgtcgcccagccgtggcttc

SEQ ID NO: 5788259 - DNA, 25 bp, Homo sapien
gtccactccctccaggccgaggagc

SEQ ID NO: 5788260 - DNA, 25 bp, Homo sapien
aggacaccctgagcgattcagatga

SEQ ID NO: 5788261 - DNA, 25 bp, Homo sapien
tctgttatgtactgtactaattctt

SEQ ID NO: 5788262 - DNA, 25 bp, Homo sapien
gcgctaaacgttggtgacggttggg

SEQ ID NO: 5788263 - DNA, 25 bp, Homo sapien
gctcaagagtgtcatccccccaaag

SEQ ID NO: 5788264 - DNA, 25 bp, Homo sapien
ggtcactgtggagaagcggcgttcc

SEQ ID NO: 5788265 - DNA, 25 bp, Homo sapien
gaacatttctgtaaataccattgac

SEQ ID NO: 5788266 - DNA, 25 bp, Homo sapien
ctaagagcttgagcccccgaaactc

SEQ ID NO: 5788267 - DNA, 25 bp, Homo sapien
gttgaagtcaccttgtgtgttccaa

SEQ ID NO: 5788268 - DNA, 25 bp, Homo sapien
gaaagaagccctcagtcgccggccg

SEQ ID NO: 5788269 - DNA, 25 bp, Homo sapien
agaatgagaaggccgccaaggtggt

SEQ ID NO: 5788270 - DNA, 25 bp, Homo sapien
atcctggagcgccagcgccgcaacg

SEQ ID NO: 5788271 - DNA, 25 bp, Homo sapien
ggggcgggtattgccgccccagccg

SEQ ID NO: 5788272 - DNA, 25 bp, Homo sapien
caccatcactgtgcgtcccaagaac

SEQ ID NO: 5788273 - DNA, 25 bp, Homo sapien
ccagaccagcggcggcgaccacaag

SEQ ID NO: 5788274 - DNA, 25 bp, Homo sapien
gttggtaaagaatgagaaggccgcc

SEQ ID NO: 5788275 - DNA, 25 bp, Homo sapien
gagcctgcatcccaggatgctgggt

SEQ ID NO: 5788276 - DNA, 25 bp, Homo sapien
gtaggaccaccagtgtggggttctg

SEQ ID NO: 5788277 - DNA, 25 bp, Homo sapien
gggtcccgggagggctcagtccagc

SEQ ID NO: 5788278 - DNA, 25 bp, Homo sapien
ttcatacctaagtactgtaataata

SEQ ID NO: 5788279 - DNA, 25 bp, Homo sapien
tacttcggcggccccgactcgaccc

SEQ ID NO: 5788280 - DNA, 25 bp, Homo sapien
gcacagctccgagcccccgagctgg

SEQ ID NO: 5788281 - DNA, 25 bp, Homo sapien
caggccgaggagcaccagcttttgc

SEQ ID NO: 5788282 - DNA, 25 bp, Homo sapien
cgctcagggaccacgtgccggagtt

SEQ ID NO: 5788283 - DNA, 25 bp, Homo sapien
gcatgatctgcaagaacccagacct

SEQ ID NO: 5788284 - DNA, 25 bp, Homo sapien
tgtgaaagttttgagtagatattac

SEQ ID NO: 5788285 - DNA, 25 bp, Homo sapien
gcacccccacagaagaagataaaga

SEQ ID NO: 5788286 - DNA, 25 bp, Homo sapien
aaatatattgttaatctctgttatg

SEQ ID NO: 5788287 - DNA, 25 bp, Homo sapien
gagcctctggggctgttgaagtcac

SEQ ID NO: 5788288 - DNA, 25 bp, Homo sapien
tagcctgtttcttcctgttaatgta

SEQ ID NO: 5788289 - DNA, 25 bp, Homo sapien
ctccggagaggacaccctgagcgat

SEQ ID NO: 5788290 - DNA, 25 bp, Homo sapien
cactgagtatgtccactccctccag

SEQ ID NO: 5788291 - DNA, 25 bp, Homo sapien
tcccctgtcgagttcggctctgggt

SEQ ID NO: 5788292 - DNA, 25 bp, Homo sapien
aaatgtatatatttagtgctgcatc

SEQ ID NO: 5788293 - DNA, 25 bp, Homo sapien
cgtcgcagaaaccacaacatcctgg

SEQ ID NO: 5788294 - DNA, 25 bp, Homo sapien
cacattcaccatcactgtgcgtccc

SEQ ID NO: 5788295 - DNA, 25 bp, Homo sapien
accagtgtggggttctgctgggacc

SEQ ID NO: 5788296 - DNA, 25 bp, Homo sapien
ctctggggctgttgaagtcaccttg

SEQ ID NO: 5788297 - DNA, 25 bp, Homo sapien
cagccgtggcttcgcggagcacagc

SEQ ID NO: 5788298 - DNA, 25 bp, Homo sapien
ctcagtcgccggccgggaggcgagc

SEQ ID NO: 5788299 - DNA, 25 bp, Homo sapien
gaaaaggaaaaattgcaggcaagac

SEQ ID NO: 5788300 - DNA, 25 bp, Homo sapien
atgcctttttcctagcctgtttctt

SEQ ID NO: 5788301 - DNA, 25 bp, Homo sapien
ggttctgctgggaccttggagagcc

SEQ ID NO: 5788302 - DNA, 25 bp, Homo sapien
cgccgagtgcgtggatcccgccgtg

SEQ ID NO: 5788303 - DNA, 25 bp, Homo sapien
ggggctgttgaagtcaccttgtgtg

SEQ ID NO: 5788304 - DNA, 25 bp, Homo sapien
cgccaaccgccggttccaccgccca

SEQ ID NO: 5788305 - DNA, 25 bp, Homo sapien
gtccagctttctcacgctcagggac

SEQ ID NO: 5788306 - DNA, 25 bp, Homo sapien
atcgacgtggtcactgtggagaagc

SEQ ID NO: 5788307 - DNA, 25 bp, Homo sapien
cgggccctgcggtcgcctcgggggc

SEQ ID NO: 5788308 - DNA, 25 bp, Homo sapien
ccatccaccagcagcacaactatgc

SEQ ID NO: 5788309 - DNA, 25 bp, Homo sapien
ataccattgacacatccgccttttg

SEQ ID NO: 5788310 - DNA, 25 bp, Homo sapien
gcaggcaagacagcagcagttgcta

SEQ ID NO: 5788311 - DNA, 25 bp, Homo sapien
agggctcagtccagcgagctgatcc

SEQ ID NO: 5788312 - DNA, 25 bp, Homo sapien
cggaggacagtgagcgtcgcagaaa

SEQ ID NO: 5788313 - DNA, 25 bp, Homo sapien
gccggagttggtaaagaatgagaag

SEQ ID NO: 5788314 - DNA, 25 bp, Homo sapien
agccctgggtcccgggagggctcag

SEQ ID NO: 5788315 - DNA, 25 bp, Homo sapien
gagttgtgaaagttttgagtagata

SEQ ID NO: 5788316 - DNA, 25 bp, Homo sapien
tctttttaaaatggtgcttaagttc

SEQ ID NO: 5788317 - DNA, 25 bp, Homo sapien
ttgactcgctacagccctgcttcta

SEQ ID NO: 5788318 - DNA, 25 bp, Homo sapien
gcaagacagcagcagttgctaaaga

SEQ ID NO: 5788319 - DNA, 25 bp, Homo sapien
tttagtatgacgctgatacataact

SEQ ID NO: 5788320 - DNA, 25 bp, Homo sapien
gccccggcggcgggccctgcggtcg

SEQ ID NO: 5788321 - DNA, 25 bp, Homo sapien
aagctgcagcacggccgcgggccgc

SEQ ID NO: 5788322 - DNA, 25 bp, Homo sapien
ttagactggaagttcatacctaagt

SEQ ID NO: 5788323 - DNA, 25 bp, Homo sapien
tccccgggagccggcgccgccagcc

SEQ ID NO: 5788324 - DNA, 25 bp, Homo sapien
tctgcaagaacccagacctcgagtt

SEQ ID NO: 5788325 - DNA, 25 bp, Homo sapien
ctgtttcttcctgttaatgtatttg

SEQ ID NO: 5788326 - DNA, 25 bp, Homo sapien
gaagaaatcgacgtggtcactgtgg

SEQ ID NO: 5788327 - DNA, 25 bp, Homo sapien
gccggggccgccctgcccgccgagc

SEQ ID NO: 5788328 - DNA, 25 bp, Homo sapien
ttgcagtgttggaggtcggcgccgg

SEQ ID NO: 5788329 - DNA, 25 bp, Homo sapien
ccctgagcgattcagatgatgaaga

SEQ ID NO: 5788330 - DNA, 25 bp, Homo sapien
ggctgttgaagtcaccttgtgtgtt

SEQ ID NO: 5788331 - DNA, 25 bp, Homo sapien
aattcttacactgcctgtatacttt

SEQ ID NO: 5788332 - DNA, 25 bp, Homo sapien
caagtttccaaacaacagaaagtca

SEQ ID NO: 5788333 - DNA, 25 bp, Homo sapien
acgaagatgacttctacttcggcgg

SEQ ID NO: 5788334 - DNA, 25 bp, Homo sapien
gcctgtttcttcctgttaatgtatt

SEQ ID NO: 5788335 - DNA, 25 bp, Homo sapien
taagttccagcagatgccacataag

SEQ ID NO: 5788336 - DNA, 25 bp, Homo sapien
aatgagaaggccgccaaggtggtca

SEQ ID NO: 5788337 - DNA, 25 bp, Homo sapien
gcagcagttgctaaagaaaattgaa

SEQ ID NO: 5788338 - DNA, 25 bp, Homo sapien
gatcctcaaacgatgccttcccatc

SEQ ID NO: 5788339 - DNA, 25 bp, Homo sapien
ttggtgcatagaactgggtaaatgc

SEQ ID NO: 5788340 - DNA, 25 bp, Homo sapien
aatgcaaagttctgtgtttaatttc

SEQ ID NO: 5788341 - DNA, 25 bp, Homo sapien
tgaaaaaggccactgagtatgtcca

SEQ ID NO: 5788342 - DNA, 25 bp, Homo sapien
cgtggagagtgaggatgcaccccca

SEQ ID NO: 5788343 - DNA, 25 bp, Homo sapien
gttgacattaagaatgttggtttac

SEQ ID NO: 5788344 - DNA, 25 bp, Homo sapien
caaaggctaagagcttgagcccccg

SEQ ID NO: 5788345 - DNA, 25 bp, Homo sapien
agtttgagctgctgcccacgccccc

SEQ ID NO: 5788346 - DNA, 25 bp, Homo sapien
caaacgatgccttcccatccaccag

SEQ ID NO: 5788347 - DNA, 25 bp, Homo sapien
tcgcgggcacggcggggctgcggga

SEQ ID NO: 5788348 - DNA, 25 bp, Homo sapien
ggccctgcggtcgcctcgggggcgg

SEQ ID NO: 5788349 - DNA, 25 bp, Homo sapien
ctttttcctagcctgtttcttcctg

SEQ ID NO: 5788350 - DNA, 25 bp, Homo sapien
cagccctgcgggtcgcgggcacggc

SEQ ID NO: 5788351 - DNA, 25 bp, Homo sapien
caaaatgtatatatttagtgctgca

SEQ ID NO: 5788352 - DNA, 25 bp, Homo sapien
gaggcgagccgatgccgagctgctc

SEQ ID NO: 5788353 - DNA, 25 bp, Homo sapien
tttgagctgctgcccacgcccccgc

SEQ ID NO: 5788354 - DNA, 25 bp, Homo sapien
cgcccacccggccgccgagtgcgtg

SEQ ID NO: 5788355 - DNA, 25 bp, Homo sapien
atcctgggtaatgagaggtggcttt

SEQ ID NO: 5788356 - DNA, 25 bp, Homo sapien
cgcccctccgcgcccaggcggccgc

SEQ ID NO: 5788357 - DNA, 25 bp, Homo sapien
tggggaacatttctgtaaataccat

SEQ ID NO: 5788358 - DNA, 25 bp, Homo sapien
ttcttcctgttaatgtatttgttca

SEQ ID NO: 5788359 - DNA, 25 bp, Homo sapien
ttgcaggcaagacagcagcagttgc

SEQ ID NO: 5788360 - DNA, 25 bp, Homo sapien
cgcccgcgagaagctggagcgcgcc

SEQ ID NO: 5788361 - DNA, 25 bp, Homo sapien
gccagtgccccggcggcgggccctg

SEQ ID NO: 5788362 - DNA, 25 bp, Homo sapien
cgaggcgtccccacgtccgctcaag

SEQ ID NO: 5788363 - DNA, 25 bp, Homo sapien
cagtgtggggttctgctgggacctt

SEQ ID NO: 5788364 - DNA, 25 bp, Homo sapien
tagatattactttatcactttttga

SEQ ID NO: 5788365 - DNA, 25 bp, Homo sapien
agcgcgagccagcgcccgtgcccgc

SEQ ID NO: 5788366 - DNA, 25 bp, Homo sapien
gacagcagcagttgctaaagaaaat

SEQ ID NO: 5788367 - DNA, 25 bp, Homo sapien
cttcccctttcccgtgaacaagcgc

SEQ ID NO: 5788368 - DNA, 25 bp, Homo sapien
gccccggccagtgccccggcggcgg

SEQ ID NO: 5788369 - DNA, 25 bp, Homo sapien
ttggtgacggttgggagcctctggg

SEQ ID NO: 5788370 - DNA, 25 bp, Homo sapien
tactaattcttacactgcctgtata

SEQ ID NO: 5788371 - DNA, 25 bp, Homo sapien
aaaaaggccactgagtatgtccact

SEQ ID NO: 5788372 - DNA, 25 bp, Homo sapien
atacccctggggaacatttctgtaa

SEQ ID NO: 5788373 - DNA, 25 bp, Homo sapien
gccctgcagcctcctccacctcacc

SEQ ID NO: 5788374 - DNA, 25 bp, Homo sapien
cccgggagggctcagtccagcgagc

SEQ ID NO: 5788375 - DNA, 25 bp, Homo sapien
ccggacgaagatgacttctacttcg

SEQ ID NO: 5788376 - DNA, 25 bp, Homo sapien
aagttttgagtagatattactttat

SEQ ID NO: 5788377 - DNA, 25 bp, Homo sapien
gcgccggcccccgccttccgcgccc

SEQ ID NO: 5788378 - DNA, 25 bp, Homo sapien
ggatgctgggtggccctgcagcctc

SEQ ID NO: 5788379 - DNA, 25 bp, Homo sapien
ggccgcgccggggccgccctgcccg

SEQ ID NO: 5788380 - DNA, 25 bp, Homo sapien
cccgtgaacaagcgcgagccagcgc

SEQ ID NO: 5788381 - DNA, 25 bp, Homo sapien
aactaaatttgatacttatattttc

SEQ ID NO: 5788382 - DNA, 25 bp, Homo sapien
gggagcctctggggctgttgaagtc

SEQ ID NO: 5788383 - DNA, 25 bp, Homo sapien
atatgcctttttcctagcctgtttc

SEQ ID NO: 5788384 - DNA, 25 bp, Homo sapien
tgcacattttgattttttttttaaa

SEQ ID NO: 5788385 - DNA, 25 bp, Homo sapien
gacacatccgccttttgtatacatc

SEQ ID NO: 5788386 - DNA, 25 bp, Homo sapien
gctgggaccttggagagcctgcatc

SEQ ID NO: 5788387 - DNA, 25 bp, Homo sapien
ttgttcatgtttggtgcatagaact

SEQ ID NO: 5788388 - DNA, 25 bp, Homo sapien
cggctctgggtgggcagtaggacca

SEQ ID NO: 5788389 - DNA, 25 bp, Homo sapien
ggctaagagcttgagcccccgaaac

SEQ ID NO: 5788390 - DNA, 25 bp, Homo sapien
gaactgggtaaatgcaaagttctgt

SEQ ID NO: 5788391 - DNA, 25 bp, Homo sapien
ccctttcccgtgaacaagcgcgagc

SEQ ID NO: 5788392 - DNA, 25 bp, Homo sapien
tgggaccttggagagcctgcatccc

SEQ ID NO: 5788393 - DNA, 25 bp, Homo sapien
cccaggcggccgccagaccagcggc

SEQ ID NO: 5788394 - DNA, 25 bp, Homo sapien
cgccagaccagcggcggcgaccaca

SEQ ID NO: 5788395 - DNA, 25 bp, Homo sapien
gtgcgtggatcccgccgtggtcttc

SEQ ID NO: 5788396 - DNA, 25 bp, Homo sapien
cccacccggccgccgagtgcgtgga

SEQ ID NO: 5788397 - DNA, 25 bp, Homo sapien
tagaactgggtaaatgcaaagttct

SEQ ID NO: 5788398 - DNA, 25 bp, Homo sapien
atgctgcttgagaacgagctgtggg

SEQ ID NO: 5788399 - DNA, 25 bp, Homo sapien
tgacggttgggagcctctggggctg

SEQ ID NO: 5788400 - DNA, 25 bp, Homo sapien
tggagcgcgccgtgagcgagaagct

SEQ ID NO: 5788401 - DNA, 25 bp, Homo sapien
ggagggctcagtccagcgagctgat

SEQ ID NO: 5788402 - DNA, 25 bp, Homo sapien
atatattgttaatctctgttatgta

SEQ ID NO: 5788403 - DNA, 25 bp, Homo sapien
gttttgagtagatattactttatca

SEQ ID NO: 5788404 - DNA, 25 bp, Homo sapien
ttgagaacgagctgtggggcagccc

SEQ ID NO: 5788405 - DNA, 25 bp, Homo sapien
actccctccaggccgaggagcacca

SEQ ID NO: 5788406 - DNA, 25 bp, Homo sapien
cgcttctcaaaactggacagtcact

SEQ ID NO: 5788407 - DNA, 25 bp, Homo sapien
gttgtgaaagttttgagtagatatt

SEQ ID NO: 5788408 - DNA, 25 bp, Homo sapien
aaataccattgacacatccgccttt

SEQ ID NO: 5788409 - DNA, 25 bp, Homo sapien
actatgccgccccctctccctacgt

SEQ ID NO: 5788410 - DNA, 25 bp, Homo sapien
cagcctcctccacctcacctccatg

SEQ ID NO: 5788411 - DNA, 25 bp, Homo sapien
ttgaggagcatgttttgtatacaaa

SEQ ID NO: 5788412 - DNA, 25 bp, Homo sapien
cccacgcccccgctgtcgcccagcc

SEQ ID NO: 5788413 - DNA, 25 bp, Homo sapien
tcgcagaaaccacaacatcctggag

SEQ ID NO: 5788414 - DNA, 25 bp, Homo sapien
ctgctgggaccttggagagcctgca

SEQ ID NO: 5788415 - DNA, 25 bp, Homo sapien
caaacattgtgttgacattaagaat

SEQ ID NO: 5788416 - DNA, 25 bp, Homo sapien
gcgccggggccgccctgcccgccga

SEQ ID NO: 5788417 - DNA, 25 bp, Homo sapien
accattgacacatccgccttttgta

SEQ ID NO: 5788418 - DNA, 25 bp, Homo sapien
gcgccagcgccgcaacgaccttcgg

SEQ ID NO: 5788419 - DNA, 25 bp, Homo sapien
gtaaagaatgagaaggccgccaagg

SEQ ID NO: 5788420 - DNA, 25 bp, Homo sapien
ccgaggagcaccagcttttgctgga

SEQ ID NO: 5788421 - DNA, 25 bp, Homo sapien
gggtcgcccctccgcgcccaggcgg

SEQ ID NO: 5788422 - DNA, 25 bp, Homo sapien
atttctgtaaataccattgacacat

SEQ ID NO: 5788423 - DNA, 25 bp, Homo sapien
gagcgattcagatgatgaagatgat

SEQ ID NO: 5788424 - DNA, 25 bp, Homo sapien
gttgctaaagaaaattgaacacgct

SEQ ID NO: 5788425 - DNA, 25 bp, Homo sapien
gctaaacgttggtgacggttgggag

SEQ ID NO: 5788426 - DNA, 25 bp, Homo sapien
tcggacttgctagacgcttctcaaa

SEQ ID NO: 5788427 - DNA, 25 bp, Homo sapien
tcactgtggagaagcggcgttcctc

SEQ ID NO: 5788428 - DNA, 25 bp, Homo sapien
tcaagagtgtcatccccccaaaggc

SEQ ID NO: 5788429 - DNA, 25 bp, Homo sapien
gagagtgaggatgcacccccacaga

SEQ ID NO: 5788430 - DNA, 25 bp, Homo sapien
gagcggcttctccgcccgcgagaag

SEQ ID NO: 5788431 - DNA, 25 bp, Homo sapien
gagcgccagcgccgcaacgaccttc

SEQ ID NO: 5788432 - DNA, 25 bp, Homo sapien
cggggctgcgggagccggccgcgcc

SEQ ID NO: 5788433 - DNA, 25 bp, Homo sapien
gtcgcccagccgtggcttcgcggag

SEQ ID NO: 5788434 - DNA, 25 bp, Homo sapien
taatgtatttgttcatgtttggtgc

SEQ ID NO: 5788435 - DNA, 25 bp, Homo sapien
aaatggtgcttaagttccagcagat

SEQ ID NO: 5788436 - DNA, 25 bp, Homo sapien
gctgcagcacggccgcgggccgcca

SEQ ID NO: 5788437 - DNA, 25 bp, Homo sapien
ctcggaggacagtgagcgtcgcaga

SEQ ID NO: 5788438 - DNA, 25 bp, Homo sapien
aggtggtcattttgaaaaaggccac

SEQ ID NO: 5788439 - DNA, 25 bp, Homo sapien
gtgttccaagtttccaaacaacaga

SEQ ID NO: 5788440 - DNA, 25 bp, Homo sapien
gcgttcggcctggggggactgggtg

SEQ ID NO: 5788441 - DNA, 25 bp, Homo sapien
ccctcagtacctccggagaggacac

SEQ ID NO: 5788442 - DNA, 25 bp, Homo sapien
accttggagagcctgcatcccagga

SEQ ID NO: 5788443 - DNA, 25 bp, Homo sapien
gcagccctgggtcccgggagggctc

SEQ ID NO: 5788444 - DNA, 25 bp, Homo sapien
cattgacacatccgccttttgtata

SEQ ID NO: 5788445 - DNA, 25 bp, Homo sapien
ccaccatgccgggcatgatctgcaa

SEQ ID NO: 5788446 - DNA, 25 bp, Homo sapien
gtatacatcctgggtaatgagaggt

SEQ ID NO: 5788447 - DNA, 25 bp, Homo sapien
ctccatgacagcgctaaacgttggt

SEQ ID NO: 5788448 - DNA, 25 bp, Homo sapien
cccctctccctacgtggagagtgag

SEQ ID NO: 5788449 - DNA, 25 bp, Homo sapien
caacatcctggagcgccagcgccgc

SEQ ID NO: 5788450 - DNA, 25 bp, Homo sapien
ggccgggaggcgagccgatgccgag

SEQ ID NO: 5788451 - DNA, 25 bp, Homo sapien
atttagtgctgcatcttatagcact

SEQ ID NO: 5788452 - DNA, 25 bp, Homo sapien
atgacttctacttcggcggccccga

SEQ ID NO: 5788453 - DNA, 25 bp, Homo sapien
ggcttctccgcccgcgagaagctgg

SEQ ID NO: 5788454 - DNA, 25 bp, Homo sapien
tgggtcacggagatgctgcttgaga

SEQ ID NO: 5788455 - DNA, 25 bp, Homo sapien
gaggacagtgagcgtcgcagaaacc

SEQ ID NO: 5788456 - DNA, 25 bp, Homo sapien
ctccacgtccaccatgccgggcatg

SEQ ID NO: 5788457 - DNA, 25 bp, Homo sapien
gatcccgccgtggtcttcccctttc

SEQ ID NO: 5788458 - DNA, 25 bp, Homo sapien
cccaagaacgcagccctgggtcccg

SEQ ID NO: 5788459 - DNA, 25 bp, Homo sapien
atatatatatgcctttttcctagcc

SEQ ID NO: 5788460 - DNA, 25 bp, Homo sapien
cccagccgtggcttcgcggagcaca

SEQ ID NO: 5788461 - DNA, 25 bp, Homo sapien
tgtggggcagcccggccgaggagga

SEQ ID NO: 5788462 - DNA, 25 bp, Homo sapien
tatagcactttgaaatacctcatgt

SEQ ID NO: 5788463 - DNA, 25 bp, Homo sapien
aaagaatgagaaggccgccaaggtg

SEQ ID NO: 5788464 - DNA, 25 bp, Homo sapien
ttgccatttgatacccctggggaac

SEQ ID NO: 5788465 - DNA, 25 bp, Homo sapien
gtgttgacattaagaatgttggttt

SEQ ID NO: 5788466 - DNA, 25 bp, Homo sapien
ccgccgagctcgcccacccggccgc

SEQ ID NO: 5788467 - DNA, 25 bp, Homo sapien
cgcgccccccacgggaaggaagcac

SEQ ID NO: 5788468 - DNA, 25 bp, Homo sapien
gaagataaagagcgaggcgtcccca

SEQ ID NO: 5788469 - DNA, 25 bp, Homo sapien
tgtcggttgcagtgttggaggtcgg

SEQ ID NO: 5788470 - DNA, 25 bp, Homo sapien
caacgaccttcggtccagctttctc

SEQ ID NO: 5788471 - DNA, 25 bp, Homo sapien
tttactttcaaatcggtcccctgtc

SEQ ID NO: 5788472 - DNA, 25 bp, Homo sapien
cgctgatacataactaaatttgata

SEQ ID NO: 5788473 - DNA, 25 bp, Homo sapien
gaagatgaagaggaagaaatcgacg

SEQ ID NO: 5788474 - DNA, 25 bp, Homo sapien
caccgcccagtccccgggagccggc

SEQ ID NO: 5788475 - DNA, 25 bp, Homo sapien
cctccgcgcccaggcggccgccaga

SEQ ID NO: 5788476 - DNA, 25 bp, Homo sapien
aggcaagacagcagcagttgctaaa

SEQ ID NO: 5788477 - DNA, 25 bp, Homo sapien
agctgatcctcaaacgatgccttcc

SEQ ID NO: 5788478 - DNA, 25 bp, Homo sapien
gctctgggtgggcagtaggaccacc

SEQ ID NO: 5788479 - DNA, 25 bp, Homo sapien
ttgaactaagaaacttttgtaaaga

SEQ ID NO: 5788480 - DNA, 25 bp, Homo sapien
gtttgaggagcatgttttgtataca

SEQ ID NO: 5788481 - DNA, 25 bp, Homo sapien
ggacagtcactgccactttgcacat

SEQ ID NO: 5788482 - DNA, 25 bp, Homo sapien
ctgtcgcccagccgtggcttcgcgg

SEQ ID NO: 5788483 - DNA, 25 bp, Homo sapien
tctccctacgtggagagtgaggatg

SEQ ID NO: 5788484 - DNA, 25 bp, Homo sapien
agccgatgccgagctgctccacgtc

SEQ ID NO: 5788485 - DNA, 25 bp, Homo sapien
ctcctccacctcacctccatgacag

SEQ ID NO: 5788486 - DNA, 25 bp, Homo sapien
aggaagaaatcgacgtggtcactgt

SEQ ID NO: 5788487 - DNA, 25 bp, Homo sapien
cgcccgtgcccgcagccccggccag

SEQ ID NO: 5788488 - DNA, 25 bp, Homo sapien
aagtcaccttgtgtgttccaagttt

SEQ ID NO: 5788489 - DNA, 25 bp, Homo sapien
tactttcaaatcggtcccctgtcga

SEQ ID NO: 5788490 - DNA, 25 bp, Homo sapien
cccccaaaggctaagagcttgagcc

SEQ ID NO: 5788491 - DNA, 25 bp, Homo sapien
aaaactggacagtcactgccacttt

SEQ ID NO: 5788492 - DNA, 25 bp, Homo sapien
acgctcggacttgctagacgcttct

SEQ ID NO: 5788493 - DNA, 25 bp, Homo sapien
tggaaaaggaaaaattgcaggcaag

SEQ ID NO: 5788494 - DNA, 25 bp, Homo sapien
ggacatctggaagaagtttgagctg

SEQ ID NO: 5788495 - DNA, 25 bp, Homo sapien
aaatgagttgtgaaagttttgagta

SEQ ID NO: 5788496 - DNA, 25 bp, Homo sapien
actttagtatgacgctgatacataa

SEQ ID NO: 5788497 - DNA, 25 bp, Homo sapien
cttatagcactttgaaatacctcat

SEQ ID NO: 5788498 - DNA, 25 bp, Homo sapien
gccgccctgcccgccgagctcgccc

SEQ ID NO: 5788499 - DNA, 25 bp, Homo sapien
catccccccaaaggctaagagcttg

SEQ ID NO: 5788500 - DNA, 25 bp, Homo sapien
ctgcatcccaggatgctgggtggcc

SEQ ID NO: 5788501 - DNA, 25 bp, Homo sapien
gcggccgccagaccagcggcggcga

SEQ ID NO: 5788502 - DNA, 25 bp, Homo sapien
cgtgagcgagaagctgcagcacggc

SEQ ID NO: 5788503 - DNA, 25 bp, Homo sapien
aagttctgtgtttaatttcttcaaa

SEQ ID NO: 5788504 - DNA, 25 bp, Homo sapien
tagcactttgaaatacctcatgttt

SEQ ID NO: 5788505 - DNA, 25 bp, Homo sapien
gttccaagtttccaaacaacagaaa

SEQ ID NO: 5788506 - DNA, 25 bp, Homo sapien
cagcgctaaacgttggtgacggttg

SEQ ID NO: 5788507 - DNA, 25 bp, Homo sapien
tgtgtttaatttcttcaaaatgtat

SEQ ID NO: 5788508 - DNA, 25 bp, Homo sapien
aggctgtcaccacattcaccatcac

SEQ ID NO: 5788509 - DNA, 25 bp, Homo sapien
gagtgaggatgcacccccacagaag

SEQ ID NO: 5788510 - DNA, 25 bp, Homo sapien
gtcatccccccaaaggctaagagct

SEQ ID NO: 5788511 - DNA, 25 bp, Homo sapien
agttccagcagatgccacataaggg

SEQ ID NO: 5788512 - DNA, 25 bp, Homo sapien
gaagttcatacctaagtactgtaat

SEQ ID NO: 5788513 - DNA, 25 bp, Homo sapien
caactatgccgccccctctccctac

SEQ ID NO: 5788514 - DNA, 25 bp, Homo sapien
tattagactggaagttcatacctaa

SEQ ID NO: 5788515 - DNA, 25 bp, Homo sapien
gtcccgggagggctcagtccagcga

SEQ ID NO: 5788516 - DNA, 25 bp, Homo sapien
ccgggcatgatctgcaagaacccag

SEQ ID NO: 5788517 - DNA, 25 bp, Homo sapien
ttcaaaatgtatatatttagtgctg

SEQ ID NO: 5788518 - DNA, 25 bp, Homo sapien
cgcccaggcggccgccagaccagcg

SEQ ID NO: 5788519 - DNA, 25 bp, Homo sapien
agtactgtaataatacctcaatgtt

SEQ ID NO: 5788520 - DNA, 25 bp, Homo sapien
gccttcccatccaccagcagcacaa

SEQ ID NO: 5788521 - DNA, 25 bp, Homo sapien
agagcgaggcgtccccacgtccgct

SEQ ID NO: 5788522 - DNA, 25 bp, Homo sapien
caaggctgtcaccacattcaccatc

SEQ ID NO: 5788523 - DNA, 25 bp, Homo sapien
cccggccgaggaggacgcgttcggc

SEQ ID NO: 5788524 - DNA, 25 bp, Homo sapien
tgcccgcagccccggccagtgcccc

SEQ ID NO: 5788525 - DNA, 25 bp, Homo sapien
acataaggggtttgccatttgatac

SEQ ID NO: 5788526 - DNA, 25 bp, Homo sapien
agaagctgcagcacggccgcgggcc

SEQ ID NO: 5788527 - DNA, 25 bp, Homo sapien
gcctctggggctgttgaagtcacct

SEQ ID NO: 5788528 - DNA, 25 bp, Homo sapien
cagatgccacataaggggtttgcca

SEQ ID NO: 5788529 - DNA, 25 bp, Homo sapien
tccgcgcccaggcggccgccagacc

SEQ ID NO: 5788530 - DNA, 25 bp, Homo sapien
tccaagtttccaaacaacagaaagt

SEQ ID NO: 5788531 - DNA, 25 bp, Homo sapien
gatgccacataaggggtttgccatt

SEQ ID NO: 5788532 - DNA, 25 bp, Homo sapien
caagaacccagacctcgagtttgac

SEQ ID NO: 5788533 - DNA, 25 bp, Homo sapien
tctccgcccgcgagaagctggagcg

SEQ ID NO: 5788534 - DNA, 25 bp, Homo sapien
ggtattgccgccccagccggggccc

SEQ ID NO: 5788535 - DNA, 25 bp, Homo sapien
agcacaactatgccgccccctctcc

SEQ ID NO: 5788536 - DNA, 25 bp, Homo sapien
ccacaaggccctcagtacctccgga

SEQ ID NO: 5788537 - DNA, 25 bp, Homo sapien
tttatcactttttgaactaagaaac

SEQ ID NO: 5788538 - DNA, 25 bp, Homo sapien
aagaagtttgagctgctgcccacgc

SEQ ID NO: 5788539 - DNA, 25 bp, Homo sapien
agaggacaccctgagcgattcagat

SEQ ID NO: 5788540 - DNA, 25 bp, Homo sapien
ccctgggtcccgggagggctcagtc

SEQ ID NO: 5788541 - DNA, 25 bp, Homo sapien
gggaccacgtgccggagttggtaaa

SEQ ID NO: 5788542 - DNA, 25 bp, Homo sapien
cccaacccggtcatcctccaggact

SEQ ID NO: 5788543 - DNA, 25 bp, Homo sapien
gggaacatttctgtaaataccattg

SEQ ID NO: 5788544 - DNA, 25 bp, Homo sapien
cggaaagaagccctcagtcgccggc

SEQ ID NO: 5788545 - DNA, 25 bp, Homo sapien
cgagctgatcctcaaacgatgcctt

SEQ ID NO: 5788546 - DNA, 25 bp, Homo sapien
gtccaccatgccgggcatgatctgc

SEQ ID NO: 5788547 - DNA, 25 bp, Homo sapien
ccgagcccccgagctgggtcacgga

SEQ ID NO: 5788548 - DNA, 25 bp, Homo sapien
agccctgcttctacccggacgaaga

SEQ ID NO: 5788549 - DNA, 25 bp, Homo sapien
gaagtttgagctgctgcccacgccc

SEQ ID NO: 5788550 - DNA, 25 bp, Homo sapien
gcctcctccacctcacctccatgac

SEQ ID NO: 5788551 - DNA, 25 bp, Homo sapien
ggccagtattagactggaagttcat

SEQ ID NO: 5788552 - DNA, 25 bp, Homo sapien
gttcctcctccaacaccaaggctgt

SEQ ID NO: 5788553 - DNA, 25 bp, Homo sapien
gtccgctcaagagtgtcatcccccc

SEQ ID NO: 5788554 - DNA, 25 bp, Homo sapien
ccggcgccgccagccctgcgggtcg

SEQ ID NO: 5788555 - DNA, 25 bp, Homo sapien
gtatttgttcatgtttggtgcatag

SEQ ID NO: 5788556 - DNA, 25 bp, Homo sapien
atacctcaatgtttgaggagcatgt

SEQ ID NO: 5788557 - DNA, 25 bp, Homo sapien
tgccacataaggggtttgccatttg

SEQ ID NO: 5788558 - DNA, 25 bp, Homo sapien
tgcttgagaacgagctgtggggcag

SEQ ID NO: 5788559 - DNA, 25 bp, Homo sapien
ctgtaaataccattgacacatccgc

SEQ ID NO: 5788560 - DNA, 25 bp, Homo sapien
cttcccatccaccagcagcacaact

SEQ ID NO: 5788561 - DNA, 25 bp, Homo sapien
atgagttgtgaaagttttgagtaga

SEQ ID NO: 5788562 - DNA, 25 bp, Homo sapien
ctgatacataactaaatttgatact

SEQ ID NO: 5788563 - DNA, 25 bp, Homo sapien
atggtgcttaagttccagcagatgc

SEQ ID NO: 5788564 - DNA, 25 bp, Homo sapien
caggatgctgggtggccctgcagcc

SEQ ID NO: 5788565 - DNA, 25 bp, Homo sapien
gtggggttctgctgggaccttggag

SEQ ID NO: 5788566 - DNA, 25 bp, Homo sapien
ccggagaggacaccctgagcgattc

SEQ ID NO: 5788567 - DNA, 25 bp, Homo sapien
aacattgtgttgacattaagaatgt

SEQ ID NO: 5788568 - DNA, 25 bp, Homo sapien
acaaggccctcagtacctccggaga

SEQ ID NO: 5788569 - DNA, 25 bp, Homo sapien
gagcccccgagctgggtcacggaga

SEQ ID NO: 5788570 - DNA, 25 bp, Homo sapien
tcctgttaatgtatttgttcatgtt

SEQ ID NO: 5788571 - DNA, 25 bp, Homo sapien
tctgtcggttgcagtgttggaggtc

SEQ ID NO: 5788572 - DNA, 25 bp, Homo sapien
caagcgcgagccagcgcccgtgccc

SEQ ID NO: 5788573 - DNA, 25 bp, Homo sapien
gtcggcgccggcccccgccttccgc

SEQ ID NO: 5788574 - DNA, 25 bp, Homo sapien
cagtccagcgagctgatcctcaaac

SEQ ID NO: 5788575 - DNA, 25 bp, Homo sapien
atgacagcgctaaacgttggtgacg

SEQ ID NO: 5788576 - DNA, 25 bp, Homo sapien
cttcctgttaatgtatttgttcatg

SEQ ID NO: 5788577 - DNA, 25 bp, Homo sapien
cacccccaacccggtcatcctccag

SEQ ID NO: 5788578 - DNA, 25 bp, Homo sapien
ttctgctgggaccttggagagcctg

SEQ ID NO: 5788579 - DNA, 25 bp, Homo sapien
gcccccgagctgggtcacggagatg

SEQ ID NO: 5788580 - DNA, 25 bp, Homo sapien
gcgggtcgcgggcacggcggggctg

SEQ ID NO: 5788581 - DNA, 25 bp, Homo sapien
tcacggagatgctgcttgagaacga

SEQ ID NO: 5788582 - DNA, 25 bp, Homo sapien
ccggccgggaggcgagccgatgccg

SEQ ID NO: 5788583 - DNA, 25 bp, Homo sapien
cccaggatgctgggtggccctgcag

SEQ ID NO: 5788584 - DNA, 25 bp, Homo sapien
gctgggtcacggagatgctgcttga

SEQ ID NO: 5788585 - DNA, 25 bp, Homo sapien
gaggtcggcgccggcccccgccttc

SEQ ID NO: 5788586 - DNA, 25 bp, Homo sapien
tgcaagaacccagacctcgagtttg

SEQ ID NO: 5788587 - DNA, 25 bp, Homo sapien
aaatcgacgtggtcactgtggagaa

SEQ ID NO: 5788588 - DNA, 25 bp, Homo sapien
ggtcattttgaaaaaggccactgag

SEQ ID NO: 5788589 - DNA, 25 bp, Homo sapien
atgtatttgttcatgtttggtgcat

SEQ ID NO: 5788590 - DNA, 25 bp, Homo sapien
gcgccgcaacgaccttcggtccagc

SEQ ID NO: 5788591 - DNA, 25 bp, Homo sapien
ggacgcgttcggcctggggggactg

SEQ ID NO: 5788592 - DNA, 25 bp, Homo sapien
tggcctcacccccaacccggtcatc

SEQ ID NO: 5788593 - DNA, 25 bp, Homo sapien
cgggggaggacatctggaagaagtt

SEQ ID NO: 5788594 - DNA, 25 bp, Homo sapien
cagtcgccggccgggaggcgagccg

SEQ ID NO: 5788595 - DNA, 25 bp, Homo sapien
taagaatgttggtttactttcaaat

SEQ ID NO: 5788596 - DNA, 25 bp, Homo sapien
aactctgactcggaggacagtgagc

SEQ ID NO: 5788597 - DNA, 25 bp, Homo sapien
ttaatctctgttatgtactgtacta

SEQ ID NO: 5788598 - DNA, 25 bp, Homo sapien
cacaactatgccgccccctctccct

SEQ ID NO: 5788599 - DNA, 25 bp, Homo sapien
agttcatacctaagtactgtaataa

SEQ ID NO: 5788600 - DNA, 25 bp, Homo sapien
ccatgacagcgctaaacgttggtga

SEQ ID NO: 5788601 - DNA, 25 bp, Homo sapien
ttcccgtgaacaagcgcgagccagc

SEQ ID NO: 5788602 - DNA, 25 bp, Homo sapien
tattactttatcactttttgaacta

SEQ ID NO: 5788603 - DNA, 25 bp, Homo sapien
gagctgtggggcagcccggccgagg

SEQ ID NO: 5788604 - DNA, 25 bp, Homo sapien
gatattactttatcactttttgaac

SEQ ID NO: 5788605 - DNA, 25 bp, Homo sapien
ttgatacttatattttcgtatgaaa

SEQ ID NO: 5788606 - DNA, 25 bp, Homo sapien
gtcgcctcgggggcgggtattgccg

SEQ ID NO: 5788607 - DNA, 25 bp, Homo sapien
cggcgaccacaaggccctcagtacc

SEQ ID NO: 5788608 - DNA, 25 bp, Homo sapien
cctggagcgccagcgccgcaacgac

SEQ ID NO: 5788609 - DNA, 25 bp, Homo sapien
gccgccgagtgcgtggatcccgccg

SEQ ID NO: 5788610 - DNA, 25 bp, Homo sapien
ctcctccaacaccaaggctgtcacc

SEQ ID NO: 5788611 - DNA, 25 bp, Homo sapien
gaaactctgactcggaggacagtga

SEQ ID NO: 5788612 - DNA, 25 bp, Homo sapien
gacagcgctaaacgttggtgacggt

SEQ ID NO: 5788613 - DNA, 25 bp, Homo sapien
gggtttgccatttgatacccctggg

SEQ ID NO: 5788614 - DNA, 25 bp, Homo sapien
tttactatatatatatgcctttttc

SEQ ID NO: 5788615 - DNA, 25 bp, Homo sapien
cgagccgatgccgagctgctccacg

SEQ ID NO: 5788616 - DNA, 25 bp, Homo sapien
atgttggtttactttcaaatcggtc

SEQ ID NO: 5788617 - DNA, 25 bp, Homo sapien
caacccggtcatcctccaggactgc

SEQ ID NO: 5788618 - DNA, 25 bp, Homo sapien
ccgagtgcgtggatcccgccgtggt

SEQ ID NO: 5788619 - DNA, 25 bp, Homo sapien
tttgcacattttgatttttttttta

SEQ ID NO: 5788620 - DNA, 25 bp, Homo sapien
cgacgtggtcactgtggagaagcgg

SEQ ID NO: 5788621 - DNA, 25 bp, Homo sapien
ttgacacatccgccttttgtataca

SEQ ID NO: 5788622 - DNA, 25 bp, Homo sapien
cgcccccgctgtcgcccagccgtgg

SEQ ID NO: 5788623 - DNA, 25 bp, Homo sapien
ctgtaataatacctcaatgtttgag

SEQ ID NO: 5788624 - DNA, 25 bp, Homo sapien
aaagaaaattgaacacgctcggact

SEQ ID NO: 5788625 - DNA, 25 bp, Homo sapien
tcaccacattcaccatcactgtgcg

SEQ ID NO: 5788626 - DNA, 25 bp, Homo sapien
gtaataatacctcaatgtttgagga

SEQ ID NO: 5788627 - DNA, 25 bp, Homo sapien
ttgctggaaaaggaaaaattgcagg

SEQ ID NO: 5788628 - DNA, 25 bp, Homo sapien
gggggtcgcccctccgcgcccaggc

SEQ ID NO: 5788629 - DNA, 25 bp, Homo sapien
ctcagtacctccggagaggacaccc

SEQ ID NO: 5788630 - DNA, 25 bp, Homo sapien
gggcatgatctgcaagaacccagac

SEQ ID NO: 5788631 - DNA, 25 bp, Homo sapien
cgtgaacaagcgcgagccagcgccc

SEQ ID NO: 5788632 - DNA, 25 bp, Homo sapien
cgccctgcccgccgagctcgcccac

SEQ ID NO: 5788633 - DNA, 25 bp, Homo sapien
ctgcttctacccggacgaagatgac

SEQ ID NO: 5788634 - DNA, 25 bp, Homo sapien
accagcggcggcgaccacaaggccc

SEQ ID NO: 5788635 - DNA, 25 bp, Homo sapien
cattgtgttgacattaagaatgttg

SEQ ID NO: 5788636 - DNA, 25 bp, Homo sapien
caggactgcatgtggagcggcttct

SEQ ID NO: 5788637 - DNA, 25 bp, Homo sapien
cgagaagctgcagcacggccgcggg

SEQ ID NO: 5788638 - DNA, 25 bp, Homo sapien
ttcggtccagctttctcacgctcag

SEQ ID NO: 5788639 - DNA, 25 bp, Homo sapien
ggccgaggagcaccagcttttgctg

SEQ ID NO: 5788640 - DNA, 25 bp, Homo sapien
gcgttcctcctccaacaccaaggct

SEQ ID NO: 5788641 - DNA, 25 bp, Homo sapien
gagctgctccacgtccaccatgccg

SEQ ID NO: 5788642 - DNA, 25 bp, Homo sapien
ttgagcccccgaaactctgactcgg

SEQ ID NO: 5788643 - DNA, 25 bp, Homo sapien
ttgaacacgctcggacttgctagac

SEQ ID NO: 5788644 - DNA, 25 bp, Homo sapien
ttttcgtatgaaaatgagttgtgaa

SEQ ID NO: 5788645 - DNA, 25 bp, Homo sapien
ggagccggcgccgccagccctgcgg

SEQ ID NO: 5788646 - DNA, 25 bp, Homo sapien
caaacaacagaaagtcattccttct

SEQ ID NO: 5788647 - DNA, 25 bp, Homo sapien
acctccatgacagcgctaaacgttg

SEQ ID NO: 5788648 - DNA, 25 bp, Homo sapien
gtcgcccctccgcgcccaggcggcc

SEQ ID NO: 5788649 - DNA, 25 bp, Homo sapien
cctaagtactgtaataatacctcaa

SEQ ID NO: 5788650 - DNA, 25 bp, Homo sapien
cctccaggactgcatgtggagcggc

SEQ ID NO: 5788651 - DNA, 25 bp, Homo sapien
cacccggccgccgagtgcgtggatc

SEQ ID NO: 5788652 - DNA, 25 bp, Homo sapien
ccctgtcgagttcggctctgggtgg

SEQ ID NO: 5788653 - DNA, 25 bp, Homo sapien
tttccaaacaacagaaagtcattcc

SEQ ID NO: 5788654 - DNA, 25 bp, Homo sapien
agaaaccacaacatcctggagcgcc

SEQ ID NO: 5788655 - DNA, 25 bp, Homo sapien
ggacgaagatgacttctacttcggc

SEQ ID NO: 5788656 - DNA, 25 bp, Homo sapien
gcgtcccaagaacgcagccctgggt

SEQ ID NO: 5788657 - DNA, 25 bp, Homo sapien
ctcagggaccacgtgccggagttgg

SEQ ID NO: 5788658 - DNA, 25 bp, Homo sapien
gacgcttctcaaaactggacagtca

SEQ ID NO: 5788659 - DNA, 25 bp, Homo sapien
tatgccgccccctctccctacgtgg

SEQ ID NO: 5788660 - DNA, 25 bp, Homo sapien
caacaccaaggctgtcaccacattc

SEQ ID NO: 5788661 - DNA, 25 bp, Homo sapien
gcggcgggccctgcggtcgcctcgg

SEQ ID NO: 5788662 - DNA, 25 bp, Homo sapien
cgcgagccagcgcccgtgcccgcag

SEQ ID NO: 5788663 - DNA, 25 bp, Homo sapien
aaggccctcagtacctccggagagg

SEQ ID NO: 5788664 - DNA, 25 bp, Homo sapien
cagcacggccgcgggccgccaaccg

SEQ ID NO: 5788665 - DNA, 25 bp, Homo sapien
gggcagcccggccgaggaggacgcg

SEQ ID NO: 5788666 - DNA, 25 bp, Homo sapien
gcctggggggactgggtggcctcac

SEQ ID NO: 5788667 - DNA, 25 bp, Homo sapien
tgcttaagttccagcagatgccaca

SEQ ID NO: 5788668 - DNA, 25 bp, Homo sapien
catagaactgggtaaatgcaaagtt

SEQ ID NO: 5788669 - DNA, 25 bp, Homo sapien
gccaaggtggtcattttgaaaaagg

SEQ ID NO: 5788670 - DNA, 25 bp, Homo sapien
gagttggtaaagaatgagaaggccg

SEQ ID NO: 5788671 - DNA, 25 bp, Homo sapien
tctgggtgggcagtaggaccaccag

SEQ ID NO: 5788672 - DNA, 25 bp, Homo sapien
gccatttgatacccctggggaacat

SEQ ID NO: 5788673 - DNA, 25 bp, Homo sapien
tgagctgctgcccacgcccccgctg

SEQ ID NO: 5788674 - DNA, 25 bp, Homo sapien
ttggaggtcggcgccggcccccgcc

SEQ ID NO: 5788675 - DNA, 25 bp, Homo sapien
ttgctagacgcttctcaaaactgga

SEQ ID NO: 5788676 - DNA, 25 bp, Homo sapien
gagagcctgcatcccaggatgctgg

SEQ ID NO: 5788677 - DNA, 25 bp, Homo sapien
gaagatgacttctacttcggcggcc

SEQ ID NO: 5788678 - DNA, 25 bp, Homo sapien
atgatctgcaagaacccagacctcg

SEQ ID NO: 5788679 - DNA, 25 bp, Homo sapien
cgagccagcgcccgtgcccgcagcc

SEQ ID NO: 5788680 - DNA, 25 bp, Homo sapien
ccctgcccgccgagctcgcccaccc

SEQ ID NO: 5788681 - DNA, 25 bp, Homo sapien
taagtactgtaataatacctcaatg

SEQ ID NO: 5788682 - DNA, 25 bp, Homo sapien
ataaagagcgaggcgtccccacgtc

SEQ ID NO: 5788683 - DNA, 25 bp, Homo sapien
atgaagaggaagaaatcgacgtggt

SEQ ID NO: 5788684 - DNA, 25 bp, Homo sapien
tccaaacaacagaaagtcattcctt

SEQ ID NO: 5788685 - DNA, 25 bp, Homo sapien
agcagatgccacataaggggtttgc

SEQ ID NO: 5788686 - DNA, 25 bp, Homo sapien
ccccacgtccgctcaagagtgtcat

SEQ ID NO: 5788687 - DNA, 25 bp, Homo sapien
ctacccggacgaagatgacttctac

SEQ ID NO: 5788688 - DNA, 25 bp, Homo sapien
agtttccaaacaacagaaagtcatt

SEQ ID NO: 5788689 - DNA, 25 bp, Homo sapien
ctggggggactgggtggcctcaccc

SEQ ID NO: 5788690 - DNA, 25 bp, Homo sapien
ggtaatgagaggtggcttttgcggc

SEQ ID NO: 5788691 - DNA, 25 bp, Homo sapien
ggagatgctgcttgagaacgagctg

SEQ ID NO: 5788692 - DNA, 25 bp, Homo sapien
gagaggtggcttttgcggccagtat

SEQ ID NO: 5788693 - DNA, 25 bp, Homo sapien
gagctgggtcacggagatgctgctt

SEQ ID NO: 5788694 - DNA, 25 bp, Homo sapien
cccggccagtgccccggcggcgggc

SEQ ID NO: 5788695 - DNA, 25 bp, Homo sapien
agaccagcggcggcgaccacaaggc

SEQ ID NO: 5788696 - DNA, 25 bp, Homo sapien
cgatgccttcccatccaccagcagc

SEQ ID NO: 5788697 - DNA, 25 bp, Homo sapien
ataaggggtttgccatttgataccc

SEQ ID NO: 5788698 - DNA, 25 bp, Homo sapien
gctgcccacgcccccgctgtcgccc

SEQ ID NO: 5788699 - DNA, 25 bp, Homo sapien
cagcggcggcgaccacaaggccctc

SEQ ID NO: 5788700 - DNA, 25 bp, Homo sapien
cccgcagccccggccagtgccccgg

SEQ ID NO: 5788701 - DNA, 25 bp, Homo sapien
atcactgtgcgtcccaagaacgcag

SEQ ID NO: 5788702 - DNA, 25 bp, Homo sapien
ccacgtccaccatgccgggcatgat

SEQ ID NO: 5788703 - DNA, 25 bp, Homo sapien
gggtcgcgggcacggcggggctgcg

SEQ ID NO: 5788704 - DNA, 25 bp, Homo sapien
taatgagaggtggcttttgcggcca

SEQ ID NO: 5788705 - DNA, 25 bp, Homo sapien
atcctccaggactgcatgtggagcg

SEQ ID NO: 5788706 - DNA, 25 bp, Homo sapien
ttctgtaaataccattgacacatcc

SEQ ID NO: 5788707 - DNA, 25 bp, Homo sapien
aaagagcgaggcgtccccacgtccg

SEQ ID NO: 5788708 - DNA, 25 bp, Homo sapien
acagtgagcgtcgcagaaaccacaa

SEQ ID NO: 5788709 - DNA, 25 bp, Homo sapien
aagagcttgagcccccgaaactctg

SEQ ID NO: 5788710 - DNA, 25 bp, Homo sapien
ttctacccggacgaagatgacttct

SEQ ID NO: 5788711 - DNA, 25 bp, Homo sapien
gagtgtcatccccccaaaggctaag

SEQ ID NO: 5788712 - DNA, 25 bp, Homo sapien
atgctgggtggccctgcagcctcct

SEQ ID NO: 5788713 - DNA, 25 bp, Homo sapien
agtgagcgtcgcagaaaccacaaca

SEQ ID NO: 5788714 - DNA, 25 bp, Homo sapien
cccaaaggctaagagcttgagcccc

SEQ ID NO: 5788715 - DNA, 25 bp, Homo sapien
ctacagccctgcttctacccggacg

SEQ ID NO: 5788716 - DNA, 25 bp, Homo sapien
agaaatcgacgtggtcactgtggag

SEQ ID NO: 5788717 - DNA, 25 bp, Homo sapien
tgcatagaactgggtaaatgcaaag

SEQ ID NO: 5788718 - DNA, 25 bp, Homo sapien
cccctccgcgcccaggcggccgcca

SEQ ID NO: 5788719 - DNA, 25 bp, Homo sapien
ccagtattagactggaagttcatac

SEQ ID NO: 5788720 - DNA, 25 bp, Homo sapien
cgccggccgggaggcgagccgatgc

SEQ ID NO: 5788721 - DNA, 25 bp, Homo sapien
acagtcactgccactttgcacattt

SEQ ID NO: 5788722 - DNA, 25 bp, Homo sapien
ccgccccctctccctacgtggagag

SEQ ID NO: 5788723 - DNA, 25 bp, Homo sapien
catttgatacccctggggaacattt

SEQ ID NO: 5788724 - DNA, 25 bp, Homo sapien
ccgaggaggacgcgttcggcctggg

SEQ ID NO: 5788725 - DNA, 25 bp, Homo sapien
accacattcaccatcactgtgcgtc

SEQ ID NO: 5788726 - DNA, 25 bp, Homo sapien
gtgaggatgcacccccacagaagaa

SEQ ID NO: 5788727 - DNA, 25 bp, Homo sapien
cacatccgccttttgtatacatcct

SEQ ID NO: 5788728 - DNA, 25 bp, Homo sapien
gaccacgtgccggagttggtaaaga

SEQ ID NO: 5788729 - DNA, 25 bp, Homo sapien
catgtggagcggcttctccgcccgc

SEQ ID NO: 5788730 - DNA, 25 bp, Homo sapien
gacaccctgagcgattcagatgatg

SEQ ID NO: 5788731 - DNA, 25 bp, Homo sapien
ctctgactcggaggacagtgagcgt

SEQ ID NO: 5788732 - DNA, 25 bp, Homo sapien
cggggccgccctgcccgccgagctc

SEQ ID NO: 5788733 - DNA, 25 bp, Homo sapien
ttttgctggaaaaggaaaaattgca

SEQ ID NO: 5788734 - DNA, 25 bp, Homo sapien
cgagaagctggagcgcgccgtgagc

SEQ ID NO: 5788735 - DNA, 25 bp, Homo sapien
ggatgcacccccacagaagaagata

SEQ ID NO: 5788736 - DNA, 25 bp, Homo sapien
gttccaccgcccagtccccgggagc

SEQ ID NO: 5788737 - DNA, 25 bp, Homo sapien
gtggtcttcccctttcccgtgaaca

SEQ ID NO: 5788738 - DNA, 25 bp, Homo sapien
acctccggagaggacaccctgagcg

SEQ ID NO: 5788739 - DNA, 25 bp, Homo sapien
agcgcccgtgcccgcagccccggcc

SEQ ID NO: 5788740 - DNA, 25 bp, Homo sapien
aaatacctcatgtttatgaaaataa

SEQ ID NO: 5788741 - DNA, 25 bp, Homo sapien
ctgggtcccgggagggctcagtcca

SEQ ID NO: 5788742 - DNA, 25 bp, Homo sapien
gcagcccggccgaggaggacgcgtt

SEQ ID NO: 5788743 - DNA, 25 bp, Homo sapien
aagctggagcgcgccgtgagcgaga

SEQ ID NO: 5788744 - DNA, 25 bp, Homo sapien
atcccaggatgctgggtggccctgc

SEQ ID NO: 5788745 - DNA, 25 bp, Homo sapien
acgtccaccatgccgggcatgatct

SEQ ID NO: 5788746 - DNA, 25 bp, Homo sapien
ctaaatttgatacttatattttcgt

SEQ ID NO: 5788747 - DNA, 25 bp, Homo sapien
cacgcccccgctgtcgcccagccgt

SEQ ID NO: 5788748 - DNA, 25 bp, Homo sapien
cgtgcccgcagccccggccagtgcc

SEQ ID NO: 5788749 - DNA, 25 bp, Homo sapien
agactggaagttcatacctaagtac

SEQ ID NO: 5788750 - DNA, 25 bp, Homo sapien
ctgactcggaggacagtgagcgtcg

SEQ ID NO: 5788751 - DNA, 25 bp, Homo sapien
gactgggtggcctcacccccaaccc

SEQ ID NO: 5788752 - DNA, 25 bp, Homo sapien
gtatatatttagtgctgcatcttat

SEQ ID NO: 5788753 - DNA, 25 bp, Homo sapien
ttactttatcactttttgaactaag

SEQ ID NO: 5788754 - DNA, 25 bp, Homo sapien
gtgccccggcggcgggccctgcggt

SEQ ID NO: 5788755 - DNA, 25 bp, Homo sapien
ggactgcatgtggagcggcttctcc

SEQ ID NO: 5788756 - DNA, 25 bp, Homo sapien
cagtgccccggcggcgggccctgcg

SEQ ID NO: 5788757 - DNA, 25 bp, Homo sapien
aggaccaccagtgtggggttctgct

SEQ ID NO: 5788758 - DNA, 25 bp, Homo sapien
cggagttggtaaagaatgagaaggc

SEQ ID NO: 5788759 - DNA, 25 bp, Homo sapien
gaaaaattgcaggcaagacagcagc

SEQ ID NO: 5788760 - DNA, 25 bp, Homo sapien
ttcgcggagcacagctccgagcccc

SEQ ID NO: 5788761 - DNA, 25 bp, Homo sapien
tccgcgccccccacgggaaggaagc

SEQ ID NO: 5788762 - DNA, 25 bp, Homo sapien
gcatgttttgtatacaaatatattg

SEQ ID NO: 5788763 - DNA, 25 bp, Homo sapien
gagaacgagctgtggggcagcccgg

SEQ ID NO: 5788764 - DNA, 25 bp, Homo sapien
gaagcggcgttcctcctccaacacc

SEQ ID NO: 5788765 - DNA, 25 bp, Homo sapien
cggccgccgagtgcgtggatcccgc

SEQ ID NO: 5788766 - DNA, 25 bp, Homo sapien
gtcgccggccgggaggcgagccgat

SEQ ID NO: 5788767 - DNA, 25 bp, Homo sapien
cgctacagccctgcttctacccgga

SEQ ID NO: 5788768 - DNA, 25 bp, Homo sapien
ctgttaatgtatttgttcatgtttg

SEQ ID NO: 5788769 - DNA, 25 bp, Homo sapien
ggagcaccagcttttgctggaaaag

SEQ ID NO: 5788770 - DNA, 25 bp, Homo sapien
gtaaataccattgacacatccgcct

SEQ ID NO: 5788771 - DNA, 25 bp, Homo sapien
gaccttcggtccagctttctcacgc

SEQ ID NO: 5788772 - DNA, 25 bp, Homo sapien
ctccgagcccccgagctgggtcacg

SEQ ID NO: 5788773 - DNA, 25 bp, Homo sapien
ctgtcgagttcggctctgggtgggc

SEQ ID NO: 5788774 - DNA, 25 bp, Homo sapien
gcccagtccccgggagccggcgccg

SEQ ID NO: 5788775 - DNA, 25 bp, Homo sapien
gagcccccgaaactctgactcggag

SEQ ID NO: 5788776 - DNA, 25 bp, Homo sapien
caaagttctgtgtttaatttcttca

SEQ ID NO: 5788777 - DNA, 25 bp, Homo sapien
cgagctcgcccacccggccgccgag

SEQ ID NO: 5788778 - DNA, 25 bp, Homo sapien
cggcgccggcccccgccttccgcgc

SEQ ID NO: 5788779 - DNA, 25 bp, Homo sapien
tccgcccgcgagaagctggagcgcg

SEQ ID NO: 5788780 - DNA, 25 bp, Homo sapien
atatttagtgctgcatcttatagca

SEQ ID NO: 5788781 - DNA, 25 bp, Homo sapien
gagaagcggcgttcctcctccaaca

SEQ ID NO: 5788782 - DNA, 25 bp, Homo sapien
ctttcaaatcggtcccctgtcgagt

SEQ ID NO: 5788783 - DNA, 25 bp, Homo sapien
tgaaagttttgagtagatattactt

SEQ ID NO: 5788784 - DNA, 25 bp, Homo sapien
actttgaaatacctcatgtttatga

SEQ ID NO: 5788785 - DNA, 25 bp, Homo sapien
ttgggagcctctggggctgttgaag

SEQ ID NO: 5788786 - DNA, 25 bp, Homo sapien
aaatttgatacttatattttcgtat

SEQ ID NO: 5788787 - DNA, 25 bp, Homo sapien
taaatgcaaagttctgtgtttaatt

SEQ ID NO: 5788788 - DNA, 25 bp, Homo sapien
gtactgtactaattcttacactgcc

SEQ ID NO: 5788789 - DNA, 25 bp, Homo sapien
tgttaatctctgttatgtactgtac

SEQ ID NO: 5788790 - DNA, 25 bp, Homo sapien
aaggctaagagcttgagcccccgaa

SEQ ID NO: 5788791 - DNA, 25 bp, Homo sapien
aaaattgaacacgctcggacttgct

SEQ ID NO: 5788792 - DNA, 25 bp, Homo sapien
tgtgtctgtcggttgcagtgttgga

SEQ ID NO: 5788793 - DNA, 25 bp, Homo sapien
acgcagccctgggtcccgggagggc

SEQ ID NO: 5788794 - DNA, 25 bp, Homo sapien
ggtaaatgcaaagttctgtgtttaa

SEQ ID NO: 5788795 - DNA, 25 bp, Homo sapien
acattaagaatgttggtttactttc

SEQ ID NO: 5788796 - DNA, 25 bp, Homo sapien
atattgttaatctctgttatgtact

SEQ ID NO: 5788797 - DNA, 25 bp, Homo sapien
ttcaaatcggtcccctgtcgagttc

SEQ ID NO: 5788798 - DNA, 25 bp, Homo sapien
agtgctgcatcttatagcactttga

SEQ ID NO: 5788799 - DNA, 25 bp, Homo sapien
gattcagatgatgaagatgatgaag

SEQ ID NO: 5788800 - DNA, 25 bp, Homo sapien
ctaattcttacactgcctgtatact

SEQ ID NO: 5788801 - DNA, 25 bp, Homo sapien
caagaacgcagccctgggtcccggg

SEQ ID NO: 5788802 - DNA, 25 bp, Homo sapien
ttcggctctgggtgggcagtaggac

SEQ ID NO: 5788803 - DNA, 25 bp, Homo sapien
agaagctggagcgcgccgtgagcga

SEQ ID NO: 5788804 - DNA, 25 bp, Homo sapien
gaacgagctgtggggcagcccggcc

SEQ ID NO: 5788805 - DNA, 25 bp, Homo sapien
acatttctgtaaataccattgacac

SEQ ID NO: 5788806 - DNA, 25 bp, Homo sapien
agaacccagacctcgagtttgactc

SEQ ID NO: 5788807 - DNA, 25 bp, Homo sapien
catccgccttttgtatacatcctgg

SEQ ID NO: 5788808 - DNA, 25 bp, Homo sapien
ttttgtatacatcctgggtaatgag

SEQ ID NO: 5788809 - DNA, 25 bp, Homo sapien
agaacgcagccctgggtcccgggag

SEQ ID NO: 5788810 - DNA, 25 bp, Homo sapien
attttgaaaaaggccactgagtatg

SEQ ID NO: 5788811 - DNA, 25 bp, Homo sapien
tttaaacaaacattgtgttgacatt

SEQ ID NO: 5788812 - DNA, 25 bp, Homo sapien
gtatacaaatatattgttaatctct

SEQ ID NO: 5788813 - DNA, 25 bp, Homo sapien
tcttcaaaatgtatatatttagtgc

SEQ ID NO: 5788814 - DNA, 25 bp, Homo sapien
acagaaagtcattccttctttttaa

SEQ ID NO: 5788815 - DNA, 25 bp, Homo sapien
gggccgccctgcccgccgagctcgc

SEQ ID NO: 5788816 - DNA, 25 bp, Homo sapien
ctgcggtcgcctcgggggcgggtat

SEQ ID NO: 5788817 - DNA, 25 bp, Homo sapien
attgttaatctctgttatgtactgt

SEQ ID NO: 5788818 - DNA, 25 bp, Homo sapien
gacctcgagtttgactcgctacagc

SEQ ID NO: 5788819 - DNA, 25 bp, Homo sapien
gtttgactcgctacagccctgcttc

SEQ ID NO: 5788820 - DNA, 25 bp, Homo sapien
ctggggctgttgaagtcaccttgtg

SEQ ID NO: 5788821 - DNA, 25 bp, Homo sapien
gtcttcccctttcccgtgaacaagc

SEQ ID NO: 5788822 - DNA, 25 bp, Homo sapien
gcgccgtgagcgagaagctgcagca

SEQ ID NO: 5788823 - DNA, 25 bp, Homo sapien
ccgggaggcgagccgatgccgagct

SEQ ID NO: 5788824 - DNA, 25 bp, Homo sapien
aaaggaaaaattgcaggcaagacag

SEQ ID NO: 5788825 - DNA, 25 bp, Homo sapien
ggtgcatagaactgggtaaatgcaa

SEQ ID NO: 5788826 - DNA, 25 bp, Homo sapien
gatacttatattttcgtatgaaaat

SEQ ID NO: 5788827 - DNA, 25 bp, Homo sapien
gccagccctgcgggtcgcgggcacg

SEQ ID NO: 5788828 - DNA, 25 bp, Homo sapien
aagaagataaagagcgaggcgtccc

SEQ ID NO: 5788829 - DNA, 25 bp, Homo sapien
ctgtgcgtcccaagaacgcagccct

SEQ ID NO: 5788830 - DNA, 25 bp, Homo sapien
gtttggtgcatagaactgggtaaat

SEQ ID NO: 5788831 - DNA, 25 bp, Homo sapien
ccgaaactctgactcggaggacagt

SEQ ID NO: 5788832 - DNA, 25 bp, Homo sapien
catgccgggcatgatctgcaagaac

SEQ ID NO: 5788833 - DNA, 25 bp, Homo sapien
gctcggacttgctagacgcttctca

SEQ ID NO: 5788834 - DNA, 25 bp, Homo sapien
caaccgccggttccaccgcccagtc

SEQ ID NO: 5788835 - DNA, 25 bp, Homo sapien
atacctcatgtttatgaaaataaat

SEQ ID NO: 5788836 - DNA, 25 bp, Homo sapien
tttttaaaatggtgcttaagttcca

SEQ ID NO: 5788837 - DNA, 25 bp, Homo sapien
aacccagacctcgagtttgactcgc

SEQ ID NO: 5788838 - DNA, 25 bp, Homo sapien
tgagtagatattactttatcacttt

SEQ ID NO: 5788839 - DNA, 25 bp, Homo sapien
aggccactgagtatgtccactccct

SEQ ID NO: 5788840 - DNA, 25 bp, Homo sapien
atgtccactccctccaggccgagga

SEQ ID NO: 5788841 - DNA, 25 bp, Homo sapien
gccagcgccgcaacgaccttcggtc

SEQ ID NO: 5788842 - DNA, 25 bp, Homo sapien
gaggagcaccagcttttgctggaaa

SEQ ID NO: 5788843 - DNA, 25 bp, Homo sapien
ggcgggccctgcggtcgcctcgggg

SEQ ID NO: 5788844 - DNA, 25 bp, Homo sapien
gccctgcgggtcgcgggcacggcgg

SEQ ID NO: 5788845 - DNA, 25 bp, Homo sapien
tgcaaagttctgtgtttaatttctt

SEQ ID NO: 5788846 - DNA, 25 bp, Homo sapien
ctttcccgtgaacaagcgcgagcca

SEQ ID NO: 5788847 - DNA, 25 bp, Homo sapien
ccccgaaactctgactcggaggaca

SEQ ID NO: 5788848 - DNA, 25 bp, Homo sapien
gaaaatgagttgtgaaagttttgag

SEQ ID NO: 5788849 - DNA, 25 bp, Homo sapien
tgttggaggtcggcgccggcccccg

SEQ ID NO: 5788850 - DNA, 25 bp, Homo sapien
ccgagctgggtcacggagatgctgc

SEQ ID NO: 5788851 - DNA, 25 bp, Homo sapien
atgtatatatttagtgctgcatctt

SEQ ID NO: 5788852 - DNA, 25 bp, Homo sapien
aacgttggtgacggttgggagcctc

SEQ ID NO: 5788853 - DNA, 25 bp, Homo sapien
tattgccgccccagccggggccccg

SEQ ID NO: 5788854 - DNA, 25 bp, Homo sapien
gaaatttactatatatatatgcctt

SEQ ID NO: 5788855 - DNA, 25 bp, Homo sapien
tgctaaagaaaattgaacacgctcg

SEQ ID NO: 5788856 - DNA, 25 bp, Homo sapien
atgtttgaggagcatgttttgtata

SEQ ID NO: 5788857 - DNA, 25 bp, Homo sapien
cgtggcttcgcggagcacagctccg

SEQ ID NO: 5788858 - DNA, 25 bp, Homo sapien
tccctccaggccgaggagcaccagc

SEQ ID NO: 5788859 - DNA, 25 bp, Homo sapien
cctagcctgtttcttcctgttaatg

SEQ ID NO: 5788860 - DNA, 25 bp, Homo sapien
ctttctcacgctcagggaccacgtg

SEQ ID NO: 5788861 - DNA, 25 bp, Homo sapien
gcgtggatcccgccgtggtcttccc

SEQ ID NO: 5788862 - DNA, 25 bp, Homo sapien
cagtaggaccaccagtgtggggttc

SEQ ID NO: 5788863 - DNA, 25 bp, Homo sapien
cgcgcccaggcggccgccagaccag

SEQ ID NO: 5788864 - DNA, 25 bp, Homo sapien
aataatacctcaatgtttgaggagc

SEQ ID NO: 5788865 - DNA, 25 bp, Homo sapien
ggtgtgtctgtcggttgcagtgttg

SEQ ID NO: 5788866 - DNA, 25 bp, Homo sapien
agcgtcgcagaaaccacaacatcct

SEQ ID NO: 5788867 - DNA, 25 bp, Homo sapien
ggctcagtccagcgagctgatcctc

SEQ ID NO: 5788868 - DNA, 25 bp, Homo sapien
gagcttgagcccccgaaactctgac

SEQ ID NO: 5788869 - DNA, 25 bp, Homo sapien
tgtctgtcggttgcagtgttggagg

SEQ ID NO: 5788870 - DNA, 25 bp, Homo sapien
tacgtggagagtgaggatgcacccc

SEQ ID NO: 5788871 - DNA, 25 bp, Homo sapien
gtatgacgctgatacataactaaat

SEQ ID NO: 5788872 - DNA, 25 bp, Homo sapien
aaaattgcaggcaagacagcagcag

SEQ ID NO: 5788873 - DNA, 25 bp, Homo sapien
tccacctcacctccatgacagcgct

SEQ ID NO: 5788874 - DNA, 25 bp, Homo sapien
ggtcatcctccaggactgcatgtgg

SEQ ID NO: 5788875 - DNA, 25 bp, Homo sapien
agtgttggaggtcggcgccggcccc

SEQ ID NO: 5788876 - DNA, 25 bp, Homo sapien
ggccctcagtacctccggagaggac

SEQ ID NO: 5788877 - DNA, 25 bp, Homo sapien
cttctccgcccgcgagaagctggag

SEQ ID NO: 5788878 - DNA, 25 bp, Homo sapien
tgtggagaagcggcgttcctcctcc

SEQ ID NO: 5788879 - DNA, 25 bp, Homo sapien
tcaaaactggacagtcactgccact

SEQ ID NO: 5788880 - DNA, 25 bp, Homo sapien
ggaggacgcgttcggcctgggggga

SEQ ID NO: 5788881 - DNA, 25 bp, Homo sapien
actgggtaaatgcaaagttctgtgt

SEQ ID NO: 5788882 - DNA, 25 bp, Homo sapien
agaatgttggtttactttcaaatcg

SEQ ID NO: 5788883 - DNA, 25 bp, Homo sapien
catacctaagtactgtaataatacc

SEQ ID NO: 5788884 - DNA, 25 bp, Homo sapien
gtccccacgtccgctcaagagtgtc

SEQ ID NO: 5788885 - DNA, 25 bp, Homo sapien
tttttaaacaaacattgtgttgaca

SEQ ID NO: 5788886 - DNA, 25 bp, Homo sapien
acaaatatattgttaatctctgtta

SEQ ID NO: 5788887 - DNA, 25 bp, Homo sapien
gtttgccatttgatacccctgggga

SEQ ID NO: 5788888 - DNA, 25 bp, Homo sapien
tctctgttatgtactgtactaattc

SEQ ID NO: 5788889 - DNA, 25 bp, Homo sapien
cggcgttcctcctccaacaccaagg

SEQ ID NO: 5788890 - DNA, 25 bp, Homo sapien
tcactgccactttgcacattttgat

SEQ ID NO: 5788891 - DNA, 25 bp, Homo sapien
cagccccggccagtgccccggcggc

SEQ ID NO: 5788892 - DNA, 25 bp, Homo sapien
atgcacccccacagaagaagataaa

SEQ ID NO: 5788893 - DNA, 25 bp, Homo sapien
ttcctagcctgtttcttcctgttaa

SEQ ID NO: 5788894 - DNA, 25 bp, Homo sapien
aggaaaaattgcaggcaagacagca

SEQ ID NO: 5788895 - DNA, 25 bp, Homo sapien
aacaagcgcgagccagcgcccgtgc

SEQ ID NO: 5788896 - DNA, 25 bp, Homo sapien
ctcaaacgatgccttcccatccacc

SEQ ID NO: 5788897 - DNA, 25 bp, Homo sapien
tttgaaaaaggccactgagtatgtc

SEQ ID NO: 5788898 - DNA, 25 bp, Homo sapien
ccagtccccgggagccggcgccgcc

SEQ ID NO: 5788899 - DNA, 25 bp, Homo sapien
gcggcttctccgcccgcgagaagct

SEQ ID NO: 5788900 - DNA, 25 bp, Homo sapien
gaccaccagtgtggggttctgctgg

SEQ ID NO: 5788901 - DNA, 25 bp, Homo sapien
aacgatgccttcccatccaccagca

SEQ ID NO: 5788902 - DNA, 25 bp, Homo sapien
ccacgtccgctcaagagtgtcatcc

SEQ ID NO: 5788903 - DNA, 25 bp, Homo sapien
tttgaaatacctcatgtttatgaaa

SEQ ID NO: 5788904 - DNA, 25 bp, Homo sapien
cccccgggggaggacatctggaaga

SEQ ID NO: 5788905 - DNA, 25 bp, Homo sapien
ccttgtgtgttccaagtttccaaac

SEQ ID NO: 5788906 - DNA, 25 bp, Homo sapien
acagccctgcttctacccggacgaa

SEQ ID NO: 5788907 - DNA, 25 bp, Homo sapien
gttaatgtatttgttcatgtttggt

SEQ ID NO: 5788908 - DNA, 25 bp, Homo sapien
agcgagaagctgcagcacggccgcg

SEQ ID NO: 5788909 - DNA, 25 bp, Homo sapien
gtatactttagtatgacgctgatac

SEQ ID NO: 5788910 - DNA, 25 bp, Homo sapien
gctgtcaccacattcaccatcactg

SEQ ID NO: 5788911 - DNA, 25 bp, Homo sapien
agcaccagcttttgctggaaaagga

SEQ ID NO: 5788912 - DNA, 25 bp, Homo sapien
tgttatgtactgtactaattcttac

SEQ ID NO: 5788913 - DNA, 25 bp, Homo sapien
ctgcgggtcgcgggcacggcggggc

SEQ ID NO: 5788914 - DNA, 25 bp, Homo sapien
tgagcgtcgcagaaaccacaacatc

SEQ ID NO: 5788915 - DNA, 25 bp, Homo sapien
tggcttttgcggccagtattagact

SEQ ID NO: 5788916 - DNA, 25 bp, Homo sapien
cgcggagcacagctccgagcccccg

SEQ ID NO: 5788917 - DNA, 25 bp, Homo sapien
acagctccgagcccccgagctgggt

SEQ ID NO: 5788918 - DNA, 25 bp, Homo sapien
tgtcaccacattcaccatcactgtg

SEQ ID NO: 5788919 - DNA, 25 bp, Homo sapien
caccctgagcgattcagatgatgaa

SEQ ID NO: 5788920 - DNA, 25 bp, Homo sapien
agttcggctctgggtgggcagtagg

SEQ ID NO: 5788921 - DNA, 25 bp, Homo sapien
atgagaggtggcttttgcggccagt

SEQ ID NO: 5788922 - DNA, 25 bp, Homo sapien
agaagaagataaagagcgaggcgtc

SEQ ID NO: 5788923 - DNA, 25 bp, Homo sapien
acccccacagaagaagataaagagc

SEQ ID NO: 5788924 - DNA, 25 bp, Homo sapien
gagtatgtccactccctccaggccg

SEQ ID NO: 5788925 - DNA, 25 bp, Homo sapien
atcttatagcactttgaaatacctc

SEQ ID NO: 5788926 - DNA, 25 bp, Homo sapien
ttccttctttttaaaatggtgctta

SEQ ID NO: 5788927 - DNA, 25 bp, Homo sapien
accagcagcacaactatgccgcccc

SEQ ID NO: 5788928 - DNA, 25 bp, Homo sapien
atttgatacttatattttcgtatga

SEQ ID NO: 5788929 - DNA, 25 bp, Homo sapien
ttcaccatcactgtgcgtcccaaga

SEQ ID NO: 5788930 - DNA, 25 bp, Homo sapien
ggtcccctgtcgagttcggctctgg

SEQ ID NO: 5788931 - DNA, 25 bp, Homo sapien
actttatcactttttgaactaagaa

SEQ ID NO: 5788932 - DNA, 25 bp, Homo sapien
gaggaggacgcgttcggcctggggg

SEQ ID NO: 5788933 - DNA, 25 bp, Homo sapien
gaacacgctcggacttgctagacgc

SEQ ID NO: 5788934 - DNA, 25 bp, Homo sapien
aacaaacattgtgttgacattaaga

SEQ ID NO: 5788935 - DNA, 25 bp, Homo sapien
gggggactgggtggcctcaccccca

SEQ ID NO: 5788936 - DNA, 25 bp, Homo sapien
cttaagttccagcagatgccacata

SEQ ID NO: 5788937 - DNA, 25 bp, Homo sapien
gaagaggaagaaatcgacgtggtca

SEQ ID NO: 5788938 - DNA, 25 bp, Homo sapien
ggtgacggttgggagcctctggggc

SEQ ID NO: 5788939 - DNA, 25 bp, Homo sapien
ggcgccgccagccctgcgggtcgcg

SEQ ID NO: 5788940 - DNA, 25 bp, Homo sapien
agatgctgcttgagaacgagctgtg

SEQ ID NO: 5788941 - DNA, 25 bp, Homo sapien
gaggacatctggaagaagtttgagc

SEQ ID NO: 5788942 - DNA, 25 bp, Homo sapien
ttagtgctgcatcttatagcacttt

SEQ ID NO: 5788943 - DNA, 25 bp, Homo sapien
agctccgagcccccgagctgggtca

SEQ ID NO: 5788944 - DNA, 25 bp, Homo sapien
acggggcggaaagaagccctcagtc

SEQ ID NO: 5788945 - DNA, 25 bp, Homo sapien
ctgtatactttagtatgacgctgat

SEQ ID NO: 5788946 - DNA, 25 bp, Homo sapien
gccgagctcgcccacccggccgccg

SEQ ID NO: 5788947 - DNA, 25 bp, Homo sapien
tggagagtgaggatgcacccccaca

SEQ ID NO: 5788948 - DNA, 25 bp, Homo sapien
cttctacttcggcggccccgactcg

SEQ ID NO: 5788949 - DNA, 25 bp, Homo sapien
gtcattccttctttttaaaatggtg

SEQ ID NO: 5788950 - DNA, 25 bp, Homo sapien
cagggaccacgtgccggagttggta

SEQ ID NO: 5788951 - DNA, 25 bp, Homo sapien
gccactgagtatgtccactccctcc

SEQ ID NO: 5788952 - DNA, 25 bp, Homo sapien
cactgtgcgtcccaagaacgcagcc

SEQ ID NO: 5788953 - DNA, 25 bp, Homo sapien
gcccgccgagctcgcccacccggcc

SEQ ID NO: 5788954 - DNA, 25 bp, Homo sapien
ttgtgttgacattaagaatgttggt

SEQ ID NO: 5788955 - DNA, 25 bp, Homo sapien
ccgagctgctccacgtccaccatgc

SEQ ID NO: 5788956 - DNA, 25 bp, Homo sapien
agcgaggcgtccccacgtccgctca

SEQ ID NO: 5788957 - DNA, 25 bp, Homo sapien
tggagcgccagcgccgcaacgacct

SEQ ID NO: 5788958 - DNA, 25 bp, Homo sapien
ctcagtccagcgagctgatcctcaa

SEQ ID NO: 5788959 - DNA, 25 bp, Homo sapien
tgaacaagcgcgagccagcgcccgt

SEQ ID NO: 5788960 - DNA, 25 bp, Homo sapien
tccaacaccaaggctgtcaccacat

SEQ ID NO: 5788961 - DNA, 25 bp, Homo sapien
gctagacgcttctcaaaactggaca

SEQ ID NO: 5788962 - DNA, 25 bp, Homo sapien
gaccacaaggccctcagtacctccg

SEQ ID NO: 5788963 - DNA, 25 bp, Homo sapien
ggcgagccgatgccgagctgctcca

SEQ ID NO: 5788964 - DNA, 25 bp, Homo sapien
cagttgctaaagaaaattgaacacg

SEQ ID NO: 5788965 - DNA, 25 bp, Homo sapien
aaaccacaacatcctggagcgccag

SEQ ID NO: 5788966 - DNA, 25 bp, Homo sapien
tgggtggccctgcagcctcctccac

SEQ ID NO: 5788967 - DNA, 25 bp, Homo sapien
cgcgagaagctggagcgcgccgtga

SEQ ID NO: 5788968 - DNA, 25 bp, Homo sapien
tgaaatacctcatgtttatgaaaat

SEQ ID NO: 5788969 - DNA, 25 bp, Homo sapien
acatcctgggtaatgagaggtggct

SEQ ID NO: 5788970 - DNA, 25 bp, Homo sapien
taaacgttggtgacggttgggagcc

SEQ ID NO: 5788971 - DNA, 25 bp, Homo sapien
agcgagctgatcctcaaacgatgcc

SEQ ID NO: 5788972 - DNA, 25 bp, Homo sapien
gacttctacttcggcggccccgact

SEQ ID NO: 5788973 - DNA, 25 bp, Homo sapien
ctgcatcttatagcactttgaaata

SEQ ID NO: 5788974 - DNA, 25 bp, Homo sapien
tgccgggcatgatctgcaagaaccc

SEQ ID NO: 5788975 - DNA, 25 bp, Homo sapien
gatctgcaagaacccagacctcgag

SEQ ID NO: 5788976 - DNA, 25 bp, Homo sapien
tagtatgacgctgatacataactaa

SEQ ID NO: 5788977 - DNA, 25 bp, Homo sapien
cctacgtggagagtgaggatgcacc

SEQ ID NO: 5788978 - DNA, 25 bp, Homo sapien
aagacagcagcagttgctaaagaaa

SEQ ID NO: 5788979 - DNA, 25 bp, Homo sapien
ggcggcgaccacaaggccctcagta

SEQ ID NO: 5788980 - DNA, 25 bp, Homo sapien
gagtgcgtggatcccgccgtggtct

SEQ ID NO: 5788981 - DNA, 25 bp, Homo sapien
acacgctcggacttgctagacgctt

SEQ ID NO: 5788982 - DNA, 25 bp, Homo sapien
gtggatcccgccgtggtcttcccct

SEQ ID NO: 5788983 - DNA, 25 bp, Homo sapien
gctgggtggccctgcagcctcctcc

SEQ ID NO: 5788984 - DNA, 25 bp, Homo sapien
agaaaattgaacacgctcggacttg

SEQ ID NO: 5788985 - DNA, 25 bp, Homo sapien
agaaggccgccaaggtggtcatttt

SEQ ID NO: 5788986 - DNA, 25 bp, Homo sapien
gggaggcgagccgatgccgagctgc

SEQ ID NO: 5788987 - DNA, 25 bp, Homo sapien
ccccacagaagaagataaagagcga

SEQ ID NO: 5788988 - DNA, 25 bp, Homo sapien
gcgcgccgtgagcgagaagctgcag

SEQ ID NO: 5788989 - DNA, 25 bp, Homo sapien
tcgagtttgactcgctacagccctg

SEQ ID NO: 5788990 - DNA, 25 bp, Homo sapien
ggcggaaagaagccctcagtcgccg

SEQ ID NO: 5788991 - DNA, 25 bp, Homo sapien
gaggagcatgttttgtatacaaata

SEQ ID NO: 5788992 - DNA, 25 bp, Homo sapien
atgacgctgatacataactaaattt

SEQ ID NO: 5788993 - DNA, 25 bp, Homo sapien
ggtggccctgcagcctcctccacct

SEQ ID NO: 5788994 - DNA, 25 bp, Homo sapien
gcatcttatagcactttgaaatacc

SEQ ID NO: 5788995 - DNA, 25 bp, Homo sapien
ggttgcagtgttggaggtcggcgcc

SEQ ID NO: 5788996 - DNA, 25 bp, Homo sapien
ggccgaggaggacgcgttcggcctg

SEQ ID NO: 5788997 - DNA, 25 bp, Homo sapien
acatctggaagaagtttgagctgct

SEQ ID NO: 5788998 - DNA, 25 bp, Homo sapien
gatgccgagctgctccacgtccacc

SEQ ID NO: 5788999 - DNA, 25 bp, Homo sapien
tgccgagctgctccacgtccaccat

SEQ ID NO: 5789000 - DNA, 25 bp, Homo sapien
gactcgctacagccctgcttctacc

SEQ ID NO: 5789001 - DNA, 25 bp, Homo sapien
cgcaacgaccttcggtccagctttc

SEQ ID NO: 5789002 - DNA, 25 bp, Homo sapien
tgtactaattcttacactgcctgta

SEQ ID NO: 5789003 - DNA, 25 bp, Homo sapien
ccggtgtgtctgtcggttgcagtgt

SEQ ID NO: 5789004 - DNA, 25 bp, Homo sapien
ttatgtactgtactaattcttacac

SEQ ID NO: 5789005 - DNA, 25 bp, Homo sapien
ttccagcagatgccacataaggggt

SEQ ID NO: 5789006 - DNA, 25 bp, Homo sapien
gtgccggagttggtaaagaatgaga

SEQ ID NO: 5789007 - DNA, 25 bp, Homo sapien
ggtcacggagatgctgcttgagaac

SEQ ID NO: 5789008 - DNA, 25 bp, Homo sapien
aatctctgttatgtactgtactaat

SEQ ID NO: 5789009 - DNA, 25 bp, Homo sapien
ctcacgctcagggaccacgtgccgg

SEQ ID NO: 5789010 - DNA, 25 bp, Homo sapien
cacaacatcctggagcgccagcgcc

SEQ ID NO: 5789011 - DNA, 25 bp, Homo sapien
acccggacgaagatgacttctactt

SEQ ID NO: 5789012 - DNA, 25 bp, Homo sapien
aaaggccactgagtatgtccactcc

SEQ ID NO: 5789013 - DNA, 25 bp, Homo sapien
tactatatatatatgcctttttcct

SEQ ID NO: 5789014 - DNA, 25 bp, Homo sapien
agtccccgggagccggcgccgccag

SEQ ID NO: 5789015 - DNA, 25 bp, Homo sapien
tttgagtagatattactttatcact

SEQ ID NO: 5789016 - DNA, 25 bp, Homo sapien
ctgctgcccacgcccccgctgtcgc

SEQ ID NO: 5789017 - DNA, 25 bp, Homo sapien
atgtttggtgcatagaactgggtaa

SEQ ID NO: 5789018 - DNA, 25 bp, Homo sapien
gcttctacccggacgaagatgactt

SEQ ID NO: 5789019 - DNA, 25 bp, Homo sapien
gccgtgagcgagaagctgcagcacg

SEQ ID NO: 5789020 - DNA, 25 bp, Homo sapien
tccctacgtggagagtgaggatgca

SEQ ID NO: 5789021 - DNA, 25 bp, Homo sapien
ccggtcatcctccaggactgcatgt

SEQ ID NO: 5789022 - DNA, 25 bp, Homo sapien
cgctgtcgcccagccgtggcttcgc

SEQ ID NO: 5789023 - DNA, 25 bp, Homo sapien
cacctcacctccatgacagcgctaa

SEQ ID NO: 5789024 - DNA, 25 bp, Homo sapien
gccgtggtcttcccctttcccgtga

SEQ ID NO: 5789025 - DNA, 25 bp, Homo sapien
acgtgccggagttggtaaagaatga

SEQ ID NO: 5789026 - DNA, 25 bp, Homo sapien
gcagtgttggaggtcggcgccggcc

SEQ ID NO: 5789027 - DNA, 25 bp, Homo sapien
gaggatgcacccccacagaagaaga

SEQ ID NO: 5789028 - DNA, 25 bp, Homo sapien
ctggaagaagtttgagctgctgccc

SEQ ID NO: 5789029 - DNA, 25 bp, Homo sapien
aagaaatttactatatatatatgcc

SEQ ID NO: 5789030 - DNA, 25 bp, Homo sapien
tgtttaatttcttcaaaatgtatat

SEQ ID NO: 5789031 - DNA, 25 bp, Homo sapien
agcccggccgaggaggacgcgttcg

SEQ ID NO: 5789032 - DNA, 25 bp, Homo sapien
cccggccgccgagtgcgtggatccc

SEQ ID NO: 5789033 - DNA, 25 bp, Homo sapien
cctgggtaatgagaggtggcttttg

SEQ ID NO: 5789034 - DNA, 25 bp, Homo sapien
cactgcctgtatactttagtatgac

SEQ ID NO: 5789035 - DNA, 25 bp, Homo sapien
aggggtttgccatttgatacccctg

SEQ ID NO: 5789036 - DNA, 25 bp, Homo sapien
gtcccaagaacgcagccctgggtcc

SEQ ID NO: 5789037 - DNA, 25 bp, Homo sapien
ccagcgcccgtgcccgcagccccgg

SEQ ID NO: 5789038 - DNA, 25 bp, Homo sapien
tcggttgcagtgttggaggtcggcg

SEQ ID NO: 5789039 - DNA, 25 bp, Homo sapien
tacctaagtactgtaataatacctc

SEQ ID NO: 5789040 - DNA, 25 bp, Homo sapien
gtccagcgagctgatcctcaaacga

SEQ ID NO: 5789041 - DNA, 25 bp, Homo sapien
ccttcggtccagctttctcacgctc

SEQ ID NO: 5789042 - DNA, 25 bp, Homo sapien
ggggcggaaagaagccctcagtcgc

SEQ ID NO: 5789043 - DNA, 25 bp, Homo sapien
ccacagaagaagataaagagcgagg

SEQ ID NO: 5789044 - DNA, 25 bp, Homo sapien
ccaccagcagcacaactatgccgcc

SEQ ID NO: 5789045 - DNA, 25 bp, Homo sapien
tttaaaatggtgcttaagttccagc

SEQ ID NO: 5789046 - DNA, 25 bp, Homo sapien
gtgtcatccccccaaaggctaagag

SEQ ID NO: 5789047 - DNA, 25 bp, Homo sapien
acaccaaggctgtcaccacattcac

SEQ ID NO: 5789048 - DNA, 25 bp, Homo sapien
cccgggggaggacatctggaagaag

SEQ ID NO: 5789049 - DNA, 25 bp, Homo sapien
acctcaatgtttgaggagcatgttt

SEQ ID NO: 5789050 - DNA, 25 bp, Homo sapien
gtcaccttgtgtgttccaagtttcc

SEQ ID NO: 5789051 - DNA, 25 bp, Homo sapien
cgggagggctcagtccagcgagctg

SEQ ID NO: 5789052 - DNA, 25 bp, Homo sapien
gggactgggtggcctcacccccaac

SEQ ID NO: 5789053 - DNA, 25 bp, Homo sapien
agtagatattactttatcacttttt

SEQ ID NO: 5789054 - DNA, 25 bp, Homo sapien
actggaagttcatacctaagtactg

SEQ ID NO: 5789055 - DNA, 25 bp, Homo sapien
gccgcaacgaccttcggtccagctt

SEQ ID NO: 5789056 - DNA, 25 bp, Homo sapien
ctcgctacagccctgcttctacccg

SEQ ID NO: 5789057 - DNA, 25 bp, Homo sapien
ctatatatatatgcctttttcctag

SEQ ID NO: 5789058 - DNA, 25 bp, Homo sapien
cttctcaaaactggacagtcactgc

SEQ ID NO: 5789059 - DNA, 25 bp, Homo sapien
cctgcagcctcctccacctcacctc

SEQ ID NO: 5789060 - DNA, 25 bp, Homo sapien
gacgctgatacataactaaatttga

SEQ ID NO: 5789061 - DNA, 25 bp, Homo sapien
ctggacagtcactgccactttgcac

SEQ ID NO: 5789062 - DNA, 25 bp, Homo sapien
cagcgccgcaacgaccttcggtcca

SEQ ID NO: 5789063 - DNA, 25 bp, Homo sapien
gcagaaaccacaacatcctggagcg

SEQ ID NO: 5789064 - DNA, 25 bp, Homo sapien
cgggtattgccgccccagccggggc

SEQ ID NO: 5789065 - DNA, 25 bp, Homo sapien
gctggaaaaggaaaaattgcaggca

SEQ ID NO: 5789066 - DNA, 25 bp, Homo sapien
gctgctccacgtccaccatgccggg

SEQ ID NO: 5789067 - DNA, 25 bp, Homo sapien
cgggagccggcgccgccagccctgc

SEQ ID NO: 5789068 - DNA, 25 bp, Homo sapien
cggtccagctttctcacgctcaggg

SEQ ID NO: 5789069 - DNA, 25 bp, Homo sapien
tccaccgcccagtccccgggagccg

SEQ ID NO: 5789070 - DNA, 25 bp, Homo sapien
ccgcccagtccccgggagccggcgc

SEQ ID NO: 5789071 - DNA, 25 bp, Homo sapien
ccacgtgccggagttggtaaagaat

SEQ ID NO: 5789072 - DNA, 25 bp, Homo sapien
ggagccggccgcgccggggccgccc

SEQ ID NO: 5789073 - DNA, 25 bp, Homo sapien
ctccggtgtgtctgtcggttgcagt

SEQ ID NO: 5789074 - DNA, 25 bp, Homo sapien
accatgccgggcatgatctgcaaga

SEQ ID NO: 5789075 - DNA, 25 bp, Homo sapien
tgctccacgtccaccatgccgggca

SEQ ID NO: 5789076 - DNA, 25 bp, Homo sapien
gtgtggggttctgctgggaccttgg

SEQ ID NO: 5789077 - DNA, 25 bp, Homo sapien
gatacataactaaatttgatactta

SEQ ID NO: 5789078 - DNA, 25 bp, Homo sapien
tgccgccccctctccctacgtggag

SEQ ID NO: 5789079 - DNA, 25 bp, Homo sapien
aagaagccctcagtcgccggccggg

SEQ ID NO: 5789080 - DNA, 25 bp, Homo sapien
ctcacccccaacccggtcatcctcc

SEQ ID NO: 5789081 - DNA, 25 bp, Homo sapien
cccccgctgtcgcccagccgtggct

SEQ ID NO: 5789082 - DNA, 25 bp, Homo sapien
agccggcgccgccagccctgcgggt

SEQ ID NO: 5789083 - DNA, 25 bp, Homo sapien
tcccctttcccgtgaacaagcgcga

SEQ ID NO: 5789084 - DNA, 25 bp, Homo sapien
cattcaccatcactgtgcgtcccaa

SEQ ID NO: 5789085 - DNA, 25 bp, Homo sapien
tcggtcccctgtcgagttcggctct

SEQ ID NO: 5789086 - DNA, 25 bp, Homo sapien
gagtttgactcgctacagccctgct

SEQ ID NO: 5789087 - DNA, 25 bp, Homo sapien
agtcactgccactttgcacattttg

SEQ ID NO: 5789088 - DNA, 25 bp, Homo sapien
ccatcactgtgcgtcccaagaacgc

SEQ ID NO: 5789089 - DNA, 25 bp, Homo sapien
gcactttgaaatacctcatgtttat

SEQ ID NO: 5789090 - DNA, 25 bp, Homo sapien
acagaagaagataaagagcgaggcg

SEQ ID NO: 5789091 - DNA, 25 bp, Homo sapien
gcacggccgcgggccgccaaccgcc

SEQ ID NO: 5789092 - DNA, 25 bp, Homo sapien
gcatcccaggatgctgggtggccct

SEQ ID NO: 5789093 - DNA, 25 bp, Homo sapien
agctgctgcccacgcccccgctgtc

SEQ ID NO: 5789094 - DNA, 25 bp, Homo sapien
ctgagcgattcagatgatgaagatg

SEQ ID NO: 5789095 - DNA, 25 bp, Homo sapien
gtgcgtcccaagaacgcagccctgg

SEQ ID NO: 5789096 - DNA, 25 bp, Homo sapien
tacactgcctgtatactttagtatg

SEQ ID NO: 5789097 - DNA, 25 bp, Homo sapien
ggtgcttaagttccagcagatgcca

SEQ ID NO: 5789098 - DNA, 25 bp, Homo sapien
ccgccagccctgcgggtcgcgggca

SEQ ID NO: 5789099 - DNA, 25 bp, Homo sapien
gcagcacaactatgccgccccctct

SEQ ID NO: 5789100 - DNA, 25 bp, Homo sapien
cccctggggaacatttctgtaaata

SEQ ID NO: 5789101 - DNA, 25 bp, Homo sapien
gttctgtgtttaatttcttcaaaat

SEQ ID NO: 5789102 - DNA, 25 bp, Homo sapien
ggtggcctcacccccaacccggtca

SEQ ID NO: 5789103 - DNA, 25 bp, Homo sapien
gccgccagaccagcggcggcgacca

SEQ ID NO: 5789104 - DNA, 25 bp, Homo sapien
tgggtaaatgcaaagttctgtgttt

SEQ ID NO: 5789105 - DNA, 25 bp, Homo sapien
attaagaatgttggtttactttcaa

SEQ ID NO: 5789106 - DNA, 25 bp, Homo sapien
caccttgtgtgttccaagtttccaa

SEQ ID NO: 5789107 - DNA, 25 bp, Homo sapien
taatacctcaatgtttgaggagcat

SEQ ID NO: 5789108 - DNA, 25 bp, Homo sapien
aacaacagaaagtcattccttcttt

SEQ ID NO: 5789109 - DNA, 25 bp, Homo sapien
tggcttcgcggagcacagctccgag

SEQ ID NO: 5789110 - DNA, 25 bp, Homo sapien
gtggtcattttgaaaaaggccactg

SEQ ID NO: 5789111 - DNA, 25 bp, Homo sapien
gtcgagttcggctctgggtgggcag

SEQ ID NO: 5789112 - DNA, 25 bp, Homo sapien
ccagcttttgctggaaaaggaaaaa

SEQ ID NO: 5789113 - DNA, 25 bp, Homo sapien
agctttctcacgctcagggaccacg

SEQ ID NO: 5789114 - DNA, 25 bp, Homo sapien
gagcacagctccgagcccccgagct

SEQ ID NO: 5789115 - DNA, 25 bp, Homo sapien
cctctccctacgtggagagtgagga

SEQ ID NO: 5789116 - DNA, 25 bp, Homo sapien
atacatcctgggtaatgagaggtgg

SEQ ID NO: 5789117 - DNA, 25 bp, Homo sapien
ggttgggagcctctggggctgttga

SEQ ID NO: 5789118 - DNA, 25 bp, Homo sapien
acgaccttcggtccagctttctcac

SEQ ID NO: 5789119 - DNA, 25 bp, Homo sapien
aactggacagtcactgccactttgc

SEQ ID NO: 5789120 - DNA, 25 bp, Homo sapien
gtggtcactgtggagaagcggcgtt

SEQ ID NO: 5789121 - DNA, 25 bp, Homo sapien
ggtggcttttgcggccagtattaga

SEQ ID NO: 5789122 - DNA, 25 bp, Homo sapien
cccgggagccggcgccgccagccct

SEQ ID NO: 5789123 - DNA, 25 bp, Homo sapien
gccccctctccctacgtggagagtg

SEQ ID NO: 5789124 - DNA, 25 bp, Homo sapien
tgccactttgcacattttgattttt

SEQ ID NO: 5789125 - DNA, 25 bp, Homo sapien
tgggtaatgagaggtggcttttgcg

SEQ ID NO: 5789126 - DNA, 25 bp, Homo sapien
ggtgggcagtaggaccaccagtgtg

SEQ ID NO: 5789127 - DNA, 25 bp, Homo sapien
tccaggactgcatgtggagcggctt

SEQ ID NO: 5789128 - DNA, 25 bp, Homo sapien
actgccactttgcacattttgattt

SEQ ID NO: 5789129 - DNA, 25 bp, Homo sapien
tcatgtttggtgcatagaactgggt

SEQ ID NO: 5789130 - DNA, 25 bp, Homo sapien
atacaaatatattgttaatctctgt

SEQ ID NO: 5789131 - DNA, 25 bp, Homo sapien
agccctcagtcgccggccgggaggc

SEQ ID NO: 5789132 - DNA, 25 bp, Homo sapien
ccgatgccgagctgctccacgtcca

SEQ ID NO: 5789133 - DNA, 25 bp, Homo sapien
cctggggaacatttctgtaaatacc

SEQ ID NO: 5789134 - DNA, 25 bp, Homo sapien
gactcggaggacagtgagcgtcgca

SEQ ID NO: 5789135 - DNA, 25 bp, Homo sapien
acggttgggagcctctggggctgtt

SEQ ID NO: 5789136 - DNA, 25 bp, Homo sapien
atatatttagtgctgcatcttatag

SEQ ID NO: 5789137 - DNA, 25 bp, Homo sapien
actgtggagaagcggcgttcctcct

SEQ ID NO: 5789138 - DNA, 25 bp, Homo sapien
ctgcccgccgagctcgcccacccgg

SEQ ID NO: 5789139 - DNA, 25 bp, Homo sapien
tcccatccaccagcagcacaactat

SEQ ID NO: 5789140 - DNA, 25 bp, Homo sapien
accacaacatcctggagcgccagcg

SEQ ID NO: 5789141 - DNA, 25 bp, Homo sapien
cccgtgcccgcagccccggccagtg

SEQ ID NO: 5789142 - DNA, 25 bp, Homo sapien
ttttcctagcctgtttcttcctgtt

SEQ ID NO: 5789143 - DNA, 25 bp, Homo sapien
ccactccctccaggccgaggagcac

SEQ ID NO: 5789144 - DNA, 25 bp, Homo sapien
agtattagactggaagttcatacct

SEQ ID NO: 5789145 - DNA, 25 bp, Homo sapien
tctcaaaactggacagtcactgcca

SEQ ID NO: 5789146 - DNA, 25 bp, Homo sapien
agctcgcccacccggccgccgagtg

SEQ ID NO: 5789147 - DNA, 25 bp, Homo sapien
cccagacctcgagtttgactcgcta

SEQ ID NO: 5789148 - DNA, 25 bp, Homo sapien
gtatgtccactccctccaggccgag

SEQ ID NO: 5789149 - DNA, 25 bp, Homo sapien
atatatatgcctttttcctagcctg

SEQ ID NO: 5789150 - DNA, 25 bp, Homo sapien
actgtactaattcttacactgcctg

SEQ ID NO: 5789151 - DNA, 25 bp, Homo sapien
tttttttaaacaaacattgtgttga

SEQ ID NO: 5789152 - DNA, 25 bp, Homo sapien
cccccaacccggtcatcctccagga

SEQ ID NO: 5789153 - DNA, 25 bp, Homo sapien
cgccttttgtatacatcctgggtaa

SEQ ID NO: 5789154 - DNA, 25 bp, Homo sapien
ccctcagtcgccggccgggaggcga

SEQ ID NO: 5789155 - DNA, 25 bp, Homo sapien
tgcagcacggccgcgggccgccaac

SEQ ID NO: 5789156 - DNA, 25 bp, Homo sapien
tcattttgaaaaaggccactgagta

SEQ ID NO: 5789157 - DNA, 25 bp, Homo sapien
caaatcggtcccctgtcgagttcgg

SEQ ID NO: 5789158 - DNA, 25 bp, Homo sapien
tttgatacccctggggaacatttct

SEQ ID NO: 5789159 - DNA, 25 bp, Homo sapien
ttctcacgctcagggaccacgtgcc

SEQ ID NO: 5789160 - DNA, 25 bp, Homo sapien
cagacctcgagtttgactcgctaca

SEQ ID NO: 5789161 - DNA, 25 bp, Homo sapien
ggagcatgttttgtatacaaatata

SEQ ID NO: 5789162 - DNA, 25 bp, Homo sapien
ggagaggacaccctgagcgattcag

SEQ ID NO: 5789163 - DNA, 25 bp, Homo sapien
ggcgggtattgccgccccagccggg

SEQ ID NO: 5789164 - DNA, 25 bp, Homo sapien
cttggagagcctgcatcccaggatg

SEQ ID NO: 5789165 - DNA, 25 bp, Homo sapien
atgccttcccatccaccagcagcac

SEQ ID NO: 5789166 - DNA, 25 bp, Homo sapien
agatgacttctacttcggcggcccc

SEQ ID NO: 5789167 - DNA, 25 bp, Homo sapien
agccagcgcccgtgcccgcagcccc

SEQ ID NO: 5789168 - DNA, 25 bp, Homo sapien
agataaagagcgaggcgtccccacg

SEQ ID NO: 5789169 - DNA, 25 bp, Homo sapien
tggagagcctgcatcccaggatgct

SEQ ID NO: 5789170 - DNA, 25 bp, Homo sapien
tggagaagcggcgttcctcctccaa

SEQ ID NO: 5789171 - DNA, 25 bp, Homo sapien
tgctgcatcttatagcactttgaaa

SEQ ID NO: 5789172 - DNA, 25 bp, Homo sapien
ggacagtgagcgtcgcagaaaccac

SEQ ID NO: 5789173 - DNA, 25 bp, Homo sapien
ccttttgtatacatcctgggtaatg

SEQ ID NO: 5789174 - DNA, 25 bp, Homo sapien
cagcagcacaactatgccgccccct

SEQ ID NO: 5789175 - DNA, 25 bp, Homo sapien
acgtccgctcaagagtgtcatcccc

SEQ ID NO: 5789176 - DNA, 25 bp, Homo sapien
gcttgagcccccgaaactctgactc

SEQ ID NO: 5789177 - DNA, 25 bp, Homo sapien
cgagttcggctctgggtgggcagta

SEQ ID NO: 5789178 - DNA, 25 bp, Homo sapien
cttacactgcctgtatactttagta

SEQ ID NO: 5789179 - DNA, 25 bp, Homo sapien
aattgaacacgctcggacttgctag

SEQ ID NO: 5789180 - DNA, 25 bp, Homo sapien
aattgcaggcaagacagcagcagtt

SEQ ID NO: 5789181 - DNA, 25 bp, Homo sapien
tgggcagtaggaccaccagtgtggg

SEQ ID NO: 5789182 - DNA, 25 bp, Homo sapien
atactttagtatgacgctgatacat

SEQ ID NO: 5789183 - DNA, 25 bp, Homo sapien
gggctgcgggagccggccgcgccgg

SEQ ID NO: 5789184 - DNA, 25 bp, Homo sapien
gcggcggcgaccacaaggccctcag

SEQ ID NO: 5789185 - DNA, 25 bp, Homo sapien
ttgtatacatcctgggtaatgagag

SEQ ID NO: 5789186 - DNA, 25 bp, Homo sapien
ttgtgtgttccaagtttccaaacaa

SEQ ID NO: 5789187 - DNA, 25 bp, Homo sapien
aggcgtccccacgtccgctcaagag

SEQ ID NO: 5789188 - DNA, 25 bp, Homo sapien
atgtactgtactaattcttacactg

SEQ ID NO: 5789189 - DNA, 25 bp, Homo sapien
gctgtggggcagcccggccgaggag

SEQ ID NO: 5789190 - DNA, 25 bp, Homo sapien
gctgcttgagaacgagctgtggggc

SEQ ID NO: 5789191 - DNA, 25 bp, Homo sapien
tgcatgtggagcggcttctccgccc

SEQ ID NO: 5789192 - DNA, 25 bp, Homo sapien
tgcccacgcccccgctgtcgcccag

SEQ ID NO: 5789193 - DNA, 25 bp, Homo sapien
agcggcgttcctcctccaacaccaa

SEQ ID NO: 5789194 - DNA, 25 bp, Homo sapien
gcttttgcggccagtattagactgg

SEQ ID NO: 5789195 - DNA, 25 bp, Homo sapien
accaaggctgtcaccacattcacca

SEQ ID NO: 5789196 - DNA, 25 bp, Homo sapien
cattccttctttttaaaatggtgct

SEQ ID NO: 5789197 - DNA, 25 bp, Homo sapien
tcacctccatgacagcgctaaacgt

SEQ ID NO: 5789198 - DNA, 25 bp, Homo sapien
aagagtgtcatccccccaaaggcta

SEQ ID NO: 5789199 - DNA, 25 bp, Homo sapien
acgagctgtggggcagcccggccga

SEQ ID NO: 5789200 - DNA, 25 bp, Homo sapien
agatgaagaggaagaaatcgacgtg

SEQ ID NO: 5789201 - DNA, 25 bp, Homo sapien
tccaggccgaggagcaccagctttt

SEQ ID NO: 5789202 - DNA, 25 bp, Homo sapien
ctgatcctcaaacgatgccttccca

SEQ ID NO: 5789203 - DNA, 25 bp, Homo sapien
atctggaagaagtttgagctgctgc

SEQ ID NO: 5789204 - DNA, 25 bp, Homo sapien
tgtggagcggcttctccgcccgcga

SEQ ID NO: 5789205 - DNA, 25 bp, Homo sapien
cctccaggccgaggagcaccagctt

SEQ ID NO: 5789206 - DNA, 25 bp, Homo sapien
aaggccgccaaggtggtcattttga

SEQ ID NO: 5789207 - DNA, 25 bp, Homo sapien
acttgctagacgcttctcaaaactg

SEQ ID NO: 5789208 - DNA, 25 bp, Homo sapien
tgactgtccagttttgagaagcgtc

SEQ ID NO: 5789209 - DNA, 25 bp, Homo sapien
ctccacagtgaccacgtcgatttct

SEQ ID NO: 5789210 - DNA, 25 bp, Homo sapien
aacattgaggtattattacagtact

SEQ ID NO: 5789211 - DNA, 25 bp, Homo sapien
gagcgtgagaaagctggaccgaagg

SEQ ID NO: 5789212 - DNA, 25 bp, Homo sapien
cagggcccgccgccggggcactggc

SEQ ID NO: 5789213 - DNA, 25 bp, Homo sapien
ggcccgcggccgtgctgcagcttct

SEQ ID NO: 5789214 - DNA, 25 bp, Homo sapien
ctggtctggcggccgcctgggcgcg

SEQ ID NO: 5789215 - DNA, 25 bp, Homo sapien
tatgtggcatctgctggaacttaag

SEQ ID NO: 5789216 - DNA, 25 bp, Homo sapien
ttccagtctaatactggccgcaaaa

SEQ ID NO: 5789217 - DNA, 25 bp, Homo sapien
atttattttcataaacatgaggtat

SEQ ID NO: 5789218 - DNA, 25 bp, Homo sapien
cggctcccggggactgggcggtgga

SEQ ID NO: 5789219 - DNA, 25 bp, Homo sapien
ggatgacactcttgagcggacgtgg

SEQ ID NO: 5789220 - DNA, 25 bp, Homo sapien
cttgagcggacgtggggacgcctcg

SEQ ID NO: 5789221 - DNA, 25 bp, Homo sapien
gcttccttcccgtggggggcgcgga

SEQ ID NO: 5789222 - DNA, 25 bp, Homo sapien
aaacatgctcctcaaacattgaggt

SEQ ID NO: 5789223 - DNA, 25 bp, Homo sapien
gctcgcgcttgttcacgggaaaggg

SEQ ID NO: 5789224 - DNA, 25 bp, Homo sapien
tggggacgcctcgctctttatcttc

SEQ ID NO: 5789225 - DNA, 25 bp, Homo sapien
tgctggtggatgggaaggcatcgtt

SEQ ID NO: 5789226 - DNA, 25 bp, Homo sapien
tcggccgggctgccccacagctcgt

SEQ ID NO: 5789227 - DNA, 25 bp, Homo sapien
gtggaggaggctgcagggccaccca

SEQ ID NO: 5789228 - DNA, 25 bp, Homo sapien
agtggcagtgactgtccagttttga

SEQ ID NO: 5789229 - DNA, 25 bp, Homo sapien
cagttttgagaagcgtctagcaagt

SEQ ID NO: 5789230 - DNA, 25 bp, Homo sapien
tgtagcgagtcaaactcgaggtctg

SEQ ID NO: 5789231 - DNA, 25 bp, Homo sapien
ctgaatcgctcagggtgtcctctcc

SEQ ID NO: 5789232 - DNA, 25 bp, Homo sapien
tcaacacaatgtttgtttaaaaaaa

SEQ ID NO: 5789233 - DNA, 25 bp, Homo sapien
gctcctcggcctggagggagtggac

SEQ ID NO: 5789234 - DNA, 25 bp, Homo sapien
cgtgacccagctcgggggctcggag

SEQ ID NO: 5789235 - DNA, 25 bp, Homo sapien
acgtttagcgctgtcatggaggtga

SEQ ID NO: 5789236 - DNA, 25 bp, Homo sapien
caaacatgaacaaatacattaacag

SEQ ID NO: 5789237 - DNA, 25 bp, Homo sapien
ttgggacgcacagtgatggtgaatg

SEQ ID NO: 5789238 - DNA, 25 bp, Homo sapien
tctttagcaactgctgctgtcttgc

SEQ ID NO: 5789239 - DNA, 25 bp, Homo sapien
ggcacgtggtccctgagcgtgagaa

SEQ ID NO: 5789240 - DNA, 25 bp, Homo sapien
ttaaaaagaaggaatgactttctgt

SEQ ID NO: 5789241 - DNA, 25 bp, Homo sapien
accgcagggcccgccgccggggcac

SEQ ID NO: 5789242 - DNA, 25 bp, Homo sapien
ccgcttctccacagtgaccacgtcg

SEQ ID NO: 5789243 - DNA, 25 bp, Homo sapien
gcggagaagccgctccacatgcagt

SEQ ID NO: 5789244 - DNA, 25 bp, Homo sapien
gcagggctggcggcgccggctcccg

SEQ ID NO: 5789245 - DNA, 25 bp, Homo sapien
ttaacaggaagaaacaggctaggaa

SEQ ID NO: 5789246 - DNA, 25 bp, Homo sapien
tgggaaggcatcgtttgaggatcag

SEQ ID NO: 5789247 - DNA, 25 bp, Homo sapien
accaaacatgaacaaatacattaac

SEQ ID NO: 5789248 - DNA, 25 bp, Homo sapien
cactggtggtcctactgcccaccca

SEQ ID NO: 5789249 - DNA, 25 bp, Homo sapien
agggggcggcatagttgtgctgctg

SEQ ID NO: 5789250 - DNA, 25 bp, Homo sapien
cgtcaccaacgtttagcgctgtcat

SEQ ID NO: 5789251 - DNA, 25 bp, Homo sapien
ggcgcgctccagcttctcgcgggcg

SEQ ID NO: 5789252 - DNA, 25 bp, Homo sapien
cgcgtcctcctcggccgggctgccc

SEQ ID NO: 5789253 - DNA, 25 bp, Homo sapien
caaaatgtgcaaagtggcagtgact

SEQ ID NO: 5789254 - DNA, 25 bp, Homo sapien
tgcctgcaatttttccttttccagc

SEQ ID NO: 5789255 - DNA, 25 bp, Homo sapien
gcgtgagaaagctggaccgaaggtc

SEQ ID NO: 5789256 - DNA, 25 bp, Homo sapien
atggtatttacagaaatgttcccca

SEQ ID NO: 5789257 - DNA, 25 bp, Homo sapien
tatacaggcagtgtaagaattagta

SEQ ID NO: 5789258 - DNA, 25 bp, Homo sapien
aatggcaaaccccttatgtggcatc

SEQ ID NO: 5789259 - DNA, 25 bp, Homo sapien
acatgaggtatttcaaagtgctata

SEQ ID NO: 5789260 - DNA, 25 bp, Homo sapien
ggtagaagcagggctgtagcgagtc

SEQ ID NO: 5789261 - DNA, 25 bp, Homo sapien
tcttaatgtcaacacaatgtttgtt

SEQ ID NO: 5789262 - DNA, 25 bp, Homo sapien
actgtcctccgagtcagagtttcgg

SEQ ID NO: 5789263 - DNA, 25 bp, Homo sapien
aaaagctggtgctcctcggcctgga

SEQ ID NO: 5789264 - DNA, 25 bp, Homo sapien
agccacctctcattacccaggatgt

SEQ ID NO: 5789265 - DNA, 25 bp, Homo sapien
cattacccaggatgtatacaaaagg

SEQ ID NO: 5789266 - DNA, 25 bp, Homo sapien
cgggcagggcggccccggcgcggcc

SEQ ID NO: 5789267 - DNA, 25 bp, Homo sapien
gcgagctcggcgggcagggcggccc

SEQ ID NO: 5789268 - DNA, 25 bp, Homo sapien
tcttcatcatctgaatcgctcaggg

SEQ ID NO: 5789269 - DNA, 25 bp, Homo sapien
cggagctgtgctccgcgaagccacg

SEQ ID NO: 5789270 - DNA, 25 bp, Homo sapien
caacattcttaatgtcaacacaatg

SEQ ID NO: 5789271 - DNA, 25 bp, Homo sapien
ctataagatgcagcactaaatatat

SEQ ID NO: 5789272 - DNA, 25 bp, Homo sapien
aagctggtgctcctcggcctggagg

SEQ ID NO: 5789273 - DNA, 25 bp, Homo sapien
cgccgacctccaacactgcaaccga

SEQ ID NO: 5789274 - DNA, 25 bp, Homo sapien
ctttggggggatgacactcttgagc

SEQ ID NO: 5789275 - DNA, 25 bp, Homo sapien
tgcaggctctccaaggtcccagcag

SEQ ID NO: 5789276 - DNA, 25 bp, Homo sapien
gtatcaaatggcaaaccccttatgt

SEQ ID NO: 5789277 - DNA, 25 bp, Homo sapien
acccagctcgggggctcggagctgt

SEQ ID NO: 5789278 - DNA, 25 bp, Homo sapien
ctcccggccggcgactgagggcttc

SEQ ID NO: 5789279 - DNA, 25 bp, Homo sapien
ctgtcttgcctgcaatttttccttt

SEQ ID NO: 5789280 - DNA, 25 bp, Homo sapien
caccattttaaaaagaaggaatgac

SEQ ID NO: 5789281 - DNA, 25 bp, Homo sapien
gggcgctggctcgcgcttgttcacg

SEQ ID NO: 5789282 - DNA, 25 bp, Homo sapien
gccccgccgtgcccgcgacccgcag

SEQ ID NO: 5789283 - DNA, 25 bp, Homo sapien
gaggaacgccgcttctccacagtga

SEQ ID NO: 5789284 - DNA, 25 bp, Homo sapien
cgggggctcggagctgtgctccgcg

SEQ ID NO: 5789285 - DNA, 25 bp, Homo sapien
tttaccaactccggcacgtggtccc

SEQ ID NO: 5789286 - DNA, 25 bp, Homo sapien
tccagttttgagaagcgtctagcaa

SEQ ID NO: 5789287 - DNA, 25 bp, Homo sapien
cgggggctcaagctcttagcctttg

SEQ ID NO: 5789288 - DNA, 25 bp, Homo sapien
cggctggggcggcaatacccgcccc

SEQ ID NO: 5789289 - DNA, 25 bp, Homo sapien
tagaagcagggctgtagcgagtcaa

SEQ ID NO: 5789290 - DNA, 25 bp, Homo sapien
ccggggcactggccggggctgcggg

SEQ ID NO: 5789291 - DNA, 25 bp, Homo sapien
ataaacatgaggtatttcaaagtgc

SEQ ID NO: 5789292 - DNA, 25 bp, Homo sapien
tctaatactggccgcaaaagccacc

SEQ ID NO: 5789293 - DNA, 25 bp, Homo sapien
caaactcgaggtctgggttcttgca

SEQ ID NO: 5789294 - DNA, 25 bp, Homo sapien
ctcccgggacccagggctgcgttct

SEQ ID NO: 5789295 - DNA, 25 bp, Homo sapien
tggaggtgaggtggaggaggctgca

SEQ ID NO: 5789296 - DNA, 25 bp, Homo sapien
tcgctcacggcgcgctccagcttct

SEQ ID NO: 5789297 - DNA, 25 bp, Homo sapien
atcagcgtcatactaaagtatacag

SEQ ID NO: 5789298 - DNA, 25 bp, Homo sapien
gctgtagcgagtcaaactcgaggtc

SEQ ID NO: 5789299 - DNA, 25 bp, Homo sapien
gaaccggcggttggcggcccgcggc

SEQ ID NO: 5789300 - DNA, 25 bp, Homo sapien
ccgcctgggcgcggaggggcgaccc

SEQ ID NO: 5789301 - DNA, 25 bp, Homo sapien
aagccgctccacatgcagtcctgga

SEQ ID NO: 5789302 - DNA, 25 bp, Homo sapien
gaaaatataagtatcaaatttagtt

SEQ ID NO: 5789303 - DNA, 25 bp, Homo sapien
tcttgcagatcatgcccggcatggt

SEQ ID NO: 5789304 - DNA, 25 bp, Homo sapien
cgtccgggtagaagcagggctgtag

SEQ ID NO: 5789305 - DNA, 25 bp, Homo sapien
gctcgttctcaagcagcatctccgt

SEQ ID NO: 5789306 - DNA, 25 bp, Homo sapien
tacaaaacatgctcctcaaacattg

SEQ ID NO: 5789307 - DNA, 25 bp, Homo sapien
ttcatcatctgaatcgctcagggtg

SEQ ID NO: 5789308 - DNA, 25 bp, Homo sapien
agggctgcgttcttgggacgcacag

SEQ ID NO: 5789309 - DNA, 25 bp, Homo sapien
agggagtggacatactcagtggcct

SEQ ID NO: 5789310 - DNA, 25 bp, Homo sapien
tgataaagtaatatctactcaaaac

SEQ ID NO: 5789311 - DNA, 25 bp, Homo sapien
gaggctgcagggccacccagcatcc

SEQ ID NO: 5789312 - DNA, 25 bp, Homo sapien
aaaggcggatgtgtcaatggtattt

SEQ ID NO: 5789313 - DNA, 25 bp, Homo sapien
atgacactcttgagcggacgtgggg

SEQ ID NO: 5789314 - DNA, 25 bp, Homo sapien
gaggatcagctcgctggactgagcc

SEQ ID NO: 5789315 - DNA, 25 bp, Homo sapien
ctgctgctgtcttgcctgcaatttt

SEQ ID NO: 5789316 - DNA, 25 bp, Homo sapien
tgaccaccttggcggccttctcatt

SEQ ID NO: 5789317 - DNA, 25 bp, Homo sapien
gagccctcccgggacccagggctgc

SEQ ID NO: 5789318 - DNA, 25 bp, Homo sapien
cagtccccccaggccgaacgcgtcc

SEQ ID NO: 5789319 - DNA, 25 bp, Homo sapien
gcagtgactgtccagttttgagaag

SEQ ID NO: 5789320 - DNA, 25 bp, Homo sapien
tgggggtgcatcctcactctccacg

SEQ ID NO: 5789321 - DNA, 25 bp, Homo sapien
gtcgagtcggggccgccgaagtaga

SEQ ID NO: 5789322 - DNA, 25 bp, Homo sapien
tattattacagtacttaggtatgaa

SEQ ID NO: 5789323 - DNA, 25 bp, Homo sapien
ttcttctgtgggggtgcatcctcac

SEQ ID NO: 5789324 - DNA, 25 bp, Homo sapien
gccctcccgggacccagggctgcgt

SEQ ID NO: 5789325 - DNA, 25 bp, Homo sapien
gatgggaaggcatcgtttgaggatc

SEQ ID NO: 5789326 - DNA, 25 bp, Homo sapien
cttagttcaaaaagtgataaagtaa

SEQ ID NO: 5789327 - DNA, 25 bp, Homo sapien
gaattagtacagtacataacagaga

SEQ ID NO: 5789328 - DNA, 25 bp, Homo sapien
cataacagagattaacaatatattt

SEQ ID NO: 5789329 - DNA, 25 bp, Homo sapien
cctttttcaaaatgaccaccttggc

SEQ ID NO: 5789330 - DNA, 25 bp, Homo sapien
atctgctggaacttaagcaccattt

SEQ ID NO: 5789331 - DNA, 25 bp, Homo sapien
cgcactcggcggccgggtgggcgag

SEQ ID NO: 5789332 - DNA, 25 bp, Homo sapien
tgtcctccgagtcagagtttcgggg

SEQ ID NO: 5789333 - DNA, 25 bp, Homo sapien
gctcccggggactgggcggtggaac

SEQ ID NO: 5789334 - DNA, 25 bp, Homo sapien
agggccacccagcatcctgggatgc

SEQ ID NO: 5789335 - DNA, 25 bp, Homo sapien
catactcagtggcctttttcaaaat

SEQ ID NO: 5789336 - DNA, 25 bp, Homo sapien
cttagcctttggggggatgacactc

SEQ ID NO: 5789337 - DNA, 25 bp, Homo sapien
ggtctggcggccgcctgggcgcgga

SEQ ID NO: 5789338 - DNA, 25 bp, Homo sapien
agccacggctgggcgacagcggggg

SEQ ID NO: 5789339 - DNA, 25 bp, Homo sapien
gagcagctcggcatcggctcgcctc

SEQ ID NO: 5789340 - DNA, 25 bp, Homo sapien
gcacgggcgctggctcgcgcttgtt

SEQ ID NO: 5789341 - DNA, 25 bp, Homo sapien
caaaacatgctcctcaaacattgag

SEQ ID NO: 5789342 - DNA, 25 bp, Homo sapien
catcttcatcatctgaatcgctcag

SEQ ID NO: 5789343 - DNA, 25 bp, Homo sapien
cccgcgacccgcagggctggcggcg

SEQ ID NO: 5789344 - DNA, 25 bp, Homo sapien
gtagggagagggggcggcatagttg

SEQ ID NO: 5789345 - DNA, 25 bp, Homo sapien
ggctgcgggcacgggcgctggctcg

SEQ ID NO: 5789346 - DNA, 25 bp, Homo sapien
gcgggggcgtgggcagcagctcaaa

SEQ ID NO: 5789347 - DNA, 25 bp, Homo sapien
agttatgtatcagcgtcatactaaa

SEQ ID NO: 5789348 - DNA, 25 bp, Homo sapien
agaaggaatgactttctgttgtttg

SEQ ID NO: 5789349 - DNA, 25 bp, Homo sapien
agcaccattttaaaaagaaggaatg

SEQ ID NO: 5789350 - DNA, 25 bp, Homo sapien
gcttgttcacgggaaaggggaagac

SEQ ID NO: 5789351 - DNA, 25 bp, Homo sapien
tactgagggccttgtggtcgccgcc

SEQ ID NO: 5789352 - DNA, 25 bp, Homo sapien
aggtcgttgcggcgctggcgctcca

SEQ ID NO: 5789353 - DNA, 25 bp, Homo sapien
ggggctcggagctgtgctccgcgaa

SEQ ID NO: 5789354 - DNA, 25 bp, Homo sapien
cggacgtggggacgcctcgctcttt

SEQ ID NO: 5789355 - DNA, 25 bp, Homo sapien
tggaaccggcggttggcggcccgcg

SEQ ID NO: 5789356 - DNA, 25 bp, Homo sapien
gaaggtcgttgcggcgctggcgctc

SEQ ID NO: 5789357 - DNA, 25 bp, Homo sapien
tatttgtatacaaaacatgctcctc

SEQ ID NO: 5789358 - DNA, 25 bp, Homo sapien
aggatgaccgggttgggggtgaggc

SEQ ID NO: 5789359 - DNA, 25 bp, Homo sapien
ggaaggcatcgtttgaggatcagct

SEQ ID NO: 5789360 - DNA, 25 bp, Homo sapien
gagggccttgtggtcgccgccgctg

SEQ ID NO: 5789361 - DNA, 25 bp, Homo sapien
tcgctctttatcttcttctgtgggg

SEQ ID NO: 5789362 - DNA, 25 bp, Homo sapien
cggcatagttgtgctgctggtggat

SEQ ID NO: 5789363 - DNA, 25 bp, Homo sapien
cctgcaatttttccttttccagcaa

SEQ ID NO: 5789364 - DNA, 25 bp, Homo sapien
cgccgcttctccacagtgaccacgt

SEQ ID NO: 5789365 - DNA, 25 bp, Homo sapien
gccttgtggtcgccgccgctggtct

SEQ ID NO: 5789366 - DNA, 25 bp, Homo sapien
tggtgctcctcggcctggagggagt

SEQ ID NO: 5789367 - DNA, 25 bp, Homo sapien
aaaccccttatgtggcatctgctgg

SEQ ID NO: 5789368 - DNA, 25 bp, Homo sapien
tcaaatttagttatgtatcagcgtc

SEQ ID NO: 5789369 - DNA, 25 bp, Homo sapien
tggcagtgactgtccagttttgaga

SEQ ID NO: 5789370 - DNA, 25 bp, Homo sapien
ctgcagggccacccagcatcctggg

SEQ ID NO: 5789371 - DNA, 25 bp, Homo sapien
gaatcgctcagggtgtcctctccgg

SEQ ID NO: 5789372 - DNA, 25 bp, Homo sapien
tgacagccttggtgttggaggagga

SEQ ID NO: 5789373 - DNA, 25 bp, Homo sapien
tctcgcgggcggagaagccgctcca

SEQ ID NO: 5789374 - DNA, 25 bp, Homo sapien
actgcaaccgacagacacaccggag

SEQ ID NO: 5789375 - DNA, 25 bp, Homo sapien
cgctggcgctccaggatgttgtggt

SEQ ID NO: 5789376 - DNA, 25 bp, Homo sapien
ttgtggtttctgcgacgctcactgt

SEQ ID NO: 5789377 - DNA, 25 bp, Homo sapien
ttcgtccgggtagaagcagggctgt

SEQ ID NO: 5789378 - DNA, 25 bp, Homo sapien
ataaagtaatatctactcaaaactt

SEQ ID NO: 5789379 - DNA, 25 bp, Homo sapien
aagaaacaggctaggaaaaaggcat

SEQ ID NO: 5789380 - DNA, 25 bp, Homo sapien
tccccaggggtatcaaatggcaaac

SEQ ID NO: 5789381 - DNA, 25 bp, Homo sapien
ctcagtggcctttttcaaaatgacc

SEQ ID NO: 5789382 - DNA, 25 bp, Homo sapien
cgacccgcagggctggcggcgccgg

SEQ ID NO: 5789383 - DNA, 25 bp, Homo sapien
tagcgagtcaaactcgaggtctggg

SEQ ID NO: 5789384 - DNA, 25 bp, Homo sapien
gtcctactgcccacccagagccgaa

SEQ ID NO: 5789385 - DNA, 25 bp, Homo sapien
ccgaactcgacaggggaccgatttg

SEQ ID NO: 5789386 - DNA, 25 bp, Homo sapien
aacgcgtcctcctcggccgggctgc

SEQ ID NO: 5789387 - DNA, 25 bp, Homo sapien
gcctggagggagtggacatactcag

SEQ ID NO: 5789388 - DNA, 25 bp, Homo sapien
gacttcaacagccccagaggctccc

SEQ ID NO: 5789389 - DNA, 25 bp, Homo sapien
aagaattagtacagtacataacaga

SEQ ID NO: 5789390 - DNA, 25 bp, Homo sapien
gcagtcctggaggatgaccgggttg

SEQ ID NO: 5789391 - DNA, 25 bp, Homo sapien
ggggccggcgccgacctccaacact

SEQ ID NO: 5789392 - DNA, 25 bp, Homo sapien
gtttcgggggctcaagctcttagcc

SEQ ID NO: 5789393 - DNA, 25 bp, Homo sapien
gaggcgaccgcagggcccgccgccg

SEQ ID NO: 5789394 - DNA, 25 bp, Homo sapien
cggccttctcattctttaccaactc

SEQ ID NO: 5789395 - DNA, 25 bp, Homo sapien
gcgactgagggcttctttccgcccc

SEQ ID NO: 5789396 - DNA, 25 bp, Homo sapien
aactttcacaactcattttcatacg

SEQ ID NO: 5789397 - DNA, 25 bp, Homo sapien
acagagattaacaatatatttgtat

SEQ ID NO: 5789398 - DNA, 25 bp, Homo sapien
cctactgcccacccagagccgaact

SEQ ID NO: 5789399 - DNA, 25 bp, Homo sapien
ttcgggggctcaagctcttagcctt

SEQ ID NO: 5789400 - DNA, 25 bp, Homo sapien
ccgcagggctggcggcgccggctcc

SEQ ID NO: 5789401 - DNA, 25 bp, Homo sapien
tctcgctcacggcgcgctccagctt

SEQ ID NO: 5789402 - DNA, 25 bp, Homo sapien
ctggagggagtggacatactcagtg

SEQ ID NO: 5789403 - DNA, 25 bp, Homo sapien
gcaaaccccttatgtggcatctgct

SEQ ID NO: 5789404 - DNA, 25 bp, Homo sapien
caaacattgaggtattattacagta

SEQ ID NO: 5789405 - DNA, 25 bp, Homo sapien
agaagcgtctagcaagtccgagcgt

SEQ ID NO: 5789406 - DNA, 25 bp, Homo sapien
cacgcactcggcggccgggtgggcg

SEQ ID NO: 5789407 - DNA, 25 bp, Homo sapien
aatacattaacaggaagaaacaggc

SEQ ID NO: 5789408 - DNA, 25 bp, Homo sapien
ggaagaaacaggctaggaaaaaggc

SEQ ID NO: 5789409 - DNA, 25 bp, Homo sapien
attagtacagtacataacagagatt

SEQ ID NO: 5789410 - DNA, 25 bp, Homo sapien
cgggggccggcgccgacctccaaca

SEQ ID NO: 5789411 - DNA, 25 bp, Homo sapien
gtaagaattagtacagtacataaca

SEQ ID NO: 5789412 - DNA, 25 bp, Homo sapien
atcgctcagggtgtcctctccggag

SEQ ID NO: 5789413 - DNA, 25 bp, Homo sapien
tgagaagcgtctagcaagtccgagc

SEQ ID NO: 5789414 - DNA, 25 bp, Homo sapien
gcgggcggagaagccgctccacatg

SEQ ID NO: 5789415 - DNA, 25 bp, Homo sapien
caagtccgagcgtgttcaattttct

SEQ ID NO: 5789416 - DNA, 25 bp, Homo sapien
tgggggtgaggccacccagtccccc

SEQ ID NO: 5789417 - DNA, 25 bp, Homo sapien
actgtccagttttgagaagcgtcta

SEQ ID NO: 5789418 - DNA, 25 bp, Homo sapien
gaaggcgggggccggcgccgacctc

SEQ ID NO: 5789419 - DNA, 25 bp, Homo sapien
aaaaagaaggaatgactttctgttg

SEQ ID NO: 5789420 - DNA, 25 bp, Homo sapien
tttatcttcttctgtgggggtgcat

SEQ ID NO: 5789421 - DNA, 25 bp, Homo sapien
aaaccaacattcttaatgtcaacac

SEQ ID NO: 5789422 - DNA, 25 bp, Homo sapien
caggccgaacgcgtcctcctcggcc

SEQ ID NO: 5789423 - DNA, 25 bp, Homo sapien
cactcttgagcggacgtggggacgc

SEQ ID NO: 5789424 - DNA, 25 bp, Homo sapien
tttttccttttccagcaaaagctgg

SEQ ID NO: 5789425 - DNA, 25 bp, Homo sapien
attttcataaacatgaggtatttca

SEQ ID NO: 5789426 - DNA, 25 bp, Homo sapien
ggtgaggtggaggaggctgcagggc

SEQ ID NO: 5789427 - DNA, 25 bp, Homo sapien
ggggctcaagctcttagcctttggg

SEQ ID NO: 5789428 - DNA, 25 bp, Homo sapien
ggagtggacatactcagtggccttt

SEQ ID NO: 5789429 - DNA, 25 bp, Homo sapien
aacttcttccagatgtcctcccccg

SEQ ID NO: 5789430 - DNA, 25 bp, Homo sapien
ggcactggccggggctgcgggcacg

SEQ ID NO: 5789431 - DNA, 25 bp, Homo sapien
gaccgatttgaaagtaaaccaacat

SEQ ID NO: 5789432 - DNA, 25 bp, Homo sapien
cccgggacccagggctgcgttcttg

SEQ ID NO: 5789433 - DNA, 25 bp, Homo sapien
cgcaaaagccacctctcattaccca

SEQ ID NO: 5789434 - DNA, 25 bp, Homo sapien
catactaaagtatacaggcagtgta

SEQ ID NO: 5789435 - DNA, 25 bp, Homo sapien
agaagtcatcttcgtccgggtagaa

SEQ ID NO: 5789436 - DNA, 25 bp, Homo sapien
cagcactaaatatatacattttgaa

SEQ ID NO: 5789437 - DNA, 25 bp, Homo sapien
ccgacctccaacactgcaaccgaca

SEQ ID NO: 5789438 - DNA, 25 bp, Homo sapien
gccgtgcccgcgacccgcagggctg

SEQ ID NO: 5789439 - DNA, 25 bp, Homo sapien
ttggaacacacaaggtgacttcaac

SEQ ID NO: 5789440 - DNA, 25 bp, Homo sapien
gtgtaagaattagtacagtacataa

SEQ ID NO: 5789441 - DNA, 25 bp, Homo sapien
tgacccagctcgggggctcggagct

SEQ ID NO: 5789442 - DNA, 25 bp, Homo sapien
tgctataagatgcagcactaaatat

SEQ ID NO: 5789443 - DNA, 25 bp, Homo sapien
aacaggctaggaaaaaggcatatat

SEQ ID NO: 5789444 - DNA, 25 bp, Homo sapien
cacgtggtccctgagcgtgagaaag

SEQ ID NO: 5789445 - DNA, 25 bp, Homo sapien
cctcggccgggctgccccacagctc

SEQ ID NO: 5789446 - DNA, 25 bp, Homo sapien
ggtggacgtggagcagctcggcatc

SEQ ID NO: 5789447 - DNA, 25 bp, Homo sapien
aggatgttgtggtttctgcgacgct

SEQ ID NO: 5789448 - DNA, 25 bp, Homo sapien
catctccgtgacccagctcgggggc

SEQ ID NO: 5789449 - DNA, 25 bp, Homo sapien
accccttatgtggcatctgctggaa

SEQ ID NO: 5789450 - DNA, 25 bp, Homo sapien
gaggtatttcaaagtgctataagat

SEQ ID NO: 5789451 - DNA, 25 bp, Homo sapien
aaaaaaatcaaaatgtgcaaagtgg

SEQ ID NO: 5789452 - DNA, 25 bp, Homo sapien
gcgtgggcagcagctcaaacttctt

SEQ ID NO: 5789453 - DNA, 25 bp, Homo sapien
tgcccgcgacccgcagggctggcgg

SEQ ID NO: 5789454 - DNA, 25 bp, Homo sapien
catgcccggcatggtggacgtggag

SEQ ID NO: 5789455 - DNA, 25 bp, Homo sapien
cagggcggccccggcgcggccggct

SEQ ID NO: 5789456 - DNA, 25 bp, Homo sapien
tctgttgtttggaaacttggaacac

SEQ ID NO: 5789457 - DNA, 25 bp, Homo sapien
cgtcctcctcggccgggctgcccca

SEQ ID NO: 5789458 - DNA, 25 bp, Homo sapien
aaggaatgactttctgttgtttgga

SEQ ID NO: 5789459 - DNA, 25 bp, Homo sapien
gggcgtgggcagcagctcaaacttc

SEQ ID NO: 5789460 - DNA, 25 bp, Homo sapien
ttgcatttacccagttctatgcacc

SEQ ID NO: 5789461 - DNA, 25 bp, Homo sapien
ccgaaggtcgttgcggcgctggcgc

SEQ ID NO: 5789462 - DNA, 25 bp, Homo sapien
acatgctcctcaaacattgaggtat

SEQ ID NO: 5789463 - DNA, 25 bp, Homo sapien
agttctatgcaccaaacatgaacaa

SEQ ID NO: 5789464 - DNA, 25 bp, Homo sapien
gcccccgaggcgaccgcagggcccg

SEQ ID NO: 5789465 - DNA, 25 bp, Homo sapien
cggggccccggctggggcggcaata

SEQ ID NO: 5789466 - DNA, 25 bp, Homo sapien
aaacttggaacacacaaggtgactt

SEQ ID NO: 5789467 - DNA, 25 bp, Homo sapien
tgtatacaaaacatgctcctcaaac

SEQ ID NO: 5789468 - DNA, 25 bp, Homo sapien
atgaacttccagtctaatactggcc

SEQ ID NO: 5789469 - DNA, 25 bp, Homo sapien
gggcggagaagccgctccacatgca

SEQ ID NO: 5789470 - DNA, 25 bp, Homo sapien
acagaactttgcatttacccagttc

SEQ ID NO: 5789471 - DNA, 25 bp, Homo sapien
tttgagaagcgtctagcaagtccga

SEQ ID NO: 5789472 - DNA, 25 bp, Homo sapien
gtttcttagttcaaaaagtgataaa

SEQ ID NO: 5789473 - DNA, 25 bp, Homo sapien
gccgccggggcactggccggggctg

SEQ ID NO: 5789474 - DNA, 25 bp, Homo sapien
tcaaagtgctataagatgcagcact

SEQ ID NO: 5789475 - DNA, 25 bp, Homo sapien
ggccgcctgggcgcggaggggcgac

SEQ ID NO: 5789476 - DNA, 25 bp, Homo sapien
attttctttagcaactgctgctgtc

SEQ ID NO: 5789477 - DNA, 25 bp, Homo sapien
tcgctggactgagccctcccgggac

SEQ ID NO: 5789478 - DNA, 25 bp, Homo sapien
cagtggcctttttcaaaatgaccac

SEQ ID NO: 5789479 - DNA, 25 bp, Homo sapien
acccaggatgtatacaaaaggcgga

SEQ ID NO: 5789480 - DNA, 25 bp, Homo sapien
acttccagtctaatactggccgcaa

SEQ ID NO: 5789481 - DNA, 25 bp, Homo sapien
gtcatcttcgtccgggtagaagcag

SEQ ID NO: 5789482 - DNA, 25 bp, Homo sapien
aaagtggcagtgactgtccagtttt

SEQ ID NO: 5789483 - DNA, 25 bp, Homo sapien
gcagatcatgcccggcatggtggac

SEQ ID NO: 5789484 - DNA, 25 bp, Homo sapien
ctccacatgcagtcctggaggatga

SEQ ID NO: 5789485 - DNA, 25 bp, Homo sapien
ctttgcatttacccagttctatgca

SEQ ID NO: 5789486 - DNA, 25 bp, Homo sapien
cgcgctccagcttctcgcgggcgga

SEQ ID NO: 5789487 - DNA, 25 bp, Homo sapien
agcggacgtggggacgcctcgctct

SEQ ID NO: 5789488 - DNA, 25 bp, Homo sapien
gacgtggagcagctcggcatcggct

SEQ ID NO: 5789489 - DNA, 25 bp, Homo sapien
agaagccgctccacatgcagtcctg

SEQ ID NO: 5789490 - DNA, 25 bp, Homo sapien
ccgagtcagagtttcgggggctcaa

SEQ ID NO: 5789491 - DNA, 25 bp, Homo sapien
aaaatgaccaccttggcggccttct

SEQ ID NO: 5789492 - DNA, 25 bp, Homo sapien
caaatacattaacaggaagaaacag

SEQ ID NO: 5789493 - DNA, 25 bp, Homo sapien
ccgcccccgaggcgaccgcagggcc

SEQ ID NO: 5789494 - DNA, 25 bp, Homo sapien
cagaaccccacactggtggtcctac

SEQ ID NO: 5789495 - DNA, 25 bp, Homo sapien
aaatgtgcaaagtggcagtgactgt

SEQ ID NO: 5789496 - DNA, 25 bp, Homo sapien
gctcgcctcccggccggcgactgag

SEQ ID NO: 5789497 - DNA, 25 bp, Homo sapien
ccagctcgggggctcggagctgtgc

SEQ ID NO: 5789498 - DNA, 25 bp, Homo sapien
ttggaggaggaacgccgcttctcca

SEQ ID NO: 5789499 - DNA, 25 bp, Homo sapien
ctcggcggccgggtgggcgagctcg

SEQ ID NO: 5789500 - DNA, 25 bp, Homo sapien
aagtcatcttcgtccgggtagaagc

SEQ ID NO: 5789501 - DNA, 25 bp, Homo sapien
tcgttctcaagcagcatctccgtga

SEQ ID NO: 5789502 - DNA, 25 bp, Homo sapien
agcagctcaaacttcttccagatgt

SEQ ID NO: 5789503 - DNA, 25 bp, Homo sapien
gagctgtgctccgcgaagccacggc

SEQ ID NO: 5789504 - DNA, 25 bp, Homo sapien
gctcaaacttcttccagatgtcctc

SEQ ID NO: 5789505 - DNA, 25 bp, Homo sapien
gtgtcaatggtatttacagaaatgt

SEQ ID NO: 5789506 - DNA, 25 bp, Homo sapien
acattcttaatgtcaacacaatgtt

SEQ ID NO: 5789507 - DNA, 25 bp, Homo sapien
gaggctcccaaccgtcaccaacgtt

SEQ ID NO: 5789508 - DNA, 25 bp, Homo sapien
ctggaggatgaccgggttgggggtg

SEQ ID NO: 5789509 - DNA, 25 bp, Homo sapien
gggtgggcgagctcggcgggcaggg

SEQ ID NO: 5789510 - DNA, 25 bp, Homo sapien
cggcaatacccgcccccgaggcgac

SEQ ID NO: 5789511 - DNA, 25 bp, Homo sapien
tatttacagaaatgttccccagggg

SEQ ID NO: 5789512 - DNA, 25 bp, Homo sapien
ggccgggctgccccacagctcgttc

SEQ ID NO: 5789513 - DNA, 25 bp, Homo sapien
ggggggatgacactcttgagcggac

SEQ ID NO: 5789514 - DNA, 25 bp, Homo sapien
gggttcttgcagatcatgcccggca

SEQ ID NO: 5789515 - DNA, 25 bp, Homo sapien
cgtggtccctgagcgtgagaaagct

SEQ ID NO: 5789516 - DNA, 25 bp, Homo sapien
gctcgctggactgagccctcccggg

SEQ ID NO: 5789517 - DNA, 25 bp, Homo sapien
cggccggcgactgagggcttctttc

SEQ ID NO: 5789518 - DNA, 25 bp, Homo sapien
ctcattacccaggatgtatacaaaa

SEQ ID NO: 5789519 - DNA, 25 bp, Homo sapien
catcttcgtccgggtagaagcaggg

SEQ ID NO: 5789520 - DNA, 25 bp, Homo sapien
atttagttatgtatcagcgtcatac

SEQ ID NO: 5789521 - DNA, 25 bp, Homo sapien
gggctgccccacagctcgttctcaa

SEQ ID NO: 5789522 - DNA, 25 bp, Homo sapien
cagccccgccgtgcccgcgacccgc

SEQ ID NO: 5789523 - DNA, 25 bp, Homo sapien
agtcggggccgccgaagtagaagtc

SEQ ID NO: 5789524 - DNA, 25 bp, Homo sapien
ggacccagggctgcgttcttgggac

SEQ ID NO: 5789525 - DNA, 25 bp, Homo sapien
gacgtggggacgcctcgctctttat

SEQ ID NO: 5789526 - DNA, 25 bp, Homo sapien
gaactcgacaggggaccgatttgaa

SEQ ID NO: 5789527 - DNA, 25 bp, Homo sapien
gcagggccacccagcatcctgggat

SEQ ID NO: 5789528 - DNA, 25 bp, Homo sapien
cagggtgtcctctccggaggtactg

SEQ ID NO: 5789529 - DNA, 25 bp, Homo sapien
tacaaaaggcggatgtgtcaatggt

SEQ ID NO: 5789530 - DNA, 25 bp, Homo sapien
aggtctgggttcttgcagatcatgc

SEQ ID NO: 5789531 - DNA, 25 bp, Homo sapien
tgttgtttggaaacttggaacacac

SEQ ID NO: 5789532 - DNA, 25 bp, Homo sapien
ctcggagctgtgctccgcgaagcca

SEQ ID NO: 5789533 - DNA, 25 bp, Homo sapien
tgcccggcatggtggacgtggagca

SEQ ID NO: 5789534 - DNA, 25 bp, Homo sapien
tttgaagaaattaaacacagaactt

SEQ ID NO: 5789535 - DNA, 25 bp, Homo sapien
cttcttccagatgtcctcccccggg

SEQ ID NO: 5789536 - DNA, 25 bp, Homo sapien
atgctcctcaaacattgaggtatta

SEQ ID NO: 5789537 - DNA, 25 bp, Homo sapien
ctccagcttctcgcgggcggagaag

SEQ ID NO: 5789538 - DNA, 25 bp, Homo sapien
ttaaacacagaactttgcatttacc

SEQ ID NO: 5789539 - DNA, 25 bp, Homo sapien
gacgcctcgctctttatcttcttct

SEQ ID NO: 5789540 - DNA, 25 bp, Homo sapien
tgttcaattttctttagcaactgct

SEQ ID NO: 5789541 - DNA, 25 bp, Homo sapien
aatgactttctgttgtttggaaact

SEQ ID NO: 5789542 - DNA, 25 bp, Homo sapien
ggggccgccgaagtagaagtcatct

SEQ ID NO: 5789543 - DNA, 25 bp, Homo sapien
cggctcgcctcccggccggcgactg

SEQ ID NO: 5789544 - DNA, 25 bp, Homo sapien
gcggcgctggcgctccaggatgttg

SEQ ID NO: 5789545 - DNA, 25 bp, Homo sapien
taaaaaaaaaatcaaaatgtgcaaa

SEQ ID NO: 5789546 - DNA, 25 bp, Homo sapien
tctggcggccgcctgggcgcggagg

SEQ ID NO: 5789547 - DNA, 25 bp, Homo sapien
cacggcgggatccacgcactcggcg

SEQ ID NO: 5789548 - DNA, 25 bp, Homo sapien
cgctccaggatgttgtggtttctgc

SEQ ID NO: 5789549 - DNA, 25 bp, Homo sapien
cgatttgaaagtaaaccaacattct

SEQ ID NO: 5789550 - DNA, 25 bp, Homo sapien
ggcagggcggccccggcgcggccgg

SEQ ID NO: 5789551 - DNA, 25 bp, Homo sapien
ttggcggccttctcattctttacca

SEQ ID NO: 5789552 - DNA, 25 bp, Homo sapien
atcagctcgctggactgagccctcc

SEQ ID NO: 5789553 - DNA, 25 bp, Homo sapien
cagcgggggcgtgggcagcagctca

SEQ ID NO: 5789554 - DNA, 25 bp, Homo sapien
tcgcgggcggagaagccgctccaca

SEQ ID NO: 5789555 - DNA, 25 bp, Homo sapien
aggatgtatacaaaaggcggatgtg

SEQ ID NO: 5789556 - DNA, 25 bp, Homo sapien
gatccacgcactcggcggccgggtg

SEQ ID NO: 5789557 - DNA, 25 bp, Homo sapien
accaacattcttaatgtcaacacaa

SEQ ID NO: 5789558 - DNA, 25 bp, Homo sapien
aagaaattaaacacagaactttgca

SEQ ID NO: 5789559 - DNA, 25 bp, Homo sapien
ggctcggagctgtgctccgcgaagc

SEQ ID NO: 5789560 - DNA, 25 bp, Homo sapien
tttaaaaaaaaaatcaaaatgtgca

SEQ ID NO: 5789561 - DNA, 25 bp, Homo sapien
tacagtacttaggtatgaacttcca

SEQ ID NO: 5789562 - DNA, 25 bp, Homo sapien
agctcgggggctcggagctgtgctc

SEQ ID NO: 5789563 - DNA, 25 bp, Homo sapien
ccagcatcctgggatgcaggctctc

SEQ ID NO: 5789564 - DNA, 25 bp, Homo sapien
cccttatgtggcatctgctggaact

SEQ ID NO: 5789565 - DNA, 25 bp, Homo sapien
tcgcgcttgttcacgggaaagggga

SEQ ID NO: 5789566 - DNA, 25 bp, Homo sapien
gggtcgagtcggggccgccgaagta

SEQ ID NO: 5789567 - DNA, 25 bp, Homo sapien
ggaggatgaccgggttgggggtgag

SEQ ID NO: 5789568 - DNA, 25 bp, Homo sapien
ggtggatgggaaggcatcgtttgag

SEQ ID NO: 5789569 - DNA, 25 bp, Homo sapien
cagctcgttctcaagcagcatctcc

SEQ ID NO: 5789570 - DNA, 25 bp, Homo sapien
aaagccacctctcattacccaggat

SEQ ID NO: 5789571 - DNA, 25 bp, Homo sapien
ttgcggcgctggcgctccaggatgt

SEQ ID NO: 5789572 - DNA, 25 bp, Homo sapien
gacgcacagtgatggtgaatgtggt

SEQ ID NO: 5789573 - DNA, 25 bp, Homo sapien
ttatgtatcagcgtcatactaaagt

SEQ ID NO: 5789574 - DNA, 25 bp, Homo sapien
ggaggaggctgcagggccacccagc

SEQ ID NO: 5789575 - DNA, 25 bp, Homo sapien
ccgccgctggtctggcggccgcctg

SEQ ID NO: 5789576 - DNA, 25 bp, Homo sapien
tccgggtagaagcagggctgtagcg

SEQ ID NO: 5789577 - DNA, 25 bp, Homo sapien
acccagagccgaactcgacagggga

SEQ ID NO: 5789578 - DNA, 25 bp, Homo sapien
agaccacggcgggatccacgcactc

SEQ ID NO: 5789579 - DNA, 25 bp, Homo sapien
gggtatcaaatggcaaaccccttat

SEQ ID NO: 5789580 - DNA, 25 bp, Homo sapien
agtccgagcgtgttcaattttcttt

SEQ ID NO: 5789581 - DNA, 25 bp, Homo sapien
gtgaggccacccagtccccccaggc

SEQ ID NO: 5789582 - DNA, 25 bp, Homo sapien
atgtggtgacagccttggtgttgga

SEQ ID NO: 5789583 - DNA, 25 bp, Homo sapien
tttctttagcaactgctgctgtctt

SEQ ID NO: 5789584 - DNA, 25 bp, Homo sapien
ggcggcgccggctcccggggactgg

SEQ ID NO: 5789585 - DNA, 25 bp, Homo sapien
tgcatcctcactctccacgtaggga

SEQ ID NO: 5789586 - DNA, 25 bp, Homo sapien
cccagaggctcccaaccgtcaccaa

SEQ ID NO: 5789587 - DNA, 25 bp, Homo sapien
tggtccctgagcgtgagaaagctgg

SEQ ID NO: 5789588 - DNA, 25 bp, Homo sapien
ctggcgctccaggatgttgtggttt

SEQ ID NO: 5789589 - DNA, 25 bp, Homo sapien
gggacgcctcgctctttatcttctt

SEQ ID NO: 5789590 - DNA, 25 bp, Homo sapien
cattaacaggaagaaacaggctagg

SEQ ID NO: 5789591 - DNA, 25 bp, Homo sapien
cactctccacgtagggagagggggc

SEQ ID NO: 5789592 - DNA, 25 bp, Homo sapien
ggatgtgtcaatggtatttacagaa

SEQ ID NO: 5789593 - DNA, 25 bp, Homo sapien
gtagaagtcatcttcgtccgggtag

SEQ ID NO: 5789594 - DNA, 25 bp, Homo sapien
acccagggctgcgttcttgggacgc

SEQ ID NO: 5789595 - DNA, 25 bp, Homo sapien
cacaaggtgacttcaacagccccag

SEQ ID NO: 5789596 - DNA, 25 bp, Homo sapien
tctccggaggtactgagggccttgt

SEQ ID NO: 5789597 - DNA, 25 bp, Homo sapien
cgaggtctgggttcttgcagatcat

SEQ ID NO: 5789598 - DNA, 25 bp, Homo sapien
cccccaggccgaacgcgtcctcctc

SEQ ID NO: 5789599 - DNA, 25 bp, Homo sapien
tgaggtggaggaggctgcagggcca

SEQ ID NO: 5789600 - DNA, 25 bp, Homo sapien
gctgctggtggatgggaaggcatcg

SEQ ID NO: 5789601 - DNA, 25 bp, Homo sapien
gtacagtacataacagagattaaca

SEQ ID NO: 5789602 - DNA, 25 bp, Homo sapien
gttcaaaaagtgataaagtaatatc

SEQ ID NO: 5789603 - DNA, 25 bp, Homo sapien
ggcatcgtttgaggatcagctcgct

SEQ ID NO: 5789604 - DNA, 25 bp, Homo sapien
gcgggatccacgcactcggcggccg

SEQ ID NO: 5789605 - DNA, 25 bp, Homo sapien
ctgcagcttctcgctcacggcgcgc

SEQ ID NO: 5789606 - DNA, 25 bp, Homo sapien
cccgcggccgtgctgcagcttctcg

SEQ ID NO: 5789607 - DNA, 25 bp, Homo sapien
ctcggcctggagggagtggacatac

SEQ ID NO: 5789608 - DNA, 25 bp, Homo sapien
cgctccagcttctcgcgggcggaga

SEQ ID NO: 5789609 - DNA, 25 bp, Homo sapien
tcggcgggcagggcggccccggcgc

SEQ ID NO: 5789610 - DNA, 25 bp, Homo sapien
cggcatcggctcgcctcccggccgg

SEQ ID NO: 5789611 - DNA, 25 bp, Homo sapien
ctcggcatcggctcgcctcccggcc

SEQ ID NO: 5789612 - DNA, 25 bp, Homo sapien
gtggtttctgcgacgctcactgtcc

SEQ ID NO: 5789613 - DNA, 25 bp, Homo sapien
agcttctcgcgggcggagaagccgc

SEQ ID NO: 5789614 - DNA, 25 bp, Homo sapien
aatgtcaacacaatgtttgtttaaa

SEQ ID NO: 5789615 - DNA, 25 bp, Homo sapien
gcgacagcgggggcgtgggcagcag

SEQ ID NO: 5789616 - DNA, 25 bp, Homo sapien
gcagcatctccgtgacccagctcgg

SEQ ID NO: 5789617 - DNA, 25 bp, Homo sapien
gtctgggttcttgcagatcatgccc

SEQ ID NO: 5789618 - DNA, 25 bp, Homo sapien
cggcggccgggtgggcgagctcggc

SEQ ID NO: 5789619 - DNA, 25 bp, Homo sapien
tttcaaagtgctataagatgcagca

SEQ ID NO: 5789620 - DNA, 25 bp, Homo sapien
tatacaaaaggcggatgtgtcaatg

SEQ ID NO: 5789621 - DNA, 25 bp, Homo sapien
ggagggagtggacatactcagtggc

SEQ ID NO: 5789622 - DNA, 25 bp, Homo sapien
gttttgagaagcgtctagcaagtcc

SEQ ID NO: 5789623 - DNA, 25 bp, Homo sapien
tcatacgaaaatataagtatcaaat

SEQ ID NO: 5789624 - DNA, 25 bp, Homo sapien
aagtaatatctactcaaaactttca

SEQ ID NO: 5789625 - DNA, 25 bp, Homo sapien
ggctggcggcgccggctcccgggga

SEQ ID NO: 5789626 - DNA, 25 bp, Homo sapien
acggcgcgctccagcttctcgcggg

SEQ ID NO: 5789627 - DNA, 25 bp, Homo sapien
ctgagggccttgtggtcgccgccgc

SEQ ID NO: 5789628 - DNA, 25 bp, Homo sapien
cgttgcggcgctggcgctccaggat

SEQ ID NO: 5789629 - DNA, 25 bp, Homo sapien
gcgtcatactaaagtatacaggcag

SEQ ID NO: 5789630 - DNA, 25 bp, Homo sapien
aagcgtctagcaagtccgagcgtgt

SEQ ID NO: 5789631 - DNA, 25 bp, Homo sapien
ttggaaacttggaacacacaaggtg

SEQ ID NO: 5789632 - DNA, 25 bp, Homo sapien
gtaaaccaacattcttaatgtcaac

SEQ ID NO: 5789633 - DNA, 25 bp, Homo sapien
ctgcgggcacgggcgctggctcgcg

SEQ ID NO: 5789634 - DNA, 25 bp, Homo sapien
tctcattctttaccaactccggcac

SEQ ID NO: 5789635 - DNA, 25 bp, Homo sapien
atcaaaatgtgcaaagtggcagtga

SEQ ID NO: 5789636 - DNA, 25 bp, Homo sapien
ggatcagctcgctggactgagccct

SEQ ID NO: 5789637 - DNA, 25 bp, Homo sapien
gcatggtggacgtggagcagctcgg

SEQ ID NO: 5789638 - DNA, 25 bp, Homo sapien
ggggctgcgggcacgggcgctggct

SEQ ID NO: 5789639 - DNA, 25 bp, Homo sapien
ccggggctgcgggcacgggcgctgg

SEQ ID NO: 5789640 - DNA, 25 bp, Homo sapien
agtggacatactcagtggccttttt

SEQ ID NO: 5789641 - DNA, 25 bp, Homo sapien
gggcccgccgccggggcactggccg

SEQ ID NO: 5789642 - DNA, 25 bp, Homo sapien
atcatgcccggcatggtggacgtgg

SEQ ID NO: 5789643 - DNA, 25 bp, Homo sapien
atcaaatggcaaaccccttatgtgg

SEQ ID NO: 5789644 - DNA, 25 bp, Homo sapien
tctttaccaactccggcacgtggtc

SEQ ID NO: 5789645 - DNA, 25 bp, Homo sapien
agaaatgttccccaggggtatcaaa

SEQ ID NO: 5789646 - DNA, 25 bp, Homo sapien
gaagccacggctgggcgacagcggg

SEQ ID NO: 5789647 - DNA, 25 bp, Homo sapien
cttctgtgggggtgcatcctcactc

SEQ ID NO: 5789648 - DNA, 25 bp, Homo sapien
acccagcatcctgggatgcaggctc

SEQ ID NO: 5789649 - DNA, 25 bp, Homo sapien
tcacggcgcgctccagcttctcgcg

SEQ ID NO: 5789650 - DNA, 25 bp, Homo sapien
gttcttgggacgcacagtgatggtg

SEQ ID NO: 5789651 - DNA, 25 bp, Homo sapien
ctctccacgtagggagagggggcgg

SEQ ID NO: 5789652 - DNA, 25 bp, Homo sapien
ccgccgccggggcactggccggggc

SEQ ID NO: 5789653 - DNA, 25 bp, Homo sapien
gaggtgaggtggaggaggctgcagg

SEQ ID NO: 5789654 - DNA, 25 bp, Homo sapien
ggaacgccgcttctccacagtgacc

SEQ ID NO: 5789655 - DNA, 25 bp, Homo sapien
gatgttgtggtttctgcgacgctca

SEQ ID NO: 5789656 - DNA, 25 bp, Homo sapien
tgagcggacgtggggacgcctcgct

SEQ ID NO: 5789657 - DNA, 25 bp, Homo sapien
agcaagtccgagcgtgttcaatttt

SEQ ID NO: 5789658 - DNA, 25 bp, Homo sapien
cgcagggcccgccgccggggcactg

SEQ ID NO: 5789659 - DNA, 25 bp, Homo sapien
gggtgtcctctccggaggtactgag

SEQ ID NO: 5789660 - DNA, 25 bp, Homo sapien
ggctgggcgacagcgggggcgtggg

SEQ ID NO: 5789661 - DNA, 25 bp, Homo sapien
ccaaggtcccagcagaaccccacac

SEQ ID NO: 5789662 - DNA, 25 bp, Homo sapien
cggccgtgctgcagcttctcgctca

SEQ ID NO: 5789663 - DNA, 25 bp, Homo sapien
tcttgggacgcacagtgatggtgaa

SEQ ID NO: 5789664 - DNA, 25 bp, Homo sapien
tggctcgcgcttgttcacgggaaag

SEQ ID NO: 5789665 - DNA, 25 bp, Homo sapien
atttgaaagtaaaccaacattctta

SEQ ID NO: 5789666 - DNA, 25 bp, Homo sapien
gcatctgctggaacttaagcaccat

SEQ ID NO: 5789667 - DNA, 25 bp, Homo sapien
ccacccagcatcctgggatgcaggc

SEQ ID NO: 5789668 - DNA, 25 bp, Homo sapien
gaacttaagcaccattttaaaaaga

SEQ ID NO: 5789669 - DNA, 25 bp, Homo sapien
caaccgtcaccaacgtttagcgctg

SEQ ID NO: 5789670 - DNA, 25 bp, Homo sapien
ggtgcatcctcactctccacgtagg

SEQ ID NO: 5789671 - DNA, 25 bp, Homo sapien
aactttgcatttacccagttctatg

SEQ ID NO: 5789672 - DNA, 25 bp, Homo sapien
ctcactctccacgtagggagagggg

SEQ ID NO: 5789673 - DNA, 25 bp, Homo sapien
tctttatcttcttctgtgggggtgc

SEQ ID NO: 5789674 - DNA, 25 bp, Homo sapien
accacgtcgatttcttcctcttcat

SEQ ID NO: 5789675 - DNA, 25 bp, Homo sapien
cgctgtcatggaggtgaggtggagg

SEQ ID NO: 5789676 - DNA, 25 bp, Homo sapien
caggctctccaaggtcccagcagaa

SEQ ID NO: 5789677 - DNA, 25 bp, Homo sapien
cagtacttaggtatgaacttccagt

SEQ ID NO: 5789678 - DNA, 25 bp, Homo sapien
tttctgttgtttggaaacttggaac

SEQ ID NO: 5789679 - DNA, 25 bp, Homo sapien
ctgccccacagctcgttctcaagca

SEQ ID NO: 5789680 - DNA, 25 bp, Homo sapien
ctggtggtcctactgcccacccaga

SEQ ID NO: 5789681 - DNA, 25 bp, Homo sapien
cgcagccccgccgtgcccgcgaccc

SEQ ID NO: 5789682 - DNA, 25 bp, Homo sapien
gtcatactaaagtatacaggcagtg

SEQ ID NO: 5789683 - DNA, 25 bp, Homo sapien
agggagagggggcggcatagttgtg

SEQ ID NO: 5789684 - DNA, 25 bp, Homo sapien
cacactggtggtcctactgcccacc

SEQ ID NO: 5789685 - DNA, 25 bp, Homo sapien
cggaggtactgagggccttgtggtc

SEQ ID NO: 5789686 - DNA, 25 bp, Homo sapien
ctctccaaggtcccagcagaacccc

SEQ ID NO: 5789687 - DNA, 25 bp, Homo sapien
acagaaatgttccccaggggtatca

SEQ ID NO: 5789688 - DNA, 25 bp, Homo sapien
tgtggtcgccgccgctggtctggcg

SEQ ID NO: 5789689 - DNA, 25 bp, Homo sapien
cccggccggcgactgagggcttctt

SEQ ID NO: 5789690 - DNA, 25 bp, Homo sapien
gaggtactgagggccttgtggtcgc

SEQ ID NO: 5789691 - DNA, 25 bp, Homo sapien
taagtatcaaatttagttatgtatc

SEQ ID NO: 5789692 - DNA, 25 bp, Homo sapien
ctgggatgcaggctctccaaggtcc

SEQ ID NO: 5789693 - DNA, 25 bp, Homo sapien
ggccggggctgcgggcacgggcgct

SEQ ID NO: 5789694 - DNA, 25 bp, Homo sapien
gcgttcttgggacgcacagtgatgg

SEQ ID NO: 5789695 - DNA, 25 bp, Homo sapien
atctgaatcgctcagggtgtcctct

SEQ ID NO: 5789696 - DNA, 25 bp, Homo sapien
tccttttccagcaaaagctggtgct

SEQ ID NO: 5789697 - DNA, 25 bp, Homo sapien
gtacttaggtatgaacttccagtct

SEQ ID NO: 5789698 - DNA, 25 bp, Homo sapien
cagagtttcgggggctcaagctctt

SEQ ID NO: 5789699 - DNA, 25 bp, Homo sapien
gccggctcccggggactgggcggtg

SEQ ID NO: 5789700 - DNA, 25 bp, Homo sapien
ctgggcgacagcgggggcgtgggca

SEQ ID NO: 5789701 - DNA, 25 bp, Homo sapien
aggtatgaacttccagtctaatact

SEQ ID NO: 5789702 - DNA, 25 bp, Homo sapien
ggggtgcatcctcactctccacgta

SEQ ID NO: 5789703 - DNA, 25 bp, Homo sapien
aacaaatacattaacaggaagaaac

SEQ ID NO: 5789704 - DNA, 25 bp, Homo sapien
ccggcgccgacctccaacactgcaa

SEQ ID NO: 5789705 - DNA, 25 bp, Homo sapien
ctctcattacccaggatgtatacaa

SEQ ID NO: 5789706 - DNA, 25 bp, Homo sapien
gccgctccacatgcagtcctggagg

SEQ ID NO: 5789707 - DNA, 25 bp, Homo sapien
cagcaaaagctggtgctcctcggcc

SEQ ID NO: 5789708 - DNA, 25 bp, Homo sapien
cccggcatggtggacgtggagcagc

SEQ ID NO: 5789709 - DNA, 25 bp, Homo sapien
gctggactgagccctcccgggaccc

SEQ ID NO: 5789710 - DNA, 25 bp, Homo sapien
ctgcgttcttgggacgcacagtgat

SEQ ID NO: 5789711 - DNA, 25 bp, Homo sapien
aactccggcacgtggtccctgagcg

SEQ ID NO: 5789712 - DNA, 25 bp, Homo sapien
gatggtgaatgtggtgacagccttg

SEQ ID NO: 5789713 - DNA, 25 bp, Homo sapien
gttggcggcccgcggccgtgctgca

SEQ ID NO: 5789714 - DNA, 25 bp, Homo sapien
ttattttcataaacatgaggtattt

SEQ ID NO: 5789715 - DNA, 25 bp, Homo sapien
tttcataaacatgaggtatttcaaa

SEQ ID NO: 5789716 - DNA, 25 bp, Homo sapien
gcatcggctcgcctcccggccggcg

SEQ ID NO: 5789717 - DNA, 25 bp, Homo sapien
cttctcgcgggcggagaagccgctc

SEQ ID NO: 5789718 - DNA, 25 bp, Homo sapien
gttcttgcagatcatgcccggcatg

SEQ ID NO: 5789719 - DNA, 25 bp, Homo sapien
ttggggggatgacactcttgagcgg

SEQ ID NO: 5789720 - DNA, 25 bp, Homo sapien
gtcctctccggaggtactgagggcc

SEQ ID NO: 5789721 - DNA, 25 bp, Homo sapien
acgaaaatataagtatcaaatttag

SEQ ID NO: 5789722 - DNA, 25 bp, Homo sapien
ttgaggtattattacagtacttagg

SEQ ID NO: 5789723 - DNA, 25 bp, Homo sapien
ccaggatgttgtggtttctgcgacg

SEQ ID NO: 5789724 - DNA, 25 bp, Homo sapien
tatctactcaaaactttcacaactc

SEQ ID NO: 5789725 - DNA, 25 bp, Homo sapien
ccaactccggcacgtggtccctgag

SEQ ID NO: 5789726 - DNA, 25 bp, Homo sapien
gacactcttgagcggacgtggggac

SEQ ID NO: 5789727 - DNA, 25 bp, Homo sapien
tccaacactgcaaccgacagacaca

SEQ ID NO: 5789728 - DNA, 25 bp, Homo sapien
gaaagctggaccgaaggtcgttgcg

SEQ ID NO: 5789729 - DNA, 25 bp, Homo sapien
ccggcgcggccggctcccgcagccc

SEQ ID NO: 5789730 - DNA, 25 bp, Homo sapien
tggcatctgctggaacttaagcacc

SEQ ID NO: 5789731 - DNA, 25 bp, Homo sapien
agcatcctgggatgcaggctctcca

SEQ ID NO: 5789732 - DNA, 25 bp, Homo sapien
catcatctgaatcgctcagggtgtc

SEQ ID NO: 5789733 - DNA, 25 bp, Homo sapien
tggccgcaaaagccacctctcatta

SEQ ID NO: 5789734 - DNA, 25 bp, Homo sapien
acgtagggagagggggcggcatagt

SEQ ID NO: 5789735 - DNA, 25 bp, Homo sapien
caggaagaaacaggctaggaaaaag

SEQ ID NO: 5789736 - DNA, 25 bp, Homo sapien
gcgaagccacggctgggcgacagcg

SEQ ID NO: 5789737 - DNA, 25 bp, Homo sapien
ctagcaagtccgagcgtgttcaatt

SEQ ID NO: 5789738 - DNA, 25 bp, Homo sapien
aacacacaaggtgacttcaacagcc

SEQ ID NO: 5789739 - DNA, 25 bp, Homo sapien
cgtgctgcagcttctcgctcacggc

SEQ ID NO: 5789740 - DNA, 25 bp, Homo sapien
cttcatcatcttcatcatctgaatc

SEQ ID NO: 5789741 - DNA, 25 bp, Homo sapien
aagtagaagtcatcttcgtccgggt

SEQ ID NO: 5789742 - DNA, 25 bp, Homo sapien
gacaggggaccgatttgaaagtaaa

SEQ ID NO: 5789743 - DNA, 25 bp, Homo sapien
ccgccgaagtagaagtcatcttcgt

SEQ ID NO: 5789744 - DNA, 25 bp, Homo sapien
cttgcctgcaatttttccttttcca

SEQ ID NO: 5789745 - DNA, 25 bp, Homo sapien
tttgtatacaaaacatgctcctcaa

SEQ ID NO: 5789746 - DNA, 25 bp, Homo sapien
ttattacagtacttaggtatgaact

SEQ ID NO: 5789747 - DNA, 25 bp, Homo sapien
ccgggtgggcgagctcggcgggcag

SEQ ID NO: 5789748 - DNA, 25 bp, Homo sapien
ctcaagctcttagcctttgggggga

SEQ ID NO: 5789749 - DNA, 25 bp, Homo sapien
ctcctcggccgggctgccccacagc

SEQ ID NO: 5789750 - DNA, 25 bp, Homo sapien
cgcgacccgcagggctggcggcgcc

SEQ ID NO: 5789751 - DNA, 25 bp, Homo sapien
gctgtgctccgcgaagccacggctg

SEQ ID NO: 5789752 - DNA, 25 bp, Homo sapien
gcgagtcaaactcgaggtctgggtt

SEQ ID NO: 5789753 - DNA, 25 bp, Homo sapien
gtatgaacttccagtctaatactgg

SEQ ID NO: 5789754 - DNA, 25 bp, Homo sapien
atacccgcccccgaggcgaccgcag

SEQ ID NO: 5789755 - DNA, 25 bp, Homo sapien
ccagcagaaccccacactggtggtc

SEQ ID NO: 5789756 - DNA, 25 bp, Homo sapien
actggccgcaaaagccacctctcat

SEQ ID NO: 5789757 - DNA, 25 bp, Homo sapien
tccggaggtactgagggccttgtgg

SEQ ID NO: 5789758 - DNA, 25 bp, Homo sapien
catggaggtgaggtggaggaggctg

SEQ ID NO: 5789759 - DNA, 25 bp, Homo sapien
gaagcagggctgtagcgagtcaaac

SEQ ID NO: 5789760 - DNA, 25 bp, Homo sapien
tatacaaaacatgctcctcaaacat

SEQ ID NO: 5789761 - DNA, 25 bp, Homo sapien
aaagtatacaggcagtgtaagaatt

SEQ ID NO: 5789762 - DNA, 25 bp, Homo sapien
ttaggtatgaacttccagtctaata

SEQ ID NO: 5789763 - DNA, 25 bp, Homo sapien
tctgtgggggtgcatcctcactctc

SEQ ID NO: 5789764 - DNA, 25 bp, Homo sapien
ggaggaggaacgccgcttctccaca

SEQ ID NO: 5789765 - DNA, 25 bp, Homo sapien
gcagcttctcgctcacggcgcgctc

SEQ ID NO: 5789766 - DNA, 25 bp, Homo sapien
tctcaagcagcatctccgtgaccca

SEQ ID NO: 5789767 - DNA, 25 bp, Homo sapien
tggacgtggagcagctcggcatcgg

SEQ ID NO: 5789768 - DNA, 25 bp, Homo sapien
tcaacagccccagaggctcccaacc

SEQ ID NO: 5789769 - DNA, 25 bp, Homo sapien
tcccgcagccccgccgtgcccgcga

SEQ ID NO: 5789770 - DNA, 25 bp, Homo sapien
tgaacaaatacattaacaggaagaa

SEQ ID NO: 5789771 - DNA, 25 bp, Homo sapien
cgctcagggtgtcctctccggaggt

SEQ ID NO: 5789772 - DNA, 25 bp, Homo sapien
gtttagcgctgtcatggaggtgagg

SEQ ID NO: 5789773 - DNA, 25 bp, Homo sapien
aattaaacacagaactttgcattta

SEQ ID NO: 5789774 - DNA, 25 bp, Homo sapien
cagtgatggtgaatgtggtgacagc

SEQ ID NO: 5789775 - DNA, 25 bp, Homo sapien
taagcaccattttaaaaagaaggaa

SEQ ID NO: 5789776 - DNA, 25 bp, Homo sapien
cgagtcggggccgccgaagtagaag

SEQ ID NO: 5789777 - DNA, 25 bp, Homo sapien
tggcggcccgcggccgtgctgcagc

SEQ ID NO: 5789778 - DNA, 25 bp, Homo sapien
gggaagaccacggcgggatccacgc

SEQ ID NO: 5789779 - DNA, 25 bp, Homo sapien
aggtggaggaggctgcagggccacc

SEQ ID NO: 5789780 - DNA, 25 bp, Homo sapien
cccaaccgtcaccaacgtttagcgc

SEQ ID NO: 5789781 - DNA, 25 bp, Homo sapien
catcgtttgaggatcagctcgctgg

SEQ ID NO: 5789782 - DNA, 25 bp, Homo sapien
gcaccaaacatgaacaaatacatta

SEQ ID NO: 5789783 - DNA, 25 bp, Homo sapien
gcatttacccagttctatgcaccaa

SEQ ID NO: 5789784 - DNA, 25 bp, Homo sapien
gctggctcgcgcttgttcacgggaa

SEQ ID NO: 5789785 - DNA, 25 bp, Homo sapien
gcaaagtggcagtgactgtccagtt

SEQ ID NO: 5789786 - DNA, 25 bp, Homo sapien
gaaattaaacacagaactttgcatt

SEQ ID NO: 5789787 - DNA, 25 bp, Homo sapien
gggttgggggtgaggccacccagtc

SEQ ID NO: 5789788 - DNA, 25 bp, Homo sapien
cgtcgatttcttcctcttcatcttc

SEQ ID NO: 5789789 - DNA, 25 bp, Homo sapien
tgctgtcttgcctgcaatttttcct

SEQ ID NO: 5789790 - DNA, 25 bp, Homo sapien
ctggcggcgccggctcccggggact

SEQ ID NO: 5789791 - DNA, 25 bp, Homo sapien
gactgggcggtggaaccggcggttg

SEQ ID NO: 5789792 - DNA, 25 bp, Homo sapien
ggctcccaaccgtcaccaacgttta

SEQ ID NO: 5789793 - DNA, 25 bp, Homo sapien
tcatcatcttcatcatctgaatcgc

SEQ ID NO: 5789794 - DNA, 25 bp, Homo sapien
gctctttatcttcttctgtgggggt

SEQ ID NO: 5789795 - DNA, 25 bp, Homo sapien
cactggccggggctgcgggcacggg

SEQ ID NO: 5789796 - DNA, 25 bp, Homo sapien
ggccgccgaagtagaagtcatcttc

SEQ ID NO: 5789797 - DNA, 25 bp, Homo sapien
aatgaccaccttggcggccttctca

SEQ ID NO: 5789798 - DNA, 25 bp, Homo sapien
ttacccaggatgtatacaaaaggcg

SEQ ID NO: 5789799 - DNA, 25 bp, Homo sapien
caacactgcaaccgacagacacacc

SEQ ID NO: 5789800 - DNA, 25 bp, Homo sapien
ctcaaacattgaggtattattacag

SEQ ID NO: 5789801 - DNA, 25 bp, Homo sapien
aaacatgaggtatttcaaagtgcta

SEQ ID NO: 5789802 - DNA, 25 bp, Homo sapien
tcctcggcctggagggagtggacat

SEQ ID NO: 5789803 - DNA, 25 bp, Homo sapien
gctgctgtcttgcctgcaatttttc

SEQ ID NO: 5789804 - DNA, 25 bp, Homo sapien
tgcagcactaaatatatacattttg

SEQ ID NO: 5789805 - DNA, 25 bp, Homo sapien
tctactcaaaactttcacaactcat

SEQ ID NO: 5789806 - DNA, 25 bp, Homo sapien
gaggtattattacagtacttaggta

SEQ ID NO: 5789807 - DNA, 25 bp, Homo sapien
aaatcaaaatgtgcaaagtggcagt

SEQ ID NO: 5789808 - DNA, 25 bp, Homo sapien
ctaggaaaaaggcatatatatatag

SEQ ID NO: 5789809 - DNA, 25 bp, Homo sapien
gtggcctttttcaaaatgaccacct

SEQ ID NO: 5789810 - DNA, 25 bp, Homo sapien
cgaccgcagggcccgccgccggggc

SEQ ID NO: 5789811 - DNA, 25 bp, Homo sapien
cttctcattctttaccaactccggc

SEQ ID NO: 5789812 - DNA, 25 bp, Homo sapien
agtatcaaatttagttatgtatcag

SEQ ID NO: 5789813 - DNA, 25 bp, Homo sapien
gccgctggtctggcggccgcctggg

SEQ ID NO: 5789814 - DNA, 25 bp, Homo sapien
tcaaacttcttccagatgtcctccc

SEQ ID NO: 5789815 - DNA, 25 bp, Homo sapien
gccgcaaaagccacctctcattacc

SEQ ID NO: 5789816 - DNA, 25 bp, Homo sapien
atatacattttgaagaaattaaaca

SEQ ID NO: 5789817 - DNA, 25 bp, Homo sapien
agtgctataagatgcagcactaaat

SEQ ID NO: 5789818 - DNA, 25 bp, Homo sapien
ccgccgtgcccgcgacccgcagggc

SEQ ID NO: 5789819 - DNA, 25 bp, Homo sapien
aaggcatcgtttgaggatcagctcg

SEQ ID NO: 5789820 - DNA, 25 bp, Homo sapien
tgttggaggaggaacgccgcttctc

SEQ ID NO: 5789821 - DNA, 25 bp, Homo sapien
ttgaaagtaaaccaacattcttaat

SEQ ID NO: 5789822 - DNA, 25 bp, Homo sapien
tttccagcaaaagctggtgctcctc

SEQ ID NO: 5789823 - DNA, 25 bp, Homo sapien
ccctgagcgtgagaaagctggaccg

SEQ ID NO: 5789824 - DNA, 25 bp, Homo sapien
cggcctggagggagtggacatactc

SEQ ID NO: 5789825 - DNA, 25 bp, Homo sapien
aggaggctgcagggccacccagcat

SEQ ID NO: 5789826 - DNA, 25 bp, Homo sapien
gggatgcaggctctccaaggtccca

SEQ ID NO: 5789827 - DNA, 25 bp, Homo sapien
aggcggatgtgtcaatggtatttac

SEQ ID NO: 5789828 - DNA, 25 bp, Homo sapien
ctgcccacccagagccgaactcgac

SEQ ID NO: 5789829 - DNA, 25 bp, Homo sapien
tttagcaactgctgctgtcttgcct

SEQ ID NO: 5789830 - DNA, 25 bp, Homo sapien
agccgaactcgacaggggaccgatt

SEQ ID NO: 5789831 - DNA, 25 bp, Homo sapien
ttaatgtcaacacaatgtttgttta

SEQ ID NO: 5789832 - DNA, 25 bp, Homo sapien
gcactaaatatatacattttgaaga

SEQ ID NO: 5789833 - DNA, 25 bp, Homo sapien
agaactttgcatttacccagttcta

SEQ ID NO: 5789834 - DNA, 25 bp, Homo sapien
tgcaatttttccttttccagcaaaa

SEQ ID NO: 5789835 - DNA, 25 bp, Homo sapien
gggctgtagcgagtcaaactcgagg

SEQ ID NO: 5789836 - DNA, 25 bp, Homo sapien
cagctcaaacttcttccagatgtcc

SEQ ID NO: 5789837 - DNA, 25 bp, Homo sapien
ccaggatgtatacaaaaggcggatg

SEQ ID NO: 5789838 - DNA, 25 bp, Homo sapien
cttctcgctcacggcgcgctccagc

SEQ ID NO: 5789839 - DNA, 25 bp, Homo sapien
aagctggaccgaaggtcgttgcggc

SEQ ID NO: 5789840 - DNA, 25 bp, Homo sapien
tgcgacgctcactgtcctccgagtc

SEQ ID NO: 5789841 - DNA, 25 bp, Homo sapien
tacataacagagattaacaatatat

SEQ ID NO: 5789842 - DNA, 25 bp, Homo sapien
ttcaattttctttagcaactgctgc

SEQ ID NO: 5789843 - DNA, 25 bp, Homo sapien
aacgccgcttctccacagtgaccac

SEQ ID NO: 5789844 - DNA, 25 bp, Homo sapien
ctgctggaacttaagcaccatttta

SEQ ID NO: 5789845 - DNA, 25 bp, Homo sapien
gcggccgggtgggcgagctcggcgg

SEQ ID NO: 5789846 - DNA, 25 bp, Homo sapien
tgtcaacacaatgtttgtttaaaaa

SEQ ID NO: 5789847 - DNA, 25 bp, Homo sapien
ggggcggcatagttgtgctgctggt

SEQ ID NO: 5789848 - DNA, 25 bp, Homo sapien
tgttgtggtttctgcgacgctcact

SEQ ID NO: 5789849 - DNA, 25 bp, Homo sapien
taacagagattaacaatatatttgt

SEQ ID NO: 5789850 - DNA, 25 bp, Homo sapien
tggatgggaaggcatcgtttgagga

SEQ ID NO: 5789851 - DNA, 25 bp, Homo sapien
ctttcacaactcattttcatacgaa

SEQ ID NO: 5789852 - DNA, 25 bp, Homo sapien
gtgctgctggtggatgggaaggcat

SEQ ID NO: 5789853 - DNA, 25 bp, Homo sapien
gggcgacagcgggggcgtgggcagc

SEQ ID NO: 5789854 - DNA, 25 bp, Homo sapien
ggtatttcaaagtgctataagatgc

SEQ ID NO: 5789855 - DNA, 25 bp, Homo sapien
accaccttggcggccttctcattct

SEQ ID NO: 5789856 - DNA, 25 bp, Homo sapien
acccgcagggctggcggcgccggct

SEQ ID NO: 5789857 - DNA, 25 bp, Homo sapien
aactcgaggtctgggttcttgcaga

SEQ ID NO: 5789858 - DNA, 25 bp, Homo sapien
gactgagccctcccgggacccaggg

SEQ ID NO: 5789859 - DNA, 25 bp, Homo sapien
gtcatggaggtgaggtggaggaggc

SEQ ID NO: 5789860 - DNA, 25 bp, Homo sapien
ggccggcgccgacctccaacactgc

SEQ ID NO: 5789861 - DNA, 25 bp, Homo sapien
gccttctcattctttaccaactccg

SEQ ID NO: 5789862 - DNA, 25 bp, Homo sapien
acgctcactgtcctccgagtcagag

SEQ ID NO: 5789863 - DNA, 25 bp, Homo sapien
aaggtcccagcagaaccccacactg

SEQ ID NO: 5789864 - DNA, 25 bp, Homo sapien
tcctggaggatgaccgggttggggg

SEQ ID NO: 5789865 - DNA, 25 bp, Homo sapien
tgaccacgtcgatttcttcctcttc

SEQ ID NO: 5789866 - DNA, 25 bp, Homo sapien
ccagcttctcgcgggcggagaagcc

SEQ ID NO: 5789867 - DNA, 25 bp, Homo sapien
cctcgctctttatcttcttctgtgg

SEQ ID NO: 5789868 - DNA, 25 bp, Homo sapien
acttggaacacacaaggtgacttca

SEQ ID NO: 5789869 - DNA, 25 bp, Homo sapien
atgcaccaaacatgaacaaatacat

SEQ ID NO: 5789870 - DNA, 25 bp, Homo sapien
gtgcttccttcccgtggggggcgcg

SEQ ID NO: 5789871 - DNA, 25 bp, Homo sapien
cgtgcccgcgacccgcagggctggc

SEQ ID NO: 5789872 - DNA, 25 bp, Homo sapien
ccagggctgcgttcttgggacgcac

SEQ ID NO: 5789873 - DNA, 25 bp, Homo sapien
ctaaagtatacaggcagtgtaagaa

SEQ ID NO: 5789874 - DNA, 25 bp, Homo sapien
tggcggccgcctgggcgcggagggg

SEQ ID NO: 5789875 - DNA, 25 bp, Homo sapien
ttggtgttggaggaggaacgccgct

SEQ ID NO: 5789876 - DNA, 25 bp, Homo sapien
cgtgttcaattttctttagcaactg

SEQ ID NO: 5789877 - DNA, 25 bp, Homo sapien
ccacggctgggcgacagcgggggcg

SEQ ID NO: 5789878 - DNA, 25 bp, Homo sapien
gccccacagctcgttctcaagcagc

SEQ ID NO: 5789879 - DNA, 25 bp, Homo sapien
ggcgctccaggatgttgtggtttct

SEQ ID NO: 5789880 - DNA, 25 bp, Homo sapien
gggccttgtggtcgccgccgctggt

SEQ ID NO: 5789881 - DNA, 25 bp, Homo sapien
acacagaactttgcatttacccagt

SEQ ID NO: 5789882 - DNA, 25 bp, Homo sapien
tccgtgacccagctcgggggctcgg

SEQ ID NO: 5789883 - DNA, 25 bp, Homo sapien
ggtattattacagtacttaggtatg

SEQ ID NO: 5789884 - DNA, 25 bp, Homo sapien
ccacccagagccgaactcgacaggg

SEQ ID NO: 5789885 - DNA, 25 bp, Homo sapien
agcgtgttcaattttctttagcaac

SEQ ID NO: 5789886 - DNA, 25 bp, Homo sapien
gccccagaggctcccaaccgtcacc

SEQ ID NO: 5789887 - DNA, 25 bp, Homo sapien
agcttctcgctcacggcgcgctcca

SEQ ID NO: 5789888 - DNA, 25 bp, Homo sapien
gccccggctggggcggcaatacccg

SEQ ID NO: 5789889 - DNA, 25 bp, Homo sapien
gcgccggctcccggggactgggcgg

SEQ ID NO: 5789890 - DNA, 25 bp, Homo sapien
caatggtatttacagaaatgttccc

SEQ ID NO: 5789891 - DNA, 25 bp, Homo sapien
caacgtttagcgctgtcatggaggt

SEQ ID NO: 5789892 - DNA, 25 bp, Homo sapien
caagctcttagcctttggggggatg

SEQ ID NO: 5789893 - DNA, 25 bp, Homo sapien
cagccccagaggctcccaaccgtca

SEQ ID NO: 5789894 - DNA, 25 bp, Homo sapien
aaatgttccccaggggtatcaaatg

SEQ ID NO: 5789895 - DNA, 25 bp, Homo sapien
tccgagcgtgttcaattttctttag

SEQ ID NO: 5789896 - DNA, 25 bp, Homo sapien
cctccaacactgcaaccgacagaca

SEQ ID NO: 5789897 - DNA, 25 bp, Homo sapien
gcgtctagcaagtccgagcgtgttc

SEQ ID NO: 5789898 - DNA, 25 bp, Homo sapien
tggaacttaagcaccattttaaaaa

SEQ ID NO: 5789899 - DNA, 25 bp, Homo sapien
ttctccacagtgaccacgtcgattt

SEQ ID NO: 5789900 - DNA, 25 bp, Homo sapien
ccttggtgttggaggaggaacgccg

SEQ ID NO: 5789901 - DNA, 25 bp, Homo sapien
gctggtgctcctcggcctggaggga

SEQ ID NO: 5789902 - DNA, 25 bp, Homo sapien
tcaagcagcatctccgtgacccagc

SEQ ID NO: 5789903 - DNA, 25 bp, Homo sapien
gcgggcacgggcgctggctcgcgct

SEQ ID NO: 5789904 - DNA, 25 bp, Homo sapien
gaagaccacggcgggatccacgcac

SEQ ID NO: 5789905 - DNA, 25 bp, Homo sapien
ctccacgtagggagagggggcggca

SEQ ID NO: 5789906 - DNA, 25 bp, Homo sapien
taccaactccggcacgtggtccctg

SEQ ID NO: 5789907 - DNA, 25 bp, Homo sapien
ctatgcaccaaacatgaacaaatac

SEQ ID NO: 5789908 - DNA, 25 bp, Homo sapien
tcctcctcggccgggctgccccaca

SEQ ID NO: 5789909 - DNA, 25 bp, Homo sapien
acccagttctatgcaccaaacatga

SEQ ID NO: 5789910 - DNA, 25 bp, Homo sapien
gcggcccgcggccgtgctgcagctt

SEQ ID NO: 5789911 - DNA, 25 bp, Homo sapien
gcccgccgccggggcactggccggg

SEQ ID NO: 5789912 - DNA, 25 bp, Homo sapien
ggtatttacagaaatgttccccagg

SEQ ID NO: 5789913 - DNA, 25 bp, Homo sapien
cgcggccgtgctgcagcttctcgct

SEQ ID NO: 5789914 - DNA, 25 bp, Homo sapien
accgtcaccaacgtttagcgctgtc

SEQ ID NO: 5789915 - DNA, 25 bp, Homo sapien
gggacgcacagtgatggtgaatgtg

SEQ ID NO: 5789916 - DNA, 25 bp, Homo sapien
tggcaaaccccttatgtggcatctg

SEQ ID NO: 5789917 - DNA, 25 bp, Homo sapien
cccaggggtatcaaatggcaaaccc

SEQ ID NO: 5789918 - DNA, 25 bp, Homo sapien
gggggcgtgggcagcagctcaaact

SEQ ID NO: 5789919 - DNA, 25 bp, Homo sapien
gtgtcctctccggaggtactgaggg

SEQ ID NO: 5789920 - DNA, 25 bp, Homo sapien
gtgctcctcggcctggagggagtgg

SEQ ID NO: 5789921 - DNA, 25 bp, Homo sapien
agtgataaagtaatatctactcaaa

SEQ ID NO: 5789922 - DNA, 25 bp, Homo sapien
gatgcaggctctccaaggtcccagc

SEQ ID NO: 5789923 - DNA, 25 bp, Homo sapien
gtttgaggatcagctcgctggactg

SEQ ID NO: 5789924 - DNA, 25 bp, Homo sapien
agcatctccgtgacccagctcgggg

SEQ ID NO: 5789925 - DNA, 25 bp, Homo sapien
cgagcgtgttcaattttctttagca

SEQ ID NO: 5789926 - DNA, 25 bp, Homo sapien
tgctgcagcttctcgctcacggcgc

SEQ ID NO: 5789927 - DNA, 25 bp, Homo sapien
tcgtttgaggatcagctcgctggac

SEQ ID NO: 5789928 - DNA, 25 bp, Homo sapien
ggaatgactttctgttgtttggaaa

SEQ ID NO: 5789929 - DNA, 25 bp, Homo sapien
gctcactgtcctccgagtcagagtt

SEQ ID NO: 5789930 - DNA, 25 bp, Homo sapien
gaccgaaggtcgttgcggcgctggc

SEQ ID NO: 5789931 - DNA, 25 bp, Homo sapien
ggtttctgcgacgctcactgtcctc

SEQ ID NO: 5789932 - DNA, 25 bp, Homo sapien
cttcaacagccccagaggctcccaa

SEQ ID NO: 5789933 - DNA, 25 bp, Homo sapien
ataagatgcagcactaaatatatac

SEQ ID NO: 5789934 - DNA, 25 bp, Homo sapien
cagtgtaagaattagtacagtacat

SEQ ID NO: 5789935 - DNA, 25 bp, Homo sapien
gagaaagctggaccgaaggtcgttg

SEQ ID NO: 5789936 - DNA, 25 bp, Homo sapien
cacgtcgatttcttcctcttcatct

SEQ ID NO: 5789937 - DNA, 25 bp, Homo sapien
gcgcggaaggcgggggccggcgccg

SEQ ID NO: 5789938 - DNA, 25 bp, Homo sapien
cccggctggggcggcaatacccgcc

SEQ ID NO: 5789939 - DNA, 25 bp, Homo sapien
ccggcacgtggtccctgagcgtgag

SEQ ID NO: 5789940 - DNA, 25 bp, Homo sapien
agtctaatactggccgcaaaagcca

SEQ ID NO: 5789941 - DNA, 25 bp, Homo sapien
atgtgtcaatggtatttacagaaat

SEQ ID NO: 5789942 - DNA, 25 bp, Homo sapien
attcttaatgtcaacacaatgtttg

SEQ ID NO: 5789943 - DNA, 25 bp, Homo sapien
agcagggctgtagcgagtcaaactc

SEQ ID NO: 5789944 - DNA, 25 bp, Homo sapien
cttttccagcaaaagctggtgctcc

SEQ ID NO: 5789945 - DNA, 25 bp, Homo sapien
gaaaaaggcatatatatatagtaaa

SEQ ID NO: 5789946 - DNA, 25 bp, Homo sapien
gggcggccccggcgcggccggctcc

SEQ ID NO: 5789947 - DNA, 25 bp, Homo sapien
ggcgggcagggcggccccggcgcgg

SEQ ID NO: 5789948 - DNA, 25 bp, Homo sapien
agtacataacagagattaacaatat

SEQ ID NO: 5789949 - DNA, 25 bp, Homo sapien
tgtggcatctgctggaacttaagca

SEQ ID NO: 5789950 - DNA, 25 bp, Homo sapien
cacccagtccccccaggccgaacgc

SEQ ID NO: 5789951 - DNA, 25 bp, Homo sapien
ccgaggcgaccgcagggcccgccgc

SEQ ID NO: 5789952 - DNA, 25 bp, Homo sapien
ccagagccgaactcgacaggggacc

SEQ ID NO: 5789953 - DNA, 25 bp, Homo sapien
tagttcaaaaagtgataaagtaata

SEQ ID NO: 5789954 - DNA, 25 bp, Homo sapien
gaaacaggctaggaaaaaggcatat

SEQ ID NO: 5789955 - DNA, 25 bp, Homo sapien
tagcctttggggggatgacactctt

SEQ ID NO: 5789956 - DNA, 25 bp, Homo sapien
ggctgcgttcttgggacgcacagtg

SEQ ID NO: 5789957 - DNA, 25 bp, Homo sapien
ttagcgctgtcatggaggtgaggtg

SEQ ID NO: 5789958 - DNA, 25 bp, Homo sapien
cgtggggacgcctcgctctttatct

SEQ ID NO: 5789959 - DNA, 25 bp, Homo sapien
gccgaacgcgtcctcctcggccggg

SEQ ID NO: 5789960 - DNA, 25 bp, Homo sapien
agtgaccacgtcgatttcttcctct

SEQ ID NO: 5789961 - DNA, 25 bp, Homo sapien
tcctcactctccacgtagggagagg

SEQ ID NO: 5789962 - DNA, 25 bp, Homo sapien
gtcttgcctgcaatttttccttttc

SEQ ID NO: 5789963 - DNA, 25 bp, Homo sapien
gacctccaacactgcaaccgacaga

SEQ ID NO: 5789964 - DNA, 25 bp, Homo sapien
aaggcatatatatatagtaaatttc

SEQ ID NO: 5789965 - DNA, 25 bp, Homo sapien
aagcagcatctccgtgacccagctc

SEQ ID NO: 5789966 - DNA, 25 bp, Homo sapien
ctcgaggtctgggttcttgcagatc

SEQ ID NO: 5789967 - DNA, 25 bp, Homo sapien
actttctgttgtttggaaacttgga

SEQ ID NO: 5789968 - DNA, 25 bp, Homo sapien
tgtccagttttgagaagcgtctagc

SEQ ID NO: 5789969 - DNA, 25 bp, Homo sapien
agagggggcggcatagttgtgctgc

SEQ ID NO: 5789970 - DNA, 25 bp, Homo sapien
tcgcctcccggccggcgactgaggg

SEQ ID NO: 5789971 - DNA, 25 bp, Homo sapien
ccacatgcagtcctggaggatgacc

SEQ ID NO: 5789972 - DNA, 25 bp, Homo sapien
tttcatacgaaaatataagtatcaa

SEQ ID NO: 5789973 - DNA, 25 bp, Homo sapien
ggcatatatatatagtaaatttctt

SEQ ID NO: 5789974 - DNA, 25 bp, Homo sapien
ggccgggtgggcgagctcggcgggc

SEQ ID NO: 5789975 - DNA, 25 bp, Homo sapien
caggggtatcaaatggcaaacccct

SEQ ID NO: 5789976 - DNA, 25 bp, Homo sapien
cgaagtagaagtcatcttcgtccgg

SEQ ID NO: 5789977 - DNA, 25 bp, Homo sapien
aggtgacttcaacagccccagaggc

SEQ ID NO: 5789978 - DNA, 25 bp, Homo sapien
cgggtagaagcagggctgtagcgag

SEQ ID NO: 5789979 - DNA, 25 bp, Homo sapien
cggcgccggctcccggggactgggc

SEQ ID NO: 5789980 - DNA, 25 bp, Homo sapien
ggcgctggcgctccaggatgttgtg

SEQ ID NO: 5789981 - DNA, 25 bp, Homo sapien
tcaaaatgaccaccttggcggcctt

SEQ ID NO: 5789982 - DNA, 25 bp, Homo sapien
ccttggcggccttctcattctttac

SEQ ID NO: 5789983 - DNA, 25 bp, Homo sapien
gtaatatctactcaaaactttcaca

SEQ ID NO: 5789984 - DNA, 25 bp, Homo sapien
tacaggcagtgtaagaattagtaca

SEQ ID NO: 5789985 - DNA, 25 bp, Homo sapien
gggcacgggcgctggctcgcgcttg

SEQ ID NO: 5789986 - DNA, 25 bp, Homo sapien
caatttttccttttccagcaaaagc

SEQ ID NO: 5789987 - DNA, 25 bp, Homo sapien
atagttgtgctgctggtggatggga

SEQ ID NO: 5789988 - DNA, 25 bp, Homo sapien
gtgaatgtggtgacagccttggtgt

SEQ ID NO: 5789989 - DNA, 25 bp, Homo sapien
gcggatgtgtcaatggtatttacag

SEQ ID NO: 5789990 - DNA, 25 bp, Homo sapien
catcctgggatgcaggctctccaag

SEQ ID NO: 5789991 - DNA, 25 bp, Homo sapien
tcttccagatgtcctcccccggggg

SEQ ID NO: 5789992 - DNA, 25 bp, Homo sapien
tcacgggaaaggggaagaccacggc

SEQ ID NO: 5789993 - DNA, 25 bp, Homo sapien
tggacatactcagtggcctttttca

SEQ ID NO: 5789994 - DNA, 25 bp, Homo sapien
ggcgggggccggcgccgacctccaa

SEQ ID NO: 5789995 - DNA, 25 bp, Homo sapien
ctcgggggctcggagctgtgctccg

SEQ ID NO: 5789996 - DNA, 25 bp, Homo sapien
cacacaaggtgacttcaacagcccc

SEQ ID NO: 5789997 - DNA, 25 bp, Homo sapien
ggctctccaaggtcccagcagaacc

SEQ ID NO: 5789998 - DNA, 25 bp, Homo sapien
tactcaaaactttcacaactcattt

SEQ ID NO: 5789999 - DNA, 25 bp, Homo sapien
caccttggcggccttctcattcttt

SEQ ID NO: 5790000 - DNA, 25 bp, Homo sapien
atggtggacgtggagcagctcggca

SEQ ID NO: 5790001 - DNA, 25 bp, Homo sapien
tcataaacatgaggtatttcaaagt

SEQ ID NO: 5790002 - DNA, 25 bp, Homo sapien
tatatttgtatacaaaacatgctcc

SEQ ID NO: 5790003 - DNA, 25 bp, Homo sapien
acgggcgctggctcgcgcttgttca

SEQ ID NO: 5790004 - DNA, 25 bp, Homo sapien
tcatctgaatcgctcagggtgtcct

SEQ ID NO: 5790005 - DNA, 25 bp, Homo sapien
caaaagccacctctcattacccagg

SEQ ID NO: 5790006 - DNA, 25 bp, Homo sapien
gcctcccggccggcgactgagggct

SEQ ID NO: 5790007 - DNA, 25 bp, Homo sapien
agcgctgtcatggaggtgaggtgga

SEQ ID NO: 5790008 - DNA, 25 bp, Homo sapien
aagtaaaccaacattcttaatgtca

SEQ ID NO: 5790009 - DNA, 25 bp, Homo sapien
ggggcactggccggggctgcgggca

SEQ ID NO: 5790010 - DNA, 25 bp, Homo sapien
ctcttgagcggacgtggggacgcct

SEQ ID NO: 5790011 - DNA, 25 bp, Homo sapien
aaacacagaactttgcatttaccca

SEQ ID NO: 5790012 - DNA, 25 bp, Homo sapien
ttctatgcaccaaacatgaacaaat

SEQ ID NO: 5790013 - DNA, 25 bp, Homo sapien
tatttcaaagtgctataagatgcag

SEQ ID NO: 5790014 - DNA, 25 bp, Homo sapien
gttctcaagcagcatctccgtgacc

SEQ ID NO: 5790015 - DNA, 25 bp, Homo sapien
aaaaggcatatatatatagtaaatt

SEQ ID NO: 5790016 - DNA, 25 bp, Homo sapien
cccacagctcgttctcaagcagcat

SEQ ID NO: 5790017 - DNA, 25 bp, Homo sapien
ggcagtgtaagaattagtacagtac

SEQ ID NO: 5790018 - DNA, 25 bp, Homo sapien
taatactggccgcaaaagccacctc

SEQ ID NO: 5790019 - DNA, 25 bp, Homo sapien
ccacgtagggagagggggcggcata

SEQ ID NO: 5790020 - DNA, 25 bp, Homo sapien
cgtggagcagctcggcatcggctcg

SEQ ID NO: 5790021 - DNA, 25 bp, Homo sapien
ggctaggaaaaaggcatatatatat

SEQ ID NO: 5790022 - DNA, 25 bp, Homo sapien
gaacttccagtctaatactggccgc

SEQ ID NO: 5790023 - DNA, 25 bp, Homo sapien
cacagctcgttctcaagcagcatct

SEQ ID NO: 5790024 - DNA, 25 bp, Homo sapien
tgaagaaattaaacacagaactttg

SEQ ID NO: 5790025 - DNA, 25 bp, Homo sapien
tcgacaggggaccgatttgaaagta

SEQ ID NO: 5790026 - DNA, 25 bp, Homo sapien
aactgctgctgtcttgcctgcaatt

SEQ ID NO: 5790027 - DNA, 25 bp, Homo sapien
ggcggcatagttgtgctgctggtgg

SEQ ID NO: 5790028 - DNA, 25 bp, Homo sapien
gactgagggcttctttccgccccgt

SEQ ID NO: 5790029 - DNA, 25 bp, Homo sapien
tggaccgaaggtcgttgcggcgctg

SEQ ID NO: 5790030 - DNA, 25 bp, Homo sapien
cggcgggatccacgcactcggcggc

SEQ ID NO: 5790031 - DNA, 25 bp, Homo sapien
gctggaacttaagcaccattttaaa

SEQ ID NO: 5790032 - DNA, 25 bp, Homo sapien
cagaggctcccaaccgtcaccaacg

SEQ ID NO: 5790033 - DNA, 25 bp, Homo sapien
gccgaagtagaagtcatcttcgtcc

SEQ ID NO: 5790034 - DNA, 25 bp, Homo sapien
cgctggtctggcggccgcctgggcg

SEQ ID NO: 5790035 - DNA, 25 bp, Homo sapien
tcggggccgccgaagtagaagtcat

SEQ ID NO: 5790036 - DNA, 25 bp, Homo sapien
gtgcaaagtggcagtgactgtccag

SEQ ID NO: 5790037 - DNA, 25 bp, Homo sapien
tgttcacgggaaaggggaagaccac

SEQ ID NO: 5790038 - DNA, 25 bp, Homo sapien
ctccaaggtcccagcagaaccccac

SEQ ID NO: 5790039 - DNA, 25 bp, Homo sapien
caatatatttgtatacaaaacatgc

SEQ ID NO: 5790040 - DNA, 25 bp, Homo sapien
tcctcaaacattgaggtattattac

SEQ ID NO: 5790041 - DNA, 25 bp, Homo sapien
cggcatggtggacgtggagcagctc

SEQ ID NO: 5790042 - DNA, 25 bp, Homo sapien
tcctccgagtcagagtttcgggggc

SEQ ID NO: 5790043 - DNA, 25 bp, Homo sapien
atacattttgaagaaattaaacaca

SEQ ID NO: 5790044 - DNA, 25 bp, Homo sapien
cgccggggcactggccggggctgcg

SEQ ID NO: 5790045 - DNA, 25 bp, Homo sapien
tccacgcactcggcggccgggtggg

SEQ ID NO: 5790046 - DNA, 25 bp, Homo sapien
ggccacccagcatcctgggatgcag

SEQ ID NO: 5790047 - DNA, 25 bp, Homo sapien
tggtgaatgtggtgacagccttggt

SEQ ID NO: 5790048 - DNA, 25 bp, Homo sapien
ttacagaaatgttccccaggggtat

SEQ ID NO: 5790049 - DNA, 25 bp, Homo sapien
gtcgttgcggcgctggcgctccagg

SEQ ID NO: 5790050 - DNA, 25 bp, Homo sapien
cttgtggtcgccgccgctggtctgg

SEQ ID NO: 5790051 - DNA, 25 bp, Homo sapien
tcgccgccgctggtctggcggccgc

SEQ ID NO: 5790052 - DNA, 25 bp, Homo sapien
tggactgagccctcccgggacccag

SEQ ID NO: 5790053 - DNA, 25 bp, Homo sapien
gttgggggtgaggccacccagtccc

SEQ ID NO: 5790054 - DNA, 25 bp, Homo sapien
accccacactggtggtcctactgcc

SEQ ID NO: 5790055 - DNA, 25 bp, Homo sapien
ctgggttcttgcagatcatgcccgg

SEQ ID NO: 5790056 - DNA, 25 bp, Homo sapien
tcttcgtccgggtagaagcagggct

SEQ ID NO: 5790057 - DNA, 25 bp, Homo sapien
ggtcccagcagaaccccacactggt

SEQ ID NO: 5790058 - DNA, 25 bp, Homo sapien
gttccccaggggtatcaaatggcaa

SEQ ID NO: 5790059 - DNA, 25 bp, Homo sapien
agttgtgctgctggtggatgggaag

SEQ ID NO: 5790060 - DNA, 25 bp, Homo sapien
tgtgggggtgcatcctcactctcca

SEQ ID NO: 5790061 - DNA, 25 bp, Homo sapien
accacggcgggatccacgcactcgg

SEQ ID NO: 5790062 - DNA, 25 bp, Homo sapien
ccccgaggcgaccgcagggcccgcc

SEQ ID NO: 5790063 - DNA, 25 bp, Homo sapien
attacagtacttaggtatgaacttc

SEQ ID NO: 5790064 - DNA, 25 bp, Homo sapien
acttaggtatgaacttccagtctaa

SEQ ID NO: 5790065 - DNA, 25 bp, Homo sapien
cgctccacatgcagtcctggaggat

SEQ ID NO: 5790066 - DNA, 25 bp, Homo sapien
atttacccagttctatgcaccaaac

SEQ ID NO: 5790067 - DNA, 25 bp, Homo sapien
gctcggcgggcagggcggccccggc

SEQ ID NO: 5790068 - DNA, 25 bp, Homo sapien
ggcggttggcggcccgcggccgtgc

SEQ ID NO: 5790069 - DNA, 25 bp, Homo sapien
tgtgctccgcgaagccacggctggg

SEQ ID NO: 5790070 - DNA, 25 bp, Homo sapien
ggtgacagccttggtgttggaggag

SEQ ID NO: 5790071 - DNA, 25 bp, Homo sapien
gtttggaaacttggaacacacaagg

SEQ ID NO: 5790072 - DNA, 25 bp, Homo sapien
atgcagtcctggaggatgaccgggt

SEQ ID NO: 5790073 - DNA, 25 bp, Homo sapien
gcggccgcctgggcgcggaggggcg

SEQ ID NO: 5790074 - DNA, 25 bp, Homo sapien
gtcagagtttcgggggctcaagctc

SEQ ID NO: 5790075 - DNA, 25 bp, Homo sapien
cagctcgctggactgagccctcccg

SEQ ID NO: 5790076 - DNA, 25 bp, Homo sapien
tatcaaatttagttatgtatcagcg

SEQ ID NO: 5790077 - DNA, 25 bp, Homo sapien
ctgtcatggaggtgaggtggaggag

SEQ ID NO: 5790078 - DNA, 25 bp, Homo sapien
gggccccggctggggcggcaatacc

SEQ ID NO: 5790079 - DNA, 25 bp, Homo sapien
ggaacacacaaggtgacttcaacag

SEQ ID NO: 5790080 - DNA, 25 bp, Homo sapien
caggcagtgtaagaattagtacagt

SEQ ID NO: 5790081 - DNA, 25 bp, Homo sapien
agagccgaactcgacaggggaccga

SEQ ID NO: 5790082 - DNA, 25 bp, Homo sapien
catcctcactctccacgtagggaga

SEQ ID NO: 5790083 - DNA, 25 bp, Homo sapien
ctggtggatgggaaggcatcgtttg

SEQ ID NO: 5790084 - DNA, 25 bp, Homo sapien
aaaaagtgataaagtaatatctact

SEQ ID NO: 5790085 - DNA, 25 bp, Homo sapien
agtatacaggcagtgtaagaattag

SEQ ID NO: 5790086 - DNA, 25 bp, Homo sapien
ggcctttttcaaaatgaccaccttg

SEQ ID NO: 5790087 - DNA, 25 bp, Homo sapien
attttgaagaaattaaacacagaac

SEQ ID NO: 5790088 - DNA, 25 bp, Homo sapien
gtgggcagcagctcaaacttcttcc

SEQ ID NO: 5790089 - DNA, 25 bp, Homo sapien
cctctccggaggtactgagggcctt

SEQ ID NO: 5790090 - DNA, 25 bp, Homo sapien
aacaggaagaaacaggctaggaaaa

SEQ ID NO: 5790091 - DNA, 25 bp, Homo sapien
atactggccgcaaaagccacctctc

SEQ ID NO: 5790092 - DNA, 25 bp, Homo sapien
cgaacgcgtcctcctcggccgggct

SEQ ID NO: 5790093 - DNA, 25 bp, Homo sapien
agctcggcatcggctcgcctcccgg

SEQ ID NO: 5790094 - DNA, 25 bp, Homo sapien
ccagttctatgcaccaaacatgaac

SEQ ID NO: 5790095 - DNA, 25 bp, Homo sapien
caattttctttagcaactgctgctg

SEQ ID NO: 5790096 - DNA, 25 bp, Homo sapien
tcaaaaagtgataaagtaatatcta

SEQ ID NO: 5790097 - DNA, 25 bp, Homo sapien
agatcatgcccggcatggtggacgt

SEQ ID NO: 5790098 - DNA, 25 bp, Homo sapien
tgctccgcgaagccacggctgggcg

SEQ ID NO: 5790099 - DNA, 25 bp, Homo sapien
caaggtgacttcaacagccccagag

SEQ ID NO: 5790100 - DNA, 25 bp, Homo sapien
tcccagcagaaccccacactggtgg

SEQ ID NO: 5790101 - DNA, 25 bp, Homo sapien
ccagtctaatactggccgcaaaagc

SEQ ID NO: 5790102 - DNA, 25 bp, Homo sapien
gacagcgggggcgtgggcagcagct

SEQ ID NO: 5790103 - DNA, 25 bp, Homo sapien
ttcttagttcaaaaagtgataaagt

SEQ ID NO: 5790104 - DNA, 25 bp, Homo sapien
tttccttttccagcaaaagctggtg

SEQ ID NO: 5790105 - DNA, 25 bp, Homo sapien
tgggcggtggaaccggcggttggcg

SEQ ID NO: 5790106 - DNA, 25 bp, Homo sapien
aggggaagaccacggcgggatccac

SEQ ID NO: 5790107 - DNA, 25 bp, Homo sapien
gggtgaggccacccagtccccccag

SEQ ID NO: 5790108 - DNA, 25 bp, Homo sapien
ctccgagtcagagtttcgggggctc

SEQ ID NO: 5790109 - DNA, 25 bp, Homo sapien
gcagctcggcatcggctcgcctccc

SEQ ID NO: 5790110 - DNA, 25 bp, Homo sapien
ctgagccctcccgggacccagggct

SEQ ID NO: 5790111 - DNA, 25 bp, Homo sapien
acagtgaccacgtcgatttcttcct

SEQ ID NO: 5790112 - DNA, 25 bp, Homo sapien
ggtactgagggccttgtggtcgccg

SEQ ID NO: 5790113 - DNA, 25 bp, Homo sapien
tctccgtgacccagctcgggggctc

SEQ ID NO: 5790114 - DNA, 25 bp, Homo sapien
acatgcagtcctggaggatgaccgg

SEQ ID NO: 5790115 - DNA, 25 bp, Homo sapien
cgcacagtgatggtgaatgtggtga

SEQ ID NO: 5790116 - DNA, 25 bp, Homo sapien
agagattaacaatatatttgtatac

SEQ ID NO: 5790117 - DNA, 25 bp, Homo sapien
caaatggcaaaccccttatgtggca

SEQ ID NO: 5790118 - DNA, 25 bp, Homo sapien
cttatgtggcatctgctggaactta

SEQ ID NO: 5790119 - DNA, 25 bp, Homo sapien
cactcggcggccgggtgggcgagct

SEQ ID NO: 5790120 - DNA, 25 bp, Homo sapien
ctggccggggctgcgggcacgggcg

SEQ ID NO: 5790121 - DNA, 25 bp, Homo sapien
gatgaccgggttgggggtgaggcca

SEQ ID NO: 5790122 - DNA, 25 bp, Homo sapien
ggagaagccgctccacatgcagtcc

SEQ ID NO: 5790123 - DNA, 25 bp, Homo sapien
gagtcaaactcgaggtctgggttct

SEQ ID NO: 5790124 - DNA, 25 bp, Homo sapien
tgactttctgttgtttggaaacttg

SEQ ID NO: 5790125 - DNA, 25 bp, Homo sapien
atacgaaaatataagtatcaaattt

SEQ ID NO: 5790126 - DNA, 25 bp, Homo sapien
tgaccgggttgggggtgaggccacc

SEQ ID NO: 5790127 - DNA, 25 bp, Homo sapien
gtctagcaagtccgagcgtgttcaa

SEQ ID NO: 5790128 - DNA, 25 bp, Homo sapien
ctcagggtgtcctctccggaggtac

SEQ ID NO: 5790129 - DNA, 25 bp, Homo sapien
aagatgcagcactaaatatatacat

SEQ ID NO: 5790130 - DNA, 25 bp, Homo sapien
cccacactggtggtcctactgccca

SEQ ID NO: 5790131 - DNA, 25 bp, Homo sapien
aatatctactcaaaactttcacaac

SEQ ID NO: 5790132 - DNA, 25 bp, Homo sapien
aggaaaaaggcatatatatatagta

SEQ ID NO: 5790133 - DNA, 25 bp, Homo sapien
gcaactgctgctgtcttgcctgcaa

SEQ ID NO: 5790134 - DNA, 25 bp, Homo sapien
gcctgggcgcggaggggcgaccccc

SEQ ID NO: 5790135 - DNA, 25 bp, Homo sapien
gtcaatggtatttacagaaatgttc

SEQ ID NO: 5790136 - DNA, 25 bp, Homo sapien
tcctgggatgcaggctctccaaggt

SEQ ID NO: 5790137 - DNA, 25 bp, Homo sapien
tcaccaacgtttagcgctgtcatgg

SEQ ID NO: 5790138 - DNA, 25 bp, Homo sapien
ttgtttggaaacttggaacacacaa

SEQ ID NO: 5790139 - DNA, 25 bp, Homo sapien
agtgactgtccagttttgagaagcg

SEQ ID NO: 5790140 - DNA, 25 bp, Homo sapien
gtgggcgagctcggcgggcagggcg

SEQ ID NO: 5790141 - DNA, 25 bp, Homo sapien
ttcacaactcattttcatacgaaaa

SEQ ID NO: 5790142 - DNA, 25 bp, Homo sapien
atgtatcagcgtcatactaaagtat

SEQ ID NO: 5790143 - DNA, 25 bp, Homo sapien
gtgacttcaacagccccagaggctc

SEQ ID NO: 5790144 - DNA, 25 bp, Homo sapien
catgaacaaatacattaacaggaag

SEQ ID NO: 5790145 - DNA, 25 bp, Homo sapien
agctcttagcctttggggggatgac

SEQ ID NO: 5790146 - DNA, 25 bp, Homo sapien
ctcttagcctttggggggatgacac

SEQ ID NO: 5790147 - DNA, 25 bp, Homo sapien
aaaaatcaaaatgtgcaaagtggca

SEQ ID NO: 5790148 - DNA, 25 bp, Homo sapien
ccacagtgaccacgtcgatttcttc

SEQ ID NO: 5790149 - DNA, 25 bp, Homo sapien
attttcatacgaaaatataagtatc

SEQ ID NO: 5790150 - DNA, 25 bp, Homo sapien
tcttcttctgtgggggtgcatcctc

SEQ ID NO: 5790151 - DNA, 25 bp, Homo sapien
gagctcggcgggcagggcggccccg

SEQ ID NO: 5790152 - DNA, 25 bp, Homo sapien
ctcccaaccgtcaccaacgtttagc

SEQ ID NO: 5790153 - DNA, 25 bp, Homo sapien
gcccacccagagccgaactcgacag

SEQ ID NO: 5790154 - DNA, 25 bp, Homo sapien
tggtcgccgccgctggtctggcggc

SEQ ID NO: 5790155 - DNA, 25 bp, Homo sapien
accaacgtttagcgctgtcatggag

SEQ ID NO: 5790156 - DNA, 25 bp, Homo sapien
ctccgcgaagccacggctgggcgac

SEQ ID NO: 5790157 - DNA, 25 bp, Homo sapien
tctgcgacgctcactgtcctccgag

SEQ ID NO: 5790158 - DNA, 25 bp, Homo sapien
gggcagcagctcaaacttcttccag

SEQ ID NO: 5790159 - DNA, 25 bp, Homo sapien
gtatcagcgtcatactaaagtatac

SEQ ID NO: 5790160 - DNA, 25 bp, Homo sapien
gggcgagctcggcgggcagggcggc

SEQ ID NO: 5790161 - DNA, 25 bp, Homo sapien
ggtgttggaggaggaacgccgcttc

SEQ ID NO: 5790162 - DNA, 25 bp, Homo sapien
tagcaactgctgctgtcttgcctgc

SEQ ID NO: 5790163 - DNA, 25 bp, Homo sapien
cgcctcgctctttatcttcttctgt

SEQ ID NO: 5790164 - DNA, 25 bp, Homo sapien
gaatgtggtgacagccttggtgttg

SEQ ID NO: 5790165 - DNA, 25 bp, Homo sapien
gaaagtaaaccaacattcttaatgt

SEQ ID NO: 5790166 - DNA, 25 bp, Homo sapien
ccgcgaagccacggctgggcgacag

SEQ ID NO: 5790167 - DNA, 25 bp, Homo sapien
gctggaccgaaggtcgttgcggcgc

SEQ ID NO: 5790168 - DNA, 25 bp, Homo sapien
gtgagaaagctggaccgaaggtcgt

SEQ ID NO: 5790169 - DNA, 25 bp, Homo sapien
gcatagttgtgctgctggtggatgg

SEQ ID NO: 5790170 - DNA, 25 bp, Homo sapien
ggtggtcctactgcccacccagagc

SEQ ID NO: 5790171 - DNA, 25 bp, Homo sapien
aacatgaacaaatacattaacagga

SEQ ID NO: 5790172 - DNA, 25 bp, Homo sapien
caggctaggaaaaaggcatatatat

SEQ ID NO: 5790173 - DNA, 25 bp, Homo sapien
tagtacagtacataacagagattaa

SEQ ID NO: 5790174 - DNA, 25 bp, Homo sapien
cacagtgatggtgaatgtggtgaca

SEQ ID NO: 5790175 - DNA, 25 bp, Homo sapien
atgaggtatttcaaagtgctataag

SEQ ID NO: 5790176 - DNA, 25 bp, Homo sapien
gaaaggggaagaccacggcgggatc

SEQ ID NO: 5790177 - DNA, 25 bp, Homo sapien
ctcaaaactttcacaactcattttc

SEQ ID NO: 5790178 - DNA, 25 bp, Homo sapien
tttctgcgacgctcactgtcctccg

SEQ ID NO: 5790179 - DNA, 25 bp, Homo sapien
gacatactcagtggcctttttcaaa

SEQ ID NO: 5790180 - DNA, 25 bp, Homo sapien
ggggatgacactcttgagcggacgt

SEQ ID NO: 5790181 - DNA, 25 bp, Homo sapien
atgttccccaggggtatcaaatggc

SEQ ID NO: 5790182 - DNA, 25 bp, Homo sapien
acagccttggtgttggaggaggaac

SEQ ID NO: 5790183 - DNA, 25 bp, Homo sapien
tccccccaggccgaacgcgtcctcc

SEQ ID NO: 5790184 - DNA, 25 bp, Homo sapien
gctcacggcgcgctccagcttctcg

SEQ ID NO: 5790185 - DNA, 25 bp, Homo sapien
ttagttatgtatcagcgtcatacta

SEQ ID NO: 5790186 - DNA, 25 bp, Homo sapien
aaagtgctataagatgcagcactaa

SEQ ID NO: 5790187 - DNA, 25 bp, Homo sapien
acagtacataacagagattaacaat

SEQ ID NO: 5790188 - DNA, 25 bp, Homo sapien
gtcaaactcgaggtctgggttcttg

SEQ ID NO: 5790189 - DNA, 25 bp, Homo sapien
ggcgaccgcagggcccgccgccggg

SEQ ID NO: 5790190 - DNA, 25 bp, Homo sapien
aaatttagttatgtatcagcgtcat

SEQ ID NO: 5790191 - DNA, 25 bp, Homo sapien
gccggcgactgagggcttctttccg

SEQ ID NO: 5790192 - DNA, 25 bp, Homo sapien
tggagcagctcggcatcggctcgcc

SEQ ID NO: 5790193 - DNA, 25 bp, Homo sapien
ggaaacttggaacacacaaggtgac

SEQ ID NO: 5790194 - DNA, 25 bp, Homo sapien
cgggacccagggctgcgttcttggg

SEQ ID NO: 5790195 - DNA, 25 bp, Homo sapien
tacattaacaggaagaaacaggcta

SEQ ID NO: 5790196 - DNA, 25 bp, Homo sapien
gaaccccacactggtggtcctactg

SEQ ID NO: 5790197 - DNA, 25 bp, Homo sapien
acattttgaagaaattaaacacaga

SEQ ID NO: 5790198 - DNA, 25 bp, Homo sapien
ggcggccttctcattctttaccaac

SEQ ID NO: 5790199 - DNA, 25 bp, Homo sapien
gcgctggctcgcgcttgttcacggg

SEQ ID NO: 5790200 - DNA, 25 bp, Homo sapien
ctccggcacgtggtccctgagcgtg

SEQ ID NO: 5790201 - DNA, 25 bp, Homo sapien
aacagccccagaggctcccaaccgt

SEQ ID NO: 5790202 - DNA, 25 bp, Homo sapien
cagggctgtagcgagtcaaactcga

SEQ ID NO: 5790203 - DNA, 25 bp, Homo sapien
gatgcagcactaaatatatacattt

SEQ ID NO: 5790204 - DNA, 25 bp, Homo sapien
ggcgccgacctccaacactgcaacc

SEQ ID NO: 5790205 - DNA, 25 bp, Homo sapien
ggctcaagctcttagcctttggggg

SEQ ID NO: 5790206 - DNA, 25 bp, Homo sapien
cattgaggtattattacagtactta

SEQ ID NO: 5790207 - DNA, 25 bp, Homo sapien
gtgatggtgaatgtggtgacagcct

SEQ ID NO: 5790208 - DNA, 25 bp, Homo sapien
tgtatacaaaaggcggatgtgtcaa

SEQ ID NO: 5790209 - DNA, 25 bp, Homo sapien
ggagagggggcggcatagttgtgct

SEQ ID NO: 5790210 - DNA, 25 bp, Homo sapien
gcctttggggggatgacactcttga

SEQ ID NO: 5790211 - DNA, 25 bp, Homo sapien
gagtcagagtttcgggggctcaagc

SEQ ID NO: 5790212 - DNA, 25 bp, Homo sapien
acctctcattacccaggatgtatac

SEQ ID NO: 5790213 - DNA, 25 bp, Homo sapien
gtccctgagcgtgagaaagctggac

SEQ ID NO: 5790214 - DNA, 25 bp, Homo sapien
gcgcttgttcacgggaaaggggaag

SEQ ID NO: 5790215 - DNA, 25 bp, Homo sapien
actcgacaggggaccgatttgaaag

SEQ ID NO: 5790216 - DNA, 25 bp, Homo sapien
agtcctggaggatgaccgggttggg

SEQ ID NO: 5790217 - DNA, 25 bp, Homo sapien
gatgtatacaaaaggcggatgtgtc

SEQ ID NO: 5790218 - DNA, 25 bp, Homo sapien
ttgcagatcatgcccggcatggtgg

SEQ ID NO: 5790219 - DNA, 25 bp, Homo sapien
tctttacaaaagtttcttagttcaa

SEQ ID NO: 5790220 - DNA, 25 bp, Homo sapien
aaagtgataaagtaatatctactca

SEQ ID NO: 5790221 - DNA, 25 bp, Homo sapien
tactcagtggcctttttcaaaatga

SEQ ID NO: 5790222 - DNA, 25 bp, Homo sapien
ctccaggatgttgtggtttctgcga

SEQ ID NO: 5790223 - DNA, 25 bp, Homo sapien
agggctggcggcgccggctcccggg

SEQ ID NO: 5790224 - DNA, 25 bp, Homo sapien
gggcgcggaaggcgggggccggcgc

SEQ ID NO: 5790225 - DNA, 25 bp, Homo sapien
gctcctcaaacattgaggtattatt

SEQ ID NO: 5790226 - DNA, 25 bp, Homo sapien
gcaaaagctggtgctcctcggcctg

SEQ ID NO: 5790227 - DNA, 25 bp, Homo sapien
tccagcaaaagctggtgctcctcgg

SEQ ID NO: 5790228 - DNA, 25 bp, Homo sapien
ccgggctgccccacagctcgttctc

SEQ ID NO: 5790229 - DNA, 25 bp, Homo sapien
attctttaccaactccggcacgtgg

SEQ ID NO: 5790230 - DNA, 25 bp, Homo sapien
gcggtggaaccggcggttggcggcc

SEQ ID NO: 5790231 - DNA, 25 bp, Homo sapien
tatcttcttctgtgggggtgcatcc

SEQ ID NO: 5790232 - DNA, 25 bp, Homo sapien
caaaaggcggatgtgtcaatggtat

SEQ ID NO: 5790233 - DNA, 25 bp, Homo sapien
ttacccagttctatgcaccaaacat

SEQ ID NO: 5790234 - DNA, 25 bp, Homo sapien
gggatccacgcactcggcggccggg

SEQ ID NO: 5790235 - DNA, 25 bp, Homo sapien
tcactgtcctccgagtcagagtttc

SEQ ID NO: 5790236 - DNA, 25 bp, Homo sapien
acggctgggcgacagcgggggcgtg

SEQ ID NO: 5790237 - DNA, 25 bp, Homo sapien
cccaggccgaacgcgtcctcctcgg

SEQ ID NO: 5790238 - DNA, 25 bp, Homo sapien
gccgtgctgcagcttctcgctcacg

SEQ ID NO: 5790239 - DNA, 25 bp, Homo sapien
cggcgactgagggcttctttccgcc

SEQ ID NO: 5790240 - DNA, 25 bp, Homo sapien
tttcaaaatgaccaccttggcggcc

SEQ ID NO: 5790241 - DNA, 25 bp, Homo sapien
gcttctccacagtgaccacgtcgat

SEQ ID NO: 5790242 - DNA, 25 bp, Homo sapien
aaagaaggaatgactttctgttgtt

SEQ ID NO: 5790243 - DNA, 25 bp, Homo sapien
aagtttcttagttcaaaaagtgata

SEQ ID NO: 5790244 - DNA, 25 bp, Homo sapien
gcagcagctcaaacttcttccagat

SEQ ID NO: 5790245 - DNA, 25 bp, Homo sapien
tactgcccacccagagccgaactcg

SEQ ID NO: 5790246 - DNA, 25 bp, Homo sapien
agccttggtgttggaggaggaacgc

SEQ ID NO: 5790247 - DNA, 25 bp, Homo sapien
ggctgcagggccacccagcatcctg

SEQ ID NO: 5790248 - DNA, 25 bp, Homo sapien
cagcgtcatactaaagtatacaggc

SEQ ID NO: 5790249 - DNA, 25 bp, Homo sapien
gtggtgacagccttggtgttggagg

SEQ ID NO: 5790250 - DNA, 25 bp, Homo sapien
tcattctttaccaactccggcacgt

SEQ ID NO: 5790251 - DNA, 25 bp, Homo sapien
atcggctcgcctcccggccggcgac

SEQ ID NO: 5790252 - DNA, 25 bp, Homo sapien
tactaaagtatacaggcagtgtaag

SEQ ID NO: 5790253 - DNA, 25 bp, Homo sapien
atgtgcaaagtggcagtgactgtcc

SEQ ID NO: 5790254 - DNA, 25 bp, Homo sapien
atcatcttcatcatctgaatcgctc

SEQ ID NO: 5790255 - DNA, 25 bp, Homo sapien
ccacctctcattacccaggatgtat

SEQ ID NO: 5790256 - DNA, 25 bp, Homo sapien
acactgcaaccgacagacacaccgg

SEQ ID NO: 5790257 - DNA, 25 bp, Homo sapien
ttgaggatcagctcgctggactgag

SEQ ID NO: 5790258 - DNA, 25 bp, Homo sapien
ctgagcgtgagaaagctggaccgaa

SEQ ID NO: 5790259 - DNA, 25 bp, Homo sapien
tggtcctactgcccacccagagccg

SEQ ID NO: 5790260 - DNA, 25 bp, Homo sapien
cggttggcggcccgcggccgtgctg

SEQ ID NO: 5790261 - DNA, 25 bp, Homo sapien
gagtttcgggggctcaagctcttag

SEQ ID NO: 5790262 - DNA, 25 bp, Homo sapien
tttttcaaaatgaccaccttggcgg

SEQ ID NO: 5790263 - DNA, 25 bp, Homo sapien
aggaggaacgccgcttctccacagt

SEQ ID NO: 5790264 - DNA, 25 bp, Homo sapien
gcggaaggcgggggccggcgccgac

SEQ ID NO: 5790265 - DNA, 25 bp, Homo sapien
agcagaaccccacactggtggtcct

SEQ ID NO: 5790266 - DNA, 25 bp, Homo sapien
cgacgctcactgtcctccgagtcag

SEQ ID NO: 5790267 - DNA, 25 bp, Homo sapien
ttgtgctgctggtggatgggaaggc

SEQ ID NO: 5790268 - DNA, 25 bp, Homo sapien
ggcgcggccggctcccgcagccccg

SEQ ID NO: 5790269 - DNA, 25 bp, Homo sapien
ggaccagtttatcaaagagtaaagc

SEQ ID NO: 5790270 - DNA, 25 bp, Homo sapien
gctttactctttgataaactggtcc

SEQ ID NO: 5790271 - DNA, 25 bp, Homo sapien
cgggtgggtcgcaggcgtcggcggt

SEQ ID NO: 5790272 - DNA, 25 bp, Homo sapien
accgccgacgcctgcgacccacccg

SEQ ID NO: 5790273 - DNA, 25 bp, Homo sapien
aagacacctagagtggaacccggct

SEQ ID NO: 5790274 - DNA, 25 bp, Homo sapien
agccgggttccactctaggtgtctt

SEQ ID NO: 5790275 - DNA, 25 bp, Homo sapien
gcagaggggacgttccgaacgtgtc

SEQ ID NO: 5790276 - DNA, 25 bp, Homo sapien
gacacgttcggaacgtcccctctgc

SEQ ID NO: 5790277 - DNA, 25 bp, Homo sapien
tgctaaacatgtatttaccacattt

SEQ ID NO: 5790278 - DNA, 25 bp, Homo sapien
ggagttgagatggaagtcaccattg

SEQ ID NO: 5790279 - DNA, 25 bp, Homo sapien
aagactttgagaatcactacaagaa

SEQ ID NO: 5790280 - DNA, 25 bp, Homo sapien
ttcatatcactctaacgagttgcaa

SEQ ID NO: 5790281 - DNA, 25 bp, Homo sapien
ctggtggttagctatacgggaaatg

SEQ ID NO: 5790282 - DNA, 25 bp, Homo sapien
gtaggaaaaccactgttattaaaca

SEQ ID NO: 5790283 - DNA, 25 bp, Homo sapien
ctgattggccttacatttctgccat

SEQ ID NO: 5790284 - DNA, 25 bp, Homo sapien
cacattttatgctaaaacaaaatca

SEQ ID NO: 5790285 - DNA, 25 bp, Homo sapien
aaagccattacctacaatgctatgc

SEQ ID NO: 5790286 - DNA, 25 bp, Homo sapien
tcgtcacccgcgtgatgctgtttct

SEQ ID NO: 5790287 - DNA, 25 bp, Homo sapien
atccacaagcgactcattgacttgc

SEQ ID NO: 5790288 - DNA, 25 bp, Homo sapien
tagtatctaccattcgtgttttaga

SEQ ID NO: 5790289 - DNA, 25 bp, Homo sapien
gatttacgttttaatgtataataat

SEQ ID NO: 5790290 - DNA, 25 bp, Homo sapien
gctggagtacggggccttcgggagc

SEQ ID NO: 5790291 - DNA, 25 bp, Homo sapien
tatatccatctaatgggttatgaca

SEQ ID NO: 5790292 - DNA, 25 bp, Homo sapien
catacatgtacagttgaactggtgg

SEQ ID NO: 5790293 - DNA, 25 bp, Homo sapien
aagagaaacggcataaagatgacaa

SEQ ID NO: 5790294 - DNA, 25 bp, Homo sapien
ttttccgacattaaaagacattttc

SEQ ID NO: 5790295 - DNA, 25 bp, Homo sapien
taagagttctgtgttactgtggttg

SEQ ID NO: 5790296 - DNA, 25 bp, Homo sapien
gcagcagccatggcttttaaacata

SEQ ID NO: 5790297 - DNA, 25 bp, Homo sapien
aggtgtgtgctgacttgatctgagg

SEQ ID NO: 5790298 - DNA, 25 bp, Homo sapien
taatgggttatgacaaagaagaatt

SEQ ID NO: 5790299 - DNA, 25 bp, Homo sapien
tctcccgggcgtcctccagcagcgg

SEQ ID NO: 5790300 - DNA, 25 bp, Homo sapien
tcaaagcttttaatttccagagaat

SEQ ID NO: 5790301 - DNA, 25 bp, Homo sapien
cctccagcagcgggccttcggggcc

SEQ ID NO: 5790302 - DNA, 25 bp, Homo sapien
gcgtccgggtcgagcgcagatccct

SEQ ID NO: 5790303 - DNA, 25 bp, Homo sapien
gggcgtcctccagcagcgggccttc

SEQ ID NO: 5790304 - DNA, 25 bp, Homo sapien
tggtggcaccctatgggtgtaggaa

SEQ ID NO: 5790305 - DNA, 25 bp, Homo sapien
cattgacttgcgcagtcctcagata

SEQ ID NO: 5790306 - DNA, 25 bp, Homo sapien
tccggcgtccgggtcgagcgcagat

SEQ ID NO: 5790307 - DNA, 25 bp, Homo sapien
gtgaagattccagatgctaaacatg

SEQ ID NO: 5790308 - DNA, 25 bp, Homo sapien
cttctccggcgtccgggtcgagcgc

SEQ ID NO: 5790309 - DNA, 25 bp, Homo sapien
atggtaagtagtgttgtcttcagta

SEQ ID NO: 5790310 - DNA, 25 bp, Homo sapien
tatttgttagtgttcgtgctcaaat

SEQ ID NO: 5790311 - DNA, 25 bp, Homo sapien
taaattgattaccagttgttaaaaa

SEQ ID NO: 5790312 - DNA, 25 bp, Homo sapien
cagaagatggaaggctaatttatac

SEQ ID NO: 5790313 - DNA, 25 bp, Homo sapien
gggccggtagccggctggagtacgg

SEQ ID NO: 5790314 - DNA, 25 bp, Homo sapien
tttattctttgtgtatggatttttc

SEQ ID NO: 5790315 - DNA, 25 bp, Homo sapien
taataataaaattgccttttgcatt

SEQ ID NO: 5790316 - DNA, 25 bp, Homo sapien
ctacgagtctgattggccttacatt

SEQ ID NO: 5790317 - DNA, 25 bp, Homo sapien
ttcactttattacaaaaggctatgt

SEQ ID NO: 5790318 - DNA, 25 bp, Homo sapien
ctcccttggtggcaccctatgggtg

SEQ ID NO: 5790319 - DNA, 25 bp, Homo sapien
tctgtcaggaagctggctaggaagc

SEQ ID NO: 5790320 - DNA, 25 bp, Homo sapien
ttgaggaagacacagtcataggtgg

SEQ ID NO: 5790321 - DNA, 25 bp, Homo sapien
acagacacttataaagccattacct

SEQ ID NO: 5790322 - DNA, 25 bp, Homo sapien
gcagcgggccttcggggccggtagc

SEQ ID NO: 5790323 - DNA, 25 bp, Homo sapien
gtgtgtgctgacttgatctgaggag

SEQ ID NO: 5790324 - DNA, 25 bp, Homo sapien
cggcgtccgggtcgagcgcagatcc

SEQ ID NO: 5790325 - DNA, 25 bp, Homo sapien
acttgatctgaggagcaaaggaaaa

SEQ ID NO: 5790326 - DNA, 25 bp, Homo sapien
ttctacgagtctgattggccttaca

SEQ ID NO: 5790327 - DNA, 25 bp, Homo sapien
gctatacgggaaatggtaagtagtg

SEQ ID NO: 5790328 - DNA, 25 bp, Homo sapien
gactcattgacttgcgcagtcctca

SEQ ID NO: 5790329 - DNA, 25 bp, Homo sapien
ttaatccagtgctctttccaaaccg

SEQ ID NO: 5790330 - DNA, 25 bp, Homo sapien
ttataaagccattacctacaatgct

SEQ ID NO: 5790331 - DNA, 25 bp, Homo sapien
agaaattcacaaattatgggagcag

SEQ ID NO: 5790332 - DNA, 25 bp, Homo sapien
gacacagtcataggtggtgcggagc

SEQ ID NO: 5790333 - DNA, 25 bp, Homo sapien
attgcccataagaacatacatgtac

SEQ ID NO: 5790334 - DNA, 25 bp, Homo sapien
gattggccttacatttctgccatac

SEQ ID NO: 5790335 - DNA, 25 bp, Homo sapien
aactggtggttagctatacgggaaa

SEQ ID NO: 5790336 - DNA, 25 bp, Homo sapien
gagcaaaggaaaagaatcagtgaaa

SEQ ID NO: 5790337 - DNA, 25 bp, Homo sapien
gtatctaccattcgtgttttagaaa

SEQ ID NO: 5790338 - DNA, 25 bp, Homo sapien
accgaattcatatcactctaacgag

SEQ ID NO: 5790339 - DNA, 25 bp, Homo sapien
ccagtgctgcttcactttattacaa

SEQ ID NO: 5790340 - DNA, 25 bp, Homo sapien
tgaaaggaccagtttgaatgcctac

SEQ ID NO: 5790341 - DNA, 25 bp, Homo sapien
ctaaacatgtatttaccacatttta

SEQ ID NO: 5790342 - DNA, 25 bp, Homo sapien
ggagcagttttaagtcttctttggt

SEQ ID NO: 5790343 - DNA, 25 bp, Homo sapien
attcgattgtaccatgaggccacaa

SEQ ID NO: 5790344 - DNA, 25 bp, Homo sapien
tattgggaaggatatgttcgattct

SEQ ID NO: 5790345 - DNA, 25 bp, Homo sapien
ctaagtgtataaatattttccgaca

SEQ ID NO: 5790346 - DNA, 25 bp, Homo sapien
tcgaactgcctctctgcggaaggag

SEQ ID NO: 5790347 - DNA, 25 bp, Homo sapien
ttgagaatcactacaagaaaaactt

SEQ ID NO: 5790348 - DNA, 25 bp, Homo sapien
aacatacatgtacagttgaactggt

SEQ ID NO: 5790349 - DNA, 25 bp, Homo sapien
agaaaaacacccgtggagtcagagg

SEQ ID NO: 5790350 - DNA, 25 bp, Homo sapien
ggactgcattgtgtgcggccgccgc

SEQ ID NO: 5790351 - DNA, 25 bp, Homo sapien
gtcataggtggtgcggagctgtggt

SEQ ID NO: 5790352 - DNA, 25 bp, Homo sapien
gttgggcagcccgtgggcggtcgaa

SEQ ID NO: 5790353 - DNA, 25 bp, Homo sapien
tattgagccaggagttgagatggaa

SEQ ID NO: 5790354 - DNA, 25 bp, Homo sapien
acacttataaagccattacctacaa

SEQ ID NO: 5790355 - DNA, 25 bp, Homo sapien
ccaaaatgtagtatctaccattcgt

SEQ ID NO: 5790356 - DNA, 25 bp, Homo sapien
aactgtgcactcctcccttggtggc

SEQ ID NO: 5790357 - DNA, 25 bp, Homo sapien
catggcttttaaacataccagaaaa

SEQ ID NO: 5790358 - DNA, 25 bp, Homo sapien
gttagctatacgggaaatggtaagt

SEQ ID NO: 5790359 - DNA, 25 bp, Homo sapien
ggcaatatggcccgagcagtgtttg

SEQ ID NO: 5790360 - DNA, 25 bp, Homo sapien
tacgggaaatggtaagtagtgttgt

SEQ ID NO: 5790361 - DNA, 25 bp, Homo sapien
tgccttttgcattccgttagtgact

SEQ ID NO: 5790362 - DNA, 25 bp, Homo sapien
agccttgcagcagccatggctttta

SEQ ID NO: 5790363 - DNA, 25 bp, Homo sapien
tcagatagttaagcagattacttcc

SEQ ID NO: 5790364 - DNA, 25 bp, Homo sapien
gtgtttggtgtgaaatgtttctctt

SEQ ID NO: 5790365 - DNA, 25 bp, Homo sapien
aaacaaaatcactgttagttaatcc

SEQ ID NO: 5790366 - DNA, 25 bp, Homo sapien
tctgatgtcagtagcaaatgggaga

SEQ ID NO: 5790367 - DNA, 25 bp, Homo sapien
catcagtattgagccaggagttgag

SEQ ID NO: 5790368 - DNA, 25 bp, Homo sapien
cacaaaataatgctatttctgaaag

SEQ ID NO: 5790369 - DNA, 25 bp, Homo sapien
actgcctctctgcggaaggaggact

SEQ ID NO: 5790370 - DNA, 25 bp, Homo sapien
cgggagccgcgcgccttctccggcg

SEQ ID NO: 5790371 - DNA, 25 bp, Homo sapien
tcagtgaaaggaccagtttgaatgc

SEQ ID NO: 5790372 - DNA, 25 bp, Homo sapien
tgtataataataaaattgccttttg

SEQ ID NO: 5790373 - DNA, 25 bp, Homo sapien
ttgtgtgcggccgccgcgctccgag

SEQ ID NO: 5790374 - DNA, 25 bp, Homo sapien
ggccttcggggccggtagccggctg

SEQ ID NO: 5790375 - DNA, 25 bp, Homo sapien
aggcatgggatcgtttccagatgag

SEQ ID NO: 5790376 - DNA, 25 bp, Homo sapien
ccttacatttctgccatacattttt

SEQ ID NO: 5790377 - DNA, 25 bp, Homo sapien
gtgcctctgcctattcaaatcatat

SEQ ID NO: 5790378 - DNA, 25 bp, Homo sapien
acaagctatgtttgaaaaccaaaat

SEQ ID NO: 5790379 - DNA, 25 bp, Homo sapien
ggcagcccgtgggcggtcgaactgc

SEQ ID NO: 5790380 - DNA, 25 bp, Homo sapien
agtctgtcaggaagctggctaggaa

SEQ ID NO: 5790381 - DNA, 25 bp, Homo sapien
tgatcaccccagtgctgcttcactt

SEQ ID NO: 5790382 - DNA, 25 bp, Homo sapien
ggctaatttatactggcaatatggc

SEQ ID NO: 5790383 - DNA, 25 bp, Homo sapien
cctacaatgctatgcttgcagaaac

SEQ ID NO: 5790384 - DNA, 25 bp, Homo sapien
tgctcaaatgtgatttacgttttaa

SEQ ID NO: 5790385 - DNA, 25 bp, Homo sapien
agtgctgcttcactttattacaaaa

SEQ ID NO: 5790386 - DNA, 25 bp, Homo sapien
atggatttttctaagtgtataaata

SEQ ID NO: 5790387 - DNA, 25 bp, Homo sapien
taagtcttctttggttcagaacaca

SEQ ID NO: 5790388 - DNA, 25 bp, Homo sapien
gaggactgcattgtgtgcggccgcc

SEQ ID NO: 5790389 - DNA, 25 bp, Homo sapien
aaatacgccatctgacaaatcagaa

SEQ ID NO: 5790390 - DNA, 25 bp, Homo sapien
gccttctccggcgtccgggtcgagc

SEQ ID NO: 5790391 - DNA, 25 bp, Homo sapien
tgtcattcgattgtaccatgaggcc

SEQ ID NO: 5790392 - DNA, 25 bp, Homo sapien
cagttgaactggtggttagctatac

SEQ ID NO: 5790393 - DNA, 25 bp, Homo sapien
aaatgtttctcttattctacgagtc

SEQ ID NO: 5790394 - DNA, 25 bp, Homo sapien
aagaagaatttattttgtatatgga

SEQ ID NO: 5790395 - DNA, 25 bp, Homo sapien
ggaaggctaatttatactggcaata

SEQ ID NO: 5790396 - DNA, 25 bp, Homo sapien
cttttaatttccagagaatgatgtt

SEQ ID NO: 5790397 - DNA, 25 bp, Homo sapien
actgctctttgctgttgcctgagga

SEQ ID NO: 5790398 - DNA, 25 bp, Homo sapien
catctgacaaatcagaagatggaag

SEQ ID NO: 5790399 - DNA, 25 bp, Homo sapien
gggtgtaggaaaaccactgttatta

SEQ ID NO: 5790400 - DNA, 25 bp, Homo sapien
gtcagtagcaaatgggagagttgct

SEQ ID NO: 5790401 - DNA, 25 bp, Homo sapien
gaagactatatccatctaatgggtt

SEQ ID NO: 5790402 - DNA, 25 bp, Homo sapien
tattctatggcatcatgggaagctt

SEQ ID NO: 5790403 - DNA, 25 bp, Homo sapien
cagatccctgtttattgggaaggat

SEQ ID NO: 5790404 - DNA, 25 bp, Homo sapien
gcctattcaaatcatattctatggc

SEQ ID NO: 5790405 - DNA, 25 bp, Homo sapien
ggagctgtggtccacctgctcctgc

SEQ ID NO: 5790406 - DNA, 25 bp, Homo sapien
gtggagtcagaggtggcaattcacc

SEQ ID NO: 5790407 - DNA, 25 bp, Homo sapien
acgagtctgattggccttacatttc

SEQ ID NO: 5790408 - DNA, 25 bp, Homo sapien
atacgccatctgacaaatcagaaga

SEQ ID NO: 5790409 - DNA, 25 bp, Homo sapien
ttgatctgaggagcaaaggaaaaga

SEQ ID NO: 5790410 - DNA, 25 bp, Homo sapien
cagttttaagtcttctttggttcag

SEQ ID NO: 5790411 - DNA, 25 bp, Homo sapien
agaatgatgtgaagattccagatgc

SEQ ID NO: 5790412 - DNA, 25 bp, Homo sapien
ctttggttcagaacacaggtttttg

SEQ ID NO: 5790413 - DNA, 25 bp, Homo sapien
ctcaaatgtgatttacgttttaatg

SEQ ID NO: 5790414 - DNA, 25 bp, Homo sapien
agaatcagtgaaaggaccagtttga

SEQ ID NO: 5790415 - DNA, 25 bp, Homo sapien
gaaacggcataaagatgacaaatga

SEQ ID NO: 5790416 - DNA, 25 bp, Homo sapien
gggttatgacaaagaagaatttatt

SEQ ID NO: 5790417 - DNA, 25 bp, Homo sapien
catgattgcccataagaacatacat

SEQ ID NO: 5790418 - DNA, 25 bp, Homo sapien
aaaagacattttctctttgaggaag

SEQ ID NO: 5790419 - DNA, 25 bp, Homo sapien
gggatctgatgtcagtagcaaatgg

SEQ ID NO: 5790420 - DNA, 25 bp, Homo sapien
tggactcgtgcagctggggcgtccg

SEQ ID NO: 5790421 - DNA, 25 bp, Homo sapien
gaagattccagatgctaaacatgta

SEQ ID NO: 5790422 - DNA, 25 bp, Homo sapien
ggaagaaaccagtgaagagaaacgg

SEQ ID NO: 5790423 - DNA, 25 bp, Homo sapien
cggctggagtacggggccttcggga

SEQ ID NO: 5790424 - DNA, 25 bp, Homo sapien
tgaactggtggttagctatacggga

SEQ ID NO: 5790425 - DNA, 25 bp, Homo sapien
attacttccatcagtattgagccag

SEQ ID NO: 5790426 - DNA, 25 bp, Homo sapien
aggatatgttcgattcttaaatacg

SEQ ID NO: 5790427 - DNA, 25 bp, Homo sapien
cttgcgcagtcctcagatagttaag

SEQ ID NO: 5790428 - DNA, 25 bp, Homo sapien
gaagatggaaggctaatttatactg

SEQ ID NO: 5790429 - DNA, 25 bp, Homo sapien
cagtcataggtggtgcggagctgtg

SEQ ID NO: 5790430 - DNA, 25 bp, Homo sapien
gtatatggaagaaaccagtgaagag

SEQ ID NO: 5790431 - DNA, 25 bp, Homo sapien
ccttcggggccggtagccggctgga

SEQ ID NO: 5790432 - DNA, 25 bp, Homo sapien
ccgaggtccccgggcctctgtctcc

SEQ ID NO: 5790433 - DNA, 25 bp, Homo sapien
tctggcgttgggcagcccgtgggcg

SEQ ID NO: 5790434 - DNA, 25 bp, Homo sapien
ttccagatgagaatccacaagcgac

SEQ ID NO: 5790435 - DNA, 25 bp, Homo sapien
cagaaacgagtacagtgtttcacca

SEQ ID NO: 5790436 - DNA, 25 bp, Homo sapien
tggggcgtccgcagccgctcgtcac

SEQ ID NO: 5790437 - DNA, 25 bp, Homo sapien
tcacaaattatgggagcagttttaa

SEQ ID NO: 5790438 - DNA, 25 bp, Homo sapien
gtcaactgttttcataaattgatta

SEQ ID NO: 5790439 - DNA, 25 bp, Homo sapien
tgacaaatcagaagatggaaggcta

SEQ ID NO: 5790440 - DNA, 25 bp, Homo sapien
agcagccatggcttttaaacatacc

SEQ ID NO: 5790441 - DNA, 25 bp, Homo sapien
aatccagtgctctttccaaaccgtg

SEQ ID NO: 5790442 - DNA, 25 bp, Homo sapien
agccggctggagtacggggccttcg

SEQ ID NO: 5790443 - DNA, 25 bp, Homo sapien
cgcagtcgtggactcgtgcagctgg

SEQ ID NO: 5790444 - DNA, 25 bp, Homo sapien
cggcataaagatgacaaatgagcct

SEQ ID NO: 5790445 - DNA, 25 bp, Homo sapien
ctgaaagtgtgcctctgcctattca

SEQ ID NO: 5790446 - DNA, 25 bp, Homo sapien
gagaatcactacaagaaaaacttac

SEQ ID NO: 5790447 - DNA, 25 bp, Homo sapien
ctgtggttgactctaaactggggat

SEQ ID NO: 5790448 - DNA, 25 bp, Homo sapien
cagctggggcgtccgcagccgctcg

SEQ ID NO: 5790449 - DNA, 25 bp, Homo sapien
ctttacggtgatcaccccagtgctg

SEQ ID NO: 5790450 - DNA, 25 bp, Homo sapien
agaggtggcaattcaccgaattcat

SEQ ID NO: 5790451 - DNA, 25 bp, Homo sapien
tacatgtacagttgaactggtggtt

SEQ ID NO: 5790452 - DNA, 25 bp, Homo sapien
accattgcaaatgcttaagtcaact

SEQ ID NO: 5790453 - DNA, 25 bp, Homo sapien
atggaagaaaccagtgaagagaaac

SEQ ID NO: 5790454 - DNA, 25 bp, Homo sapien
aatgtgatttacgttttaatgtata

SEQ ID NO: 5790455 - DNA, 25 bp, Homo sapien
aaaatgtagtatctaccattcgtgt

SEQ ID NO: 5790456 - DNA, 25 bp, Homo sapien
ccgtgggcggtcgaactgcctctct

SEQ ID NO: 5790457 - DNA, 25 bp, Homo sapien
ccagtttgaatgcctaccaagactt

SEQ ID NO: 5790458 - DNA, 25 bp, Homo sapien
cctgctcctgctcctgactcactgc

SEQ ID NO: 5790459 - DNA, 25 bp, Homo sapien
cagccatggcttttaaacataccag

SEQ ID NO: 5790460 - DNA, 25 bp, Homo sapien
ttgacttgcgcagtcctcagatagt

SEQ ID NO: 5790461 - DNA, 25 bp, Homo sapien
tctgaggagcaaaggaaaagaatca

SEQ ID NO: 5790462 - DNA, 25 bp, Homo sapien
taatttccagagaatgatgtttgtt

SEQ ID NO: 5790463 - DNA, 25 bp, Homo sapien
atcactacaagaaaaacttacggtg

SEQ ID NO: 5790464 - DNA, 25 bp, Homo sapien
gtttccagatgagaatccacaagcg

SEQ ID NO: 5790465 - DNA, 25 bp, Homo sapien
gtgaaggttctaaggcatgggatcg

SEQ ID NO: 5790466 - DNA, 25 bp, Homo sapien
ctgcaactgtgcactcctcccttgg

SEQ ID NO: 5790467 - DNA, 25 bp, Homo sapien
aaaatccctggataaggtgtgtgct

SEQ ID NO: 5790468 - DNA, 25 bp, Homo sapien
gaccagtttgaatgcctaccaagac

SEQ ID NO: 5790469 - DNA, 25 bp, Homo sapien
aggaagccttgcagcagccatggct

SEQ ID NO: 5790470 - DNA, 25 bp, Homo sapien
tgaggccacaacagacacttataaa

SEQ ID NO: 5790471 - DNA, 25 bp, Homo sapien
atgtatttaccacattttatgctaa

SEQ ID NO: 5790472 - DNA, 25 bp, Homo sapien
gacattaaaagacattttctctttg

SEQ ID NO: 5790473 - DNA, 25 bp, Homo sapien
tttaagtcttctttggttcagaaca

SEQ ID NO: 5790474 - DNA, 25 bp, Homo sapien
atattttccgacattaaaagacatt

SEQ ID NO: 5790475 - DNA, 25 bp, Homo sapien
accacattttatgctaaaacaaaat

SEQ ID NO: 5790476 - DNA, 25 bp, Homo sapien
ggcaattcaccgaattcatatcact

SEQ ID NO: 5790477 - DNA, 25 bp, Homo sapien
tccagtgctctttccaaaccgtgaa

SEQ ID NO: 5790478 - DNA, 25 bp, Homo sapien
atttctgccatacatttttacacaa

SEQ ID NO: 5790479 - DNA, 25 bp, Homo sapien
agccattacctacaatgctatgctt

SEQ ID NO: 5790480 - DNA, 25 bp, Homo sapien
ggccttcgggagccgcgcgccttct

SEQ ID NO: 5790481 - DNA, 25 bp, Homo sapien
acccctggcatgattgcccataaga

SEQ ID NO: 5790482 - DNA, 25 bp, Homo sapien
agcttttaatttccagagaatgatg

SEQ ID NO: 5790483 - DNA, 25 bp, Homo sapien
tccagatgctaaacatgtatttacc

SEQ ID NO: 5790484 - DNA, 25 bp, Homo sapien
aagtgtataaatattttccgacatt

SEQ ID NO: 5790485 - DNA, 25 bp, Homo sapien
acatttttacacaaaataatgctat

SEQ ID NO: 5790486 - DNA, 25 bp, Homo sapien
ccgctcgtcacccgcgtgatgctgt

SEQ ID NO: 5790487 - DNA, 25 bp, Homo sapien
aggaaaagaatcagtgaaaggacca

SEQ ID NO: 5790488 - DNA, 25 bp, Homo sapien
tatactggcaatatggcccgagcag

SEQ ID NO: 5790489 - DNA, 25 bp, Homo sapien
tgctatttctgaaagtgtgcctctg

SEQ ID NO: 5790490 - DNA, 25 bp, Homo sapien
tatgttcgattcttaaatacgccat

SEQ ID NO: 5790491 - DNA, 25 bp, Homo sapien
gctatgcttgcagaaacgagtacag

SEQ ID NO: 5790492 - DNA, 25 bp, Homo sapien
tgtttctggcgttgggcagcccgtg

SEQ ID NO: 5790493 - DNA, 25 bp, Homo sapien
cctctgtctcccgggcgtcctccag

SEQ ID NO: 5790494 - DNA, 25 bp, Homo sapien
atttccagagaatgatgtttgttta

SEQ ID NO: 5790495 - DNA, 25 bp, Homo sapien
aaatattttccgacattaaaagaca

SEQ ID NO: 5790496 - DNA, 25 bp, Homo sapien
actcctcccttggtggcaccctatg

SEQ ID NO: 5790497 - DNA, 25 bp, Homo sapien
gataaggtgtgtgctgacttgatct

SEQ ID NO: 5790498 - DNA, 25 bp, Homo sapien
gaagtcaccattgcaaatgcttaag

SEQ ID NO: 5790499 - DNA, 25 bp, Homo sapien
agtataagagttctgtgttactgtg

SEQ ID NO: 5790500 - DNA, 25 bp, Homo sapien
caagtctgtcaggaagctggctagg

SEQ ID NO: 5790501 - DNA, 25 bp, Homo sapien
gcattccgttagtgactgattgtta

SEQ ID NO: 5790502 - DNA, 25 bp, Homo sapien
gcttcactttattacaaaaggctat

SEQ ID NO: 5790503 - DNA, 25 bp, Homo sapien
cctctctgcggaaggaggactgcat

SEQ ID NO: 5790504 - DNA, 25 bp, Homo sapien
ctctttgaggaagacacagtcatag

SEQ ID NO: 5790505 - DNA, 25 bp, Homo sapien
cgtgatgctgtttctggcgttgggc

SEQ ID NO: 5790506 - DNA, 25 bp, Homo sapien
tacctacaatgctatgcttgcagaa

SEQ ID NO: 5790507 - DNA, 25 bp, Homo sapien
ggtcgaactgcctctctgcggaagg

SEQ ID NO: 5790508 - DNA, 25 bp, Homo sapien
gctaaaacaaaatcactgttagtta

SEQ ID NO: 5790509 - DNA, 25 bp, Homo sapien
tatgggagcagttttaagtcttctt

SEQ ID NO: 5790510 - DNA, 25 bp, Homo sapien
ttgtttctgcaactgtgcactcctc

SEQ ID NO: 5790511 - DNA, 25 bp, Homo sapien
ttgctttattctttgtgtatggatt

SEQ ID NO: 5790512 - DNA, 25 bp, Homo sapien
aatgcctaccaagactttgagaatc

SEQ ID NO: 5790513 - DNA, 25 bp, Homo sapien
tctttccaaaccgtgaagactatat

SEQ ID NO: 5790514 - DNA, 25 bp, Homo sapien
acaaattatgggagcagttttaagt

SEQ ID NO: 5790515 - DNA, 25 bp, Homo sapien
aaactggggatctgatgtcagtagc

SEQ ID NO: 5790516 - DNA, 25 bp, Homo sapien
ttgctgttgcctgaggaccaagtct

SEQ ID NO: 5790517 - DNA, 25 bp, Homo sapien
cgcgtgatgctgtttctggcgttgg

SEQ ID NO: 5790518 - DNA, 25 bp, Homo sapien
tacttccatcagtattgagccagga

SEQ ID NO: 5790519 - DNA, 25 bp, Homo sapien
gtgaagactatatccatctaatggg

SEQ ID NO: 5790520 - DNA, 25 bp, Homo sapien
ataaagatgacaaatgagcctattt

SEQ ID NO: 5790521 - DNA, 25 bp, Homo sapien
aaacacccgtggagtcagaggtggc

SEQ ID NO: 5790522 - DNA, 25 bp, Homo sapien
gtgctctttccaaaccgtgaagact

SEQ ID NO: 5790523 - DNA, 25 bp, Homo sapien
agtagtgttgtcttcagtatcttaa

SEQ ID NO: 5790524 - DNA, 25 bp, Homo sapien
ccagatgagaatccacaagcgactc

SEQ ID NO: 5790525 - DNA, 25 bp, Homo sapien
cacaacagacacttataaagccatt

SEQ ID NO: 5790526 - DNA, 25 bp, Homo sapien
aataaatatgttcatgctagtataa

SEQ ID NO: 5790527 - DNA, 25 bp, Homo sapien
gttgaactggtggttagctatacgg

SEQ ID NO: 5790528 - DNA, 25 bp, Homo sapien
tctaaggcatgggatcgtttccaga

SEQ ID NO: 5790529 - DNA, 25 bp, Homo sapien
gcgcgccttctccggcgtccgggtc

SEQ ID NO: 5790530 - DNA, 25 bp, Homo sapien
tgggcagcccgtgggcggtcgaact

SEQ ID NO: 5790531 - DNA, 25 bp, Homo sapien
ggttcagaacacaggtttttgccta

SEQ ID NO: 5790532 - DNA, 25 bp, Homo sapien
aaagatgacaaatgagcctatttgt

SEQ ID NO: 5790533 - DNA, 25 bp, Homo sapien
ttcgtgttttagaaaggtatgtgaa

SEQ ID NO: 5790534 - DNA, 25 bp, Homo sapien
agtttgaatgcctaccaagactttg

SEQ ID NO: 5790535 - DNA, 25 bp, Homo sapien
ccgacattaaaagacattttctctt

SEQ ID NO: 5790536 - DNA, 25 bp, Homo sapien
caagaaattcacaaattatgggagc

SEQ ID NO: 5790537 - DNA, 25 bp, Homo sapien
ttttcataaattgattaccagttgt

SEQ ID NO: 5790538 - DNA, 25 bp, Homo sapien
tcattcgattgtaccatgaggccac

SEQ ID NO: 5790539 - DNA, 25 bp, Homo sapien
cggtagccggctggagtacggggcc

SEQ ID NO: 5790540 - DNA, 25 bp, Homo sapien
agcaaatgggagagttgctttattc

SEQ ID NO: 5790541 - DNA, 25 bp, Homo sapien
agctggctaggaagccttgcagcag

SEQ ID NO: 5790542 - DNA, 25 bp, Homo sapien
ctctgcctattcaaatcatattcta

SEQ ID NO: 5790543 - DNA, 25 bp, Homo sapien
aatgatgtgaagattccagatgcta

SEQ ID NO: 5790544 - DNA, 25 bp, Homo sapien
gtttctcttattctacgagtctgat

SEQ ID NO: 5790545 - DNA, 25 bp, Homo sapien
tggcttttaaacataccagaaaaac

SEQ ID NO: 5790546 - DNA, 25 bp, Homo sapien
gcctgaggaccaagtctgtcaggaa

SEQ ID NO: 5790547 - DNA, 25 bp, Homo sapien
tgaggagcaaaggaaaagaatcagt

SEQ ID NO: 5790548 - DNA, 25 bp, Homo sapien
gatatgttcgattcttaaatacgcc

SEQ ID NO: 5790549 - DNA, 25 bp, Homo sapien
cacagtcataggtggtgcggagctg

SEQ ID NO: 5790550 - DNA, 25 bp, Homo sapien
gctgttgcctgaggaccaagtctgt

SEQ ID NO: 5790551 - DNA, 25 bp, Homo sapien
gggaaggatatgttcgattcttaaa

SEQ ID NO: 5790552 - DNA, 25 bp, Homo sapien
tgactcactgctctttgctgttgcc

SEQ ID NO: 5790553 - DNA, 25 bp, Homo sapien
cctgtttattgggaaggatatgttc

SEQ ID NO: 5790554 - DNA, 25 bp, Homo sapien
caaatgagcctatttgttagtgttc

SEQ ID NO: 5790555 - DNA, 25 bp, Homo sapien
tatgtgaataaatatgttcatgcta

SEQ ID NO: 5790556 - DNA, 25 bp, Homo sapien
agctttacggtgatcaccccagtgc

SEQ ID NO: 5790557 - DNA, 25 bp, Homo sapien
aacttacggtgaaggttctaaggca

SEQ ID NO: 5790558 - DNA, 25 bp, Homo sapien
gtacggggccttcgggagccgcgcg

SEQ ID NO: 5790559 - DNA, 25 bp, Homo sapien
gatggaagtcaccattgcaaatgct

SEQ ID NO: 5790560 - DNA, 25 bp, Homo sapien
ttgcagcagccatggcttttaaaca

SEQ ID NO: 5790561 - DNA, 25 bp, Homo sapien
cctgactcactgctctttgctgttg

SEQ ID NO: 5790562 - DNA, 25 bp, Homo sapien
cggtgaaggttctaaggcatgggat

SEQ ID NO: 5790563 - DNA, 25 bp, Homo sapien
gcttttaaacataccagaaaaacac

SEQ ID NO: 5790564 - DNA, 25 bp, Homo sapien
cactttattacaaaaggctatgtca

SEQ ID NO: 5790565 - DNA, 25 bp, Homo sapien
cttattctacgagtctgattggcct

SEQ ID NO: 5790566 - DNA, 25 bp, Homo sapien
ggcctctgtctcccgggcgtcctcc

SEQ ID NO: 5790567 - DNA, 25 bp, Homo sapien
gttactgtggttgactctaaactgg

SEQ ID NO: 5790568 - DNA, 25 bp, Homo sapien
ttaagtcaactgttttcataaattg

SEQ ID NO: 5790569 - DNA, 25 bp, Homo sapien
gcttaagtcaactgttttcataaat

SEQ ID NO: 5790570 - DNA, 25 bp, Homo sapien
tgggagagttgctttattctttgtg

SEQ ID NO: 5790571 - DNA, 25 bp, Homo sapien
tgaaaaccaaaatgtagtatctacc

SEQ ID NO: 5790572 - DNA, 25 bp, Homo sapien
taaatatgttcatgctagtataaga

SEQ ID NO: 5790573 - DNA, 25 bp, Homo sapien
gtgtttcaccagaatgatgtgaaga

SEQ ID NO: 5790574 - DNA, 25 bp, Homo sapien
tccgttagtgactgattgttaaaaa

SEQ ID NO: 5790575 - DNA, 25 bp, Homo sapien
caacagacacttataaagccattac

SEQ ID NO: 5790576 - DNA, 25 bp, Homo sapien
aaatgcttaagtcaactgttttcat

SEQ ID NO: 5790577 - DNA, 25 bp, Homo sapien
aacgagtacagtgtttcaccagaat

SEQ ID NO: 5790578 - DNA, 25 bp, Homo sapien
accatgaggccacaacagacactta

SEQ ID NO: 5790579 - DNA, 25 bp, Homo sapien
atgtgaagattccagatgctaaaca

SEQ ID NO: 5790580 - DNA, 25 bp, Homo sapien
tgttcgattcttaaatacgccatct

SEQ ID NO: 5790581 - DNA, 25 bp, Homo sapien
gaggaccaagtctgtcaggaagctg

SEQ ID NO: 5790582 - DNA, 25 bp, Homo sapien
tcactgttagttaatccagtgctct

SEQ ID NO: 5790583 - DNA, 25 bp, Homo sapien
acccgtggagtcagaggtggcaatt

SEQ ID NO: 5790584 - DNA, 25 bp, Homo sapien
atgtttctcttattctacgagtctg

SEQ ID NO: 5790585 - DNA, 25 bp, Homo sapien
cgttagtgactgattgttaaaaata

SEQ ID NO: 5790586 - DNA, 25 bp, Homo sapien
gcgttgggcagcccgtgggcggtcg

SEQ ID NO: 5790587 - DNA, 25 bp, Homo sapien
gtgtgcctctgcctattcaaatcat

SEQ ID NO: 5790588 - DNA, 25 bp, Homo sapien
tgcccataagaacatacatgtacag

SEQ ID NO: 5790589 - DNA, 25 bp, Homo sapien
ttcataaattgattaccagttgtta

SEQ ID NO: 5790590 - DNA, 25 bp, Homo sapien
atgcttaagtcaactgttttcataa

SEQ ID NO: 5790591 - DNA, 25 bp, Homo sapien
ttttgcattccgttagtgactgatt

SEQ ID NO: 5790592 - DNA, 25 bp, Homo sapien
gtccgggtcgagcgcagatccctgt

SEQ ID NO: 5790593 - DNA, 25 bp, Homo sapien
agtcaccattgcaaatgcttaagtc

SEQ ID NO: 5790594 - DNA, 25 bp, Homo sapien
gggaagctttacggtgatcacccca

SEQ ID NO: 5790595 - DNA, 25 bp, Homo sapien
caatatggcccgagcagtgtttggt

SEQ ID NO: 5790596 - DNA, 25 bp, Homo sapien
ttcaaaaaaccgcaaaatttcaaga

SEQ ID NO: 5790597 - DNA, 25 bp, Homo sapien
tgctagtataagagttctgtgttac

SEQ ID NO: 5790598 - DNA, 25 bp, Homo sapien
gcctctgcctattcaaatcatattc

SEQ ID NO: 5790599 - DNA, 25 bp, Homo sapien
cagtgtttcaccagaatgatgtgaa

SEQ ID NO: 5790600 - DNA, 25 bp, Homo sapien
tttccaaaccgtgaagactatatcc

SEQ ID NO: 5790601 - DNA, 25 bp, Homo sapien
ttgtaccatgaggccacaacagaca

SEQ ID NO: 5790602 - DNA, 25 bp, Homo sapien
taccaagactttgagaatcactaca

SEQ ID NO: 5790603 - DNA, 25 bp, Homo sapien
aaggtatgtgaataaatatgttcat

SEQ ID NO: 5790604 - DNA, 25 bp, Homo sapien
atgctatgcttgcagaaacgagtac

SEQ ID NO: 5790605 - DNA, 25 bp, Homo sapien
gatctgaggagcaaaggaaaagaat

SEQ ID NO: 5790606 - DNA, 25 bp, Homo sapien
cagtcctcagatagttaagcagatt

SEQ ID NO: 5790607 - DNA, 25 bp, Homo sapien
ggtgatcaccccagtgctgcttcac

SEQ ID NO: 5790608 - DNA, 25 bp, Homo sapien
ctttgaggaagacacagtcataggt

SEQ ID NO: 5790609 - DNA, 25 bp, Homo sapien
aataaaattgccttttgcattccgt

SEQ ID NO: 5790610 - DNA, 25 bp, Homo sapien
ccccagtgctgcttcactttattac

SEQ ID NO: 5790611 - DNA, 25 bp, Homo sapien
cgattcttaaatacgccatctgaca

SEQ ID NO: 5790612 - DNA, 25 bp, Homo sapien
agactatatccatctaatgggttat

SEQ ID NO: 5790613 - DNA, 25 bp, Homo sapien
gagatggaagtcaccattgcaaatg

SEQ ID NO: 5790614 - DNA, 25 bp, Homo sapien
tctgacaaatcagaagatggaaggc

SEQ ID NO: 5790615 - DNA, 25 bp, Homo sapien
attccagatgctaaacatgtattta

SEQ ID NO: 5790616 - DNA, 25 bp, Homo sapien
ttctttgtgtatggatttttctaag

SEQ ID NO: 5790617 - DNA, 25 bp, Homo sapien
ttcgattcttaaatacgccatctga

SEQ ID NO: 5790618 - DNA, 25 bp, Homo sapien
ctgcttcactttattacaaaaggct

SEQ ID NO: 5790619 - DNA, 25 bp, Homo sapien
ttaagcagattacttccatcagtat

SEQ ID NO: 5790620 - DNA, 25 bp, Homo sapien
gctctttccaaaccgtgaagactat

SEQ ID NO: 5790621 - DNA, 25 bp, Homo sapien
aatccctggataaggtgtgtgctga

SEQ ID NO: 5790622 - DNA, 25 bp, Homo sapien
ctaatttatactggcaatatggccc

SEQ ID NO: 5790623 - DNA, 25 bp, Homo sapien
taaaacaagctatgtttgaaaacca

SEQ ID NO: 5790624 - DNA, 25 bp, Homo sapien
gtttcaccagaatgatgtgaagatt

SEQ ID NO: 5790625 - DNA, 25 bp, Homo sapien
tcaccgaattcatatcactctaacg

SEQ ID NO: 5790626 - DNA, 25 bp, Homo sapien
atttgtttctgcaactgtgcactcc

SEQ ID NO: 5790627 - DNA, 25 bp, Homo sapien
aagaaaccagtgaagagaaacggca

SEQ ID NO: 5790628 - DNA, 25 bp, Homo sapien
tccaaaccgtgaagactatatccat

SEQ ID NO: 5790629 - DNA, 25 bp, Homo sapien
ccgcagccgctcgtcacccgcgtga

SEQ ID NO: 5790630 - DNA, 25 bp, Homo sapien
tgctctttgctgttgcctgaggacc

SEQ ID NO: 5790631 - DNA, 25 bp, Homo sapien
acaaaatcactgttagttaatccag

SEQ ID NO: 5790632 - DNA, 25 bp, Homo sapien
gtccccgggcctctgtctcccgggc

SEQ ID NO: 5790633 - DNA, 25 bp, Homo sapien
gaggaagacacagtcataggtggtg

SEQ ID NO: 5790634 - DNA, 25 bp, Homo sapien
atgacaaatgagcctatttgttagt

SEQ ID NO: 5790635 - DNA, 25 bp, Homo sapien
cattgcaaatgcttaagtcaactgt

SEQ ID NO: 5790636 - DNA, 25 bp, Homo sapien
tttgaaaaccaaaatgtagtatcta

SEQ ID NO: 5790637 - DNA, 25 bp, Homo sapien
cccgggcctctgtctcccgggcgtc

SEQ ID NO: 5790638 - DNA, 25 bp, Homo sapien
tttacacaaaataatgctatttctg

SEQ ID NO: 5790639 - DNA, 25 bp, Homo sapien
tttctggcgttgggcagcccgtggg

SEQ ID NO: 5790640 - DNA, 25 bp, Homo sapien
ttattacaaaaggctatgtcattcg

SEQ ID NO: 5790641 - DNA, 25 bp, Homo sapien
aaccagtgaagagaaacggcataaa

SEQ ID NO: 5790642 - DNA, 25 bp, Homo sapien
tgtctcccgggcgtcctccagcagc

SEQ ID NO: 5790643 - DNA, 25 bp, Homo sapien
tgctcctgctcctgactcactgctc

SEQ ID NO: 5790644 - DNA, 25 bp, Homo sapien
aaagcttttaatttccagagaatga

SEQ ID NO: 5790645 - DNA, 25 bp, Homo sapien
acggtgatcaccccagtgctgcttc

SEQ ID NO: 5790646 - DNA, 25 bp, Homo sapien
ttgtatatggaagaaaccagtgaag

SEQ ID NO: 5790647 - DNA, 25 bp, Homo sapien
cattaaaagacattttctctttgag

SEQ ID NO: 5790648 - DNA, 25 bp, Homo sapien
tgtcaggaagctggctaggaagcct

SEQ ID NO: 5790649 - DNA, 25 bp, Homo sapien
gatgctaaacatgtatttaccacat

SEQ ID NO: 5790650 - DNA, 25 bp, Homo sapien
aattcatatcactctaacgagttgc

SEQ ID NO: 5790651 - DNA, 25 bp, Homo sapien
gcataaagatgacaaatgagcctat

SEQ ID NO: 5790652 - DNA, 25 bp, Homo sapien
ctatgggtgtaggaaaaccactgtt

SEQ ID NO: 5790653 - DNA, 25 bp, Homo sapien
cagtagcaaatgggagagttgcttt

SEQ ID NO: 5790654 - DNA, 25 bp, Homo sapien
tgcctctctgcggaaggaggactgc

SEQ ID NO: 5790655 - DNA, 25 bp, Homo sapien
catgctagtataagagttctgtgtt

SEQ ID NO: 5790656 - DNA, 25 bp, Homo sapien
gtagcaaatgggagagttgctttat

SEQ ID NO: 5790657 - DNA, 25 bp, Homo sapien
gatcgtttccagatgagaatccaca

SEQ ID NO: 5790658 - DNA, 25 bp, Homo sapien
ttctttggttcagaacacaggtttt

SEQ ID NO: 5790659 - DNA, 25 bp, Homo sapien
ccgccgcgctccgaggtccccgggc

SEQ ID NO: 5790660 - DNA, 25 bp, Homo sapien
gggcgtccgcagccgctcgtcaccc

SEQ ID NO: 5790661 - DNA, 25 bp, Homo sapien
ttgactctaaactggggatctgatg

SEQ ID NO: 5790662 - DNA, 25 bp, Homo sapien
actcactgctctttgctgttgcctg

SEQ ID NO: 5790663 - DNA, 25 bp, Homo sapien
tttatactggcaatatggcccgagc

SEQ ID NO: 5790664 - DNA, 25 bp, Homo sapien
aagctatgtttgaaaaccaaaatgt

SEQ ID NO: 5790665 - DNA, 25 bp, Homo sapien
tgagcctatttgttagtgttcgtgc

SEQ ID NO: 5790666 - DNA, 25 bp, Homo sapien
ttctaagtgtataaatattttccga

SEQ ID NO: 5790667 - DNA, 25 bp, Homo sapien
aggaggactgcattgtgtgcggccg

SEQ ID NO: 5790668 - DNA, 25 bp, Homo sapien
tataataataaaattgccttttgca

SEQ ID NO: 5790669 - DNA, 25 bp, Homo sapien
tcttctttggttcagaacacaggtt

SEQ ID NO: 5790670 - DNA, 25 bp, Homo sapien
ccgtgtctcgcagtcgtggactcgt

SEQ ID NO: 5790671 - DNA, 25 bp, Homo sapien
ctgccatacatttttacacaaaata

SEQ ID NO: 5790672 - DNA, 25 bp, Homo sapien
catattctatggcatcatgggaagc

SEQ ID NO: 5790673 - DNA, 25 bp, Homo sapien
ctcgtgcagctggggcgtccgcagc

SEQ ID NO: 5790674 - DNA, 25 bp, Homo sapien
ttaaatacgccatctgacaaatcag

SEQ ID NO: 5790675 - DNA, 25 bp, Homo sapien
aggaccagtttgaatgcctaccaag

SEQ ID NO: 5790676 - DNA, 25 bp, Homo sapien
gccatacatttttacacaaaataat

SEQ ID NO: 5790677 - DNA, 25 bp, Homo sapien
gtttctgcaactgtgcactcctccc

SEQ ID NO: 5790678 - DNA, 25 bp, Homo sapien
ttctgccatacatttttacacaaaa

SEQ ID NO: 5790679 - DNA, 25 bp, Homo sapien
tactgtggttgactctaaactgggg

SEQ ID NO: 5790680 - DNA, 25 bp, Homo sapien
cgcagtcctcagatagttaagcaga

SEQ ID NO: 5790681 - DNA, 25 bp, Homo sapien
agttgctttattctttgtgtatgga

SEQ ID NO: 5790682 - DNA, 25 bp, Homo sapien
cagtgctctttccaaaccgtgaaga

SEQ ID NO: 5790683 - DNA, 25 bp, Homo sapien
ttccgacattaaaagacattttctc

SEQ ID NO: 5790684 - DNA, 25 bp, Homo sapien
agtgaaaggaccagtttgaatgcct

SEQ ID NO: 5790685 - DNA, 25 bp, Homo sapien
gagtacggggccttcgggagccgcg

SEQ ID NO: 5790686 - DNA, 25 bp, Homo sapien
aggttctaaggcatgggatcgtttc

SEQ ID NO: 5790687 - DNA, 25 bp, Homo sapien
ttttatgctaaaacaaaatcactgt

SEQ ID NO: 5790688 - DNA, 25 bp, Homo sapien
cataggtggtgcggagctgtggtcc

SEQ ID NO: 5790689 - DNA, 25 bp, Homo sapien
gtggtccacctgctcctgctcctga

SEQ ID NO: 5790690 - DNA, 25 bp, Homo sapien
atttaccacattttatgctaaaaca

SEQ ID NO: 5790691 - DNA, 25 bp, Homo sapien
catgtacagttgaactggtggttag

SEQ ID NO: 5790692 - DNA, 25 bp, Homo sapien
tactggcaatatggcccgagcagtg

SEQ ID NO: 5790693 - DNA, 25 bp, Homo sapien
atgggttatgacaaagaagaattta

SEQ ID NO: 5790694 - DNA, 25 bp, Homo sapien
ggccttacatttctgccatacattt

SEQ ID NO: 5790695 - DNA, 25 bp, Homo sapien
tggttagctatacgggaaatggtaa

SEQ ID NO: 5790696 - DNA, 25 bp, Homo sapien
agattacttccatcagtattgagcc

SEQ ID NO: 5790697 - DNA, 25 bp, Homo sapien
tggaagtcaccattgcaaatgctta

SEQ ID NO: 5790698 - DNA, 25 bp, Homo sapien
aagcgactcattgacttgcgcagtc

SEQ ID NO: 5790699 - DNA, 25 bp, Homo sapien
ctttgtgtatggatttttctaagtg

SEQ ID NO: 5790700 - DNA, 25 bp, Homo sapien
ctggcatgattgcccataagaacat

SEQ ID NO: 5790701 - DNA, 25 bp, Homo sapien
aaagaatcagtgaaaggaccagttt

SEQ ID NO: 5790702 - DNA, 25 bp, Homo sapien
tacggtgaaggttctaaggcatggg

SEQ ID NO: 5790703 - DNA, 25 bp, Homo sapien
acatttctgccatacatttttacac

SEQ ID NO: 5790704 - DNA, 25 bp, Homo sapien
ggcatcatgggaagctttacggtga

SEQ ID NO: 5790705 - DNA, 25 bp, Homo sapien
actctaacgagttgcaacgtaaaat

SEQ ID NO: 5790706 - DNA, 25 bp, Homo sapien
ccagtgaagagaaacggcataaaga

SEQ ID NO: 5790707 - DNA, 25 bp, Homo sapien
cattttatgctaaaacaaaatcact

SEQ ID NO: 5790708 - DNA, 25 bp, Homo sapien
tcaaatcatattctatggcatcatg

SEQ ID NO: 5790709 - DNA, 25 bp, Homo sapien
tgcattgtgtgcggccgccgcgctc

SEQ ID NO: 5790710 - DNA, 25 bp, Homo sapien
gtggcaccctatgggtgtaggaaaa

SEQ ID NO: 5790711 - DNA, 25 bp, Homo sapien
ctgtggtccacctgctcctgctcct

SEQ ID NO: 5790712 - DNA, 25 bp, Homo sapien
ttgcaaatgcttaagtcaactgttt

SEQ ID NO: 5790713 - DNA, 25 bp, Homo sapien
atcatattctatggcatcatgggaa

SEQ ID NO: 5790714 - DNA, 25 bp, Homo sapien
gcatgggatcgtttccagatgagaa

SEQ ID NO: 5790715 - DNA, 25 bp, Homo sapien
ggagtcagaggtggcaattcaccga

SEQ ID NO: 5790716 - DNA, 25 bp, Homo sapien
gcccgtgggcggtcgaactgcctct

SEQ ID NO: 5790717 - DNA, 25 bp, Homo sapien
gctggggcgtccgcagccgctcgtc

SEQ ID NO: 5790718 - DNA, 25 bp, Homo sapien
atgctaaaacaaaatcactgttagt

SEQ ID NO: 5790719 - DNA, 25 bp, Homo sapien
taaaacaaaatcactgttagttaat

SEQ ID NO: 5790720 - DNA, 25 bp, Homo sapien
agcgcagatccctgtttattgggaa

SEQ ID NO: 5790721 - DNA, 25 bp, Homo sapien
caccccagtgctgcttcactttatt

SEQ ID NO: 5790722 - DNA, 25 bp, Homo sapien
ataatgctatttctgaaagtgtgcc

SEQ ID NO: 5790723 - DNA, 25 bp, Homo sapien
ggatttttctaagtgtataaatatt

SEQ ID NO: 5790724 - DNA, 25 bp, Homo sapien
ctcctgctcctgactcactgctctt

SEQ ID NO: 5790725 - DNA, 25 bp, Homo sapien
gccggtagccggctggagtacgggg

SEQ ID NO: 5790726 - DNA, 25 bp, Homo sapien
aagtgtgcctctgcctattcaaatc

SEQ ID NO: 5790727 - DNA, 25 bp, Homo sapien
agttgagatggaagtcaccattgca

SEQ ID NO: 5790728 - DNA, 25 bp, Homo sapien
gctatgtcattcgattgtaccatga

SEQ ID NO: 5790729 - DNA, 25 bp, Homo sapien
gcaactgtgcactcctcccttggtg

SEQ ID NO: 5790730 - DNA, 25 bp, Homo sapien
ccaagactttgagaatcactacaag

SEQ ID NO: 5790731 - DNA, 25 bp, Homo sapien
tctgcggaaggaggactgcattgtg

SEQ ID NO: 5790732 - DNA, 25 bp, Homo sapien
agtcagaggtggcaattcaccgaat

SEQ ID NO: 5790733 - DNA, 25 bp, Homo sapien
gtcctcagatagttaagcagattac

SEQ ID NO: 5790734 - DNA, 25 bp, Homo sapien
gtatttaccacattttatgctaaaa

SEQ ID NO: 5790735 - DNA, 25 bp, Homo sapien
gccatctgacaaatcagaagatgga

SEQ ID NO: 5790736 - DNA, 25 bp, Homo sapien
cccgagcagtgtttggtgtgaaatg

SEQ ID NO: 5790737 - DNA, 25 bp, Homo sapien
tgcagaaacgagtacagtgtttcac

SEQ ID NO: 5790738 - DNA, 25 bp, Homo sapien
ggaaatggtaagtagtgttgtcttc

SEQ ID NO: 5790739 - DNA, 25 bp, Homo sapien
aatgtataataataaaattgccttt

SEQ ID NO: 5790740 - DNA, 25 bp, Homo sapien
tcttcagtatcttaatttgtttctg

SEQ ID NO: 5790741 - DNA, 25 bp, Homo sapien
aaacatgtatttaccacattttatg

SEQ ID NO: 5790742 - DNA, 25 bp, Homo sapien
tggagtacggggccttcgggagccg

SEQ ID NO: 5790743 - DNA, 25 bp, Homo sapien
atatggaagaaaccagtgaagagaa

SEQ ID NO: 5790744 - DNA, 25 bp, Homo sapien
ttggtgtgaaatgtttctcttattc

SEQ ID NO: 5790745 - DNA, 25 bp, Homo sapien
tcaccattgcaaatgcttaagtcaa

SEQ ID NO: 5790746 - DNA, 25 bp, Homo sapien
cagcagcgggccttcggggccggta

SEQ ID NO: 5790747 - DNA, 25 bp, Homo sapien
gtagccggctggagtacggggcctt

SEQ ID NO: 5790748 - DNA, 25 bp, Homo sapien
agttaagcagattacttccatcagt

SEQ ID NO: 5790749 - DNA, 25 bp, Homo sapien
gcaaaggaaaagaatcagtgaaagg

SEQ ID NO: 5790750 - DNA, 25 bp, Homo sapien
gtctgattggccttacatttctgcc

SEQ ID NO: 5790751 - DNA, 25 bp, Homo sapien
aatgtagtatctaccattcgtgttt

SEQ ID NO: 5790752 - DNA, 25 bp, Homo sapien
ttcgggagccgcgcgccttctccgg

SEQ ID NO: 5790753 - DNA, 25 bp, Homo sapien
catcatgggaagctttacggtgatc

SEQ ID NO: 5790754 - DNA, 25 bp, Homo sapien
ccgggtcgagcgcagatccctgttt

SEQ ID NO: 5790755 - DNA, 25 bp, Homo sapien
gactgattgttaaaaataatttgaa

SEQ ID NO: 5790756 - DNA, 25 bp, Homo sapien
aagcagattacttccatcagtattg

SEQ ID NO: 5790757 - DNA, 25 bp, Homo sapien
tataagagttctgtgttactgtggt

SEQ ID NO: 5790758 - DNA, 25 bp, Homo sapien
atatggcccgagcagtgtttggtgt

SEQ ID NO: 5790759 - DNA, 25 bp, Homo sapien
ttcatgctagtataagagttctgtg

SEQ ID NO: 5790760 - DNA, 25 bp, Homo sapien
ttacggtgatcaccccagtgctgct

SEQ ID NO: 5790761 - DNA, 25 bp, Homo sapien
tgttagtgttcgtgctcaaatgtga

SEQ ID NO: 5790762 - DNA, 25 bp, Homo sapien
ggccgccgcgctccgaggtccccgg

SEQ ID NO: 5790763 - DNA, 25 bp, Homo sapien
tgtttgaaaaccaaaatgtagtatc

SEQ ID NO: 5790764 - DNA, 25 bp, Homo sapien
gtatcttaatttgtttctgcaactg

SEQ ID NO: 5790765 - DNA, 25 bp, Homo sapien
acttataaagccattacctacaatg

SEQ ID NO: 5790766 - DNA, 25 bp, Homo sapien
gtaccatgaggccacaacagacact

SEQ ID NO: 5790767 - DNA, 25 bp, Homo sapien
gccatggcttttaaacataccagaa

SEQ ID NO: 5790768 - DNA, 25 bp, Homo sapien
attatgggagcagttttaagtcttc

SEQ ID NO: 5790769 - DNA, 25 bp, Homo sapien
ctccgaggtccccgggcctctgtct

SEQ ID NO: 5790770 - DNA, 25 bp, Homo sapien
aatcactgttagttaatccagtgct

SEQ ID NO: 5790771 - DNA, 25 bp, Homo sapien
agtacagtgtttcaccagaatgatg

SEQ ID NO: 5790772 - DNA, 25 bp, Homo sapien
atctaccattcgtgttttagaaagg

SEQ ID NO: 5790773 - DNA, 25 bp, Homo sapien
atgggaagctttacggtgatcaccc

SEQ ID NO: 5790774 - DNA, 25 bp, Homo sapien
aggctatgtcattcgattgtaccat

SEQ ID NO: 5790775 - DNA, 25 bp, Homo sapien
ttctgcaactgtgcactcctccctt

SEQ ID NO: 5790776 - DNA, 25 bp, Homo sapien
ttggccttacatttctgccatacat

SEQ ID NO: 5790777 - DNA, 25 bp, Homo sapien
tgctgcttcactttattacaaaagg

SEQ ID NO: 5790778 - DNA, 25 bp, Homo sapien
gtgcggccgccgcgctccgaggtcc

SEQ ID NO: 5790779 - DNA, 25 bp, Homo sapien
gtgctgacttgatctgaggagcaaa

SEQ ID NO: 5790780 - DNA, 25 bp, Homo sapien
acgccatctgacaaatcagaagatg

SEQ ID NO: 5790781 - DNA, 25 bp, Homo sapien
aaatcatattctatggcatcatggg

SEQ ID NO: 5790782 - DNA, 25 bp, Homo sapien
ccgtggagtcagaggtggcaattca

SEQ ID NO: 5790783 - DNA, 25 bp, Homo sapien
gcagccgctcgtcacccgcgtgatg

SEQ ID NO: 5790784 - DNA, 25 bp, Homo sapien
agagttgctttattctttgtgtatg

SEQ ID NO: 5790785 - DNA, 25 bp, Homo sapien
aatgagcctatttgttagtgttcgt

SEQ ID NO: 5790786 - DNA, 25 bp, Homo sapien
ctaccattcgtgttttagaaaggta

SEQ ID NO: 5790787 - DNA, 25 bp, Homo sapien
actgcattgtgtgcggccgccgcgc

SEQ ID NO: 5790788 - DNA, 25 bp, Homo sapien
gctgtttctggcgttgggcagcccg

SEQ ID NO: 5790789 - DNA, 25 bp, Homo sapien
gaggtccccgggcctctgtctcccg

SEQ ID NO: 5790790 - DNA, 25 bp, Homo sapien
ctctttgctgttgcctgaggaccaa

SEQ ID NO: 5790791 - DNA, 25 bp, Homo sapien
taacccctggcatgattgcccataa

SEQ ID NO: 5790792 - DNA, 25 bp, Homo sapien
gctatgtttgaaaaccaaaatgtag

SEQ ID NO: 5790793 - DNA, 25 bp, Homo sapien
gttttaagtcttctttggttcagaa

SEQ ID NO: 5790794 - DNA, 25 bp, Homo sapien
cctggataaggtgtgtgctgacttg

SEQ ID NO: 5790795 - DNA, 25 bp, Homo sapien
tcccgggcgtcctccagcagcgggc

SEQ ID NO: 5790796 - DNA, 25 bp, Homo sapien
tatgtcattcgattgtaccatgagg

SEQ ID NO: 5790797 - DNA, 25 bp, Homo sapien
gaagctggctaggaagccttgcagc

SEQ ID NO: 5790798 - DNA, 25 bp, Homo sapien
aacataccagaaaaacacccgtgga

SEQ ID NO: 5790799 - DNA, 25 bp, Homo sapien
ggaagacacagtcataggtggtgcg

SEQ ID NO: 5790800 - DNA, 25 bp, Homo sapien
ttgcctgaggaccaagtctgtcagg

SEQ ID NO: 5790801 - DNA, 25 bp, Homo sapien
gtaaaatccctggataaggtgtgtg

SEQ ID NO: 5790802 - DNA, 25 bp, Homo sapien
tatcaaagcttttaatttccagaga

SEQ ID NO: 5790803 - DNA, 25 bp, Homo sapien
tttgaatgcctaccaagactttgag

SEQ ID NO: 5790804 - DNA, 25 bp, Homo sapien
agtcttctttggttcagaacacagg

SEQ ID NO: 5790805 - DNA, 25 bp, Homo sapien
tgatgtgaagattccagatgctaaa

SEQ ID NO: 5790806 - DNA, 25 bp, Homo sapien
tgtcttcagtatcttaatttgtttc

SEQ ID NO: 5790807 - DNA, 25 bp, Homo sapien
gaatcactacaagaaaaacttacgg

SEQ ID NO: 5790808 - DNA, 25 bp, Homo sapien
catgaggccacaacagacacttata

SEQ ID NO: 5790809 - DNA, 25 bp, Homo sapien
atacatttttacacaaaataatgct

SEQ ID NO: 5790810 - DNA, 25 bp, Homo sapien
cacccgcgtgatgctgtttctggcg

SEQ ID NO: 5790811 - DNA, 25 bp, Homo sapien
caaaccgtgaagactatatccatct

SEQ ID NO: 5790812 - DNA, 25 bp, Homo sapien
gtcgagcgcagatccctgtttattg

SEQ ID NO: 5790813 - DNA, 25 bp, Homo sapien
gtctcgcagtcgtggactcgtgcag

SEQ ID NO: 5790814 - DNA, 25 bp, Homo sapien
taatttgtttctgcaactgtgcact

SEQ ID NO: 5790815 - DNA, 25 bp, Homo sapien
cgggaaatggtaagtagtgttgtct

SEQ ID NO: 5790816 - DNA, 25 bp, Homo sapien
ctcttattctacgagtctgattggc

SEQ ID NO: 5790817 - DNA, 25 bp, Homo sapien
cgtgctcaaatgtgatttacgtttt

SEQ ID NO: 5790818 - DNA, 25 bp, Homo sapien
aaaatcactgttagttaatccagtg

SEQ ID NO: 5790819 - DNA, 25 bp, Homo sapien
attgccttttgcattccgttagtga

SEQ ID NO: 5790820 - DNA, 25 bp, Homo sapien
tcatgggaagctttacggtgatcac

SEQ ID NO: 5790821 - DNA, 25 bp, Homo sapien
tcactctaacgagttgcaacgtaaa

SEQ ID NO: 5790822 - DNA, 25 bp, Homo sapien
acgagttgcaacgtaaaatccctgg

SEQ ID NO: 5790823 - DNA, 25 bp, Homo sapien
agccgtgtctcgcagtcgtggactc

SEQ ID NO: 5790824 - DNA, 25 bp, Homo sapien
caaaataatgctatttctgaaagtg

SEQ ID NO: 5790825 - DNA, 25 bp, Homo sapien
tcttaaatacgccatctgacaaatc

SEQ ID NO: 5790826 - DNA, 25 bp, Homo sapien
gggcggtcgaactgcctctctgcgg

SEQ ID NO: 5790827 - DNA, 25 bp, Homo sapien
gtgtctcgcagtcgtggactcgtgc

SEQ ID NO: 5790828 - DNA, 25 bp, Homo sapien
ctaaactggggatctgatgtcagta

SEQ ID NO: 5790829 - DNA, 25 bp, Homo sapien
gtgtataaatattttccgacattaa

SEQ ID NO: 5790830 - DNA, 25 bp, Homo sapien
gaagaatttattttgtatatggaag

SEQ ID NO: 5790831 - DNA, 25 bp, Homo sapien
tccatctaatgggttatgacaaaga

SEQ ID NO: 5790832 - DNA, 25 bp, Homo sapien
cgcgctccgaggtccccgggcctct

SEQ ID NO: 5790833 - DNA, 25 bp, Homo sapien
gggaagccgtgtctcgcagtcgtgg

SEQ ID NO: 5790834 - DNA, 25 bp, Homo sapien
cttaatttgtttctgcaactgtgca

SEQ ID NO: 5790835 - DNA, 25 bp, Homo sapien
aatcagtgaaaggaccagtttgaat

SEQ ID NO: 5790836 - DNA, 25 bp, Homo sapien
gtgggaagccgtgtctcgcagtcgt

SEQ ID NO: 5790837 - DNA, 25 bp, Homo sapien
accattcgtgttttagaaaggtatg

SEQ ID NO: 5790838 - DNA, 25 bp, Homo sapien
tagctatacgggaaatggtaagtag

SEQ ID NO: 5790839 - DNA, 25 bp, Homo sapien
tgttagttaatccagtgctctttcc

SEQ ID NO: 5790840 - DNA, 25 bp, Homo sapien
ttcggggccggtagccggctggagt

SEQ ID NO: 5790841 - DNA, 25 bp, Homo sapien
gctttattctttgtgtatggatttt

SEQ ID NO: 5790842 - DNA, 25 bp, Homo sapien
gcactcctcccttggtggcacccta

SEQ ID NO: 5790843 - DNA, 25 bp, Homo sapien
tcctcccttggtggcaccctatggg

SEQ ID NO: 5790844 - DNA, 25 bp, Homo sapien
aatgctatttctgaaagtgtgcctc

SEQ ID NO: 5790845 - DNA, 25 bp, Homo sapien
ccgggcgtcctccagcagcgggcct

SEQ ID NO: 5790846 - DNA, 25 bp, Homo sapien
caatgctatgcttgcagaaacgagt

SEQ ID NO: 5790847 - DNA, 25 bp, Homo sapien
ctagtataagagttctgtgttactg

SEQ ID NO: 5790848 - DNA, 25 bp, Homo sapien
tggtgcggagctgtggtccacctgc

SEQ ID NO: 5790849 - DNA, 25 bp, Homo sapien
ttacatttctgccatacatttttac

SEQ ID NO: 5790850 - DNA, 25 bp, Homo sapien
agaatttattttgtatatggaagaa

SEQ ID NO: 5790851 - DNA, 25 bp, Homo sapien
gaagccgtgtctcgcagtcgtggac

SEQ ID NO: 5790852 - DNA, 25 bp, Homo sapien
cttgcagaaacgagtacagtgtttc

SEQ ID NO: 5790853 - DNA, 25 bp, Homo sapien
ccttgcagcagccatggcttttaaa

SEQ ID NO: 5790854 - DNA, 25 bp, Homo sapien
aaattatgggagcagttttaagtct

SEQ ID NO: 5790855 - DNA, 25 bp, Homo sapien
attcacaaattatgggagcagtttt

SEQ ID NO: 5790856 - DNA, 25 bp, Homo sapien
agtattgagccaggagttgagatgg

SEQ ID NO: 5790857 - DNA, 25 bp, Homo sapien
ccagaatgatgtgaagattccagat

SEQ ID NO: 5790858 - DNA, 25 bp, Homo sapien
aaaggaaaagaatcagtgaaaggac

SEQ ID NO: 5790859 - DNA, 25 bp, Homo sapien
actggggatctgatgtcagtagcaa

SEQ ID NO: 5790860 - DNA, 25 bp, Homo sapien
agttaatccagtgctctttccaaac

SEQ ID NO: 5790861 - DNA, 25 bp, Homo sapien
aagacacagtcataggtggtgcgga

SEQ ID NO: 5790862 - DNA, 25 bp, Homo sapien
ttggttcagaacacaggtttttgcc

SEQ ID NO: 5790863 - DNA, 25 bp, Homo sapien
attatcaaagcttttaatttccaga

SEQ ID NO: 5790864 - DNA, 25 bp, Homo sapien
tattttgtatatggaagaaaccagt

SEQ ID NO: 5790865 - DNA, 25 bp, Homo sapien
acgtaaaatccctggataaggtgtg

SEQ ID NO: 5790866 - DNA, 25 bp, Homo sapien
ggcaccctatgggtgtaggaaaacc

SEQ ID NO: 5790867 - DNA, 25 bp, Homo sapien
tctgtctcccgggcgtcctccagca

SEQ ID NO: 5790868 - DNA, 25 bp, Homo sapien
gcgtcctccagcagcgggccttcgg

SEQ ID NO: 5790869 - DNA, 25 bp, Homo sapien
tgcaacgtaaaatccctggataagg

SEQ ID NO: 5790870 - DNA, 25 bp, Homo sapien
cttggtggcaccctatgggtgtagg

SEQ ID NO: 5790871 - DNA, 25 bp, Homo sapien
aaccgtgaagactatatccatctaa

SEQ ID NO: 5790872 - DNA, 25 bp, Homo sapien
tgttcgtgctcaaatgtgatttacg

SEQ ID NO: 5790873 - DNA, 25 bp, Homo sapien
caattcaccgaattcatatcactct

SEQ ID NO: 5790874 - DNA, 25 bp, Homo sapien
tccctgtttattgggaaggatatgt

SEQ ID NO: 5790875 - DNA, 25 bp, Homo sapien
ggcatgattgcccataagaacatac

SEQ ID NO: 5790876 - DNA, 25 bp, Homo sapien
ggtaagtagtgttgtcttcagtatc

SEQ ID NO: 5790877 - DNA, 25 bp, Homo sapien
gaaacgagtacagtgtttcaccaga

SEQ ID NO: 5790878 - DNA, 25 bp, Homo sapien
tgaatgcctaccaagactttgagaa

SEQ ID NO: 5790879 - DNA, 25 bp, Homo sapien
gtgttgtcttcagtatcttaatttg

SEQ ID NO: 5790880 - DNA, 25 bp, Homo sapien
ctgtgcactcctcccttggtggcac

SEQ ID NO: 5790881 - DNA, 25 bp, Homo sapien
cagcccgtgggcggtcgaactgcct

SEQ ID NO: 5790882 - DNA, 25 bp, Homo sapien
gagttgcaacgtaaaatccctggat

SEQ ID NO: 5790883 - DNA, 25 bp, Homo sapien
tgcggaaggaggactgcattgtgtg

SEQ ID NO: 5790884 - DNA, 25 bp, Homo sapien
agaacatacatgtacagttgaactg

SEQ ID NO: 5790885 - DNA, 25 bp, Homo sapien
tctctgcggaaggaggactgcattg

SEQ ID NO: 5790886 - DNA, 25 bp, Homo sapien
tgcctaacccctggcatgattgccc

SEQ ID NO: 5790887 - DNA, 25 bp, Homo sapien
ttatgctaaaacaaaatcactgtta

SEQ ID NO: 5790888 - DNA, 25 bp, Homo sapien
ttgcattccgttagtgactgattgt

SEQ ID NO: 5790889 - DNA, 25 bp, Homo sapien
gaactgcctctctgcggaaggagga

SEQ ID NO: 5790890 - DNA, 25 bp, Homo sapien
cctatttgttagtgttcgtgctcaa

SEQ ID NO: 5790891 - DNA, 25 bp, Homo sapien
tgtgatttacgttttaatgtataat

SEQ ID NO: 5790892 - DNA, 25 bp, Homo sapien
tttattgggaaggatatgttcgatt

SEQ ID NO: 5790893 - DNA, 25 bp, Homo sapien
ttcagaacacaggtttttgcctaac

SEQ ID NO: 5790894 - DNA, 25 bp, Homo sapien
tgggagcagttttaagtcttctttg

SEQ ID NO: 5790895 - DNA, 25 bp, Homo sapien
cgagtacagtgtttcaccagaatga

SEQ ID NO: 5790896 - DNA, 25 bp, Homo sapien
gttgtcttcagtatcttaatttgtt

SEQ ID NO: 5790897 - DNA, 25 bp, Homo sapien
attacaaaaggctatgtcattcgat

SEQ ID NO: 5790898 - DNA, 25 bp, Homo sapien
tcactgctctttgctgttgcctgag

SEQ ID NO: 5790899 - DNA, 25 bp, Homo sapien
ataaatattttccgacattaaaaga

SEQ ID NO: 5790900 - DNA, 25 bp, Homo sapien
gattgtaccatgaggccacaacaga

SEQ ID NO: 5790901 - DNA, 25 bp, Homo sapien
tgtacagttgaactggtggttagct

SEQ ID NO: 5790902 - DNA, 25 bp, Homo sapien
ccgtgaagactatatccatctaatg

SEQ ID NO: 5790903 - DNA, 25 bp, Homo sapien
gtgggcggtcgaactgcctctctgc

SEQ ID NO: 5790904 - DNA, 25 bp, Homo sapien
tcagaggtggcaattcaccgaattc

SEQ ID NO: 5790905 - DNA, 25 bp, Homo sapien
gcggtcgaactgcctctctgcggaa

SEQ ID NO: 5790906 - DNA, 25 bp, Homo sapien
ctcctgactcactgctctttgctgt

SEQ ID NO: 5790907 - DNA, 25 bp, Homo sapien
agctgtggtccacctgctcctgctc

SEQ ID NO: 5790908 - DNA, 25 bp, Homo sapien
ctattcaaatcatattctatggcat

SEQ ID NO: 5790909 - DNA, 25 bp, Homo sapien
ccttttgcattccgttagtgactga

SEQ ID NO: 5790910 - DNA, 25 bp, Homo sapien
tattctacgagtctgattggcctta

SEQ ID NO: 5790911 - DNA, 25 bp, Homo sapien
ctcgcagtcgtggactcgtgcagct

SEQ ID NO: 5790912 - DNA, 25 bp, Homo sapien
tatgtttgaaaaccaaaatgtagta

SEQ ID NO: 5790913 - DNA, 25 bp, Homo sapien
tgttcatgctagtataagagttctg

SEQ ID NO: 5790914 - DNA, 25 bp, Homo sapien
gtggcaattcaccgaattcatatca

SEQ ID NO: 5790915 - DNA, 25 bp, Homo sapien
ggggccttcgggagccgcgcgcctt

SEQ ID NO: 5790916 - DNA, 25 bp, Homo sapien
tgtgaaatgtttctcttattctacg

SEQ ID NO: 5790917 - DNA, 25 bp, Homo sapien
aatttatactggcaatatggcccga

SEQ ID NO: 5790918 - DNA, 25 bp, Homo sapien
gagaaacggcataaagatgacaaat

SEQ ID NO: 5790919 - DNA, 25 bp, Homo sapien
agtgaagagaaacggcataaagatg

SEQ ID NO: 5790920 - DNA, 25 bp, Homo sapien
aaacaagctatgtttgaaaaccaaa

SEQ ID NO: 5790921 - DNA, 25 bp, Homo sapien
ttagtgttcgtgctcaaatgtgatt

SEQ ID NO: 5790922 - DNA, 25 bp, Homo sapien
taaaattgccttttgcattccgtta

SEQ ID NO: 5790923 - DNA, 25 bp, Homo sapien
tgcagctggggcgtccgcagccgct

SEQ ID NO: 5790924 - DNA, 25 bp, Homo sapien
gcaaatgcttaagtcaactgttttc

SEQ ID NO: 5790925 - DNA, 25 bp, Homo sapien
tggataaggtgtgtgctgacttgat

SEQ ID NO: 5790926 - DNA, 25 bp, Homo sapien
ctatggcatcatgggaagctttacg

SEQ ID NO: 5790927 - DNA, 25 bp, Homo sapien
gtttggtgtgaaatgtttctcttat

SEQ ID NO: 5790928 - DNA, 25 bp, Homo sapien
tattctttgtgtatggatttttcta

SEQ ID NO: 5790929 - DNA, 25 bp, Homo sapien
ttttctctttgaggaagacacagtc

SEQ ID NO: 5790930 - DNA, 25 bp, Homo sapien
tacaaaaggctatgtcattcgattg

SEQ ID NO: 5790931 - DNA, 25 bp, Homo sapien
agtgttcgtgctcaaatgtgattta

SEQ ID NO: 5790932 - DNA, 25 bp, Homo sapien
cagtatcttaatttgtttctgcaac

SEQ ID NO: 5790933 - DNA, 25 bp, Homo sapien
cattgtgtgcggccgccgcgctccg

SEQ ID NO: 5790934 - DNA, 25 bp, Homo sapien
aaattgccttttgcattccgttagt

SEQ ID NO: 5790935 - DNA, 25 bp, Homo sapien
aagtcaactgttttcataaattgat

SEQ ID NO: 5790936 - DNA, 25 bp, Homo sapien
cactacaagaaaaacttacggtgaa

SEQ ID NO: 5790937 - DNA, 25 bp, Homo sapien
aaaggctatgtcattcgattgtacc

SEQ ID NO: 5790938 - DNA, 25 bp, Homo sapien
cagaacacaggtttttgcctaaccc

SEQ ID NO: 5790939 - DNA, 25 bp, Homo sapien
cagatgctaaacatgtatttaccac

SEQ ID NO: 5790940 - DNA, 25 bp, Homo sapien
ttcaagaaattcacaaattatggga

SEQ ID NO: 5790941 - DNA, 25 bp, Homo sapien
ggtggttagctatacgggaaatggt

SEQ ID NO: 5790942 - DNA, 25 bp, Homo sapien
gtccgcagccgctcgtcacccgcgt

SEQ ID NO: 5790943 - DNA, 25 bp, Homo sapien
aggtggcaattcaccgaattcatat

SEQ ID NO: 5790944 - DNA, 25 bp, Homo sapien
cattttctctttgaggaagacacag

SEQ ID NO: 5790945 - DNA, 25 bp, Homo sapien
tttgcctaacccctggcatgattgc

SEQ ID NO: 5790946 - DNA, 25 bp, Homo sapien
gttctaaggcatgggatcgtttcca

SEQ ID NO: 5790947 - DNA, 25 bp, Homo sapien
cttccatcagtattgagccaggagt

SEQ ID NO: 5790948 - DNA, 25 bp, Homo sapien
gtgtgctgacttgatctgaggagca

SEQ ID NO: 5790949 - DNA, 25 bp, Homo sapien
tttttacacaaaataatgctatttc

SEQ ID NO: 5790950 - DNA, 25 bp, Homo sapien
gtgtaggaaaaccactgttattaaa

SEQ ID NO: 5790951 - DNA, 25 bp, Homo sapien
gggtgggaagccgtgtctcgcagtc

SEQ ID NO: 5790952 - DNA, 25 bp, Homo sapien
caccagaatgatgtgaagattccag

SEQ ID NO: 5790953 - DNA, 25 bp, Homo sapien
cacaggtttttgcctaacccctggc

SEQ ID NO: 5790954 - DNA, 25 bp, Homo sapien
caggagttgagatggaagtcaccat

SEQ ID NO: 5790955 - DNA, 25 bp, Homo sapien
atggcatcatgggaagctttacggt

SEQ ID NO: 5790956 - DNA, 25 bp, Homo sapien
tgattgcccataagaacatacatgt

SEQ ID NO: 5790957 - DNA, 25 bp, Homo sapien
aaatcagaagatggaaggctaattt

SEQ ID NO: 5790958 - DNA, 25 bp, Homo sapien
tacaatgctatgcttgcagaaacga

SEQ ID NO: 5790959 - DNA, 25 bp, Homo sapien
ggttgactctaaactggggatctga

SEQ ID NO: 5790960 - DNA, 25 bp, Homo sapien
ctgaggaccaagtctgtcaggaagc

SEQ ID NO: 5790961 - DNA, 25 bp, Homo sapien
gagccaggagttgagatggaagtca

SEQ ID NO: 5790962 - DNA, 25 bp, Homo sapien
cgagcgcagatccctgtttattggg

SEQ ID NO: 5790963 - DNA, 25 bp, Homo sapien
gaaaagaatcagtgaaaggaccagt

SEQ ID NO: 5790964 - DNA, 25 bp, Homo sapien
gatccctgtttattgggaaggatat

SEQ ID NO: 5790965 - DNA, 25 bp, Homo sapien
gaaaaccactgttattaaacaggtg

SEQ ID NO: 5790966 - DNA, 25 bp, Homo sapien
ttaaaagacattttctctttgagga

SEQ ID NO: 5790967 - DNA, 25 bp, Homo sapien
cataccagaaaaacacccgtggagt

SEQ ID NO: 5790968 - DNA, 25 bp, Homo sapien
cagtcgtggactcgtgcagctgggg

SEQ ID NO: 5790969 - DNA, 25 bp, Homo sapien
taagtagtgttgtcttcagtatctt

SEQ ID NO: 5790970 - DNA, 25 bp, Homo sapien
atggaaggctaatttatactggcaa

SEQ ID NO: 5790971 - DNA, 25 bp, Homo sapien
tgcctaccaagactttgagaatcac

SEQ ID NO: 5790972 - DNA, 25 bp, Homo sapien
ttctctttgaggaagacacagtcat

SEQ ID NO: 5790973 - DNA, 25 bp, Homo sapien
tgatgtcagtagcaaatgggagagt

SEQ ID NO: 5790974 - DNA, 25 bp, Homo sapien
ttagttaatccagtgctctttccaa

SEQ ID NO: 5790975 - DNA, 25 bp, Homo sapien
gcagattacttccatcagtattgag

SEQ ID NO: 5790976 - DNA, 25 bp, Homo sapien
cctaacccctggcatgattgcccat

SEQ ID NO: 5790977 - DNA, 25 bp, Homo sapien
gtgcggagctgtggtccacctgctc

SEQ ID NO: 5790978 - DNA, 25 bp, Homo sapien
gctgacttgatctgaggagcaaagg

SEQ ID NO: 5790979 - DNA, 25 bp, Homo sapien
ccttcgggagccgcgcgccttctcc

SEQ ID NO: 5790980 - DNA, 25 bp, Homo sapien
ttgagccaggagttgagatggaagt

SEQ ID NO: 5790981 - DNA, 25 bp, Homo sapien
atgtcagtagcaaatgggagagttg

SEQ ID NO: 5790982 - DNA, 25 bp, Homo sapien
gactcgtgcagctggggcgtccgca

SEQ ID NO: 5790983 - DNA, 25 bp, Homo sapien
aaaaacacccgtggagtcagaggtg

SEQ ID NO: 5790984 - DNA, 25 bp, Homo sapien
tatgcttgcagaaacgagtacagtg

SEQ ID NO: 5790985 - DNA, 25 bp, Homo sapien
ttagtgactgattgttaaaaataat

SEQ ID NO: 5790986 - DNA, 25 bp, Homo sapien
ttctgtgttactgtggttgactcta

SEQ ID NO: 5790987 - DNA, 25 bp, Homo sapien
gaaagtgtgcctctgcctattcaaa

SEQ ID NO: 5790988 - DNA, 25 bp, Homo sapien
ctggcaatatggcccgagcagtgtt

SEQ ID NO: 5790989 - DNA, 25 bp, Homo sapien
ggtccacctgctcctgctcctgact

SEQ ID NO: 5790990 - DNA, 25 bp, Homo sapien
tctccggcgtccgggtcgagcgcag

SEQ ID NO: 5790991 - DNA, 25 bp, Homo sapien
aggaagctggctaggaagccttgca

SEQ ID NO: 5790992 - DNA, 25 bp, Homo sapien
acaagcgactcattgacttgcgcag

SEQ ID NO: 5790993 - DNA, 25 bp, Homo sapien
acacccgtggagtcagaggtggcaa

SEQ ID NO: 5790994 - DNA, 25 bp, Homo sapien
tgtgaataaatatgttcatgctagt

SEQ ID NO: 5790995 - DNA, 25 bp, Homo sapien
gacttgcgcagtcctcagatagtta

SEQ ID NO: 5790996 - DNA, 25 bp, Homo sapien
gaaaccagtgaagagaaacggcata

SEQ ID NO: 5790997 - DNA, 25 bp, Homo sapien
tccagcagcgggccttcggggccgg

SEQ ID NO: 5790998 - DNA, 25 bp, Homo sapien
agatgagaatccacaagcgactcat

SEQ ID NO: 5790999 - DNA, 25 bp, Homo sapien
gaaggaggactgcattgtgtgcggc

SEQ ID NO: 5791000 - DNA, 25 bp, Homo sapien
tgtagtatctaccattcgtgtttta

SEQ ID NO: 5791001 - DNA, 25 bp, Homo sapien
caaatgggagagttgctttattctt

SEQ ID NO: 5791002 - DNA, 25 bp, Homo sapien
tgtttattgggaaggatatgttcga

SEQ ID NO: 5791003 - DNA, 25 bp, Homo sapien
ttcgtgctcaaatgtgatttacgtt

SEQ ID NO: 5791004 - DNA, 25 bp, Homo sapien
ctttgagaatcactacaagaaaaac

SEQ ID NO: 5791005 - DNA, 25 bp, Homo sapien
taaacataccagaaaaacacccgtg

SEQ ID NO: 5791006 - DNA, 25 bp, Homo sapien
tgcttgcagaaacgagtacagtgtt

SEQ ID NO: 5791007 - DNA, 25 bp, Homo sapien
ttgagatggaagtcaccattgcaaa

SEQ ID NO: 5791008 - DNA, 25 bp, Homo sapien
aagacattttctctttgaggaagac

SEQ ID NO: 5791009 - DNA, 25 bp, Homo sapien
tacacaaaataatgctatttctgaa

SEQ ID NO: 5791010 - DNA, 25 bp, Homo sapien
cagtgtttggtgtgaaatgtttctc

SEQ ID NO: 5791011 - DNA, 25 bp, Homo sapien
cataagaacatacatgtacagttga

SEQ ID NO: 5791012 - DNA, 25 bp, Homo sapien
gtgttactgtggttgactctaaact

SEQ ID NO: 5791013 - DNA, 25 bp, Homo sapien
cgtggactcgtgcagctggggcgtc

SEQ ID NO: 5791014 - DNA, 25 bp, Homo sapien
tgctcctgactcactgctctttgct

SEQ ID NO: 5791015 - DNA, 25 bp, Homo sapien
tgttttcataaattgattaccagtt

SEQ ID NO: 5791016 - DNA, 25 bp, Homo sapien
gacattttctctttgaggaagacac

SEQ ID NO: 5791017 - DNA, 25 bp, Homo sapien
ctttgctgttgcctgaggaccaagt

SEQ ID NO: 5791018 - DNA, 25 bp, Homo sapien
catatcactctaacgagttgcaacg

SEQ ID NO: 5791019 - DNA, 25 bp, Homo sapien
atgctgtttctggcgttgggcagcc

SEQ ID NO: 5791020 - DNA, 25 bp, Homo sapien
ttctatggcatcatgggaagcttta

SEQ ID NO: 5791021 - DNA, 25 bp, Homo sapien
ttttgtatatggaagaaaccagtga

SEQ ID NO: 5791022 - DNA, 25 bp, Homo sapien
gactttgagaatcactacaagaaaa

SEQ ID NO: 5791023 - DNA, 25 bp, Homo sapien
gggtcgagcgcagatccctgtttat

SEQ ID NO: 5791024 - DNA, 25 bp, Homo sapien
tatcactctaacgagttgcaacgta

SEQ ID NO: 5791025 - DNA, 25 bp, Homo sapien
cttacggtgaaggttctaaggcatg

SEQ ID NO: 5791026 - DNA, 25 bp, Homo sapien
gagaatccacaagcgactcattgac

SEQ ID NO: 5791027 - DNA, 25 bp, Homo sapien
ctgcctattcaaatcatattctatg

SEQ ID NO: 5791028 - DNA, 25 bp, Homo sapien
agttctgtgttactgtggttgactc

SEQ ID NO: 5791029 - DNA, 25 bp, Homo sapien
ggcccgagcagtgtttggtgtgaaa

SEQ ID NO: 5791030 - DNA, 25 bp, Homo sapien
ctatttctgaaagtgtgcctctgcc

SEQ ID NO: 5791031 - DNA, 25 bp, Homo sapien
aaaggaccagtttgaatgcctacca

SEQ ID NO: 5791032 - DNA, 25 bp, Homo sapien
cccttggtggcaccctatgggtgta

SEQ ID NO: 5791033 - DNA, 25 bp, Homo sapien
cgagcagtgtttggtgtgaaatgtt

SEQ ID NO: 5791034 - DNA, 25 bp, Homo sapien
tagtgttgtcttcagtatcttaatt

SEQ ID NO: 5791035 - DNA, 25 bp, Homo sapien
atcaccccagtgctgcttcacttta

SEQ ID NO: 5791036 - DNA, 25 bp, Homo sapien
ttcagtatcttaatttgtttctgca

SEQ ID NO: 5791037 - DNA, 25 bp, Homo sapien
tttaatttccagagaatgatgtttg

SEQ ID NO: 5791038 - DNA, 25 bp, Homo sapien
cgtgcagctggggcgtccgcagccg

SEQ ID NO: 5791039 - DNA, 25 bp, Homo sapien
tttattttgtatatggaagaaacca

SEQ ID NO: 5791040 - DNA, 25 bp, Homo sapien
aaattatcaaagcttttaatttcca

SEQ ID NO: 5791041 - DNA, 25 bp, Homo sapien
cgaattcatatcactctaacgagtt

SEQ ID NO: 5791042 - DNA, 25 bp, Homo sapien
aaggctaatttatactggcaatatg

SEQ ID NO: 5791043 - DNA, 25 bp, Homo sapien
taaggtgtgtgctgacttgatctga

SEQ ID NO: 5791044 - DNA, 25 bp, Homo sapien
ttttctaagtgtataaatattttcc

SEQ ID NO: 5791045 - DNA, 25 bp, Homo sapien
ctttattacaaaaggctatgtcatt

SEQ ID NO: 5791046 - DNA, 25 bp, Homo sapien
gcggccgccgcgctccgaggtcccc

SEQ ID NO: 5791047 - DNA, 25 bp, Homo sapien
gctcgtcacccgcgtgatgctgttt

SEQ ID NO: 5791048 - DNA, 25 bp, Homo sapien
gcgggtgggaagccgtgtctcgcag

SEQ ID NO: 5791049 - DNA, 25 bp, Homo sapien
caactgttttcataaattgattacc

SEQ ID NO: 5791050 - DNA, 25 bp, Homo sapien
tcgtttccagatgagaatccacaag

SEQ ID NO: 5791051 - DNA, 25 bp, Homo sapien
cgtgttttagaaaggtatgtgaata

SEQ ID NO: 5791052 - DNA, 25 bp, Homo sapien
aaattcacaaattatgggagcagtt

SEQ ID NO: 5791053 - DNA, 25 bp, Homo sapien
cggaaggaggactgcattgtgtgcg

SEQ ID NO: 5791054 - DNA, 25 bp, Homo sapien
tggcgttgggcagcccgtgggcggt

SEQ ID NO: 5791055 - DNA, 25 bp, Homo sapien
tcagtattgagccaggagttgagat

SEQ ID NO: 5791056 - DNA, 25 bp, Homo sapien
caccctatgggtgtaggaaaaccac

SEQ ID NO: 5791057 - DNA, 25 bp, Homo sapien
atttcaagaaattcacaaattatgg

SEQ ID NO: 5791058 - DNA, 25 bp, Homo sapien
tttttgcctaacccctggcatgatt

SEQ ID NO: 5791059 - DNA, 25 bp, Homo sapien
ggctaggaagccttgcagcagccat

SEQ ID NO: 5791060 - DNA, 25 bp, Homo sapien
aaataatgctatttctgaaagtgtg

SEQ ID NO: 5791061 - DNA, 25 bp, Homo sapien
gcgactcattgacttgcgcagtcct

SEQ ID NO: 5791062 - DNA, 25 bp, Homo sapien
gcgccttctccggcgtccgggtcga

SEQ ID NO: 5791063 - DNA, 25 bp, Homo sapien
agatagttaagcagattacttccat

SEQ ID NO: 5791064 - DNA, 25 bp, Homo sapien
gttgcaacgtaaaatccctggataa

SEQ ID NO: 5791065 - DNA, 25 bp, Homo sapien
cgcagatccctgtttattgggaagg

SEQ ID NO: 5791066 - DNA, 25 bp, Homo sapien
ccattacctacaatgctatgcttgc

SEQ ID NO: 5791067 - DNA, 25 bp, Homo sapien
agcagtgtttggtgtgaaatgtttc

SEQ ID NO: 5791068 - DNA, 25 bp, Homo sapien
gccacaacagacacttataaagcca

SEQ ID NO: 5791069 - DNA, 25 bp, Homo sapien
tgcgcagtcctcagatagttaagca

SEQ ID NO: 5791070 - DNA, 25 bp, Homo sapien
gcgtccgcagccgctcgtcacccgc

SEQ ID NO: 5791071 - DNA, 25 bp, Homo sapien
caaaaggctatgtcattcgattgta

SEQ ID NO: 5791072 - DNA, 25 bp, Homo sapien
aatgggagagttgctttattctttg

SEQ ID NO: 5791073 - DNA, 25 bp, Homo sapien
acatgtatttaccacattttatgct

SEQ ID NO: 5791074 - DNA, 25 bp, Homo sapien
cgggcctctgtctcccgggcgtcct

SEQ ID NO: 5791075 - DNA, 25 bp, Homo sapien
agccgcgcgccttctccggcgtccg

SEQ ID NO: 5791076 - DNA, 25 bp, Homo sapien
agcagttttaagtcttctttggttc

SEQ ID NO: 5791077 - DNA, 25 bp, Homo sapien
aaaccgcaaaatttcaagaaattca

SEQ ID NO: 5791078 - DNA, 25 bp, Homo sapien
ggtggtgcggagctgtggtccacct

SEQ ID NO: 5791079 - DNA, 25 bp, Homo sapien
tgaataaatatgttcatgctagtat

SEQ ID NO: 5791080 - DNA, 25 bp, Homo sapien
agatgacaaatgagcctatttgtta

SEQ ID NO: 5791081 - DNA, 25 bp, Homo sapien
cataaattgattaccagttgttaaa

SEQ ID NO: 5791082 - DNA, 25 bp, Homo sapien
gactctaaactggggatctgatgtc

SEQ ID NO: 5791083 - DNA, 25 bp, Homo sapien
acggggccttcgggagccgcgcgcc

SEQ ID NO: 5791084 - DNA, 25 bp, Homo sapien
ttaccacattttatgctaaaacaaa

SEQ ID NO: 5791085 - DNA, 25 bp, Homo sapien
ctgtgttactgtggttgactctaaa

SEQ ID NO: 5791086 - DNA, 25 bp, Homo sapien
gaagctttacggtgatcaccccagt

SEQ ID NO: 5791087 - DNA, 25 bp, Homo sapien
catctaatgggttatgacaaagaag

SEQ ID NO: 5791088 - DNA, 25 bp, Homo sapien
tggggatctgatgtcagtagcaaat

SEQ ID NO: 5791089 - DNA, 25 bp, Homo sapien
gtcacccgcgtgatgctgtttctgg

SEQ ID NO: 5791090 - DNA, 25 bp, Homo sapien
caggtttttgcctaacccctggcat

SEQ ID NO: 5791091 - DNA, 25 bp, Homo sapien
gaaggatatgttcgattcttaaata

SEQ ID NO: 5791092 - DNA, 25 bp, Homo sapien
gtgcactcctcccttggtggcaccc

SEQ ID NO: 5791093 - DNA, 25 bp, Homo sapien
cctgctcctgactcactgctctttg

SEQ ID NO: 5791094 - DNA, 25 bp, Homo sapien
aacggcataaagatgacaaatgagc

SEQ ID NO: 5791095 - DNA, 25 bp, Homo sapien
taggtggtgcggagctgtggtccac

SEQ ID NO: 5791096 - DNA, 25 bp, Homo sapien
gtgtatggatttttctaagtgtata

SEQ ID NO: 5791097 - DNA, 25 bp, Homo sapien
tccacctgctcctgctcctgactca

SEQ ID NO: 5791098 - DNA, 25 bp, Homo sapien
ataataaaattgccttttgcattcc

SEQ ID NO: 5791099 - DNA, 25 bp, Homo sapien
atcttaatttgtttctgcaactgtg

SEQ ID NO: 5791100 - DNA, 25 bp, Homo sapien
ttctcttattctacgagtctgattg

SEQ ID NO: 5791101 - DNA, 25 bp, Homo sapien
gccgcgctccgaggtccccgggcct

SEQ ID NO: 5791102 - DNA, 25 bp, Homo sapien
agatggaaggctaatttatactggc

SEQ ID NO: 5791103 - DNA, 25 bp, Homo sapien
aaaaccaaaatgtagtatctaccat

SEQ ID NO: 5791104 - DNA, 25 bp, Homo sapien
tgaagagaaacggcataaagatgac

SEQ ID NO: 5791105 - DNA, 25 bp, Homo sapien
aatatgttcatgctagtataagagt

SEQ ID NO: 5791106 - DNA, 25 bp, Homo sapien
gtcgtggactcgtgcagctggggcg

SEQ ID NO: 5791107 - DNA, 25 bp, Homo sapien
ttgtgtatggatttttctaagtgta

SEQ ID NO: 5791108 - DNA, 25 bp, Homo sapien
attccgttagtgactgattgttaaa

SEQ ID NO: 5791109 - DNA, 25 bp, Homo sapien
atgggtgtaggaaaaccactgttat

SEQ ID NO: 5791110 - DNA, 25 bp, Homo sapien
aggccacaacagacacttataaagc

SEQ ID NO: 5791111 - DNA, 25 bp, Homo sapien
cccgcgtgatgctgtttctggcgtt

SEQ ID NO: 5791112 - DNA, 25 bp, Homo sapien
caaatgtgatttacgttttaatgta

SEQ ID NO: 5791113 - DNA, 25 bp, Homo sapien
tacagttgaactggtggttagctat

SEQ ID NO: 5791114 - DNA, 25 bp, Homo sapien
tcaggaagctggctaggaagccttg

SEQ ID NO: 5791115 - DNA, 25 bp, Homo sapien
atgagaatccacaagcgactcattg

SEQ ID NO: 5791116 - DNA, 25 bp, Homo sapien
ggtttttgcctaacccctggcatga

SEQ ID NO: 5791117 - DNA, 25 bp, Homo sapien
ccagagaatgatgtttgtttataat

SEQ ID NO: 5791118 - DNA, 25 bp, Homo sapien
ggtatgtgaataaatatgttcatgc

SEQ ID NO: 5791119 - DNA, 25 bp, Homo sapien
taagaacatacatgtacagttgaac

SEQ ID NO: 5791120 - DNA, 25 bp, Homo sapien
ccctggcatgattgcccataagaac

SEQ ID NO: 5791121 - DNA, 25 bp, Homo sapien
gaatccacaagcgactcattgactt

SEQ ID NO: 5791122 - DNA, 25 bp, Homo sapien
ggagccgcgcgccttctccggcgtc

SEQ ID NO: 5791123 - DNA, 25 bp, Homo sapien
cattcgtgttttagaaaggtatgtg

SEQ ID NO: 5791124 - DNA, 25 bp, Homo sapien
atgggatcgtttccagatgagaatc

SEQ ID NO: 5791125 - DNA, 25 bp, Homo sapien
tgttgcctgaggaccaagtctgtca

SEQ ID NO: 5791126 - DNA, 25 bp, Homo sapien
accgcaaaatttcaagaaattcaca

SEQ ID NO: 5791127 - DNA, 25 bp, Homo sapien
tatacgggaaatggtaagtagtgtt

SEQ ID NO: 5791128 - DNA, 25 bp, Homo sapien
agccgctcgtcacccgcgtgatgct

SEQ ID NO: 5791129 - DNA, 25 bp, Homo sapien
taccagaaaaacacccgtggagtca

SEQ ID NO: 5791130 - DNA, 25 bp, Homo sapien
gtgtgcggccgccgcgctccgaggt

SEQ ID NO: 5791131 - DNA, 25 bp, Homo sapien
agagttctgtgttactgtggttgac

SEQ ID NO: 5791132 - DNA, 25 bp, Homo sapien
tacagtgtttcaccagaatgatgtg

SEQ ID NO: 5791133 - DNA, 25 bp, Homo sapien
tccatcagtattgagccaggagttg

SEQ ID NO: 5791134 - DNA, 25 bp, Homo sapien
gtggttgactctaaactggggatct

SEQ ID NO: 5791135 - DNA, 25 bp, Homo sapien
agattccagatgctaaacatgtatt

SEQ ID NO: 5791136 - DNA, 25 bp, Homo sapien
ccctatgggtgtaggaaaaccactg

SEQ ID NO: 5791137 - DNA, 25 bp, Homo sapien
ggaccaagtctgtcaggaagctggc

SEQ ID NO: 5791138 - DNA, 25 bp, Homo sapien
gaaggttctaaggcatgggatcgtt

SEQ ID NO: 5791139 - DNA, 25 bp, Homo sapien
aggagcaaaggaaaagaatcagtga

SEQ ID NO: 5791140 - DNA, 25 bp, Homo sapien
ctggctaggaagccttgcagcagcc

SEQ ID NO: 5791141 - DNA, 25 bp, Homo sapien
tatccatctaatgggttatgacaaa

SEQ ID NO: 5791142 - DNA, 25 bp, Homo sapien
ccgcgcgccttctccggcgtccggg

SEQ ID NO: 5791143 - DNA, 25 bp, Homo sapien
ttgggaaggatatgttcgattctta

SEQ ID NO: 5791144 - DNA, 25 bp, Homo sapien
gccaggagttgagatggaagtcacc

SEQ ID NO: 5791145 - DNA, 25 bp, Homo sapien
gcggagctgtggtccacctgctcct

SEQ ID NO: 5791146 - DNA, 25 bp, Homo sapien
tctaacgagttgcaacgtaaaatcc

SEQ ID NO: 5791147 - DNA, 25 bp, Homo sapien
tcgattgtaccatgaggccacaaca

SEQ ID NO: 5791148 - DNA, 25 bp, Homo sapien
agacacttataaagccattacctac

SEQ ID NO: 5791149 - DNA, 25 bp, Homo sapien
cccataagaacatacatgtacagtt

SEQ ID NO: 5791150 - DNA, 25 bp, Homo sapien
tatgttcatgctagtataagagttc

SEQ ID NO: 5791151 - DNA, 25 bp, Homo sapien
aaatggtaagtagtgttgtcttcag

SEQ ID NO: 5791152 - DNA, 25 bp, Homo sapien
agtgactgattgttaaaaataattt

SEQ ID NO: 5791153 - DNA, 25 bp, Homo sapien
gacaaatgagcctatttgttagtgt

SEQ ID NO: 5791154 - DNA, 25 bp, Homo sapien
gtcctccagcagcgggccttcgggg

SEQ ID NO: 5791155 - DNA, 25 bp, Homo sapien
ataaagccattacctacaatgctat

SEQ ID NO: 5791156 - DNA, 25 bp, Homo sapien
actgttagttaatccagtgctcttt

SEQ ID NO: 5791157 - DNA, 25 bp, Homo sapien
ggagagttgctttattctttgtgta

SEQ ID NO: 5791158 - DNA, 25 bp, Homo sapien
ttccagagaatgatgtttgtttata

SEQ ID NO: 5791159 - DNA, 25 bp, Homo sapien
aatttattttgtatatggaagaaac

SEQ ID NO: 5791160 - DNA, 25 bp, Homo sapien
gggatcgtttccagatgagaatcca

SEQ ID NO: 5791161 - DNA, 25 bp, Homo sapien
tgaaatgtttctcttattctacgag

SEQ ID NO: 5791162 - DNA, 25 bp, Homo sapien
ttctgaaagtgtgcctctgcctatt

SEQ ID NO: 5791163 - DNA, 25 bp, Homo sapien
cacctgctcctgctcctgactcact

SEQ ID NO: 5791164 - DNA, 25 bp, Homo sapien
ggtgtgaaatgtttctcttattcta

SEQ ID NO: 5791165 - DNA, 25 bp, Homo sapien
actatatccatctaatgggttatga

SEQ ID NO: 5791166 - DNA, 25 bp, Homo sapien
acaaatcagaagatggaaggctaat

SEQ ID NO: 5791167 - DNA, 25 bp, Homo sapien
taaggcatgggatcgtttccagatg

SEQ ID NO: 5791168 - DNA, 25 bp, Homo sapien
agcctatttgttagtgttcgtgctc

SEQ ID NO: 5791169 - DNA, 25 bp, Homo sapien
ctaggaagccttgcagcagccatgg

SEQ ID NO: 5791170 - DNA, 25 bp, Homo sapien
tttgttagtgttcgtgctcaaatgt

SEQ ID NO: 5791171 - DNA, 25 bp, Homo sapien
cctcagatagttaagcagattactt

SEQ ID NO: 5791172 - DNA, 25 bp, Homo sapien
accaagtctgtcaggaagctggcta

SEQ ID NO: 5791173 - DNA, 25 bp, Homo sapien
aataaaacaagctatgtttgaaaac

SEQ ID NO: 5791174 - DNA, 25 bp, Homo sapien
aaaccactgttattaaacaggtgaa

SEQ ID NO: 5791175 - DNA, 25 bp, Homo sapien
tgatgctgtttctggcgttgggcag

SEQ ID NO: 5791176 - DNA, 25 bp, Homo sapien
atagttaagcagattacttccatca

SEQ ID NO: 5791177 - DNA, 25 bp, Homo sapien
cctaccaagactttgagaatcacta

SEQ ID NO: 5791178 - DNA, 25 bp, Homo sapien
taacgagttgcaacgtaaaatccct

SEQ ID NO: 5791179 - DNA, 25 bp, Homo sapien
gaagccttgcagcagccatggcttt

SEQ ID NO: 5791180 - DNA, 25 bp, Homo sapien
attacctacaatgctatgcttgcag

SEQ ID NO: 5791181 - DNA, 25 bp, Homo sapien
actgttttcataaattgattaccag

SEQ ID NO: 5791182 - DNA, 25 bp, Homo sapien
caacgtaaaatccctggataaggtg

SEQ ID NO: 5791183 - DNA, 25 bp, Homo sapien
attcaccgaattcatatcactctaa

SEQ ID NO: 5791184 - DNA, 25 bp, Homo sapien
ccacaagcgactcattgacttgcgc

SEQ ID NO: 5791185 - DNA, 25 bp, Homo sapien
gatctgatgtcagtagcaaatggga

SEQ ID NO: 5791186 - DNA, 25 bp, Homo sapien
ccagaaaaacacccgtggagtcaga

SEQ ID NO: 5791187 - DNA, 25 bp, Homo sapien
attcaaatcatattctatggcatca

SEQ ID NO: 5791188 - DNA, 25 bp, Homo sapien
cgctccgaggtccccgggcctctgt

SEQ ID NO: 5791189 - DNA, 25 bp, Homo sapien
tgacttgatctgaggagcaaaggaa

SEQ ID NO: 5791190 - DNA, 25 bp, Homo sapien
attcttaaatacgccatctgacaaa

SEQ ID NO: 5791191 - DNA, 25 bp, Homo sapien
ttcaccagaatgatgtgaagattcc

SEQ ID NO: 5791192 - DNA, 25 bp, Homo sapien
ctcattgacttgcgcagtcctcaga

SEQ ID NO: 5791193 - DNA, 25 bp, Homo sapien
accactgttattaaacaggtgaaaa

SEQ ID NO: 5791194 - DNA, 25 bp, Homo sapien
ctctaaactggggatctgatgtcag

SEQ ID NO: 5791195 - DNA, 25 bp, Homo sapien
gtatggatttttctaagtgtataaa

SEQ ID NO: 5791196 - DNA, 25 bp, Homo sapien
gtataaatattttccgacattaaaa

SEQ ID NO: 5791197 - DNA, 25 bp, Homo sapien
tctaatgggttatgacaaagaagaa

SEQ ID NO: 5791198 - DNA, 25 bp, Homo sapien
tccctggataaggtgtgtgctgact

SEQ ID NO: 5791199 - DNA, 25 bp, Homo sapien
atttctgaaagtgtgcctctgccta

SEQ ID NO: 5791200 - DNA, 25 bp, Homo sapien
atcagaagatggaaggctaatttat

SEQ ID NO: 5791201 - DNA, 25 bp, Homo sapien
agagaatgatgtttgtttataataa

SEQ ID NO: 5791202 - DNA, 25 bp, Homo sapien
gagtctgattggccttacatttctg

SEQ ID NO: 5791203 - DNA, 25 bp, Homo sapien
aaccaaaatgtagtatctaccattc

SEQ ID NO: 5791204 - DNA, 25 bp, Homo sapien
atggcccgagcagtgtttggtgtga

SEQ ID NO: 5791205 - DNA, 25 bp, Homo sapien
acactaacaaataggctcatttgtc

SEQ ID NO: 5791206 - DNA, 25 bp, Homo sapien
tcagatcaagtcagcacacacctta

SEQ ID NO: 5791207 - DNA, 25 bp, Homo sapien
cccaataaacagggatctgcgctcg

SEQ ID NO: 5791208 - DNA, 25 bp, Homo sapien
cactttcagaaatagcattattttg

SEQ ID NO: 5791209 - DNA, 25 bp, Homo sapien
agttcgaccgcccacgggctgccca

SEQ ID NO: 5791210 - DNA, 25 bp, Homo sapien
ttgccacctctgactccacgggtgt

SEQ ID NO: 5791211 - DNA, 25 bp, Homo sapien
atggctgctgcaaggcttcctagcc

SEQ ID NO: 5791212 - DNA, 25 bp, Homo sapien
ggcaacagcaaagagcagtgagtca

SEQ ID NO: 5791213 - DNA, 25 bp, Homo sapien
ttcccatgatgccatagaatatgat

SEQ ID NO: 5791214 - DNA, 25 bp, Homo sapien
aggccaatcagactcgtagaataag

SEQ ID NO: 5791215 - DNA, 25 bp, Homo sapien
tgaatttcttgaaattttgcggttt

SEQ ID NO: 5791216 - DNA, 25 bp, Homo sapien
acattttggttttcaaacatagctt

SEQ ID NO: 5791217 - DNA, 25 bp, Homo sapien
aagtgaagcagcactggggtgatca

SEQ ID NO: 5791218 - DNA, 25 bp, Homo sapien
tctggaaacgatcccatgccttaga

SEQ ID NO: 5791219 - DNA, 25 bp, Homo sapien
ccggggacctcggagcgcggcggcc

SEQ ID NO: 5791220 - DNA, 25 bp, Homo sapien
aactgctcccataatttgtgaattt

SEQ ID NO: 5791221 - DNA, 25 bp, Homo sapien
tcgtttctgcaagcatagcattgta

SEQ ID NO: 5791222 - DNA, 25 bp, Homo sapien
tttaaaagccatggctgctgcaagg

SEQ ID NO: 5791223 - DNA, 25 bp, Homo sapien
gagcaggtggaccacagctccgcac

SEQ ID NO: 5791224 - DNA, 25 bp, Homo sapien
tgcggacgccccagctgcacgagtc

SEQ ID NO: 5791225 - DNA, 25 bp, Homo sapien
aagaataaagcaactctcccatttg

SEQ ID NO: 5791226 - DNA, 25 bp, Homo sapien
ctggaatcttcacatcattctggtg

SEQ ID NO: 5791227 - DNA, 25 bp, Homo sapien
ccaccagttcaactgtacatgtatg

SEQ ID NO: 5791228 - DNA, 25 bp, Homo sapien
tcatttgtcatctttatgccgtttc

SEQ ID NO: 5791229 - DNA, 25 bp, Homo sapien
atttgctactgacatcagatcccca

SEQ ID NO: 5791230 - DNA, 25 bp, Homo sapien
actaacaaataggctcatttgtcat

SEQ ID NO: 5791231 - DNA, 25 bp, Homo sapien
tgtgaatttcttgaaattttgcggt

SEQ ID NO: 5791232 - DNA, 25 bp, Homo sapien
agaaacagcatcacgcgggtgacga

SEQ ID NO: 5791233 - DNA, 25 bp, Homo sapien
taacagtgattttgttttagcataa

SEQ ID NO: 5791234 - DNA, 25 bp, Homo sapien
ggattttacgttgcaactcgttaga

SEQ ID NO: 5791235 - DNA, 25 bp, Homo sapien
tacattaaaacgtaaatcacatttg

SEQ ID NO: 5791236 - DNA, 25 bp, Homo sapien
acagcatcacgcgggtgacgagcgg

SEQ ID NO: 5791237 - DNA, 25 bp, Homo sapien
cctttgctcctcagatcaagtcagc

SEQ ID NO: 5791238 - DNA, 25 bp, Homo sapien
atatccttcccaataaacagggatc

SEQ ID NO: 5791239 - DNA, 25 bp, Homo sapien
aataaattcttctttgtcataaccc

SEQ ID NO: 5791240 - DNA, 25 bp, Homo sapien
gggcaatcatgccaggggttaggca

SEQ ID NO: 5791241 - DNA, 25 bp, Homo sapien
cgcttgtggattctcatctggaaac

SEQ ID NO: 5791242 - DNA, 25 bp, Homo sapien
gctgcggacgccccagctgcacgag

SEQ ID NO: 5791243 - DNA, 25 bp, Homo sapien
tgttctgaaccaaagaagacttaaa

SEQ ID NO: 5791244 - DNA, 25 bp, Homo sapien
gcagtcctccttccgcagagaggca

SEQ ID NO: 5791245 - DNA, 25 bp, Homo sapien
gcacgaacactaacaaataggctca

SEQ ID NO: 5791246 - DNA, 25 bp, Homo sapien
cacacaccttatccagggattttac

SEQ ID NO: 5791247 - DNA, 25 bp, Homo sapien
gacttaagcatttgcaatggtgact

SEQ ID NO: 5791248 - DNA, 25 bp, Homo sapien
atctgcgctcgacccggacgccgga

SEQ ID NO: 5791249 - DNA, 25 bp, Homo sapien
caaaaggcaattttattattataca

SEQ ID NO: 5791250 - DNA, 25 bp, Homo sapien
gaagcagcactggggtgatcaccgt

SEQ ID NO: 5791251 - DNA, 25 bp, Homo sapien
gtgacgagcggctgcggacgcccca

SEQ ID NO: 5791252 - DNA, 25 bp, Homo sapien
ctggaggacgcccgggagacagagg

SEQ ID NO: 5791253 - DNA, 25 bp, Homo sapien
tagtgattctcaaagtcttggtagg

SEQ ID NO: 5791254 - DNA, 25 bp, Homo sapien
aaatgtatggcagaaatgtaaggcc

SEQ ID NO: 5791255 - DNA, 25 bp, Homo sapien
acatgtatgttcttatgggcaatca

SEQ ID NO: 5791256 - DNA, 25 bp, Homo sapien
ctcaaagtcttggtaggcattcaaa

SEQ ID NO: 5791257 - DNA, 25 bp, Homo sapien
aagcttcccatgatgccatagaata

SEQ ID NO: 5791258 - DNA, 25 bp, Homo sapien
taagaatcgaacatatccttcccaa

SEQ ID NO: 5791259 - DNA, 25 bp, Homo sapien
aatcagtcactaacggaatgcaaaa

SEQ ID NO: 5791260 - DNA, 25 bp, Homo sapien
gtggcctcatggtacaatcgaatga

SEQ ID NO: 5791261 - DNA, 25 bp, Homo sapien
tctgcttaactatctgaggactgcg

SEQ ID NO: 5791262 - DNA, 25 bp, Homo sapien
ttttaatgtcggaaaatatttatac

SEQ ID NO: 5791263 - DNA, 25 bp, Homo sapien
tttttaacaatcagtcactaacgga

SEQ ID NO: 5791264 - DNA, 25 bp, Homo sapien
tataagtgtctgttgtggcctcatg

SEQ ID NO: 5791265 - DNA, 25 bp, Homo sapien
cttagaaaaatccatacacaaagaa

SEQ ID NO: 5791266 - DNA, 25 bp, Homo sapien
aagggaggagtgcacagttgcagaa

SEQ ID NO: 5791267 - DNA, 25 bp, Homo sapien
tctggaaattaaaagctttgataat

SEQ ID NO: 5791268 - DNA, 25 bp, Homo sapien
ccgtaagtttttcttgtagtgattc

SEQ ID NO: 5791269 - DNA, 25 bp, Homo sapien
ttgtaataaagtgaagcagcactgg

SEQ ID NO: 5791270 - DNA, 25 bp, Homo sapien
caaattaagatactgaagacaacac

SEQ ID NO: 5791271 - DNA, 25 bp, Homo sapien
taaggccaatcagactcgtagaata

SEQ ID NO: 5791272 - DNA, 25 bp, Homo sapien
actaacagtgattttgttttagcat

SEQ ID NO: 5791273 - DNA, 25 bp, Homo sapien
aatcgaacatatccttcccaataaa

SEQ ID NO: 5791274 - DNA, 25 bp, Homo sapien
ggtcctcaggcaacagcaaagagca

SEQ ID NO: 5791275 - DNA, 25 bp, Homo sapien
cagtaacacagaactcttatactag

SEQ ID NO: 5791276 - DNA, 25 bp, Homo sapien
tcccataatttgtgaatttcttgaa

SEQ ID NO: 5791277 - DNA, 25 bp, Homo sapien
accgtaaagcttcccatgatgccat

SEQ ID NO: 5791278 - DNA, 25 bp, Homo sapien
aatatttatacacttagaaaaatcc

SEQ ID NO: 5791279 - DNA, 25 bp, Homo sapien
gctaccggccccgaaggcccgctgc

SEQ ID NO: 5791280 - DNA, 25 bp, Homo sapien
cttccatcttctgatttgtcagatg

SEQ ID NO: 5791281 - DNA, 25 bp, Homo sapien
taaagtgaagcagcactggggtgat

SEQ ID NO: 5791282 - DNA, 25 bp, Homo sapien
cttctttgtcataacccattagatg

SEQ ID NO: 5791283 - DNA, 25 bp, Homo sapien
aacaaattaagatactgaagacaac

SEQ ID NO: 5791284 - DNA, 25 bp, Homo sapien
tcattctctggaaattaaaagcttt

SEQ ID NO: 5791285 - DNA, 25 bp, Homo sapien
aggcttcctagccagcttcctgaca

SEQ ID NO: 5791286 - DNA, 25 bp, Homo sapien
agcaactctcccatttgctactgac

SEQ ID NO: 5791287 - DNA, 25 bp, Homo sapien
ttcagaaatagcattattttgtgta

SEQ ID NO: 5791288 - DNA, 25 bp, Homo sapien
taacaactggtaatcaatttatgaa

SEQ ID NO: 5791289 - DNA, 25 bp, Homo sapien
aataggcagaggcacactttcagaa

SEQ ID NO: 5791290 - DNA, 25 bp, Homo sapien
gattctcatctggaaacgatcccat

SEQ ID NO: 5791291 - DNA, 25 bp, Homo sapien
ccccagctgcacgagtccacgactg

SEQ ID NO: 5791292 - DNA, 25 bp, Homo sapien
cttaagcatttgcaatggtgacttc

SEQ ID NO: 5791293 - DNA, 25 bp, Homo sapien
catgatgccatagaatatgatttga

SEQ ID NO: 5791294 - DNA, 25 bp, Homo sapien
cacagaactcttatactagcatgaa

SEQ ID NO: 5791295 - DNA, 25 bp, Homo sapien
ttaagatactgaagacaacactact

SEQ ID NO: 5791296 - DNA, 25 bp, Homo sapien
caaagaataaagcaactctcccatt

SEQ ID NO: 5791297 - DNA, 25 bp, Homo sapien
aaacagggatctgcgctcgacccgg

SEQ ID NO: 5791298 - DNA, 25 bp, Homo sapien
tctggtgaaacactgtactcgtttc

SEQ ID NO: 5791299 - DNA, 25 bp, Homo sapien
ggacctcggagcgcggcggccgcac

SEQ ID NO: 5791300 - DNA, 25 bp, Homo sapien
taagcatttgcaatggtgacttcca

SEQ ID NO: 5791301 - DNA, 25 bp, Homo sapien
aacgatcccatgccttagaaccttc

SEQ ID NO: 5791302 - DNA, 25 bp, Homo sapien
cacacaatgcagtcctccttccgca

SEQ ID NO: 5791303 - DNA, 25 bp, Homo sapien
gcgcggcggccgcacacaatgcagt

SEQ ID NO: 5791304 - DNA, 25 bp, Homo sapien
tttggttttcaaacatagcttgttt

SEQ ID NO: 5791305 - DNA, 25 bp, Homo sapien
tgttgtggcctcatggtacaatcga

SEQ ID NO: 5791306 - DNA, 25 bp, Homo sapien
tcttatactagcatgaacatattta

SEQ ID NO: 5791307 - DNA, 25 bp, Homo sapien
tcagatggcgtatttaagaatcgaa

SEQ ID NO: 5791308 - DNA, 25 bp, Homo sapien
caccaagggaggagtgcacagttgc

SEQ ID NO: 5791309 - DNA, 25 bp, Homo sapien
atttgagcacgaacactaacaaata

SEQ ID NO: 5791310 - DNA, 25 bp, Homo sapien
ctgacatcagatccccagtttagag

SEQ ID NO: 5791311 - DNA, 25 bp, Homo sapien
agagcactggattaactaacagtga

SEQ ID NO: 5791312 - DNA, 25 bp, Homo sapien
ggcacactttcagaaatagcattat

SEQ ID NO: 5791313 - DNA, 25 bp, Homo sapien
ttatgaaaacagttgacttaagcat

SEQ ID NO: 5791314 - DNA, 25 bp, Homo sapien
catcagatccccagtttagagtcaa

SEQ ID NO: 5791315 - DNA, 25 bp, Homo sapien
accaaacactgctcgggccatattg

SEQ ID NO: 5791316 - DNA, 25 bp, Homo sapien
agaaggcgcgcggctcccgaaggcc

SEQ ID NO: 5791317 - DNA, 25 bp, Homo sapien
cattgtaggtaatggctttataagt

SEQ ID NO: 5791318 - DNA, 25 bp, Homo sapien
tttaataacagtggttttcctacac

SEQ ID NO: 5791319 - DNA, 25 bp, Homo sapien
ctgcaagcatagcattgtaggtaat

SEQ ID NO: 5791320 - DNA, 25 bp, Homo sapien
ctggctcaatactgatggaagtaat

SEQ ID NO: 5791321 - DNA, 25 bp, Homo sapien
catgccttagaaccttcaccgtaag

SEQ ID NO: 5791322 - DNA, 25 bp, Homo sapien
agctgcacgagtccacgactgcgag

SEQ ID NO: 5791323 - DNA, 25 bp, Homo sapien
atactagcatgaacatatttattca

SEQ ID NO: 5791324 - DNA, 25 bp, Homo sapien
ttgacttaagcatttgcaatggtga

SEQ ID NO: 5791325 - DNA, 25 bp, Homo sapien
gaaatgtaaggccaatcagactcgt

SEQ ID NO: 5791326 - DNA, 25 bp, Homo sapien
gtcaaccacagtaacacagaactct

SEQ ID NO: 5791327 - DNA, 25 bp, Homo sapien
tgtcggaaaatatttatacacttag

SEQ ID NO: 5791328 - DNA, 25 bp, Homo sapien
acacgaatggtagatactacatttt

SEQ ID NO: 5791329 - DNA, 25 bp, Homo sapien
catacacaaagaataaagcaactct

SEQ ID NO: 5791330 - DNA, 25 bp, Homo sapien
ggattaactaacagtgattttgttt

SEQ ID NO: 5791331 - DNA, 25 bp, Homo sapien
gtggtaaatacatgtttagcatctg

SEQ ID NO: 5791332 - DNA, 25 bp, Homo sapien
catagaatatgatttgaataggcag

SEQ ID NO: 5791333 - DNA, 25 bp, Homo sapien
ttaatgtcggaaaatatttatacac

SEQ ID NO: 5791334 - DNA, 25 bp, Homo sapien
aaattagccttccatcttctgattt

SEQ ID NO: 5791335 - DNA, 25 bp, Homo sapien
cagtataaattagccttccatcttc

SEQ ID NO: 5791336 - DNA, 25 bp, Homo sapien
gctgcaaggcttcctagccagcttc

SEQ ID NO: 5791337 - DNA, 25 bp, Homo sapien
ttcctacacccatagggtgccacca

SEQ ID NO: 5791338 - DNA, 25 bp, Homo sapien
actatctgaggactgcgcaagtcaa

SEQ ID NO: 5791339 - DNA, 25 bp, Homo sapien
cctagccagcttcctgacagacttg

SEQ ID NO: 5791340 - DNA, 25 bp, Homo sapien
gttcttatgggcaatcatgccaggg

SEQ ID NO: 5791341 - DNA, 25 bp, Homo sapien
gtcgcttgtggattctcatctggaa

SEQ ID NO: 5791342 - DNA, 25 bp, Homo sapien
tgcacagttgcagaaacaaattaag

SEQ ID NO: 5791343 - DNA, 25 bp, Homo sapien
tgccttagaaccttcaccgtaagtt

SEQ ID NO: 5791344 - DNA, 25 bp, Homo sapien
ctgaaccaaagaagacttaaaactg

SEQ ID NO: 5791345 - DNA, 25 bp, Homo sapien
acgaacactaacaaataggctcatt

SEQ ID NO: 5791346 - DNA, 25 bp, Homo sapien
acatatccttcccaataaacaggga

SEQ ID NO: 5791347 - DNA, 25 bp, Homo sapien
gcggcggccgcacacaatgcagtcc

SEQ ID NO: 5791348 - DNA, 25 bp, Homo sapien
aatgtcttttaatgtcggaaaatat

SEQ ID NO: 5791349 - DNA, 25 bp, Homo sapien
gtggaccacagctccgcaccaccta

SEQ ID NO: 5791350 - DNA, 25 bp, Homo sapien
tttgctcctcagatcaagtcagcac

SEQ ID NO: 5791351 - DNA, 25 bp, Homo sapien
ggtgacttccatctcaactcctggc

SEQ ID NO: 5791352 - DNA, 25 bp, Homo sapien
caaagagcagtgagtcaggagcagg

SEQ ID NO: 5791353 - DNA, 25 bp, Homo sapien
aagcatagcattgtaggtaatggct

SEQ ID NO: 5791354 - DNA, 25 bp, Homo sapien
acaactggtaatcaatttatgaaaa

SEQ ID NO: 5791355 - DNA, 25 bp, Homo sapien
catttcacaccaaacactgctcggg

SEQ ID NO: 5791356 - DNA, 25 bp, Homo sapien
ctgaagacaacactacttaccattt

SEQ ID NO: 5791357 - DNA, 25 bp, Homo sapien
aaggcgcgcggctcccgaaggcccc

SEQ ID NO: 5791358 - DNA, 25 bp, Homo sapien
aggctcatttgtcatctttatgccg

SEQ ID NO: 5791359 - DNA, 25 bp, Homo sapien
taacaatcagtcactaacggaatgc

SEQ ID NO: 5791360 - DNA, 25 bp, Homo sapien
gctcgacccggacgccggagaaggc

SEQ ID NO: 5791361 - DNA, 25 bp, Homo sapien
atctggaatcttcacatcattctgg

SEQ ID NO: 5791362 - DNA, 25 bp, Homo sapien
caatcagactcgtagaataagagaa

SEQ ID NO: 5791363 - DNA, 25 bp, Homo sapien
ttcaccgtaagtttttcttgtagtg

SEQ ID NO: 5791364 - DNA, 25 bp, Homo sapien
tgtttagcatctggaatcttcacat

SEQ ID NO: 5791365 - DNA, 25 bp, Homo sapien
tttcactgattcttttcctttgctc

SEQ ID NO: 5791366 - DNA, 25 bp, Homo sapien
tttacgttgcaactcgttagagtga

SEQ ID NO: 5791367 - DNA, 25 bp, Homo sapien
atgactgtgtcttcctcaaagagaa

SEQ ID NO: 5791368 - DNA, 25 bp, Homo sapien
gccagtataaattagccttccatct

SEQ ID NO: 5791369 - DNA, 25 bp, Homo sapien
gtttctcttcactggtttcttccat

SEQ ID NO: 5791370 - DNA, 25 bp, Homo sapien
gacgccggagaaggcgcgcggctcc

SEQ ID NO: 5791371 - DNA, 25 bp, Homo sapien
aattaagatactgaagacaacacta

SEQ ID NO: 5791372 - DNA, 25 bp, Homo sapien
gtgtaaaaatgtatggcagaaatgt

SEQ ID NO: 5791373 - DNA, 25 bp, Homo sapien
ttcctagccagcttcctgacagact

SEQ ID NO: 5791374 - DNA, 25 bp, Homo sapien
gagcaggagcaggtggaccacagct

SEQ ID NO: 5791375 - DNA, 25 bp, Homo sapien
tcccatttgctactgacatcagatc

SEQ ID NO: 5791376 - DNA, 25 bp, Homo sapien
aggcccggggacctcggagcgcggc

SEQ ID NO: 5791377 - DNA, 25 bp, Homo sapien
gaaggcccgctgctggaggacgccc

SEQ ID NO: 5791378 - DNA, 25 bp, Homo sapien
atggtacaatcgaatgacatagcct

SEQ ID NO: 5791379 - DNA, 25 bp, Homo sapien
tacctttctaaaacacgaatggtag

SEQ ID NO: 5791380 - DNA, 25 bp, Homo sapien
accatttcccgtatagctaaccacc

SEQ ID NO: 5791381 - DNA, 25 bp, Homo sapien
cgagcggctgcggacgccccagctg

SEQ ID NO: 5791382 - DNA, 25 bp, Homo sapien
ttcacatcattctggtgaaacactg

SEQ ID NO: 5791383 - DNA, 25 bp, Homo sapien
tgatatgaattcggtgaattgccac

SEQ ID NO: 5791384 - DNA, 25 bp, Homo sapien
ctggtatgtttaaaagccatggctg

SEQ ID NO: 5791385 - DNA, 25 bp, Homo sapien
accagttcaactgtacatgtatgtt

SEQ ID NO: 5791386 - DNA, 25 bp, Homo sapien
taatcaatttatgaaaacagttgac

SEQ ID NO: 5791387 - DNA, 25 bp, Homo sapien
cactgtactcgtttctgcaagcata

SEQ ID NO: 5791388 - DNA, 25 bp, Homo sapien
tcctcaggcaacagcaaagagcagt

SEQ ID NO: 5791389 - DNA, 25 bp, Homo sapien
cgggagacagaggcccggggacctc

SEQ ID NO: 5791390 - DNA, 25 bp, Homo sapien
tttatacacttagaaaaatccatac

SEQ ID NO: 5791391 - DNA, 25 bp, Homo sapien
tgtcagatggcgtatttaagaatcg

SEQ ID NO: 5791392 - DNA, 25 bp, Homo sapien
acttggtcctcaggcaacagcaaag

SEQ ID NO: 5791393 - DNA, 25 bp, Homo sapien
agtcttcacggtttggaaagagcac

SEQ ID NO: 5791394 - DNA, 25 bp, Homo sapien
aatggctttataagtgtctgttgtg

SEQ ID NO: 5791395 - DNA, 25 bp, Homo sapien
gaataaagcaactctcccatttgct

SEQ ID NO: 5791396 - DNA, 25 bp, Homo sapien
caaagaagacttaaaactgctccca

SEQ ID NO: 5791397 - DNA, 25 bp, Homo sapien
gccatagaatatgatttgaataggc

SEQ ID NO: 5791398 - DNA, 25 bp, Homo sapien
tctcccatttgctactgacatcaga

SEQ ID NO: 5791399 - DNA, 25 bp, Homo sapien
cggacgccggagaaggcgcgcggct

SEQ ID NO: 5791400 - DNA, 25 bp, Homo sapien
taaacaaacatcattctctggaaat

SEQ ID NO: 5791401 - DNA, 25 bp, Homo sapien
aatgcaaaaggcaattttattatta

SEQ ID NO: 5791402 - DNA, 25 bp, Homo sapien
tcccgaaggccccgtactccagccg

SEQ ID NO: 5791403 - DNA, 25 bp, Homo sapien
cttcactggtttcttccatatacaa

SEQ ID NO: 5791404 - DNA, 25 bp, Homo sapien
tgtaaggccaatcagactcgtagaa

SEQ ID NO: 5791405 - DNA, 25 bp, Homo sapien
tgaataggcagaggcacactttcag

SEQ ID NO: 5791406 - DNA, 25 bp, Homo sapien
tcacgcgggtgacgagcggctgcgg

SEQ ID NO: 5791407 - DNA, 25 bp, Homo sapien
cacagttgcagaaacaaattaagat

SEQ ID NO: 5791408 - DNA, 25 bp, Homo sapien
taagtgtctgttgtggcctcatggt

SEQ ID NO: 5791409 - DNA, 25 bp, Homo sapien
acttccatctcaactcctggctcaa

SEQ ID NO: 5791410 - DNA, 25 bp, Homo sapien
caaagagaaaatgtcttttaatgtc

SEQ ID NO: 5791411 - DNA, 25 bp, Homo sapien
atgtatggcagaaatgtaaggccaa

SEQ ID NO: 5791412 - DNA, 25 bp, Homo sapien
acgagtccacgactgcgagacacgg

SEQ ID NO: 5791413 - DNA, 25 bp, Homo sapien
ctgcgcaagtcaatgagtcgcttgt

SEQ ID NO: 5791414 - DNA, 25 bp, Homo sapien
tcttttcctttgctcctcagatcaa

SEQ ID NO: 5791415 - DNA, 25 bp, Homo sapien
taaaacacgaatggtagatactaca

SEQ ID NO: 5791416 - DNA, 25 bp, Homo sapien
tcgggccatattgccagtataaatt

SEQ ID NO: 5791417 - DNA, 25 bp, Homo sapien
ctacttaccatttcccgtatagcta

SEQ ID NO: 5791418 - DNA, 25 bp, Homo sapien
agcaaagagcagtgagtcaggagca

SEQ ID NO: 5791419 - DNA, 25 bp, Homo sapien
ataggctcatttgtcatctttatgc

SEQ ID NO: 5791420 - DNA, 25 bp, Homo sapien
atgccaggggttaggcaaaaacctg

SEQ ID NO: 5791421 - DNA, 25 bp, Homo sapien
aaaaatgtatggcagaaatgtaagg

SEQ ID NO: 5791422 - DNA, 25 bp, Homo sapien
ccagtttagagtcaaccacagtaac

SEQ ID NO: 5791423 - DNA, 25 bp, Homo sapien
gtgattctcaaagtcttggtaggca

SEQ ID NO: 5791424 - DNA, 25 bp, Homo sapien
atgttcttatgggcaatcatgccag

SEQ ID NO: 5791425 - DNA, 25 bp, Homo sapien
atagccttttgtaataaagtgaagc

SEQ ID NO: 5791426 - DNA, 25 bp, Homo sapien
tgatgccatagaatatgatttgaat

SEQ ID NO: 5791427 - DNA, 25 bp, Homo sapien
tgtttaataacagtggttttcctac

SEQ ID NO: 5791428 - DNA, 25 bp, Homo sapien
tcacatttgagcacgaacactaaca

SEQ ID NO: 5791429 - DNA, 25 bp, Homo sapien
caggcaacagcaaagagcagtgagt

SEQ ID NO: 5791430 - DNA, 25 bp, Homo sapien
tatctgaggactgcgcaagtcaatg

SEQ ID NO: 5791431 - DNA, 25 bp, Homo sapien
cactggattaactaacagtgatttt

SEQ ID NO: 5791432 - DNA, 25 bp, Homo sapien
cacatacctttctaaaacacgaatg

SEQ ID NO: 5791433 - DNA, 25 bp, Homo sapien
cagctccgcaccacctatgactgtg

SEQ ID NO: 5791434 - DNA, 25 bp, Homo sapien
agcattattttgtgtaaaaatgtat

SEQ ID NO: 5791435 - DNA, 25 bp, Homo sapien
gttcaactgtacatgtatgttctta

SEQ ID NO: 5791436 - DNA, 25 bp, Homo sapien
gagtcaaccacagtaacacagaact

SEQ ID NO: 5791437 - DNA, 25 bp, Homo sapien
acagtgattttgttttagcataaaa

SEQ ID NO: 5791438 - DNA, 25 bp, Homo sapien
ggtgaattgccacctctgactccac

SEQ ID NO: 5791439 - DNA, 25 bp, Homo sapien
tttagcatctggaatcttcacatca

SEQ ID NO: 5791440 - DNA, 25 bp, Homo sapien
aacactacttaccatttcccgtata

SEQ ID NO: 5791441 - DNA, 25 bp, Homo sapien
tggctttataagtgtctgttgtggc

SEQ ID NO: 5791442 - DNA, 25 bp, Homo sapien
gcgggtgacgagcggctgcggacgc

SEQ ID NO: 5791443 - DNA, 25 bp, Homo sapien
atccagggattttacgttgcaactc

SEQ ID NO: 5791444 - DNA, 25 bp, Homo sapien
agcatcacgcgggtgacgagcggct

SEQ ID NO: 5791445 - DNA, 25 bp, Homo sapien
tggttttcaaacatagcttgtttta

SEQ ID NO: 5791446 - DNA, 25 bp, Homo sapien
ttgtaggtaatggctttataagtgt

SEQ ID NO: 5791447 - DNA, 25 bp, Homo sapien
caaccacagtaacacagaactctta

SEQ ID NO: 5791448 - DNA, 25 bp, Homo sapien
gctcccataatttgtgaatttcttg

SEQ ID NO: 5791449 - DNA, 25 bp, Homo sapien
aagtttttcttgtagtgattctcaa

SEQ ID NO: 5791450 - DNA, 25 bp, Homo sapien
tcttctgatttgtcagatggcgtat

SEQ ID NO: 5791451 - DNA, 25 bp, Homo sapien
tcagtcactaacggaatgcaaaagg

SEQ ID NO: 5791452 - DNA, 25 bp, Homo sapien
attcggtgaattgccacctctgact

SEQ ID NO: 5791453 - DNA, 25 bp, Homo sapien
catattgccagtataaattagcctt

SEQ ID NO: 5791454 - DNA, 25 bp, Homo sapien
gcgctcgacccggacgccggagaag

SEQ ID NO: 5791455 - DNA, 25 bp, Homo sapien
gacccggacgccggagaaggcgcgc

SEQ ID NO: 5791456 - DNA, 25 bp, Homo sapien
acgactgcgagacacggcttcccac

SEQ ID NO: 5791457 - DNA, 25 bp, Homo sapien
cgtaaatcacatttgagcacgaaca

SEQ ID NO: 5791458 - DNA, 25 bp, Homo sapien
atgaattcggtgaattgccacctct

SEQ ID NO: 5791459 - DNA, 25 bp, Homo sapien
acaaataggctcatttgtcatcttt

SEQ ID NO: 5791460 - DNA, 25 bp, Homo sapien
aaattatttttaacaatcagtcact

SEQ ID NO: 5791461 - DNA, 25 bp, Homo sapien
tattgccagtataaattagccttcc

SEQ ID NO: 5791462 - DNA, 25 bp, Homo sapien
cccggacgccggagaaggcgcgcgg

SEQ ID NO: 5791463 - DNA, 25 bp, Homo sapien
ctgctgcaaggcttcctagccagct

SEQ ID NO: 5791464 - DNA, 25 bp, Homo sapien
gaatatgatttgaataggcagaggc

SEQ ID NO: 5791465 - DNA, 25 bp, Homo sapien
gtcttggtaggcattcaaactggtc

SEQ ID NO: 5791466 - DNA, 25 bp, Homo sapien
gaaaatgtcttttaatgtcggaaaa

SEQ ID NO: 5791467 - DNA, 25 bp, Homo sapien
gcccaacgccagaaacagcatcacg

SEQ ID NO: 5791468 - DNA, 25 bp, Homo sapien
cgaaggccccgtactccagccggct

SEQ ID NO: 5791469 - DNA, 25 bp, Homo sapien
tctaaaacacgaatggtagatacta

SEQ ID NO: 5791470 - DNA, 25 bp, Homo sapien
tcataacccattagatggatatagt

SEQ ID NO: 5791471 - DNA, 25 bp, Homo sapien
acaatcagtcactaacggaatgcaa

SEQ ID NO: 5791472 - DNA, 25 bp, Homo sapien
ttttcacctgtttaataacagtggt

SEQ ID NO: 5791473 - DNA, 25 bp, Homo sapien
acctcggagcgcggcggccgcacac

SEQ ID NO: 5791474 - DNA, 25 bp, Homo sapien
gtgccaccaagggaggagtgcacag

SEQ ID NO: 5791475 - DNA, 25 bp, Homo sapien
ttccgcagagaggcagttcgaccgc

SEQ ID NO: 5791476 - DNA, 25 bp, Homo sapien
gagcagtgagtcaggagcaggagca

SEQ ID NO: 5791477 - DNA, 25 bp, Homo sapien
aggcattcaaactggtcctttcact

SEQ ID NO: 5791478 - DNA, 25 bp, Homo sapien
agcacacaccttatccagggatttt

SEQ ID NO: 5791479 - DNA, 25 bp, Homo sapien
ggccccgtactccagccggctaccg

SEQ ID NO: 5791480 - DNA, 25 bp, Homo sapien
aagaagacttaaaactgctcccata

SEQ ID NO: 5791481 - DNA, 25 bp, Homo sapien
aaacagttgacttaagcatttgcaa

SEQ ID NO: 5791482 - DNA, 25 bp, Homo sapien
ggtacaatcgaatgacatagccttt

SEQ ID NO: 5791483 - DNA, 25 bp, Homo sapien
cctacacccatagggtgccaccaag

SEQ ID NO: 5791484 - DNA, 25 bp, Homo sapien
cggccgcacacaatgcagtcctcct

SEQ ID NO: 5791485 - DNA, 25 bp, Homo sapien
ccaacgccagaaacagcatcacgcg

SEQ ID NO: 5791486 - DNA, 25 bp, Homo sapien
ttcacggtttggaaagagcactgga

SEQ ID NO: 5791487 - DNA, 25 bp, Homo sapien
tcttgaaattttgcggttttttgaa

SEQ ID NO: 5791488 - DNA, 25 bp, Homo sapien
ggcggccgcacacaatgcagtcctc

SEQ ID NO: 5791489 - DNA, 25 bp, Homo sapien
ttctggtatgtttaaaagccatggc

SEQ ID NO: 5791490 - DNA, 25 bp, Homo sapien
cgccccagctgcacgagtccacgac

SEQ ID NO: 5791491 - DNA, 25 bp, Homo sapien
agtcaggagcaggagcaggtggacc

SEQ ID NO: 5791492 - DNA, 25 bp, Homo sapien
tctgttgtggcctcatggtacaatc

SEQ ID NO: 5791493 - DNA, 25 bp, Homo sapien
ttctgatttgtcagatggcgtattt

SEQ ID NO: 5791494 - DNA, 25 bp, Homo sapien
aatgtcggaaaatatttatacactt

SEQ ID NO: 5791495 - DNA, 25 bp, Homo sapien
actccagccggctaccggccccgaa

SEQ ID NO: 5791496 - DNA, 25 bp, Homo sapien
ctgcgctcgacccggacgccggaga

SEQ ID NO: 5791497 - DNA, 25 bp, Homo sapien
gcactggggtgatcaccgtaaagct

SEQ ID NO: 5791498 - DNA, 25 bp, Homo sapien
tatgtttaaaagccatggctgctgc

SEQ ID NO: 5791499 - DNA, 25 bp, Homo sapien
atcagactcgtagaataagagaaac

SEQ ID NO: 5791500 - DNA, 25 bp, Homo sapien
atcccatgccttagaaccttcaccg

SEQ ID NO: 5791501 - DNA, 25 bp, Homo sapien
ggccccgaaggcccgctgctggagg

SEQ ID NO: 5791502 - DNA, 25 bp, Homo sapien
ttattataaacaaacatcattctct

SEQ ID NO: 5791503 - DNA, 25 bp, Homo sapien
ttcttgtagtgattctcaaagtctt

SEQ ID NO: 5791504 - DNA, 25 bp, Homo sapien
gtacatgtatgttcttatgggcaat

SEQ ID NO: 5791505 - DNA, 25 bp, Homo sapien
acggaatgcaaaaggcaattttatt

SEQ ID NO: 5791506 - DNA, 25 bp, Homo sapien
cagccggctaccggccccgaaggcc

SEQ ID NO: 5791507 - DNA, 25 bp, Homo sapien
aacctgtgttctgaaccaaagaaga

SEQ ID NO: 5791508 - DNA, 25 bp, Homo sapien
gtatggcagaaatgtaaggccaatc

SEQ ID NO: 5791509 - DNA, 25 bp, Homo sapien
ggctgctgcaaggcttcctagccag

SEQ ID NO: 5791510 - DNA, 25 bp, Homo sapien
ccgcagagaggcagttcgaccgccc

SEQ ID NO: 5791511 - DNA, 25 bp, Homo sapien
taggcaaaaacctgtgttctgaacc

SEQ ID NO: 5791512 - DNA, 25 bp, Homo sapien
ccggagaaggcgcgcggctcccgaa

SEQ ID NO: 5791513 - DNA, 25 bp, Homo sapien
ggaaagagcactggattaactaaca

SEQ ID NO: 5791514 - DNA, 25 bp, Homo sapien
gcattcaaactggtcctttcactga

SEQ ID NO: 5791515 - DNA, 25 bp, Homo sapien
gctcccgaaggccccgtactccagc

SEQ ID NO: 5791516 - DNA, 25 bp, Homo sapien
caatttatgaaaacagttgacttaa

SEQ ID NO: 5791517 - DNA, 25 bp, Homo sapien
ccccgtactccagccggctaccggc

SEQ ID NO: 5791518 - DNA, 25 bp, Homo sapien
tcgacccggacgccggagaaggcgc

SEQ ID NO: 5791519 - DNA, 25 bp, Homo sapien
agcataaaatgtggtaaatacatgt

SEQ ID NO: 5791520 - DNA, 25 bp, Homo sapien
tcactggtttcttccatatacaaaa

SEQ ID NO: 5791521 - DNA, 25 bp, Homo sapien
aagagcagtgagtcaggagcaggag

SEQ ID NO: 5791522 - DNA, 25 bp, Homo sapien
ctcgtagaataagagaaacatttca

SEQ ID NO: 5791523 - DNA, 25 bp, Homo sapien
tccatcttctgatttgtcagatggc

SEQ ID NO: 5791524 - DNA, 25 bp, Homo sapien
catgtttagcatctggaatcttcac

SEQ ID NO: 5791525 - DNA, 25 bp, Homo sapien
gacgagcggctgcggacgccccagc

SEQ ID NO: 5791526 - DNA, 25 bp, Homo sapien
gagtcgcttgtggattctcatctgg

SEQ ID NO: 5791527 - DNA, 25 bp, Homo sapien
agcatttgcaatggtgacttccatc

SEQ ID NO: 5791528 - DNA, 25 bp, Homo sapien
tttgcaatggtgacttccatctcaa

SEQ ID NO: 5791529 - DNA, 25 bp, Homo sapien
ctgcccaacgccagaaacagcatca

SEQ ID NO: 5791530 - DNA, 25 bp, Homo sapien
gcccggggacctcggagcgcggcgg

SEQ ID NO: 5791531 - DNA, 25 bp, Homo sapien
aggcagttcgaccgcccacgggctg

SEQ ID NO: 5791532 - DNA, 25 bp, Homo sapien
aactgtacatgtatgttcttatggg

SEQ ID NO: 5791533 - DNA, 25 bp, Homo sapien
ttcaaattatttttaacaatcagtc

SEQ ID NO: 5791534 - DNA, 25 bp, Homo sapien
tctttgtcataacccattagatgga

SEQ ID NO: 5791535 - DNA, 25 bp, Homo sapien
agttgacttaagcatttgcaatggt

SEQ ID NO: 5791536 - DNA, 25 bp, Homo sapien
atccttcccaataaacagggatctg

SEQ ID NO: 5791537 - DNA, 25 bp, Homo sapien
cacatcattctggtgaaacactgta

SEQ ID NO: 5791538 - DNA, 25 bp, Homo sapien
ataaattagccttccatcttctgat

SEQ ID NO: 5791539 - DNA, 25 bp, Homo sapien
acttaccatttcccgtatagctaac

SEQ ID NO: 5791540 - DNA, 25 bp, Homo sapien
gtaaaaatgtatggcagaaatgtaa

SEQ ID NO: 5791541 - DNA, 25 bp, Homo sapien
tctgaggactgcgcaagtcaatgag

SEQ ID NO: 5791542 - DNA, 25 bp, Homo sapien
aatcatgccaggggttaggcaaaaa

SEQ ID NO: 5791543 - DNA, 25 bp, Homo sapien
cacaatgcagtcctccttccgcaga

SEQ ID NO: 5791544 - DNA, 25 bp, Homo sapien
atggcagaaatgtaaggccaatcag

SEQ ID NO: 5791545 - DNA, 25 bp, Homo sapien
gctcgggccatattgccagtataaa

SEQ ID NO: 5791546 - DNA, 25 bp, Homo sapien
attctggtgaaacactgtactcgtt

SEQ ID NO: 5791547 - DNA, 25 bp, Homo sapien
ccttatccagggattttacgttgca

SEQ ID NO: 5791548 - DNA, 25 bp, Homo sapien
ttctgaaccaaagaagacttaaaac

SEQ ID NO: 5791549 - DNA, 25 bp, Homo sapien
tttcacaccaaacactgctcgggcc

SEQ ID NO: 5791550 - DNA, 25 bp, Homo sapien
tgactccacgggtgtttttctggta

SEQ ID NO: 5791551 - DNA, 25 bp, Homo sapien
gctgctggaggacgcccgggagaca

SEQ ID NO: 5791552 - DNA, 25 bp, Homo sapien
tcttcacatcattctggtgaaacac

SEQ ID NO: 5791553 - DNA, 25 bp, Homo sapien
ttccatctcaactcctggctcaata

SEQ ID NO: 5791554 - DNA, 25 bp, Homo sapien
gaataagagaaacatttcacaccaa

SEQ ID NO: 5791555 - DNA, 25 bp, Homo sapien
ccttttgtaataaagtgaagcagca

SEQ ID NO: 5791556 - DNA, 25 bp, Homo sapien
ttcccaataaacagggatctgcgct

SEQ ID NO: 5791557 - DNA, 25 bp, Homo sapien
tcttatgggcaatcatgccaggggt

SEQ ID NO: 5791558 - DNA, 25 bp, Homo sapien
caactcctggctcaatactgatgga

SEQ ID NO: 5791559 - DNA, 25 bp, Homo sapien
cacagtaacacagaactcttatact

SEQ ID NO: 5791560 - DNA, 25 bp, Homo sapien
gtaatggctttataagtgtctgttg

SEQ ID NO: 5791561 - DNA, 25 bp, Homo sapien
cccatagggtgccaccaagggagga

SEQ ID NO: 5791562 - DNA, 25 bp, Homo sapien
ctggattaactaacagtgattttgt

SEQ ID NO: 5791563 - DNA, 25 bp, Homo sapien
taactatctgaggactgcgcaagtc

SEQ ID NO: 5791564 - DNA, 25 bp, Homo sapien
attctctggaaattaaaagctttga

SEQ ID NO: 5791565 - DNA, 25 bp, Homo sapien
cccacgggctgcccaacgccagaaa

SEQ ID NO: 5791566 - DNA, 25 bp, Homo sapien
attatttttaacaatcagtcactaa

SEQ ID NO: 5791567 - DNA, 25 bp, Homo sapien
ctcaggcaacagcaaagagcagtga

SEQ ID NO: 5791568 - DNA, 25 bp, Homo sapien
tttataagtgtctgttgtggcctca

SEQ ID NO: 5791569 - DNA, 25 bp, Homo sapien
aaaacctgtgttctgaaccaaagaa

SEQ ID NO: 5791570 - DNA, 25 bp, Homo sapien
catcttctgatttgtcagatggcgt

SEQ ID NO: 5791571 - DNA, 25 bp, Homo sapien
atctcaactcctggctcaatactga

SEQ ID NO: 5791572 - DNA, 25 bp, Homo sapien
acagttgacttaagcatttgcaatg

SEQ ID NO: 5791573 - DNA, 25 bp, Homo sapien
gggtgccaccaagggaggagtgcac

SEQ ID NO: 5791574 - DNA, 25 bp, Homo sapien
aacacagaactcttatactagcatg

SEQ ID NO: 5791575 - DNA, 25 bp, Homo sapien
tcaaactggtcctttcactgattct

SEQ ID NO: 5791576 - DNA, 25 bp, Homo sapien
cacttagaaaaatccatacacaaag

SEQ ID NO: 5791577 - DNA, 25 bp, Homo sapien
cctcagatcaagtcagcacacacct

SEQ ID NO: 5791578 - DNA, 25 bp, Homo sapien
tagagtcaaccacagtaacacagaa

SEQ ID NO: 5791579 - DNA, 25 bp, Homo sapien
tggtaggcattcaaactggtccttt

SEQ ID NO: 5791580 - DNA, 25 bp, Homo sapien
gcaggtggaccacagctccgcacca

SEQ ID NO: 5791581 - DNA, 25 bp, Homo sapien
caccttatccagggattttacgttg

SEQ ID NO: 5791582 - DNA, 25 bp, Homo sapien
tactgaagacaacactacttaccat

SEQ ID NO: 5791583 - DNA, 25 bp, Homo sapien
ccgaaggcccgctgctggaggacgc

SEQ ID NO: 5791584 - DNA, 25 bp, Homo sapien
tagccttccatcttctgatttgtca

SEQ ID NO: 5791585 - DNA, 25 bp, Homo sapien
ctcatctggaaacgatcccatgcct

SEQ ID NO: 5791586 - DNA, 25 bp, Homo sapien
taaatcacatttgagcacgaacact

SEQ ID NO: 5791587 - DNA, 25 bp, Homo sapien
gtcatctttatgccgtttctcttca

SEQ ID NO: 5791588 - DNA, 25 bp, Homo sapien
taaatacatgtttagcatctggaat

SEQ ID NO: 5791589 - DNA, 25 bp, Homo sapien
cgccagaaacagcatcacgcgggtg

SEQ ID NO: 5791590 - DNA, 25 bp, Homo sapien
gatcaccgtaaagcttcccatgatg

SEQ ID NO: 5791591 - DNA, 25 bp, Homo sapien
tttatgccgtttctcttcactggtt

SEQ ID NO: 5791592 - DNA, 25 bp, Homo sapien
tttagagtcaaccacagtaacacag

SEQ ID NO: 5791593 - DNA, 25 bp, Homo sapien
catctggaaacgatcccatgcctta

SEQ ID NO: 5791594 - DNA, 25 bp, Homo sapien
tttaagaatcgaacatatccttccc

SEQ ID NO: 5791595 - DNA, 25 bp, Homo sapien
caaaaacctgtgttctgaaccaaag

SEQ ID NO: 5791596 - DNA, 25 bp, Homo sapien
atggcgtatttaagaatcgaacata

SEQ ID NO: 5791597 - DNA, 25 bp, Homo sapien
agggatctgcgctcgacccggacgc

SEQ ID NO: 5791598 - DNA, 25 bp, Homo sapien
agtgatatgaattcggtgaattgcc

SEQ ID NO: 5791599 - DNA, 25 bp, Homo sapien
ccgtactccagccggctaccggccc

SEQ ID NO: 5791600 - DNA, 25 bp, Homo sapien
caccacctatgactgtgtcttcctc

SEQ ID NO: 5791601 - DNA, 25 bp, Homo sapien
ctgcacgagtccacgactgcgagac

SEQ ID NO: 5791602 - DNA, 25 bp, Homo sapien
caaacactgctcgggccatattgcc

SEQ ID NO: 5791603 - DNA, 25 bp, Homo sapien
cacactttcagaaatagcattattt

SEQ ID NO: 5791604 - DNA, 25 bp, Homo sapien
ggaccacagctccgcaccacctatg

SEQ ID NO: 5791605 - DNA, 25 bp, Homo sapien
ctaaccaccagttcaactgtacatg

SEQ ID NO: 5791606 - DNA, 25 bp, Homo sapien
aacatcattctctggaaattaaaag

SEQ ID NO: 5791607 - DNA, 25 bp, Homo sapien
tacacttagaaaaatccatacacaa

SEQ ID NO: 5791608 - DNA, 25 bp, Homo sapien
gaaacactgtactcgtttctgcaag

SEQ ID NO: 5791609 - DNA, 25 bp, Homo sapien
ttctcatctggaaacgatcccatgc

SEQ ID NO: 5791610 - DNA, 25 bp, Homo sapien
gatactacattttggttttcaaaca

SEQ ID NO: 5791611 - DNA, 25 bp, Homo sapien
gtttctgcaagcatagcattgtagg

SEQ ID NO: 5791612 - DNA, 25 bp, Homo sapien
ttagatggatatagtcttcacggtt

SEQ ID NO: 5791613 - DNA, 25 bp, Homo sapien
tcatggtacaatcgaatgacatagc

SEQ ID NO: 5791614 - DNA, 25 bp, Homo sapien
aaacagcatcacgcgggtgacgagc

SEQ ID NO: 5791615 - DNA, 25 bp, Homo sapien
ttttagcataaaatgtggtaaatac

SEQ ID NO: 5791616 - DNA, 25 bp, Homo sapien
aaaactgctcccataatttgtgaat

SEQ ID NO: 5791617 - DNA, 25 bp, Homo sapien
accaaagaagacttaaaactgctcc

SEQ ID NO: 5791618 - DNA, 25 bp, Homo sapien
ccatttgctactgacatcagatccc

SEQ ID NO: 5791619 - DNA, 25 bp, Homo sapien
tacacaaagaataaagcaactctcc

SEQ ID NO: 5791620 - DNA, 25 bp, Homo sapien
tagaaaaatccatacacaaagaata

SEQ ID NO: 5791621 - DNA, 25 bp, Homo sapien
tcggaaaatatttatacacttagaa

SEQ ID NO: 5791622 - DNA, 25 bp, Homo sapien
gaaaaatccatacacaaagaataaa

SEQ ID NO: 5791623 - DNA, 25 bp, Homo sapien
taaaatgtggtaaatacatgtttag

SEQ ID NO: 5791624 - DNA, 25 bp, Homo sapien
gcgcaagtcaatgagtcgcttgtgg

SEQ ID NO: 5791625 - DNA, 25 bp, Homo sapien
cagaaacaaattaagatactgaaga

SEQ ID NO: 5791626 - DNA, 25 bp, Homo sapien
atggaagtaatctgcttaactatct

SEQ ID NO: 5791627 - DNA, 25 bp, Homo sapien
ctttcagaaatagcattattttgtg

SEQ ID NO: 5791628 - DNA, 25 bp, Homo sapien
agcggctgcggacgccccagctgca

SEQ ID NO: 5791629 - DNA, 25 bp, Homo sapien
tgaggactgcgcaagtcaatgagtc

SEQ ID NO: 5791630 - DNA, 25 bp, Homo sapien
ttctgcaagcatagcattgtaggta

SEQ ID NO: 5791631 - DNA, 25 bp, Homo sapien
cctttcactgattcttttcctttgc

SEQ ID NO: 5791632 - DNA, 25 bp, Homo sapien
aggagcaggtggaccacagctccgc

SEQ ID NO: 5791633 - DNA, 25 bp, Homo sapien
gggtgacgagcggctgcggacgccc

SEQ ID NO: 5791634 - DNA, 25 bp, Homo sapien
aactcgttagagtgatatgaattcg

SEQ ID NO: 5791635 - DNA, 25 bp, Homo sapien
cggctgcggacgccccagctgcacg

SEQ ID NO: 5791636 - DNA, 25 bp, Homo sapien
agaggcccggggacctcggagcgcg

SEQ ID NO: 5791637 - DNA, 25 bp, Homo sapien
tggtttcttccatatacaaaataaa

SEQ ID NO: 5791638 - DNA, 25 bp, Homo sapien
gtaggcattcaaactggtcctttca

SEQ ID NO: 5791639 - DNA, 25 bp, Homo sapien
agtttagagtcaaccacagtaacac

SEQ ID NO: 5791640 - DNA, 25 bp, Homo sapien
aatgacatagccttttgtaataaag

SEQ ID NO: 5791641 - DNA, 25 bp, Homo sapien
cttaactatctgaggactgcgcaag

SEQ ID NO: 5791642 - DNA, 25 bp, Homo sapien
tttaacaactggtaatcaatttatg

SEQ ID NO: 5791643 - DNA, 25 bp, Homo sapien
ttctcttcactggtttcttccatat

SEQ ID NO: 5791644 - DNA, 25 bp, Homo sapien
catttcccgtatagctaaccaccag

SEQ ID NO: 5791645 - DNA, 25 bp, Homo sapien
tcttcacggtttggaaagagcactg

SEQ ID NO: 5791646 - DNA, 25 bp, Homo sapien
ctcggagcgcggcggccgcacacaa

SEQ ID NO: 5791647 - DNA, 25 bp, Homo sapien
ataaacagggatctgcgctcgaccc

SEQ ID NO: 5791648 - DNA, 25 bp, Homo sapien
ttcacatacctttctaaaacacgaa

SEQ ID NO: 5791649 - DNA, 25 bp, Homo sapien
gtataaattagccttccatcttctg

SEQ ID NO: 5791650 - DNA, 25 bp, Homo sapien
taataacagtggttttcctacaccc

SEQ ID NO: 5791651 - DNA, 25 bp, Homo sapien
cctttctaaaacacgaatggtagat

SEQ ID NO: 5791652 - DNA, 25 bp, Homo sapien
tactacattttggttttcaaacata

SEQ ID NO: 5791653 - DNA, 25 bp, Homo sapien
accacagctccgcaccacctatgac

SEQ ID NO: 5791654 - DNA, 25 bp, Homo sapien
ggtatgtttaaaagccatggctgct

SEQ ID NO: 5791655 - DNA, 25 bp, Homo sapien
aagatactgaagacaacactactta

SEQ ID NO: 5791656 - DNA, 25 bp, Homo sapien
gaattcggtgaattgccacctctga

SEQ ID NO: 5791657 - DNA, 25 bp, Homo sapien
aacatttcacaccaaacactgctcg

SEQ ID NO: 5791658 - DNA, 25 bp, Homo sapien
aagtaatctgcttaactatctgagg

SEQ ID NO: 5791659 - DNA, 25 bp, Homo sapien
accacagtaacacagaactcttata

SEQ ID NO: 5791660 - DNA, 25 bp, Homo sapien
tgtttaaaagccatggctgctgcaa

SEQ ID NO: 5791661 - DNA, 25 bp, Homo sapien
ccgctgctggaggacgcccgggaga

SEQ ID NO: 5791662 - DNA, 25 bp, Homo sapien
ggaatgcaaaaggcaattttattat

SEQ ID NO: 5791663 - DNA, 25 bp, Homo sapien
aacgtaaatcacatttgagcacgaa

SEQ ID NO: 5791664 - DNA, 25 bp, Homo sapien
gccaccaagggaggagtgcacagtt

SEQ ID NO: 5791665 - DNA, 25 bp, Homo sapien
cgtatttaagaatcgaacatatcct

SEQ ID NO: 5791666 - DNA, 25 bp, Homo sapien
atggtagatactacattttggtttt

SEQ ID NO: 5791667 - DNA, 25 bp, Homo sapien
atcaatttatgaaaacagttgactt

SEQ ID NO: 5791668 - DNA, 25 bp, Homo sapien
ggaatcttcacatcattctggtgaa

SEQ ID NO: 5791669 - DNA, 25 bp, Homo sapien
tcttttaatgtcggaaaatatttat

SEQ ID NO: 5791670 - DNA, 25 bp, Homo sapien
actccacgggtgtttttctggtatg

SEQ ID NO: 5791671 - DNA, 25 bp, Homo sapien
cttcctcaaagagaaaatgtctttt

SEQ ID NO: 5791672 - DNA, 25 bp, Homo sapien
attcttttcctttgctcctcagatc

SEQ ID NO: 5791673 - DNA, 25 bp, Homo sapien
atactgatggaagtaatctgcttaa

SEQ ID NO: 5791674 - DNA, 25 bp, Homo sapien
tgcttaactatctgaggactgcgca

SEQ ID NO: 5791675 - DNA, 25 bp, Homo sapien
gcagtgagtcaggagcaggagcagg

SEQ ID NO: 5791676 - DNA, 25 bp, Homo sapien
atcaagtcagcacacaccttatcca

SEQ ID NO: 5791677 - DNA, 25 bp, Homo sapien
tcctcaaagagaaaatgtcttttaa

SEQ ID NO: 5791678 - DNA, 25 bp, Homo sapien
cacgggtgtttttctggtatgttta

SEQ ID NO: 5791679 - DNA, 25 bp, Homo sapien
tatacacttagaaaaatccatacac

SEQ ID NO: 5791680 - DNA, 25 bp, Homo sapien
tccatatacaaaataaattcttctt

SEQ ID NO: 5791681 - DNA, 25 bp, Homo sapien
ccgtatagctaaccaccagttcaac

SEQ ID NO: 5791682 - DNA, 25 bp, Homo sapien
aacaaacatcattctctggaaatta

SEQ ID NO: 5791683 - DNA, 25 bp, Homo sapien
ttgtggcctcatggtacaatcgaat

SEQ ID NO: 5791684 - DNA, 25 bp, Homo sapien
ttgctactgacatcagatccccagt

SEQ ID NO: 5791685 - DNA, 25 bp, Homo sapien
gtaatctgcttaactatctgaggac

SEQ ID NO: 5791686 - DNA, 25 bp, Homo sapien
atccccagtttagagtcaaccacag

SEQ ID NO: 5791687 - DNA, 25 bp, Homo sapien
caatgagtcgcttgtggattctcat

SEQ ID NO: 5791688 - DNA, 25 bp, Homo sapien
atggatatagtcttcacggtttgga

SEQ ID NO: 5791689 - DNA, 25 bp, Homo sapien
gctttataagtgtctgttgtggcct

SEQ ID NO: 5791690 - DNA, 25 bp, Homo sapien
attattatacattaaaacgtaaatc

SEQ ID NO: 5791691 - DNA, 25 bp, Homo sapien
cgcacacaatgcagtcctccttccg

SEQ ID NO: 5791692 - DNA, 25 bp, Homo sapien
cagactcgtagaataagagaaacat

SEQ ID NO: 5791693 - DNA, 25 bp, Homo sapien
aaaggcaattttattattatacatt

SEQ ID NO: 5791694 - DNA, 25 bp, Homo sapien
gactgcgagacacggcttcccaccc

SEQ ID NO: 5791695 - DNA, 25 bp, Homo sapien
tataaacaaacatcattctctggaa

SEQ ID NO: 5791696 - DNA, 25 bp, Homo sapien
gcatgaacatatttattcacatacc

SEQ ID NO: 5791697 - DNA, 25 bp, Homo sapien
agtcactaacggaatgcaaaaggca

SEQ ID NO: 5791698 - DNA, 25 bp, Homo sapien
atatgaattcggtgaattgccacct

SEQ ID NO: 5791699 - DNA, 25 bp, Homo sapien
gcatagcattgtaggtaatggcttt

SEQ ID NO: 5791700 - DNA, 25 bp, Homo sapien
gatttgtcagatggcgtatttaaga

SEQ ID NO: 5791701 - DNA, 25 bp, Homo sapien
tggtcctttcactgattcttttcct

SEQ ID NO: 5791702 - DNA, 25 bp, Homo sapien
gcttcctagccagcttcctgacaga

SEQ ID NO: 5791703 - DNA, 25 bp, Homo sapien
agtcagcacacaccttatccaggga

SEQ ID NO: 5791704 - DNA, 25 bp, Homo sapien
gcaagtcaatgagtcgcttgtggat

SEQ ID NO: 5791705 - DNA, 25 bp, Homo sapien
tgcaatggtgacttccatctcaact

SEQ ID NO: 5791706 - DNA, 25 bp, Homo sapien
tttgtcagatggcgtatttaagaat

SEQ ID NO: 5791707 - DNA, 25 bp, Homo sapien
tgctggaggacgcccgggagacaga

SEQ ID NO: 5791708 - DNA, 25 bp, Homo sapien
ttcttccatatacaaaataaattct

SEQ ID NO: 5791709 - DNA, 25 bp, Homo sapien
tccagccggctaccggccccgaagg

SEQ ID NO: 5791710 - DNA, 25 bp, Homo sapien
taactaacagtgattttgttttagc

SEQ ID NO: 5791711 - DNA, 25 bp, Homo sapien
cggctcccgaaggccccgtactcca

SEQ ID NO: 5791712 - DNA, 25 bp, Homo sapien
gaacactaacaaataggctcatttg

SEQ ID NO: 5791713 - DNA, 25 bp, Homo sapien
gtttttctggtatgtttaaaagcca

SEQ ID NO: 5791714 - DNA, 25 bp, Homo sapien
tacgttgcaactcgttagagtgata

SEQ ID NO: 5791715 - DNA, 25 bp, Homo sapien
ataacccattagatggatatagtct

SEQ ID NO: 5791716 - DNA, 25 bp, Homo sapien
atgaaaacagttgacttaagcattt

SEQ ID NO: 5791717 - DNA, 25 bp, Homo sapien
acatttgagcacgaacactaacaaa

SEQ ID NO: 5791718 - DNA, 25 bp, Homo sapien
ttgtcatctttatgccgtttctctt

SEQ ID NO: 5791719 - DNA, 25 bp, Homo sapien
gattctcaaagtcttggtaggcatt

SEQ ID NO: 5791720 - DNA, 25 bp, Homo sapien
ctacattttggttttcaaacatagc

SEQ ID NO: 5791721 - DNA, 25 bp, Homo sapien
cctgtgttctgaaccaaagaagact

SEQ ID NO: 5791722 - DNA, 25 bp, Homo sapien
tatttttaacaatcagtcactaacg

SEQ ID NO: 5791723 - DNA, 25 bp, Homo sapien
gcaatcatgccaggggttaggcaaa

SEQ ID NO: 5791724 - DNA, 25 bp, Homo sapien
aaactggtcctttcactgattcttt

SEQ ID NO: 5791725 - DNA, 25 bp, Homo sapien
aacactgtactcgtttctgcaagca

SEQ ID NO: 5791726 - DNA, 25 bp, Homo sapien
agtgcacagttgcagaaacaaatta

SEQ ID NO: 5791727 - DNA, 25 bp, Homo sapien
tgttttagcataaaatgtggtaaat

SEQ ID NO: 5791728 - DNA, 25 bp, Homo sapien
gaatggtagatactacattttggtt

SEQ ID NO: 5791729 - DNA, 25 bp, Homo sapien
cgtaaagcttcccatgatgccatag

SEQ ID NO: 5791730 - DNA, 25 bp, Homo sapien
cctgacagacttggtcctcaggcaa

SEQ ID NO: 5791731 - DNA, 25 bp, Homo sapien
gcagttcgaccgcccacgggctgcc

SEQ ID NO: 5791732 - DNA, 25 bp, Homo sapien
tggggtgatcaccgtaaagcttccc

SEQ ID NO: 5791733 - DNA, 25 bp, Homo sapien
ccatctcaactcctggctcaatact

SEQ ID NO: 5791734 - DNA, 25 bp, Homo sapien
aaataggctcatttgtcatctttat

SEQ ID NO: 5791735 - DNA, 25 bp, Homo sapien
ggagaaggcgcgcggctcccgaagg

SEQ ID NO: 5791736 - DNA, 25 bp, Homo sapien
ttagagtgatatgaattcggtgaat

SEQ ID NO: 5791737 - DNA, 25 bp, Homo sapien
atagcattgtaggtaatggctttat

SEQ ID NO: 5791738 - DNA, 25 bp, Homo sapien
tatacattaaaacgtaaatcacatt

SEQ ID NO: 5791739 - DNA, 25 bp, Homo sapien
catcattctctggaaattaaaagct

SEQ ID NO: 5791740 - DNA, 25 bp, Homo sapien
tatttatacacttagaaaaatccat

SEQ ID NO: 5791741 - DNA, 25 bp, Homo sapien
ccacctatgactgtgtcttcctcaa

SEQ ID NO: 5791742 - DNA, 25 bp, Homo sapien
ttgagcacgaacactaacaaatagg

SEQ ID NO: 5791743 - DNA, 25 bp, Homo sapien
gacgccccagctgcacgagtccacg

SEQ ID NO: 5791744 - DNA, 25 bp, Homo sapien
tggtgaaacactgtactcgtttctg

SEQ ID NO: 5791745 - DNA, 25 bp, Homo sapien
tgattttgttttagcataaaatgtg

SEQ ID NO: 5791746 - DNA, 25 bp, Homo sapien
acttaaaactgctcccataatttgt

SEQ ID NO: 5791747 - DNA, 25 bp, Homo sapien
actcgtttctgcaagcatagcattg

SEQ ID NO: 5791748 - DNA, 25 bp, Homo sapien
agtcctccttccgcagagaggcagt

SEQ ID NO: 5791749 - DNA, 25 bp, Homo sapien
ccacgactgcgagacacggcttccc

SEQ ID NO: 5791750 - DNA, 25 bp, Homo sapien
ccccagtttagagtcaaccacagta

SEQ ID NO: 5791751 - DNA, 25 bp, Homo sapien
ttggtcctcaggcaacagcaaagag

SEQ ID NO: 5791752 - DNA, 25 bp, Homo sapien
cctctgactccacgggtgtttttct

SEQ ID NO: 5791753 - DNA, 25 bp, Homo sapien
tagcatctggaatcttcacatcatt

SEQ ID NO: 5791754 - DNA, 25 bp, Homo sapien
ttatccagggattttacgttgcaac

SEQ ID NO: 5791755 - DNA, 25 bp, Homo sapien
agatccccagtttagagtcaaccac

SEQ ID NO: 5791756 - DNA, 25 bp, Homo sapien
agatcaagtcagcacacaccttatc

SEQ ID NO: 5791757 - DNA, 25 bp, Homo sapien
cgttgcaactcgttagagtgatatg

SEQ ID NO: 5791758 - DNA, 25 bp, Homo sapien
gacgcccgggagacagaggcccggg

SEQ ID NO: 5791759 - DNA, 25 bp, Homo sapien
actgattcttttcctttgctcctca

SEQ ID NO: 5791760 - DNA, 25 bp, Homo sapien
aagtcttggtaggcattcaaactgg

SEQ ID NO: 5791761 - DNA, 25 bp, Homo sapien
aattcttctttgtcataacccatta

SEQ ID NO: 5791762 - DNA, 25 bp, Homo sapien
cacaaagaataaagcaactctccca

SEQ ID NO: 5791763 - DNA, 25 bp, Homo sapien
agtgattttgttttagcataaaatg

SEQ ID NO: 5791764 - DNA, 25 bp, Homo sapien
tcacaccaaacactgctcgggccat

SEQ ID NO: 5791765 - DNA, 25 bp, Homo sapien
gctactgacatcagatccccagttt

SEQ ID NO: 5791766 - DNA, 25 bp, Homo sapien
agcactggattaactaacagtgatt

SEQ ID NO: 5791767 - DNA, 25 bp, Homo sapien
actctcccatttgctactgacatca

SEQ ID NO: 5791768 - DNA, 25 bp, Homo sapien
agcattgtaggtaatggctttataa

SEQ ID NO: 5791769 - DNA, 25 bp, Homo sapien
cagttcaactgtacatgtatgttct

SEQ ID NO: 5791770 - DNA, 25 bp, Homo sapien
cactacttaccatttcccgtatagc

SEQ ID NO: 5791771 - DNA, 25 bp, Homo sapien
attcaaactggtcctttcactgatt

SEQ ID NO: 5791772 - DNA, 25 bp, Homo sapien
gaaaacagttgacttaagcatttgc

SEQ ID NO: 5791773 - DNA, 25 bp, Homo sapien
tggaaacgatcccatgccttagaac

SEQ ID NO: 5791774 - DNA, 25 bp, Homo sapien
ctatgactgtgtcttcctcaaagag

SEQ ID NO: 5791775 - DNA, 25 bp, Homo sapien
cgttagagtgatatgaattcggtga

SEQ ID NO: 5791776 - DNA, 25 bp, Homo sapien
tagaataagagaaacatttcacacc

SEQ ID NO: 5791777 - DNA, 25 bp, Homo sapien
cacagctccgcaccacctatgactg

SEQ ID NO: 5791778 - DNA, 25 bp, Homo sapien
atgggcaatcatgccaggggttagg

SEQ ID NO: 5791779 - DNA, 25 bp, Homo sapien
tacaatcgaatgacatagccttttg

SEQ ID NO: 5791780 - DNA, 25 bp, Homo sapien
gtcaatgagtcgcttgtggattctc

SEQ ID NO: 5791781 - DNA, 25 bp, Homo sapien
ctgctcccataatttgtgaatttct

SEQ ID NO: 5791782 - DNA, 25 bp, Homo sapien
aggagcaggagcaggtggaccacag

SEQ ID NO: 5791783 - DNA, 25 bp, Homo sapien
tttgaataggcagaggcacactttc

SEQ ID NO: 5791784 - DNA, 25 bp, Homo sapien
gcacgagtccacgactgcgagacac

SEQ ID NO: 5791785 - DNA, 25 bp, Homo sapien
ctcaactcctggctcaatactgatg

SEQ ID NO: 5791786 - DNA, 25 bp, Homo sapien
gagtccacgactgcgagacacggct

SEQ ID NO: 5791787 - DNA, 25 bp, Homo sapien
aggacgcccgggagacagaggcccg

SEQ ID NO: 5791788 - DNA, 25 bp, Homo sapien
attttacgttgcaactcgttagagt

SEQ ID NO: 5791789 - DNA, 25 bp, Homo sapien
cacccatagggtgccaccaagggag

SEQ ID NO: 5791790 - DNA, 25 bp, Homo sapien
tccgcaccacctatgactgtgtctt

SEQ ID NO: 5791791 - DNA, 25 bp, Homo sapien
gaggcacactttcagaaatagcatt

SEQ ID NO: 5791792 - DNA, 25 bp, Homo sapien
gacatcagatccccagtttagagtc

SEQ ID NO: 5791793 - DNA, 25 bp, Homo sapien
aacgccagaaacagcatcacgcggg

SEQ ID NO: 5791794 - DNA, 25 bp, Homo sapien
tgtggattctcatctggaaacgatc

SEQ ID NO: 5791795 - DNA, 25 bp, Homo sapien
tatttaagaatcgaacatatccttc

SEQ ID NO: 5791796 - DNA, 25 bp, Homo sapien
aataaagtgaagcagcactggggtg

SEQ ID NO: 5791797 - DNA, 25 bp, Homo sapien
ggcaaaaacctgtgttctgaaccaa

SEQ ID NO: 5791798 - DNA, 25 bp, Homo sapien
tcctggctcaatactgatggaagta

SEQ ID NO: 5791799 - DNA, 25 bp, Homo sapien
ttaaaactgctcccataatttgtga

SEQ ID NO: 5791800 - DNA, 25 bp, Homo sapien
ggcagaaatgtaaggccaatcagac

SEQ ID NO: 5791801 - DNA, 25 bp, Homo sapien
aaggccccgtactccagccggctac

SEQ ID NO: 5791802 - DNA, 25 bp, Homo sapien
gaaatagcattattttgtgtaaaaa

SEQ ID NO: 5791803 - DNA, 25 bp, Homo sapien
gtgatcaccgtaaagcttcccatga

SEQ ID NO: 5791804 - DNA, 25 bp, Homo sapien
ccagggattttacgttgcaactcgt

SEQ ID NO: 5791805 - DNA, 25 bp, Homo sapien
gtaacacagaactcttatactagca

SEQ ID NO: 5791806 - DNA, 25 bp, Homo sapien
acgcgggtgacgagcggctgcggac

SEQ ID NO: 5791807 - DNA, 25 bp, Homo sapien
ccttccgcagagaggcagttcgacc

SEQ ID NO: 5791808 - DNA, 25 bp, Homo sapien
cggagcgcggcggccgcacacaatg

SEQ ID NO: 5791809 - DNA, 25 bp, Homo sapien
actagcatgaacatatttattcaca

SEQ ID NO: 5791810 - DNA, 25 bp, Homo sapien
ggaagtaatctgcttaactatctga

SEQ ID NO: 5791811 - DNA, 25 bp, Homo sapien
gccgcacacaatgcagtcctccttc

SEQ ID NO: 5791812 - DNA, 25 bp, Homo sapien
cggtttggaaagagcactggattaa

SEQ ID NO: 5791813 - DNA, 25 bp, Homo sapien
gtatagctaaccaccagttcaactg

SEQ ID NO: 5791814 - DNA, 25 bp, Homo sapien
ctgtactcgtttctgcaagcatagc

SEQ ID NO: 5791815 - DNA, 25 bp, Homo sapien
gagaaaatgtcttttaatgtcggaa

SEQ ID NO: 5791816 - DNA, 25 bp, Homo sapien
gagaaacatttcacaccaaacactg

SEQ ID NO: 5791817 - DNA, 25 bp, Homo sapien
tacacccatagggtgccaccaaggg

SEQ ID NO: 5791818 - DNA, 25 bp, Homo sapien
gaacatatccttcccaataaacagg

SEQ ID NO: 5791819 - DNA, 25 bp, Homo sapien
tcatgccaggggttaggcaaaaacc

SEQ ID NO: 5791820 - DNA, 25 bp, Homo sapien
cttggtaggcattcaaactggtcct

SEQ ID NO: 5791821 - DNA, 25 bp, Homo sapien
tagaatatgatttgaataggcagag

SEQ ID NO: 5791822 - DNA, 25 bp, Homo sapien
agagaggcagttcgaccgcccacgg

SEQ ID NO: 5791823 - DNA, 25 bp, Homo sapien
tgcaaggcttcctagccagcttcct

SEQ ID NO: 5791824 - DNA, 25 bp, Homo sapien
aatctgcttaactatctgaggactg

SEQ ID NO: 5791825 - DNA, 25 bp, Homo sapien
gtgaagcagcactggggtgatcacc

SEQ ID NO: 5791826 - DNA, 25 bp, Homo sapien
cgatcccatgccttagaaccttcac

SEQ ID NO: 5791827 - DNA, 25 bp, Homo sapien
atagctaaccaccagttcaactgta

SEQ ID NO: 5791828 - DNA, 25 bp, Homo sapien
cacggtttggaaagagcactggatt

SEQ ID NO: 5791829 - DNA, 25 bp, Homo sapien
ctgtgtcttcctcaaagagaaaatg

SEQ ID NO: 5791830 - DNA, 25 bp, Homo sapien
gaggagtgcacagttgcagaaacaa

SEQ ID NO: 5791831 - DNA, 25 bp, Homo sapien
cagcttcctgacagacttggtcctc

SEQ ID NO: 5791832 - DNA, 25 bp, Homo sapien
tcactaacggaatgcaaaaggcaat

SEQ ID NO: 5791833 - DNA, 25 bp, Homo sapien
ttttcctttgctcctcagatcaagt

SEQ ID NO: 5791834 - DNA, 25 bp, Homo sapien
agccttttgtaataaagtgaagcag

SEQ ID NO: 5791835 - DNA, 25 bp, Homo sapien
cgcggctcccgaaggccccgtactc

SEQ ID NO: 5791836 - DNA, 25 bp, Homo sapien
aaaatccatacacaaagaataaagc

SEQ ID NO: 5791837 - DNA, 25 bp, Homo sapien
aagagaaacatttcacaccaaacac

SEQ ID NO: 5791838 - DNA, 25 bp, Homo sapien
gaaacgatcccatgccttagaacct

SEQ ID NO: 5791839 - DNA, 25 bp, Homo sapien
ggctgcccaacgccagaaacagcat

SEQ ID NO: 5791840 - DNA, 25 bp, Homo sapien
attaactaacagtgattttgtttta

SEQ ID NO: 5791841 - DNA, 25 bp, Homo sapien
gcagagaggcagttcgaccgcccac

SEQ ID NO: 5791842 - DNA, 25 bp, Homo sapien
tcctccttccgcagagaggcagttc

SEQ ID NO: 5791843 - DNA, 25 bp, Homo sapien
catcattctggtgaaacactgtact

SEQ ID NO: 5791844 - DNA, 25 bp, Homo sapien
actaacggaatgcaaaaggcaattt

SEQ ID NO: 5791845 - DNA, 25 bp, Homo sapien
cattagatggatatagtcttcacgg

SEQ ID NO: 5791846 - DNA, 25 bp, Homo sapien
atagcattattttgtgtaaaaatgt

SEQ ID NO: 5791847 - DNA, 25 bp, Homo sapien
ttttctggtatgtttaaaagccatg

SEQ ID NO: 5791848 - DNA, 25 bp, Homo sapien
cgcccacgggctgcccaacgccaga

SEQ ID NO: 5791849 - DNA, 25 bp, Homo sapien
ccatggctgctgcaaggcttcctag

SEQ ID NO: 5791850 - DNA, 25 bp, Homo sapien
cagtggttttcctacacccataggg

SEQ ID NO: 5791851 - DNA, 25 bp, Homo sapien
cagaaatagcattattttgtgtaaa

SEQ ID NO: 5791852 - DNA, 25 bp, Homo sapien
gggttaggcaaaaacctgtgttctg

SEQ ID NO: 5791853 - DNA, 25 bp, Homo sapien
acagaggcccggggacctcggagcg

SEQ ID NO: 5791854 - DNA, 25 bp, Homo sapien
ccataatttgtgaatttcttgaaat

SEQ ID NO: 5791855 - DNA, 25 bp, Homo sapien
actcctggctcaatactgatggaag

SEQ ID NO: 5791856 - DNA, 25 bp, Homo sapien
acagacttggtcctcaggcaacagc

SEQ ID NO: 5791857 - DNA, 25 bp, Homo sapien
taggcagaggcacactttcagaaat

SEQ ID NO: 5791858 - DNA, 25 bp, Homo sapien
tgccgtttctcttcactggtttctt

SEQ ID NO: 5791859 - DNA, 25 bp, Homo sapien
ctgcgagacacggcttcccacccgc

SEQ ID NO: 5791860 - DNA, 25 bp, Homo sapien
cagaactcttatactagcatgaaca

SEQ ID NO: 5791861 - DNA, 25 bp, Homo sapien
tagcatgaacatatttattcacata

SEQ ID NO: 5791862 - DNA, 25 bp, Homo sapien
actcttatactagcatgaacatatt

SEQ ID NO: 5791863 - DNA, 25 bp, Homo sapien
gcaactcgttagagtgatatgaatt

SEQ ID NO: 5791864 - DNA, 25 bp, Homo sapien
gtgtcttcctcaaagagaaaatgtc

SEQ ID NO: 5791865 - DNA, 25 bp, Homo sapien
ggttttcctacacccatagggtgcc

SEQ ID NO: 5791866 - DNA, 25 bp, Homo sapien
caataaacagggatctgcgctcgac

SEQ ID NO: 5791867 - DNA, 25 bp, Homo sapien
ttttcttgtagtgattctcaaagtc

SEQ ID NO: 5791868 - DNA, 25 bp, Homo sapien
gactgcgcaagtcaatgagtcgctt

SEQ ID NO: 5791869 - DNA, 25 bp, Homo sapien
gctcatttgtcatctttatgccgtt

SEQ ID NO: 5791870 - DNA, 25 bp, Homo sapien
gcaagcatagcattgtaggtaatgg

SEQ ID NO: 5791871 - DNA, 25 bp, Homo sapien
caatgcagtcctccttccgcagaga

SEQ ID NO: 5791872 - DNA, 25 bp, Homo sapien
atgagtcgcttgtggattctcatct

SEQ ID NO: 5791873 - DNA, 25 bp, Homo sapien
tgctcctcagatcaagtcagcacac

SEQ ID NO: 5791874 - DNA, 25 bp, Homo sapien
ggcgcgcggctcccgaaggccccgt

SEQ ID NO: 5791875 - DNA, 25 bp, Homo sapien
ggtaatcaatttatgaaaacagttg

SEQ ID NO: 5791876 - DNA, 25 bp, Homo sapien
agacttggtcctcaggcaacagcaa

SEQ ID NO: 5791877 - DNA, 25 bp, Homo sapien
agaatcgaacatatccttcccaata

SEQ ID NO: 5791878 - DNA, 25 bp, Homo sapien
gtatgttcttatgggcaatcatgcc

SEQ ID NO: 5791879 - DNA, 25 bp, Homo sapien
gttttcaaacatagcttgttttatt

SEQ ID NO: 5791880 - DNA, 25 bp, Homo sapien
atttgtcatctttatgccgtttctc

SEQ ID NO: 5791881 - DNA, 25 bp, Homo sapien
acagggatctgcgctcgacccggac

SEQ ID NO: 5791882 - DNA, 25 bp, Homo sapien
tagatactacattttggttttcaaa

SEQ ID NO: 5791883 - DNA, 25 bp, Homo sapien
gcttcctgacagacttggtcctcag

SEQ ID NO: 5791884 - DNA, 25 bp, Homo sapien
gccagcttcctgacagacttggtcc

SEQ ID NO: 5791885 - DNA, 25 bp, Homo sapien
aaacacgaatggtagatactacatt

SEQ ID NO: 5791886 - DNA, 25 bp, Homo sapien
tcattctggtgaaacactgtactcg

SEQ ID NO: 5791887 - DNA, 25 bp, Homo sapien
gtgtttttctggtatgtttaaaagc

SEQ ID NO: 5791888 - DNA, 25 bp, Homo sapien
ggatatagtcttcacggtttggaaa

SEQ ID NO: 5791889 - DNA, 25 bp, Homo sapien
ttctcaaagtcttggtaggcattca

SEQ ID NO: 5791890 - DNA, 25 bp, Homo sapien
gaaacatttcacaccaaacactgct

SEQ ID NO: 5791891 - DNA, 25 bp, Homo sapien
ccggccccgaaggcccgctgctgga

SEQ ID NO: 5791892 - DNA, 25 bp, Homo sapien
agccatggctgctgcaaggcttcct

SEQ ID NO: 5791893 - DNA, 25 bp, Homo sapien
aacagtggttttcctacacccatag

SEQ ID NO: 5791894 - DNA, 25 bp, Homo sapien
cccatgatgccatagaatatgattt

SEQ ID NO: 5791895 - DNA, 25 bp, Homo sapien
gtttcttccatatacaaaataaatt

SEQ ID NO: 5791896 - DNA, 25 bp, Homo sapien
tgaattgccacctctgactccacgg

SEQ ID NO: 5791897 - DNA, 25 bp, Homo sapien
gatactgaagacaacactacttacc

SEQ ID NO: 5791898 - DNA, 25 bp, Homo sapien
ttatgggcaatcatgccaggggtta

SEQ ID NO: 5791899 - DNA, 25 bp, Homo sapien
actggtcctttcactgattcttttc

SEQ ID NO: 5791900 - DNA, 25 bp, Homo sapien
cacaccttatccagggattttacgt

SEQ ID NO: 5791901 - DNA, 25 bp, Homo sapien
gccaggggttaggcaaaaacctgtg

SEQ ID NO: 5791902 - DNA, 25 bp, Homo sapien
cataaaatgtggtaaatacatgttt

SEQ ID NO: 5791903 - DNA, 25 bp, Homo sapien
cagcactggggtgatcaccgtaaag

SEQ ID NO: 5791904 - DNA, 25 bp, Homo sapien
gcaggagcaggtggaccacagctcc

SEQ ID NO: 5791905 - DNA, 25 bp, Homo sapien
tgattcttttcctttgctcctcaga

SEQ ID NO: 5791906 - DNA, 25 bp, Homo sapien
tttcccgtatagctaaccaccagtt

SEQ ID NO: 5791907 - DNA, 25 bp, Homo sapien
aatcttcacatcattctggtgaaac

SEQ ID NO: 5791908 - DNA, 25 bp, Homo sapien
aatacatgtttagcatctggaatct

SEQ ID NO: 5791909 - DNA, 25 bp, Homo sapien
aggactgcgcaagtcaatgagtcgc

SEQ ID NO: 5791910 - DNA, 25 bp, Homo sapien
tgtgttctgaaccaaagaagactta

SEQ ID NO: 5791911 - DNA, 25 bp, Homo sapien
atgatttgaataggcagaggcacac

SEQ ID NO: 5791912 - DNA, 25 bp, Homo sapien
agtgagtcaggagcaggagcaggtg

SEQ ID NO: 5791913 - DNA, 25 bp, Homo sapien
agcagcactggggtgatcaccgtaa

SEQ ID NO: 5791914 - DNA, 25 bp, Homo sapien
tctctggaaattaaaagctttgata

SEQ ID NO: 5791915 - DNA, 25 bp, Homo sapien
cttccatatacaaaataaattcttc

SEQ ID NO: 5791916 - DNA, 25 bp, Homo sapien
cgtagaataagagaaacatttcaca

SEQ ID NO: 5791917 - DNA, 25 bp, Homo sapien
cagaggcacactttcagaaatagca

SEQ ID NO: 5791918 - DNA, 25 bp, Homo sapien
tggattctcatctggaaacgatccc

SEQ ID NO: 5791919 - DNA, 25 bp, Homo sapien
gttaggcaaaaacctgtgttctgaa

SEQ ID NO: 5791920 - DNA, 25 bp, Homo sapien
ccagaaacagcatcacgcgggtgac

SEQ ID NO: 5791921 - DNA, 25 bp, Homo sapien
aggtaatggctttataagtgtctgt

SEQ ID NO: 5791922 - DNA, 25 bp, Homo sapien
ttcttctttgtcataacccattaga

SEQ ID NO: 5791923 - DNA, 25 bp, Homo sapien
cgccggagaaggcgcgcggctcccg

SEQ ID NO: 5791924 - DNA, 25 bp, Homo sapien
catagggtgccaccaagggaggagt

SEQ ID NO: 5791925 - DNA, 25 bp, Homo sapien
taacaaataggctcatttgtcatct

SEQ ID NO: 5791926 - DNA, 25 bp, Homo sapien
ttcacctgtttaataacagtggttt

SEQ ID NO: 5791927 - DNA, 25 bp, Homo sapien
gtgaaacactgtactcgtttctgca

SEQ ID NO: 5791928 - DNA, 25 bp, Homo sapien
gactgtgtcttcctcaaagagaaaa

SEQ ID NO: 5791929 - DNA, 25 bp, Homo sapien
atagtcttcacggtttggaaagagc

SEQ ID NO: 5791930 - DNA, 25 bp, Homo sapien
gttgcagaaacaaattaagatactg

SEQ ID NO: 5791931 - DNA, 25 bp, Homo sapien
cttgtggattctcatctggaaacga

SEQ ID NO: 5791932 - DNA, 25 bp, Homo sapien
tgagtcaggagcaggagcaggtgga

SEQ ID NO: 5791933 - DNA, 25 bp, Homo sapien
cctcatggtacaatcgaatgacata

SEQ ID NO: 5791934 - DNA, 25 bp, Homo sapien
aagagaaaatgtcttttaatgtcgg

SEQ ID NO: 5791935 - DNA, 25 bp, Homo sapien
acctatgactgtgtcttcctcaaag

SEQ ID NO: 5791936 - DNA, 25 bp, Homo sapien
tagccagcttcctgacagacttggt

SEQ ID NO: 5791937 - DNA, 25 bp, Homo sapien
agctaaccaccagttcaactgtaca

SEQ ID NO: 5791938 - DNA, 25 bp, Homo sapien
attataaacaaacatcattctctgg

SEQ ID NO: 5791939 - DNA, 25 bp, Homo sapien
acagcaaagagcagtgagtcaggag

SEQ ID NO: 5791940 - DNA, 25 bp, Homo sapien
tgcagaaacaaattaagatactgaa

SEQ ID NO: 5791941 - DNA, 25 bp, Homo sapien
gtcctttcactgattcttttccttt

SEQ ID NO: 5791942 - DNA, 25 bp, Homo sapien
cccatgccttagaaccttcaccgta

SEQ ID NO: 5791943 - DNA, 25 bp, Homo sapien
tgatggaagtaatctgcttaactat

SEQ ID NO: 5791944 - DNA, 25 bp, Homo sapien
gcttcccatgatgccatagaatatg

SEQ ID NO: 5791945 - DNA, 25 bp, Homo sapien
tccacgggtgtttttctggtatgtt

SEQ ID NO: 5791946 - DNA, 25 bp, Homo sapien
gtttttcttgtagtgattctcaaag

SEQ ID NO: 5791947 - DNA, 25 bp, Homo sapien
tgtctgttgtggcctcatggtacaa

SEQ ID NO: 5791948 - DNA, 25 bp, Homo sapien
gccatattgccagtataaattagcc

SEQ ID NO: 5791949 - DNA, 25 bp, Homo sapien
ggcgtatttaagaatcgaacatatc

SEQ ID NO: 5791950 - DNA, 25 bp, Homo sapien
ttcgaccgcccacgggctgcccaac

SEQ ID NO: 5791951 - DNA, 25 bp, Homo sapien
ggagtgcacagttgcagaaacaaat

SEQ ID NO: 5791952 - DNA, 25 bp, Homo sapien
gtggttttcctacacccatagggtg

SEQ ID NO: 5791953 - DNA, 25 bp, Homo sapien
ccaagggaggagtgcacagttgcag

SEQ ID NO: 5791954 - DNA, 25 bp, Homo sapien
taaagcttcccatgatgccatagaa

SEQ ID NO: 5791955 - DNA, 25 bp, Homo sapien
atttatgaaaacagttgacttaagc

SEQ ID NO: 5791956 - DNA, 25 bp, Homo sapien
gtccacgactgcgagacacggcttc

SEQ ID NO: 5791957 - DNA, 25 bp, Homo sapien
catctttatgccgtttctcttcact

SEQ ID NO: 5791958 - DNA, 25 bp, Homo sapien
aattgccacctctgactccacgggt

SEQ ID NO: 5791959 - DNA, 25 bp, Homo sapien
cgggctgcccaacgccagaaacagc

SEQ ID NO: 5791960 - DNA, 25 bp, Homo sapien
aggtggaccacagctccgcaccacc

SEQ ID NO: 5791961 - DNA, 25 bp, Homo sapien
tgacagacttggtcctcaggcaaca

SEQ ID NO: 5791962 - DNA, 25 bp, Homo sapien
ctcctcagatcaagtcagcacacac

SEQ ID NO: 5791963 - DNA, 25 bp, Homo sapien
gtcttcctcaaagagaaaatgtctt

SEQ ID NO: 5791964 - DNA, 25 bp, Homo sapien
ggaaaatatttatacacttagaaaa

SEQ ID NO: 5791965 - DNA, 25 bp, Homo sapien
cacgggctgcccaacgccagaaaca

SEQ ID NO: 5791966 - DNA, 25 bp, Homo sapien
gaagacaacactacttaccatttcc

SEQ ID NO: 5791967 - DNA, 25 bp, Homo sapien
catacctttctaaaacacgaatggt

SEQ ID NO: 5791968 - DNA, 25 bp, Homo sapien
gggccatattgccagtataaattag

SEQ ID NO: 5791969 - DNA, 25 bp, Homo sapien
aacccattagatggatatagtcttc

SEQ ID NO: 5791970 - DNA, 25 bp, Homo sapien
aaccaccagttcaactgtacatgta

SEQ ID NO: 5791971 - DNA, 25 bp, Homo sapien
atgcagtcctccttccgcagagagg

SEQ ID NO: 5791972 - DNA, 25 bp, Homo sapien
aaagagcactggattaactaacagt

SEQ ID NO: 5791973 - DNA, 25 bp, Homo sapien
ctcgttagagtgatatgaattcggt

SEQ ID NO: 5791974 - DNA, 25 bp, Homo sapien
tgacttccatctcaactcctggctc

SEQ ID NO: 5791975 - DNA, 25 bp, Homo sapien
ctccttccgcagagaggcagttcga

SEQ ID NO: 5791976 - DNA, 25 bp, Homo sapien
atgaacatatttattcacatacctt

SEQ ID NO: 5791977 - DNA, 25 bp, Homo sapien
ggaggacgcccgggagacagaggcc

SEQ ID NO: 5791978 - DNA, 25 bp, Homo sapien
gtactcgtttctgcaagcatagcat

SEQ ID NO: 5791979 - DNA, 25 bp, Homo sapien
gaaccaaagaagacttaaaactgct

SEQ ID NO: 5791980 - DNA, 25 bp, Homo sapien
ctgatttgtcagatggcgtatttaa

SEQ ID NO: 5791981 - DNA, 25 bp, Homo sapien
gcatctggaatcttcacatcattct

SEQ ID NO: 5791982 - DNA, 25 bp, Homo sapien
cacctgtttaataacagtggttttc

SEQ ID NO: 5791983 - DNA, 25 bp, Homo sapien
acatagccttttgtaataaagtgaa

SEQ ID NO: 5791984 - DNA, 25 bp, Homo sapien
atatagtcttcacggtttggaaaga

SEQ ID NO: 5791985 - DNA, 25 bp, Homo sapien
cagaaatgtaaggccaatcagactc

SEQ ID NO: 5791986 - DNA, 25 bp, Homo sapien
cccattagatggatatagtcttcac

SEQ ID NO: 5791987 - DNA, 25 bp, Homo sapien
aatcacatttgagcacgaacactaa

SEQ ID NO: 5791988 - DNA, 25 bp, Homo sapien
taaaagccatggctgctgcaaggct

SEQ ID NO: 5791989 - DNA, 25 bp, Homo sapien
tgtagtgattctcaaagtcttggta

SEQ ID NO: 5791990 - DNA, 25 bp, Homo sapien
gaactcttatactagcatgaacata

SEQ ID NO: 5791991 - DNA, 25 bp, Homo sapien
tttgtcataacccattagatggata

SEQ ID NO: 5791992 - DNA, 25 bp, Homo sapien
tatgccgtttctcttcactggtttc

SEQ ID NO: 5791993 - DNA, 25 bp, Homo sapien
cagttgcagaaacaaattaagatac

SEQ ID NO: 5791994 - DNA, 25 bp, Homo sapien
actggtttcttccatatacaaaata

SEQ ID NO: 5791995 - DNA, 25 bp, Homo sapien
ttgcaactcgttagagtgatatgaa

SEQ ID NO: 5791996 - DNA, 25 bp, Homo sapien
gccaatcagactcgtagaataagag

SEQ ID NO: 5791997 - DNA, 25 bp, Homo sapien
ctgtacatgtatgttcttatgggca

SEQ ID NO: 5791998 - DNA, 25 bp, Homo sapien
gccacctctgactccacgggtgttt

SEQ ID NO: 5791999 - DNA, 25 bp, Homo sapien
acgaatggtagatactacattttgg

SEQ ID NO: 5792000 - DNA, 25 bp, Homo sapien
ctcttcactggtttcttccatatac

SEQ ID NO: 5792001 - DNA, 25 bp, Homo sapien
aaagccatggctgctgcaaggcttc

SEQ ID NO: 5792002 - DNA, 25 bp, Homo sapien
ggtaaatacatgtttagcatctgga

SEQ ID NO: 5792003 - DNA, 25 bp, Homo sapien
ggctcaatactgatggaagtaatct

SEQ ID NO: 5792004 - DNA, 25 bp, Homo sapien
cgcgcggctcccgaaggccccgtac

SEQ ID NO: 5792005 - DNA, 25 bp, Homo sapien
gctccgcaccacctatgactgtgtc

SEQ ID NO: 5792006 - DNA, 25 bp, Homo sapien
taacggaatgcaaaaggcaatttta

SEQ ID NO: 5792007 - DNA, 25 bp, Homo sapien
ggagacagaggcccggggacctcgg

SEQ ID NO: 5792008 - DNA, 25 bp, Homo sapien
tcaactgtacatgtatgttcttatg

SEQ ID NO: 5792009 - DNA, 25 bp, Homo sapien
catttgcaatggtgacttccatctc

SEQ ID NO: 5792010 - DNA, 25 bp, Homo sapien
gaagacttaaaactgctcccataat

SEQ ID NO: 5792011 - DNA, 25 bp, Homo sapien
attagccttccatcttctgatttgt

SEQ ID NO: 5792012 - DNA, 25 bp, Homo sapien
ataagagaaacatttcacaccaaac

SEQ ID NO: 5792013 - DNA, 25 bp, Homo sapien
caaacatcattctctggaaattaaa

SEQ ID NO: 5792014 - DNA, 25 bp, Homo sapien
tcaccgtaaagcttcccatgatgcc

SEQ ID NO: 5792015 - DNA, 25 bp, Homo sapien
actggggtgatcaccgtaaagcttc

SEQ ID NO: 5792016 - DNA, 25 bp, Homo sapien
tgcaaaaggcaattttattattata

SEQ ID NO: 5792017 - DNA, 25 bp, Homo sapien
ctcaatactgatggaagtaatctgc

SEQ ID NO: 5792018 - DNA, 25 bp, Homo sapien
tttctaaaacacgaatggtagatac

SEQ ID NO: 5792019 - DNA, 25 bp, Homo sapien
atgtggtaaatacatgtttagcatc

SEQ ID NO: 5792020 - DNA, 25 bp, Homo sapien
cggacgccccagctgcacgagtcca

SEQ ID NO: 5792021 - DNA, 25 bp, Homo sapien
atgtatgttcttatgggcaatcatg

SEQ ID NO: 5792022 - DNA, 25 bp, Homo sapien
tcggtgaattgccacctctgactcc

SEQ ID NO: 5792023 - DNA, 25 bp, Homo sapien
caatggtgacttccatctcaactcc

SEQ ID NO: 5792024 - DNA, 25 bp, Homo sapien
atggtgacttccatctcaactcctg

SEQ ID NO: 5792025 - DNA, 25 bp, Homo sapien
aaaacgtaaatcacatttgagcacg

SEQ ID NO: 5792026 - DNA, 25 bp, Homo sapien
gggtgatcaccgtaaagcttcccat

SEQ ID NO: 5792027 - DNA, 25 bp, Homo sapien
tattttgtgtaaaaatgtatggcag

SEQ ID NO: 5792028 - DNA, 25 bp, Homo sapien
tttaacaatcagtcactaacggaat

SEQ ID NO: 5792029 - DNA, 25 bp, Homo sapien
ccttcccaataaacagggatctgcg

SEQ ID NO: 5792030 - DNA, 25 bp, Homo sapien
agatggatatagtcttcacggtttg

SEQ ID NO: 5792031 - DNA, 25 bp, Homo sapien
tccatacacaaagaataaagcaact

SEQ ID NO: 5792032 - DNA, 25 bp, Homo sapien
ggatctgcgctcgacccggacgccg

SEQ ID NO: 5792033 - DNA, 25 bp, Homo sapien
gtaagtttttcttgtagtgattctc

SEQ ID NO: 5792034 - DNA, 25 bp, Homo sapien
ttggaaagagcactggattaactaa

SEQ ID NO: 5792035 - DNA, 25 bp, Homo sapien
agtgtctgttgtggcctcatggtac

SEQ ID NO: 5792036 - DNA, 25 bp, Homo sapien
atgccatagaatatgatttgaatag

SEQ ID NO: 5792037 - DNA, 25 bp, Homo sapien
caacagcaaagagcagtgagtcagg

SEQ ID NO: 5792038 - DNA, 25 bp, Homo sapien
cgcaccacctatgactgtgtcttcc

SEQ ID NO: 5792039 - DNA, 25 bp, Homo sapien
aaagcaactctcccatttgctactg

SEQ ID NO: 5792040 - DNA, 25 bp, Homo sapien
agacaacactacttaccatttcccg

SEQ ID NO: 5792041 - DNA, 25 bp, Homo sapien
cattaaaacgtaaatcacatttgag

SEQ ID NO: 5792042 - DNA, 25 bp, Homo sapien
attattttgtgtaaaaatgtatggc

SEQ ID NO: 5792043 - DNA, 25 bp, Homo sapien
tgacatagccttttgtaataaagtg

SEQ ID NO: 5792044 - DNA, 25 bp, Homo sapien
caagtcagcacacaccttatccagg

SEQ ID NO: 5792045 - DNA, 25 bp, Homo sapien
caccgtaagtttttcttgtagtgat

SEQ ID NO: 5792046 - DNA, 25 bp, Homo sapien
acaacactacttaccatttcccgta

SEQ ID NO: 5792047 - DNA, 25 bp, Homo sapien
tcaggagcaggagcaggtggaccac

SEQ ID NO: 5792048 - DNA, 25 bp, Homo sapien
ggggacctcggagcgcggcggccgc

SEQ ID NO: 5792049 - DNA, 25 bp, Homo sapien
aaatgtggtaaatacatgtttagca

SEQ ID NO: 5792050 - DNA, 25 bp, Homo sapien
aagtcaatgagtcgcttgtggattc

SEQ ID NO: 5792051 - DNA, 25 bp, Homo sapien
gactcgtagaataagagaaacattt

SEQ ID NO: 5792052 - DNA, 25 bp, Homo sapien
gcccgggagacagaggcccggggac

SEQ ID NO: 5792053 - DNA, 25 bp, Homo sapien
cgaatgacatagccttttgtaataa

SEQ ID NO: 5792054 - DNA, 25 bp, Homo sapien
gaaacaaattaagatactgaagaca

SEQ ID NO: 5792055 - DNA, 25 bp, Homo sapien
gcccgctgctggaggacgcccggga

SEQ ID NO: 5792056 - DNA, 25 bp, Homo sapien
ttcctgacagacttggtcctcaggc

SEQ ID NO: 5792057 - DNA, 25 bp, Homo sapien
ataacagtggttttcctacacccat

SEQ ID NO: 5792058 - DNA, 25 bp, Homo sapien
attatacattaaaacgtaaatcaca

SEQ ID NO: 5792059 - DNA, 25 bp, Homo sapien
ttttcctacacccatagggtgccac

SEQ ID NO: 5792060 - DNA, 25 bp, Homo sapien
ccccgaaggcccgctgctggaggac

SEQ ID NO: 5792061 - DNA, 25 bp, Homo sapien
cacctctgactccacgggtgttttt

SEQ ID NO: 5792062 - DNA, 25 bp, Homo sapien
tcccgtatagctaaccaccagttca

SEQ ID NO: 5792063 - DNA, 25 bp, Homo sapien
ggcagaggcacactttcagaaatag

SEQ ID NO: 5792064 - DNA, 25 bp, Homo sapien
gggaggagtgcacagttgcagaaac

SEQ ID NO: 5792065 - DNA, 25 bp, Homo sapien
gtaggtaatggctttataagtgtct

SEQ ID NO: 5792066 - DNA, 25 bp, Homo sapien
aggcccgctgctggaggacgcccgg

SEQ ID NO: 5792067 - DNA, 25 bp, Homo sapien
tgtcataacccattagatggatata

SEQ ID NO: 5792068 - DNA, 25 bp, Homo sapien
cgaccgcccacgggctgcccaacgc

SEQ ID NO: 5792069 - DNA, 25 bp, Homo sapien
ttaaaacgtaaatcacatttgagca

SEQ ID NO: 5792070 - DNA, 25 bp, Homo sapien
aacactgctcgggccatattgccag

SEQ ID NO: 5792071 - DNA, 25 bp, Homo sapien
ttgccagtataaattagccttccat

SEQ ID NO: 5792072 - DNA, 25 bp, Homo sapien
ttgtgtaaaaatgtatggcagaaat

SEQ ID NO: 5792073 - DNA, 25 bp, Homo sapien
catcacgcgggtgacgagcggctgc

SEQ ID NO: 5792074 - DNA, 25 bp, Homo sapien
tgtcttttaatgtcggaaaatattt

SEQ ID NO: 5792075 - DNA, 25 bp, Homo sapien
tagggtgccaccaagggaggagtgc

SEQ ID NO: 5792076 - DNA, 25 bp, Homo sapien
acaccaaacactgctcgggccatat

SEQ ID NO: 5792077 - DNA, 25 bp, Homo sapien
ctgctcgggccatattgccagtata

SEQ ID NO: 5792078 - DNA, 25 bp, Homo sapien
gtttggaaagagcactggattaact

SEQ ID NO: 5792079 - DNA, 25 bp, Homo sapien
caatcgaatgacatagccttttgta

SEQ ID NO: 5792080 - DNA, 25 bp, Homo sapien
ctcaaagagaaaatgtcttttaatg

SEQ ID NO: 5792081 - DNA, 25 bp, Homo sapien
tacatgtttagcatctggaatcttc

SEQ ID NO: 5792082 - DNA, 25 bp, Homo sapien
actgatggaagtaatctgcttaact

SEQ ID NO: 5792083 - DNA, 25 bp, Homo sapien
tactgacatcagatccccagtttag

SEQ ID NO: 5792084 - DNA, 25 bp, Homo sapien
tcagatccccagtttagagtcaacc

SEQ ID NO: 5792085 - DNA, 25 bp, Homo sapien
atcgaatgacatagccttttgtaat

SEQ ID NO: 5792086 - DNA, 25 bp, Homo sapien
aatgtaaggccaatcagactcgtag

SEQ ID NO: 5792087 - DNA, 25 bp, Homo sapien
tttgttttagcataaaatgtggtaa

SEQ ID NO: 5792088 - DNA, 25 bp, Homo sapien
atatgatttgaataggcagaggcac

SEQ ID NO: 5792089 - DNA, 25 bp, Homo sapien
agacttaaaactgctcccataattt

SEQ ID NO: 5792090 - DNA, 25 bp, Homo sapien
caaggcttcctagccagcttcctga

SEQ ID NO: 5792091 - DNA, 25 bp, Homo sapien
ttttgtgtaaaaatgtatggcagaa

SEQ ID NO: 5792092 - DNA, 25 bp, Homo sapien
tcagcacacaccttatccagggatt

SEQ ID NO: 5792093 - DNA, 25 bp, Homo sapien
agggattttacgttgcaactcgtta

SEQ ID NO: 5792094 - DNA, 25 bp, Homo sapien
caaagtcttggtaggcattcaaact

SEQ ID NO: 5792095 - DNA, 25 bp, Homo sapien
tggaaattaaaagctttgataattt

SEQ ID NO: 5792096 - DNA, 25 bp, Homo sapien
taccggccccgaaggcccgctgctg

SEQ ID NO: 5792097 - DNA, 25 bp, Homo sapien
attttggttttcaaacatagcttgt

SEQ ID NO: 5792098 - DNA, 25 bp, Homo sapien
gccttccatcttctgatttgtcaga

SEQ ID NO: 5792099 - DNA, 25 bp, Homo sapien
attttgttttagcataaaatgtggt

SEQ ID NO: 5792100 - DNA, 25 bp, Homo sapien
ttcctttgctcctcagatcaagtca

SEQ ID NO: 5792101 - DNA, 25 bp, Homo sapien
agatggcgtatttaagaatcgaaca

SEQ ID NO: 5792102 - DNA, 25 bp, Homo sapien
aatccatacacaaagaataaagcaa

SEQ ID NO: 5792103 - DNA, 25 bp, Homo sapien
ctggtaatcaatttatgaaaacagt

SEQ ID NO: 5792104 - DNA, 25 bp, Homo sapien
ttaccatttcccgtatagctaacca

SEQ ID NO: 5792105 - DNA, 25 bp, Homo sapien
cactgctcgggccatattgccagta

SEQ ID NO: 5792106 - DNA, 25 bp, Homo sapien
gatttgaataggcagaggcacactt

SEQ ID NO: 5792107 - DNA, 25 bp, Homo sapien
agacagaggcccggggacctcggag

SEQ ID NO: 5792108 - DNA, 25 bp, Homo sapien
aactggtaatcaatttatgaaaaca

SEQ ID NO: 5792109 - DNA, 25 bp, Homo sapien
gagcgcggcggccgcacacaatgca

SEQ ID NO: 5792110 - DNA, 25 bp, Homo sapien
taaattcttctttgtcataacccat

SEQ ID NO: 5792111 - DNA, 25 bp, Homo sapien
tctgactccacgggtgtttttctgg

SEQ ID NO: 5792112 - DNA, 25 bp, Homo sapien
agagtgatatgaattcggtgaattg

SEQ ID NO: 5792113 - DNA, 25 bp, Homo sapien
cttgtagtgattctcaaagtcttgg

SEQ ID NO: 5792114 - DNA, 25 bp, Homo sapien
caactctcccatttgctactgacat

SEQ ID NO: 5792115 - DNA, 25 bp, Homo sapien
ggcctcatggtacaatcgaatgaca

SEQ ID NO: 5792116 - DNA, 25 bp, Homo sapien
tcgaacatatccttcccaataaaca

SEQ ID NO: 5792117 - DNA, 25 bp, Homo sapien
caatactgatggaagtaatctgctt

SEQ ID NO: 5792118 - DNA, 25 bp, Homo sapien
ataaagcaactctcccatttgctac

SEQ ID NO: 5792119 - DNA, 25 bp, Homo sapien
gagcacgaacactaacaaataggct

SEQ ID NO: 5792120 - DNA, 25 bp, Homo sapien
accgcccacgggctgcccaacgcca

SEQ ID NO: 5792121 - DNA, 25 bp, Homo sapien
gtaataaagtgaagcagcactgggg

SEQ ID NO: 5792122 - DNA, 25 bp, Homo sapien
tattcacatacctttctaaaacacg

SEQ ID NO: 5792123 - DNA, 25 bp, Homo sapien
ttatactagcatgaacatatttatt

SEQ ID NO: 5792124 - DNA, 25 bp, Homo sapien
tttttaacaactggtaatcaattta

SEQ ID NO: 5792125 - DNA, 25 bp, Homo sapien
tctttatgccgtttctcttcactgg

SEQ ID NO: 5792126 - DNA, 25 bp, Homo sapien
ttagcataaaatgtggtaaatacat

SEQ ID NO: 5792127 - DNA, 25 bp, Homo sapien
ccagctgcacgagtccacgactgcg

SEQ ID NO: 5792128 - DNA, 25 bp, Homo sapien
agaggcagttcgaccgcccacgggc

SEQ ID NO: 5792129 - DNA, 25 bp, Homo sapien
tcactgattcttttcctttgctcct

SEQ ID NO: 5792130 - DNA, 25 bp, Homo sapien
ttttgtaataaagtgaagcagcact

SEQ ID NO: 5792131 - DNA, 25 bp, Homo sapien
ggtagatactacattttggttttca

SEQ ID NO: 5792132 - DNA, 25 bp, Homo sapien
ccgtttctcttcactggtttcttcc

SEQ ID NO: 5792133 - DNA, 25 bp, Homo sapien
ctctgtccgtcgacttacctgcgac

SEQ ID NO: 5792134 - DNA, 25 bp, Homo sapien
gtcgcaggtaagtcgacggacagag

SEQ ID NO: 5792135 - DNA, 25 bp, Homo sapien
acccgcctccttctgaaggctggtg

SEQ ID NO: 5792136 - DNA, 25 bp, Homo sapien
ctgggcagagctggcagagcgtctg

SEQ ID NO: 5792137 - DNA, 25 bp, Homo sapien
tgctgctcagaacaccatggagcca

SEQ ID NO: 5792138 - DNA, 25 bp, Homo sapien
gccacgggcacccccagcctcaggt

SEQ ID NO: 5792139 - DNA, 25 bp, Homo sapien
ggtgatcacggggcagacgagtgtg

SEQ ID NO: 5792140 - DNA, 25 bp, Homo sapien
agaagccgcaaccagagccgccgcc

SEQ ID NO: 5792141 - DNA, 25 bp, Homo sapien
gtgcccactgccttcaccccctacc

SEQ ID NO: 5792142 - DNA, 25 bp, Homo sapien
agtgtcattgagcagatagtctatg

SEQ ID NO: 5792143 - DNA, 25 bp, Homo sapien
agcggctccgctctaggccccaggg

SEQ ID NO: 5792144 - DNA, 25 bp, Homo sapien
aggctctgtgcggggtggagatgaa

SEQ ID NO: 5792145 - DNA, 25 bp, Homo sapien
ctgacatgggcctagaggagggagt

SEQ ID NO: 5792146 - DNA, 25 bp, Homo sapien
aggtggacctggtaacacacagtga

SEQ ID NO: 5792147 - DNA, 25 bp, Homo sapien
ctagccatcatccacgggcagacca

SEQ ID NO: 5792148 - DNA, 25 bp, Homo sapien
aagccgcaaccagagccgccgccac

SEQ ID NO: 5792149 - DNA, 25 bp, Homo sapien
cagcctaagcagagaggcttccgat

SEQ ID NO: 5792150 - DNA, 25 bp, Homo sapien
gaagacagtgcgtacgggagccagt

SEQ ID NO: 5792151 - DNA, 25 bp, Homo sapien
ggggggacgaacagccttgcatcta

SEQ ID NO: 5792152 - DNA, 25 bp, Homo sapien
atgacagcaaatctccgggggcatc

SEQ ID NO: 5792153 - DNA, 25 bp, Homo sapien
ctgcatgtgactaagaagaacatga

SEQ ID NO: 5792154 - DNA, 25 bp, Homo sapien
ccgcctccttctgaaggctggtgct

SEQ ID NO: 5792155 - DNA, 25 bp, Homo sapien
ccctacctctgatagcgactcggac

SEQ ID NO: 5792156 - DNA, 25 bp, Homo sapien
ctgactttgagggactgtatccagt

SEQ ID NO: 5792157 - DNA, 25 bp, Homo sapien
tgtaacagtgtttctgcaactgaaa

SEQ ID NO: 5792158 - DNA, 25 bp, Homo sapien
ctacagcccctaccagtccggcgcg

SEQ ID NO: 5792159 - DNA, 25 bp, Homo sapien
tgcagcggaagcggaggaaggcctt

SEQ ID NO: 5792160 - DNA, 25 bp, Homo sapien
aaggacacccgaagcagcttccggg

SEQ ID NO: 5792161 - DNA, 25 bp, Homo sapien
cctgagaaggacacccgaagcagct

SEQ ID NO: 5792162 - DNA, 25 bp, Homo sapien
aagatgaagattgagcggcctgtaa

SEQ ID NO: 5792163 - DNA, 25 bp, Homo sapien
ctttgagggactgtatccagtacac

SEQ ID NO: 5792164 - DNA, 25 bp, Homo sapien
cccccctatcacaagatgaagattg

SEQ ID NO: 5792165 - DNA, 25 bp, Homo sapien
gcagggccgggactgtcacttggtg

SEQ ID NO: 5792166 - DNA, 25 bp, Homo sapien
agtgcggctgcgcttctctgccttc

SEQ ID NO: 5792167 - DNA, 25 bp, Homo sapien
tctgctggtggacagtggggctgaa

SEQ ID NO: 5792168 - DNA, 25 bp, Homo sapien
ggggctgcgcagcctggtagacacg

SEQ ID NO: 5792169 - DNA, 25 bp, Homo sapien
agctcctgctgtgccccagctgttg

SEQ ID NO: 5792170 - DNA, 25 bp, Homo sapien
gacagagccgggcctagcccagaga

SEQ ID NO: 5792171 - DNA, 25 bp, Homo sapien
ctcccacatgggtggaggctctggg

SEQ ID NO: 5792172 - DNA, 25 bp, Homo sapien
cctgttcggcctggcgcagcgcagc

SEQ ID NO: 5792173 - DNA, 25 bp, Homo sapien
agctggcagagcgtctggggctgcg

SEQ ID NO: 5792174 - DNA, 25 bp, Homo sapien
cctggtgatcgtggaacagcctaag

SEQ ID NO: 5792175 - DNA, 25 bp, Homo sapien
tgatggctccttctccctgcccctg

SEQ ID NO: 5792176 - DNA, 25 bp, Homo sapien
gaagcccagggcagctgggcagagc

SEQ ID NO: 5792177 - DNA, 25 bp, Homo sapien
tccctggcctacagcccctaccagt

SEQ ID NO: 5792178 - DNA, 25 bp, Homo sapien
atctggtcaccaagctccgggccaa

SEQ ID NO: 5792179 - DNA, 25 bp, Homo sapien
acacacagtgacccacctcgtgctc

SEQ ID NO: 5792180 - DNA, 25 bp, Homo sapien
gatctgctggtggacagtggggctg

SEQ ID NO: 5792181 - DNA, 25 bp, Homo sapien
cagcctcaggtgcactgacctgctg

SEQ ID NO: 5792182 - DNA, 25 bp, Homo sapien
gctgcgtgcactgcttcagagtgga

SEQ ID NO: 5792183 - DNA, 25 bp, Homo sapien
atcatccacgggcagaccagtgtca

SEQ ID NO: 5792184 - DNA, 25 bp, Homo sapien
tgttcggcctggcgcagcgcagcgc

SEQ ID NO: 5792185 - DNA, 25 bp, Homo sapien
caggaccccccagtgcgagccgcag

SEQ ID NO: 5792186 - DNA, 25 bp, Homo sapien
ctccgggccaacgtgaacgctcgca

SEQ ID NO: 5792187 - DNA, 25 bp, Homo sapien
gtggagctcctgctgtgccccagct

SEQ ID NO: 5792188 - DNA, 25 bp, Homo sapien
acatgatggggactatgatacaaaa

SEQ ID NO: 5792189 - DNA, 25 bp, Homo sapien
ggagctggaggaggtggcagcctcg

SEQ ID NO: 5792190 - DNA, 25 bp, Homo sapien
gtgaagaccttgctgctaaatgctg

SEQ ID NO: 5792191 - DNA, 25 bp, Homo sapien
cgaggagcccctgtgcccactgcct

SEQ ID NO: 5792192 - DNA, 25 bp, Homo sapien
aaacgcaagcgaggaggggacgtgt

SEQ ID NO: 5792193 - DNA, 25 bp, Homo sapien
gcacctagccatcatccacgggcag

SEQ ID NO: 5792194 - DNA, 25 bp, Homo sapien
tgcacctggcagctggactggggta

SEQ ID NO: 5792195 - DNA, 25 bp, Homo sapien
ccagcccttcgggggtggctcccac

SEQ ID NO: 5792196 - DNA, 25 bp, Homo sapien
cctcacccagtggcagcctcctgcg

SEQ ID NO: 5792197 - DNA, 25 bp, Homo sapien
agtgacccacctcgtgctcatgccc

SEQ ID NO: 5792198 - DNA, 25 bp, Homo sapien
ccacctatttcaaatcttatttaac

SEQ ID NO: 5792199 - DNA, 25 bp, Homo sapien
ggcccctacctggtgatcgtggaac

SEQ ID NO: 5792200 - DNA, 25 bp, Homo sapien
cctgcacctggcagctggactgggg

SEQ ID NO: 5792201 - DNA, 25 bp, Homo sapien
tggaggccctgtctgacatgggcct

SEQ ID NO: 5792202 - DNA, 25 bp, Homo sapien
aggttcggttctatgaggatgatga

SEQ ID NO: 5792203 - DNA, 25 bp, Homo sapien
gagaacggagacacaccactgcacc

SEQ ID NO: 5792204 - DNA, 25 bp, Homo sapien
tcagaggcagcggctccgctctagg

SEQ ID NO: 5792205 - DNA, 25 bp, Homo sapien
cgcaagcgaggaggggacgtgtctg

SEQ ID NO: 5792206 - DNA, 25 bp, Homo sapien
ggggccacacgcctcttgacctcac

SEQ ID NO: 5792207 - DNA, 25 bp, Homo sapien
ccacctgctgacggcgcaggacgag

SEQ ID NO: 5792208 - DNA, 25 bp, Homo sapien
accccccagtgcgagccgcaggccc

SEQ ID NO: 5792209 - DNA, 25 bp, Homo sapien
gcagagaggcttccgatttcgatat

SEQ ID NO: 5792210 - DNA, 25 bp, Homo sapien
tggcctacagcccctaccagtccgg

SEQ ID NO: 5792211 - DNA, 25 bp, Homo sapien
acaccactgcacctagccatcatcc

SEQ ID NO: 5792212 - DNA, 25 bp, Homo sapien
gttcggttctatgaggatgatgaga

SEQ ID NO: 5792213 - DNA, 25 bp, Homo sapien
cgcctgttcggcctggcgcagcgca

SEQ ID NO: 5792214 - DNA, 25 bp, Homo sapien
tctgctgcgggtaggtgcagaccca

SEQ ID NO: 5792215 - DNA, 25 bp, Homo sapien
caggcgctggtgctcctgagctgct

SEQ ID NO: 5792216 - DNA, 25 bp, Homo sapien
cttcgggggtggctcccacatgggt

SEQ ID NO: 5792217 - DNA, 25 bp, Homo sapien
tcaccgcggacgcgcgcgcgctgct

SEQ ID NO: 5792218 - DNA, 25 bp, Homo sapien
cagaacctggccggagccactagac

SEQ ID NO: 5792219 - DNA, 25 bp, Homo sapien
acgagctggctggcggggacctggc

SEQ ID NO: 5792220 - DNA, 25 bp, Homo sapien
gaggccctgtctgacatgggcctag

SEQ ID NO: 5792221 - DNA, 25 bp, Homo sapien
aacgaggagcccctgtgcccactgc

SEQ ID NO: 5792222 - DNA, 25 bp, Homo sapien
cgcccgagccctactcgactacggc

SEQ ID NO: 5792223 - DNA, 25 bp, Homo sapien
acccgaagcagcttccggggccaca

SEQ ID NO: 5792224 - DNA, 25 bp, Homo sapien
ctccttctgaaggctggtgctgaca

SEQ ID NO: 5792225 - DNA, 25 bp, Homo sapien
gctgcagcgagctcgagagtacaac

SEQ ID NO: 5792226 - DNA, 25 bp, Homo sapien
tccattgtggaacccaaggagccag

SEQ ID NO: 5792227 - DNA, 25 bp, Homo sapien
aatatgatgatttcaaattgaactc

SEQ ID NO: 5792228 - DNA, 25 bp, Homo sapien
gagatggaggagctggggttggtca

SEQ ID NO: 5792229 - DNA, 25 bp, Homo sapien
tacgggagccagtcagtggagcagg

SEQ ID NO: 5792230 - DNA, 25 bp, Homo sapien
ggcccctcccatggaggactgcccg

SEQ ID NO: 5792231 - DNA, 25 bp, Homo sapien
ctagacgggccagaagcccagggca

SEQ ID NO: 5792232 - DNA, 25 bp, Homo sapien
cgccacggtgcccagcagggactcc

SEQ ID NO: 5792233 - DNA, 25 bp, Homo sapien
gcagcggctccgctctaggccccag

SEQ ID NO: 5792234 - DNA, 25 bp, Homo sapien
tgcatctggcgctgcgggcaggcgc

SEQ ID NO: 5792235 - DNA, 25 bp, Homo sapien
tcaaattgaactcctccattgtgga

SEQ ID NO: 5792236 - DNA, 25 bp, Homo sapien
cctgtacagcgtccccacctatttc

SEQ ID NO: 5792237 - DNA, 25 bp, Homo sapien
gacgagtgtggtgagctttctgctg

SEQ ID NO: 5792238 - DNA, 25 bp, Homo sapien
tgcctccagtgagaagggccgaaag

SEQ ID NO: 5792239 - DNA, 25 bp, Homo sapien
gaacctggccggagccactagacag

SEQ ID NO: 5792240 - DNA, 25 bp, Homo sapien
ggtgctcctgagctgctgcgtgcac

SEQ ID NO: 5792241 - DNA, 25 bp, Homo sapien
agtgatggctccttctccctgcccc

SEQ ID NO: 5792242 - DNA, 25 bp, Homo sapien
agttcacctattaccctctggtgga

SEQ ID NO: 5792243 - DNA, 25 bp, Homo sapien
cgaggaggggacgtgtctgattcca

SEQ ID NO: 5792244 - DNA, 25 bp, Homo sapien
ggcaagcaatgctcggagctgggga

SEQ ID NO: 5792245 - DNA, 25 bp, Homo sapien
ctatgaggatgatgagaatggatgg

SEQ ID NO: 5792246 - DNA, 25 bp, Homo sapien
gcctcaggtgcactgacctgctgcc

SEQ ID NO: 5792247 - DNA, 25 bp, Homo sapien
agctacgagctggctggcggggacc

SEQ ID NO: 5792248 - DNA, 25 bp, Homo sapien
cgggcagaccagtgtcattgagcag

SEQ ID NO: 5792249 - DNA, 25 bp, Homo sapien
ctgatagcgactcggactctgaagg

SEQ ID NO: 5792250 - DNA, 25 bp, Homo sapien
cgtacgggagccagtcagtggagca

SEQ ID NO: 5792251 - DNA, 25 bp, Homo sapien
gaaacagctgatggcccctacctgg

SEQ ID NO: 5792252 - DNA, 25 bp, Homo sapien
gatgagaatggatggcaggcctttg

SEQ ID NO: 5792253 - DNA, 25 bp, Homo sapien
tggaggctctgggggtgcagccggg

SEQ ID NO: 5792254 - DNA, 25 bp, Homo sapien
cctgagctgctgcgtgcactgcttc

SEQ ID NO: 5792255 - DNA, 25 bp, Homo sapien
ctggcgcagcgcagcgcccgagccc

SEQ ID NO: 5792256 - DNA, 25 bp, Homo sapien
agcccagggcagctgggcagagctg

SEQ ID NO: 5792257 - DNA, 25 bp, Homo sapien
tgtggtgagctttctgctgcgggta

SEQ ID NO: 5792258 - DNA, 25 bp, Homo sapien
gatgaagtttatctgctttgtgaca

SEQ ID NO: 5792259 - DNA, 25 bp, Homo sapien
gcctacagcccctaccagtccggcg

SEQ ID NO: 5792260 - DNA, 25 bp, Homo sapien
taacagtgtttctgcaactgaaacg

SEQ ID NO: 5792261 - DNA, 25 bp, Homo sapien
tcagaacaccatggagccacccctg

SEQ ID NO: 5792262 - DNA, 25 bp, Homo sapien
tccagaaacccgagacaagctgccc

SEQ ID NO: 5792263 - DNA, 25 bp, Homo sapien
gggaagcagaacctggccggagcca

SEQ ID NO: 5792264 - DNA, 25 bp, Homo sapien
gatgtgcataaacagtatgccattg

SEQ ID NO: 5792265 - DNA, 25 bp, Homo sapien
tggcgctgcgggcaggcgctggtgc

SEQ ID NO: 5792266 - DNA, 25 bp, Homo sapien
atgcctgactttgagggactgtatc

SEQ ID NO: 5792267 - DNA, 25 bp, Homo sapien
tgcgggcaggcgctggtgctcctga

SEQ ID NO: 5792268 - DNA, 25 bp, Homo sapien
ctgtgccccagctgttgcatatgcc

SEQ ID NO: 5792269 - DNA, 25 bp, Homo sapien
ctccttctccctgcccctgaagcca

SEQ ID NO: 5792270 - DNA, 25 bp, Homo sapien
tggtgatcgtggaacagcctaagca

SEQ ID NO: 5792271 - DNA, 25 bp, Homo sapien
ggtggcagcctcggtttcttcccct

SEQ ID NO: 5792272 - DNA, 25 bp, Homo sapien
ggcaggggggacgaacagccttgca

SEQ ID NO: 5792273 - DNA, 25 bp, Homo sapien
aaaacgaggagcccctgtgcccact

SEQ ID NO: 5792274 - DNA, 25 bp, Homo sapien
agggaccagccaagatcgaggtgga

SEQ ID NO: 5792275 - DNA, 25 bp, Homo sapien
ggccttacggaggccgagcagcggg

SEQ ID NO: 5792276 - DNA, 25 bp, Homo sapien
gcggggcgcagatggccgccacggt

SEQ ID NO: 5792277 - DNA, 25 bp, Homo sapien
atctcccagcccatccatgacagca

SEQ ID NO: 5792278 - DNA, 25 bp, Homo sapien
tggagcaggaggcagagaagctggg

SEQ ID NO: 5792279 - DNA, 25 bp, Homo sapien
cgcccctgcacctggcggtgatcac

SEQ ID NO: 5792280 - DNA, 25 bp, Homo sapien
cacagtctggtgggcaagcaatgct

SEQ ID NO: 5792281 - DNA, 25 bp, Homo sapien
gagactcagccatgcatctggcgct

SEQ ID NO: 5792282 - DNA, 25 bp, Homo sapien
ttgtgttccggacacccccctatca

SEQ ID NO: 5792283 - DNA, 25 bp, Homo sapien
tggaagacaaggaagaggtgcagcg

SEQ ID NO: 5792284 - DNA, 25 bp, Homo sapien
tggggcccaaggacatgactgccca

SEQ ID NO: 5792285 - DNA, 25 bp, Homo sapien
cctcggcgttgtcaacctcaccaac

SEQ ID NO: 5792286 - DNA, 25 bp, Homo sapien
ctcccacagatgtgcataaacagta

SEQ ID NO: 5792287 - DNA, 25 bp, Homo sapien
gaagccagtcatctcccagcccatc

SEQ ID NO: 5792288 - DNA, 25 bp, Homo sapien
ccagtggcagcctcctgcgcagcta

SEQ ID NO: 5792289 - DNA, 25 bp, Homo sapien
gagaagctgggcccaccccctgagc

SEQ ID NO: 5792290 - DNA, 25 bp, Homo sapien
gctgaagtggaggccactgagcggc

SEQ ID NO: 5792291 - DNA, 25 bp, Homo sapien
ggttctatgaggatgatgagaatgg

SEQ ID NO: 5792292 - DNA, 25 bp, Homo sapien
gcagctgggcagagctggcagagcg

SEQ ID NO: 5792293 - DNA, 25 bp, Homo sapien
tgatcacggggcagacgagtgtggt

SEQ ID NO: 5792294 - DNA, 25 bp, Homo sapien
tcgcacctttgcgggaaacacaccc

SEQ ID NO: 5792295 - DNA, 25 bp, Homo sapien
ttctgaaggctggtgctgacatcca

SEQ ID NO: 5792296 - DNA, 25 bp, Homo sapien
aggtgcagacccagctctgctggat

SEQ ID NO: 5792297 - DNA, 25 bp, Homo sapien
tattaccctctggtggaagacaagg

SEQ ID NO: 5792298 - DNA, 25 bp, Homo sapien
agagacatggagagttgctacaacc

SEQ ID NO: 5792299 - DNA, 25 bp, Homo sapien
gcctttggggacttctctcccacag

SEQ ID NO: 5792300 - DNA, 25 bp, Homo sapien
ggagccactagacagagccgggcct

SEQ ID NO: 5792301 - DNA, 25 bp, Homo sapien
acgtgaacgctcgcacctttgcggg

SEQ ID NO: 5792302 - DNA, 25 bp, Homo sapien
gccgcaggccccggagatgctgcag

SEQ ID NO: 5792303 - DNA, 25 bp, Homo sapien
ggcaggcgctggtgctcctgagctg

SEQ ID NO: 5792304 - DNA, 25 bp, Homo sapien
acccagctctgctggatcggcatgg

SEQ ID NO: 5792305 - DNA, 25 bp, Homo sapien
ctactggaggccctgtctgacatgg

SEQ ID NO: 5792306 - DNA, 25 bp, Homo sapien
gcctggcgcagcgcagcgcccgagc

SEQ ID NO: 5792307 - DNA, 25 bp, Homo sapien
cccagtgcgagccgcaggccccgga

SEQ ID NO: 5792308 - DNA, 25 bp, Homo sapien
ggctctgccacgggcacccccagcc

SEQ ID NO: 5792309 - DNA, 25 bp, Homo sapien
tggtgatacagctctgcagaacctg

SEQ ID NO: 5792310 - DNA, 25 bp, Homo sapien
cgggcaggcgctggtgctcctgagc

SEQ ID NO: 5792311 - DNA, 25 bp, Homo sapien
ggggatctgcgccgtttctgtgggg

SEQ ID NO: 5792312 - DNA, 25 bp, Homo sapien
aactgaagaaggtgatggatctgag

SEQ ID NO: 5792313 - DNA, 25 bp, Homo sapien
cagcccatccatgacagcaaatctc

SEQ ID NO: 5792314 - DNA, 25 bp, Homo sapien
ctgaaggctggtgctgacatccatg

SEQ ID NO: 5792315 - DNA, 25 bp, Homo sapien
gctgctgaggggtccagaaacccga

SEQ ID NO: 5792316 - DNA, 25 bp, Homo sapien
ctgcgcagctacgagctggctggcg

SEQ ID NO: 5792317 - DNA, 25 bp, Homo sapien
caagcgaggaggggacgtgtctgat

SEQ ID NO: 5792318 - DNA, 25 bp, Homo sapien
gggggcatcaaacctgaagatttct

SEQ ID NO: 5792319 - DNA, 25 bp, Homo sapien
gtgctgacatccatgctgaaaacga

SEQ ID NO: 5792320 - DNA, 25 bp, Homo sapien
agtacacctggcggtccgagcccga

SEQ ID NO: 5792321 - DNA, 25 bp, Homo sapien
ggaacagcctaagcagagaggcttc

SEQ ID NO: 5792322 - DNA, 25 bp, Homo sapien
cgccacctgctgacggcgcaggacg

SEQ ID NO: 5792323 - DNA, 25 bp, Homo sapien
aagctgcccagcacagaggtgaagg

SEQ ID NO: 5792324 - DNA, 25 bp, Homo sapien
gccctgagtgcctggatctgctggt

SEQ ID NO: 5792325 - DNA, 25 bp, Homo sapien
agacaaggaagaggtgcagcggaag

SEQ ID NO: 5792326 - DNA, 25 bp, Homo sapien
tgagaatggatggcaggcctttggg

SEQ ID NO: 5792327 - DNA, 25 bp, Homo sapien
acctgcaccagacgcccctgcacct

SEQ ID NO: 5792328 - DNA, 25 bp, Homo sapien
aggaaggccttgcccaccttctccc

SEQ ID NO: 5792329 - DNA, 25 bp, Homo sapien
gtggaacagcctaagcagagaggct

SEQ ID NO: 5792330 - DNA, 25 bp, Homo sapien
ggagctcctgctgtgccccagctgt

SEQ ID NO: 5792331 - DNA, 25 bp, Homo sapien
acccacctcgtgctcatgcccacag

SEQ ID NO: 5792332 - DNA, 25 bp, Homo sapien
actggaggccctgtctgacatgggc

SEQ ID NO: 5792333 - DNA, 25 bp, Homo sapien
agagttgctacaacccaggtctgga

SEQ ID NO: 5792334 - DNA, 25 bp, Homo sapien
gcccagcccagcagggccgggactg

SEQ ID NO: 5792335 - DNA, 25 bp, Homo sapien
agctgggcagagctggcagagcgtc

SEQ ID NO: 5792336 - DNA, 25 bp, Homo sapien
cctcccatggaggactgcccggtgc

SEQ ID NO: 5792337 - DNA, 25 bp, Homo sapien
caacgtgaacgctcgcacctttgcg

SEQ ID NO: 5792338 - DNA, 25 bp, Homo sapien
acacgtaccgacagacaacctcacc

SEQ ID NO: 5792339 - DNA, 25 bp, Homo sapien
gtgatacagctctgcagaacctgga

SEQ ID NO: 5792340 - DNA, 25 bp, Homo sapien
aaagaactgaagaaggtgatggatc

SEQ ID NO: 5792341 - DNA, 25 bp, Homo sapien
tcccctcctccctggcctacagccc

SEQ ID NO: 5792342 - DNA, 25 bp, Homo sapien
tctgtggggcccaaggacatgactg

SEQ ID NO: 5792343 - DNA, 25 bp, Homo sapien
aataaaggattctcatgggaagggg

SEQ ID NO: 5792344 - DNA, 25 bp, Homo sapien
cttgctgctaaatgctgctcagaac

SEQ ID NO: 5792345 - DNA, 25 bp, Homo sapien
ccctactcgactacggcgtcaccgc

SEQ ID NO: 5792346 - DNA, 25 bp, Homo sapien
tagacagagccgggcctagcccaga

SEQ ID NO: 5792347 - DNA, 25 bp, Homo sapien
acaacctcacccagtggcagcctcc

SEQ ID NO: 5792348 - DNA, 25 bp, Homo sapien
tatgatgatttcaaattgaactcct

SEQ ID NO: 5792349 - DNA, 25 bp, Homo sapien
acaccccacacccacccctcagttg

SEQ ID NO: 5792350 - DNA, 25 bp, Homo sapien
cgagacaagctgcccagcacagagg

SEQ ID NO: 5792351 - DNA, 25 bp, Homo sapien
tcgatatggctgtgaaggcccctcc

SEQ ID NO: 5792352 - DNA, 25 bp, Homo sapien
aagtttatctgctttgtgacaaggt

SEQ ID NO: 5792353 - DNA, 25 bp, Homo sapien
gtatgccattgtgttccggacaccc

SEQ ID NO: 5792354 - DNA, 25 bp, Homo sapien
gcaccaaggtgaagaccttgctgct

SEQ ID NO: 5792355 - DNA, 25 bp, Homo sapien
attgaggttcggttctatgaggatg

SEQ ID NO: 5792356 - DNA, 25 bp, Homo sapien
gcgggagctggagcaagaggccaaa

SEQ ID NO: 5792357 - DNA, 25 bp, Homo sapien
ctgcgccgtttctgtggggcccaag

SEQ ID NO: 5792358 - DNA, 25 bp, Homo sapien
gctgttgcatatgcctgactttgag

SEQ ID NO: 5792359 - DNA, 25 bp, Homo sapien
ggctcccacatgggtggaggctctg

SEQ ID NO: 5792360 - DNA, 25 bp, Homo sapien
cagcaccaaggtgaagaccttgctg

SEQ ID NO: 5792361 - DNA, 25 bp, Homo sapien
acggtgcccagcagggactccgggg

SEQ ID NO: 5792362 - DNA, 25 bp, Homo sapien
agcccttcgggggtggctcccacat

SEQ ID NO: 5792363 - DNA, 25 bp, Homo sapien
cagcggaagcggaggaaggccttgc

SEQ ID NO: 5792364 - DNA, 25 bp, Homo sapien
aacaccatggagccacccctgaccc

SEQ ID NO: 5792365 - DNA, 25 bp, Homo sapien
gacagtggggctgaagtggaggcca

SEQ ID NO: 5792366 - DNA, 25 bp, Homo sapien
gtgtctgattccaaacagttcacct

SEQ ID NO: 5792367 - DNA, 25 bp, Homo sapien
ccatccatgacagcaaatctccggg

SEQ ID NO: 5792368 - DNA, 25 bp, Homo sapien
gacctatcccactgtcaagatctgt

SEQ ID NO: 5792369 - DNA, 25 bp, Homo sapien
atgctgcagcgagctcgagagtaca

SEQ ID NO: 5792370 - DNA, 25 bp, Homo sapien
atgatggggactatgatacaaaaac

SEQ ID NO: 5792371 - DNA, 25 bp, Homo sapien
gctcagaacaccatggagccacccc

SEQ ID NO: 5792372 - DNA, 25 bp, Homo sapien
ctcacttgcagcaccaaggtgaaga

SEQ ID NO: 5792373 - DNA, 25 bp, Homo sapien
gggccaacgtgaacgctcgcacctt

SEQ ID NO: 5792374 - DNA, 25 bp, Homo sapien
tcgtggaacagcctaagcagagagg

SEQ ID NO: 5792375 - DNA, 25 bp, Homo sapien
ggtcaccaagctccgggccaacgtg

SEQ ID NO: 5792376 - DNA, 25 bp, Homo sapien
acacgcctcttgacctcacttgcag

SEQ ID NO: 5792377 - DNA, 25 bp, Homo sapien
cgggccccatgggctgctacccggg

SEQ ID NO: 5792378 - DNA, 25 bp, Homo sapien
tgcccagcagggactccggggagga

SEQ ID NO: 5792379 - DNA, 25 bp, Homo sapien
cctggcagctggactggggtacccg

SEQ ID NO: 5792380 - DNA, 25 bp, Homo sapien
ttctgggaagcagaacctggccgga

SEQ ID NO: 5792381 - DNA, 25 bp, Homo sapien
tcacccatctggtcaccaagctccg

SEQ ID NO: 5792382 - DNA, 25 bp, Homo sapien
atcgaggtggacctggtaacacaca

SEQ ID NO: 5792383 - DNA, 25 bp, Homo sapien
tacccgaccctcacccgcctccttc

SEQ ID NO: 5792384 - DNA, 25 bp, Homo sapien
tgctgtgccccagctgttgcatatg

SEQ ID NO: 5792385 - DNA, 25 bp, Homo sapien
agaactgaagaaggtgatggatctg

SEQ ID NO: 5792386 - DNA, 25 bp, Homo sapien
atgactgcccaatttaacaacctgg

SEQ ID NO: 5792387 - DNA, 25 bp, Homo sapien
gctcggagctggggatctgcgccgt

SEQ ID NO: 5792388 - DNA, 25 bp, Homo sapien
gcgggaaacacacccctgcacctgg

SEQ ID NO: 5792389 - DNA, 25 bp, Homo sapien
cagagtggagctcctgctgtgcccc

SEQ ID NO: 5792390 - DNA, 25 bp, Homo sapien
ctggccggagccactagacagagcc

SEQ ID NO: 5792391 - DNA, 25 bp, Homo sapien
gaaagatgacattgaggttcggttc

SEQ ID NO: 5792392 - DNA, 25 bp, Homo sapien
agaaggtgatggatctgagtatagt

SEQ ID NO: 5792393 - DNA, 25 bp, Homo sapien
ggaccccccagtgcgagccgcaggc

SEQ ID NO: 5792394 - DNA, 25 bp, Homo sapien
cattgtggaacccaaggagccagcc

SEQ ID NO: 5792395 - DNA, 25 bp, Homo sapien
gaggccaaagaactgaagaaggtga

SEQ ID NO: 5792396 - DNA, 25 bp, Homo sapien
ttctatgaggatgatgagaatggat

SEQ ID NO: 5792397 - DNA, 25 bp, Homo sapien
cctagcccagagacatggagagttg

SEQ ID NO: 5792398 - DNA, 25 bp, Homo sapien
gcggtgatcacggggcagacgagtg

SEQ ID NO: 5792399 - DNA, 25 bp, Homo sapien
atttcaaatcttatttaacacccca

SEQ ID NO: 5792400 - DNA, 25 bp, Homo sapien
ctttggggacttctctcccacagat

SEQ ID NO: 5792401 - DNA, 25 bp, Homo sapien
aggacctcggcgttgtcaacctcac

SEQ ID NO: 5792402 - DNA, 25 bp, Homo sapien
cgaggtggacctggtaacacacagt

SEQ ID NO: 5792403 - DNA, 25 bp, Homo sapien
ggctccttctccctgcccctgaagc

SEQ ID NO: 5792404 - DNA, 25 bp, Homo sapien
ggcatggagactcagccatgcatct

SEQ ID NO: 5792405 - DNA, 25 bp, Homo sapien
tggatggcaggcctttggggacttc

SEQ ID NO: 5792406 - DNA, 25 bp, Homo sapien
tttcgatatggctgtgaaggcccct

SEQ ID NO: 5792407 - DNA, 25 bp, Homo sapien
gcgccgtttctgtggggcccaagga

SEQ ID NO: 5792408 - DNA, 25 bp, Homo sapien
ccgccacggcgggcgtctaaaattc

SEQ ID NO: 5792409 - DNA, 25 bp, Homo sapien
gctacggaggagctggaggaggtgg

SEQ ID NO: 5792410 - DNA, 25 bp, Homo sapien
tgcctggatctgctggtggacagtg

SEQ ID NO: 5792411 - DNA, 25 bp, Homo sapien
gcatatgcctgactttgagggactg

SEQ ID NO: 5792412 - DNA, 25 bp, Homo sapien
gggcccaccccctgagccaccagga

SEQ ID NO: 5792413 - DNA, 25 bp, Homo sapien
agcgaggaggggacgtgtctgattc

SEQ ID NO: 5792414 - DNA, 25 bp, Homo sapien
ggccgaaagacctatcccactgtca

SEQ ID NO: 5792415 - DNA, 25 bp, Homo sapien
ctcctccattgtggaacccaaggag

SEQ ID NO: 5792416 - DNA, 25 bp, Homo sapien
gcagcctcctgcgcagctacgagct

SEQ ID NO: 5792417 - DNA, 25 bp, Homo sapien
ctctgaagggcctgagaaggacacc

SEQ ID NO: 5792418 - DNA, 25 bp, Homo sapien
cacgggcacccccagcctcaggtgc

SEQ ID NO: 5792419 - DNA, 25 bp, Homo sapien
ctcatgcccacagtctggtgggcaa

SEQ ID NO: 5792420 - DNA, 25 bp, Homo sapien
cgctggtgctcctgagctgctgcgt

SEQ ID NO: 5792421 - DNA, 25 bp, Homo sapien
gatttcgatatggctgtgaaggccc

SEQ ID NO: 5792422 - DNA, 25 bp, Homo sapien
gcagacccagctctgctggatcggc

SEQ ID NO: 5792423 - DNA, 25 bp, Homo sapien
tacggaggagctggaggaggtggca

SEQ ID NO: 5792424 - DNA, 25 bp, Homo sapien
agagctggcagagcgtctggggctg

SEQ ID NO: 5792425 - DNA, 25 bp, Homo sapien
caggacgagaacggagacacaccac

SEQ ID NO: 5792426 - DNA, 25 bp, Homo sapien
cgcttctctgccttccttagagcca

SEQ ID NO: 5792427 - DNA, 25 bp, Homo sapien
attgaactcctccattgtggaaccc

SEQ ID NO: 5792428 - DNA, 25 bp, Homo sapien
ctaaaattctgggaagcagaacctg

SEQ ID NO: 5792429 - DNA, 25 bp, Homo sapien
ctgtgcccactgccttcacccccta

SEQ ID NO: 5792430 - DNA, 25 bp, Homo sapien
atgggctgctacccgggaggcgggg

SEQ ID NO: 5792431 - DNA, 25 bp, Homo sapien
ccttagagccagtgatggctccttc

SEQ ID NO: 5792432 - DNA, 25 bp, Homo sapien
gtgccccagctgttgcatatgcctg

SEQ ID NO: 5792433 - DNA, 25 bp, Homo sapien
tcggttctatgaggatgatgagaat

SEQ ID NO: 5792434 - DNA, 25 bp, Homo sapien
caacccaggtctggatggtattatt

SEQ ID NO: 5792435 - DNA, 25 bp, Homo sapien
ccggtgcctccagtgagaagggccg

SEQ ID NO: 5792436 - DNA, 25 bp, Homo sapien
gagccagccccagaaacagctgatg

SEQ ID NO: 5792437 - DNA, 25 bp, Homo sapien
gatagcgactcggactctgaagggc

SEQ ID NO: 5792438 - DNA, 25 bp, Homo sapien
gatcggcatggagactcagccatgc

SEQ ID NO: 5792439 - DNA, 25 bp, Homo sapien
tcggcatggagactcagccatgcat

SEQ ID NO: 5792440 - DNA, 25 bp, Homo sapien
cctcacccgcctccttctgaaggct

SEQ ID NO: 5792441 - DNA, 25 bp, Homo sapien
gactctgaagggcctgagaaggaca

SEQ ID NO: 5792442 - DNA, 25 bp, Homo sapien
ctgcccctgaagccagtcatctccc

SEQ ID NO: 5792443 - DNA, 25 bp, Homo sapien
gccattgtgttccggacacccccct

SEQ ID NO: 5792444 - DNA, 25 bp, Homo sapien
gctcgagagtacaacgcgcgcctgt

SEQ ID NO: 5792445 - DNA, 25 bp, Homo sapien
tgaaaacgaggagcccctgtgccca

SEQ ID NO: 5792446 - DNA, 25 bp, Homo sapien
tggatctgctggtggacagtggggc

SEQ ID NO: 5792447 - DNA, 25 bp, Homo sapien
ctcaggtgcactgacctgctgcctg

SEQ ID NO: 5792448 - DNA, 25 bp, Homo sapien
agttgctacaacccaggtctggatg

SEQ ID NO: 5792449 - DNA, 25 bp, Homo sapien
accgcggacgcgcgcgcgctgctgg

SEQ ID NO: 5792450 - DNA, 25 bp, Homo sapien
acagttcacctattaccctctggtg

SEQ ID NO: 5792451 - DNA, 25 bp, Homo sapien
aggccttgcccaccttctcccagcc

SEQ ID NO: 5792452 - DNA, 25 bp, Homo sapien
ttcaaatcttatttaacaccccaca

SEQ ID NO: 5792453 - DNA, 25 bp, Homo sapien
gaggtgcagcggaagcggaggaagg

SEQ ID NO: 5792454 - DNA, 25 bp, Homo sapien
gctttgtgacaaggtgcagaaagat

SEQ ID NO: 5792455 - DNA, 25 bp, Homo sapien
acttctctcccacagatgtgcataa

SEQ ID NO: 5792456 - DNA, 25 bp, Homo sapien
ggaacccaaggagccagccccagaa

SEQ ID NO: 5792457 - DNA, 25 bp, Homo sapien
acccaggtctggatggtattattga

SEQ ID NO: 5792458 - DNA, 25 bp, Homo sapien
aactcctccattgtggaacccaagg

SEQ ID NO: 5792459 - DNA, 25 bp, Homo sapien
tgcataaacagtatgccattgtgtt

SEQ ID NO: 5792460 - DNA, 25 bp, Homo sapien
agagccagtgatggctccttctccc

SEQ ID NO: 5792461 - DNA, 25 bp, Homo sapien
cgcgcctgttcggcctggcgcagcg

SEQ ID NO: 5792462 - DNA, 25 bp, Homo sapien
tgtttctgcaactgaaacgcaagcg

SEQ ID NO: 5792463 - DNA, 25 bp, Homo sapien
cagaccagtgtcattgagcagatag

SEQ ID NO: 5792464 - DNA, 25 bp, Homo sapien
cctggcaggtctactggaggccctg

SEQ ID NO: 5792465 - DNA, 25 bp, Homo sapien
agcccctaccagtccggcgcgggcc

SEQ ID NO: 5792466 - DNA, 25 bp, Homo sapien
caccccctacctctgatagcgactc

SEQ ID NO: 5792467 - DNA, 25 bp, Homo sapien
agcggcaggggggacgaacagcctt

SEQ ID NO: 5792468 - DNA, 25 bp, Homo sapien
cggacgcgcgcgcgctgctggcggg

SEQ ID NO: 5792469 - DNA, 25 bp, Homo sapien
ccaccccctgagccaccaggagggc

SEQ ID NO: 5792470 - DNA, 25 bp, Homo sapien
ggtcacccatctggtcaccaagctc

SEQ ID NO: 5792471 - DNA, 25 bp, Homo sapien
tccaggaccccccagtgcgagccgc

SEQ ID NO: 5792472 - DNA, 25 bp, Homo sapien
ttagagccagtgatggctccttctc

SEQ ID NO: 5792473 - DNA, 25 bp, Homo sapien
ccagtcatctcccagcccatccatg

SEQ ID NO: 5792474 - DNA, 25 bp, Homo sapien
cacacccctgcacctggcagctgga

SEQ ID NO: 5792475 - DNA, 25 bp, Homo sapien
ctgattccaaacagttcacctatta

SEQ ID NO: 5792476 - DNA, 25 bp, Homo sapien
ccccctacctctgatagcgactcgg

SEQ ID NO: 5792477 - DNA, 25 bp, Homo sapien
gatggggactatgatacaaaaactt

SEQ ID NO: 5792478 - DNA, 25 bp, Homo sapien
tgaatatgatgatttcaaattgaac

SEQ ID NO: 5792479 - DNA, 25 bp, Homo sapien
cagcacagaggtgaaggaagacagt

SEQ ID NO: 5792480 - DNA, 25 bp, Homo sapien
ggccgggactgtcacttggtgatac

SEQ ID NO: 5792481 - DNA, 25 bp, Homo sapien
tggctggcggggacctggcaggtct

SEQ ID NO: 5792482 - DNA, 25 bp, Homo sapien
ggcctagcccagagacatggagagt

SEQ ID NO: 5792483 - DNA, 25 bp, Homo sapien
ggttggtcacccatctggtcaccaa

SEQ ID NO: 5792484 - DNA, 25 bp, Homo sapien
cccagctgttgcatatgcctgactt

SEQ ID NO: 5792485 - DNA, 25 bp, Homo sapien
tgaagatttctcgaatggacaagac

SEQ ID NO: 5792486 - DNA, 25 bp, Homo sapien
agctggactggggtacccgaccctc

SEQ ID NO: 5792487 - DNA, 25 bp, Homo sapien
cctagaggagggagtgaggctgctg

SEQ ID NO: 5792488 - DNA, 25 bp, Homo sapien
tgacaaggtgcagaaagatgacatt

SEQ ID NO: 5792489 - DNA, 25 bp, Homo sapien
tgggcaagcaatgctcggagctggg

SEQ ID NO: 5792490 - DNA, 25 bp, Homo sapien
cacctggcggtgatcacggggcaga

SEQ ID NO: 5792491 - DNA, 25 bp, Homo sapien
tgcgtgcactgcttcagagtggagc

SEQ ID NO: 5792492 - DNA, 25 bp, Homo sapien
gagcgtctggggctgcgcagcctgg

SEQ ID NO: 5792493 - DNA, 25 bp, Homo sapien
caagatcgaggtggacctggtaaca

SEQ ID NO: 5792494 - DNA, 25 bp, Homo sapien
aagaggtgcagcggaagcggaggaa

SEQ ID NO: 5792495 - DNA, 25 bp, Homo sapien
ttcagagtggagctcctgctgtgcc

SEQ ID NO: 5792496 - DNA, 25 bp, Homo sapien
tgagaaggacacccgaagcagcttc

SEQ ID NO: 5792497 - DNA, 25 bp, Homo sapien
tgcccacagtctggtgggcaagcaa

SEQ ID NO: 5792498 - DNA, 25 bp, Homo sapien
ccagtgtcattgagcagatagtcta

SEQ ID NO: 5792499 - DNA, 25 bp, Homo sapien
gactatgatacaaaaacttcagagg

SEQ ID NO: 5792500 - DNA, 25 bp, Homo sapien
gactgcccaatttaacaacctgggt

SEQ ID NO: 5792501 - DNA, 25 bp, Homo sapien
acatggagagttgctacaacccagg

SEQ ID NO: 5792502 - DNA, 25 bp, Homo sapien
cagtgcgagccgcaggccccggaga

SEQ ID NO: 5792503 - DNA, 25 bp, Homo sapien
cagatgtgcataaacagtatgccat

SEQ ID NO: 5792504 - DNA, 25 bp, Homo sapien
cccagaaacagctgatggcccctac

SEQ ID NO: 5792505 - DNA, 25 bp, Homo sapien
ccccggagatgctgcagcgagctcg

SEQ ID NO: 5792506 - DNA, 25 bp, Homo sapien
gaaagacctatcccactgtcaagat

SEQ ID NO: 5792507 - DNA, 25 bp, Homo sapien
gccagaagcccagggcagctgggca

SEQ ID NO: 5792508 - DNA, 25 bp, Homo sapien
tcggcgttgtcaacctcaccaacca

SEQ ID NO: 5792509 - DNA, 25 bp, Homo sapien
ggacagcgccacctgctgacggcgc

SEQ ID NO: 5792510 - DNA, 25 bp, Homo sapien
gcggaagcggaggaaggccttgccc

SEQ ID NO: 5792511 - DNA, 25 bp, Homo sapien
cagcgagctcgagagtacaacgcgc

SEQ ID NO: 5792512 - DNA, 25 bp, Homo sapien
ggagagttgctacaacccaggtctg

SEQ ID NO: 5792513 - DNA, 25 bp, Homo sapien
gatacagctctgcagaacctggagc

SEQ ID NO: 5792514 - DNA, 25 bp, Homo sapien
gctgcgcttctctgccttccttaga

SEQ ID NO: 5792515 - DNA, 25 bp, Homo sapien
actacgagggaccagccaagatcga

SEQ ID NO: 5792516 - DNA, 25 bp, Homo sapien
gcagcgcccgagccctactcgacta

SEQ ID NO: 5792517 - DNA, 25 bp, Homo sapien
aagccctgagtgcctggatctgctg

SEQ ID NO: 5792518 - DNA, 25 bp, Homo sapien
gggactgtcacttggtgatacagct

SEQ ID NO: 5792519 - DNA, 25 bp, Homo sapien
aggaggggacgtgtctgattccaaa

SEQ ID NO: 5792520 - DNA, 25 bp, Homo sapien
gaagctgggcccaccccctgagcca

SEQ ID NO: 5792521 - DNA, 25 bp, Homo sapien
agaggtgaaggaagacagtgcgtac

SEQ ID NO: 5792522 - DNA, 25 bp, Homo sapien
ttgcgggaaacacacccctgcacct

SEQ ID NO: 5792523 - DNA, 25 bp, Homo sapien
aacccaaggagccagccccagaaac

SEQ ID NO: 5792524 - DNA, 25 bp, Homo sapien
gacatgggcctagaggagggagtga

SEQ ID NO: 5792525 - DNA, 25 bp, Homo sapien
ccacctgcaccagacgcccctgcac

SEQ ID NO: 5792526 - DNA, 25 bp, Homo sapien
caccatggagccacccctgaccccg

SEQ ID NO: 5792527 - DNA, 25 bp, Homo sapien
gaatggacaagacagcaggctctgt

SEQ ID NO: 5792528 - DNA, 25 bp, Homo sapien
ccatcatccacgggcagaccagtgt

SEQ ID NO: 5792529 - DNA, 25 bp, Homo sapien
aggaagacagtgcgtacgggagcca

SEQ ID NO: 5792530 - DNA, 25 bp, Homo sapien
ccctgcccctgaagccagtcatctc

SEQ ID NO: 5792531 - DNA, 25 bp, Homo sapien
tacgagggaccagccaagatcgagg

SEQ ID NO: 5792532 - DNA, 25 bp, Homo sapien
ggacatgactgcccaatttaacaac

SEQ ID NO: 5792533 - DNA, 25 bp, Homo sapien
tacctggtgatcgtggaacagccta

SEQ ID NO: 5792534 - DNA, 25 bp, Homo sapien
tgtggggcccaaggacatgactgcc

SEQ ID NO: 5792535 - DNA, 25 bp, Homo sapien
ggacctggtaacacacagtgaccca

SEQ ID NO: 5792536 - DNA, 25 bp, Homo sapien
cggacacccccctatcacaagatga

SEQ ID NO: 5792537 - DNA, 25 bp, Homo sapien
tgcccagcacagaggtgaaggaaga

SEQ ID NO: 5792538 - DNA, 25 bp, Homo sapien
aagacctatcccactgtcaagatct

SEQ ID NO: 5792539 - DNA, 25 bp, Homo sapien
cttcccggaccccctgtacagcgtc

SEQ ID NO: 5792540 - DNA, 25 bp, Homo sapien
gccccagaaacagctgatggcccct

SEQ ID NO: 5792541 - DNA, 25 bp, Homo sapien
gccagccccagaaacagctgatggc

SEQ ID NO: 5792542 - DNA, 25 bp, Homo sapien
cgggcctagcccagagacatggaga

SEQ ID NO: 5792543 - DNA, 25 bp, Homo sapien
acgaacagccttgcatctagccaca

SEQ ID NO: 5792544 - DNA, 25 bp, Homo sapien
gcccaatttaacaacctgggtgtcc

SEQ ID NO: 5792545 - DNA, 25 bp, Homo sapien
gagtggagctcctgctgtgccccag

SEQ ID NO: 5792546 - DNA, 25 bp, Homo sapien
ggtgatggatctgagtatagtgcgg

SEQ ID NO: 5792547 - DNA, 25 bp, Homo sapien
cgacagacaacctcacccagtggca

SEQ ID NO: 5792548 - DNA, 25 bp, Homo sapien
gcagcctcggtttcttcccctcctc

SEQ ID NO: 5792549 - DNA, 25 bp, Homo sapien
ggtccagaaacccgagacaagctgc

SEQ ID NO: 5792550 - DNA, 25 bp, Homo sapien
tgagcagatagtctatgtcatccac

SEQ ID NO: 5792551 - DNA, 25 bp, Homo sapien
tgagtgcctggatctgctggtggac

SEQ ID NO: 5792552 - DNA, 25 bp, Homo sapien
ctcgtgctcatgcccacagtctggt

SEQ ID NO: 5792553 - DNA, 25 bp, Homo sapien
tgctcatgcccacagtctggtgggc

SEQ ID NO: 5792554 - DNA, 25 bp, Homo sapien
gctggctggcggggacctggcaggt

SEQ ID NO: 5792555 - DNA, 25 bp, Homo sapien
caccacgcccaggacctcggcgttg

SEQ ID NO: 5792556 - DNA, 25 bp, Homo sapien
cagctgatggcccctacctggtgat

SEQ ID NO: 5792557 - DNA, 25 bp, Homo sapien
acctagccatcatccacgggcagac

SEQ ID NO: 5792558 - DNA, 25 bp, Homo sapien
agccagtcagtggagcaggaggcag

SEQ ID NO: 5792559 - DNA, 25 bp, Homo sapien
gcgctgctggcgggacagcgccacc

SEQ ID NO: 5792560 - DNA, 25 bp, Homo sapien
tgctggcgggacagcgccacctgct

SEQ ID NO: 5792561 - DNA, 25 bp, Homo sapien
cacctggcagctggactggggtacc

SEQ ID NO: 5792562 - DNA, 25 bp, Homo sapien
gaggcagagaagctgggcccacccc

SEQ ID NO: 5792563 - DNA, 25 bp, Homo sapien
ttggggacttctctcccacagatgt

SEQ ID NO: 5792564 - DNA, 25 bp, Homo sapien
tttgtgacaaggtgcagaaagatga

SEQ ID NO: 5792565 - DNA, 25 bp, Homo sapien
cataaacagtatgccattgtgttcc

SEQ ID NO: 5792566 - DNA, 25 bp, Homo sapien
gcggggacctggcaggtctactgga

SEQ ID NO: 5792567 - DNA, 25 bp, Homo sapien
agaaggacacccgaagcagcttccg

SEQ ID NO: 5792568 - DNA, 25 bp, Homo sapien
ccttgcatctagccacagagatgga

SEQ ID NO: 5792569 - DNA, 25 bp, Homo sapien
aacctgaagatttctcgaatggaca

SEQ ID NO: 5792570 - DNA, 25 bp, Homo sapien
caaaaacttcagaggcagcggctcc

SEQ ID NO: 5792571 - DNA, 25 bp, Homo sapien
cagagccgggcctagcccagagaca

SEQ ID NO: 5792572 - DNA, 25 bp, Homo sapien
tcggtttcttcccctcctccctggc

SEQ ID NO: 5792573 - DNA, 25 bp, Homo sapien
gctctgggggtgcagccgggggcta

SEQ ID NO: 5792574 - DNA, 25 bp, Homo sapien
ctctgccacgggcacccccagcctc

SEQ ID NO: 5792575 - DNA, 25 bp, Homo sapien
ccggagatgctgcagcgagctcgag

SEQ ID NO: 5792576 - DNA, 25 bp, Homo sapien
agacatggagagttgctacaaccca

SEQ ID NO: 5792577 - DNA, 25 bp, Homo sapien
cctattaccctctggtggaagacaa

SEQ ID NO: 5792578 - DNA, 25 bp, Homo sapien
ccacacgcctcttgacctcacttgc

SEQ ID NO: 5792579 - DNA, 25 bp, Homo sapien
ggtgcactgacctgctgcctgcccc

SEQ ID NO: 5792580 - DNA, 25 bp, Homo sapien
ctatttcaaatcttatttaacaccc

SEQ ID NO: 5792581 - DNA, 25 bp, Homo sapien
cagagccgccgccacggcgggcgtc

SEQ ID NO: 5792582 - DNA, 25 bp, Homo sapien
gcgggtaggtgcagacccagctctg

SEQ ID NO: 5792583 - DNA, 25 bp, Homo sapien
agccctactcgactacggcgtcacc

SEQ ID NO: 5792584 - DNA, 25 bp, Homo sapien
catctggcgctgcgggcaggcgctg

SEQ ID NO: 5792585 - DNA, 25 bp, Homo sapien
gacagcaaatctccgggggcatcaa

SEQ ID NO: 5792586 - DNA, 25 bp, Homo sapien
ccgaagcagcttccggggccacacg

SEQ ID NO: 5792587 - DNA, 25 bp, Homo sapien
tggctgtgaaggcccctcccatgga

SEQ ID NO: 5792588 - DNA, 25 bp, Homo sapien
gtatccagtacacctggcggtccga

SEQ ID NO: 5792589 - DNA, 25 bp, Homo sapien
ggggttggtcacccatctggtcacc

SEQ ID NO: 5792590 - DNA, 25 bp, Homo sapien
tccagtgagaagggccgaaagacct

SEQ ID NO: 5792591 - DNA, 25 bp, Homo sapien
cccagcagggccgggactgtcactt

SEQ ID NO: 5792592 - DNA, 25 bp, Homo sapien
atctccgggggcatcaaacctgaag

SEQ ID NO: 5792593 - DNA, 25 bp, Homo sapien
cgaccctcacccgcctccttctgaa

SEQ ID NO: 5792594 - DNA, 25 bp, Homo sapien
gcggcctgtaacagtgtttctgcaa

SEQ ID NO: 5792595 - DNA, 25 bp, Homo sapien
gctccgctctaggccccagggcctt

SEQ ID NO: 5792596 - DNA, 25 bp, Homo sapien
tctcgaatggacaagacagcaggct

SEQ ID NO: 5792597 - DNA, 25 bp, Homo sapien
ccggggccacacgcctcttgacctc

SEQ ID NO: 5792598 - DNA, 25 bp, Homo sapien
catgggcctagaggagggagtgagg

SEQ ID NO: 5792599 - DNA, 25 bp, Homo sapien
gccacggcgggcgtctaaaattctg

SEQ ID NO: 5792600 - DNA, 25 bp, Homo sapien
accccctgagccaccaggagggctc

SEQ ID NO: 5792601 - DNA, 25 bp, Homo sapien
atcacggggcagacgagtgtggtga

SEQ ID NO: 5792602 - DNA, 25 bp, Homo sapien
actagacagagccgggcctagccca

SEQ ID NO: 5792603 - DNA, 25 bp, Homo sapien
gcacagaggtgaaggaagacagtgc

SEQ ID NO: 5792604 - DNA, 25 bp, Homo sapien
ttacggaggccgagcagcgggagct

SEQ ID NO: 5792605 - DNA, 25 bp, Homo sapien
tgaagtggaggccactgagcggcag

SEQ ID NO: 5792606 - DNA, 25 bp, Homo sapien
ggagcagctgctagacgggccagaa

SEQ ID NO: 5792607 - DNA, 25 bp, Homo sapien
atcaaacctgaagatttctcgaatg

SEQ ID NO: 5792608 - DNA, 25 bp, Homo sapien
acattgaggttcggttctatgagga

SEQ ID NO: 5792609 - DNA, 25 bp, Homo sapien
ccttacggaggccgagcagcgggag

SEQ ID NO: 5792610 - DNA, 25 bp, Homo sapien
cccctcagttgggacaaataaagga

SEQ ID NO: 5792611 - DNA, 25 bp, Homo sapien
ctcctgctgtgccccagctgttgca

SEQ ID NO: 5792612 - DNA, 25 bp, Homo sapien
ctgctaaatgctgctcagaacacca

SEQ ID NO: 5792613 - DNA, 25 bp, Homo sapien
tgagctgctgcgtgcactgcttcag

SEQ ID NO: 5792614 - DNA, 25 bp, Homo sapien
gtatagtgcggctgcgcttctctgc

SEQ ID NO: 5792615 - DNA, 25 bp, Homo sapien
aatcttatttaacaccccacaccca

SEQ ID NO: 5792616 - DNA, 25 bp, Homo sapien
tgttgcatatgcctgactttgaggg

SEQ ID NO: 5792617 - DNA, 25 bp, Homo sapien
ttgagggactgtatccagtacacct

SEQ ID NO: 5792618 - DNA, 25 bp, Homo sapien
ggacgagaacggagacacaccactg

SEQ ID NO: 5792619 - DNA, 25 bp, Homo sapien
aaattgaactcctccattgtggaac

SEQ ID NO: 5792620 - DNA, 25 bp, Homo sapien
acatgggtggaggctctgggggtgc

SEQ ID NO: 5792621 - DNA, 25 bp, Homo sapien
gaaacccgagacaagctgcccagca

SEQ ID NO: 5792622 - DNA, 25 bp, Homo sapien
tagaggagggagtgaggctgctgag

SEQ ID NO: 5792623 - DNA, 25 bp, Homo sapien
ggaggccgagcagcgggagctggag

SEQ ID NO: 5792624 - DNA, 25 bp, Homo sapien
gacctggcaggtctactggaggccc

SEQ ID NO: 5792625 - DNA, 25 bp, Homo sapien
caggtgcactgacctgctgcctgcc

SEQ ID NO: 5792626 - DNA, 25 bp, Homo sapien
gctacaacccaggtctggatggtat

SEQ ID NO: 5792627 - DNA, 25 bp, Homo sapien
gaggggacgtgtctgattccaaaca

SEQ ID NO: 5792628 - DNA, 25 bp, Homo sapien
ctctgatagcgactcggactctgaa

SEQ ID NO: 5792629 - DNA, 25 bp, Homo sapien
ccccacctatttcaaatcttattta

SEQ ID NO: 5792630 - DNA, 25 bp, Homo sapien
ctggatggtattattgaatatgatg

SEQ ID NO: 5792631 - DNA, 25 bp, Homo sapien
gtctggggctgcgcagcctggtaga

SEQ ID NO: 5792632 - DNA, 25 bp, Homo sapien
gtgcagacccagctctgctggatcg

SEQ ID NO: 5792633 - DNA, 25 bp, Homo sapien
agtgtggtgagctttctgctgcggg

SEQ ID NO: 5792634 - DNA, 25 bp, Homo sapien
ctactcgactacggcgtcaccgcgg

SEQ ID NO: 5792635 - DNA, 25 bp, Homo sapien
ctggaggaggtggcagcctcggttt

SEQ ID NO: 5792636 - DNA, 25 bp, Homo sapien
cccctccaggaccccccagtgcgag

SEQ ID NO: 5792637 - DNA, 25 bp, Homo sapien
gagatgaagtttatctgctttgtga

SEQ ID NO: 5792638 - DNA, 25 bp, Homo sapien
ctcagccatgcatctggcgctgcgg

SEQ ID NO: 5792639 - DNA, 25 bp, Homo sapien
gtccggcgcgggccccatgggctgc

SEQ ID NO: 5792640 - DNA, 25 bp, Homo sapien
aagatgacattgaggttcggttcta

SEQ ID NO: 5792641 - DNA, 25 bp, Homo sapien
gctgctggcgggacagcgccacctg

SEQ ID NO: 5792642 - DNA, 25 bp, Homo sapien
tgaagattgagcggcctgtaacagt

SEQ ID NO: 5792643 - DNA, 25 bp, Homo sapien
acagtgcgtacgggagccagtcagt

SEQ ID NO: 5792644 - DNA, 25 bp, Homo sapien
gcggtccgagcccgaagccctgagt

SEQ ID NO: 5792645 - DNA, 25 bp, Homo sapien
tcgactacggcgtcaccgcggacgc

SEQ ID NO: 5792646 - DNA, 25 bp, Homo sapien
aggtgaaggaagacagtgcgtacgg

SEQ ID NO: 5792647 - DNA, 25 bp, Homo sapien
cggactctgaagggcctgagaagga

SEQ ID NO: 5792648 - DNA, 25 bp, Homo sapien
tagcccagagacatggagagttgct

SEQ ID NO: 5792649 - DNA, 25 bp, Homo sapien
gcaaatctccgggggcatcaaacct

SEQ ID NO: 5792650 - DNA, 25 bp, Homo sapien
cgcagcgcagcgcccgagccctact

SEQ ID NO: 5792651 - DNA, 25 bp, Homo sapien
gaagaccttgctgctaaatgctgct

SEQ ID NO: 5792652 - DNA, 25 bp, Homo sapien
cctccattgtggaacccaaggagcc

SEQ ID NO: 5792653 - DNA, 25 bp, Homo sapien
ggcgtcaccgcggacgcgcgcgcgc

SEQ ID NO: 5792654 - DNA, 25 bp, Homo sapien
gatagtctatgtcatccaccacgcc

SEQ ID NO: 5792655 - DNA, 25 bp, Homo sapien
ggaggaggtggcagcctcggtttct

SEQ ID NO: 5792656 - DNA, 25 bp, Homo sapien
gtggaacccaaggagccagccccag

SEQ ID NO: 5792657 - DNA, 25 bp, Homo sapien
ctggtgctcctgagctgctgcgtgc

SEQ ID NO: 5792658 - DNA, 25 bp, Homo sapien
caagcaatgctcggagctggggatc

SEQ ID NO: 5792659 - DNA, 25 bp, Homo sapien
tgggtgtcctgcatgtgactaagaa

SEQ ID NO: 5792660 - DNA, 25 bp, Homo sapien
gtgatcgtggaacagcctaagcaga

SEQ ID NO: 5792661 - DNA, 25 bp, Homo sapien
gggaaacacacccctgcacctggca

SEQ ID NO: 5792662 - DNA, 25 bp, Homo sapien
cccctcccatggaggactgcccggt

SEQ ID NO: 5792663 - DNA, 25 bp, Homo sapien
atccagtacacctggcggtccgagc

SEQ ID NO: 5792664 - DNA, 25 bp, Homo sapien
ccacacccacccctcagttgggaca

SEQ ID NO: 5792665 - DNA, 25 bp, Homo sapien
tgcaactgaaacgcaagcgaggagg

SEQ ID NO: 5792666 - DNA, 25 bp, Homo sapien
cagtgagaagggccgaaagacctat

SEQ ID NO: 5792667 - DNA, 25 bp, Homo sapien
acggagacacaccactgcacctagc

SEQ ID NO: 5792668 - DNA, 25 bp, Homo sapien
cggaggagctggaggaggtggcagc

SEQ ID NO: 5792669 - DNA, 25 bp, Homo sapien
taaacagtatgccattgtgttccgg

SEQ ID NO: 5792670 - DNA, 25 bp, Homo sapien
tctgtaactacgagggaccagccaa

SEQ ID NO: 5792671 - DNA, 25 bp, Homo sapien
acagccttgcatctagccacagaga

SEQ ID NO: 5792672 - DNA, 25 bp, Homo sapien
ggccccggagatgctgcagcgagct

SEQ ID NO: 5792673 - DNA, 25 bp, Homo sapien
acagtgacccacctcgtgctcatgc

SEQ ID NO: 5792674 - DNA, 25 bp, Homo sapien
cacttggtgatacagctctgcagaa

SEQ ID NO: 5792675 - DNA, 25 bp, Homo sapien
gggtaggtgcagacccagctctgct

SEQ ID NO: 5792676 - DNA, 25 bp, Homo sapien
gtcacttggtgatacagctctgcag

SEQ ID NO: 5792677 - DNA, 25 bp, Homo sapien
tgacccacctcgtgctcatgcccac

SEQ ID NO: 5792678 - DNA, 25 bp, Homo sapien
ccggagccactagacagagccgggc

SEQ ID NO: 5792679 - DNA, 25 bp, Homo sapien
gatgacattgaggttcggttctatg

SEQ ID NO: 5792680 - DNA, 25 bp, Homo sapien
ccagggccttacggaggccgagcag

SEQ ID NO: 5792681 - DNA, 25 bp, Homo sapien
aagccgcggagccgagcgccccctc

SEQ ID NO: 5792682 - DNA, 25 bp, Homo sapien
ctccctgcccctgaagccagtcatc

SEQ ID NO: 5792683 - DNA, 25 bp, Homo sapien
tagcgactcggactctgaagggcct

SEQ ID NO: 5792684 - DNA, 25 bp, Homo sapien
gtgttccggacacccccctatcaca

SEQ ID NO: 5792685 - DNA, 25 bp, Homo sapien
ccaaagaactgaagaaggtgatgga

SEQ ID NO: 5792686 - DNA, 25 bp, Homo sapien
tcacccagtggcagcctcctgcgca

SEQ ID NO: 5792687 - DNA, 25 bp, Homo sapien
acctcgtgctcatgcccacagtctg

SEQ ID NO: 5792688 - DNA, 25 bp, Homo sapien
gcgagccgcaggccccggagatgct

SEQ ID NO: 5792689 - DNA, 25 bp, Homo sapien
cgcaggacgagaacggagacacacc

SEQ ID NO: 5792690 - DNA, 25 bp, Homo sapien
gccgccgccacggcgggcgtctaaa

SEQ ID NO: 5792691 - DNA, 25 bp, Homo sapien
acaagctgcccagcacagaggtgaa

SEQ ID NO: 5792692 - DNA, 25 bp, Homo sapien
acctatttcaaatcttatttaacac

SEQ ID NO: 5792693 - DNA, 25 bp, Homo sapien
gacctcggcgttgtcaacctcacca

SEQ ID NO: 5792694 - DNA, 25 bp, Homo sapien
gactgcccggtgcctccagtgagaa

SEQ ID NO: 5792695 - DNA, 25 bp, Homo sapien
tcttatttaacaccccacacccacc

SEQ ID NO: 5792696 - DNA, 25 bp, Homo sapien
tcctgcgcagctacgagctggctgg

SEQ ID NO: 5792697 - DNA, 25 bp, Homo sapien
ggagatgctgcagcgagctcgagag

SEQ ID NO: 5792698 - DNA, 25 bp, Homo sapien
atgatacaaaaacttcagaggcagc

SEQ ID NO: 5792699 - DNA, 25 bp, Homo sapien
ctgtctgacatgggcctagaggagg

SEQ ID NO: 5792700 - DNA, 25 bp, Homo sapien
ttgcatctagccacagagatggagg

SEQ ID NO: 5792701 - DNA, 25 bp, Homo sapien
gacctgctgcctgcccccagccccc

SEQ ID NO: 5792702 - DNA, 25 bp, Homo sapien
aagacagcaggctctgtgcggggtg

SEQ ID NO: 5792703 - DNA, 25 bp, Homo sapien
cagcaaatctccgggggcatcaaac

SEQ ID NO: 5792704 - DNA, 25 bp, Homo sapien
atatgcctgactttgagggactgta

SEQ ID NO: 5792705 - DNA, 25 bp, Homo sapien
tcattgagcagatagtctatgtcat

SEQ ID NO: 5792706 - DNA, 25 bp, Homo sapien
ctctaggccccagggccttacggag

SEQ ID NO: 5792707 - DNA, 25 bp, Homo sapien
gaggatgatgagaatggatggcagg

SEQ ID NO: 5792708 - DNA, 25 bp, Homo sapien
agggcctgagaaggacacccgaagc

SEQ ID NO: 5792709 - DNA, 25 bp, Homo sapien
ccccacacccacccctcagttggga

SEQ ID NO: 5792710 - DNA, 25 bp, Homo sapien
agttgggacaaataaaggattctca

SEQ ID NO: 5792711 - DNA, 25 bp, Homo sapien
cagatagtctatgtcatccaccacg

SEQ ID NO: 5792712 - DNA, 25 bp, Homo sapien
ggccggagccactagacagagccgg

SEQ ID NO: 5792713 - DNA, 25 bp, Homo sapien
ccggcgcgggccccatgggctgcta

SEQ ID NO: 5792714 - DNA, 25 bp, Homo sapien
ctcggactctgaagggcctgagaag

SEQ ID NO: 5792715 - DNA, 25 bp, Homo sapien
gaaacacacccctgcacctggcagc

SEQ ID NO: 5792716 - DNA, 25 bp, Homo sapien
gagcccctgtgcccactgccttcac

SEQ ID NO: 5792717 - DNA, 25 bp, Homo sapien
caacctcaccaaccacctgcaccag

SEQ ID NO: 5792718 - DNA, 25 bp, Homo sapien
gtctatgtcatccaccacgcccagg

SEQ ID NO: 5792719 - DNA, 25 bp, Homo sapien
ccctgaccccgcccagcccagcagg

SEQ ID NO: 5792720 - DNA, 25 bp, Homo sapien
gtctaaaattctgggaagcagaacc

SEQ ID NO: 5792721 - DNA, 25 bp, Homo sapien
gggcccaaggacatgactgcccaat

SEQ ID NO: 5792722 - DNA, 25 bp, Homo sapien
aaggcccctcccatggaggactgcc

SEQ ID NO: 5792723 - DNA, 25 bp, Homo sapien
cgagccctactcgactacggcgtca

SEQ ID NO: 5792724 - DNA, 25 bp, Homo sapien
ggtgcagaaagatgacattgaggtt

SEQ ID NO: 5792725 - DNA, 25 bp, Homo sapien
cccctatcacaagatgaagattgag

SEQ ID NO: 5792726 - DNA, 25 bp, Homo sapien
accctctggtggaagacaaggaaga

SEQ ID NO: 5792727 - DNA, 25 bp, Homo sapien
ctggggctgcgcagcctggtagaca

SEQ ID NO: 5792728 - DNA, 25 bp, Homo sapien
tggggactatgatacaaaaacttca

SEQ ID NO: 5792729 - DNA, 25 bp, Homo sapien
acaacctgggtgtcctgcatgtgac

SEQ ID NO: 5792730 - DNA, 25 bp, Homo sapien
gagctggagcaagaggccaaagaac

SEQ ID NO: 5792731 - DNA, 25 bp, Homo sapien
ttcacctattaccctctggtggaag

SEQ ID NO: 5792732 - DNA, 25 bp, Homo sapien
cgtgctcatgcccacagtctggtgg

SEQ ID NO: 5792733 - DNA, 25 bp, Homo sapien
catccaccacgcccaggacctcggc

SEQ ID NO: 5792734 - DNA, 25 bp, Homo sapien
gagccgccgccacggcgggcgtcta

SEQ ID NO: 5792735 - DNA, 25 bp, Homo sapien
cgtgcactgcttcagagtggagctc

SEQ ID NO: 5792736 - DNA, 25 bp, Homo sapien
ggggacttctctcccacagatgtgc

SEQ ID NO: 5792737 - DNA, 25 bp, Homo sapien
ggtggagatgaagtttatctgcttt

SEQ ID NO: 5792738 - DNA, 25 bp, Homo sapien
cacccccctatcacaagatgaagat

SEQ ID NO: 5792739 - DNA, 25 bp, Homo sapien
tcccactgtcaagatctgtaactac

SEQ ID NO: 5792740 - DNA, 25 bp, Homo sapien
tacagcgtccccacctatttcaaat

SEQ ID NO: 5792741 - DNA, 25 bp, Homo sapien
acccagtggcagcctcctgcgcagc

SEQ ID NO: 5792742 - DNA, 25 bp, Homo sapien
atggcccctacctggtgatcgtgga

SEQ ID NO: 5792743 - DNA, 25 bp, Homo sapien
ccatggagccacccctgaccccgcc

SEQ ID NO: 5792744 - DNA, 25 bp, Homo sapien
aagcagagaggcttccgatttcgat

SEQ ID NO: 5792745 - DNA, 25 bp, Homo sapien
gccgccacggtgcccagcagggact

SEQ ID NO: 5792746 - DNA, 25 bp, Homo sapien
gaacgctcgcacctttgcgggaaac

SEQ ID NO: 5792747 - DNA, 25 bp, Homo sapien
cagaacctggagcagctgctagacg

SEQ ID NO: 5792748 - DNA, 25 bp, Homo sapien
gatggcaggcctttggggacttctc

SEQ ID NO: 5792749 - DNA, 25 bp, Homo sapien
ggcagagaagctgggcccaccccct

SEQ ID NO: 5792750 - DNA, 25 bp, Homo sapien
gccccagctgttgcatatgcctgac

SEQ ID NO: 5792751 - DNA, 25 bp, Homo sapien
cagacgcccctgcacctggcggtga

SEQ ID NO: 5792752 - DNA, 25 bp, Homo sapien
cgggagccagtcagtggagcaggag

SEQ ID NO: 5792753 - DNA, 25 bp, Homo sapien
gtagacacgtaccgacagacaacct

SEQ ID NO: 5792754 - DNA, 25 bp, Homo sapien
gggacctggcaggtctactggaggc

SEQ ID NO: 5792755 - DNA, 25 bp, Homo sapien
tgcgcttctctgccttccttagagc

SEQ ID NO: 5792756 - DNA, 25 bp, Homo sapien
tgagccaccaggagggctctgccac

SEQ ID NO: 5792757 - DNA, 25 bp, Homo sapien
cagccatgcatctggcgctgcgggc

SEQ ID NO: 5792758 - DNA, 25 bp, Homo sapien
tgcactgacctgctgcctgccccca

SEQ ID NO: 5792759 - DNA, 25 bp, Homo sapien
accaagctccgggccaacgtgaacg

SEQ ID NO: 5792760 - DNA, 25 bp, Homo sapien
acctcaccaaccacctgcaccagac

SEQ ID NO: 5792761 - DNA, 25 bp, Homo sapien
cgagcccgaagccctgagtgcctgg

SEQ ID NO: 5792762 - DNA, 25 bp, Homo sapien
accagagccgccgccacggcgggcg

SEQ ID NO: 5792763 - DNA, 25 bp, Homo sapien
agctgggcccaccccctgagccacc

SEQ ID NO: 5792764 - DNA, 25 bp, Homo sapien
gcagctacgagctggctggcgggga

SEQ ID NO: 5792765 - DNA, 25 bp, Homo sapien
attctcatgggaaggggaggacccc

SEQ ID NO: 5792766 - DNA, 25 bp, Homo sapien
ctgctgcgtgcactgcttcagagtg

SEQ ID NO: 5792767 - DNA, 25 bp, Homo sapien
aggactgcccggtgcctccagtgag

SEQ ID NO: 5792768 - DNA, 25 bp, Homo sapien
ggcagagcgtctggggctgcgcagc

SEQ ID NO: 5792769 - DNA, 25 bp, Homo sapien
caatgctcggagctggggatctgcg

SEQ ID NO: 5792770 - DNA, 25 bp, Homo sapien
gccgcaaccagagccgccgccacgg

SEQ ID NO: 5792771 - DNA, 25 bp, Homo sapien
ccctgtctgacatgggcctagagga

SEQ ID NO: 5792772 - DNA, 25 bp, Homo sapien
gggaggaagccgcggagccgagcgc

SEQ ID NO: 5792773 - DNA, 25 bp, Homo sapien
ctcccagcccatccatgacagcaaa

SEQ ID NO: 5792774 - DNA, 25 bp, Homo sapien
aacctgggtgtcctgcatgtgacta

SEQ ID NO: 5792775 - DNA, 25 bp, Homo sapien
tagtctatgtcatccaccacgccca

SEQ ID NO: 5792776 - DNA, 25 bp, Homo sapien
gactcagccatgcatctggcgctgc

SEQ ID NO: 5792777 - DNA, 25 bp, Homo sapien
aaccacctgcaccagacgcccctgc

SEQ ID NO: 5792778 - DNA, 25 bp, Homo sapien
ccagtacacctggcggtccgagccc

SEQ ID NO: 5792779 - DNA, 25 bp, Homo sapien
gcaccagacgcccctgcacctggcg

SEQ ID NO: 5792780 - DNA, 25 bp, Homo sapien
ccgggccaacgtgaacgctcgcacc

SEQ ID NO: 5792781 - DNA, 25 bp, Homo sapien
ctggtcaccaagctccgggccaacg

SEQ ID NO: 5792782 - DNA, 25 bp, Homo sapien
cagccaagatcgaggtggacctggt

SEQ ID NO: 5792783 - DNA, 25 bp, Homo sapien
gctgcccagcacagaggtgaaggaa

SEQ ID NO: 5792784 - DNA, 25 bp, Homo sapien
ctcctgagctgctgcgtgcactgct

SEQ ID NO: 5792785 - DNA, 25 bp, Homo sapien
ttggtcacccatctggtcaccaagc

SEQ ID NO: 5792786 - DNA, 25 bp, Homo sapien
cctggcctacagcccctaccagtcc

SEQ ID NO: 5792787 - DNA, 25 bp, Homo sapien
ggaggactgcccggtgcctccagtg

SEQ ID NO: 5792788 - DNA, 25 bp, Homo sapien
ggtccgagcccgaagccctgagtgc

SEQ ID NO: 5792789 - DNA, 25 bp, Homo sapien
gcctgactttgagggactgtatcca

SEQ ID NO: 5792790 - DNA, 25 bp, Homo sapien
tgaagtttatctgctttgtgacaag

SEQ ID NO: 5792791 - DNA, 25 bp, Homo sapien
acctttgcgggaaacacacccctgc

SEQ ID NO: 5792792 - DNA, 25 bp, Homo sapien
ttccggggccacacgcctcttgacc

SEQ ID NO: 5792793 - DNA, 25 bp, Homo sapien
ttccaaacagttcacctattaccct

SEQ ID NO: 5792794 - DNA, 25 bp, Homo sapien
ttaccctctggtggaagacaaggaa

SEQ ID NO: 5792795 - DNA, 25 bp, Homo sapien
gggactatgatacaaaaacttcaga

SEQ ID NO: 5792796 - DNA, 25 bp, Homo sapien
gggctacggaggagctggaggaggt

SEQ ID NO: 5792797 - DNA, 25 bp, Homo sapien
ccccagggccttacggaggccgagc

SEQ ID NO: 5792798 - DNA, 25 bp, Homo sapien
ggcgcaggacgagaacggagacaca

SEQ ID NO: 5792799 - DNA, 25 bp, Homo sapien
atgtgactaagaagaacatgatggg

SEQ ID NO: 5792800 - DNA, 25 bp, Homo sapien
accagacgcccctgcacctggcggt

SEQ ID NO: 5792801 - DNA, 25 bp, Homo sapien
tcaagatctgtaactacgagggacc

SEQ ID NO: 5792802 - DNA, 25 bp, Homo sapien
ttccttagagccagtgatggctcct

SEQ ID NO: 5792803 - DNA, 25 bp, Homo sapien
tctctgccttccttagagccagtga

SEQ ID NO: 5792804 - DNA, 25 bp, Homo sapien
cgttgtcaacctcaccaaccacctg

SEQ ID NO: 5792805 - DNA, 25 bp, Homo sapien
gcccggtgcctccagtgagaagggc

SEQ ID NO: 5792806 - DNA, 25 bp, Homo sapien
cgggacagcgccacctgctgacggc

SEQ ID NO: 5792807 - DNA, 25 bp, Homo sapien
ccagcccagcagggccgggactgtc

SEQ ID NO: 5792808 - DNA, 25 bp, Homo sapien
gccaagatcgaggtggacctggtaa

SEQ ID NO: 5792809 - DNA, 25 bp, Homo sapien
ggcgggacagcgccacctgctgacg

SEQ ID NO: 5792810 - DNA, 25 bp, Homo sapien
tcgggggtggctcccacatgggtgg

SEQ ID NO: 5792811 - DNA, 25 bp, Homo sapien
gacaaataaaggattctcatgggaa

SEQ ID NO: 5792812 - DNA, 25 bp, Homo sapien
attgagcagatagtctatgtcatcc

SEQ ID NO: 5792813 - DNA, 25 bp, Homo sapien
ccagtgatggctccttctccctgcc

SEQ ID NO: 5792814 - DNA, 25 bp, Homo sapien
acaaggtgcagaaagatgacattga

SEQ ID NO: 5792815 - DNA, 25 bp, Homo sapien
gctggcggggacctggcaggtctac

SEQ ID NO: 5792816 - DNA, 25 bp, Homo sapien
gatctgtaactacgagggaccagcc

SEQ ID NO: 5792817 - DNA, 25 bp, Homo sapien
gcagcctggtagacacgtaccgaca

SEQ ID NO: 5792818 - DNA, 25 bp, Homo sapien
gcccaggacctcggcgttgtcaacc

SEQ ID NO: 5792819 - DNA, 25 bp, Homo sapien
tttaacaccccacacccacccctca

SEQ ID NO: 5792820 - DNA, 25 bp, Homo sapien
tctgccttccttagagccagtgatg

SEQ ID NO: 5792821 - DNA, 25 bp, Homo sapien
acccacccctcagttgggacaaata

SEQ ID NO: 5792822 - DNA, 25 bp, Homo sapien
cagcagggccgggactgtcacttgg

SEQ ID NO: 5792823 - DNA, 25 bp, Homo sapien
cacccctgcacctggcagctggact

SEQ ID NO: 5792824 - DNA, 25 bp, Homo sapien
ggggtggagatgaagtttatctgct

SEQ ID NO: 5792825 - DNA, 25 bp, Homo sapien
gcgcagcgcccgagccctactcgac

SEQ ID NO: 5792826 - DNA, 25 bp, Homo sapien
acggcgcaggacgagaacggagaca

SEQ ID NO: 5792827 - DNA, 25 bp, Homo sapien
ccgatttcgatatggctgtgaaggc

SEQ ID NO: 5792828 - DNA, 25 bp, Homo sapien
ctggggttggtcacccatctggtca

SEQ ID NO: 5792829 - DNA, 25 bp, Homo sapien
cagcgtccccacctatttcaaatct

SEQ ID NO: 5792830 - DNA, 25 bp, Homo sapien
gtgaacgctcgcacctttgcgggaa

SEQ ID NO: 5792831 - DNA, 25 bp, Homo sapien
ggaccagccaagatcgaggtggacc

SEQ ID NO: 5792832 - DNA, 25 bp, Homo sapien
tgacctcacttgcagcaccaaggtg

SEQ ID NO: 5792833 - DNA, 25 bp, Homo sapien
ctccgggggcatcaaacctgaagat

SEQ ID NO: 5792834 - DNA, 25 bp, Homo sapien
aggcctttggggacttctctcccac

SEQ ID NO: 5792835 - DNA, 25 bp, Homo sapien
ctatgatacaaaaacttcagaggca

SEQ ID NO: 5792836 - DNA, 25 bp, Homo sapien
ttgagcggcctgtaacagtgtttct

SEQ ID NO: 5792837 - DNA, 25 bp, Homo sapien
gcctaagcagagaggcttccgattt

SEQ ID NO: 5792838 - DNA, 25 bp, Homo sapien
gagctggctggcggggacctggcag

SEQ ID NO: 5792839 - DNA, 25 bp, Homo sapien
cacctattaccctctggtggaagac

SEQ ID NO: 5792840 - DNA, 25 bp, Homo sapien
atccatgctgaaaacgaggagcccc

SEQ ID NO: 5792841 - DNA, 25 bp, Homo sapien
ctgcaccagacgcccctgcacctgg

SEQ ID NO: 5792842 - DNA, 25 bp, Homo sapien
cccccagtgcgagccgcaggccccg

SEQ ID NO: 5792843 - DNA, 25 bp, Homo sapien
agccttgcatctagccacagagatg

SEQ ID NO: 5792844 - DNA, 25 bp, Homo sapien
cgggcacccccagcctcaggtgcac

SEQ ID NO: 5792845 - DNA, 25 bp, Homo sapien
gccccctccaggaccccccagtgcg

SEQ ID NO: 5792846 - DNA, 25 bp, Homo sapien
cttgacctcacttgcagcaccaagg

SEQ ID NO: 5792847 - DNA, 25 bp, Homo sapien
ggagctggggttggtcacccatctg

SEQ ID NO: 5792848 - DNA, 25 bp, Homo sapien
aatttaacaacctgggtgtcctgca

SEQ ID NO: 5792849 - DNA, 25 bp, Homo sapien
tcccggaccccctgtacagcgtccc

SEQ ID NO: 5792850 - DNA, 25 bp, Homo sapien
ccactgtcaagatctgtaactacga

SEQ ID NO: 5792851 - DNA, 25 bp, Homo sapien
ccacccctcagttgggacaaataaa

SEQ ID NO: 5792852 - DNA, 25 bp, Homo sapien
ccaccaggagggctctgccacgggc

SEQ ID NO: 5792853 - DNA, 25 bp, Homo sapien
atgctcggagctggggatctgcgcc

SEQ ID NO: 5792854 - DNA, 25 bp, Homo sapien
tacagctctgcagaacctggagcag

SEQ ID NO: 5792855 - DNA, 25 bp, Homo sapien
gagcaggaggcagagaagctgggcc

SEQ ID NO: 5792856 - DNA, 25 bp, Homo sapien
tccacgggcagaccagtgtcattga

SEQ ID NO: 5792857 - DNA, 25 bp, Homo sapien
gagtatagtgcggctgcgcttctct

SEQ ID NO: 5792858 - DNA, 25 bp, Homo sapien
gcccatccatgacagcaaatctccg

SEQ ID NO: 5792859 - DNA, 25 bp, Homo sapien
aacacacccctgcacctggcagctg

SEQ ID NO: 5792860 - DNA, 25 bp, Homo sapien
aagaacatgatggggactatgatac

SEQ ID NO: 5792861 - DNA, 25 bp, Homo sapien
gcccagagacatggagagttgctac

SEQ ID NO: 5792862 - DNA, 25 bp, Homo sapien
cacctggcggtccgagcccgaagcc

SEQ ID NO: 5792863 - DNA, 25 bp, Homo sapien
ctcaccaaccacctgcaccagacgc

SEQ ID NO: 5792864 - DNA, 25 bp, Homo sapien
gtctgacatgggcctagaggaggga

SEQ ID NO: 5792865 - DNA, 25 bp, Homo sapien
taaatgctgctcagaacaccatgga

SEQ ID NO: 5792866 - DNA, 25 bp, Homo sapien
tgcactgcttcagagtggagctcct

SEQ ID NO: 5792867 - DNA, 25 bp, Homo sapien
agccagtgatggctccttctccctg

SEQ ID NO: 5792868 - DNA, 25 bp, Homo sapien
gcaggcctttggggacttctctccc

SEQ ID NO: 5792869 - DNA, 25 bp, Homo sapien
ctgacctgctgcctgcccccagccc

SEQ ID NO: 5792870 - DNA, 25 bp, Homo sapien
ccgcccagcccagcagggccgggac

SEQ ID NO: 5792871 - DNA, 25 bp, Homo sapien
cagtatgccattgtgttccggacac

SEQ ID NO: 5792872 - DNA, 25 bp, Homo sapien
aagtggaggccactgagcggcaggg

SEQ ID NO: 5792873 - DNA, 25 bp, Homo sapien
gtacaacgcgcgcctgttcggcctg

SEQ ID NO: 5792874 - DNA, 25 bp, Homo sapien
agcaatgctcggagctggggatctg

SEQ ID NO: 5792875 - DNA, 25 bp, Homo sapien
accagccaagatcgaggtggacctg

SEQ ID NO: 5792876 - DNA, 25 bp, Homo sapien
aggcttccgatttcgatatggctgt

SEQ ID NO: 5792877 - DNA, 25 bp, Homo sapien
cagacgagtgtggtgagctttctgc

SEQ ID NO: 5792878 - DNA, 25 bp, Homo sapien
agagaggcttccgatttcgatatgg

SEQ ID NO: 5792879 - DNA, 25 bp, Homo sapien
gaggagggagtgaggctgctgaggg

SEQ ID NO: 5792880 - DNA, 25 bp, Homo sapien
ctctggtggaagacaaggaagaggt

SEQ ID NO: 5792881 - DNA, 25 bp, Homo sapien
ggaagccgcggagccgagcgccccc

SEQ ID NO: 5792882 - DNA, 25 bp, Homo sapien
cctccctggcctacagcccctacca

SEQ ID NO: 5792883 - DNA, 25 bp, Homo sapien
cctgctgtgccccagctgttgcata

SEQ ID NO: 5792884 - DNA, 25 bp, Homo sapien
ctggactggggtacccgaccctcac

SEQ ID NO: 5792885 - DNA, 25 bp, Homo sapien
gagcggcctgtaacagtgtttctgc

SEQ ID NO: 5792886 - DNA, 25 bp, Homo sapien
gcaggaggcagagaagctgggccca

SEQ ID NO: 5792887 - DNA, 25 bp, Homo sapien
ggcctagaggagggagtgaggctgc

SEQ ID NO: 5792888 - DNA, 25 bp, Homo sapien
gccgcggagccgagcgccccctcca

SEQ ID NO: 5792889 - DNA, 25 bp, Homo sapien
ggccacacgcctcttgacctcactt

SEQ ID NO: 5792890 - DNA, 25 bp, Homo sapien
gactacggcgtcaccgcggacgcgc

SEQ ID NO: 5792891 - DNA, 25 bp, Homo sapien
ccccatgggctgctacccgggaggc

SEQ ID NO: 5792892 - DNA, 25 bp, Homo sapien
cccagcacagaggtgaaggaagaca

SEQ ID NO: 5792893 - DNA, 25 bp, Homo sapien
cagccccagaaacagctgatggccc

SEQ ID NO: 5792894 - DNA, 25 bp, Homo sapien
acctctgatagcgactcggactctg

SEQ ID NO: 5792895 - DNA, 25 bp, Homo sapien
gccgggcctagcccagagacatgga

SEQ ID NO: 5792896 - DNA, 25 bp, Homo sapien
accgacagacaacctcacccagtgg

SEQ ID NO: 5792897 - DNA, 25 bp, Homo sapien
tgtaactacgagggaccagccaaga

SEQ ID NO: 5792898 - DNA, 25 bp, Homo sapien
atctgctttgtgacaaggtgcagaa

SEQ ID NO: 5792899 - DNA, 25 bp, Homo sapien
aaaattctgggaagcagaacctggc

SEQ ID NO: 5792900 - DNA, 25 bp, Homo sapien
gcatcaaacctgaagatttctcgaa

SEQ ID NO: 5792901 - DNA, 25 bp, Homo sapien
cggctccgctctaggccccagggcc

SEQ ID NO: 5792902 - DNA, 25 bp, Homo sapien
agccacccctgaccccgcccagccc

SEQ ID NO: 5792903 - DNA, 25 bp, Homo sapien
ggcacccccagcctcaggtgcactg

SEQ ID NO: 5792904 - DNA, 25 bp, Homo sapien
gcagagctggcagagcgtctggggc

SEQ ID NO: 5792905 - DNA, 25 bp, Homo sapien
gactttgagggactgtatccagtac

SEQ ID NO: 5792906 - DNA, 25 bp, Homo sapien
ggagccacccctgaccccgcccagc

SEQ ID NO: 5792907 - DNA, 25 bp, Homo sapien
catccacgggcagaccagtgtcatt

SEQ ID NO: 5792908 - DNA, 25 bp, Homo sapien
ggagtgaggctgctgaggggtccag

SEQ ID NO: 5792909 - DNA, 25 bp, Homo sapien
tccaccacgcccaggacctcggcgt

SEQ ID NO: 5792910 - DNA, 25 bp, Homo sapien
tttaacaacctgggtgtcctgcatg

SEQ ID NO: 5792911 - DNA, 25 bp, Homo sapien
ctacctctgatagcgactcggactc

SEQ ID NO: 5792912 - DNA, 25 bp, Homo sapien
atggctccttctccctgcccctgaa

SEQ ID NO: 5792913 - DNA, 25 bp, Homo sapien
ggattctcatgggaaggggaggacc

SEQ ID NO: 5792914 - DNA, 25 bp, Homo sapien
gcccctgaagccagtcatctcccag

SEQ ID NO: 5792915 - DNA, 25 bp, Homo sapien
ggcgcgggccccatgggctgctacc

SEQ ID NO: 5792916 - DNA, 25 bp, Homo sapien
gggcatcaaacctgaagatttctcg

SEQ ID NO: 5792917 - DNA, 25 bp, Homo sapien
cccctgagccaccaggagggctctg

SEQ ID NO: 5792918 - DNA, 25 bp, Homo sapien
cagagcgtctggggctgcgcagcct

SEQ ID NO: 5792919 - DNA, 25 bp, Homo sapien
cctggcggtccgagcccgaagccct

SEQ ID NO: 5792920 - DNA, 25 bp, Homo sapien
aggagccagccccagaaacagctga

SEQ ID NO: 5792921 - DNA, 25 bp, Homo sapien
cccccagcctcaggtgcactgacct

SEQ ID NO: 5792922 - DNA, 25 bp, Homo sapien
gccgtttctgtggggcccaaggaca

SEQ ID NO: 5792923 - DNA, 25 bp, Homo sapien
cagcgggagctggagcaagaggcca

SEQ ID NO: 5792924 - DNA, 25 bp, Homo sapien
tcgaatggacaagacagcaggctct

SEQ ID NO: 5792925 - DNA, 25 bp, Homo sapien
agaacaccatggagccacccctgac

SEQ ID NO: 5792926 - DNA, 25 bp, Homo sapien
gcctgcccccagcccccttcccgga

SEQ ID NO: 5792927 - DNA, 25 bp, Homo sapien
gtcatccaccacgcccaggacctcg

SEQ ID NO: 5792928 - DNA, 25 bp, Homo sapien
cagcttccggggccacacgcctctt

SEQ ID NO: 5792929 - DNA, 25 bp, Homo sapien
tccgagcccgaagccctgagtgcct

SEQ ID NO: 5792930 - DNA, 25 bp, Homo sapien
cccaaggagccagccccagaaacag

SEQ ID NO: 5792931 - DNA, 25 bp, Homo sapien
tggagactcagccatgcatctggcg

SEQ ID NO: 5792932 - DNA, 25 bp, Homo sapien
accctcacccgcctccttctgaagg

SEQ ID NO: 5792933 - DNA, 25 bp, Homo sapien
aggtgaagaccttgctgctaaatgc

SEQ ID NO: 5792934 - DNA, 25 bp, Homo sapien
gcatctagccacagagatggaggag

SEQ ID NO: 5792935 - DNA, 25 bp, Homo sapien
ctgaggggtccagaaacccgagaca

SEQ ID NO: 5792936 - DNA, 25 bp, Homo sapien
acggcgtcaccgcggacgcgcgcgc

SEQ ID NO: 5792937 - DNA, 25 bp, Homo sapien
gatacaaaaacttcagaggcagcgg

SEQ ID NO: 5792938 - DNA, 25 bp, Homo sapien
gaggtggcagcctcggtttcttccc

SEQ ID NO: 5792939 - DNA, 25 bp, Homo sapien
aaatctccgggggcatcaaacctga

SEQ ID NO: 5792940 - DNA, 25 bp, Homo sapien
agccagtcatctcccagcccatcca

SEQ ID NO: 5792941 - DNA, 25 bp, Homo sapien
tggcagcctcggtttcttcccctcc

SEQ ID NO: 5792942 - DNA, 25 bp, Homo sapien
actcgactacggcgtcaccgcggac

SEQ ID NO: 5792943 - DNA, 25 bp, Homo sapien
ttgtcaacctcaccaaccacctgca

SEQ ID NO: 5792944 - DNA, 25 bp, Homo sapien
agacagtgcgtacgggagccagtca

SEQ ID NO: 5792945 - DNA, 25 bp, Homo sapien
ccgaaagacctatcccactgtcaag

SEQ ID NO: 5792946 - DNA, 25 bp, Homo sapien
ctaagcagagaggcttccgatttcg

SEQ ID NO: 5792947 - DNA, 25 bp, Homo sapien
agctggggatctgcgccgtttctgt

SEQ ID NO: 5792948 - DNA, 25 bp, Homo sapien
gctgatggcccctacctggtgatcg

SEQ ID NO: 5792949 - DNA, 25 bp, Homo sapien
aacagcctaagcagagaggcttccg

SEQ ID NO: 5792950 - DNA, 25 bp, Homo sapien
ccaaacagttcacctattaccctct

SEQ ID NO: 5792951 - DNA, 25 bp, Homo sapien
ccaaggacatgactgcccaatttaa

SEQ ID NO: 5792952 - DNA, 25 bp, Homo sapien
tgaggttcggttctatgaggatgat

SEQ ID NO: 5792953 - DNA, 25 bp, Homo sapien
gagccgggcctagcccagagacatg

SEQ ID NO: 5792954 - DNA, 25 bp, Homo sapien
taacacacagtgacccacctcgtgc

SEQ ID NO: 5792955 - DNA, 25 bp, Homo sapien
ggcgcagatggccgccacggtgccc

SEQ ID NO: 5792956 - DNA, 25 bp, Homo sapien
taacaacctgggtgtcctgcatgtg

SEQ ID NO: 5792957 - DNA, 25 bp, Homo sapien
tgcgtacgggagccagtcagtggag

SEQ ID NO: 5792958 - DNA, 25 bp, Homo sapien
agggccgggactgtcacttggtgat

SEQ ID NO: 5792959 - DNA, 25 bp, Homo sapien
cacagatgtgcataaacagtatgcc

SEQ ID NO: 5792960 - DNA, 25 bp, Homo sapien
cgaagccctgagtgcctggatctgc

SEQ ID NO: 5792961 - DNA, 25 bp, Homo sapien
gatcgtggaacagcctaagcagaga

SEQ ID NO: 5792962 - DNA, 25 bp, Homo sapien
gacgcccctgcacctggcggtgatc

SEQ ID NO: 5792963 - DNA, 25 bp, Homo sapien
tgcccaccttctcccagcccttcgg

SEQ ID NO: 5792964 - DNA, 25 bp, Homo sapien
cctgtaacagtgtttctgcaactga

SEQ ID NO: 5792965 - DNA, 25 bp, Homo sapien
cctgctgcctgcccccagccccctt

SEQ ID NO: 5792966 - DNA, 25 bp, Homo sapien
tgaaggcccctcccatggaggactg

SEQ ID NO: 5792967 - DNA, 25 bp, Homo sapien
agcctggtagacacgtaccgacaga

SEQ ID NO: 5792968 - DNA, 25 bp, Homo sapien
ggtggaagacaaggaagaggtgcag

SEQ ID NO: 5792969 - DNA, 25 bp, Homo sapien
ggagggctctgccacgggcaccccc

SEQ ID NO: 5792970 - DNA, 25 bp, Homo sapien
ggatctgcgccgtttctgtggggcc

SEQ ID NO: 5792971 - DNA, 25 bp, Homo sapien
ctctcccacagatgtgcataaacag

SEQ ID NO: 5792972 - DNA, 25 bp, Homo sapien
cccctgcacctggcggtgatcacgg

SEQ ID NO: 5792973 - DNA, 25 bp, Homo sapien
ctggagcagctgctagacgggccag

SEQ ID NO: 5792974 - DNA, 25 bp, Homo sapien
gtttatctgctttgtgacaaggtgc

SEQ ID NO: 5792975 - DNA, 25 bp, Homo sapien
ctggcagagcgtctggggctgcgca

SEQ ID NO: 5792976 - DNA, 25 bp, Homo sapien
gctttctgctgcgggtaggtgcaga

SEQ ID NO: 5792977 - DNA, 25 bp, Homo sapien
agcagcgggagctggagcaagaggc

SEQ ID NO: 5792978 - DNA, 25 bp, Homo sapien
cctgcacctggcggtgatcacgggg

SEQ ID NO: 5792979 - DNA, 25 bp, Homo sapien
acagtgtttctgcaactgaaacgca

SEQ ID NO: 5792980 - DNA, 25 bp, Homo sapien
tggtgctgacatccatgctgaaaac

SEQ ID NO: 5792981 - DNA, 25 bp, Homo sapien
cccctgcacctggcagctggactgg

SEQ ID NO: 5792982 - DNA, 25 bp, Homo sapien
cggcctggcgcagcgcagcgcccga

SEQ ID NO: 5792983 - DNA, 25 bp, Homo sapien
ccatgggctgctacccgggaggcgg

SEQ ID NO: 5792984 - DNA, 25 bp, Homo sapien
cagctctgcagaacctggagcagct

SEQ ID NO: 5792985 - DNA, 25 bp, Homo sapien
ggctgcgcagcctggtagacacgta

SEQ ID NO: 5792986 - DNA, 25 bp, Homo sapien
cttcagaggcagcggctccgctcta

SEQ ID NO: 5792987 - DNA, 25 bp, Homo sapien
acagaggtgaaggaagacagtgcgt

SEQ ID NO: 5792988 - DNA, 25 bp, Homo sapien
cactgcacctagccatcatccacgg

SEQ ID NO: 5792989 - DNA, 25 bp, Homo sapien
gcgagctcgagagtacaacgcgcgc

SEQ ID NO: 5792990 - DNA, 25 bp, Homo sapien
tatcccactgtcaagatctgtaact

SEQ ID NO: 5792991 - DNA, 25 bp, Homo sapien
ctgccacgggcacccccagcctcag

SEQ ID NO: 5792992 - DNA, 25 bp, Homo sapien
agctggggttggtcacccatctggt

SEQ ID NO: 5792993 - DNA, 25 bp, Homo sapien
tcatctcccagcccatccatgacag

SEQ ID NO: 5792994 - DNA, 25 bp, Homo sapien
tcacaagatgaagattgagcggcct

SEQ ID NO: 5792995 - DNA, 25 bp, Homo sapien
cctcagttgggacaaataaaggatt

SEQ ID NO: 5792996 - DNA, 25 bp, Homo sapien
gcgtctaaaattctgggaagcagaa

SEQ ID NO: 5792997 - DNA, 25 bp, Homo sapien
gatgaagattgagcggcctgtaaca

SEQ ID NO: 5792998 - DNA, 25 bp, Homo sapien
ccatgctgaaaacgaggagcccctg

SEQ ID NO: 5792999 - DNA, 25 bp, Homo sapien
gctctgcagaacctggagcagctgc

SEQ ID NO: 5793000 - DNA, 25 bp, Homo sapien
tccggacacccccctatcacaagat

SEQ ID NO: 5793001 - DNA, 25 bp, Homo sapien
ggccccagggccttacggaggccga

SEQ ID NO: 5793002 - DNA, 25 bp, Homo sapien
tggtgagctttctgctgcgggtagg

SEQ ID NO: 5793003 - DNA, 25 bp, Homo sapien
caagctccgggccaacgtgaacgct

SEQ ID NO: 5793004 - DNA, 25 bp, Homo sapien
agacacaccactgcacctagccatc

SEQ ID NO: 5793005 - DNA, 25 bp, Homo sapien
cagtccggcgcgggccccatgggct

SEQ ID NO: 5793006 - DNA, 25 bp, Homo sapien
agctgctgcgtgcactgcttcagag

SEQ ID NO: 5793007 - DNA, 25 bp, Homo sapien
ccctgtgcccactgccttcaccccc

SEQ ID NO: 5793008 - DNA, 25 bp, Homo sapien
tgggcctagaggagggagtgaggct

SEQ ID NO: 5793009 - DNA, 25 bp, Homo sapien
ggatgatgagaatggatggcaggcc

SEQ ID NO: 5793010 - DNA, 25 bp, Homo sapien
gaacagccttgcatctagccacaga

SEQ ID NO: 5793011 - DNA, 25 bp, Homo sapien
gctgctagacgggccagaagcccag

SEQ ID NO: 5793012 - DNA, 25 bp, Homo sapien
ctgtgcggggtggagatgaagttta

SEQ ID NO: 5793013 - DNA, 25 bp, Homo sapien
ctgcgggtaggtgcagacccagctc

SEQ ID NO: 5793014 - DNA, 25 bp, Homo sapien
atccatgacagcaaatctccggggg

SEQ ID NO: 5793015 - DNA, 25 bp, Homo sapien
gaaggaagacagtgcgtacgggagc

SEQ ID NO: 5793016 - DNA, 25 bp, Homo sapien
ccacctcgtgctcatgcccacagtc

SEQ ID NO: 5793017 - DNA, 25 bp, Homo sapien
ctgctggatcggcatggagactcag

SEQ ID NO: 5793018 - DNA, 25 bp, Homo sapien
ctgctgacggcgcaggacgagaacg

SEQ ID NO: 5793019 - DNA, 25 bp, Homo sapien
tcctgcatgtgactaagaagaacat

SEQ ID NO: 5793020 - DNA, 25 bp, Homo sapien
tgtacagcgtccccacctatttcaa

SEQ ID NO: 5793021 - DNA, 25 bp, Homo sapien
cttgcagcaccaaggtgaagacctt

SEQ ID NO: 5793022 - DNA, 25 bp, Homo sapien
cccagggcagctgggcagagctggc

SEQ ID NO: 5793023 - DNA, 25 bp, Homo sapien
gactgtcacttggtgatacagctct

SEQ ID NO: 5793024 - DNA, 25 bp, Homo sapien
actgccttcaccccctacctctgat

SEQ ID NO: 5793025 - DNA, 25 bp, Homo sapien
tggcaggcctttggggacttctctc

SEQ ID NO: 5793026 - DNA, 25 bp, Homo sapien
ggtgggcaagcaatgctcggagctg

SEQ ID NO: 5793027 - DNA, 25 bp, Homo sapien
aaggacatgactgcccaatttaaca

SEQ ID NO: 5793028 - DNA, 25 bp, Homo sapien
gcgtctggggctgcgcagcctggta

SEQ ID NO: 5793029 - DNA, 25 bp, Homo sapien
cctatcacaagatgaagattgagcg

SEQ ID NO: 5793030 - DNA, 25 bp, Homo sapien
agtcagtggagcaggaggcagagaa

SEQ ID NO: 5793031 - DNA, 25 bp, Homo sapien
tgctgcctgcccccagcccccttcc

SEQ ID NO: 5793032 - DNA, 25 bp, Homo sapien
cgcgcgcgctgctggcgggacagcg

SEQ ID NO: 5793033 - DNA, 25 bp, Homo sapien
gggactgtatccagtacacctggcg

SEQ ID NO: 5793034 - DNA, 25 bp, Homo sapien
ggtgcagcggaagcggaggaaggcc

SEQ ID NO: 5793035 - DNA, 25 bp, Homo sapien
ttgggacaaataaaggattctcatg

SEQ ID NO: 5793036 - DNA, 25 bp, Homo sapien
gactgtatccagtacacctggcggt

SEQ ID NO: 5793037 - DNA, 25 bp, Homo sapien
tgacggcgcaggacgagaacggaga

SEQ ID NO: 5793038 - DNA, 25 bp, Homo sapien
ctggtgggcaagcaatgctcggagc

SEQ ID NO: 5793039 - DNA, 25 bp, Homo sapien
ggtaacacacagtgacccacctcgt

SEQ ID NO: 5793040 - DNA, 25 bp, Homo sapien
cgcgggccccatgggctgctacccg

SEQ ID NO: 5793041 - DNA, 25 bp, Homo sapien
gctaaatgctgctcagaacaccatg

SEQ ID NO: 5793042 - DNA, 25 bp, Homo sapien
gtctggatggtattattgaatatga

SEQ ID NO: 5793043 - DNA, 25 bp, Homo sapien
agggagtgaggctgctgaggggtcc

SEQ ID NO: 5793044 - DNA, 25 bp, Homo sapien
ccttctgaaggctggtgctgacatc

SEQ ID NO: 5793045 - DNA, 25 bp, Homo sapien
cgtcaccgcggacgcgcgcgcgctg

SEQ ID NO: 5793046 - DNA, 25 bp, Homo sapien
tgctagacgggccagaagcccaggg

SEQ ID NO: 5793047 - DNA, 25 bp, Homo sapien
cactgcttcagagtggagctcctgc

SEQ ID NO: 5793048 - DNA, 25 bp, Homo sapien
tgccttcaccccctacctctgatag

SEQ ID NO: 5793049 - DNA, 25 bp, Homo sapien
catggagactcagccatgcatctgg

SEQ ID NO: 5793050 - DNA, 25 bp, Homo sapien
gaagaaggtgatggatctgagtata

SEQ ID NO: 5793051 - DNA, 25 bp, Homo sapien
tgatggcccctacctggtgatcgtg

SEQ ID NO: 5793052 - DNA, 25 bp, Homo sapien
gtaccgacagacaacctcacccagt

SEQ ID NO: 5793053 - DNA, 25 bp, Homo sapien
tgaactcctccattgtggaacccaa

SEQ ID NO: 5793054 - DNA, 25 bp, Homo sapien
ggagctggggatctgcgccgtttct

SEQ ID NO: 5793055 - DNA, 25 bp, Homo sapien
tacaacccaggtctggatggtatta

SEQ ID NO: 5793056 - DNA, 25 bp, Homo sapien
atgggtggaggctctgggggtgcag

SEQ ID NO: 5793057 - DNA, 25 bp, Homo sapien
cggctgcgcttctctgccttcctta

SEQ ID NO: 5793058 - DNA, 25 bp, Homo sapien
accagtccggcgcgggccccatggg

SEQ ID NO: 5793059 - DNA, 25 bp, Homo sapien
ttgtggaacccaaggagccagcccc

SEQ ID NO: 5793060 - DNA, 25 bp, Homo sapien
aggctgctgaggggtccagaaaccc

SEQ ID NO: 5793061 - DNA, 25 bp, Homo sapien
ttgctacaacccaggtctggatggt

SEQ ID NO: 5793062 - DNA, 25 bp, Homo sapien
accaggagggctctgccacgggcac

SEQ ID NO: 5793063 - DNA, 25 bp, Homo sapien
tttcaaattgaactcctccattgtg

SEQ ID NO: 5793064 - DNA, 25 bp, Homo sapien
agcccagcagggccgggactgtcac

SEQ ID NO: 5793065 - DNA, 25 bp, Homo sapien
gccgagcagcgggagctggagcaag

SEQ ID NO: 5793066 - DNA, 25 bp, Homo sapien
ggccctgtctgacatgggcctagag

SEQ ID NO: 5793067 - DNA, 25 bp, Homo sapien
acgctcgcacctttgcgggaaacac

SEQ ID NO: 5793068 - DNA, 25 bp, Homo sapien
aagatctgtaactacgagggaccag

SEQ ID NO: 5793069 - DNA, 25 bp, Homo sapien
gactcggactctgaagggcctgaga

SEQ ID NO: 5793070 - DNA, 25 bp, Homo sapien
tcggagctggggatctgcgccgttt

SEQ ID NO: 5793071 - DNA, 25 bp, Homo sapien
aacagtatgccattgtgttccggac

SEQ ID NO: 5793072 - DNA, 25 bp, Homo sapien
cttggtgatacagctctgcagaacc

SEQ ID NO: 5793073 - DNA, 25 bp, Homo sapien
cattgtgttccggacacccccctat

SEQ ID NO: 5793074 - DNA, 25 bp, Homo sapien
catgcccacagtctggtgggcaagc

SEQ ID NO: 5793075 - DNA, 25 bp, Homo sapien
gcgcagcctggtagacacgtaccga

SEQ ID NO: 5793076 - DNA, 25 bp, Homo sapien
cagatggccgccacggtgcccagca

SEQ ID NO: 5793077 - DNA, 25 bp, Homo sapien
tggcggtccgagcccgaagccctga

SEQ ID NO: 5793078 - DNA, 25 bp, Homo sapien
gcacctttgcgggaaacacacccct

SEQ ID NO: 5793079 - DNA, 25 bp, Homo sapien
cttctcccagcccttcgggggtggc

SEQ ID NO: 5793080 - DNA, 25 bp, Homo sapien
gttccggacacccccctatcacaag

SEQ ID NO: 5793081 - DNA, 25 bp, Homo sapien
aacctcacccagtggcagcctcctg

SEQ ID NO: 5793082 - DNA, 25 bp, Homo sapien
gcagctggactggggtacccgaccc

SEQ ID NO: 5793083 - DNA, 25 bp, Homo sapien
gcaggctctgtgcggggtggagatg

SEQ ID NO: 5793084 - DNA, 25 bp, Homo sapien
gtctgattccaaacagttcacctat

SEQ ID NO: 5793085 - DNA, 25 bp, Homo sapien
gaccccgcccagcccagcagggccg

SEQ ID NO: 5793086 - DNA, 25 bp, Homo sapien
cctggcggtgatcacggggcagacg

SEQ ID NO: 5793087 - DNA, 25 bp, Homo sapien
cccttcgggggtggctcccacatgg

SEQ ID NO: 5793088 - DNA, 25 bp, Homo sapien
acaacgcgcgcctgttcggcctggc

SEQ ID NO: 5793089 - DNA, 25 bp, Homo sapien
agtggcagcctcctgcgcagctacg

SEQ ID NO: 5793090 - DNA, 25 bp, Homo sapien
acgcctcttgacctcacttgcagca

SEQ ID NO: 5793091 - DNA, 25 bp, Homo sapien
agccactagacagagccgggcctag

SEQ ID NO: 5793092 - DNA, 25 bp, Homo sapien
aggtctactggaggccctgtctgac

SEQ ID NO: 5793093 - DNA, 25 bp, Homo sapien
tcagttgggacaaataaaggattct

SEQ ID NO: 5793094 - DNA, 25 bp, Homo sapien
cccgaccctcacccgcctccttctg

SEQ ID NO: 5793095 - DNA, 25 bp, Homo sapien
gacagcaggctctgtgcggggtgga

SEQ ID NO: 5793096 - DNA, 25 bp, Homo sapien
agatcgaggtggacctggtaacaca

SEQ ID NO: 5793097 - DNA, 25 bp, Homo sapien
cttcccctcctccctggcctacagc

SEQ ID NO: 5793098 - DNA, 25 bp, Homo sapien
gaggaagccgcggagccgagcgccc

SEQ ID NO: 5793099 - DNA, 25 bp, Homo sapien
ggtgtcctgcatgtgactaagaaga

SEQ ID NO: 5793100 - DNA, 25 bp, Homo sapien
accactgcacctagccatcatccac

SEQ ID NO: 5793101 - DNA, 25 bp, Homo sapien
ggtgcctccagtgagaagggccgaa

SEQ ID NO: 5793102 - DNA, 25 bp, Homo sapien
gaaggctggtgctgacatccatgct

SEQ ID NO: 5793103 - DNA, 25 bp, Homo sapien
ggacaagacagcaggctctgtgcgg

SEQ ID NO: 5793104 - DNA, 25 bp, Homo sapien
tgctcctgagctgctgcgtgcactg

SEQ ID NO: 5793105 - DNA, 25 bp, Homo sapien
ggcagaccagtgtcattgagcagat

SEQ ID NO: 5793106 - DNA, 25 bp, Homo sapien
acacagtgacccacctcgtgctcat

SEQ ID NO: 5793107 - DNA, 25 bp, Homo sapien
catgcatctggcgctgcgggcaggc

SEQ ID NO: 5793108 - DNA, 25 bp, Homo sapien
gtgcgagccgcaggccccggagatg

SEQ ID NO: 5793109 - DNA, 25 bp, Homo sapien
gattgagcggcctgtaacagtgttt

SEQ ID NO: 5793110 - DNA, 25 bp, Homo sapien
gggcagagctggcagagcgtctggg

SEQ ID NO: 5793111 - DNA, 25 bp, Homo sapien
gctgcgggcaggcgctggtgctcct

SEQ ID NO: 5793112 - DNA, 25 bp, Homo sapien
agctggaggaggtggcagcctcggt

SEQ ID NO: 5793113 - DNA, 25 bp, Homo sapien
ggatctgagtatagtgcggctgcgc

SEQ ID NO: 5793114 - DNA, 25 bp, Homo sapien
ctggtaacacacagtgacccacctc

SEQ ID NO: 5793115 - DNA, 25 bp, Homo sapien
tggcagctggactggggtacccgac

SEQ ID NO: 5793116 - DNA, 25 bp, Homo sapien
caaacctgaagatttctcgaatgga

SEQ ID NO: 5793117 - DNA, 25 bp, Homo sapien
ttcaccccctacctctgatagcgac

SEQ ID NO: 5793118 - DNA, 25 bp, Homo sapien
atctagccacagagatggaggagct

SEQ ID NO: 5793119 - DNA, 25 bp, Homo sapien
tggccgccacggtgcccagcaggga

SEQ ID NO: 5793120 - DNA, 25 bp, Homo sapien
cgcggacgcgcgcgcgctgctggcg

SEQ ID NO: 5793121 - DNA, 25 bp, Homo sapien
cacgggcagaccagtgtcattgagc

SEQ ID NO: 5793122 - DNA, 25 bp, Homo sapien
gtgagaagggccgaaagacctatcc

SEQ ID NO: 5793123 - DNA, 25 bp, Homo sapien
cagaagcccagggcagctgggcaga

SEQ ID NO: 5793124 - DNA, 25 bp, Homo sapien
cccctacctggtgatcgtggaacag

SEQ ID NO: 5793125 - DNA, 25 bp, Homo sapien
gggcagctgggcagagctggcagag

SEQ ID NO: 5793126 - DNA, 25 bp, Homo sapien
tcacccgcctccttctgaaggctgg

SEQ ID NO: 5793127 - DNA, 25 bp, Homo sapien
tacaaaaacttcagaggcagcggct

SEQ ID NO: 5793128 - DNA, 25 bp, Homo sapien
cacttgcagcaccaaggtgaagacc

SEQ ID NO: 5793129 - DNA, 25 bp, Homo sapien
acagacaacctcacccagtggcagc

SEQ ID NO: 5793130 - DNA, 25 bp, Homo sapien
agaggcttccgatttcgatatggct

SEQ ID NO: 5793131 - DNA, 25 bp, Homo sapien
tgtgcataaacagtatgccattgtg

SEQ ID NO: 5793132 - DNA, 25 bp, Homo sapien
gtggacctggtaacacacagtgacc

SEQ ID NO: 5793133 - DNA, 25 bp, Homo sapien
gcgcagctacgagctggctggcggg

SEQ ID NO: 5793134 - DNA, 25 bp, Homo sapien
aggccgagcagcgggagctggagca

SEQ ID NO: 5793135 - DNA, 25 bp, Homo sapien
accccctgtacagcgtccccaccta

SEQ ID NO: 5793136 - DNA, 25 bp, Homo sapien
agacaagctgcccagcacagaggtg

SEQ ID NO: 5793137 - DNA, 25 bp, Homo sapien
acatccatgctgaaaacgaggagcc

SEQ ID NO: 5793138 - DNA, 25 bp, Homo sapien
acccctgaccccgcccagcccagca

SEQ ID NO: 5793139 - DNA, 25 bp, Homo sapien
ccaaccacctgcaccagacgcccct

SEQ ID NO: 5793140 - DNA, 25 bp, Homo sapien
agacccagctctgctggatcggcat

SEQ ID NO: 5793141 - DNA, 25 bp, Homo sapien
aggagcccctgtgcccactgccttc

SEQ ID NO: 5793142 - DNA, 25 bp, Homo sapien
cgcaaccagagccgccgccacggcg

SEQ ID NO: 5793143 - DNA, 25 bp, Homo sapien
ctaggccccagggccttacggaggc

SEQ ID NO: 5793144 - DNA, 25 bp, Homo sapien
agcgcccgagccctactcgactacg

SEQ ID NO: 5793145 - DNA, 25 bp, Homo sapien
agctccgggccaacgtgaacgctcg

SEQ ID NO: 5793146 - DNA, 25 bp, Homo sapien
ttatctgctttgtgacaaggtgcag

SEQ ID NO: 5793147 - DNA, 25 bp, Homo sapien
cgagtgtggtgagctttctgctgcg

SEQ ID NO: 5793148 - DNA, 25 bp, Homo sapien
caggagggctctgccacgggcaccc

SEQ ID NO: 5793149 - DNA, 25 bp, Homo sapien
ggcctgagaaggacacccgaagcag

SEQ ID NO: 5793150 - DNA, 25 bp, Homo sapien
caaggtgaagaccttgctgctaaat

SEQ ID NO: 5793151 - DNA, 25 bp, Homo sapien
gtgagctttctgctgcgggtaggtg

SEQ ID NO: 5793152 - DNA, 25 bp, Homo sapien
ctggcgggacagcgccacctgctga

SEQ ID NO: 5793153 - DNA, 25 bp, Homo sapien
ggacgtgtctgattccaaacagttc

SEQ ID NO: 5793154 - DNA, 25 bp, Homo sapien
accttgctgctaaatgctgctcaga

SEQ ID NO: 5793155 - DNA, 25 bp, Homo sapien
ggaccccctgtacagcgtccccacc

SEQ ID NO: 5793156 - DNA, 25 bp, Homo sapien
gcgcgctgctggcgggacagcgcca

SEQ ID NO: 5793157 - DNA, 25 bp, Homo sapien
ctgggaagcagaacctggccggagc

SEQ ID NO: 5793158 - DNA, 25 bp, Homo sapien
gtggctcccacatgggtggaggctc

SEQ ID NO: 5793159 - DNA, 25 bp, Homo sapien
acacccgaagcagcttccggggcca

SEQ ID NO: 5793160 - DNA, 25 bp, Homo sapien
tttctgtggggcccaaggacatgac

SEQ ID NO: 5793161 - DNA, 25 bp, Homo sapien
ccacccctgaccccgcccagcccag

SEQ ID NO: 5793162 - DNA, 25 bp, Homo sapien
tctggcgctgcgggcaggcgctggt

SEQ ID NO: 5793163 - DNA, 25 bp, Homo sapien
agtgtttctgcaactgaaacgcaag

SEQ ID NO: 5793164 - DNA, 25 bp, Homo sapien
aatgctgctcagaacaccatggagc

SEQ ID NO: 5793165 - DNA, 25 bp, Homo sapien
tggcggtgatcacggggcagacgag

SEQ ID NO: 5793166 - DNA, 25 bp, Homo sapien
gaagcagaacctggccggagccact

SEQ ID NO: 5793167 - DNA, 25 bp, Homo sapien
cccctgtacagcgtccccacctatt

SEQ ID NO: 5793168 - DNA, 25 bp, Homo sapien
gtaggtgcagacccagctctgctgg

SEQ ID NO: 5793169 - DNA, 25 bp, Homo sapien
gagccgagcgccccctccaggaccc

SEQ ID NO: 5793170 - DNA, 25 bp, Homo sapien
tgctgaggggtccagaaacccgaga

SEQ ID NO: 5793171 - DNA, 25 bp, Homo sapien
agcagcttccggggccacacgcctc

SEQ ID NO: 5793172 - DNA, 25 bp, Homo sapien
aaggaagaggtgcagcggaagcgga

SEQ ID NO: 5793173 - DNA, 25 bp, Homo sapien
ccccgcccagcccagcagggccggg

SEQ ID NO: 5793174 - DNA, 25 bp, Homo sapien
ccttctccctgcccctgaagccagt

SEQ ID NO: 5793175 - DNA, 25 bp, Homo sapien
ctgagtatagtgcggctgcgcttct

SEQ ID NO: 5793176 - DNA, 25 bp, Homo sapien
gcccctgtgcccactgccttcaccc

SEQ ID NO: 5793177 - DNA, 25 bp, Homo sapien
gaggggtccagaaacccgagacaag

SEQ ID NO: 5793178 - DNA, 25 bp, Homo sapien
gagctcgagagtacaacgcgcgcct

SEQ ID NO: 5793179 - DNA, 25 bp, Homo sapien
gcgctgcgggcaggcgctggtgctc

SEQ ID NO: 5793180 - DNA, 25 bp, Homo sapien
acctcacttgcagcaccaaggtgaa

SEQ ID NO: 5793181 - DNA, 25 bp, Homo sapien
ccttccttagagccagtgatggctc

SEQ ID NO: 5793182 - DNA, 25 bp, Homo sapien
gacacccccctatcacaagatgaag

SEQ ID NO: 5793183 - DNA, 25 bp, Homo sapien
aagattgagcggcctgtaacagtgt

SEQ ID NO: 5793184 - DNA, 25 bp, Homo sapien
acctgctgacggcgcaggacgagaa

SEQ ID NO: 5793185 - DNA, 25 bp, Homo sapien
ccagctctgctggatcggcatggag

SEQ ID NO: 5793186 - DNA, 25 bp, Homo sapien
agcctcctgcgcagctacgagctgg

SEQ ID NO: 5793187 - DNA, 25 bp, Homo sapien
agcagctgctagacgggccagaagc

SEQ ID NO: 5793188 - DNA, 25 bp, Homo sapien
ggaagcggaggaaggccttgcccac

SEQ ID NO: 5793189 - DNA, 25 bp, Homo sapien
cttgcccaccttctcccagcccttc

SEQ ID NO: 5793190 - DNA, 25 bp, Homo sapien
acctggtaacacacagtgacccacc

SEQ ID NO: 5793191 - DNA, 25 bp, Homo sapien
ggcgttgtcaacctcaccaaccacc

SEQ ID NO: 5793192 - DNA, 25 bp, Homo sapien
tggagatgaagtttatctgctttgt

SEQ ID NO: 5793193 - DNA, 25 bp, Homo sapien
aggtctggatggtattattgaatat

SEQ ID NO: 5793194 - DNA, 25 bp, Homo sapien
ccacgcccaggacctcggcgttgtc

SEQ ID NO: 5793195 - DNA, 25 bp, Homo sapien
ctggtggaagacaaggaagaggtgc

SEQ ID NO: 5793196 - DNA, 25 bp, Homo sapien
tctgcaactgaaacgcaagcgagga

SEQ ID NO: 5793197 - DNA, 25 bp, Homo sapien
gctgacggcgcaggacgagaacgga

SEQ ID NO: 5793198 - DNA, 25 bp, Homo sapien
ggtgcccagcagggactccggggag

SEQ ID NO: 5793199 - DNA, 25 bp, Homo sapien
aacagctgatggcccctacctggtg

SEQ ID NO: 5793200 - DNA, 25 bp, Homo sapien
gtgaaggaagacagtgcgtacggga

SEQ ID NO: 5793201 - DNA, 25 bp, Homo sapien
cgagcgccccctccaggacccccca

SEQ ID NO: 5793202 - DNA, 25 bp, Homo sapien
cgtttctgtggggcccaaggacatg

SEQ ID NO: 5793203 - DNA, 25 bp, Homo sapien
ctgaagaaggtgatggatctgagta

SEQ ID NO: 5793204 - DNA, 25 bp, Homo sapien
cccacagatgtgcataaacagtatg

SEQ ID NO: 5793205 - DNA, 25 bp, Homo sapien
ggccccatgggctgctacccgggag

SEQ ID NO: 5793206 - DNA, 25 bp, Homo sapien
ccggaccccctgtacagcgtcccca

SEQ ID NO: 5793207 - DNA, 25 bp, Homo sapien
atggagagttgctacaacccaggtc

SEQ ID NO: 5793208 - DNA, 25 bp, Homo sapien
acctggccggagccactagacagag

SEQ ID NO: 5793209 - DNA, 25 bp, Homo sapien
agaatggatggcaggcctttgggga

SEQ ID NO: 5793210 - DNA, 25 bp, Homo sapien
ccgggactgtcacttggtgatacag

SEQ ID NO: 5793211 - DNA, 25 bp, Homo sapien
gcatgtgactaagaagaacatgatg

SEQ ID NO: 5793212 - DNA, 25 bp, Homo sapien
gatatggctgtgaaggcccctccca

SEQ ID NO: 5793213 - DNA, 25 bp, Homo sapien
ctgcccggtgcctccagtgagaagg

SEQ ID NO: 5793214 - DNA, 25 bp, Homo sapien
tcgagagtacaacgcgcgcctgttc

SEQ ID NO: 5793215 - DNA, 25 bp, Homo sapien
gatggaggagctggggttggtcacc

SEQ ID NO: 5793216 - DNA, 25 bp, Homo sapien
atgctgaaaacgaggagcccctgtg

SEQ ID NO: 5793217 - DNA, 25 bp, Homo sapien
ctgaccccgcccagcccagcagggc

SEQ ID NO: 5793218 - DNA, 25 bp, Homo sapien
accaaggtgaagaccttgctgctaa

SEQ ID NO: 5793219 - DNA, 25 bp, Homo sapien
gaagcagcttccggggccacacgcc

SEQ ID NO: 5793220 - DNA, 25 bp, Homo sapien
tcagtggagcaggaggcagagaagc

SEQ ID NO: 5793221 - DNA, 25 bp, Homo sapien
tgcagcaccaaggtgaagaccttgc

SEQ ID NO: 5793222 - DNA, 25 bp, Homo sapien
tggtagacacgtaccgacagacaac

SEQ ID NO: 5793223 - DNA, 25 bp, Homo sapien
cagaaagatgacattgaggttcggt

SEQ ID NO: 5793224 - DNA, 25 bp, Homo sapien
tccgctctaggccccagggccttac

SEQ ID NO: 5793225 - DNA, 25 bp, Homo sapien
tgacatccatgctgaaaacgaggag

SEQ ID NO: 5793226 - DNA, 25 bp, Homo sapien
aaggtgatggatctgagtatagtgc

SEQ ID NO: 5793227 - DNA, 25 bp, Homo sapien
gggagctggagcaagaggccaaaga

SEQ ID NO: 5793228 - DNA, 25 bp, Homo sapien
ctcttgacctcacttgcagcaccaa

SEQ ID NO: 5793229 - DNA, 25 bp, Homo sapien
caaatcttatttaacaccccacacc

SEQ ID NO: 5793230 - DNA, 25 bp, Homo sapien
ctgcttcagagtggagctcctgctg

SEQ ID NO: 5793231 - DNA, 25 bp, Homo sapien
agccaccaggagggctctgccacgg

SEQ ID NO: 5793232 - DNA, 25 bp, Homo sapien
gatttcaaattgaactcctccattg

SEQ ID NO: 5793233 - DNA, 25 bp, Homo sapien
ctgcgcagcctggtagacacgtacc

SEQ ID NO: 5793234 - DNA, 25 bp, Homo sapien
ggaggaaggccttgcccaccttctc

SEQ ID NO: 5793235 - DNA, 25 bp, Homo sapien
gcgactcggactctgaagggcctga

SEQ ID NO: 5793236 - DNA, 25 bp, Homo sapien
aattctgggaagcagaacctggccg

SEQ ID NO: 5793237 - DNA, 25 bp, Homo sapien
gctgacatccatgctgaaaacgagg

SEQ ID NO: 5793238 - DNA, 25 bp, Homo sapien
agtcatctcccagcccatccatgac

SEQ ID NO: 5793239 - DNA, 25 bp, Homo sapien
atggaggactgcccggtgcctccag

SEQ ID NO: 5793240 - DNA, 25 bp, Homo sapien
aaaacttcagaggcagcggctccgc

SEQ ID NO: 5793241 - DNA, 25 bp, Homo sapien
tgcagaaagatgacattgaggttcg

SEQ ID NO: 5793242 - DNA, 25 bp, Homo sapien
ggagccagtcagtggagcaggaggc

SEQ ID NO: 5793243 - DNA, 25 bp, Homo sapien
gctgtgaaggcccctcccatggagg

SEQ ID NO: 5793244 - DNA, 25 bp, Homo sapien
cgccgccacggcgggcgtctaaaat

SEQ ID NO: 5793245 - DNA, 25 bp, Homo sapien
cactgacctgctgcctgcccccagc

SEQ ID NO: 5793246 - DNA, 25 bp, Homo sapien
agacgggccagaagcccagggcagc

SEQ ID NO: 5793247 - DNA, 25 bp, Homo sapien
atgaggatgatgagaatggatggca

SEQ ID NO: 5793248 - DNA, 25 bp, Homo sapien
cagaaacccgagacaagctgcccag

SEQ ID NO: 5793249 - DNA, 25 bp, Homo sapien
aggctggtgctgacatccatgctga

SEQ ID NO: 5793250 - DNA, 25 bp, Homo sapien
agcagaacctggccggagccactag

SEQ ID NO: 5793251 - DNA, 25 bp, Homo sapien
acagcccctaccagtccggcgcggg

SEQ ID NO: 5793252 - DNA, 25 bp, Homo sapien
ctatgtcatccaccacgcccaggac

SEQ ID NO: 5793253 - DNA, 25 bp, Homo sapien
gcctccttctgaaggctggtgctga

SEQ ID NO: 5793254 - DNA, 25 bp, Homo sapien
ttcggcctggcgcagcgcagcgccc

SEQ ID NO: 5793255 - DNA, 25 bp, Homo sapien
acccatctggtcaccaagctccggg

SEQ ID NO: 5793256 - DNA, 25 bp, Homo sapien
tgtcaagatctgtaactacgaggga

SEQ ID NO: 5793257 - DNA, 25 bp, Homo sapien
tggatcggcatggagactcagccat

SEQ ID NO: 5793258 - DNA, 25 bp, Homo sapien
cccgagacaagctgcccagcacaga

SEQ ID NO: 5793259 - DNA, 25 bp, Homo sapien
ccaatttaacaacctgggtgtcctg

SEQ ID NO: 5793260 - DNA, 25 bp, Homo sapien
ctgcacctagccatcatccacgggc

SEQ ID NO: 5793261 - DNA, 25 bp, Homo sapien
gaaggccttgcccaccttctcccag

SEQ ID NO: 5793262 - DNA, 25 bp, Homo sapien
cctgagccaccaggagggctctgcc

SEQ ID NO: 5793263 - DNA, 25 bp, Homo sapien
agacaacctcacccagtggcagcct

SEQ ID NO: 5793264 - DNA, 25 bp, Homo sapien
gatttctcgaatggacaagacagca

SEQ ID NO: 5793265 - DNA, 25 bp, Homo sapien
tgtgacaaggtgcagaaagatgaca

SEQ ID NO: 5793266 - DNA, 25 bp, Homo sapien
cctatcccactgtcaagatctgtaa

SEQ ID NO: 5793267 - DNA, 25 bp, Homo sapien
ggacacccgaagcagcttccggggc

SEQ ID NO: 5793268 - DNA, 25 bp, Homo sapien
agcgccacctgctgacggcgcagga

SEQ ID NO: 5793269 - DNA, 25 bp, Homo sapien
tggcaggtctactggaggccctgtc

SEQ ID NO: 5793270 - DNA, 25 bp, Homo sapien
atggagccacccctgaccccgccca

SEQ ID NO: 5793271 - DNA, 25 bp, Homo sapien
cagctgctagacgggccagaagccc

SEQ ID NO: 5793272 - DNA, 25 bp, Homo sapien
cagaaacagctgatggcccctacct

SEQ ID NO: 5793273 - DNA, 25 bp, Homo sapien
tgtgaaggcccctcccatggaggac

SEQ ID NO: 5793274 - DNA, 25 bp, Homo sapien
gccatgcatctggcgctgcgggcag

SEQ ID NO: 5793275 - DNA, 25 bp, Homo sapien
atggacaagacagcaggctctgtgc

SEQ ID NO: 5793276 - DNA, 25 bp, Homo sapien
acgtgtctgattccaaacagttcac

SEQ ID NO: 5793277 - DNA, 25 bp, Homo sapien
gcccaaggacatgactgcccaattt

SEQ ID NO: 5793278 - DNA, 25 bp, Homo sapien
cgagggaccagccaagatcgaggtg

SEQ ID NO: 5793279 - DNA, 25 bp, Homo sapien
ggggcgcagatggccgccacggtgc

SEQ ID NO: 5793280 - DNA, 25 bp, Homo sapien
acggaggccgagcagcgggagctgg

SEQ ID NO: 5793281 - DNA, 25 bp, Homo sapien
ctgcccaatttaacaacctgggtgt

SEQ ID NO: 5793282 - DNA, 25 bp, Homo sapien
gcaagaggccaaagaactgaagaag

SEQ ID NO: 5793283 - DNA, 25 bp, Homo sapien
ccagtcagtggagcaggaggcagag

SEQ ID NO: 5793284 - DNA, 25 bp, Homo sapien
caggccccggagatgctgcagcgag

SEQ ID NO: 5793285 - DNA, 25 bp, Homo sapien
cctggtagacacgtaccgacagaca

SEQ ID NO: 5793286 - DNA, 25 bp, Homo sapien
aagcggaggaaggccttgcccacct

SEQ ID NO: 5793287 - DNA, 25 bp, Homo sapien
atgatttcaaattgaactcctccat

SEQ ID NO: 5793288 - DNA, 25 bp, Homo sapien
gaagggcctgagaaggacacccgaa

SEQ ID NO: 5793289 - DNA, 25 bp, Homo sapien
acaagacagcaggctctgtgcgggg

SEQ ID NO: 5793290 - DNA, 25 bp, Homo sapien
aagatttctcgaatggacaagacag

SEQ ID NO: 5793291 - DNA, 25 bp, Homo sapien
ggaagaggtgcagcggaagcggagg

SEQ ID NO: 5793292 - DNA, 25 bp, Homo sapien
tcaccaagctccgggccaacgtgaa

SEQ ID NO: 5793293 - DNA, 25 bp, Homo sapien
ccacggtgcccagcagggactccgg

SEQ ID NO: 5793294 - DNA, 25 bp, Homo sapien
tgtcctgcatgtgactaagaagaac

SEQ ID NO: 5793295 - DNA, 25 bp, Homo sapien
cgcagatggccgccacggtgcccag

SEQ ID NO: 5793296 - DNA, 25 bp, Homo sapien
tgcggctgcgcttctctgccttcct

SEQ ID NO: 5793297 - DNA, 25 bp, Homo sapien
tatggctgtgaaggcccctcccatg

SEQ ID NO: 5793298 - DNA, 25 bp, Homo sapien
ccagagacatggagagttgctacaa

SEQ ID NO: 5793299 - DNA, 25 bp, Homo sapien
ctgaagccagtcatctcccagccca

SEQ ID NO: 5793300 - DNA, 25 bp, Homo sapien
ggcgcagcgcagcgcccgagcccta

SEQ ID NO: 5793301 - DNA, 25 bp, Homo sapien
ctgggcccaccccctgagccaccag

SEQ ID NO: 5793302 - DNA, 25 bp, Homo sapien
atgccattgtgttccggacaccccc

SEQ ID NO: 5793303 - DNA, 25 bp, Homo sapien
tcccatggaggactgcccggtgcct

SEQ ID NO: 5793304 - DNA, 25 bp, Homo sapien
cccagcccatccatgacagcaaatc

SEQ ID NO: 5793305 - DNA, 25 bp, Homo sapien
cgctctaggccccagggccttacgg

SEQ ID NO: 5793306 - DNA, 25 bp, Homo sapien
gaccagtgtcattgagcagatagtc

SEQ ID NO: 5793307 - DNA, 25 bp, Homo sapien
tggcagcctcctgcgcagctacgag

SEQ ID NO: 5793308 - DNA, 25 bp, Homo sapien
aacttcagaggcagcggctccgctc

SEQ ID NO: 5793309 - DNA, 25 bp, Homo sapien
gattccaaacagttcacctattacc

SEQ ID NO: 5793310 - DNA, 25 bp, Homo sapien
gctcgcacctttgcgggaaacacac

SEQ ID NO: 5793311 - DNA, 25 bp, Homo sapien
ggagacacaccactgcacctagcca

SEQ ID NO: 5793312 - DNA, 25 bp, Homo sapien
atggatctgagtatagtgcggctgc

SEQ ID NO: 5793313 - DNA, 25 bp, Homo sapien
gcccaccccctgagccaccaggagg

SEQ ID NO: 5793314 - DNA, 25 bp, Homo sapien
ccatctggtcaccaagctccgggcc

SEQ ID NO: 5793315 - DNA, 25 bp, Homo sapien
tttctgcaactgaaacgcaagcgag

SEQ ID NO: 5793316 - DNA, 25 bp, Homo sapien
ccactgccttcaccccctacctctg

SEQ ID NO: 5793317 - DNA, 25 bp, Homo sapien
acgtaccgacagacaacctcaccca

SEQ ID NO: 5793318 - DNA, 25 bp, Homo sapien
aagaggccaaagaactgaagaaggt

SEQ ID NO: 5793319 - DNA, 25 bp, Homo sapien
gcttccggggccacacgcctcttga

SEQ ID NO: 5793320 - DNA, 25 bp, Homo sapien
ctgtcacttggtgatacagctctgc

SEQ ID NO: 5793321 - DNA, 25 bp, Homo sapien
agtgcctggatctgctggtggacag

SEQ ID NO: 5793322 - DNA, 25 bp, Homo sapien
gggacaaataaaggattctcatggg

SEQ ID NO: 5793323 - DNA, 25 bp, Homo sapien
tgacattgaggttcggttctatgag

SEQ ID NO: 5793324 - DNA, 25 bp, Homo sapien
gctggatcggcatggagactcagcc

SEQ ID NO: 5793325 - DNA, 25 bp, Homo sapien
gaagggccgaaagacctatcccact

SEQ ID NO: 5793326 - DNA, 25 bp, Homo sapien
cggcgggcgtctaaaattctgggaa

SEQ ID NO: 5793327 - DNA, 25 bp, Homo sapien
cctgagtgcctggatctgctggtgg

SEQ ID NO: 5793328 - DNA, 25 bp, Homo sapien
tcccagcccttcgggggtggctccc

SEQ ID NO: 5793329 - DNA, 25 bp, Homo sapien
agggccttacggaggccgagcagcg

SEQ ID NO: 5793330 - DNA, 25 bp, Homo sapien
gcgggcgtctaaaattctgggaagc

SEQ ID NO: 5793331 - DNA, 25 bp, Homo sapien
ttctccctgcccctgaagccagtca

SEQ ID NO: 5793332 - DNA, 25 bp, Homo sapien
agaccttgctgctaaatgctgctca

SEQ ID NO: 5793333 - DNA, 25 bp, Homo sapien
ctgctttgtgacaaggtgcagaaag

SEQ ID NO: 5793334 - DNA, 25 bp, Homo sapien
acacccacccctcagttgggacaaa

SEQ ID NO: 5793335 - DNA, 25 bp, Homo sapien
tgcagcgagctcgagagtacaacgc

SEQ ID NO: 5793336 - DNA, 25 bp, Homo sapien
acaaggaagaggtgcagcggaagcg

SEQ ID NO: 5793337 - DNA, 25 bp, Homo sapien
aggaggtggcagcctcggtttcttc

SEQ ID NO: 5793338 - DNA, 25 bp, Homo sapien
atctgagtatagtgcggctgcgctt

SEQ ID NO: 5793339 - DNA, 25 bp, Homo sapien
cgagcagcgggagctggagcaagag

SEQ ID NO: 5793340 - DNA, 25 bp, Homo sapien
gtccccacctatttcaaatcttatt

SEQ ID NO: 5793341 - DNA, 25 bp, Homo sapien
ggatggtattattgaatatgatgat

SEQ ID NO: 5793342 - DNA, 25 bp, Homo sapien
ccactagacagagccgggcctagcc

SEQ ID NO: 5793343 - DNA, 25 bp, Homo sapien
gaggagctggaggaggtggcagcct

SEQ ID NO: 5793344 - DNA, 25 bp, Homo sapien
caaccagagccgccgccacggcggg

SEQ ID NO: 5793345 - DNA, 25 bp, Homo sapien
cctggatctgctggtggacagtggg

SEQ ID NO: 5793346 - DNA, 25 bp, Homo sapien
acagcgccacctgctgacggcgcag

SEQ ID NO: 5793347 - DNA, 25 bp, Homo sapien
ggccaaagaactgaagaaggtgatg

SEQ ID NO: 5793348 - DNA, 25 bp, Homo sapien
gtttcttcccctcctccctggccta

SEQ ID NO: 5793349 - DNA, 25 bp, Homo sapien
gagtacaacgcgcgcctgttcggcc

SEQ ID NO: 5793350 - DNA, 25 bp, Homo sapien
gacgcgcgcgcgctgctggcgggac

SEQ ID NO: 5793351 - DNA, 25 bp, Homo sapien
aaacagttcacctattaccctctgg

SEQ ID NO: 5793352 - DNA, 25 bp, Homo sapien
ctaccagtccggcgcgggccccatg

SEQ ID NO: 5793353 - DNA, 25 bp, Homo sapien
ttcttcccctcctccctggcctaca

SEQ ID NO: 5793354 - DNA, 25 bp, Homo sapien
agggctctgccacgggcacccccag

SEQ ID NO: 5793355 - DNA, 25 bp, Homo sapien
ctttgcgggaaacacacccctgcac

SEQ ID NO: 5793356 - DNA, 25 bp, Homo sapien
gcggaggaaggccttgcccaccttc

SEQ ID NO: 5793357 - DNA, 25 bp, Homo sapien
ccgggggcatcaaacctgaagattt

SEQ ID NO: 5793358 - DNA, 25 bp, Homo sapien
gcttcagagtggagctcctgctgtg

SEQ ID NO: 5793359 - DNA, 25 bp, Homo sapien
cctccaggaccccccagtgcgagcc

SEQ ID NO: 5793360 - DNA, 25 bp, Homo sapien
cgcaggccccggagatgctgcagcg

SEQ ID NO: 5793361 - DNA, 25 bp, Homo sapien
caaataaaggattctcatgggaagg

SEQ ID NO: 5793362 - DNA, 25 bp, Homo sapien
cctcctgcgcagctacgagctggct

SEQ ID NO: 5793363 - DNA, 25 bp, Homo sapien
tctgcagaacctggagcagctgcta

SEQ ID NO: 5793364 - DNA, 25 bp, Homo sapien
gctggagcaagaggccaaagaactg

SEQ ID NO: 5793365 - DNA, 25 bp, Homo sapien
ctcctccctggcctacagcccctac

SEQ ID NO: 5793366 - DNA, 25 bp, Homo sapien
acaagatgaagattgagcggcctgt

SEQ ID NO: 5793367 - DNA, 25 bp, Homo sapien
gaacctggagcagctgctagacggg

SEQ ID NO: 5793368 - DNA, 25 bp, Homo sapien
tgcacctggcggtgatcacggggca

SEQ ID NO: 5793369 - DNA, 25 bp, Homo sapien
cgcgcgcctgttcggcctggcgcag

SEQ ID NO: 5793370 - DNA, 25 bp, Homo sapien
cggagccgagcgccccctccaggac

SEQ ID NO: 5793371 - DNA, 25 bp, Homo sapien
atgatgagaatggatggcaggcctt

SEQ ID NO: 5793372 - DNA, 25 bp, Homo sapien
cacggcgggcgtctaaaattctggg

SEQ ID NO: 5793373 - DNA, 25 bp, Homo sapien
taactacgagggaccagccaagatc

SEQ ID NO: 5793374 - DNA, 25 bp, Homo sapien
aacgcgcgcctgttcggcctggcgc

SEQ ID NO: 5793375 - DNA, 25 bp, Homo sapien
tacacctggcggtccgagcccgaag

SEQ ID NO: 5793376 - DNA, 25 bp, Homo sapien
ttgcatatgcctgactttgagggac

SEQ ID NO: 5793377 - DNA, 25 bp, Homo sapien
gagctttctgctgcgggtaggtgca

SEQ ID NO: 5793378 - DNA, 25 bp, Homo sapien
tgtcattgagcagatagtctatgtc

SEQ ID NO: 5793379 - DNA, 25 bp, Homo sapien
ttccgatttcgatatggctgtgaag

SEQ ID NO: 5793380 - DNA, 25 bp, Homo sapien
gggcgtctaaaattctgggaagcag

SEQ ID NO: 5793381 - DNA, 25 bp, Homo sapien
acatgactgcccaatttaacaacct

SEQ ID NO: 5793382 - DNA, 25 bp, Homo sapien
gtctactggaggccctgtctgacat

SEQ ID NO: 5793383 - DNA, 25 bp, Homo sapien
acggggcagacgagtgtggtgagct

SEQ ID NO: 5793384 - DNA, 25 bp, Homo sapien
gccttgcccaccttctcccagccct

SEQ ID NO: 5793385 - DNA, 25 bp, Homo sapien
cttctctgccttccttagagccagt

SEQ ID NO: 5793386 - DNA, 25 bp, Homo sapien
agtgaggctgctgaggggtccagaa

SEQ ID NO: 5793387 - DNA, 25 bp, Homo sapien
ggacttctctcccacagatgtgcat

SEQ ID NO: 5793388 - DNA, 25 bp, Homo sapien
agggccgaaagacctatcccactgt

SEQ ID NO: 5793389 - DNA, 25 bp, Homo sapien
gcgtccccacctatttcaaatctta

SEQ ID NO: 5793390 - DNA, 25 bp, Homo sapien
tggaggagctggggttggtcaccca

SEQ ID NO: 5793391 - DNA, 25 bp, Homo sapien
acgcccaggacctcggcgttgtcaa

SEQ ID NO: 5793392 - DNA, 25 bp, Homo sapien
cagctgttgcatatgcctgactttg

SEQ ID NO: 5793393 - DNA, 25 bp, Homo sapien
tgaggctgctgaggggtccagaaac

SEQ ID NO: 5793394 - DNA, 25 bp, Homo sapien
gcccactgccttcaccccctacctc

SEQ ID NO: 5793395 - DNA, 25 bp, Homo sapien
cctacctggtgatcgtggaacagcc

SEQ ID NO: 5793396 - DNA, 25 bp, Homo sapien
gaagacaaggaagaggtgcagcgga

SEQ ID NO: 5793397 - DNA, 25 bp, Homo sapien
tggcggggacctggcaggtctactg

SEQ ID NO: 5793398 - DNA, 25 bp, Homo sapien
ccttcaccccctacctctgatagcg

SEQ ID NO: 5793399 - DNA, 25 bp, Homo sapien
ctacgagctggctggcggggacctg

SEQ ID NO: 5793400 - DNA, 25 bp, Homo sapien
gcttccgatttcgatatggctgtga

SEQ ID NO: 5793401 - DNA, 25 bp, Homo sapien
gcgccccctccaggaccccccagtg

SEQ ID NO: 5793402 - DNA, 25 bp, Homo sapien
cctccagtgagaagggccgaaagac

SEQ ID NO: 5793403 - DNA, 25 bp, Homo sapien
ggcagacgagtgtggtgagctttct

SEQ ID NO: 5793404 - DNA, 25 bp, Homo sapien
ccatggaggactgcccggtgcctcc

SEQ ID NO: 5793405 - DNA, 25 bp, Homo sapien
gtcaacctcaccaaccacctgcacc

SEQ ID NO: 5793406 - DNA, 25 bp, Homo sapien
gagaagggccgaaagacctatccca

SEQ ID NO: 5793407 - DNA, 25 bp, Homo sapien
agcagatagtctatgtcatccacca

SEQ ID NO: 5793408 - DNA, 25 bp, Homo sapien
cccgagccctactcgactacggcgt

SEQ ID NO: 5793409 - DNA, 25 bp, Homo sapien
cagagaagctgggcccaccccctga

SEQ ID NO: 5793410 - DNA, 25 bp, Homo sapien
actgtcaagatctgtaactacgagg

SEQ ID NO: 5793411 - DNA, 25 bp, Homo sapien
acgagaacggagacacaccactgca

SEQ ID NO: 5793412 - DNA, 25 bp, Homo sapien
agcccgaagccctgagtgcctggat

SEQ ID NO: 5793413 - DNA, 25 bp, Homo sapien
tctcccagcccttcgggggtggctc

SEQ ID NO: 5793414 - DNA, 25 bp, Homo sapien
ttctctcccacagatgtgcataaac

SEQ ID NO: 5793415 - DNA, 25 bp, Homo sapien
ggcgctggtgctcctgagctgctgc

SEQ ID NO: 5793416 - DNA, 25 bp, Homo sapien
tggagcaagaggccaaagaactgaa

SEQ ID NO: 5793417 - DNA, 25 bp, Homo sapien
cctgaagatttctcgaatggacaag

SEQ ID NO: 5793418 - DNA, 25 bp, Homo sapien
ccatgacagcaaatctccgggggca

SEQ ID NO: 5793419 - DNA, 25 bp, Homo sapien
cagcaggctctgtgcggggtggaga

SEQ ID NO: 5793420 - DNA, 25 bp, Homo sapien
ccaggacctcggcgttgtcaacctc

SEQ ID NO: 5793421 - DNA, 25 bp, Homo sapien
tgatgatttcaaattgaactcctcc

SEQ ID NO: 5793422 - DNA, 25 bp, Homo sapien
ccctcctccctggcctacagcccct

SEQ ID NO: 5793423 - DNA, 25 bp, Homo sapien
cagcgcagcgcccgagccctactcg

SEQ ID NO: 5793424 - DNA, 25 bp, Homo sapien
gctggtgctgacatccatgctgaaa

SEQ ID NO: 5793425 - DNA, 25 bp, Homo sapien
agtgcgtacgggagccagtcagtgg

SEQ ID NO: 5793426 - DNA, 25 bp, Homo sapien
caccaaccacctgcaccagacgccc

SEQ ID NO: 5793427 - DNA, 25 bp, Homo sapien
aacccgagacaagctgcccagcaca

SEQ ID NO: 5793428 - DNA, 25 bp, Homo sapien
ctgcctgcccccagcccccttcccg

SEQ ID NO: 5793429 - DNA, 25 bp, Homo sapien
acctggagcagctgctagacgggcc

SEQ ID NO: 5793430 - DNA, 25 bp, Homo sapien
atctgcgccgtttctgtggggccca

SEQ ID NO: 5793431 - DNA, 25 bp, Homo sapien
gtgcggggtggagatgaagtttatc

SEQ ID NO: 5793432 - DNA, 25 bp, Homo sapien
tgccttccttagagccagtgatggc

SEQ ID NO: 5793433 - DNA, 25 bp, Homo sapien
gctgaaaacgaggagcccctgtgcc

SEQ ID NO: 5793434 - DNA, 25 bp, Homo sapien
ggggacgaacagccttgcatctagc

SEQ ID NO: 5793435 - DNA, 25 bp, Homo sapien
ctagccacagagatggaggagctgg

SEQ ID NO: 5793436 - DNA, 25 bp, Homo sapien
gaacggagacacaccactgcaccta

SEQ ID NO: 5793437 - DNA, 25 bp, Homo sapien
cagggcagctgggcagagctggcag

SEQ ID NO: 5793438 - DNA, 25 bp, Homo sapien
gagagtacaacgcgcgcctgttcgg

SEQ ID NO: 5793439 - DNA, 25 bp, Homo sapien
tgctgctaaatgctgctcagaacac

SEQ ID NO: 5793440 - DNA, 25 bp, Homo sapien
taacaccccacacccacccctcagt

SEQ ID NO: 5793441 - DNA, 25 bp, Homo sapien
ggcctgtaacagtgtttctgcaact

SEQ ID NO: 5793442 - DNA, 25 bp, Homo sapien
ccctgaagccagtcatctcccagcc

SEQ ID NO: 5793443 - DNA, 25 bp, Homo sapien
aatggatggcaggcctttggggact

SEQ ID NO: 5793444 - DNA, 25 bp, Homo sapien
aggaggcagagaagctgggcccacc

SEQ ID NO: 5793445 - DNA, 25 bp, Homo sapien
gagcaagaggccaaagaactgaaga

SEQ ID NO: 5793446 - DNA, 25 bp, Homo sapien
gaacatgatggggactatgatacaa

SEQ ID NO: 5793447 - DNA, 25 bp, Homo sapien
gggccagaagcccagggcagctggg

SEQ ID NO: 5793448 - DNA, 25 bp, Homo sapien
gatggccgccacggtgcccagcagg

SEQ ID NO: 5793449 - DNA, 25 bp, Homo sapien
ctggggatctgcgccgtttctgtgg

SEQ ID NO: 5793450 - DNA, 25 bp, Homo sapien
agatgctgcagcgagctcgagagta

SEQ ID NO: 5793451 - DNA, 25 bp, Homo sapien
aaggtgcagaaagatgacattgagg

SEQ ID NO: 5793452 - DNA, 25 bp, Homo sapien
agaggcagcggctccgctctaggcc

SEQ ID NO: 5793453 - DNA, 25 bp, Homo sapien
gagggactgtatccagtacacctgg

SEQ ID NO: 5793454 - DNA, 25 bp, Homo sapien
gtctggtgggcaagcaatgctcgga

SEQ ID NO: 5793455 - DNA, 25 bp, Homo sapien
tttctgctgcgggtaggtgcagacc

SEQ ID NO: 5793456 - DNA, 25 bp, Homo sapien
gggctgaagtggaggccactgagcg

SEQ ID NO: 5793457 - DNA, 25 bp, Homo sapien
ctacggcgtcaccgcggacgcgcgc

SEQ ID NO: 5793458 - DNA, 25 bp, Homo sapien
caaggagccagccccagaaacagct

SEQ ID NO: 5793459 - DNA, 25 bp, Homo sapien
agccatcatccacgggcagaccagt

SEQ ID NO: 5793460 - DNA, 25 bp, Homo sapien
ccaggtctggatggtattattgaat

SEQ ID NO: 5793461 - DNA, 25 bp, Homo sapien
gaggagctggggttggtcacccatc

SEQ ID NO: 5793462 - DNA, 25 bp, Homo sapien
tttctcgaatggacaagacagcagg

SEQ ID NO: 5793463 - DNA, 25 bp, Homo sapien
agtggagcaggaggcagagaagctg

SEQ ID NO: 5793464 - DNA, 25 bp, Homo sapien
cccgaagccctgagtgcctggatct

SEQ ID NO: 5793465 - DNA, 25 bp, Homo sapien
gcaggtctactggaggccctgtctg

SEQ ID NO: 5793466 - DNA, 25 bp, Homo sapien
ctgctcagaacaccatggagccacc

SEQ ID NO: 5793467 - DNA, 25 bp, Homo sapien
atagtgcggctgcgcttctctgcct

SEQ ID NO: 5793468 - DNA, 25 bp, Homo sapien
ctctgctggatcggcatggagactc

SEQ ID NO: 5793469 - DNA, 25 bp, Homo sapien
ccctaccagtccggcgcgggcccca

SEQ ID NO: 5793470 - DNA, 25 bp, Homo sapien
agctctgctggatcggcatggagac

SEQ ID NO: 5793471 - DNA, 25 bp, Homo sapien
cctgggtgtcctgcatgtgactaag

SEQ ID NO: 5793472 - DNA, 25 bp, Homo sapien
ggggcagacgagtgtggtgagcttt

SEQ ID NO: 5793473 - DNA, 25 bp, Homo sapien
ggggtccagaaacccgagacaagct

SEQ ID NO: 5793474 - DNA, 25 bp, Homo sapien
cacccccagcctcaggtgcactgac

SEQ ID NO: 5793475 - DNA, 25 bp, Homo sapien
acgggccagaagcccagggcagctg

SEQ ID NO: 5793476 - DNA, 25 bp, Homo sapien
ggggacgtgtctgattccaaacagt

SEQ ID NO: 5793477 - DNA, 25 bp, Homo sapien
cccagcctcaggtgcactgacctgc

SEQ ID NO: 5793478 - DNA, 25 bp, Homo sapien
gcctcttgacctcacttgcagcacc

SEQ ID NO: 5793479 - DNA, 25 bp, Homo sapien
caggggggacgaacagccttgcatc

SEQ ID NO: 5793480 - DNA, 25 bp, Homo sapien
aggcagcggctccgctctaggcccc

SEQ ID NO: 5793481 - DNA, 25 bp, Homo sapien
gccaacgtgaacgctcgcacctttg

SEQ ID NO: 5793482 - DNA, 25 bp, Homo sapien
agacacgtaccgacagacaacctca

SEQ ID NO: 5793483 - DNA, 25 bp, Homo sapien
cgcgcgcgcgctgctggcgggacag

SEQ ID NO: 5793484 - DNA, 25 bp, Homo sapien
tgctgcgggtaggtgcagacccagc

SEQ ID NO: 5793485 - DNA, 25 bp, Homo sapien
gggtggctcccacatgggtggaggc

SEQ ID NO: 5793486 - DNA, 25 bp, Homo sapien
gccgagcgccccctccaggaccccc

SEQ ID NO: 5793487 - DNA, 25 bp, Homo sapien
cagtctggtgggcaagcaatgctcg

SEQ ID NO: 5793488 - DNA, 25 bp, Homo sapien
ctgaagggcctgagaaggacacccg

SEQ ID NO: 5793489 - DNA, 25 bp, Homo sapien
cccacagtctggtgggcaagcaatg

SEQ ID NO: 5793490 - DNA, 25 bp, Homo sapien
acacaccactgcacctagccatcat

SEQ ID NO: 5793491 - DNA, 25 bp, Homo sapien
cgcggagccgagcgccccctccagg

SEQ ID NO: 5793492 - DNA, 25 bp, Homo sapien
ggacgaacagccttgcatctagcca

SEQ ID NO: 5793493 - DNA, 25 bp, Homo sapien
atgtcatccaccacgcccaggacct

SEQ ID NO: 5793494 - DNA, 25 bp, Homo sapien
tgcagaacctggagcagctgctaga

SEQ ID NO: 5793495 - DNA, 25 bp, Homo sapien
gggggtggctcccacatgggtggag

SEQ ID NO: 5793496 - DNA, 25 bp, Homo sapien
tatcacaagatgaagattgagcggc

SEQ ID NO: 5793497 - DNA, 25 bp, Homo sapien
tgatggatctgagtatagtgcggct

SEQ ID NO: 5793498 - DNA, 25 bp, Homo sapien
ctgtatccagtacacctggcggtcc

SEQ ID NO: 5793499 - DNA, 25 bp, Homo sapien
gagccgcaggccccggagatgctgc

SEQ ID NO: 5793500 - DNA, 25 bp, Homo sapien
tggtattattgaatatgatgatttc

SEQ ID NO: 5793501 - DNA, 25 bp, Homo sapien
aggtcagtgcacctgaggctggggg

SEQ ID NO: 5793502 - DNA, 25 bp, Homo sapien
ttgtcttccaccagagggtaatagg

SEQ ID NO: 5793503 - DNA, 25 bp, Homo sapien
gctgccctgggcttctggcccgtct

SEQ ID NO: 5793504 - DNA, 25 bp, Homo sapien
tccatcaccttcttcagttctttgg

SEQ ID NO: 5793505 - DNA, 25 bp, Homo sapien
tgggtgaccaaccccagctcctcca

SEQ ID NO: 5793506 - DNA, 25 bp, Homo sapien
tctgcccagctgccctgggcttctg

SEQ ID NO: 5793507 - DNA, 25 bp, Homo sapien
tactcagatccatcaccttcttcag

SEQ ID NO: 5793508 - DNA, 25 bp, Homo sapien
ccaggcactcagggcttcgggctcg

SEQ ID NO: 5793509 - DNA, 25 bp, Homo sapien
gcccatgtcagacagggcctccagt

SEQ ID NO: 5793510 - DNA, 25 bp, Homo sapien
gtgatcaccgccaggtgcaggggcg

SEQ ID NO: 5793511 - DNA, 25 bp, Homo sapien
tccacgatcaccaggtaggggccat

SEQ ID NO: 5793512 - DNA, 25 bp, Homo sapien
caggaggctgccactgggtgaggtt

SEQ ID NO: 5793513 - DNA, 25 bp, Homo sapien
gagctccactctgaagcagtgcacg

SEQ ID NO: 5793514 - DNA, 25 bp, Homo sapien
gggtcgggtaccccagtccagctgc

SEQ ID NO: 5793515 - DNA, 25 bp, Homo sapien
accgtggcggccatctgcgccccgc

SEQ ID NO: 5793516 - DNA, 25 bp, Homo sapien
ggggcacagcaggagctccactctg

SEQ ID NO: 5793517 - DNA, 25 bp, Homo sapien
cagtgcacgcagcagctcaggagca

SEQ ID NO: 5793518 - DNA, 25 bp, Homo sapien
gctccatggtgttctgagcagcatt

SEQ ID NO: 5793519 - DNA, 25 bp, Homo sapien
ccgcagcgccagatgcatggctgag

SEQ ID NO: 5793520 - DNA, 25 bp, Homo sapien
gccaggtccccgccagccagctcgt

SEQ ID NO: 5793521 - DNA, 25 bp, Homo sapien
gatccccagctccgagcattgcttg

SEQ ID NO: 5793522 - DNA, 25 bp, Homo sapien
caggcagcaggtcagtgcacctgag

SEQ ID NO: 5793523 - DNA, 25 bp, Homo sapien
ggagccgctgcctctgaagtttttg

SEQ ID NO: 5793524 - DNA, 25 bp, Homo sapien
ctcctccatctctgtggctagatgc

SEQ ID NO: 5793525 - DNA, 25 bp, Homo sapien
gcgccgtcagcaggtggcgctgtcc

SEQ ID NO: 5793526 - DNA, 25 bp, Homo sapien
gaattttagacgcccgccgtggcgg

SEQ ID NO: 5793527 - DNA, 25 bp, Homo sapien
ccggagtccctgctgggcaccgtgg

SEQ ID NO: 5793528 - DNA, 25 bp, Homo sapien
tagggggtgaaggcagtgggcacag

SEQ ID NO: 5793529 - DNA, 25 bp, Homo sapien
ctcctgctccactgactggctcccg

SEQ ID NO: 5793530 - DNA, 25 bp, Homo sapien
gcgtccgcggtgacgccgtagtcga

SEQ ID NO: 5793531 - DNA, 25 bp, Homo sapien
ctcaaagtcaggcatatgcaacagc

SEQ ID NO: 5793532 - DNA, 25 bp, Homo sapien
tccgttctcgtcctgcgccgtcagc

SEQ ID NO: 5793533 - DNA, 25 bp, Homo sapien
cgctgcacctcttccttgtcttcca

SEQ ID NO: 5793534 - DNA, 25 bp, Homo sapien
atggaggagttcaatttgaaatcat

SEQ ID NO: 5793535 - DNA, 25 bp, Homo sapien
ctgcggctcgcactggggggtcctg

SEQ ID NO: 5793536 - DNA, 25 bp, Homo sapien
cccatggggcccgcgccggactggt

SEQ ID NO: 5793537 - DNA, 25 bp, Homo sapien
catgtctctgggctaggcccggctc

SEQ ID NO: 5793538 - DNA, 25 bp, Homo sapien
ctgggcaccgtggcggccatctgcg

SEQ ID NO: 5793539 - DNA, 25 bp, Homo sapien
actgtcttccttcacctctgtgctg

SEQ ID NO: 5793540 - DNA, 25 bp, Homo sapien
gtgcacctgaggctgggggtgcccg

SEQ ID NO: 5793541 - DNA, 25 bp, Homo sapien
agaaatcttcaggtttgatgccccc

SEQ ID NO: 5793542 - DNA, 25 bp, Homo sapien
cctcctctaggcccatgtcagacag

SEQ ID NO: 5793543 - DNA, 25 bp, Homo sapien
ccctgccgctcagtggcctccactt

SEQ ID NO: 5793544 - DNA, 25 bp, Homo sapien
ctgcacccccagagcctccacccat

SEQ ID NO: 5793545 - DNA, 25 bp, Homo sapien
ccaccagactgtgggcatgagcacg

SEQ ID NO: 5793546 - DNA, 25 bp, Homo sapien
cttgtccattcgagaaatcttcagg

SEQ ID NO: 5793547 - DNA, 25 bp, Homo sapien
gtggtgtgtctccgttctcgtcctg

SEQ ID NO: 5793548 - DNA, 25 bp, Homo sapien
cccggccctgctgggctgggcgggg

SEQ ID NO: 5793549 - DNA, 25 bp, Homo sapien
cccgctgctcggcctccgtaaggcc

SEQ ID NO: 5793550 - DNA, 25 bp, Homo sapien
gcccaccagactgtgggcatgagca

SEQ ID NO: 5793551 - DNA, 25 bp, Homo sapien
cctcgttttcagcatggatgtcagc

SEQ ID NO: 5793552 - DNA, 25 bp, Homo sapien
gggtgtccggaacacaatggcatac

SEQ ID NO: 5793553 - DNA, 25 bp, Homo sapien
tgaccaaccccagctcctccatctc

SEQ ID NO: 5793554 - DNA, 25 bp, Homo sapien
gataaacttcatctccaccccgcac

SEQ ID NO: 5793555 - DNA, 25 bp, Homo sapien
accagactgtgggcatgagcacgag

SEQ ID NO: 5793556 - DNA, 25 bp, Homo sapien
ccccgcacagagcctgctgtcttgt

SEQ ID NO: 5793557 - DNA, 25 bp, Homo sapien
tgctgggcagcttgtctcgggtttc

SEQ ID NO: 5793558 - DNA, 25 bp, Homo sapien
cttccaccagagggtaataggtgaa

SEQ ID NO: 5793559 - DNA, 25 bp, Homo sapien
tgagcagcatttagcagcaaggtct

SEQ ID NO: 5793560 - DNA, 25 bp, Homo sapien
ggcagggagaaggagccatcactgg

SEQ ID NO: 5793561 - DNA, 25 bp, Homo sapien
agatgcatggctgagtctccatgcc

SEQ ID NO: 5793562 - DNA, 25 bp, Homo sapien
ggctaggcccggctctgtctagtgg

SEQ ID NO: 5793563 - DNA, 25 bp, Homo sapien
gtaaggccctggggcctagagcgga

SEQ ID NO: 5793564 - DNA, 25 bp, Homo sapien
ttggctggtccctcgtagttacaga

SEQ ID NO: 5793565 - DNA, 25 bp, Homo sapien
ggcccagcttctctgcctcctgctc

SEQ ID NO: 5793566 - DNA, 25 bp, Homo sapien
tgggcgtggtggatgacatagacta

SEQ ID NO: 5793567 - DNA, 25 bp, Homo sapien
agttacagatcttgacagtgggata

SEQ ID NO: 5793568 - DNA, 25 bp, Homo sapien
ggggctcctcgttttcagcatggat

SEQ ID NO: 5793569 - DNA, 25 bp, Homo sapien
gtttgatgcccccggagatttgctg

SEQ ID NO: 5793570 - DNA, 25 bp, Homo sapien
acaggccgctcaatcttcatcttgt

SEQ ID NO: 5793571 - DNA, 25 bp, Homo sapien
tccttgggccccacagaaacggcgc

SEQ ID NO: 5793572 - DNA, 25 bp, Homo sapien
acgccgaggtcctgggcgtggtgga

SEQ ID NO: 5793573 - DNA, 25 bp, Homo sapien
aatcctttatttgtcccaactgagg

SEQ ID NO: 5793574 - DNA, 25 bp, Homo sapien
ccttcctccgcttccgctgcacctc

SEQ ID NO: 5793575 - DNA, 25 bp, Homo sapien
gatcttggctggtccctcgtagtta

SEQ ID NO: 5793576 - DNA, 25 bp, Homo sapien
ctgagtctccatgccgatccagcag

SEQ ID NO: 5793577 - DNA, 25 bp, Homo sapien
ttcggcccttctcactggaggcacc

SEQ ID NO: 5793578 - DNA, 25 bp, Homo sapien
gatgcccccggagatttgctgtcat

SEQ ID NO: 5793579 - DNA, 25 bp, Homo sapien
ggtccctcgtagttacagatcttga

SEQ ID NO: 5793580 - DNA, 25 bp, Homo sapien
cttaggctgttccacgatcaccagg

SEQ ID NO: 5793581 - DNA, 25 bp, Homo sapien
gcgcgcgcgtccgcggtgacgccgt

SEQ ID NO: 5793582 - DNA, 25 bp, Homo sapien
gtgaaggcagtgggcacaggggctc

SEQ ID NO: 5793583 - DNA, 25 bp, Homo sapien
cctgggcgtggtggatgacatagac

SEQ ID NO: 5793584 - DNA, 25 bp, Homo sapien
tctctgcttaggctgttccacgatc

SEQ ID NO: 5793585 - DNA, 25 bp, Homo sapien
ggagtccctgctgggcaccgtggcg

SEQ ID NO: 5793586 - DNA, 25 bp, Homo sapien
gtgcaggggcgtctggtgcaggtgg

SEQ ID NO: 5793587 - DNA, 25 bp, Homo sapien
aaaccgaggctgccacctcctccag

SEQ ID NO: 5793588 - DNA, 25 bp, Homo sapien
agcagcaaggtcttcaccttggtgc

SEQ ID NO: 5793589 - DNA, 25 bp, Homo sapien
cccccggagatttgctgtcatggat

SEQ ID NO: 5793590 - DNA, 25 bp, Homo sapien
ctggtgcaggtggttggtgaggttg

SEQ ID NO: 5793591 - DNA, 25 bp, Homo sapien
gctgtaggccagggaggaggggaag

SEQ ID NO: 5793592 - DNA, 25 bp, Homo sapien
aggcgcgcgttgtactctcgagctc

SEQ ID NO: 5793593 - DNA, 25 bp, Homo sapien
cctcgatcttggctggtccctcgta

SEQ ID NO: 5793594 - DNA, 25 bp, Homo sapien
ccttgtcttccaccagagggtaata

SEQ ID NO: 5793595 - DNA, 25 bp, Homo sapien
ggggcctagagcggagccgctgcct

SEQ ID NO: 5793596 - DNA, 25 bp, Homo sapien
gcgcgcgtccgcggtgacgccgtag

SEQ ID NO: 5793597 - DNA, 25 bp, Homo sapien
catggatgtcagcaccagccttcag

SEQ ID NO: 5793598 - DNA, 25 bp, Homo sapien
tacgtgtctaccaggctgcgcagcc

SEQ ID NO: 5793599 - DNA, 25 bp, Homo sapien
ggctggctccttgggttccacaatg

SEQ ID NO: 5793600 - DNA, 25 bp, Homo sapien
cttgtctcgggtttctggacccctc

SEQ ID NO: 5793601 - DNA, 25 bp, Homo sapien
aaggccttcctccgcttccgctgca

SEQ ID NO: 5793602 - DNA, 25 bp, Homo sapien
cacgatcaccaggtaggggccatca

SEQ ID NO: 5793603 - DNA, 25 bp, Homo sapien
gccccagacgctctgccagctctgc

SEQ ID NO: 5793604 - DNA, 25 bp, Homo sapien
aggaaggcagagaagcgcagccgca

SEQ ID NO: 5793605 - DNA, 25 bp, Homo sapien
atccattctcatcatcctcatagaa

SEQ ID NO: 5793606 - DNA, 25 bp, Homo sapien
ggcccgcgccggactggtaggggct

SEQ ID NO: 5793607 - DNA, 25 bp, Homo sapien
ggtgggtcactgtgtgttaccaggt

SEQ ID NO: 5793608 - DNA, 25 bp, Homo sapien
gggagccacccccgaagggctggga

SEQ ID NO: 5793609 - DNA, 25 bp, Homo sapien
tagaaccgaacctcaatgtcatctt

SEQ ID NO: 5793610 - DNA, 25 bp, Homo sapien
ccagctcctccatctctgtggctag

SEQ ID NO: 5793611 - DNA, 25 bp, Homo sapien
gctagatgcaaggctgttcgtcccc

SEQ ID NO: 5793612 - DNA, 25 bp, Homo sapien
atcttcaggtttgatgcccccggag

SEQ ID NO: 5793613 - DNA, 25 bp, Homo sapien
agctcccgctgctcggcctccgtaa

SEQ ID NO: 5793614 - DNA, 25 bp, Homo sapien
agggctgggagaaggtgggcaaggc

SEQ ID NO: 5793615 - DNA, 25 bp, Homo sapien
cccgccagccagctcgtagctgcgc

SEQ ID NO: 5793616 - DNA, 25 bp, Homo sapien
tccatctctgtggctagatgcaagg

SEQ ID NO: 5793617 - DNA, 25 bp, Homo sapien
gcctccagtagacctgccaggtccc

SEQ ID NO: 5793618 - DNA, 25 bp, Homo sapien
gggtttctggacccctcagcagcct

SEQ ID NO: 5793619 - DNA, 25 bp, Homo sapien
tccggccaggttctgcttcccagaa

SEQ ID NO: 5793620 - DNA, 25 bp, Homo sapien
ttcatctccaccccgcacagagcct

SEQ ID NO: 5793621 - DNA, 25 bp, Homo sapien
gtggcagagccctcctggtggctca

SEQ ID NO: 5793622 - DNA, 25 bp, Homo sapien
tgtgtctccgttctcgtcctgcgcc

SEQ ID NO: 5793623 - DNA, 25 bp, Homo sapien
aggcccttcagagtccgagtcgcta

SEQ ID NO: 5793624 - DNA, 25 bp, Homo sapien
gcttggtgaccagatgggtgaccaa

SEQ ID NO: 5793625 - DNA, 25 bp, Homo sapien
ccgtacgcactgtcttccttcacct

SEQ ID NO: 5793626 - DNA, 25 bp, Homo sapien
gtctggtgcaggtggttggtgaggt

SEQ ID NO: 5793627 - DNA, 25 bp, Homo sapien
cgccaggtgtactggatacagtccc

SEQ ID NO: 5793628 - DNA, 25 bp, Homo sapien
gggcatgagcacgaggtgggtcact

SEQ ID NO: 5793629 - DNA, 25 bp, Homo sapien
cagttctttggcctcttgctccagc

SEQ ID NO: 5793630 - DNA, 25 bp, Homo sapien
gcacatctgtgggagagaagtcccc

SEQ ID NO: 5793631 - DNA, 25 bp, Homo sapien
ttcccagaattttagacgcccgccg

SEQ ID NO: 5793632 - DNA, 25 bp, Homo sapien
tccccgccagccagctcgtagctgc

SEQ ID NO: 5793633 - DNA, 25 bp, Homo sapien
gcatggctgagtctccatgccgatc

SEQ ID NO: 5793634 - DNA, 25 bp, Homo sapien
cgttggcccggagcttggtgaccag

SEQ ID NO: 5793635 - DNA, 25 bp, Homo sapien
tagacgcccgccgtggcggcggctc

SEQ ID NO: 5793636 - DNA, 25 bp, Homo sapien
ggatgacatagactatctgctcaat

SEQ ID NO: 5793637 - DNA, 25 bp, Homo sapien
cgcgccggactggtaggggctgtag

SEQ ID NO: 5793638 - DNA, 25 bp, Homo sapien
cgccaggtgcaggggcgtctggtgc

SEQ ID NO: 5793639 - DNA, 25 bp, Homo sapien
ttctggggctggctccttgggttcc

SEQ ID NO: 5793640 - DNA, 25 bp, Homo sapien
gccgtcagcaggtggcgctgtcccg

SEQ ID NO: 5793641 - DNA, 25 bp, Homo sapien
cagacacgtcccctcctcgcttgcg

SEQ ID NO: 5793642 - DNA, 25 bp, Homo sapien
gctccactctgaagcagtgcacgca

SEQ ID NO: 5793643 - DNA, 25 bp, Homo sapien
gcctcttgctccagctcccgctgct

SEQ ID NO: 5793644 - DNA, 25 bp, Homo sapien
atgtcagacagggcctccagtagac

SEQ ID NO: 5793645 - DNA, 25 bp, Homo sapien
tgtctcgggtttctggacccctcag

SEQ ID NO: 5793646 - DNA, 25 bp, Homo sapien
agcattgcttgcccaccagactgtg

SEQ ID NO: 5793647 - DNA, 25 bp, Homo sapien
gctaggtgcagtggtgtgtctccgt

SEQ ID NO: 5793648 - DNA, 25 bp, Homo sapien
tcctggtggctcagggggtgggccc

SEQ ID NO: 5793649 - DNA, 25 bp, Homo sapien
taaacttcatctccaccccgcacag

SEQ ID NO: 5793650 - DNA, 25 bp, Homo sapien
ggacccctcagcagcctcactccct

SEQ ID NO: 5793651 - DNA, 25 bp, Homo sapien
gtgttaaataagatttgaaataggt

SEQ ID NO: 5793652 - DNA, 25 bp, Homo sapien
taataggtgaactgtttggaatcag

SEQ ID NO: 5793653 - DNA, 25 bp, Homo sapien
gcgctcggctccgcggcttcctccc

SEQ ID NO: 5793654 - DNA, 25 bp, Homo sapien
agcatctccggggcctgcggctcgc

SEQ ID NO: 5793655 - DNA, 25 bp, Homo sapien
acctcttccttgtcttccaccagag

SEQ ID NO: 5793656 - DNA, 25 bp, Homo sapien
ctcctcgttttcagcatggatgtca

SEQ ID NO: 5793657 - DNA, 25 bp, Homo sapien
ctggtccctcgtagttacagatctt

SEQ ID NO: 5793658 - DNA, 25 bp, Homo sapien
actcagggcttcgggctcggaccgc

SEQ ID NO: 5793659 - DNA, 25 bp, Homo sapien
cagagtccgagtcgctatcagaggt

SEQ ID NO: 5793660 - DNA, 25 bp, Homo sapien
cttctcaggcccttcagagtccgag

SEQ ID NO: 5793661 - DNA, 25 bp, Homo sapien
gccgatccagcagagctgggtctgc

SEQ ID NO: 5793662 - DNA, 25 bp, Homo sapien
gccttcacagccatatcgaaatcgg

SEQ ID NO: 5793663 - DNA, 25 bp, Homo sapien
agtccccaaaggcctgccatccatt

SEQ ID NO: 5793664 - DNA, 25 bp, Homo sapien
ttcttagtcacatgcaggacaccca

SEQ ID NO: 5793665 - DNA, 25 bp, Homo sapien
agtgggataggtctttcggcccttc

SEQ ID NO: 5793666 - DNA, 25 bp, Homo sapien
gggacgctgtacagggggtccggga

SEQ ID NO: 5793667 - DNA, 25 bp, Homo sapien
tgctccagctcccgctgctcggcct

SEQ ID NO: 5793668 - DNA, 25 bp, Homo sapien
cagagctgggtctgcacctacccgc

SEQ ID NO: 5793669 - DNA, 25 bp, Homo sapien
gccaggccgaacaggcgcgcgttgt

SEQ ID NO: 5793670 - DNA, 25 bp, Homo sapien
cgggtaccccagtccagctgccagg

SEQ ID NO: 5793671 - DNA, 25 bp, Homo sapien
gggcctccagtagacctgccaggtc

SEQ ID NO: 5793672 - DNA, 25 bp, Homo sapien
tcagttgcagaaacactgttacagg

SEQ ID NO: 5793673 - DNA, 25 bp, Homo sapien
aggccgctcaatcttcatcttgtga

SEQ ID NO: 5793674 - DNA, 25 bp, Homo sapien
atcttgtgataggggggtgtccgga

SEQ ID NO: 5793675 - DNA, 25 bp, Homo sapien
cactctgaagcagtgcacgcagcag

SEQ ID NO: 5793676 - DNA, 25 bp, Homo sapien
gcgccaggccgaacaggcgcgcgtt

SEQ ID NO: 5793677 - DNA, 25 bp, Homo sapien
tccagacctgggttgtagcaactct

SEQ ID NO: 5793678 - DNA, 25 bp, Homo sapien
attttagacgcccgccgtggcggcg

SEQ ID NO: 5793679 - DNA, 25 bp, Homo sapien
cagactgtgggcatgagcacgaggt

SEQ ID NO: 5793680 - DNA, 25 bp, Homo sapien
gagttcaatttgaaatcatcatatt

SEQ ID NO: 5793681 - DNA, 25 bp, Homo sapien
catctccaccccgcacagagcctgc

SEQ ID NO: 5793682 - DNA, 25 bp, Homo sapien
tgcgtttcagttgcagaaacactgt

SEQ ID NO: 5793683 - DNA, 25 bp, Homo sapien
tgtctctgggctaggcccggctctg

SEQ ID NO: 5793684 - DNA, 25 bp, Homo sapien
ccaggtgcaggggcgtctggtgcag

SEQ ID NO: 5793685 - DNA, 25 bp, Homo sapien
ccttcagaaggaggcgggtgagggt

SEQ ID NO: 5793686 - DNA, 25 bp, Homo sapien
ctccacccatgtgggagccaccccc

SEQ ID NO: 5793687 - DNA, 25 bp, Homo sapien
gttcaatttgaaatcatcatattca

SEQ ID NO: 5793688 - DNA, 25 bp, Homo sapien
gcccgtggatgatggctaggtgcag

SEQ ID NO: 5793689 - DNA, 25 bp, Homo sapien
gtgcacgcagcagctcaggagcacc

SEQ ID NO: 5793690 - DNA, 25 bp, Homo sapien
tgggccccacagaaacggcgcagat

SEQ ID NO: 5793691 - DNA, 25 bp, Homo sapien
gatgactggcttcaggggcagggag

SEQ ID NO: 5793692 - DNA, 25 bp, Homo sapien
gtcatgtccttgggccccacagaaa

SEQ ID NO: 5793693 - DNA, 25 bp, Homo sapien
ctgcttcccagaattttagacgccc

SEQ ID NO: 5793694 - DNA, 25 bp, Homo sapien
atcaccaagtgacagtcccggccct

SEQ ID NO: 5793695 - DNA, 25 bp, Homo sapien
cccagaattttagacgcccgccgtg

SEQ ID NO: 5793696 - DNA, 25 bp, Homo sapien
ctgggagatgactggcttcaggggc

SEQ ID NO: 5793697 - DNA, 25 bp, Homo sapien
agggggtgggcccagcttctctgcc

SEQ ID NO: 5793698 - DNA, 25 bp, Homo sapien
ggggtcctccccttcccatgagaat

SEQ ID NO: 5793699 - DNA, 25 bp, Homo sapien
tcgttttcagcatggatgtcagcac

SEQ ID NO: 5793700 - DNA, 25 bp, Homo sapien
acacgtcccctcctcgcttgcgttt

SEQ ID NO: 5793701 - DNA, 25 bp, Homo sapien
cgccagatgcatggctgagtctcca

SEQ ID NO: 5793702 - DNA, 25 bp, Homo sapien
ctgcccgtggatgatggctaggtgc

SEQ ID NO: 5793703 - DNA, 25 bp, Homo sapien
gagaaggagccatcactggctctaa

SEQ ID NO: 5793704 - DNA, 25 bp, Homo sapien
cgccgtggcggcggctctggttgcg

SEQ ID NO: 5793705 - DNA, 25 bp, Homo sapien
ctgcacctcttccttgtcttccacc

SEQ ID NO: 5793706 - DNA, 25 bp, Homo sapien
gatggctaggtgcagtggtgtgtct

SEQ ID NO: 5793707 - DNA, 25 bp, Homo sapien
ggcatactgtttatgcacatctgtg

SEQ ID NO: 5793708 - DNA, 25 bp, Homo sapien
gccctcctggtggctcagggggtgg

SEQ ID NO: 5793709 - DNA, 25 bp, Homo sapien
tgggtcactgtgtgttaccaggtcc

SEQ ID NO: 5793710 - DNA, 25 bp, Homo sapien
aggggccttcacagccatatcgaaa

SEQ ID NO: 5793711 - DNA, 25 bp, Homo sapien
cgccagcagcgcgcgcgcgtccgcg

SEQ ID NO: 5793712 - DNA, 25 bp, Homo sapien
aggggcgtctggtgcaggtggttgg

SEQ ID NO: 5793713 - DNA, 25 bp, Homo sapien
gggaagaaaccgaggctgccacctc

SEQ ID NO: 5793714 - DNA, 25 bp, Homo sapien
ggcgtgtggccccggaagctgcttc

SEQ ID NO: 5793715 - DNA, 25 bp, Homo sapien
gggagagaagtccccaaaggcctgc

SEQ ID NO: 5793716 - DNA, 25 bp, Homo sapien
cgctgcagcatctccggggcctgcg

SEQ ID NO: 5793717 - DNA, 25 bp, Homo sapien
caccttggtgctgcaagtgaggtca

SEQ ID NO: 5793718 - DNA, 25 bp, Homo sapien
cagcagcctcactccctcctctagg

SEQ ID NO: 5793719 - DNA, 25 bp, Homo sapien
ttgcccaccagactgtgggcatgag

SEQ ID NO: 5793720 - DNA, 25 bp, Homo sapien
tagatgcaaggctgttcgtcccccc

SEQ ID NO: 5793721 - DNA, 25 bp, Homo sapien
ccttcagagtccgagtcgctatcag

SEQ ID NO: 5793722 - DNA, 25 bp, Homo sapien
caatcttcatcttgtgatagggggg

SEQ ID NO: 5793723 - DNA, 25 bp, Homo sapien
tgtcccaactgaggggtgggtgtgg

SEQ ID NO: 5793724 - DNA, 25 bp, Homo sapien
gcttcccagaattttagacgcccgc

SEQ ID NO: 5793725 - DNA, 25 bp, Homo sapien
cccagcttctctgcctcctgctcca

SEQ ID NO: 5793726 - DNA, 25 bp, Homo sapien
agtggctccggccaggttctgcttc

SEQ ID NO: 5793727 - DNA, 25 bp, Homo sapien
gcttctggcccgtctagcagctgct

SEQ ID NO: 5793728 - DNA, 25 bp, Homo sapien
gtagcaactctccatgtctctgggc

SEQ ID NO: 5793729 - DNA, 25 bp, Homo sapien
tctgggctaggcccggctctgtcta

SEQ ID NO: 5793730 - DNA, 25 bp, Homo sapien
cttagtcacatgcaggacacccagg

SEQ ID NO: 5793731 - DNA, 25 bp, Homo sapien
agatccaggcactcagggcttcggg

SEQ ID NO: 5793732 - DNA, 25 bp, Homo sapien
gtgcaggggtgtgtttcccgcaaag

SEQ ID NO: 5793733 - DNA, 25 bp, Homo sapien
gacgctctgccagctctgcccagct

SEQ ID NO: 5793734 - DNA, 25 bp, Homo sapien
gcagagctgtatcaccaagtgacag

SEQ ID NO: 5793735 - DNA, 25 bp, Homo sapien
ctcccgctgctcggcctccgtaagg

SEQ ID NO: 5793736 - DNA, 25 bp, Homo sapien
tgtctaccaggctgcgcagccccag

SEQ ID NO: 5793737 - DNA, 25 bp, Homo sapien
cacaatggcatactgtttatgcaca

SEQ ID NO: 5793738 - DNA, 25 bp, Homo sapien
ccagcagcgcgcgcgcgtccgcggt

SEQ ID NO: 5793739 - DNA, 25 bp, Homo sapien
tgcgcagccccagacgctctgccag

SEQ ID NO: 5793740 - DNA, 25 bp, Homo sapien
agcgttcacgttggcccggagcttg

SEQ ID NO: 5793741 - DNA, 25 bp, Homo sapien
aaacggcgcagatccccagctccga

SEQ ID NO: 5793742 - DNA, 25 bp, Homo sapien
gtcagacagggcctccagtagacct

SEQ ID NO: 5793743 - DNA, 25 bp, Homo sapien
gcaggggtgtgtttcccgcaaaggt

SEQ ID NO: 5793744 - DNA, 25 bp, Homo sapien
catgtccttgggccccacagaaacg

SEQ ID NO: 5793745 - DNA, 25 bp, Homo sapien
tggtaggggctgtaggccagggagg

SEQ ID NO: 5793746 - DNA, 25 bp, Homo sapien
ctgctcggcctccgtaaggccctgg

SEQ ID NO: 5793747 - DNA, 25 bp, Homo sapien
atttgaaataggtggggacgctgta

SEQ ID NO: 5793748 - DNA, 25 bp, Homo sapien
gggctgggggcaggcagcaggtcag

SEQ ID NO: 5793749 - DNA, 25 bp, Homo sapien
aggctgccacctcctccagctcctc

SEQ ID NO: 5793750 - DNA, 25 bp, Homo sapien
ttcctccgcttccgctgcacctctt

SEQ ID NO: 5793751 - DNA, 25 bp, Homo sapien
ggtgtggggtgttaaataagatttg

SEQ ID NO: 5793752 - DNA, 25 bp, Homo sapien
ataggggggtgtccggaacacaatg

SEQ ID NO: 5793753 - DNA, 25 bp, Homo sapien
cgggaagggggctgggggcaggcag

SEQ ID NO: 5793754 - DNA, 25 bp, Homo sapien
tcggaccgccaggtgtactggatac

SEQ ID NO: 5793755 - DNA, 25 bp, Homo sapien
cctacccgcagcagaaagctcacca

SEQ ID NO: 5793756 - DNA, 25 bp, Homo sapien
gaggaggggaagaaaccgaggctgc

SEQ ID NO: 5793757 - DNA, 25 bp, Homo sapien
acagatcttgacagtgggataggtc

SEQ ID NO: 5793758 - DNA, 25 bp, Homo sapien
tttgctgtcatggatgggctgggag

SEQ ID NO: 5793759 - DNA, 25 bp, Homo sapien
cagaattttagacgcccgccgtggc

SEQ ID NO: 5793760 - DNA, 25 bp, Homo sapien
ggcctgccatccattctcatcatcc

SEQ ID NO: 5793761 - DNA, 25 bp, Homo sapien
ttcaggggcagggagaaggagccat

SEQ ID NO: 5793762 - DNA, 25 bp, Homo sapien
aagtgacagtcccggccctgctggg

SEQ ID NO: 5793763 - DNA, 25 bp, Homo sapien
tgtccttgggccccacagaaacggc

SEQ ID NO: 5793764 - DNA, 25 bp, Homo sapien
tcaggagcaccagcgcctgcccgca

SEQ ID NO: 5793765 - DNA, 25 bp, Homo sapien
accagcagatccaggcactcagggc

SEQ ID NO: 5793766 - DNA, 25 bp, Homo sapien
ggctgggagaaggtgggcaaggcct

SEQ ID NO: 5793767 - DNA, 25 bp, Homo sapien
aggggctgtaggccagggaggaggg

SEQ ID NO: 5793768 - DNA, 25 bp, Homo sapien
accgccaggtgtactggatacagtc

SEQ ID NO: 5793769 - DNA, 25 bp, Homo sapien
gtcaggggtggctccatggtgttct

SEQ ID NO: 5793770 - DNA, 25 bp, Homo sapien
gtttatgcacatctgtgggagagaa

SEQ ID NO: 5793771 - DNA, 25 bp, Homo sapien
aaggtgcgagcgttcacgttggccc

SEQ ID NO: 5793772 - DNA, 25 bp, Homo sapien
tgcgcaggaggctgccactgggtga

SEQ ID NO: 5793773 - DNA, 25 bp, Homo sapien
cactggggggtcctggagggggcgc

SEQ ID NO: 5793774 - DNA, 25 bp, Homo sapien
cgtctagcagctgctccaggttctg

SEQ ID NO: 5793775 - DNA, 25 bp, Homo sapien
cctgccatccattctcatcatcctc

SEQ ID NO: 5793776 - DNA, 25 bp, Homo sapien
gacctgggttgtagcaactctccat

SEQ ID NO: 5793777 - DNA, 25 bp, Homo sapien
ctgtcttgtccattcgagaaatctt

SEQ ID NO: 5793778 - DNA, 25 bp, Homo sapien
ggcacaggggctcctcgttttcagc

SEQ ID NO: 5793779 - DNA, 25 bp, Homo sapien
caatggaggagttcaatttgaaatc

SEQ ID NO: 5793780 - DNA, 25 bp, Homo sapien
ggctgggggtgcccgtggcagagcc

SEQ ID NO: 5793781 - DNA, 25 bp, Homo sapien
gtgtttcccgcaaaggtgcgagcgt

SEQ ID NO: 5793782 - DNA, 25 bp, Homo sapien
taataccatccagacctgggttgta

SEQ ID NO: 5793783 - DNA, 25 bp, Homo sapien
atatcgaaatcggaagcctctctgc

SEQ ID NO: 5793784 - DNA, 25 bp, Homo sapien
gttcttcttagtcacatgcaggaca

SEQ ID NO: 5793785 - DNA, 25 bp, Homo sapien
cctcactccctcctctaggcccatg

SEQ ID NO: 5793786 - DNA, 25 bp, Homo sapien
tagctgcgcaggaggctgccactgg

SEQ ID NO: 5793787 - DNA, 25 bp, Homo sapien
cactcgtctgccccgtgatcaccgc

SEQ ID NO: 5793788 - DNA, 25 bp, Homo sapien
acaggcgcgcgttgtactctcgagc

SEQ ID NO: 5793789 - DNA, 25 bp, Homo sapien
gtcgctatcagaggtagggggtgaa

SEQ ID NO: 5793790 - DNA, 25 bp, Homo sapien
ctctgaagcagtgcacgcagcagct

SEQ ID NO: 5793791 - DNA, 25 bp, Homo sapien
gcccgcagcgccagatgcatggctg

SEQ ID NO: 5793792 - DNA, 25 bp, Homo sapien
gctccgagcattgcttgcccaccag

SEQ ID NO: 5793793 - DNA, 25 bp, Homo sapien
agctggggcacagcaggagctccac

SEQ ID NO: 5793794 - DNA, 25 bp, Homo sapien
actgactggctcccgtacgcactgt

SEQ ID NO: 5793795 - DNA, 25 bp, Homo sapien
aaatcttcaggtttgatgcccccgg

SEQ ID NO: 5793796 - DNA, 25 bp, Homo sapien
acccaggttgttaaattgggcagtc

SEQ ID NO: 5793797 - DNA, 25 bp, Homo sapien
agggcttcgggctcggaccgccagg

SEQ ID NO: 5793798 - DNA, 25 bp, Homo sapien
aaagcagataaacttcatctccacc

SEQ ID NO: 5793799 - DNA, 25 bp, Homo sapien
tggtctgcccgtggatgatggctag

SEQ ID NO: 5793800 - DNA, 25 bp, Homo sapien
tagactatctgctcaatgacactgg

SEQ ID NO: 5793801 - DNA, 25 bp, Homo sapien
tccaggttctgcagagctgtatcac

SEQ ID NO: 5793802 - DNA, 25 bp, Homo sapien
catggggcccgcgccggactggtag

SEQ ID NO: 5793803 - DNA, 25 bp, Homo sapien
gggggcgctcggctccgcggcttcc

SEQ ID NO: 5793804 - DNA, 25 bp, Homo sapien
aggggtgtgtttcccgcaaaggtgc

SEQ ID NO: 5793805 - DNA, 25 bp, Homo sapien
gtactggatacagtccctcaaagtc

SEQ ID NO: 5793806 - DNA, 25 bp, Homo sapien
ccttcccatgagaatcctttatttg

SEQ ID NO: 5793807 - DNA, 25 bp, Homo sapien
ttctgcttcccagaattttagacgc

SEQ ID NO: 5793808 - DNA, 25 bp, Homo sapien
attctcatcatcctcatagaaccga

SEQ ID NO: 5793809 - DNA, 25 bp, Homo sapien
aaattgggcagtcatgtccttgggc

SEQ ID NO: 5793810 - DNA, 25 bp, Homo sapien
tacccgcagcagaaagctcaccaca

SEQ ID NO: 5793811 - DNA, 25 bp, Homo sapien
tagtcacatgcaggacacccaggtt

SEQ ID NO: 5793812 - DNA, 25 bp, Homo sapien
agcagcatttagcagcaaggtcttc

SEQ ID NO: 5793813 - DNA, 25 bp, Homo sapien
gcaccttgtcacaaagcagataaac

SEQ ID NO: 5793814 - DNA, 25 bp, Homo sapien
cgtgtctaccaggctgcgcagcccc

SEQ ID NO: 5793815 - DNA, 25 bp, Homo sapien
gcaccgtggcggccatctgcgcccc

SEQ ID NO: 5793816 - DNA, 25 bp, Homo sapien
cctcctcgcttgcgtttcagttgca

SEQ ID NO: 5793817 - DNA, 25 bp, Homo sapien
cgcaggaggctgccactgggtgagg

SEQ ID NO: 5793818 - DNA, 25 bp, Homo sapien
atattcaataataccatccagacct

SEQ ID NO: 5793819 - DNA, 25 bp, Homo sapien
acctgaggctgggggtgcccgtggc

SEQ ID NO: 5793820 - DNA, 25 bp, Homo sapien
tgctgtcttgtccattcgagaaatc

SEQ ID NO: 5793821 - DNA, 25 bp, Homo sapien
gggagaaggtgggcaaggccttcct

SEQ ID NO: 5793822 - DNA, 25 bp, Homo sapien
gtgagggtcgggtaccccagtccag

SEQ ID NO: 5793823 - DNA, 25 bp, Homo sapien
cgcagccccagacgctctgccagct

SEQ ID NO: 5793824 - DNA, 25 bp, Homo sapien
cggccctgctgggctgggcggggtc

SEQ ID NO: 5793825 - DNA, 25 bp, Homo sapien
atcatcatattcaataataccatcc

SEQ ID NO: 5793826 - DNA, 25 bp, Homo sapien
cagccccagacgctctgccagctct

SEQ ID NO: 5793827 - DNA, 25 bp, Homo sapien
tcaccgccaggtgcaggggcgtctg

SEQ ID NO: 5793828 - DNA, 25 bp, Homo sapien
tcaataataccatccagacctgggt

SEQ ID NO: 5793829 - DNA, 25 bp, Homo sapien
catggatgggctgggagatgactgg

SEQ ID NO: 5793830 - DNA, 25 bp, Homo sapien
tccatgtctctgggctaggcccggc

SEQ ID NO: 5793831 - DNA, 25 bp, Homo sapien
gggggtgtccggaacacaatggcat

SEQ ID NO: 5793832 - DNA, 25 bp, Homo sapien
tgcccagctgccctgggcttctggc

SEQ ID NO: 5793833 - DNA, 25 bp, Homo sapien
agagctgtatcaccaagtgacagtc

SEQ ID NO: 5793834 - DNA, 25 bp, Homo sapien
tgctgggcaccgtggcggccatctg

SEQ ID NO: 5793835 - DNA, 25 bp, Homo sapien
gcctgcggctcgcactggggggtcc

SEQ ID NO: 5793836 - DNA, 25 bp, Homo sapien
tggctctaaggaaggcagagaagcg

SEQ ID NO: 5793837 - DNA, 25 bp, Homo sapien
tcgatcttggctggtccctcgtagt

SEQ ID NO: 5793838 - DNA, 25 bp, Homo sapien
gggctgggcggggtcaggggtggct

SEQ ID NO: 5793839 - DNA, 25 bp, Homo sapien
acccatgtgggagccacccccgaag

SEQ ID NO: 5793840 - DNA, 25 bp, Homo sapien
caggccgaacaggcgcgcgttgtac

SEQ ID NO: 5793841 - DNA, 25 bp, Homo sapien
cagctccgagcattgcttgcccacc

SEQ ID NO: 5793842 - DNA, 25 bp, Homo sapien
aacacaatggcatactgtttatgca

SEQ ID NO: 5793843 - DNA, 25 bp, Homo sapien
tgctccactgactggctcccgtacg

SEQ ID NO: 5793844 - DNA, 25 bp, Homo sapien
cccagagcctccacccatgtgggag

SEQ ID NO: 5793845 - DNA, 25 bp, Homo sapien
tgaccagatgggtgaccaaccccag

SEQ ID NO: 5793846 - DNA, 25 bp, Homo sapien
agagaagcgcagccgcactatactc

SEQ ID NO: 5793847 - DNA, 25 bp, Homo sapien
ccatgtcagacagggcctccagtag

SEQ ID NO: 5793848 - DNA, 25 bp, Homo sapien
ctggggcacagcaggagctccactc

SEQ ID NO: 5793849 - DNA, 25 bp, Homo sapien
aatgacactggtctgcccgtggatg

SEQ ID NO: 5793850 - DNA, 25 bp, Homo sapien
ctgtcatggatgggctgggagatga

SEQ ID NO: 5793851 - DNA, 25 bp, Homo sapien
gatgcaaggctgttcgtcccccctg

SEQ ID NO: 5793852 - DNA, 25 bp, Homo sapien
agaaacactgttacaggccgctcaa

SEQ ID NO: 5793853 - DNA, 25 bp, Homo sapien
ccacagaaacggcgcagatccccag

SEQ ID NO: 5793854 - DNA, 25 bp, Homo sapien
cgggtagcagcccatggggcccgcg

SEQ ID NO: 5793855 - DNA, 25 bp, Homo sapien
aaggccctggggcctagagcggagc

SEQ ID NO: 5793856 - DNA, 25 bp, Homo sapien
tccaccccgcacagagcctgctgtc

SEQ ID NO: 5793857 - DNA, 25 bp, Homo sapien
tgacagtgggataggtctttcggcc

SEQ ID NO: 5793858 - DNA, 25 bp, Homo sapien
ctgcccgcagcgccagatgcatggc

SEQ ID NO: 5793859 - DNA, 25 bp, Homo sapien
ctgctccaggttctgcagagctgta

SEQ ID NO: 5793860 - DNA, 25 bp, Homo sapien
tctgcttaggctgttccacgatcac

SEQ ID NO: 5793861 - DNA, 25 bp, Homo sapien
agccgcactatactcagatccatca

SEQ ID NO: 5793862 - DNA, 25 bp, Homo sapien
agatcttgacagtgggataggtctt

SEQ ID NO: 5793863 - DNA, 25 bp, Homo sapien
aggggccatcagctgtttctggggc

SEQ ID NO: 5793864 - DNA, 25 bp, Homo sapien
tgggtctgcacctacccgcagcaga

SEQ ID NO: 5793865 - DNA, 25 bp, Homo sapien
atgagcacgaggtgggtcactgtgt

SEQ ID NO: 5793866 - DNA, 25 bp, Homo sapien
ctcagatccatcaccttcttcagtt

SEQ ID NO: 5793867 - DNA, 25 bp, Homo sapien
gccgaggtcctgggcgtggtggatg

SEQ ID NO: 5793868 - DNA, 25 bp, Homo sapien
acctcctccagctcctccgtagccc

SEQ ID NO: 5793869 - DNA, 25 bp, Homo sapien
aggcaccgggcagtcctccatggga

SEQ ID NO: 5793870 - DNA, 25 bp, Homo sapien
cacaatggaggagttcaatttgaaa

SEQ ID NO: 5793871 - DNA, 25 bp, Homo sapien
ccacctcctccagctcctccgtagc

SEQ ID NO: 5793872 - DNA, 25 bp, Homo sapien
tctgcacctacccgcagcagaaagc

SEQ ID NO: 5793873 - DNA, 25 bp, Homo sapien
tgcttaggctgttccacgatcacca

SEQ ID NO: 5793874 - DNA, 25 bp, Homo sapien
ttcgagaaatcttcaggtttgatgc

SEQ ID NO: 5793875 - DNA, 25 bp, Homo sapien
aaggtcttcaccttggtgctgcaag

SEQ ID NO: 5793876 - DNA, 25 bp, Homo sapien
ttgatgcccccggagatttgctgtc

SEQ ID NO: 5793877 - DNA, 25 bp, Homo sapien
tttggaatcagacacgtcccctcct

SEQ ID NO: 5793878 - DNA, 25 bp, Homo sapien
tccgggaagggggctgggggcaggc

SEQ ID NO: 5793879 - DNA, 25 bp, Homo sapien
ctccactgactggctcccgtacgca

SEQ ID NO: 5793880 - DNA, 25 bp, Homo sapien
tctcatcatcctcatagaaccgaac

SEQ ID NO: 5793881 - DNA, 25 bp, Homo sapien
cccgccagcagcgcgcgcgcgtccg

SEQ ID NO: 5793882 - DNA, 25 bp, Homo sapien
gtgaggttgacaacgccgaggtcct

SEQ ID NO: 5793883 - DNA, 25 bp, Homo sapien
tgccatccattctcatcatcctcat

SEQ ID NO: 5793884 - DNA, 25 bp, Homo sapien
ttacagatcttgacagtgggatagg

SEQ ID NO: 5793885 - DNA, 25 bp, Homo sapien
cgctcaatcttcatcttgtgatagg

SEQ ID NO: 5793886 - DNA, 25 bp, Homo sapien
agccttcagaaggaggcgggtgagg

SEQ ID NO: 5793887 - DNA, 25 bp, Homo sapien
gagtctccatgccgatccagcagag

SEQ ID NO: 5793888 - DNA, 25 bp, Homo sapien
gcgcagccgcactatactcagatcc

SEQ ID NO: 5793889 - DNA, 25 bp, Homo sapien
cagggagaaggagccatcactggct

SEQ ID NO: 5793890 - DNA, 25 bp, Homo sapien
agagcctgctgtcttgtccattcga

SEQ ID NO: 5793891 - DNA, 25 bp, Homo sapien
gtttttgtatcatagtccccatcat

SEQ ID NO: 5793892 - DNA, 25 bp, Homo sapien
gtaggggccatcagctgtttctggg

SEQ ID NO: 5793893 - DNA, 25 bp, Homo sapien
gtccgagtcgctatcagaggtaggg

SEQ ID NO: 5793894 - DNA, 25 bp, Homo sapien
gggggtgcccgtggcagagccctcc

SEQ ID NO: 5793895 - DNA, 25 bp, Homo sapien
acatctgtgggagagaagtccccaa

SEQ ID NO: 5793896 - DNA, 25 bp, Homo sapien
caggttctgcagagctgtatcacca

SEQ ID NO: 5793897 - DNA, 25 bp, Homo sapien
gtatcatagtccccatcatgttctt

SEQ ID NO: 5793898 - DNA, 25 bp, Homo sapien
ctgccagctctgcccagctgccctg

SEQ ID NO: 5793899 - DNA, 25 bp, Homo sapien
gtccctcaaagtcaggcatatgcaa

SEQ ID NO: 5793900 - DNA, 25 bp, Homo sapien
accatccagacctgggttgtagcaa

SEQ ID NO: 5793901 - DNA, 25 bp, Homo sapien
gccacccccgaagggctgggagaag

SEQ ID NO: 5793902 - DNA, 25 bp, Homo sapien
gctgggtctgcacctacccgcagca

SEQ ID NO: 5793903 - DNA, 25 bp, Homo sapien
cccatcatgttcttcttagtcacat

SEQ ID NO: 5793904 - DNA, 25 bp, Homo sapien
gggcttctggcccgtctagcagctg

SEQ ID NO: 5793905 - DNA, 25 bp, Homo sapien
ttcccatgagaatcctttatttgtc

SEQ ID NO: 5793906 - DNA, 25 bp, Homo sapien
tgtgctgggcagcttgtctcgggtt

SEQ ID NO: 5793907 - DNA, 25 bp, Homo sapien
tgccactgggtgaggttgtctgtcg

SEQ ID NO: 5793908 - DNA, 25 bp, Homo sapien
cagtagacctgccaggtccccgcca

SEQ ID NO: 5793909 - DNA, 25 bp, Homo sapien
ctgtctagtggctccggccaggttc

SEQ ID NO: 5793910 - DNA, 25 bp, Homo sapien
tgtgataggggggtgtccggaacac

SEQ ID NO: 5793911 - DNA, 25 bp, Homo sapien
cagatccccagctccgagcattgct

SEQ ID NO: 5793912 - DNA, 25 bp, Homo sapien
atcaccaggtaggggccatcagctg

SEQ ID NO: 5793913 - DNA, 25 bp, Homo sapien
tcagcaggtggcgctgtcccgccag

SEQ ID NO: 5793914 - DNA, 25 bp, Homo sapien
cttgcgtttcagttgcagaaacact

SEQ ID NO: 5793915 - DNA, 25 bp, Homo sapien
gaggtcaagaggcgtgtggccccgg

SEQ ID NO: 5793916 - DNA, 25 bp, Homo sapien
aacctcaatgtcatctttctgcacc

SEQ ID NO: 5793917 - DNA, 25 bp, Homo sapien
cccactgtccaccagcagatccagg

SEQ ID NO: 5793918 - DNA, 25 bp, Homo sapien
agcgccagatgcatggctgagtctc

SEQ ID NO: 5793919 - DNA, 25 bp, Homo sapien
ccatatcgaaatcggaagcctctct

SEQ ID NO: 5793920 - DNA, 25 bp, Homo sapien
gtgggagccacccccgaagggctgg

SEQ ID NO: 5793921 - DNA, 25 bp, Homo sapien
actgtttggaatcagacacgtcccc

SEQ ID NO: 5793922 - DNA, 25 bp, Homo sapien
gccagggaggaggggaagaaaccga

SEQ ID NO: 5793923 - DNA, 25 bp, Homo sapien
ggaagggggctgggggcaggcagca

SEQ ID NO: 5793924 - DNA, 25 bp, Homo sapien
gggctcgggcgctgcgctgcgccag

SEQ ID NO: 5793925 - DNA, 25 bp, Homo sapien
acggcgcagatccccagctccgagc

SEQ ID NO: 5793926 - DNA, 25 bp, Homo sapien
tggtggatgacatagactatctgct

SEQ ID NO: 5793927 - DNA, 25 bp, Homo sapien
catctccggggcctgcggctcgcac

SEQ ID NO: 5793928 - DNA, 25 bp, Homo sapien
aggagttcaatttgaaatcatcata

SEQ ID NO: 5793929 - DNA, 25 bp, Homo sapien
tgactggcttcaggggcagggagaa

SEQ ID NO: 5793930 - DNA, 25 bp, Homo sapien
tccacctcgatcttggctggtccct

SEQ ID NO: 5793931 - DNA, 25 bp, Homo sapien
cagctgccaggtgcaggggtgtgtt

SEQ ID NO: 5793932 - DNA, 25 bp, Homo sapien
atcggaagcctctctgcttaggctg

SEQ ID NO: 5793933 - DNA, 25 bp, Homo sapien
agtgggcacaggggctcctcgtttt

SEQ ID NO: 5793934 - DNA, 25 bp, Homo sapien
accttcttcagttctttggcctctt

SEQ ID NO: 5793935 - DNA, 25 bp, Homo sapien
cgaaatcggaagcctctctgcttag

SEQ ID NO: 5793936 - DNA, 25 bp, Homo sapien
ggtgcaggtggttggtgaggttgac

SEQ ID NO: 5793937 - DNA, 25 bp, Homo sapien
ccttggtgctgcaagtgaggtcaag

SEQ ID NO: 5793938 - DNA, 25 bp, Homo sapien
tgggcccagcttctctgcctcctgc

SEQ ID NO: 5793939 - DNA, 25 bp, Homo sapien
cagtcatgtccttgggccccacaga

SEQ ID NO: 5793940 - DNA, 25 bp, Homo sapien
tcagggcttcgggctcggaccgcca

SEQ ID NO: 5793941 - DNA, 25 bp, Homo sapien
cacgttggcccggagcttggtgacc

SEQ ID NO: 5793942 - DNA, 25 bp, Homo sapien
tgaagtttttgtatcatagtcccca

SEQ ID NO: 5793943 - DNA, 25 bp, Homo sapien
tgtggggtgttaaataagatttgaa

SEQ ID NO: 5793944 - DNA, 25 bp, Homo sapien
cagcatttagcagcaaggtcttcac

SEQ ID NO: 5793945 - DNA, 25 bp, Homo sapien
ccattctcatcatcctcatagaacc

SEQ ID NO: 5793946 - DNA, 25 bp, Homo sapien
ctgcaccttgtcacaaagcagataa

SEQ ID NO: 5793947 - DNA, 25 bp, Homo sapien
cttcaggtttgatgcccccggagat

SEQ ID NO: 5793948 - DNA, 25 bp, Homo sapien
cacctctgtgctgggcagcttgtct

SEQ ID NO: 5793949 - DNA, 25 bp, Homo sapien
ggaccgccaggtgtactggatacag

SEQ ID NO: 5793950 - DNA, 25 bp, Homo sapien
agcatggatgtcagcaccagccttc

SEQ ID NO: 5793951 - DNA, 25 bp, Homo sapien
gaagctgcttcgggtgtccttctca

SEQ ID NO: 5793952 - DNA, 25 bp, Homo sapien
ggcccgtctagcagctgctccaggt

SEQ ID NO: 5793953 - DNA, 25 bp, Homo sapien
caggggcagggagaaggagccatca

SEQ ID NO: 5793954 - DNA, 25 bp, Homo sapien
ccgcctcccgggtagcagcccatgg

SEQ ID NO: 5793955 - DNA, 25 bp, Homo sapien
accagcgcctgcccgcagcgccaga

SEQ ID NO: 5793956 - DNA, 25 bp, Homo sapien
gctgcgcaggaggctgccactgggt

SEQ ID NO: 5793957 - DNA, 25 bp, Homo sapien
ctgcagagctgtatcaccaagtgac

SEQ ID NO: 5793958 - DNA, 25 bp, Homo sapien
gagggtcgggtaccccagtccagct

SEQ ID NO: 5793959 - DNA, 25 bp, Homo sapien
cccgggtagcagcccatggggcccg

SEQ ID NO: 5793960 - DNA, 25 bp, Homo sapien
gaagaaaccgaggctgccacctcct

SEQ ID NO: 5793961 - DNA, 25 bp, Homo sapien
tcaggtttgatgcccccggagattt

SEQ ID NO: 5793962 - DNA, 25 bp, Homo sapien
tgttaaattgggcagtcatgtcctt

SEQ ID NO: 5793963 - DNA, 25 bp, Homo sapien
ggccctggggcctagagcggagccg

SEQ ID NO: 5793964 - DNA, 25 bp, Homo sapien
gggccttcacagccatatcgaaatc

SEQ ID NO: 5793965 - DNA, 25 bp, Homo sapien
caggcatatgcaacagctggggcac

SEQ ID NO: 5793966 - DNA, 25 bp, Homo sapien
agccatatcgaaatcggaagcctct

SEQ ID NO: 5793967 - DNA, 25 bp, Homo sapien
tctctgtggctagatgcaaggctgt

SEQ ID NO: 5793968 - DNA, 25 bp, Homo sapien
tcagcaccagccttcagaaggaggc

SEQ ID NO: 5793969 - DNA, 25 bp, Homo sapien
aggtcctgggcgtggtggatgacat

SEQ ID NO: 5793970 - DNA, 25 bp, Homo sapien
ttggtgctgcaagtgaggtcaagag

SEQ ID NO: 5793971 - DNA, 25 bp, Homo sapien
ggcaggcagcaggtcagtgcacctg

SEQ ID NO: 5793972 - DNA, 25 bp, Homo sapien
agcctctctgcttaggctgttccac

SEQ ID NO: 5793973 - DNA, 25 bp, Homo sapien
ctccagctcccgctgctcggcctcc

SEQ ID NO: 5793974 - DNA, 25 bp, Homo sapien
gggttccacaatggaggagttcaat

SEQ ID NO: 5793975 - DNA, 25 bp, Homo sapien
acgcagcagctcaggagcaccagcg

SEQ ID NO: 5793976 - DNA, 25 bp, Homo sapien
ggtaataggtgaactgtttggaatc

SEQ ID NO: 5793977 - DNA, 25 bp, Homo sapien
cagccccactgtccaccagcagatc

SEQ ID NO: 5793978 - DNA, 25 bp, Homo sapien
tgcctctgaagtttttgtatcatag

SEQ ID NO: 5793979 - DNA, 25 bp, Homo sapien
tctgtgctgggcagcttgtctcggg

SEQ ID NO: 5793980 - DNA, 25 bp, Homo sapien
cccggagcttggtgaccagatgggt

SEQ ID NO: 5793981 - DNA, 25 bp, Homo sapien
tgctgcaagtgaggtcaagaggcgt

SEQ ID NO: 5793982 - DNA, 25 bp, Homo sapien
cgcttccgctgcacctcttccttgt

SEQ ID NO: 5793983 - DNA, 25 bp, Homo sapien
ggcatatgcaacagctggggcacag

SEQ ID NO: 5793984 - DNA, 25 bp, Homo sapien
agccgctgcctctgaagtttttgta

SEQ ID NO: 5793985 - DNA, 25 bp, Homo sapien
gcagagaagcgcagccgcactatac

SEQ ID NO: 5793986 - DNA, 25 bp, Homo sapien
gaagcagtgcacgcagcagctcagg

SEQ ID NO: 5793987 - DNA, 25 bp, Homo sapien
ctctcgagctcgctgcagcatctcc

SEQ ID NO: 5793988 - DNA, 25 bp, Homo sapien
tgggctaggcccggctctgtctagt

SEQ ID NO: 5793989 - DNA, 25 bp, Homo sapien
accgggcagtcctccatgggagggg

SEQ ID NO: 5793990 - DNA, 25 bp, Homo sapien
ataccatccagacctgggttgtagc

SEQ ID NO: 5793991 - DNA, 25 bp, Homo sapien
ggatgatggctaggtgcagtggtgt

SEQ ID NO: 5793992 - DNA, 25 bp, Homo sapien
gcggtgacgccgtagtcgagtaggg

SEQ ID NO: 5793993 - DNA, 25 bp, Homo sapien
ttcgggtgtccttctcaggcccttc

SEQ ID NO: 5793994 - DNA, 25 bp, Homo sapien
tgaggttgtctgtcggtacgtgtct

SEQ ID NO: 5793995 - DNA, 25 bp, Homo sapien
gcggagccgctgcctctgaagtttt

SEQ ID NO: 5793996 - DNA, 25 bp, Homo sapien
tcaggcccttcagagtccgagtcgc

SEQ ID NO: 5793997 - DNA, 25 bp, Homo sapien
gaaggcagagaagcgcagccgcact

SEQ ID NO: 5793998 - DNA, 25 bp, Homo sapien
cctctgaagtttttgtatcatagtc

SEQ ID NO: 5793999 - DNA, 25 bp, Homo sapien
aggagccatcactggctctaaggaa

SEQ ID NO: 5794000 - DNA, 25 bp, Homo sapien
tccgagcattgcttgcccaccagac

SEQ ID NO: 5794001 - DNA, 25 bp, Homo sapien
tctctgggctaggcccggctctgtc

SEQ ID NO: 5794002 - DNA, 25 bp, Homo sapien
ccaggctgcgcagccccagacgctc

SEQ ID NO: 5794003 - DNA, 25 bp, Homo sapien
atctgtgggagagaagtccccaaag

SEQ ID NO: 5794004 - DNA, 25 bp, Homo sapien
tggggcccgcgccggactggtaggg

SEQ ID NO: 5794005 - DNA, 25 bp, Homo sapien
gggcctgcggctcgcactggggggt

SEQ ID NO: 5794006 - DNA, 25 bp, Homo sapien
cttgacagtgggataggtctttcgg

SEQ ID NO: 5794007 - DNA, 25 bp, Homo sapien
ttcagccccactgtccaccagcaga

SEQ ID NO: 5794008 - DNA, 25 bp, Homo sapien
caacgccgaggtcctgggcgtggtg

SEQ ID NO: 5794009 - DNA, 25 bp, Homo sapien
cttcgggctcggaccgccaggtgta

SEQ ID NO: 5794010 - DNA, 25 bp, Homo sapien
ctgcgccgtcagcaggtggcgctgt

SEQ ID NO: 5794011 - DNA, 25 bp, Homo sapien
aagggggctgggggcaggcagcagg

SEQ ID NO: 5794012 - DNA, 25 bp, Homo sapien
cacagcaggagctccactctgaagc

SEQ ID NO: 5794013 - DNA, 25 bp, Homo sapien
catcatgttcttcttagtcacatgc

SEQ ID NO: 5794014 - DNA, 25 bp, Homo sapien
tccctcgtagttacagatcttgaca

SEQ ID NO: 5794015 - DNA, 25 bp, Homo sapien
ggcctagagcggagccgctgcctct

SEQ ID NO: 5794016 - DNA, 25 bp, Homo sapien
aggtttgatgcccccggagatttgc

SEQ ID NO: 5794017 - DNA, 25 bp, Homo sapien
gggctgtaggccagggaggagggga

SEQ ID NO: 5794018 - DNA, 25 bp, Homo sapien
tgtactctcgagctcgctgcagcat

SEQ ID NO: 5794019 - DNA, 25 bp, Homo sapien
tggctccatggtgttctgagcagca

SEQ ID NO: 5794020 - DNA, 25 bp, Homo sapien
actggctctaaggaaggcagagaag

SEQ ID NO: 5794021 - DNA, 25 bp, Homo sapien
ccatgtgggagccacccccgaaggg

SEQ ID NO: 5794022 - DNA, 25 bp, Homo sapien
ggcccggagcttggtgaccagatgg

SEQ ID NO: 5794023 - DNA, 25 bp, Homo sapien
gcggctcgcactggggggtcctgga

SEQ ID NO: 5794024 - DNA, 25 bp, Homo sapien
ccactgactggctcccgtacgcact

SEQ ID NO: 5794025 - DNA, 25 bp, Homo sapien
cccgccgtggcggcggctctggttg

SEQ ID NO: 5794026 - DNA, 25 bp, Homo sapien
cgctatcagaggtagggggtgaagg

SEQ ID NO: 5794027 - DNA, 25 bp, Homo sapien
gtgttctgagcagcatttagcagca

SEQ ID NO: 5794028 - DNA, 25 bp, Homo sapien
tccggggcctgcggctcgcactggg

SEQ ID NO: 5794029 - DNA, 25 bp, Homo sapien
ggcagcaggtcagtgcacctgaggc

SEQ ID NO: 5794030 - DNA, 25 bp, Homo sapien
ggtgggcccagcttctctgcctcct

SEQ ID NO: 5794031 - DNA, 25 bp, Homo sapien
gtcagtgcacctgaggctgggggtg

SEQ ID NO: 5794032 - DNA, 25 bp, Homo sapien
cccgcaaaggtgcgagcgttcacgt

SEQ ID NO: 5794033 - DNA, 25 bp, Homo sapien
cacatgcaggacacccaggttgtta

SEQ ID NO: 5794034 - DNA, 25 bp, Homo sapien
gctcggaccgccaggtgtactggat

SEQ ID NO: 5794035 - DNA, 25 bp, Homo sapien
gccgctcagtggcctccacttcagc

SEQ ID NO: 5794036 - DNA, 25 bp, Homo sapien
gtatcaccaagtgacagtcccggcc

SEQ ID NO: 5794037 - DNA, 25 bp, Homo sapien
ctgtttatgcacatctgtgggagag

SEQ ID NO: 5794038 - DNA, 25 bp, Homo sapien
ttctcgtcctgcgccgtcagcaggt

SEQ ID NO: 5794039 - DNA, 25 bp, Homo sapien
tcctctaggcccatgtcagacaggg

SEQ ID NO: 5794040 - DNA, 25 bp, Homo sapien
agacctgccaggtccccgccagcca

SEQ ID NO: 5794041 - DNA, 25 bp, Homo sapien
gtcctggagggggcgctcggctccg

SEQ ID NO: 5794042 - DNA, 25 bp, Homo sapien
gacaacgccgaggtcctgggcgtgg

SEQ ID NO: 5794043 - DNA, 25 bp, Homo sapien
gaaggtgggcaaggccttcctccgc

SEQ ID NO: 5794044 - DNA, 25 bp, Homo sapien
agcaactctccatgtctctgggcta

SEQ ID NO: 5794045 - DNA, 25 bp, Homo sapien
agctgtttctggggctggctccttg

SEQ ID NO: 5794046 - DNA, 25 bp, Homo sapien
tgctgggctgggcggggtcaggggt

SEQ ID NO: 5794047 - DNA, 25 bp, Homo sapien
ggtggctcagggggtgggcccagct

SEQ ID NO: 5794048 - DNA, 25 bp, Homo sapien
tcatattcaataataccatccagac

SEQ ID NO: 5794049 - DNA, 25 bp, Homo sapien
gggagaaggagccatcactggctct

SEQ ID NO: 5794050 - DNA, 25 bp, Homo sapien
ggctcctcgttttcagcatggatgt

SEQ ID NO: 5794051 - DNA, 25 bp, Homo sapien
cagacgctctgccagctctgcccag

SEQ ID NO: 5794052 - DNA, 25 bp, Homo sapien
agctcgctgcagcatctccggggcc

SEQ ID NO: 5794053 - DNA, 25 bp, Homo sapien
gccccactgtccaccagcagatcca

SEQ ID NO: 5794054 - DNA, 25 bp, Homo sapien
gcacctgaggctgggggtgcccgtg

SEQ ID NO: 5794055 - DNA, 25 bp, Homo sapien
ccctggggcctagagcggagccgct

SEQ ID NO: 5794056 - DNA, 25 bp, Homo sapien
gttggtgaggttgacaacgccgagg

SEQ ID NO: 5794057 - DNA, 25 bp, Homo sapien
cttcttcagttctttggcctcttgc

SEQ ID NO: 5794058 - DNA, 25 bp, Homo sapien
tggcctccacttcagccccactgtc

SEQ ID NO: 5794059 - DNA, 25 bp, Homo sapien
aggttgttaaattgggcagtcatgt

SEQ ID NO: 5794060 - DNA, 25 bp, Homo sapien
agcccatggggcccgcgccggactg

SEQ ID NO: 5794061 - DNA, 25 bp, Homo sapien
aaggctgttcgtcccccctgccgct

SEQ ID NO: 5794062 - DNA, 25 bp, Homo sapien
gctgcctctgaagtttttgtatcat

SEQ ID NO: 5794063 - DNA, 25 bp, Homo sapien
tatgcaacagctggggcacagcagg

SEQ ID NO: 5794064 - DNA, 25 bp, Homo sapien
cagacagggcctccagtagacctgc

SEQ ID NO: 5794065 - DNA, 25 bp, Homo sapien
gagcctccacccatgtgggagccac

SEQ ID NO: 5794066 - DNA, 25 bp, Homo sapien
ggaggcaccgggcagtcctccatgg

SEQ ID NO: 5794067 - DNA, 25 bp, Homo sapien
gggtgaaggcagtgggcacaggggc

SEQ ID NO: 5794068 - DNA, 25 bp, Homo sapien
gtcctgggcgtggtggatgacatag

SEQ ID NO: 5794069 - DNA, 25 bp, Homo sapien
agctgctccaggttctgcagagctg

SEQ ID NO: 5794070 - DNA, 25 bp, Homo sapien
gacagtcccggccctgctgggctgg

SEQ ID NO: 5794071 - DNA, 25 bp, Homo sapien
tctgtcggtacgtgtctaccaggct

SEQ ID NO: 5794072 - DNA, 25 bp, Homo sapien
gccaggttctgcttcccagaatttt

SEQ ID NO: 5794073 - DNA, 25 bp, Homo sapien
gccatcagctgtttctggggctggc

SEQ ID NO: 5794074 - DNA, 25 bp, Homo sapien
cgcagcagaaagctcaccacactcg

SEQ ID NO: 5794075 - DNA, 25 bp, Homo sapien
atctgctcaatgacactggtctgcc

SEQ ID NO: 5794076 - DNA, 25 bp, Homo sapien
tcagcatggatgtcagcaccagcct

SEQ ID NO: 5794077 - DNA, 25 bp, Homo sapien
gcccggctctgtctagtggctccgg

SEQ ID NO: 5794078 - DNA, 25 bp, Homo sapien
ctgggagaaggtgggcaaggccttc

SEQ ID NO: 5794079 - DNA, 25 bp, Homo sapien
ccccgtgatcaccgccaggtgcagg

SEQ ID NO: 5794080 - DNA, 25 bp, Homo sapien
cgtagctgcgcaggaggctgccact

SEQ ID NO: 5794081 - DNA, 25 bp, Homo sapien
aaacactgttacaggccgctcaatc

SEQ ID NO: 5794082 - DNA, 25 bp, Homo sapien
tgtggctagatgcaaggctgttcgt

SEQ ID NO: 5794083 - DNA, 25 bp, Homo sapien
tagagcggagccgctgcctctgaag

SEQ ID NO: 5794084 - DNA, 25 bp, Homo sapien
ctgggcttctggcccgtctagcagc

SEQ ID NO: 5794085 - DNA, 25 bp, Homo sapien
gtgggcatgagcacgaggtgggtca

SEQ ID NO: 5794086 - DNA, 25 bp, Homo sapien
ccccagtccagctgccaggtgcagg

SEQ ID NO: 5794087 - DNA, 25 bp, Homo sapien
gcagccgcactatactcagatccat

SEQ ID NO: 5794088 - DNA, 25 bp, Homo sapien
atcttgacagtgggataggtctttc

SEQ ID NO: 5794089 - DNA, 25 bp, Homo sapien
atgcatggctgagtctccatgccga

SEQ ID NO: 5794090 - DNA, 25 bp, Homo sapien
cgctctgccagctctgcccagctgc

SEQ ID NO: 5794091 - DNA, 25 bp, Homo sapien
tctccatgtctctgggctaggcccg

SEQ ID NO: 5794092 - DNA, 25 bp, Homo sapien
ggcggggtcaggggtggctccatgg

SEQ ID NO: 5794093 - DNA, 25 bp, Homo sapien
catcactggctctaaggaaggcaga

SEQ ID NO: 5794094 - DNA, 25 bp, Homo sapien
cagcaggtcagtgcacctgaggctg

SEQ ID NO: 5794095 - DNA, 25 bp, Homo sapien
gtcttgtccattcgagaaatcttca

SEQ ID NO: 5794096 - DNA, 25 bp, Homo sapien
ccgctgcctctgaagtttttgtatc

SEQ ID NO: 5794097 - DNA, 25 bp, Homo sapien
ctgtccaccagcagatccaggcact

SEQ ID NO: 5794098 - DNA, 25 bp, Homo sapien
gcactatactcagatccatcacctt

SEQ ID NO: 5794099 - DNA, 25 bp, Homo sapien
tactgtttatgcacatctgtgggag

SEQ ID NO: 5794100 - DNA, 25 bp, Homo sapien
ccgtggcagagccctcctggtggct

SEQ ID NO: 5794101 - DNA, 25 bp, Homo sapien
acagagcctgctgtcttgtccattc

SEQ ID NO: 5794102 - DNA, 25 bp, Homo sapien
gaatcagacacgtcccctcctcgct

SEQ ID NO: 5794103 - DNA, 25 bp, Homo sapien
cctcaatgtcatctttctgcacctt

SEQ ID NO: 5794104 - DNA, 25 bp, Homo sapien
ctccttgggttccacaatggaggag

SEQ ID NO: 5794105 - DNA, 25 bp, Homo sapien
tgtcagcaccagccttcagaaggag

SEQ ID NO: 5794106 - DNA, 25 bp, Homo sapien
tgataggggggtgtccggaacacaa

SEQ ID NO: 5794107 - DNA, 25 bp, Homo sapien
tggcgctgtcccgccagcagcgcgc

SEQ ID NO: 5794108 - DNA, 25 bp, Homo sapien
gcagcccatggggcccgcgccggac

SEQ ID NO: 5794109 - DNA, 25 bp, Homo sapien
cggaagctgcttcgggtgtccttct

SEQ ID NO: 5794110 - DNA, 25 bp, Homo sapien
ttgtatcatagtccccatcatgttc

SEQ ID NO: 5794111 - DNA, 25 bp, Homo sapien
actgttacaggccgctcaatcttca

SEQ ID NO: 5794112 - DNA, 25 bp, Homo sapien
gacgcccgccgtggcggcggctctg

SEQ ID NO: 5794113 - DNA, 25 bp, Homo sapien
tgaggggtgggtgtggggtgttaaa

SEQ ID NO: 5794114 - DNA, 25 bp, Homo sapien
ccggctctgtctagtggctccggcc

SEQ ID NO: 5794115 - DNA, 25 bp, Homo sapien
tcttcaccttggtgctgcaagtgag

SEQ ID NO: 5794116 - DNA, 25 bp, Homo sapien
catccagacctgggttgtagcaact

SEQ ID NO: 5794117 - DNA, 25 bp, Homo sapien
ccttcacctctgtgctgggcagctt

SEQ ID NO: 5794118 - DNA, 25 bp, Homo sapien
taaataagatttgaaataggtgggg

SEQ ID NO: 5794119 - DNA, 25 bp, Homo sapien
cccaaaggcctgccatccattctca

SEQ ID NO: 5794120 - DNA, 25 bp, Homo sapien
ctgtgggagagaagtccccaaaggc

SEQ ID NO: 5794121 - DNA, 25 bp, Homo sapien
gtgggagagaagtccccaaaggcct

SEQ ID NO: 5794122 - DNA, 25 bp, Homo sapien
cccgcgccggactggtaggggctgt

SEQ ID NO: 5794123 - DNA, 25 bp, Homo sapien
aggtgcaggggcgtctggtgcaggt

SEQ ID NO: 5794124 - DNA, 25 bp, Homo sapien
gcacccccagagcctccacccatgt

SEQ ID NO: 5794125 - DNA, 25 bp, Homo sapien
ggtggctccatggtgttctgagcag

SEQ ID NO: 5794126 - DNA, 25 bp, Homo sapien
taggtggggacgctgtacagggggt

SEQ ID NO: 5794127 - DNA, 25 bp, Homo sapien
tttgtcccaactgaggggtgggtgt

SEQ ID NO: 5794128 - DNA, 25 bp, Homo sapien
aataggtggggacgctgtacagggg

SEQ ID NO: 5794129 - DNA, 25 bp, Homo sapien
agtccagctgccaggtgcaggggtg

SEQ ID NO: 5794130 - DNA, 25 bp, Homo sapien
gcaccgggcagtcctccatgggagg

SEQ ID NO: 5794131 - DNA, 25 bp, Homo sapien
caatggcatactgtttatgcacatc

SEQ ID NO: 5794132 - DNA, 25 bp, Homo sapien
gcaccagcgcctgcccgcagcgcca

SEQ ID NO: 5794133 - DNA, 25 bp, Homo sapien
gtccaccagcagatccaggcactca

SEQ ID NO: 5794134 - DNA, 25 bp, Homo sapien
tctccggggcctgcggctcgcactg

SEQ ID NO: 5794135 - DNA, 25 bp, Homo sapien
tagcagcccatggggcccgcgccgg

SEQ ID NO: 5794136 - DNA, 25 bp, Homo sapien
agcagctcaggagcaccagcgcctg

SEQ ID NO: 5794137 - DNA, 25 bp, Homo sapien
tgccacctcctccagctcctccgta

SEQ ID NO: 5794138 - DNA, 25 bp, Homo sapien
ttacaggccgctcaatcttcatctt

SEQ ID NO: 5794139 - DNA, 25 bp, Homo sapien
tgagaatcctttatttgtcccaact

SEQ ID NO: 5794140 - DNA, 25 bp, Homo sapien
ccgtggatgatggctaggtgcagtg

SEQ ID NO: 5794141 - DNA, 25 bp, Homo sapien
actgtgtgttaccaggtccacctcg

SEQ ID NO: 5794142 - DNA, 25 bp, Homo sapien
ggccgaacaggcgcgcgttgtactc

SEQ ID NO: 5794143 - DNA, 25 bp, Homo sapien
tggagggggcgctcggctccgcggc

SEQ ID NO: 5794144 - DNA, 25 bp, Homo sapien
ttcccgcaaaggtgcgagcgttcac

SEQ ID NO: 5794145 - DNA, 25 bp, Homo sapien
gcgtctggtgcaggtggttggtgag

SEQ ID NO: 5794146 - DNA, 25 bp, Homo sapien
gcaggggcgtctggtgcaggtggtt

SEQ ID NO: 5794147 - DNA, 25 bp, Homo sapien
taggtgcagtggtgtgtctccgttc

SEQ ID NO: 5794148 - DNA, 25 bp, Homo sapien
ggctggtccctcgtagttacagatc

SEQ ID NO: 5794149 - DNA, 25 bp, Homo sapien
tttcagcatggatgtcagcaccagc

SEQ ID NO: 5794150 - DNA, 25 bp, Homo sapien
agcaccagccttcagaaggaggcgg

SEQ ID NO: 5794151 - DNA, 25 bp, Homo sapien
cggcccttctcactggaggcaccgg

SEQ ID NO: 5794152 - DNA, 25 bp, Homo sapien
gggctcggaccgccaggtgtactgg

SEQ ID NO: 5794153 - DNA, 25 bp, Homo sapien
cgatccagcagagctgggtctgcac

SEQ ID NO: 5794154 - DNA, 25 bp, Homo sapien
ggtgctgcaagtgaggtcaagaggc

SEQ ID NO: 5794155 - DNA, 25 bp, Homo sapien
gagcggagccgctgcctctgaagtt

SEQ ID NO: 5794156 - DNA, 25 bp, Homo sapien
gcacctcttccttgtcttccaccag

SEQ ID NO: 5794157 - DNA, 25 bp, Homo sapien
tctcgggtttctggacccctcagca

SEQ ID NO: 5794158 - DNA, 25 bp, Homo sapien
tcgggctcggaccgccaggtgtact

SEQ ID NO: 5794159 - DNA, 25 bp, Homo sapien
gcttgcccaccagactgtgggcatg

SEQ ID NO: 5794160 - DNA, 25 bp, Homo sapien
tgtctccgttctcgtcctgcgccgt

SEQ ID NO: 5794161 - DNA, 25 bp, Homo sapien
taggccagggaggaggggaagaaac

SEQ ID NO: 5794162 - DNA, 25 bp, Homo sapien
ggaggagttcaatttgaaatcatca

SEQ ID NO: 5794163 - DNA, 25 bp, Homo sapien
ctcactggaggcaccgggcagtcct

SEQ ID NO: 5794164 - DNA, 25 bp, Homo sapien
agctcctccatctctgtggctagat

SEQ ID NO: 5794165 - DNA, 25 bp, Homo sapien
gcacgcagcagctcaggagcaccag

SEQ ID NO: 5794166 - DNA, 25 bp, Homo sapien
gaaccgaacctcaatgtcatctttc

SEQ ID NO: 5794167 - DNA, 25 bp, Homo sapien
ttcacgttggcccggagcttggtga

SEQ ID NO: 5794168 - DNA, 25 bp, Homo sapien
ttctgcagagctgtatcaccaagtg

SEQ ID NO: 5794169 - DNA, 25 bp, Homo sapien
cagcttctctgcctcctgctccact

SEQ ID NO: 5794170 - DNA, 25 bp, Homo sapien
tcgggcgctgcgctgcgccaggccg

SEQ ID NO: 5794171 - DNA, 25 bp, Homo sapien
tcttcagttctttggcctcttgctc

SEQ ID NO: 5794172 - DNA, 25 bp, Homo sapien
cacctacccgcagcagaaagctcac

SEQ ID NO: 5794173 - DNA, 25 bp, Homo sapien
gcttcaggggcagggagaaggagcc

SEQ ID NO: 5794174 - DNA, 25 bp, Homo sapien
cgtagtcgagtagggctcgggcgct

SEQ ID NO: 5794175 - DNA, 25 bp, Homo sapien
tccgcttccgctgcacctcttcctt

SEQ ID NO: 5794176 - DNA, 25 bp, Homo sapien
gccctgctgggctgggcggggtcag

SEQ ID NO: 5794177 - DNA, 25 bp, Homo sapien
cctagagcggagccgctgcctctga

SEQ ID NO: 5794178 - DNA, 25 bp, Homo sapien
cctctctgcttaggctgttccacga

SEQ ID NO: 5794179 - DNA, 25 bp, Homo sapien
gggtcaggggtggctccatggtgtt

SEQ ID NO: 5794180 - DNA, 25 bp, Homo sapien
tcaagaggcgtgtggccccggaagc

SEQ ID NO: 5794181 - DNA, 25 bp, Homo sapien
ggtgaccagatgggtgaccaacccc

SEQ ID NO: 5794182 - DNA, 25 bp, Homo sapien
gcagcatctccggggcctgcggctc

SEQ ID NO: 5794183 - DNA, 25 bp, Homo sapien
catctctgtggctagatgcaaggct

SEQ ID NO: 5794184 - DNA, 25 bp, Homo sapien
cgcagatccccagctccgagcattg

SEQ ID NO: 5794185 - DNA, 25 bp, Homo sapien
gcagaaacactgttacaggccgctc

SEQ ID NO: 5794186 - DNA, 25 bp, Homo sapien
ccgagtcgctatcagaggtaggggg

SEQ ID NO: 5794187 - DNA, 25 bp, Homo sapien
aggtgtactggatacagtccctcaa

SEQ ID NO: 5794188 - DNA, 25 bp, Homo sapien
ttatgcacatctgtgggagagaagt

SEQ ID NO: 5794189 - DNA, 25 bp, Homo sapien
cccagacgctctgccagctctgccc

SEQ ID NO: 5794190 - DNA, 25 bp, Homo sapien
ttggcccggagcttggtgaccagat

SEQ ID NO: 5794191 - DNA, 25 bp, Homo sapien
gaagcctctctgcttaggctgttcc

SEQ ID NO: 5794192 - DNA, 25 bp, Homo sapien
accagatgggtgaccaaccccagct

SEQ ID NO: 5794193 - DNA, 25 bp, Homo sapien
gagtcgctatcagaggtagggggtg

SEQ ID NO: 5794194 - DNA, 25 bp, Homo sapien
tccccagctccgagcattgcttgcc

SEQ ID NO: 5794195 - DNA, 25 bp, Homo sapien
acagctggggcacagcaggagctcc

SEQ ID NO: 5794196 - DNA, 25 bp, Homo sapien
gttaaataagatttgaaataggtgg

SEQ ID NO: 5794197 - DNA, 25 bp, Homo sapien
cccggagatttgctgtcatggatgg

SEQ ID NO: 5794198 - DNA, 25 bp, Homo sapien
tccccaaaggcctgccatccattct

SEQ ID NO: 5794199 - DNA, 25 bp, Homo sapien
acagaaacggcgcagatccccagct

SEQ ID NO: 5794200 - DNA, 25 bp, Homo sapien
gctctaaggaaggcagagaagcgca

SEQ ID NO: 5794201 - DNA, 25 bp, Homo sapien
tacagtccctcaaagtcaggcatat

SEQ ID NO: 5794202 - DNA, 25 bp, Homo sapien
gcgttgtactctcgagctcgctgca

SEQ ID NO: 5794203 - DNA, 25 bp, Homo sapien
cttgtgataggggggtgtccggaac

SEQ ID NO: 5794204 - DNA, 25 bp, Homo sapien
atcagaggtagggggtgaaggcagt

SEQ ID NO: 5794205 - DNA, 25 bp, Homo sapien
tggtgttctgagcagcatttagcag

SEQ ID NO: 5794206 - DNA, 25 bp, Homo sapien
cggaagcctctctgcttaggctgtt

SEQ ID NO: 5794207 - DNA, 25 bp, Homo sapien
cctgctgggctgggcggggtcaggg

SEQ ID NO: 5794208 - DNA, 25 bp, Homo sapien
caactctccatgtctctgggctagg

SEQ ID NO: 5794209 - DNA, 25 bp, Homo sapien
cggagatttgctgtcatggatgggc

SEQ ID NO: 5794210 - DNA, 25 bp, Homo sapien
gacatagactatctgctcaatgaca

SEQ ID NO: 5794211 - DNA, 25 bp, Homo sapien
ggggcagggagaaggagccatcact

SEQ ID NO: 5794212 - DNA, 25 bp, Homo sapien
atttagcagcaaggtcttcaccttg

SEQ ID NO: 5794213 - DNA, 25 bp, Homo sapien
agaaagctcaccacactcgtctgcc

SEQ ID NO: 5794214 - DNA, 25 bp, Homo sapien
catactgtttatgcacatctgtggg

SEQ ID NO: 5794215 - DNA, 25 bp, Homo sapien
gagatgactggcttcaggggcaggg

SEQ ID NO: 5794216 - DNA, 25 bp, Homo sapien
gcctcctgctccactgactggctcc

SEQ ID NO: 5794217 - DNA, 25 bp, Homo sapien
cgtcagcaggtggcgctgtcccgcc

SEQ ID NO: 5794218 - DNA, 25 bp, Homo sapien
ccctcagcagcctcactccctcctc

SEQ ID NO: 5794219 - DNA, 25 bp, Homo sapien
tcctccccggagtccctgctgggca

SEQ ID NO: 5794220 - DNA, 25 bp, Homo sapien
gtaggggctgtaggccagggaggag

SEQ ID NO: 5794221 - DNA, 25 bp, Homo sapien
gccgtagtcgagtagggctcgggcg

SEQ ID NO: 5794222 - DNA, 25 bp, Homo sapien
tcaccacactcgtctgccccgtgat

SEQ ID NO: 5794223 - DNA, 25 bp, Homo sapien
ctgccaggtccccgccagccagctc

SEQ ID NO: 5794224 - DNA, 25 bp, Homo sapien
tcacagccatatcgaaatcggaagc

SEQ ID NO: 5794225 - DNA, 25 bp, Homo sapien
actgggtgaggttgtctgtcggtac

SEQ ID NO: 5794226 - DNA, 25 bp, Homo sapien
ttctggacccctcagcagcctcact

SEQ ID NO: 5794227 - DNA, 25 bp, Homo sapien
tgtccattcgagaaatcttcaggtt

SEQ ID NO: 5794228 - DNA, 25 bp, Homo sapien
gccgctcaatcttcatcttgtgata

SEQ ID NO: 5794229 - DNA, 25 bp, Homo sapien
acgaggtgggtcactgtgtgttacc

SEQ ID NO: 5794230 - DNA, 25 bp, Homo sapien
aggtaggggccatcagctgtttctg

SEQ ID NO: 5794231 - DNA, 25 bp, Homo sapien
gtgtgtttcccgcaaaggtgcgagc

SEQ ID NO: 5794232 - DNA, 25 bp, Homo sapien
ccccacagaaacggcgcagatcccc

SEQ ID NO: 5794233 - DNA, 25 bp, Homo sapien
tctgtggctagatgcaaggctgttc

SEQ ID NO: 5794234 - DNA, 25 bp, Homo sapien
ttccttgtcttccaccagagggtaa

SEQ ID NO: 5794235 - DNA, 25 bp, Homo sapien
atgatggctaggtgcagtggtgtgt

SEQ ID NO: 5794236 - DNA, 25 bp, Homo sapien
cgtcctgcgccgtcagcaggtggcg

SEQ ID NO: 5794237 - DNA, 25 bp, Homo sapien
ccagccagctcgtagctgcgcagga

SEQ ID NO: 5794238 - DNA, 25 bp, Homo sapien
caggacacccaggttgttaaattgg

SEQ ID NO: 5794239 - DNA, 25 bp, Homo sapien
agctcaccacactcgtctgccccgt

SEQ ID NO: 5794240 - DNA, 25 bp, Homo sapien
atcttcatcttgtgataggggggtg

SEQ ID NO: 5794241 - DNA, 25 bp, Homo sapien
ggactggtaggggctgtaggccagg

SEQ ID NO: 5794242 - DNA, 25 bp, Homo sapien
ccagctcgtagctgcgcaggaggct

SEQ ID NO: 5794243 - DNA, 25 bp, Homo sapien
gagccctcctggtggctcagggggt

SEQ ID NO: 5794244 - DNA, 25 bp, Homo sapien
gtttctggggctggctccttgggtt

SEQ ID NO: 5794245 - DNA, 25 bp, Homo sapien
gggggtgaaggcagtgggcacaggg

SEQ ID NO: 5794246 - DNA, 25 bp, Homo sapien
tcgggtttctggacccctcagcagc

SEQ ID NO: 5794247 - DNA, 25 bp, Homo sapien
caggtccccgccagccagctcgtag

SEQ ID NO: 5794248 - DNA, 25 bp, Homo sapien
acactggtctgcccgtggatgatgg

SEQ ID NO: 5794249 - DNA, 25 bp, Homo sapien
caactgaggggtgggtgtggggtgt

SEQ ID NO: 5794250 - DNA, 25 bp, Homo sapien
ctcgcactggggggtcctggagggg

SEQ ID NO: 5794251 - DNA, 25 bp, Homo sapien
cgctgctcggcctccgtaaggccct

SEQ ID NO: 5794252 - DNA, 25 bp, Homo sapien
ggtgaggttgtctgtcggtacgtgt

SEQ ID NO: 5794253 - DNA, 25 bp, Homo sapien
gcacagagcctgctgtcttgtccat

SEQ ID NO: 5794254 - DNA, 25 bp, Homo sapien
agcagtgcacgcagcagctcaggag

SEQ ID NO: 5794255 - DNA, 25 bp, Homo sapien
ggcagtcatgtccttgggccccaca

SEQ ID NO: 5794256 - DNA, 25 bp, Homo sapien
aggctgccactgggtgaggttgtct

SEQ ID NO: 5794257 - DNA, 25 bp, Homo sapien
tgtggccccggaagctgcttcgggt

SEQ ID NO: 5794258 - DNA, 25 bp, Homo sapien
aatgtcatctttctgcaccttgtca

SEQ ID NO: 5794259 - DNA, 25 bp, Homo sapien
gtttcccgcaaaggtgcgagcgttc

SEQ ID NO: 5794260 - DNA, 25 bp, Homo sapien
tgcaacagctggggcacagcaggag

SEQ ID NO: 5794261 - DNA, 25 bp, Homo sapien
gcttctctgcctcctgctccactga

SEQ ID NO: 5794262 - DNA, 25 bp, Homo sapien
gggtgttaaataagatttgaaatag

SEQ ID NO: 5794263 - DNA, 25 bp, Homo sapien
acacccaggttgttaaattgggcag

SEQ ID NO: 5794264 - DNA, 25 bp, Homo sapien
cattgcttgcccaccagactgtggg

SEQ ID NO: 5794265 - DNA, 25 bp, Homo sapien
tagcagctgctccaggttctgcaga

SEQ ID NO: 5794266 - DNA, 25 bp, Homo sapien
tggggggtcctggagggggcgctcg

SEQ ID NO: 5794267 - DNA, 25 bp, Homo sapien
gtccgcggtgacgccgtagtcgagt

SEQ ID NO: 5794268 - DNA, 25 bp, Homo sapien
accgccaggtgcaggggcgtctggt

SEQ ID NO: 5794269 - DNA, 25 bp, Homo sapien
agggtaataggtgaactgtttggaa

SEQ ID NO: 5794270 - DNA, 25 bp, Homo sapien
tccaccagagggtaataggtgaact

SEQ ID NO: 5794271 - DNA, 25 bp, Homo sapien
catagactatctgctcaatgacact

SEQ ID NO: 5794272 - DNA, 25 bp, Homo sapien
tctgagcagcatttagcagcaaggt

SEQ ID NO: 5794273 - DNA, 25 bp, Homo sapien
ggttgtagcaactctccatgtctct

SEQ ID NO: 5794274 - DNA, 25 bp, Homo sapien
cgcccgccgtggcggcggctctggt

SEQ ID NO: 5794275 - DNA, 25 bp, Homo sapien
cttgtcacaaagcagataaacttca

SEQ ID NO: 5794276 - DNA, 25 bp, Homo sapien
gaaataggtggggacgctgtacagg

SEQ ID NO: 5794277 - DNA, 25 bp, Homo sapien
ggtgtgtctccgttctcgtcctgcg

SEQ ID NO: 5794278 - DNA, 25 bp, Homo sapien
tcaccttcttcagttctttggcctc

SEQ ID NO: 5794279 - DNA, 25 bp, Homo sapien
gttctgagcagcatttagcagcaag

SEQ ID NO: 5794280 - DNA, 25 bp, Homo sapien
ccgcggtgacgccgtagtcgagtag

SEQ ID NO: 5794281 - DNA, 25 bp, Homo sapien
ccacccatgtgggagccacccccga

SEQ ID NO: 5794282 - DNA, 25 bp, Homo sapien
cacactcgtctgccccgtgatcacc

SEQ ID NO: 5794283 - DNA, 25 bp, Homo sapien
ttcagttctttggcctcttgctcca

SEQ ID NO: 5794284 - DNA, 25 bp, Homo sapien
cccagctccgagcattgcttgccca

SEQ ID NO: 5794285 - DNA, 25 bp, Homo sapien
tcactgtgtgttaccaggtccacct

SEQ ID NO: 5794286 - DNA, 25 bp, Homo sapien
caccagagggtaataggtgaactgt

SEQ ID NO: 5794287 - DNA, 25 bp, Homo sapien
ggtggcgctgtcccgccagcagcgc

SEQ ID NO: 5794288 - DNA, 25 bp, Homo sapien
gttgtactctcgagctcgctgcagc

SEQ ID NO: 5794289 - DNA, 25 bp, Homo sapien
agccagctcgtagctgcgcaggagg

SEQ ID NO: 5794290 - DNA, 25 bp, Homo sapien
cagcagaaagctcaccacactcgtc

SEQ ID NO: 5794291 - DNA, 25 bp, Homo sapien
tatttgtcccaactgaggggtgggt

SEQ ID NO: 5794292 - DNA, 25 bp, Homo sapien
gttccacaatggaggagttcaattt

SEQ ID NO: 5794293 - DNA, 25 bp, Homo sapien
caccaagtgacagtcccggccctgc

SEQ ID NO: 5794294 - DNA, 25 bp, Homo sapien
ggcacagcaggagctccactctgaa

SEQ ID NO: 5794295 - DNA, 25 bp, Homo sapien
cttccgctgcacctcttccttgtct

SEQ ID NO: 5794296 - DNA, 25 bp, Homo sapien
ctatcagaggtagggggtgaaggca

SEQ ID NO: 5794297 - DNA, 25 bp, Homo sapien
ataggtctttcggcccttctcactg

SEQ ID NO: 5794298 - DNA, 25 bp, Homo sapien
gaggcgtgtggccccggaagctgct

SEQ ID NO: 5794299 - DNA, 25 bp, Homo sapien
gttctttggcctcttgctccagctc

SEQ ID NO: 5794300 - DNA, 25 bp, Homo sapien
ctaggcccatgtcagacagggcctc

SEQ ID NO: 5794301 - DNA, 25 bp, Homo sapien
aggcagtgggcacaggggctcctcg

SEQ ID NO: 5794302 - DNA, 25 bp, Homo sapien
tgcagtggtgtgtctccgttctcgt

SEQ ID NO: 5794303 - DNA, 25 bp, Homo sapien
ggtgggtgtggggtgttaaataaga

SEQ ID NO: 5794304 - DNA, 25 bp, Homo sapien
cgggtgtccttctcaggcccttcag

SEQ ID NO: 5794305 - DNA, 25 bp, Homo sapien
ccttgggttccacaatggaggagtt

SEQ ID NO: 5794306 - DNA, 25 bp, Homo sapien
actccctcctctaggcccatgtcag

SEQ ID NO: 5794307 - DNA, 25 bp, Homo sapien
actggcttcaggggcagggagaagg

SEQ ID NO: 5794308 - DNA, 25 bp, Homo sapien
cttgggccccacagaaacggcgcag

SEQ ID NO: 5794309 - DNA, 25 bp, Homo sapien
gaggttgacaacgccgaggtcctgg

SEQ ID NO: 5794310 - DNA, 25 bp, Homo sapien
ccagatgcatggctgagtctccatg

SEQ ID NO: 5794311 - DNA, 25 bp, Homo sapien
tccctcctctaggcccatgtcagac

SEQ ID NO: 5794312 - DNA, 25 bp, Homo sapien
catatgcaacagctggggcacagca

SEQ ID NO: 5794313 - DNA, 25 bp, Homo sapien
cctctgtgctgggcagcttgtctcg

SEQ ID NO: 5794314 - DNA, 25 bp, Homo sapien
agaaacggcgcagatccccagctcc

SEQ ID NO: 5794315 - DNA, 25 bp, Homo sapien
aagtgaggtcaagaggcgtgtggcc

SEQ ID NO: 5794316 - DNA, 25 bp, Homo sapien
gagcacgaggtgggtcactgtgtgt

SEQ ID NO: 5794317 - DNA, 25 bp, Homo sapien
cctgctccactgactggctcccgta

SEQ ID NO: 5794318 - DNA, 25 bp, Homo sapien
cggccaggttctgcttcccagaatt

SEQ ID NO: 5794319 - DNA, 25 bp, Homo sapien
accgaggctgccacctcctccagct

SEQ ID NO: 5794320 - DNA, 25 bp, Homo sapien
gggcaaggccttcctccgcttccgc

SEQ ID NO: 5794321 - DNA, 25 bp, Homo sapien
tcccgtacgcactgtcttccttcac

SEQ ID NO: 5794322 - DNA, 25 bp, Homo sapien
ccgtaaggccctggggcctagagcg

SEQ ID NO: 5794323 - DNA, 25 bp, Homo sapien
gccccggaagctgcttcgggtgtcc

SEQ ID NO: 5794324 - DNA, 25 bp, Homo sapien
gttgtctgtcggtacgtgtctacca

SEQ ID NO: 5794325 - DNA, 25 bp, Homo sapien
ttggtgaccagatgggtgaccaacc

SEQ ID NO: 5794326 - DNA, 25 bp, Homo sapien
catcaccttcttcagttctttggcc

SEQ ID NO: 5794327 - DNA, 25 bp, Homo sapien
ttttgtatcatagtccccatcatgt

SEQ ID NO: 5794328 - DNA, 25 bp, Homo sapien
tggctccggccaggttctgcttccc

SEQ ID NO: 5794329 - DNA, 25 bp, Homo sapien
accgaacctcaatgtcatctttctg

SEQ ID NO: 5794330 - DNA, 25 bp, Homo sapien
aggagctccactctgaagcagtgca

SEQ ID NO: 5794331 - DNA, 25 bp, Homo sapien
aggagcaccagcgcctgcccgcagc

SEQ ID NO: 5794332 - DNA, 25 bp, Homo sapien
gcagatccaggcactcagggcttcg

SEQ ID NO: 5794333 - DNA, 25 bp, Homo sapien
gcaagtgaggtcaagaggcgtgtgg

SEQ ID NO: 5794334 - DNA, 25 bp, Homo sapien
catcatattcaataataccatccag

SEQ ID NO: 5794335 - DNA, 25 bp, Homo sapien
ggcggcggctctggttgcggcttct

SEQ ID NO: 5794336 - DNA, 25 bp, Homo sapien
gctcagggggtgggcccagcttctc

SEQ ID NO: 5794337 - DNA, 25 bp, Homo sapien
ctaggcccggctctgtctagtggct

SEQ ID NO: 5794338 - DNA, 25 bp, Homo sapien
cagtggtgtgtctccgttctcgtcc

SEQ ID NO: 5794339 - DNA, 25 bp, Homo sapien
ctgaagcagtgcacgcagcagctca

SEQ ID NO: 5794340 - DNA, 25 bp, Homo sapien
tggatgtcagcaccagccttcagaa

SEQ ID NO: 5794341 - DNA, 25 bp, Homo sapien
tcagggggtgggcccagcttctctg

SEQ ID NO: 5794342 - DNA, 25 bp, Homo sapien
tggccccggaagctgcttcgggtgt

SEQ ID NO: 5794343 - DNA, 25 bp, Homo sapien
ggaggctgccactgggtgaggttgt

SEQ ID NO: 5794344 - DNA, 25 bp, Homo sapien
gtctttcggcccttctcactggagg

SEQ ID NO: 5794345 - DNA, 25 bp, Homo sapien
tccacaatggaggagttcaatttga

SEQ ID NO: 5794346 - DNA, 25 bp, Homo sapien
tcatcttgtgataggggggtgtccg

SEQ ID NO: 5794347 - DNA, 25 bp, Homo sapien
tcactccctcctctaggcccatgtc

SEQ ID NO: 5794348 - DNA, 25 bp, Homo sapien
ctttcggcccttctcactggaggca

SEQ ID NO: 5794349 - DNA, 25 bp, Homo sapien
ccagtccagctgccaggtgcagggg

SEQ ID NO: 5794350 - DNA, 25 bp, Homo sapien
tcctttatttgtcccaactgagggg

SEQ ID NO: 5794351 - DNA, 25 bp, Homo sapien
caggggctcctcgttttcagcatgg

SEQ ID NO: 5794352 - DNA, 25 bp, Homo sapien
ttaaattgggcagtcatgtccttgg

SEQ ID NO: 5794353 - DNA, 25 bp, Homo sapien
gttgttaaattgggcagtcatgtcc

SEQ ID NO: 5794354 - DNA, 25 bp, Homo sapien
tcttggctggtccctcgtagttaca

SEQ ID NO: 5794355 - DNA, 25 bp, Homo sapien
cgtctgccccgtgatcaccgccagg

SEQ ID NO: 5794356 - DNA, 25 bp, Homo sapien
gggccatcagctgtttctggggctg

SEQ ID NO: 5794357 - DNA, 25 bp, Homo sapien
tgcgagcgttcacgttggcccggag

SEQ ID NO: 5794358 - DNA, 25 bp, Homo sapien
gagatttgctgtcatggatgggctg

SEQ ID NO: 5794359 - DNA, 25 bp, Homo sapien
ctgggggtgcccgtggcagagccct

SEQ ID NO: 5794360 - DNA, 25 bp, Homo sapien
tgggggcaggcagcaggtcagtgca

SEQ ID NO: 5794361 - DNA, 25 bp, Homo sapien
ctttctgcaccttgtcacaaagcag

SEQ ID NO: 5794362 - DNA, 25 bp, Homo sapien
ctcagcagcctcactccctcctcta

SEQ ID NO: 5794363 - DNA, 25 bp, Homo sapien
tctagcagctgctccaggttctgca

SEQ ID NO: 5794364 - DNA, 25 bp, Homo sapien
cagcagatccaggcactcagggctt

SEQ ID NO: 5794365 - DNA, 25 bp, Homo sapien
cactggaggcaccgggcagtcctcc

SEQ ID NO: 5794366 - DNA, 25 bp, Homo sapien
agatttgaaataggtggggacgctg

SEQ ID NO: 5794367 - DNA, 25 bp, Homo sapien
tgcgctgcgccaggccgaacaggcg

SEQ ID NO: 5794368 - DNA, 25 bp, Homo sapien
cgccggactggtaggggctgtaggc

SEQ ID NO: 5794369 - DNA, 25 bp, Homo sapien
ccgtggcggcggctctggttgcggc

SEQ ID NO: 5794370 - DNA, 25 bp, Homo sapien
ggtggttggtgaggttgacaacgcc

SEQ ID NO: 5794371 - DNA, 25 bp, Homo sapien
cagatccatcaccttcttcagttct

SEQ ID NO: 5794372 - DNA, 25 bp, Homo sapien
cgagctcgctgcagcatctccgggg

SEQ ID NO: 5794373 - DNA, 25 bp, Homo sapien
cgaggctgccacctcctccagctcc

SEQ ID NO: 5794374 - DNA, 25 bp, Homo sapien
ccgcacagagcctgctgtcttgtcc

SEQ ID NO: 5794375 - DNA, 25 bp, Homo sapien
tttcagttgcagaaacactgttaca

SEQ ID NO: 5794376 - DNA, 25 bp, Homo sapien
gcacgaggtgggtcactgtgtgtta

SEQ ID NO: 5794377 - DNA, 25 bp, Homo sapien
tgtgttaccaggtccacctcgatct

SEQ ID NO: 5794378 - DNA, 25 bp, Homo sapien
cgtttcagttgcagaaacactgtta

SEQ ID NO: 5794379 - DNA, 25 bp, Homo sapien
gagctgggtctgcacctacccgcag

SEQ ID NO: 5794380 - DNA, 25 bp, Homo sapien
tgtccttctcaggcccttcagagtc

SEQ ID NO: 5794381 - DNA, 25 bp, Homo sapien
ggaggggccttcacagccatatcga

SEQ ID NO: 5794382 - DNA, 25 bp, Homo sapien
ggataggtctttcggcccttctcac

SEQ ID NO: 5794383 - DNA, 25 bp, Homo sapien
tgggtgtggggtgttaaataagatt

SEQ ID NO: 5794384 - DNA, 25 bp, Homo sapien
gtagttacagatcttgacagtggga

SEQ ID NO: 5794385 - DNA, 25 bp, Homo sapien
attcaataataccatccagacctgg

SEQ ID NO: 5794386 - DNA, 25 bp, Homo sapien
gctgggggcaggcagcaggtcagtg

SEQ ID NO: 5794387 - DNA, 25 bp, Homo sapien
gtggatgacatagactatctgctca

SEQ ID NO: 5794388 - DNA, 25 bp, Homo sapien
ctagtggctccggccaggttctgct

SEQ ID NO: 5794389 - DNA, 25 bp, Homo sapien
gtgggcaaggccttcctccgcttcc

SEQ ID NO: 5794390 - DNA, 25 bp, Homo sapien
agaagcgcagccgcactatactcag

SEQ ID NO: 5794391 - DNA, 25 bp, Homo sapien
gatacagtccctcaaagtcaggcat

SEQ ID NO: 5794392 - DNA, 25 bp, Homo sapien
caggtccacctcgatcttggctggt

SEQ ID NO: 5794393 - DNA, 25 bp, Homo sapien
atcatcctcatagaaccgaacctca

SEQ ID NO: 5794394 - DNA, 25 bp, Homo sapien
caccagccttcagaaggaggcgggt

SEQ ID NO: 5794395 - DNA, 25 bp, Homo sapien
gctgggcggggtcaggggtggctcc

SEQ ID NO: 5794396 - DNA, 25 bp, Homo sapien
cctccatgggaggggccttcacagc

SEQ ID NO: 5794397 - DNA, 25 bp, Homo sapien
gatgggtgaccaaccccagctcctc

SEQ ID NO: 5794398 - DNA, 25 bp, Homo sapien
cttcatcttgtgataggggggtgtc

SEQ ID NO: 5794399 - DNA, 25 bp, Homo sapien
ctgttccacgatcaccaggtagggg

SEQ ID NO: 5794400 - DNA, 25 bp, Homo sapien
tctccgttctcgtcctgcgccgtca

SEQ ID NO: 5794401 - DNA, 25 bp, Homo sapien
tcgtagttacagatcttgacagtgg

SEQ ID NO: 5794402 - DNA, 25 bp, Homo sapien
gcagcttgtctcgggtttctggacc

SEQ ID NO: 5794403 - DNA, 25 bp, Homo sapien
catgcaggacacccaggttgttaaa

SEQ ID NO: 5794404 - DNA, 25 bp, Homo sapien
aaatcggaagcctctctgcttaggc

SEQ ID NO: 5794405 - DNA, 25 bp, Homo sapien
atgccgatccagcagagctgggtct

SEQ ID NO: 5794406 - DNA, 25 bp, Homo sapien
acgcactgtcttccttcacctctgt

SEQ ID NO: 5794407 - DNA, 25 bp, Homo sapien
cccggctgcacccccagagcctcca

SEQ ID NO: 5794408 - DNA, 25 bp, Homo sapien
catgagaatcctttatttgtcccaa

SEQ ID NO: 5794409 - DNA, 25 bp, Homo sapien
ctggcccgtctagcagctgctccag

SEQ ID NO: 5794410 - DNA, 25 bp, Homo sapien
tcatctttctgcaccttgtcacaaa

SEQ ID NO: 5794411 - DNA, 25 bp, Homo sapien
tggctaggtgcagtggtgtgtctcc

SEQ ID NO: 5794412 - DNA, 25 bp, Homo sapien
tctaaggaaggcagagaagcgcagc

SEQ ID NO: 5794413 - DNA, 25 bp, Homo sapien
tcttcttagtcacatgcaggacacc

SEQ ID NO: 5794414 - DNA, 25 bp, Homo sapien
gtctagtggctccggccaggttctg

SEQ ID NO: 5794415 - DNA, 25 bp, Homo sapien
actggatacagtccctcaaagtcag

SEQ ID NO: 5794416 - DNA, 25 bp, Homo sapien
ctggtggctcagggggtgggcccag

SEQ ID NO: 5794417 - DNA, 25 bp, Homo sapien
ccagcagagctgggtctgcacctac

SEQ ID NO: 5794418 - DNA, 25 bp, Homo sapien
agcctgctgtcttgtccattcgaga

SEQ ID NO: 5794419 - DNA, 25 bp, Homo sapien
ctggaggcaccgggcagtcctccat

SEQ ID NO: 5794420 - DNA, 25 bp, Homo sapien
caccccgcacagagcctgctgtctt

SEQ ID NO: 5794421 - DNA, 25 bp, Homo sapien
gaagggctgggagaaggtgggcaag

SEQ ID NO: 5794422 - DNA, 25 bp, Homo sapien
ccccttcccatgagaatcctttatt

SEQ ID NO: 5794423 - DNA, 25 bp, Homo sapien
ccctgggcttctggcccgtctagca

SEQ ID NO: 5794424 - DNA, 25 bp, Homo sapien
ctgcttcgggtgtccttctcaggcc

SEQ ID NO: 5794425 - DNA, 25 bp, Homo sapien
ctcgagctcgctgcagcatctccgg

SEQ ID NO: 5794426 - DNA, 25 bp, Homo sapien
agttgcagaaacactgttacaggcc

SEQ ID NO: 5794427 - DNA, 25 bp, Homo sapien
cccggaagctgcttcgggtgtcctt

SEQ ID NO: 5794428 - DNA, 25 bp, Homo sapien
ggtcaagaggcgtgtggccccggaa

SEQ ID NO: 5794429 - DNA, 25 bp, Homo sapien
ttgcttgcccaccagactgtgggca

SEQ ID NO: 5794430 - DNA, 25 bp, Homo sapien
tgccccgtgatcaccgccaggtgca

SEQ ID NO: 5794431 - DNA, 25 bp, Homo sapien
caccaggtaggggccatcagctgtt

SEQ ID NO: 5794432 - DNA, 25 bp, Homo sapien
taccccagtccagctgccaggtgca

SEQ ID NO: 5794433 - DNA, 25 bp, Homo sapien
tggaatcagacacgtcccctcctcg

SEQ ID NO: 5794434 - DNA, 25 bp, Homo sapien
tttggcctcttgctccagctcccgc

SEQ ID NO: 5794435 - DNA, 25 bp, Homo sapien
ggtgcagtggtgtgtctccgttctc

SEQ ID NO: 5794436 - DNA, 25 bp, Homo sapien
gcactgtcttccttcacctctgtgc

SEQ ID NO: 5794437 - DNA, 25 bp, Homo sapien
tccttctcaggcccttcagagtccg

SEQ ID NO: 5794438 - DNA, 25 bp, Homo sapien
gcaaggccttcctccgcttccgctg

SEQ ID NO: 5794439 - DNA, 25 bp, Homo sapien
cgccagccagctcgtagctgcgcag

SEQ ID NO: 5794440 - DNA, 25 bp, Homo sapien
gtcccggccctgctgggctgggcgg

SEQ ID NO: 5794441 - DNA, 25 bp, Homo sapien
cagctcaggagcaccagcgcctgcc

SEQ ID NO: 5794442 - DNA, 25 bp, Homo sapien
tcaatgacactggtctgcccgtgga

SEQ ID NO: 5794443 - DNA, 25 bp, Homo sapien
tgcaggtggttggtgaggttgacaa

SEQ ID NO: 5794444 - DNA, 25 bp, Homo sapien
cacctcgatcttggctggtccctcg

SEQ ID NO: 5794445 - DNA, 25 bp, Homo sapien
gtttctggacccctcagcagcctca

SEQ ID NO: 5794446 - DNA, 25 bp, Homo sapien
caggtggttggtgaggttgacaacg

SEQ ID NO: 5794447 - DNA, 25 bp, Homo sapien
ggctcgcactggggggtcctggagg

SEQ ID NO: 5794448 - DNA, 25 bp, Homo sapien
tctaccaggctgcgcagccccagac

SEQ ID NO: 5794449 - DNA, 25 bp, Homo sapien
cccgcagcagaaagctcaccacact

SEQ ID NO: 5794450 - DNA, 25 bp, Homo sapien
gcctcccgggtagcagcccatgggg

SEQ ID NO: 5794451 - DNA, 25 bp, Homo sapien
tgtttggaatcagacacgtcccctc

SEQ ID NO: 5794452 - DNA, 25 bp, Homo sapien
ctggctccttgggttccacaatgga

SEQ ID NO: 5794453 - DNA, 25 bp, Homo sapien
aggcccggctctgtctagtggctcc

SEQ ID NO: 5794454 - DNA, 25 bp, Homo sapien
cctccatctctgtggctagatgcaa

SEQ ID NO: 5794455 - DNA, 25 bp, Homo sapien
acactgttacaggccgctcaatctt

SEQ ID NO: 5794456 - DNA, 25 bp, Homo sapien
gagtccgagtcgctatcagaggtag

SEQ ID NO: 5794457 - DNA, 25 bp, Homo sapien
tctcaggcccttcagagtccgagtc

SEQ ID NO: 5794458 - DNA, 25 bp, Homo sapien
tcggtacgtgtctaccaggctgcgc

SEQ ID NO: 5794459 - DNA, 25 bp, Homo sapien
gctgcgcagccccagacgctctgcc

SEQ ID NO: 5794460 - DNA, 25 bp, Homo sapien
tgctgtcatggatgggctgggagat

SEQ ID NO: 5794461 - DNA, 25 bp, Homo sapien
cagggcctccagtagacctgccagg

SEQ ID NO: 5794462 - DNA, 25 bp, Homo sapien
tcaatgtcatctttctgcaccttgt

SEQ ID NO: 5794463 - DNA, 25 bp, Homo sapien
aggcccatgtcagacagggcctcca

SEQ ID NO: 5794464 - DNA, 25 bp, Homo sapien
tgggctgggagatgactggcttcag

SEQ ID NO: 5794465 - DNA, 25 bp, Homo sapien
actggtctgcccgtggatgatggct

SEQ ID NO: 5794466 - DNA, 25 bp, Homo sapien
tgccaggtgcaggggtgtgtttccc

SEQ ID NO: 5794467 - DNA, 25 bp, Homo sapien
gcactcagggcttcgggctcggacc

SEQ ID NO: 5794468 - DNA, 25 bp, Homo sapien
cagtcctccatgggaggggccttca

SEQ ID NO: 5794469 - DNA, 25 bp, Homo sapien
ccagctcccgctgctcggcctccgt

SEQ ID NO: 5794470 - DNA, 25 bp, Homo sapien
gggtgcccgtggcagagccctcctg

SEQ ID NO: 5794471 - DNA, 25 bp, Homo sapien
ctctgccagctctgcccagctgccc

SEQ ID NO: 5794472 - DNA, 25 bp, Homo sapien
gggggctgggggcaggcagcaggtc

SEQ ID NO: 5794473 - DNA, 25 bp, Homo sapien
ttgcagaaacactgttacaggccgc

SEQ ID NO: 5794474 - DNA, 25 bp, Homo sapien
ggggtgggcccagcttctctgcctc

SEQ ID NO: 5794475 - DNA, 25 bp, Homo sapien
ccagccttcagaaggaggcgggtga

SEQ ID NO: 5794476 - DNA, 25 bp, Homo sapien
caggttctgcttcccagaattttag

SEQ ID NO: 5794477 - DNA, 25 bp, Homo sapien
gaggtgggtcactgtgtgttaccag

SEQ ID NO: 5794478 - DNA, 25 bp, Homo sapien
agaatcctttatttgtcccaactga

SEQ ID NO: 5794479 - DNA, 25 bp, Homo sapien
gttttcagcatggatgtcagcacca

SEQ ID NO: 5794480 - DNA, 25 bp, Homo sapien
gaagtccccaaaggcctgccatcca

SEQ ID NO: 5794481 - DNA, 25 bp, Homo sapien
cttgctccagctcccgctgctcggc

SEQ ID NO: 5794482 - DNA, 25 bp, Homo sapien
caggtggcgctgtcccgccagcagc

SEQ ID NO: 5794483 - DNA, 25 bp, Homo sapien
tcactggctctaaggaaggcagaga

SEQ ID NO: 5794484 - DNA, 25 bp, Homo sapien
acagccatatcgaaatcggaagcct

SEQ ID NO: 5794485 - DNA, 25 bp, Homo sapien
aagtttttgtatcatagtccccatc

SEQ ID NO: 5794486 - DNA, 25 bp, Homo sapien
ccactgggtgaggttgtctgtcggt

SEQ ID NO: 5794487 - DNA, 25 bp, Homo sapien
ctctgcctcctgctccactgactgg

SEQ ID NO: 5794488 - DNA, 25 bp, Homo sapien
ccgcactatactcagatccatcacc

SEQ ID NO: 5794489 - DNA, 25 bp, Homo sapien
ctccgtaaggccctggggcctagag

SEQ ID NO: 5794490 - DNA, 25 bp, Homo sapien
gctcggcctccgtaaggccctgggg

SEQ ID NO: 5794491 - DNA, 25 bp, Homo sapien
cccagctgccctgggcttctggccc

SEQ ID NO: 5794492 - DNA, 25 bp, Homo sapien
gcccgtggcagagccctcctggtgg

SEQ ID NO: 5794493 - DNA, 25 bp, Homo sapien
ttctcactggaggcaccgggcagtc

SEQ ID NO: 5794494 - DNA, 25 bp, Homo sapien
catgggaggggccttcacagccata

SEQ ID NO: 5794495 - DNA, 25 bp, Homo sapien
aataagatttgaaataggtggggac

SEQ ID NO: 5794496 - DNA, 25 bp, Homo sapien
ggtgcgagcgttcacgttggcccgg

SEQ ID NO: 5794497 - DNA, 25 bp, Homo sapien
tggggacgctgtacagggggtccgg

SEQ ID NO: 5794498 - DNA, 25 bp, Homo sapien
agagggtaataggtgaactgtttgg

SEQ ID NO: 5794499 - DNA, 25 bp, Homo sapien
atgttcttcttagtcacatgcagga

SEQ ID NO: 5794500 - DNA, 25 bp, Homo sapien
tggcctcttgctccagctcccgctg

SEQ ID NO: 5794501 - DNA, 25 bp, Homo sapien
ggtcctccccttcccatgagaatcc

SEQ ID NO: 5794502 - DNA, 25 bp, Homo sapien
cgctgtcccgccagcagcgcgcgcg

SEQ ID NO: 5794503 - DNA, 25 bp, Homo sapien
ctctgtctagtggctccggccaggt

SEQ ID NO: 5794504 - DNA, 25 bp, Homo sapien
tctgccccgtgatcaccgccaggtg

SEQ ID NO: 5794505 - DNA, 25 bp, Homo sapien
ccaagtgacagtcccggccctgctg

SEQ ID NO: 5794506 - DNA, 25 bp, Homo sapien
gcttcgggtgtccttctcaggccct

SEQ ID NO: 5794507 - DNA, 25 bp, Homo sapien
caacagctggggcacagcaggagct

SEQ ID NO: 5794508 - DNA, 25 bp, Homo sapien
gcctccgtaaggccctggggcctag

SEQ ID NO: 5794509 - DNA, 25 bp, Homo sapien
gaaggagccatcactggctctaagg

SEQ ID NO: 5794510 - DNA, 25 bp, Homo sapien
tggcttcaggggcagggagaaggag

SEQ ID NO: 5794511 - DNA, 25 bp, Homo sapien
ctgtcccgccagcagcgcgcgcgcg

SEQ ID NO: 5794512 - DNA, 25 bp, Homo sapien
cgctcagtggcctccacttcagccc

SEQ ID NO: 5794513 - DNA, 25 bp, Homo sapien
tggttggtgaggttgacaacgccga

SEQ ID NO: 5794514 - DNA, 25 bp, Homo sapien
gctcgggcgctgcgctgcgccaggc

SEQ ID NO: 5794515 - DNA, 25 bp, Homo sapien
gggtgtgtttcccgcaaaggtgcga

SEQ ID NO: 5794516 - DNA, 25 bp, Homo sapien
gagaagtccccaaaggcctgccatc

SEQ ID NO: 5794517 - DNA, 25 bp, Homo sapien
ggctccttgggttccacaatggagg

SEQ ID NO: 5794518 - DNA, 25 bp, Homo sapien
tgggataggtctttcggcccttctc

SEQ ID NO: 5794519 - DNA, 25 bp, Homo sapien
gcgcgtccgcggtgacgccgtagtc

SEQ ID NO: 5794520 - DNA, 25 bp, Homo sapien
cccatgagaatcctttatttgtccc

SEQ ID NO: 5794521 - DNA, 25 bp, Homo sapien
ggccttcctccgcttccgctgcacc

SEQ ID NO: 5794522 - DNA, 25 bp, Homo sapien
cctccgcttccgctgcacctcttcc

SEQ ID NO: 5794523 - DNA, 25 bp, Homo sapien
gtcgggtaccccagtccagctgcca

SEQ ID NO: 5794524 - DNA, 25 bp, Homo sapien
gggcagcttgtctcgggtttctgga

SEQ ID NO: 5794525 - DNA, 25 bp, Homo sapien
ctgcgccaggccgaacaggcgcgcg

SEQ ID NO: 5794526 - DNA, 25 bp, Homo sapien
gcgcgcgcgcgtccgcggtgacgcc

SEQ ID NO: 5794527 - DNA, 25 bp, Homo sapien
gccatcactggctctaaggaaggca

SEQ ID NO: 5794528 - DNA, 25 bp, Homo sapien
ccaggtgcaggggtgtgtttcccgc

SEQ ID NO: 5794529 - DNA, 25 bp, Homo sapien
gcgctgcgctgcgccaggccgaaca

SEQ ID NO: 5794530 - DNA, 25 bp, Homo sapien
gtcccgccagcagcgcgcgcgcgtc

SEQ ID NO: 5794531 - DNA, 25 bp, Homo sapien
gcctgcccgcagcgccagatgcatg

SEQ ID NO: 5794532 - DNA, 25 bp, Homo sapien
ccccgcctcccgggtagcagcccat

SEQ ID NO: 5794533 - DNA, 25 bp, Homo sapien
ctgaggctgggggtgcccgtggcag

SEQ ID NO: 5794534 - DNA, 25 bp, Homo sapien
gagaaggtgggcaaggccttcctcc

SEQ ID NO: 5794535 - DNA, 25 bp, Homo sapien
atctttctgcaccttgtcacaaagc

SEQ ID NO: 5794536 - DNA, 25 bp, Homo sapien
gatcaccgccaggtgcaggggcgtc

SEQ ID NO: 5794537 - DNA, 25 bp, Homo sapien
tcatcatcctcatagaaccgaacct

SEQ ID NO: 5794538 - DNA, 25 bp, Homo sapien
gtcttccaccagagggtaataggtg

SEQ ID NO: 5794539 - DNA, 25 bp, Homo sapien
ctatctgctcaatgacactggtctg

SEQ ID NO: 5794540 - DNA, 25 bp, Homo sapien
ttgaaataggtggggacgctgtaca

SEQ ID NO: 5794541 - DNA, 25 bp, Homo sapien
ggtgacgccgtagtcgagtagggct

SEQ ID NO: 5794542 - DNA, 25 bp, Homo sapien
gctctgcccagctgccctgggcttc

SEQ ID NO: 5794543 - DNA, 25 bp, Homo sapien
gagcttggtgaccagatgggtgacc

SEQ ID NO: 5794544 - DNA, 25 bp, Homo sapien
gcagcctcactccctcctctaggcc

SEQ ID NO: 5794545 - DNA, 25 bp, Homo sapien
agcagcgcgcgcgcgtccgcggtga

SEQ ID NO: 5794546 - DNA, 25 bp, Homo sapien
ttctgcaccttgtcacaaagcagat

SEQ ID NO: 5794547 - DNA, 25 bp, Homo sapien
cttcacagccatatcgaaatcggaa

SEQ ID NO: 5794548 - DNA, 25 bp, Homo sapien
gaaggcagtgggcacaggggctcct

SEQ ID NO: 5794549 - DNA, 25 bp, Homo sapien
gtgtactggatacagtccctcaaag

SEQ ID NO: 5794550 - DNA, 25 bp, Homo sapien
cgcaaaggtgcgagcgttcacgttg

SEQ ID NO: 5794551 - DNA, 25 bp, Homo sapien
ggaggggaagaaaccgaggctgcca

SEQ ID NO: 5794552 - DNA, 25 bp, Homo sapien
tgggcacaggggctcctcgttttca

SEQ ID NO: 5794553 - DNA, 25 bp, Homo sapien
tgcaggacacccaggttgttaaatt

SEQ ID NO: 5794554 - DNA, 25 bp, Homo sapien
catcagctgtttctggggctggctc

SEQ ID NO: 5794555 - DNA, 25 bp, Homo sapien
tcttccttcacctctgtgctgggca

SEQ ID NO: 5794556 - DNA, 25 bp, Homo sapien
ccaggtgtactggatacagtccctc

SEQ ID NO: 5794557 - DNA, 25 bp, Homo sapien
gcaaggtcttcaccttggtgctgca

SEQ ID NO: 5794558 - DNA, 25 bp, Homo sapien
gcagctgctccaggttctgcagagc

SEQ ID NO: 5794559 - DNA, 25 bp, Homo sapien
atcagacacgtcccctcctcgcttg

SEQ ID NO: 5794560 - DNA, 25 bp, Homo sapien
ttcagaaggaggcgggtgagggtcg

SEQ ID NO: 5794561 - DNA, 25 bp, Homo sapien
ggcgcagatccccagctccgagcat

SEQ ID NO: 5794562 - DNA, 25 bp, Homo sapien
gggcgctcggctccgcggcttcctc

SEQ ID NO: 5794563 - DNA, 25 bp, Homo sapien
ggccccacagaaacggcgcagatcc

SEQ ID NO: 5794564 - DNA, 25 bp, Homo sapien
caaaggcctgccatccattctcatc

SEQ ID NO: 5794565 - DNA, 25 bp, Homo sapien
ggtaccccagtccagctgccaggtg

SEQ ID NO: 5794566 - DNA, 25 bp, Homo sapien
ctgggcagcttgtctcgggtttctg

SEQ ID NO: 5794567 - DNA, 25 bp, Homo sapien
cagagccctcctggtggctcagggg

SEQ ID NO: 5794568 - DNA, 25 bp, Homo sapien
ctgcctcctgctccactgactggct

SEQ ID NO: 5794569 - DNA, 25 bp, Homo sapien
gggtcctggagggggcgctcggctc

SEQ ID NO: 5794570 - DNA, 25 bp, Homo sapien
ggtcttcaccttggtgctgcaagtg

SEQ ID NO: 5794571 - DNA, 25 bp, Homo sapien
gggagatgactggcttcaggggcag

SEQ ID NO: 5794572 - DNA, 25 bp, Homo sapien
ctgcagcatctccggggcctgcggc

SEQ ID NO: 5794573 - DNA, 25 bp, Homo sapien
ctcgtctgccccgtgatcaccgcca

SEQ ID NO: 5794574 - DNA, 25 bp, Homo sapien
gaggctgggggtgcccgtggcagag

SEQ ID NO: 5794575 - DNA, 25 bp, Homo sapien
ggtggggacgctgtacagggggtcc

SEQ ID NO: 5794576 - DNA, 25 bp, Homo sapien
gcgcgcgttgtactctcgagctcgc

SEQ ID NO: 5794577 - DNA, 25 bp, Homo sapien
acgccgtagtcgagtagggctcggg

SEQ ID NO: 5794578 - DNA, 25 bp, Homo sapien
agctcgtagctgcgcaggaggctgc

SEQ ID NO: 5794579 - DNA, 25 bp, Homo sapien
tgccctgggcttctggcccgtctag

SEQ ID NO: 5794580 - DNA, 25 bp, Homo sapien
cctgggttgtagcaactctccatgt

SEQ ID NO: 5794581 - DNA, 25 bp, Homo sapien
ggctgagtctccatgccgatccagc

SEQ ID NO: 5794582 - DNA, 25 bp, Homo sapien
agcagagctgggtctgcacctaccc

SEQ ID NO: 5794583 - DNA, 25 bp, Homo sapien
gctgcgctgcgccaggccgaacagg

SEQ ID NO: 5794584 - DNA, 25 bp, Homo sapien
catggtgttctgagcagcatttagc

SEQ ID NO: 5794585 - DNA, 25 bp, Homo sapien
actggtaggggctgtaggccaggga

SEQ ID NO: 5794586 - DNA, 25 bp, Homo sapien
ccttctcactggaggcaccgggcag

SEQ ID NO: 5794587 - DNA, 25 bp, Homo sapien
gctcaggagcaccagcgcctgcccg

SEQ ID NO: 5794588 - DNA, 25 bp, Homo sapien
ccaccagcagatccaggcactcagg

SEQ ID NO: 5794589 - DNA, 25 bp, Homo sapien
cctcgtagttacagatcttgacagt

SEQ ID NO: 5794590 - DNA, 25 bp, Homo sapien
cagcgcgcgcgcgtccgcggtgacg

SEQ ID NO: 5794591 - DNA, 25 bp, Homo sapien
gcccttcagagtccgagtcgctatc

SEQ ID NO: 5794592 - DNA, 25 bp, Homo sapien
ccgtgatcaccgccaggtgcagggg

SEQ ID NO: 5794593 - DNA, 25 bp, Homo sapien
ataggtgaactgtttggaatcagac

SEQ ID NO: 5794594 - DNA, 25 bp, Homo sapien
ggttgacaacgccgaggtcctgggc

SEQ ID NO: 5794595 - DNA, 25 bp, Homo sapien
taccaggctgcgcagccccagacgc

SEQ ID NO: 5794596 - DNA, 25 bp, Homo sapien
gtccggaacacaatggcatactgtt

SEQ ID NO: 5794597 - DNA, 25 bp, Homo sapien
atgtgggagccacccccgaagggct

SEQ ID NO: 5794598 - DNA, 25 bp, Homo sapien
ccccggagtccctgctgggcaccgt

SEQ ID NO: 5794599 - DNA, 25 bp, Homo sapien
gctgccaggtgcaggggtgtgtttc

SEQ ID NO: 5794600 - DNA, 25 bp, Homo sapien
gcagaaagctcaccacactcgtctg

SEQ ID NO: 5794601 - DNA, 25 bp, Homo sapien
cagaggtagggggtgaaggcagtgg

SEQ ID NO: 5794602 - DNA, 25 bp, Homo sapien
gtcctccatgggaggggccttcaca

SEQ ID NO: 5794603 - DNA, 25 bp, Homo sapien
ctcgctgcagcatctccggggcctg

SEQ ID NO: 5794604 - DNA, 25 bp, Homo sapien
cagcaggagctccactctgaagcag

SEQ ID NO: 5794605 - DNA, 25 bp, Homo sapien
gagcaccagcgcctgcccgcagcgc

SEQ ID NO: 5794606 - DNA, 25 bp, Homo sapien
gtgtccggaacacaatggcatactg

SEQ ID NO: 5794607 - DNA, 25 bp, Homo sapien
ggtccccgccagccagctcgtagct

SEQ ID NO: 5794608 - DNA, 25 bp, Homo sapien
attgggcagtcatgtccttgggccc

SEQ ID NO: 5794609 - DNA, 25 bp, Homo sapien
tgcacctacccgcagcagaaagctc

SEQ ID NO: 5794610 - DNA, 25 bp, Homo sapien
gtctgcccgtggatgatggctaggt

SEQ ID NO: 5794611 - DNA, 25 bp, Homo sapien
cgttctcgtcctgcgccgtcagcag

SEQ ID NO: 5794612 - DNA, 25 bp, Homo sapien
cgcttgcgtttcagttgcagaaaca

SEQ ID NO: 5794613 - DNA, 25 bp, Homo sapien
cagtccctcaaagtcaggcatatgc

SEQ ID NO: 5794614 - DNA, 25 bp, Homo sapien
cgctgcgccaggccgaacaggcgcg

SEQ ID NO: 5794615 - DNA, 25 bp, Homo sapien
gcaggtcagtgcacctgaggctggg

SEQ ID NO: 5794616 - DNA, 25 bp, Homo sapien
atcgaaatcggaagcctctctgctt

SEQ ID NO: 5794617 - DNA, 25 bp, Homo sapien
gcgcctgcccgcagcgccagatgca

SEQ ID NO: 5794618 - DNA, 25 bp, Homo sapien
tggtgaggttgacaacgccgaggtc

SEQ ID NO: 5794619 - DNA, 25 bp, Homo sapien
aggcactcagggcttcgggctcgga

SEQ ID NO: 5794620 - DNA, 25 bp, Homo sapien
cgatcaccaggtaggggccatcagc

SEQ ID NO: 5794621 - DNA, 25 bp, Homo sapien
tggatgggctgggagatgactggct

SEQ ID NO: 5794622 - DNA, 25 bp, Homo sapien
ccgaacaggcgcgcgttgtactctc

SEQ ID NO: 5794623 - DNA, 25 bp, Homo sapien
ggttctgcttcccagaattttagac

SEQ ID NO: 5794624 - DNA, 25 bp, Homo sapien
ttagcagcaaggtcttcaccttggt

SEQ ID NO: 5794625 - DNA, 25 bp, Homo sapien
gctgccactgggtgaggttgtctgt

SEQ ID NO: 5794626 - DNA, 25 bp, Homo sapien
tggctcccgtacgcactgtcttcct

SEQ ID NO: 5794627 - DNA, 25 bp, Homo sapien
ggtccacctcgatcttggctggtcc

SEQ ID NO: 5794628 - DNA, 25 bp, Homo sapien
aggcagagaagcgcagccgcactat

SEQ ID NO: 5794629 - DNA, 25 bp, Homo sapien
accacactcgtctgccccgtgatca

SEQ ID NO: 5794630 - DNA, 25 bp, Homo sapien
caaaggtgcgagcgttcacgttggc

SEQ ID NO: 5794631 - DNA, 25 bp, Homo sapien
gcccttctcactggaggcaccgggc

SEQ ID NO: 5794632 - DNA, 25 bp, Homo sapien
gcagcgccagatgcatggctgagtc

SEQ ID NO: 5794633 - DNA, 25 bp, Homo sapien
ttctggcccgtctagcagctgctcc

SEQ ID NO: 5794634 - DNA, 25 bp, Homo sapien
cgagcattgcttgcccaccagactg

SEQ ID NO: 5794635 - DNA, 25 bp, Homo sapien
atggctgagtctccatgccgatcca

SEQ ID NO: 5794636 - DNA, 25 bp, Homo sapien
gtacgcactgtcttccttcacctct

SEQ ID NO: 5794637 - DNA, 25 bp, Homo sapien
gtctccatgccgatccagcagagct

SEQ ID NO: 5794638 - DNA, 25 bp, Homo sapien
ccggaacacaatggcatactgttta

SEQ ID NO: 5794639 - DNA, 25 bp, Homo sapien
ggtgtccttctcaggcccttcagag

SEQ ID NO: 5794640 - DNA, 25 bp, Homo sapien
ccgaagggctgggagaaggtgggca

SEQ ID NO: 5794641 - DNA, 25 bp, Homo sapien
ggcagagccctcctggtggctcagg

SEQ ID NO: 5794642 - DNA, 25 bp, Homo sapien
tggatacagtccctcaaagtcaggc

SEQ ID NO: 5794643 - DNA, 25 bp, Homo sapien
ttgacaacgccgaggtcctgggcgt

SEQ ID NO: 5794644 - DNA, 25 bp, Homo sapien
ctgtatcaccaagtgacagtcccgg

SEQ ID NO: 5794645 - DNA, 25 bp, Homo sapien
ccaggtaggggccatcagctgtttc

SEQ ID NO: 5794646 - DNA, 25 bp, Homo sapien
aggttgtctgtcggtacgtgtctac

SEQ ID NO: 5794647 - DNA, 25 bp, Homo sapien
cgtggtggatgacatagactatctg

SEQ ID NO: 5794648 - DNA, 25 bp, Homo sapien
ggttctgcagagctgtatcaccaag

SEQ ID NO: 5794649 - DNA, 25 bp, Homo sapien
gatttgctgtcatggatgggctggg

SEQ ID NO: 5794650 - DNA, 25 bp, Homo sapien
cgttcacgttggcccggagcttggt

SEQ ID NO: 5794651 - DNA, 25 bp, Homo sapien
cgcactggggggtcctggagggggc

SEQ ID NO: 5794652 - DNA, 25 bp, Homo sapien
actggctcccgtacgcactgtcttc

SEQ ID NO: 5794653 - DNA, 25 bp, Homo sapien
gtgcccgtggcagagccctcctggt

SEQ ID NO: 5794654 - DNA, 25 bp, Homo sapien
ccctcaaagtcaggcatatgcaaca

SEQ ID NO: 5794655 - DNA, 25 bp, Homo sapien
ggctgggagatgactggcttcaggg

SEQ ID NO: 5794656 - DNA, 25 bp, Homo sapien
catagaaccgaacctcaatgtcatc

SEQ ID NO: 5794657 - DNA, 25 bp, Homo sapien
tttatttgtcccaactgaggggtgg

SEQ ID NO: 5794658 - DNA, 25 bp, Homo sapien
ctggggcctagagcggagccgctgc

SEQ ID NO: 5794659 - DNA, 25 bp, Homo sapien
caaagtcaggcatatgcaacagctg

SEQ ID NO: 5794660 - DNA, 25 bp, Homo sapien
aggctgcgcagccccagacgctctg

SEQ ID NO: 5794661 - DNA, 25 bp, Homo sapien
tggctagatgcaaggctgttcgtcc

SEQ ID NO: 5794662 - DNA, 25 bp, Homo sapien
cggggtcaggggtggctccatggtg

SEQ ID NO: 5794663 - DNA, 25 bp, Homo sapien
cctcctggtggctcagggggtgggc

SEQ ID NO: 5794664 - DNA, 25 bp, Homo sapien
actgaggggtgggtgtggggtgtta

SEQ ID NO: 5794665 - DNA, 25 bp, Homo sapien
gtcacatgcaggacacccaggttgt

SEQ ID NO: 5794666 - DNA, 25 bp, Homo sapien
ctggggctggctccttgggttccac

SEQ ID NO: 5794667 - DNA, 25 bp, Homo sapien
cactgtccaccagcagatccaggca

SEQ ID NO: 5794668 - DNA, 25 bp, Homo sapien
tagtcgagtagggctcgggcgctgc

SEQ ID NO: 5794669 - DNA, 25 bp, Homo sapien
cggagcttggtgaccagatgggtga

SEQ ID NO: 5794670 - DNA, 25 bp, Homo sapien
gtgaactgtttggaatcagacacgt

SEQ ID NO: 5794671 - DNA, 25 bp, Homo sapien
gaggtagggggtgaaggcagtgggc

SEQ ID NO: 5794672 - DNA, 25 bp, Homo sapien
tactctcgagctcgctgcagcatct

SEQ ID NO: 5794673 - DNA, 25 bp, Homo sapien
cgggcagtcctccatgggaggggcc

SEQ ID NO: 5794674 - DNA, 25 bp, Homo sapien
aagtcaggcatatgcaacagctggg

SEQ ID NO: 5794675 - DNA, 25 bp, Homo sapien
tcatgttcttcttagtcacatgcag

SEQ ID NO: 5794676 - DNA, 25 bp, Homo sapien
cagcgcctgcccgcagcgccagatg

SEQ ID NO: 5794677 - DNA, 25 bp, Homo sapien
ccatgccgatccagcagagctgggt

SEQ ID NO: 5794678 - DNA, 25 bp, Homo sapien
gactgtgggcatgagcacgaggtgg

SEQ ID NO: 5794679 - DNA, 25 bp, Homo sapien
tccatgggaggggccttcacagcca

SEQ ID NO: 5794680 - DNA, 25 bp, Homo sapien
tcccaactgaggggtgggtgtgggg

SEQ ID NO: 5794681 - DNA, 25 bp, Homo sapien
ttcagagtccgagtcgctatcagag

SEQ ID NO: 5794682 - DNA, 25 bp, Homo sapien
accttgtcacaaagcagataaactt

SEQ ID NO: 5794683 - DNA, 25 bp, Homo sapien
aagaggcgtgtggccccggaagctg

SEQ ID NO: 5794684 - DNA, 25 bp, Homo sapien
gccagctctgcccagctgccctggg

SEQ ID NO: 5794685 - DNA, 25 bp, Homo sapien
cgaacctcaatgtcatctttctgca

SEQ ID NO: 5794686 - DNA, 25 bp, Homo sapien
ctcgtcctgcgccgtcagcaggtgg

SEQ ID NO: 5794687 - DNA, 25 bp, Homo sapien
gactatctgctcaatgacactggtc

SEQ ID NO: 5794688 - DNA, 25 bp, Homo sapien
ctgtgggcatgagcacgaggtgggt

SEQ ID NO: 5794689 - DNA, 25 bp, Homo sapien
tcctcatagaaccgaacctcaatgt

SEQ ID NO: 5794690 - DNA, 25 bp, Homo sapien
aggggggtgtccggaacacaatggc

SEQ ID NO: 5794691 - DNA, 25 bp, Homo sapien
ccaggttgttaaattgggcagtcat

SEQ ID NO: 5794692 - DNA, 25 bp, Homo sapien
agctgcttcgggtgtccttctcagg

SEQ ID NO: 5794693 - DNA, 25 bp, Homo sapien
ggcagtcctccatgggaggggcctt

SEQ ID NO: 5794694 - DNA, 25 bp, Homo sapien
gatgggctgggagatgactggcttc

SEQ ID NO: 5794695 - DNA, 25 bp, Homo sapien
gggcgctgcgctgcgccaggccgaa

SEQ ID NO: 5794696 - DNA, 25 bp, Homo sapien
ggtgaccaaccccagctcctccatc

SEQ ID NO: 5794697 - DNA, 25 bp, Homo sapien
ccggactggtaggggctgtaggcca

SEQ ID NO: 5794698 - DNA, 25 bp, Homo sapien
agcctcactccctcctctaggccca

SEQ ID NO: 5794699 - DNA, 25 bp, Homo sapien
gctccaggttctgcagagctgtatc

SEQ ID NO: 5794700 - DNA, 25 bp, Homo sapien
cgagtagggctcgggcgctgcgctg

SEQ ID NO: 5794701 - DNA, 25 bp, Homo sapien
aggtgggcaaggccttcctccgctt

SEQ ID NO: 5794702 - DNA, 25 bp, Homo sapien
taagatttgaaataggtggggacgc

SEQ ID NO: 5794703 - DNA, 25 bp, Homo sapien
tcttccttgtcttccaccagagggt

SEQ ID NO: 5794704 - DNA, 25 bp, Homo sapien
aaggcctgccatccattctcatcat

SEQ ID NO: 5794705 - DNA, 25 bp, Homo sapien
tgggtgaggttgtctgtcggtacgt

SEQ ID NO: 5794706 - DNA, 25 bp, Homo sapien
tagcccccggctgcacccccagagc

SEQ ID NO: 5794707 - DNA, 25 bp, Homo sapien
gtagacctgccaggtccccgccagc

SEQ ID NO: 5794708 - DNA, 25 bp, Homo sapien
gttccacgatcaccaggtaggggcc

SEQ ID NO: 5794709 - DNA, 25 bp, Homo sapien
ctcgcttgcgtttcagttgcagaaa

SEQ ID NO: 5794710 - DNA, 25 bp, Homo sapien
actctccatgtctctgggctaggcc

SEQ ID NO: 5794711 - DNA, 25 bp, Homo sapien
acaaagcagataaacttcatctcca

SEQ ID NO: 5794712 - DNA, 25 bp, Homo sapien
tccattcgagaaatcttcaggtttg

SEQ ID NO: 5794713 - DNA, 25 bp, Homo sapien
ggaacacaatggcatactgtttatg

SEQ ID NO: 5794714 - DNA, 25 bp, Homo sapien
cctggagggggcgctcggctccgcg

SEQ ID NO: 5794715 - DNA, 25 bp, Homo sapien
cggggcctgcggctcgcactggggg

SEQ ID NO: 5794716 - DNA, 25 bp, Homo sapien
tccgctgcacctcttccttgtcttc

SEQ ID NO: 5794717 - DNA, 25 bp, Homo sapien
gtggcggcggctctggttgcggctt

SEQ ID NO: 5794718 - DNA, 25 bp, Homo sapien
cgagaaatcttcaggtttgatgccc

SEQ ID NO: 5794719 - DNA, 25 bp, Homo sapien
acctgccaggtccccgccagccagc

SEQ ID NO: 5794720 - DNA, 25 bp, Homo sapien
ctctaggcccatgtcagacagggcc

SEQ ID NO: 5794721 - DNA, 25 bp, Homo sapien
cgtgtggccccggaagctgcttcgg

SEQ ID NO: 5794722 - DNA, 25 bp, Homo sapien
cgaggtcctgggcgtggtggatgac

SEQ ID NO: 5794723 - DNA, 25 bp, Homo sapien
ctgctcaatgacactggtctgcccg

SEQ ID NO: 5794724 - DNA, 25 bp, Homo sapien
gggcgtctggtgcaggtggttggtg

SEQ ID NO: 5794725 - DNA, 25 bp, Homo sapien
tgcccccggagatttgctgtcatgg

SEQ ID NO: 5794726 - DNA, 25 bp, Homo sapien
ttcaccttggtgctgcaagtgaggt

SEQ ID NO: 5794727 - DNA, 25 bp, Homo sapien
ctcaatcttcatcttgtgatagggg

SEQ ID NO: 5794728 - DNA, 25 bp, Homo sapien
gagagaagtccccaaaggcctgcca

SEQ ID NO: 5794729 - DNA, 25 bp, Homo sapien
ccatccattctcatcatcctcatag

SEQ ID NO: 5794730 - DNA, 25 bp, Homo sapien
tggctcagggggtgggcccagcttc

SEQ ID NO: 5794731 - DNA, 25 bp, Homo sapien
aggtctttcggcccttctcactgga

SEQ ID NO: 5794732 - DNA, 25 bp, Homo sapien
gagccacccccgaagggctgggaga

SEQ ID NO: 5794733 - DNA, 25 bp, Homo sapien
gtcatggatgggctgggagatgact

SEQ ID NO: 5794734 - DNA, 25 bp, Homo sapien
gatgtcagcaccagccttcagaagg

SEQ ID NO: 5794735 - DNA, 25 bp, Homo sapien
taaggaaggcagagaagcgcagccg

SEQ ID NO: 5794736 - DNA, 25 bp, Homo sapien
tctccaccccgcacagagcctgctg

SEQ ID NO: 5794737 - DNA, 25 bp, Homo sapien
tgggcagtcatgtccttgggcccca

SEQ ID NO: 5794738 - DNA, 25 bp, Homo sapien
gcagtgggcacaggggctcctcgtt

SEQ ID NO: 5794739 - DNA, 25 bp, Homo sapien
cagcaaggtcttcaccttggtgctg

SEQ ID NO: 5794740 - DNA, 25 bp, Homo sapien
agcttgtctcgggtttctggacccc

SEQ ID NO: 5794741 - DNA, 25 bp, Homo sapien
cagacctgggttgtagcaactctcc

SEQ ID NO: 5794742 - DNA, 25 bp, Homo sapien
taggctgttccacgatcaccaggta

SEQ ID NO: 5794743 - DNA, 25 bp, Homo sapien
ccagagggtaataggtgaactgttt

SEQ ID NO: 5794744 - DNA, 25 bp, Homo sapien
gaaggaggcgggtgagggtcgggta

SEQ ID NO: 5794745 - DNA, 25 bp, Homo sapien
agctgtatcaccaagtgacagtccc

SEQ ID NO: 5794746 - DNA, 25 bp, Homo sapien
aggtgaactgtttggaatcagacac

SEQ ID NO: 5794747 - DNA, 25 bp, Homo sapien
ggtagggggtgaaggcagtgggcac

SEQ ID NO: 5794748 - DNA, 25 bp, Homo sapien
gaaatcatcatattcaataatacca

SEQ ID NO: 5794749 - DNA, 25 bp, Homo sapien
tcctgcgccgtcagcaggtggcgct

SEQ ID NO: 5794750 - DNA, 25 bp, Homo sapien
gcgcgttgtactctcgagctcgctg

SEQ ID NO: 5794751 - DNA, 25 bp, Homo sapien
tgtgtgttaccaggtccacctcgat

SEQ ID NO: 5794752 - DNA, 25 bp, Homo sapien
gtgacagtcccggccctgctgggct

SEQ ID NO: 5794753 - DNA, 25 bp, Homo sapien
gagggggcgctcggctccgcggctt

SEQ ID NO: 5794754 - DNA, 25 bp, Homo sapien
tgacactggtctgcccgtggatgat

SEQ ID NO: 5794755 - DNA, 25 bp, Homo sapien
ttcacctctgtgctgggcagcttgt

SEQ ID NO: 5794756 - DNA, 25 bp, Homo sapien
cctgctgggcaccgtggcggccatc

SEQ ID NO: 5794757 - DNA, 25 bp, Homo sapien
aggtgcaggggtgtgtttcccgcaa

SEQ ID NO: 5794758 - DNA, 25 bp, Homo sapien
gctgccacctcctccagctcctccg

SEQ ID NO: 5794759 - DNA, 25 bp, Homo sapien
tccagctgccaggtgcaggggtgtg

SEQ ID NO: 5794760 - DNA, 25 bp, Homo sapien
gtcaggcatatgcaacagctggggc

SEQ ID NO: 5794761 - DNA, 25 bp, Homo sapien
gcaggagctccactctgaagcagtg

SEQ ID NO: 5794762 - DNA, 25 bp, Homo sapien
cagagcctccacccatgtgggagcc

SEQ ID NO: 5794763 - DNA, 25 bp, Homo sapien
acagtgggataggtctttcggccct

SEQ ID NO: 5794764 - DNA, 25 bp, Homo sapien
ctccccggagtccctgctgggcacc

SEQ ID NO: 5794765 - DNA, 25 bp, Homo sapien
aggggaagaaaccgaggctgccacc

SEQ ID NO: 5794766 - DNA, 25 bp, Homo sapien
gaacaggcgcgcgttgtactctcga

SEQ ID NO: 5794767 - DNA, 25 bp, Homo sapien
cagaaggaggcgggtgagggtcggg

SEQ ID NO: 5794768 - DNA, 25 bp, Homo sapien
ttgggttccacaatggaggagttca

SEQ ID NO: 5794769 - DNA, 25 bp, Homo sapien
atgcacatctgtgggagagaagtcc

SEQ ID NO: 5794770 - DNA, 25 bp, Homo sapien
ggtacgtgtctaccaggctgcgcag

SEQ ID NO: 5794771 - DNA, 25 bp, Homo sapien
ctcccgggtagcagcccatggggcc

SEQ ID NO: 5794772 - DNA, 25 bp, Homo sapien
cattcgagaaatcttcaggtttgat

SEQ ID NO: 5794773 - DNA, 25 bp, Homo sapien
tgtcttccttcacctctgtgctggg

SEQ ID NO: 5794774 - DNA, 25 bp, Homo sapien
ctccatgccgatccagcagagctgg

SEQ ID NO: 5794775 - DNA, 25 bp, Homo sapien
gacagggcctccagtagacctgcca

SEQ ID NO: 5794776 - DNA, 25 bp, Homo sapien
gctcccgtacgcactgtcttccttc

SEQ ID NO: 5794777 - DNA, 25 bp, Homo sapien
tgtcatctttctgcaccttgtcaca

SEQ ID NO: 5794778 - DNA, 25 bp, Homo sapien
ggtctgcacctacccgcagcagaaa

SEQ ID NO: 5794779 - DNA, 25 bp, Homo sapien
cagctgccctgggcttctggcccgt

SEQ ID NO: 5794780 - DNA, 25 bp, Homo sapien
tcggcctccgtaaggccctggggcc

SEQ ID NO: 5794781 - DNA, 25 bp, Homo sapien
gctccggccaggttctgcttcccag

SEQ ID NO: 5794782 - DNA, 25 bp, Homo sapien
gtcgagtagggctcgggcgctgcgc

SEQ ID NO: 5794783 - DNA, 25 bp, Homo sapien
ggctgttccacgatcaccaggtagg

SEQ ID NO: 5794784 - DNA, 25 bp, Homo sapien
cagtgcacctgaggctgggggtgcc

SEQ ID NO: 5794785 - DNA, 25 bp, Homo sapien
caggggtggctccatggtgttctga

SEQ ID NO: 5794786 - DNA, 25 bp, Homo sapien
atgacatagactatctgctcaatga

SEQ ID NO: 5794787 - DNA, 25 bp, Homo sapien
tgtaggccagggaggaggggaagaa

SEQ ID NO: 5794788 - DNA, 25 bp, Homo sapien
agtccctgctgggcaccgtggcggc

SEQ ID NO: 5794789 - DNA, 25 bp, Homo sapien
ggggtggctccatggtgttctgagc

SEQ ID NO: 5794790 - DNA, 25 bp, Homo sapien
agcagataaacttcatctccacccc

SEQ ID NO: 5794791 - DNA, 25 bp, Homo sapien
tctgaagtttttgtatcatagtccc

SEQ ID NO: 5794792 - DNA, 25 bp, Homo sapien
atggcatactgtttatgcacatctg

SEQ ID NO: 5794793 - DNA, 25 bp, Homo sapien
gcatgagcacgaggtgggtcactgt

SEQ ID NO: 5794794 - DNA, 25 bp, Homo sapien
cgagcgttcacgttggcccggagct

SEQ ID NO: 5794795 - DNA, 25 bp, Homo sapien
ggcttcgggctcggaccgccaggtg

SEQ ID NO: 5794796 - DNA, 25 bp, Homo sapien
ctcgtagctgcgcaggaggctgcca

SEQ ID NO: 5794797 - DNA, 25 bp, Homo sapien
ctgccgctcagtggcctccacttca

SEQ ID NO: 5794798 - DNA, 25 bp, Homo sapien
tccactctgaagcagtgcacgcagc

SEQ ID NO: 5794799 - DNA, 25 bp, Homo sapien
tgttaccaggtccacctcgatcttg

SEQ ID NO: 5794800 - DNA, 25 bp, Homo sapien
ggggctggctccttgggttccacaa

SEQ ID NO: 5794801 - DNA, 25 bp, Homo sapien
tgggaggggccttcacagccatatc

SEQ ID NO: 5794802 - DNA, 25 bp, Homo sapien
aaagctcaccacactcgtctgcccc

SEQ ID NO: 5794803 - DNA, 25 bp, Homo sapien
aagcgcagccgcactatactcagat

SEQ ID NO: 5794804 - DNA, 25 bp, Homo sapien
ttctctgcctcctgctccactgact

SEQ ID NO: 5794805 - DNA, 25 bp, Homo sapien
tagggctcgggcgctgcgctgcgcc

SEQ ID NO: 5794806 - DNA, 25 bp, Homo sapien
tgttacaggccgctcaatcttcatc

SEQ ID NO: 5794807 - DNA, 25 bp, Homo sapien
tgtcacaaagcagataaacttcatc

SEQ ID NO: 5794808 - DNA, 25 bp, Homo sapien
tgtctgtcggtacgtgtctaccagg

SEQ ID NO: 5794809 - DNA, 25 bp, Homo sapien
gtggatgatggctaggtgcagtggt

SEQ ID NO: 5794810 - DNA, 25 bp, Homo sapien
gtgaggtcaagaggcgtgtggcccc

SEQ ID NO: 5794811 - DNA, 25 bp, Homo sapien
cagtcccggccctgctgggctgggc

SEQ ID NO: 5794812 - DNA, 25 bp, Homo sapien
atccagcagagctgggtctgcacct

SEQ ID NO: 5794813 - DNA, 25 bp, Homo sapien
tgggttgtagcaactctccatgtct

SEQ ID NO: 5794814 - DNA, 25 bp, Homo sapien
agtagggctcgggcgctgcgctgcg

SEQ ID NO: 5794815 - DNA, 25 bp, Homo sapien
catcctcatagaaccgaacctcaat

SEQ ID NO: 5794816 - DNA, 25 bp, Homo sapien
gggggtcctggagggggcgctcggc

SEQ ID NO: 5794817 - DNA, 25 bp, Homo sapien
ggacacccaggttgttaaattgggc

SEQ ID NO: 5794818 - DNA, 25 bp, Homo sapien
tcacaaagcagataaacttcatctc

SEQ ID NO: 5794819 - DNA, 25 bp, Homo sapien
ggcgtggtggatgacatagactatc

SEQ ID NO: 5794820 - DNA, 25 bp, Homo sapien
tgacgccgtagtcgagtagggctcg

SEQ ID NO: 5794821 - DNA, 25 bp, Homo sapien
tgggcggggtcaggggtggctccat

SEQ ID NO: 5794822 - DNA, 25 bp, Homo sapien
aataataccatccagacctgggttg

SEQ ID NO: 5794823 - DNA, 25 bp, Homo sapien
ttccttcacctctgtgctgggcagc

SEQ ID NO: 5794824 - DNA, 25 bp, Homo sapien
tatactcagatccatcaccttcttc

SEQ ID NO: 5794825 - DNA, 25 bp, Homo sapien
tcagctgtttctggggctggctcct

SEQ ID NO: 5794826 - DNA, 25 bp, Homo sapien
tgtcggtacgtgtctaccaggctgc

SEQ ID NO: 5794827 - DNA, 25 bp, Homo sapien
agaaaccgaggctgccacctcctcc

SEQ ID NO: 5794828 - DNA, 25 bp, Homo sapien
atccaggcactcagggcttcgggct

SEQ ID NO: 5794829 - DNA, 25 bp, Homo sapien
gcctccacccatgtgggagccaccc

SEQ ID NO: 5794830 - DNA, 25 bp, Homo sapien
ctgcaagtgaggtcaagaggcgtgt

SEQ ID NO: 5794831 - DNA, 25 bp, Homo sapien
ggggcaggcagcaggtcagtgcacc

SEQ ID NO: 5794832 - DNA, 25 bp, Homo sapien
gggcaccgtggcggccatctgcgcc

SEQ ID NO: 5794833 - DNA, 25 bp, Homo sapien
cctgctgtcttgtccattcgagaaa

SEQ ID NO: 5794834 - DNA, 25 bp, Homo sapien
gcatttagcagcaaggtcttcacct

SEQ ID NO: 5794835 - DNA, 25 bp, Homo sapien
ctgtttctggggctggctccttggg

SEQ ID NO: 5794836 - DNA, 25 bp, Homo sapien
tgcaaggctgttcgtcccccctgcc

SEQ ID NO: 5794837 - DNA, 25 bp, Homo sapien
tccagtagacctgccaggtccccgc

SEQ ID NO: 5794838 - DNA, 25 bp, Homo sapien
tctttggcctcttgctccagctccc

SEQ ID NO: 5794839 - DNA, 25 bp, Homo sapien
ggctctgtctagtggctccggccag

SEQ ID NO: 5794840 - DNA, 25 bp, Homo sapien
ggtagcagcccatggggcccgcgcc

SEQ ID NO: 5794841 - DNA, 25 bp, Homo sapien
cagctctgcccagctgccctgggct

SEQ ID NO: 5794842 - DNA, 25 bp, Homo sapien
ctcttgctccagctcccgctgctcg

SEQ ID NO: 5794843 - DNA, 25 bp, Homo sapien
gagccatcactggctctaaggaagg

SEQ ID NO: 5794844 - DNA, 25 bp, Homo sapien
gcagcagctcaggagcaccagcgcc

SEQ ID NO: 5794845 - DNA, 25 bp, Homo sapien
tgactggctcccgtacgcactgtct

SEQ ID NO: 5794846 - DNA, 25 bp, Homo sapien
gatccatcaccttcttcagttcttt

SEQ ID NO: 5794847 - DNA, 25 bp, Homo sapien
tggggtgttaaataagatttgaaat

SEQ ID NO: 5794848 - DNA, 25 bp, Homo sapien
agcaggtggcgctgtcccgccagca

SEQ ID NO: 5794849 - DNA, 25 bp, Homo sapien
ttgtagcaactctccatgtctctgg

SEQ ID NO: 5794850 - DNA, 25 bp, Homo sapien
ctcatagaaccgaacctcaatgtca

SEQ ID NO: 5794851 - DNA, 25 bp, Homo sapien
ttaccaggtccacctcgatcttggc

SEQ ID NO: 5794852 - DNA, 25 bp, Homo sapien
cagatgggtgaccaaccccagctcc

SEQ ID NO: 5794853 - DNA, 25 bp, Homo sapien
accaggtccacctcgatcttggctg

SEQ ID NO: 5794854 - DNA, 25 bp, Homo sapien
gctcaatgacactggtctgcccgtg

SEQ ID NO: 5794855 - DNA, 25 bp, Homo sapien
cccgtctagcagctgctccaggttc

SEQ ID NO: 5794856 - DNA, 25 bp, Homo sapien
ggtcactgtgtgttaccaggtccac

SEQ ID NO: 5794857 - DNA, 25 bp, Homo sapien
ctggacccctcagcagcctcactcc

SEQ ID NO: 5794858 - DNA, 25 bp, Homo sapien
tccctgctgggcaccgtggcggcca

SEQ ID NO: 5794859 - DNA, 25 bp, Homo sapien
tttagacgcccgccgtggcggcggc

SEQ ID NO: 5794860 - DNA, 25 bp, Homo sapien
tccatggtgttctgagcagcattta

SEQ ID NO: 5794861 - DNA, 25 bp, Homo sapien
ctgggctgggcggggtcaggggtgg

SEQ ID NO: 5794862 - DNA, 25 bp, Homo sapien
gaactgtttggaatcagacacgtcc

SEQ ID NO: 5794863 - DNA, 25 bp, Homo sapien
cacaggggctcctcgttttcagcat

SEQ ID NO: 5794864 - DNA, 25 bp, Homo sapien
tcctcgcttgcgtttcagttgcaga

SEQ ID NO: 5794865 - DNA, 25 bp, Homo sapien
actatactcagatccatcaccttct

SEQ ID NO: 5794866 - DNA, 25 bp, Homo sapien
gacgctgtacagggggtccgggaag

SEQ ID NO: 5794867 - DNA, 25 bp, Homo sapien
agtgtactacaacaggttctcgtcg

SEQ ID NO: 5794868 - DNA, 25 bp, Homo sapien
cgacgagaacctgttgtagtacact

SEQ ID NO: 5794869 - DNA, 25 bp, Homo sapien
gcccatgccacctatgccacagtgc

SEQ ID NO: 5794870 - DNA, 25 bp, Homo sapien
ttcaatgccccctccctttctgaag

SEQ ID NO: 5794871 - DNA, 25 bp, Homo sapien
aggaagctcgcggaccagtacccgc

SEQ ID NO: 5794872 - DNA, 25 bp, Homo sapien
gtgggaccgccgccatccaggccca

SEQ ID NO: 5794873 - DNA, 25 bp, Homo sapien
gctcagccttcccctccatctcccg

SEQ ID NO: 5794874 - DNA, 25 bp, Homo sapien
ggggcccccacactacaccgaccag

SEQ ID NO: 5794875 - DNA, 25 bp, Homo sapien
ccccagtcccacagccccacacact

SEQ ID NO: 5794876 - DNA, 25 bp, Homo sapien
agccccgtgggctcggaggagcccc

SEQ ID NO: 5794877 - DNA, 25 bp, Homo sapien
ggccactcgggccaggcctctggcc

SEQ ID NO: 5794878 - DNA, 25 bp, Homo sapien
atggcggaggagcaggacctatcgg

SEQ ID NO: 5794879 - DNA, 25 bp, Homo sapien
cacctatgccacagtgcctaagggc

SEQ ID NO: 5794880 - DNA, 25 bp, Homo sapien
gctttctgtctggctcactgccctg

SEQ ID NO: 5794881 - DNA, 25 bp, Homo sapien
cgctgcctgtccccggggagcgcgc

SEQ ID NO: 5794882 - DNA, 25 bp, Homo sapien
acccaggccatgtgagcagctactc

SEQ ID NO: 5794883 - DNA, 25 bp, Homo sapien
gactctttgcgaggaccccggcggc

SEQ ID NO: 5794884 - DNA, 25 bp, Homo sapien
caagaaggagcagcaggacggcgag

SEQ ID NO: 5794885 - DNA, 25 bp, Homo sapien
ctgatgacccacccgccccatccag

SEQ ID NO: 5794886 - DNA, 25 bp, Homo sapien
cctatatggggccctcgcagcggcc

SEQ ID NO: 5794887 - DNA, 25 bp, Homo sapien
cgaccagccatccacctcacagatc

SEQ ID NO: 5794888 - DNA, 25 bp, Homo sapien
gtaatgtccaacatggagacctttg

SEQ ID NO: 5794889 - DNA, 25 bp, Homo sapien
cgtggacattggtgagatcagccac

SEQ ID NO: 5794890 - DNA, 25 bp, Homo sapien
gcagtcgggcaaggcagacccgaag

SEQ ID NO: 5794891 - DNA, 25 bp, Homo sapien
aggtcggggggctttctgtctggct

SEQ ID NO: 5794892 - DNA, 25 bp, Homo sapien
gccgcccaatgggcacccaggccat

SEQ ID NO: 5794893 - DNA, 25 bp, Homo sapien
ccacagtgcctaagggctaggccac

SEQ ID NO: 5794894 - DNA, 25 bp, Homo sapien
caggcctctggcctctactcggcct

SEQ ID NO: 5794895 - DNA, 25 bp, Homo sapien
tgttgcacccacactgaaagatgag

SEQ ID NO: 5794896 - DNA, 25 bp, Homo sapien
gggagggcgggaagcctcacatcga

SEQ ID NO: 5794897 - DNA, 25 bp, Homo sapien
aggcctggtggtggcagtggaggag

SEQ ID NO: 5794898 - DNA, 25 bp, Homo sapien
ccacccgccccatccaggctccagc

SEQ ID NO: 5794899 - DNA, 25 bp, Homo sapien
tccctttctgaaggcaggaaggagt

SEQ ID NO: 5794900 - DNA, 25 bp, Homo sapien
ccctcaggccagagccatggcccac

SEQ ID NO: 5794901 - DNA, 25 bp, Homo sapien
cagtatatacgacactgtcccggcc

SEQ ID NO: 5794902 - DNA, 25 bp, Homo sapien
aaccccgagcacccctcaggccaga

SEQ ID NO: 5794903 - DNA, 25 bp, Homo sapien
gggcgttggactctttgcgaggacc

SEQ ID NO: 5794904 - DNA, 25 bp, Homo sapien
ccagcccaggcggcggaagaacggg

SEQ ID NO: 5794905 - DNA, 25 bp, Homo sapien
gcgagctgggcaaggtcaagaagga

SEQ ID NO: 5794906 - DNA, 25 bp, Homo sapien
gagaagggcctgctcaccctcctcg

SEQ ID NO: 5794907 - DNA, 25 bp, Homo sapien
cctccctttctgaaggcaggaagga

SEQ ID NO: 5794908 - DNA, 25 bp, Homo sapien
aaagtgacaagcgccccttcatcga

SEQ ID NO: 5794909 - DNA, 25 bp, Homo sapien
gggctgggcagtgccctggccgtgg

SEQ ID NO: 5794910 - DNA, 25 bp, Homo sapien
ggccagagccatggcccacccaccc

SEQ ID NO: 5794911 - DNA, 25 bp, Homo sapien
cgcctacacctccctcagcctgccc

SEQ ID NO: 5794912 - DNA, 25 bp, Homo sapien
cccccgcccagcccctgcccccagc

SEQ ID NO: 5794913 - DNA, 25 bp, Homo sapien
tggatctccaagccaccaggcgtgg

SEQ ID NO: 5794914 - DNA, 25 bp, Homo sapien
ggaccctattatggccactcgggcc

SEQ ID NO: 5794915 - DNA, 25 bp, Homo sapien
cgctagggcccgacggcggcggcgg

SEQ ID NO: 5794916 - DNA, 25 bp, Homo sapien
ggcgtggctctgcccacggtctcac

SEQ ID NO: 5794917 - DNA, 25 bp, Homo sapien
ggacctgagaagggcctgctcaccc

SEQ ID NO: 5794918 - DNA, 25 bp, Homo sapien
gggaagcctcacatcgacttcggca

SEQ ID NO: 5794919 - DNA, 25 bp, Homo sapien
tggccagtggacactccgcctggat

SEQ ID NO: 5794920 - DNA, 25 bp, Homo sapien
tgagctcagcaagacgctgggcaag

SEQ ID NO: 5794921 - DNA, 25 bp, Homo sapien
tcacagatagtgagggtctgacatg

SEQ ID NO: 5794922 - DNA, 25 bp, Homo sapien
agcagcaaagccccaggagaacagg

SEQ ID NO: 5794923 - DNA, 25 bp, Homo sapien
atcagccacgaggtaatgtccaaca

SEQ ID NO: 5794924 - DNA, 25 bp, Homo sapien
gcagcggcccctctacacggccatc

SEQ ID NO: 5794925 - DNA, 25 bp, Homo sapien
cccgctgcctgtccccggggagcgc

SEQ ID NO: 5794926 - DNA, 25 bp, Homo sapien
tgcgagccagcccggggccaggcga

SEQ ID NO: 5794927 - DNA, 25 bp, Homo sapien
ccctctacacggccatctctgaccc

SEQ ID NO: 5794928 - DNA, 25 bp, Homo sapien
aaggagcagcaggacggcgaggcgg

SEQ ID NO: 5794929 - DNA, 25 bp, Homo sapien
ctgctgaacgaaagtgacaagcgcc

SEQ ID NO: 5794930 - DNA, 25 bp, Homo sapien
gcaacgtggacattggtgagatcag

SEQ ID NO: 5794931 - DNA, 25 bp, Homo sapien
gacttagtggagttctcatcccttc

SEQ ID NO: 5794932 - DNA, 25 bp, Homo sapien
ggagttctcatcccttcaatgcccc

SEQ ID NO: 5794933 - DNA, 25 bp, Homo sapien
ggatcgggcctgcgagccagcccgg

SEQ ID NO: 5794934 - DNA, 25 bp, Homo sapien
cagctactcagcagccggctatggg

SEQ ID NO: 5794935 - DNA, 25 bp, Homo sapien
tggcatcggaggccttaccactcct

SEQ ID NO: 5794936 - DNA, 25 bp, Homo sapien
gacgctgggcaagctctggaggctg

SEQ ID NO: 5794937 - DNA, 25 bp, Homo sapien
cagccagtatatacgacactgtccc

SEQ ID NO: 5794938 - DNA, 25 bp, Homo sapien
cggcaacgtggacattggtgagatc

SEQ ID NO: 5794939 - DNA, 25 bp, Homo sapien
agcaaaagcaagccgcacgtcaagc

SEQ ID NO: 5794940 - DNA, 25 bp, Homo sapien
ggtgtggatgccaaagcccaggtga

SEQ ID NO: 5794941 - DNA, 25 bp, Homo sapien
atgccacctatgccacagtgcctaa

SEQ ID NO: 5794942 - DNA, 25 bp, Homo sapien
tggctcagccttcccctccatctcc

SEQ ID NO: 5794943 - DNA, 25 bp, Homo sapien
gtgcccatgcccgtgcgcgtcaacg

SEQ ID NO: 5794944 - DNA, 25 bp, Homo sapien
tggacagaggagaaggaggttgact

SEQ ID NO: 5794945 - DNA, 25 bp, Homo sapien
agctcagcaagacgctgggcaagct

SEQ ID NO: 5794946 - DNA, 25 bp, Homo sapien
atggtgtgggctcaggcagcgcgca

SEQ ID NO: 5794947 - DNA, 25 bp, Homo sapien
ctgcctgtccccggggagcgcgccc

SEQ ID NO: 5794948 - DNA, 25 bp, Homo sapien
tcgggccaggcctctggcctctact

SEQ ID NO: 5794949 - DNA, 25 bp, Homo sapien
ttggaccagtacctgccgcccaatg

SEQ ID NO: 5794950 - DNA, 25 bp, Homo sapien
agcccctcagggccccagtcccaca

SEQ ID NO: 5794951 - DNA, 25 bp, Homo sapien
agacagagctgcagtcgggcaaggc

SEQ ID NO: 5794952 - DNA, 25 bp, Homo sapien
aggtgggaccgccgccatccaggcc

SEQ ID NO: 5794953 - DNA, 25 bp, Homo sapien
cactcctatgactcctgttttctct

SEQ ID NO: 5794954 - DNA, 25 bp, Homo sapien
gctgggcaaggtcaagaaggagcag

SEQ ID NO: 5794955 - DNA, 25 bp, Homo sapien
gcgcaggaagctcgcggaccagtac

SEQ ID NO: 5794956 - DNA, 25 bp, Homo sapien
ccgtgcgcgtcaacggcgccagcaa

SEQ ID NO: 5794957 - DNA, 25 bp, Homo sapien
ctctacacggccatctctgacccca

SEQ ID NO: 5794958 - DNA, 25 bp, Homo sapien
tttctgtctggctcactgccctgat

SEQ ID NO: 5794959 - DNA, 25 bp, Homo sapien
tggctgagttggaccagtacctgcc

SEQ ID NO: 5794960 - DNA, 25 bp, Homo sapien
acccaggagagggctcccccatgtc

SEQ ID NO: 5794961 - DNA, 25 bp, Homo sapien
cgacatggcggaggagcaggaccta

SEQ ID NO: 5794962 - DNA, 25 bp, Homo sapien
cccaggggcccccacactacaccga

SEQ ID NO: 5794963 - DNA, 25 bp, Homo sapien
ctatcggaggtggagctgagccccg

SEQ ID NO: 5794964 - DNA, 25 bp, Homo sapien
ccacagccccacacactgggagcag

SEQ ID NO: 5794965 - DNA, 25 bp, Homo sapien
acactccgcctggatctccaagcca

SEQ ID NO: 5794966 - DNA, 25 bp, Homo sapien
ggcggaggagcaggacctatcggag

SEQ ID NO: 5794967 - DNA, 25 bp, Homo sapien
cattggtgagatcagccacgaggta

SEQ ID NO: 5794968 - DNA, 25 bp, Homo sapien
cgccctcgctagggcccgacggcgg

SEQ ID NO: 5794969 - DNA, 25 bp, Homo sapien
caagagcgcccacttggaccaccgg

SEQ ID NO: 5794970 - DNA, 25 bp, Homo sapien
atatacgacactgtcccggccctaa

SEQ ID NO: 5794971 - DNA, 25 bp, Homo sapien
actgttgcacccacactgaaagatg

SEQ ID NO: 5794972 - DNA, 25 bp, Homo sapien
atgacaagttccccgtgtgcatccg

SEQ ID NO: 5794973 - DNA, 25 bp, Homo sapien
ccagagccatggcccacccacccct

SEQ ID NO: 5794974 - DNA, 25 bp, Homo sapien
cctcgcagcggcccctctacacggc

SEQ ID NO: 5794975 - DNA, 25 bp, Homo sapien
tctctcacagatagtgagggtctga

SEQ ID NO: 5794976 - DNA, 25 bp, Homo sapien
gagcggctccgtatgcagcacaaga

SEQ ID NO: 5794977 - DNA, 25 bp, Homo sapien
agtcccacagccccacacactggga

SEQ ID NO: 5794978 - DNA, 25 bp, Homo sapien
ccagcccctcagggccccagtccca

SEQ ID NO: 5794979 - DNA, 25 bp, Homo sapien
ctcccgcccccagtttgactactct

SEQ ID NO: 5794980 - DNA, 25 bp, Homo sapien
ttgcgaggaccccggcggctggccc

SEQ ID NO: 5794981 - DNA, 25 bp, Homo sapien
tccaaccaccccgaagacagagctg

SEQ ID NO: 5794982 - DNA, 25 bp, Homo sapien
ggcggcggatcgggcctgcgagcca

SEQ ID NO: 5794983 - DNA, 25 bp, Homo sapien
gggctgagagtagctttgaggagcc

SEQ ID NO: 5794984 - DNA, 25 bp, Homo sapien
actcctgttttctctctcacagata

SEQ ID NO: 5794985 - DNA, 25 bp, Homo sapien
aggtcaagaaggagcagcaggacgg

SEQ ID NO: 5794986 - DNA, 25 bp, Homo sapien
atctcccgcccccagtttgactact

SEQ ID NO: 5794987 - DNA, 25 bp, Homo sapien
agatcagccacgaggtaatgtccaa

SEQ ID NO: 5794988 - DNA, 25 bp, Homo sapien
ccctctatcccaggacctgagaagg

SEQ ID NO: 5794989 - DNA, 25 bp, Homo sapien
acctgagaagggcctgctcaccctc

SEQ ID NO: 5794990 - DNA, 25 bp, Homo sapien
agtagctttgaggagcctcattggg

SEQ ID NO: 5794991 - DNA, 25 bp, Homo sapien
ggcagcgcgcaggaagctcgcggac

SEQ ID NO: 5794992 - DNA, 25 bp, Homo sapien
cttcccccaggaatgaccctctatc

SEQ ID NO: 5794993 - DNA, 25 bp, Homo sapien
gccctcgcagcggcccctctacacg

SEQ ID NO: 5794994 - DNA, 25 bp, Homo sapien
gctgagctcagcaagacgctgggca

SEQ ID NO: 5794995 - DNA, 25 bp, Homo sapien
ggagttggcacagaggccccctgaa

SEQ ID NO: 5794996 - DNA, 25 bp, Homo sapien
cggcacccaggagagggctccccca

SEQ ID NO: 5794997 - DNA, 25 bp, Homo sapien
caacgctgagctcagcaagacgctg

SEQ ID NO: 5794998 - DNA, 25 bp, Homo sapien
ccagtcccacagccccacacactgg

SEQ ID NO: 5794999 - DNA, 25 bp, Homo sapien
tctggaggctgctgaacgaaagtga

SEQ ID NO: 5795000 - DNA, 25 bp, Homo sapien
caggaaggagttggcacagaggccc

SEQ ID NO: 5795001 - DNA, 25 bp, Homo sapien
ccgtgggctcggaggagccccgctg

SEQ ID NO: 5795002 - DNA, 25 bp, Homo sapien
ggggagcgcgccctcgctagggccc

SEQ ID NO: 5795003 - DNA, 25 bp, Homo sapien
ctacacggccatctctgaccccagc

SEQ ID NO: 5795004 - DNA, 25 bp, Homo sapien
gcgtcaacggcgccagcaaaagcaa

SEQ ID NO: 5795005 - DNA, 25 bp, Homo sapien
agccatggcccacccacccctccaa

SEQ ID NO: 5795006 - DNA, 25 bp, Homo sapien
gtcagccaggtgctcagcggctacg

SEQ ID NO: 5795007 - DNA, 25 bp, Homo sapien
gaagaacgggaaggccgcccagggc

SEQ ID NO: 5795008 - DNA, 25 bp, Homo sapien
gggggagggcgggaagcctcacatc

SEQ ID NO: 5795009 - DNA, 25 bp, Homo sapien
atcgaggaggctgagcggctccgta

SEQ ID NO: 5795010 - DNA, 25 bp, Homo sapien
tgccctgatgacccacccgccccat

SEQ ID NO: 5795011 - DNA, 25 bp, Homo sapien
tccaagccaccaggcgtggctctgc

SEQ ID NO: 5795012 - DNA, 25 bp, Homo sapien
aggccgagcaaggtgggaccgccgc

SEQ ID NO: 5795013 - DNA, 25 bp, Homo sapien
ggctacgactggacgctggtgccca

SEQ ID NO: 5795014 - DNA, 25 bp, Homo sapien
caggacctatcggaggtggagctga

SEQ ID NO: 5795015 - DNA, 25 bp, Homo sapien
aacgtggacattggtgagatcagcc

SEQ ID NO: 5795016 - DNA, 25 bp, Homo sapien
tctgacatgcccatgccacctatgc

SEQ ID NO: 5795017 - DNA, 25 bp, Homo sapien
caatgccccctccctttctgaaggc

SEQ ID NO: 5795018 - DNA, 25 bp, Homo sapien
tcactgccctgatgacccacccgcc

SEQ ID NO: 5795019 - DNA, 25 bp, Homo sapien
ccatctctgaccccagcccctcagg

SEQ ID NO: 5795020 - DNA, 25 bp, Homo sapien
gcgcgcaggaagctcgcggaccagt

SEQ ID NO: 5795021 - DNA, 25 bp, Homo sapien
aggctgaggaggctgaagaggctga

SEQ ID NO: 5795022 - DNA, 25 bp, Homo sapien
cgggcctgcgagccagcccggggcc

SEQ ID NO: 5795023 - DNA, 25 bp, Homo sapien
cacctccctcagcctgccccactat

SEQ ID NO: 5795024 - DNA, 25 bp, Homo sapien
acccggactacaagtaccagcccag

SEQ ID NO: 5795025 - DNA, 25 bp, Homo sapien
tccctcagcctgccccactatggct

SEQ ID NO: 5795026 - DNA, 25 bp, Homo sapien
ccccgagcacccctcaggccagagc

SEQ ID NO: 5795027 - DNA, 25 bp, Homo sapien
cggacgatgacaagttccccgtgtg

SEQ ID NO: 5795028 - DNA, 25 bp, Homo sapien
gcacccctcaggccagagccatggc

SEQ ID NO: 5795029 - DNA, 25 bp, Homo sapien
gggccccaggggcccccacactaca

SEQ ID NO: 5795030 - DNA, 25 bp, Homo sapien
tgccacagtgcctaagggctaggcc

SEQ ID NO: 5795031 - DNA, 25 bp, Homo sapien
ctggtggtggcagtggaggaggctg

SEQ ID NO: 5795032 - DNA, 25 bp, Homo sapien
ccttctcctatatggggccctcgca

SEQ ID NO: 5795033 - DNA, 25 bp, Homo sapien
acagccccacacactgggagcagcc

SEQ ID NO: 5795034 - DNA, 25 bp, Homo sapien
caggacctgagaagggcctgctcac

SEQ ID NO: 5795035 - DNA, 25 bp, Homo sapien
cccttcatcgaggaggctgagcggc

SEQ ID NO: 5795036 - DNA, 25 bp, Homo sapien
ggcctgctcaccctcctcggggagg

SEQ ID NO: 5795037 - DNA, 25 bp, Homo sapien
tcccttcaatgccccctccctttct

SEQ ID NO: 5795038 - DNA, 25 bp, Homo sapien
atgccccctccctttctgaaggcag

SEQ ID NO: 5795039 - DNA, 25 bp, Homo sapien
gaggggctgcaccttcccccaggaa

SEQ ID NO: 5795040 - DNA, 25 bp, Homo sapien
acacggccatctctgaccccagccc

SEQ ID NO: 5795041 - DNA, 25 bp, Homo sapien
aggcccactacaagagcgcccactt

SEQ ID NO: 5795042 - DNA, 25 bp, Homo sapien
agcccggggccaggcgagctgggca

SEQ ID NO: 5795043 - DNA, 25 bp, Homo sapien
aggaggctgagcggctccgtatgca

SEQ ID NO: 5795044 - DNA, 25 bp, Homo sapien
ccttcaatgccccctccctttctga

SEQ ID NO: 5795045 - DNA, 25 bp, Homo sapien
cagcaagacgctgggcaagctctgg

SEQ ID NO: 5795046 - DNA, 25 bp, Homo sapien
tggatgccaaagcccaggtgaagac

SEQ ID NO: 5795047 - DNA, 25 bp, Homo sapien
ctcaggccagagccatggcccaccc

SEQ ID NO: 5795048 - DNA, 25 bp, Homo sapien
tgcacaacgctgagctcagcaagac

SEQ ID NO: 5795049 - DNA, 25 bp, Homo sapien
tcctgttttctctctcacagatagt

SEQ ID NO: 5795050 - DNA, 25 bp, Homo sapien
gtgggcgttggactctttgcgagga

SEQ ID NO: 5795051 - DNA, 25 bp, Homo sapien
atcggaggtggagctgagccccgtg

SEQ ID NO: 5795052 - DNA, 25 bp, Homo sapien
atgtcagatgggaaccccgagcacc

SEQ ID NO: 5795053 - DNA, 25 bp, Homo sapien
agagcgcccacttggaccaccggca

SEQ ID NO: 5795054 - DNA, 25 bp, Homo sapien
acgggaaggccgcccagggcgaggc

SEQ ID NO: 5795055 - DNA, 25 bp, Homo sapien
accttcccccaggaatgaccctcta

SEQ ID NO: 5795056 - DNA, 25 bp, Homo sapien
gccccaggggcccccacactacacc

SEQ ID NO: 5795057 - DNA, 25 bp, Homo sapien
cacaagaaagaccacccggactaca

SEQ ID NO: 5795058 - DNA, 25 bp, Homo sapien
acatggcggaggagcaggacctatc

SEQ ID NO: 5795059 - DNA, 25 bp, Homo sapien
tcgcagcggcccctctacacggcca

SEQ ID NO: 5795060 - DNA, 25 bp, Homo sapien
ccggagctggccgtgtctcccactc

SEQ ID NO: 5795061 - DNA, 25 bp, Homo sapien
agagtagctttgaggagcctcattg

SEQ ID NO: 5795062 - DNA, 25 bp, Homo sapien
cagatgggaaccccgagcacccctc

SEQ ID NO: 5795063 - DNA, 25 bp, Homo sapien
ccggctatgggctgggcagtgccct

SEQ ID NO: 5795064 - DNA, 25 bp, Homo sapien
tctgcccacggtctcaccacctggt

SEQ ID NO: 5795065 - DNA, 25 bp, Homo sapien
caggccagagccatggcccacccac

SEQ ID NO: 5795066 - DNA, 25 bp, Homo sapien
gactggacgctggtgcccatgcccg

SEQ ID NO: 5795067 - DNA, 25 bp, Homo sapien
acagatcgcctacacctccctcagc

SEQ ID NO: 5795068 - DNA, 25 bp, Homo sapien
gctgaggaggctgaagaggctgaca

SEQ ID NO: 5795069 - DNA, 25 bp, Homo sapien
agaacgggaaggccgcccagggcga

SEQ ID NO: 5795070 - DNA, 25 bp, Homo sapien
caggggcccccacactacaccgacc

SEQ ID NO: 5795071 - DNA, 25 bp, Homo sapien
cgagcaaggtgggaccgccgccatc

SEQ ID NO: 5795072 - DNA, 25 bp, Homo sapien
accaggcgtggctctgcccacggtc

SEQ ID NO: 5795073 - DNA, 25 bp, Homo sapien
ttctcatcccttcaatgccccctcc

SEQ ID NO: 5795074 - DNA, 25 bp, Homo sapien
gggctcccccatgtcagatgggaac

SEQ ID NO: 5795075 - DNA, 25 bp, Homo sapien
ccagcaaaagcaagccgcacgtcaa

SEQ ID NO: 5795076 - DNA, 25 bp, Homo sapien
ctgcccccagcctgtgtgccctgtt

SEQ ID NO: 5795077 - DNA, 25 bp, Homo sapien
ggtggcatcggaggccttaccactc

SEQ ID NO: 5795078 - DNA, 25 bp, Homo sapien
accagtacctgccgcccaatgggca

SEQ ID NO: 5795079 - DNA, 25 bp, Homo sapien
ctctactcggccttctcctatatgg

SEQ ID NO: 5795080 - DNA, 25 bp, Homo sapien
cctgtgtgccctgttccttgcccac

SEQ ID NO: 5795081 - DNA, 25 bp, Homo sapien
ccgtgtctcccactcaggggctgag

SEQ ID NO: 5795082 - DNA, 25 bp, Homo sapien
atgaacgccttcatggtgtgggctc

SEQ ID NO: 5795083 - DNA, 25 bp, Homo sapien
tgacatgcccatgccacctatgcca

SEQ ID NO: 5795084 - DNA, 25 bp, Homo sapien
ctgccgcccaatgggcacccaggcc

SEQ ID NO: 5795085 - DNA, 25 bp, Homo sapien
ccaggaatgaccctctatcccagga

SEQ ID NO: 5795086 - DNA, 25 bp, Homo sapien
gacccgaagcgggacgggcgctcca

SEQ ID NO: 5795087 - DNA, 25 bp, Homo sapien
cccgcccagcccctgcccccagcct

SEQ ID NO: 5795088 - DNA, 25 bp, Homo sapien
gccccgctgcctgtccccggggagc

SEQ ID NO: 5795089 - DNA, 25 bp, Homo sapien
gctgaacgaaagtgacaagcgcccc

SEQ ID NO: 5795090 - DNA, 25 bp, Homo sapien
caagaaagaccacccggactacaag

SEQ ID NO: 5795091 - DNA, 25 bp, Homo sapien
gatgacccacccgccccatccaggc

SEQ ID NO: 5795092 - DNA, 25 bp, Homo sapien
ggccccagtcccacagccccacaca

SEQ ID NO: 5795093 - DNA, 25 bp, Homo sapien
ccccaggaatgaccctctatcccag

SEQ ID NO: 5795094 - DNA, 25 bp, Homo sapien
gactgtgcccggagctggccgtgtc

SEQ ID NO: 5795095 - DNA, 25 bp, Homo sapien
tctggctcactgccctgatgaccca

SEQ ID NO: 5795096 - DNA, 25 bp, Homo sapien
cgcgccctcgctagggcccgacggc

SEQ ID NO: 5795097 - DNA, 25 bp, Homo sapien
ccctcgctagggcccgacggcggcg

SEQ ID NO: 5795098 - DNA, 25 bp, Homo sapien
cggaggtggagctgagccccgtggg

SEQ ID NO: 5795099 - DNA, 25 bp, Homo sapien
tattatggccactcgggccaggcct

SEQ ID NO: 5795100 - DNA, 25 bp, Homo sapien
agtcgggcaaggcagacccgaagcg

SEQ ID NO: 5795101 - DNA, 25 bp, Homo sapien
tgcccacctcaggcctggtggtggc

SEQ ID NO: 5795102 - DNA, 25 bp, Homo sapien
tggctcactgccctgatgacccacc

SEQ ID NO: 5795103 - DNA, 25 bp, Homo sapien
gtcaacggcgccagcaaaagcaagc

SEQ ID NO: 5795104 - DNA, 25 bp, Homo sapien
cccagtttgactactctgaccatca

SEQ ID NO: 5795105 - DNA, 25 bp, Homo sapien
acactgaaagatgaggggctgcacc

SEQ ID NO: 5795106 - DNA, 25 bp, Homo sapien
ccttcccctccatctcccgccccca

SEQ ID NO: 5795107 - DNA, 25 bp, Homo sapien
agccaccaggcgtggctctgcccac

SEQ ID NO: 5795108 - DNA, 25 bp, Homo sapien
tctggcctctactcggccttctcct

SEQ ID NO: 5795109 - DNA, 25 bp, Homo sapien
cgtggccagtggacactccgcctgg

SEQ ID NO: 5795110 - DNA, 25 bp, Homo sapien
ggcctgcgagccagcccggggccag

SEQ ID NO: 5795111 - DNA, 25 bp, Homo sapien
ggccctaaagggggccctgtcgcca

SEQ ID NO: 5795112 - DNA, 25 bp, Homo sapien
tagctttgaggagcctcattgggga

SEQ ID NO: 5795113 - DNA, 25 bp, Homo sapien
cctattatggccactcgggccaggc

SEQ ID NO: 5795114 - DNA, 25 bp, Homo sapien
cagcagccggctatgggctgggcag

SEQ ID NO: 5795115 - DNA, 25 bp, Homo sapien
acggcgccagcaaaagcaagccgca

SEQ ID NO: 5795116 - DNA, 25 bp, Homo sapien
agctgcagtcgggcaaggcagaccc

SEQ ID NO: 5795117 - DNA, 25 bp, Homo sapien
aggctgacaggtcggggggctttct

SEQ ID NO: 5795118 - DNA, 25 bp, Homo sapien
acccacactgaaagatgaggggctg

SEQ ID NO: 5795119 - DNA, 25 bp, Homo sapien
ccagcagcaaagccccaggagaaca

SEQ ID NO: 5795120 - DNA, 25 bp, Homo sapien
tccgcctggatctccaagccaccag

SEQ ID NO: 5795121 - DNA, 25 bp, Homo sapien
gcaggacggcgaggcggacgatgac

SEQ ID NO: 5795122 - DNA, 25 bp, Homo sapien
ccagcctgtgtgccctgttccttgc

SEQ ID NO: 5795123 - DNA, 25 bp, Homo sapien
gtcaagcggcccatgaacgccttca

SEQ ID NO: 5795124 - DNA, 25 bp, Homo sapien
gcagtggaggaggctgaggaggctg

SEQ ID NO: 5795125 - DNA, 25 bp, Homo sapien
tcggaggagccccgctgcctgtccc

SEQ ID NO: 5795126 - DNA, 25 bp, Homo sapien
cccagcccctgcccccagcctgtgt

SEQ ID NO: 5795127 - DNA, 25 bp, Homo sapien
gcaccttcccccaggaatgaccctc

SEQ ID NO: 5795128 - DNA, 25 bp, Homo sapien
gaggccgtcagccaggtgctcagcg

SEQ ID NO: 5795129 - DNA, 25 bp, Homo sapien
tcagccctcaggaccctattatggc

SEQ ID NO: 5795130 - DNA, 25 bp, Homo sapien
tggcagtggaggaggctgaggaggc

SEQ ID NO: 5795131 - DNA, 25 bp, Homo sapien
actatggctcagccttcccctccat

SEQ ID NO: 5795132 - DNA, 25 bp, Homo sapien
atgaccctctatcccaggacctgag

SEQ ID NO: 5795133 - DNA, 25 bp, Homo sapien
ggccaggcgagctgggcaaggtcaa

SEQ ID NO: 5795134 - DNA, 25 bp, Homo sapien
gacaagttccccgtgtgcatccgcg

SEQ ID NO: 5795135 - DNA, 25 bp, Homo sapien
cctacacctccctcagcctgcccca

SEQ ID NO: 5795136 - DNA, 25 bp, Homo sapien
gcccatgcccgtgcgcgtcaacggc

SEQ ID NO: 5795137 - DNA, 25 bp, Homo sapien
agatgaggggctgcaccttccccca

SEQ ID NO: 5795138 - DNA, 25 bp, Homo sapien
ggctcaggcagcgcgcaggaagctc

SEQ ID NO: 5795139 - DNA, 25 bp, Homo sapien
tgagatcagccacgaggtaatgtcc

SEQ ID NO: 5795140 - DNA, 25 bp, Homo sapien
gcaggaagctcgcggaccagtaccc

SEQ ID NO: 5795141 - DNA, 25 bp, Homo sapien
ttccccgtgtgcatccgcgaggccg

SEQ ID NO: 5795142 - DNA, 25 bp, Homo sapien
tccttgcccacctcaggcctggtgg

SEQ ID NO: 5795143 - DNA, 25 bp, Homo sapien
agggcctgctcaccctcctcgggga

SEQ ID NO: 5795144 - DNA, 25 bp, Homo sapien
tgcccacggtctcaccacctggtgt

SEQ ID NO: 5795145 - DNA, 25 bp, Homo sapien
ggctatgggctgggcagtgccctgg

SEQ ID NO: 5795146 - DNA, 25 bp, Homo sapien
gcggctacgactggacgctggtgcc

SEQ ID NO: 5795147 - DNA, 25 bp, Homo sapien
gctcggaggagccccgctgcctgtc

SEQ ID NO: 5795148 - DNA, 25 bp, Homo sapien
agacctttgatgtggctgagttgga

SEQ ID NO: 5795149 - DNA, 25 bp, Homo sapien
catccaggctccagcagcaaagccc

SEQ ID NO: 5795150 - DNA, 25 bp, Homo sapien
agttggaccagtacctgccgcccaa

SEQ ID NO: 5795151 - DNA, 25 bp, Homo sapien
agaaggaggttgactgttgcaccca

SEQ ID NO: 5795152 - DNA, 25 bp, Homo sapien
acctatcggaggtggagctgagccc

SEQ ID NO: 5795153 - DNA, 25 bp, Homo sapien
cttagtggagttctcatcccttcaa

SEQ ID NO: 5795154 - DNA, 25 bp, Homo sapien
gctctgcccacggtctcaccacctg

SEQ ID NO: 5795155 - DNA, 25 bp, Homo sapien
tgccccactatggctcagccttccc

SEQ ID NO: 5795156 - DNA, 25 bp, Homo sapien
aggtaatgtccaacatggagacctt

SEQ ID NO: 5795157 - DNA, 25 bp, Homo sapien
ctacaccgaccagccatccacctca

SEQ ID NO: 5795158 - DNA, 25 bp, Homo sapien
gagcacccctcaggccagagccatg

SEQ ID NO: 5795159 - DNA, 25 bp, Homo sapien
ctactctgaccatcagccctcagga

SEQ ID NO: 5795160 - DNA, 25 bp, Homo sapien
gaaggccgcccagggcgaggcggag

SEQ ID NO: 5795161 - DNA, 25 bp, Homo sapien
ggttggtggcatcggaggccttacc

SEQ ID NO: 5795162 - DNA, 25 bp, Homo sapien
cacgaggtaatgtccaacatggaga

SEQ ID NO: 5795163 - DNA, 25 bp, Homo sapien
tgaaagatgaggggctgcaccttcc

SEQ ID NO: 5795164 - DNA, 25 bp, Homo sapien
aggtgggcgttggactctttgcgag

SEQ ID NO: 5795165 - DNA, 25 bp, Homo sapien
ccaggcccactacaagagcgcccac

SEQ ID NO: 5795166 - DNA, 25 bp, Homo sapien
tgtgtgccctgttccttgcccacct

SEQ ID NO: 5795167 - DNA, 25 bp, Homo sapien
ctggtgtggatgccaaagcccaggt

SEQ ID NO: 5795168 - DNA, 25 bp, Homo sapien
ccacccggactacaagtaccagccc

SEQ ID NO: 5795169 - DNA, 25 bp, Homo sapien
tgtcgccaccaccccccgcccagcc

SEQ ID NO: 5795170 - DNA, 25 bp, Homo sapien
gggaccgccgccatccaggcccact

SEQ ID NO: 5795171 - DNA, 25 bp, Homo sapien
ggccttaccactcctatgactcctg

SEQ ID NO: 5795172 - DNA, 25 bp, Homo sapien
gagggctcccccatgtcagatggga

SEQ ID NO: 5795173 - DNA, 25 bp, Homo sapien
gccagtggacactccgcctggatct

SEQ ID NO: 5795174 - DNA, 25 bp, Homo sapien
cctcacatcgacttcggcaacgtgg

SEQ ID NO: 5795175 - DNA, 25 bp, Homo sapien
actgggagcagccagtatatacgac

SEQ ID NO: 5795176 - DNA, 25 bp, Homo sapien
ggtctgacatgcccatgccacctat

SEQ ID NO: 5795177 - DNA, 25 bp, Homo sapien
cagcaggacggcgaggcggacgatg

SEQ ID NO: 5795178 - DNA, 25 bp, Homo sapien
tggcctctactcggccttctcctat

SEQ ID NO: 5795179 - DNA, 25 bp, Homo sapien
acactgggagcagccagtatatacg

SEQ ID NO: 5795180 - DNA, 25 bp, Homo sapien
tgggcagtgccctggccgtggccag

SEQ ID NO: 5795181 - DNA, 25 bp, Homo sapien
gggccctcgcagcggcccctctaca

SEQ ID NO: 5795182 - DNA, 25 bp, Homo sapien
gttcgagggacttagtggagttctc

SEQ ID NO: 5795183 - DNA, 25 bp, Homo sapien
ggcaaggtcaagaaggagcagcagg

SEQ ID NO: 5795184 - DNA, 25 bp, Homo sapien
tgggagcagccagtatatacgacac

SEQ ID NO: 5795185 - DNA, 25 bp, Homo sapien
cgaaagtgacaagcgccccttcatc

SEQ ID NO: 5795186 - DNA, 25 bp, Homo sapien
tatgccacagtgcctaagggctagg

SEQ ID NO: 5795187 - DNA, 25 bp, Homo sapien
ctgcaccttcccccaggaatgaccc

SEQ ID NO: 5795188 - DNA, 25 bp, Homo sapien
ctcatcccttcaatgccccctccct

SEQ ID NO: 5795189 - DNA, 25 bp, Homo sapien
caagttccccgtgtgcatccgcgag

SEQ ID NO: 5795190 - DNA, 25 bp, Homo sapien
gcggctccgtatgcagcacaagaaa

SEQ ID NO: 5795191 - DNA, 25 bp, Homo sapien
gacagaggagaaggaggttgactgt

SEQ ID NO: 5795192 - DNA, 25 bp, Homo sapien
caggtgctcagcggctacgactgga

SEQ ID NO: 5795193 - DNA, 25 bp, Homo sapien
atgcccatgccacctatgccacagt

SEQ ID NO: 5795194 - DNA, 25 bp, Homo sapien
ccgaagacagagctgcagtcgggca

SEQ ID NO: 5795195 - DNA, 25 bp, Homo sapien
cggcggatcgggcctgcgagccagc

SEQ ID NO: 5795196 - DNA, 25 bp, Homo sapien
gctggacagaggagaaggaggttga

SEQ ID NO: 5795197 - DNA, 25 bp, Homo sapien
gccagtatatacgacactgtcccgg

SEQ ID NO: 5795198 - DNA, 25 bp, Homo sapien
aatgtccaacatggagacctttgat

SEQ ID NO: 5795199 - DNA, 25 bp, Homo sapien
ctcagcaagacgctgggcaagctct

SEQ ID NO: 5795200 - DNA, 25 bp, Homo sapien
ggacctatcggaggtggagctgagc

SEQ ID NO: 5795201 - DNA, 25 bp, Homo sapien
gcatccgcgaggccgtcagccaggt

SEQ ID NO: 5795202 - DNA, 25 bp, Homo sapien
agccggctatgggctgggcagtgcc

SEQ ID NO: 5795203 - DNA, 25 bp, Homo sapien
ctaggccacccagagactgtgcccg

SEQ ID NO: 5795204 - DNA, 25 bp, Homo sapien
agtgccccggtggggaggccgagca

SEQ ID NO: 5795205 - DNA, 25 bp, Homo sapien
caaccaccccgaagacagagctgca

SEQ ID NO: 5795206 - DNA, 25 bp, Homo sapien
ctctttgcgaggaccccggcggctg

SEQ ID NO: 5795207 - DNA, 25 bp, Homo sapien
ggggccaggcgagctgggcaaggtc

SEQ ID NO: 5795208 - DNA, 25 bp, Homo sapien
agcggcccctctacacggccatctc

SEQ ID NO: 5795209 - DNA, 25 bp, Homo sapien
ggggctgcaccttcccccaggaatg

SEQ ID NO: 5795210 - DNA, 25 bp, Homo sapien
cgcccaatgggcacccaggccatgt

SEQ ID NO: 5795211 - DNA, 25 bp, Homo sapien
caccagggttggtggcatcggaggc

SEQ ID NO: 5795212 - DNA, 25 bp, Homo sapien
acgccttcatggtgtgggctcaggc

SEQ ID NO: 5795213 - DNA, 25 bp, Homo sapien
aggaggctgaagaggctgacaggtc

SEQ ID NO: 5795214 - DNA, 25 bp, Homo sapien
gaagctcgcggaccagtacccgcac

SEQ ID NO: 5795215 - DNA, 25 bp, Homo sapien
gggctttctgtctggctcactgccc

SEQ ID NO: 5795216 - DNA, 25 bp, Homo sapien
gcatcggaggccttaccactcctat

SEQ ID NO: 5795217 - DNA, 25 bp, Homo sapien
cccgcacctgcacaacgctgagctc

SEQ ID NO: 5795218 - DNA, 25 bp, Homo sapien
ttctcctatatggggccctcgcagc

SEQ ID NO: 5795219 - DNA, 25 bp, Homo sapien
gcacccacactgaaagatgaggggc

SEQ ID NO: 5795220 - DNA, 25 bp, Homo sapien
ggaaggagttggcacagaggccccc

SEQ ID NO: 5795221 - DNA, 25 bp, Homo sapien
gcacgtcaagcggcccatgaacgcc

SEQ ID NO: 5795222 - DNA, 25 bp, Homo sapien
ctgagaagggcctgctcaccctcct

SEQ ID NO: 5795223 - DNA, 25 bp, Homo sapien
ctgtccccggggagcgcgccctcgc

SEQ ID NO: 5795224 - DNA, 25 bp, Homo sapien
gggccctgtcgccaccaccccccgc

SEQ ID NO: 5795225 - DNA, 25 bp, Homo sapien
ccatgccacctatgccacagtgcct

SEQ ID NO: 5795226 - DNA, 25 bp, Homo sapien
tcagcctgccccactatggctcagc

SEQ ID NO: 5795227 - DNA, 25 bp, Homo sapien
tgggcaaggtcaagaaggagcagca

SEQ ID NO: 5795228 - DNA, 25 bp, Homo sapien
gaggccttaccactcctatgactcc

SEQ ID NO: 5795229 - DNA, 25 bp, Homo sapien
caatgggcacccaggccatgtgagc

SEQ ID NO: 5795230 - DNA, 25 bp, Homo sapien
gagaacaggctggacagaggagaag

SEQ ID NO: 5795231 - DNA, 25 bp, Homo sapien
cgacttcggcaacgtggacattggt

SEQ ID NO: 5795232 - DNA, 25 bp, Homo sapien
agcctgtgtgccctgttccttgccc

SEQ ID NO: 5795233 - DNA, 25 bp, Homo sapien
caccacctggtgtggatgccaaagc

SEQ ID NO: 5795234 - DNA, 25 bp, Homo sapien
cccagggcgaggcggagtgccccgg

SEQ ID NO: 5795235 - DNA, 25 bp, Homo sapien
ctcaggaccctattatggccactcg

SEQ ID NO: 5795236 - DNA, 25 bp, Homo sapien
cccgcccccagtttgactactctga

SEQ ID NO: 5795237 - DNA, 25 bp, Homo sapien
ccagtacccgcacctgcacaacgct

SEQ ID NO: 5795238 - DNA, 25 bp, Homo sapien
gggttcgagggacttagtggagttc

SEQ ID NO: 5795239 - DNA, 25 bp, Homo sapien
ggctccgtatgcagcacaagaaaga

SEQ ID NO: 5795240 - DNA, 25 bp, Homo sapien
agggccccagtcccacagccccaca

SEQ ID NO: 5795241 - DNA, 25 bp, Homo sapien
ctgtgcccggagctggccgtgtctc

SEQ ID NO: 5795242 - DNA, 25 bp, Homo sapien
ctctatcccaggacctgagaagggc

SEQ ID NO: 5795243 - DNA, 25 bp, Homo sapien
ctcctatatggggccctcgcagcgg

SEQ ID NO: 5795244 - DNA, 25 bp, Homo sapien
agtggaggaggctgaggaggctgaa

SEQ ID NO: 5795245 - DNA, 25 bp, Homo sapien
ggtgagatcagccacgaggtaatgt

SEQ ID NO: 5795246 - DNA, 25 bp, Homo sapien
agcaagccgcacgtcaagcggccca

SEQ ID NO: 5795247 - DNA, 25 bp, Homo sapien
gaacgccttcatggtgtgggctcag

SEQ ID NO: 5795248 - DNA, 25 bp, Homo sapien
ctggccgtgtctcccactcaggggc

SEQ ID NO: 5795249 - DNA, 25 bp, Homo sapien
ccgtatgcagcacaagaaagaccac

SEQ ID NO: 5795250 - DNA, 25 bp, Homo sapien
agcagcaggacggcgaggcggacga

SEQ ID NO: 5795251 - DNA, 25 bp, Homo sapien
acaagcgccccttcatcgaggaggc

SEQ ID NO: 5795252 - DNA, 25 bp, Homo sapien
gttccttgcccacctcaggcctggt

SEQ ID NO: 5795253 - DNA, 25 bp, Homo sapien
ccaggagagggctcccccatgtcag

SEQ ID NO: 5795254 - DNA, 25 bp, Homo sapien
ccatggcccacccacccctccaacc

SEQ ID NO: 5795255 - DNA, 25 bp, Homo sapien
ccagggttggtggcatcggaggcct

SEQ ID NO: 5795256 - DNA, 25 bp, Homo sapien
aagcgccccttcatcgaggaggctg

SEQ ID NO: 5795257 - DNA, 25 bp, Homo sapien
cgaggaggctgagcggctccgtatg

SEQ ID NO: 5795258 - DNA, 25 bp, Homo sapien
tccacctcacagatcgcctacacct

SEQ ID NO: 5795259 - DNA, 25 bp, Homo sapien
aaagatgaggggctgcaccttcccc

SEQ ID NO: 5795260 - DNA, 25 bp, Homo sapien
ggcgacatggcggaggagcaggacc

SEQ ID NO: 5795261 - DNA, 25 bp, Homo sapien
caggctccagcagcaaagccccagg

SEQ ID NO: 5795262 - DNA, 25 bp, Homo sapien
gccccttcatcgaggaggctgagcg

SEQ ID NO: 5795263 - DNA, 25 bp, Homo sapien
tcagccttcccctccatctcccgcc

SEQ ID NO: 5795264 - DNA, 25 bp, Homo sapien
gcccgtgcgcgtcaacggcgccagc

SEQ ID NO: 5795265 - DNA, 25 bp, Homo sapien
accctattatggccactcgggccag

SEQ ID NO: 5795266 - DNA, 25 bp, Homo sapien
gttttctctctcacagatagtgagg

SEQ ID NO: 5795267 - DNA, 25 bp, Homo sapien
tgagccccgtgggctcggaggagcc

SEQ ID NO: 5795268 - DNA, 25 bp, Homo sapien
cccacactacaccgaccagccatcc

SEQ ID NO: 5795269 - DNA, 25 bp, Homo sapien
cgcctggatctccaagccaccaggc

SEQ ID NO: 5795270 - DNA, 25 bp, Homo sapien
caagcggcccatgaacgccttcatg

SEQ ID NO: 5795271 - DNA, 25 bp, Homo sapien
gggaaggccgcccagggcgaggcgg

SEQ ID NO: 5795272 - DNA, 25 bp, Homo sapien
ccatctcccgcccccagtttgacta

SEQ ID NO: 5795273 - DNA, 25 bp, Homo sapien
tggccgtggccagtggacactccgc

SEQ ID NO: 5795274 - DNA, 25 bp, Homo sapien
cctcagcctgccccactatggctca

SEQ ID NO: 5795275 - DNA, 25 bp, Homo sapien
atcggaggccttaccactcctatga

SEQ ID NO: 5795276 - DNA, 25 bp, Homo sapien
cctcacagatcgcctacacctccct

SEQ ID NO: 5795277 - DNA, 25 bp, Homo sapien
ggaggtgggcgttggactctttgcg

SEQ ID NO: 5795278 - DNA, 25 bp, Homo sapien
agacagagaccgcggggccccaggg

SEQ ID NO: 5795279 - DNA, 25 bp, Homo sapien
agcgcgccctcgctagggcccgacg

SEQ ID NO: 5795280 - DNA, 25 bp, Homo sapien
tcaggggctgagagtagctttgagg

SEQ ID NO: 5795281 - DNA, 25 bp, Homo sapien
ccactcgggccaggcctctggcctc

SEQ ID NO: 5795282 - DNA, 25 bp, Homo sapien
ctatcccaggacctgagaagggcct

SEQ ID NO: 5795283 - DNA, 25 bp, Homo sapien
tcatggtgtgggctcaggcagcgcg

SEQ ID NO: 5795284 - DNA, 25 bp, Homo sapien
ccctccatctcccgcccccagtttg

SEQ ID NO: 5795285 - DNA, 25 bp, Homo sapien
cgcccccagtttgactactctgacc

SEQ ID NO: 5795286 - DNA, 25 bp, Homo sapien
catcagccctcaggaccctattatg

SEQ ID NO: 5795287 - DNA, 25 bp, Homo sapien
cccaatgggcacccaggccatgtga

SEQ ID NO: 5795288 - DNA, 25 bp, Homo sapien
ctactcggccttctcctatatgggg

SEQ ID NO: 5795289 - DNA, 25 bp, Homo sapien
aaagcccaggtgaagacagagaccg

SEQ ID NO: 5795290 - DNA, 25 bp, Homo sapien
ggaggccgagcaaggtgggaccgcc

SEQ ID NO: 5795291 - DNA, 25 bp, Homo sapien
ttgatgtggctgagttggaccagta

SEQ ID NO: 5795292 - DNA, 25 bp, Homo sapien
cggcccctctacacggccatctctg

SEQ ID NO: 5795293 - DNA, 25 bp, Homo sapien
gcagcacaagaaagaccacccggac

SEQ ID NO: 5795294 - DNA, 25 bp, Homo sapien
actgccctgatgacccacccgcccc

SEQ ID NO: 5795295 - DNA, 25 bp, Homo sapien
cacctcaggcctggtggtggcagtg

SEQ ID NO: 5795296 - DNA, 25 bp, Homo sapien
ggctgcaccttcccccaggaatgac

SEQ ID NO: 5795297 - DNA, 25 bp, Homo sapien
cgaagcgggacgggcgctccatggg

SEQ ID NO: 5795298 - DNA, 25 bp, Homo sapien
ccaccaggcgtggctctgcccacgg

SEQ ID NO: 5795299 - DNA, 25 bp, Homo sapien
acggcggcggcggcggatcgggcct

SEQ ID NO: 5795300 - DNA, 25 bp, Homo sapien
aggtgaagacagagaccgcggggcc

SEQ ID NO: 5795301 - DNA, 25 bp, Homo sapien
tctctctcacagatagtgagggtct

SEQ ID NO: 5795302 - DNA, 25 bp, Homo sapien
gtgccctggccgtggccagtggaca

SEQ ID NO: 5795303 - DNA, 25 bp, Homo sapien
cccacggtctcaccacctggtgtgg

SEQ ID NO: 5795304 - DNA, 25 bp, Homo sapien
ccaaagcccaggtgaagacagagac

SEQ ID NO: 5795305 - DNA, 25 bp, Homo sapien
atcgcctacacctccctcagcctgc

SEQ ID NO: 5795306 - DNA, 25 bp, Homo sapien
agtgcctaagggctaggccacccag

SEQ ID NO: 5795307 - DNA, 25 bp, Homo sapien
gcgccccttcatcgaggaggctgag

SEQ ID NO: 5795308 - DNA, 25 bp, Homo sapien
ccccacacactgggagcagccagta

SEQ ID NO: 5795309 - DNA, 25 bp, Homo sapien
tggggggttcgagggacttagtgga

SEQ ID NO: 5795310 - DNA, 25 bp, Homo sapien
tccaacatggagacctttgatgtgg

SEQ ID NO: 5795311 - DNA, 25 bp, Homo sapien
atgggggagggcgggaagcctcaca

SEQ ID NO: 5795312 - DNA, 25 bp, Homo sapien
atagtgagggtctgacatgcccatg

SEQ ID NO: 5795313 - DNA, 25 bp, Homo sapien
ggcggcggaagaacgggaaggccgc

SEQ ID NO: 5795314 - DNA, 25 bp, Homo sapien
ccggactacaagtaccagcccaggc

SEQ ID NO: 5795315 - DNA, 25 bp, Homo sapien
ccctgttccttgcccacctcaggcc

SEQ ID NO: 5795316 - DNA, 25 bp, Homo sapien
ggggaggccgagcaaggtgggaccg

SEQ ID NO: 5795317 - DNA, 25 bp, Homo sapien
gtggacactccgcctggatctccaa

SEQ ID NO: 5795318 - DNA, 25 bp, Homo sapien
ccgcacgtcaagcggcccatgaacg

SEQ ID NO: 5795319 - DNA, 25 bp, Homo sapien
gtgggctcggaggagccccgctgcc

SEQ ID NO: 5795320 - DNA, 25 bp, Homo sapien
ccaggcggcggaagaacgggaaggc

SEQ ID NO: 5795321 - DNA, 25 bp, Homo sapien
agcaccagggttggtggcatcggag

SEQ ID NO: 5795322 - DNA, 25 bp, Homo sapien
cagcgcgcaggaagctcgcggacca

SEQ ID NO: 5795323 - DNA, 25 bp, Homo sapien
actacaagagcgcccacttggacca

SEQ ID NO: 5795324 - DNA, 25 bp, Homo sapien
agttctcatcccttcaatgccccct

SEQ ID NO: 5795325 - DNA, 25 bp, Homo sapien
cctaaagggggccctgtcgccacca

SEQ ID NO: 5795326 - DNA, 25 bp, Homo sapien
tgtggatgccaaagcccaggtgaag

SEQ ID NO: 5795327 - DNA, 25 bp, Homo sapien
cttgcccacctcaggcctggtggtg

SEQ ID NO: 5795328 - DNA, 25 bp, Homo sapien
gaggagaaggaggttgactgttgca

SEQ ID NO: 5795329 - DNA, 25 bp, Homo sapien
cctggatctccaagccaccaggcgt

SEQ ID NO: 5795330 - DNA, 25 bp, Homo sapien
aagcgggacgggcgctccatggggg

SEQ ID NO: 5795331 - DNA, 25 bp, Homo sapien
ccacctggtgtggatgccaaagccc

SEQ ID NO: 5795332 - DNA, 25 bp, Homo sapien
cacaacgctgagctcagcaagacgc

SEQ ID NO: 5795333 - DNA, 25 bp, Homo sapien
gcccatgaacgccttcatggtgtgg

SEQ ID NO: 5795334 - DNA, 25 bp, Homo sapien
ccccatgtcagatgggaaccccgag

SEQ ID NO: 5795335 - DNA, 25 bp, Homo sapien
cggcccatgaacgccttcatggtgt

SEQ ID NO: 5795336 - DNA, 25 bp, Homo sapien
caaggtgggaccgccgccatccagg

SEQ ID NO: 5795337 - DNA, 25 bp, Homo sapien
gacgatgacaagttccccgtgtgca

SEQ ID NO: 5795338 - DNA, 25 bp, Homo sapien
ccgcgaggccgtcagccaggtgctc

SEQ ID NO: 5795339 - DNA, 25 bp, Homo sapien
gaagcaccagggttggtggcatcgg

SEQ ID NO: 5795340 - DNA, 25 bp, Homo sapien
atcgacttcggcaacgtggacattg

SEQ ID NO: 5795341 - DNA, 25 bp, Homo sapien
caacggcgccagcaaaagcaagccg

SEQ ID NO: 5795342 - DNA, 25 bp, Homo sapien
agcctgccccactatggctcagcct

SEQ ID NO: 5795343 - DNA, 25 bp, Homo sapien
cctccctcagcctgccccactatgg

SEQ ID NO: 5795344 - DNA, 25 bp, Homo sapien
acaccgaccagccatccacctcaca

SEQ ID NO: 5795345 - DNA, 25 bp, Homo sapien
gaggtggagctgagccccgtgggct

SEQ ID NO: 5795346 - DNA, 25 bp, Homo sapien
tgggctcaggcagcgcgcaggaagc

SEQ ID NO: 5795347 - DNA, 25 bp, Homo sapien
gctactcagcagccggctatgggct

SEQ ID NO: 5795348 - DNA, 25 bp, Homo sapien
cccgacggcggcggcggcggatcgg

SEQ ID NO: 5795349 - DNA, 25 bp, Homo sapien
cgaggtaatgtccaacatggagacc

SEQ ID NO: 5795350 - DNA, 25 bp, Homo sapien
ccggggagcgcgccctcgctagggc

SEQ ID NO: 5795351 - DNA, 25 bp, Homo sapien
cagacccgaagcgggacgggcgctc

SEQ ID NO: 5795352 - DNA, 25 bp, Homo sapien
caagccaccaggcgtggctctgccc

SEQ ID NO: 5795353 - DNA, 25 bp, Homo sapien
ggctgctgaacgaaagtgacaagcg

SEQ ID NO: 5795354 - DNA, 25 bp, Homo sapien
agaggctgacaggtcggggggcttt

SEQ ID NO: 5795355 - DNA, 25 bp, Homo sapien
gggctcggaggagccccgctgcctg

SEQ ID NO: 5795356 - DNA, 25 bp, Homo sapien
gctcactgccctgatgacccacccg

SEQ ID NO: 5795357 - DNA, 25 bp, Homo sapien
cagtgccctggccgtggccagtgga

SEQ ID NO: 5795358 - DNA, 25 bp, Homo sapien
tgagggtctgacatgcccatgccac

SEQ ID NO: 5795359 - DNA, 25 bp, Homo sapien
ctcgctagggcccgacggcggcggc

SEQ ID NO: 5795360 - DNA, 25 bp, Homo sapien
ggcggacgatgacaagttccccgtg

SEQ ID NO: 5795361 - DNA, 25 bp, Homo sapien
tacccgcacctgcacaacgctgagc

SEQ ID NO: 5795362 - DNA, 25 bp, Homo sapien
atctctgaccccagcccctcagggc

SEQ ID NO: 5795363 - DNA, 25 bp, Homo sapien
cacttggaccaccggcacccaggag

SEQ ID NO: 5795364 - DNA, 25 bp, Homo sapien
ccactatggctcagccttcccctcc

SEQ ID NO: 5795365 - DNA, 25 bp, Homo sapien
ccacacactgggagcagccagtata

SEQ ID NO: 5795366 - DNA, 25 bp, Homo sapien
ccccagcctgtgtgccctgttcctt

SEQ ID NO: 5795367 - DNA, 25 bp, Homo sapien
agccagcccggggccaggcgagctg

SEQ ID NO: 5795368 - DNA, 25 bp, Homo sapien
ccctgcccccagcctgtgtgccctg

SEQ ID NO: 5795369 - DNA, 25 bp, Homo sapien
agttccccgtgtgcatccgcgaggc

SEQ ID NO: 5795370 - DNA, 25 bp, Homo sapien
aggccacccagagactgtgcccgga

SEQ ID NO: 5795371 - DNA, 25 bp, Homo sapien
ccatgcccgtgcgcgtcaacggcgc

SEQ ID NO: 5795372 - DNA, 25 bp, Homo sapien
gcaaagccccaggagaacaggctgg

SEQ ID NO: 5795373 - DNA, 25 bp, Homo sapien
ccgtgtgcatccgcgaggccgtcag

SEQ ID NO: 5795374 - DNA, 25 bp, Homo sapien
gcgaggcggagtgccccggtgggga

SEQ ID NO: 5795375 - DNA, 25 bp, Homo sapien
cccccacactacaccgaccagccat

SEQ ID NO: 5795376 - DNA, 25 bp, Homo sapien
gccgagcaaggtgggaccgccgcca

SEQ ID NO: 5795377 - DNA, 25 bp, Homo sapien
gccccctccctttctgaaggcagga

SEQ ID NO: 5795378 - DNA, 25 bp, Homo sapien
gggcaaggcagacccgaagcgggac

SEQ ID NO: 5795379 - DNA, 25 bp, Homo sapien
cagggcgaggcggagtgccccggtg

SEQ ID NO: 5795380 - DNA, 25 bp, Homo sapien
aggagagggctcccccatgtcagat

SEQ ID NO: 5795381 - DNA, 25 bp, Homo sapien
cctctggcctctactcggccttctc

SEQ ID NO: 5795382 - DNA, 25 bp, Homo sapien
cctgccccactatggctcagccttc

SEQ ID NO: 5795383 - DNA, 25 bp, Homo sapien
cccggggccaggcgagctgggcaag

SEQ ID NO: 5795384 - DNA, 25 bp, Homo sapien
caagccgcacgtcaagcggcccatg

SEQ ID NO: 5795385 - DNA, 25 bp, Homo sapien
gtacctgccgcccaatgggcaccca

SEQ ID NO: 5795386 - DNA, 25 bp, Homo sapien
cggtctcaccacctggtgtggatgc

SEQ ID NO: 5795387 - DNA, 25 bp, Homo sapien
gtgtctcccactcaggggctgagag

SEQ ID NO: 5795388 - DNA, 25 bp, Homo sapien
gaatgaccctctatcccaggacctg

SEQ ID NO: 5795389 - DNA, 25 bp, Homo sapien
tcgggcaaggcagacccgaagcggg

SEQ ID NO: 5795390 - DNA, 25 bp, Homo sapien
gagggacttagtggagttctcatcc

SEQ ID NO: 5795391 - DNA, 25 bp, Homo sapien
cttcatcgaggaggctgagcggctc

SEQ ID NO: 5795392 - DNA, 25 bp, Homo sapien
cgcggaccagtacccgcacctgcac

SEQ ID NO: 5795393 - DNA, 25 bp, Homo sapien
tgccccggtggggaggccgagcaag

SEQ ID NO: 5795394 - DNA, 25 bp, Homo sapien
tgtggctgagttggaccagtacctg

SEQ ID NO: 5795395 - DNA, 25 bp, Homo sapien
cccccagtttgactactctgaccat

SEQ ID NO: 5795396 - DNA, 25 bp, Homo sapien
acctggtgtggatgccaaagcccag

SEQ ID NO: 5795397 - DNA, 25 bp, Homo sapien
aagacgctgggcaagctctggaggc

SEQ ID NO: 5795398 - DNA, 25 bp, Homo sapien
gaggctgagcggctccgtatgcagc

SEQ ID NO: 5795399 - DNA, 25 bp, Homo sapien
gtgcccggagctggccgtgtctccc

SEQ ID NO: 5795400 - DNA, 25 bp, Homo sapien
caggcagcgcgcaggaagctcgcgg

SEQ ID NO: 5795401 - DNA, 25 bp, Homo sapien
cggaggccttaccactcctatgact

SEQ ID NO: 5795402 - DNA, 25 bp, Homo sapien
cagtggacactccgcctggatctcc

SEQ ID NO: 5795403 - DNA, 25 bp, Homo sapien
agggctaggccacccagagactgtg

SEQ ID NO: 5795404 - DNA, 25 bp, Homo sapien
tcccccaggaatgaccctctatccc

SEQ ID NO: 5795405 - DNA, 25 bp, Homo sapien
atccaggcccactacaagagcgccc

SEQ ID NO: 5795406 - DNA, 25 bp, Homo sapien
gccgtggccagtggacactccgcct

SEQ ID NO: 5795407 - DNA, 25 bp, Homo sapien
ctgttttctctctcacagatagtga

SEQ ID NO: 5795408 - DNA, 25 bp, Homo sapien
tcccccatgtcagatgggaaccccg

SEQ ID NO: 5795409 - DNA, 25 bp, Homo sapien
tagtggagttctcatcccttcaatg

SEQ ID NO: 5795410 - DNA, 25 bp, Homo sapien
cctaagggctaggccacccagagac

SEQ ID NO: 5795411 - DNA, 25 bp, Homo sapien
gcgaggccgtcagccaggtgctcag

SEQ ID NO: 5795412 - DNA, 25 bp, Homo sapien
cagccaggtgctcagcggctacgac

SEQ ID NO: 5795413 - DNA, 25 bp, Homo sapien
gtggagttctcatcccttcaatgcc

SEQ ID NO: 5795414 - DNA, 25 bp, Homo sapien
gccctggccgtggccagtggacact

SEQ ID NO: 5795415 - DNA, 25 bp, Homo sapien
atggagacctttgatgtggctgagt

SEQ ID NO: 5795416 - DNA, 25 bp, Homo sapien
cggaccagtacccgcacctgcacaa

SEQ ID NO: 5795417 - DNA, 25 bp, Homo sapien
aagaccacccggactacaagtacca

SEQ ID NO: 5795418 - DNA, 25 bp, Homo sapien
cagcaaagccccaggagaacaggct

SEQ ID NO: 5795419 - DNA, 25 bp, Homo sapien
agctggccgtgtctcccactcaggg

SEQ ID NO: 5795420 - DNA, 25 bp, Homo sapien
gatgccaaagcccaggtgaagacag

SEQ ID NO: 5795421 - DNA, 25 bp, Homo sapien
agcgcccacttggaccaccggcacc

SEQ ID NO: 5795422 - DNA, 25 bp, Homo sapien
agaaagaccacccggactacaagta

SEQ ID NO: 5795423 - DNA, 25 bp, Homo sapien
aacgaaagtgacaagcgccccttca

SEQ ID NO: 5795424 - DNA, 25 bp, Homo sapien
tttctgaaggcaggaaggagttggc

SEQ ID NO: 5795425 - DNA, 25 bp, Homo sapien
gggccaggcctctggcctctactcg

SEQ ID NO: 5795426 - DNA, 25 bp, Homo sapien
cagccatccacctcacagatcgcct

SEQ ID NO: 5795427 - DNA, 25 bp, Homo sapien
ctcagcagccggctatgggctgggc

SEQ ID NO: 5795428 - DNA, 25 bp, Homo sapien
cggcgaggcggacgatgacaagttc

SEQ ID NO: 5795429 - DNA, 25 bp, Homo sapien
tatggctcagccttcccctccatct

SEQ ID NO: 5795430 - DNA, 25 bp, Homo sapien
gctcccccatgtcagatgggaaccc

SEQ ID NO: 5795431 - DNA, 25 bp, Homo sapien
gcaagctctggaggctgctgaacga

SEQ ID NO: 5795432 - DNA, 25 bp, Homo sapien
ccatccaggcccactacaagagcgc

SEQ ID NO: 5795433 - DNA, 25 bp, Homo sapien
aggccatgtgagcagctactcagca

SEQ ID NO: 5795434 - DNA, 25 bp, Homo sapien
tgagttggaccagtacctgccgccc

SEQ ID NO: 5795435 - DNA, 25 bp, Homo sapien
gggacttagtggagttctcatccct

SEQ ID NO: 5795436 - DNA, 25 bp, Homo sapien
ctgaccccagcccctcagggcccca

SEQ ID NO: 5795437 - DNA, 25 bp, Homo sapien
tcatcgaggaggctgagcggctccg

SEQ ID NO: 5795438 - DNA, 25 bp, Homo sapien
ggctaggccacccagagactgtgcc

SEQ ID NO: 5795439 - DNA, 25 bp, Homo sapien
gggaagcaccagggttggtggcatc

SEQ ID NO: 5795440 - DNA, 25 bp, Homo sapien
tatatggggccctcgcagcggcccc

SEQ ID NO: 5795441 - DNA, 25 bp, Homo sapien
caggcgtggctctgcccacggtctc

SEQ ID NO: 5795442 - DNA, 25 bp, Homo sapien
tcagggccccagtcccacagcccca

SEQ ID NO: 5795443 - DNA, 25 bp, Homo sapien
ttgactactctgaccatcagccctc

SEQ ID NO: 5795444 - DNA, 25 bp, Homo sapien
actcggccttctcctatatggggcc

SEQ ID NO: 5795445 - DNA, 25 bp, Homo sapien
cctttctgaaggcaggaaggagttg

SEQ ID NO: 5795446 - DNA, 25 bp, Homo sapien
cccctcagggccccagtcccacagc

SEQ ID NO: 5795447 - DNA, 25 bp, Homo sapien
gaggcggacgatgacaagttccccg

SEQ ID NO: 5795448 - DNA, 25 bp, Homo sapien
accggcacccaggagagggctcccc

SEQ ID NO: 5795449 - DNA, 25 bp, Homo sapien
gaagggcctgctcaccctcctcggg

SEQ ID NO: 5795450 - DNA, 25 bp, Homo sapien
actctgaccatcagccctcaggacc

SEQ ID NO: 5795451 - DNA, 25 bp, Homo sapien
ctcgcggaccagtacccgcacctgc

SEQ ID NO: 5795452 - DNA, 25 bp, Homo sapien
atccgcgaggccgtcagccaggtgc

SEQ ID NO: 5795453 - DNA, 25 bp, Homo sapien
gcccactacaagagcgcccacttgg

SEQ ID NO: 5795454 - DNA, 25 bp, Homo sapien
actccgcctggatctccaagccacc

SEQ ID NO: 5795455 - DNA, 25 bp, Homo sapien
tgaggaggctgaagaggctgacagg

SEQ ID NO: 5795456 - DNA, 25 bp, Homo sapien
cacccctccaaccaccccgaagaca

SEQ ID NO: 5795457 - DNA, 25 bp, Homo sapien
cagtacctgccgcccaatgggcacc

SEQ ID NO: 5795458 - DNA, 25 bp, Homo sapien
ggtgctcagcggctacgactggacg

SEQ ID NO: 5795459 - DNA, 25 bp, Homo sapien
atcccaggacctgagaagggcctgc

SEQ ID NO: 5795460 - DNA, 25 bp, Homo sapien
gggcaagctctggaggctgctgaac

SEQ ID NO: 5795461 - DNA, 25 bp, Homo sapien
agcaggacctatcggaggtggagct

SEQ ID NO: 5795462 - DNA, 25 bp, Homo sapien
tttctctctcacagatagtgagggt

SEQ ID NO: 5795463 - DNA, 25 bp, Homo sapien
catgtgagcagctactcagcagccg

SEQ ID NO: 5795464 - DNA, 25 bp, Homo sapien
aagctctggaggctgctgaacgaaa

SEQ ID NO: 5795465 - DNA, 25 bp, Homo sapien
agcctcacatcgacttcggcaacgt

SEQ ID NO: 5795466 - DNA, 25 bp, Homo sapien
tgtccaacatggagacctttgatgt

SEQ ID NO: 5795467 - DNA, 25 bp, Homo sapien
cagagactgtgcccggagctggccg

SEQ ID NO: 5795468 - DNA, 25 bp, Homo sapien
gcagccggctatgggctgggcagtg

SEQ ID NO: 5795469 - DNA, 25 bp, Homo sapien
gctgacaggtcggggggctttctgt

SEQ ID NO: 5795470 - DNA, 25 bp, Homo sapien
ctccagcagcaaagccccaggagaa

SEQ ID NO: 5795471 - DNA, 25 bp, Homo sapien
gctggtgcccatgcccgtgcgcgtc

SEQ ID NO: 5795472 - DNA, 25 bp, Homo sapien
gcacccaggagagggctcccccatg

SEQ ID NO: 5795473 - DNA, 25 bp, Homo sapien
ttggtgagatcagccacgaggtaat

SEQ ID NO: 5795474 - DNA, 25 bp, Homo sapien
gccctgtcgccaccaccccccgccc

SEQ ID NO: 5795475 - DNA, 25 bp, Homo sapien
tcaggcctggtggtggcagtggagg

SEQ ID NO: 5795476 - DNA, 25 bp, Homo sapien
gcctgtccccggggagcgcgccctc

SEQ ID NO: 5795477 - DNA, 25 bp, Homo sapien
gcccggagctggccgtgtctcccac

SEQ ID NO: 5795478 - DNA, 25 bp, Homo sapien
ggacactccgcctggatctccaagc

SEQ ID NO: 5795479 - DNA, 25 bp, Homo sapien
gccttcatggtgtgggctcaggcag

SEQ ID NO: 5795480 - DNA, 25 bp, Homo sapien
taaagggggccctgtcgccaccacc

SEQ ID NO: 5795481 - DNA, 25 bp, Homo sapien
ctccgtatgcagcacaagaaagacc

SEQ ID NO: 5795482 - DNA, 25 bp, Homo sapien
acagtgcctaagggctaggccaccc

SEQ ID NO: 5795483 - DNA, 25 bp, Homo sapien
agtacccgcacctgcacaacgctga

SEQ ID NO: 5795484 - DNA, 25 bp, Homo sapien
cgtggctctgcccacggtctcacca

SEQ ID NO: 5795485 - DNA, 25 bp, Homo sapien
gatgtggctgagttggaccagtacc

SEQ ID NO: 5795486 - DNA, 25 bp, Homo sapien
agcggcccatgaacgccttcatggt

SEQ ID NO: 5795487 - DNA, 25 bp, Homo sapien
ctgagcggctccgtatgcagcacaa

SEQ ID NO: 5795488 - DNA, 25 bp, Homo sapien
gccacgaggtaatgtccaacatgga

SEQ ID NO: 5795489 - DNA, 25 bp, Homo sapien
ttatggccactcgggccaggcctct

SEQ ID NO: 5795490 - DNA, 25 bp, Homo sapien
ggcctctggcctctactcggccttc

SEQ ID NO: 5795491 - DNA, 25 bp, Homo sapien
ctcagcggctacgactggacgctgg

SEQ ID NO: 5795492 - DNA, 25 bp, Homo sapien
tcacatcgacttcggcaacgtggac

SEQ ID NO: 5795493 - DNA, 25 bp, Homo sapien
aggttgactgttgcacccacactga

SEQ ID NO: 5795494 - DNA, 25 bp, Homo sapien
agtgacaagcgccccttcatcgagg

SEQ ID NO: 5795495 - DNA, 25 bp, Homo sapien
agtaccagcccaggcggcggaagaa

SEQ ID NO: 5795496 - DNA, 25 bp, Homo sapien
tggctctgcccacggtctcaccacc

SEQ ID NO: 5795497 - DNA, 25 bp, Homo sapien
ccccgtgggctcggaggagccccgc

SEQ ID NO: 5795498 - DNA, 25 bp, Homo sapien
tgtctggctcactgccctgatgacc

SEQ ID NO: 5795499 - DNA, 25 bp, Homo sapien
gctgggcagtgccctggccgtggcc

SEQ ID NO: 5795500 - DNA, 25 bp, Homo sapien
caaggtcaagaaggagcagcaggac

SEQ ID NO: 5795501 - DNA, 25 bp, Homo sapien
ccaggagaacaggctggacagagga

SEQ ID NO: 5795502 - DNA, 25 bp, Homo sapien
actcaggggctgagagtagctttga

SEQ ID NO: 5795503 - DNA, 25 bp, Homo sapien
cacctcacagatcgcctacacctcc

SEQ ID NO: 5795504 - DNA, 25 bp, Homo sapien
cacccagagactgtgcccggagctg

SEQ ID NO: 5795505 - DNA, 25 bp, Homo sapien
gtggggaggccgagcaaggtgggac

SEQ ID NO: 5795506 - DNA, 25 bp, Homo sapien
gaagacagagctgcagtcgggcaag

SEQ ID NO: 5795507 - DNA, 25 bp, Homo sapien
cccctccctttctgaaggcaggaag

SEQ ID NO: 5795508 - DNA, 25 bp, Homo sapien
ggaggttgactgttgcacccacact

SEQ ID NO: 5795509 - DNA, 25 bp, Homo sapien
aggagccccgctgcctgtccccggg

SEQ ID NO: 5795510 - DNA, 25 bp, Homo sapien
ggagacctttgatgtggctgagttg

SEQ ID NO: 5795511 - DNA, 25 bp, Homo sapien
ggccttctcctatatggggccctcg

SEQ ID NO: 5795512 - DNA, 25 bp, Homo sapien
ccaccggcacccaggagagggctcc

SEQ ID NO: 5795513 - DNA, 25 bp, Homo sapien
ctcaggcagcgcgcaggaagctcgc

SEQ ID NO: 5795514 - DNA, 25 bp, Homo sapien
tgtgccctgttccttgcccacctca

SEQ ID NO: 5795515 - DNA, 25 bp, Homo sapien
gaccgccgccatccaggcccactac

SEQ ID NO: 5795516 - DNA, 25 bp, Homo sapien
agcccaggtgaagacagagaccgcg

SEQ ID NO: 5795517 - DNA, 25 bp, Homo sapien
cctgctcaccctcctcggggagggg

SEQ ID NO: 5795518 - DNA, 25 bp, Homo sapien
ggagcaggacctatcggaggtggag

SEQ ID NO: 5795519 - DNA, 25 bp, Homo sapien
caaaagcaagccgcacgtcaagcgg

SEQ ID NO: 5795520 - DNA, 25 bp, Homo sapien
accagccatccacctcacagatcgc

SEQ ID NO: 5795521 - DNA, 25 bp, Homo sapien
cgatgacaagttccccgtgtgcatc

SEQ ID NO: 5795522 - DNA, 25 bp, Homo sapien
cgcccagggcgaggcggagtgcccc

SEQ ID NO: 5795523 - DNA, 25 bp, Homo sapien
ggcggaagaacgggaaggccgccca

SEQ ID NO: 5795524 - DNA, 25 bp, Homo sapien
caacatggagacctttgatgtggct

SEQ ID NO: 5795525 - DNA, 25 bp, Homo sapien
gaggagcaggacctatcggaggtgg

SEQ ID NO: 5795526 - DNA, 25 bp, Homo sapien
atggcccacccacccctccaaccac

SEQ ID NO: 5795527 - DNA, 25 bp, Homo sapien
gctgagagtagctttgaggagcctc

SEQ ID NO: 5795528 - DNA, 25 bp, Homo sapien
gaacaggctggacagaggagaagga

SEQ ID NO: 5795529 - DNA, 25 bp, Homo sapien
cgagccagcccggggccaggcgagc

SEQ ID NO: 5795530 - DNA, 25 bp, Homo sapien
tgccctgttccttgcccacctcagg

SEQ ID NO: 5795531 - DNA, 25 bp, Homo sapien
taagggctaggccacccagagactg

SEQ ID NO: 5795532 - DNA, 25 bp, Homo sapien
acaggtcggggggctttctgtctgg

SEQ ID NO: 5795533 - DNA, 25 bp, Homo sapien
ccaggcgagctgggcaaggtcaaga

SEQ ID NO: 5795534 - DNA, 25 bp, Homo sapien
acttcggcaacgtggacattggtga

SEQ ID NO: 5795535 - DNA, 25 bp, Homo sapien
gggcgaggcggagtgccccggtggg

SEQ ID NO: 5795536 - DNA, 25 bp, Homo sapien
cctgcacaacgctgagctcagcaag

SEQ ID NO: 5795537 - DNA, 25 bp, Homo sapien
tggacattggtgagatcagccacga

SEQ ID NO: 5795538 - DNA, 25 bp, Homo sapien
tacaagagcgcccacttggaccacc

SEQ ID NO: 5795539 - DNA, 25 bp, Homo sapien
aaggcagacccgaagcgggacgggc

SEQ ID NO: 5795540 - DNA, 25 bp, Homo sapien
gaggaggtgggcgttggactctttg

SEQ ID NO: 5795541 - DNA, 25 bp, Homo sapien
gtgcatccgcgaggccgtcagccag

SEQ ID NO: 5795542 - DNA, 25 bp, Homo sapien
ggcccgacggcggcggcggcggatc

SEQ ID NO: 5795543 - DNA, 25 bp, Homo sapien
agatagtgagggtctgacatgccca

SEQ ID NO: 5795544 - DNA, 25 bp, Homo sapien
gaagcctcacatcgacttcggcaac

SEQ ID NO: 5795545 - DNA, 25 bp, Homo sapien
gagagggctcccccatgtcagatgg

SEQ ID NO: 5795546 - DNA, 25 bp, Homo sapien
gccgccatccaggcccactacaaga

SEQ ID NO: 5795547 - DNA, 25 bp, Homo sapien
gagggcgggaagcctcacatcgact

SEQ ID NO: 5795548 - DNA, 25 bp, Homo sapien
gtttgactactctgaccatcagccc

SEQ ID NO: 5795549 - DNA, 25 bp, Homo sapien
cagcggctacgactggacgctggtg

SEQ ID NO: 5795550 - DNA, 25 bp, Homo sapien
gtcaagaaggagcagcaggacggcg

SEQ ID NO: 5795551 - DNA, 25 bp, Homo sapien
gcacccaggccatgtgagcagctac

SEQ ID NO: 5795552 - DNA, 25 bp, Homo sapien
acctttgatgtggctgagttggacc

SEQ ID NO: 5795553 - DNA, 25 bp, Homo sapien
gagctgggcaaggtcaagaaggagc

SEQ ID NO: 5795554 - DNA, 25 bp, Homo sapien
atgaggggctgcaccttcccccagg

SEQ ID NO: 5795555 - DNA, 25 bp, Homo sapien
taccagcccaggcggcggaagaacg

SEQ ID NO: 5795556 - DNA, 25 bp, Homo sapien
acgtcaagcggcccatgaacgcctt

SEQ ID NO: 5795557 - DNA, 25 bp, Homo sapien
ccccgaagacagagctgcagtcggg

SEQ ID NO: 5795558 - DNA, 25 bp, Homo sapien
cgacggcggcggcggcggatcgggc

SEQ ID NO: 5795559 - DNA, 25 bp, Homo sapien
acagatagtgagggtctgacatgcc

SEQ ID NO: 5795560 - DNA, 25 bp, Homo sapien
gcggcggcggatcgggcctgcgagc

SEQ ID NO: 5795561 - DNA, 25 bp, Homo sapien
ttggcacagaggccccctgaaaaaa

SEQ ID NO: 5795562 - DNA, 25 bp, Homo sapien
ccgtcagccaggtgctcagcggcta

SEQ ID NO: 5795563 - DNA, 25 bp, Homo sapien
ggtggagctgagccccgtgggctcg

SEQ ID NO: 5795564 - DNA, 25 bp, Homo sapien
cttggaccaccggcacccaggagag

SEQ ID NO: 5795565 - DNA, 25 bp, Homo sapien
agccttcccctccatctcccgcccc

SEQ ID NO: 5795566 - DNA, 25 bp, Homo sapien
ggagcagccagtatatacgacactg

SEQ ID NO: 5795567 - DNA, 25 bp, Homo sapien
tgcctaagggctaggccacccagag

SEQ ID NO: 5795568 - DNA, 25 bp, Homo sapien
gtgtgcatccgcgaggccgtcagcc

SEQ ID NO: 5795569 - DNA, 25 bp, Homo sapien
gcgaggaccccggcggctggcccgg

SEQ ID NO: 5795570 - DNA, 25 bp, Homo sapien
gatgggaaccccgagcacccctcag

SEQ ID NO: 5795571 - DNA, 25 bp, Homo sapien
accaccccgaagacagagctgcagt

SEQ ID NO: 5795572 - DNA, 25 bp, Homo sapien
gaggaggctgaggaggctgaagagg

SEQ ID NO: 5795573 - DNA, 25 bp, Homo sapien
aaggagttggcacagaggccccctg

SEQ ID NO: 5795574 - DNA, 25 bp, Homo sapien
ccactacaagagcgcccacttggac

SEQ ID NO: 5795575 - DNA, 25 bp, Homo sapien
agggttggtggcatcggaggcctta

SEQ ID NO: 5795576 - DNA, 25 bp, Homo sapien
caagtaccagcccaggcggcggaag

SEQ ID NO: 5795577 - DNA, 25 bp, Homo sapien
cccatccaggctccagcagcaaagc

SEQ ID NO: 5795578 - DNA, 25 bp, Homo sapien
actgaaagatgaggggctgcacctt

SEQ ID NO: 5795579 - DNA, 25 bp, Homo sapien
tcgagggacttagtggagttctcat

SEQ ID NO: 5795580 - DNA, 25 bp, Homo sapien
cagtttgactactctgaccatcagc

SEQ ID NO: 5795581 - DNA, 25 bp, Homo sapien
tctgaaggcaggaaggagttggcac

SEQ ID NO: 5795582 - DNA, 25 bp, Homo sapien
cctccaaccaccccgaagacagagc

SEQ ID NO: 5795583 - DNA, 25 bp, Homo sapien
gtatgcagcacaagaaagaccaccc

SEQ ID NO: 5795584 - DNA, 25 bp, Homo sapien
tggtgcccatgcccgtgcgcgtcaa

SEQ ID NO: 5795585 - DNA, 25 bp, Homo sapien
cctcagggccccagtcccacagccc

SEQ ID NO: 5795586 - DNA, 25 bp, Homo sapien
gcgcgtcaacggcgccagcaaaagc

SEQ ID NO: 5795587 - DNA, 25 bp, Homo sapien
tgacaggtcggggggctttctgtct

SEQ ID NO: 5795588 - DNA, 25 bp, Homo sapien
ccgccccatccaggctccagcagca

SEQ ID NO: 5795589 - DNA, 25 bp, Homo sapien
cagaggagaaggaggttgactgttg

SEQ ID NO: 5795590 - DNA, 25 bp, Homo sapien
tcgccaccaccccccgcccagcccc

SEQ ID NO: 5795591 - DNA, 25 bp, Homo sapien
ctccatctcccgcccccagtttgac

SEQ ID NO: 5795592 - DNA, 25 bp, Homo sapien
ctacgactggacgctggtgcccatg

SEQ ID NO: 5795593 - DNA, 25 bp, Homo sapien
ggccatctctgaccccagcccctca

SEQ ID NO: 5795594 - DNA, 25 bp, Homo sapien
tgccaaagcccaggtgaagacagag

SEQ ID NO: 5795595 - DNA, 25 bp, Homo sapien
accactcctatgactcctgttttct

SEQ ID NO: 5795596 - DNA, 25 bp, Homo sapien
gggcgggaagcctcacatcgacttc

SEQ ID NO: 5795597 - DNA, 25 bp, Homo sapien
gttgactgttgcacccacactgaaa

SEQ ID NO: 5795598 - DNA, 25 bp, Homo sapien
ccccaggagaacaggctggacagag

SEQ ID NO: 5795599 - DNA, 25 bp, Homo sapien
ttcggcaacgtggacattggtgaga

SEQ ID NO: 5795600 - DNA, 25 bp, Homo sapien
agcagctactcagcagccggctatg

SEQ ID NO: 5795601 - DNA, 25 bp, Homo sapien
tgtgggctcaggcagcgcgcaggaa

SEQ ID NO: 5795602 - DNA, 25 bp, Homo sapien
ccgaggaggtgggcgttggactctt

SEQ ID NO: 5795603 - DNA, 25 bp, Homo sapien
gcctggtggtggcagtggaggaggc

SEQ ID NO: 5795604 - DNA, 25 bp, Homo sapien
ccatgaacgccttcatggtgtgggc

SEQ ID NO: 5795605 - DNA, 25 bp, Homo sapien
agttggcacagaggccccctgaaaa

SEQ ID NO: 5795606 - DNA, 25 bp, Homo sapien
agcacaagaaagaccacccggacta

SEQ ID NO: 5795607 - DNA, 25 bp, Homo sapien
gaccccagcccctcagggccccagt

SEQ ID NO: 5795608 - DNA, 25 bp, Homo sapien
ccgagcacccctcaggccagagcca

SEQ ID NO: 5795609 - DNA, 25 bp, Homo sapien
ggagaaggaggttgactgttgcacc

SEQ ID NO: 5795610 - DNA, 25 bp, Homo sapien
ggcacagaggccccctgaaaaaaaa

SEQ ID NO: 5795611 - DNA, 25 bp, Homo sapien
atggccactcgggccaggcctctgg

SEQ ID NO: 5795612 - DNA, 25 bp, Homo sapien
gaagaggctgacaggtcggggggct

SEQ ID NO: 5795613 - DNA, 25 bp, Homo sapien
accgaccagccatccacctcacaga

SEQ ID NO: 5795614 - DNA, 25 bp, Homo sapien
atcgggcctgcgagccagcccgggg

SEQ ID NO: 5795615 - DNA, 25 bp, Homo sapien
gtgaagacagagaccgcggggcccc

SEQ ID NO: 5795616 - DNA, 25 bp, Homo sapien
tctccaagccaccaggcgtggctct

SEQ ID NO: 5795617 - DNA, 25 bp, Homo sapien
ggctgagcggctccgtatgcagcac

SEQ ID NO: 5795618 - DNA, 25 bp, Homo sapien
gcgggacgggcgctccatgggggag

SEQ ID NO: 5795619 - DNA, 25 bp, Homo sapien
ttgcacccacactgaaagatgaggg

SEQ ID NO: 5795620 - DNA, 25 bp, Homo sapien
acccctcaggccagagccatggccc

SEQ ID NO: 5795621 - DNA, 25 bp, Homo sapien
cctatgactcctgttttctctctca

SEQ ID NO: 5795622 - DNA, 25 bp, Homo sapien
agccccacacactgggagcagccag

SEQ ID NO: 5795623 - DNA, 25 bp, Homo sapien
ggctccagcagcaaagccccaggag

SEQ ID NO: 5795624 - DNA, 25 bp, Homo sapien
catccacctcacagatcgcctacac

SEQ ID NO: 5795625 - DNA, 25 bp, Homo sapien
tggactctttgcgaggaccccggcg

SEQ ID NO: 5795626 - DNA, 25 bp, Homo sapien
ttaccactcctatgactcctgtttt

SEQ ID NO: 5795627 - DNA, 25 bp, Homo sapien
cccaggtgaagacagagaccgcggg

SEQ ID NO: 5795628 - DNA, 25 bp, Homo sapien
caggaccctattatggccactcggg

SEQ ID NO: 5795629 - DNA, 25 bp, Homo sapien
acatcgacttcggcaacgtggacat

SEQ ID NO: 5795630 - DNA, 25 bp, Homo sapien
ggcaggaaggagttggcacagaggc

SEQ ID NO: 5795631 - DNA, 25 bp, Homo sapien
acatggagacctttgatgtggctga

SEQ ID NO: 5795632 - DNA, 25 bp, Homo sapien
gcaagacgctgggcaagctctggag

SEQ ID NO: 5795633 - DNA, 25 bp, Homo sapien
atacgacactgtcccggccctaaag

SEQ ID NO: 5795634 - DNA, 25 bp, Homo sapien
tgaaggcaggaaggagttggcacag

SEQ ID NO: 5795635 - DNA, 25 bp, Homo sapien
ttcccctccatctcccgcccccagt

SEQ ID NO: 5795636 - DNA, 25 bp, Homo sapien
aaagcaagccgcacgtcaagcggcc

SEQ ID NO: 5795637 - DNA, 25 bp, Homo sapien
gggggctttctgtctggctcactgc

SEQ ID NO: 5795638 - DNA, 25 bp, Homo sapien
cccacttggaccaccggcacccagg

SEQ ID NO: 5795639 - DNA, 25 bp, Homo sapien
cccgaagcgggacgggcgctccatg

SEQ ID NO: 5795640 - DNA, 25 bp, Homo sapien
cgcccacttggaccaccggcaccca

SEQ ID NO: 5795641 - DNA, 25 bp, Homo sapien
ccctcaggaccctattatggccact

SEQ ID NO: 5795642 - DNA, 25 bp, Homo sapien
agccgcacgtcaagcggcccatgaa

SEQ ID NO: 5795643 - DNA, 25 bp, Homo sapien
agccctcaggaccctattatggcca

SEQ ID NO: 5795644 - DNA, 25 bp, Homo sapien
cctcaggcctggtggtggcagtgga

SEQ ID NO: 5795645 - DNA, 25 bp, Homo sapien
ctgcagtcgggcaaggcagacccga

SEQ ID NO: 5795646 - DNA, 25 bp, Homo sapien
gaccagtacccgcacctgcacaacg

SEQ ID NO: 5795647 - DNA, 25 bp, Homo sapien
tgaccatcagccctcaggaccctat

SEQ ID NO: 5795648 - DNA, 25 bp, Homo sapien
ggcagacccgaagcgggacgggcgc

SEQ ID NO: 5795649 - DNA, 25 bp, Homo sapien
gcccctctacacggccatctctgac

SEQ ID NO: 5795650 - DNA, 25 bp, Homo sapien
gggcacccaggccatgtgagcagct

SEQ ID NO: 5795651 - DNA, 25 bp, Homo sapien
ggaaccccgagcacccctcaggcca

SEQ ID NO: 5795652 - DNA, 25 bp, Homo sapien
acaggctggacagaggagaaggagg

SEQ ID NO: 5795653 - DNA, 25 bp, Homo sapien
acgctggtgcccatgcccgtgcgcg

SEQ ID NO: 5795654 - DNA, 25 bp, Homo sapien
tctcacagatagtgagggtctgaca

SEQ ID NO: 5795655 - DNA, 25 bp, Homo sapien
agctcgcggaccagtacccgcacct

SEQ ID NO: 5795656 - DNA, 25 bp, Homo sapien
cgctgggcaagctctggaggctgct

SEQ ID NO: 5795657 - DNA, 25 bp, Homo sapien
gcctctactcggccttctcctatat

SEQ ID NO: 5795658 - DNA, 25 bp, Homo sapien
tttgaggagcctcattggggagtgg

SEQ ID NO: 5795659 - DNA, 25 bp, Homo sapien
cccaggacctgagaagggcctgctc

SEQ ID NO: 5795660 - DNA, 25 bp, Homo sapien
cacactacaccgaccagccatccac

SEQ ID NO: 5795661 - DNA, 25 bp, Homo sapien
agcagccagtatatacgacactgtc

SEQ ID NO: 5795662 - DNA, 25 bp, Homo sapien
gtctcccactcaggggctgagagta

SEQ ID NO: 5795663 - DNA, 25 bp, Homo sapien
agcccaggcggcggaagaacgggaa

SEQ ID NO: 5795664 - DNA, 25 bp, Homo sapien
cgccagcaaaagcaagccgcacgtc

SEQ ID NO: 5795665 - DNA, 25 bp, Homo sapien
gaggctgctgaacgaaagtgacaag

SEQ ID NO: 5795666 - DNA, 25 bp, Homo sapien
gagactgtgcccggagctggccgtg

SEQ ID NO: 5795667 - DNA, 25 bp, Homo sapien
cccctccaaccaccccgaagacaga

SEQ ID NO: 5795668 - DNA, 25 bp, Homo sapien
tgctcagcggctacgactggacgct

SEQ ID NO: 5795669 - DNA, 25 bp, Homo sapien
ggggcgacatggcggaggagcagga

SEQ ID NO: 5795670 - DNA, 25 bp, Homo sapien
ctcctatgactcctgttttctctct

SEQ ID NO: 5795671 - DNA, 25 bp, Homo sapien
gccaggcctctggcctctactcggc

SEQ ID NO: 5795672 - DNA, 25 bp, Homo sapien
cgccatccaggcccactacaagagc

SEQ ID NO: 5795673 - DNA, 25 bp, Homo sapien
ggcagtgccctggccgtggccagtg

SEQ ID NO: 5795674 - DNA, 25 bp, Homo sapien
tcccacagccccacacactgggagc

SEQ ID NO: 5795675 - DNA, 25 bp, Homo sapien
accatcagccctcaggaccctatta

SEQ ID NO: 5795676 - DNA, 25 bp, Homo sapien
actcgggccaggcctctggcctcta

SEQ ID NO: 5795677 - DNA, 25 bp, Homo sapien
tggaggaggctgaggaggctgaaga

SEQ ID NO: 5795678 - DNA, 25 bp, Homo sapien
agtgagggtctgacatgcccatgcc

SEQ ID NO: 5795679 - DNA, 25 bp, Homo sapien
gaagacagagaccgcggggccccag

SEQ ID NO: 5795680 - DNA, 25 bp, Homo sapien
gacattggtgagatcagccacgagg

SEQ ID NO: 5795681 - DNA, 25 bp, Homo sapien
ctatgggctgggcagtgccctggcc

SEQ ID NO: 5795682 - DNA, 25 bp, Homo sapien
acggccatctctgaccccagcccct

SEQ ID NO: 5795683 - DNA, 25 bp, Homo sapien
aaggaggttgactgttgcacccaca

SEQ ID NO: 5795684 - DNA, 25 bp, Homo sapien
cgcacctgcacaacgctgagctcag

SEQ ID NO: 5795685 - DNA, 25 bp, Homo sapien
gccacctatgccacagtgcctaagg

SEQ ID NO: 5795686 - DNA, 25 bp, Homo sapien
tggaggctgctgaacgaaagtgaca

SEQ ID NO: 5795687 - DNA, 25 bp, Homo sapien
tctgtctggctcactgccctgatga

SEQ ID NO: 5795688 - DNA, 25 bp, Homo sapien
tccaggctccagcagcaaagcccca

SEQ ID NO: 5795689 - DNA, 25 bp, Homo sapien
cggggggctttctgtctggctcact

SEQ ID NO: 5795690 - DNA, 25 bp, Homo sapien
gagccccgctgcctgtccccgggga

SEQ ID NO: 5795691 - DNA, 25 bp, Homo sapien
ggagctggccgtgtctcccactcag

SEQ ID NO: 5795692 - DNA, 25 bp, Homo sapien
ggacgctggtgcccatgcccgtgcg

SEQ ID NO: 5795693 - DNA, 25 bp, Homo sapien
actacaagtaccagcccaggcggcg

SEQ ID NO: 5795694 - DNA, 25 bp, Homo sapien
gttggactctttgcgaggaccccgg

SEQ ID NO: 5795695 - DNA, 25 bp, Homo sapien
acgctgagctcagcaagacgctggg

SEQ ID NO: 5795696 - DNA, 25 bp, Homo sapien
caccaccccccgcccagcccctgcc

SEQ ID NO: 5795697 - DNA, 25 bp, Homo sapien
ggaggagccccgctgcctgtccccg

SEQ ID NO: 5795698 - DNA, 25 bp, Homo sapien
catcccttcaatgccccctcccttt

SEQ ID NO: 5795699 - DNA, 25 bp, Homo sapien
ccccactatggctcagccttcccct

SEQ ID NO: 5795700 - DNA, 25 bp, Homo sapien
ctttgatgtggctgagttggaccag

SEQ ID NO: 5795701 - DNA, 25 bp, Homo sapien
cctgcgagccagcccggggccaggc

SEQ ID NO: 5795702 - DNA, 25 bp, Homo sapien
ccaggccatgtgagcagctactcag

SEQ ID NO: 5795703 - DNA, 25 bp, Homo sapien
ggaccagtacctgccgcccaatggg

SEQ ID NO: 5795704 - DNA, 25 bp, Homo sapien
gccaggtgctcagcggctacgactg

SEQ ID NO: 5795705 - DNA, 25 bp, Homo sapien
gccatccacctcacagatcgcctac

SEQ ID NO: 5795706 - DNA, 25 bp, Homo sapien
aggagaacaggctggacagaggaga

SEQ ID NO: 5795707 - DNA, 25 bp, Homo sapien
ccccgtgtgcatccgcgaggccgtc

SEQ ID NO: 5795708 - DNA, 25 bp, Homo sapien
cgcccagcccctgcccccagcctgt

SEQ ID NO: 5795709 - DNA, 25 bp, Homo sapien
atgggctgggcagtgccctggccgt

SEQ ID NO: 5795710 - DNA, 25 bp, Homo sapien
gagctgagccccgtgggctcggagg

SEQ ID NO: 5795711 - DNA, 25 bp, Homo sapien
gcggatcgggcctgcgagccagccc

SEQ ID NO: 5795712 - DNA, 25 bp, Homo sapien
ctgttccttgcccacctcaggcctg

SEQ ID NO: 5795713 - DNA, 25 bp, Homo sapien
cggcggcggcggatcgggcctgcga

SEQ ID NO: 5795714 - DNA, 25 bp, Homo sapien
gaccaccggcacccaggagagggct

SEQ ID NO: 5795715 - DNA, 25 bp, Homo sapien
gcccccagcctgtgtgccctgttcc

SEQ ID NO: 5795716 - DNA, 25 bp, Homo sapien
agagccatggcccacccacccctcc

SEQ ID NO: 5795717 - DNA, 25 bp, Homo sapien
tgactgttgcacccacactgaaaga

SEQ ID NO: 5795718 - DNA, 25 bp, Homo sapien
cagccacgaggtaatgtccaacatg

SEQ ID NO: 5795719 - DNA, 25 bp, Homo sapien
gccaccaccccccgcccagcccctg

SEQ ID NO: 5795720 - DNA, 25 bp, Homo sapien
gcgttggactctttgcgaggacccc

SEQ ID NO: 5795721 - DNA, 25 bp, Homo sapien
tacaagtaccagcccaggcggcgga

SEQ ID NO: 5795722 - DNA, 25 bp, Homo sapien
agatcgcctacacctccctcagcct

SEQ ID NO: 5795723 - DNA, 25 bp, Homo sapien
acccacccgccccatccaggctcca

SEQ ID NO: 5795724 - DNA, 25 bp, Homo sapien
tggggccctcgcagcggcccctcta

SEQ ID NO: 5795725 - DNA, 25 bp, Homo sapien
gactactctgaccatcagccctcag

SEQ ID NO: 5795726 - DNA, 25 bp, Homo sapien
ttggtggcatcggaggccttaccac

SEQ ID NO: 5795727 - DNA, 25 bp, Homo sapien
cctggccgtggccagtggacactcc

SEQ ID NO: 5795728 - DNA, 25 bp, Homo sapien
tggtggcagtggaggaggctgagga

SEQ ID NO: 5795729 - DNA, 25 bp, Homo sapien
tgacccacccgccccatccaggctc

SEQ ID NO: 5795730 - DNA, 25 bp, Homo sapien
gtcggggggctttctgtctggctca

SEQ ID NO: 5795731 - DNA, 25 bp, Homo sapien
gtcagatgggaaccccgagcacccc

SEQ ID NO: 5795732 - DNA, 25 bp, Homo sapien
ggcggcggcggcggatcgggcctgc

SEQ ID NO: 5795733 - DNA, 25 bp, Homo sapien
aggacggcgaggcggacgatgacaa

SEQ ID NO: 5795734 - DNA, 25 bp, Homo sapien
tgaacgaaagtgacaagcgcccctt

SEQ ID NO: 5795735 - DNA, 25 bp, Homo sapien
ggagcagcaggacggcgaggcggac

SEQ ID NO: 5795736 - DNA, 25 bp, Homo sapien
tgggaaccccgagcacccctcaggc

SEQ ID NO: 5795737 - DNA, 25 bp, Homo sapien
tactcagcagccggctatgggctgg

SEQ ID NO: 5795738 - DNA, 25 bp, Homo sapien
ggcccccacactacaccgaccagcc

SEQ ID NO: 5795739 - DNA, 25 bp, Homo sapien
ctttgcgaggaccccggcggctggc

SEQ ID NO: 5795740 - DNA, 25 bp, Homo sapien
ccgccgccatccaggcccactacaa

SEQ ID NO: 5795741 - DNA, 25 bp, Homo sapien
gctgagttggaccagtacctgccgc

SEQ ID NO: 5795742 - DNA, 25 bp, Homo sapien
cttcatggtgtgggctcaggcagcg

SEQ ID NO: 5795743 - DNA, 25 bp, Homo sapien
acagagctgcagtcgggcaaggcag

SEQ ID NO: 5795744 - DNA, 25 bp, Homo sapien
tcacagatcgcctacacctccctca

SEQ ID NO: 5795745 - DNA, 25 bp, Homo sapien
ggcgccagcaaaagcaagccgcacg

SEQ ID NO: 5795746 - DNA, 25 bp, Homo sapien
tgagagtagctttgaggagcctcat

SEQ ID NO: 5795747 - DNA, 25 bp, Homo sapien
aaagccccaggagaacaggctggac

SEQ ID NO: 5795748 - DNA, 25 bp, Homo sapien
gcaaggcagacccgaagcgggacgg

SEQ ID NO: 5795749 - DNA, 25 bp, Homo sapien
acacactgggagcagccagtatata

SEQ ID NO: 5795750 - DNA, 25 bp, Homo sapien
acgactggacgctggtgcccatgcc

SEQ ID NO: 5795751 - DNA, 25 bp, Homo sapien
gtccccggggagcgcgccctcgcta

SEQ ID NO: 5795752 - DNA, 25 bp, Homo sapien
agcaaggtgggaccgccgccatcca

SEQ ID NO: 5795753 - DNA, 25 bp, Homo sapien
cagcccctgcccccagcctgtgtgc

SEQ ID NO: 5795754 - DNA, 25 bp, Homo sapien
agccccaggagaacaggctggacag

SEQ ID NO: 5795755 - DNA, 25 bp, Homo sapien
aggcgagctgggcaaggtcaagaag

SEQ ID NO: 5795756 - DNA, 25 bp, Homo sapien
ccccagcccctcagggccccagtcc

SEQ ID NO: 5795757 - DNA, 25 bp, Homo sapien
ctcaccacctggtgtggatgccaaa

SEQ ID NO: 5795758 - DNA, 25 bp, Homo sapien
tgagcagctactcagcagccggcta

SEQ ID NO: 5795759 - DNA, 25 bp, Homo sapien
tatgactcctgttttctctctcaca

SEQ ID NO: 5795760 - DNA, 25 bp, Homo sapien
gcccctgcccccagcctgtgtgccc

SEQ ID NO: 5795761 - DNA, 25 bp, Homo sapien
aggaatgaccctctatcccaggacc

SEQ ID NO: 5795762 - DNA, 25 bp, Homo sapien
aggctggacagaggagaaggaggtt

SEQ ID NO: 5795763 - DNA, 25 bp, Homo sapien
gctgagccccgtgggctcggaggag

SEQ ID NO: 5795764 - DNA, 25 bp, Homo sapien
ccatgtcagatgggaaccccgagca

SEQ ID NO: 5795765 - DNA, 25 bp, Homo sapien
gtatatacgacactgtcccggccct

SEQ ID NO: 5795766 - DNA, 25 bp, Homo sapien
ggaggctgaggaggctgaagaggct

SEQ ID NO: 5795767 - DNA, 25 bp, Homo sapien
ctagggcccgacggcggcggcggcg

SEQ ID NO: 5795768 - DNA, 25 bp, Homo sapien
gtctcaccacctggtgtggatgcca

SEQ ID NO: 5795769 - DNA, 25 bp, Homo sapien
tctgaccatcagccctcaggaccct

SEQ ID NO: 5795770 - DNA, 25 bp, Homo sapien
cctatgccacagtgcctaagggcta

SEQ ID NO: 5795771 - DNA, 25 bp, Homo sapien
tacacctccctcagcctgccccact

SEQ ID NO: 5795772 - DNA, 25 bp, Homo sapien
cactacaccgaccagccatccacct

SEQ ID NO: 5795773 - DNA, 25 bp, Homo sapien
cacggtctcaccacctggtgtggat

SEQ ID NO: 5795774 - DNA, 25 bp, Homo sapien
agagctgcagtcgggcaaggcagac

SEQ ID NO: 5795775 - DNA, 25 bp, Homo sapien
ggtggtggcagtggaggaggctgag

SEQ ID NO: 5795776 - DNA, 25 bp, Homo sapien
tggaccaccggcacccaggagaggg

SEQ ID NO: 5795777 - DNA, 25 bp, Homo sapien
tcggccttctcctatatggggccct

SEQ ID NO: 5795778 - DNA, 25 bp, Homo sapien
atgggcacccaggccatgtgagcag

SEQ ID NO: 5795779 - DNA, 25 bp, Homo sapien
gcgaggcggacgatgacaagttccc

SEQ ID NO: 5795780 - DNA, 25 bp, Homo sapien
ccttaccactcctatgactcctgtt

SEQ ID NO: 5795781 - DNA, 25 bp, Homo sapien
acccgccccatccaggctccagcag

SEQ ID NO: 5795782 - DNA, 25 bp, Homo sapien
aaggcaggaaggagttggcacagag

SEQ ID NO: 5795783 - DNA, 25 bp, Homo sapien
tgacaagcgccccttcatcgaggag

SEQ ID NO: 5795784 - DNA, 25 bp, Homo sapien
atgcccgtgcgcgtcaacggcgcca

SEQ ID NO: 5795785 - DNA, 25 bp, Homo sapien
agaaggagcagcaggacggcgaggc

SEQ ID NO: 5795786 - DNA, 25 bp, Homo sapien
ggagcgcgccctcgctagggcccga

SEQ ID NO: 5795787 - DNA, 25 bp, Homo sapien
caccccgaagacagagctgcagtcg

SEQ ID NO: 5795788 - DNA, 25 bp, Homo sapien
gaccacccggactacaagtaccagc

SEQ ID NO: 5795789 - DNA, 25 bp, Homo sapien
agggcccgacggcggcggcggcgga

SEQ ID NO: 5795790 - DNA, 25 bp, Homo sapien
cctgtcgccaccaccccccgcccag

SEQ ID NO: 5795791 - DNA, 25 bp, Homo sapien
gccccatccaggctccagcagcaaa

SEQ ID NO: 5795792 - DNA, 25 bp, Homo sapien
ggccgtcagccaggtgctcagcggc

SEQ ID NO: 5795793 - DNA, 25 bp, Homo sapien
cccagagactgtgcccggagctggc

SEQ ID NO: 5795794 - DNA, 25 bp, Homo sapien
aggccgcccagggcgaggcggagtg

SEQ ID NO: 5795795 - DNA, 25 bp, Homo sapien
ccctgatgacccacccgccccatcc

SEQ ID NO: 5795796 - DNA, 25 bp, Homo sapien
gccatgtgagcagctactcagcagc

SEQ ID NO: 5795797 - DNA, 25 bp, Homo sapien
tatggggccctcgcagcggcccctc

SEQ ID NO: 5795798 - DNA, 25 bp, Homo sapien
aggggctgagagtagctttgaggag

SEQ ID NO: 5795799 - DNA, 25 bp, Homo sapien
gccacccagagactgtgcccggagc

SEQ ID NO: 5795800 - DNA, 25 bp, Homo sapien
ctggacgctggtgcccatgcccgtg

SEQ ID NO: 5795801 - DNA, 25 bp, Homo sapien
gacggcgaggcggacgatgacaagt

SEQ ID NO: 5795802 - DNA, 25 bp, Homo sapien
ggactacaagtaccagcccaggcgg

SEQ ID NO: 5795803 - DNA, 25 bp, Homo sapien
ctctgaccccagcccctcagggccc

SEQ ID NO: 5795804 - DNA, 25 bp, Homo sapien
acatgcccatgccacctatgccaca

SEQ ID NO: 5795805 - DNA, 25 bp, Homo sapien
tggagctgagccccgtgggctcgga

SEQ ID NO: 5795806 - DNA, 25 bp, Homo sapien
ggccgtgtctcccactcaggggctg

SEQ ID NO: 5795807 - DNA, 25 bp, Homo sapien
gctctggaggctgctgaacgaaagt

SEQ ID NO: 5795808 - DNA, 25 bp, Homo sapien
cccacctcaggcctggtggtggcag

SEQ ID NO: 5795809 - DNA, 25 bp, Homo sapien
ccacactgaaagatgaggggctgca

SEQ ID NO: 5795810 - DNA, 25 bp, Homo sapien
gtgcgcgtcaacggcgccagcaaaa

SEQ ID NO: 5795811 - DNA, 25 bp, Homo sapien
gaggctgaagaggctgacaggtcgg

SEQ ID NO: 5795812 - DNA, 25 bp, Homo sapien
ccccggggagcgcgccctcgctagg

SEQ ID NO: 5795813 - DNA, 25 bp, Homo sapien
agggtctgacatgcccatgccacct

SEQ ID NO: 5795814 - DNA, 25 bp, Homo sapien
tgactcctgttttctctctcacaga

SEQ ID NO: 5795815 - DNA, 25 bp, Homo sapien
cggaggagcaggacctatcggaggt

SEQ ID NO: 5795816 - DNA, 25 bp, Homo sapien
gatctccaagccaccaggcgtggct

SEQ ID NO: 5795817 - DNA, 25 bp, Homo sapien
acctgccgcccaatgggcacccagg

SEQ ID NO: 5795818 - DNA, 25 bp, Homo sapien
tgtgagcagctactcagcagccggc

SEQ ID NO: 5795819 - DNA, 25 bp, Homo sapien
atgcagcacaagaaagaccacccgg

SEQ ID NO: 5795820 - DNA, 25 bp, Homo sapien
ctgggcaagctctggaggctgctga

SEQ ID NO: 5795821 - DNA, 25 bp, Homo sapien
gaccctctatcccaggacctgagaa

SEQ ID NO: 5795822 - DNA, 25 bp, Homo sapien
ggtgtgggctcaggcagcgcgcagg

SEQ ID NO: 5795823 - DNA, 25 bp, Homo sapien
cacctgcacaacgctgagctcagca

SEQ ID NO: 5795824 - DNA, 25 bp, Homo sapien
gcgggaagcctcacatcgacttcgg

SEQ ID NO: 5795825 - DNA, 25 bp, Homo sapien
gccagccgccggggtcctcgcaaag

SEQ ID NO: 5795826 - DNA, 25 bp, Homo sapien
aggagggtgagcaggcccttctcag

SEQ ID NO: 5795827 - DNA, 25 bp, Homo sapien
tggtccgcgagcttcctgcgcgctg

SEQ ID NO: 5795828 - DNA, 25 bp, Homo sapien
cctccccgaggagggtgagcaggcc

SEQ ID NO: 5795829 - DNA, 25 bp, Homo sapien
gcccttctcaggtcctgggatagag

SEQ ID NO: 5795830 - DNA, 25 bp, Homo sapien
ggtctccatgttggacattacctcg

SEQ ID NO: 5795831 - DNA, 25 bp, Homo sapien
actgtggcataggtggcatgggcat

SEQ ID NO: 5795832 - DNA, 25 bp, Homo sapien
agggagggggcattgaagggatgag

SEQ ID NO: 5795833 - DNA, 25 bp, Homo sapien
ctggccccgggctggctcgcaggcc

SEQ ID NO: 5795834 - DNA, 25 bp, Homo sapien
tagccgctgagcacctggctgacgg

SEQ ID NO: 5795835 - DNA, 25 bp, Homo sapien
ctgggctttggcatccacaccaggt

SEQ ID NO: 5795836 - DNA, 25 bp, Homo sapien
caatgtccacgttgccgaagtcgat

SEQ ID NO: 5795837 - DNA, 25 bp, Homo sapien
cctgggtgccggtggtccaagtggg

SEQ ID NO: 5795838 - DNA, 25 bp, Homo sapien
tccttctcctctgtccagcctgttc

SEQ ID NO: 5795839 - DNA, 25 bp, Homo sapien
gccgccgccgtcgggccctagcgag

SEQ ID NO: 5795840 - DNA, 25 bp, Homo sapien
aaagccccccgacctgtcagcctct

SEQ ID NO: 5795841 - DNA, 25 bp, Homo sapien
cccatggagcgcccgtcccgcttcg

SEQ ID NO: 5795842 - DNA, 25 bp, Homo sapien
gctgagccatagtggggcaggctga

SEQ ID NO: 5795843 - DNA, 25 bp, Homo sapien
cggatgcacacggggaacttgtcat

SEQ ID NO: 5795844 - DNA, 25 bp, Homo sapien
tctcctctgtccagcctgttctcct

SEQ ID NO: 5795845 - DNA, 25 bp, Homo sapien
tccagtcgtagccgctgagcacctg

SEQ ID NO: 5795846 - DNA, 25 bp, Homo sapien
atggtcagagtagtcaaactggggg

SEQ ID NO: 5795847 - DNA, 25 bp, Homo sapien
tctccatgttggacattacctcgtg

SEQ ID NO: 5795848 - DNA, 25 bp, Homo sapien
caatgaggctcctcaaagctactct

SEQ ID NO: 5795849 - DNA, 25 bp, Homo sapien
cccgcttcgggtctgccttgcccga

SEQ ID NO: 5795850 - DNA, 25 bp, Homo sapien
tccgccgccgccgccgtcgggccct

SEQ ID NO: 5795851 - DNA, 25 bp, Homo sapien
ggcatgtcagaccctcactatctgt

SEQ ID NO: 5795852 - DNA, 25 bp, Homo sapien
ctccagagcttgcccagcgtcttgc

SEQ ID NO: 5795853 - DNA, 25 bp, Homo sapien
atagtggggcaggctgagggaggtg

SEQ ID NO: 5795854 - DNA, 25 bp, Homo sapien
gggctttggcatccacaccaggtgg

SEQ ID NO: 5795855 - DNA, 25 bp, Homo sapien
gggctggctcgcaggcccgatccgc

SEQ ID NO: 5795856 - DNA, 25 bp, Homo sapien
atggggcgggtgggtcatcagggca

SEQ ID NO: 5795857 - DNA, 25 bp, Homo sapien
cagcggggctcctccgagcccacgg

SEQ ID NO: 5795858 - DNA, 25 bp, Homo sapien
tgtgagagagaaaacaggagtcata

SEQ ID NO: 5795859 - DNA, 25 bp, Homo sapien
tgggtgcaacagtcaacctccttct

SEQ ID NO: 5795860 - DNA, 25 bp, Homo sapien
tctgtgaggtggatggctggtcggt

SEQ ID NO: 5795861 - DNA, 25 bp, Homo sapien
gccgccggggtcctcgcaaagagtc

SEQ ID NO: 5795862 - DNA, 25 bp, Homo sapien
cctgaggtgggcaaggaacagggca

SEQ ID NO: 5795863 - DNA, 25 bp, Homo sapien
gagacacggccagctccgggcacag

SEQ ID NO: 5795864 - DNA, 25 bp, Homo sapien
agatccaggcggagtgtccactggc

SEQ ID NO: 5795865 - DNA, 25 bp, Homo sapien
agcctgttctcctggggctttgctg

SEQ ID NO: 5795866 - DNA, 25 bp, Homo sapien
gccatggctctggcctgaggggtgc

SEQ ID NO: 5795867 - DNA, 25 bp, Homo sapien
tggtgagaccgtgggcagagccacg

SEQ ID NO: 5795868 - DNA, 25 bp, Homo sapien
tgctcggggttcccatctgacatgg

SEQ ID NO: 5795869 - DNA, 25 bp, Homo sapien
gcctcgccgtcctgctgctccttct

SEQ ID NO: 5795870 - DNA, 25 bp, Homo sapien
ggctgatctcaccaatgtccacgtt

SEQ ID NO: 5795871 - DNA, 25 bp, Homo sapien
cgggtgggtcatcagggcagtgagc

SEQ ID NO: 5795872 - DNA, 25 bp, Homo sapien
gccttgcccgactgcagctctgtct

SEQ ID NO: 5795873 - DNA, 25 bp, Homo sapien
tcccatctgacatgggggagccctc

SEQ ID NO: 5795874 - DNA, 25 bp, Homo sapien
tgtgaggcttcccgccctcccccat

SEQ ID NO: 5795875 - DNA, 25 bp, Homo sapien
gcgagcttcctgcgcgctgcctgag

SEQ ID NO: 5795876 - DNA, 25 bp, Homo sapien
acacaggctgggggcaggggctggg

SEQ ID NO: 5795877 - DNA, 25 bp, Homo sapien
ggaggggaaggctgagccatagtgg

SEQ ID NO: 5795878 - DNA, 25 bp, Homo sapien
gatgtgaggcttcccgccctccccc

SEQ ID NO: 5795879 - DNA, 25 bp, Homo sapien
tcaacctccttctcctctgtccagc

SEQ ID NO: 5795880 - DNA, 25 bp, Homo sapien
cagcctcctcgatgaaggggcgctt

SEQ ID NO: 5795881 - DNA, 25 bp, Homo sapien
ctgagcccacaccatgaaggcgttc

SEQ ID NO: 5795882 - DNA, 25 bp, Homo sapien
cgctcagcctcctcgatgaaggggc

SEQ ID NO: 5795883 - DNA, 25 bp, Homo sapien
ctgcctgagcccacaccatgaaggc

SEQ ID NO: 5795884 - DNA, 25 bp, Homo sapien
agggcactgcccagcccatagccgg

SEQ ID NO: 5795885 - DNA, 25 bp, Homo sapien
gtagctgctcacatggcctgggtgc

SEQ ID NO: 5795886 - DNA, 25 bp, Homo sapien
ggtggtgagaccgtgggcagagcca

SEQ ID NO: 5795887 - DNA, 25 bp, Homo sapien
cgccgccgtcgggccctagcgaggg

SEQ ID NO: 5795888 - DNA, 25 bp, Homo sapien
tgtgggtgcaacagtcaacctcctt

SEQ ID NO: 5795889 - DNA, 25 bp, Homo sapien
gatagagggtcattcctgggggaag

SEQ ID NO: 5795890 - DNA, 25 bp, Homo sapien
caccagcgtccagtcgtagccgctg

SEQ ID NO: 5795891 - DNA, 25 bp, Homo sapien
gcctgagcccacaccatgaaggcgt

SEQ ID NO: 5795892 - DNA, 25 bp, Homo sapien
ggcctagcccttaggcactgtggca

SEQ ID NO: 5795893 - DNA, 25 bp, Homo sapien
tcactttcgttcagcagcctccaga

SEQ ID NO: 5795894 - DNA, 25 bp, Homo sapien
tgtcagcctcttcagcctcctcagc

SEQ ID NO: 5795895 - DNA, 25 bp, Homo sapien
gctgcatacggagccgctcagcctc

SEQ ID NO: 5795896 - DNA, 25 bp, Homo sapien
gtggctgatctcaccaatgtccacg

SEQ ID NO: 5795897 - DNA, 25 bp, Homo sapien
tgatggtcagagtagtcaaactggg

SEQ ID NO: 5795898 - DNA, 25 bp, Homo sapien
catctttcagtgtgggtgcaacagt

SEQ ID NO: 5795899 - DNA, 25 bp, Homo sapien
ccaagtgggcgctcttgtagtgggc

SEQ ID NO: 5795900 - DNA, 25 bp, Homo sapien
gtgccaactccttcctgccttcaga

SEQ ID NO: 5795901 - DNA, 25 bp, Homo sapien
gggcgctcttgtagtgggcctggat

SEQ ID NO: 5795902 - DNA, 25 bp, Homo sapien
agagagaaaacaggagtcataggag

SEQ ID NO: 5795903 - DNA, 25 bp, Homo sapien
ctcctccgagcccacggggctcagc

SEQ ID NO: 5795904 - DNA, 25 bp, Homo sapien
gagtggtaaggcctccgatgccacc

SEQ ID NO: 5795905 - DNA, 25 bp, Homo sapien
ggcgggtgggtcatcagggcagtga

SEQ ID NO: 5795906 - DNA, 25 bp, Homo sapien
tgtgggactggggccctgaggggct

SEQ ID NO: 5795907 - DNA, 25 bp, Homo sapien
gggccagccgccggggtcctcgcaa

SEQ ID NO: 5795908 - DNA, 25 bp, Homo sapien
ctgcccagcccatagccggctgctg

SEQ ID NO: 5795909 - DNA, 25 bp, Homo sapien
ccggggcactccgcctcgccctggg

SEQ ID NO: 5795910 - DNA, 25 bp, Homo sapien
ctctgtcttcacctgggctttggca

SEQ ID NO: 5795911 - DNA, 25 bp, Homo sapien
tttcagtgtgggtgcaacagtcaac

SEQ ID NO: 5795912 - DNA, 25 bp, Homo sapien
tgggcctggatggcggcggtcccac

SEQ ID NO: 5795913 - DNA, 25 bp, Homo sapien
tcgggccctagcgagggcgcgctcc

SEQ ID NO: 5795914 - DNA, 25 bp, Homo sapien
ggcgggagatggaggggaaggctga

SEQ ID NO: 5795915 - DNA, 25 bp, Homo sapien
ccgctgcgagggccccatataggag

SEQ ID NO: 5795916 - DNA, 25 bp, Homo sapien
gggcggcaggtactggtccaactca

SEQ ID NO: 5795917 - DNA, 25 bp, Homo sapien
ccgcctgggctggtacttgtagtcc

SEQ ID NO: 5795918 - DNA, 25 bp, Homo sapien
tggccataatagggtcctgagggct

SEQ ID NO: 5795919 - DNA, 25 bp, Homo sapien
tatctgtgagagagaaaacaggagt

SEQ ID NO: 5795920 - DNA, 25 bp, Homo sapien
gggaaggctgagccatagtggggca

SEQ ID NO: 5795921 - DNA, 25 bp, Homo sapien
tggggctttgctgctggagcctgga

SEQ ID NO: 5795922 - DNA, 25 bp, Homo sapien
gcccgatccgccgccgccgccgtcg

SEQ ID NO: 5795923 - DNA, 25 bp, Homo sapien
tggtggcgacagggccccctttagg

SEQ ID NO: 5795924 - DNA, 25 bp, Homo sapien
tccgggcacagtctctgggtggcct

SEQ ID NO: 5795925 - DNA, 25 bp, Homo sapien
gagcttcctgcgcgctgcctgagcc

SEQ ID NO: 5795926 - DNA, 25 bp, Homo sapien
tgctgagctcagcgttgtgcaggtg

SEQ ID NO: 5795927 - DNA, 25 bp, Homo sapien
gagccgctcagcctcctcgatgaag

SEQ ID NO: 5795928 - DNA, 25 bp, Homo sapien
cgctgcctgagcccacaccatgaag

SEQ ID NO: 5795929 - DNA, 25 bp, Homo sapien
cattcctgggggaaggtgcagcccc

SEQ ID NO: 5795930 - DNA, 25 bp, Homo sapien
cgttgacgcgcacgggcatgggcac

SEQ ID NO: 5795931 - DNA, 25 bp, Homo sapien
cgcttgtcactttcgttcagcagcc

SEQ ID NO: 5795932 - DNA, 25 bp, Homo sapien
gtggcctagcccttaggcactgtgg

SEQ ID NO: 5795933 - DNA, 25 bp, Homo sapien
gaagggatgagaactccactaagtc

SEQ ID NO: 5795934 - DNA, 25 bp, Homo sapien
tcttcagcctcctcagcctcctcca

SEQ ID NO: 5795935 - DNA, 25 bp, Homo sapien
taaggcctccgatgccaccaaccct

SEQ ID NO: 5795936 - DNA, 25 bp, Homo sapien
gtagtgggcctggatggcggcggtc

SEQ ID NO: 5795937 - DNA, 25 bp, Homo sapien
gatccgccgccgccgccgtcgggcc

SEQ ID NO: 5795938 - DNA, 25 bp, Homo sapien
ccagtgtgtggggctgtgggactgg

SEQ ID NO: 5795939 - DNA, 25 bp, Homo sapien
gggtggtctttcttgtgctgcatac

SEQ ID NO: 5795940 - DNA, 25 bp, Homo sapien
atctgacatgggggagccctctcct

SEQ ID NO: 5795941 - DNA, 25 bp, Homo sapien
ggggccgctgcgagggccccatata

SEQ ID NO: 5795942 - DNA, 25 bp, Homo sapien
gcctggtggcttggagatccaggcg

SEQ ID NO: 5795943 - DNA, 25 bp, Homo sapien
tgcaacagtcaacctccttctcctc

SEQ ID NO: 5795944 - DNA, 25 bp, Homo sapien
ctgccttgcccgactgcagctctgt

SEQ ID NO: 5795945 - DNA, 25 bp, Homo sapien
ccgtcccgcttcgggtctgccttgc

SEQ ID NO: 5795946 - DNA, 25 bp, Homo sapien
tggtccaagtgggcgctcttgtagt

SEQ ID NO: 5795947 - DNA, 25 bp, Homo sapien
gggacaggcagcggggctcctccga

SEQ ID NO: 5795948 - DNA, 25 bp, Homo sapien
gagggctgatggtcagagtagtcaa

SEQ ID NO: 5795949 - DNA, 25 bp, Homo sapien
ttgtgctgcatacggagccgctcag

SEQ ID NO: 5795950 - DNA, 25 bp, Homo sapien
gcctcctccactgccaccaccaggc

SEQ ID NO: 5795951 - DNA, 25 bp, Homo sapien
ttgaccttgcccagctcgcctggcc

SEQ ID NO: 5795952 - DNA, 25 bp, Homo sapien
cctcaaagctactctcagcccctga

SEQ ID NO: 5795953 - DNA, 25 bp, Homo sapien
ttgggcggcaggtactggtccaact

SEQ ID NO: 5795954 - DNA, 25 bp, Homo sapien
cgctgagcacctggctgacggcctc

SEQ ID NO: 5795955 - DNA, 25 bp, Homo sapien
ccggggtcctcgcaaagagtccaac

SEQ ID NO: 5795956 - DNA, 25 bp, Homo sapien
cccagcgtcttgctgagctcagcgt

SEQ ID NO: 5795957 - DNA, 25 bp, Homo sapien
tgtggcataggtggcatgggcatgt

SEQ ID NO: 5795958 - DNA, 25 bp, Homo sapien
agccagacagaaagccccccgacct

SEQ ID NO: 5795959 - DNA, 25 bp, Homo sapien
ggagatggaggggaaggctgagcca

SEQ ID NO: 5795960 - DNA, 25 bp, Homo sapien
ccgatgccaccaaccctggtgcttc

SEQ ID NO: 5795961 - DNA, 25 bp, Homo sapien
tgtcagaccctcactatctgtgaga

SEQ ID NO: 5795962 - DNA, 25 bp, Homo sapien
ctgagtagctgctcacatggcctgg

SEQ ID NO: 5795963 - DNA, 25 bp, Homo sapien
tcatcagggcagtgagccagacaga

SEQ ID NO: 5795964 - DNA, 25 bp, Homo sapien
tgcatacggagccgctcagcctcct

SEQ ID NO: 5795965 - DNA, 25 bp, Homo sapien
aacaggagtcataggagtggtaagg

SEQ ID NO: 5795966 - DNA, 25 bp, Homo sapien
tggagcgcccgtcccgcttcgggtc

SEQ ID NO: 5795967 - DNA, 25 bp, Homo sapien
tggcctgaggggtgctcggggttcc

SEQ ID NO: 5795968 - DNA, 25 bp, Homo sapien
gcacctggctgacggcctcgcggat

SEQ ID NO: 5795969 - DNA, 25 bp, Homo sapien
gctcacatggcctgggtgcccattg

SEQ ID NO: 5795970 - DNA, 25 bp, Homo sapien
cataatagggtcctgagggctgatg

SEQ ID NO: 5795971 - DNA, 25 bp, Homo sapien
acatggcctgggtgcccattgggcg

SEQ ID NO: 5795972 - DNA, 25 bp, Homo sapien
gctggagcctggatggggcgggtgg

SEQ ID NO: 5795973 - DNA, 25 bp, Homo sapien
ttgacgcgcacgggcatgggcacca

SEQ ID NO: 5795974 - DNA, 25 bp, Homo sapien
cgggcatgggcaccagcgtccagtc

SEQ ID NO: 5795975 - DNA, 25 bp, Homo sapien
tacttgtagtccgggtggtctttct

SEQ ID NO: 5795976 - DNA, 25 bp, Homo sapien
cctgggggaaggtgcagcccctcat

SEQ ID NO: 5795977 - DNA, 25 bp, Homo sapien
tcgcaggcccgatccgccgccgccg

SEQ ID NO: 5795978 - DNA, 25 bp, Homo sapien
gcctcctcgatgaaggggcgcttgt

SEQ ID NO: 5795979 - DNA, 25 bp, Homo sapien
caaactgggggcgggagatggaggg

SEQ ID NO: 5795980 - DNA, 25 bp, Homo sapien
ggtcggtgtagtgtgggggcccctg

SEQ ID NO: 5795981 - DNA, 25 bp, Homo sapien
caacagtcaacctccttctcctctg

SEQ ID NO: 5795982 - DNA, 25 bp, Homo sapien
catggagcgcccgtcccgcttcggg

SEQ ID NO: 5795983 - DNA, 25 bp, Homo sapien
tccttcttgaccttgcccagctcgc

SEQ ID NO: 5795984 - DNA, 25 bp, Homo sapien
tggcggcggtcccaccttgctcggc

SEQ ID NO: 5795985 - DNA, 25 bp, Homo sapien
tggcttggagatccaggcggagtgt

SEQ ID NO: 5795986 - DNA, 25 bp, Homo sapien
ctcccccatggagcgcccgtcccgc

SEQ ID NO: 5795987 - DNA, 25 bp, Homo sapien
ggaaggtgcagcccctcatctttca

SEQ ID NO: 5795988 - DNA, 25 bp, Homo sapien
ggcctgggtgcccattgggcggcag

SEQ ID NO: 5795989 - DNA, 25 bp, Homo sapien
tgggtgccggtggtccaagtgggcg

SEQ ID NO: 5795990 - DNA, 25 bp, Homo sapien
cgcaaagagtccaacgcccacctcc

SEQ ID NO: 5795991 - DNA, 25 bp, Homo sapien
cttgctcggcctccccaccggggca

SEQ ID NO: 5795992 - DNA, 25 bp, Homo sapien
aggcccgatccgccgccgccgccgt

SEQ ID NO: 5795993 - DNA, 25 bp, Homo sapien
tcgtccgcctcgccgtcctgctgct

SEQ ID NO: 5795994 - DNA, 25 bp, Homo sapien
cggagccgctcagcctcctcgatga

SEQ ID NO: 5795995 - DNA, 25 bp, Homo sapien
aggtggatggctggtcggtgtagtg

SEQ ID NO: 5795996 - DNA, 25 bp, Homo sapien
gggcctctgtgccaactccttcctg

SEQ ID NO: 5795997 - DNA, 25 bp, Homo sapien
catagccggctgctgagtagctgct

SEQ ID NO: 5795998 - DNA, 25 bp, Homo sapien
gcaggcccgatccgccgccgccgcc

SEQ ID NO: 5795999 - DNA, 25 bp, Homo sapien
taatagggtcctgagggctgatggt

SEQ ID NO: 5796000 - DNA, 25 bp, Homo sapien
tccactaagtccctcgaacccccca

SEQ ID NO: 5796001 - DNA, 25 bp, Homo sapien
ggggctgggcggggggtggtggcga

SEQ ID NO: 5796002 - DNA, 25 bp, Homo sapien
gagtgggagacacggccagctccgg

SEQ ID NO: 5796003 - DNA, 25 bp, Homo sapien
cgagcccacggggctcagctccacc

SEQ ID NO: 5796004 - DNA, 25 bp, Homo sapien
cgggcacagtctctgggtggcctag

SEQ ID NO: 5796005 - DNA, 25 bp, Homo sapien
ttttgctggcgccgttgacgcgcac

SEQ ID NO: 5796006 - DNA, 25 bp, Homo sapien
ggtcctgggatagagggtcattcct

SEQ ID NO: 5796007 - DNA, 25 bp, Homo sapien
cttgtagtccgggtggtctttcttg

SEQ ID NO: 5796008 - DNA, 25 bp, Homo sapien
gccagctccgggcacagtctctggg

SEQ ID NO: 5796009 - DNA, 25 bp, Homo sapien
aaggggcgcttgtcactttcgttca

SEQ ID NO: 5796010 - DNA, 25 bp, Homo sapien
gggtggcctagcccttaggcactgt

SEQ ID NO: 5796011 - DNA, 25 bp, Homo sapien
gtctctgtcttcacctgggctttgg

SEQ ID NO: 5796012 - DNA, 25 bp, Homo sapien
gaggctcctcaaagctactctcagc

SEQ ID NO: 5796013 - DNA, 25 bp, Homo sapien
tcagctccacctccgataggtcctg

SEQ ID NO: 5796014 - DNA, 25 bp, Homo sapien
cgtgcggcttgcttttgctggcgcc

SEQ ID NO: 5796015 - DNA, 25 bp, Homo sapien
cgccgcctgggctggtacttgtagt

SEQ ID NO: 5796016 - DNA, 25 bp, Homo sapien
cgcggtctctgtcttcacctgggct

SEQ ID NO: 5796017 - DNA, 25 bp, Homo sapien
cctgggtgcccattgggcggcaggt

SEQ ID NO: 5796018 - DNA, 25 bp, Homo sapien
ggcggtcccaccttgctcggcctcc

SEQ ID NO: 5796019 - DNA, 25 bp, Homo sapien
ccctcatctttcagtgtgggtgcaa

SEQ ID NO: 5796020 - DNA, 25 bp, Homo sapien
gtcatcgtccgcctcgccgtcctgc

SEQ ID NO: 5796021 - DNA, 25 bp, Homo sapien
tgcccagctcgcctggccccgggct

SEQ ID NO: 5796022 - DNA, 25 bp, Homo sapien
cagctccgggcacagtctctgggtg

SEQ ID NO: 5796023 - DNA, 25 bp, Homo sapien
tagaggggccgctgcgagggcccca

SEQ ID NO: 5796024 - DNA, 25 bp, Homo sapien
gtgagcaggcccttctcaggtcctg

SEQ ID NO: 5796025 - DNA, 25 bp, Homo sapien
cagcctcctccactgccaccaccag

SEQ ID NO: 5796026 - DNA, 25 bp, Homo sapien
ttgacgtgcggcttgcttttgctgg

SEQ ID NO: 5796027 - DNA, 25 bp, Homo sapien
caggtactggtccaactcagccaca

SEQ ID NO: 5796028 - DNA, 25 bp, Homo sapien
gggctgatggtcagagtagtcaaac

SEQ ID NO: 5796029 - DNA, 25 bp, Homo sapien
tgaaggggcgcttgtcactttcgtt

SEQ ID NO: 5796030 - DNA, 25 bp, Homo sapien
gccggctgctgagtagctgctcaca

SEQ ID NO: 5796031 - DNA, 25 bp, Homo sapien
ttctcctggggctttgctgctggag

SEQ ID NO: 5796032 - DNA, 25 bp, Homo sapien
atagggtcctgagggctgatggtca

SEQ ID NO: 5796033 - DNA, 25 bp, Homo sapien
gagggtcattcctgggggaaggtgc

SEQ ID NO: 5796034 - DNA, 25 bp, Homo sapien
cctagcgagggcgcgctccccgggg

SEQ ID NO: 5796035 - DNA, 25 bp, Homo sapien
ttttttttcagggggcctctgtgcc

SEQ ID NO: 5796036 - DNA, 25 bp, Homo sapien
cgagggccccatataggagaaggcc

SEQ ID NO: 5796037 - DNA, 25 bp, Homo sapien
agccatagtggggcaggctgaggga

SEQ ID NO: 5796038 - DNA, 25 bp, Homo sapien
tggggctgtgggactggggccctga

SEQ ID NO: 5796039 - DNA, 25 bp, Homo sapien
gacatgggggagccctctcctgggt

SEQ ID NO: 5796040 - DNA, 25 bp, Homo sapien
atccacaccaggtggtgagaccgtg

SEQ ID NO: 5796041 - DNA, 25 bp, Homo sapien
ccatagtggggcaggctgagggagg

SEQ ID NO: 5796042 - DNA, 25 bp, Homo sapien
cctgtcagcctcttcagcctcctca

SEQ ID NO: 5796043 - DNA, 25 bp, Homo sapien
gtggtctttcttgtgctgcatacgg

SEQ ID NO: 5796044 - DNA, 25 bp, Homo sapien
gccgttgacgcgcacgggcatgggc

SEQ ID NO: 5796045 - DNA, 25 bp, Homo sapien
cagcgtcttgctgagctcagcgttg

SEQ ID NO: 5796046 - DNA, 25 bp, Homo sapien
ttttcagggggcctctgtgccaact

SEQ ID NO: 5796047 - DNA, 25 bp, Homo sapien
catggctctggcctgaggggtgctc

SEQ ID NO: 5796048 - DNA, 25 bp, Homo sapien
gacgcgcacgggcatgggcaccagc

SEQ ID NO: 5796049 - DNA, 25 bp, Homo sapien
aggtgcgggtactggtccgcgagct

SEQ ID NO: 5796050 - DNA, 25 bp, Homo sapien
tcgtggctgatctcaccaatgtcca

SEQ ID NO: 5796051 - DNA, 25 bp, Homo sapien
cacacggggaacttgtcatcgtccg

SEQ ID NO: 5796052 - DNA, 25 bp, Homo sapien
gggtgggccatggctctggcctgag

SEQ ID NO: 5796053 - DNA, 25 bp, Homo sapien
ggctgctcccagtgtgtggggctgt

SEQ ID NO: 5796054 - DNA, 25 bp, Homo sapien
ggccccatataggagaaggccgagt

SEQ ID NO: 5796055 - DNA, 25 bp, Homo sapien
gggtactggtccgcgagcttcctgc

SEQ ID NO: 5796056 - DNA, 25 bp, Homo sapien
gcccttaggcactgtggcataggtg

SEQ ID NO: 5796057 - DNA, 25 bp, Homo sapien
cttgcccagctcgcctggccccggg

SEQ ID NO: 5796058 - DNA, 25 bp, Homo sapien
tgagccagacagaaagccccccgac

SEQ ID NO: 5796059 - DNA, 25 bp, Homo sapien
tgcggcttgcttttgctggcgccgt

SEQ ID NO: 5796060 - DNA, 25 bp, Homo sapien
ggggcattgaagggatgagaactcc

SEQ ID NO: 5796061 - DNA, 25 bp, Homo sapien
tgctgctggagcctggatggggcgg

SEQ ID NO: 5796062 - DNA, 25 bp, Homo sapien
cgttgtgcaggtgcgggtactggtc

SEQ ID NO: 5796063 - DNA, 25 bp, Homo sapien
cggggctcagctccacctccgatag

SEQ ID NO: 5796064 - DNA, 25 bp, Homo sapien
ctcagcccctgagtgggagacacgg

SEQ ID NO: 5796065 - DNA, 25 bp, Homo sapien
ccagcctgttctcctggggctttgc

SEQ ID NO: 5796066 - DNA, 25 bp, Homo sapien
catgtcagaccctcactatctgtga

SEQ ID NO: 5796067 - DNA, 25 bp, Homo sapien
tatactggctgctcccagtgtgtgg

SEQ ID NO: 5796068 - DNA, 25 bp, Homo sapien
aggccgagtagaggccagaggcctg

SEQ ID NO: 5796069 - DNA, 25 bp, Homo sapien
gacacggccagctccgggcacagtc

SEQ ID NO: 5796070 - DNA, 25 bp, Homo sapien
tagtccgggtggtctttcttgtgct

SEQ ID NO: 5796071 - DNA, 25 bp, Homo sapien
gcataggtggcatgggcatgtcaga

SEQ ID NO: 5796072 - DNA, 25 bp, Homo sapien
ctgctcccagtgtgtggggctgtgg

SEQ ID NO: 5796073 - DNA, 25 bp, Homo sapien
cgccgtcctgctgctccttcttgac

SEQ ID NO: 5796074 - DNA, 25 bp, Homo sapien
gaggggtgctcggggttcccatctg

SEQ ID NO: 5796075 - DNA, 25 bp, Homo sapien
cagccgccggggtcctcgcaaagag

SEQ ID NO: 5796076 - DNA, 25 bp, Homo sapien
gccctagcgagggcgcgctccccgg

SEQ ID NO: 5796077 - DNA, 25 bp, Homo sapien
gaagtcgatgtgaggcttcccgccc

SEQ ID NO: 5796078 - DNA, 25 bp, Homo sapien
gctgctgagtagctgctcacatggc

SEQ ID NO: 5796079 - DNA, 25 bp, Homo sapien
gtcccgcttcgggtctgccttgccc

SEQ ID NO: 5796080 - DNA, 25 bp, Homo sapien
ttcatgggccgcttgacgtgcggct

SEQ ID NO: 5796081 - DNA, 25 bp, Homo sapien
gcaggctgagggaggtgtaggcgat

SEQ ID NO: 5796082 - DNA, 25 bp, Homo sapien
agaaaacaggagtcataggagtggt

SEQ ID NO: 5796083 - DNA, 25 bp, Homo sapien
ggggagccctctcctgggtgccggt

SEQ ID NO: 5796084 - DNA, 25 bp, Homo sapien
gagggcgcgctccccggggacaggc

SEQ ID NO: 5796085 - DNA, 25 bp, Homo sapien
ccgggctggctcgcaggcccgatcc

SEQ ID NO: 5796086 - DNA, 25 bp, Homo sapien
tccaactcagccacatcaaaggtct

SEQ ID NO: 5796087 - DNA, 25 bp, Homo sapien
acagtcaacctccttctcctctgtc

SEQ ID NO: 5796088 - DNA, 25 bp, Homo sapien
gggccatggctctggcctgaggggt

SEQ ID NO: 5796089 - DNA, 25 bp, Homo sapien
ggggcactccgcctcgccctgggcg

SEQ ID NO: 5796090 - DNA, 25 bp, Homo sapien
gagaactccactaagtccctcgaac

SEQ ID NO: 5796091 - DNA, 25 bp, Homo sapien
cctgcgcgctgcctgagcccacacc

SEQ ID NO: 5796092 - DNA, 25 bp, Homo sapien
aaagggagggggcattgaagggatg

SEQ ID NO: 5796093 - DNA, 25 bp, Homo sapien
cgtagccgctgagcacctggctgac

SEQ ID NO: 5796094 - DNA, 25 bp, Homo sapien
gcgcgctccccggggacaggcagcg

SEQ ID NO: 5796095 - DNA, 25 bp, Homo sapien
ctccgataggtcctgctcctccgcc

SEQ ID NO: 5796096 - DNA, 25 bp, Homo sapien
ttggaggggtgggtgggccatggct

SEQ ID NO: 5796097 - DNA, 25 bp, Homo sapien
cttgcccagcgtcttgctgagctca

SEQ ID NO: 5796098 - DNA, 25 bp, Homo sapien
tagaggccagaggcctggcccgagt

SEQ ID NO: 5796099 - DNA, 25 bp, Homo sapien
cctgaggggctggggtcagagatgg

SEQ ID NO: 5796100 - DNA, 25 bp, Homo sapien
tcctgggatagagggtcattcctgg

SEQ ID NO: 5796101 - DNA, 25 bp, Homo sapien
cagggcagtgagccagacagaaagc

SEQ ID NO: 5796102 - DNA, 25 bp, Homo sapien
agtgagccagacagaaagccccccg

SEQ ID NO: 5796103 - DNA, 25 bp, Homo sapien
gcggggctcctccgagcccacgggg

SEQ ID NO: 5796104 - DNA, 25 bp, Homo sapien
cacggccagctccgggcacagtctc

SEQ ID NO: 5796105 - DNA, 25 bp, Homo sapien
gtgggcaaggaacagggcacacagg

SEQ ID NO: 5796106 - DNA, 25 bp, Homo sapien
gctgatggtcagagtagtcaaactg

SEQ ID NO: 5796107 - DNA, 25 bp, Homo sapien
tcttgaccttgcccagctcgcctgg

SEQ ID NO: 5796108 - DNA, 25 bp, Homo sapien
agaccctcactatctgtgagagaga

SEQ ID NO: 5796109 - DNA, 25 bp, Homo sapien
ggtactggtccaactcagccacatc

SEQ ID NO: 5796110 - DNA, 25 bp, Homo sapien
tccttcctgccttcagaaagggagg

SEQ ID NO: 5796111 - DNA, 25 bp, Homo sapien
caaagagtccaacgcccacctcctc

SEQ ID NO: 5796112 - DNA, 25 bp, Homo sapien
ccacaccaggtggtgagaccgtggg

SEQ ID NO: 5796113 - DNA, 25 bp, Homo sapien
tcctgccttcagaaagggagggggc

SEQ ID NO: 5796114 - DNA, 25 bp, Homo sapien
tgagggaggtgtaggcgatctgtga

SEQ ID NO: 5796115 - DNA, 25 bp, Homo sapien
gggctttgctgctggagcctggatg

SEQ ID NO: 5796116 - DNA, 25 bp, Homo sapien
ctgctcacatggcctgggtgcccat

SEQ ID NO: 5796117 - DNA, 25 bp, Homo sapien
gctccccggggacaggcagcggggc

SEQ ID NO: 5796118 - DNA, 25 bp, Homo sapien
tgaaggcgttcatgggccgcttgac

SEQ ID NO: 5796119 - DNA, 25 bp, Homo sapien
cctcactatctgtgagagagaaaac

SEQ ID NO: 5796120 - DNA, 25 bp, Homo sapien
gggtgggtgggccatggctctggcc

SEQ ID NO: 5796121 - DNA, 25 bp, Homo sapien
gccaactccttcctgccttcagaaa

SEQ ID NO: 5796122 - DNA, 25 bp, Homo sapien
cggccagctccgggcacagtctctg

SEQ ID NO: 5796123 - DNA, 25 bp, Homo sapien
gtgcgggtactggtccgcgagcttc

SEQ ID NO: 5796124 - DNA, 25 bp, Homo sapien
catgttggacattacctcgtggctg

SEQ ID NO: 5796125 - DNA, 25 bp, Homo sapien
tgcccgactgcagctctgtcttcgg

SEQ ID NO: 5796126 - DNA, 25 bp, Homo sapien
cttgcccgactgcagctctgtcttc

SEQ ID NO: 5796127 - DNA, 25 bp, Homo sapien
cacgggcatgggcaccagcgtccag

SEQ ID NO: 5796128 - DNA, 25 bp, Homo sapien
cgagtagaggccagaggcctggccc

SEQ ID NO: 5796129 - DNA, 25 bp, Homo sapien
aggggctggggtcagagatggccgt

SEQ ID NO: 5796130 - DNA, 25 bp, Homo sapien
cccgttcttccgccgcctgggctgg

SEQ ID NO: 5796131 - DNA, 25 bp, Homo sapien
cgcggatgcacacggggaacttgtc

SEQ ID NO: 5796132 - DNA, 25 bp, Homo sapien
ccgggtggtctttcttgtgctgcat

SEQ ID NO: 5796133 - DNA, 25 bp, Homo sapien
ctcaggtcctgggatagagggtcat

SEQ ID NO: 5796134 - DNA, 25 bp, Homo sapien
tgttctcctggggctttgctgctgg

SEQ ID NO: 5796135 - DNA, 25 bp, Homo sapien
gaggggccgctgcgagggccccata

SEQ ID NO: 5796136 - DNA, 25 bp, Homo sapien
gacaggcagcggggctcctccgagc

SEQ ID NO: 5796137 - DNA, 25 bp, Homo sapien
cccgaggagggtgagcaggcccttc

SEQ ID NO: 5796138 - DNA, 25 bp, Homo sapien
cgtccagtcgtagccgctgagcacc

SEQ ID NO: 5796139 - DNA, 25 bp, Homo sapien
ggagatccaggcggagtgtccactg

SEQ ID NO: 5796140 - DNA, 25 bp, Homo sapien
tgagagagaaaacaggagtcatagg

SEQ ID NO: 5796141 - DNA, 25 bp, Homo sapien
cggtctctgtcttcacctgggcttt

SEQ ID NO: 5796142 - DNA, 25 bp, Homo sapien
gcggggggtggtggcgacagggccc

SEQ ID NO: 5796143 - DNA, 25 bp, Homo sapien
acaggctgggggcaggggctgggcg

SEQ ID NO: 5796144 - DNA, 25 bp, Homo sapien
gcacacaggctgggggcaggggctg

SEQ ID NO: 5796145 - DNA, 25 bp, Homo sapien
gcaaggaacagggcacacaggctgg

SEQ ID NO: 5796146 - DNA, 25 bp, Homo sapien
tggatggcggcggtcccaccttgct

SEQ ID NO: 5796147 - DNA, 25 bp, Homo sapien
ctggctgacggcctcgcggatgcac

SEQ ID NO: 5796148 - DNA, 25 bp, Homo sapien
ttggagatccaggcggagtgtccac

SEQ ID NO: 5796149 - DNA, 25 bp, Homo sapien
gtggttggaggggtgggtgggccat

SEQ ID NO: 5796150 - DNA, 25 bp, Homo sapien
gtctgccttgcccgactgcagctct

SEQ ID NO: 5796151 - DNA, 25 bp, Homo sapien
cagctctgtcttcggggtggttgga

SEQ ID NO: 5796152 - DNA, 25 bp, Homo sapien
gtggcatgggcatgtcagaccctca

SEQ ID NO: 5796153 - DNA, 25 bp, Homo sapien
ggccccgcggtctctgtcttcacct

SEQ ID NO: 5796154 - DNA, 25 bp, Homo sapien
accaatgtccacgttgccgaagtcg

SEQ ID NO: 5796155 - DNA, 25 bp, Homo sapien
ctgaggggtgctcggggttcccatc

SEQ ID NO: 5796156 - DNA, 25 bp, Homo sapien
gggttcccatctgacatgggggagc

SEQ ID NO: 5796157 - DNA, 25 bp, Homo sapien
ccactccccaatgaggctcctcaaa

SEQ ID NO: 5796158 - DNA, 25 bp, Homo sapien
ggcgcttgtcactttcgttcagcag

SEQ ID NO: 5796159 - DNA, 25 bp, Homo sapien
gcccctcatctttcagtgtgggtgc

SEQ ID NO: 5796160 - DNA, 25 bp, Homo sapien
tagcccttaggcactgtggcatagg

SEQ ID NO: 5796161 - DNA, 25 bp, Homo sapien
cttccgccgcctgggctggtacttg

SEQ ID NO: 5796162 - DNA, 25 bp, Homo sapien
ccacatcaaaggtctccatgttgga

SEQ ID NO: 5796163 - DNA, 25 bp, Homo sapien
gcttgcttttgctggcgccgttgac

SEQ ID NO: 5796164 - DNA, 25 bp, Homo sapien
gctggtacttgtagtccgggtggtc

SEQ ID NO: 5796165 - DNA, 25 bp, Homo sapien
cagtgtcgtatatactggctgctcc

SEQ ID NO: 5796166 - DNA, 25 bp, Homo sapien
cccgactgcagctctgtcttcgggg

SEQ ID NO: 5796167 - DNA, 25 bp, Homo sapien
actggtccgcgagcttcctgcgcgc

SEQ ID NO: 5796168 - DNA, 25 bp, Homo sapien
tgggggagccctctcctgggtgccg

SEQ ID NO: 5796169 - DNA, 25 bp, Homo sapien
cttcctgccttcagaaagggagggg

SEQ ID NO: 5796170 - DNA, 25 bp, Homo sapien
ggcactgcccagcccatagccggct

SEQ ID NO: 5796171 - DNA, 25 bp, Homo sapien
agcgttgtgcaggtgcgggtactgg

SEQ ID NO: 5796172 - DNA, 25 bp, Homo sapien
gggacagtgtcgtatatactggctg

SEQ ID NO: 5796173 - DNA, 25 bp, Homo sapien
gtcttgctgagctcagcgttgtgca

SEQ ID NO: 5796174 - DNA, 25 bp, Homo sapien
aaggtgcagcccctcatctttcagt

SEQ ID NO: 5796175 - DNA, 25 bp, Homo sapien
ccccatataggagaaggccgagtag

SEQ ID NO: 5796176 - DNA, 25 bp, Homo sapien
cgttcttccgccgcctgggctggta

SEQ ID NO: 5796177 - DNA, 25 bp, Homo sapien
gagcctggatggggcgggtgggtca

SEQ ID NO: 5796178 - DNA, 25 bp, Homo sapien
tgggggaaggtgcagcccctcatct

SEQ ID NO: 5796179 - DNA, 25 bp, Homo sapien
agccacatcaaaggtctccatgttg

SEQ ID NO: 5796180 - DNA, 25 bp, Homo sapien
gtcgtagccgctgagcacctggctg

SEQ ID NO: 5796181 - DNA, 25 bp, Homo sapien
ctgtcttcacctgggctttggcatc

SEQ ID NO: 5796182 - DNA, 25 bp, Homo sapien
gtccgcctcgccgtcctgctgctcc

SEQ ID NO: 5796183 - DNA, 25 bp, Homo sapien
gggctcagctccacctccgataggt

SEQ ID NO: 5796184 - DNA, 25 bp, Homo sapien
ccttctcaggtcctgggatagaggg

SEQ ID NO: 5796185 - DNA, 25 bp, Homo sapien
actcagccacatcaaaggtctccat

SEQ ID NO: 5796186 - DNA, 25 bp, Homo sapien
tccactgccaccaccaggcctgagg

SEQ ID NO: 5796187 - DNA, 25 bp, Homo sapien
ctctgggtggcctagcccttaggca

SEQ ID NO: 5796188 - DNA, 25 bp, Homo sapien
ggcccgagtggccataatagggtcc

SEQ ID NO: 5796189 - DNA, 25 bp, Homo sapien
tcctgagggctgatggtcagagtag

SEQ ID NO: 5796190 - DNA, 25 bp, Homo sapien
ggccacggccagggcactgcccagc

SEQ ID NO: 5796191 - DNA, 25 bp, Homo sapien
gtcttcacctgggctttggcatcca

SEQ ID NO: 5796192 - DNA, 25 bp, Homo sapien
aggctgggggcaggggctgggcggg

SEQ ID NO: 5796193 - DNA, 25 bp, Homo sapien
cagcccctgagtgggagacacggcc

SEQ ID NO: 5796194 - DNA, 25 bp, Homo sapien
tccccaatgaggctcctcaaagcta

SEQ ID NO: 5796195 - DNA, 25 bp, Homo sapien
ctcgcaaagagtccaacgcccacct

SEQ ID NO: 5796196 - DNA, 25 bp, Homo sapien
agccctctcctgggtgccggtggtc

SEQ ID NO: 5796197 - DNA, 25 bp, Homo sapien
gctgcgagggccccatataggagaa

SEQ ID NO: 5796198 - DNA, 25 bp, Homo sapien
tgcgcgctgcctgagcccacaccat

SEQ ID NO: 5796199 - DNA, 25 bp, Homo sapien
gctcttgtagtgggcctggatggcg

SEQ ID NO: 5796200 - DNA, 25 bp, Homo sapien
atataggagaaggccgagtagaggc

SEQ ID NO: 5796201 - DNA, 25 bp, Homo sapien
ggcctggatggcggcggtcccacct

SEQ ID NO: 5796202 - DNA, 25 bp, Homo sapien
gggcacacaggctgggggcaggggc

SEQ ID NO: 5796203 - DNA, 25 bp, Homo sapien
ttcctgcgcgctgcctgagcccaca

SEQ ID NO: 5796204 - DNA, 25 bp, Homo sapien
ctgagctcagcgttgtgcaggtgcg

SEQ ID NO: 5796205 - DNA, 25 bp, Homo sapien
ctgctggagcctggatggggcgggt

SEQ ID NO: 5796206 - DNA, 25 bp, Homo sapien
gatggcggcggtcccaccttgctcg

SEQ ID NO: 5796207 - DNA, 25 bp, Homo sapien
aggcgatctgtgaggtggatggctg

SEQ ID NO: 5796208 - DNA, 25 bp, Homo sapien
gccataatagggtcctgagggctga

SEQ ID NO: 5796209 - DNA, 25 bp, Homo sapien
ctgtccagcctgttctcctggggct

SEQ ID NO: 5796210 - DNA, 25 bp, Homo sapien
tcgcctggccccgggctggctcgca

SEQ ID NO: 5796211 - DNA, 25 bp, Homo sapien
atgagaactccactaagtccctcga

SEQ ID NO: 5796212 - DNA, 25 bp, Homo sapien
cttcacctgggctttggcatccaca

SEQ ID NO: 5796213 - DNA, 25 bp, Homo sapien
ctgggtggcctagcccttaggcact

SEQ ID NO: 5796214 - DNA, 25 bp, Homo sapien
gcggcggtcccaccttgctcggcct

SEQ ID NO: 5796215 - DNA, 25 bp, Homo sapien
tggagcctggatggggcgggtgggt

SEQ ID NO: 5796216 - DNA, 25 bp, Homo sapien
tcagaaagggagggggcattgaagg

SEQ ID NO: 5796217 - DNA, 25 bp, Homo sapien
tactctcagcccctgagtgggagac

SEQ ID NO: 5796218 - DNA, 25 bp, Homo sapien
ggtcctgagggctgatggtcagagt

SEQ ID NO: 5796219 - DNA, 25 bp, Homo sapien
cgactgcagctctgtcttcggggtg

SEQ ID NO: 5796220 - DNA, 25 bp, Homo sapien
gatctcaccaatgtccacgttgccg

SEQ ID NO: 5796221 - DNA, 25 bp, Homo sapien
ggccagaggcctggcccgagtggcc

SEQ ID NO: 5796222 - DNA, 25 bp, Homo sapien
ccaccaggcctgaggtgggcaagga

SEQ ID NO: 5796223 - DNA, 25 bp, Homo sapien
cttcagaaagggagggggcattgaa

SEQ ID NO: 5796224 - DNA, 25 bp, Homo sapien
ggctgggcggggggtggtggcgaca

SEQ ID NO: 5796225 - DNA, 25 bp, Homo sapien
gggggcctctgtgccaactccttcc

SEQ ID NO: 5796226 - DNA, 25 bp, Homo sapien
tggcgccgttgacgcgcacgggcat

SEQ ID NO: 5796227 - DNA, 25 bp, Homo sapien
tcctctgtccagcctgttctcctgg

SEQ ID NO: 5796228 - DNA, 25 bp, Homo sapien
caggtggtgagaccgtgggcagagc

SEQ ID NO: 5796229 - DNA, 25 bp, Homo sapien
ctccgatgccaccaaccctggtgct

SEQ ID NO: 5796230 - DNA, 25 bp, Homo sapien
tgtcttcggggtggttggaggggtg

SEQ ID NO: 5796231 - DNA, 25 bp, Homo sapien
gcttttgctggcgccgttgacgcgc

SEQ ID NO: 5796232 - DNA, 25 bp, Homo sapien
accctcactatctgtgagagagaaa

SEQ ID NO: 5796233 - DNA, 25 bp, Homo sapien
ccacgcctggtggcttggagatcca

SEQ ID NO: 5796234 - DNA, 25 bp, Homo sapien
cgcgcacgggcatgggcaccagcgt

SEQ ID NO: 5796235 - DNA, 25 bp, Homo sapien
cccctccccgaggagggtgagcagg

SEQ ID NO: 5796236 - DNA, 25 bp, Homo sapien
ctcctgggtgccggtggtccaagtg

SEQ ID NO: 5796237 - DNA, 25 bp, Homo sapien
tccgagcccacggggctcagctcca

SEQ ID NO: 5796238 - DNA, 25 bp, Homo sapien
ggccagggcactgcccagcccatag

SEQ ID NO: 5796239 - DNA, 25 bp, Homo sapien
ttgtgcaggtgcgggtactggtccg

SEQ ID NO: 5796240 - DNA, 25 bp, Homo sapien
gctctggcctgaggggtgctcgggg

SEQ ID NO: 5796241 - DNA, 25 bp, Homo sapien
gggcaggctgagggaggtgtaggcg

SEQ ID NO: 5796242 - DNA, 25 bp, Homo sapien
atccaggcggagtgtccactggcca

SEQ ID NO: 5796243 - DNA, 25 bp, Homo sapien
ttgtagtgggcctggatggcggcgg

SEQ ID NO: 5796244 - DNA, 25 bp, Homo sapien
tgctgctccttcttgaccttgccca

SEQ ID NO: 5796245 - DNA, 25 bp, Homo sapien
ccagaggcctggcccgagtggccat

SEQ ID NO: 5796246 - DNA, 25 bp, Homo sapien
acttgtcatcgtccgcctcgccgtc

SEQ ID NO: 5796247 - DNA, 25 bp, Homo sapien
gatgcacacggggaacttgtcatcg

SEQ ID NO: 5796248 - DNA, 25 bp, Homo sapien
gagctcagcgttgtgcaggtgcggg

SEQ ID NO: 5796249 - DNA, 25 bp, Homo sapien
gacctgtcagcctcttcagcctcct

SEQ ID NO: 5796250 - DNA, 25 bp, Homo sapien
ggttggaggggtgggtgggccatgg

SEQ ID NO: 5796251 - DNA, 25 bp, Homo sapien
tgctcggcctccccaccggggcact

SEQ ID NO: 5796252 - DNA, 25 bp, Homo sapien
tggggccctgaggggctggggtcag

SEQ ID NO: 5796253 - DNA, 25 bp, Homo sapien
ggaggggtgggtgggccatggctct

SEQ ID NO: 5796254 - DNA, 25 bp, Homo sapien
ctggctgctcccagtgtgtggggct

SEQ ID NO: 5796255 - DNA, 25 bp, Homo sapien
agaggcctggcccgagtggccataa

SEQ ID NO: 5796256 - DNA, 25 bp, Homo sapien
cagagatggccgtgtagaggggccg

SEQ ID NO: 5796257 - DNA, 25 bp, Homo sapien
cagtcgtagccgctgagcacctggc

SEQ ID NO: 5796258 - DNA, 25 bp, Homo sapien
cctgctgctccttcttgaccttgcc

SEQ ID NO: 5796259 - DNA, 25 bp, Homo sapien
ctggtccaactcagccacatcaaag

SEQ ID NO: 5796260 - DNA, 25 bp, Homo sapien
ggccccgggctggctcgcaggcccg

SEQ ID NO: 5796261 - DNA, 25 bp, Homo sapien
ggccgctgcgagggccccatatagg

SEQ ID NO: 5796262 - DNA, 25 bp, Homo sapien
ctgagcacctggctgacggcctcgc

SEQ ID NO: 5796263 - DNA, 25 bp, Homo sapien
cactccgcctcgccctgggcggcct

SEQ ID NO: 5796264 - DNA, 25 bp, Homo sapien
cggctgctgagtagctgctcacatg

SEQ ID NO: 5796265 - DNA, 25 bp, Homo sapien
accaggtggtgagaccgtgggcaga

SEQ ID NO: 5796266 - DNA, 25 bp, Homo sapien
taggtcctgctcctccgccatgtcg

SEQ ID NO: 5796267 - DNA, 25 bp, Homo sapien
tcccagtgtgtggggctgtgggact

SEQ ID NO: 5796268 - DNA, 25 bp, Homo sapien
ggatggggcgggtgggtcatcaggg

SEQ ID NO: 5796269 - DNA, 25 bp, Homo sapien
ggactggggccctgaggggctgggg

SEQ ID NO: 5796270 - DNA, 25 bp, Homo sapien
ctcgccgtcctgctgctccttcttg

SEQ ID NO: 5796271 - DNA, 25 bp, Homo sapien
cgtcgggccctagcgagggcgcgct

SEQ ID NO: 5796272 - DNA, 25 bp, Homo sapien
gtccagcctgttctcctggggcttt

SEQ ID NO: 5796273 - DNA, 25 bp, Homo sapien
ccaggcggagtgtccactggccacg

SEQ ID NO: 5796274 - DNA, 25 bp, Homo sapien
gtccacgttgccgaagtcgatgtga

SEQ ID NO: 5796275 - DNA, 25 bp, Homo sapien
ttggacattacctcgtggctgatct

SEQ ID NO: 5796276 - DNA, 25 bp, Homo sapien
cctggggctttgctgctggagcctg

SEQ ID NO: 5796277 - DNA, 25 bp, Homo sapien
tgagccatagtggggcaggctgagg

SEQ ID NO: 5796278 - DNA, 25 bp, Homo sapien
ctgctccttcttgaccttgcccagc

SEQ ID NO: 5796279 - DNA, 25 bp, Homo sapien
gccgctcagcctcctcgatgaaggg

SEQ ID NO: 5796280 - DNA, 25 bp, Homo sapien
ttgaagggatgagaactccactaag

SEQ ID NO: 5796281 - DNA, 25 bp, Homo sapien
actgggggcgggagatggaggggaa

SEQ ID NO: 5796282 - DNA, 25 bp, Homo sapien
ctggatggggcgggtgggtcatcag

SEQ ID NO: 5796283 - DNA, 25 bp, Homo sapien
ttctcaggtcctgggatagagggtc

SEQ ID NO: 5796284 - DNA, 25 bp, Homo sapien
gtgggcagagccacgcctggtggct

SEQ ID NO: 5796285 - DNA, 25 bp, Homo sapien
gctcgcaggcccgatccgccgccgc

SEQ ID NO: 5796286 - DNA, 25 bp, Homo sapien
cttgtcactttcgttcagcagcctc

SEQ ID NO: 5796287 - DNA, 25 bp, Homo sapien
cggcctcgcggatgcacacggggaa

SEQ ID NO: 5796288 - DNA, 25 bp, Homo sapien
tggcgacagggccccctttagggcc

SEQ ID NO: 5796289 - DNA, 25 bp, Homo sapien
ggtgccggtggtccaagtgggcgct

SEQ ID NO: 5796290 - DNA, 25 bp, Homo sapien
gcgctccccggggacaggcagcggg

SEQ ID NO: 5796291 - DNA, 25 bp, Homo sapien
ccacggccagggcactgcccagccc

SEQ ID NO: 5796292 - DNA, 25 bp, Homo sapien
tgggccgcttgacgtgcggcttgct

SEQ ID NO: 5796293 - DNA, 25 bp, Homo sapien
ggcgttcatgggccgcttgacgtgc

SEQ ID NO: 5796294 - DNA, 25 bp, Homo sapien
gccctgaggggctggggtcagagat

SEQ ID NO: 5796295 - DNA, 25 bp, Homo sapien
gccttcagaaagggagggggcattg

SEQ ID NO: 5796296 - DNA, 25 bp, Homo sapien
caggtcctgggatagagggtcattc

SEQ ID NO: 5796297 - DNA, 25 bp, Homo sapien
ctgagggctgatggtcagagtagtc

SEQ ID NO: 5796298 - DNA, 25 bp, Homo sapien
tttcgttcagcagcctccagagctt

SEQ ID NO: 5796299 - DNA, 25 bp, Homo sapien
ggatggctggtcggtgtagtgtggg

SEQ ID NO: 5796300 - DNA, 25 bp, Homo sapien
cactggccacggccagggcactgcc

SEQ ID NO: 5796301 - DNA, 25 bp, Homo sapien
cagctcgcctggccccgggctggct

SEQ ID NO: 5796302 - DNA, 25 bp, Homo sapien
ctccacctccgataggtcctgctcc

SEQ ID NO: 5796303 - DNA, 25 bp, Homo sapien
agtagaggccagaggcctggcccga

SEQ ID NO: 5796304 - DNA, 25 bp, Homo sapien
cccgagtggccataatagggtcctg

SEQ ID NO: 5796305 - DNA, 25 bp, Homo sapien
ccctctcctgggtgccggtggtcca

SEQ ID NO: 5796306 - DNA, 25 bp, Homo sapien
cattgggcggcaggtactggtccaa

SEQ ID NO: 5796307 - DNA, 25 bp, Homo sapien
ctcagcctcctccactgccaccacc

SEQ ID NO: 5796308 - DNA, 25 bp, Homo sapien
ctcctcgatgaaggggcgcttgtca

SEQ ID NO: 5796309 - DNA, 25 bp, Homo sapien
agcctcttcagcctcctcagcctcc

SEQ ID NO: 5796310 - DNA, 25 bp, Homo sapien
atggaggggaaggctgagccatagt

SEQ ID NO: 5796311 - DNA, 25 bp, Homo sapien
cgagtggccataatagggtcctgag

SEQ ID NO: 5796312 - DNA, 25 bp, Homo sapien
tccatgttggacattacctcgtggc

SEQ ID NO: 5796313 - DNA, 25 bp, Homo sapien
aaggtctccatgttggacattacct

SEQ ID NO: 5796314 - DNA, 25 bp, Homo sapien
gcaggcccttctcaggtcctgggat

SEQ ID NO: 5796315 - DNA, 25 bp, Homo sapien
ggtgtagtgtgggggcccctggggc

SEQ ID NO: 5796316 - DNA, 25 bp, Homo sapien
caactcagccacatcaaaggtctcc

SEQ ID NO: 5796317 - DNA, 25 bp, Homo sapien
aggctgagccatagtggggcaggct

SEQ ID NO: 5796318 - DNA, 25 bp, Homo sapien
gcctccagagcttgcccagcgtctt

SEQ ID NO: 5796319 - DNA, 25 bp, Homo sapien
cccatagccggctgctgagtagctg

SEQ ID NO: 5796320 - DNA, 25 bp, Homo sapien
ccgccgccgccgtcgggccctagcg

SEQ ID NO: 5796321 - DNA, 25 bp, Homo sapien
gccttcccgttcttccgccgcctgg

SEQ ID NO: 5796322 - DNA, 25 bp, Homo sapien
gcgctcttgtagtgggcctggatgg

SEQ ID NO: 5796323 - DNA, 25 bp, Homo sapien
ctcgcggatgcacacggggaacttg

SEQ ID NO: 5796324 - DNA, 25 bp, Homo sapien
gtctctgggtggcctagcccttagg

SEQ ID NO: 5796325 - DNA, 25 bp, Homo sapien
gcctggccccgggctggctcgcagg

SEQ ID NO: 5796326 - DNA, 25 bp, Homo sapien
cctccttctcctctgtccagcctgt

SEQ ID NO: 5796327 - DNA, 25 bp, Homo sapien
gtccgcgagcttcctgcgcgctgcc

SEQ ID NO: 5796328 - DNA, 25 bp, Homo sapien
gtcgtatatactggctgctcccagt

SEQ ID NO: 5796329 - DNA, 25 bp, Homo sapien
ccgcgagcttcctgcgcgctgcctg

SEQ ID NO: 5796330 - DNA, 25 bp, Homo sapien
agccacgcctggtggcttggagatc

SEQ ID NO: 5796331 - DNA, 25 bp, Homo sapien
gaccttgcccagctcgcctggcccc

SEQ ID NO: 5796332 - DNA, 25 bp, Homo sapien
ggtcatcagggcagtgagccagaca

SEQ ID NO: 5796333 - DNA, 25 bp, Homo sapien
actgcagctctgtcttcggggtggt

SEQ ID NO: 5796334 - DNA, 25 bp, Homo sapien
tgggggcgggagatggaggggaagg

SEQ ID NO: 5796335 - DNA, 25 bp, Homo sapien
acctgggctttggcatccacaccag

SEQ ID NO: 5796336 - DNA, 25 bp, Homo sapien
tgggcaccagcgtccagtcgtagcc

SEQ ID NO: 5796337 - DNA, 25 bp, Homo sapien
tcacctgggctttggcatccacacc

SEQ ID NO: 5796338 - DNA, 25 bp, Homo sapien
tcgatgtgaggcttcccgccctccc

SEQ ID NO: 5796339 - DNA, 25 bp, Homo sapien
tgggactggggccctgaggggctgg

SEQ ID NO: 5796340 - DNA, 25 bp, Homo sapien
gcgagggcgcgctccccggggacag

SEQ ID NO: 5796341 - DNA, 25 bp, Homo sapien
tgcacacggggaacttgtcatcgtc

SEQ ID NO: 5796342 - DNA, 25 bp, Homo sapien
tctgtcttcggggtggttggagggg

SEQ ID NO: 5796343 - DNA, 25 bp, Homo sapien
ccacaccatgaaggcgttcatgggc

SEQ ID NO: 5796344 - DNA, 25 bp, Homo sapien
ccagggcactgcccagcccatagcc

SEQ ID NO: 5796345 - DNA, 25 bp, Homo sapien
ggggcgggagatggaggggaaggct

SEQ ID NO: 5796346 - DNA, 25 bp, Homo sapien
tgggtgcccattgggcggcaggtac

SEQ ID NO: 5796347 - DNA, 25 bp, Homo sapien
ccagagcttgcccagcgtcttgctg

SEQ ID NO: 5796348 - DNA, 25 bp, Homo sapien
cagtctctgggtggcctagccctta

SEQ ID NO: 5796349 - DNA, 25 bp, Homo sapien
gggtcattcctgggggaaggtgcag

SEQ ID NO: 5796350 - DNA, 25 bp, Homo sapien
ctggggccccgcggtctctgtcttc

SEQ ID NO: 5796351 - DNA, 25 bp, Homo sapien
acctggctgacggcctcgcggatgc

SEQ ID NO: 5796352 - DNA, 25 bp, Homo sapien
gagggtgagcaggcccttctcaggt

SEQ ID NO: 5796353 - DNA, 25 bp, Homo sapien
ggagggggcattgaagggatgagaa

SEQ ID NO: 5796354 - DNA, 25 bp, Homo sapien
tatatactggctgctcccagtgtgt

SEQ ID NO: 5796355 - DNA, 25 bp, Homo sapien
gggtgagcaggcccttctcaggtcc

SEQ ID NO: 5796356 - DNA, 25 bp, Homo sapien
gctgagggaggtgtaggcgatctgt

SEQ ID NO: 5796357 - DNA, 25 bp, Homo sapien
ggtctttcttgtgctgcatacggag

SEQ ID NO: 5796358 - DNA, 25 bp, Homo sapien
gccgtgtagaggggccgctgcgagg

SEQ ID NO: 5796359 - DNA, 25 bp, Homo sapien
ggagccctctcctgggtgccggtgg

SEQ ID NO: 5796360 - DNA, 25 bp, Homo sapien
ccgcctcgccctgggcggccttccc

SEQ ID NO: 5796361 - DNA, 25 bp, Homo sapien
tgtggggctgtgggactggggccct

SEQ ID NO: 5796362 - DNA, 25 bp, Homo sapien
tggggcaggctgagggaggtgtagg

SEQ ID NO: 5796363 - DNA, 25 bp, Homo sapien
ggggtgctcggggttcccatctgac

SEQ ID NO: 5796364 - DNA, 25 bp, Homo sapien
agtggggcaggctgagggaggtgta

SEQ ID NO: 5796365 - DNA, 25 bp, Homo sapien
ccgacctgtcagcctcttcagcctc

SEQ ID NO: 5796366 - DNA, 25 bp, Homo sapien
catgggggagccctctcctgggtgc

SEQ ID NO: 5796367 - DNA, 25 bp, Homo sapien
gggagacacggccagctccgggcac

SEQ ID NO: 5796368 - DNA, 25 bp, Homo sapien
agggccgggacagtgtcgtatatac

SEQ ID NO: 5796369 - DNA, 25 bp, Homo sapien
gagaccgtgggcagagccacgcctg

SEQ ID NO: 5796370 - DNA, 25 bp, Homo sapien
ttaggcactgtggcataggtggcat

SEQ ID NO: 5796371 - DNA, 25 bp, Homo sapien
ggggcgggtgggtcatcagggcagt

SEQ ID NO: 5796372 - DNA, 25 bp, Homo sapien
caccaccaggcctgaggtgggcaag

SEQ ID NO: 5796373 - DNA, 25 bp, Homo sapien
gcctggcccgagtggccataatagg

SEQ ID NO: 5796374 - DNA, 25 bp, Homo sapien
tgtccactggccacggccagggcac

SEQ ID NO: 5796375 - DNA, 25 bp, Homo sapien
gcctccgatgccaccaaccctggtg

SEQ ID NO: 5796376 - DNA, 25 bp, Homo sapien
gtgggcgctcttgtagtgggcctgg

SEQ ID NO: 5796377 - DNA, 25 bp, Homo sapien
gctccttcttgaccttgcccagctc

SEQ ID NO: 5796378 - DNA, 25 bp, Homo sapien
ggcacagtctctgggtggcctagcc

SEQ ID NO: 5796379 - DNA, 25 bp, Homo sapien
cagggggcctctgtgccaactcctt

SEQ ID NO: 5796380 - DNA, 25 bp, Homo sapien
tgtagtgtgggggcccctggggccc

SEQ ID NO: 5796381 - DNA, 25 bp, Homo sapien
ggtaaggcctccgatgccaccaacc

SEQ ID NO: 5796382 - DNA, 25 bp, Homo sapien
gccgagtagaggccagaggcctggc

SEQ ID NO: 5796383 - DNA, 25 bp, Homo sapien
gcctcctcagcctcctccactgcca

SEQ ID NO: 5796384 - DNA, 25 bp, Homo sapien
ccgggccagccgccggggtcctcgc

SEQ ID NO: 5796385 - DNA, 25 bp, Homo sapien
gcgccgttgacgcgcacgggcatgg

SEQ ID NO: 5796386 - DNA, 25 bp, Homo sapien
gggcggggggtggtggcgacagggc

SEQ ID NO: 5796387 - DNA, 25 bp, Homo sapien
ttgtcatcgtccgcctcgccgtcct

SEQ ID NO: 5796388 - DNA, 25 bp, Homo sapien
actttcgttcagcagcctccagagc

SEQ ID NO: 5796389 - DNA, 25 bp, Homo sapien
ggcctgaggtgggcaaggaacaggg

SEQ ID NO: 5796390 - DNA, 25 bp, Homo sapien
gcttgacgtgcggcttgcttttgct

SEQ ID NO: 5796391 - DNA, 25 bp, Homo sapien
ggctcctcaaagctactctcagccc

SEQ ID NO: 5796392 - DNA, 25 bp, Homo sapien
agagaaaacaggagtcataggagtg

SEQ ID NO: 5796393 - DNA, 25 bp, Homo sapien
ggcaccagcgtccagtcgtagccgc

SEQ ID NO: 5796394 - DNA, 25 bp, Homo sapien
cctgttctcctggggctttgctgct

SEQ ID NO: 5796395 - DNA, 25 bp, Homo sapien
gatgaaggggcgcttgtcactttcg

SEQ ID NO: 5796396 - DNA, 25 bp, Homo sapien
ccgaagtcgatgtgaggcttcccgc

SEQ ID NO: 5796397 - DNA, 25 bp, Homo sapien
tgcccagcgtcttgctgagctcagc

SEQ ID NO: 5796398 - DNA, 25 bp, Homo sapien
ttgctggcgccgttgacgcgcacgg

SEQ ID NO: 5796399 - DNA, 25 bp, Homo sapien
gtgggccatggctctggcctgaggg

SEQ ID NO: 5796400 - DNA, 25 bp, Homo sapien
ccctgagtgggagacacggccagct

SEQ ID NO: 5796401 - DNA, 25 bp, Homo sapien
tgcagcccctcatctttcagtgtgg

SEQ ID NO: 5796402 - DNA, 25 bp, Homo sapien
tagccggctgctgagtagctgctca

SEQ ID NO: 5796403 - DNA, 25 bp, Homo sapien
tgaggtggatggctggtcggtgtag

SEQ ID NO: 5796404 - DNA, 25 bp, Homo sapien
tgccgaagtcgatgtgaggcttccc

SEQ ID NO: 5796405 - DNA, 25 bp, Homo sapien
acaccatgaaggcgttcatgggccg

SEQ ID NO: 5796406 - DNA, 25 bp, Homo sapien
tgttggacattacctcgtggctgat

SEQ ID NO: 5796407 - DNA, 25 bp, Homo sapien
gtgtaggcgatctgtgaggtggatg

SEQ ID NO: 5796408 - DNA, 25 bp, Homo sapien
tcagaccctcactatctgtgagaga

SEQ ID NO: 5796409 - DNA, 25 bp, Homo sapien
cggggttcccatctgacatggggga

SEQ ID NO: 5796410 - DNA, 25 bp, Homo sapien
ggcatgggcatgtcagaccctcact

SEQ ID NO: 5796411 - DNA, 25 bp, Homo sapien
gggcgcgctccccggggacaggcag

SEQ ID NO: 5796412 - DNA, 25 bp, Homo sapien
gcggagtgtccactggccacggcca

SEQ ID NO: 5796413 - DNA, 25 bp, Homo sapien
gggatagagggtcattcctggggga

SEQ ID NO: 5796414 - DNA, 25 bp, Homo sapien
ggtggtggcgacagggcccccttta

SEQ ID NO: 5796415 - DNA, 25 bp, Homo sapien
aagtgggcgctcttgtagtgggcct

SEQ ID NO: 5796416 - DNA, 25 bp, Homo sapien
gcggccttcccgttcttccgccgcc

SEQ ID NO: 5796417 - DNA, 25 bp, Homo sapien
ccttaggcactgtggcataggtggc

SEQ ID NO: 5796418 - DNA, 25 bp, Homo sapien
ccacctccgataggtcctgctcctc

SEQ ID NO: 5796419 - DNA, 25 bp, Homo sapien
aggagaaggccgagtagaggccaga

SEQ ID NO: 5796420 - DNA, 25 bp, Homo sapien
tcataggagtggtaaggcctccgat

SEQ ID NO: 5796421 - DNA, 25 bp, Homo sapien
gctggggtcagagatggccgtgtag

SEQ ID NO: 5796422 - DNA, 25 bp, Homo sapien
gcctcgccctgggcggccttcccgt

SEQ ID NO: 5796423 - DNA, 25 bp, Homo sapien
tacctcgtggctgatctcaccaatg

SEQ ID NO: 5796424 - DNA, 25 bp, Homo sapien
gtactggtccgcgagcttcctgcgc

SEQ ID NO: 5796425 - DNA, 25 bp, Homo sapien
tggctcgcaggcccgatccgccgcc

SEQ ID NO: 5796426 - DNA, 25 bp, Homo sapien
gataggtcctgctcctccgccatgt

SEQ ID NO: 5796427 - DNA, 25 bp, Homo sapien
ccagacagaaagccccccgacctgt

SEQ ID NO: 5796428 - DNA, 25 bp, Homo sapien
tggccgtgtagaggggccgctgcga

SEQ ID NO: 5796429 - DNA, 25 bp, Homo sapien
agggggcattgaagggatgagaact

SEQ ID NO: 5796430 - DNA, 25 bp, Homo sapien
agccccccgacctgtcagcctcttc

SEQ ID NO: 5796431 - DNA, 25 bp, Homo sapien
ccgtcctgctgctccttcttgacct

SEQ ID NO: 5796432 - DNA, 25 bp, Homo sapien
tgcgagggccccatataggagaagg

SEQ ID NO: 5796433 - DNA, 25 bp, Homo sapien
ataggtggcatgggcatgtcagacc

SEQ ID NO: 5796434 - DNA, 25 bp, Homo sapien
ccctggggccccgcggtctctgtct

SEQ ID NO: 5796435 - DNA, 25 bp, Homo sapien
gcctgaggggtgctcggggttccca

SEQ ID NO: 5796436 - DNA, 25 bp, Homo sapien
gctggcgccgttgacgcgcacgggc

SEQ ID NO: 5796437 - DNA, 25 bp, Homo sapien
gtcattcctgggggaaggtgcagcc

SEQ ID NO: 5796438 - DNA, 25 bp, Homo sapien
ctctgtgccaactccttcctgcctt

SEQ ID NO: 5796439 - DNA, 25 bp, Homo sapien
cacagtctctgggtggcctagccct

SEQ ID NO: 5796440 - DNA, 25 bp, Homo sapien
aggctgagggaggtgtaggcgatct

SEQ ID NO: 5796441 - DNA, 25 bp, Homo sapien
tagcgagggcgcgctccccggggac

SEQ ID NO: 5796442 - DNA, 25 bp, Homo sapien
gttcccatctgacatgggggagccc

SEQ ID NO: 5796443 - DNA, 25 bp, Homo sapien
actccttcctgccttcagaaaggga

SEQ ID NO: 5796444 - DNA, 25 bp, Homo sapien
gctggctcgcaggcccgatccgccg

SEQ ID NO: 5796445 - DNA, 25 bp, Homo sapien
tttcttgtgctgcatacggagccgc

SEQ ID NO: 5796446 - DNA, 25 bp, Homo sapien
cggggaacttgtcatcgtccgcctc

SEQ ID NO: 5796447 - DNA, 25 bp, Homo sapien
gaactccactaagtccctcgaaccc

SEQ ID NO: 5796448 - DNA, 25 bp, Homo sapien
cttcgggtctgccttgcccgactgc

SEQ ID NO: 5796449 - DNA, 25 bp, Homo sapien
atggcctgggtgcccattgggcggc

SEQ ID NO: 5796450 - DNA, 25 bp, Homo sapien
gagaaggccgagtagaggccagagg

SEQ ID NO: 5796451 - DNA, 25 bp, Homo sapien
tcgatgaaggggcgcttgtcacttt

SEQ ID NO: 5796452 - DNA, 25 bp, Homo sapien
ctcctccactgccaccaccaggcct

SEQ ID NO: 5796453 - DNA, 25 bp, Homo sapien
ggtccaactcagccacatcaaaggt

SEQ ID NO: 5796454 - DNA, 25 bp, Homo sapien
tgtagtccgggtggtctttcttgtg

SEQ ID NO: 5796455 - DNA, 25 bp, Homo sapien
agagccacgcctggtggcttggaga

SEQ ID NO: 5796456 - DNA, 25 bp, Homo sapien
tactggtccaactcagccacatcaa

SEQ ID NO: 5796457 - DNA, 25 bp, Homo sapien
ggagtgtccactggccacggccagg

SEQ ID NO: 5796458 - DNA, 25 bp, Homo sapien
cctccgagcccacggggctcagctc

SEQ ID NO: 5796459 - DNA, 25 bp, Homo sapien
tcacatggcctgggtgcccattggg

SEQ ID NO: 5796460 - DNA, 25 bp, Homo sapien
atggctggtcggtgtagtgtggggg

SEQ ID NO: 5796461 - DNA, 25 bp, Homo sapien
ccacgttgccgaagtcgatgtgagg

SEQ ID NO: 5796462 - DNA, 25 bp, Homo sapien
gatgccaccaaccctggtgcttccc

SEQ ID NO: 5796463 - DNA, 25 bp, Homo sapien
agggccccatataggagaaggccga

SEQ ID NO: 5796464 - DNA, 25 bp, Homo sapien
tgggcggccttcccgttcttccgcc

SEQ ID NO: 5796465 - DNA, 25 bp, Homo sapien
gcatccacaccaggtggtgagaccg

SEQ ID NO: 5796466 - DNA, 25 bp, Homo sapien
gggtcagagatggccgtgtagaggg

SEQ ID NO: 5796467 - DNA, 25 bp, Homo sapien
agggaggtgtaggcgatctgtgagg

SEQ ID NO: 5796468 - DNA, 25 bp, Homo sapien
gcctctgtgccaactccttcctgcc

SEQ ID NO: 5796469 - DNA, 25 bp, Homo sapien
tcactatctgtgagagagaaaacag

SEQ ID NO: 5796470 - DNA, 25 bp, Homo sapien
ctgtgccaactccttcctgccttca

SEQ ID NO: 5796471 - DNA, 25 bp, Homo sapien
agtagtcaaactgggggcgggagat

SEQ ID NO: 5796472 - DNA, 25 bp, Homo sapien
actatctgtgagagagaaaacagga

SEQ ID NO: 5796473 - DNA, 25 bp, Homo sapien
gtgggtgggccatggctctggcctg

SEQ ID NO: 5796474 - DNA, 25 bp, Homo sapien
ctcggggttcccatctgacatgggg

SEQ ID NO: 5796475 - DNA, 25 bp, Homo sapien
tccccaccggggcactccgcctcgc

SEQ ID NO: 5796476 - DNA, 25 bp, Homo sapien
cctggatggcggcggtcccaccttg

SEQ ID NO: 5796477 - DNA, 25 bp, Homo sapien
cttcttgaccttgcccagctcgcct

SEQ ID NO: 5796478 - DNA, 25 bp, Homo sapien
aaggcgttcatgggccgcttgacgt

SEQ ID NO: 5796479 - DNA, 25 bp, Homo sapien
gtgagaccgtgggcagagccacgcc

SEQ ID NO: 5796480 - DNA, 25 bp, Homo sapien
gggcaaggaacagggcacacaggct

SEQ ID NO: 5796481 - DNA, 25 bp, Homo sapien
tcaaagctactctcagcccctgagt

SEQ ID NO: 5796482 - DNA, 25 bp, Homo sapien
ccatataggagaaggccgagtagag

SEQ ID NO: 5796483 - DNA, 25 bp, Homo sapien
cgcttcgggtctgccttgcccgact

SEQ ID NO: 5796484 - DNA, 25 bp, Homo sapien
actggggccctgaggggctggggtc

SEQ ID NO: 5796485 - DNA, 25 bp, Homo sapien
gaggccagaggcctggcccgagtgg

SEQ ID NO: 5796486 - DNA, 25 bp, Homo sapien
ccggtggtccaagtgggcgctcttg

SEQ ID NO: 5796487 - DNA, 25 bp, Homo sapien
ttcagggggcctctgtgccaactcc

SEQ ID NO: 5796488 - DNA, 25 bp, Homo sapien
gtggatggctggtcggtgtagtgtg

SEQ ID NO: 5796489 - DNA, 25 bp, Homo sapien
ccatctgacatgggggagccctctc

SEQ ID NO: 5796490 - DNA, 25 bp, Homo sapien
atcaaaggtctccatgttggacatt

SEQ ID NO: 5796491 - DNA, 25 bp, Homo sapien
tgtagaggggccgctgcgagggccc

SEQ ID NO: 5796492 - DNA, 25 bp, Homo sapien
ggctgacggcctcgcggatgcacac

SEQ ID NO: 5796493 - DNA, 25 bp, Homo sapien
ggtgggtcatcagggcagtgagcca

SEQ ID NO: 5796494 - DNA, 25 bp, Homo sapien
gccctgggcggccttcccgttcttc

SEQ ID NO: 5796495 - DNA, 25 bp, Homo sapien
cccggggacaggcagcggggctcct

SEQ ID NO: 5796496 - DNA, 25 bp, Homo sapien
gaacttgtcatcgtccgcctcgccg

SEQ ID NO: 5796497 - DNA, 25 bp, Homo sapien
gtccgggtggtctttcttgtgctgc

SEQ ID NO: 5796498 - DNA, 25 bp, Homo sapien
tctggcctgaggggtgctcggggtt

SEQ ID NO: 5796499 - DNA, 25 bp, Homo sapien
tgtcactttcgttcagcagcctcca

SEQ ID NO: 5796500 - DNA, 25 bp, Homo sapien
cgttcatgggccgcttgacgtgcgg

SEQ ID NO: 5796501 - DNA, 25 bp, Homo sapien
cagcctccagagcttgcccagcgtc

SEQ ID NO: 5796502 - DNA, 25 bp, Homo sapien
caggggctgggcggggggtggtggc

SEQ ID NO: 5796503 - DNA, 25 bp, Homo sapien
acagaaagccccccgacctgtcagc

SEQ ID NO: 5796504 - DNA, 25 bp, Homo sapien
atgaggctcctcaaagctactctca

SEQ ID NO: 5796505 - DNA, 25 bp, Homo sapien
ccagcccatagccggctgctgagta

SEQ ID NO: 5796506 - DNA, 25 bp, Homo sapien
cactgccaccaccaggcctgaggtg

SEQ ID NO: 5796507 - DNA, 25 bp, Homo sapien
gctcgcctggccccgggctggctcg

SEQ ID NO: 5796508 - DNA, 25 bp, Homo sapien
agtgtccactggccacggccagggc

SEQ ID NO: 5796509 - DNA, 25 bp, Homo sapien
ccgccgtcgggccctagcgagggcg

SEQ ID NO: 5796510 - DNA, 25 bp, Homo sapien
gccaccaccaggcctgaggtgggca

SEQ ID NO: 5796511 - DNA, 25 bp, Homo sapien
tcagcagcctccagagcttgcccag

SEQ ID NO: 5796512 - DNA, 25 bp, Homo sapien
ggctggtcggtgtagtgtgggggcc

SEQ ID NO: 5796513 - DNA, 25 bp, Homo sapien
aggcactgtggcataggtggcatgg

SEQ ID NO: 5796514 - DNA, 25 bp, Homo sapien
ctgacggcctcgcggatgcacacgg

SEQ ID NO: 5796515 - DNA, 25 bp, Homo sapien
aacagggcacacaggctgggggcag

SEQ ID NO: 5796516 - DNA, 25 bp, Homo sapien
gctgtgggactggggccctgagggg

SEQ ID NO: 5796517 - DNA, 25 bp, Homo sapien
agctgctcacatggcctgggtgccc

SEQ ID NO: 5796518 - DNA, 25 bp, Homo sapien
ttgcttttgctggcgccgttgacgc

SEQ ID NO: 5796519 - DNA, 25 bp, Homo sapien
cctcgatgaaggggcgcttgtcact

SEQ ID NO: 5796520 - DNA, 25 bp, Homo sapien
ctccgcctcgccctgggcggccttc

SEQ ID NO: 5796521 - DNA, 25 bp, Homo sapien
gacggcctcgcggatgcacacgggg

SEQ ID NO: 5796522 - DNA, 25 bp, Homo sapien
gcctcgcggatgcacacggggaact

SEQ ID NO: 5796523 - DNA, 25 bp, Homo sapien
tcagagtagtcaaactgggggcggg

SEQ ID NO: 5796524 - DNA, 25 bp, Homo sapien
caaaggtctccatgttggacattac

SEQ ID NO: 5796525 - DNA, 25 bp, Homo sapien
ccgcctcgccgtcctgctgctcctt

SEQ ID NO: 5796526 - DNA, 25 bp, Homo sapien
agagtagtcaaactgggggcgggag

SEQ ID NO: 5796527 - DNA, 25 bp, Homo sapien
ctggtcggtgtagtgtgggggcccc

SEQ ID NO: 5796528 - DNA, 25 bp, Homo sapien
acctccgataggtcctgctcctccg

SEQ ID NO: 5796529 - DNA, 25 bp, Homo sapien
ggaacagggcacacaggctgggggc

SEQ ID NO: 5796530 - DNA, 25 bp, Homo sapien
agatggaggggaaggctgagccata

SEQ ID NO: 5796531 - DNA, 25 bp, Homo sapien
gcccgtcccgcttcgggtctgcctt

SEQ ID NO: 5796532 - DNA, 25 bp, Homo sapien
ctgggcggggggtggtggcgacagg

SEQ ID NO: 5796533 - DNA, 25 bp, Homo sapien
agtcaacctccttctcctctgtcca

SEQ ID NO: 5796534 - DNA, 25 bp, Homo sapien
ggaggtgtaggcgatctgtgaggtg

SEQ ID NO: 5796535 - DNA, 25 bp, Homo sapien
tactggctgctcccagtgtgtgggg

SEQ ID NO: 5796536 - DNA, 25 bp, Homo sapien
agtgtgtggggctgtgggactgggg

SEQ ID NO: 5796537 - DNA, 25 bp, Homo sapien
agtgtgggtgcaacagtcaacctcc

SEQ ID NO: 5796538 - DNA, 25 bp, Homo sapien
gctctgtcttcggggtggttggagg

SEQ ID NO: 5796539 - DNA, 25 bp, Homo sapien
cagcctcctcagcctcctccactgc

SEQ ID NO: 5796540 - DNA, 25 bp, Homo sapien
ttcctgggggaaggtgcagcccctc

SEQ ID NO: 5796541 - DNA, 25 bp, Homo sapien
tggggtcagagatggccgtgtagag

SEQ ID NO: 5796542 - DNA, 25 bp, Homo sapien
caactccttcctgccttcagaaagg

SEQ ID NO: 5796543 - DNA, 25 bp, Homo sapien
ctgccaccaccaggcctgaggtggg

SEQ ID NO: 5796544 - DNA, 25 bp, Homo sapien
gagcacctggctgacggcctcgcgg

SEQ ID NO: 5796545 - DNA, 25 bp, Homo sapien
ataggagaaggccgagtagaggcca

SEQ ID NO: 5796546 - DNA, 25 bp, Homo sapien
tccccgaggagggtgagcaggccct

SEQ ID NO: 5796547 - DNA, 25 bp, Homo sapien
acggccagggcactgcccagcccat

SEQ ID NO: 5796548 - DNA, 25 bp, Homo sapien
gctttggcatccacaccaggtggtg

SEQ ID NO: 5796549 - DNA, 25 bp, Homo sapien
ggatgagaactccactaagtccctc

SEQ ID NO: 5796550 - DNA, 25 bp, Homo sapien
caccggggcactccgcctcgccctg

SEQ ID NO: 5796551 - DNA, 25 bp, Homo sapien
cgaggagggtgagcaggcccttctc

SEQ ID NO: 5796552 - DNA, 25 bp, Homo sapien
ccagcgtccagtcgtagccgctgag

SEQ ID NO: 5796553 - DNA, 25 bp, Homo sapien
tcagcgttgtgcaggtgcgggtact

SEQ ID NO: 5796554 - DNA, 25 bp, Homo sapien
acattacctcgtggctgatctcacc

SEQ ID NO: 5796555 - DNA, 25 bp, Homo sapien
cctccactgccaccaccaggcctga

SEQ ID NO: 5796556 - DNA, 25 bp, Homo sapien
ctcctcaaagctactctcagcccct

SEQ ID NO: 5796557 - DNA, 25 bp, Homo sapien
gcttggagatccaggcggagtgtcc

SEQ ID NO: 5796558 - DNA, 25 bp, Homo sapien
gttcagcagcctccagagcttgccc

SEQ ID NO: 5796559 - DNA, 25 bp, Homo sapien
ttcccgttcttccgccgcctgggct

SEQ ID NO: 5796560 - DNA, 25 bp, Homo sapien
gcgcccgtcccgcttcgggtctgcc

SEQ ID NO: 5796561 - DNA, 25 bp, Homo sapien
ttcttccgccgcctgggctggtact

SEQ ID NO: 5796562 - DNA, 25 bp, Homo sapien
ctgacatgggggagccctctcctgg

SEQ ID NO: 5796563 - DNA, 25 bp, Homo sapien
cctagcccttaggcactgtggcata

SEQ ID NO: 5796564 - DNA, 25 bp, Homo sapien
gcgtcttgctgagctcagcgttgtg

SEQ ID NO: 5796565 - DNA, 25 bp, Homo sapien
gtgcaggtgcgggtactggtccgcg

SEQ ID NO: 5796566 - DNA, 25 bp, Homo sapien
tggctctggcctgaggggtgctcgg

SEQ ID NO: 5796567 - DNA, 25 bp, Homo sapien
ccgcttgacgtgcggcttgcttttg

SEQ ID NO: 5796568 - DNA, 25 bp, Homo sapien
tcagtgtgggtgcaacagtcaacct

SEQ ID NO: 5796569 - DNA, 25 bp, Homo sapien
tcaccaatgtccacgttgccgaagt

SEQ ID NO: 5796570 - DNA, 25 bp, Homo sapien
gagtagctgctcacatggcctgggt

SEQ ID NO: 5796571 - DNA, 25 bp, Homo sapien
gagcccacaccatgaaggcgttcat

SEQ ID NO: 5796572 - DNA, 25 bp, Homo sapien
cactgcccagcccatagccggctgc

SEQ ID NO: 5796573 - DNA, 25 bp, Homo sapien
gcctgggctggtacttgtagtccgg

SEQ ID NO: 5796574 - DNA, 25 bp, Homo sapien
ataggagtggtaaggcctccgatgc

SEQ ID NO: 5796575 - DNA, 25 bp, Homo sapien
gtaggcgatctgtgaggtggatggc

SEQ ID NO: 5796576 - DNA, 25 bp, Homo sapien
ctgccttcagaaagggagggggcat

SEQ ID NO: 5796577 - DNA, 25 bp, Homo sapien
gctcagcgttgtgcaggtgcgggta

SEQ ID NO: 5796578 - DNA, 25 bp, Homo sapien
agtcataggagtggtaaggcctccg

SEQ ID NO: 5796579 - DNA, 25 bp, Homo sapien
agcccacggggctcagctccacctc

SEQ ID NO: 5796580 - DNA, 25 bp, Homo sapien
tcgttcagcagcctccagagcttgc

SEQ ID NO: 5796581 - DNA, 25 bp, Homo sapien
catgaaggcgttcatgggccgcttg

SEQ ID NO: 5796582 - DNA, 25 bp, Homo sapien
agcttgcccagcgtcttgctgagct

SEQ ID NO: 5796583 - DNA, 25 bp, Homo sapien
gagcgcccgtcccgcttcgggtctg

SEQ ID NO: 5796584 - DNA, 25 bp, Homo sapien
ggggcgcttgtcactttcgttcagc

SEQ ID NO: 5796585 - DNA, 25 bp, Homo sapien
catgggcatgtcagaccctcactat

SEQ ID NO: 5796586 - DNA, 25 bp, Homo sapien
aaggaacagggcacacaggctgggg

SEQ ID NO: 5796587 - DNA, 25 bp, Homo sapien
agggatgagaactccactaagtccc

SEQ ID NO: 5796588 - DNA, 25 bp, Homo sapien
gggaacttgtcatcgtccgcctcgc

SEQ ID NO: 5796589 - DNA, 25 bp, Homo sapien
cgtatatactggctgctcccagtgt

SEQ ID NO: 5796590 - DNA, 25 bp, Homo sapien
gggctgtgggactggggccctgagg

SEQ ID NO: 5796591 - DNA, 25 bp, Homo sapien
aggggtgggtgggccatggctctgg

SEQ ID NO: 5796592 - DNA, 25 bp, Homo sapien
acaccaggtggtgagaccgtgggca

SEQ ID NO: 5796593 - DNA, 25 bp, Homo sapien
tcgccctgggcggccttcccgttct

SEQ ID NO: 5796594 - DNA, 25 bp, Homo sapien
gctcagctccacctccgataggtcc

SEQ ID NO: 5796595 - DNA, 25 bp, Homo sapien
agaaagccccccgacctgtcagcct

SEQ ID NO: 5796596 - DNA, 25 bp, Homo sapien
tccgccgcctgggctggtacttgta

SEQ ID NO: 5796597 - DNA, 25 bp, Homo sapien
gaaggccgagtagaggccagaggcc

SEQ ID NO: 5796598 - DNA, 25 bp, Homo sapien
ttagggccgggacagtgtcgtatat

SEQ ID NO: 5796599 - DNA, 25 bp, Homo sapien
cttctcctctgtccagcctgttctc

SEQ ID NO: 5796600 - DNA, 25 bp, Homo sapien
ccccgggctggctcgcaggcccgat

SEQ ID NO: 5796601 - DNA, 25 bp, Homo sapien
gaaggctgagccatagtggggcagg

SEQ ID NO: 5796602 - DNA, 25 bp, Homo sapien
tcagccacatcaaaggtctccatgt

SEQ ID NO: 5796603 - DNA, 25 bp, Homo sapien
cacggggctcagctccacctccgat

SEQ ID NO: 5796604 - DNA, 25 bp, Homo sapien
cgcgctgcctgagcccacaccatga

SEQ ID NO: 5796605 - DNA, 25 bp, Homo sapien
cccacggggctcagctccacctccg

SEQ ID NO: 5796606 - DNA, 25 bp, Homo sapien
ggctcctccgagcccacggggctca

SEQ ID NO: 5796607 - DNA, 25 bp, Homo sapien
aggtgtaggcgatctgtgaggtgga

SEQ ID NO: 5796608 - DNA, 25 bp, Homo sapien
catacggagccgctcagcctcctcg

SEQ ID NO: 5796609 - DNA, 25 bp, Homo sapien
agtcgatgtgaggcttcccgccctc

SEQ ID NO: 5796610 - DNA, 25 bp, Homo sapien
agtggccataatagggtcctgaggg

SEQ ID NO: 5796611 - DNA, 25 bp, Homo sapien
ggacattacctcgtggctgatctca

SEQ ID NO: 5796612 - DNA, 25 bp, Homo sapien
gcactgtggcataggtggcatgggc

SEQ ID NO: 5796613 - DNA, 25 bp, Homo sapien
gatggccgtgtagaggggccgctgc

SEQ ID NO: 5796614 - DNA, 25 bp, Homo sapien
ggcattgaagggatgagaactccac

SEQ ID NO: 5796615 - DNA, 25 bp, Homo sapien
ggtggtccaagtgggcgctcttgta

SEQ ID NO: 5796616 - DNA, 25 bp, Homo sapien
tccactggccacggccagggcactg

SEQ ID NO: 5796617 - DNA, 25 bp, Homo sapien
gttgccgaagtcgatgtgaggcttc

SEQ ID NO: 5796618 - DNA, 25 bp, Homo sapien
gtgctgcatacggagccgctcagcc

SEQ ID NO: 5796619 - DNA, 25 bp, Homo sapien
gcaggtgcgggtactggtccgcgag

SEQ ID NO: 5796620 - DNA, 25 bp, Homo sapien
tcctgctcctccgccatgtcgcccc

SEQ ID NO: 5796621 - DNA, 25 bp, Homo sapien
gtcccaccttgctcggcctccccac

SEQ ID NO: 5796622 - DNA, 25 bp, Homo sapien
ggtggcttggagatccaggcggagt

SEQ ID NO: 5796623 - DNA, 25 bp, Homo sapien
tccccggggacaggcagcggggctc

SEQ ID NO: 5796624 - DNA, 25 bp, Homo sapien
accaggcctgaggtgggcaaggaac

SEQ ID NO: 5796625 - DNA, 25 bp, Homo sapien
tcttgtagtgggcctggatggcggc

SEQ ID NO: 5796626 - DNA, 25 bp, Homo sapien
tgaggggctggggtcagagatggcc

SEQ ID NO: 5796627 - DNA, 25 bp, Homo sapien
tttggcatccacaccaggtggtgag

SEQ ID NO: 5796628 - DNA, 25 bp, Homo sapien
ctgggctggtacttgtagtccgggt

SEQ ID NO: 5796629 - DNA, 25 bp, Homo sapien
aggcggagtgtccactggccacggc

SEQ ID NO: 5796630 - DNA, 25 bp, Homo sapien
agggtcctgagggctgatggtcaga

SEQ ID NO: 5796631 - DNA, 25 bp, Homo sapien
aggagtggtaaggcctccgatgcca

SEQ ID NO: 5796632 - DNA, 25 bp, Homo sapien
catgggccgcttgacgtgcggcttg

SEQ ID NO: 5796633 - DNA, 25 bp, Homo sapien
tagagggtcattcctgggggaaggt

SEQ ID NO: 5796634 - DNA, 25 bp, Homo sapien
cccaccggggcactccgcctcgccc

SEQ ID NO: 5796635 - DNA, 25 bp, Homo sapien
ggggctcctccgagcccacggggct

SEQ ID NO: 5796636 - DNA, 25 bp, Homo sapien
ctctcagcccctgagtgggagacac

SEQ ID NO: 5796637 - DNA, 25 bp, Homo sapien
gggcagtgagccagacagaaagccc

SEQ ID NO: 5796638 - DNA, 25 bp, Homo sapien
gcttcctgcgcgctgcctgagccca

SEQ ID NO: 5796639 - DNA, 25 bp, Homo sapien
gcccagcccatagccggctgctgag

SEQ ID NO: 5796640 - DNA, 25 bp, Homo sapien
tcctcagcctcctccactgccacca

SEQ ID NO: 5796641 - DNA, 25 bp, Homo sapien
tgaggtgggcaaggaacagggcaca

SEQ ID NO: 5796642 - DNA, 25 bp, Homo sapien
ggtgcagcccctcatctttcagtgt

SEQ ID NO: 5796643 - DNA, 25 bp, Homo sapien
ggtcctcgcaaagagtccaacgccc

SEQ ID NO: 5796644 - DNA, 25 bp, Homo sapien
gggctggtacttgtagtccgggtgg

SEQ ID NO: 5796645 - DNA, 25 bp, Homo sapien
atcagggcagtgagccagacagaaa

SEQ ID NO: 5796646 - DNA, 25 bp, Homo sapien
ggtgcaacagtcaacctccttctcc

SEQ ID NO: 5796647 - DNA, 25 bp, Homo sapien
gatctgtgaggtggatggctggtcg

SEQ ID NO: 5796648 - DNA, 25 bp, Homo sapien
ggggccccgcggtctctgtcttcac

SEQ ID NO: 5796649 - DNA, 25 bp, Homo sapien
gggccctagcgagggcgcgctcccc

SEQ ID NO: 5796650 - DNA, 25 bp, Homo sapien
gtgtcgtatatactggctgctccca

SEQ ID NO: 5796651 - DNA, 25 bp, Homo sapien
gcagagccacgcctggtggcttgga

SEQ ID NO: 5796652 - DNA, 25 bp, Homo sapien
acatcaaaggtctccatgttggaca

SEQ ID NO: 5796653 - DNA, 25 bp, Homo sapien
gcccacaccatgaaggcgttcatgg

SEQ ID NO: 5796654 - DNA, 25 bp, Homo sapien
tacggagccgctcagcctcctcgat

SEQ ID NO: 5796655 - DNA, 25 bp, Homo sapien
tcggtgtagtgtgggggcccctggg

SEQ ID NO: 5796656 - DNA, 25 bp, Homo sapien
ccgtgggcagagccacgcctggtgg

SEQ ID NO: 5796657 - DNA, 25 bp, Homo sapien
ggccgggacagtgtcgtatatactg

SEQ ID NO: 5796658 - DNA, 25 bp, Homo sapien
gccgctgagcacctggctgacggcc

SEQ ID NO: 5796659 - DNA, 25 bp, Homo sapien
aagagtccaacgcccacctcctcgg

SEQ ID NO: 5796660 - DNA, 25 bp, Homo sapien
cccattgggcggcaggtactggtcc

SEQ ID NO: 5796661 - DNA, 25 bp, Homo sapien
caggcctgaggtgggcaaggaacag

SEQ ID NO: 5796662 - DNA, 25 bp, Homo sapien
aggtgggcaaggaacagggcacaca

SEQ ID NO: 5796663 - DNA, 25 bp, Homo sapien
acgcctggtggcttggagatccagg

SEQ ID NO: 5796664 - DNA, 25 bp, Homo sapien
ctggccacggccagggcactgccca

SEQ ID NO: 5796665 - DNA, 25 bp, Homo sapien
ggccgcttgacgtgcggcttgcttt

SEQ ID NO: 5796666 - DNA, 25 bp, Homo sapien
ttcagcctcctcagcctcctccact

SEQ ID NO: 5796667 - DNA, 25 bp, Homo sapien
agctccacctccgataggtcctgct

SEQ ID NO: 5796668 - DNA, 25 bp, Homo sapien
gggcagagccacgcctggtggcttg

SEQ ID NO: 5796669 - DNA, 25 bp, Homo sapien
cgccgccgccgccgtcgggccctag

SEQ ID NO: 5796670 - DNA, 25 bp, Homo sapien
gggccctgaggggctggggtcagag

SEQ ID NO: 5796671 - DNA, 25 bp, Homo sapien
gtcaaactgggggcgggagatggag

SEQ ID NO: 5796672 - DNA, 25 bp, Homo sapien
ctttagggccgggacagtgtcgtat

SEQ ID NO: 5796673 - DNA, 25 bp, Homo sapien
agagcttgcccagcgtcttgctgag

SEQ ID NO: 5796674 - DNA, 25 bp, Homo sapien
ctcatctttcagtgtgggtgcaaca

SEQ ID NO: 5796675 - DNA, 25 bp, Homo sapien
cccgcggtctctgtcttcacctggg

SEQ ID NO: 5796676 - DNA, 25 bp, Homo sapien
cggcttgcttttgctggcgccgttg

SEQ ID NO: 5796677 - DNA, 25 bp, Homo sapien
tgtgtggggctgtgggactggggcc

SEQ ID NO: 5796678 - DNA, 25 bp, Homo sapien
agacagaaagccccccgacctgtca

SEQ ID NO: 5796679 - DNA, 25 bp, Homo sapien
gctccgggcacagtctctgggtggc

SEQ ID NO: 5796680 - DNA, 25 bp, Homo sapien
gcggcaggtactggtccaactcagc

SEQ ID NO: 5796681 - DNA, 25 bp, Homo sapien
gctgggggcaggggctgggcggggg

SEQ ID NO: 5796682 - DNA, 25 bp, Homo sapien
aggggaaggctgagccatagtgggg

SEQ ID NO: 5796683 - DNA, 25 bp, Homo sapien
gcgggtactggtccgcgagcttcct

SEQ ID NO: 5796684 - DNA, 25 bp, Homo sapien
cttgctgagctcagcgttgtgcagg

SEQ ID NO: 5796685 - DNA, 25 bp, Homo sapien
gtcctgctgctccttcttgaccttg

SEQ ID NO: 5796686 - DNA, 25 bp, Homo sapien
ggtcctgctcctccgccatgtcgcc

SEQ ID NO: 5796687 - DNA, 25 bp, Homo sapien
ggcatgggcaccagcgtccagtcgt

SEQ ID NO: 5796688 - DNA, 25 bp, Homo sapien
tctttcagtgtgggtgcaacagtca

SEQ ID NO: 5796689 - DNA, 25 bp, Homo sapien
tgtgaggtggatggctggtcggtgt

SEQ ID NO: 5796690 - DNA, 25 bp, Homo sapien
agcagcctccagagcttgcccagcg

SEQ ID NO: 5796691 - DNA, 25 bp, Homo sapien
ggtgcccattgggcggcaggtactg

SEQ ID NO: 5796692 - DNA, 25 bp, Homo sapien
gtgggagacacggccagctccgggc

SEQ ID NO: 5796693 - DNA, 25 bp, Homo sapien
gctttgctgctggagcctggatggg

SEQ ID NO: 5796694 - DNA, 25 bp, Homo sapien
ggggtcctcgcaaagagtccaacgc

SEQ ID NO: 5796695 - DNA, 25 bp, Homo sapien
agcccatagccggctgctgagtagc

SEQ ID NO: 5796696 - DNA, 25 bp, Homo sapien
ctgatctcaccaatgtccacgttgc

SEQ ID NO: 5796697 - DNA, 25 bp, Homo sapien
tggcataggtggcatgggcatgtca

SEQ ID NO: 5796698 - DNA, 25 bp, Homo sapien
cattgaagggatgagaactccacta

SEQ ID NO: 5796699 - DNA, 25 bp, Homo sapien
cgcacgggcatgggcaccagcgtcc

SEQ ID NO: 5796700 - DNA, 25 bp, Homo sapien
tctcaccaatgtccacgttgccgaa

SEQ ID NO: 5796701 - DNA, 25 bp, Homo sapien
cccaatgaggctcctcaaagctact

SEQ ID NO: 5796702 - DNA, 25 bp, Homo sapien
cagcccctcatctttcagtgtgggt

SEQ ID NO: 5796703 - DNA, 25 bp, Homo sapien
tctttcttgtgctgcatacggagcc

SEQ ID NO: 5796704 - DNA, 25 bp, Homo sapien
ggcaggggctgggcggggggtggtg

SEQ ID NO: 5796705 - DNA, 25 bp, Homo sapien
cgtgtagaggggccgctgcgagggc

SEQ ID NO: 5796706 - DNA, 25 bp, Homo sapien
gaccgtgggcagagccacgcctggt

SEQ ID NO: 5796707 - DNA, 25 bp, Homo sapien
catgggcaccagcgtccagtcgtag

SEQ ID NO: 5796708 - DNA, 25 bp, Homo sapien
cggggacaggcagcggggctcctcc

SEQ ID NO: 5796709 - DNA, 25 bp, Homo sapien
gacgtgcggcttgcttttgctggcg

SEQ ID NO: 5796710 - DNA, 25 bp, Homo sapien
ccgataggtcctgctcctccgccat

SEQ ID NO: 5796711 - DNA, 25 bp, Homo sapien
gccgtcgggccctagcgagggcgcg

SEQ ID NO: 5796712 - DNA, 25 bp, Homo sapien
ctgggatagagggtcattcctgggg

SEQ ID NO: 5796713 - DNA, 25 bp, Homo sapien
tgcagctctgtcttcggggtggttg

SEQ ID NO: 5796714 - DNA, 25 bp, Homo sapien
acgttgccgaagtcgatgtgaggct

SEQ ID NO: 5796715 - DNA, 25 bp, Homo sapien
gctcccagtgtgtggggctgtggga

SEQ ID NO: 5796716 - DNA, 25 bp, Homo sapien
tcctcgcaaagagtccaacgcccac

SEQ ID NO: 5796717 - DNA, 25 bp, Homo sapien
aacctccttctcctctgtccagcct

SEQ ID NO: 5796718 - DNA, 25 bp, Homo sapien
gggctggggtcagagatggccgtgt

SEQ ID NO: 5796719 - DNA, 25 bp, Homo sapien
gagcaggcccttctcaggtcctggg

SEQ ID NO: 5796720 - DNA, 25 bp, Homo sapien
cctcgtggctgatctcaccaatgtc

SEQ ID NO: 5796721 - DNA, 25 bp, Homo sapien
ggtgctcggggttcccatctgacat

SEQ ID NO: 5796722 - DNA, 25 bp, Homo sapien
aaaacaggagtcataggagtggtaa

SEQ ID NO: 5796723 - DNA, 25 bp, Homo sapien
gtggtaaggcctccgatgccaccaa

SEQ ID NO: 5796724 - DNA, 25 bp, Homo sapien
ctctgtccagcctgttctcctgggg

SEQ ID NO: 5796725 - DNA, 25 bp, Homo sapien
gtcagagatggccgtgtagaggggc

SEQ ID NO: 5796726 - DNA, 25 bp, Homo sapien
ctcagcctcctcgatgaaggggcgc

SEQ ID NO: 5796727 - DNA, 25 bp, Homo sapien
cctcttcagcctcctcagcctcctc

SEQ ID NO: 5796728 - DNA, 25 bp, Homo sapien
ggcaggtactggtccaactcagcca

SEQ ID NO: 5796729 - DNA, 25 bp, Homo sapien
tgcccattgggcggcaggtactggt

SEQ ID NO: 5796730 - DNA, 25 bp, Homo sapien
tgggtcatcagggcagtgagccaga

SEQ ID NO: 5796731 - DNA, 25 bp, Homo sapien
tggcatccacaccaggtggtgagac

SEQ ID NO: 5796732 - DNA, 25 bp, Homo sapien
tgctgagtagctgctcacatggcct

SEQ ID NO: 5796733 - DNA, 25 bp, Homo sapien
gcagtgagccagacagaaagccccc

SEQ ID NO: 5796734 - DNA, 25 bp, Homo sapien
ctggtggcttggagatccaggcgga

SEQ ID NO: 5796735 - DNA, 25 bp, Homo sapien
aggcctggcccgagtggccataata

SEQ ID NO: 5796736 - DNA, 25 bp, Homo sapien
cacggggaacttgtcatcgtccgcc

SEQ ID NO: 5796737 - DNA, 25 bp, Homo sapien
tgggcatgtcagaccctcactatct

SEQ ID NO: 5796738 - DNA, 25 bp, Homo sapien
ggagtcataggagtggtaaggcctc

SEQ ID NO: 5796739 - DNA, 25 bp, Homo sapien
gcctggatggggcgggtgggtcatc

SEQ ID NO: 5796740 - DNA, 25 bp, Homo sapien
caggcagcggggctcctccgagccc

SEQ ID NO: 5796741 - DNA, 25 bp, Homo sapien
tcttgtgctgcatacggagccgctc

SEQ ID NO: 5796742 - DNA, 25 bp, Homo sapien
cagggcacacaggctgggggcaggg

SEQ ID NO: 5796743 - DNA, 25 bp, Homo sapien
caggagtcataggagtggtaaggcc

SEQ ID NO: 5796744 - DNA, 25 bp, Homo sapien
ctctcctgggtgccggtggtccaag

SEQ ID NO: 5796745 - DNA, 25 bp, Homo sapien
aggcccttctcaggtcctgggatag

SEQ ID NO: 5796746 - DNA, 25 bp, Homo sapien
gagatggccgtgtagaggggccgct

SEQ ID NO: 5796747 - DNA, 25 bp, Homo sapien
gcccctgagtgggagacacggccag

SEQ ID NO: 5796748 - DNA, 25 bp, Homo sapien
tagtcaaactgggggcgggagatgg

SEQ ID NO: 5796749 - DNA, 25 bp, Homo sapien
gggtctgccttgcccgactgcagct

SEQ ID NO: 5796750 - DNA, 25 bp, Homo sapien
accatgaaggcgttcatgggccgct

SEQ ID NO: 5796751 - DNA, 25 bp, Homo sapien
tcagcctcttcagcctcctcagcct

SEQ ID NO: 5796752 - DNA, 25 bp, Homo sapien
ccgatccgccgccgccgccgtcggg

SEQ ID NO: 5796753 - DNA, 25 bp, Homo sapien
agaaagggagggggcattgaaggga

SEQ ID NO: 5796754 - DNA, 25 bp, Homo sapien
cgggagatggaggggaaggctgagc

SEQ ID NO: 5796755 - DNA, 25 bp, Homo sapien
gcgatctgtgaggtggatggctggt

SEQ ID NO: 5796756 - DNA, 25 bp, Homo sapien
tgccggtggtccaagtgggcgctct

SEQ ID NO: 5796757 - DNA, 25 bp, Homo sapien
tctgtgagagagaaaacaggagtca

SEQ ID NO: 5796758 - DNA, 25 bp, Homo sapien
tttgctgctggagcctggatggggc

SEQ ID NO: 5796759 - DNA, 25 bp, Homo sapien
ctcctggggctttgctgctggagcc

SEQ ID NO: 5796760 - DNA, 25 bp, Homo sapien
ggtcagagtagtcaaactgggggcg

SEQ ID NO: 5796761 - DNA, 25 bp, Homo sapien
agtgggcctggatggcggcggtccc

SEQ ID NO: 5796762 - DNA, 25 bp, Homo sapien
ctgagtgggagacacggccagctcc

SEQ ID NO: 5796763 - DNA, 25 bp, Homo sapien
ctggcccgagtggccataatagggt

SEQ ID NO: 5796764 - DNA, 25 bp, Homo sapien
agcgtccagtcgtagccgctgagca

SEQ ID NO: 5796765 - DNA, 25 bp, Homo sapien
gacagtgtcgtatatactggctgct

SEQ ID NO: 5796766 - DNA, 25 bp, Homo sapien
ccgggacagtgtcgtatatactggc

SEQ ID NO: 5796767 - DNA, 25 bp, Homo sapien
ggcagcggggctcctccgagcccac

SEQ ID NO: 5796768 - DNA, 25 bp, Homo sapien
cgccggggtcctcgcaaagagtcca

SEQ ID NO: 5796769 - DNA, 25 bp, Homo sapien
catcgtccgcctcgccgtcctgctg

SEQ ID NO: 5796770 - DNA, 25 bp, Homo sapien
tcgggtctgccttgcccgactgcag

SEQ ID NO: 5796771 - DNA, 25 bp, Homo sapien
ttttttcagggggcctctgtgccaa

SEQ ID NO: 5796772 - DNA, 25 bp, Homo sapien
cggtcccaccttgctcggcctcccc

SEQ ID NO: 5796773 - DNA, 25 bp, Homo sapien
attacctcgtggctgatctcaccaa

SEQ ID NO: 5796774 - DNA, 25 bp, Homo sapien
gtccaagtgggcgctcttgtagtgg

SEQ ID NO: 5796775 - DNA, 25 bp, Homo sapien
atgtccacgttgccgaagtcgatgt

SEQ ID NO: 5796776 - DNA, 25 bp, Homo sapien
ggggaaggtgcagcccctcatcttt

SEQ ID NO: 5796777 - DNA, 25 bp, Homo sapien
tggtacttgtagtccgggtggtctt

SEQ ID NO: 5796778 - DNA, 25 bp, Homo sapien
aggcctccgatgccaccaaccctgg

SEQ ID NO: 5796779 - DNA, 25 bp, Homo sapien
aggtggcatgggcatgtcagaccct

SEQ ID NO: 5796780 - DNA, 25 bp, Homo sapien
cccccatggagcgcccgtcccgctt

SEQ ID NO: 5796781 - DNA, 25 bp, Homo sapien
ctgatctgcaggatgtttacgttct

SEQ ID NO: 5796782 - DNA, 25 bp, Homo sapien
agaacgtaaacatcctgcagatcag

SEQ ID NO: 5796783 - DNA, 25 bp, Homo sapien
atgactacccccgggcttcacaccc

SEQ ID NO: 5796784 - DNA, 25 bp, Homo sapien
ttgcctgtagcccatatgctagagg

SEQ ID NO: 5796785 - DNA, 25 bp, Homo sapien
cttgcagcctccagctccttttatg

SEQ ID NO: 5796786 - DNA, 25 bp, Homo sapien
ctgtcatcccacatagccctggggt

SEQ ID NO: 5796787 - DNA, 25 bp, Homo sapien
agactggcaggcagtctactgaccc

SEQ ID NO: 5796788 - DNA, 25 bp, Homo sapien
ggggtgctgtgtggctcaatgtcaa

SEQ ID NO: 5796789 - DNA, 25 bp, Homo sapien
cttggtggaattggctacttctacg

SEQ ID NO: 5796790 - DNA, 25 bp, Homo sapien
gccatctctggagcccctttggttt

SEQ ID NO: 5796791 - DNA, 25 bp, Homo sapien
attcctagtacaacgagcagtccac

SEQ ID NO: 5796792 - DNA, 25 bp, Homo sapien
ctggacctccaacccaggactgccc

SEQ ID NO: 5796793 - DNA, 25 bp, Homo sapien
ctcctaagctcaggcacacgtgtga

SEQ ID NO: 5796794 - DNA, 25 bp, Homo sapien
ctgcactgggccccagagctaggag

SEQ ID NO: 5796795 - DNA, 25 bp, Homo sapien
agtctactgacccaggccctggaga

SEQ ID NO: 5796796 - DNA, 25 bp, Homo sapien
agctcttgtgacgcggacctcagtg

SEQ ID NO: 5796797 - DNA, 25 bp, Homo sapien
tggcggggtgctgtgtggctcaatg

SEQ ID NO: 5796798 - DNA, 25 bp, Homo sapien
tggggtgaatgtgaatccagagtct

SEQ ID NO: 5796799 - DNA, 25 bp, Homo sapien
ttttgcctgtagcccatatgctaga

SEQ ID NO: 5796800 - DNA, 25 bp, Homo sapien
cagtgccggcagagggagtgcggac

SEQ ID NO: 5796801 - DNA, 25 bp, Homo sapien
tcaagaggcctgggggtcagcacgg

SEQ ID NO: 5796802 - DNA, 25 bp, Homo sapien
ttactggccatggctgaagactact

SEQ ID NO: 5796803 - DNA, 25 bp, Homo sapien
ttcctttgggatgaaggctttcacc

SEQ ID NO: 5796804 - DNA, 25 bp, Homo sapien
actacctggctttgggagcactcca

SEQ ID NO: 5796805 - DNA, 25 bp, Homo sapien
caggctacaggctttctttgggagc

SEQ ID NO: 5796806 - DNA, 25 bp, Homo sapien
tggcggggacgggaccctgccttac

SEQ ID NO: 5796807 - DNA, 25 bp, Homo sapien
cgggagccggagaggtgaggcagga

SEQ ID NO: 5796808 - DNA, 25 bp, Homo sapien
gagaggcgggagccggagaggtgag

SEQ ID NO: 5796809 - DNA, 25 bp, Homo sapien
agagagcctggatgagctgcactgg

SEQ ID NO: 5796810 - DNA, 25 bp, Homo sapien
cagcggtgggatccctccctcaccc

SEQ ID NO: 5796811 - DNA, 25 bp, Homo sapien
tgggaaccacacaaaagcagtacag

SEQ ID NO: 5796812 - DNA, 25 bp, Homo sapien
caacacatccaggatggggccttaa

SEQ ID NO: 5796813 - DNA, 25 bp, Homo sapien
cacggctggaggagtggctctggcc

SEQ ID NO: 5796814 - DNA, 25 bp, Homo sapien
caggcgctggctggcaggtgtcgct

SEQ ID NO: 5796815 - DNA, 25 bp, Homo sapien
atcaggcagtgcccaggcaggagga

SEQ ID NO: 5796816 - DNA, 25 bp, Homo sapien
gtagcccatatgctagaggttggtg

SEQ ID NO: 5796817 - DNA, 25 bp, Homo sapien
accctgaaaattcccatttccatag

SEQ ID NO: 5796818 - DNA, 25 bp, Homo sapien
cgtggtaccgtgcgcggcgggcggt

SEQ ID NO: 5796819 - DNA, 25 bp, Homo sapien
ctggacattctagccgacagccgcc

SEQ ID NO: 5796820 - DNA, 25 bp, Homo sapien
tcgggcgccaacacatccaggatgg

SEQ ID NO: 5796821 - DNA, 25 bp, Homo sapien
cgacttggctttcctccgaaaggcc

SEQ ID NO: 5796822 - DNA, 25 bp, Homo sapien
gcggcctccttggtggaattggcta

SEQ ID NO: 5796823 - DNA, 25 bp, Homo sapien
tggacccagccctctttccacccgt

SEQ ID NO: 5796824 - DNA, 25 bp, Homo sapien
cctttgggatgaaggctttcaccag

SEQ ID NO: 5796825 - DNA, 25 bp, Homo sapien
tcccttgctgctgcgactgctggac

SEQ ID NO: 5796826 - DNA, 25 bp, Homo sapien
ctggcgtggtaccgtgcgcggcggg

SEQ ID NO: 5796827 - DNA, 25 bp, Homo sapien
gcgagaggcgggagccggagaggtg

SEQ ID NO: 5796828 - DNA, 25 bp, Homo sapien
ccccacctcatcccgccttgggccc

SEQ ID NO: 5796829 - DNA, 25 bp, Homo sapien
aagggcaggggcagttcttgataca

SEQ ID NO: 5796830 - DNA, 25 bp, Homo sapien
ggatgaaggctttcaccagctggtg

SEQ ID NO: 5796831 - DNA, 25 bp, Homo sapien
gctggcagagcatctgggtgaggct

SEQ ID NO: 5796832 - DNA, 25 bp, Homo sapien
tttcctccgaaaggccttgccccgc

SEQ ID NO: 5796833 - DNA, 25 bp, Homo sapien
gaggcccgagcccgggtgcctccag

SEQ ID NO: 5796834 - DNA, 25 bp, Homo sapien
tcctcaccaggctcgggctgccaaa

SEQ ID NO: 5796835 - DNA, 25 bp, Homo sapien
ggcaccaccccggggactcctaagc

SEQ ID NO: 5796836 - DNA, 25 bp, Homo sapien
agtacaacgagcagtccacgccaac

SEQ ID NO: 5796837 - DNA, 25 bp, Homo sapien
tcctcaccggactgatgtgggcgca

SEQ ID NO: 5796838 - DNA, 25 bp, Homo sapien
ggtgaccctgaaaattcccatttcc

SEQ ID NO: 5796839 - DNA, 25 bp, Homo sapien
ggagggtcctcaccaggctcgggct

SEQ ID NO: 5796840 - DNA, 25 bp, Homo sapien
catatgctagaggttggtgaccctg

SEQ ID NO: 5796841 - DNA, 25 bp, Homo sapien
ctttccacggctggaccagccttgt

SEQ ID NO: 5796842 - DNA, 25 bp, Homo sapien
gcctgtagcccatatgctagaggtt

SEQ ID NO: 5796843 - DNA, 25 bp, Homo sapien
gagaagaccttccagctgaaggaga

SEQ ID NO: 5796844 - DNA, 25 bp, Homo sapien
cagggcgagaggcgggagccggaga

SEQ ID NO: 5796845 - DNA, 25 bp, Homo sapien
tgagctgcactgggccccagagcta

SEQ ID NO: 5796846 - DNA, 25 bp, Homo sapien
gccgactcctccagccccgccgtgg

SEQ ID NO: 5796847 - DNA, 25 bp, Homo sapien
gttcgtcaagaggcctgggggtcag

SEQ ID NO: 5796848 - DNA, 25 bp, Homo sapien
cctggggtgaatgtgaatccagagt

SEQ ID NO: 5796849 - DNA, 25 bp, Homo sapien
tggggaacctaccgccctcacgtct

SEQ ID NO: 5796850 - DNA, 25 bp, Homo sapien
tttggccctgggtatgtcggggcgc

SEQ ID NO: 5796851 - DNA, 25 bp, Homo sapien
ctcaggactcagctacaatgtcttc

SEQ ID NO: 5796852 - DNA, 25 bp, Homo sapien
tcagcatcggcccccaggggcctcc

SEQ ID NO: 5796853 - DNA, 25 bp, Homo sapien
cggtgtgggtccctatggctgggag

SEQ ID NO: 5796854 - DNA, 25 bp, Homo sapien
tggcgccagtaccaggctacaggct

SEQ ID NO: 5796855 - DNA, 25 bp, Homo sapien
ggacctccaacccaggactgcccct

SEQ ID NO: 5796856 - DNA, 25 bp, Homo sapien
tgcgatgttgggtggcactgggtgc

SEQ ID NO: 5796857 - DNA, 25 bp, Homo sapien
ggcgcaggcgctggctggcaggtgt

SEQ ID NO: 5796858 - DNA, 25 bp, Homo sapien
agcccgggtgcctccagaattccta

SEQ ID NO: 5796859 - DNA, 25 bp, Homo sapien
agctggagagtgactgtagagcctc

SEQ ID NO: 5796860 - DNA, 25 bp, Homo sapien
gagaggaggggagccaagacactca

SEQ ID NO: 5796861 - DNA, 25 bp, Homo sapien
tctgggtgaggctgaggtagctgct

SEQ ID NO: 5796862 - DNA, 25 bp, Homo sapien
agccgccatctctggagcccctttg

SEQ ID NO: 5796863 - DNA, 25 bp, Homo sapien
gactgctggaccccacctcatcccg

SEQ ID NO: 5796864 - DNA, 25 bp, Homo sapien
tgctgacgcggctggcagagcatct

SEQ ID NO: 5796865 - DNA, 25 bp, Homo sapien
aggtgaggcaggacccgggctccac

SEQ ID NO: 5796866 - DNA, 25 bp, Homo sapien
ggtcaggctgccctcagcggcctcc

SEQ ID NO: 5796867 - DNA, 25 bp, Homo sapien
tatggcgccagtaccaggctacagg

SEQ ID NO: 5796868 - DNA, 25 bp, Homo sapien
tagccgacagccgccatctctggag

SEQ ID NO: 5796869 - DNA, 25 bp, Homo sapien
ggaaatcaagccctgccaagactgg

SEQ ID NO: 5796870 - DNA, 25 bp, Homo sapien
ccctgggtatgtcggggcgctgggt

SEQ ID NO: 5796871 - DNA, 25 bp, Homo sapien
cttccagctgaaggagaagggcctg

SEQ ID NO: 5796872 - DNA, 25 bp, Homo sapien
ggagagtgactgtagagcctcagga

SEQ ID NO: 5796873 - DNA, 25 bp, Homo sapien
gtaccaggctacaggctttctttgg

SEQ ID NO: 5796874 - DNA, 25 bp, Homo sapien
tgcctggttttcctggctccatcag

SEQ ID NO: 5796875 - DNA, 25 bp, Homo sapien
ggcttcacacccttcagtaaccgag

SEQ ID NO: 5796876 - DNA, 25 bp, Homo sapien
gaggcgggagccggagaggtgaggc

SEQ ID NO: 5796877 - DNA, 25 bp, Homo sapien
ctgccactatcttaccgctggcggg

SEQ ID NO: 5796878 - DNA, 25 bp, Homo sapien
tcaactgcagtatgtagatgctctt

SEQ ID NO: 5796879 - DNA, 25 bp, Homo sapien
gcgcagcagggcaccaccccgggga

SEQ ID NO: 5796880 - DNA, 25 bp, Homo sapien
gtaggcaatgtatggcgccagtacc

SEQ ID NO: 5796881 - DNA, 25 bp, Homo sapien
ccttggccactggctggggctgcta

SEQ ID NO: 5796882 - DNA, 25 bp, Homo sapien
ctggctctgaagggacaaaggcttc

SEQ ID NO: 5796883 - DNA, 25 bp, Homo sapien
cctgctggacattctagccgacagc

SEQ ID NO: 5796884 - DNA, 25 bp, Homo sapien
ggcaggcccactgccactatcttac

SEQ ID NO: 5796885 - DNA, 25 bp, Homo sapien
actggaggcagcagagagcctggat

SEQ ID NO: 5796886 - DNA, 25 bp, Homo sapien
gccatggctgaagactactgaaggg

SEQ ID NO: 5796887 - DNA, 25 bp, Homo sapien
ctcaccaggctcgggctgccaaact

SEQ ID NO: 5796888 - DNA, 25 bp, Homo sapien
gtgggtccctatggctgggagttcc

SEQ ID NO: 5796889 - DNA, 25 bp, Homo sapien
accaggctacaggctttctttggga

SEQ ID NO: 5796890 - DNA, 25 bp, Homo sapien
caactacctggctttgggagcactc

SEQ ID NO: 5796891 - DNA, 25 bp, Homo sapien
tgagctgggcccactggctgcctca

SEQ ID NO: 5796892 - DNA, 25 bp, Homo sapien
ctcacgtctacttcggcatgaagac

SEQ ID NO: 5796893 - DNA, 25 bp, Homo sapien
gacgcggctggcagagcatctgggt

SEQ ID NO: 5796894 - DNA, 25 bp, Homo sapien
gggctggtattgccagacatcgggg

SEQ ID NO: 5796895 - DNA, 25 bp, Homo sapien
ttgctgctgcgactgctggacccca

SEQ ID NO: 5796896 - DNA, 25 bp, Homo sapien
gctgcctcactggaggcagcagaga

SEQ ID NO: 5796897 - DNA, 25 bp, Homo sapien
gcagagggagtgcggacagccgaga

SEQ ID NO: 5796898 - DNA, 25 bp, Homo sapien
agctgctgagctgggcccactggct

SEQ ID NO: 5796899 - DNA, 25 bp, Homo sapien
cttcctcatttcatctcaggtgtct

SEQ ID NO: 5796900 - DNA, 25 bp, Homo sapien
ctgctgagctgggcccactggctgc

SEQ ID NO: 5796901 - DNA, 25 bp, Homo sapien
atacagcaggtgaccctgaaaattc

SEQ ID NO: 5796902 - DNA, 25 bp, Homo sapien
gggcgcagcagggcaccaccccggg

SEQ ID NO: 5796903 - DNA, 25 bp, Homo sapien
acctcagtgccaggatggctcgggg

SEQ ID NO: 5796904 - DNA, 25 bp, Homo sapien
cactgccactatcttaccgctggcg

SEQ ID NO: 5796905 - DNA, 25 bp, Homo sapien
gctcgttcgggtggtgggtcggccc

SEQ ID NO: 5796906 - DNA, 25 bp, Homo sapien
ggcccctgctggacattctagccga

SEQ ID NO: 5796907 - DNA, 25 bp, Homo sapien
tggctgcctcactggaggcagcaga

SEQ ID NO: 5796908 - DNA, 25 bp, Homo sapien
ccccaggggcctcccctgaacgcta

SEQ ID NO: 5796909 - DNA, 25 bp, Homo sapien
tggctggggctgctaaatgctgatg

SEQ ID NO: 5796910 - DNA, 25 bp, Homo sapien
cctctccgagctcttgtgacgcgga

SEQ ID NO: 5796911 - DNA, 25 bp, Homo sapien
cctcctcaccggactgatgtgggcg

SEQ ID NO: 5796912 - DNA, 25 bp, Homo sapien
gcgactgctggaccccacctcatcc

SEQ ID NO: 5796913 - DNA, 25 bp, Homo sapien
cgcctctccgagctcttgtgacgcg

SEQ ID NO: 5796914 - DNA, 25 bp, Homo sapien
ggcatgggctgccgccctttccacg

SEQ ID NO: 5796915 - DNA, 25 bp, Homo sapien
gacagagatggtaaagagtcgccta

SEQ ID NO: 5796916 - DNA, 25 bp, Homo sapien
tcgccagggcgagaggcgggagccg

SEQ ID NO: 5796917 - DNA, 25 bp, Homo sapien
agcacggctggaggagtggctctgg

SEQ ID NO: 5796918 - DNA, 25 bp, Homo sapien
ccacctcatcccgccttgggcccct

SEQ ID NO: 5796919 - DNA, 25 bp, Homo sapien
gtgaatccagagtctatttttctaa

SEQ ID NO: 5796920 - DNA, 25 bp, Homo sapien
tagatgctcttggctatgtcagtct

SEQ ID NO: 5796921 - DNA, 25 bp, Homo sapien
tgcccgtgtgctgacgcggctggca

SEQ ID NO: 5796922 - DNA, 25 bp, Homo sapien
gtacagtgaccgcgatgggcgaggc

SEQ ID NO: 5796923 - DNA, 25 bp, Homo sapien
ggaattggctacttctacggacaag

SEQ ID NO: 5796924 - DNA, 25 bp, Homo sapien
agagcatgatcccccctactggcgg

SEQ ID NO: 5796925 - DNA, 25 bp, Homo sapien
ctctgaagggacaaaggcttctggc

SEQ ID NO: 5796926 - DNA, 25 bp, Homo sapien
gcagttcttgatacagcaggtgacc

SEQ ID NO: 5796927 - DNA, 25 bp, Homo sapien
catagccctggggtgaatgtgaatc

SEQ ID NO: 5796928 - DNA, 25 bp, Homo sapien
aggatggggccttaaggctcaccac

SEQ ID NO: 5796929 - DNA, 25 bp, Homo sapien
gcccaggcaggaggaaatcaagccc

SEQ ID NO: 5796930 - DNA, 25 bp, Homo sapien
tggatgagctgcactgggccccaga

SEQ ID NO: 5796931 - DNA, 25 bp, Homo sapien
atgctgatggctggattgggaggga

SEQ ID NO: 5796932 - DNA, 25 bp, Homo sapien
gcttctggcttttgcccccagcccc

SEQ ID NO: 5796933 - DNA, 25 bp, Homo sapien
cgctggctggcaggtgtcgctaacc

SEQ ID NO: 5796934 - DNA, 25 bp, Homo sapien
ctgtgtggctcaatgtcaactacct

SEQ ID NO: 5796935 - DNA, 25 bp, Homo sapien
gctggtattgccagacatcggggtg

SEQ ID NO: 5796936 - DNA, 25 bp, Homo sapien
caggacccgggctccactgccgcct

SEQ ID NO: 5796937 - DNA, 25 bp, Homo sapien
agatactgggggatgaggcccgagc

SEQ ID NO: 5796938 - DNA, 25 bp, Homo sapien
ctctttttacagcagtgccctcccg

SEQ ID NO: 5796939 - DNA, 25 bp, Homo sapien
ctccagccccgccgtggccccggac

SEQ ID NO: 5796940 - DNA, 25 bp, Homo sapien
cccaggactgcccctgctgacagag

SEQ ID NO: 5796941 - DNA, 25 bp, Homo sapien
tctctggagcccctttggtttacgc

SEQ ID NO: 5796942 - DNA, 25 bp, Homo sapien
aagggtctgagcagaaggtggaccc

SEQ ID NO: 5796943 - DNA, 25 bp, Homo sapien
tcagtctttttcccttgctgctgcg

SEQ ID NO: 5796944 - DNA, 25 bp, Homo sapien
acactcatgccactctggctctgaa

SEQ ID NO: 5796945 - DNA, 25 bp, Homo sapien
cgccctcacgtctacttcggcatga

SEQ ID NO: 5796946 - DNA, 25 bp, Homo sapien
gggggacggtgtgggtccctatggc

SEQ ID NO: 5796947 - DNA, 25 bp, Homo sapien
aggaggaaatcaagccctgccaaga

SEQ ID NO: 5796948 - DNA, 25 bp, Homo sapien
tctccgagctcttgtgacgcggacc

SEQ ID NO: 5796949 - DNA, 25 bp, Homo sapien
gctcaccactgagttcgtcaagagg

SEQ ID NO: 5796950 - DNA, 25 bp, Homo sapien
tcttctggacctccaacccaggact

SEQ ID NO: 5796951 - DNA, 25 bp, Homo sapien
cagccccttggataccagtaattca

SEQ ID NO: 5796952 - DNA, 25 bp, Homo sapien
atggctgggagttccacgacggcct

SEQ ID NO: 5796953 - DNA, 25 bp, Homo sapien
ccctacttttgcctgtagcccatat

SEQ ID NO: 5796954 - DNA, 25 bp, Homo sapien
tgtcgctaaccggacggtggtcgcc

SEQ ID NO: 5796955 - DNA, 25 bp, Homo sapien
gggctgctaaatgctgatggctgga

SEQ ID NO: 5796956 - DNA, 25 bp, Homo sapien
catcccacatagccctggggtgaat

SEQ ID NO: 5796957 - DNA, 25 bp, Homo sapien
cgggaagcccttggccactggctgg

SEQ ID NO: 5796958 - DNA, 25 bp, Homo sapien
gggcagttcttgatacagcaggtga

SEQ ID NO: 5796959 - DNA, 25 bp, Homo sapien
ccagagctaggagtctttgcagact

SEQ ID NO: 5796960 - DNA, 25 bp, Homo sapien
ccagccctctttccacccgtacctc

SEQ ID NO: 5796961 - DNA, 25 bp, Homo sapien
tttgcccccagccccttggatacca

SEQ ID NO: 5796962 - DNA, 25 bp, Homo sapien
atgaggcccgagcccgggtgcctcc

SEQ ID NO: 5796963 - DNA, 25 bp, Homo sapien
gccagtaccaggctacaggctttct

SEQ ID NO: 5796964 - DNA, 25 bp, Homo sapien
ggtcattcttcccacgaggcttcct

SEQ ID NO: 5796965 - DNA, 25 bp, Homo sapien
gcccttggccactggctggggctgc

SEQ ID NO: 5796966 - DNA, 25 bp, Homo sapien
tcctggctccatcagagccaggcag

SEQ ID NO: 5796967 - DNA, 25 bp, Homo sapien
aagactactgaagggagggagagga

SEQ ID NO: 5796968 - DNA, 25 bp, Homo sapien
tgtagagcctcaggactcagctaca

SEQ ID NO: 5796969 - DNA, 25 bp, Homo sapien
ccaacccaggactgcccctgctgac

SEQ ID NO: 5796970 - DNA, 25 bp, Homo sapien
ggacctcagtgccaggatggctcgg

SEQ ID NO: 5796971 - DNA, 25 bp, Homo sapien
taaggctcaccactgagttcgtcaa

SEQ ID NO: 5796972 - DNA, 25 bp, Homo sapien
cttttgcccccagccccttggatac

SEQ ID NO: 5796973 - DNA, 25 bp, Homo sapien
ttctggacctccaacccaggactgc

SEQ ID NO: 5796974 - DNA, 25 bp, Homo sapien
ggctggaccagccttgtcttactgg

SEQ ID NO: 5796975 - DNA, 25 bp, Homo sapien
tgggtgcccgtgtgctgacgcggct

SEQ ID NO: 5796976 - DNA, 25 bp, Homo sapien
tttcaccagctggtggttcagcggt

SEQ ID NO: 5796977 - DNA, 25 bp, Homo sapien
agaggttggtgaccctgacgacttg

SEQ ID NO: 5796978 - DNA, 25 bp, Homo sapien
cctcaactgcagtatgtagatgctc

SEQ ID NO: 5796979 - DNA, 25 bp, Homo sapien
ccactggctgcctcactggaggcag

SEQ ID NO: 5796980 - DNA, 25 bp, Homo sapien
ggtgtctccttgctgtcatcccaca

SEQ ID NO: 5796981 - DNA, 25 bp, Homo sapien
agcactccaccactatgggcatctg

SEQ ID NO: 5796982 - DNA, 25 bp, Homo sapien
ttagagagcgctttgagaagacctt

SEQ ID NO: 5796983 - DNA, 25 bp, Homo sapien
gtggtcgccagggcgagaggcggga

SEQ ID NO: 5796984 - DNA, 25 bp, Homo sapien
tgatacagcaggtgaccctgaaaat

SEQ ID NO: 5796985 - DNA, 25 bp, Homo sapien
aacgtggtaggcaatgtatggcgcc

SEQ ID NO: 5796986 - DNA, 25 bp, Homo sapien
cggctggaggagtggctctggccgt

SEQ ID NO: 5796987 - DNA, 25 bp, Homo sapien
ctttgagaagaccttccagctgaag

SEQ ID NO: 5796988 - DNA, 25 bp, Homo sapien
gtgtggctcaatgtcaactacctgg

SEQ ID NO: 5796989 - DNA, 25 bp, Homo sapien
ctgtctttggccctgggtatgtcgg

SEQ ID NO: 5796990 - DNA, 25 bp, Homo sapien
gcgaggcatgggctgccgccctttc

SEQ ID NO: 5796991 - DNA, 25 bp, Homo sapien
cgcgcagtgccggcagagggagtgc

SEQ ID NO: 5796992 - DNA, 25 bp, Homo sapien
aggacagaggtccaagtgggcaagg

SEQ ID NO: 5796993 - DNA, 25 bp, Homo sapien
gcctccagctccttttatggccagc

SEQ ID NO: 5796994 - DNA, 25 bp, Homo sapien
ggtcacgctgcactccgcgcctcct

SEQ ID NO: 5796995 - DNA, 25 bp, Homo sapien
ggctccatcagagccaggcaggccc

SEQ ID NO: 5796996 - DNA, 25 bp, Homo sapien
gccgcgcagtgccggcagagggagt

SEQ ID NO: 5796997 - DNA, 25 bp, Homo sapien
ggtgtcgctaaccggacggtggtcg

SEQ ID NO: 5796998 - DNA, 25 bp, Homo sapien
gactcctaagctcaggcacacgtgt

SEQ ID NO: 5796999 - DNA, 25 bp, Homo sapien
tcaccagctggtggttcagcggtgg

SEQ ID NO: 5797000 - DNA, 25 bp, Homo sapien
gctgctgcgactgctggaccccacc

SEQ ID NO: 5797001 - DNA, 25 bp, Homo sapien
tgggccccagagctaggagtctttg

SEQ ID NO: 5797002 - DNA, 25 bp, Homo sapien
ggaggggactggagctggagagtga

SEQ ID NO: 5797003 - DNA, 25 bp, Homo sapien
tctactgacccaggccctggagagc

SEQ ID NO: 5797004 - DNA, 25 bp, Homo sapien
aaccacacaaaagcagtacagctga

SEQ ID NO: 5797005 - DNA, 25 bp, Homo sapien
gctccactgccgcctctccgagctc

SEQ ID NO: 5797006 - DNA, 25 bp, Homo sapien
cccgtgtgctgacgcggctggcaga

SEQ ID NO: 5797007 - DNA, 25 bp, Homo sapien
gggtccctatggctgggagttccac

SEQ ID NO: 5797008 - DNA, 25 bp, Homo sapien
ttgcagactttgggaaccacacaaa

SEQ ID NO: 5797009 - DNA, 25 bp, Homo sapien
gtggtgggtcggccccaacctcaac

SEQ ID NO: 5797010 - DNA, 25 bp, Homo sapien
ctcttggctatgtcagtctttttcc

SEQ ID NO: 5797011 - DNA, 25 bp, Homo sapien
gggtggaagggtctgagcagaaggt

SEQ ID NO: 5797012 - DNA, 25 bp, Homo sapien
agcagggggacggtgtgggtcccta

SEQ ID NO: 5797013 - DNA, 25 bp, Homo sapien
ccaccccggggactcctaagctcag

SEQ ID NO: 5797014 - DNA, 25 bp, Homo sapien
caagacactcatgccactctggctc

SEQ ID NO: 5797015 - DNA, 25 bp, Homo sapien
accggacggtggtcgccagggcgag

SEQ ID NO: 5797016 - DNA, 25 bp, Homo sapien
agtacagctgaagcccaggccccct

SEQ ID NO: 5797017 - DNA, 25 bp, Homo sapien
tgaggctgaggtagctgctgagctg

SEQ ID NO: 5797018 - DNA, 25 bp, Homo sapien
gcacggaggggactggagctggaga

SEQ ID NO: 5797019 - DNA, 25 bp, Homo sapien
gtgaccctgacgacttggctttcct

SEQ ID NO: 5797020 - DNA, 25 bp, Homo sapien
gggagccaagacactcatgccactc

SEQ ID NO: 5797021 - DNA, 25 bp, Homo sapien
atgggcatctggagggtcctcacca

SEQ ID NO: 5797022 - DNA, 25 bp, Homo sapien
atgggcgaggcatgggctgccgccc

SEQ ID NO: 5797023 - DNA, 25 bp, Homo sapien
gggcccactggctgcctcactggag

SEQ ID NO: 5797024 - DNA, 25 bp, Homo sapien
tctttttcccttgctgctgcgactg

SEQ ID NO: 5797025 - DNA, 25 bp, Homo sapien
ggccgcgtagcacggctggaggagt

SEQ ID NO: 5797026 - DNA, 25 bp, Homo sapien
cttcacacccttcagtaaccgagcg

SEQ ID NO: 5797027 - DNA, 25 bp, Homo sapien
ctggctggcaggtgtcgctaaccgg

SEQ ID NO: 5797028 - DNA, 25 bp, Homo sapien
gccactatcttaccgctggcgggga

SEQ ID NO: 5797029 - DNA, 25 bp, Homo sapien
cagcagagagcctggatgagctgca

SEQ ID NO: 5797030 - DNA, 25 bp, Homo sapien
gaatccagagtctatttttctaaat

SEQ ID NO: 5797031 - DNA, 25 bp, Homo sapien
tggtggaattggctacttctacgga

SEQ ID NO: 5797032 - DNA, 25 bp, Homo sapien
tgaaaattcccatttccatagagtt

SEQ ID NO: 5797033 - DNA, 25 bp, Homo sapien
tgaggtagctgctgagctgggccca

SEQ ID NO: 5797034 - DNA, 25 bp, Homo sapien
cctaagctcaggcacacgtgtgagc

SEQ ID NO: 5797035 - DNA, 25 bp, Homo sapien
tagagcctcaggactcagctacaat

SEQ ID NO: 5797036 - DNA, 25 bp, Homo sapien
agacactcatgccactctggctctg

SEQ ID NO: 5797037 - DNA, 25 bp, Homo sapien
atgccactctggctctgaagggaca

SEQ ID NO: 5797038 - DNA, 25 bp, Homo sapien
tggtaccgtgcgcggcgggcggtca

SEQ ID NO: 5797039 - DNA, 25 bp, Homo sapien
gggactggagctggagagtgactgt

SEQ ID NO: 5797040 - DNA, 25 bp, Homo sapien
ccggtcattcttcccacgaggcttc

SEQ ID NO: 5797041 - DNA, 25 bp, Homo sapien
agctgcactgggccccagagctagg

SEQ ID NO: 5797042 - DNA, 25 bp, Homo sapien
gcagatactgggggatgaggcccga

SEQ ID NO: 5797043 - DNA, 25 bp, Homo sapien
cgcagtgccggcagagggagtgcgg

SEQ ID NO: 5797044 - DNA, 25 bp, Homo sapien
aattggctacttctacggacaaggg

SEQ ID NO: 5797045 - DNA, 25 bp, Homo sapien
gggcaagggcaggggcagttcttga

SEQ ID NO: 5797046 - DNA, 25 bp, Homo sapien
tgtcttctggacctccaacccagga

SEQ ID NO: 5797047 - DNA, 25 bp, Homo sapien
tcgcctaaatagctggtttcagcat

SEQ ID NO: 5797048 - DNA, 25 bp, Homo sapien
ctccagctccttttatggccagcgc

SEQ ID NO: 5797049 - DNA, 25 bp, Homo sapien
gccccctcaggggctcgttcgggtg

SEQ ID NO: 5797050 - DNA, 25 bp, Homo sapien
gacctgcgatgttgggtggcactgg

SEQ ID NO: 5797051 - DNA, 25 bp, Homo sapien
acggcctctccttcgggcgccaaca

SEQ ID NO: 5797052 - DNA, 25 bp, Homo sapien
ggcagtgcccaggcaggaggaaatc

SEQ ID NO: 5797053 - DNA, 25 bp, Homo sapien
ggcgtggtaccgtgcgcggcgggcg

SEQ ID NO: 5797054 - DNA, 25 bp, Homo sapien
ggacaagggctggtattgccagaca

SEQ ID NO: 5797055 - DNA, 25 bp, Homo sapien
tgctaaatgctgatggctggattgg

SEQ ID NO: 5797056 - DNA, 25 bp, Homo sapien
cagcctccagctccttttatggcca

SEQ ID NO: 5797057 - DNA, 25 bp, Homo sapien
ccgaaaggccttgccccgcctgcat

SEQ ID NO: 5797058 - DNA, 25 bp, Homo sapien
gttgggtggcactgggtgcccgtgt

SEQ ID NO: 5797059 - DNA, 25 bp, Homo sapien
ctgacgacttggctttcctccgaaa

SEQ ID NO: 5797060 - DNA, 25 bp, Homo sapien
cggcgccgcgcagtgccggcagagg

SEQ ID NO: 5797061 - DNA, 25 bp, Homo sapien
gtgtttgaatcaggcagtgcccagg

SEQ ID NO: 5797062 - DNA, 25 bp, Homo sapien
catggctgaagactactgaagggag

SEQ ID NO: 5797063 - DNA, 25 bp, Homo sapien
caggcccactgccactatcttaccg

SEQ ID NO: 5797064 - DNA, 25 bp, Homo sapien
gggacggtgtgggtccctatggctg

SEQ ID NO: 5797065 - DNA, 25 bp, Homo sapien
aggggagccaagacactcatgccac

SEQ ID NO: 5797066 - DNA, 25 bp, Homo sapien
catcggggtggaagggtctgagcag

SEQ ID NO: 5797067 - DNA, 25 bp, Homo sapien
ccgggctccactgccgcctctccga

SEQ ID NO: 5797068 - DNA, 25 bp, Homo sapien
cagctgaagcccaggccccctcagg

SEQ ID NO: 5797069 - DNA, 25 bp, Homo sapien
gagcggcacctggacctgcgatgtt

SEQ ID NO: 5797070 - DNA, 25 bp, Homo sapien
gctgaaggagaagggcctgagctct

SEQ ID NO: 5797071 - DNA, 25 bp, Homo sapien
ccatgctgaaggctttagagagcgc

SEQ ID NO: 5797072 - DNA, 25 bp, Homo sapien
gggctccactgccgcctctccgagc

SEQ ID NO: 5797073 - DNA, 25 bp, Homo sapien
ggaagcccttggccactggctgggg

SEQ ID NO: 5797074 - DNA, 25 bp, Homo sapien
ctaaatgctgatggctggattggga

SEQ ID NO: 5797075 - DNA, 25 bp, Homo sapien
ctggagagtgactgtagagcctcag

SEQ ID NO: 5797076 - DNA, 25 bp, Homo sapien
gtggctcaatgtcaactacctggct

SEQ ID NO: 5797077 - DNA, 25 bp, Homo sapien
actgtagagcctcaggactcagcta

SEQ ID NO: 5797078 - DNA, 25 bp, Homo sapien
tggagcccctttggtttacgctccc

SEQ ID NO: 5797079 - DNA, 25 bp, Homo sapien
gggcgaggcatgggctgccgccctt

SEQ ID NO: 5797080 - DNA, 25 bp, Homo sapien
aaactccacggtgagctccgtgcca

SEQ ID NO: 5797081 - DNA, 25 bp, Homo sapien
aggggactggagctggagagtgact

SEQ ID NO: 5797082 - DNA, 25 bp, Homo sapien
cagtaaccgagcggcacctggacct

SEQ ID NO: 5797083 - DNA, 25 bp, Homo sapien
aagggcctgagctctggcgagcagg

SEQ ID NO: 5797084 - DNA, 25 bp, Homo sapien
tccttgctgtcatcccacatagccc

SEQ ID NO: 5797085 - DNA, 25 bp, Homo sapien
cgctcccttgcagcctccagctcct

SEQ ID NO: 5797086 - DNA, 25 bp, Homo sapien
agcatcggcccccaggggcctcccc

SEQ ID NO: 5797087 - DNA, 25 bp, Homo sapien
ctgagctctggcgagcaggttttgg

SEQ ID NO: 5797088 - DNA, 25 bp, Homo sapien
agactttgggaaccacacaaaagca

SEQ ID NO: 5797089 - DNA, 25 bp, Homo sapien
ggacctcttctggggaacctaccgc

SEQ ID NO: 5797090 - DNA, 25 bp, Homo sapien
gaggcagcagagagcctggatgagc

SEQ ID NO: 5797091 - DNA, 25 bp, Homo sapien
ctacggacaagggctggtattgcca

SEQ ID NO: 5797092 - DNA, 25 bp, Homo sapien
gccgtcgtggtcctgtctttggccc

SEQ ID NO: 5797093 - DNA, 25 bp, Homo sapien
gtctttgcagactttgggaaccaca

SEQ ID NO: 5797094 - DNA, 25 bp, Homo sapien
actcctccagccccgccgtggcccc

SEQ ID NO: 5797095 - DNA, 25 bp, Homo sapien
ggatccctccctcacccgggaagcc

SEQ ID NO: 5797096 - DNA, 25 bp, Homo sapien
tctggcgagcaggttttgggtcagg

SEQ ID NO: 5797097 - DNA, 25 bp, Homo sapien
tttcctggctccatcagagccaggc

SEQ ID NO: 5797098 - DNA, 25 bp, Homo sapien
tgaaggagaagggcctgagctctgg

SEQ ID NO: 5797099 - DNA, 25 bp, Homo sapien
tgccctcagcggcctccttggtgga

SEQ ID NO: 5797100 - DNA, 25 bp, Homo sapien
tggtattgccagacatcggggtgga

SEQ ID NO: 5797101 - DNA, 25 bp, Homo sapien
ccctttggtttacgctcccttgcag

SEQ ID NO: 5797102 - DNA, 25 bp, Homo sapien
cctccttggtggaattggctacttc

SEQ ID NO: 5797103 - DNA, 25 bp, Homo sapien
cctgctgacagagatggtaaagagt

SEQ ID NO: 5797104 - DNA, 25 bp, Homo sapien
gcagcagggcaccaccccggggact

SEQ ID NO: 5797105 - DNA, 25 bp, Homo sapien
gacccaggccctggagagccatgct

SEQ ID NO: 5797106 - DNA, 25 bp, Homo sapien
ggatgactacccccgggcttcacac

SEQ ID NO: 5797107 - DNA, 25 bp, Homo sapien
cgccctttccacggctggaccagcc

SEQ ID NO: 5797108 - DNA, 25 bp, Homo sapien
gctctggcgagcaggttttgggtca

SEQ ID NO: 5797109 - DNA, 25 bp, Homo sapien
agtgaccgcgatgggcgaggcatgg

SEQ ID NO: 5797110 - DNA, 25 bp, Homo sapien
cgaggcttcctttgggatgaaggct

SEQ ID NO: 5797111 - DNA, 25 bp, Homo sapien
catctgggtgaggctgaggtagctg

SEQ ID NO: 5797112 - DNA, 25 bp, Homo sapien
agcccatatgctagaggttggtgac

SEQ ID NO: 5797113 - DNA, 25 bp, Homo sapien
ccggagaggtgaggcaggacccggg

SEQ ID NO: 5797114 - DNA, 25 bp, Homo sapien
gctgagctgggcccactggctgcct

SEQ ID NO: 5797115 - DNA, 25 bp, Homo sapien
tgaacgctacctcggcttgccagga

SEQ ID NO: 5797116 - DNA, 25 bp, Homo sapien
tgggtggcactgggtgcccgtgtgc

SEQ ID NO: 5797117 - DNA, 25 bp, Homo sapien
gggcaggggcagttcttgatacagc

SEQ ID NO: 5797118 - DNA, 25 bp, Homo sapien
gtttgtgtttgaatcaggcagtgcc

SEQ ID NO: 5797119 - DNA, 25 bp, Homo sapien
catgcctggttttcctggctccatc

SEQ ID NO: 5797120 - DNA, 25 bp, Homo sapien
tgaagacccgcagcccgaagcccct

SEQ ID NO: 5797121 - DNA, 25 bp, Homo sapien
atgtgaatccagagtctatttttct

SEQ ID NO: 5797122 - DNA, 25 bp, Homo sapien
tttcccttgctgctgcgactgctgg

SEQ ID NO: 5797123 - DNA, 25 bp, Homo sapien
atcttaccgctggcggggacgggac

SEQ ID NO: 5797124 - DNA, 25 bp, Homo sapien
atcaagccctgccaagactggcagg

SEQ ID NO: 5797125 - DNA, 25 bp, Homo sapien
tcactggaggcagcagagagcctgg

SEQ ID NO: 5797126 - DNA, 25 bp, Homo sapien
agtgggaggacagaggtccaagtgg

SEQ ID NO: 5797127 - DNA, 25 bp, Homo sapien
tacctggctttgggagcactccacc

SEQ ID NO: 5797128 - DNA, 25 bp, Homo sapien
gggagttccacgacggcctctcctt

SEQ ID NO: 5797129 - DNA, 25 bp, Homo sapien
gggcgctgggtgctggcgtggtacc

SEQ ID NO: 5797130 - DNA, 25 bp, Homo sapien
gctgggtgctggcgtggtaccgtgc

SEQ ID NO: 5797131 - DNA, 25 bp, Homo sapien
ggagcactccaccactatgggcatc

SEQ ID NO: 5797132 - DNA, 25 bp, Homo sapien
ttgagaagaccttccagctgaagga

SEQ ID NO: 5797133 - DNA, 25 bp, Homo sapien
gagctccgtgccaacgtggtaggca

SEQ ID NO: 5797134 - DNA, 25 bp, Homo sapien
acctaccgccctcacgtctacttcg

SEQ ID NO: 5797135 - DNA, 25 bp, Homo sapien
cagagatggtaaagagtcgcctaaa

SEQ ID NO: 5797136 - DNA, 25 bp, Homo sapien
gcaggaggaaatcaagccctgccaa

SEQ ID NO: 5797137 - DNA, 25 bp, Homo sapien
tttgggagcagtacagtgaccgcga

SEQ ID NO: 5797138 - DNA, 25 bp, Homo sapien
ggaggggagccaagacactcatgcc

SEQ ID NO: 5797139 - DNA, 25 bp, Homo sapien
cccgggtgcctccagaattcctagt

SEQ ID NO: 5797140 - DNA, 25 bp, Homo sapien
agcagtacagtgaccgcgatgggcg

SEQ ID NO: 5797141 - DNA, 25 bp, Homo sapien
gagccaagacactcatgccactctg

SEQ ID NO: 5797142 - DNA, 25 bp, Homo sapien
gcttcctttgggatgaaggctttca

SEQ ID NO: 5797143 - DNA, 25 bp, Homo sapien
aggctcaccactgagttcgtcaaga

SEQ ID NO: 5797144 - DNA, 25 bp, Homo sapien
agaagggcctgagctctggcgagca

SEQ ID NO: 5797145 - DNA, 25 bp, Homo sapien
ttgccccgcctgcatgcctggtttt

SEQ ID NO: 5797146 - DNA, 25 bp, Homo sapien
gtaaccgagcggcacctggacctgc

SEQ ID NO: 5797147 - DNA, 25 bp, Homo sapien
cttgtcttactggccatggctgaag

SEQ ID NO: 5797148 - DNA, 25 bp, Homo sapien
agtgccaggatggctcggggcgagc

SEQ ID NO: 5797149 - DNA, 25 bp, Homo sapien
ctcagcggcctccttggtggaattg

SEQ ID NO: 5797150 - DNA, 25 bp, Homo sapien
taccagtaattcaaaccttcctcat

SEQ ID NO: 5797151 - DNA, 25 bp, Homo sapien
ttgtgtttgaatcaggcagtgccca

SEQ ID NO: 5797152 - DNA, 25 bp, Homo sapien
cacctggacctgcgatgttgggtgg

SEQ ID NO: 5797153 - DNA, 25 bp, Homo sapien
gagtttgtgtttgaatcaggcagtg

SEQ ID NO: 5797154 - DNA, 25 bp, Homo sapien
cttgggcccctgctggacattctag

SEQ ID NO: 5797155 - DNA, 25 bp, Homo sapien
gacggtgtgggtccctatggctggg

SEQ ID NO: 5797156 - DNA, 25 bp, Homo sapien
ttggctacttctacggacaagggct

SEQ ID NO: 5797157 - DNA, 25 bp, Homo sapien
agcccctcctcaccggactgatgtg

SEQ ID NO: 5797158 - DNA, 25 bp, Homo sapien
agggacaaaggcttctggcttttgc

SEQ ID NO: 5797159 - DNA, 25 bp, Homo sapien
ttccacccgtacctctttttacagc

SEQ ID NO: 5797160 - DNA, 25 bp, Homo sapien
gaccctgacgacttggctttcctcc

SEQ ID NO: 5797161 - DNA, 25 bp, Homo sapien
cagtaccaggctacaggctttcttt

SEQ ID NO: 5797162 - DNA, 25 bp, Homo sapien
ggtttcagcatcggcccccaggggc

SEQ ID NO: 5797163 - DNA, 25 bp, Homo sapien
cactctggctctgaagggacaaagg

SEQ ID NO: 5797164 - DNA, 25 bp, Homo sapien
ctgtagcccatatgctagaggttgg

SEQ ID NO: 5797165 - DNA, 25 bp, Homo sapien
ggctgccgccctttccacggctgga

SEQ ID NO: 5797166 - DNA, 25 bp, Homo sapien
ctcccctgaacgctacctcggcttg

SEQ ID NO: 5797167 - DNA, 25 bp, Homo sapien
caatgtcaactacctggctttggga

SEQ ID NO: 5797168 - DNA, 25 bp, Homo sapien
gggcgccaacacatccaggatgggg

SEQ ID NO: 5797169 - DNA, 25 bp, Homo sapien
aactgcagtatgtagatgctcttgg

SEQ ID NO: 5797170 - DNA, 25 bp, Homo sapien
ggaggacagaggtccaagtgggcaa

SEQ ID NO: 5797171 - DNA, 25 bp, Homo sapien
acacatccaggatggggccttaagg

SEQ ID NO: 5797172 - DNA, 25 bp, Homo sapien
ttcttgatacagcaggtgaccctga

SEQ ID NO: 5797173 - DNA, 25 bp, Homo sapien
gccttgggcccctgctggacattct

SEQ ID NO: 5797174 - DNA, 25 bp, Homo sapien
ccctcaggggctcgttcgggtggtg

SEQ ID NO: 5797175 - DNA, 25 bp, Homo sapien
tgcccccagccccttggataccagt

SEQ ID NO: 5797176 - DNA, 25 bp, Homo sapien
tttccatagagtttgtgtttgaatc

SEQ ID NO: 5797177 - DNA, 25 bp, Homo sapien
ggccagcgcaattcagagcatgatc

SEQ ID NO: 5797178 - DNA, 25 bp, Homo sapien
tgggatgaaggctttcaccagctgg

SEQ ID NO: 5797179 - DNA, 25 bp, Homo sapien
tagagtttgtgtttgaatcaggcag

SEQ ID NO: 5797180 - DNA, 25 bp, Homo sapien
gagtctttgcagactttgggaacca

SEQ ID NO: 5797181 - DNA, 25 bp, Homo sapien
agagtctatttttctaaataaattg

SEQ ID NO: 5797182 - DNA, 25 bp, Homo sapien
tgactgtagagcctcaggactcagc

SEQ ID NO: 5797183 - DNA, 25 bp, Homo sapien
agctggtttcagcatcggcccccag

SEQ ID NO: 5797184 - DNA, 25 bp, Homo sapien
aagaggcctgggggtcagcacggag

SEQ ID NO: 5797185 - DNA, 25 bp, Homo sapien
ctgagttcgtcaagaggcctggggg

SEQ ID NO: 5797186 - DNA, 25 bp, Homo sapien
tcagctacaatgtcttctggacctc

SEQ ID NO: 5797187 - DNA, 25 bp, Homo sapien
gcctcccctgaacgctacctcggct

SEQ ID NO: 5797188 - DNA, 25 bp, Homo sapien
ctatgggcatctggagggtcctcac

SEQ ID NO: 5797189 - DNA, 25 bp, Homo sapien
cagaggtccaagtgggcaagggcag

SEQ ID NO: 5797190 - DNA, 25 bp, Homo sapien
cactatcttaccgctggcggggacg

SEQ ID NO: 5797191 - DNA, 25 bp, Homo sapien
ggatgaggcccgagcccgggtgcct

SEQ ID NO: 5797192 - DNA, 25 bp, Homo sapien
ccctttccacggctggaccagcctt

SEQ ID NO: 5797193 - DNA, 25 bp, Homo sapien
catttcatctcaggtgtctccttgc

SEQ ID NO: 5797194 - DNA, 25 bp, Homo sapien
cctgcatgcctggttttcctggctc

SEQ ID NO: 5797195 - DNA, 25 bp, Homo sapien
caggcagtgcccaggcaggaggaaa

SEQ ID NO: 5797196 - DNA, 25 bp, Homo sapien
gagcctcaggactcagctacaatgt

SEQ ID NO: 5797197 - DNA, 25 bp, Homo sapien
gttttcctggctccatcagagccag

SEQ ID NO: 5797198 - DNA, 25 bp, Homo sapien
agctaggagtctttgcagactttgg

SEQ ID NO: 5797199 - DNA, 25 bp, Homo sapien
tgaagcccaggccccctcaggggct

SEQ ID NO: 5797200 - DNA, 25 bp, Homo sapien
ctacccccgggcttcacacccttca

SEQ ID NO: 5797201 - DNA, 25 bp, Homo sapien
cacggtgagctccgtgccaacgtgg

SEQ ID NO: 5797202 - DNA, 25 bp, Homo sapien
tgggtgctggcgtggtaccgtgcgc

SEQ ID NO: 5797203 - DNA, 25 bp, Homo sapien
ctggctccatcagagccaggcaggc

SEQ ID NO: 5797204 - DNA, 25 bp, Homo sapien
gcccccaggggcctcccctgaacgc

SEQ ID NO: 5797205 - DNA, 25 bp, Homo sapien
gatgctcttggctatgtcagtcttt

SEQ ID NO: 5797206 - DNA, 25 bp, Homo sapien
tggtgaccctgacgacttggctttc

SEQ ID NO: 5797207 - DNA, 25 bp, Homo sapien
cttggataccagtaattcaaacctt

SEQ ID NO: 5797208 - DNA, 25 bp, Homo sapien
tactgaaccccaagaccctaccctc

SEQ ID NO: 5797209 - DNA, 25 bp, Homo sapien
tgccaaactccacggtgagctccgt

SEQ ID NO: 5797210 - DNA, 25 bp, Homo sapien
tttgggatgaaggctttcaccagct

SEQ ID NO: 5797211 - DNA, 25 bp, Homo sapien
ggcctctccttcgggcgccaacaca

SEQ ID NO: 5797212 - DNA, 25 bp, Homo sapien
cctgtgttgcctgccgactcctcca

SEQ ID NO: 5797213 - DNA, 25 bp, Homo sapien
cgacggcctctccttcgggcgccaa

SEQ ID NO: 5797214 - DNA, 25 bp, Homo sapien
ctcagtgccaggatggctcggggcg

SEQ ID NO: 5797215 - DNA, 25 bp, Homo sapien
cagctgaaggagaagggcctgagct

SEQ ID NO: 5797216 - DNA, 25 bp, Homo sapien
tggctatgtcagtctttttcccttg

SEQ ID NO: 5797217 - DNA, 25 bp, Homo sapien
agctcaggcacacgtgtgagcaggg

SEQ ID NO: 5797218 - DNA, 25 bp, Homo sapien
tcacacccttcagtaaccgagcggc

SEQ ID NO: 5797219 - DNA, 25 bp, Homo sapien
tgggggatgaggcccgagcccgggt

SEQ ID NO: 5797220 - DNA, 25 bp, Homo sapien
catctctggagcccctttggtttac

SEQ ID NO: 5797221 - DNA, 25 bp, Homo sapien
tcctagtacaacgagcagtccacgc

SEQ ID NO: 5797222 - DNA, 25 bp, Homo sapien
atactgggggatgaggcccgagccc

SEQ ID NO: 5797223 - DNA, 25 bp, Homo sapien
ctcttgtgacgcggacctcagtgcc

SEQ ID NO: 5797224 - DNA, 25 bp, Homo sapien
gcgagcggcggcgccgcgcagtgcc

SEQ ID NO: 5797225 - DNA, 25 bp, Homo sapien
gtggaattggctacttctacggaca

SEQ ID NO: 5797226 - DNA, 25 bp, Homo sapien
aggttggtgaccctgacgacttggc

SEQ ID NO: 5797227 - DNA, 25 bp, Homo sapien
gccaggcaggcccactgccactatc

SEQ ID NO: 5797228 - DNA, 25 bp, Homo sapien
gtgagctccgtgccaacgtggtagg

SEQ ID NO: 5797229 - DNA, 25 bp, Homo sapien
agagagcgctttgagaagaccttcc

SEQ ID NO: 5797230 - DNA, 25 bp, Homo sapien
cttaaggctcaccactgagttcgtc

SEQ ID NO: 5797231 - DNA, 25 bp, Homo sapien
aacgctacctcggcttgccaggatc

SEQ ID NO: 5797232 - DNA, 25 bp, Homo sapien
gcagagcatctgggtgaggctgagg

SEQ ID NO: 5797233 - DNA, 25 bp, Homo sapien
caggactcagctacaatgtcttctg

SEQ ID NO: 5797234 - DNA, 25 bp, Homo sapien
gagcagaaggtggacccagccctct

SEQ ID NO: 5797235 - DNA, 25 bp, Homo sapien
cccaggccctggagagccatgctga

SEQ ID NO: 5797236 - DNA, 25 bp, Homo sapien
gaggagtggctctggccgtcgtggt

SEQ ID NO: 5797237 - DNA, 25 bp, Homo sapien
ggcccgagcccgggtgcctccagaa

SEQ ID NO: 5797238 - DNA, 25 bp, Homo sapien
gtattgccagacatcggggtggaag

SEQ ID NO: 5797239 - DNA, 25 bp, Homo sapien
gctttctttgggagcagtacagtga

SEQ ID NO: 5797240 - DNA, 25 bp, Homo sapien
ccaaactccacggtgagctccgtgc

SEQ ID NO: 5797241 - DNA, 25 bp, Homo sapien
cggctggcagagcatctgggtgagg

SEQ ID NO: 5797242 - DNA, 25 bp, Homo sapien
ctgaagtgggaggacagaggtccaa

SEQ ID NO: 5797243 - DNA, 25 bp, Homo sapien
cagaattcctagtacaacgagcagt

SEQ ID NO: 5797244 - DNA, 25 bp, Homo sapien
aggcaatgtatggcgccagtaccag

SEQ ID NO: 5797245 - DNA, 25 bp, Homo sapien
ttccacggctggaccagccttgtct

SEQ ID NO: 5797246 - DNA, 25 bp, Homo sapien
ctttttacagcagtgccctcccggt

SEQ ID NO: 5797247 - DNA, 25 bp, Homo sapien
atctggagggtcctcaccaggctcg

SEQ ID NO: 5797248 - DNA, 25 bp, Homo sapien
ggccccagagctaggagtctttgca

SEQ ID NO: 5797249 - DNA, 25 bp, Homo sapien
ttcagtaaccgagcggcacctggac

SEQ ID NO: 5797250 - DNA, 25 bp, Homo sapien
attgccagacatcggggtggaaggg

SEQ ID NO: 5797251 - DNA, 25 bp, Homo sapien
ccaacctcaactgcagtatgtagat

SEQ ID NO: 5797252 - DNA, 25 bp, Homo sapien
ggagtggctctggccgtcgtggtcc

SEQ ID NO: 5797253 - DNA, 25 bp, Homo sapien
gccaagacactcatgccactctggc

SEQ ID NO: 5797254 - DNA, 25 bp, Homo sapien
ggcctccttggtggaattggctact

SEQ ID NO: 5797255 - DNA, 25 bp, Homo sapien
gaccccacctcatcccgccttgggc

SEQ ID NO: 5797256 - DNA, 25 bp, Homo sapien
ccgcgcctcctgtgttgcctgccga

SEQ ID NO: 5797257 - DNA, 25 bp, Homo sapien
gctgccaaactccacggtgagctcc

SEQ ID NO: 5797258 - DNA, 25 bp, Homo sapien
agtcgcctaaatagctggtttcagc

SEQ ID NO: 5797259 - DNA, 25 bp, Homo sapien
actgggggatgaggcccgagcccgg

SEQ ID NO: 5797260 - DNA, 25 bp, Homo sapien
tccacggtgagctccgtgccaacgt

SEQ ID NO: 5797261 - DNA, 25 bp, Homo sapien
cacatagccctggggtgaatgtgaa

SEQ ID NO: 5797262 - DNA, 25 bp, Homo sapien
agcgcaattcagagcatgatccccc

SEQ ID NO: 5797263 - DNA, 25 bp, Homo sapien
gcccaggccccctcaggggctcgtt

SEQ ID NO: 5797264 - DNA, 25 bp, Homo sapien
gctcgggctgccaaactccacggtg

SEQ ID NO: 5797265 - DNA, 25 bp, Homo sapien
ggaccagccttgtcttactggccat

SEQ ID NO: 5797266 - DNA, 25 bp, Homo sapien
tcgctaaccggacggtggtcgccag

SEQ ID NO: 5797267 - DNA, 25 bp, Homo sapien
ggccactggctggggctgctaaatg

SEQ ID NO: 5797268 - DNA, 25 bp, Homo sapien
tgcgcggcgggcggtcacgctgcac

SEQ ID NO: 5797269 - DNA, 25 bp, Homo sapien
gctgctaaatgctgatggctggatt

SEQ ID NO: 5797270 - DNA, 25 bp, Homo sapien
ggagaggtgaggcaggacccgggct

SEQ ID NO: 5797271 - DNA, 25 bp, Homo sapien
gagctctggcgagcaggttttgggt

SEQ ID NO: 5797272 - DNA, 25 bp, Homo sapien
tcccgccttgggcccctgctggaca

SEQ ID NO: 5797273 - DNA, 25 bp, Homo sapien
cggcttgccaggatccctgaagtgg

SEQ ID NO: 5797274 - DNA, 25 bp, Homo sapien
ctgggcccactggctgcctcactgg

SEQ ID NO: 5797275 - DNA, 25 bp, Homo sapien
gagccaggcaggcccactgccacta

SEQ ID NO: 5797276 - DNA, 25 bp, Homo sapien
tgctgtgtggctcaatgtcaactac

SEQ ID NO: 5797277 - DNA, 25 bp, Homo sapien
cctggacctgcgatgttgggtggca

SEQ ID NO: 5797278 - DNA, 25 bp, Homo sapien
acagcagtgccctcccggtcattct

SEQ ID NO: 5797279 - DNA, 25 bp, Homo sapien
tgctgacagagatggtaaagagtcg

SEQ ID NO: 5797280 - DNA, 25 bp, Homo sapien
acggctggaccagccttgtcttact

SEQ ID NO: 5797281 - DNA, 25 bp, Homo sapien
tccacgacggcctctccttcgggcg

SEQ ID NO: 5797282 - DNA, 25 bp, Homo sapien
ttacagcagtgccctcccggtcatt

SEQ ID NO: 5797283 - DNA, 25 bp, Homo sapien
agcagggcaccaccccggggactcc

SEQ ID NO: 5797284 - DNA, 25 bp, Homo sapien
acattctagccgacagccgccatct

SEQ ID NO: 5797285 - DNA, 25 bp, Homo sapien
tggtaggcaatgtatggcgccagta

SEQ ID NO: 5797286 - DNA, 25 bp, Homo sapien
agtctatttttctaaataaattgga

SEQ ID NO: 5797287 - DNA, 25 bp, Homo sapien
gcggcgggccgcgtagcacggctgg

SEQ ID NO: 5797288 - DNA, 25 bp, Homo sapien
gtccaagtgggcaagggcaggggca

SEQ ID NO: 5797289 - DNA, 25 bp, Homo sapien
gccactctggctctgaagggacaaa

SEQ ID NO: 5797290 - DNA, 25 bp, Homo sapien
gggagaggaggggagccaagacact

SEQ ID NO: 5797291 - DNA, 25 bp, Homo sapien
tgtagatgctcttggctatgtcagt

SEQ ID NO: 5797292 - DNA, 25 bp, Homo sapien
accttcctcatttcatctcaggtgt

SEQ ID NO: 5797293 - DNA, 25 bp, Homo sapien
gcagactttgggaaccacacaaaag

SEQ ID NO: 5797294 - DNA, 25 bp, Homo sapien
tgctggcgtggtaccgtgcgcggcg

SEQ ID NO: 5797295 - DNA, 25 bp, Homo sapien
ggcgctggctggcaggtgtcgctaa

SEQ ID NO: 5797296 - DNA, 25 bp, Homo sapien
tttgggtcaggctgccctcagcggc

SEQ ID NO: 5797297 - DNA, 25 bp, Homo sapien
aaaccttcctcatttcatctcaggt

SEQ ID NO: 5797298 - DNA, 25 bp, Homo sapien
ctgaaccccaagaccctaccctctg

SEQ ID NO: 5797299 - DNA, 25 bp, Homo sapien
actggcggggtgctgtgtggctcaa

SEQ ID NO: 5797300 - DNA, 25 bp, Homo sapien
aatgtatggcgccagtaccaggcta

SEQ ID NO: 5797301 - DNA, 25 bp, Homo sapien
ctccctcacccgggaagcccttggc

SEQ ID NO: 5797302 - DNA, 25 bp, Homo sapien
aggctttctttgggagcagtacagt

SEQ ID NO: 5797303 - DNA, 25 bp, Homo sapien
ggctttagagagcgctttgagaaga

SEQ ID NO: 5797304 - DNA, 25 bp, Homo sapien
gctgaagactactgaagggagggag

SEQ ID NO: 5797305 - DNA, 25 bp, Homo sapien
cggacggtggtcgccagggcgagag

SEQ ID NO: 5797306 - DNA, 25 bp, Homo sapien
agcaggtgaccctgaaaattcccat

SEQ ID NO: 5797307 - DNA, 25 bp, Homo sapien
caccggactgatgtgggcgcagcag

SEQ ID NO: 5797308 - DNA, 25 bp, Homo sapien
gcgcctcctgtgttgcctgccgact

SEQ ID NO: 5797309 - DNA, 25 bp, Homo sapien
ggtgggtcggccccaacctcaactg

SEQ ID NO: 5797310 - DNA, 25 bp, Homo sapien
aggtagctgctgagctgggcccact

SEQ ID NO: 5797311 - DNA, 25 bp, Homo sapien
tttcatctcaggtgtctccttgctg

SEQ ID NO: 5797312 - DNA, 25 bp, Homo sapien
tcctgtctttggccctgggtatgtc

SEQ ID NO: 5797313 - DNA, 25 bp, Homo sapien
ccacacaaaagcagtacagctgaag

SEQ ID NO: 5797314 - DNA, 25 bp, Homo sapien
gggcggtcacgctgcactccgcgcc

SEQ ID NO: 5797315 - DNA, 25 bp, Homo sapien
gcggggacgggaccctgccttacca

SEQ ID NO: 5797316 - DNA, 25 bp, Homo sapien
ctgccgccctttccacggctggacc

SEQ ID NO: 5797317 - DNA, 25 bp, Homo sapien
cgcctgcatgcctggttttcctggc

SEQ ID NO: 5797318 - DNA, 25 bp, Homo sapien
acgcggacctcagtgccaggatggc

SEQ ID NO: 5797319 - DNA, 25 bp, Homo sapien
tgctagaggttggtgaccctgacga

SEQ ID NO: 5797320 - DNA, 25 bp, Homo sapien
ctgggtatgtcggggcgctgggtgc

SEQ ID NO: 5797321 - DNA, 25 bp, Homo sapien
gcagtatgtagatgctcttggctat

SEQ ID NO: 5797322 - DNA, 25 bp, Homo sapien
acaaaagcagtacagctgaagccca

SEQ ID NO: 5797323 - DNA, 25 bp, Homo sapien
tgggagcactccaccactatgggca

SEQ ID NO: 5797324 - DNA, 25 bp, Homo sapien
attcagagcatgatcccccctactg

SEQ ID NO: 5797325 - DNA, 25 bp, Homo sapien
gctggaggagtggctctggccgtcg

SEQ ID NO: 5797326 - DNA, 25 bp, Homo sapien
agctccttttatggccagcgcaatt

SEQ ID NO: 5797327 - DNA, 25 bp, Homo sapien
caggtgtctccttgctgtcatccca

SEQ ID NO: 5797328 - DNA, 25 bp, Homo sapien
cgggccgcgtagcacggctggagga

SEQ ID NO: 5797329 - DNA, 25 bp, Homo sapien
atccaggatggggccttaaggctca

SEQ ID NO: 5797330 - DNA, 25 bp, Homo sapien
gccccttggataccagtaattcaaa

SEQ ID NO: 5797331 - DNA, 25 bp, Homo sapien
atcccccctactggcggggtgctgt

SEQ ID NO: 5797332 - DNA, 25 bp, Homo sapien
tacgctcccttgcagcctccagctc

SEQ ID NO: 5797333 - DNA, 25 bp, Homo sapien
agaccttccagctgaaggagaaggg

SEQ ID NO: 5797334 - DNA, 25 bp, Homo sapien
gctttcctccgaaaggccttgcccc

SEQ ID NO: 5797335 - DNA, 25 bp, Homo sapien
gggcggcgggccgcgtagcacggct

SEQ ID NO: 5797336 - DNA, 25 bp, Homo sapien
tcaaaccttcctcatttcatctcag

SEQ ID NO: 5797337 - DNA, 25 bp, Homo sapien
agcagtgccctcccggtcattcttc

SEQ ID NO: 5797338 - DNA, 25 bp, Homo sapien
gcgtagcacggctggaggagtggct

SEQ ID NO: 5797339 - DNA, 25 bp, Homo sapien
gcctgccgactcctccagccccgcc

SEQ ID NO: 5797340 - DNA, 25 bp, Homo sapien
tgtatggcgccagtaccaggctaca

SEQ ID NO: 5797341 - DNA, 25 bp, Homo sapien
cccgcagcccgaagcccctcctcac

SEQ ID NO: 5797342 - DNA, 25 bp, Homo sapien
acacaaaagcagtacagctgaagcc

SEQ ID NO: 5797343 - DNA, 25 bp, Homo sapien
ctgcagtatgtagatgctcttggct

SEQ ID NO: 5797344 - DNA, 25 bp, Homo sapien
ctcaggtgtctccttgctgtcatcc

SEQ ID NO: 5797345 - DNA, 25 bp, Homo sapien
ccaggggcctcccctgaacgctacc

SEQ ID NO: 5797346 - DNA, 25 bp, Homo sapien
tcagagcatgatcccccctactggc

SEQ ID NO: 5797347 - DNA, 25 bp, Homo sapien
ctcggcttgccaggatccctgaagt

SEQ ID NO: 5797348 - DNA, 25 bp, Homo sapien
gacccgcagcccgaagcccctcctc

SEQ ID NO: 5797349 - DNA, 25 bp, Homo sapien
ctcaggggctcgttcgggtggtggg

SEQ ID NO: 5797350 - DNA, 25 bp, Homo sapien
agtgactgtagagcctcaggactca

SEQ ID NO: 5797351 - DNA, 25 bp, Homo sapien
ccaggctcgggctgccaaactccac

SEQ ID NO: 5797352 - DNA, 25 bp, Homo sapien
cacgaggcttcctttgggatgaagg

SEQ ID NO: 5797353 - DNA, 25 bp, Homo sapien
agcatgatcccccctactggcgggg

SEQ ID NO: 5797354 - DNA, 25 bp, Homo sapien
catcccgccttgggcccctgctgga

SEQ ID NO: 5797355 - DNA, 25 bp, Homo sapien
tcacgctgcactccgcgcctcctgt

SEQ ID NO: 5797356 - DNA, 25 bp, Homo sapien
tcctccagccccgccgtggccccgg

SEQ ID NO: 5797357 - DNA, 25 bp, Homo sapien
tggataccagtaattcaaaccttcc

SEQ ID NO: 5797358 - DNA, 25 bp, Homo sapien
gccgacagccgccatctctggagcc

SEQ ID NO: 5797359 - DNA, 25 bp, Homo sapien
ctactggcggggtgctgtgtggctc

SEQ ID NO: 5797360 - DNA, 25 bp, Homo sapien
ccaggccccctcaggggctcgttcg

SEQ ID NO: 5797361 - DNA, 25 bp, Homo sapien
ggagaagggcctgagctctggcgag

SEQ ID NO: 5797362 - DNA, 25 bp, Homo sapien
gccgccctttccacggctggaccag

SEQ ID NO: 5797363 - DNA, 25 bp, Homo sapien
ggtggacccagccctctttccaccc

SEQ ID NO: 5797364 - DNA, 25 bp, Homo sapien
taaccggacggtggtcgccagggcg

SEQ ID NO: 5797365 - DNA, 25 bp, Homo sapien
tgatggctggattgggagggagcag

SEQ ID NO: 5797366 - DNA, 25 bp, Homo sapien
tcatgccactctggctctgaaggga

SEQ ID NO: 5797367 - DNA, 25 bp, Homo sapien
atgtgggcgcagcagggcaccaccc

SEQ ID NO: 5797368 - DNA, 25 bp, Homo sapien
gggcctcccctgaacgctacctcgg

SEQ ID NO: 5797369 - DNA, 25 bp, Homo sapien
aatgtcttctggacctccaacccag

SEQ ID NO: 5797370 - DNA, 25 bp, Homo sapien
ccttcagtaaccgagcggcacctgg

SEQ ID NO: 5797371 - DNA, 25 bp, Homo sapien
cttggctttcctccgaaaggccttg

SEQ ID NO: 5797372 - DNA, 25 bp, Homo sapien
tcaggctgccctcagcggcctcctt

SEQ ID NO: 5797373 - DNA, 25 bp, Homo sapien
cccatttccatagagtttgtgtttg

SEQ ID NO: 5797374 - DNA, 25 bp, Homo sapien
ggatccctgaagtgggaggacagag

SEQ ID NO: 5797375 - DNA, 25 bp, Homo sapien
accactatgggcatctggagggtcc

SEQ ID NO: 5797376 - DNA, 25 bp, Homo sapien
tcattcttcccacgaggcttccttt

SEQ ID NO: 5797377 - DNA, 25 bp, Homo sapien
gcatctggagggtcctcaccaggct

SEQ ID NO: 5797378 - DNA, 25 bp, Homo sapien
gctaaccggacggtggtcgccaggg

SEQ ID NO: 5797379 - DNA, 25 bp, Homo sapien
caggtgaccctgaaaattcccattt

SEQ ID NO: 5797380 - DNA, 25 bp, Homo sapien
attcaaaccttcctcatttcatctc

SEQ ID NO: 5797381 - DNA, 25 bp, Homo sapien
tgcctcactggaggcagcagagagc

SEQ ID NO: 5797382 - DNA, 25 bp, Homo sapien
ctcacccgggaagcccttggccact

SEQ ID NO: 5797383 - DNA, 25 bp, Homo sapien
acacccttcagtaaccgagcggcac

SEQ ID NO: 5797384 - DNA, 25 bp, Homo sapien
agagccatgctgaaggctttagaga

SEQ ID NO: 5797385 - DNA, 25 bp, Homo sapien
ccagtaattcaaaccttcctcattt

SEQ ID NO: 5797386 - DNA, 25 bp, Homo sapien
tggtggttcagcggtgggatccctc

SEQ ID NO: 5797387 - DNA, 25 bp, Homo sapien
acctcatcccgccttgggcccctgc

SEQ ID NO: 5797388 - DNA, 25 bp, Homo sapien
gcccgaagcccctcctcaccggact

SEQ ID NO: 5797389 - DNA, 25 bp, Homo sapien
agtatgtagatgctcttggctatgt

SEQ ID NO: 5797390 - DNA, 25 bp, Homo sapien
agagtgactgtagagcctcaggact

SEQ ID NO: 5797391 - DNA, 25 bp, Homo sapien
gggcctgagctctggcgagcaggtt

SEQ ID NO: 5797392 - DNA, 25 bp, Homo sapien
ggctcaatgtcaactacctggcttt

SEQ ID NO: 5797393 - DNA, 25 bp, Homo sapien
aaatagctggtttcagcatcggccc

SEQ ID NO: 5797394 - DNA, 25 bp, Homo sapien
tccgtgccaacgtggtaggcaatgt

SEQ ID NO: 5797395 - DNA, 25 bp, Homo sapien
ccttttatggccagcgcaattcaga

SEQ ID NO: 5797396 - DNA, 25 bp, Homo sapien
ggagagccatgctgaaggctttaga

SEQ ID NO: 5797397 - DNA, 25 bp, Homo sapien
ctaaatagctggtttcagcatcggc

SEQ ID NO: 5797398 - DNA, 25 bp, Homo sapien
ttgaatcaggcagtgcccaggcagg

SEQ ID NO: 5797399 - DNA, 25 bp, Homo sapien
gtcggggcgctgggtgctggcgtgg

SEQ ID NO: 5797400 - DNA, 25 bp, Homo sapien
ctaggagtctttgcagactttggga

SEQ ID NO: 5797401 - DNA, 25 bp, Homo sapien
gacccagccctctttccacccgtac

SEQ ID NO: 5797402 - DNA, 25 bp, Homo sapien
ctctggctctgaagggacaaaggct

SEQ ID NO: 5797403 - DNA, 25 bp, Homo sapien
caagactggcaggcagtctactgac

SEQ ID NO: 5797404 - DNA, 25 bp, Homo sapien
cctctccttcgggcgccaacacatc

SEQ ID NO: 5797405 - DNA, 25 bp, Homo sapien
tctggagcccctttggtttacgctc

SEQ ID NO: 5797406 - DNA, 25 bp, Homo sapien
gaggcatgggctgccgccctttcca

SEQ ID NO: 5797407 - DNA, 25 bp, Homo sapien
aagcccttggccactggctggggct

SEQ ID NO: 5797408 - DNA, 25 bp, Homo sapien
gccgtggccccggacctcttctggg

SEQ ID NO: 5797409 - DNA, 25 bp, Homo sapien
agaggtgaggcaggacccgggctcc

SEQ ID NO: 5797410 - DNA, 25 bp, Homo sapien
caggggctcgttcgggtggtgggtc

SEQ ID NO: 5797411 - DNA, 25 bp, Homo sapien
ccgccttgggcccctgctggacatt

SEQ ID NO: 5797412 - DNA, 25 bp, Homo sapien
aagacccgcagcccgaagcccctcc

SEQ ID NO: 5797413 - DNA, 25 bp, Homo sapien
aagtgggcaagggcaggggcagttc

SEQ ID NO: 5797414 - DNA, 25 bp, Homo sapien
gaggaaatcaagccctgccaagact

SEQ ID NO: 5797415 - DNA, 25 bp, Homo sapien
atgttgggtggcactgggtgcccgt

SEQ ID NO: 5797416 - DNA, 25 bp, Homo sapien
cgtgtgctgacgcggctggcagagc

SEQ ID NO: 5797417 - DNA, 25 bp, Homo sapien
gacgacttggctttcctccgaaagg

SEQ ID NO: 5797418 - DNA, 25 bp, Homo sapien
ctatggctgggagttccacgacggc

SEQ ID NO: 5797419 - DNA, 25 bp, Homo sapien
ggcggcgccgcgcagtgccggcaga

SEQ ID NO: 5797420 - DNA, 25 bp, Homo sapien
tacagctgaagcccaggccccctca

SEQ ID NO: 5797421 - DNA, 25 bp, Homo sapien
ctggcaggtgtcgctaaccggacgg

SEQ ID NO: 5797422 - DNA, 25 bp, Homo sapien
ccccaaccctacttttgcctgtagc

SEQ ID NO: 5797423 - DNA, 25 bp, Homo sapien
tttttcccttgctgctgcgactgct

SEQ ID NO: 5797424 - DNA, 25 bp, Homo sapien
cttgatacagcaggtgaccctgaaa

SEQ ID NO: 5797425 - DNA, 25 bp, Homo sapien
acagcaggtgaccctgaaaattccc

SEQ ID NO: 5797426 - DNA, 25 bp, Homo sapien
actcatgccactctggctctgaagg

SEQ ID NO: 5797427 - DNA, 25 bp, Homo sapien
cccccgggcttcacacccttcagta

SEQ ID NO: 5797428 - DNA, 25 bp, Homo sapien
ggtcggccccaacctcaactgcagt

SEQ ID NO: 5797429 - DNA, 25 bp, Homo sapien
gacggtggtcgccagggcgagaggc

SEQ ID NO: 5797430 - DNA, 25 bp, Homo sapien
ccctcacgtctacttcggcatgaag

SEQ ID NO: 5797431 - DNA, 25 bp, Homo sapien
tggggctgctaaatgctgatggctg

SEQ ID NO: 5797432 - DNA, 25 bp, Homo sapien
catttccatagagtttgtgtttgaa

SEQ ID NO: 5797433 - DNA, 25 bp, Homo sapien
ggtggcactgggtgcccgtgtgctg

SEQ ID NO: 5797434 - DNA, 25 bp, Homo sapien
cccatatgctagaggttggtgaccc

SEQ ID NO: 5797435 - DNA, 25 bp, Homo sapien
cagtgcccaggcaggaggaaatcaa

SEQ ID NO: 5797436 - DNA, 25 bp, Homo sapien
tggcactgggtgcccgtgtgctgac

SEQ ID NO: 5797437 - DNA, 25 bp, Homo sapien
ctgacgcggctggcagagcatctgg

SEQ ID NO: 5797438 - DNA, 25 bp, Homo sapien
ggcgggagccggagaggtgaggcag

SEQ ID NO: 5797439 - DNA, 25 bp, Homo sapien
cggcagagggagtgcggacagccga

SEQ ID NO: 5797440 - DNA, 25 bp, Homo sapien
tgcctccagaattcctagtacaacg

SEQ ID NO: 5797441 - DNA, 25 bp, Homo sapien
gctttgggagcactccaccactatg

SEQ ID NO: 5797442 - DNA, 25 bp, Homo sapien
ggctggatgactacccccgggcttc

SEQ ID NO: 5797443 - DNA, 25 bp, Homo sapien
ctagtacaacgagcagtccacgcca

SEQ ID NO: 5797444 - DNA, 25 bp, Homo sapien
cctggctttgggagcactccaccac

SEQ ID NO: 5797445 - DNA, 25 bp, Homo sapien
gctggggctgctaaatgctgatggc

SEQ ID NO: 5797446 - DNA, 25 bp, Homo sapien
ggccctggagagccatgctgaaggc

SEQ ID NO: 5797447 - DNA, 25 bp, Homo sapien
cgactcctccagccccgccgtggcc

SEQ ID NO: 5797448 - DNA, 25 bp, Homo sapien
cggggactcctaagctcaggcacac

SEQ ID NO: 5797449 - DNA, 25 bp, Homo sapien
tccgagctcttgtgacgcggacctc

SEQ ID NO: 5797450 - DNA, 25 bp, Homo sapien
aacctcaactgcagtatgtagatgc

SEQ ID NO: 5797451 - DNA, 25 bp, Homo sapien
ctcaatgtcaactacctggctttgg

SEQ ID NO: 5797452 - DNA, 25 bp, Homo sapien
ggtgcccgtgtgctgacgcggctgg

SEQ ID NO: 5797453 - DNA, 25 bp, Homo sapien
cagggggacggtgtgggtccctatg

SEQ ID NO: 5797454 - DNA, 25 bp, Homo sapien
ggcaggtgtcgctaaccggacggtg

SEQ ID NO: 5797455 - DNA, 25 bp, Homo sapien
gggactcctaagctcaggcacacgt

SEQ ID NO: 5797456 - DNA, 25 bp, Homo sapien
cccgagcccgggtgcctccagaatt

SEQ ID NO: 5797457 - DNA, 25 bp, Homo sapien
ctgctggaccccacctcatcccgcc

SEQ ID NO: 5797458 - DNA, 25 bp, Homo sapien
ctggcttttgcccccagccccttgg

SEQ ID NO: 5797459 - DNA, 25 bp, Homo sapien
tccatagagtttgtgtttgaatcag

SEQ ID NO: 5797460 - DNA, 25 bp, Homo sapien
gcctaaatagctggtttcagcatcg

SEQ ID NO: 5797461 - DNA, 25 bp, Homo sapien
ccaggcaggaggaaatcaagccctg

SEQ ID NO: 5797462 - DNA, 25 bp, Homo sapien
cagtacagtgaccgcgatgggcgag

SEQ ID NO: 5797463 - DNA, 25 bp, Homo sapien
cccctgctgacagagatggtaaaga

SEQ ID NO: 5797464 - DNA, 25 bp, Homo sapien
tgctggacattctagccgacagccg

SEQ ID NO: 5797465 - DNA, 25 bp, Homo sapien
aaggctttagagagcgctttgagaa

SEQ ID NO: 5797466 - DNA, 25 bp, Homo sapien
ccctcagcggcctccttggtggaat

SEQ ID NO: 5797467 - DNA, 25 bp, Homo sapien
gtggtcctgtctttggccctgggta

SEQ ID NO: 5797468 - DNA, 25 bp, Homo sapien
agtaattcaaaccttcctcatttca

SEQ ID NO: 5797469 - DNA, 25 bp, Homo sapien
tctgggctggatgactacccccggg

SEQ ID NO: 5797470 - DNA, 25 bp, Homo sapien
gcagtacagctgaagcccaggcccc

SEQ ID NO: 5797471 - DNA, 25 bp, Homo sapien
ggcttttgcccccagccccttggat

SEQ ID NO: 5797472 - DNA, 25 bp, Homo sapien
aggttttgggtcaggctgccctcag

SEQ ID NO: 5797473 - DNA, 25 bp, Homo sapien
tgaaggctttagagagcgctttgag

SEQ ID NO: 5797474 - DNA, 25 bp, Homo sapien
tgtcagtctttttcccttgctgctg

SEQ ID NO: 5797475 - DNA, 25 bp, Homo sapien
ctcaccggactgatgtgggcgcagc

SEQ ID NO: 5797476 - DNA, 25 bp, Homo sapien
ccctgccaagactggcaggcagtct

SEQ ID NO: 5797477 - DNA, 25 bp, Homo sapien
cttctggggaacctaccgccctcac

SEQ ID NO: 5797478 - DNA, 25 bp, Homo sapien
tgggtgaggctgaggtagctgctga

SEQ ID NO: 5797479 - DNA, 25 bp, Homo sapien
acatccaggatggggccttaaggct

SEQ ID NO: 5797480 - DNA, 25 bp, Homo sapien
cactatgggcatctggagggtcctc

SEQ ID NO: 5797481 - DNA, 25 bp, Homo sapien
ggtgggatccctccctcacccggga

SEQ ID NO: 5797482 - DNA, 25 bp, Homo sapien
cctcactggaggcagcagagagcct

SEQ ID NO: 5797483 - DNA, 25 bp, Homo sapien
ttttacagcagtgccctcccggtca

SEQ ID NO: 5797484 - DNA, 25 bp, Homo sapien
ggaagggtctgagcagaaggtggac

SEQ ID NO: 5797485 - DNA, 25 bp, Homo sapien
gcagaaggtggacccagccctcttt

SEQ ID NO: 5797486 - DNA, 25 bp, Homo sapien
ccgccgtggccccggacctcttctg

SEQ ID NO: 5797487 - DNA, 25 bp, Homo sapien
atgaaggctttcaccagctggtggt

SEQ ID NO: 5797488 - DNA, 25 bp, Homo sapien
aggggcctcccctgaacgctacctc

SEQ ID NO: 5797489 - DNA, 25 bp, Homo sapien
gccttgtcttactggccatggctga

SEQ ID NO: 5797490 - DNA, 25 bp, Homo sapien
gactggagctggagagtgactgtag

SEQ ID NO: 5797491 - DNA, 25 bp, Homo sapien
tgacgcggacctcagtgccaggatg

SEQ ID NO: 5797492 - DNA, 25 bp, Homo sapien
agtgcggacagccgagagggcggct

SEQ ID NO: 5797493 - DNA, 25 bp, Homo sapien
gtgaggcaggacccgggctccactg

SEQ ID NO: 5797494 - DNA, 25 bp, Homo sapien
tcgtggtcctgtctttggccctggg

SEQ ID NO: 5797495 - DNA, 25 bp, Homo sapien
aaccgagcggcacctggacctgcga

SEQ ID NO: 5797496 - DNA, 25 bp, Homo sapien
cagctggtggttcagcggtgggatc

SEQ ID NO: 5797497 - DNA, 25 bp, Homo sapien
gggtggtgggtcggccccaacctca

SEQ ID NO: 5797498 - DNA, 25 bp, Homo sapien
actgatgtgggcgcagcagggcacc

SEQ ID NO: 5797499 - DNA, 25 bp, Homo sapien
accgcgatgggcgaggcatgggctg

SEQ ID NO: 5797500 - DNA, 25 bp, Homo sapien
acagtgaccgcgatgggcgaggcat

SEQ ID NO: 5797501 - DNA, 25 bp, Homo sapien
cccacgaggcttcctttgggatgaa

SEQ ID NO: 5797502 - DNA, 25 bp, Homo sapien
cgagcccgggtgcctccagaattcc

SEQ ID NO: 5797503 - DNA, 25 bp, Homo sapien
ccagctccttttatggccagcgcaa

SEQ ID NO: 5797504 - DNA, 25 bp, Homo sapien
ttggccactggctggggctgctaaa

SEQ ID NO: 5797505 - DNA, 25 bp, Homo sapien
tatgtcagtctttttcccttgctgc

SEQ ID NO: 5797506 - DNA, 25 bp, Homo sapien
aagggctggtattgccagacatcgg

SEQ ID NO: 5797507 - DNA, 25 bp, Homo sapien
gcgccagtaccaggctacaggcttt

SEQ ID NO: 5797508 - DNA, 25 bp, Homo sapien
cttgtgacgcggacctcagtgccag

SEQ ID NO: 5797509 - DNA, 25 bp, Homo sapien
ctggaccagccttgtcttactggcc

SEQ ID NO: 5797510 - DNA, 25 bp, Homo sapien
gaggcaggacccgggctccactgcc

SEQ ID NO: 5797511 - DNA, 25 bp, Homo sapien
gcccctttggtttacgctcccttgc

SEQ ID NO: 5797512 - DNA, 25 bp, Homo sapien
cccgggcttcacacccttcagtaac

SEQ ID NO: 5797513 - DNA, 25 bp, Homo sapien
tttgggagcactccaccactatggg

SEQ ID NO: 5797514 - DNA, 25 bp, Homo sapien
agagcctggatgagctgcactgggc

SEQ ID NO: 5797515 - DNA, 25 bp, Homo sapien
ctcatcccgccttgggcccctgctg

SEQ ID NO: 5797516 - DNA, 25 bp, Homo sapien
catgaagacccgcagcccgaagccc

SEQ ID NO: 5797517 - DNA, 25 bp, Homo sapien
gccgcctctccgagctcttgtgacg

SEQ ID NO: 5797518 - DNA, 25 bp, Homo sapien
tggccctgggtatgtcggggcgctg

SEQ ID NO: 5797519 - DNA, 25 bp, Homo sapien
gccccgcctgcatgcctggttttcc

SEQ ID NO: 5797520 - DNA, 25 bp, Homo sapien
gttccacgacggcctctccttcggg

SEQ ID NO: 5797521 - DNA, 25 bp, Homo sapien
actgcccctgctgacagagatggta

SEQ ID NO: 5797522 - DNA, 25 bp, Homo sapien
cgatgggcgaggcatgggctgccgc

SEQ ID NO: 5797523 - DNA, 25 bp, Homo sapien
gctttcaccagctggtggttcagcg

SEQ ID NO: 5797524 - DNA, 25 bp, Homo sapien
caggactgcccctgctgacagagat

SEQ ID NO: 5797525 - DNA, 25 bp, Homo sapien
gctgaggtagctgctgagctgggcc

SEQ ID NO: 5797526 - DNA, 25 bp, Homo sapien
gctgaagcccaggccccctcagggg

SEQ ID NO: 5797527 - DNA, 25 bp, Homo sapien
cccgcctgcatgcctggttttcctg

SEQ ID NO: 5797528 - DNA, 25 bp, Homo sapien
cagccttgtcttactggccatggct

SEQ ID NO: 5797529 - DNA, 25 bp, Homo sapien
ctaccctctgggctggatgactacc

SEQ ID NO: 5797530 - DNA, 25 bp, Homo sapien
ctttgcagactttgggaaccacaca

SEQ ID NO: 5797531 - DNA, 25 bp, Homo sapien
tggaccccacctcatcccgccttgg

SEQ ID NO: 5797532 - DNA, 25 bp, Homo sapien
gaacctaccgccctcacgtctactt

SEQ ID NO: 5797533 - DNA, 25 bp, Homo sapien
tgcactccgcgcctcctgtgttgcc

SEQ ID NO: 5797534 - DNA, 25 bp, Homo sapien
agccggagaggtgaggcaggacccg

SEQ ID NO: 5797535 - DNA, 25 bp, Homo sapien
ctcttctggggaacctaccgccctc

SEQ ID NO: 5797536 - DNA, 25 bp, Homo sapien
ggcagcagagagcctggatgagctg

SEQ ID NO: 5797537 - DNA, 25 bp, Homo sapien
gggaacctaccgccctcacgtctac

SEQ ID NO: 5797538 - DNA, 25 bp, Homo sapien
gagcagatactgggggatgaggccc

SEQ ID NO: 5797539 - DNA, 25 bp, Homo sapien
ccacccgtacctctttttacagcag

SEQ ID NO: 5797540 - DNA, 25 bp, Homo sapien
agctgggcccactggctgcctcact

SEQ ID NO: 5797541 - DNA, 25 bp, Homo sapien
ctagaggttggtgaccctgacgact

SEQ ID NO: 5797542 - DNA, 25 bp, Homo sapien
ctacaatgtcttctggacctccaac

SEQ ID NO: 5797543 - DNA, 25 bp, Homo sapien
ggtcgccagggcgagaggcgggagc

SEQ ID NO: 5797544 - DNA, 25 bp, Homo sapien
tcaccactgagttcgtcaagaggcc

SEQ ID NO: 5797545 - DNA, 25 bp, Homo sapien
ctatcttaccgctggcggggacggg

SEQ ID NO: 5797546 - DNA, 25 bp, Homo sapien
gtcaactacctggctttgggagcac

SEQ ID NO: 5797547 - DNA, 25 bp, Homo sapien
aggcttcctttgggatgaaggcttt

SEQ ID NO: 5797548 - DNA, 25 bp, Homo sapien
tggggccttaaggctcaccactgag

SEQ ID NO: 5797549 - DNA, 25 bp, Homo sapien
gcagagagcctggatgagctgcact

SEQ ID NO: 5797550 - DNA, 25 bp, Homo sapien
ccggactgatgtgggcgcagcaggg

SEQ ID NO: 5797551 - DNA, 25 bp, Homo sapien
catagagtttgtgtttgaatcaggc

SEQ ID NO: 5797552 - DNA, 25 bp, Homo sapien
actggctgcctcactggaggcagca

SEQ ID NO: 5797553 - DNA, 25 bp, Homo sapien
gcactgggtgcccgtgtgctgacgc

SEQ ID NO: 5797554 - DNA, 25 bp, Homo sapien
ctgcgactgctggaccccacctcat

SEQ ID NO: 5797555 - DNA, 25 bp, Homo sapien
ctccatcagagccaggcaggcccac

SEQ ID NO: 5797556 - DNA, 25 bp, Homo sapien
tctggccgtcgtggtcctgtctttg

SEQ ID NO: 5797557 - DNA, 25 bp, Homo sapien
agagtcgcctaaatagctggtttca

SEQ ID NO: 5797558 - DNA, 25 bp, Homo sapien
tggctctggccgtcgtggtcctgtc

SEQ ID NO: 5797559 - DNA, 25 bp, Homo sapien
tgtgacgcggacctcagtgccagga

SEQ ID NO: 5797560 - DNA, 25 bp, Homo sapien
ccgcgtagcacggctggaggagtgg

SEQ ID NO: 5797561 - DNA, 25 bp, Homo sapien
ctggagggtcctcaccaggctcggg

SEQ ID NO: 5797562 - DNA, 25 bp, Homo sapien
agcgctttgagaagaccttccagct

SEQ ID NO: 5797563 - DNA, 25 bp, Homo sapien
gataccagtaattcaaaccttcctc

SEQ ID NO: 5797564 - DNA, 25 bp, Homo sapien
ctggatgactacccccgggcttcac

SEQ ID NO: 5797565 - DNA, 25 bp, Homo sapien
ttaccaaccttactgaaccccaaga

SEQ ID NO: 5797566 - DNA, 25 bp, Homo sapien
tggcagagcatctgggtgaggctga

SEQ ID NO: 5797567 - DNA, 25 bp, Homo sapien
ggctggcaggtgtcgctaaccggac

SEQ ID NO: 5797568 - DNA, 25 bp, Homo sapien
ccatcagagccaggcaggcccactg

SEQ ID NO: 5797569 - DNA, 25 bp, Homo sapien
tgctcttggctatgtcagtcttttt

SEQ ID NO: 5797570 - DNA, 25 bp, Homo sapien
caagccctgccaagactggcaggca

SEQ ID NO: 5797571 - DNA, 25 bp, Homo sapien
atcagagccaggcaggcccactgcc

SEQ ID NO: 5797572 - DNA, 25 bp, Homo sapien
gagcggcggcgccgcgcagtgccgg

SEQ ID NO: 5797573 - DNA, 25 bp, Homo sapien
gcggacctcagtgccaggatggctc

SEQ ID NO: 5797574 - DNA, 25 bp, Homo sapien
cgcggcgggcggtcacgctgcactc

SEQ ID NO: 5797575 - DNA, 25 bp, Homo sapien
accagccttgtcttactggccatgg

SEQ ID NO: 5797576 - DNA, 25 bp, Homo sapien
tgtcttactggccatggctgaagac

SEQ ID NO: 5797577 - DNA, 25 bp, Homo sapien
gcggcacctggacctgcgatgttgg

SEQ ID NO: 5797578 - DNA, 25 bp, Homo sapien
cccttgcagcctccagctcctttta

SEQ ID NO: 5797579 - DNA, 25 bp, Homo sapien
aggcttctggcttttgcccccagcc

SEQ ID NO: 5797580 - DNA, 25 bp, Homo sapien
aaaagcagtacagctgaagcccagg

SEQ ID NO: 5797581 - DNA, 25 bp, Homo sapien
tcatctcaggtgtctccttgctgtc

SEQ ID NO: 5797582 - DNA, 25 bp, Homo sapien
caattcagagcatgatcccccctac

SEQ ID NO: 5797583 - DNA, 25 bp, Homo sapien
ggtttacgctcccttgcagcctcca

SEQ ID NO: 5797584 - DNA, 25 bp, Homo sapien
gggtgaatgtgaatccagagtctat

SEQ ID NO: 5797585 - DNA, 25 bp, Homo sapien
gtgaatgtgaatccagagtctattt

SEQ ID NO: 5797586 - DNA, 25 bp, Homo sapien
gctccgtgccaacgtggtaggcaat

SEQ ID NO: 5797587 - DNA, 25 bp, Homo sapien
tggccatggctgaagactactgaag

SEQ ID NO: 5797588 - DNA, 25 bp, Homo sapien
cgtgcgcggcgggcggtcacgctgc

SEQ ID NO: 5797589 - DNA, 25 bp, Homo sapien
gctgaaggctttagagagcgctttg

SEQ ID NO: 5797590 - DNA, 25 bp, Homo sapien
ccttgctgctgcgactgctggaccc

SEQ ID NO: 5797591 - DNA, 25 bp, Homo sapien
ctccaacccaggactgcccctgctg

SEQ ID NO: 5797592 - DNA, 25 bp, Homo sapien
tctagccgacagccgccatctctgg

SEQ ID NO: 5797593 - DNA, 25 bp, Homo sapien
tggcaggcagtctactgacccaggc

SEQ ID NO: 5797594 - DNA, 25 bp, Homo sapien
gaaaggccttgccccgcctgcatgc

SEQ ID NO: 5797595 - DNA, 25 bp, Homo sapien
gcctcaggactcagctacaatgtct

SEQ ID NO: 5797596 - DNA, 25 bp, Homo sapien
gcttgccaggatccctgaagtggga

SEQ ID NO: 5797597 - DNA, 25 bp, Homo sapien
tccagctgaaggagaagggcctgag

SEQ ID NO: 5797598 - DNA, 25 bp, Homo sapien
gcaatgtatggcgccagtaccaggc

SEQ ID NO: 5797599 - DNA, 25 bp, Homo sapien
gccaagactggcaggcagtctactg

SEQ ID NO: 5797600 - DNA, 25 bp, Homo sapien
gcagtctactgacccaggccctgga

SEQ ID NO: 5797601 - DNA, 25 bp, Homo sapien
gatggtaaagagtcgcctaaatagc

SEQ ID NO: 5797602 - DNA, 25 bp, Homo sapien
ctttagagagcgctttgagaagacc

SEQ ID NO: 5797603 - DNA, 25 bp, Homo sapien
ccaggatggggccttaaggctcacc

SEQ ID NO: 5797604 - DNA, 25 bp, Homo sapien
gatggggccttaaggctcaccactg

SEQ ID NO: 5797605 - DNA, 25 bp, Homo sapien
aaatgctgatggctggattgggagg

SEQ ID NO: 5797606 - DNA, 25 bp, Homo sapien
ctacaggctttctttgggagcagta

SEQ ID NO: 5797607 - DNA, 25 bp, Homo sapien
tgggtcaggctgccctcagcggcct

SEQ ID NO: 5797608 - DNA, 25 bp, Homo sapien
ccctaccctctgggctggatgacta

SEQ ID NO: 5797609 - DNA, 25 bp, Homo sapien
cagggcaccaccccggggactccta

SEQ ID NO: 5797610 - DNA, 25 bp, Homo sapien
gctggcggggacgggaccctgcctt

SEQ ID NO: 5797611 - DNA, 25 bp, Homo sapien
ctggagctggagagtgactgtagag

SEQ ID NO: 5797612 - DNA, 25 bp, Homo sapien
agagggagtgcggacagccgagagg

SEQ ID NO: 5797613 - DNA, 25 bp, Homo sapien
gcctcctgtgttgcctgccgactcc

SEQ ID NO: 5797614 - DNA, 25 bp, Homo sapien
tgcccctgctgacagagatggtaaa

SEQ ID NO: 5797615 - DNA, 25 bp, Homo sapien
agccatgctgaaggctttagagagc

SEQ ID NO: 5797616 - DNA, 25 bp, Homo sapien
ggagtgcggacagccgagagggcgg

SEQ ID NO: 5797617 - DNA, 25 bp, Homo sapien
cccctcctcaccggactgatgtggg

SEQ ID NO: 5797618 - DNA, 25 bp, Homo sapien
ccagcgcaattcagagcatgatccc

SEQ ID NO: 5797619 - DNA, 25 bp, Homo sapien
ctggagagccatgctgaaggcttta

SEQ ID NO: 5797620 - DNA, 25 bp, Homo sapien
atccagagtctatttttctaaataa

SEQ ID NO: 5797621 - DNA, 25 bp, Homo sapien
ctgacagagatggtaaagagtcgcc

SEQ ID NO: 5797622 - DNA, 25 bp, Homo sapien
cccggggactcctaagctcaggcac

SEQ ID NO: 5797623 - DNA, 25 bp, Homo sapien
cagtgccctcccggtcattcttccc

SEQ ID NO: 5797624 - DNA, 25 bp, Homo sapien
cctgcgatgttgggtggcactgggt

SEQ ID NO: 5797625 - DNA, 25 bp, Homo sapien
tggctttgggagcactccaccacta

SEQ ID NO: 5797626 - DNA, 25 bp, Homo sapien
catcggcccccaggggcctcccctg

SEQ ID NO: 5797627 - DNA, 25 bp, Homo sapien
ttctacggacaagggctggtattgc

SEQ ID NO: 5797628 - DNA, 25 bp, Homo sapien
tgggaggacagaggtccaagtgggc

SEQ ID NO: 5797629 - DNA, 25 bp, Homo sapien
taccgctggcggggacgggaccctg

SEQ ID NO: 5797630 - DNA, 25 bp, Homo sapien
agggtcctcaccaggctcgggctgc

SEQ ID NO: 5797631 - DNA, 25 bp, Homo sapien
caggtgtcgctaaccggacggtggt

SEQ ID NO: 5797632 - DNA, 25 bp, Homo sapien
ctcccttgcagcctccagctccttt

SEQ ID NO: 5797633 - DNA, 25 bp, Homo sapien
ccaagaccctaccctctgggctgga

SEQ ID NO: 5797634 - DNA, 25 bp, Homo sapien
cttcgggcgccaacacatccaggat

SEQ ID NO: 5797635 - DNA, 25 bp, Homo sapien
gcgagcaggttttgggtcaggctgc

SEQ ID NO: 5797636 - DNA, 25 bp, Homo sapien
tgccttaccaaccttactgaacccc

SEQ ID NO: 5797637 - DNA, 25 bp, Homo sapien
ttatggccagcgcaattcagagcat

SEQ ID NO: 5797638 - DNA, 25 bp, Homo sapien
cgggtgcctccagaattcctagtac

SEQ ID NO: 5797639 - DNA, 25 bp, Homo sapien
ttgcctgccgactcctccagccccg

SEQ ID NO: 5797640 - DNA, 25 bp, Homo sapien
gcggggtgctgtgtggctcaatgtc

SEQ ID NO: 5797641 - DNA, 25 bp, Homo sapien
ccctgacgacttggctttcctccga

SEQ ID NO: 5797642 - DNA, 25 bp, Homo sapien
ccgagcggcacctggacctgcgatg

SEQ ID NO: 5797643 - DNA, 25 bp, Homo sapien
ggcatgaagacccgcagcccgaagc

SEQ ID NO: 5797644 - DNA, 25 bp, Homo sapien
aacccaggactgcccctgctgacag

SEQ ID NO: 5797645 - DNA, 25 bp, Homo sapien
agagcgctttgagaagaccttccag

SEQ ID NO: 5797646 - DNA, 25 bp, Homo sapien
atgctgaaggctttagagagcgctt

SEQ ID NO: 5797647 - DNA, 25 bp, Homo sapien
gtgggcaagggcaggggcagttctt

SEQ ID NO: 5797648 - DNA, 25 bp, Homo sapien
tcccacatagccctggggtgaatgt

SEQ ID NO: 5797649 - DNA, 25 bp, Homo sapien
tgggtcggccccaacctcaactgca

SEQ ID NO: 5797650 - DNA, 25 bp, Homo sapien
tcggccccaacctcaactgcagtat

SEQ ID NO: 5797651 - DNA, 25 bp, Homo sapien
gtgggcgcagcagggcaccaccccg

SEQ ID NO: 5797652 - DNA, 25 bp, Homo sapien
gtccctatggctgggagttccacga

SEQ ID NO: 5797653 - DNA, 25 bp, Homo sapien
actcagctacaatgtcttctggacc

SEQ ID NO: 5797654 - DNA, 25 bp, Homo sapien
cagcccgaagcccctcctcaccgga

SEQ ID NO: 5797655 - DNA, 25 bp, Homo sapien
aattcccatttccatagagtttgtg

SEQ ID NO: 5797656 - DNA, 25 bp, Homo sapien
cccagccccttggataccagtaatt

SEQ ID NO: 5797657 - DNA, 25 bp, Homo sapien
gaggaggggagccaagacactcatg

SEQ ID NO: 5797658 - DNA, 25 bp, Homo sapien
ctacctcggcttgccaggatccctg

SEQ ID NO: 5797659 - DNA, 25 bp, Homo sapien
ctcctgtgttgcctgccgactcctc

SEQ ID NO: 5797660 - DNA, 25 bp, Homo sapien
cccttggataccagtaattcaaacc

SEQ ID NO: 5797661 - DNA, 25 bp, Homo sapien
aggctttcaccagctggtggttcag

SEQ ID NO: 5797662 - DNA, 25 bp, Homo sapien
ctccgaaaggccttgccccgcctgc

SEQ ID NO: 5797663 - DNA, 25 bp, Homo sapien
gaattcctagtacaacgagcagtcc

SEQ ID NO: 5797664 - DNA, 25 bp, Homo sapien
acctccaacccaggactgcccctgc

SEQ ID NO: 5797665 - DNA, 25 bp, Homo sapien
gctgcactccgcgcctcctgtgttg

SEQ ID NO: 5797666 - DNA, 25 bp, Homo sapien
cctcccggtcattcttcccacgagg

SEQ ID NO: 5797667 - DNA, 25 bp, Homo sapien
ggcgggccgcgtagcacggctggag

SEQ ID NO: 5797668 - DNA, 25 bp, Homo sapien
acctcggcttgccaggatccctgaa

SEQ ID NO: 5797669 - DNA, 25 bp, Homo sapien
tatgtagatgctcttggctatgtca

SEQ ID NO: 5797670 - DNA, 25 bp, Homo sapien
tctacttcggcatgaagacccgcag

SEQ ID NO: 5797671 - DNA, 25 bp, Homo sapien
ccctggagagccatgctgaaggctt

SEQ ID NO: 5797672 - DNA, 25 bp, Homo sapien
gtagcacggctggaggagtggctct

SEQ ID NO: 5797673 - DNA, 25 bp, Homo sapien
gggcatctggagggtcctcaccagg

SEQ ID NO: 5797674 - DNA, 25 bp, Homo sapien
cctggttttcctggctccatcagag

SEQ ID NO: 5797675 - DNA, 25 bp, Homo sapien
cacgacggcctctccttcgggcgcc

SEQ ID NO: 5797676 - DNA, 25 bp, Homo sapien
ggtgcctccagaattcctagtacaa

SEQ ID NO: 5797677 - DNA, 25 bp, Homo sapien
cccctgctggacattctagccgaca

SEQ ID NO: 5797678 - DNA, 25 bp, Homo sapien
ggacaaaggcttctggcttttgccc

SEQ ID NO: 5797679 - DNA, 25 bp, Homo sapien
cgagctcttgtgacgcggacctcag

SEQ ID NO: 5797680 - DNA, 25 bp, Homo sapien
cctccagaattcctagtacaacgag

SEQ ID NO: 5797681 - DNA, 25 bp, Homo sapien
tccttcgggcgccaacacatccagg

SEQ ID NO: 5797682 - DNA, 25 bp, Homo sapien
cgtggccccggacctcttctgggga

SEQ ID NO: 5797683 - DNA, 25 bp, Homo sapien
tttacgctcccttgcagcctccagc

SEQ ID NO: 5797684 - DNA, 25 bp, Homo sapien
ctgggagttccacgacggcctctcc

SEQ ID NO: 5797685 - DNA, 25 bp, Homo sapien
cgcagcccgaagcccctcctcaccg

SEQ ID NO: 5797686 - DNA, 25 bp, Homo sapien
ggagctggagagtgactgtagagcc

SEQ ID NO: 5797687 - DNA, 25 bp, Homo sapien
gcgccgcgcagtgccggcagaggga

SEQ ID NO: 5797688 - DNA, 25 bp, Homo sapien
acccgggctccactgccgcctctcc

SEQ ID NO: 5797689 - DNA, 25 bp, Homo sapien
ggcacctggacctgcgatgttgggt

SEQ ID NO: 5797690 - DNA, 25 bp, Homo sapien
tttcagcatcggcccccaggggcct

SEQ ID NO: 5797691 - DNA, 25 bp, Homo sapien
gccaacacatccaggatggggcctt

SEQ ID NO: 5797692 - DNA, 25 bp, Homo sapien
tgggctggatgactacccccgggct

SEQ ID NO: 5797693 - DNA, 25 bp, Homo sapien
acttttgcctgtagcccatatgcta

SEQ ID NO: 5797694 - DNA, 25 bp, Homo sapien
ctgccgactcctccagccccgccgt

SEQ ID NO: 5797695 - DNA, 25 bp, Homo sapien
gtcatcccacatagccctggggtga

SEQ ID NO: 5797696 - DNA, 25 bp, Homo sapien
ccccaagaccctaccctctgggctg

SEQ ID NO: 5797697 - DNA, 25 bp, Homo sapien
gtgccctcccggtcattcttcccac

SEQ ID NO: 5797698 - DNA, 25 bp, Homo sapien
agagcatctgggtgaggctgaggta

SEQ ID NO: 5797699 - DNA, 25 bp, Homo sapien
tgctgtcatcccacatagccctggg

SEQ ID NO: 5797700 - DNA, 25 bp, Homo sapien
cactgagttcgtcaagaggcctggg

SEQ ID NO: 5797701 - DNA, 25 bp, Homo sapien
cctctgggctggatgactacccccg

SEQ ID NO: 5797702 - DNA, 25 bp, Homo sapien
tgtgttgcctgccgactcctccagc

SEQ ID NO: 5797703 - DNA, 25 bp, Homo sapien
ccccagagctaggagtctttgcaga

SEQ ID NO: 5797704 - DNA, 25 bp, Homo sapien
tctccttgctgtcatcccacatagc

SEQ ID NO: 5797705 - DNA, 25 bp, Homo sapien
tccactgccgcctctccgagctctt

SEQ ID NO: 5797706 - DNA, 25 bp, Homo sapien
gcaggttttgggtcaggctgccctc

SEQ ID NO: 5797707 - DNA, 25 bp, Homo sapien
aggcaggaggaaatcaagccctgcc

SEQ ID NO: 5797708 - DNA, 25 bp, Homo sapien
gaccctaccctctgggctggatgac

SEQ ID NO: 5797709 - DNA, 25 bp, Homo sapien
acccgtacctctttttacagcagtg

SEQ ID NO: 5797710 - DNA, 25 bp, Homo sapien
gccctcccggtcattcttcccacga

SEQ ID NO: 5797711 - DNA, 25 bp, Homo sapien
cgcaggcgctggctggcaggtgtcg

SEQ ID NO: 5797712 - DNA, 25 bp, Homo sapien
cgctacctcggcttgccaggatccc

SEQ ID NO: 5797713 - DNA, 25 bp, Homo sapien
tcccggtcattcttcccacgaggct

SEQ ID NO: 5797714 - DNA, 25 bp, Homo sapien
ggacattctagccgacagccgccat

SEQ ID NO: 5797715 - DNA, 25 bp, Homo sapien
attctagccgacagccgccatctct

SEQ ID NO: 5797716 - DNA, 25 bp, Homo sapien
ccctcacccgggaagcccttggcca

SEQ ID NO: 5797717 - DNA, 25 bp, Homo sapien
gaagaccttccagctgaaggagaag

SEQ ID NO: 5797718 - DNA, 25 bp, Homo sapien
gttggtgaccctgacgacttggctt

SEQ ID NO: 5797719 - DNA, 25 bp, Homo sapien
ggactgcccctgctgacagagatgg

SEQ ID NO: 5797720 - DNA, 25 bp, Homo sapien
agcctggatgagctgcactgggccc

SEQ ID NO: 5797721 - DNA, 25 bp, Homo sapien
tccagaattcctagtacaacgagca

SEQ ID NO: 5797722 - DNA, 25 bp, Homo sapien
gaatcaggcagtgcccaggcaggag

SEQ ID NO: 5797723 - DNA, 25 bp, Homo sapien
aaggagaagggcctgagctctggcg

SEQ ID NO: 5797724 - DNA, 25 bp, Homo sapien
acagccgccatctctggagcccctt

SEQ ID NO: 5797725 - DNA, 25 bp, Homo sapien
aagaccctaccctctgggctggatg

SEQ ID NO: 5797726 - DNA, 25 bp, Homo sapien
tgggatccctccctcacccgggaag

SEQ ID NO: 5797727 - DNA, 25 bp, Homo sapien
cgatgttgggtggcactgggtgccc

SEQ ID NO: 5797728 - DNA, 25 bp, Homo sapien
tcgttcgggtggtgggtcggcccca

SEQ ID NO: 5797729 - DNA, 25 bp, Homo sapien
ccgaagcccctcctcaccggactga

SEQ ID NO: 5797730 - DNA, 25 bp, Homo sapien
aggggcagttcttgatacagcaggt

SEQ ID NO: 5797731 - DNA, 25 bp, Homo sapien
accactgagttcgtcaagaggcctg

SEQ ID NO: 5797732 - DNA, 25 bp, Homo sapien
gcggtgggatccctccctcacccgg

SEQ ID NO: 5797733 - DNA, 25 bp, Homo sapien
gcactgggccccagagctaggagtc

SEQ ID NO: 5797734 - DNA, 25 bp, Homo sapien
ttctggcttttgcccccagcccctt

SEQ ID NO: 5797735 - DNA, 25 bp, Homo sapien
cctgccttaccaaccttactgaacc

SEQ ID NO: 5797736 - DNA, 25 bp, Homo sapien
tgatcccccctactggcggggtgct

SEQ ID NO: 5797737 - DNA, 25 bp, Homo sapien
actccacggtgagctccgtgccaac

SEQ ID NO: 5797738 - DNA, 25 bp, Homo sapien
gccttaaggctcaccactgagttcg

SEQ ID NO: 5797739 - DNA, 25 bp, Homo sapien
ctgccaagactggcaggcagtctac

SEQ ID NO: 5797740 - DNA, 25 bp, Homo sapien
aaaattcccatttccatagagtttg

SEQ ID NO: 5797741 - DNA, 25 bp, Homo sapien
cgcggctggcagagcatctgggtga

SEQ ID NO: 5797742 - DNA, 25 bp, Homo sapien
cgtcgtggtcctgtctttggccctg

SEQ ID NO: 5797743 - DNA, 25 bp, Homo sapien
ccagagtctatttttctaaataaat

SEQ ID NO: 5797744 - DNA, 25 bp, Homo sapien
tgttgcctgccgactcctccagccc

SEQ ID NO: 5797745 - DNA, 25 bp, Homo sapien
ttcccatttccatagagtttgtgtt

SEQ ID NO: 5797746 - DNA, 25 bp, Homo sapien
gctctggccgtcgtggtcctgtctt

SEQ ID NO: 5797747 - DNA, 25 bp, Homo sapien
ggctctgaagggacaaaggcttctg

SEQ ID NO: 5797748 - DNA, 25 bp, Homo sapien
attcttcccacgaggcttcctttgg

SEQ ID NO: 5797749 - DNA, 25 bp, Homo sapien
agggagtgcggacagccgagagggc

SEQ ID NO: 5797750 - DNA, 25 bp, Homo sapien
tggaggagtggctctggccgtcgtg

SEQ ID NO: 5797751 - DNA, 25 bp, Homo sapien
cagagccaggcaggcccactgccac

SEQ ID NO: 5797752 - DNA, 25 bp, Homo sapien
gaatgtgaatccagagtctattttt

SEQ ID NO: 5797753 - DNA, 25 bp, Homo sapien
ccctatggctgggagttccacgacg

SEQ ID NO: 5797754 - DNA, 25 bp, Homo sapien
ccacggctggaccagccttgtctta

SEQ ID NO: 5797755 - DNA, 25 bp, Homo sapien
cacgtctacttcggcatgaagaccc

SEQ ID NO: 5797756 - DNA, 25 bp, Homo sapien
tgccaacgtggtaggcaatgtatgg

SEQ ID NO: 5797757 - DNA, 25 bp, Homo sapien
ctccgcgcctcctgtgttgcctgcc

SEQ ID NO: 5797758 - DNA, 25 bp, Homo sapien
tgcatgcctggttttcctggctcca

SEQ ID NO: 5797759 - DNA, 25 bp, Homo sapien
ggactcagctacaatgtcttctgga

SEQ ID NO: 5797760 - DNA, 25 bp, Homo sapien
accgtgcgcggcgggcggtcacgct

SEQ ID NO: 5797761 - DNA, 25 bp, Homo sapien
cctgaaaattcccatttccatagag

SEQ ID NO: 5797762 - DNA, 25 bp, Homo sapien
cgtggtaggcaatgtatggcgccag

SEQ ID NO: 5797763 - DNA, 25 bp, Homo sapien
gctatgtcagtctttttcccttgct

SEQ ID NO: 5797764 - DNA, 25 bp, Homo sapien
ccactggctggggctgctaaatgct

SEQ ID NO: 5797765 - DNA, 25 bp, Homo sapien
gcggcggcgccgcgcagtgccggca

SEQ ID NO: 5797766 - DNA, 25 bp, Homo sapien
cgtgccaacgtggtaggcaatgtat

SEQ ID NO: 5797767 - DNA, 25 bp, Homo sapien
ctggattgggagggagcagatactg

SEQ ID NO: 5797768 - DNA, 25 bp, Homo sapien
atagctggtttcagcatcggccccc

SEQ ID NO: 5797769 - DNA, 25 bp, Homo sapien
gcgctgggtgctggcgtggtaccgt

SEQ ID NO: 5797770 - DNA, 25 bp, Homo sapien
cggtggtcgccagggcgagaggcgg

SEQ ID NO: 5797771 - DNA, 25 bp, Homo sapien
tttgggaaccacacaaaagcagtac

SEQ ID NO: 5797772 - DNA, 25 bp, Homo sapien
ctacttttgcctgtagcccatatgc

SEQ ID NO: 5797773 - DNA, 25 bp, Homo sapien
acgagcagtccacgccaacccccca

SEQ ID NO: 5797774 - DNA, 25 bp, Homo sapien
tggctgaagactactgaagggaggg

SEQ ID NO: 5797775 - DNA, 25 bp, Homo sapien
aggcagtctactgacccaggccctg

SEQ ID NO: 5797776 - DNA, 25 bp, Homo sapien
tgctgcgactgctggaccccacctc

SEQ ID NO: 5797777 - DNA, 25 bp, Homo sapien
gctgccctcagcggcctccttggtg

SEQ ID NO: 5797778 - DNA, 25 bp, Homo sapien
ggtcctcaccaggctcgggctgcca

SEQ ID NO: 5797779 - DNA, 25 bp, Homo sapien
acttctacggacaagggctggtatt

SEQ ID NO: 5797780 - DNA, 25 bp, Homo sapien
catgggctgccgccctttccacggc

SEQ ID NO: 5797781 - DNA, 25 bp, Homo sapien
gcaggcagtctactgacccaggccc

SEQ ID NO: 5797782 - DNA, 25 bp, Homo sapien
tcttactggccatggctgaagacta

SEQ ID NO: 5797783 - DNA, 25 bp, Homo sapien
taagctcaggcacacgtgtgagcag

SEQ ID NO: 5797784 - DNA, 25 bp, Homo sapien
agtggctctggccgtcgtggtcctg

SEQ ID NO: 5797785 - DNA, 25 bp, Homo sapien
caggccctggagagccatgctgaag

SEQ ID NO: 5797786 - DNA, 25 bp, Homo sapien
accgccctcacgtctacttcggcat

SEQ ID NO: 5797787 - DNA, 25 bp, Homo sapien
ggctgggagttccacgacggcctct

SEQ ID NO: 5797788 - DNA, 25 bp, Homo sapien
ggctacttctacggacaagggctgg

SEQ ID NO: 5797789 - DNA, 25 bp, Homo sapien
tggctttcctccgaaaggccttgcc

SEQ ID NO: 5797790 - DNA, 25 bp, Homo sapien
gagcagtccacgccaaccccccaac

SEQ ID NO: 5797791 - DNA, 25 bp, Homo sapien
agccctgccaagactggcaggcagt

SEQ ID NO: 5797792 - DNA, 25 bp, Homo sapien
ggggatgaggcccgagcccgggtgc

SEQ ID NO: 5797793 - DNA, 25 bp, Homo sapien
acaaaggcttctggcttttgccccc

SEQ ID NO: 5797794 - DNA, 25 bp, Homo sapien
ggttcagcggtgggatccctccctc

SEQ ID NO: 5797795 - DNA, 25 bp, Homo sapien
gtggaagggtctgagcagaaggtgg

SEQ ID NO: 5797796 - DNA, 25 bp, Homo sapien
aaccctacttttgcctgtagcccat

SEQ ID NO: 5797797 - DNA, 25 bp, Homo sapien
tcttcccacgaggcttcctttggga

SEQ ID NO: 5797798 - DNA, 25 bp, Homo sapien
aaggccttgccccgcctgcatgcct

SEQ ID NO: 5797799 - DNA, 25 bp, Homo sapien
gggctgccaaactccacggtgagct

SEQ ID NO: 5797800 - DNA, 25 bp, Homo sapien
caggatccctgaagtgggaggacag

SEQ ID NO: 5797801 - DNA, 25 bp, Homo sapien
gtctgagcagaaggtggacccagcc

SEQ ID NO: 5797802 - DNA, 25 bp, Homo sapien
ccgccatctctggagcccctttggt

SEQ ID NO: 5797803 - DNA, 25 bp, Homo sapien
atgtcggggcgctgggtgctggcgt

SEQ ID NO: 5797804 - DNA, 25 bp, Homo sapien
cactgccgcctctccgagctcttgt

SEQ ID NO: 5797805 - DNA, 25 bp, Homo sapien
ttcccacgaggcttcctttgggatg

SEQ ID NO: 5797806 - DNA, 25 bp, Homo sapien
atccctgaagtgggaggacagaggt

SEQ ID NO: 5797807 - DNA, 25 bp, Homo sapien
actggcaggcagtctactgacccag

SEQ ID NO: 5797808 - DNA, 25 bp, Homo sapien
acctctttttacagcagtgccctcc

SEQ ID NO: 5797809 - DNA, 25 bp, Homo sapien
tgatgtgggcgcagcagggcaccac

SEQ ID NO: 5797810 - DNA, 25 bp, Homo sapien
cactccgcgcctcctgtgttgcctg

SEQ ID NO: 5797811 - DNA, 25 bp, Homo sapien
cccgggaagcccttggccactggct

SEQ ID NO: 5797812 - DNA, 25 bp, Homo sapien
gatgagctgcactgggccccagagc

SEQ ID NO: 5797813 - DNA, 25 bp, Homo sapien
acaagggctggtattgccagacatc

SEQ ID NO: 5797814 - DNA, 25 bp, Homo sapien
gcccactggctgcctcactggaggc

SEQ ID NO: 5797815 - DNA, 25 bp, Homo sapien
cggacagccgagagggcggctcggg

SEQ ID NO: 5797816 - DNA, 25 bp, Homo sapien
gacagaggtccaagtgggcaagggc

SEQ ID NO: 5797817 - DNA, 25 bp, Homo sapien
ctccttttatggccagcgcaattca

SEQ ID NO: 5797818 - DNA, 25 bp, Homo sapien
acaatgtcttctggacctccaaccc

SEQ ID NO: 5797819 - DNA, 25 bp, Homo sapien
ttttatggccagcgcaattcagagc

SEQ ID NO: 5797820 - DNA, 25 bp, Homo sapien
tcggggtggaagggtctgagcagaa

SEQ ID NO: 5797821 - DNA, 25 bp, Homo sapien
ggtcctgtctttggccctgggtatg

SEQ ID NO: 5797822 - DNA, 25 bp, Homo sapien
tctccttcgggcgccaacacatcca

SEQ ID NO: 5797823 - DNA, 25 bp, Homo sapien
ctccaccactatgggcatctggagg

SEQ ID NO: 5797824 - DNA, 25 bp, Homo sapien
gggctcgttcgggtggtgggtcggc

SEQ ID NO: 5797825 - DNA, 25 bp, Homo sapien
cactccaccactatgggcatctgga

SEQ ID NO: 5797826 - DNA, 25 bp, Homo sapien
cttcggcatgaagacccgcagcccg

SEQ ID NO: 5797827 - DNA, 25 bp, Homo sapien
cggtgagctccgtgccaacgtggta

SEQ ID NO: 5797828 - DNA, 25 bp, Homo sapien
tgtctccttgctgtcatcccacata

SEQ ID NO: 5797829 - DNA, 25 bp, Homo sapien
tgaccctgaaaattcccatttccat

SEQ ID NO: 5797830 - DNA, 25 bp, Homo sapien
cgggcttcacacccttcagtaaccg

SEQ ID NO: 5797831 - DNA, 25 bp, Homo sapien
cgtcaagaggcctgggggtcagcac

SEQ ID NO: 5797832 - DNA, 25 bp, Homo sapien
tttctttgggagcagtacagtgacc

SEQ ID NO: 5797833 - DNA, 25 bp, Homo sapien
aaatcaagccctgccaagactggca

SEQ ID NO: 5797834 - DNA, 25 bp, Homo sapien
cacccgggaagcccttggccactgg

SEQ ID NO: 5797835 - DNA, 25 bp, Homo sapien
gctggtggttcagcggtgggatccc

SEQ ID NO: 5797836 - DNA, 25 bp, Homo sapien
accctgccttaccaaccttactgaa

SEQ ID NO: 5797837 - DNA, 25 bp, Homo sapien
tgggcccctgctggacattctagcc

SEQ ID NO: 5797838 - DNA, 25 bp, Homo sapien
ggacccgggctccactgccgcctct

SEQ ID NO: 5797839 - DNA, 25 bp, Homo sapien
ccctactggcggggtgctgtgtggc

SEQ ID NO: 5797840 - DNA, 25 bp, Homo sapien
gaagtgggaggacagaggtccaagt

SEQ ID NO: 5797841 - DNA, 25 bp, Homo sapien
ttcagcggtgggatccctccctcac

SEQ ID NO: 5797842 - DNA, 25 bp, Homo sapien
gcaagggcaggggcagttcttgata

SEQ ID NO: 5797843 - DNA, 25 bp, Homo sapien
cgctttgagaagaccttccagctga

SEQ ID NO: 5797844 - DNA, 25 bp, Homo sapien
gagatggtaaagagtcgcctaaata

SEQ ID NO: 5797845 - DNA, 25 bp, Homo sapien
tccttggtggaattggctacttcta

SEQ ID NO: 5797846 - DNA, 25 bp, Homo sapien
ctgacccaggccctggagagccatg

SEQ ID NO: 5797847 - DNA, 25 bp, Homo sapien
accagctggtggttcagcggtggga

SEQ ID NO: 5797848 - DNA, 25 bp, Homo sapien
agcatctgggtgaggctgaggtagc

SEQ ID NO: 5797849 - DNA, 25 bp, Homo sapien
gtaaagagtcgcctaaatagctggt

SEQ ID NO: 5797850 - DNA, 25 bp, Homo sapien
gcggtcacgctgcactccgcgcctc

SEQ ID NO: 5797851 - DNA, 25 bp, Homo sapien
tgggagcagtacagtgaccgcgatg

SEQ ID NO: 5797852 - DNA, 25 bp, Homo sapien
ggccccaacctcaactgcagtatgt

SEQ ID NO: 5797853 - DNA, 25 bp, Homo sapien
gtggttcagcggtgggatccctccc

SEQ ID NO: 5797854 - DNA, 25 bp, Homo sapien
acgctgcactccgcgcctcctgtgt

SEQ ID NO: 5797855 - DNA, 25 bp, Homo sapien
ccctgaagtgggaggacagaggtcc

SEQ ID NO: 5797856 - DNA, 25 bp, Homo sapien
ctgccgcctctccgagctcttgtga

SEQ ID NO: 5797857 - DNA, 25 bp, Homo sapien
ggccttgccccgcctgcatgcctgg

SEQ ID NO: 5797858 - DNA, 25 bp, Homo sapien
caccaccccggggactcctaagctc

SEQ ID NO: 5797859 - DNA, 25 bp, Homo sapien
tggccccggacctcttctggggaac

SEQ ID NO: 5797860 - DNA, 25 bp, Homo sapien
gcagtccacgccaaccccccaaccc

SEQ ID NO: 5797861 - DNA, 25 bp, Homo sapien
tacttcggcatgaagacccgcagcc

SEQ ID NO: 5797862 - DNA, 25 bp, Homo sapien
cctggatgagctgcactgggcccca

SEQ ID NO: 5797863 - DNA, 25 bp, Homo sapien
tcctcatttcatctcaggtgtctcc

SEQ ID NO: 5797864 - DNA, 25 bp, Homo sapien
gtgccggcagagggagtgcggacag

SEQ ID NO: 5797865 - DNA, 25 bp, Homo sapien
ttgccaggatccctgaagtgggagg

SEQ ID NO: 5797866 - DNA, 25 bp, Homo sapien
aggctcgggctgccaaactccacgg

SEQ ID NO: 5797867 - DNA, 25 bp, Homo sapien
gagttcgtcaagaggcctgggggtc

SEQ ID NO: 5797868 - DNA, 25 bp, Homo sapien
gggcgagaggcgggagccggagagg

SEQ ID NO: 5797869 - DNA, 25 bp, Homo sapien
gtagctgctgagctgggcccactgg

SEQ ID NO: 5797870 - DNA, 25 bp, Homo sapien
cctgaacgctacctcggcttgccag

SEQ ID NO: 5797871 - DNA, 25 bp, Homo sapien
tggttttcctggctccatcagagcc

SEQ ID NO: 5797872 - DNA, 25 bp, Homo sapien
gagttccacgacggcctctccttcg

SEQ ID NO: 5797873 - DNA, 25 bp, Homo sapien
catgatcccccctactggcggggtg

SEQ ID NO: 5797874 - DNA, 25 bp, Homo sapien
ccccaacctcaactgcagtatgtag

SEQ ID NO: 5797875 - DNA, 25 bp, Homo sapien
cttgctgtcatcccacatagccctg

SEQ ID NO: 5797876 - DNA, 25 bp, Homo sapien
ctacttctacggacaagggctggta

SEQ ID NO: 5797877 - DNA, 25 bp, Homo sapien
actgggtgcccgtgtgctgacgcgg

SEQ ID NO: 5797878 - DNA, 25 bp, Homo sapien
ggcaggacccgggctccactgccgc

SEQ ID NO: 5797879 - DNA, 25 bp, Homo sapien
acaggctttctttgggagcagtaca

SEQ ID NO: 5797880 - DNA, 25 bp, Homo sapien
gggtatgtcggggcgctgggtgctg

SEQ ID NO: 5797881 - DNA, 25 bp, Homo sapien
aggctgccctcagcggcctccttgg

SEQ ID NO: 5797882 - DNA, 25 bp, Homo sapien
ggagcagtacagtgaccgcgatggg

SEQ ID NO: 5797883 - DNA, 25 bp, Homo sapien
ccaacgtggtaggcaatgtatggcg

SEQ ID NO: 5797884 - DNA, 25 bp, Homo sapien
ccaaccctacttttgcctgtagccc

SEQ ID NO: 5797885 - DNA, 25 bp, Homo sapien
tacaacgagcagtccacgccaaccc

SEQ ID NO: 5797886 - DNA, 25 bp, Homo sapien
tgggctgccgccctttccacggctg

SEQ ID NO: 5797887 - DNA, 25 bp, Homo sapien
tggccgtcgtggtcctgtctttggc

SEQ ID NO: 5797888 - DNA, 25 bp, Homo sapien
gcctgagctctggcgagcaggtttt

SEQ ID NO: 5797889 - DNA, 25 bp, Homo sapien
aaaggcttctggcttttgcccccag

SEQ ID NO: 5797890 - DNA, 25 bp, Homo sapien
agagctaggagtctttgcagacttt

SEQ ID NO: 5797891 - DNA, 25 bp, Homo sapien
cggcgggcggtcacgctgcactccg

SEQ ID NO: 5797892 - DNA, 25 bp, Homo sapien
atgtcaactacctggctttgggagc

SEQ ID NO: 5797893 - DNA, 25 bp, Homo sapien
ggtgaggctgaggtagctgctgagc

SEQ ID NO: 5797894 - DNA, 25 bp, Homo sapien
tggtaaagagtcgcctaaatagctg

SEQ ID NO: 5797895 - DNA, 25 bp, Homo sapien
atggctggattgggagggagcagat

SEQ ID NO: 5797896 - DNA, 25 bp, Homo sapien
tactgacccaggccctggagagcca

SEQ ID NO: 5797897 - DNA, 25 bp, Homo sapien
ggattgggagggagcagatactggg

SEQ ID NO: 5797898 - DNA, 25 bp, Homo sapien
cccccagccccttggataccagtaa

SEQ ID NO: 5797899 - DNA, 25 bp, Homo sapien
ctaccgccctcacgtctacttcggc

SEQ ID NO: 5797900 - DNA, 25 bp, Homo sapien
cttggctatgtcagtctttttccct

SEQ ID NO: 5797901 - DNA, 25 bp, Homo sapien
actggctggggctgctaaatgctga

SEQ ID NO: 5797902 - DNA, 25 bp, Homo sapien
accctctgggctggatgactacccc

SEQ ID NO: 5797903 - DNA, 25 bp, Homo sapien
ccaccactatgggcatctggagggt

SEQ ID NO: 5797904 - DNA, 25 bp, Homo sapien
gtttgaatcaggcagtgcccaggca

SEQ ID NO: 5797905 - DNA, 25 bp, Homo sapien
agctacaatgtcttctggacctcca

SEQ ID NO: 5797906 - DNA, 25 bp, Homo sapien
acggacaagggctggtattgccaga

SEQ ID NO: 5797907 - DNA, 25 bp, Homo sapien
ggtgctggcgtggtaccgtgcgcgg

SEQ ID NO: 5797908 - DNA, 25 bp, Homo sapien
gccggcagagggagtgcggacagcc

SEQ ID NO: 5797909 - DNA, 25 bp, Homo sapien
tctttgggagcagtacagtgaccgc

SEQ ID NO: 5797910 - DNA, 25 bp, Homo sapien
ggtgctgtgtggctcaatgtcaact

SEQ ID NO: 5797911 - DNA, 25 bp, Homo sapien
cgcaattcagagcatgatcccccct

SEQ ID NO: 5797912 - DNA, 25 bp, Homo sapien
gccctggggtgaatgtgaatccaga

SEQ ID NO: 5797913 - DNA, 25 bp, Homo sapien
actttgggaaccacacaaaagcagt

SEQ ID NO: 5797914 - DNA, 25 bp, Homo sapien
tatgctagaggttggtgaccctgac

SEQ ID NO: 5797915 - DNA, 25 bp, Homo sapien
tcctccgaaaggccttgccccgcct

SEQ ID NO: 5797916 - DNA, 25 bp, Homo sapien
ctttggtttacgctcccttgcagcc

SEQ ID NO: 5797917 - DNA, 25 bp, Homo sapien
gaagggacaaaggcttctggctttt

SEQ ID NO: 5797918 - DNA, 25 bp, Homo sapien
ggctggattgggagggagcagatac

SEQ ID NO: 5797919 - DNA, 25 bp, Homo sapien
accttccagctgaaggagaagggcc

SEQ ID NO: 5797920 - DNA, 25 bp, Homo sapien
gaagcccctcctcaccggactgatg

SEQ ID NO: 5797921 - DNA, 25 bp, Homo sapien
atggccagcgcaattcagagcatga

SEQ ID NO: 5797922 - DNA, 25 bp, Homo sapien
gactactgaagggagggagaggagg

SEQ ID NO: 5797923 - DNA, 25 bp, Homo sapien
ccgctggcggggacgggaccctgcc

SEQ ID NO: 5797924 - DNA, 25 bp, Homo sapien
ggcccactgccactatcttaccgct

SEQ ID NO: 5797925 - DNA, 25 bp, Homo sapien
tcgggctgccaaactccacggtgag

SEQ ID NO: 5797926 - DNA, 25 bp, Homo sapien
cggggcgctgggtgctggcgtggta

SEQ ID NO: 5797927 - DNA, 25 bp, Homo sapien
ctgagcagaaggtggacccagccct

SEQ ID NO: 5797928 - DNA, 25 bp, Homo sapien
accccggggactcctaagctcaggc

SEQ ID NO: 5797929 - DNA, 25 bp, Homo sapien
gtaccgtgcgcggcgggcggtcacg

SEQ ID NO: 5797930 - DNA, 25 bp, Homo sapien
aggagtctttgcagactttgggaac

SEQ ID NO: 5797931 - DNA, 25 bp, Homo sapien
gtctttggccctgggtatgtcgggg

SEQ ID NO: 5797932 - DNA, 25 bp, Homo sapien
actggccatggctgaagactactga

SEQ ID NO: 5797933 - DNA, 25 bp, Homo sapien
ctgaagggacaaaggcttctggctt

SEQ ID NO: 5797934 - DNA, 25 bp, Homo sapien
tggacctgcgatgttgggtggcact

SEQ ID NO: 5797935 - DNA, 25 bp, Homo sapien
gggccttaaggctcaccactgagtt

SEQ ID NO: 5797936 - DNA, 25 bp, Homo sapien
cgacagccgccatctctggagcccc

SEQ ID NO: 5797937 - DNA, 25 bp, Homo sapien
caggcaggcccactgccactatctt

SEQ ID NO: 5797938 - DNA, 25 bp, Homo sapien
cgcgatgggcgaggcatgggctgcc

SEQ ID NO: 5797939 - DNA, 25 bp, Homo sapien
gggtctgagcagaaggtggacccag

SEQ ID NO: 5797940 - DNA, 25 bp, Homo sapien
ttggtttacgctcccttgcagcctc

SEQ ID NO: 5797941 - DNA, 25 bp, Homo sapien
caacgagcagtccacgccaaccccc

SEQ ID NO: 5797942 - DNA, 25 bp, Homo sapien
tgaagactactgaagggagggagag

SEQ ID NO: 5797943 - DNA, 25 bp, Homo sapien
aagcccaggccccctcaggggctcg

SEQ ID NO: 5797944 - DNA, 25 bp, Homo sapien
agtctttttcccttgctgctgcgac

SEQ ID NO: 5797945 - DNA, 25 bp, Homo sapien
gaaggctttcaccagctggtggttc

SEQ ID NO: 5797946 - DNA, 25 bp, Homo sapien
gcaggggcagttcttgatacagcag

SEQ ID NO: 5797947 - DNA, 25 bp, Homo sapien
actgggccccagagctaggagtctt

SEQ ID NO: 5797948 - DNA, 25 bp, Homo sapien
tcggcatgaagacccgcagcccgaa

SEQ ID NO: 5797949 - DNA, 25 bp, Homo sapien
caccaggctcgggctgccaaactcc

SEQ ID NO: 5797950 - DNA, 25 bp, Homo sapien
aagcagtacagctgaagcccaggcc

SEQ ID NO: 5797951 - DNA, 25 bp, Homo sapien
gtatgtcggggcgctgggtgctggc

SEQ ID NO: 5797952 - DNA, 25 bp, Homo sapien
gcgggcggtcacgctgcactccgcg

SEQ ID NO: 5797953 - DNA, 25 bp, Homo sapien
ctggtttcagcatcggcccccaggg

SEQ ID NO: 5797954 - DNA, 25 bp, Homo sapien
gtgcccaggcaggaggaaatcaagc

SEQ ID NO: 5797955 - DNA, 25 bp, Homo sapien
tctggggaacctaccgccctcacgt

SEQ ID NO: 5797956 - DNA, 25 bp, Homo sapien
tagccctggggtgaatgtgaatcca

SEQ ID NO: 5797957 - DNA, 25 bp, Homo sapien
ggaccctgccttaccaaccttactg

SEQ ID NO: 5797958 - DNA, 25 bp, Homo sapien
ggactgatgtgggcgcagcagggca

SEQ ID NO: 5797959 - DNA, 25 bp, Homo sapien
acccttcagtaaccgagcggcacct

SEQ ID NO: 5797960 - DNA, 25 bp, Homo sapien
cccctgaacgctacctcggcttgcc

SEQ ID NO: 5797961 - DNA, 25 bp, Homo sapien
ggctacaggctttctttgggagcag

SEQ ID NO: 5797962 - DNA, 25 bp, Homo sapien
ccgtacctctttttacagcagtgcc

SEQ ID NO: 5797963 - DNA, 25 bp, Homo sapien
ccttgccccgcctgcatgcctggtt

SEQ ID NO: 5797964 - DNA, 25 bp, Homo sapien
cagccccgccgtggccccggacctc

SEQ ID NO: 5797965 - DNA, 25 bp, Homo sapien
gttttgggtcaggctgccctcagcg

SEQ ID NO: 5797966 - DNA, 25 bp, Homo sapien
aaggtggacccagccctctttccac

SEQ ID NO: 5797967 - DNA, 25 bp, Homo sapien
agaaggtggacccagccctctttcc

SEQ ID NO: 5797968 - DNA, 25 bp, Homo sapien
gccaggatccctgaagtgggaggac

SEQ ID NO: 5797969 - DNA, 25 bp, Homo sapien
cgtctacttcggcatgaagacccgc

SEQ ID NO: 5797970 - DNA, 25 bp, Homo sapien
gagcaggttttgggtcaggctgccc

SEQ ID NO: 5797971 - DNA, 25 bp, Homo sapien
atctcaggtgtctccttgctgtcat

SEQ ID NO: 5797972 - DNA, 25 bp, Homo sapien
tggaggcagcagagagcctggatga

SEQ ID NO: 5797973 - DNA, 25 bp, Homo sapien
ggagccggagaggtgaggcaggacc

SEQ ID NO: 5797974 - DNA, 25 bp, Homo sapien
gaggcctgggggtcagcacggaggg

SEQ ID NO: 5797975 - DNA, 25 bp, Homo sapien
tgcggacagccgagagggcggctcg

SEQ ID NO: 5797976 - DNA, 25 bp, Homo sapien
gctgatggctggattgggagggagc

SEQ ID NO: 5797977 - DNA, 25 bp, Homo sapien
tgaccgcgatgggcgaggcatgggc

SEQ ID NO: 5797978 - DNA, 25 bp, Homo sapien
cagcggcctccttggtggaattggc

SEQ ID NO: 5797979 - DNA, 25 bp, Homo sapien
gctggaccccacctcatcccgcctt

SEQ ID NO: 5797980 - DNA, 25 bp, Homo sapien
tgcagcctccagctccttttatggc

SEQ ID NO: 5797981 - DNA, 25 bp, Homo sapien
taattcaaaccttcctcatttcatc

SEQ ID NO: 5797982 - DNA, 25 bp, Homo sapien
tggcgagcaggttttgggtcaggct

SEQ ID NO: 5797983 - DNA, 25 bp, Homo sapien
ggaaccacacaaaagcagtacagct

SEQ ID NO: 5797984 - DNA, 25 bp, Homo sapien
gaggtccaagtgggcaagggcaggg

SEQ ID NO: 5797985 - DNA, 25 bp, Homo sapien
gtgtgggtccctatggctgggagtt

SEQ ID NO: 5797986 - DNA, 25 bp, Homo sapien
agttcttgatacagcaggtgaccct

SEQ ID NO: 5797987 - DNA, 25 bp, Homo sapien
aaagagtcgcctaaatagctggttt

SEQ ID NO: 5797988 - DNA, 25 bp, Homo sapien
gccagggcgagaggcgggagccgga

SEQ ID NO: 5797989 - DNA, 25 bp, Homo sapien
cccccctactggcggggtgctgtgt

SEQ ID NO: 5797990 - DNA, 25 bp, Homo sapien
gacatcggggtggaagggtctgagc

SEQ ID NO: 5797991 - DNA, 25 bp, Homo sapien
tgtgctgacgcggctggcagagcat

SEQ ID NO: 5797992 - DNA, 25 bp, Homo sapien
aggctgaggtagctgctgagctggg

SEQ ID NO: 5797993 - DNA, 25 bp, Homo sapien
gtacctctttttacagcagtgccct

SEQ ID NO: 5797994 - DNA, 25 bp, Homo sapien
cccactgccactatcttaccgctgg

SEQ ID NO: 5797995 - DNA, 25 bp, Homo sapien
ctcatttcatctcaggtgtctcctt

SEQ ID NO: 5797996 - DNA, 25 bp, Homo sapien
tcggcccccaggggcctcccctgaa

SEQ ID NO: 5797997 - DNA, 25 bp, Homo sapien
ggtagcgttcaggggaggcccctgg

SEQ ID NO: 5797998 - DNA, 25 bp, Homo sapien
cgaacgagcccctgagggggcctgg

SEQ ID NO: 5797999 - DNA, 25 bp, Homo sapien
cacgacggccagagccactcctcca

SEQ ID NO: 5798000 - DNA, 25 bp, Homo sapien
cccttccaccccgatgtctggcaat

SEQ ID NO: 5798001 - DNA, 25 bp, Homo sapien
agtcactctccagctccagtcccct

SEQ ID NO: 5798002 - DNA, 25 bp, Homo sapien
gtggtggagtgctcccaaagccagg

SEQ ID NO: 5798003 - DNA, 25 bp, Homo sapien
aatccagccatcagcatttagcagc

SEQ ID NO: 5798004 - DNA, 25 bp, Homo sapien
caccaaggaggccgctgagggcagc

SEQ ID NO: 5798005 - DNA, 25 bp, Homo sapien
tagctctggggcccagtgcagctca

SEQ ID NO: 5798006 - DNA, 25 bp, Homo sapien
ccagtcttggcagggcttgatttcc

SEQ ID NO: 5798007 - DNA, 25 bp, Homo sapien
cagccgtggaaagggcggcagccca

SEQ ID NO: 5798008 - DNA, 25 bp, Homo sapien
ggagcccgggtcctgcctcacctct

SEQ ID NO: 5798009 - DNA, 25 bp, Homo sapien
catgagtgtcttggctcccctcctc

SEQ ID NO: 5798010 - DNA, 25 bp, Homo sapien
agtgggcccagctcagcagctacct

SEQ ID NO: 5798011 - DNA, 25 bp, Homo sapien
tgcctaccacgttggcacggagctc

SEQ ID NO: 5798012 - DNA, 25 bp, Homo sapien
cgccatacattgcctaccacgttgg

SEQ ID NO: 5798013 - DNA, 25 bp, Homo sapien
cagcacccagcgccccgacataccc

SEQ ID NO: 5798014 - DNA, 25 bp, Homo sapien
gcggcagtggagcccgggtcctgcc

SEQ ID NO: 5798015 - DNA, 25 bp, Homo sapien
aaggtcttctcaaagcgctctctaa

SEQ ID NO: 5798016 - DNA, 25 bp, Homo sapien
ggatgacagcaaggagacacctgag

SEQ ID NO: 5798017 - DNA, 25 bp, Homo sapien
tcctctccctcccttcagtagtctt

SEQ ID NO: 5798018 - DNA, 25 bp, Homo sapien
ggatgaggtggggtccagcagtcgc

SEQ ID NO: 5798019 - DNA, 25 bp, Homo sapien
ggcagggtcccgtccccgccagcgg

SEQ ID NO: 5798020 - DNA, 25 bp, Homo sapien
gtaaggcagggtcccgtccccgcca

SEQ ID NO: 5798021 - DNA, 25 bp, Homo sapien
tactgaagggtgtgaagcccggggg

SEQ ID NO: 5798022 - DNA, 25 bp, Homo sapien
agaatgaccgggagggcactgctgt

SEQ ID NO: 5798023 - DNA, 25 bp, Homo sapien
gtgaagcccgggggtagtcatccag

SEQ ID NO: 5798024 - DNA, 25 bp, Homo sapien
tcgggcctcatcccccagtatctgc

SEQ ID NO: 5798025 - DNA, 25 bp, Homo sapien
tggcgtggactgctcgttgtactag

SEQ ID NO: 5798026 - DNA, 25 bp, Homo sapien
ccttaaggccccatcctggatgtgt

SEQ ID NO: 5798027 - DNA, 25 bp, Homo sapien
accaccgtccggttagcgacacctg

SEQ ID NO: 5798028 - DNA, 25 bp, Homo sapien
gccgctgagggcagcctgacccaaa

SEQ ID NO: 5798029 - DNA, 25 bp, Homo sapien
cttcagccatggccagtaagacaag

SEQ ID NO: 5798030 - DNA, 25 bp, Homo sapien
ctgaggtccgcgtcacaagagctcg

SEQ ID NO: 5798031 - DNA, 25 bp, Homo sapien
gggctacaggcaaaagtagggttgg

SEQ ID NO: 5798032 - DNA, 25 bp, Homo sapien
ccacggcggggctggaggagtcggc

SEQ ID NO: 5798033 - DNA, 25 bp, Homo sapien
aaggcagggtcccgtccccgccagc

SEQ ID NO: 5798034 - DNA, 25 bp, Homo sapien
cctggtgaggaccctccagatgccc

SEQ ID NO: 5798035 - DNA, 25 bp, Homo sapien
aaagccaggtagttgacattgagcc

SEQ ID NO: 5798036 - DNA, 25 bp, Homo sapien
agctggtgaaagccttcatcccaaa

SEQ ID NO: 5798037 - DNA, 25 bp, Homo sapien
gggaattttcagggtcacctgctgt

SEQ ID NO: 5798038 - DNA, 25 bp, Homo sapien
agaatgtccagcaggggcccaaggc

SEQ ID NO: 5798039 - DNA, 25 bp, Homo sapien
ttaaggccccatcctggatgtgttg

SEQ ID NO: 5798040 - DNA, 25 bp, Homo sapien
cccatagtggtggagtgctcccaaa

SEQ ID NO: 5798041 - DNA, 25 bp, Homo sapien
cggagtgcagcgtgaccgcccgccg

SEQ ID NO: 5798042 - DNA, 25 bp, Homo sapien
ttgacattgagccacacagcacccc

SEQ ID NO: 5798043 - DNA, 25 bp, Homo sapien
ggttagcgacacctgccagccagcg

SEQ ID NO: 5798044 - DNA, 25 bp, Homo sapien
agccgccctctcggctgtccgcact

SEQ ID NO: 5798045 - DNA, 25 bp, Homo sapien
aaatgggaattttcagggtcacctg

SEQ ID NO: 5798046 - DNA, 25 bp, Homo sapien
cagtaaggttggtaaggcagggtcc

SEQ ID NO: 5798047 - DNA, 25 bp, Homo sapien
ggaggaaagccaagtcgtcagggtc

SEQ ID NO: 5798048 - DNA, 25 bp, Homo sapien
ctgagcttaggagtccccggggtgg

SEQ ID NO: 5798049 - DNA, 25 bp, Homo sapien
ctctatggaaatgggaattttcagg

SEQ ID NO: 5798050 - DNA, 25 bp, Homo sapien
gcctggtactggcgccatacattgc

SEQ ID NO: 5798051 - DNA, 25 bp, Homo sapien
ggctagaatgtccagcaggggccca

SEQ ID NO: 5798052 - DNA, 25 bp, Homo sapien
agccactcctccagccgtgctacgc

SEQ ID NO: 5798053 - DNA, 25 bp, Homo sapien
ctatggaaatgggaattttcagggt

SEQ ID NO: 5798054 - DNA, 25 bp, Homo sapien
agacgtgagggcggtaggttcccca

SEQ ID NO: 5798055 - DNA, 25 bp, Homo sapien
cagtcgcagcagcaagggaaaaaga

SEQ ID NO: 5798056 - DNA, 25 bp, Homo sapien
gaggaaggtttgaattactggtatc

SEQ ID NO: 5798057 - DNA, 25 bp, Homo sapien
agcccttgtccgtagaagtagccaa

SEQ ID NO: 5798058 - DNA, 25 bp, Homo sapien
caagggaaaaagactgacatagcca

SEQ ID NO: 5798059 - DNA, 25 bp, Homo sapien
ttctcaaagcgctctctaaagcctt

SEQ ID NO: 5798060 - DNA, 25 bp, Homo sapien
ggtcttctcaaagcgctctctaaag

SEQ ID NO: 5798061 - DNA, 25 bp, Homo sapien
aagcgctctctaaagccttcagcat

SEQ ID NO: 5798062 - DNA, 25 bp, Homo sapien
gctgcgcccacatcagtccggtgag

SEQ ID NO: 5798063 - DNA, 25 bp, Homo sapien
cctcacccagatgctctgccagccg

SEQ ID NO: 5798064 - DNA, 25 bp, Homo sapien
agcctgtagcctggtactggcgcca

SEQ ID NO: 5798065 - DNA, 25 bp, Homo sapien
atgccgaagtagacgtgagggcggt

SEQ ID NO: 5798066 - DNA, 25 bp, Homo sapien
gctgtcggctagaatgtccagcagg

SEQ ID NO: 5798067 - DNA, 25 bp, Homo sapien
ctgtccgcactccctctgccggcac

SEQ ID NO: 5798068 - DNA, 25 bp, Homo sapien
gacaggaccacgacggccagagcca

SEQ ID NO: 5798069 - DNA, 25 bp, Homo sapien
cactgaggtccgcgtcacaagagct

SEQ ID NO: 5798070 - DNA, 25 bp, Homo sapien
gaggaccctccagatgcccatagtg

SEQ ID NO: 5798071 - DNA, 25 bp, Homo sapien
ttggacctctgtcctcccacttcag

SEQ ID NO: 5798072 - DNA, 25 bp, Homo sapien
tcccaaaggaagcctcgtgggaaga

SEQ ID NO: 5798073 - DNA, 25 bp, Homo sapien
attgtagctgagtcctgaggctcta

SEQ ID NO: 5798074 - DNA, 25 bp, Homo sapien
atgaggtggggtccagcagtcgcag

SEQ ID NO: 5798075 - DNA, 25 bp, Homo sapien
tggcaataccagcccttgtccgtag

SEQ ID NO: 5798076 - DNA, 25 bp, Homo sapien
cctcgtgggaagaatgaccgggagg

SEQ ID NO: 5798077 - DNA, 25 bp, Homo sapien
taaaaggagctggaggctgcaaggg

SEQ ID NO: 5798078 - DNA, 25 bp, Homo sapien
ctgctccctcccaatccagccatca

SEQ ID NO: 5798079 - DNA, 25 bp, Homo sapien
agcatttagcagccccagccagtgg

SEQ ID NO: 5798080 - DNA, 25 bp, Homo sapien
atccaaggggctgggggcaaaagcc

SEQ ID NO: 5798081 - DNA, 25 bp, Homo sapien
tcctggcaagccgaggtagcgttca

SEQ ID NO: 5798082 - DNA, 25 bp, Homo sapien
ggagacacctgagatgaaatgagga

SEQ ID NO: 5798083 - DNA, 25 bp, Homo sapien
cagtggtgagccttaaggccccatc

SEQ ID NO: 5798084 - DNA, 25 bp, Homo sapien
tccagcccagagggtagggtcttgg

SEQ ID NO: 5798085 - DNA, 25 bp, Homo sapien
cccggggtggtgccctgctgcgccc

SEQ ID NO: 5798086 - DNA, 25 bp, Homo sapien
ctgcctccagtgaggcagccagtgg

SEQ ID NO: 5798087 - DNA, 25 bp, Homo sapien
ttagcgacacctgccagccagcgcc

SEQ ID NO: 5798088 - DNA, 25 bp, Homo sapien
gtaagatagtggcagtgggcctgcc

SEQ ID NO: 5798089 - DNA, 25 bp, Homo sapien
catcagtccggtgaggaggggcttc

SEQ ID NO: 5798090 - DNA, 25 bp, Homo sapien
acgtgtgcctgagcttaggagtccc

SEQ ID NO: 5798091 - DNA, 25 bp, Homo sapien
aagagcatctacatactgcagttga

SEQ ID NO: 5798092 - DNA, 25 bp, Homo sapien
agtcgtcagggtcaccaacctctag

SEQ ID NO: 5798093 - DNA, 25 bp, Homo sapien
acttcagggatcctggcaagccgag

SEQ ID NO: 5798094 - DNA, 25 bp, Homo sapien
aaaggagctggaggctgcaagggag

SEQ ID NO: 5798095 - DNA, 25 bp, Homo sapien
tcgtggaactcccagccatagggac

SEQ ID NO: 5798096 - DNA, 25 bp, Homo sapien
gaactgcccctgcccttgcccactt

SEQ ID NO: 5798097 - DNA, 25 bp, Homo sapien
ccctccgtgctgacccccaggcctc

SEQ ID NO: 5798098 - DNA, 25 bp, Homo sapien
tacctcagcctcacccagatgctct

SEQ ID NO: 5798099 - DNA, 25 bp, Homo sapien
tagcctggtactggcgccatacatt

SEQ ID NO: 5798100 - DNA, 25 bp, Homo sapien
tccggctcccgcctctcgccctggc

SEQ ID NO: 5798101 - DNA, 25 bp, Homo sapien
ttcagtaaggttggtaaggcagggt

SEQ ID NO: 5798102 - DNA, 25 bp, Homo sapien
agtgccacccaacatcgcaggtcca

SEQ ID NO: 5798103 - DNA, 25 bp, Homo sapien
aaaccagctatttaggcgactcttt

SEQ ID NO: 5798104 - DNA, 25 bp, Homo sapien
gagccacacagcaccccgccagtag

SEQ ID NO: 5798105 - DNA, 25 bp, Homo sapien
gggtgtgaagcccgggggtagtcat

SEQ ID NO: 5798106 - DNA, 25 bp, Homo sapien
tttaccatctctgtcagcaggggca

SEQ ID NO: 5798107 - DNA, 25 bp, Homo sapien
aagagctcggagaggcggcagtgga

SEQ ID NO: 5798108 - DNA, 25 bp, Homo sapien
cagatgcccatagtggtggagtgct

SEQ ID NO: 5798109 - DNA, 25 bp, Homo sapien
ctgcgggtcttcatgccgaagtaga

SEQ ID NO: 5798110 - DNA, 25 bp, Homo sapien
catcccaaaggaagcctcgtgggaa

SEQ ID NO: 5798111 - DNA, 25 bp, Homo sapien
ctcccttcagtagtcttcagccatg

SEQ ID NO: 5798112 - DNA, 25 bp, Homo sapien
gtggaactcccagccatagggaccc

SEQ ID NO: 5798113 - DNA, 25 bp, Homo sapien
tggttcccaaagtctgcaaagactc

SEQ ID NO: 5798114 - DNA, 25 bp, Homo sapien
ggcagtgggcctgcctggctctgat

SEQ ID NO: 5798115 - DNA, 25 bp, Homo sapien
gtcagggtcaccaacctctagcata

SEQ ID NO: 5798116 - DNA, 25 bp, Homo sapien
tcgcggtcactgtactgctcccaaa

SEQ ID NO: 5798117 - DNA, 25 bp, Homo sapien
cctctccggctcccgcctctcgccc

SEQ ID NO: 5798118 - DNA, 25 bp, Homo sapien
ccatgcctcgcccatcgcggtcact

SEQ ID NO: 5798119 - DNA, 25 bp, Homo sapien
gcagcaagggaaaaagactgacata

SEQ ID NO: 5798120 - DNA, 25 bp, Homo sapien
cgtccccgccagcggtaagatagtg

SEQ ID NO: 5798121 - DNA, 25 bp, Homo sapien
acatactgcagttgaggttggggcc

SEQ ID NO: 5798122 - DNA, 25 bp, Homo sapien
ctgcccttgcccacttggacctctg

SEQ ID NO: 5798123 - DNA, 25 bp, Homo sapien
cagcgccccgacatacccagggcca

SEQ ID NO: 5798124 - DNA, 25 bp, Homo sapien
gccaattccaccaaggaggccgctg

SEQ ID NO: 5798125 - DNA, 25 bp, Homo sapien
tgcagctcatccaggctctctgctg

SEQ ID NO: 5798126 - DNA, 25 bp, Homo sapien
ccaaggaggccgctgagggcagcct

SEQ ID NO: 5798127 - DNA, 25 bp, Homo sapien
actgcctgccagtcttggcagggct

SEQ ID NO: 5798128 - DNA, 25 bp, Homo sapien
gagtgcagcgtgaccgcccgccgcg

SEQ ID NO: 5798129 - DNA, 25 bp, Homo sapien
ggtgaaagccttcatcccaaaggaa

SEQ ID NO: 5798130 - DNA, 25 bp, Homo sapien
gcacacgggcacccagtgccaccca

SEQ ID NO: 5798131 - DNA, 25 bp, Homo sapien
tgagccttaaggccccatcctggat

SEQ ID NO: 5798132 - DNA, 25 bp, Homo sapien
acacagcaccccgccagtagggggg

SEQ ID NO: 5798133 - DNA, 25 bp, Homo sapien
atctacatactgcagttgaggttgg

SEQ ID NO: 5798134 - DNA, 25 bp, Homo sapien
tgagtcctgaggctctacagtcact

SEQ ID NO: 5798135 - DNA, 25 bp, Homo sapien
gagccaggaaaaccaggcatgcagg

SEQ ID NO: 5798136 - DNA, 25 bp, Homo sapien
gaattttcagggtcacctgctgtat

SEQ ID NO: 5798137 - DNA, 25 bp, Homo sapien
aaaggaagcctcgtgggaagaatga

SEQ ID NO: 5798138 - DNA, 25 bp, Homo sapien
gttactgaagggtgtgaagcccggg

SEQ ID NO: 5798139 - DNA, 25 bp, Homo sapien
gcctcgcccatcgcggtcactgtac

SEQ ID NO: 5798140 - DNA, 25 bp, Homo sapien
gccatcctggcactgaggtccgcgt

SEQ ID NO: 5798141 - DNA, 25 bp, Homo sapien
tctaaagccttcagcatggctctcc

SEQ ID NO: 5798142 - DNA, 25 bp, Homo sapien
tcccaaagccaggtagttgacattg

SEQ ID NO: 5798143 - DNA, 25 bp, Homo sapien
atcctggatgtgttggcgcccgaag

SEQ ID NO: 5798144 - DNA, 25 bp, Homo sapien
actgcttttgtgtggttcccaaagt

SEQ ID NO: 5798145 - DNA, 25 bp, Homo sapien
cgtggaaagggcggcagcccatgcc

SEQ ID NO: 5798146 - DNA, 25 bp, Homo sapien
gggccaaagacaggaccacgacggc

SEQ ID NO: 5798147 - DNA, 25 bp, Homo sapien
ggcgggatgaggtggggtccagcag

SEQ ID NO: 5798148 - DNA, 25 bp, Homo sapien
cgaagtagacgtgagggcggtaggt

SEQ ID NO: 5798149 - DNA, 25 bp, Homo sapien
catggctctccagggcctgggtcag

SEQ ID NO: 5798150 - DNA, 25 bp, Homo sapien
cagcagcaagggaaaaagactgaca

SEQ ID NO: 5798151 - DNA, 25 bp, Homo sapien
cagccatagggacccacaccgtccc

SEQ ID NO: 5798152 - DNA, 25 bp, Homo sapien
tccgtagaagtagccaattccacca

SEQ ID NO: 5798153 - DNA, 25 bp, Homo sapien
agttgacattgagccacacagcacc

SEQ ID NO: 5798154 - DNA, 25 bp, Homo sapien
tcccgggtgagggagggatcccacc

SEQ ID NO: 5798155 - DNA, 25 bp, Homo sapien
ccatacattgcctaccacgttggca

SEQ ID NO: 5798156 - DNA, 25 bp, Homo sapien
tctgccagccgcgtcagcacacggg

SEQ ID NO: 5798157 - DNA, 25 bp, Homo sapien
catagggacccacaccgtccccctg

SEQ ID NO: 5798158 - DNA, 25 bp, Homo sapien
cagcaggggcagtcctgggttggag

SEQ ID NO: 5798159 - DNA, 25 bp, Homo sapien
acggcggggctggaggagtcggcag

SEQ ID NO: 5798160 - DNA, 25 bp, Homo sapien
ctggcgaccaccgtccggttagcga

SEQ ID NO: 5798161 - DNA, 25 bp, Homo sapien
ctcggttactgaagggtgtgaagcc

SEQ ID NO: 5798162 - DNA, 25 bp, Homo sapien
aggtagttgacattgagccacacag

SEQ ID NO: 5798163 - DNA, 25 bp, Homo sapien
gggtcagtagactgcctgccagtct

SEQ ID NO: 5798164 - DNA, 25 bp, Homo sapien
tttaggcgactctttaccatctctg

SEQ ID NO: 5798165 - DNA, 25 bp, Homo sapien
gccctctcggctgtccgcactccct

SEQ ID NO: 5798166 - DNA, 25 bp, Homo sapien
actggtatccaaggggctgggggca

SEQ ID NO: 5798167 - DNA, 25 bp, Homo sapien
tgcccctgcccttgcccacttggac

SEQ ID NO: 5798168 - DNA, 25 bp, Homo sapien
ggaggcccctgggggccgatgctga

SEQ ID NO: 5798169 - DNA, 25 bp, Homo sapien
aggtccaggtgccgctcggttactg

SEQ ID NO: 5798170 - DNA, 25 bp, Homo sapien
caccccgccagtaggggggatcatg

SEQ ID NO: 5798171 - DNA, 25 bp, Homo sapien
ttggcgcccgaaggagaggccgtcg

SEQ ID NO: 5798172 - DNA, 25 bp, Homo sapien
cgacggccagagccactcctccagc

SEQ ID NO: 5798173 - DNA, 25 bp, Homo sapien
tctcggctgtccgcactccctctgc

SEQ ID NO: 5798174 - DNA, 25 bp, Homo sapien
gcttgatttcctcctgcctgggcac

SEQ ID NO: 5798175 - DNA, 25 bp, Homo sapien
gctcagcagctacctcagcctcacc

SEQ ID NO: 5798176 - DNA, 25 bp, Homo sapien
cctgctcgccagagctcaggccctt

SEQ ID NO: 5798177 - DNA, 25 bp, Homo sapien
tcactgtactgctcccaaagaaagc

SEQ ID NO: 5798178 - DNA, 25 bp, Homo sapien
gcgtaaaccaaaggggctccagaga

SEQ ID NO: 5798179 - DNA, 25 bp, Homo sapien
ccagatgctctgccagccgcgtcag

SEQ ID NO: 5798180 - DNA, 25 bp, Homo sapien
caaacacaaactctatggaaatggg

SEQ ID NO: 5798181 - DNA, 25 bp, Homo sapien
gcacccagcgccccgacatacccag

SEQ ID NO: 5798182 - DNA, 25 bp, Homo sapien
ctccagtgaggcagccagtgggccc

SEQ ID NO: 5798183 - DNA, 25 bp, Homo sapien
cagcacacgggcacccagtgccacc

SEQ ID NO: 5798184 - DNA, 25 bp, Homo sapien
gcgcacggtaccacgccagcaccca

SEQ ID NO: 5798185 - DNA, 25 bp, Homo sapien
cctcccacttcagggatcctggcaa

SEQ ID NO: 5798186 - DNA, 25 bp, Homo sapien
gggcctcatcccccagtatctgctc

SEQ ID NO: 5798187 - DNA, 25 bp, Homo sapien
ccgatgtctggcaataccagccctt

SEQ ID NO: 5798188 - DNA, 25 bp, Homo sapien
cgctgagggcagcctgacccaaaac

SEQ ID NO: 5798189 - DNA, 25 bp, Homo sapien
agccgcgtcagcacacgggcaccca

SEQ ID NO: 5798190 - DNA, 25 bp, Homo sapien
gcaggggcccaaggcgggatgaggt

SEQ ID NO: 5798191 - DNA, 25 bp, Homo sapien
cggctcccgcctctcgccctggcga

SEQ ID NO: 5798192 - DNA, 25 bp, Homo sapien
cgacacctgccagccagcgcctgcg

SEQ ID NO: 5798193 - DNA, 25 bp, Homo sapien
tctggattcacattcaccccagggc

SEQ ID NO: 5798194 - DNA, 25 bp, Homo sapien
caggggaggcccctgggggccgatg

SEQ ID NO: 5798195 - DNA, 25 bp, Homo sapien
agccgtgctacgcggcccgccgccc

SEQ ID NO: 5798196 - DNA, 25 bp, Homo sapien
cgcccacatcagtccggtgaggagg

SEQ ID NO: 5798197 - DNA, 25 bp, Homo sapien
attgcctaccacgttggcacggagc

SEQ ID NO: 5798198 - DNA, 25 bp, Homo sapien
gaaagccaagtcgtcagggtcacca

SEQ ID NO: 5798199 - DNA, 25 bp, Homo sapien
caaaggggctccagagatggcggct

SEQ ID NO: 5798200 - DNA, 25 bp, Homo sapien
aaggggctccagagatggcggctgt

SEQ ID NO: 5798201 - DNA, 25 bp, Homo sapien
ctggctctgatggagccaggaaaac

SEQ ID NO: 5798202 - DNA, 25 bp, Homo sapien
ccatctctgtcagcaggggcagtcc

SEQ ID NO: 5798203 - DNA, 25 bp, Homo sapien
cagttgaggttggggccgacccacc

SEQ ID NO: 5798204 - DNA, 25 bp, Homo sapien
caccagctggtgaaagccttcatcc

SEQ ID NO: 5798205 - DNA, 25 bp, Homo sapien
gatcctggcaagccgaggtagcgtt

SEQ ID NO: 5798206 - DNA, 25 bp, Homo sapien
gggttggggggttggcgtggactgc

SEQ ID NO: 5798207 - DNA, 25 bp, Homo sapien
tttgtgtggttcccaaagtctgcaa

SEQ ID NO: 5798208 - DNA, 25 bp, Homo sapien
ggcactgctgtaaaaagaggtacgg

SEQ ID NO: 5798209 - DNA, 25 bp, Homo sapien
ggcccagctcagcagctacctcagc

SEQ ID NO: 5798210 - DNA, 25 bp, Homo sapien
tagcagccccagccagtggccaagg

SEQ ID NO: 5798211 - DNA, 25 bp, Homo sapien
ctacagtcactctccagctccagtc

SEQ ID NO: 5798212 - DNA, 25 bp, Homo sapien
gcagccccagccagtggccaagggc

SEQ ID NO: 5798213 - DNA, 25 bp, Homo sapien
cgctgaaccaccagctggtgaaagc

SEQ ID NO: 5798214 - DNA, 25 bp, Homo sapien
tgcctgccagtcttggcagggcttg

SEQ ID NO: 5798215 - DNA, 25 bp, Homo sapien
tggatgtgttggcgcccgaaggaga

SEQ ID NO: 5798216 - DNA, 25 bp, Homo sapien
gtggcatgagtgtcttggctcccct

SEQ ID NO: 5798217 - DNA, 25 bp, Homo sapien
tttcagggtcacctgctgtatcaag

SEQ ID NO: 5798218 - DNA, 25 bp, Homo sapien
gggcctgggtcagtagactgcctgc

SEQ ID NO: 5798219 - DNA, 25 bp, Homo sapien
agcggtaagatagtggcagtgggcc

SEQ ID NO: 5798220 - DNA, 25 bp, Homo sapien
gaagcccgggggtagtcatccagcc

SEQ ID NO: 5798221 - DNA, 25 bp, Homo sapien
acaagagctcggagaggcggcagtg

SEQ ID NO: 5798222 - DNA, 25 bp, Homo sapien
actcctccagccgtgctacgcggcc

SEQ ID NO: 5798223 - DNA, 25 bp, Homo sapien
ggcactgcgcggcgccgccgctcgc

SEQ ID NO: 5798224 - DNA, 25 bp, Homo sapien
gatcccaccgctgaaccaccagctg

SEQ ID NO: 5798225 - DNA, 25 bp, Homo sapien
cagaagacattgtagctgagtcctg

SEQ ID NO: 5798226 - DNA, 25 bp, Homo sapien
cgtcgtggaactcccagccataggg

SEQ ID NO: 5798227 - DNA, 25 bp, Homo sapien
aggaagcctcgtgggaagaatgacc

SEQ ID NO: 5798228 - DNA, 25 bp, Homo sapien
ctctgtcagcaggggcagtcctggg

SEQ ID NO: 5798229 - DNA, 25 bp, Homo sapien
ggccagagccactcctccagccgtg

SEQ ID NO: 5798230 - DNA, 25 bp, Homo sapien
actgctcgttgtactaggaattctg

SEQ ID NO: 5798231 - DNA, 25 bp, Homo sapien
ccagtggccaagggcttcccgggtg

SEQ ID NO: 5798232 - DNA, 25 bp, Homo sapien
gtactgcttttgtgtggttcccaaa

SEQ ID NO: 5798233 - DNA, 25 bp, Homo sapien
ttggcagggcttgatttcctcctgc

SEQ ID NO: 5798234 - DNA, 25 bp, Homo sapien
gaggaggggcttcgggctgcgggtc

SEQ ID NO: 5798235 - DNA, 25 bp, Homo sapien
gacattgagccacacagcaccccgc

SEQ ID NO: 5798236 - DNA, 25 bp, Homo sapien
ctacatactgcagttgaggttgggg

SEQ ID NO: 5798237 - DNA, 25 bp, Homo sapien
caccccgatgtctggcaataccagc

SEQ ID NO: 5798238 - DNA, 25 bp, Homo sapien
ctcctagctctggggcccagtgcag

SEQ ID NO: 5798239 - DNA, 25 bp, Homo sapien
cctcagcctcacccagatgctctgc

SEQ ID NO: 5798240 - DNA, 25 bp, Homo sapien
tggctctccagggcctgggtcagta

SEQ ID NO: 5798241 - DNA, 25 bp, Homo sapien
tggggccgacccaccacccgaacga

SEQ ID NO: 5798242 - DNA, 25 bp, Homo sapien
ggcagtggagcccgggtcctgcctc

SEQ ID NO: 5798243 - DNA, 25 bp, Homo sapien
gcaataccagcccttgtccgtagaa

SEQ ID NO: 5798244 - DNA, 25 bp, Homo sapien
ggccacggcggggctggaggagtcg

SEQ ID NO: 5798245 - DNA, 25 bp, Homo sapien
atgcctcgcccatcgcggtcactgt

SEQ ID NO: 5798246 - DNA, 25 bp, Homo sapien
gtggagcccgggtcctgcctcacct

SEQ ID NO: 5798247 - DNA, 25 bp, Homo sapien
tgggcactgcctgattcaaacacaa

SEQ ID NO: 5798248 - DNA, 25 bp, Homo sapien
ggtttgaattactggtatccaaggg

SEQ ID NO: 5798249 - DNA, 25 bp, Homo sapien
tggaaagggcggcagcccatgcctc

SEQ ID NO: 5798250 - DNA, 25 bp, Homo sapien
tgcagttgaggttggggccgaccca

SEQ ID NO: 5798251 - DNA, 25 bp, Homo sapien
gctcggagaggcggcagtggagccc

SEQ ID NO: 5798252 - DNA, 25 bp, Homo sapien
tgacatagccaagagcatctacata

SEQ ID NO: 5798253 - DNA, 25 bp, Homo sapien
aaggtttgaattactggtatccaag

SEQ ID NO: 5798254 - DNA, 25 bp, Homo sapien
aggggcttcgggctgcgggtcttca

SEQ ID NO: 5798255 - DNA, 25 bp, Homo sapien
ggtcctgcctcacctctccggctcc

SEQ ID NO: 5798256 - DNA, 25 bp, Homo sapien
gcgtcagcacacgggcacccagtgc

SEQ ID NO: 5798257 - DNA, 25 bp, Homo sapien
agagctcaggcccttctccttcagc

SEQ ID NO: 5798258 - DNA, 25 bp, Homo sapien
catttagcagccccagccagtggcc

SEQ ID NO: 5798259 - DNA, 25 bp, Homo sapien
tctgctgcctccagtgaggcagcca

SEQ ID NO: 5798260 - DNA, 25 bp, Homo sapien
agggaaaaagactgacatagccaag

SEQ ID NO: 5798261 - DNA, 25 bp, Homo sapien
gaggtccggggccacggcggggctg

SEQ ID NO: 5798262 - DNA, 25 bp, Homo sapien
aggagctggaggctgcaagggagcg

SEQ ID NO: 5798263 - DNA, 25 bp, Homo sapien
tttagcagccccagccagtggccaa

SEQ ID NO: 5798264 - DNA, 25 bp, Homo sapien
gcgggtcttcatgccgaagtagacg

SEQ ID NO: 5798265 - DNA, 25 bp, Homo sapien
gccgtggaaagggcggcagcccatg

SEQ ID NO: 5798266 - DNA, 25 bp, Homo sapien
gacgaactcagtggtgagccttaag

SEQ ID NO: 5798267 - DNA, 25 bp, Homo sapien
ccgtggagtttggcagcccgagcct

SEQ ID NO: 5798268 - DNA, 25 bp, Homo sapien
agagatggcggctgtcggctagaat

SEQ ID NO: 5798269 - DNA, 25 bp, Homo sapien
cagaagaggtccggggccacggcgg

SEQ ID NO: 5798270 - DNA, 25 bp, Homo sapien
cccgagcctggtgaggaccctccag

SEQ ID NO: 5798271 - DNA, 25 bp, Homo sapien
tacccagggccaaagacaggaccac

SEQ ID NO: 5798272 - DNA, 25 bp, Homo sapien
gtgagggcggtaggttccccagaag

SEQ ID NO: 5798273 - DNA, 25 bp, Homo sapien
gaagacattgtagctgagtcctgag

SEQ ID NO: 5798274 - DNA, 25 bp, Homo sapien
caaagcgctctctaaagccttcagc

SEQ ID NO: 5798275 - DNA, 25 bp, Homo sapien
ggaccctccagatgcccatagtggt

SEQ ID NO: 5798276 - DNA, 25 bp, Homo sapien
caaggcctttcggaggaaagccaag

SEQ ID NO: 5798277 - DNA, 25 bp, Homo sapien
gctggaggagtcggcaggcaacaca

SEQ ID NO: 5798278 - DNA, 25 bp, Homo sapien
gctggccataaaaggagctggaggc

SEQ ID NO: 5798279 - DNA, 25 bp, Homo sapien
cagggatcctggcaagccgaggtag

SEQ ID NO: 5798280 - DNA, 25 bp, Homo sapien
gctctctgctgcctccagtgaggca

SEQ ID NO: 5798281 - DNA, 25 bp, Homo sapien
gattcacattcaccccagggctatg

SEQ ID NO: 5798282 - DNA, 25 bp, Homo sapien
gcagcctgacccaaaacctgctcgc

SEQ ID NO: 5798283 - DNA, 25 bp, Homo sapien
ggaaagagggctgggtccaccttct

SEQ ID NO: 5798284 - DNA, 25 bp, Homo sapien
ccagtgcagctcatccaggctctct

SEQ ID NO: 5798285 - DNA, 25 bp, Homo sapien
tgtccgtagaagtagccaattccac

SEQ ID NO: 5798286 - DNA, 25 bp, Homo sapien
ccagtgccacccaacatcgcaggtc

SEQ ID NO: 5798287 - DNA, 25 bp, Homo sapien
tcggctgtccgcactccctctgccg

SEQ ID NO: 5798288 - DNA, 25 bp, Homo sapien
cagaagcctttgtcccttcagagcc

SEQ ID NO: 5798289 - DNA, 25 bp, Homo sapien
agcctgacccaaaacctgctcgcca

SEQ ID NO: 5798290 - DNA, 25 bp, Homo sapien
tgttggcgcccgaaggagaggccgt

SEQ ID NO: 5798291 - DNA, 25 bp, Homo sapien
tctagcatatgggctacaggcaaaa

SEQ ID NO: 5798292 - DNA, 25 bp, Homo sapien
ttcagggatcctggcaagccgaggt

SEQ ID NO: 5798293 - DNA, 25 bp, Homo sapien
taggagtccccggggtggtgccctg

SEQ ID NO: 5798294 - DNA, 25 bp, Homo sapien
gccataaaaggagctggaggctgca

SEQ ID NO: 5798295 - DNA, 25 bp, Homo sapien
gcctccagtgaggcagccagtgggc

SEQ ID NO: 5798296 - DNA, 25 bp, Homo sapien
agtaagacaaggctggtccagccgt

SEQ ID NO: 5798297 - DNA, 25 bp, Homo sapien
tgaagggtgtgaagcccgggggtag

SEQ ID NO: 5798298 - DNA, 25 bp, Homo sapien
ctggtccagccgtggaaagggcggc

SEQ ID NO: 5798299 - DNA, 25 bp, Homo sapien
gccgacccaccacccgaacgagccc

SEQ ID NO: 5798300 - DNA, 25 bp, Homo sapien
cgaccaccgtccggttagcgacacc

SEQ ID NO: 5798301 - DNA, 25 bp, Homo sapien
tcagcatggctctccagggcctggg

SEQ ID NO: 5798302 - DNA, 25 bp, Homo sapien
gttcccaaagtctgcaaagactcct

SEQ ID NO: 5798303 - DNA, 25 bp, Homo sapien
gaggctctacagtcactctccagct

SEQ ID NO: 5798304 - DNA, 25 bp, Homo sapien
accgctgaaccaccagctggtgaaa

SEQ ID NO: 5798305 - DNA, 25 bp, Homo sapien
acaggaggcgcggagtgcagcgtga

SEQ ID NO: 5798306 - DNA, 25 bp, Homo sapien
ctgtcagcaggggcagtcctgggtt

SEQ ID NO: 5798307 - DNA, 25 bp, Homo sapien
acccgggctcgggcctcatccccca

SEQ ID NO: 5798308 - DNA, 25 bp, Homo sapien
cagggcttgatttcctcctgcctgg

SEQ ID NO: 5798309 - DNA, 25 bp, Homo sapien
tggcacggagctcaccgtggagttt

SEQ ID NO: 5798310 - DNA, 25 bp, Homo sapien
acggccagagccactcctccagccg

SEQ ID NO: 5798311 - DNA, 25 bp, Homo sapien
cgaactcagtggtgagccttaaggc

SEQ ID NO: 5798312 - DNA, 25 bp, Homo sapien
gtccagcagtcgcagcagcaaggga

SEQ ID NO: 5798313 - DNA, 25 bp, Homo sapien
acagcaccccgccagtaggggggat

SEQ ID NO: 5798314 - DNA, 25 bp, Homo sapien
ccctgggggccgatgctgaaaccag

SEQ ID NO: 5798315 - DNA, 25 bp, Homo sapien
gaggctgcaagggagcgtaaaccaa

SEQ ID NO: 5798316 - DNA, 25 bp, Homo sapien
accccagggctatgtgggatgacag

SEQ ID NO: 5798317 - DNA, 25 bp, Homo sapien
agcagctacctcagcctcacccaga

SEQ ID NO: 5798318 - DNA, 25 bp, Homo sapien
aggccgctgagggcagcctgaccca

SEQ ID NO: 5798319 - DNA, 25 bp, Homo sapien
aggcatgcaggcggggcaaggcctt

SEQ ID NO: 5798320 - DNA, 25 bp, Homo sapien
cgggtcctgcctcacctctccggct

SEQ ID NO: 5798321 - DNA, 25 bp, Homo sapien
ggccagtaagacaaggctggtccag

SEQ ID NO: 5798322 - DNA, 25 bp, Homo sapien
gtgcctgagcttaggagtccccggg

SEQ ID NO: 5798323 - DNA, 25 bp, Homo sapien
aggcagccagtgggcccagctcagc

SEQ ID NO: 5798324 - DNA, 25 bp, Homo sapien
tggggcccagtgcagctcatccagg

SEQ ID NO: 5798325 - DNA, 25 bp, Homo sapien
caacacaggaggcgcggagtgcagc

SEQ ID NO: 5798326 - DNA, 25 bp, Homo sapien
aggtgccgctcggttactgaagggt

SEQ ID NO: 5798327 - DNA, 25 bp, Homo sapien
aaggagaggccgtcgtggaactccc

SEQ ID NO: 5798328 - DNA, 25 bp, Homo sapien
cgcgtcacaagagctcggagaggcg

SEQ ID NO: 5798329 - DNA, 25 bp, Homo sapien
ctcgccagagctcaggcccttctcc

SEQ ID NO: 5798330 - DNA, 25 bp, Homo sapien
agcaccccgccagtaggggggatca

SEQ ID NO: 5798331 - DNA, 25 bp, Homo sapien
ttctggaggcacccgggctcgggcc

SEQ ID NO: 5798332 - DNA, 25 bp, Homo sapien
ggcactgaggtccgcgtcacaagag

SEQ ID NO: 5798333 - DNA, 25 bp, Homo sapien
gagctggaggctgcaagggagcgta

SEQ ID NO: 5798334 - DNA, 25 bp, Homo sapien
ccaaagtctgcaaagactcctagct

SEQ ID NO: 5798335 - DNA, 25 bp, Homo sapien
aaagtctgcaaagactcctagctct

SEQ ID NO: 5798336 - DNA, 25 bp, Homo sapien
gggcagtcctgggttggaggtccag

SEQ ID NO: 5798337 - DNA, 25 bp, Homo sapien
tgtcccttcagagccagagtggcat

SEQ ID NO: 5798338 - DNA, 25 bp, Homo sapien
gacagcaaggagacacctgagatga

SEQ ID NO: 5798339 - DNA, 25 bp, Homo sapien
tgtgtggttcccaaagtctgcaaag

SEQ ID NO: 5798340 - DNA, 25 bp, Homo sapien
acgggcacccagtgccacccaacat

SEQ ID NO: 5798341 - DNA, 25 bp, Homo sapien
atggaaatgggaattttcagggtca

SEQ ID NO: 5798342 - DNA, 25 bp, Homo sapien
atgctctgccagccgcgtcagcaca

SEQ ID NO: 5798343 - DNA, 25 bp, Homo sapien
tcctcctgcctgggcactgcctgat

SEQ ID NO: 5798344 - DNA, 25 bp, Homo sapien
ctggcaagccgaggtagcgttcagg

SEQ ID NO: 5798345 - DNA, 25 bp, Homo sapien
gggcttcgggctgcgggtcttcatg

SEQ ID NO: 5798346 - DNA, 25 bp, Homo sapien
cgaaggagaggccgtcgtggaactc

SEQ ID NO: 5798347 - DNA, 25 bp, Homo sapien
tccttcagctggaaggtcttctcaa

SEQ ID NO: 5798348 - DNA, 25 bp, Homo sapien
gggccgatgctgaaaccagctattt

SEQ ID NO: 5798349 - DNA, 25 bp, Homo sapien
tggtatccaaggggctgggggcaaa

SEQ ID NO: 5798350 - DNA, 25 bp, Homo sapien
gagggcagcctgacccaaaacctgc

SEQ ID NO: 5798351 - DNA, 25 bp, Homo sapien
gcccttgcccacttggacctctgtc

SEQ ID NO: 5798352 - DNA, 25 bp, Homo sapien
cttcagtagtcttcagccatggcca

SEQ ID NO: 5798353 - DNA, 25 bp, Homo sapien
tcagtagtcttcagccatggccagt

SEQ ID NO: 5798354 - DNA, 25 bp, Homo sapien
gaggcgcggagtgcagcgtgaccgc

SEQ ID NO: 5798355 - DNA, 25 bp, Homo sapien
aactcagtggtgagccttaaggccc

SEQ ID NO: 5798356 - DNA, 25 bp, Homo sapien
tgaccgcccgccgcgcacggtacca

SEQ ID NO: 5798357 - DNA, 25 bp, Homo sapien
gcgctggccataaaaggagctggag

SEQ ID NO: 5798358 - DNA, 25 bp, Homo sapien
cataaaaggagctggaggctgcaag

SEQ ID NO: 5798359 - DNA, 25 bp, Homo sapien
gggcttgatttcctcctgcctgggc

SEQ ID NO: 5798360 - DNA, 25 bp, Homo sapien
actgtactgctcccaaagaaagcct

SEQ ID NO: 5798361 - DNA, 25 bp, Homo sapien
cgtagaagtagccaattccaccaag

SEQ ID NO: 5798362 - DNA, 25 bp, Homo sapien
aaggggctgggggcaaaagccagaa

SEQ ID NO: 5798363 - DNA, 25 bp, Homo sapien
cccttcagtagtcttcagccatggc

SEQ ID NO: 5798364 - DNA, 25 bp, Homo sapien
ctgaaccaccagctggtgaaagcct

SEQ ID NO: 5798365 - DNA, 25 bp, Homo sapien
tgaattactggtatccaaggggctg

SEQ ID NO: 5798366 - DNA, 25 bp, Homo sapien
tcagcatttagcagccccagccagt

SEQ ID NO: 5798367 - DNA, 25 bp, Homo sapien
tggagtgctcccaaagccaggtagt

SEQ ID NO: 5798368 - DNA, 25 bp, Homo sapien
agcccgggtcctgcctcacctctcc

SEQ ID NO: 5798369 - DNA, 25 bp, Homo sapien
ggtggagtgctcccaaagccaggta

SEQ ID NO: 5798370 - DNA, 25 bp, Homo sapien
agctcaggcccttctccttcagctg

SEQ ID NO: 5798371 - DNA, 25 bp, Homo sapien
aattgcgctggccataaaaggagct

SEQ ID NO: 5798372 - DNA, 25 bp, Homo sapien
cgttgtactaggaattctggaggca

SEQ ID NO: 5798373 - DNA, 25 bp, Homo sapien
atacattgcctaccacgttggcacg

SEQ ID NO: 5798374 - DNA, 25 bp, Homo sapien
ccacgccagcacccagcgccccgac

SEQ ID NO: 5798375 - DNA, 25 bp, Homo sapien
ggaggcacccgggctcgggcctcat

SEQ ID NO: 5798376 - DNA, 25 bp, Homo sapien
gtgaggaggggcttcgggctgcggg

SEQ ID NO: 5798377 - DNA, 25 bp, Homo sapien
agtgcagctcatccaggctctctgc

SEQ ID NO: 5798378 - DNA, 25 bp, Homo sapien
cctgccagtcttggcagggcttgat

SEQ ID NO: 5798379 - DNA, 25 bp, Homo sapien
taccatctctgtcagcaggggcagt

SEQ ID NO: 5798380 - DNA, 25 bp, Homo sapien
atggcggctgtcggctagaatgtcc

SEQ ID NO: 5798381 - DNA, 25 bp, Homo sapien
gtcccgtccccgccagcggtaagat

SEQ ID NO: 5798382 - DNA, 25 bp, Homo sapien
gggggcaaaagccagaagcctttgt

SEQ ID NO: 5798383 - DNA, 25 bp, Homo sapien
ggcctttcggaggaaagccaagtcg

SEQ ID NO: 5798384 - DNA, 25 bp, Homo sapien
tgtatcaagaactgcccctgccctt

SEQ ID NO: 5798385 - DNA, 25 bp, Homo sapien
aaggcgggatgaggtggggtccagc

SEQ ID NO: 5798386 - DNA, 25 bp, Homo sapien
ctctgtcctcccacttcagggatcc

SEQ ID NO: 5798387 - DNA, 25 bp, Homo sapien
tgggcccagctcagcagctacctca

SEQ ID NO: 5798388 - DNA, 25 bp, Homo sapien
cctgagggggcctgggcttcagctg

SEQ ID NO: 5798389 - DNA, 25 bp, Homo sapien
ggtccagccgtggaaagggcggcag

SEQ ID NO: 5798390 - DNA, 25 bp, Homo sapien
cccagtatctgctccctcccaatcc

SEQ ID NO: 5798391 - DNA, 25 bp, Homo sapien
gctctggggcccagtgcagctcatc

SEQ ID NO: 5798392 - DNA, 25 bp, Homo sapien
gtcttcatgccgaagtagacgtgag

SEQ ID NO: 5798393 - DNA, 25 bp, Homo sapien
taaagccttcagcatggctctccag

SEQ ID NO: 5798394 - DNA, 25 bp, Homo sapien
gtggactgctcgttgtactaggaat

SEQ ID NO: 5798395 - DNA, 25 bp, Homo sapien
tcccaccgctgaaccaccagctggt

SEQ ID NO: 5798396 - DNA, 25 bp, Homo sapien
gcatctacatactgcagttgaggtt

SEQ ID NO: 5798397 - DNA, 25 bp, Homo sapien
atctctgtcagcaggggcagtcctg

SEQ ID NO: 5798398 - DNA, 25 bp, Homo sapien
gtaggggggatcatgctctgaattg

SEQ ID NO: 5798399 - DNA, 25 bp, Homo sapien
ctcgccctggcgaccaccgtccggt

SEQ ID NO: 5798400 - DNA, 25 bp, Homo sapien
aaggctggtccagccgtggaaaggg

SEQ ID NO: 5798401 - DNA, 25 bp, Homo sapien
caaactctatggaaatgggaatttt

SEQ ID NO: 5798402 - DNA, 25 bp, Homo sapien
cccgggtcctgcctcacctctccgg

SEQ ID NO: 5798403 - DNA, 25 bp, Homo sapien
gccatagggacccacaccgtccccc

SEQ ID NO: 5798404 - DNA, 25 bp, Homo sapien
ccccgacatacccagggccaaagac

SEQ ID NO: 5798405 - DNA, 25 bp, Homo sapien
aaaagccagaagcctttgtcccttc

SEQ ID NO: 5798406 - DNA, 25 bp, Homo sapien
ccgacatacccagggccaaagacag

SEQ ID NO: 5798407 - DNA, 25 bp, Homo sapien
cagcaaggagacacctgagatgaaa

SEQ ID NO: 5798408 - DNA, 25 bp, Homo sapien
gcatatgggctacaggcaaaagtag

SEQ ID NO: 5798409 - DNA, 25 bp, Homo sapien
actaggaattctggaggcacccggg

SEQ ID NO: 5798410 - DNA, 25 bp, Homo sapien
ctgggtccaccttctgctcagaccc

SEQ ID NO: 5798411 - DNA, 25 bp, Homo sapien
tccggtgaggaggggcttcgggctg

SEQ ID NO: 5798412 - DNA, 25 bp, Homo sapien
ggctggtccagccgtggaaagggcg

SEQ ID NO: 5798413 - DNA, 25 bp, Homo sapien
accacgacggccagagccactcctc

SEQ ID NO: 5798414 - DNA, 25 bp, Homo sapien
catacccagggccaaagacaggacc

SEQ ID NO: 5798415 - DNA, 25 bp, Homo sapien
agcccgagcctggtgaggaccctcc

SEQ ID NO: 5798416 - DNA, 25 bp, Homo sapien
ggctgggggcaaaagccagaagcct

SEQ ID NO: 5798417 - DNA, 25 bp, Homo sapien
acccaaaacctgctcgccagagctc

SEQ ID NO: 5798418 - DNA, 25 bp, Homo sapien
ctgacccccaggcctcttgacgaac

SEQ ID NO: 5798419 - DNA, 25 bp, Homo sapien
ctgcctcacctctccggctcccgcc

SEQ ID NO: 5798420 - DNA, 25 bp, Homo sapien
ctgggtcagtagactgcctgccagt

SEQ ID NO: 5798421 - DNA, 25 bp, Homo sapien
gcatgcaggcggggcaaggcctttc

SEQ ID NO: 5798422 - DNA, 25 bp, Homo sapien
aaatagactctggattcacattcac

SEQ ID NO: 5798423 - DNA, 25 bp, Homo sapien
cctttcggaggaaagccaagtcgtc

SEQ ID NO: 5798424 - DNA, 25 bp, Homo sapien
ggggctccagagatggcggctgtcg

SEQ ID NO: 5798425 - DNA, 25 bp, Homo sapien
gctcccaaagccaggtagttgacat

SEQ ID NO: 5798426 - DNA, 25 bp, Homo sapien
ctggaaggtcttctcaaagcgctct

SEQ ID NO: 5798427 - DNA, 25 bp, Homo sapien
gcctgcctggctctgatggagccag

SEQ ID NO: 5798428 - DNA, 25 bp, Homo sapien
accaaaggggctccagagatggcgg

SEQ ID NO: 5798429 - DNA, 25 bp, Homo sapien
tccccggggtggtgccctgctgcgc

SEQ ID NO: 5798430 - DNA, 25 bp, Homo sapien
caccgtccggttagcgacacctgcc

SEQ ID NO: 5798431 - DNA, 25 bp, Homo sapien
cctccagatgcccatagtggtggag

SEQ ID NO: 5798432 - DNA, 25 bp, Homo sapien
aggctctctgctgcctccagtgagg

SEQ ID NO: 5798433 - DNA, 25 bp, Homo sapien
tggcagcccgagcctggtgaggacc

SEQ ID NO: 5798434 - DNA, 25 bp, Homo sapien
tcccttcagagccagagtggcatga

SEQ ID NO: 5798435 - DNA, 25 bp, Homo sapien
gccgaagtagacgtgagggcggtag

SEQ ID NO: 5798436 - DNA, 25 bp, Homo sapien
ccaggctctctgctgcctccagtga

SEQ ID NO: 5798437 - DNA, 25 bp, Homo sapien
cctctagcatatgggctacaggcaa

SEQ ID NO: 5798438 - DNA, 25 bp, Homo sapien
cgccccgagccatcctggcactgag

SEQ ID NO: 5798439 - DNA, 25 bp, Homo sapien
caccaacctctagcatatgggctac

SEQ ID NO: 5798440 - DNA, 25 bp, Homo sapien
ccaaaacctgctcgccagagctcag

SEQ ID NO: 5798441 - DNA, 25 bp, Homo sapien
tttcctcctgcctgggcactgcctg

SEQ ID NO: 5798442 - DNA, 25 bp, Homo sapien
ccgaggtagcgttcaggggaggccc

SEQ ID NO: 5798443 - DNA, 25 bp, Homo sapien
cttcagctgtactgcttttgtgtgg

SEQ ID NO: 5798444 - DNA, 25 bp, Homo sapien
gcaaaagccagaagcctttgtccct

SEQ ID NO: 5798445 - DNA, 25 bp, Homo sapien
agcccctgagggggcctgggcttca

SEQ ID NO: 5798446 - DNA, 25 bp, Homo sapien
tggagccaggaaaaccaggcatgca

SEQ ID NO: 5798447 - DNA, 25 bp, Homo sapien
cgatgctgaaaccagctatttaggc

SEQ ID NO: 5798448 - DNA, 25 bp, Homo sapien
cacatcagtccggtgaggaggggct

SEQ ID NO: 5798449 - DNA, 25 bp, Homo sapien
gaggtacgggtggaaagagggctgg

SEQ ID NO: 5798450 - DNA, 25 bp, Homo sapien
tcatgctctgaattgcgctggccat

SEQ ID NO: 5798451 - DNA, 25 bp, Homo sapien
cagtggagcccgggtcctgcctcac

SEQ ID NO: 5798452 - DNA, 25 bp, Homo sapien
cccacatcagtccggtgaggagggg

SEQ ID NO: 5798453 - DNA, 25 bp, Homo sapien
ggggctgggggcaaaagccagaagc

SEQ ID NO: 5798454 - DNA, 25 bp, Homo sapien
atttagaaaaatagactctggattc

SEQ ID NO: 5798455 - DNA, 25 bp, Homo sapien
tgaggcagccagtgggcccagctca

SEQ ID NO: 5798456 - DNA, 25 bp, Homo sapien
agccttaaggccccatcctggatgt

SEQ ID NO: 5798457 - DNA, 25 bp, Homo sapien
cacaaactctatggaaatgggaatt

SEQ ID NO: 5798458 - DNA, 25 bp, Homo sapien
gccagagtggcatgagtgtcttggc

SEQ ID NO: 5798459 - DNA, 25 bp, Homo sapien
gctctccagggcctgggtcagtaga

SEQ ID NO: 5798460 - DNA, 25 bp, Homo sapien
ctctccctcccttcagtagtcttca

SEQ ID NO: 5798461 - DNA, 25 bp, Homo sapien
tgtccagcaggggcccaaggcggga

SEQ ID NO: 5798462 - DNA, 25 bp, Homo sapien
ccttgcccacttggacctctgtcct

SEQ ID NO: 5798463 - DNA, 25 bp, Homo sapien
gttggaggtccagaagacattgtag

SEQ ID NO: 5798464 - DNA, 25 bp, Homo sapien
cagctatttaggcgactctttacca

SEQ ID NO: 5798465 - DNA, 25 bp, Homo sapien
tgtagcctggtactggcgccataca

SEQ ID NO: 5798466 - DNA, 25 bp, Homo sapien
tcagcctcacccagatgctctgcca

SEQ ID NO: 5798467 - DNA, 25 bp, Homo sapien
ggggccacggcggggctggaggagt

SEQ ID NO: 5798468 - DNA, 25 bp, Homo sapien
agaggcggcagtggagcccgggtcc

SEQ ID NO: 5798469 - DNA, 25 bp, Homo sapien
ggcaggcaacacaggaggcgcggag

SEQ ID NO: 5798470 - DNA, 25 bp, Homo sapien
gcacggtaccacgccagcacccagc

SEQ ID NO: 5798471 - DNA, 25 bp, Homo sapien
gatgaaatgaggaaggtttgaatta

SEQ ID NO: 5798472 - DNA, 25 bp, Homo sapien
acttggacctctgtcctcccacttc

SEQ ID NO: 5798473 - DNA, 25 bp, Homo sapien
tagcatatgggctacaggcaaaagt

SEQ ID NO: 5798474 - DNA, 25 bp, Homo sapien
gtgctcccaaagccaggtagttgac

SEQ ID NO: 5798475 - DNA, 25 bp, Homo sapien
tttgaattactggtatccaaggggc

SEQ ID NO: 5798476 - DNA, 25 bp, Homo sapien
ctccagagatggcggctgtcggcta

SEQ ID NO: 5798477 - DNA, 25 bp, Homo sapien
ccacgttggcacggagctcaccgtg

SEQ ID NO: 5798478 - DNA, 25 bp, Homo sapien
gcctgattcaaacacaaactctatg

SEQ ID NO: 5798479 - DNA, 25 bp, Homo sapien
cttcagctggaaggtcttctcaaag

SEQ ID NO: 5798480 - DNA, 25 bp, Homo sapien
ccgtccggttagcgacacctgccag

SEQ ID NO: 5798481 - DNA, 25 bp, Homo sapien
ccaaggggctgggggcaaaagccag

SEQ ID NO: 5798482 - DNA, 25 bp, Homo sapien
ggcggctgtcggctagaatgtccag

SEQ ID NO: 5798483 - DNA, 25 bp, Homo sapien
tccccgccagcggtaagatagtggc

SEQ ID NO: 5798484 - DNA, 25 bp, Homo sapien
ggactgctcgttgtactaggaattc

SEQ ID NO: 5798485 - DNA, 25 bp, Homo sapien
gggcccagtgcagctcatccaggct

SEQ ID NO: 5798486 - DNA, 25 bp, Homo sapien
gggccgacccaccacccgaacgagc

SEQ ID NO: 5798487 - DNA, 25 bp, Homo sapien
cagggtcccgtccccgccagcggta

SEQ ID NO: 5798488 - DNA, 25 bp, Homo sapien
gcaggtccaggtgccgctcggttac

SEQ ID NO: 5798489 - DNA, 25 bp, Homo sapien
gtccggggccacggcggggctggag

SEQ ID NO: 5798490 - DNA, 25 bp, Homo sapien
ggaaatgggaattttcagggtcacc

SEQ ID NO: 5798491 - DNA, 25 bp, Homo sapien
gcacccagtgccacccaacatcgca

SEQ ID NO: 5798492 - DNA, 25 bp, Homo sapien
tggaggtccagaagacattgtagct

SEQ ID NO: 5798493 - DNA, 25 bp, Homo sapien
tttgtcccttcagagccagagtggc

SEQ ID NO: 5798494 - DNA, 25 bp, Homo sapien
tcagctggaaggtcttctcaaagcg

SEQ ID NO: 5798495 - DNA, 25 bp, Homo sapien
gctcacacgtgtgcctgagcttagg

SEQ ID NO: 5798496 - DNA, 25 bp, Homo sapien
tcttggcagggcttgatttcctcct

SEQ ID NO: 5798497 - DNA, 25 bp, Homo sapien
aggaaagccaagtcgtcagggtcac

SEQ ID NO: 5798498 - DNA, 25 bp, Homo sapien
agggcactgctgtaaaaagaggtac

SEQ ID NO: 5798499 - DNA, 25 bp, Homo sapien
acatagccaagagcatctacatact

SEQ ID NO: 5798500 - DNA, 25 bp, Homo sapien
ctgagggcagcctgacccaaaacct

SEQ ID NO: 5798501 - DNA, 25 bp, Homo sapien
atatgggctacaggcaaaagtaggg

SEQ ID NO: 5798502 - DNA, 25 bp, Homo sapien
ggctgcaagggagcgtaaaccaaag

SEQ ID NO: 5798503 - DNA, 25 bp, Homo sapien
ggacctctgtcctcccacttcaggg

SEQ ID NO: 5798504 - DNA, 25 bp, Homo sapien
gtggaaagagggctgggtccacctt

SEQ ID NO: 5798505 - DNA, 25 bp, Homo sapien
cccgtccccgccagcggtaagatag

SEQ ID NO: 5798506 - DNA, 25 bp, Homo sapien
ccgtgctgacccccaggcctcttga

SEQ ID NO: 5798507 - DNA, 25 bp, Homo sapien
ctcgttgtactaggaattctggagg

SEQ ID NO: 5798508 - DNA, 25 bp, Homo sapien
tctggggcccagtgcagctcatcca

SEQ ID NO: 5798509 - DNA, 25 bp, Homo sapien
ttcacattcaccccagggctatgtg

SEQ ID NO: 5798510 - DNA, 25 bp, Homo sapien
tgagggggcctgggcttcagctgta

SEQ ID NO: 5798511 - DNA, 25 bp, Homo sapien
gccagcacccagcgccccgacatac

SEQ ID NO: 5798512 - DNA, 25 bp, Homo sapien
accaccagctggtgaaagccttcat

SEQ ID NO: 5798513 - DNA, 25 bp, Homo sapien
tcccaaagtctgcaaagactcctag

SEQ ID NO: 5798514 - DNA, 25 bp, Homo sapien
cagagtggcatgagtgtcttggctc

SEQ ID NO: 5798515 - DNA, 25 bp, Homo sapien
ttcagagccagagtggcatgagtgt

SEQ ID NO: 5798516 - DNA, 25 bp, Homo sapien
caatttatttagaaaaatagactct

SEQ ID NO: 5798517 - DNA, 25 bp, Homo sapien
atgcaggcggggcaaggcctttcgg

SEQ ID NO: 5798518 - DNA, 25 bp, Homo sapien
gaaccaccagctggtgaaagccttc

SEQ ID NO: 5798519 - DNA, 25 bp, Homo sapien
aagggcggcagcccatgcctcgccc

SEQ ID NO: 5798520 - DNA, 25 bp, Homo sapien
ggctctgatggagccaggaaaacca

SEQ ID NO: 5798521 - DNA, 25 bp, Homo sapien
tcacccagatgctctgccagccgcg

SEQ ID NO: 5798522 - DNA, 25 bp, Homo sapien
cttctccttcagctggaaggtcttc

SEQ ID NO: 5798523 - DNA, 25 bp, Homo sapien
tcgcaggtccaggtgccgctcggtt

SEQ ID NO: 5798524 - DNA, 25 bp, Homo sapien
gtccgcactccctctgccggcactg

SEQ ID NO: 5798525 - DNA, 25 bp, Homo sapien
tcacacgtgtgcctgagcttaggag

SEQ ID NO: 5798526 - DNA, 25 bp, Homo sapien
tagtggcagtgggcctgcctggctc

SEQ ID NO: 5798527 - DNA, 25 bp, Homo sapien
caggcctcttgacgaactcagtggt

SEQ ID NO: 5798528 - DNA, 25 bp, Homo sapien
agccagtggccaagggcttcccggg

SEQ ID NO: 5798529 - DNA, 25 bp, Homo sapien
agccaggtagttgacattgagccac

SEQ ID NO: 5798530 - DNA, 25 bp, Homo sapien
ccgcgcacggtaccacgccagcacc

SEQ ID NO: 5798531 - DNA, 25 bp, Homo sapien
atggccagtaagacaaggctggtcc

SEQ ID NO: 5798532 - DNA, 25 bp, Homo sapien
ggaattctggaggcacccgggctcg

SEQ ID NO: 5798533 - DNA, 25 bp, Homo sapien
gggatcccaccgctgaaccaccagc

SEQ ID NO: 5798534 - DNA, 25 bp, Homo sapien
caggcaacacaggaggcgcggagtg

SEQ ID NO: 5798535 - DNA, 25 bp, Homo sapien
taggcgactctttaccatctctgtc

SEQ ID NO: 5798536 - DNA, 25 bp, Homo sapien
ggtagtcatccagcccagagggtag

SEQ ID NO: 5798537 - DNA, 25 bp, Homo sapien
tcctccagccgtgctacgcggcccg

SEQ ID NO: 5798538 - DNA, 25 bp, Homo sapien
gggtcaccaacctctagcatatggg

SEQ ID NO: 5798539 - DNA, 25 bp, Homo sapien
cgcagcagcaagggaaaaagactga

SEQ ID NO: 5798540 - DNA, 25 bp, Homo sapien
aatgtccagcaggggcccaaggcgg

SEQ ID NO: 5798541 - DNA, 25 bp, Homo sapien
ccagagatggcggctgtcggctaga

SEQ ID NO: 5798542 - DNA, 25 bp, Homo sapien
ttgatttcctcctgcctgggcactg

SEQ ID NO: 5798543 - DNA, 25 bp, Homo sapien
tgccctgctgcgcccacatcagtcc

SEQ ID NO: 5798544 - DNA, 25 bp, Homo sapien
ccaagagcatctacatactgcagtt

SEQ ID NO: 5798545 - DNA, 25 bp, Homo sapien
gggaagaatgaccgggagggcactg

SEQ ID NO: 5798546 - DNA, 25 bp, Homo sapien
cgcccatcgcggtcactgtactgct

SEQ ID NO: 5798547 - DNA, 25 bp, Homo sapien
atccaggctctctgctgcctccagt

SEQ ID NO: 5798548 - DNA, 25 bp, Homo sapien
tggtaaggcagggtcccgtccccgc

SEQ ID NO: 5798549 - DNA, 25 bp, Homo sapien
tgaggttggggccgacccaccaccc

SEQ ID NO: 5798550 - DNA, 25 bp, Homo sapien
gtgccgctcggttactgaagggtgt

SEQ ID NO: 5798551 - DNA, 25 bp, Homo sapien
ggcaagccgaggtagcgttcagggg

SEQ ID NO: 5798552 - DNA, 25 bp, Homo sapien
gagcgtaaaccaaaggggctccaga

SEQ ID NO: 5798553 - DNA, 25 bp, Homo sapien
ctgaggctctacagtcactctccag

SEQ ID NO: 5798554 - DNA, 25 bp, Homo sapien
tctccttcagctggaaggtcttctc

SEQ ID NO: 5798555 - DNA, 25 bp, Homo sapien
gtgtgcctgagcttaggagtccccg

SEQ ID NO: 5798556 - DNA, 25 bp, Homo sapien
catcgcaggtccaggtgccgctcgg

SEQ ID NO: 5798557 - DNA, 25 bp, Homo sapien
tgctgcctccagtgaggcagccagt

SEQ ID NO: 5798558 - DNA, 25 bp, Homo sapien
tagtggtggagtgctcccaaagcca

SEQ ID NO: 5798559 - DNA, 25 bp, Homo sapien
gcagccagtgggcccagctcagcag

SEQ ID NO: 5798560 - DNA, 25 bp, Homo sapien
tgtactgctcccaaagaaagcctgt

SEQ ID NO: 5798561 - DNA, 25 bp, Homo sapien
ttatttagaaaaatagactctggat

SEQ ID NO: 5798562 - DNA, 25 bp, Homo sapien
agccttcatcccaaaggaagcctcg

SEQ ID NO: 5798563 - DNA, 25 bp, Homo sapien
tcggctagaatgtccagcaggggcc

SEQ ID NO: 5798564 - DNA, 25 bp, Homo sapien
tagtcatccagcccagagggtaggg

SEQ ID NO: 5798565 - DNA, 25 bp, Homo sapien
gttggcgtggactgctcgttgtact

SEQ ID NO: 5798566 - DNA, 25 bp, Homo sapien
ccaggtgccgctcggttactgaagg

SEQ ID NO: 5798567 - DNA, 25 bp, Homo sapien
gtgtgaagcccgggggtagtcatcc

SEQ ID NO: 5798568 - DNA, 25 bp, Homo sapien
agccatggccagtaagacaaggctg

SEQ ID NO: 5798569 - DNA, 25 bp, Homo sapien
gggcacccagtgccacccaacatcg

SEQ ID NO: 5798570 - DNA, 25 bp, Homo sapien
ccaacctctagcatatgggctacag

SEQ ID NO: 5798571 - DNA, 25 bp, Homo sapien
tggaggctgcaagggagcgtaaacc

SEQ ID NO: 5798572 - DNA, 25 bp, Homo sapien
ctagaatgtccagcaggggcccaag

SEQ ID NO: 5798573 - DNA, 25 bp, Homo sapien
ccgccctctcggctgtccgcactcc

SEQ ID NO: 5798574 - DNA, 25 bp, Homo sapien
ggcgaccaccgtccggttagcgaca

SEQ ID NO: 5798575 - DNA, 25 bp, Homo sapien
cccgaaggagaggccgtcgtggaac

SEQ ID NO: 5798576 - DNA, 25 bp, Homo sapien
tggaggagtcggcaggcaacacagg

SEQ ID NO: 5798577 - DNA, 25 bp, Homo sapien
ctcgcccatcgcggtcactgtactg

SEQ ID NO: 5798578 - DNA, 25 bp, Homo sapien
gagccatcctggcactgaggtccgc

SEQ ID NO: 5798579 - DNA, 25 bp, Homo sapien
tgcaaagactcctagctctggggcc

SEQ ID NO: 5798580 - DNA, 25 bp, Homo sapien
gatgtctggcaataccagcccttgt

SEQ ID NO: 5798581 - DNA, 25 bp, Homo sapien
gcctgagcttaggagtccccggggt

SEQ ID NO: 5798582 - DNA, 25 bp, Homo sapien
ggcagcccatgcctcgcccatcgcg

SEQ ID NO: 5798583 - DNA, 25 bp, Homo sapien
gccacacagcaccccgccagtaggg

SEQ ID NO: 5798584 - DNA, 25 bp, Homo sapien
gggttggaggtccagaagacattgt

SEQ ID NO: 5798585 - DNA, 25 bp, Homo sapien
gctgtatcaagaactgcccctgccc

SEQ ID NO: 5798586 - DNA, 25 bp, Homo sapien
gccatcagcatttagcagccccagc

SEQ ID NO: 5798587 - DNA, 25 bp, Homo sapien
ccagctggtgaaagccttcatccca

SEQ ID NO: 5798588 - DNA, 25 bp, Homo sapien
cccaccacccgaacgagcccctgag

SEQ ID NO: 5798589 - DNA, 25 bp, Homo sapien
gggagcgtaaaccaaaggggctcca

SEQ ID NO: 5798590 - DNA, 25 bp, Homo sapien
aactcccagccatagggacccacac

SEQ ID NO: 5798591 - DNA, 25 bp, Homo sapien
gtgggcctgcctggctctgatggag

SEQ ID NO: 5798592 - DNA, 25 bp, Homo sapien
gcactccctctgccggcactgcgcg

SEQ ID NO: 5798593 - DNA, 25 bp, Homo sapien
gcctcacctctccggctcccgcctc

SEQ ID NO: 5798594 - DNA, 25 bp, Homo sapien
cctttgtcccttcagagccagagtg

SEQ ID NO: 5798595 - DNA, 25 bp, Homo sapien
agcctggtgaggaccctccagatgc

SEQ ID NO: 5798596 - DNA, 25 bp, Homo sapien
ggcccttctccttcagctggaaggt

SEQ ID NO: 5798597 - DNA, 25 bp, Homo sapien
tccagatgcccatagtggtggagtg

SEQ ID NO: 5798598 - DNA, 25 bp, Homo sapien
agacattgtagctgagtcctgaggc

SEQ ID NO: 5798599 - DNA, 25 bp, Homo sapien
gctcccaaagaaagcctgtagcctg

SEQ ID NO: 5798600 - DNA, 25 bp, Homo sapien
cagggccaaagacaggaccacgacg

SEQ ID NO: 5798601 - DNA, 25 bp, Homo sapien
gacccccaggcctcttgacgaactc

SEQ ID NO: 5798602 - DNA, 25 bp, Homo sapien
catcctggcactgaggtccgcgtca

SEQ ID NO: 5798603 - DNA, 25 bp, Homo sapien
cagggcctgggtcagtagactgcct

SEQ ID NO: 5798604 - DNA, 25 bp, Homo sapien
ctgatggagccaggaaaaccaggca

SEQ ID NO: 5798605 - DNA, 25 bp, Homo sapien
tcaagaactgcccctgcccttgccc

SEQ ID NO: 5798606 - DNA, 25 bp, Homo sapien
agcgacacctgccagccagcgcctg

SEQ ID NO: 5798607 - DNA, 25 bp, Homo sapien
tcccacttcagggatcctggcaagc

SEQ ID NO: 5798608 - DNA, 25 bp, Homo sapien
aacatcgcaggtccaggtgccgctc

SEQ ID NO: 5798609 - DNA, 25 bp, Homo sapien
tcacctgctgtatcaagaactgccc

SEQ ID NO: 5798610 - DNA, 25 bp, Homo sapien
ccaaggcgggatgaggtggggtcca

SEQ ID NO: 5798611 - DNA, 25 bp, Homo sapien
ttctgctcagacccttccaccccga

SEQ ID NO: 5798612 - DNA, 25 bp, Homo sapien
ccggttagcgacacctgccagccag

SEQ ID NO: 5798613 - DNA, 25 bp, Homo sapien
ggcatgagtgtcttggctcccctcc

SEQ ID NO: 5798614 - DNA, 25 bp, Homo sapien
attcaccccagggctatgtgggatg

SEQ ID NO: 5798615 - DNA, 25 bp, Homo sapien
caccgtggagtttggcagcccgagc

SEQ ID NO: 5798616 - DNA, 25 bp, Homo sapien
cttgtccgtagaagtagccaattcc

SEQ ID NO: 5798617 - DNA, 25 bp, Homo sapien
aacacaaactctatggaaatgggaa

SEQ ID NO: 5798618 - DNA, 25 bp, Homo sapien
acgccagcacccagcgccccgacat

SEQ ID NO: 5798619 - DNA, 25 bp, Homo sapien
gtgaggaccctccagatgcccatag

SEQ ID NO: 5798620 - DNA, 25 bp, Homo sapien
gctgaaaccagctatttaggcgact

SEQ ID NO: 5798621 - DNA, 25 bp, Homo sapien
tactgctcccaaagaaagcctgtag

SEQ ID NO: 5798622 - DNA, 25 bp, Homo sapien
gtgctgacccccaggcctcttgacg

SEQ ID NO: 5798623 - DNA, 25 bp, Homo sapien
tcggaggaaagccaagtcgtcaggg

SEQ ID NO: 5798624 - DNA, 25 bp, Homo sapien
agatgctctgccagccgcgtcagca

SEQ ID NO: 5798625 - DNA, 25 bp, Homo sapien
gtactaggaattctggaggcacccg

SEQ ID NO: 5798626 - DNA, 25 bp, Homo sapien
cctaccacgttggcacggagctcac

SEQ ID NO: 5798627 - DNA, 25 bp, Homo sapien
ggcgcggagtgcagcgtgaccgccc

SEQ ID NO: 5798628 - DNA, 25 bp, Homo sapien
gcccagtgcagctcatccaggctct

SEQ ID NO: 5798629 - DNA, 25 bp, Homo sapien
ccggcactgcgcggcgccgccgctc

SEQ ID NO: 5798630 - DNA, 25 bp, Homo sapien
aataccagcccttgtccgtagaagt

SEQ ID NO: 5798631 - DNA, 25 bp, Homo sapien
aggcggcagtggagcccgggtcctg

SEQ ID NO: 5798632 - DNA, 25 bp, Homo sapien
ttgcgctggccataaaaggagctgg

SEQ ID NO: 5798633 - DNA, 25 bp, Homo sapien
tctctaaagccttcagcatggctct

SEQ ID NO: 5798634 - DNA, 25 bp, Homo sapien
gctcgccccgagccatcctggcact

SEQ ID NO: 5798635 - DNA, 25 bp, Homo sapien
gatttcctcctgcctgggcactgcc

SEQ ID NO: 5798636 - DNA, 25 bp, Homo sapien
acacaggaggcgcggagtgcagcgt

SEQ ID NO: 5798637 - DNA, 25 bp, Homo sapien
tgccagtcttggcagggcttgattt

SEQ ID NO: 5798638 - DNA, 25 bp, Homo sapien
gaggtggggtccagcagtcgcagca

SEQ ID NO: 5798639 - DNA, 25 bp, Homo sapien
ccagccgcgtcagcacacgggcacc

SEQ ID NO: 5798640 - DNA, 25 bp, Homo sapien
atctgctccctcccaatccagccat

SEQ ID NO: 5798641 - DNA, 25 bp, Homo sapien
tagtcttcagccatggccagtaaga

SEQ ID NO: 5798642 - DNA, 25 bp, Homo sapien
ggagggcactgctgtaaaaagaggt

SEQ ID NO: 5798643 - DNA, 25 bp, Homo sapien
agcgtgaccgcccgccgcgcacggt

SEQ ID NO: 5798644 - DNA, 25 bp, Homo sapien
cgtgaccgcccgccgcgcacggtac

SEQ ID NO: 5798645 - DNA, 25 bp, Homo sapien
gcggcagcccatgcctcgcccatcg

SEQ ID NO: 5798646 - DNA, 25 bp, Homo sapien
cttcccgggtgagggagggatccca

SEQ ID NO: 5798647 - DNA, 25 bp, Homo sapien
ccctcccttcagtagtcttcagcca

SEQ ID NO: 5798648 - DNA, 25 bp, Homo sapien
ccacttcagggatcctggcaagccg

SEQ ID NO: 5798649 - DNA, 25 bp, Homo sapien
cagtagactgcctgccagtcttggc

SEQ ID NO: 5798650 - DNA, 25 bp, Homo sapien
ccctggcgaccaccgtccggttagc

SEQ ID NO: 5798651 - DNA, 25 bp, Homo sapien
gcccacttggacctctgtcctccca

SEQ ID NO: 5798652 - DNA, 25 bp, Homo sapien
cagtatctgctccctcccaatccag

SEQ ID NO: 5798653 - DNA, 25 bp, Homo sapien
cgagcctggtgaggaccctccagat

SEQ ID NO: 5798654 - DNA, 25 bp, Homo sapien
ccgggtgagggagggatcccaccgc

SEQ ID NO: 5798655 - DNA, 25 bp, Homo sapien
gttccccagaagaggtccggggcca

SEQ ID NO: 5798656 - DNA, 25 bp, Homo sapien
ctccagccgtgctacgcggcccgcc

SEQ ID NO: 5798657 - DNA, 25 bp, Homo sapien
tcccaatccagccatcagcatttag

SEQ ID NO: 5798658 - DNA, 25 bp, Homo sapien
ctgggggccgatgctgaaaccagct

SEQ ID NO: 5798659 - DNA, 25 bp, Homo sapien
ctgctgtatcaagaactgcccctgc

SEQ ID NO: 5798660 - DNA, 25 bp, Homo sapien
catcgcggtcactgtactgctccca

SEQ ID NO: 5798661 - DNA, 25 bp, Homo sapien
agctgtactgcttttgtgtggttcc

SEQ ID NO: 5798662 - DNA, 25 bp, Homo sapien
gccgatgctgaaaccagctatttag

SEQ ID NO: 5798663 - DNA, 25 bp, Homo sapien
gctcatccaggctctctgctgcctc

SEQ ID NO: 5798664 - DNA, 25 bp, Homo sapien
gccgtcgtggaactcccagccatag

SEQ ID NO: 5798665 - DNA, 25 bp, Homo sapien
gagggatcccaccgctgaaccacca

SEQ ID NO: 5798666 - DNA, 25 bp, Homo sapien
tcagcagctacctcagcctcaccca

SEQ ID NO: 5798667 - DNA, 25 bp, Homo sapien
gatggagccaggaaaaccaggcatg

SEQ ID NO: 5798668 - DNA, 25 bp, Homo sapien
cagggtcaccaacctctagcatatg

SEQ ID NO: 5798669 - DNA, 25 bp, Homo sapien
ggtggggtccagcagtcgcagcagc

SEQ ID NO: 5798670 - DNA, 25 bp, Homo sapien
tgcctgggcactgcctgattcaaac

SEQ ID NO: 5798671 - DNA, 25 bp, Homo sapien
ctctcgccctggcgaccaccgtccg

SEQ ID NO: 5798672 - DNA, 25 bp, Homo sapien
gcaagggagcgtaaaccaaaggggc

SEQ ID NO: 5798673 - DNA, 25 bp, Homo sapien
gttggggggttggcgtggactgctc

SEQ ID NO: 5798674 - DNA, 25 bp, Homo sapien
gctatgtgggatgacagcaaggaga

SEQ ID NO: 5798675 - DNA, 25 bp, Homo sapien
gcagcgtgaccgcccgccgcgcacg

SEQ ID NO: 5798676 - DNA, 25 bp, Homo sapien
tctccagctccagtcccctccgtgc

SEQ ID NO: 5798677 - DNA, 25 bp, Homo sapien
gccagaagcctttgtcccttcagag

SEQ ID NO: 5798678 - DNA, 25 bp, Homo sapien
cgcggagtgcagcgtgaccgcccgc

SEQ ID NO: 5798679 - DNA, 25 bp, Homo sapien
cgggctgcgggtcttcatgccgaag

SEQ ID NO: 5798680 - DNA, 25 bp, Homo sapien
tgaaagccttcatcccaaaggaagc

SEQ ID NO: 5798681 - DNA, 25 bp, Homo sapien
gccgctcggttactgaagggtgtga

SEQ ID NO: 5798682 - DNA, 25 bp, Homo sapien
gaagcctcgtgggaagaatgaccgg

SEQ ID NO: 5798683 - DNA, 25 bp, Homo sapien
atactgcagttgaggttggggccga

SEQ ID NO: 5798684 - DNA, 25 bp, Homo sapien
aggcccctgggggccgatgctgaaa

SEQ ID NO: 5798685 - DNA, 25 bp, Homo sapien
ggttcagtaaggttggtaaggcagg

SEQ ID NO: 5798686 - DNA, 25 bp, Homo sapien
ttcaggggaggcccctgggggccga

SEQ ID NO: 5798687 - DNA, 25 bp, Homo sapien
cctctgccggcactgcgcggcgccg

SEQ ID NO: 5798688 - DNA, 25 bp, Homo sapien
cccgagccgccctctcggctgtccg

SEQ ID NO: 5798689 - DNA, 25 bp, Homo sapien
tcagggtcacctgctgtatcaagaa

SEQ ID NO: 5798690 - DNA, 25 bp, Homo sapien
accttctgctcagacccttccaccc

SEQ ID NO: 5798691 - DNA, 25 bp, Homo sapien
tcccgcctctcgccctggcgaccac

SEQ ID NO: 5798692 - DNA, 25 bp, Homo sapien
cagctcagcagctacctcagcctca

SEQ ID NO: 5798693 - DNA, 25 bp, Homo sapien
aagatagtggcagtgggcctgcctg

SEQ ID NO: 5798694 - DNA, 25 bp, Homo sapien
agggtcacctgctgtatcaagaact

SEQ ID NO: 5798695 - DNA, 25 bp, Homo sapien
cagtaggggggatcatgctctgaat

SEQ ID NO: 5798696 - DNA, 25 bp, Homo sapien
accgggagggcactgctgtaaaaag

SEQ ID NO: 5798697 - DNA, 25 bp, Homo sapien
ggtactggcgccatacattgcctac

SEQ ID NO: 5798698 - DNA, 25 bp, Homo sapien
ttagaaaaatagactctggattcac

SEQ ID NO: 5798699 - DNA, 25 bp, Homo sapien
gcacccgggctcgggcctcatcccc

SEQ ID NO: 5798700 - DNA, 25 bp, Homo sapien
tgcccatagtggtggagtgctccca

SEQ ID NO: 5798701 - DNA, 25 bp, Homo sapien
gagggcggtaggttccccagaagag

SEQ ID NO: 5798702 - DNA, 25 bp, Homo sapien
tccccagaagaggtccggggccacg

SEQ ID NO: 5798703 - DNA, 25 bp, Homo sapien
cttcatgccgaagtagacgtgaggg

SEQ ID NO: 5798704 - DNA, 25 bp, Homo sapien
cctgggcttcagctgtactgctttt

SEQ ID NO: 5798705 - DNA, 25 bp, Homo sapien
gcccctgggggccgatgctgaaacc

SEQ ID NO: 5798706 - DNA, 25 bp, Homo sapien
ttgagccacacagcaccccgccagt

SEQ ID NO: 5798707 - DNA, 25 bp, Homo sapien
aaagcctgtagcctggtactggcgc

SEQ ID NO: 5798708 - DNA, 25 bp, Homo sapien
taagacaaggctggtccagccgtgg

SEQ ID NO: 5798709 - DNA, 25 bp, Homo sapien
aagacaggaccacgacggccagagc

SEQ ID NO: 5798710 - DNA, 25 bp, Homo sapien
ttgtactaggaattctggaggcacc

SEQ ID NO: 5798711 - DNA, 25 bp, Homo sapien
gcagtcctgggttggaggtccagaa

SEQ ID NO: 5798712 - DNA, 25 bp, Homo sapien
atgaggaaggtttgaattactggta

SEQ ID NO: 5798713 - DNA, 25 bp, Homo sapien
tgaccgggagggcactgctgtaaaa

SEQ ID NO: 5798714 - DNA, 25 bp, Homo sapien
gtgcagcgtgaccgcccgccgcgca

SEQ ID NO: 5798715 - DNA, 25 bp, Homo sapien
acgggtggaaagagggctgggtcca

SEQ ID NO: 5798716 - DNA, 25 bp, Homo sapien
ccatcctggatgtgttggcgcccga

SEQ ID NO: 5798717 - DNA, 25 bp, Homo sapien
acgttggcacggagctcaccgtgga

SEQ ID NO: 5798718 - DNA, 25 bp, Homo sapien
ccaacatcgcaggtccaggtgccgc

SEQ ID NO: 5798719 - DNA, 25 bp, Homo sapien
aagaactgcccctgcccttgcccac

SEQ ID NO: 5798720 - DNA, 25 bp, Homo sapien
tgacccaaaacctgctcgccagagc

SEQ ID NO: 5798721 - DNA, 25 bp, Homo sapien
agctcaccgtggagtttggcagccc

SEQ ID NO: 5798722 - DNA, 25 bp, Homo sapien
agtccggtgaggaggggcttcgggc

SEQ ID NO: 5798723 - DNA, 25 bp, Homo sapien
ttgcccacttggacctctgtcctcc

SEQ ID NO: 5798724 - DNA, 25 bp, Homo sapien
tccagccgtggaaagggcggcagcc

SEQ ID NO: 5798725 - DNA, 25 bp, Homo sapien
ccgcgtcagcacacgggcacccagt

SEQ ID NO: 5798726 - DNA, 25 bp, Homo sapien
tggccataaaaggagctggaggctg

SEQ ID NO: 5798727 - DNA, 25 bp, Homo sapien
ctgcctgattcaaacacaaactcta

SEQ ID NO: 5798728 - DNA, 25 bp, Homo sapien
gggctatgtgggatgacagcaagga

SEQ ID NO: 5798729 - DNA, 25 bp, Homo sapien
gttgaggttggggccgacccaccac

SEQ ID NO: 5798730 - DNA, 25 bp, Homo sapien
agcctcacccagatgctctgccagc

SEQ ID NO: 5798731 - DNA, 25 bp, Homo sapien
cgctcggttactgaagggtgtgaag

SEQ ID NO: 5798732 - DNA, 25 bp, Homo sapien
cgggggtagtcatccagcccagagg

SEQ ID NO: 5798733 - DNA, 25 bp, Homo sapien
ggcaacacaggaggcgcggagtgca

SEQ ID NO: 5798734 - DNA, 25 bp, Homo sapien
gccagtaggggggatcatgctctga

SEQ ID NO: 5798735 - DNA, 25 bp, Homo sapien
ctcaccgtggagtttggcagcccga

SEQ ID NO: 5798736 - DNA, 25 bp, Homo sapien
cgccctggcgaccaccgtccggtta

SEQ ID NO: 5798737 - DNA, 25 bp, Homo sapien
ggcaaggcctttcggaggaaagcca

SEQ ID NO: 5798738 - DNA, 25 bp, Homo sapien
ctgctgcgcccacatcagtccggtg

SEQ ID NO: 5798739 - DNA, 25 bp, Homo sapien
tgcttttgtgtggttcccaaagtct

SEQ ID NO: 5798740 - DNA, 25 bp, Homo sapien
acaaggctggtccagccgtggaaag

SEQ ID NO: 5798741 - DNA, 25 bp, Homo sapien
tcctgaggctctacagtcactctcc

SEQ ID NO: 5798742 - DNA, 25 bp, Homo sapien
tctgccggcactgcgcggcgccgcc

SEQ ID NO: 5798743 - DNA, 25 bp, Homo sapien
atgctctgaattgcgctggccataa

SEQ ID NO: 5798744 - DNA, 25 bp, Homo sapien
gggtcttcatgccgaagtagacgtg

SEQ ID NO: 5798745 - DNA, 25 bp, Homo sapien
ccttcatcccaaaggaagcctcgtg

SEQ ID NO: 5798746 - DNA, 25 bp, Homo sapien
ggcttcagctgtactgcttttgtgt

SEQ ID NO: 5798747 - DNA, 25 bp, Homo sapien
ggagtttggcagcccgagcctggtg

SEQ ID NO: 5798748 - DNA, 25 bp, Homo sapien
ctcaaagcgctctctaaagccttca

SEQ ID NO: 5798749 - DNA, 25 bp, Homo sapien
cctcccaatccagccatcagcattt

SEQ ID NO: 5798750 - DNA, 25 bp, Homo sapien
gcctctcgccctggcgaccaccgtc

SEQ ID NO: 5798751 - DNA, 25 bp, Homo sapien
gattcaaacacaaactctatggaaa

SEQ ID NO: 5798752 - DNA, 25 bp, Homo sapien
ggcctcttgacgaactcagtggtga

SEQ ID NO: 5798753 - DNA, 25 bp, Homo sapien
catcagcatttagcagccccagcca

SEQ ID NO: 5798754 - DNA, 25 bp, Homo sapien
gagcatctacatactgcagttgagg

SEQ ID NO: 5798755 - DNA, 25 bp, Homo sapien
ggcactgcctgattcaaacacaaac

SEQ ID NO: 5798756 - DNA, 25 bp, Homo sapien
gtacgggtggaaagagggctgggtc

SEQ ID NO: 5798757 - DNA, 25 bp, Homo sapien
gtagacgtgagggcggtaggttccc

SEQ ID NO: 5798758 - DNA, 25 bp, Homo sapien
gtagactgcctgccagtcttggcag

SEQ ID NO: 5798759 - DNA, 25 bp, Homo sapien
aaaaatagactctggattcacattc

SEQ ID NO: 5798760 - DNA, 25 bp, Homo sapien
ccccagccagtggccaagggcttcc

SEQ ID NO: 5798761 - DNA, 25 bp, Homo sapien
acattgcctaccacgttggcacgga

SEQ ID NO: 5798762 - DNA, 25 bp, Homo sapien
agaggccgtcgtggaactcccagcc

SEQ ID NO: 5798763 - DNA, 25 bp, Homo sapien
aagccttcagcatggctctccaggg

SEQ ID NO: 5798764 - DNA, 25 bp, Homo sapien
atgacagcaaggagacacctgagat

SEQ ID NO: 5798765 - DNA, 25 bp, Homo sapien
ccccgatgtctggcaataccagccc

SEQ ID NO: 5798766 - DNA, 25 bp, Homo sapien
ctggtgaaagccttcatcccaaagg

SEQ ID NO: 5798767 - DNA, 25 bp, Homo sapien
ggctgggtccaccttctgctcagac

SEQ ID NO: 5798768 - DNA, 25 bp, Homo sapien
ggctctacagtcactctccagctcc

SEQ ID NO: 5798769 - DNA, 25 bp, Homo sapien
gagtgctcccaaagccaggtagttg

SEQ ID NO: 5798770 - DNA, 25 bp, Homo sapien
gaggtccgcgtcacaagagctcgga

SEQ ID NO: 5798771 - DNA, 25 bp, Homo sapien
caggaaaaccaggcatgcaggcggg

SEQ ID NO: 5798772 - DNA, 25 bp, Homo sapien
ggagtcggcaggcaacacaggaggc

SEQ ID NO: 5798773 - DNA, 25 bp, Homo sapien
agagccactcctccagccgtgctac

SEQ ID NO: 5798774 - DNA, 25 bp, Homo sapien
ccgggctcgggcctcatcccccagt

SEQ ID NO: 5798775 - DNA, 25 bp, Homo sapien
ctgattcaaacacaaactctatgga

SEQ ID NO: 5798776 - DNA, 25 bp, Homo sapien
tcggcaggcaacacaggaggcgcgg

SEQ ID NO: 5798777 - DNA, 25 bp, Homo sapien
tgtctggcaataccagcccttgtcc

SEQ ID NO: 5798778 - DNA, 25 bp, Homo sapien
acccagcgccccgacatacccaggg

SEQ ID NO: 5798779 - DNA, 25 bp, Homo sapien
aggcggggcaaggcctttcggagga

SEQ ID NO: 5798780 - DNA, 25 bp, Homo sapien
ccagccgtgctacgcggcccgccgc

SEQ ID NO: 5798781 - DNA, 25 bp, Homo sapien
gtggtgagccttaaggccccatcct

SEQ ID NO: 5798782 - DNA, 25 bp, Homo sapien
caggcccttctccttcagctggaag

SEQ ID NO: 5798783 - DNA, 25 bp, Homo sapien
ccagagctcaggcccttctccttca

SEQ ID NO: 5798784 - DNA, 25 bp, Homo sapien
tccagccatcagcatttagcagccc

SEQ ID NO: 5798785 - DNA, 25 bp, Homo sapien
aattactggtatccaaggggctggg

SEQ ID NO: 5798786 - DNA, 25 bp, Homo sapien
ctgcaagggagcgtaaaccaaaggg

SEQ ID NO: 5798787 - DNA, 25 bp, Homo sapien
aatgaccgggagggcactgctgtaa

SEQ ID NO: 5798788 - DNA, 25 bp, Homo sapien
acctctgtcctcccacttcagggat

SEQ ID NO: 5798789 - DNA, 25 bp, Homo sapien
agaaagcctgtagcctggtactggc

SEQ ID NO: 5798790 - DNA, 25 bp, Homo sapien
cagcccatgcctcgcccatcgcggt

SEQ ID NO: 5798791 - DNA, 25 bp, Homo sapien
gggcaaaagccagaagcctttgtcc

SEQ ID NO: 5798792 - DNA, 25 bp, Homo sapien
acgtgagggcggtaggttccccaga

SEQ ID NO: 5798793 - DNA, 25 bp, Homo sapien
agcccgggggtagtcatccagccca

SEQ ID NO: 5798794 - DNA, 25 bp, Homo sapien
tgccagccgcgtcagcacacgggca

SEQ ID NO: 5798795 - DNA, 25 bp, Homo sapien
ccttcagagccagagtggcatgagt

SEQ ID NO: 5798796 - DNA, 25 bp, Homo sapien
gccaggaaaaccaggcatgcaggcg

SEQ ID NO: 5798797 - DNA, 25 bp, Homo sapien
ggctgtccgcactccctctgccggc

SEQ ID NO: 5798798 - DNA, 25 bp, Homo sapien
ctcagtggtgagccttaaggcccca

SEQ ID NO: 5798799 - DNA, 25 bp, Homo sapien
agaaaaatagactctggattcacat

SEQ ID NO: 5798800 - DNA, 25 bp, Homo sapien
gggtgagggagggatcccaccgctg

SEQ ID NO: 5798801 - DNA, 25 bp, Homo sapien
agggctgggtccaccttctgctcag

SEQ ID NO: 5798802 - DNA, 25 bp, Homo sapien
gtggagtttggcagcccgagcctgg

SEQ ID NO: 5798803 - DNA, 25 bp, Homo sapien
cggtaagatagtggcagtgggcctg

SEQ ID NO: 5798804 - DNA, 25 bp, Homo sapien
tcgtgggaagaatgaccgggagggc

SEQ ID NO: 5798805 - DNA, 25 bp, Homo sapien
ccaccgctgaaccaccagctggtga

SEQ ID NO: 5798806 - DNA, 25 bp, Homo sapien
ggctgcgggtcttcatgccgaagta

SEQ ID NO: 5798807 - DNA, 25 bp, Homo sapien
accgcccgccgcgcacggtaccacg

SEQ ID NO: 5798808 - DNA, 25 bp, Homo sapien
ctggcgccatacattgcctaccacg

SEQ ID NO: 5798809 - DNA, 25 bp, Homo sapien
gggtccagcagtcgcagcagcaagg

SEQ ID NO: 5798810 - DNA, 25 bp, Homo sapien
tatgtgggatgacagcaaggagaca

SEQ ID NO: 5798811 - DNA, 25 bp, Homo sapien
ccaaagaaagcctgtagcctggtac

SEQ ID NO: 5798812 - DNA, 25 bp, Homo sapien
ctggtactggcgccatacattgcct

SEQ ID NO: 5798813 - DNA, 25 bp, Homo sapien
ggaaaaccaggcatgcaggcggggc

SEQ ID NO: 5798814 - DNA, 25 bp, Homo sapien
tgtgggatgacagcaaggagacacc

SEQ ID NO: 5798815 - DNA, 25 bp, Homo sapien
tcatccaggctctctgctgcctcca

SEQ ID NO: 5798816 - DNA, 25 bp, Homo sapien
acacctgagatgaaatgaggaaggt

SEQ ID NO: 5798817 - DNA, 25 bp, Homo sapien
ccgcactccctctgccggcactgcg

SEQ ID NO: 5798818 - DNA, 25 bp, Homo sapien
gagatgaaatgaggaaggtttgaat

SEQ ID NO: 5798819 - DNA, 25 bp, Homo sapien
cccgggggtagtcatccagcccaga

SEQ ID NO: 5798820 - DNA, 25 bp, Homo sapien
ggagaggcggcagtggagcccgggt

SEQ ID NO: 5798821 - DNA, 25 bp, Homo sapien
ctgggttggaggtccagaagacatt

SEQ ID NO: 5798822 - DNA, 25 bp, Homo sapien
ccatggccagtaagacaaggctggt

SEQ ID NO: 5798823 - DNA, 25 bp, Homo sapien
cgccagcggtaagatagtggcagtg

SEQ ID NO: 5798824 - DNA, 25 bp, Homo sapien
gccaagggcttcccgggtgagggag

SEQ ID NO: 5798825 - DNA, 25 bp, Homo sapien
agtcttggcagggcttgatttcctc

SEQ ID NO: 5798826 - DNA, 25 bp, Homo sapien
gaggagtcggcaggcaacacaggag

SEQ ID NO: 5798827 - DNA, 25 bp, Homo sapien
ccagtgggcccagctcagcagctac

SEQ ID NO: 5798828 - DNA, 25 bp, Homo sapien
ggaggccgctgagggcagcctgacc

SEQ ID NO: 5798829 - DNA, 25 bp, Homo sapien
gcctggctctgatggagccaggaaa

SEQ ID NO: 5798830 - DNA, 25 bp, Homo sapien
ggcgccatacattgcctaccacgtt

SEQ ID NO: 5798831 - DNA, 25 bp, Homo sapien
gcggtaggttccccagaagaggtcc

SEQ ID NO: 5798832 - DNA, 25 bp, Homo sapien
agggggcctgggcttcagctgtact

SEQ ID NO: 5798833 - DNA, 25 bp, Homo sapien
cgggagggcactgctgtaaaaagag

SEQ ID NO: 5798834 - DNA, 25 bp, Homo sapien
cagggctatgtgggatgacagcaag

SEQ ID NO: 5798835 - DNA, 25 bp, Homo sapien
cccccaggcctcttgacgaactcag

SEQ ID NO: 5798836 - DNA, 25 bp, Homo sapien
tcctgcctcacctctccggctcccg

SEQ ID NO: 5798837 - DNA, 25 bp, Homo sapien
taccacgttggcacggagctcaccg

SEQ ID NO: 5798838 - DNA, 25 bp, Homo sapien
gtcctcccacttcagggatcctggc

SEQ ID NO: 5798839 - DNA, 25 bp, Homo sapien
gagggtagggtcttggggttcagta

SEQ ID NO: 5798840 - DNA, 25 bp, Homo sapien
ttcatcccaaaggaagcctcgtggg

SEQ ID NO: 5798841 - DNA, 25 bp, Homo sapien
agtagccaattccaccaaggaggcc

SEQ ID NO: 5798842 - DNA, 25 bp, Homo sapien
ctctacagtcactctccagctccag

SEQ ID NO: 5798843 - DNA, 25 bp, Homo sapien
tctgcaaagactcctagctctgggg

SEQ ID NO: 5798844 - DNA, 25 bp, Homo sapien
tttggcagcccgagcctggtgagga

SEQ ID NO: 5798845 - DNA, 25 bp, Homo sapien
cctgggcactgcctgattcaaacac

SEQ ID NO: 5798846 - DNA, 25 bp, Homo sapien
gggtggtgccctgctgcgcccacat

SEQ ID NO: 5798847 - DNA, 25 bp, Homo sapien
acccagtgccacccaacatcgcagg

SEQ ID NO: 5798848 - DNA, 25 bp, Homo sapien
gctctctaaagccttcagcatggct

SEQ ID NO: 5798849 - DNA, 25 bp, Homo sapien
agccaagagcatctacatactgcag

SEQ ID NO: 5798850 - DNA, 25 bp, Homo sapien
cccaggcctcttgacgaactcagtg

SEQ ID NO: 5798851 - DNA, 25 bp, Homo sapien
cccgccgcgcacggtaccacgccag

SEQ ID NO: 5798852 - DNA, 25 bp, Homo sapien
cacctctccggctcccgcctctcgc

SEQ ID NO: 5798853 - DNA, 25 bp, Homo sapien
tcagctgtactgcttttgtgtggtt

SEQ ID NO: 5798854 - DNA, 25 bp, Homo sapien
accagctatttaggcgactctttac

SEQ ID NO: 5798855 - DNA, 25 bp, Homo sapien
attttcagggtcacctgctgtatca

SEQ ID NO: 5798856 - DNA, 25 bp, Homo sapien
gtgagggagggatcccaccgctgaa

SEQ ID NO: 5798857 - DNA, 25 bp, Homo sapien
agacacctgagatgaaatgaggaag

SEQ ID NO: 5798858 - DNA, 25 bp, Homo sapien
agatggcggctgtcggctagaatgt

SEQ ID NO: 5798859 - DNA, 25 bp, Homo sapien
gctacctcagcctcacccagatgct

SEQ ID NO: 5798860 - DNA, 25 bp, Homo sapien
tagctgagtcctgaggctctacagt

SEQ ID NO: 5798861 - DNA, 25 bp, Homo sapien
agcaagggaaaaagactgacatagc

SEQ ID NO: 5798862 - DNA, 25 bp, Homo sapien
gcacggagctcaccgtggagtttgg

SEQ ID NO: 5798863 - DNA, 25 bp, Homo sapien
tcttctcaaagcgctctctaaagcc

SEQ ID NO: 5798864 - DNA, 25 bp, Homo sapien
cagagccagagtggcatgagtgtct

SEQ ID NO: 5798865 - DNA, 25 bp, Homo sapien
acccagatgctctgccagccgcgtc

SEQ ID NO: 5798866 - DNA, 25 bp, Homo sapien
cctgtagcctggtactggcgccata

SEQ ID NO: 5798867 - DNA, 25 bp, Homo sapien
tagcgttcaggggaggcccctgggg

SEQ ID NO: 5798868 - DNA, 25 bp, Homo sapien
aggggcagtcctgggttggaggtcc

SEQ ID NO: 5798869 - DNA, 25 bp, Homo sapien
gtcagcaggggcagtcctgggttgg

SEQ ID NO: 5798870 - DNA, 25 bp, Homo sapien
gcccatgcctcgcccatcgcggtca

SEQ ID NO: 5798871 - DNA, 25 bp, Homo sapien
agtgaggcagccagtgggcccagct

SEQ ID NO: 5798872 - DNA, 25 bp, Homo sapien
tccctcccaatccagccatcagcat

SEQ ID NO: 5798873 - DNA, 25 bp, Homo sapien
ggcggggctggaggagtcggcaggc

SEQ ID NO: 5798874 - DNA, 25 bp, Homo sapien
acacctgccagccagcgcctgcgcc

SEQ ID NO: 5798875 - DNA, 25 bp, Homo sapien
cctctcggctgtccgcactccctct

SEQ ID NO: 5798876 - DNA, 25 bp, Homo sapien
tagaagtagccaattccaccaagga

SEQ ID NO: 5798877 - DNA, 25 bp, Homo sapien
ctgtcctcccacttcagggatcctg

SEQ ID NO: 5798878 - DNA, 25 bp, Homo sapien
agtggccaagggcttcccgggtgag

SEQ ID NO: 5798879 - DNA, 25 bp, Homo sapien
cccagggctatgtgggatgacagca

SEQ ID NO: 5798880 - DNA, 25 bp, Homo sapien
ttactggtatccaaggggctggggg

SEQ ID NO: 5798881 - DNA, 25 bp, Homo sapien
gggggttggcgtggactgctcgttg

SEQ ID NO: 5798882 - DNA, 25 bp, Homo sapien
cccagccatagggacccacaccgtc

SEQ ID NO: 5798883 - DNA, 25 bp, Homo sapien
ttcgggctgcgggtcttcatgccga

SEQ ID NO: 5798884 - DNA, 25 bp, Homo sapien
ccagcagtcgcagcagcaagggaaa

SEQ ID NO: 5798885 - DNA, 25 bp, Homo sapien
cgccagagctcaggcccttctcctt

SEQ ID NO: 5798886 - DNA, 25 bp, Homo sapien
ccaaaggaagcctcgtgggaagaat

SEQ ID NO: 5798887 - DNA, 25 bp, Homo sapien
gaagcctttgtcccttcagagccag

SEQ ID NO: 5798888 - DNA, 25 bp, Homo sapien
gaaagggcggcagcccatgcctcgc

SEQ ID NO: 5798889 - DNA, 25 bp, Homo sapien
ctgtactgcttttgtgtggttccca

SEQ ID NO: 5798890 - DNA, 25 bp, Homo sapien
ctgctcacacgtgtgcctgagctta

SEQ ID NO: 5798891 - DNA, 25 bp, Homo sapien
actccctctgccggcactgcgcggc

SEQ ID NO: 5798892 - DNA, 25 bp, Homo sapien
gcttcgggctgcgggtcttcatgcc

SEQ ID NO: 5798893 - DNA, 25 bp, Homo sapien
cactgcctgattcaaacacaaactc

SEQ ID NO: 5798894 - DNA, 25 bp, Homo sapien
gacatacccagggccaaagacagga

SEQ ID NO: 5798895 - DNA, 25 bp, Homo sapien
tcacaagagctcggagaggcggcag

SEQ ID NO: 5798896 - DNA, 25 bp, Homo sapien
ggctccagagatggcggctgtcggc

SEQ ID NO: 5798897 - DNA, 25 bp, Homo sapien
gtcttcagccatggccagtaagaca

SEQ ID NO: 5798898 - DNA, 25 bp, Homo sapien
cactgctgtaaaaagaggtacgggt

SEQ ID NO: 5798899 - DNA, 25 bp, Homo sapien
agccccagccagtggccaagggctt

SEQ ID NO: 5798900 - DNA, 25 bp, Homo sapien
gcttaggagtccccggggtggtgcc

SEQ ID NO: 5798901 - DNA, 25 bp, Homo sapien
ggaaggtcttctcaaagcgctctct

SEQ ID NO: 5798902 - DNA, 25 bp, Homo sapien
tccagggcctgggtcagtagactgc

SEQ ID NO: 5798903 - DNA, 25 bp, Homo sapien
gctctgaattgcgctggccataaaa

SEQ ID NO: 5798904 - DNA, 25 bp, Homo sapien
gctcagacccttccaccccgatgtc

SEQ ID NO: 5798905 - DNA, 25 bp, Homo sapien
gatgcccatagtggtggagtgctcc

SEQ ID NO: 5798906 - DNA, 25 bp, Homo sapien
tcttgacgaactcagtggtgagcct

SEQ ID NO: 5798907 - DNA, 25 bp, Homo sapien
tagccaattccaccaaggaggccgc

SEQ ID NO: 5798908 - DNA, 25 bp, Homo sapien
gctcgggcctcatcccccagtatct

SEQ ID NO: 5798909 - DNA, 25 bp, Homo sapien
cgagcccctgagggggcctgggctt

SEQ ID NO: 5798910 - DNA, 25 bp, Homo sapien
cagagggtagggtcttggggttcag

SEQ ID NO: 5798911 - DNA, 25 bp, Homo sapien
cccagaagaggtccggggccacggc

SEQ ID NO: 5798912 - DNA, 25 bp, Homo sapien
gtggcagtgggcctgcctggctctg

SEQ ID NO: 5798913 - DNA, 25 bp, Homo sapien
gaagtagccaattccaccaaggagg

SEQ ID NO: 5798914 - DNA, 25 bp, Homo sapien
gggcggcagcccatgcctcgcccat

SEQ ID NO: 5798915 - DNA, 25 bp, Homo sapien
cgcccgccgcgcacggtaccacgcc

SEQ ID NO: 5798916 - DNA, 25 bp, Homo sapien
aggcacccgggctcgggcctcatcc

SEQ ID NO: 5798917 - DNA, 25 bp, Homo sapien
cccgccagcggtaagatagtggcag

SEQ ID NO: 5798918 - DNA, 25 bp, Homo sapien
tcactctccagctccagtcccctcc

SEQ ID NO: 5798919 - DNA, 25 bp, Homo sapien
cccatcgcggtcactgtactgctcc

SEQ ID NO: 5798920 - DNA, 25 bp, Homo sapien
cctcctctccctcccttcagtagtc

SEQ ID NO: 5798921 - DNA, 25 bp, Homo sapien
ggagctcaccgtggagtttggcagc

SEQ ID NO: 5798922 - DNA, 25 bp, Homo sapien
catagtggtggagtgctcccaaagc

SEQ ID NO: 5798923 - DNA, 25 bp, Homo sapien
aaatgaggaaggtttgaattactgg

SEQ ID NO: 5798924 - DNA, 25 bp, Homo sapien
ccactcctccagccgtgctacgcgg

SEQ ID NO: 5798925 - DNA, 25 bp, Homo sapien
gggggatcatgctctgaattgcgct

SEQ ID NO: 5798926 - DNA, 25 bp, Homo sapien
ccagtgaggcagccagtgggcccag

SEQ ID NO: 5798927 - DNA, 25 bp, Homo sapien
atgggctacaggcaaaagtagggtt

SEQ ID NO: 5798928 - DNA, 25 bp, Homo sapien
ctgggggcaaaagccagaagccttt

SEQ ID NO: 5798929 - DNA, 25 bp, Homo sapien
aattctggaggcacccgggctcggg

SEQ ID NO: 5798930 - DNA, 25 bp, Homo sapien
tgctcgttgtactaggaattctgga

SEQ ID NO: 5798931 - DNA, 25 bp, Homo sapien
gcgtggactgctcgttgtactagga

SEQ ID NO: 5798932 - DNA, 25 bp, Homo sapien
ggtccgcgtcacaagagctcggaga

SEQ ID NO: 5798933 - DNA, 25 bp, Homo sapien
ggtccagaagacattgtagctgagt

SEQ ID NO: 5798934 - DNA, 25 bp, Homo sapien
tggggtccagcagtcgcagcagcaa

SEQ ID NO: 5798935 - DNA, 25 bp, Homo sapien
ggggttcagtaaggttggtaaggca

SEQ ID NO: 5798936 - DNA, 25 bp, Homo sapien
aggggcccaaggcgggatgaggtgg

SEQ ID NO: 5798937 - DNA, 25 bp, Homo sapien
tgtgttggcgcccgaaggagaggcc

SEQ ID NO: 5798938 - DNA, 25 bp, Homo sapien
agtgtcttggctcccctcctctccc

SEQ ID NO: 5798939 - DNA, 25 bp, Homo sapien
cttcagcatggctctccagggcctg

SEQ ID NO: 5798940 - DNA, 25 bp, Homo sapien
aggaggcgcggagtgcagcgtgacc

SEQ ID NO: 5798941 - DNA, 25 bp, Homo sapien
tctccggctcccgcctctcgccctg

SEQ ID NO: 5798942 - DNA, 25 bp, Homo sapien
tctctgctgcctccagtgaggcagc

SEQ ID NO: 5798943 - DNA, 25 bp, Homo sapien
cattgagccacacagcaccccgcca

SEQ ID NO: 5798944 - DNA, 25 bp, Homo sapien
atagccaagagcatctacatactgc

SEQ ID NO: 5798945 - DNA, 25 bp, Homo sapien
ccctgctcacacgtgtgcctgagct

SEQ ID NO: 5798946 - DNA, 25 bp, Homo sapien
cagtgggcctgcctggctctgatgg

SEQ ID NO: 5798947 - DNA, 25 bp, Homo sapien
gtagttgacattgagccacacagca

SEQ ID NO: 5798948 - DNA, 25 bp, Homo sapien
ggtcacctgctgtatcaagaactgc

SEQ ID NO: 5798949 - DNA, 25 bp, Homo sapien
aagccagaagcctttgtcccttcag

SEQ ID NO: 5798950 - DNA, 25 bp, Homo sapien
actgcagttgaggttggggccgacc

SEQ ID NO: 5798951 - DNA, 25 bp, Homo sapien
gctgtaaaaagaggtacgggtggaa

SEQ ID NO: 5798952 - DNA, 25 bp, Homo sapien
gggctggaggagtcggcaggcaaca

SEQ ID NO: 5798953 - DNA, 25 bp, Homo sapien
cagccatcagcatttagcagcccca

SEQ ID NO: 5798954 - DNA, 25 bp, Homo sapien
tggtgaggaccctccagatgcccat

SEQ ID NO: 5798955 - DNA, 25 bp, Homo sapien
gaagaatgaccgggagggcactgct

SEQ ID NO: 5798956 - DNA, 25 bp, Homo sapien
acctgagatgaaatgaggaaggttt

SEQ ID NO: 5798957 - DNA, 25 bp, Homo sapien
gggatcatgctctgaattgcgctgg

SEQ ID NO: 5798958 - DNA, 25 bp, Homo sapien
agctggaaggtcttctcaaagcgct

SEQ ID NO: 5798959 - DNA, 25 bp, Homo sapien
cagcaggggcccaaggcgggatgag

SEQ ID NO: 5798960 - DNA, 25 bp, Homo sapien
ggtgccctgctgcgcccacatcagt

SEQ ID NO: 5798961 - DNA, 25 bp, Homo sapien
atagactctggattcacattcaccc

SEQ ID NO: 5798962 - DNA, 25 bp, Homo sapien
aaggagacacctgagatgaaatgag

SEQ ID NO: 5798963 - DNA, 25 bp, Homo sapien
ctgctcagacccttccaccccgatg

SEQ ID NO: 5798964 - DNA, 25 bp, Homo sapien
gatagtggcagtgggcctgcctggc

SEQ ID NO: 5798965 - DNA, 25 bp, Homo sapien
ctcccagccatagggacccacaccg

SEQ ID NO: 5798966 - DNA, 25 bp, Homo sapien
caggaccacgacggccagagccact

SEQ ID NO: 5798967 - DNA, 25 bp, Homo sapien
tgccacccaacatcgcaggtccagg

SEQ ID NO: 5798968 - DNA, 25 bp, Homo sapien
accctccagatgcccatagtggtgg

SEQ ID NO: 5798969 - DNA, 25 bp, Homo sapien
gctcccgcctctcgccctggcgacc

SEQ ID NO: 5798970 - DNA, 25 bp, Homo sapien
agacaaggctggtccagccgtggaa

SEQ ID NO: 5798971 - DNA, 25 bp, Homo sapien
acctgctgtatcaagaactgcccct

SEQ ID NO: 5798972 - DNA, 25 bp, Homo sapien
aagactcctagctctggggcccagt

SEQ ID NO: 5798973 - DNA, 25 bp, Homo sapien
aacgagcccctgagggggcctgggc

SEQ ID NO: 5798974 - DNA, 25 bp, Homo sapien
cggtgaggaggggcttcgggctgcg

SEQ ID NO: 5798975 - DNA, 25 bp, Homo sapien
cccctgagggggcctgggcttcagc

SEQ ID NO: 5798976 - DNA, 25 bp, Homo sapien
gggcccaaggcgggatgaggtgggg

SEQ ID NO: 5798977 - DNA, 25 bp, Homo sapien
gcgctctctaaagccttcagcatgg

SEQ ID NO: 5798978 - DNA, 25 bp, Homo sapien
ggggcctgggcttcagctgtactgc

SEQ ID NO: 5798979 - DNA, 25 bp, Homo sapien
tccaccccgatgtctggcaatacca

SEQ ID NO: 5798980 - DNA, 25 bp, Homo sapien
tctggcaataccagcccttgtccgt

SEQ ID NO: 5798981 - DNA, 25 bp, Homo sapien
ggtgagccttaaggccccatcctgg

SEQ ID NO: 5798982 - DNA, 25 bp, Homo sapien
ctccctcccttcagtagtcttcagc

SEQ ID NO: 5798983 - DNA, 25 bp, Homo sapien
ccccatcctggatgtgttggcgccc

SEQ ID NO: 5798984 - DNA, 25 bp, Homo sapien
gctccctcccaatccagccatcagc

SEQ ID NO: 5798985 - DNA, 25 bp, Homo sapien
ggcctgggcttcagctgtactgctt

SEQ ID NO: 5798986 - DNA, 25 bp, Homo sapien
ccgccagtaggggggatcatgctct

SEQ ID NO: 5798987 - DNA, 25 bp, Homo sapien
tctttaccatctctgtcagcagggg

SEQ ID NO: 5798988 - DNA, 25 bp, Homo sapien
ccgagccatcctggcactgaggtcc

SEQ ID NO: 5798989 - DNA, 25 bp, Homo sapien
ccaggcatgcaggcggggcaaggcc

SEQ ID NO: 5798990 - DNA, 25 bp, Homo sapien
gctggaggctgcaagggagcgtaaa

SEQ ID NO: 5798991 - DNA, 25 bp, Homo sapien
agtttggcagcccgagcctggtgag

SEQ ID NO: 5798992 - DNA, 25 bp, Homo sapien
tgtcggctagaatgtccagcagggg

SEQ ID NO: 5798993 - DNA, 25 bp, Homo sapien
gctgagtcctgaggctctacagtca

SEQ ID NO: 5798994 - DNA, 25 bp, Homo sapien
acacgtgtgcctgagcttaggagtc

SEQ ID NO: 5798995 - DNA, 25 bp, Homo sapien
ccaggtagttgacattgagccacac

SEQ ID NO: 5798996 - DNA, 25 bp, Homo sapien
cgagccgccctctcggctgtccgca

SEQ ID NO: 5798997 - DNA, 25 bp, Homo sapien
agcagtcgcagcagcaagggaaaaa

SEQ ID NO: 5798998 - DNA, 25 bp, Homo sapien
ccgcctctcgccctggcgaccaccg

SEQ ID NO: 5798999 - DNA, 25 bp, Homo sapien
gcctgggtcagtagactgcctgcca

SEQ ID NO: 5799000 - DNA, 25 bp, Homo sapien
ccagagccactcctccagccgtgct

SEQ ID NO: 5799001 - DNA, 25 bp, Homo sapien
actctttaccatctctgtcagcagg

SEQ ID NO: 5799002 - DNA, 25 bp, Homo sapien
tctgaattgcgctggccataaaagg

SEQ ID NO: 5799003 - DNA, 25 bp, Homo sapien
ccagcggtaagatagtggcagtggg

SEQ ID NO: 5799004 - DNA, 25 bp, Homo sapien
tgccggcactgcgcggcgccgccgc

SEQ ID NO: 5799005 - DNA, 25 bp, Homo sapien
tcaccccagggctatgtgggatgac

SEQ ID NO: 5799006 - DNA, 25 bp, Homo sapien
agtagtcttcagccatggccagtaa

SEQ ID NO: 5799007 - DNA, 25 bp, Homo sapien
caaagactcctagctctggggccca

SEQ ID NO: 5799008 - DNA, 25 bp, Homo sapien
gaggtccagaagacattgtagctga

SEQ ID NO: 5799009 - DNA, 25 bp, Homo sapien
cctcttgacgaactcagtggtgagc

SEQ ID NO: 5799010 - DNA, 25 bp, Homo sapien
agcatggctctccagggcctgggtc

SEQ ID NO: 5799011 - DNA, 25 bp, Homo sapien
ccacttggacctctgtcctcccact

SEQ ID NO: 5799012 - DNA, 25 bp, Homo sapien
caccacccgaacgagcccctgaggg

SEQ ID NO: 5799013 - DNA, 25 bp, Homo sapien
aaaccaaaggggctccagagatggc

SEQ ID NO: 5799014 - DNA, 25 bp, Homo sapien
gggagggatcccaccgctgaaccac

SEQ ID NO: 5799015 - DNA, 25 bp, Homo sapien
gactcctagctctggggcccagtgc

SEQ ID NO: 5799016 - DNA, 25 bp, Homo sapien
tgtggttcccaaagtctgcaaagac

SEQ ID NO: 5799017 - DNA, 25 bp, Homo sapien
caaagacaggaccacgacggccaga

SEQ ID NO: 5799018 - DNA, 25 bp, Homo sapien
ttcaaacacaaactctatggaaatg

SEQ ID NO: 5799019 - DNA, 25 bp, Homo sapien
aaccaggcatgcaggcggggcaagg

SEQ ID NO: 5799020 - DNA, 25 bp, Homo sapien
gcgccccgacatacccagggccaaa

SEQ ID NO: 5799021 - DNA, 25 bp, Homo sapien
tctccagggcctgggtcagtagact

SEQ ID NO: 5799022 - DNA, 25 bp, Homo sapien
agtcctgaggctctacagtcactct

SEQ ID NO: 5799023 - DNA, 25 bp, Homo sapien
gccttcagcatggctctccagggcc

SEQ ID NO: 5799024 - DNA, 25 bp, Homo sapien
cacccgaacgagcccctgagggggc

SEQ ID NO: 5799025 - DNA, 25 bp, Homo sapien
gcggggcaaggcctttcggaggaaa

SEQ ID NO: 5799026 - DNA, 25 bp, Homo sapien
cttttgtgtggttcccaaagtctgc

SEQ ID NO: 5799027 - DNA, 25 bp, Homo sapien
cccttctccttcagctggaaggtct

SEQ ID NO: 5799028 - DNA, 25 bp, Homo sapien
gcgttcaggggaggcccctgggggc

SEQ ID NO: 5799029 - DNA, 25 bp, Homo sapien
cagctcatccaggctctctgctgcc

SEQ ID NO: 5799030 - DNA, 25 bp, Homo sapien
tgggcttcagctgtactgcttttgt

SEQ ID NO: 5799031 - DNA, 25 bp, Homo sapien
cgtcacaagagctcggagaggcggc

SEQ ID NO: 5799032 - DNA, 25 bp, Homo sapien
ctgctgtaaaaagaggtacgggtgg

SEQ ID NO: 5799033 - DNA, 25 bp, Homo sapien
tcctggcactgaggtccgcgtcaca

SEQ ID NO: 5799034 - DNA, 25 bp, Homo sapien
atgggaattttcagggtcacctgct

SEQ ID NO: 5799035 - DNA, 25 bp, Homo sapien
tcgtcagggtcaccaacctctagca

SEQ ID NO: 5799036 - DNA, 25 bp, Homo sapien
gcagcccgagcctggtgaggaccct

SEQ ID NO: 5799037 - DNA, 25 bp, Homo sapien
caagtcgtcagggtcaccaacctct

SEQ ID NO: 5799038 - DNA, 25 bp, Homo sapien
gggggccgatgctgaaaccagctat

SEQ ID NO: 5799039 - DNA, 25 bp, Homo sapien
cagctacctcagcctcacccagatg

SEQ ID NO: 5799040 - DNA, 25 bp, Homo sapien
ggaactcccagccatagggacccac

SEQ ID NO: 5799041 - DNA, 25 bp, Homo sapien
gtccaggtgccgctcggttactgaa

SEQ ID NO: 5799042 - DNA, 25 bp, Homo sapien
aaaacctgctcgccagagctcaggc

SEQ ID NO: 5799043 - DNA, 25 bp, Homo sapien
ccccgccagtaggggggatcatgct

SEQ ID NO: 5799044 - DNA, 25 bp, Homo sapien
caagccgaggtagcgttcaggggag

SEQ ID NO: 5799045 - DNA, 25 bp, Homo sapien
ggcgcccgaaggagaggccgtcgtg

SEQ ID NO: 5799046 - DNA, 25 bp, Homo sapien
gcaggggcagtcctgggttggaggt

SEQ ID NO: 5799047 - DNA, 25 bp, Homo sapien
ttgacgaactcagtggtgagcctta

SEQ ID NO: 5799048 - DNA, 25 bp, Homo sapien
tgtagctgagtcctgaggctctaca

SEQ ID NO: 5799049 - DNA, 25 bp, Homo sapien
tccagcaggggcccaaggcgggatg

SEQ ID NO: 5799050 - DNA, 25 bp, Homo sapien
gccaaagacaggaccacgacggcca

SEQ ID NO: 5799051 - DNA, 25 bp, Homo sapien
aaggccccatcctggatgtgttggc

SEQ ID NO: 5799052 - DNA, 25 bp, Homo sapien
gtgggaagaatgaccgggagggcac

SEQ ID NO: 5799053 - DNA, 25 bp, Homo sapien
ccaccttctgctcagacccttccac

SEQ ID NO: 5799054 - DNA, 25 bp, Homo sapien
ggtcactgtactgctcccaaagaaa

SEQ ID NO: 5799055 - DNA, 25 bp, Homo sapien
tagggacccacaccgtccccctgct

SEQ ID NO: 5799056 - DNA, 25 bp, Homo sapien
attccaccaaggaggccgctgaggg

SEQ ID NO: 5799057 - DNA, 25 bp, Homo sapien
tggccaagggcttcccgggtgaggg

SEQ ID NO: 5799058 - DNA, 25 bp, Homo sapien
agactctggattcacattcacccca

SEQ ID NO: 5799059 - DNA, 25 bp, Homo sapien
aaggaggccgctgagggcagcctga

SEQ ID NO: 5799060 - DNA, 25 bp, Homo sapien
gcaaggagacacctgagatgaaatg

SEQ ID NO: 5799061 - DNA, 25 bp, Homo sapien
ggggtagtcatccagcccagagggt

SEQ ID NO: 5799062 - DNA, 25 bp, Homo sapien
gtaaaccaaaggggctccagagatg

SEQ ID NO: 5799063 - DNA, 25 bp, Homo sapien
gaggtagcgttcaggggaggcccct

SEQ ID NO: 5799064 - DNA, 25 bp, Homo sapien
tgagtgtcttggctcccctcctctc

SEQ ID NO: 5799065 - DNA, 25 bp, Homo sapien
ggaccacgacggccagagccactcc

SEQ ID NO: 5799066 - DNA, 25 bp, Homo sapien
ctgagatgaaatgaggaaggtttga

SEQ ID NO: 5799067 - DNA, 25 bp, Homo sapien
cggggctggaggagtcggcaggcaa

SEQ ID NO: 5799068 - DNA, 25 bp, Homo sapien
cggctgtcggctagaatgtccagca

SEQ ID NO: 5799069 - DNA, 25 bp, Homo sapien
agtcggcaggcaacacaggaggcgc

SEQ ID NO: 5799070 - DNA, 25 bp, Homo sapien
acagtcactctccagctccagtccc

SEQ ID NO: 5799071 - DNA, 25 bp, Homo sapien
tgaaaccagctatttaggcgactct

SEQ ID NO: 5799072 - DNA, 25 bp, Homo sapien
tcctgggttggaggtccagaagaca

SEQ ID NO: 5799073 - DNA, 25 bp, Homo sapien
atgctgaaaccagctatttaggcga

SEQ ID NO: 5799074 - DNA, 25 bp, Homo sapien
ccaatccagccatcagcatttagca

SEQ ID NO: 5799075 - DNA, 25 bp, Homo sapien
tgctcgccagagctcaggcccttct

SEQ ID NO: 5799076 - DNA, 25 bp, Homo sapien
gagtggcatgagtgtcttggctccc

SEQ ID NO: 5799077 - DNA, 25 bp, Homo sapien
ggggaggcccctgggggccgatgct

SEQ ID NO: 5799078 - DNA, 25 bp, Homo sapien
ggagaggccgtcgtggaactcccag

SEQ ID NO: 5799079 - DNA, 25 bp, Homo sapien
ccctgcccttgcccacttggacctc

SEQ ID NO: 5799080 - DNA, 25 bp, Homo sapien
tcatgccgaagtagacgtgagggcg

SEQ ID NO: 5799081 - DNA, 25 bp, Homo sapien
ccggggccacggcggggctggagga

SEQ ID NO: 5799082 - DNA, 25 bp, Homo sapien
agactgcctgccagtcttggcaggg

SEQ ID NO: 5799083 - DNA, 25 bp, Homo sapien
cctgacccaaaacctgctcgccaga

SEQ ID NO: 5799084 - DNA, 25 bp, Homo sapien
gctctgccagccgcgtcagcacacg

SEQ ID NO: 5799085 - DNA, 25 bp, Homo sapien
taccagcccttgtccgtagaagtag

SEQ ID NO: 5799086 - DNA, 25 bp, Homo sapien
ggcgactctttaccatctctgtcag

SEQ ID NO: 5799087 - DNA, 25 bp, Homo sapien
tccagaagacattgtagctgagtcc

SEQ ID NO: 5799088 - DNA, 25 bp, Homo sapien
cccttgtccgtagaagtagccaatt

SEQ ID NO: 5799089 - DNA, 25 bp, Homo sapien
gggttggcgtggactgctcgttgta

SEQ ID NO: 5799090 - DNA, 25 bp, Homo sapien
tcagtccggtgaggaggggcttcgg

SEQ ID NO: 5799091 - DNA, 25 bp, Homo sapien
tatcaagaactgcccctgcccttgc

SEQ ID NO: 5799092 - DNA, 25 bp, Homo sapien
ggagtccccggggtggtgccctgct

SEQ ID NO: 5799093 - DNA, 25 bp, Homo sapien
gggcagcctgacccaaaacctgctc

SEQ ID NO: 5799094 - DNA, 25 bp, Homo sapien
aacctgctcgccagagctcaggccc

SEQ ID NO: 5799095 - DNA, 25 bp, Homo sapien
agccgaggtagcgttcaggggaggc

SEQ ID NO: 5799096 - DNA, 25 bp, Homo sapien
ccagcccttgtccgtagaagtagcc

SEQ ID NO: 5799097 - DNA, 25 bp, Homo sapien
gttggcacggagctcaccgtggagt

SEQ ID NO: 5799098 - DNA, 25 bp, Homo sapien
aggccgtcgtggaactcccagccat

SEQ ID NO: 5799099 - DNA, 25 bp, Homo sapien
agcctcgtgggaagaatgaccggga

SEQ ID NO: 5799100 - DNA, 25 bp, Homo sapien
aaaaccaggcatgcaggcggggcaa

SEQ ID NO: 5799101 - DNA, 25 bp, Homo sapien
taggaattctggaggcacccgggct

SEQ ID NO: 5799102 - DNA, 25 bp, Homo sapien
gggtccaccttctgctcagaccctt

SEQ ID NO: 5799103 - DNA, 25 bp, Homo sapien
cggggtggtgccctgctgcgcccac

SEQ ID NO: 5799104 - DNA, 25 bp, Homo sapien
tactggcgccatacattgcctacca

SEQ ID NO: 5799105 - DNA, 25 bp, Homo sapien
gatgtgttggcgcccgaaggagagg

SEQ ID NO: 5799106 - DNA, 25 bp, Homo sapien
tcccaaagaaagcctgtagcctggt

SEQ ID NO: 5799107 - DNA, 25 bp, Homo sapien
ccagccagtggccaagggcttcccg

SEQ ID NO: 5799108 - DNA, 25 bp, Homo sapien
gtcgcagcagcaagggaaaaagact

SEQ ID NO: 5799109 - DNA, 25 bp, Homo sapien
gagcttaggagtccccggggtggtg

SEQ ID NO: 5799110 - DNA, 25 bp, Homo sapien
ctctgatggagccaggaaaaccagg

SEQ ID NO: 5799111 - DNA, 25 bp, Homo sapien
aaagactgacatagccaagagcatc

SEQ ID NO: 5799112 - DNA, 25 bp, Homo sapien
ggcagggcttgatttcctcctgcct

SEQ ID NO: 5799113 - DNA, 25 bp, Homo sapien
catccagcccagagggtagggtctt

SEQ ID NO: 5799114 - DNA, 25 bp, Homo sapien
tccaccaaggaggccgctgagggca

SEQ ID NO: 5799115 - DNA, 25 bp, Homo sapien
acattcaccccagggctatgtggga

SEQ ID NO: 5799116 - DNA, 25 bp, Homo sapien
ctcctgcctgggcactgcctgattc

SEQ ID NO: 5799117 - DNA, 25 bp, Homo sapien
cgggatgaggtggggtccagcagtc

SEQ ID NO: 5799118 - DNA, 25 bp, Homo sapien
gccaagtcgtcagggtcaccaacct

SEQ ID NO: 5799119 - DNA, 25 bp, Homo sapien
tccgcgtcacaagagctcggagagg

SEQ ID NO: 5799120 - DNA, 25 bp, Homo sapien
aaagagggctgggtccaccttctgc

SEQ ID NO: 5799121 - DNA, 25 bp, Homo sapien
ggaggggcttcgggctgcgggtctt

SEQ ID NO: 5799122 - DNA, 25 bp, Homo sapien
gcccaaggcgggatgaggtggggtc

SEQ ID NO: 5799123 - DNA, 25 bp, Homo sapien
cccagggccaaagacaggaccacga

SEQ ID NO: 5799124 - DNA, 25 bp, Homo sapien
gtatccaaggggctgggggcaaaag

SEQ ID NO: 5799125 - DNA, 25 bp, Homo sapien
gctatttaggcgactctttaccatc

SEQ ID NO: 5799126 - DNA, 25 bp, Homo sapien
gtcagtagactgcctgccagtcttg

SEQ ID NO: 5799127 - DNA, 25 bp, Homo sapien
tgaattgcgctggccataaaaggag

SEQ ID NO: 5799128 - DNA, 25 bp, Homo sapien
tccaatttatttagaaaaatagact

SEQ ID NO: 5799129 - DNA, 25 bp, Homo sapien
gggtggaaagagggctgggtccacc

SEQ ID NO: 5799130 - DNA, 25 bp, Homo sapien
ctcacctctccggctcccgcctctc

SEQ ID NO: 5799131 - DNA, 25 bp, Homo sapien
ccagtaagacaaggctggtccagcc

SEQ ID NO: 5799132 - DNA, 25 bp, Homo sapien
ctgcctggctctgatggagccagga

SEQ ID NO: 5799133 - DNA, 25 bp, Homo sapien
gacccaccacccgaacgagcccctg

SEQ ID NO: 5799134 - DNA, 25 bp, Homo sapien
tttcggaggaaagccaagtcgtcag

SEQ ID NO: 5799135 - DNA, 25 bp, Homo sapien
tcttggggttcagtaaggttggtaa

SEQ ID NO: 5799136 - DNA, 25 bp, Homo sapien
gtccggttagcgacacctgccagcc

SEQ ID NO: 5799137 - DNA, 25 bp, Homo sapien
ctccgtgctgacccccaggcctctt

SEQ ID NO: 5799138 - DNA, 25 bp, Homo sapien
agcctttgtcccttcagagccagag

SEQ ID NO: 5799139 - DNA, 25 bp, Homo sapien
ctcaggcccttctccttcagctgga

SEQ ID NO: 5799140 - DNA, 25 bp, Homo sapien
acattgtagctgagtcctgaggctc

SEQ ID NO: 5799141 - DNA, 25 bp, Homo sapien
tggggggttggcgtggactgctcgt

SEQ ID NO: 5799142 - DNA, 25 bp, Homo sapien
acccaacatcgcaggtccaggtgcc

SEQ ID NO: 5799143 - DNA, 25 bp, Homo sapien
gtggtgccctgctgcgcccacatca

SEQ ID NO: 5799144 - DNA, 25 bp, Homo sapien
aagccaagtcgtcagggtcaccaac

SEQ ID NO: 5799145 - DNA, 25 bp, Homo sapien
cctggatgtgttggcgcccgaagga

SEQ ID NO: 5799146 - DNA, 25 bp, Homo sapien
cgactctttaccatctctgtcagca

SEQ ID NO: 5799147 - DNA, 25 bp, Homo sapien
acggtaccacgccagcacccagcgc

SEQ ID NO: 5799148 - DNA, 25 bp, Homo sapien
ggaaggtttgaattactggtatcca

SEQ ID NO: 5799149 - DNA, 25 bp, Homo sapien
ggggcaaggcctttcggaggaaagc

SEQ ID NO: 5799150 - DNA, 25 bp, Homo sapien
actgacatagccaagagcatctaca

SEQ ID NO: 5799151 - DNA, 25 bp, Homo sapien
ccacccaacatcgcaggtccaggtg

SEQ ID NO: 5799152 - DNA, 25 bp, Homo sapien
tcggagaggcggcagtggagcccgg

SEQ ID NO: 5799153 - DNA, 25 bp, Homo sapien
gagggagggatcccaccgctgaacc

SEQ ID NO: 5799154 - DNA, 25 bp, Homo sapien
ctggcactgaggtccgcgtcacaag

SEQ ID NO: 5799155 - DNA, 25 bp, Homo sapien
aacctctagcatatgggctacaggc

SEQ ID NO: 5799156 - DNA, 25 bp, Homo sapien
agccagtgggcccagctcagcagct

SEQ ID NO: 5799157 - DNA, 25 bp, Homo sapien
gagccagagtggcatgagtgtcttg

SEQ ID NO: 5799158 - DNA, 25 bp, Homo sapien
tccctctgccggcactgcgcggcgc

SEQ ID NO: 5799159 - DNA, 25 bp, Homo sapien
gggcctgcctggctctgatggagcc

SEQ ID NO: 5799160 - DNA, 25 bp, Homo sapien
agactgacatagccaagagcatcta

SEQ ID NO: 5799161 - DNA, 25 bp, Homo sapien
ggaaaaagactgacatagccaagag

SEQ ID NO: 5799162 - DNA, 25 bp, Homo sapien
gggctcgggcctcatcccccagtat

SEQ ID NO: 5799163 - DNA, 25 bp, Homo sapien
gctacaggcaaaagtagggttgggg

SEQ ID NO: 5799164 - DNA, 25 bp, Homo sapien
aactctatggaaatgggaattttca

SEQ ID NO: 5799165 - DNA, 25 bp, Homo sapien
cagcccagagggtagggtcttgggg

SEQ ID NO: 5799166 - DNA, 25 bp, Homo sapien
tgcgcccacatcagtccggtgagga

SEQ ID NO: 5799167 - DNA, 25 bp, Homo sapien
agagggctgggtccaccttctgctc

SEQ ID NO: 5799168 - DNA, 25 bp, Homo sapien
acggagctcaccgtggagtttggca

SEQ ID NO: 5799169 - DNA, 25 bp, Homo sapien
ctgctcccaaagaaagcctgtagcc

SEQ ID NO: 5799170 - DNA, 25 bp, Homo sapien
gtcagcacacgggcacccagtgcca

SEQ ID NO: 5799171 - DNA, 25 bp, Homo sapien
ccctgctgcgcccacatcagtccgg

SEQ ID NO: 5799172 - DNA, 25 bp, Homo sapien
tcagccatggccagtaagacaaggc

SEQ ID NO: 5799173 - DNA, 25 bp, Homo sapien
ccccgagccatcctggcactgaggt

SEQ ID NO: 5799174 - DNA, 25 bp, Homo sapien
ccaaagccaggtagttgacattgag

SEQ ID NO: 5799175 - DNA, 25 bp, Homo sapien
aagtagacgtgagggcggtaggttc

SEQ ID NO: 5799176 - DNA, 25 bp, Homo sapien
cgcccgaaggagaggccgtcgtgga

SEQ ID NO: 5799177 - DNA, 25 bp, Homo sapien
taccacgccagcacccagcgccccg

SEQ ID NO: 5799178 - DNA, 25 bp, Homo sapien
gagctcggagaggcggcagtggagc

SEQ ID NO: 5799179 - DNA, 25 bp, Homo sapien
agtccccggggtggtgccctgctgc

SEQ ID NO: 5799180 - DNA, 25 bp, Homo sapien
ctggaggcacccgggctcgggcctc

SEQ ID NO: 5799181 - DNA, 25 bp, Homo sapien
caattccaccaaggaggccgctgag

SEQ ID NO: 5799182 - DNA, 25 bp, Homo sapien
acacgggcacccagtgccacccaac

SEQ ID NO: 5799183 - DNA, 25 bp, Homo sapien
aaaaagactgacatagccaagagca

SEQ ID NO: 5799184 - DNA, 25 bp, Homo sapien
gcaggcggggcaaggcctttcggag

SEQ ID NO: 5799185 - DNA, 25 bp, Homo sapien
gtcatccagcccagagggtagggtc

SEQ ID NO: 5799186 - DNA, 25 bp, Homo sapien
cccagctcagcagctacctcagcct

SEQ ID NO: 5799187 - DNA, 25 bp, Homo sapien
cctagctctggggcccagtgcagct

SEQ ID NO: 5799188 - DNA, 25 bp, Homo sapien
aggggggatcatgctctgaattgcg

SEQ ID NO: 5799189 - DNA, 25 bp, Homo sapien
tatttaggcgactctttaccatctc

SEQ ID NO: 5799190 - DNA, 25 bp, Homo sapien
aaagccttcatcccaaaggaagcct

SEQ ID NO: 5799191 - DNA, 25 bp, Homo sapien
cgccgcgcacggtaccacgccagca

SEQ ID NO: 5799192 - DNA, 25 bp, Homo sapien
tgaaatgaggaaggtttgaattact

SEQ ID NO: 5799193 - DNA, 25 bp, Homo sapien
actctggattcacattcaccccagg

SEQ ID NO: 5799194 - DNA, 25 bp, Homo sapien
ggtaccacgccagcacccagcgccc

SEQ ID NO: 5799195 - DNA, 25 bp, Homo sapien
gtccaccttctgctcagacccttcc

SEQ ID NO: 5799196 - DNA, 25 bp, Homo sapien
agtcctgggttggaggtccagaaga

SEQ ID NO: 5799197 - DNA, 25 bp, Homo sapien
cctgcctgggcactgcctgattcaa

SEQ ID NO: 5799198 - DNA, 25 bp, Homo sapien
gcggtcactgtactgctcccaaaga

SEQ ID NO: 5799199 - DNA, 25 bp, Homo sapien
gggatcctggcaagccgaggtagcg

SEQ ID NO: 5799200 - DNA, 25 bp, Homo sapien
gtatctgctccctcccaatccagcc

SEQ ID NO: 5799201 - DNA, 25 bp, Homo sapien
tgggatgacagcaaggagacacctg

SEQ ID NO: 5799202 - DNA, 25 bp, Homo sapien
gtcaccaacctctagcatatgggct

SEQ ID NO: 5799203 - DNA, 25 bp, Homo sapien
agtctgcaaagactcctagctctgg

SEQ ID NO: 5799204 - DNA, 25 bp, Homo sapien
atttatttagaaaaatagactctgg

SEQ ID NO: 5799205 - DNA, 25 bp, Homo sapien
ggcttcccgggtgagggagggatcc

SEQ ID NO: 5799206 - DNA, 25 bp, Homo sapien
tggattcacattcaccccagggcta

SEQ ID NO: 5799207 - DNA, 25 bp, Homo sapien
aaagaaagcctgtagcctggtactg

SEQ ID NO: 5799208 - DNA, 25 bp, Homo sapien
cttccaccccgatgtctggcaatac

SEQ ID NO: 5799209 - DNA, 25 bp, Homo sapien
cggttactgaagggtgtgaagcccg

SEQ ID NO: 5799210 - DNA, 25 bp, Homo sapien
gatcatgctctgaattgcgctggcc

SEQ ID NO: 5799211 - DNA, 25 bp, Homo sapien
gcactcgggtgtccccttagtcgac

SEQ ID NO: 5799212 - DNA, 25 bp, Homo sapien
gtcgactaaggggacacccgagtgc

SEQ ID NO: 5799213 - DNA, 25 bp, Homo sapien
gtctcaacgaaccatcctcggaatg

SEQ ID NO: 5799214 - DNA, 25 bp, Homo sapien
cattccgaggatggttcgttgagac

SEQ ID NO: 5799215 - DNA, 25 bp, Homo sapien
tacgactagtttccacaggccttgt

SEQ ID NO: 5799216 - DNA, 25 bp, Homo sapien
acaaggcctgtggaaactagtcgta

SEQ ID NO: 5799217 - DNA, 25 bp, Homo sapien
gctaccacttctcgaatgtcgaacg

SEQ ID NO: 5799218 - DNA, 25 bp, Homo sapien
cgttcgacattcgagaagtggtagc

SEQ ID NO: 5799219 - DNA, 25 bp, Homo sapien
tgaccccttagtcggtccctcgatt

SEQ ID NO: 5799220 - DNA, 25 bp, Homo sapien
aatcgagggaccgactaaggggtca

SEQ ID NO: 5799221 - DNA, 25 bp, Homo sapien
ttcaaacataaccgaagaaacttat

SEQ ID NO: 5799222 - DNA, 25 bp, Homo sapien
ataagtttcttcggttatgtttgaa

SEQ ID NO: 5799223 - DNA, 25 bp, Homo sapien
aaccgtgaagactcggtggctcccc

SEQ ID NO: 5799224 - DNA, 25 bp, Homo sapien
ggggagccaccgagtcttcacggtt

SEQ ID NO: 5799225 - DNA, 25 bp, Homo sapien
ataaaagtcgacatagtcgggaccg

SEQ ID NO: 5799226 - DNA, 25 bp, Homo sapien
cggtcccgactatgtcgacttttat

SEQ ID NO: 5799227 - DNA, 25 bp, Homo sapien
ggagactctcctagttggtccacag

SEQ ID NO: 5799228 - DNA, 25 bp, Homo sapien
ctgtggaccaactaggagagtctcc

SEQ ID NO: 5799229 - DNA, 25 bp, Homo sapien
atatcatgagaaataattatctgag

SEQ ID NO: 5799230 - DNA, 25 bp, Homo sapien
ctcagataattatttctcatgatat

SEQ ID NO: 5799231 - DNA, 25 bp, Homo sapien
gtagccaggcgctgagaccccgacg

SEQ ID NO: 5799232 - DNA, 25 bp, Homo sapien
cgtcggggtctcagcgcctggctac

SEQ ID NO: 5799233 - DNA, 25 bp, Homo sapien
ccgaggagtctcccgggccaccctg

SEQ ID NO: 5799234 - DNA, 25 bp, Homo sapien
cagggtggcccgggagactcctcgg

SEQ ID NO: 5799235 - DNA, 25 bp, Homo sapien
gcgtcttcacggtacatgaaaccag

SEQ ID NO: 5799236 - DNA, 25 bp, Homo sapien
ctggtttcatgtaccgtgaagacgc

SEQ ID NO: 5799237 - DNA, 25 bp, Homo sapien
tcacacagcggggacccaccggacc

SEQ ID NO: 5799238 - DNA, 25 bp, Homo sapien
ggtccggtgggtccccgctgtgtga

SEQ ID NO: 5799239 - DNA, 25 bp, Homo sapien
gtgtattaacgtacttaaaggtgaa

SEQ ID NO: 5799240 - DNA, 25 bp, Homo sapien
ttcacctttaagtacgttaatacac

SEQ ID NO: 5799241 - DNA, 25 bp, Homo sapien
gggtgatggaatacacacggtgttg

SEQ ID NO: 5799242 - DNA, 25 bp, Homo sapien
caacaccgtgtgtattccatcaccc

SEQ ID NO: 5799243 - DNA, 25 bp, Homo sapien
cgacggccggccgaccggtcctgcc

SEQ ID NO: 5799244 - DNA, 25 bp, Homo sapien
ggcaggaccggtcggccggccgtcg

SEQ ID NO: 5799245 - DNA, 25 bp, Homo sapien
ttaaacctctcccatacatttcaag

SEQ ID NO: 5799246 - DNA, 25 bp, Homo sapien
cttgaaatgtatgggagaggtttaa

SEQ ID NO: 5799247 - DNA, 25 bp, Homo sapien
atgaagcagaaggaagcactacagt

SEQ ID NO: 5799248 - DNA, 25 bp, Homo sapien
gcccttctggtgctcggacaccgct

SEQ ID NO: 5799249 - DNA, 25 bp, Homo sapien
tcagtctgcatttattctgtaaaaa

SEQ ID NO: 5799250 - DNA, 25 bp, Homo sapien
gaagtagatgctccaatcacagtat

SEQ ID NO: 5799251 - DNA, 25 bp, Homo sapien
gctgtcccctttcctccaacccaac

SEQ ID NO: 5799252 - DNA, 25 bp, Homo sapien
ggtgactgttttataaattctttta

SEQ ID NO: 5799253 - DNA, 25 bp, Homo sapien
ctgggtgactatgtggacagaggct

SEQ ID NO: 5799254 - DNA, 25 bp, Homo sapien
agcccaagatgctgggtatcgaatg

SEQ ID NO: 5799255 - DNA, 25 bp, Homo sapien
ttggagcactatacccacaacactg

SEQ ID NO: 5799256 - DNA, 25 bp, Homo sapien
gatccggagttttgaagaagcgcga

SEQ ID NO: 5799257 - DNA, 25 bp, Homo sapien
gcggcggccgcggcgtaggcgcacg

SEQ ID NO: 5799258 - DNA, 25 bp, Homo sapien
actatcaattatcagagcccatgaa

SEQ ID NO: 5799259 - DNA, 25 bp, Homo sapien
tggacaattctttgacctaatgaag

SEQ ID NO: 5799260 - DNA, 25 bp, Homo sapien
ggggaccatgtccgggaggcgcttc

SEQ ID NO: 5799261 - DNA, 25 bp, Homo sapien
cttagagtcctgccgtggctcaggt

SEQ ID NO: 5799262 - DNA, 25 bp, Homo sapien
cggccgcggcgtaggcgcacgtccg

SEQ ID NO: 5799263 - DNA, 25 bp, Homo sapien
tagtaacacacgctacctctttctg

SEQ ID NO: 5799264 - DNA, 25 bp, Homo sapien
ggtggatctaaaactcaagaacaaa

SEQ ID NO: 5799265 - DNA, 25 bp, Homo sapien
gttttcacatggtctttgccttttg

SEQ ID NO: 5799266 - DNA, 25 bp, Homo sapien
gactcccacaggcacactccctctg

SEQ ID NO: 5799267 - DNA, 25 bp, Homo sapien
gaagtatttgagaatgggaaaccta

SEQ ID NO: 5799268 - DNA, 25 bp, Homo sapien
aagggcctgactcccacaggcacac

SEQ ID NO: 5799269 - DNA, 25 bp, Homo sapien
aatgccaccccgaaaggatagcata

SEQ ID NO: 5799270 - DNA, 25 bp, Homo sapien
gaagcccaagatgctgggtatcgaa

SEQ ID NO: 5799271 - DNA, 25 bp, Homo sapien
acattgtttctgcttcggggaaatc

SEQ ID NO: 5799272 - DNA, 25 bp, Homo sapien
tgacctaatgaagttatttgaagtt

SEQ ID NO: 5799273 - DNA, 25 bp, Homo sapien
ggccgaggggaccatgtccgggagg

SEQ ID NO: 5799274 - DNA, 25 bp, Homo sapien
tgccgtggctcaggtggatctaaaa

SEQ ID NO: 5799275 - DNA, 25 bp, Homo sapien
cttcctcttgctgccctcttaaacc

SEQ ID NO: 5799276 - DNA, 25 bp, Homo sapien
tagatgctccaatcacagtatgtgg

SEQ ID NO: 5799277 - DNA, 25 bp, Homo sapien
tcacatgctgcgcacaggagcgacc

SEQ ID NO: 5799278 - DNA, 25 bp, Homo sapien
ccatcacttattacaattttctctg

SEQ ID NO: 5799279 - DNA, 25 bp, Homo sapien
tagagtcctgccgtggctcaggtgg

SEQ ID NO: 5799280 - DNA, 25 bp, Homo sapien
gctggtgggccaatgaaatctgtaa

SEQ ID NO: 5799281 - DNA, 25 bp, Homo sapien
ggaggaggccgaggggaccatgtcc

SEQ ID NO: 5799282 - DNA, 25 bp, Homo sapien
gtgacctgctttggtctgatccctc

SEQ ID NO: 5799283 - DNA, 25 bp, Homo sapien
ttgtgaagtcttgtgctataaaggg

SEQ ID NO: 5799284 - DNA, 25 bp, Homo sapien
agcactatacccacaacactgtccg

SEQ ID NO: 5799285 - DNA, 25 bp, Homo sapien
agaatgggaaacctaaagttgatgt

SEQ ID NO: 5799286 - DNA, 25 bp, Homo sapien
tcgcttcagcacaagatccggagtt

SEQ ID NO: 5799287 - DNA, 25 bp, Homo sapien
cgggcagctaaggctgcccgaggag

SEQ ID NO: 5799288 - DNA, 25 bp, Homo sapien
gcctgtatggagacatttgactgtc

SEQ ID NO: 5799289 - DNA, 25 bp, Homo sapien
gtgctgtatttatggagtttaaaga

SEQ ID NO: 5799290 - DNA, 25 bp, Homo sapien
tataattcagtctgcatttattctg

SEQ ID NO: 5799291 - DNA, 25 bp, Homo sapien
gcaactcaaaacaacttcaacctgg

SEQ ID NO: 5799292 - DNA, 25 bp, Homo sapien
gactatgtggacagaggctatttca

SEQ ID NO: 5799293 - DNA, 25 bp, Homo sapien
accaccgaccgcgtcatcaaagctg

SEQ ID NO: 5799294 - DNA, 25 bp, Homo sapien
ataatcaatgatggggctgccatcc

SEQ ID NO: 5799295 - DNA, 25 bp, Homo sapien
ccatgaagcccaagatgctgggtat

SEQ ID NO: 5799296 - DNA, 25 bp, Homo sapien
tcctgaggcaagagaagactatgat

SEQ ID NO: 5799297 - DNA, 25 bp, Homo sapien
cactgtccgagggtgctcttatttc

SEQ ID NO: 5799298 - DNA, 25 bp, Homo sapien
ggccggtgggccctcgtcctgtcag

SEQ ID NO: 5799299 - DNA, 25 bp, Homo sapien
cttcaacctggaggtgcatttataa

SEQ ID NO: 5799300 - DNA, 25 bp, Homo sapien
gctcttatttctacagttaccctgc

SEQ ID NO: 5799301 - DNA, 25 bp, Homo sapien
ctgatgatgaagcagaaggaagcac

SEQ ID NO: 5799302 - DNA, 25 bp, Homo sapien
gctgtcccggtcgccacccttagca

SEQ ID NO: 5799303 - DNA, 25 bp, Homo sapien
tgtttctgcttcggggaaatcatga

SEQ ID NO: 5799304 - DNA, 25 bp, Homo sapien
atgaaatctgtaacctcagcacact

SEQ ID NO: 5799305 - DNA, 25 bp, Homo sapien
tttttctccataattttaagaaatg

SEQ ID NO: 5799306 - DNA, 25 bp, Homo sapien
gagatcatcaggaataagatcagag

SEQ ID NO: 5799307 - DNA, 25 bp, Homo sapien
attattggaaaatgaaaagcaactc

SEQ ID NO: 5799308 - DNA, 25 bp, Homo sapien
attcggaacaggtgtatgatgcctg

SEQ ID NO: 5799309 - DNA, 25 bp, Homo sapien
cggcaagaaagtgagagtgtgctga

SEQ ID NO: 5799310 - DNA, 25 bp, Homo sapien
ccccaattacctagatgtctataac

SEQ ID NO: 5799311 - DNA, 25 bp, Homo sapien
actcacatgctgcgcacaggagcga

SEQ ID NO: 5799312 - DNA, 25 bp, Homo sapien
ggcagtttaactgttctccacaccc

SEQ ID NO: 5799313 - DNA, 25 bp, Homo sapien
cacgctacctctttctgggtgacta

SEQ ID NO: 5799314 - DNA, 25 bp, Homo sapien
ccctcgtcctgtcagtggcgtcgga

SEQ ID NO: 5799315 - DNA, 25 bp, Homo sapien
aggaagagccaagccacaggctttc

SEQ ID NO: 5799316 - DNA, 25 bp, Homo sapien
gacgaactgatttctgatgatgaag

SEQ ID NO: 5799317 - DNA, 25 bp, Homo sapien
gtcggtgccgaagcggtgttccccg

SEQ ID NO: 5799318 - DNA, 25 bp, Homo sapien
tcttatttctacagttaccctgcag

SEQ ID NO: 5799319 - DNA, 25 bp, Homo sapien
attcttttaatttatgttcaatata

SEQ ID NO: 5799320 - DNA, 25 bp, Homo sapien
ggacctgtgtgtgacctgctttggt

SEQ ID NO: 5799321 - DNA, 25 bp, Homo sapien
atttggtaaaggaaggacgactgga

SEQ ID NO: 5799322 - DNA, 25 bp, Homo sapien
aggaagtatttgagaatgggaaacc

SEQ ID NO: 5799323 - DNA, 25 bp, Homo sapien
cacctagtaacacacgctacctctt

SEQ ID NO: 5799324 - DNA, 25 bp, Homo sapien
aaaagcaactcaaaacaacttcaac

SEQ ID NO: 5799325 - DNA, 25 bp, Homo sapien
gtcagtggcgtcggaggccggcgct

SEQ ID NO: 5799326 - DNA, 25 bp, Homo sapien
ttggtctgatccctcagaggattat

SEQ ID NO: 5799327 - DNA, 25 bp, Homo sapien
cctcccgcctttggacctgtgtgtg

SEQ ID NO: 5799328 - DNA, 25 bp, Homo sapien
agatgtctataacaataaagctgct

SEQ ID NO: 5799329 - DNA, 25 bp, Homo sapien
gccaatgaaatctgtaacctcagca

SEQ ID NO: 5799330 - DNA, 25 bp, Homo sapien
atggagacatttgactgtcttcctc

SEQ ID NO: 5799331 - DNA, 25 bp, Homo sapien
ggagcactatacccacaacactgtc

SEQ ID NO: 5799332 - DNA, 25 bp, Homo sapien
ttttaagaaatgaatctgattgttg

SEQ ID NO: 5799333 - DNA, 25 bp, Homo sapien
gtgtgtgacctgctttggtctgatc

SEQ ID NO: 5799334 - DNA, 25 bp, Homo sapien
gggcgtcctctcaggaggcaagcag

SEQ ID NO: 5799335 - DNA, 25 bp, Homo sapien
tctgtaacctcagcacactcacatg

SEQ ID NO: 5799336 - DNA, 25 bp, Homo sapien
ctatgtggacagaggctatttcagt

SEQ ID NO: 5799337 - DNA, 25 bp, Homo sapien
gccggggccgggcacggctggctga

SEQ ID NO: 5799338 - DNA, 25 bp, Homo sapien
ggatcacctagtaacacacgctacc

SEQ ID NO: 5799339 - DNA, 25 bp, Homo sapien
tcatcccaaaacattgtttctgctt

SEQ ID NO: 5799340 - DNA, 25 bp, Homo sapien
gaaatgaatctgattgttgtcaaca

SEQ ID NO: 5799341 - DNA, 25 bp, Homo sapien
catttataattcagtctgcatttat

SEQ ID NO: 5799342 - DNA, 25 bp, Homo sapien
cgaaaggatagcatacacgctggtg

SEQ ID NO: 5799343 - DNA, 25 bp, Homo sapien
tctgcttcggggaaatcatgaatgc

SEQ ID NO: 5799344 - DNA, 25 bp, Homo sapien
tggaggaatgtcacctgaaattact

SEQ ID NO: 5799345 - DNA, 25 bp, Homo sapien
tgatggggctgccatcctgaggcaa

SEQ ID NO: 5799346 - DNA, 25 bp, Homo sapien
tataaaaagtgcatctgttttgttt

SEQ ID NO: 5799347 - DNA, 25 bp, Homo sapien
gaaaacaatgtcatgaatatcaggc

SEQ ID NO: 5799348 - DNA, 25 bp, Homo sapien
gattaatcatcccaaaacattgttt

SEQ ID NO: 5799349 - DNA, 25 bp, Homo sapien
agcgaccaagggaagaaagcccatt

SEQ ID NO: 5799350 - DNA, 25 bp, Homo sapien
tatgtggtgatattcatggacaatt

SEQ ID NO: 5799351 - DNA, 25 bp, Homo sapien
ggtgttccccgccttagccgctggc

SEQ ID NO: 5799352 - DNA, 25 bp, Homo sapien
ttggtaaaggaaggacgactggaag

SEQ ID NO: 5799353 - DNA, 25 bp, Homo sapien
ttgtgctataaaggggaacttcccc

SEQ ID NO: 5799354 - DNA, 25 bp, Homo sapien
gcggtgttccccgccttagccgctg

SEQ ID NO: 5799355 - DNA, 25 bp, Homo sapien
caacacatttgtgaagtcttgtgct

SEQ ID NO: 5799356 - DNA, 25 bp, Homo sapien
ggcagctaaggctgcccgaggagaa

SEQ ID NO: 5799357 - DNA, 25 bp, Homo sapien
agtagatgctccaatcacagtatgt

SEQ ID NO: 5799358 - DNA, 25 bp, Homo sapien
atcagagcccatgaagcccaagatg

SEQ ID NO: 5799359 - DNA, 25 bp, Homo sapien
ttactttcaaggaagtatttgagaa

SEQ ID NO: 5799360 - DNA, 25 bp, Homo sapien
gcctggaggaggccgaggggaccat

SEQ ID NO: 5799361 - DNA, 25 bp, Homo sapien
accatgtccgggaggcgcttccacc

SEQ ID NO: 5799362 - DNA, 25 bp, Homo sapien
cggtggccgcgcccttctggtgctc

SEQ ID NO: 5799363 - DNA, 25 bp, Homo sapien
caatgaaatctgtaacctcagcaca

SEQ ID NO: 5799364 - DNA, 25 bp, Homo sapien
ccgccttagccgctggcgcctccca

SEQ ID NO: 5799365 - DNA, 25 bp, Homo sapien
gcgtaggcgcacgtccggcgggctc

SEQ ID NO: 5799366 - DNA, 25 bp, Homo sapien
caagggaagaaagcccattcatgac

SEQ ID NO: 5799367 - DNA, 25 bp, Homo sapien
acatggtctttgccttttgttgggg

SEQ ID NO: 5799368 - DNA, 25 bp, Homo sapien
taaatgtgctcaacatatgctctga

SEQ ID NO: 5799369 - DNA, 25 bp, Homo sapien
ttctgtaaaaaggtgactgttttat

SEQ ID NO: 5799370 - DNA, 25 bp, Homo sapien
gggaagccatcagagggttctcgct

SEQ ID NO: 5799371 - DNA, 25 bp, Homo sapien
atttttgcagaacaataatttacta

SEQ ID NO: 5799372 - DNA, 25 bp, Homo sapien
tgctcaacatatgctctgatgacga

SEQ ID NO: 5799373 - DNA, 25 bp, Homo sapien
tcacagtatgtggtgatattcatgg

SEQ ID NO: 5799374 - DNA, 25 bp, Homo sapien
tcctccaacccaacggcttactttc

SEQ ID NO: 5799375 - DNA, 25 bp, Homo sapien
tgactctcaagggcctgactcccac

SEQ ID NO: 5799376 - DNA, 25 bp, Homo sapien
atccctcagaggattatggcaatga

SEQ ID NO: 5799377 - DNA, 25 bp, Homo sapien
ccctctgggcgtcctctcaggaggc

SEQ ID NO: 5799378 - DNA, 25 bp, Homo sapien
gactatcgagacagccacagtagaa

SEQ ID NO: 5799379 - DNA, 25 bp, Homo sapien
gctatttcagtatagagtgtgtgct

SEQ ID NO: 5799380 - DNA, 25 bp, Homo sapien
acagactatttcaccttcaaacagg

SEQ ID NO: 5799381 - DNA, 25 bp, Homo sapien
ctcagaggattatggcaatgagaag

SEQ ID NO: 5799382 - DNA, 25 bp, Homo sapien
aaatattcggaacaggtgtatgatg

SEQ ID NO: 5799383 - DNA, 25 bp, Homo sapien
agttaccctgcagtttgtgaatttt

SEQ ID NO: 5799384 - DNA, 25 bp, Homo sapien
actcaagaacaaattctatttattt

SEQ ID NO: 5799385 - DNA, 25 bp, Homo sapien
tttgagaatgggaaacctaaagttg

SEQ ID NO: 5799386 - DNA, 25 bp, Homo sapien
ggaacaggtgtatgatgcctgtatg

SEQ ID NO: 5799387 - DNA, 25 bp, Homo sapien
tttgaagaagcgcgaggtctggacc

SEQ ID NO: 5799388 - DNA, 25 bp, Homo sapien
gaagccatcagagggttctcgcttc

SEQ ID NO: 5799389 - DNA, 25 bp, Homo sapien
gtggctcaggtggatctaaaactca

SEQ ID NO: 5799390 - DNA, 25 bp, Homo sapien
aatctgtaacctcagcacactcaca

SEQ ID NO: 5799391 - DNA, 25 bp, Homo sapien
ttaatgagcgaatgccaccccgaaa

SEQ ID NO: 5799392 - DNA, 25 bp, Homo sapien
aaatcatgaatgcaggcatcttaca

SEQ ID NO: 5799393 - DNA, 25 bp, Homo sapien
atcatgaatgcaggcatcttacaga

SEQ ID NO: 5799394 - DNA, 25 bp, Homo sapien
cctgcagtttgtgaatttttgcaga

SEQ ID NO: 5799395 - DNA, 25 bp, Homo sapien
gaggccgaggggaccatgtccggga

SEQ ID NO: 5799396 - DNA, 25 bp, Homo sapien
gccgaagcggtgttccccgccttag

SEQ ID NO: 5799397 - DNA, 25 bp, Homo sapien
ccgggaagccatcagagggttctcg

SEQ ID NO: 5799398 - DNA, 25 bp, Homo sapien
agtagaagcggtagaggcccgggaa

SEQ ID NO: 5799399 - DNA, 25 bp, Homo sapien
tgattgttgtcaacacatttgtgaa

SEQ ID NO: 5799400 - DNA, 25 bp, Homo sapien
tcaagggcctgactcccacaggcac

SEQ ID NO: 5799401 - DNA, 25 bp, Homo sapien
gtgatattcatggacaattctttga

SEQ ID NO: 5799402 - DNA, 25 bp, Homo sapien
acactcacatgctgcgcacaggagc

SEQ ID NO: 5799403 - DNA, 25 bp, Homo sapien
gctgggtatcgaatgtacaggaaga

SEQ ID NO: 5799404 - DNA, 25 bp, Homo sapien
atcaggcagtttaactgttctccac

SEQ ID NO: 5799405 - DNA, 25 bp, Homo sapien
aagtagccttaaagataatcaatga

SEQ ID NO: 5799406 - DNA, 25 bp, Homo sapien
gccgcgagcagccgcggctgtcccg

SEQ ID NO: 5799407 - DNA, 25 bp, Homo sapien
tttctgcttcggggaaatcatgaat

SEQ ID NO: 5799408 - DNA, 25 bp, Homo sapien
aacacacgctacctctttctgggtg

SEQ ID NO: 5799409 - DNA, 25 bp, Homo sapien
tgtccgggaggcgcttccacctctc

SEQ ID NO: 5799410 - DNA, 25 bp, Homo sapien
ctcttgctgccctcttaaaccagca

SEQ ID NO: 5799411 - DNA, 25 bp, Homo sapien
agatcagagccattgggaagatggc

SEQ ID NO: 5799412 - DNA, 25 bp, Homo sapien
aatgatggggctgccatcctgaggc

SEQ ID NO: 5799413 - DNA, 25 bp, Homo sapien
gtggacagaggctatttcagtatag

SEQ ID NO: 5799414 - DNA, 25 bp, Homo sapien
gcgcttccacctctccaccaccgac

SEQ ID NO: 5799415 - DNA, 25 bp, Homo sapien
gtgctgactctcaagggcctgactc

SEQ ID NO: 5799416 - DNA, 25 bp, Homo sapien
ctgatttctgatgatgaagcagaag

SEQ ID NO: 5799417 - DNA, 25 bp, Homo sapien
ttatcagagcccatgaagcccaaga

SEQ ID NO: 5799418 - DNA, 25 bp, Homo sapien
tgtcacctgaaattacttctttaga

SEQ ID NO: 5799419 - DNA, 25 bp, Homo sapien
aatgtgctcaacatatgctctgatg

SEQ ID NO: 5799420 - DNA, 25 bp, Homo sapien
gggttctcgcttcagcacaagatcc

SEQ ID NO: 5799421 - DNA, 25 bp, Homo sapien
actctcaagggcctgactcccacag

SEQ ID NO: 5799422 - DNA, 25 bp, Homo sapien
actttcaaggaagtatttgagaatg

SEQ ID NO: 5799423 - DNA, 25 bp, Homo sapien
tagccgctggcgcctcccaagagag

SEQ ID NO: 5799424 - DNA, 25 bp, Homo sapien
aagcccattcatgacttagagtcct

SEQ ID NO: 5799425 - DNA, 25 bp, Homo sapien
caataaagctgctgtgttgaaatat

SEQ ID NO: 5799426 - DNA, 25 bp, Homo sapien
agtctgcatttattctgtaaaaagg

SEQ ID NO: 5799427 - DNA, 25 bp, Homo sapien
tagaagtagatgctccaatcacagt

SEQ ID NO: 5799428 - DNA, 25 bp, Homo sapien
ctatcgagacagccacagtagaagc

SEQ ID NO: 5799429 - DNA, 25 bp, Homo sapien
gaagcggtagaggcccgggaagcca

SEQ ID NO: 5799430 - DNA, 25 bp, Homo sapien
acttctttagatgacattaggaaat

SEQ ID NO: 5799431 - DNA, 25 bp, Homo sapien
ggctgccatcctgaggcaagagaag

SEQ ID NO: 5799432 - DNA, 25 bp, Homo sapien
tgttccccgccttagccgctggcgc

SEQ ID NO: 5799433 - DNA, 25 bp, Homo sapien
cacgagggcccgggccgcgagcagc

SEQ ID NO: 5799434 - DNA, 25 bp, Homo sapien
cgaggagaaggcggcggccgcggcg

SEQ ID NO: 5799435 - DNA, 25 bp, Homo sapien
tgagcgaatgccaccccgaaaggat

SEQ ID NO: 5799436 - DNA, 25 bp, Homo sapien
taaggctgcccgaggagaaggcggc

SEQ ID NO: 5799437 - DNA, 25 bp, Homo sapien
ctgtcagtggcgtcggaggccggcg

SEQ ID NO: 5799438 - DNA, 25 bp, Homo sapien
taaaaagtgcatctgttttgttttt

SEQ ID NO: 5799439 - DNA, 25 bp, Homo sapien
gcgcccttctggtgctcggacaccg

SEQ ID NO: 5799440 - DNA, 25 bp, Homo sapien
tctcaagggcctgactcccacaggc

SEQ ID NO: 5799441 - DNA, 25 bp, Homo sapien
atgcctgtatggagacatttgactg

SEQ ID NO: 5799442 - DNA, 25 bp, Homo sapien
gacctgctttggtctgatccctcag

SEQ ID NO: 5799443 - DNA, 25 bp, Homo sapien
tcggaggccggcgctgcggtggccg

SEQ ID NO: 5799444 - DNA, 25 bp, Homo sapien
ctccaatcacagtatgtggtgatat

SEQ ID NO: 5799445 - DNA, 25 bp, Homo sapien
aggtctggaccgaattaatgagcga

SEQ ID NO: 5799446 - DNA, 25 bp, Homo sapien
tgagaatgggaaacctaaagttgat

SEQ ID NO: 5799447 - DNA, 25 bp, Homo sapien
atttgactgtcttcctcttgctgcc

SEQ ID NO: 5799448 - DNA, 25 bp, Homo sapien
gccctcttaaaccagcagtttctct

SEQ ID NO: 5799449 - DNA, 25 bp, Homo sapien
ctggtaaatgtgctcaacatatgct

SEQ ID NO: 5799450 - DNA, 25 bp, Homo sapien
gggtgctcttatttctacagttacc

SEQ ID NO: 5799451 - DNA, 25 bp, Homo sapien
gtctataacaataaagctgctgtgt

SEQ ID NO: 5799452 - DNA, 25 bp, Homo sapien
cttccaaactttatggatgttttca

SEQ ID NO: 5799453 - DNA, 25 bp, Homo sapien
caacccaacggcttactttcaagga

SEQ ID NO: 5799454 - DNA, 25 bp, Homo sapien
atgaagcccaagatgctgggtatcg

SEQ ID NO: 5799455 - DNA, 25 bp, Homo sapien
atcacttattacaattttctctgcc

SEQ ID NO: 5799456 - DNA, 25 bp, Homo sapien
tctgattgttgtcaacacatttgtg

SEQ ID NO: 5799457 - DNA, 25 bp, Homo sapien
ttcatggacaattctttgacctaat

SEQ ID NO: 5799458 - DNA, 25 bp, Homo sapien
acagttcgtaaggagatcatcagga

SEQ ID NO: 5799459 - DNA, 25 bp, Homo sapien
ctggaagaggaagtagccttaaaga

SEQ ID NO: 5799460 - DNA, 25 bp, Homo sapien
ttatggagtttaaagattaatcatc

SEQ ID NO: 5799461 - DNA, 25 bp, Homo sapien
tgcatttattctgtaaaaaggtgac

SEQ ID NO: 5799462 - DNA, 25 bp, Homo sapien
gttcaatatatataaaaagtgcatc

SEQ ID NO: 5799463 - DNA, 25 bp, Homo sapien
gctgtgttgaaatatgaaaacaatg

SEQ ID NO: 5799464 - DNA, 25 bp, Homo sapien
atcccaaaacattgtttctgcttcg

SEQ ID NO: 5799465 - DNA, 25 bp, Homo sapien
tgcttcggggaaatcatgaatgcag

SEQ ID NO: 5799466 - DNA, 25 bp, Homo sapien
tggtgggccaatgaaatctgtaacc

SEQ ID NO: 5799467 - DNA, 25 bp, Homo sapien
cactccctctgggcgtcctctcagg

SEQ ID NO: 5799468 - DNA, 25 bp, Homo sapien
tttgacctaatgaagttatttgaag

SEQ ID NO: 5799469 - DNA, 25 bp, Homo sapien
ttaatcatcccaaaacattgtttct

SEQ ID NO: 5799470 - DNA, 25 bp, Homo sapien
taaggagatcatcaggaataagatc

SEQ ID NO: 5799471 - DNA, 25 bp, Homo sapien
aattttctctgcccccaattaccta

SEQ ID NO: 5799472 - DNA, 25 bp, Homo sapien
gaagcgcgaggtctggaccgaatta

SEQ ID NO: 5799473 - DNA, 25 bp, Homo sapien
gacaccgctgaggagccggggccgg

SEQ ID NO: 5799474 - DNA, 25 bp, Homo sapien
agataatcaatgatggggctgccat

SEQ ID NO: 5799475 - DNA, 25 bp, Homo sapien
cctgccgtggctcaggtggatctaa

SEQ ID NO: 5799476 - DNA, 25 bp, Homo sapien
tgatgcctgtatggagacatttgac

SEQ ID NO: 5799477 - DNA, 25 bp, Homo sapien
cgggaggcgcttccacctctccacc

SEQ ID NO: 5799478 - DNA, 25 bp, Homo sapien
atgctgcgcacaggagcgaccaagg

SEQ ID NO: 5799479 - DNA, 25 bp, Homo sapien
ttgtcaacacatttgtgaagtcttg

SEQ ID NO: 5799480 - DNA, 25 bp, Homo sapien
acaacactgtccgagggtgctctta

SEQ ID NO: 5799481 - DNA, 25 bp, Homo sapien
gttggaggatcacctagtaacacac

SEQ ID NO: 5799482 - DNA, 25 bp, Homo sapien
ggcaagcagactatcgagacagcca

SEQ ID NO: 5799483 - DNA, 25 bp, Homo sapien
acaggaatgtcgaatcaaatattcg

SEQ ID NO: 5799484 - DNA, 25 bp, Homo sapien
attgttgtcaacacatttgtgaagt

SEQ ID NO: 5799485 - DNA, 25 bp, Homo sapien
acaattttctctgcccccaattacc

SEQ ID NO: 5799486 - DNA, 25 bp, Homo sapien
tgctcggacaccgctgaggagccgg

SEQ ID NO: 5799487 - DNA, 25 bp, Homo sapien
aagagagcggccggtgggccctcgt

SEQ ID NO: 5799488 - DNA, 25 bp, Homo sapien
gtcacagagatgctggtaaatgtgc

SEQ ID NO: 5799489 - DNA, 25 bp, Homo sapien
ctttggacctgtgtgtgacctgctt

SEQ ID NO: 5799490 - DNA, 25 bp, Homo sapien
ggaagtagccttaaagataatcaat

SEQ ID NO: 5799491 - DNA, 25 bp, Homo sapien
cgagacagccacagtagaagcggta

SEQ ID NO: 5799492 - DNA, 25 bp, Homo sapien
gagaaggcggcggccgcggcgtagg

SEQ ID NO: 5799493 - DNA, 25 bp, Homo sapien
ggaacctcccgcctttggacctgtg

SEQ ID NO: 5799494 - DNA, 25 bp, Homo sapien
ctgtaaaaaggtgactgttttataa

SEQ ID NO: 5799495 - DNA, 25 bp, Homo sapien
gcaatgagaagaccttggagcacta

SEQ ID NO: 5799496 - DNA, 25 bp, Homo sapien
cgagggcccgggccgcgagcagccg

SEQ ID NO: 5799497 - DNA, 25 bp, Homo sapien
acagccacagtagaagcggtagagg

SEQ ID NO: 5799498 - DNA, 25 bp, Homo sapien
cccctactggcttccaaactttatg

SEQ ID NO: 5799499 - DNA, 25 bp, Homo sapien
gtttgtgaatttttgcagaacaata

SEQ ID NO: 5799500 - DNA, 25 bp, Homo sapien
gctgtatttatggagtttaaagatt

SEQ ID NO: 5799501 - DNA, 25 bp, Homo sapien
tcaaacaggaatgtcgaatcaaata

SEQ ID NO: 5799502 - DNA, 25 bp, Homo sapien
cgctacctctttctgggtgactatg

SEQ ID NO: 5799503 - DNA, 25 bp, Homo sapien
ggaccgaattaatgagcgaatgcca

SEQ ID NO: 5799504 - DNA, 25 bp, Homo sapien
agaagactatgatagaagtagatgc

SEQ ID NO: 5799505 - DNA, 25 bp, Homo sapien
atggagtttaaagattaatcatccc

SEQ ID NO: 5799506 - DNA, 25 bp, Homo sapien
aagatccggagttttgaagaagcgc

SEQ ID NO: 5799507 - DNA, 25 bp, Homo sapien
agaggctatttcagtatagagtgtg

SEQ ID NO: 5799508 - DNA, 25 bp, Homo sapien
gtcgaatcaaatattcggaacaggt

SEQ ID NO: 5799509 - DNA, 25 bp, Homo sapien
agagccaagccacaggctttccatc

SEQ ID NO: 5799510 - DNA, 25 bp, Homo sapien
ggaagaggaagtagccttaaagata

SEQ ID NO: 5799511 - DNA, 25 bp, Homo sapien
taatttactatcaattatcagagcc

SEQ ID NO: 5799512 - DNA, 25 bp, Homo sapien
gtcttcctcttgctgccctcttaaa

SEQ ID NO: 5799513 - DNA, 25 bp, Homo sapien
cagccgcggctgtcccggtcgccac

SEQ ID NO: 5799514 - DNA, 25 bp, Homo sapien
cagagatgctggtaaatgtgctcaa

SEQ ID NO: 5799515 - DNA, 25 bp, Homo sapien
ggcacactccctctgggcgtcctct

SEQ ID NO: 5799516 - DNA, 25 bp, Homo sapien
aaactcaagaacaaattctatttat

SEQ ID NO: 5799517 - DNA, 25 bp, Homo sapien
agatgctgggtatcgaatgtacagg

SEQ ID NO: 5799518 - DNA, 25 bp, Homo sapien
gctgacggctccgggcagctaaggc

SEQ ID NO: 5799519 - DNA, 25 bp, Homo sapien
ttctgggtgactatgtggacagagg

SEQ ID NO: 5799520 - DNA, 25 bp, Homo sapien
attcagtctgcatttattctgtaaa

SEQ ID NO: 5799521 - DNA, 25 bp, Homo sapien
agtttctctgtgtacatggaggaat

SEQ ID NO: 5799522 - DNA, 25 bp, Homo sapien
ctcggacaccgctgaggagccgggg

SEQ ID NO: 5799523 - DNA, 25 bp, Homo sapien
aagtgcatctgttttgtttttccct

SEQ ID NO: 5799524 - DNA, 25 bp, Homo sapien
gtcaacacatttgtgaagtcttgtg

SEQ ID NO: 5799525 - DNA, 25 bp, Homo sapien
tctcgcttcagcacaagatccggag

SEQ ID NO: 5799526 - DNA, 25 bp, Homo sapien
ctgaaattacttctttagatgacat

SEQ ID NO: 5799527 - DNA, 25 bp, Homo sapien
atcaggaataagatcagagccattg

SEQ ID NO: 5799528 - DNA, 25 bp, Homo sapien
aacctggaggtgcatttataattca

SEQ ID NO: 5799529 - DNA, 25 bp, Homo sapien
acagtagaagcggtagaggcccggg

SEQ ID NO: 5799530 - DNA, 25 bp, Homo sapien
ctggaccgaattaatgagcgaatgc

SEQ ID NO: 5799531 - DNA, 25 bp, Homo sapien
tcacctgaaattacttctttagatg

SEQ ID NO: 5799532 - DNA, 25 bp, Homo sapien
ctatgatagaagtagatgctccaat

SEQ ID NO: 5799533 - DNA, 25 bp, Homo sapien
cagaaggaagcactacagttcgtaa

SEQ ID NO: 5799534 - DNA, 25 bp, Homo sapien
ctctgcccccaattacctagatgtc

SEQ ID NO: 5799535 - DNA, 25 bp, Homo sapien
tcttaaaccagcagtttctctgtgt

SEQ ID NO: 5799536 - DNA, 25 bp, Homo sapien
caggaataagatcagagccattggg

SEQ ID NO: 5799537 - DNA, 25 bp, Homo sapien
agaggcccgggaagccatcagaggg

SEQ ID NO: 5799538 - DNA, 25 bp, Homo sapien
cggggccgggcacggctggctgacg

SEQ ID NO: 5799539 - DNA, 25 bp, Homo sapien
ccaacggcttactttcaaggaagta

SEQ ID NO: 5799540 - DNA, 25 bp, Homo sapien
ggacgactggaagaggaagtagcct

SEQ ID NO: 5799541 - DNA, 25 bp, Homo sapien
caggtgtatgatgcctgtatggaga

SEQ ID NO: 5799542 - DNA, 25 bp, Homo sapien
ctgtgtgtgacctgctttggtctga

SEQ ID NO: 5799543 - DNA, 25 bp, Homo sapien
gtgaatttttgcagaacaataattt

SEQ ID NO: 5799544 - DNA, 25 bp, Homo sapien
cccaaaacattgtttctgcttcggg

SEQ ID NO: 5799545 - DNA, 25 bp, Homo sapien
tcaattatcagagcccatgaagccc

SEQ ID NO: 5799546 - DNA, 25 bp, Homo sapien
cagcacactcacatgctgcgcacag

SEQ ID NO: 5799547 - DNA, 25 bp, Homo sapien
ggtcgccacccttagcagcggtcga

SEQ ID NO: 5799548 - DNA, 25 bp, Homo sapien
gttctcgcttcagcacaagatccgg

SEQ ID NO: 5799549 - DNA, 25 bp, Homo sapien
cagactatcgagacagccacagtag

SEQ ID NO: 5799550 - DNA, 25 bp, Homo sapien
ttcaaggaagtatttgagaatggga

SEQ ID NO: 5799551 - DNA, 25 bp, Homo sapien
gcttccacctctccaccaccgaccg

SEQ ID NO: 5799552 - DNA, 25 bp, Homo sapien
gagtgtgtgctgtatttatggagtt

SEQ ID NO: 5799553 - DNA, 25 bp, Homo sapien
aaaagtcacagagatgctggtaaat

SEQ ID NO: 5799554 - DNA, 25 bp, Homo sapien
tatgatgcctgtatggagacatttg

SEQ ID NO: 5799555 - DNA, 25 bp, Homo sapien
atggggctgccatcctgaggcaaga

SEQ ID NO: 5799556 - DNA, 25 bp, Homo sapien
tcaccttcaaacaggaatgtcgaat

SEQ ID NO: 5799557 - DNA, 25 bp, Homo sapien
caggagcgaccaagggaagaaagcc

SEQ ID NO: 5799558 - DNA, 25 bp, Homo sapien
ctcctggagcctggaggaggccgag

SEQ ID NO: 5799559 - DNA, 25 bp, Homo sapien
ggtaaaggaaggacgactggaagag

SEQ ID NO: 5799560 - DNA, 25 bp, Homo sapien
aacactgtccgagggtgctcttatt

SEQ ID NO: 5799561 - DNA, 25 bp, Homo sapien
aataatttactatcaattatcagag

SEQ ID NO: 5799562 - DNA, 25 bp, Homo sapien
gacttagagtcctgccgtggctcag

SEQ ID NO: 5799563 - DNA, 25 bp, Homo sapien
ataacaataaagctgctgtgttgaa

SEQ ID NO: 5799564 - DNA, 25 bp, Homo sapien
tatatataaaaagtgcatctgtttt

SEQ ID NO: 5799565 - DNA, 25 bp, Homo sapien
tttataattcagtctgcatttattc

SEQ ID NO: 5799566 - DNA, 25 bp, Homo sapien
cttagcagcggtcgaggtcggtgcc

SEQ ID NO: 5799567 - DNA, 25 bp, Homo sapien
aattatcagagcccatgaagcccaa

SEQ ID NO: 5799568 - DNA, 25 bp, Homo sapien
cggtgccgaagcggtgttccccgcc

SEQ ID NO: 5799569 - DNA, 25 bp, Homo sapien
attgtttctgcttcggggaaatcat

SEQ ID NO: 5799570 - DNA, 25 bp, Homo sapien
tctgatgacgaactgatttctgatg

SEQ ID NO: 5799571 - DNA, 25 bp, Homo sapien
ggaataagatcagagccattgggaa

SEQ ID NO: 5799572 - DNA, 25 bp, Homo sapien
tcttacagactatttcaccttcaaa

SEQ ID NO: 5799573 - DNA, 25 bp, Homo sapien
ttctgatgatgaagcagaaggaagc

SEQ ID NO: 5799574 - DNA, 25 bp, Homo sapien
tgggaaacctaaagttgatgtttta

SEQ ID NO: 5799575 - DNA, 25 bp, Homo sapien
acaacttcaacctggaggtgcattt

SEQ ID NO: 5799576 - DNA, 25 bp, Homo sapien
ccgcgtcatcaaagctgtccccttt

SEQ ID NO: 5799577 - DNA, 25 bp, Homo sapien
agcagactatcgagacagccacagt

SEQ ID NO: 5799578 - DNA, 25 bp, Homo sapien
ccacagtagaagcggtagaggcccg

SEQ ID NO: 5799579 - DNA, 25 bp, Homo sapien
aagctgtcccctttcctccaaccca

SEQ ID NO: 5799580 - DNA, 25 bp, Homo sapien
cagcacaagatccggagttttgaag

SEQ ID NO: 5799581 - DNA, 25 bp, Homo sapien
gtgaagtcttgtgctataaagggga

SEQ ID NO: 5799582 - DNA, 25 bp, Homo sapien
tgcccgaggagaaggcggcggccgc

SEQ ID NO: 5799583 - DNA, 25 bp, Homo sapien
tttaaagattaatcatcccaaaaca

SEQ ID NO: 5799584 - DNA, 25 bp, Homo sapien
gacaattctttgacctaatgaagtt

SEQ ID NO: 5799585 - DNA, 25 bp, Homo sapien
tgactgttttataaattcttttaat

SEQ ID NO: 5799586 - DNA, 25 bp, Homo sapien
gagccggggccgggcacggctggct

SEQ ID NO: 5799587 - DNA, 25 bp, Homo sapien
gcctgactcccacaggcacactccc

SEQ ID NO: 5799588 - DNA, 25 bp, Homo sapien
acatgctgcgcacaggagcgaccaa

SEQ ID NO: 5799589 - DNA, 25 bp, Homo sapien
ccggtcgccacccttagcagcggtc

SEQ ID NO: 5799590 - DNA, 25 bp, Homo sapien
caggtggatctaaaactcaagaaca

SEQ ID NO: 5799591 - DNA, 25 bp, Homo sapien
gatgatgaagcagaaggaagcacta

SEQ ID NO: 5799592 - DNA, 25 bp, Homo sapien
atgtacaggaagagccaagccacag

SEQ ID NO: 5799593 - DNA, 25 bp, Homo sapien
acaggaagagccaagccacaggctt

SEQ ID NO: 5799594 - DNA, 25 bp, Homo sapien
gtttaactgttctccacacccctac

SEQ ID NO: 5799595 - DNA, 25 bp, Homo sapien
cttcggggaaatcatgaatgcaggc

SEQ ID NO: 5799596 - DNA, 25 bp, Homo sapien
tcaacctggaggtgcatttataatt

SEQ ID NO: 5799597 - DNA, 25 bp, Homo sapien
aatcaaatattcggaacaggtgtat

SEQ ID NO: 5799598 - DNA, 25 bp, Homo sapien
catcctgaggcaagagaagactatg

SEQ ID NO: 5799599 - DNA, 25 bp, Homo sapien
gtgtgctgactctcaagggcctgac

SEQ ID NO: 5799600 - DNA, 25 bp, Homo sapien
gagatgctggtaaatgtgctcaaca

SEQ ID NO: 5799601 - DNA, 25 bp, Homo sapien
ttacagactatttcaccttcaaaca

SEQ ID NO: 5799602 - DNA, 25 bp, Homo sapien
tagaagcggtagaggcccgggaagc

SEQ ID NO: 5799603 - DNA, 25 bp, Homo sapien
aacctcccgcctttggacctgtgtg

SEQ ID NO: 5799604 - DNA, 25 bp, Homo sapien
aggaagcactacagttcgtaaggag

SEQ ID NO: 5799605 - DNA, 25 bp, Homo sapien
agcactacagttcgtaaggagatca

SEQ ID NO: 5799606 - DNA, 25 bp, Homo sapien
cacagagatgctggtaaatgtgctc

SEQ ID NO: 5799607 - DNA, 25 bp, Homo sapien
tcaggaggcaagcagactatcgaga

SEQ ID NO: 5799608 - DNA, 25 bp, Homo sapien
gagtcctgccgtggctcaggtggat

SEQ ID NO: 5799609 - DNA, 25 bp, Homo sapien
tgtcatgaatatcaggcagtttaac

SEQ ID NO: 5799610 - DNA, 25 bp, Homo sapien
aactgttctccacacccctactggc

SEQ ID NO: 5799611 - DNA, 25 bp, Homo sapien
agcagccgcggctgtcccggtcgcc

SEQ ID NO: 5799612 - DNA, 25 bp, Homo sapien
cttgctgccctcttaaaccagcagt

SEQ ID NO: 5799613 - DNA, 25 bp, Homo sapien
ggaccatgtccgggaggcgcttcca

SEQ ID NO: 5799614 - DNA, 25 bp, Homo sapien
agactatttcaccttcaaacaggaa

SEQ ID NO: 5799615 - DNA, 25 bp, Homo sapien
ggtcttttcaattcttcggcaagaa

SEQ ID NO: 5799616 - DNA, 25 bp, Homo sapien
ggaatgtcacctgaaattacttctt

SEQ ID NO: 5799617 - DNA, 25 bp, Homo sapien
cagagcccatgaagcccaagatgct

SEQ ID NO: 5799618 - DNA, 25 bp, Homo sapien
tctaaaactcaagaacaaattctat

SEQ ID NO: 5799619 - DNA, 25 bp, Homo sapien
gatcatcaggaataagatcagagcc

SEQ ID NO: 5799620 - DNA, 25 bp, Homo sapien
gcaagaaagtgagagtgtgctgact

SEQ ID NO: 5799621 - DNA, 25 bp, Homo sapien
gggccgcgagcagccgcggctgtcc

SEQ ID NO: 5799622 - DNA, 25 bp, Homo sapien
ccggcgggctcctggagcctggagg

SEQ ID NO: 5799623 - DNA, 25 bp, Homo sapien
ctataacaataaagctgctgtgttg

SEQ ID NO: 5799624 - DNA, 25 bp, Homo sapien
gaaagcccattcatgacttagagtc

SEQ ID NO: 5799625 - DNA, 25 bp, Homo sapien
cacacgctacctctttctgggtgac

SEQ ID NO: 5799626 - DNA, 25 bp, Homo sapien
gtcctgccgtggctcaggtggatct

SEQ ID NO: 5799627 - DNA, 25 bp, Homo sapien
catggacaattctttgacctaatga

SEQ ID NO: 5799628 - DNA, 25 bp, Homo sapien
gtatggagacatttgactgtcttcc

SEQ ID NO: 5799629 - DNA, 25 bp, Homo sapien
cctgctttggtctgatccctcagag

SEQ ID NO: 5799630 - DNA, 25 bp, Homo sapien
gaggcaagcagactatcgagacagc

SEQ ID NO: 5799631 - DNA, 25 bp, Homo sapien
aaagataatcaatgatggggctgcc

SEQ ID NO: 5799632 - DNA, 25 bp, Homo sapien
gaaggcggcggccgcggcgtaggcg

SEQ ID NO: 5799633 - DNA, 25 bp, Homo sapien
cattgggaagatggcacgggtcttt

SEQ ID NO: 5799634 - DNA, 25 bp, Homo sapien
aaggacgactggaagaggaagtagc

SEQ ID NO: 5799635 - DNA, 25 bp, Homo sapien
ccttggagcactatacccacaacac

SEQ ID NO: 5799636 - DNA, 25 bp, Homo sapien
tgcatttataattcagtctgcattt

SEQ ID NO: 5799637 - DNA, 25 bp, Homo sapien
catgtccgggaggcgcttccacctc

SEQ ID NO: 5799638 - DNA, 25 bp, Homo sapien
gagcccatgaagcccaagatgctgg

SEQ ID NO: 5799639 - DNA, 25 bp, Homo sapien
gctgcgcacaggagcgaccaaggga

SEQ ID NO: 5799640 - DNA, 25 bp, Homo sapien
cgctggcgcctcccaagagagcggc

SEQ ID NO: 5799641 - DNA, 25 bp, Homo sapien
gcttactttcaaggaagtatttgag

SEQ ID NO: 5799642 - DNA, 25 bp, Homo sapien
ttttctctgcccccaattacctaga

SEQ ID NO: 5799643 - DNA, 25 bp, Homo sapien
taattcagtctgcatttattctgta

SEQ ID NO: 5799644 - DNA, 25 bp, Homo sapien
gaacaaattctatttatttattatt

SEQ ID NO: 5799645 - DNA, 25 bp, Homo sapien
cctggagcctggaggaggccgaggg

SEQ ID NO: 5799646 - DNA, 25 bp, Homo sapien
cgaggtctggaccgaattaatgagc

SEQ ID NO: 5799647 - DNA, 25 bp, Homo sapien
aaacaatgtcatgaatatcaggcag

SEQ ID NO: 5799648 - DNA, 25 bp, Homo sapien
aagattaatcatcccaaaacattgt

SEQ ID NO: 5799649 - DNA, 25 bp, Homo sapien
atatgctctgatgacgaactgattt

SEQ ID NO: 5799650 - DNA, 25 bp, Homo sapien
ttcgtaaggagatcatcaggaataa

SEQ ID NO: 5799651 - DNA, 25 bp, Homo sapien
cctggaggtgcatttataattcagt

SEQ ID NO: 5799652 - DNA, 25 bp, Homo sapien
ccggtgggccctcgtcctgtcagtg

SEQ ID NO: 5799653 - DNA, 25 bp, Homo sapien
atggtctttgccttttgttggggaa

SEQ ID NO: 5799654 - DNA, 25 bp, Homo sapien
gaggggaccatgtccgggaggcgct

SEQ ID NO: 5799655 - DNA, 25 bp, Homo sapien
tccaaactttatggatgttttcaca

SEQ ID NO: 5799656 - DNA, 25 bp, Homo sapien
gtgtgctgtatttatggagtttaaa

SEQ ID NO: 5799657 - DNA, 25 bp, Homo sapien
gctctgatgacgaactgatttctga

SEQ ID NO: 5799658 - DNA, 25 bp, Homo sapien
gaggcaagagaagactatgatagaa

SEQ ID NO: 5799659 - DNA, 25 bp, Homo sapien
gcagaacaataatttactatcaatt

SEQ ID NO: 5799660 - DNA, 25 bp, Homo sapien
tgggtatcgaatgtacaggaagagc

SEQ ID NO: 5799661 - DNA, 25 bp, Homo sapien
cacaggcacactccctctgggcgtc

SEQ ID NO: 5799662 - DNA, 25 bp, Homo sapien
attcttcggcaagaaagtgagagtg

SEQ ID NO: 5799663 - DNA, 25 bp, Homo sapien
tggcaatgagaagaccttggagcac

SEQ ID NO: 5799664 - DNA, 25 bp, Homo sapien
tcctgtcagtggcgtcggaggccgg

SEQ ID NO: 5799665 - DNA, 25 bp, Homo sapien
agtttaaagattaatcatcccaaaa

SEQ ID NO: 5799666 - DNA, 25 bp, Homo sapien
atcacctagtaacacacgctacctc

SEQ ID NO: 5799667 - DNA, 25 bp, Homo sapien
gccgggcacggctggctgacggctc

SEQ ID NO: 5799668 - DNA, 25 bp, Homo sapien
ctggtgctcggacaccgctgaggag

SEQ ID NO: 5799669 - DNA, 25 bp, Homo sapien
gaaaaagtcacagagatgctggtaa

SEQ ID NO: 5799670 - DNA, 25 bp, Homo sapien
tatcgaatgtacaggaagagccaag

SEQ ID NO: 5799671 - DNA, 25 bp, Homo sapien
ttactatcaattatcagagcccatg

SEQ ID NO: 5799672 - DNA, 25 bp, Homo sapien
acatttgactgtcttcctcttgctg

SEQ ID NO: 5799673 - DNA, 25 bp, Homo sapien
aaattctatttatttattattggaa

SEQ ID NO: 5799674 - DNA, 25 bp, Homo sapien
ggagacatttgactgtcttcctctt

SEQ ID NO: 5799675 - DNA, 25 bp, Homo sapien
tgctccaatcacagtatgtggtgat

SEQ ID NO: 5799676 - DNA, 25 bp, Homo sapien
atgtcgaatcaaatattcggaacag

SEQ ID NO: 5799677 - DNA, 25 bp, Homo sapien
ccaccccgaaaggatagcatacacg

SEQ ID NO: 5799678 - DNA, 25 bp, Homo sapien
agacatttgactgtcttcctcttgc

SEQ ID NO: 5799679 - DNA, 25 bp, Homo sapien
tggaggatcacctagtaacacacgc

SEQ ID NO: 5799680 - DNA, 25 bp, Homo sapien
gctggctgacggctccgggcagcta

SEQ ID NO: 5799681 - DNA, 25 bp, Homo sapien
aggaggccgaggggaccatgtccgg

SEQ ID NO: 5799682 - DNA, 25 bp, Homo sapien
ctgcccccaattacctagatgtcta

SEQ ID NO: 5799683 - DNA, 25 bp, Homo sapien
ttgggaagatggcacgggtcttttc

SEQ ID NO: 5799684 - DNA, 25 bp, Homo sapien
aataagatcagagccattgggaaga

SEQ ID NO: 5799685 - DNA, 25 bp, Homo sapien
tctctgtgtacatggaggaatgtca

SEQ ID NO: 5799686 - DNA, 25 bp, Homo sapien
aaattcttttaatttatgttcaata

SEQ ID NO: 5799687 - DNA, 25 bp, Homo sapien
cagagccattgggaagatggcacgg

SEQ ID NO: 5799688 - DNA, 25 bp, Homo sapien
gcccgggccgcgagcagccgcggct

SEQ ID NO: 5799689 - DNA, 25 bp, Homo sapien
cgcgaggtctggaccgaattaatga

SEQ ID NO: 5799690 - DNA, 25 bp, Homo sapien
ctttggtctgatccctcagaggatt

SEQ ID NO: 5799691 - DNA, 25 bp, Homo sapien
cttcaaacaggaatgtcgaatcaaa

SEQ ID NO: 5799692 - DNA, 25 bp, Homo sapien
ggcacgggtcttttcaattcttcgg

SEQ ID NO: 5799693 - DNA, 25 bp, Homo sapien
tttgaagttggaggatcacctagta

SEQ ID NO: 5799694 - DNA, 25 bp, Homo sapien
ctcagcacactcacatgctgcgcac

SEQ ID NO: 5799695 - DNA, 25 bp, Homo sapien
cggacaccgctgaggagccggggcc

SEQ ID NO: 5799696 - DNA, 25 bp, Homo sapien
gccgcggcgtaggcgcacgtccggc

SEQ ID NO: 5799697 - DNA, 25 bp, Homo sapien
atcgagacagccacagtagaagcgg

SEQ ID NO: 5799698 - DNA, 25 bp, Homo sapien
aagtgagagtgtgctgactctcaag

SEQ ID NO: 5799699 - DNA, 25 bp, Homo sapien
acgctggtgggccaatgaaatctgt

SEQ ID NO: 5799700 - DNA, 25 bp, Homo sapien
aatgtcatgaatatcaggcagttta

SEQ ID NO: 5799701 - DNA, 25 bp, Homo sapien
cgaattaatgagcgaatgccacccc

SEQ ID NO: 5799702 - DNA, 25 bp, Homo sapien
gcgcacgtccggcgggctcctggag

SEQ ID NO: 5799703 - DNA, 25 bp, Homo sapien
aggatagcatacacgctggtgggcc

SEQ ID NO: 5799704 - DNA, 25 bp, Homo sapien
gggaaaaagtcacagagatgctggt

SEQ ID NO: 5799705 - DNA, 25 bp, Homo sapien
acgactggaagaggaagtagcctta

SEQ ID NO: 5799706 - DNA, 25 bp, Homo sapien
tattctgtaaaaaggtgactgtttt

SEQ ID NO: 5799707 - DNA, 25 bp, Homo sapien
tgtatgatgcctgtatggagacatt

SEQ ID NO: 5799708 - DNA, 25 bp, Homo sapien
tgaatctgattgttgtcaacacatt

SEQ ID NO: 5799709 - DNA, 25 bp, Homo sapien
cgaagcggtgttccccgccttagcc

SEQ ID NO: 5799710 - DNA, 25 bp, Homo sapien
ccgagggtgctcttatttctacagt

SEQ ID NO: 5799711 - DNA, 25 bp, Homo sapien
gaaagtgagagtgtgctgactctca

SEQ ID NO: 5799712 - DNA, 25 bp, Homo sapien
tcgccacccttagcagcggtcgagg

SEQ ID NO: 5799713 - DNA, 25 bp, Homo sapien
gatctaaaactcaagaacaaattct

SEQ ID NO: 5799714 - DNA, 25 bp, Homo sapien
cacgggtcttttcaattcttcggca

SEQ ID NO: 5799715 - DNA, 25 bp, Homo sapien
acagtatgtggtgatattcatggac

SEQ ID NO: 5799716 - DNA, 25 bp, Homo sapien
aatcaatgatggggctgccatcctg

SEQ ID NO: 5799717 - DNA, 25 bp, Homo sapien
gtgtgtgctgtatttatggagttta

SEQ ID NO: 5799718 - DNA, 25 bp, Homo sapien
cggctgtcccggtcgccacccttag

SEQ ID NO: 5799719 - DNA, 25 bp, Homo sapien
ttccatcacttattacaattttctc

SEQ ID NO: 5799720 - DNA, 25 bp, Homo sapien
ggagcgaccaagggaagaaagccca

SEQ ID NO: 5799721 - DNA, 25 bp, Homo sapien
ctgccctcttaaaccagcagtttct

SEQ ID NO: 5799722 - DNA, 25 bp, Homo sapien
catcttacagactatttcaccttca

SEQ ID NO: 5799723 - DNA, 25 bp, Homo sapien
gcttcagcacaagatccggagtttt

SEQ ID NO: 5799724 - DNA, 25 bp, Homo sapien
atgacgaactgatttctgatgatga

SEQ ID NO: 5799725 - DNA, 25 bp, Homo sapien
cgcacaggagcgaccaagggaagaa

SEQ ID NO: 5799726 - DNA, 25 bp, Homo sapien
ggagtttaaagattaatcatcccaa

SEQ ID NO: 5799727 - DNA, 25 bp, Homo sapien
gaatgtacaggaagagccaagccac

SEQ ID NO: 5799728 - DNA, 25 bp, Homo sapien
tctgatccctcagaggattatggca

SEQ ID NO: 5799729 - DNA, 25 bp, Homo sapien
cacttattacaattttctctgcccc

SEQ ID NO: 5799730 - DNA, 25 bp, Homo sapien
tcaaatattcggaacaggtgtatga

SEQ ID NO: 5799731 - DNA, 25 bp, Homo sapien
ctggcttccaaactttatggatgtt

SEQ ID NO: 5799732 - DNA, 25 bp, Homo sapien
cgtaaggagatcatcaggaataaga

SEQ ID NO: 5799733 - DNA, 25 bp, Homo sapien
tcggggaaatcatgaatgcaggcat

SEQ ID NO: 5799734 - DNA, 25 bp, Homo sapien
cgtcctgtcagtggcgtcggaggcc

SEQ ID NO: 5799735 - DNA, 25 bp, Homo sapien
taaagattaatcatcccaaaacatt

SEQ ID NO: 5799736 - DNA, 25 bp, Homo sapien
cagcagtttctctgtgtacatggag

SEQ ID NO: 5799737 - DNA, 25 bp, Homo sapien
aaagctgctgtgttgaaatatgaaa

SEQ ID NO: 5799738 - DNA, 25 bp, Homo sapien
cagagggttctcgcttcagcacaag

SEQ ID NO: 5799739 - DNA, 25 bp, Homo sapien
atgacttagagtcctgccgtggctc

SEQ ID NO: 5799740 - DNA, 25 bp, Homo sapien
gttggggaaaaagtcacagagatgc

SEQ ID NO: 5799741 - DNA, 25 bp, Homo sapien
cctagtaacacacgctacctctttc

SEQ ID NO: 5799742 - DNA, 25 bp, Homo sapien
gctgcggtggccgcgcccttctggt

SEQ ID NO: 5799743 - DNA, 25 bp, Homo sapien
gtagaggcccgggaagccatcagag

SEQ ID NO: 5799744 - DNA, 25 bp, Homo sapien
ctgtccgagggtgctcttatttcta

SEQ ID NO: 5799745 - DNA, 25 bp, Homo sapien
aacaggtgtatgatgcctgtatgga

SEQ ID NO: 5799746 - DNA, 25 bp, Homo sapien
cgcggctgtcccggtcgccaccctt

SEQ ID NO: 5799747 - DNA, 25 bp, Homo sapien
ctcaacatatgctctgatgacgaac

SEQ ID NO: 5799748 - DNA, 25 bp, Homo sapien
tagagtgtgtgctgtatttatggag

SEQ ID NO: 5799749 - DNA, 25 bp, Homo sapien
gagagtgtgctgactctcaagggcc

SEQ ID NO: 5799750 - DNA, 25 bp, Homo sapien
agtatttgagaatgggaaacctaaa

SEQ ID NO: 5799751 - DNA, 25 bp, Homo sapien
atgctctgatgacgaactgatttct

SEQ ID NO: 5799752 - DNA, 25 bp, Homo sapien
gatattcatggacaattctttgacc

SEQ ID NO: 5799753 - DNA, 25 bp, Homo sapien
atatcaggcagtttaactgttctcc

SEQ ID NO: 5799754 - DNA, 25 bp, Homo sapien
atgtctataacaataaagctgctgt

SEQ ID NO: 5799755 - DNA, 25 bp, Homo sapien
tgcggtggccgcgcccttctggtgc

SEQ ID NO: 5799756 - DNA, 25 bp, Homo sapien
aatgaaaagcaactcaaaacaactt

SEQ ID NO: 5799757 - DNA, 25 bp, Homo sapien
caacatatgctctgatgacgaactg

SEQ ID NO: 5799758 - DNA, 25 bp, Homo sapien
attcatgacttagagtcctgccgtg

SEQ ID NO: 5799759 - DNA, 25 bp, Homo sapien
gtgtgacctgctttggtctgatccc

SEQ ID NO: 5799760 - DNA, 25 bp, Homo sapien
ctttagatgacattaggaaattaga

SEQ ID NO: 5799761 - DNA, 25 bp, Homo sapien
aagaaagcccattcatgacttagag

SEQ ID NO: 5799762 - DNA, 25 bp, Homo sapien
tgtaacctcagcacactcacatgct

SEQ ID NO: 5799763 - DNA, 25 bp, Homo sapien
tgatccctcagaggattatggcaat

SEQ ID NO: 5799764 - DNA, 25 bp, Homo sapien
agcgaatgccaccccgaaaggatag

SEQ ID NO: 5799765 - DNA, 25 bp, Homo sapien
atacccacaacactgtccgagggtg

SEQ ID NO: 5799766 - DNA, 25 bp, Homo sapien
gtgccgaagcggtgttccccgcctt

SEQ ID NO: 5799767 - DNA, 25 bp, Homo sapien
cgaatcaaatattcggaacaggtgt

SEQ ID NO: 5799768 - DNA, 25 bp, Homo sapien
agttcgtaaggagatcatcaggaat

SEQ ID NO: 5799769 - DNA, 25 bp, Homo sapien
ctgttctccacacccctactggctt

SEQ ID NO: 5799770 - DNA, 25 bp, Homo sapien
atgaaaacaatgtcatgaatatcag

SEQ ID NO: 5799771 - DNA, 25 bp, Homo sapien
gtctggaccgaattaatgagcgaat

SEQ ID NO: 5799772 - DNA, 25 bp, Homo sapien
ggaagaaagcccattcatgacttag

SEQ ID NO: 5799773 - DNA, 25 bp, Homo sapien
ggcacggctggctgacggctccggg

SEQ ID NO: 5799774 - DNA, 25 bp, Homo sapien
aggctatttcagtatagagtgtgtg

SEQ ID NO: 5799775 - DNA, 25 bp, Homo sapien
aacaataaagctgctgtgttgaaat

SEQ ID NO: 5799776 - DNA, 25 bp, Homo sapien
tgccaccccgaaaggatagcataca

SEQ ID NO: 5799777 - DNA, 25 bp, Homo sapien
cgcctcccaagagagcggccggtgg

SEQ ID NO: 5799778 - DNA, 25 bp, Homo sapien
aatcatcccaaaacattgtttctgc

SEQ ID NO: 5799779 - DNA, 25 bp, Homo sapien
aatatatataaaaagtgcatctgtt

SEQ ID NO: 5799780 - DNA, 25 bp, Homo sapien
gaggatcacctagtaacacacgcta

SEQ ID NO: 5799781 - DNA, 25 bp, Homo sapien
ttaactgttctccacacccctactg

SEQ ID NO: 5799782 - DNA, 25 bp, Homo sapien
tgcaggcatcttacagactatttca

SEQ ID NO: 5799783 - DNA, 25 bp, Homo sapien
gtgactatgtggacagaggctattt

SEQ ID NO: 5799784 - DNA, 25 bp, Homo sapien
ttacaattttctctgcccccaatta

SEQ ID NO: 5799785 - DNA, 25 bp, Homo sapien
agcgcgaggtctggaccgaattaat

SEQ ID NO: 5799786 - DNA, 25 bp, Homo sapien
tcccggtcgccacccttagcagcgg

SEQ ID NO: 5799787 - DNA, 25 bp, Homo sapien
aactgatttctgatgatgaagcaga

SEQ ID NO: 5799788 - DNA, 25 bp, Homo sapien
ggcgcctcccaagagagcggccggt

SEQ ID NO: 5799789 - DNA, 25 bp, Homo sapien
tgcgcacaggagcgaccaagggaag

SEQ ID NO: 5799790 - DNA, 25 bp, Homo sapien
ctgctgtgttgaaatatgaaaacaa

SEQ ID NO: 5799791 - DNA, 25 bp, Homo sapien
tccacacccctactggcttccaaac

SEQ ID NO: 5799792 - DNA, 25 bp, Homo sapien
agtcttgtgctataaaggggaactt

SEQ ID NO: 5799793 - DNA, 25 bp, Homo sapien
catttattctgtaaaaaggtgactg

SEQ ID NO: 5799794 - DNA, 25 bp, Homo sapien
ggcgggctcctggagcctggaggag

SEQ ID NO: 5799795 - DNA, 25 bp, Homo sapien
aattaatgagcgaatgccaccccga

SEQ ID NO: 5799796 - DNA, 25 bp, Homo sapien
cgaactgatttctgatgatgaagca

SEQ ID NO: 5799797 - DNA, 25 bp, Homo sapien
gatgctggtaaatgtgctcaacata

SEQ ID NO: 5799798 - DNA, 25 bp, Homo sapien
tcttcggcaagaaagtgagagtgtg

SEQ ID NO: 5799799 - DNA, 25 bp, Homo sapien
gagccattgggaagatggcacgggt

SEQ ID NO: 5799800 - DNA, 25 bp, Homo sapien
aatgagcgaatgccaccccgaaagg

SEQ ID NO: 5799801 - DNA, 25 bp, Homo sapien
atgtggacagaggctatttcagtat

SEQ ID NO: 5799802 - DNA, 25 bp, Homo sapien
aattacctagatgtctataacaata

SEQ ID NO: 5799803 - DNA, 25 bp, Homo sapien
taacctcagcacactcacatgctgc

SEQ ID NO: 5799804 - DNA, 25 bp, Homo sapien
tgaagttggaggatcacctagtaac

SEQ ID NO: 5799805 - DNA, 25 bp, Homo sapien
acctaatgaagttatttgaagttgg

SEQ ID NO: 5799806 - DNA, 25 bp, Homo sapien
aggaatgtcgaatcaaatattcgga

SEQ ID NO: 5799807 - DNA, 25 bp, Homo sapien
aggcgcacgtccggcgggctcctgg

SEQ ID NO: 5799808 - DNA, 25 bp, Homo sapien
gatgctccaatcacagtatgtggtg

SEQ ID NO: 5799809 - DNA, 25 bp, Homo sapien
ccaattacctagatgtctataacaa

SEQ ID NO: 5799810 - DNA, 25 bp, Homo sapien
gaagatggcacgggtcttttcaatt

SEQ ID NO: 5799811 - DNA, 25 bp, Homo sapien
aagaaagtgagagtgtgctgactct

SEQ ID NO: 5799812 - DNA, 25 bp, Homo sapien
ttttgcagaacaataatttactatc

SEQ ID NO: 5799813 - DNA, 25 bp, Homo sapien
agggaagaaagcccattcatgactt

SEQ ID NO: 5799814 - DNA, 25 bp, Homo sapien
aatctgattgttgtcaacacatttg

SEQ ID NO: 5799815 - DNA, 25 bp, Homo sapien
tttattctgtaaaaaggtgactgtt

SEQ ID NO: 5799816 - DNA, 25 bp, Homo sapien
cggtcgaggtcggtgccgaagcggt

SEQ ID NO: 5799817 - DNA, 25 bp, Homo sapien
tctgcatttattctgtaaaaaggtg

SEQ ID NO: 5799818 - DNA, 25 bp, Homo sapien
tgaagttatttgaagttggaggatc

SEQ ID NO: 5799819 - DNA, 25 bp, Homo sapien
gggtgactatgtggacagaggctat

SEQ ID NO: 5799820 - DNA, 25 bp, Homo sapien
aggcccgggaagccatcagagggtt

SEQ ID NO: 5799821 - DNA, 25 bp, Homo sapien
gtggccgcgcccttctggtgctcgg

SEQ ID NO: 5799822 - DNA, 25 bp, Homo sapien
ttccacctctccaccaccgaccgcg

SEQ ID NO: 5799823 - DNA, 25 bp, Homo sapien
gagttttgaagaagcgcgaggtctg

SEQ ID NO: 5799824 - DNA, 25 bp, Homo sapien
aaacaggaatgtcgaatcaaatatt

SEQ ID NO: 5799825 - DNA, 25 bp, Homo sapien
gggcctgactcccacaggcacactc

SEQ ID NO: 5799826 - DNA, 25 bp, Homo sapien
tgaagaagcgcgaggtctggaccga

SEQ ID NO: 5799827 - DNA, 25 bp, Homo sapien
gaccttggagcactatacccacaac

SEQ ID NO: 5799828 - DNA, 25 bp, Homo sapien
cgagcagccgcggctgtcccggtcg

SEQ ID NO: 5799829 - DNA, 25 bp, Homo sapien
cacacccctactggcttccaaactt

SEQ ID NO: 5799830 - DNA, 25 bp, Homo sapien
caggctttccatcacttattacaat

SEQ ID NO: 5799831 - DNA, 25 bp, Homo sapien
cagtttgtgaatttttgcagaacaa

SEQ ID NO: 5799832 - DNA, 25 bp, Homo sapien
cggtagaggcccgggaagccatcag

SEQ ID NO: 5799833 - DNA, 25 bp, Homo sapien
aaggaaggacgactggaagaggaag

SEQ ID NO: 5799834 - DNA, 25 bp, Homo sapien
gcacactcacatgctgcgcacagga

SEQ ID NO: 5799835 - DNA, 25 bp, Homo sapien
gtacaggaagagccaagccacaggc

SEQ ID NO: 5799836 - DNA, 25 bp, Homo sapien
gccacaggctttccatcacttatta

SEQ ID NO: 5799837 - DNA, 25 bp, Homo sapien
aagcaactcaaaacaacttcaacct

SEQ ID NO: 5799838 - DNA, 25 bp, Homo sapien
agccaagccacaggctttccatcac

SEQ ID NO: 5799839 - DNA, 25 bp, Homo sapien
ttcaattcttcggcaagaaagtgag

SEQ ID NO: 5799840 - DNA, 25 bp, Homo sapien
gcagcggtcgaggtcggtgccgaag

SEQ ID NO: 5799841 - DNA, 25 bp, Homo sapien
gctaaggctgcccgaggagaaggcg

SEQ ID NO: 5799842 - DNA, 25 bp, Homo sapien
atacacgctggtgggccaatgaaat

SEQ ID NO: 5799843 - DNA, 25 bp, Homo sapien
ttggacctgtgtgtgacctgctttg

SEQ ID NO: 5799844 - DNA, 25 bp, Homo sapien
ggtatcgaatgtacaggaagagcca

SEQ ID NO: 5799845 - DNA, 25 bp, Homo sapien
atcagagggttctcgcttcagcaca

SEQ ID NO: 5799846 - DNA, 25 bp, Homo sapien
tcttgtgctataaaggggaacttcc

SEQ ID NO: 5799847 - DNA, 25 bp, Homo sapien
tcaaagctgtcccctttcctccaac

SEQ ID NO: 5799848 - DNA, 25 bp, Homo sapien
accaagggaagaaagcccattcatg

SEQ ID NO: 5799849 - DNA, 25 bp, Homo sapien
gcagtttctctgtgtacatggagga

SEQ ID NO: 5799850 - DNA, 25 bp, Homo sapien
gaagcagaaggaagcactacagttc

SEQ ID NO: 5799851 - DNA, 25 bp, Homo sapien
gtcgaggtcggtgccgaagcggtgt

SEQ ID NO: 5799852 - DNA, 25 bp, Homo sapien
gcgctgcggtggccgcgcccttctg

SEQ ID NO: 5799853 - DNA, 25 bp, Homo sapien
gaaatctgtaacctcagcacactca

SEQ ID NO: 5799854 - DNA, 25 bp, Homo sapien
ggacagaggctatttcagtatagag

SEQ ID NO: 5799855 - DNA, 25 bp, Homo sapien
ggtgcatttataattcagtctgcat

SEQ ID NO: 5799856 - DNA, 25 bp, Homo sapien
atgctgggtatcgaatgtacaggaa

SEQ ID NO: 5799857 - DNA, 25 bp, Homo sapien
agacagccacagtagaagcggtaga

SEQ ID NO: 5799858 - DNA, 25 bp, Homo sapien
ttagatgacattaggaaattagaca

SEQ ID NO: 5799859 - DNA, 25 bp, Homo sapien
aatcacagtatgtggtgatattcat

SEQ ID NO: 5799860 - DNA, 25 bp, Homo sapien
atatgaaaacaatgtcatgaatatc

SEQ ID NO: 5799861 - DNA, 25 bp, Homo sapien
ggaggccggcgctgcggtggccgcg

SEQ ID NO: 5799862 - DNA, 25 bp, Homo sapien
tcacatggtctttgccttttgttgg

SEQ ID NO: 5799863 - DNA, 25 bp, Homo sapien
tcctcttgctgccctcttaaaccag

SEQ ID NO: 5799864 - DNA, 25 bp, Homo sapien
acctgaaattacttctttagatgac

SEQ ID NO: 5799865 - DNA, 25 bp, Homo sapien
agatgacattaggaaattagacagg

SEQ ID NO: 5799866 - DNA, 25 bp, Homo sapien
gactgtcttcctcttgctgccctct

SEQ ID NO: 5799867 - DNA, 25 bp, Homo sapien
catggaggaatgtcacctgaaatta

SEQ ID NO: 5799868 - DNA, 25 bp, Homo sapien
tctgtgtacatggaggaatgtcacc

SEQ ID NO: 5799869 - DNA, 25 bp, Homo sapien
ttacttctttagatgacattaggaa

SEQ ID NO: 5799870 - DNA, 25 bp, Homo sapien
ggctttccatcacttattacaattt

SEQ ID NO: 5799871 - DNA, 25 bp, Homo sapien
ctttctgggtgactatgtggacaga

SEQ ID NO: 5799872 - DNA, 25 bp, Homo sapien
cccaagatgctgggtatcgaatgta

SEQ ID NO: 5799873 - DNA, 25 bp, Homo sapien
catcaaagctgtcccctttcctcca

SEQ ID NO: 5799874 - DNA, 25 bp, Homo sapien
ggaaatcatgaatgcaggcatctta

SEQ ID NO: 5799875 - DNA, 25 bp, Homo sapien
ccaccaccgaccgcgtcatcaaagc

SEQ ID NO: 5799876 - DNA, 25 bp, Homo sapien
gaatgtcgaatcaaatattcggaac

SEQ ID NO: 5799877 - DNA, 25 bp, Homo sapien
gggccaatgaaatctgtaacctcag

SEQ ID NO: 5799878 - DNA, 25 bp, Homo sapien
caattctttgacctaatgaagttat

SEQ ID NO: 5799879 - DNA, 25 bp, Homo sapien
gctccgggcagctaaggctgcccga

SEQ ID NO: 5799880 - DNA, 25 bp, Homo sapien
tgttgtcaacacatttgtgaagtct

SEQ ID NO: 5799881 - DNA, 25 bp, Homo sapien
tggaggtgcatttataattcagtct

SEQ ID NO: 5799882 - DNA, 25 bp, Homo sapien
gccgcggctgtcccggtcgccaccc

SEQ ID NO: 5799883 - DNA, 25 bp, Homo sapien
ggcttccaaactttatggatgtttt

SEQ ID NO: 5799884 - DNA, 25 bp, Homo sapien
tgtggtgatattcatggacaattct

SEQ ID NO: 5799885 - DNA, 25 bp, Homo sapien
gcccattcatgacttagagtcctgc

SEQ ID NO: 5799886 - DNA, 25 bp, Homo sapien
atgaatatcaggcagtttaactgtt

SEQ ID NO: 5799887 - DNA, 25 bp, Homo sapien
gagggtgctcttatttctacagtta

SEQ ID NO: 5799888 - DNA, 25 bp, Homo sapien
gtaacacacgctacctctttctggg

SEQ ID NO: 5799889 - DNA, 25 bp, Homo sapien
gtccggcgggctcctggagcctgga

SEQ ID NO: 5799890 - DNA, 25 bp, Homo sapien
ctttatggatgttttcacatggtct

SEQ ID NO: 5799891 - DNA, 25 bp, Homo sapien
caaactttatggatgttttcacatg

SEQ ID NO: 5799892 - DNA, 25 bp, Homo sapien
aagcggtgttccccgccttagccgc

SEQ ID NO: 5799893 - DNA, 25 bp, Homo sapien
tgaaaagcaactcaaaacaacttca

SEQ ID NO: 5799894 - DNA, 25 bp, Homo sapien
ctacctctttctgggtgactatgtg

SEQ ID NO: 5799895 - DNA, 25 bp, Homo sapien
gcccatgaagcccaagatgctgggt

SEQ ID NO: 5799896 - DNA, 25 bp, Homo sapien
gcgtcctctcaggaggcaagcagac

SEQ ID NO: 5799897 - DNA, 25 bp, Homo sapien
cgaggtcggtgccgaagcggtgttc

SEQ ID NO: 5799898 - DNA, 25 bp, Homo sapien
acaagatccggagttttgaagaagc

SEQ ID NO: 5799899 - DNA, 25 bp, Homo sapien
cattaggaaattagacaggtttacg

SEQ ID NO: 5799900 - DNA, 25 bp, Homo sapien
gcatacacgctggtgggccaatgaa

SEQ ID NO: 5799901 - DNA, 25 bp, Homo sapien
ctacagttcgtaaggagatcatcag

SEQ ID NO: 5799902 - DNA, 25 bp, Homo sapien
taagatcagagccattgggaagatg

SEQ ID NO: 5799903 - DNA, 25 bp, Homo sapien
gagcggccggtgggccctcgtcctg

SEQ ID NO: 5799904 - DNA, 25 bp, Homo sapien
gaaattacttctttagatgacatta

SEQ ID NO: 5799905 - DNA, 25 bp, Homo sapien
ggtgctcggacaccgctgaggagcc

SEQ ID NO: 5799906 - DNA, 25 bp, Homo sapien
aactttatggatgttttcacatggt

SEQ ID NO: 5799907 - DNA, 25 bp, Homo sapien
gtcatcaaagctgtcccctttcctc

SEQ ID NO: 5799908 - DNA, 25 bp, Homo sapien
cccgaggagaaggcggcggccgcgg

SEQ ID NO: 5799909 - DNA, 25 bp, Homo sapien
tcatgaatatcaggcagtttaactg

SEQ ID NO: 5799910 - DNA, 25 bp, Homo sapien
tgacggctccgggcagctaaggctg

SEQ ID NO: 5799911 - DNA, 25 bp, Homo sapien
attatggcaatgagaagaccttgga

SEQ ID NO: 5799912 - DNA, 25 bp, Homo sapien
ggattatggcaatgagaagaccttg

SEQ ID NO: 5799913 - DNA, 25 bp, Homo sapien
gggaagatggcacgggtcttttcaa

SEQ ID NO: 5799914 - DNA, 25 bp, Homo sapien
tactggcttccaaactttatggatg

SEQ ID NO: 5799915 - DNA, 25 bp, Homo sapien
tccgggaggcgcttccacctctcca

SEQ ID NO: 5799916 - DNA, 25 bp, Homo sapien
agcggtagaggcccgggaagccatc

SEQ ID NO: 5799917 - DNA, 25 bp, Homo sapien
gtgctcttatttctacagttaccct

SEQ ID NO: 5799918 - DNA, 25 bp, Homo sapien
gctgcccgaggagaaggcggcggcc

SEQ ID NO: 5799919 - DNA, 25 bp, Homo sapien
gtgagagtgtgctgactctcaaggg

SEQ ID NO: 5799920 - DNA, 25 bp, Homo sapien
gccgctggcgcctcccaagagagcg

SEQ ID NO: 5799921 - DNA, 25 bp, Homo sapien
ttaagaaatgaatctgattgttgtc

SEQ ID NO: 5799922 - DNA, 25 bp, Homo sapien
gtgggccaatgaaatctgtaacctc

SEQ ID NO: 5799923 - DNA, 25 bp, Homo sapien
cagctaaggctgcccgaggagaagg

SEQ ID NO: 5799924 - DNA, 25 bp, Homo sapien
atgacattaggaaattagacaggtt

SEQ ID NO: 5799925 - DNA, 25 bp, Homo sapien
gatttctgatgatgaagcagaagga

SEQ ID NO: 5799926 - DNA, 25 bp, Homo sapien
acctcagcacactcacatgctgcgc

SEQ ID NO: 5799927 - DNA, 25 bp, Homo sapien
cggcgtaggcgcacgtccggcgggc

SEQ ID NO: 5799928 - DNA, 25 bp, Homo sapien
gactatgatagaagtagatgctcca

SEQ ID NO: 5799929 - DNA, 25 bp, Homo sapien
agcagaaggaagcactacagttcgt

SEQ ID NO: 5799930 - DNA, 25 bp, Homo sapien
tatataaaaagtgcatctgttttgt

SEQ ID NO: 5799931 - DNA, 25 bp, Homo sapien
ttacctagatgtctataacaataaa

SEQ ID NO: 5799932 - DNA, 25 bp, Homo sapien
gcctttggacctgtgtgtgacctgc

SEQ ID NO: 5799933 - DNA, 25 bp, Homo sapien
cgcgagcagccgcggctgtcccggt

SEQ ID NO: 5799934 - DNA, 25 bp, Homo sapien
gagggttctcgcttcagcacaagat

SEQ ID NO: 5799935 - DNA, 25 bp, Homo sapien
acccacaacactgtccgagggtgct

SEQ ID NO: 5799936 - DNA, 25 bp, Homo sapien
cagtttaactgttctccacacccct

SEQ ID NO: 5799937 - DNA, 25 bp, Homo sapien
taaaactcaagaacaaattctattt

SEQ ID NO: 5799938 - DNA, 25 bp, Homo sapien
gcgtcatcaaagctgtcccctttcc

SEQ ID NO: 5799939 - DNA, 25 bp, Homo sapien
tatttgaagttggaggatcacctag

SEQ ID NO: 5799940 - DNA, 25 bp, Homo sapien
cgcggcgtaggcgcacgtccggcgg

SEQ ID NO: 5799941 - DNA, 25 bp, Homo sapien
acctgtgtgtgacctgctttggtct

SEQ ID NO: 5799942 - DNA, 25 bp, Homo sapien
ttctggtgctcggacaccgctgagg

SEQ ID NO: 5799943 - DNA, 25 bp, Homo sapien
ttctttagatgacattaggaaatta

SEQ ID NO: 5799944 - DNA, 25 bp, Homo sapien
cgggtcttttcaattcttcggcaag

SEQ ID NO: 5799945 - DNA, 25 bp, Homo sapien
accagcagtttctctgtgtacatgg

SEQ ID NO: 5799946 - DNA, 25 bp, Homo sapien
agcggtcgaggtcggtgccgaagcg

SEQ ID NO: 5799947 - DNA, 25 bp, Homo sapien
aagaggaagtagccttaaagataat

SEQ ID NO: 5799948 - DNA, 25 bp, Homo sapien
aagttatttgaagttggaggatcac

SEQ ID NO: 5799949 - DNA, 25 bp, Homo sapien
atttactatcaattatcagagccca

SEQ ID NO: 5799950 - DNA, 25 bp, Homo sapien
tagacaggtttacggaacctcccgc

SEQ ID NO: 5799951 - DNA, 25 bp, Homo sapien
ccgcgcccttctggtgctcggacac

SEQ ID NO: 5799952 - DNA, 25 bp, Homo sapien
acagaggctatttcagtatagagtg

SEQ ID NO: 5799953 - DNA, 25 bp, Homo sapien
agggcccgggccgcgagcagccgcg

SEQ ID NO: 5799954 - DNA, 25 bp, Homo sapien
ctccctctgggcgtcctctcaggag

SEQ ID NO: 5799955 - DNA, 25 bp, Homo sapien
gaatatcaggcagtttaactgttct

SEQ ID NO: 5799956 - DNA, 25 bp, Homo sapien
ggcatcttacagactatttcacctt

SEQ ID NO: 5799957 - DNA, 25 bp, Homo sapien
ctgactcccacaggcacactccctc

SEQ ID NO: 5799958 - DNA, 25 bp, Homo sapien
tcccaagagagcggccggtgggccc

SEQ ID NO: 5799959 - DNA, 25 bp, Homo sapien
gtccgagggtgctcttatttctaca

SEQ ID NO: 5799960 - DNA, 25 bp, Homo sapien
gtagccttaaagataatcaatgatg

SEQ ID NO: 5799961 - DNA, 25 bp, Homo sapien
gcggccggtgggccctcgtcctgtc

SEQ ID NO: 5799962 - DNA, 25 bp, Homo sapien
cccacaggcacactccctctgggcg

SEQ ID NO: 5799963 - DNA, 25 bp, Homo sapien
ctcgtcctgtcagtggcgtcggagg

SEQ ID NO: 5799964 - DNA, 25 bp, Homo sapien
tatggcaatgagaagaccttggagc

SEQ ID NO: 5799965 - DNA, 25 bp, Homo sapien
tgtgtacatggaggaatgtcacctg

SEQ ID NO: 5799966 - DNA, 25 bp, Homo sapien
catgaatgcaggcatcttacagact

SEQ ID NO: 5799967 - DNA, 25 bp, Homo sapien
ttttcaattcttcggcaagaaagtg

SEQ ID NO: 5799968 - DNA, 25 bp, Homo sapien
attctatttatttattattggaaaa

SEQ ID NO: 5799969 - DNA, 25 bp, Homo sapien
tattcatggacaattctttgaccta

SEQ ID NO: 5799970 - DNA, 25 bp, Homo sapien
tcttttcaattcttcggcaagaaag

SEQ ID NO: 5799971 - DNA, 25 bp, Homo sapien
agaagaccttggagcactataccca

SEQ ID NO: 5799972 - DNA, 25 bp, Homo sapien
gatagaagtagatgctccaatcaca

SEQ ID NO: 5799973 - DNA, 25 bp, Homo sapien
aggtcggtgccgaagcggtgttccc

SEQ ID NO: 5799974 - DNA, 25 bp, Homo sapien
ctagatgtctataacaataaagctg

SEQ ID NO: 5799975 - DNA, 25 bp, Homo sapien
tcagtatagagtgtgtgctgtattt

SEQ ID NO: 5799976 - DNA, 25 bp, Homo sapien
cacactccctctgggcgtcctctca

SEQ ID NO: 5799977 - DNA, 25 bp, Homo sapien
gcccgggaagccatcagagggttct

SEQ ID NO: 5799978 - DNA, 25 bp, Homo sapien
acctctttctgggtgactatgtgga

SEQ ID NO: 5799979 - DNA, 25 bp, Homo sapien
caggcatcttacagactatttcacc

SEQ ID NO: 5799980 - DNA, 25 bp, Homo sapien
tatttcaccttcaaacaggaatgtc

SEQ ID NO: 5799981 - DNA, 25 bp, Homo sapien
tgctggtaaatgtgctcaacatatg

SEQ ID NO: 5799982 - DNA, 25 bp, Homo sapien
tgcagtttgtgaatttttgcagaac

SEQ ID NO: 5799983 - DNA, 25 bp, Homo sapien
cctcttaaaccagcagtttctctgt

SEQ ID NO: 5799984 - DNA, 25 bp, Homo sapien
ggggaaatcatgaatgcaggcatct

SEQ ID NO: 5799985 - DNA, 25 bp, Homo sapien
tggtgatattcatggacaattcttt

SEQ ID NO: 5799986 - DNA, 25 bp, Homo sapien
ttaaaccagcagtttctctgtgtac

SEQ ID NO: 5799987 - DNA, 25 bp, Homo sapien
aagactatgatagaagtagatgctc

SEQ ID NO: 5799988 - DNA, 25 bp, Homo sapien
aactcaaaacaacttcaacctggag

SEQ ID NO: 5799989 - DNA, 25 bp, Homo sapien
cacaggctttccatcacttattaca

SEQ ID NO: 5799990 - DNA, 25 bp, Homo sapien
caaaacattgtttctgcttcgggga

SEQ ID NO: 5799991 - DNA, 25 bp, Homo sapien
aatgaatctgattgttgtcaacaca

SEQ ID NO: 5799992 - DNA, 25 bp, Homo sapien
aggaggcaagcagactatcgagaca

SEQ ID NO: 5799993 - DNA, 25 bp, Homo sapien
tgctgccctcttaaaccagcagttt

SEQ ID NO: 5799994 - DNA, 25 bp, Homo sapien
cactacagttcgtaaggagatcatc

SEQ ID NO: 5799995 - DNA, 25 bp, Homo sapien
tttctctgtgtacatggaggaatgt

SEQ ID NO: 5799996 - DNA, 25 bp, Homo sapien
caccgctgaggagccggggccgggc

SEQ ID NO: 5799997 - DNA, 25 bp, Homo sapien
ctcccacaggcacactccctctggg

SEQ ID NO: 5799998 - DNA, 25 bp, Homo sapien
caaaacaacttcaacctggaggtgc

SEQ ID NO: 5799999 - DNA, 25 bp, Homo sapien
aaaagtgcatctgttttgtttttcc

SEQ ID NO: 5800000 - DNA, 25 bp, Homo sapien
ggaggcgcttccacctctccaccac

SEQ ID NO: 5800001 - DNA, 25 bp, Homo sapien
aaaccagcagtttctctgtgtacat

SEQ ID NO: 5800002 - DNA, 25 bp, Homo sapien
gccacccttagcagcggtcgaggtc

SEQ ID NO: 5800003 - DNA, 25 bp, Homo sapien
aatgcaggcatcttacagactattt

SEQ ID NO: 5800004 - DNA, 25 bp, Homo sapien
tcaatgatggggctgccatcctgag

SEQ ID NO: 5800005 - DNA, 25 bp, Homo sapien
ttgactgtcttcctcttgctgccct

SEQ ID NO: 5800006 - DNA, 25 bp, Homo sapien
ccgaggggaccatgtccgggaggcg

SEQ ID NO: 5800007 - DNA, 25 bp, Homo sapien
tctcaggaggcaagcagactatcga

SEQ ID NO: 5800008 - DNA, 25 bp, Homo sapien
aagaagcgcgaggtctggaccgaat

SEQ ID NO: 5800009 - DNA, 25 bp, Homo sapien
caggcagtttaactgttctccacac

SEQ ID NO: 5800010 - DNA, 25 bp, Homo sapien
aagttggaggatcacctagtaacac

SEQ ID NO: 5800011 - DNA, 25 bp, Homo sapien
acaaattctatttatttattattgg

SEQ ID NO: 5800012 - DNA, 25 bp, Homo sapien
ctcaggtggatctaaaactcaagaa

SEQ ID NO: 5800013 - DNA, 25 bp, Homo sapien
actatttcaccttcaaacaggaatg

SEQ ID NO: 5800014 - DNA, 25 bp, Homo sapien
ccatttggtaaaggaaggacgactg

SEQ ID NO: 5800015 - DNA, 25 bp, Homo sapien
cccttagcagcggtcgaggtcggtg

SEQ ID NO: 5800016 - DNA, 25 bp, Homo sapien
tcatcaggaataagatcagagccat

SEQ ID NO: 5800017 - DNA, 25 bp, Homo sapien
ggtaaatgtgctcaacatatgctct

SEQ ID NO: 5800018 - DNA, 25 bp, Homo sapien
tctttgacctaatgaagttatttga

SEQ ID NO: 5800019 - DNA, 25 bp, Homo sapien
ccatcagagggttctcgcttcagca

SEQ ID NO: 5800020 - DNA, 25 bp, Homo sapien
cctactggcttccaaactttatgga

SEQ ID NO: 5800021 - DNA, 25 bp, Homo sapien
aacttcaacctggaggtgcatttat

SEQ ID NO: 5800022 - DNA, 25 bp, Homo sapien
ggccctcgtcctgtcagtggcgtcg

SEQ ID NO: 5800023 - DNA, 25 bp, Homo sapien
ggtgggccctcgtcctgtcagtggc

SEQ ID NO: 5800024 - DNA, 25 bp, Homo sapien
ataaagctgctgtgttgaaatatga

SEQ ID NO: 5800025 - DNA, 25 bp, Homo sapien
acagttaccctgcagtttgtgaatt

SEQ ID NO: 5800026 - DNA, 25 bp, Homo sapien
ctgtatggagacatttgactgtctt

SEQ ID NO: 5800027 - DNA, 25 bp, Homo sapien
aatgtcacctgaaattacttcttta

SEQ ID NO: 5800028 - DNA, 25 bp, Homo sapien
atgttttcacatggtctttgccttt

SEQ ID NO: 5800029 - DNA, 25 bp, Homo sapien
aaacaacttcaacctggaggtgcat

SEQ ID NO: 5800030 - DNA, 25 bp, Homo sapien
gaaggaagcactacagttcgtaagg

SEQ ID NO: 5800031 - DNA, 25 bp, Homo sapien
ccccgccttagccgctggcgcctcc

SEQ ID NO: 5800032 - DNA, 25 bp, Homo sapien
cagaggattatggcaatgagaagac

SEQ ID NO: 5800033 - DNA, 25 bp, Homo sapien
gctgactctcaagggcctgactccc

SEQ ID NO: 5800034 - DNA, 25 bp, Homo sapien
cggagttttgaagaagcgcgaggtc

SEQ ID NO: 5800035 - DNA, 25 bp, Homo sapien
cctctcaggaggcaagcagactatc

SEQ ID NO: 5800036 - DNA, 25 bp, Homo sapien
atcagagccattgggaagatggcac

SEQ ID NO: 5800037 - DNA, 25 bp, Homo sapien
tattacaattttctctgcccccaat

SEQ ID NO: 5800038 - DNA, 25 bp, Homo sapien
ttctacagttaccctgcagtttgtg

SEQ ID NO: 5800039 - DNA, 25 bp, Homo sapien
atttctacagttaccctgcagtttg

SEQ ID NO: 5800040 - DNA, 25 bp, Homo sapien
atattcggaacaggtgtatgatgcc

SEQ ID NO: 5800041 - DNA, 25 bp, Homo sapien
atttgtgaagtcttgtgctataaag

SEQ ID NO: 5800042 - DNA, 25 bp, Homo sapien
ccctcagaggattatggcaatgaga

SEQ ID NO: 5800043 - DNA, 25 bp, Homo sapien
cccgaaaggatagcatacacgctgg

SEQ ID NO: 5800044 - DNA, 25 bp, Homo sapien
gaggattatggcaatgagaagacct

SEQ ID NO: 5800045 - DNA, 25 bp, Homo sapien
tatcaattatcagagcccatgaagc

SEQ ID NO: 5800046 - DNA, 25 bp, Homo sapien
tggatctaaaactcaagaacaaatt

SEQ ID NO: 5800047 - DNA, 25 bp, Homo sapien
gagagcggccggtgggccctcgtcc

SEQ ID NO: 5800048 - DNA, 25 bp, Homo sapien
ctttccatcacttattacaattttc

SEQ ID NO: 5800049 - DNA, 25 bp, Homo sapien
tcatgacttagagtcctgccgtggc

SEQ ID NO: 5800050 - DNA, 25 bp, Homo sapien
ggcgtcggaggccggcgctgcggtg

SEQ ID NO: 5800051 - DNA, 25 bp, Homo sapien
ccgtggctcaggtggatctaaaact

SEQ ID NO: 5800052 - DNA, 25 bp, Homo sapien
ccgcctttggacctgtgtgtgacct

SEQ ID NO: 5800053 - DNA, 25 bp, Homo sapien
tgagaagaccttggagcactatacc

SEQ ID NO: 5800054 - DNA, 25 bp, Homo sapien
agatggcacgggtcttttcaattct

SEQ ID NO: 5800055 - DNA, 25 bp, Homo sapien
ttaccctgcagtttgtgaatttttg

SEQ ID NO: 5800056 - DNA, 25 bp, Homo sapien
caagatgctgggtatcgaatgtaca

SEQ ID NO: 5800057 - DNA, 25 bp, Homo sapien
ggcggccgcggcgtaggcgcacgtc

SEQ ID NO: 5800058 - DNA, 25 bp, Homo sapien
caggcacactccctctgggcgtcct

SEQ ID NO: 5800059 - DNA, 25 bp, Homo sapien
cgtcggaggccggcgctgcggtggc

SEQ ID NO: 5800060 - DNA, 25 bp, Homo sapien
cggctggctgacggctccgggcagc

SEQ ID NO: 5800061 - DNA, 25 bp, Homo sapien
ccttctggtgctcggacaccgctga

SEQ ID NO: 5800062 - DNA, 25 bp, Homo sapien
gccggcgctgcggtggccgcgccct

SEQ ID NO: 5800063 - DNA, 25 bp, Homo sapien
tgtgctcaacatatgctctgatgac

SEQ ID NO: 5800064 - DNA, 25 bp, Homo sapien
ctgggcgtcctctcaggaggcaagc

SEQ ID NO: 5800065 - DNA, 25 bp, Homo sapien
ctaatgaagttatttgaagttggag

SEQ ID NO: 5800066 - DNA, 25 bp, Homo sapien
tctccataattttaagaaatgaatc

SEQ ID NO: 5800067 - DNA, 25 bp, Homo sapien
ctacagttaccctgcagtttgtgaa

SEQ ID NO: 5800068 - DNA, 25 bp, Homo sapien
ggggctgccatcctgaggcaagaga

SEQ ID NO: 5800069 - DNA, 25 bp, Homo sapien
taaaggaaggacgactggaagagga

SEQ ID NO: 5800070 - DNA, 25 bp, Homo sapien
cacccttagcagcggtcgaggtcgg

SEQ ID NO: 5800071 - DNA, 25 bp, Homo sapien
acctagatgtctataacaataaagc

SEQ ID NO: 5800072 - DNA, 25 bp, Homo sapien
tttcagtatagagtgtgtgctgtat

SEQ ID NO: 5800073 - DNA, 25 bp, Homo sapien
cagtggcgtcggaggccggcgctgc

SEQ ID NO: 5800074 - DNA, 25 bp, Homo sapien
tcgaatgtacaggaagagccaagcc

SEQ ID NO: 5800075 - DNA, 25 bp, Homo sapien
agccatcagagggttctcgcttcag

SEQ ID NO: 5800076 - DNA, 25 bp, Homo sapien
ccgggccgcgagcagccgcggctgt

SEQ ID NO: 5800077 - DNA, 25 bp, Homo sapien
aaaatgaaaagcaactcaaaacaac

SEQ ID NO: 5800078 - DNA, 25 bp, Homo sapien
cactatacccacaacactgtccgag

SEQ ID NO: 5800079 - DNA, 25 bp, Homo sapien
ttaggaaattagacaggtttacgga

SEQ ID NO: 5800080 - DNA, 25 bp, Homo sapien
ctccaccaccgaccgcgtcatcaaa

SEQ ID NO: 5800081 - DNA, 25 bp, Homo sapien
gcacaagatccggagttttgaagaa

SEQ ID NO: 5800082 - DNA, 25 bp, Homo sapien
ttccccgccttagccgctggcgcct

SEQ ID NO: 5800083 - DNA, 25 bp, Homo sapien
tccgggcagctaaggctgcccgagg

SEQ ID NO: 5800084 - DNA, 25 bp, Homo sapien
ctggaggaggccgaggggaccatgt

SEQ ID NO: 5800085 - DNA, 25 bp, Homo sapien
aggagaaggcggcggccgcggcgta

SEQ ID NO: 5800086 - DNA, 25 bp, Homo sapien
caccgaccgcgtcatcaaagctgtc

SEQ ID NO: 5800087 - DNA, 25 bp, Homo sapien
tatagagtgtgtgctgtatttatgg

SEQ ID NO: 5800088 - DNA, 25 bp, Homo sapien
ttcggcaagaaagtgagagtgtgct

SEQ ID NO: 5800089 - DNA, 25 bp, Homo sapien
acatatgctctgatgacgaactgat

SEQ ID NO: 5800090 - DNA, 25 bp, Homo sapien
tgtacatggaggaatgtcacctgaa

SEQ ID NO: 5800091 - DNA, 25 bp, Homo sapien
tattggaaaatgaaaagcaactcaa

SEQ ID NO: 5800092 - DNA, 25 bp, Homo sapien
accttcaaacaggaatgtcgaatca

SEQ ID NO: 5800093 - DNA, 25 bp, Homo sapien
tcccgcctttggacctgtgtgtgac

SEQ ID NO: 5800094 - DNA, 25 bp, Homo sapien
cacccctactggcttccaaacttta

SEQ ID NO: 5800095 - DNA, 25 bp, Homo sapien
aagtcacagagatgctggtaaatgt

SEQ ID NO: 5800096 - DNA, 25 bp, Homo sapien
aggagatcatcaggaataagatcag

SEQ ID NO: 5800097 - DNA, 25 bp, Homo sapien
aagccacaggctttccatcacttat

SEQ ID NO: 5800098 - DNA, 25 bp, Homo sapien
ttatttctacagttaccctgcagtt

SEQ ID NO: 5800099 - DNA, 25 bp, Homo sapien
ttggaaaatgaaaagcaactcaaaa

SEQ ID NO: 5800100 - DNA, 25 bp, Homo sapien
tttcaccttcaaacaggaatgtcga

SEQ ID NO: 5800101 - DNA, 25 bp, Homo sapien
ctgccatcctgaggcaagagaagac

SEQ ID NO: 5800102 - DNA, 25 bp, Homo sapien
ggccgcgcccttctggtgctcggac

SEQ ID NO: 5800103 - DNA, 25 bp, Homo sapien
ctcaaaacaacttcaacctggaggt

SEQ ID NO: 5800104 - DNA, 25 bp, Homo sapien
ggctcaggtggatctaaaactcaag

SEQ ID NO: 5800105 - DNA, 25 bp, Homo sapien
aggccggcgctgcggtggccgcgcc

SEQ ID NO: 5800106 - DNA, 25 bp, Homo sapien
acctctccaccaccgaccgcgtcat

SEQ ID NO: 5800107 - DNA, 25 bp, Homo sapien
tagcatacacgctggtgggccaatg

SEQ ID NO: 5800108 - DNA, 25 bp, Homo sapien
tgtcccggtcgccacccttagcagc

SEQ ID NO: 5800109 - DNA, 25 bp, Homo sapien
ccacctctccaccaccgaccgcgtc

SEQ ID NO: 5800110 - DNA, 25 bp, Homo sapien
cgaatgccaccccgaaaggatagca

SEQ ID NO: 5800111 - DNA, 25 bp, Homo sapien
tgaatgcaggcatcttacagactat

SEQ ID NO: 5800112 - DNA, 25 bp, Homo sapien
agtatagagtgtgtgctgtatttat

SEQ ID NO: 5800113 - DNA, 25 bp, Homo sapien
aatgagaagaccttggagcactata

SEQ ID NO: 5800114 - DNA, 25 bp, Homo sapien
ggaaaatgaaaagcaactcaaaaca

SEQ ID NO: 5800115 - DNA, 25 bp, Homo sapien
cacggctggctgacggctccgggca

SEQ ID NO: 5800116 - DNA, 25 bp, Homo sapien
gcacgtccggcgggctcctggagcc

SEQ ID NO: 5800117 - DNA, 25 bp, Homo sapien
ggatgttttcacatggtctttgcct

SEQ ID NO: 5800118 - DNA, 25 bp, Homo sapien
ctccaacccaacggcttactttcaa

SEQ ID NO: 5800119 - DNA, 25 bp, Homo sapien
caattcttcggcaagaaagtgagag

SEQ ID NO: 5800120 - DNA, 25 bp, Homo sapien
ggcaagagaagactatgatagaagt

SEQ ID NO: 5800121 - DNA, 25 bp, Homo sapien
caagcagactatcgagacagccaca

SEQ ID NO: 5800122 - DNA, 25 bp, Homo sapien
tacatggaggaatgtcacctgaaat

SEQ ID NO: 5800123 - DNA, 25 bp, Homo sapien
acggctccgggcagctaaggctgcc

SEQ ID NO: 5800124 - DNA, 25 bp, Homo sapien
gaagcactacagttcgtaaggagat

SEQ ID NO: 5800125 - DNA, 25 bp, Homo sapien
ccaagccacaggctttccatcactt

SEQ ID NO: 5800126 - DNA, 25 bp, Homo sapien
gccttagccgctggcgcctcccaag

SEQ ID NO: 5800127 - DNA, 25 bp, Homo sapien
gccatcctgaggcaagagaagacta

SEQ ID NO: 5800128 - DNA, 25 bp, Homo sapien
tccggagttttgaagaagcgcgagg

SEQ ID NO: 5800129 - DNA, 25 bp, Homo sapien
aagaaatgaatctgattgttgtcaa

SEQ ID NO: 5800130 - DNA, 25 bp, Homo sapien
ctgtcttcctcttgctgccctctta

SEQ ID NO: 5800131 - DNA, 25 bp, Homo sapien
tggctgacggctccgggcagctaag

SEQ ID NO: 5800132 - DNA, 25 bp, Homo sapien
tcaatatatataaaaagtgcatctg

SEQ ID NO: 5800133 - DNA, 25 bp, Homo sapien
ttgtgaatttttgcagaacaataat

SEQ ID NO: 5800134 - DNA, 25 bp, Homo sapien
gggccgggcacggctggctgacggc

SEQ ID NO: 5800135 - DNA, 25 bp, Homo sapien
aatgaagttatttgaagttggagga

SEQ ID NO: 5800136 - DNA, 25 bp, Homo sapien
gtgcatctgttttgtttttcccttt

SEQ ID NO: 5800137 - DNA, 25 bp, Homo sapien
gttatttgaagttggaggatcacct

SEQ ID NO: 5800138 - DNA, 25 bp, Homo sapien
ttcagcacaagatccggagttttga

SEQ ID NO: 5800139 - DNA, 25 bp, Homo sapien
ccaagagagcggccggtgggccctc

SEQ ID NO: 5800140 - DNA, 25 bp, Homo sapien
gttctccacacccctactggcttcc

SEQ ID NO: 5800141 - DNA, 25 bp, Homo sapien
agccacagtagaagcggtagaggcc

SEQ ID NO: 5800142 - DNA, 25 bp, Homo sapien
ttctctgcccccaattacctagatg

SEQ ID NO: 5800143 - DNA, 25 bp, Homo sapien
gtgctataaaggggaacttccccta

SEQ ID NO: 5800144 - DNA, 25 bp, Homo sapien
agccttaaagataatcaatgatggg

SEQ ID NO: 5800145 - DNA, 25 bp, Homo sapien
ctctccaccaccgaccgcgtcatca

SEQ ID NO: 5800146 - DNA, 25 bp, Homo sapien
ccaatcacagtatgtggtgatattc

SEQ ID NO: 5800147 - DNA, 25 bp, Homo sapien
cgaccaagggaagaaagcccattca

SEQ ID NO: 5800148 - DNA, 25 bp, Homo sapien
cgggctcctggagcctggaggaggc

SEQ ID NO: 5800149 - DNA, 25 bp, Homo sapien
gccattgggaagatggcacgggtct

SEQ ID NO: 5800150 - DNA, 25 bp, Homo sapien
acacgctggtgggccaatgaaatct

SEQ ID NO: 5800151 - DNA, 25 bp, Homo sapien
acgtccggcgggctcctggagcctg

SEQ ID NO: 5800152 - DNA, 25 bp, Homo sapien
accgaattaatgagcgaatgccacc

SEQ ID NO: 5800153 - DNA, 25 bp, Homo sapien
attctttgacctaatgaagttattt

SEQ ID NO: 5800154 - DNA, 25 bp, Homo sapien
aggctgcccgaggagaaggcggcgg

SEQ ID NO: 5800155 - DNA, 25 bp, Homo sapien
gaggtgcatttataattcagtctgc

SEQ ID NO: 5800156 - DNA, 25 bp, Homo sapien
agctgctgtgttgaaatatgaaaac

SEQ ID NO: 5800157 - DNA, 25 bp, Homo sapien
ggaaggacgactggaagaggaagta

SEQ ID NO: 5800158 - DNA, 25 bp, Homo sapien
gtcctctcaggaggcaagcagacta

SEQ ID NO: 5800159 - DNA, 25 bp, Homo sapien
tttcacatggtctttgccttttgtt

SEQ ID NO: 5800160 - DNA, 25 bp, Homo sapien
tatttgagaatgggaaacctaaagt

SEQ ID NO: 5800161 - DNA, 25 bp, Homo sapien
gaggaagtagccttaaagataatca

SEQ ID NO: 5800162 - DNA, 25 bp, Homo sapien
gaagagccaagccacaggctttcca

SEQ ID NO: 5800163 - DNA, 25 bp, Homo sapien
aaaggatagcatacacgctggtggg

SEQ ID NO: 5800164 - DNA, 25 bp, Homo sapien
agtatgtggtgatattcatggacaa

SEQ ID NO: 5800165 - DNA, 25 bp, Homo sapien
tgatgaagcagaaggaagcactaca

SEQ ID NO: 5800166 - DNA, 25 bp, Homo sapien
cttagccgctggcgcctcccaagag

SEQ ID NO: 5800167 - DNA, 25 bp, Homo sapien
gaatttttgcagaacaataatttac

SEQ ID NO: 5800168 - DNA, 25 bp, Homo sapien
gaagtcttgtgctataaaggggaac

SEQ ID NO: 5800169 - DNA, 25 bp, Homo sapien
ctctgggcgtcctctcaggaggcaa

SEQ ID NO: 5800170 - DNA, 25 bp, Homo sapien
tatttcagtatagagtgtgtgctgt

SEQ ID NO: 5800171 - DNA, 25 bp, Homo sapien
taataaaagggccttggaaacctca

SEQ ID NO: 5800172 - DNA, 25 bp, Homo sapien
atgatagaagtagatgctccaatca

SEQ ID NO: 5800173 - DNA, 25 bp, Homo sapien
tgatgttttaaaaaaccatttggta

SEQ ID NO: 5800174 - DNA, 25 bp, Homo sapien
tgatgacgaactgatttctgatgat

SEQ ID NO: 5800175 - DNA, 25 bp, Homo sapien
ggtctgatccctcagaggattatgg

SEQ ID NO: 5800176 - DNA, 25 bp, Homo sapien
gaccgcgtcatcaaagctgtcccct

SEQ ID NO: 5800177 - DNA, 25 bp, Homo sapien
acatttgtgaagtcttgtgctataa

SEQ ID NO: 5800178 - DNA, 25 bp, Homo sapien
ctgaggcaagagaagactatgatag

SEQ ID NO: 5800179 - DNA, 25 bp, Homo sapien
acaatgtcatgaatatcaggcagtt

SEQ ID NO: 5800180 - DNA, 25 bp, Homo sapien
tggggaaaaagtcacagagatgctg

SEQ ID NO: 5800181 - DNA, 25 bp, Homo sapien
gttttgaagaagcgcgaggtctgga

SEQ ID NO: 5800182 - DNA, 25 bp, Homo sapien
caaggaagtatttgagaatgggaaa

SEQ ID NO: 5800183 - DNA, 25 bp, Homo sapien
atggcacgggtcttttcaattcttc

SEQ ID NO: 5800184 - DNA, 25 bp, Homo sapien
atggatgttttcacatggtctttgc

SEQ ID NO: 5800185 - DNA, 25 bp, Homo sapien
aattacttctttagatgacattagg

SEQ ID NO: 5800186 - DNA, 25 bp, Homo sapien
aagaccttggagcactatacccaca

SEQ ID NO: 5800187 - DNA, 25 bp, Homo sapien
gcccccaattacctagatgtctata

SEQ ID NO: 5800188 - DNA, 25 bp, Homo sapien
gacattaggaaattagacaggttta

SEQ ID NO: 5800189 - DNA, 25 bp, Homo sapien
tgctttggtctgatccctcagagga

SEQ ID NO: 5800190 - DNA, 25 bp, Homo sapien
cggcgctgcggtggccgcgcccttc

SEQ ID NO: 5800191 - DNA, 25 bp, Homo sapien
accctgcagtttgtgaatttttgca

SEQ ID NO: 5800192 - DNA, 25 bp, Homo sapien
ttgcagaacaataatttactatcaa

SEQ ID NO: 5800193 - DNA, 25 bp, Homo sapien
cctcccaagagagcggccggtgggc

SEQ ID NO: 5800194 - DNA, 25 bp, Homo sapien
aaacattgtttctgcttcggggaaa

SEQ ID NO: 5800195 - DNA, 25 bp, Homo sapien
ggctcctggagcctggaggaggccg

SEQ ID NO: 5800196 - DNA, 25 bp, Homo sapien
cggcttactttcaaggaagtatttg

SEQ ID NO: 5800197 - DNA, 25 bp, Homo sapien
ctctttctgggtgactatgtggaca

SEQ ID NO: 5800198 - DNA, 25 bp, Homo sapien
ttatggatgttttcacatggtcttt

SEQ ID NO: 5800199 - DNA, 25 bp, Homo sapien
gactggaagaggaagtagccttaaa

SEQ ID NO: 5800200 - DNA, 25 bp, Homo sapien
acacatttgtgaagtcttgtgctat

SEQ ID NO: 5800201 - DNA, 25 bp, Homo sapien
gtggcgtcggaggccggcgctgcgg

SEQ ID NO: 5800202 - DNA, 25 bp, Homo sapien
gaggaatgtcacctgaaattacttc

SEQ ID NO: 5800203 - DNA, 25 bp, Homo sapien
gagtgtgctgactctcaagggcctg

SEQ ID NO: 5800204 - DNA, 25 bp, Homo sapien
cgggcacggctggctgacggctccg

SEQ ID NO: 5800205 - DNA, 25 bp, Homo sapien
ctggcgcctcccaagagagcggccg

SEQ ID NO: 5800206 - DNA, 25 bp, Homo sapien
aggcggcggccgcggcgtaggcgca

SEQ ID NO: 5800207 - DNA, 25 bp, Homo sapien
cacaggagcgaccaagggaagaaag

SEQ ID NO: 5800208 - DNA, 25 bp, Homo sapien
gatagcatacacgctggtgggccaa

SEQ ID NO: 5800209 - DNA, 25 bp, Homo sapien
ggtgtatgatgcctgtatggagaca

SEQ ID NO: 5800210 - DNA, 25 bp, Homo sapien
ccattcatgacttagagtcctgccg

SEQ ID NO: 5800211 - DNA, 25 bp, Homo sapien
tgggccctcgtcctgtcagtggcgt

SEQ ID NO: 5800212 - DNA, 25 bp, Homo sapien
tctccacacccctactggcttccaa

SEQ ID NO: 5800213 - DNA, 25 bp, Homo sapien
gtaggcgcacgtccggcgggctcct

SEQ ID NO: 5800214 - DNA, 25 bp, Homo sapien
tcggaacaggtgtatgatgcctgta

SEQ ID NO: 5800215 - DNA, 25 bp, Homo sapien
ccacaacactgtccgagggtgctct

SEQ ID NO: 5800216 - DNA, 25 bp, Homo sapien
ctatacccacaacactgtccgaggg

SEQ ID NO: 5800217 - DNA, 25 bp, Homo sapien
ccgaccgcgtcatcaaagctgtccc

SEQ ID NO: 5800218 - DNA, 25 bp, Homo sapien
cttattacaattttctctgccccca

SEQ ID NO: 5800219 - DNA, 25 bp, Homo sapien
accccgaaaggatagcatacacgct

SEQ ID NO: 5800220 - DNA, 25 bp, Homo sapien
tagcagcggtcgaggtcggtgccga

SEQ ID NO: 5800221 - DNA, 25 bp, Homo sapien
aggcgcttccacctctccaccaccg

SEQ ID NO: 5800222 - DNA, 25 bp, Homo sapien
ggtggagaggtggaagcgcctcccg

SEQ ID NO: 5800223 - DNA, 25 bp, Homo sapien
aatctttaaactccataaatacagc

SEQ ID NO: 5800224 - DNA, 25 bp, Homo sapien
ggtaactgtagaaataagagcaccc

SEQ ID NO: 5800225 - DNA, 25 bp, Homo sapien
cagaataaatgcagactgaattata

SEQ ID NO: 5800226 - DNA, 25 bp, Homo sapien
ttcaacacagcagctttattgttat

SEQ ID NO: 5800227 - DNA, 25 bp, Homo sapien
ggcccaccagcgtgtatgctatcct

SEQ ID NO: 5800228 - DNA, 25 bp, Homo sapien
actgaaatagcctctgtccacatag

SEQ ID NO: 5800229 - DNA, 25 bp, Homo sapien
taactgtagaaataagagcaccctc

SEQ ID NO: 5800230 - DNA, 25 bp, Homo sapien
accagcatctctgtgactttttccc

SEQ ID NO: 5800231 - DNA, 25 bp, Homo sapien
tcatcatcagaaatcagttcgtcat

SEQ ID NO: 5800232 - DNA, 25 bp, Homo sapien
tgagtgtgctgaggttacagatttc

SEQ ID NO: 5800233 - DNA, 25 bp, Homo sapien
tgacattcctccatgtacacagaga

SEQ ID NO: 5800234 - DNA, 25 bp, Homo sapien
attcgctcattaattcggtccagac

SEQ ID NO: 5800235 - DNA, 25 bp, Homo sapien
agacttcacaaatgtgttgacaaca

SEQ ID NO: 5800236 - DNA, 25 bp, Homo sapien
tctccatacaggcatcatacacctg

SEQ ID NO: 5800237 - DNA, 25 bp, Homo sapien
ggttacagatttcattggcccacca

SEQ ID NO: 5800238 - DNA, 25 bp, Homo sapien
aggactctaagtcatgaatgggctt

SEQ ID NO: 5800239 - DNA, 25 bp, Homo sapien
aatgtgttgacaacaatcagattca

SEQ ID NO: 5800240 - DNA, 25 bp, Homo sapien
tctaccgcttctactgtggctgtct

SEQ ID NO: 5800241 - DNA, 25 bp, Homo sapien
acacagcagctttattgttatagac

SEQ ID NO: 5800242 - DNA, 25 bp, Homo sapien
gtcacccagaaagaggtagcgtgtg

SEQ ID NO: 5800243 - DNA, 25 bp, Homo sapien
gccttagctgcccggagccgtcagc

SEQ ID NO: 5800244 - DNA, 25 bp, Homo sapien
tcgggcagccttagctgcccggagc

SEQ ID NO: 5800245 - DNA, 25 bp, Homo sapien
cttctcttgcctcaggatggcagcc

SEQ ID NO: 5800246 - DNA, 25 bp, Homo sapien
ctcggacagtgttgtgggtatagtg

SEQ ID NO: 5800247 - DNA, 25 bp, Homo sapien
ttccccaacaaaaggcaaagaccat

SEQ ID NO: 5800248 - DNA, 25 bp, Homo sapien
ggtttcccattctcaaatacttcct

SEQ ID NO: 5800249 - DNA, 25 bp, Homo sapien
tactaggtgatcctccaacttcaaa

SEQ ID NO: 5800250 - DNA, 25 bp, Homo sapien
gacaggacgagggcccaccggccgc

SEQ ID NO: 5800251 - DNA, 25 bp, Homo sapien
gagggagtgtgcctgtgggagtcag

SEQ ID NO: 5800252 - DNA, 25 bp, Homo sapien
ggagaacagttaaactgcctgatat

SEQ ID NO: 5800253 - DNA, 25 bp, Homo sapien
agcacaagacttcacaaatgtgttg

SEQ ID NO: 5800254 - DNA, 25 bp, Homo sapien
aaggcggggaacaccgcttcggcac

SEQ ID NO: 5800255 - DNA, 25 bp, Homo sapien
ggtcaaagaattgtccatgaatatc

SEQ ID NO: 5800256 - DNA, 25 bp, Homo sapien
gggagtcaggcccttgagagtcagc

SEQ ID NO: 5800257 - DNA, 25 bp, Homo sapien
cccatcattgattatctttaaggct

SEQ ID NO: 5800258 - DNA, 25 bp, Homo sapien
tgtatgctatcctttcggggtggca

SEQ ID NO: 5800259 - DNA, 25 bp, Homo sapien
gcagactgaattataaatgcacctc

SEQ ID NO: 5800260 - DNA, 25 bp, Homo sapien
gtccgagcaccagaagggcgcggcc

SEQ ID NO: 5800261 - DNA, 25 bp, Homo sapien
atagtctgtaagatgcctgcattca

SEQ ID NO: 5800262 - DNA, 25 bp, Homo sapien
tcctgatgatctccttacgaactgt

SEQ ID NO: 5800263 - DNA, 25 bp, Homo sapien
ggacagccgcggctgctcgcggccc

SEQ ID NO: 5800264 - DNA, 25 bp, Homo sapien
gtcttctcattgccataatcctctg

SEQ ID NO: 5800265 - DNA, 25 bp, Homo sapien
cattctcaaatacttccttgaaagt

SEQ ID NO: 5800266 - DNA, 25 bp, Homo sapien
ataaatgcagactgaattataaatg

SEQ ID NO: 5800267 - DNA, 25 bp, Homo sapien
gcgggaggttccgtaaacctgtcta

SEQ ID NO: 5800268 - DNA, 25 bp, Homo sapien
gtcaaatgtctccatacaggcatca

SEQ ID NO: 5800269 - DNA, 25 bp, Homo sapien
cttcaaaactccggatcttgtgctg

SEQ ID NO: 5800270 - DNA, 25 bp, Homo sapien
ttggaagccagtaggggtgtggaga

SEQ ID NO: 5800271 - DNA, 25 bp, Homo sapien
gtacacagagaaactgctggtttaa

SEQ ID NO: 5800272 - DNA, 25 bp, Homo sapien
ggctctgataattgatagtaaatta

SEQ ID NO: 5800273 - DNA, 25 bp, Homo sapien
taaactgcctgatattcatgacatt

SEQ ID NO: 5800274 - DNA, 25 bp, Homo sapien
gtccatgaatatcaccacatactgt

SEQ ID NO: 5800275 - DNA, 25 bp, Homo sapien
gcctcctgagaggacgcccagaggg

SEQ ID NO: 5800276 - DNA, 25 bp, Homo sapien
atcaactttaggtttcccattctca

SEQ ID NO: 5800277 - DNA, 25 bp, Homo sapien
catgtgagtgtgctgaggttacaga

SEQ ID NO: 5800278 - DNA, 25 bp, Homo sapien
tagtcttctcttgcctcaggatggc

SEQ ID NO: 5800279 - DNA, 25 bp, Homo sapien
ctcggcctcctccaggctccaggag

SEQ ID NO: 5800280 - DNA, 25 bp, Homo sapien
ttcacaaactgcagggtaactgtag

SEQ ID NO: 5800281 - DNA, 25 bp, Homo sapien
taagatgcctgcattcatgatttcc

SEQ ID NO: 5800282 - DNA, 25 bp, Homo sapien
gccgctctcttgggaggcgccagcg

SEQ ID NO: 5800283 - DNA, 25 bp, Homo sapien
actgtgattggagcatctacttcta

SEQ ID NO: 5800284 - DNA, 25 bp, Homo sapien
tcccggacatggtcccctcggcctc

SEQ ID NO: 5800285 - DNA, 25 bp, Homo sapien
ctaaggcggggaacaccgcttcggc

SEQ ID NO: 5800286 - DNA, 25 bp, Homo sapien
tacttcctcttccagtcgtccttcc

SEQ ID NO: 5800287 - DNA, 25 bp, Homo sapien
aacttcaaataacttcattaggtca

SEQ ID NO: 5800288 - DNA, 25 bp, Homo sapien
tcagagcatatgttgagcacattta

SEQ ID NO: 5800289 - DNA, 25 bp, Homo sapien
cttgagttttagatccacctgagcc

SEQ ID NO: 5800290 - DNA, 25 bp, Homo sapien
tccacatagtcacccagaaagaggt

SEQ ID NO: 5800291 - DNA, 25 bp, Homo sapien
atagaatttgttcttgagttttaga

SEQ ID NO: 5800292 - DNA, 25 bp, Homo sapien
ttcctaatgtcatctaaagaagtaa

SEQ ID NO: 5800293 - DNA, 25 bp, Homo sapien
acagcagctttattgttatagacat

SEQ ID NO: 5800294 - DNA, 25 bp, Homo sapien
ggtcgctcctgtgcgcagcatgtga

SEQ ID NO: 5800295 - DNA, 25 bp, Homo sapien
ttataaatgcacctccaggttgaag

SEQ ID NO: 5800296 - DNA, 25 bp, Homo sapien
cagtcgtccttcctttaccaaatgg

SEQ ID NO: 5800297 - DNA, 25 bp, Homo sapien
gcttcttcaaaactccggatcttgt

SEQ ID NO: 5800298 - DNA, 25 bp, Homo sapien
acatggtcccctcggcctcctccag

SEQ ID NO: 5800299 - DNA, 25 bp, Homo sapien
ttcttgccgaagaattgaaaagacc

SEQ ID NO: 5800300 - DNA, 25 bp, Homo sapien
caacacagcagctttattgttatag

SEQ ID NO: 5800301 - DNA, 25 bp, Homo sapien
gttaaactgcctgatattcatgaca

SEQ ID NO: 5800302 - DNA, 25 bp, Homo sapien
gcaagaggaagacagtcaaatgtct

SEQ ID NO: 5800303 - DNA, 25 bp, Homo sapien
cctccaggctccaggagcccgccgg

SEQ ID NO: 5800304 - DNA, 25 bp, Homo sapien
ggtatagtgctccaaggtcttctca

SEQ ID NO: 5800305 - DNA, 25 bp, Homo sapien
gacgtgcgcctacgccgcggccgcc

SEQ ID NO: 5800306 - DNA, 25 bp, Homo sapien
gcaggactctaagtcatgaatgggc

SEQ ID NO: 5800307 - DNA, 25 bp, Homo sapien
gtctgcttgcctcctgagaggacgc

SEQ ID NO: 5800308 - DNA, 25 bp, Homo sapien
gagggcccaccggccgctctcttgg

SEQ ID NO: 5800309 - DNA, 25 bp, Homo sapien
acaccgcttcggcaccgacctcgac

SEQ ID NO: 5800310 - DNA, 25 bp, Homo sapien
ccggctcctcagcggtgtccgagca

SEQ ID NO: 5800311 - DNA, 25 bp, Homo sapien
tctcgatagtctgcttgcctcctga

SEQ ID NO: 5800312 - DNA, 25 bp, Homo sapien
agactgaattataaatgcacctcca

SEQ ID NO: 5800313 - DNA, 25 bp, Homo sapien
tacgccgcggccgccgccttctcct

SEQ ID NO: 5800314 - DNA, 25 bp, Homo sapien
agccgcggctgctcgcggcccgggc

SEQ ID NO: 5800315 - DNA, 25 bp, Homo sapien
gatggaaagcctgtggcttggctct

SEQ ID NO: 5800316 - DNA, 25 bp, Homo sapien
gctccaaggtcttctcattgccata

SEQ ID NO: 5800317 - DNA, 25 bp, Homo sapien
gggcccaccggccgctctcttggga

SEQ ID NO: 5800318 - DNA, 25 bp, Homo sapien
tgtctaatttcctaatgtcatctaa

SEQ ID NO: 5800319 - DNA, 25 bp, Homo sapien
ctcaaatacttccttgaaagtaagc

SEQ ID NO: 5800320 - DNA, 25 bp, Homo sapien
ccataaatacagcacacactctata

SEQ ID NO: 5800321 - DNA, 25 bp, Homo sapien
taatgtcatctaaagaagtaatttc

SEQ ID NO: 5800322 - DNA, 25 bp, Homo sapien
ccagcgtgtatgctatcctttcggg

SEQ ID NO: 5800323 - DNA, 25 bp, Homo sapien
aagcagaaacaatgttttgggatga

SEQ ID NO: 5800324 - DNA, 25 bp, Homo sapien
gtgatggaaagcctgtggcttggct

SEQ ID NO: 5800325 - DNA, 25 bp, Homo sapien
ccgacctcgaccgctgctaagggtg

SEQ ID NO: 5800326 - DNA, 25 bp, Homo sapien
ctgatcttattcctgatgatctcct

SEQ ID NO: 5800327 - DNA, 25 bp, Homo sapien
gatagtaaattattgttctgcaaaa

SEQ ID NO: 5800328 - DNA, 25 bp, Homo sapien
ccgccgccttctcctcgggcagcct

SEQ ID NO: 5800329 - DNA, 25 bp, Homo sapien
agatgcctgcattcatgatttcccc

SEQ ID NO: 5800330 - DNA, 25 bp, Homo sapien
ggctcctcagcggtgtccgagcacc

SEQ ID NO: 5800331 - DNA, 25 bp, Homo sapien
agggcagcaagaggaagacagtcaa

SEQ ID NO: 5800332 - DNA, 25 bp, Homo sapien
ccatgaatatcaccacatactgtga

SEQ ID NO: 5800333 - DNA, 25 bp, Homo sapien
gcgcttcttcaaaactccggatctt

SEQ ID NO: 5800334 - DNA, 25 bp, Homo sapien
agcatgtgagtgtgctgaggttaca

SEQ ID NO: 5800335 - DNA, 25 bp, Homo sapien
aaacaaaacagatgcactttttata

SEQ ID NO: 5800336 - DNA, 25 bp, Homo sapien
ccataatcctctgagggatcagacc

SEQ ID NO: 5800337 - DNA, 25 bp, Homo sapien
cagagaaaattgtaataagtgatgg

SEQ ID NO: 5800338 - DNA, 25 bp, Homo sapien
cctttcggggtggcattcgctcatt

SEQ ID NO: 5800339 - DNA, 25 bp, Homo sapien
gttgggttggaggaaaggggacagc

SEQ ID NO: 5800340 - DNA, 25 bp, Homo sapien
ccgtgccatcttcccaatggctctg

SEQ ID NO: 5800341 - DNA, 25 bp, Homo sapien
gtgtgcctgtgggagtcaggccctt

SEQ ID NO: 5800342 - DNA, 25 bp, Homo sapien
gcctcctccaggctccaggagcccg

SEQ ID NO: 5800343 - DNA, 25 bp, Homo sapien
cacacaggtccaaaggcgggaggtt

SEQ ID NO: 5800344 - DNA, 25 bp, Homo sapien
gcctgcattcatgatttccccgaag

SEQ ID NO: 5800345 - DNA, 25 bp, Homo sapien
ctgagccacggcaggactctaagtc

SEQ ID NO: 5800346 - DNA, 25 bp, Homo sapien
gtcatgaatgggctttcttcccttg

SEQ ID NO: 5800347 - DNA, 25 bp, Homo sapien
aaaggggacagctttgatgacgcgg

SEQ ID NO: 5800348 - DNA, 25 bp, Homo sapien
cggccaccgcagcgccggcctccga

SEQ ID NO: 5800349 - DNA, 25 bp, Homo sapien
gcgtgtgttactaggtgatcctcca

SEQ ID NO: 5800350 - DNA, 25 bp, Homo sapien
ctttatagcacaagacttcacaaat

SEQ ID NO: 5800351 - DNA, 25 bp, Homo sapien
ctcctgagaggacgcccagagggag

SEQ ID NO: 5800352 - DNA, 25 bp, Homo sapien
aagttcccctttatagcacaagact

SEQ ID NO: 5800353 - DNA, 25 bp, Homo sapien
tttccccgaagcagaaacaatgttt

SEQ ID NO: 5800354 - DNA, 25 bp, Homo sapien
tagtgctccaaggtcttctcattgc

SEQ ID NO: 5800355 - DNA, 25 bp, Homo sapien
tcttattcctgatgatctccttacg

SEQ ID NO: 5800356 - DNA, 25 bp, Homo sapien
tcagaaatcagttcgtcatcagagc

SEQ ID NO: 5800357 - DNA, 25 bp, Homo sapien
caccctcggacagtgttgtgggtat

SEQ ID NO: 5800358 - DNA, 25 bp, Homo sapien
aagcaggtcacacacaggtccaaag

SEQ ID NO: 5800359 - DNA, 25 bp, Homo sapien
atttcattggcccaccagcgtgtat

SEQ ID NO: 5800360 - DNA, 25 bp, Homo sapien
gctcattaattcggtccagacctcg

SEQ ID NO: 5800361 - DNA, 25 bp, Homo sapien
gttcgtcatcagagcatatgttgag

SEQ ID NO: 5800362 - DNA, 25 bp, Homo sapien
gcttcatgggctctgataattgata

SEQ ID NO: 5800363 - DNA, 25 bp, Homo sapien
gatcttattcctgatgatctcctta

SEQ ID NO: 5800364 - DNA, 25 bp, Homo sapien
tgattcgacattcctgtttgaaggt

SEQ ID NO: 5800365 - DNA, 25 bp, Homo sapien
tctcttgcctcaggatggcagcccc

SEQ ID NO: 5800366 - DNA, 25 bp, Homo sapien
tgctggtttaagagggcagcaagag

SEQ ID NO: 5800367 - DNA, 25 bp, Homo sapien
gattcatttcttaaaattatggaga

SEQ ID NO: 5800368 - DNA, 25 bp, Homo sapien
aaacaatgttttgggatgattaatc

SEQ ID NO: 5800369 - DNA, 25 bp, Homo sapien
accaaagcaggtcacacacaggtcc

SEQ ID NO: 5800370 - DNA, 25 bp, Homo sapien
tgtgagtgtgctgaggttacagatt

SEQ ID NO: 5800371 - DNA, 25 bp, Homo sapien
tgtagtgcttccttctgcttcatca

SEQ ID NO: 5800372 - DNA, 25 bp, Homo sapien
aggctacttcctcttccagtcgtcc

SEQ ID NO: 5800373 - DNA, 25 bp, Homo sapien
agcgccggcctccgacgccactgac

SEQ ID NO: 5800374 - DNA, 25 bp, Homo sapien
cacacacaggtccaaaggcgggagg

SEQ ID NO: 5800375 - DNA, 25 bp, Homo sapien
gttccgaatatttgattcgacattc

SEQ ID NO: 5800376 - DNA, 25 bp, Homo sapien
aattgaaaagacccgtgccatcttc

SEQ ID NO: 5800377 - DNA, 25 bp, Homo sapien
tccagacctcgcgcttcttcaaaac

SEQ ID NO: 5800378 - DNA, 25 bp, Homo sapien
cccagaaagaggtagcgtgtgttac

SEQ ID NO: 5800379 - DNA, 25 bp, Homo sapien
gagtcaggcccttgagagtcagcac

SEQ ID NO: 5800380 - DNA, 25 bp, Homo sapien
acgagggcccaccggccgctctctt

SEQ ID NO: 5800381 - DNA, 25 bp, Homo sapien
atctccttacgaactgtagtgcttc

SEQ ID NO: 5800382 - DNA, 25 bp, Homo sapien
cctcgaccgctgctaagggtggcga

SEQ ID NO: 5800383 - DNA, 25 bp, Homo sapien
tggctcttcctgtacattcgatacc

SEQ ID NO: 5800384 - DNA, 25 bp, Homo sapien
tcttgggcttcatgggctctgataa

SEQ ID NO: 5800385 - DNA, 25 bp, Homo sapien
gggaacaccgcttcggcaccgacct

SEQ ID NO: 5800386 - DNA, 25 bp, Homo sapien
gcccaccggccgctctcttgggagg

SEQ ID NO: 5800387 - DNA, 25 bp, Homo sapien
tctaaagaagtaatttcaggtgaca

SEQ ID NO: 5800388 - DNA, 25 bp, Homo sapien
tctttaaactccataaatacagcac

SEQ ID NO: 5800389 - DNA, 25 bp, Homo sapien
caaatgtgttgacaacaatcagatt

SEQ ID NO: 5800390 - DNA, 25 bp, Homo sapien
cccgaagcagaaacaatgttttggg

SEQ ID NO: 5800391 - DNA, 25 bp, Homo sapien
cgtgtatgctatcctttcggggtgg

SEQ ID NO: 5800392 - DNA, 25 bp, Homo sapien
gagaggtggaagcgcctcccggaca

SEQ ID NO: 5800393 - DNA, 25 bp, Homo sapien
tctaggtaattgggggcagagaaaa

SEQ ID NO: 5800394 - DNA, 25 bp, Homo sapien
ctcactttcttgccgaagaattgaa

SEQ ID NO: 5800395 - DNA, 25 bp, Homo sapien
ccacatactgtgattggagcatcta

SEQ ID NO: 5800396 - DNA, 25 bp, Homo sapien
tgtctccatacaggcatcatacacc

SEQ ID NO: 5800397 - DNA, 25 bp, Homo sapien
atggctctgatcttattcctgatga

SEQ ID NO: 5800398 - DNA, 25 bp, Homo sapien
cggagccgtcagccagccgtgcccg

SEQ ID NO: 5800399 - DNA, 25 bp, Homo sapien
ttcaggtgacattcctccatgtaca

SEQ ID NO: 5800400 - DNA, 25 bp, Homo sapien
ccaataataaataaatagaatttgt

SEQ ID NO: 5800401 - DNA, 25 bp, Homo sapien
tcgacattcctgtttgaaggtgaaa

SEQ ID NO: 5800402 - DNA, 25 bp, Homo sapien
cacccagaaagaggtagcgtgtgtt

SEQ ID NO: 5800403 - DNA, 25 bp, Homo sapien
gcctcaggatggcagccccatcatt

SEQ ID NO: 5800404 - DNA, 25 bp, Homo sapien
ccaggagcccgccggacgtgcgcct

SEQ ID NO: 5800405 - DNA, 25 bp, Homo sapien
catcttgggcttcatgggctctgat

SEQ ID NO: 5800406 - DNA, 25 bp, Homo sapien
attcctccatgtacacagagaaact

SEQ ID NO: 5800407 - DNA, 25 bp, Homo sapien
tagtaaattattgttctgcaaaaat

SEQ ID NO: 5800408 - DNA, 25 bp, Homo sapien
acgccactgacaggacgagggccca

SEQ ID NO: 5800409 - DNA, 25 bp, Homo sapien
gtgccatcttcccaatggctctgat

SEQ ID NO: 5800410 - DNA, 25 bp, Homo sapien
tgtaataagtgatggaaagcctgtg

SEQ ID NO: 5800411 - DNA, 25 bp, Homo sapien
taaacctgtctaatttcctaatgtc

SEQ ID NO: 5800412 - DNA, 25 bp, Homo sapien
cactctatactgaaatagcctctgt

SEQ ID NO: 5800413 - DNA, 25 bp, Homo sapien
gatgatctccttacgaactgtagtg

SEQ ID NO: 5800414 - DNA, 25 bp, Homo sapien
ggcttggctcttcctgtacattcga

SEQ ID NO: 5800415 - DNA, 25 bp, Homo sapien
tcgcgcttcttcaaaactccggatc

SEQ ID NO: 5800416 - DNA, 25 bp, Homo sapien
gatgcactttttatatatattgaac

SEQ ID NO: 5800417 - DNA, 25 bp, Homo sapien
ctgtgcgcagcatgtgagtgtgctg

SEQ ID NO: 5800418 - DNA, 25 bp, Homo sapien
gtgttgtgggtatagtgctccaagg

SEQ ID NO: 5800419 - DNA, 25 bp, Homo sapien
ctttcttgccgaagaattgaaaaga

SEQ ID NO: 5800420 - DNA, 25 bp, Homo sapien
gcattcatgatttccccgaagcaga

SEQ ID NO: 5800421 - DNA, 25 bp, Homo sapien
gttgttttgagttgcttttcatttt

SEQ ID NO: 5800422 - DNA, 25 bp, Homo sapien
acctgttccgaatatttgattcgac

SEQ ID NO: 5800423 - DNA, 25 bp, Homo sapien
cacaggtccaaaggcgggaggttcc

SEQ ID NO: 5800424 - DNA, 25 bp, Homo sapien
ctcctcgggcagccttagctgcccg

SEQ ID NO: 5800425 - DNA, 25 bp, Homo sapien
tggagaggtggaagcgcctcccgga

SEQ ID NO: 5800426 - DNA, 25 bp, Homo sapien
ctaggtgatcctccaacttcaaata

SEQ ID NO: 5800427 - DNA, 25 bp, Homo sapien
ctgaggttacagatttcattggccc

SEQ ID NO: 5800428 - DNA, 25 bp, Homo sapien
ctgagggatcagaccaaagcaggtc

SEQ ID NO: 5800429 - DNA, 25 bp, Homo sapien
catcagaaatcagttcgtcatcaga

SEQ ID NO: 5800430 - DNA, 25 bp, Homo sapien
ttttccaataataaataaatagaat

SEQ ID NO: 5800431 - DNA, 25 bp, Homo sapien
atgcacctccaggttgaagttgttt

SEQ ID NO: 5800432 - DNA, 25 bp, Homo sapien
gttatagacatctaggtaattgggg

SEQ ID NO: 5800433 - DNA, 25 bp, Homo sapien
gaaagaggtagcgtgtgttactagg

SEQ ID NO: 5800434 - DNA, 25 bp, Homo sapien
cctcgcgcttcttcaaaactccgga

SEQ ID NO: 5800435 - DNA, 25 bp, Homo sapien
cacacactctatactgaaatagcct

SEQ ID NO: 5800436 - DNA, 25 bp, Homo sapien
caggcccttgagagtcagcacactc

SEQ ID NO: 5800437 - DNA, 25 bp, Homo sapien
tcattgattatctttaaggctactt

SEQ ID NO: 5800438 - DNA, 25 bp, Homo sapien
cccaatggctctgatcttattcctg

SEQ ID NO: 5800439 - DNA, 25 bp, Homo sapien
aaatagaatttgttcttgagtttta

SEQ ID NO: 5800440 - DNA, 25 bp, Homo sapien
cgccttctcctcgggcagccttagc

SEQ ID NO: 5800441 - DNA, 25 bp, Homo sapien
ctgatggcttcccgggcctctaccg

SEQ ID NO: 5800442 - DNA, 25 bp, Homo sapien
ggaaaggggacagctttgatgacgc

SEQ ID NO: 5800443 - DNA, 25 bp, Homo sapien
ccccggctcctcagcggtgtccgag

SEQ ID NO: 5800444 - DNA, 25 bp, Homo sapien
atgtcatctaaagaagtaatttcag

SEQ ID NO: 5800445 - DNA, 25 bp, Homo sapien
ctaagggtggcgaccgggacagccg

SEQ ID NO: 5800446 - DNA, 25 bp, Homo sapien
cctttttacagaataaatgcagact

SEQ ID NO: 5800447 - DNA, 25 bp, Homo sapien
aaataacttcattaggtcaaagaat

SEQ ID NO: 5800448 - DNA, 25 bp, Homo sapien
agcctctgtccacatagtcacccag

SEQ ID NO: 5800449 - DNA, 25 bp, Homo sapien
acaaaacagatgcactttttatata

SEQ ID NO: 5800450 - DNA, 25 bp, Homo sapien
gtggcttggctcttcctgtacattc

SEQ ID NO: 5800451 - DNA, 25 bp, Homo sapien
ctgttccgaatatttgattcgacat

SEQ ID NO: 5800452 - DNA, 25 bp, Homo sapien
ctatcatagtcttctcttgcctcag

SEQ ID NO: 5800453 - DNA, 25 bp, Homo sapien
ctaagtcatgaatgggctttcttcc

SEQ ID NO: 5800454 - DNA, 25 bp, Homo sapien
tggagcatctacttctatcatagtc

SEQ ID NO: 5800455 - DNA, 25 bp, Homo sapien
cctgtacattcgatacccagcatct

SEQ ID NO: 5800456 - DNA, 25 bp, Homo sapien
tatgctatcctttcggggtggcatt

SEQ ID NO: 5800457 - DNA, 25 bp, Homo sapien
cctcgggcagccttagctgcccgga

SEQ ID NO: 5800458 - DNA, 25 bp, Homo sapien
tcattaggtcaaagaattgtccatg

SEQ ID NO: 5800459 - DNA, 25 bp, Homo sapien
aactccataaatacagcacacactc

SEQ ID NO: 5800460 - DNA, 25 bp, Homo sapien
tcattaattcggtccagacctcgcg

SEQ ID NO: 5800461 - DNA, 25 bp, Homo sapien
agagggcagcaagaggaagacagtc

SEQ ID NO: 5800462 - DNA, 25 bp, Homo sapien
ctcaggatggcagccccatcattga

SEQ ID NO: 5800463 - DNA, 25 bp, Homo sapien
aggttgaagttgttttgagttgctt

SEQ ID NO: 5800464 - DNA, 25 bp, Homo sapien
cctcccggacatggtcccctcggcc

SEQ ID NO: 5800465 - DNA, 25 bp, Homo sapien
gctgctaagggtggcgaccgggaca

SEQ ID NO: 5800466 - DNA, 25 bp, Homo sapien
caggacgagggcccaccggccgctc

SEQ ID NO: 5800467 - DNA, 25 bp, Homo sapien
tggaaagcctgtggcttggctcttc

SEQ ID NO: 5800468 - DNA, 25 bp, Homo sapien
gggatgattaatctttaaactccat

SEQ ID NO: 5800469 - DNA, 25 bp, Homo sapien
cctctaccgcttctactgtggctgt

SEQ ID NO: 5800470 - DNA, 25 bp, Homo sapien
ataaaacagtcacctttttacagaa

SEQ ID NO: 5800471 - DNA, 25 bp, Homo sapien
cttcccttggtcgctcctgtgcgca

SEQ ID NO: 5800472 - DNA, 25 bp, Homo sapien
tttaagagggcagcaagaggaagac

SEQ ID NO: 5800473 - DNA, 25 bp, Homo sapien
ttctactgtggctgtctcgatagtc

SEQ ID NO: 5800474 - DNA, 25 bp, Homo sapien
aaagaattgtccatgaatatcacca

SEQ ID NO: 5800475 - DNA, 25 bp, Homo sapien
cttggctcttcctgtacattcgata

SEQ ID NO: 5800476 - DNA, 25 bp, Homo sapien
ggaggcgccagcggctaaggcgggg

SEQ ID NO: 5800477 - DNA, 25 bp, Homo sapien
attcgacattcctgtttgaaggtga

SEQ ID NO: 5800478 - DNA, 25 bp, Homo sapien
gtcaggcccttgagagtcagcacac

SEQ ID NO: 5800479 - DNA, 25 bp, Homo sapien
gactctaagtcatgaatgggctttc

SEQ ID NO: 5800480 - DNA, 25 bp, Homo sapien
tccttctgcttcatcatcagaaatc

SEQ ID NO: 5800481 - DNA, 25 bp, Homo sapien
ttcatgggctctgataattgatagt

SEQ ID NO: 5800482 - DNA, 25 bp, Homo sapien
aggggtgtggagaacagttaaactg

SEQ ID NO: 5800483 - DNA, 25 bp, Homo sapien
taaaagaatttataaaacagtcacc

SEQ ID NO: 5800484 - DNA, 25 bp, Homo sapien
gaggtagcgtgtgttactaggtgat

SEQ ID NO: 5800485 - DNA, 25 bp, Homo sapien
tatagtgctccaaggtcttctcatt

SEQ ID NO: 5800486 - DNA, 25 bp, Homo sapien
aaaactccggatcttgtgctgaagc

SEQ ID NO: 5800487 - DNA, 25 bp, Homo sapien
tcaaagaattgtccatgaatatcac

SEQ ID NO: 5800488 - DNA, 25 bp, Homo sapien
taatttcaggtgacattcctccatg

SEQ ID NO: 5800489 - DNA, 25 bp, Homo sapien
tcgctcattaattcggtccagacct

SEQ ID NO: 5800490 - DNA, 25 bp, Homo sapien
accatgtgaaaacatccataaagtt

SEQ ID NO: 5800491 - DNA, 25 bp, Homo sapien
tcctccaacttcaaataacttcatt

SEQ ID NO: 5800492 - DNA, 25 bp, Homo sapien
ctcttgggaggcgccagcggctaag

SEQ ID NO: 5800493 - DNA, 25 bp, Homo sapien
gtcatcagagcatatgttgagcaca

SEQ ID NO: 5800494 - DNA, 25 bp, Homo sapien
atcaccacatactgtgattggagca

SEQ ID NO: 5800495 - DNA, 25 bp, Homo sapien
ttgttttcatatttcaacacagcag

SEQ ID NO: 5800496 - DNA, 25 bp, Homo sapien
tgaaatagcctctgtccacatagtc

SEQ ID NO: 5800497 - DNA, 25 bp, Homo sapien
catctaaagaagtaatttcaggtga

SEQ ID NO: 5800498 - DNA, 25 bp, Homo sapien
tgtgctgaagcgagaaccctctgat

SEQ ID NO: 5800499 - DNA, 25 bp, Homo sapien
aggagcccgccggacgtgcgcctac

SEQ ID NO: 5800500 - DNA, 25 bp, Homo sapien
cggcaggactctaagtcatgaatgg

SEQ ID NO: 5800501 - DNA, 25 bp, Homo sapien
ttgcctcaggatggcagccccatca

SEQ ID NO: 5800502 - DNA, 25 bp, Homo sapien
aggacgcccagagggagtgtgcctg

SEQ ID NO: 5800503 - DNA, 25 bp, Homo sapien
gctcttcctgtacattcgataccca

SEQ ID NO: 5800504 - DNA, 25 bp, Homo sapien
ctgatattcatgacattgttttcat

SEQ ID NO: 5800505 - DNA, 25 bp, Homo sapien
agtctgtaagatgcctgcattcatg

SEQ ID NO: 5800506 - DNA, 25 bp, Homo sapien
cccagagggagtgtgcctgtgggag

SEQ ID NO: 5800507 - DNA, 25 bp, Homo sapien
gtcggtggtggagaggtggaagcgc

SEQ ID NO: 5800508 - DNA, 25 bp, Homo sapien
taccgcttctactgtggctgtctcg

SEQ ID NO: 5800509 - DNA, 25 bp, Homo sapien
acatactgtgattggagcatctact

SEQ ID NO: 5800510 - DNA, 25 bp, Homo sapien
aaggtgaaatagtctgtaagatgcc

SEQ ID NO: 5800511 - DNA, 25 bp, Homo sapien
tacaggcatcatacacctgttccga

SEQ ID NO: 5800512 - DNA, 25 bp, Homo sapien
cttgagagtcagcacactctcactt

SEQ ID NO: 5800513 - DNA, 25 bp, Homo sapien
tagacatctaggtaattgggggcag

SEQ ID NO: 5800514 - DNA, 25 bp, Homo sapien
ttcttcccttggtcgctcctgtgcg

SEQ ID NO: 5800515 - DNA, 25 bp, Homo sapien
caaggtcttctcattgccataatcc

SEQ ID NO: 5800516 - DNA, 25 bp, Homo sapien
catgtgaaaacatccataaagtttg

SEQ ID NO: 5800517 - DNA, 25 bp, Homo sapien
ctgcagggtaactgtagaaataaga

SEQ ID NO: 5800518 - DNA, 25 bp, Homo sapien
ctctcactttcttgccgaagaattg

SEQ ID NO: 5800519 - DNA, 25 bp, Homo sapien
gttgtgggtatagtgctccaaggtc

SEQ ID NO: 5800520 - DNA, 25 bp, Homo sapien
atgacgcggtcggtggtggagaggt

SEQ ID NO: 5800521 - DNA, 25 bp, Homo sapien
ctccaacttcaaataacttcattag

SEQ ID NO: 5800522 - DNA, 25 bp, Homo sapien
aagccagtaggggtgtggagaacag

SEQ ID NO: 5800523 - DNA, 25 bp, Homo sapien
tggctgtctcgatagtctgcttgcc

SEQ ID NO: 5800524 - DNA, 25 bp, Homo sapien
taattgggggcagagaaaattgtaa

SEQ ID NO: 5800525 - DNA, 25 bp, Homo sapien
tcggtccagacctcgcgcttcttca

SEQ ID NO: 5800526 - DNA, 25 bp, Homo sapien
tttaggtttcccattctcaaatact

SEQ ID NO: 5800527 - DNA, 25 bp, Homo sapien
cacaaactgcagggtaactgtagaa

SEQ ID NO: 5800528 - DNA, 25 bp, Homo sapien
gctacttcctcttccagtcgtcctt

SEQ ID NO: 5800529 - DNA, 25 bp, Homo sapien
atggcagccccatcattgattatct

SEQ ID NO: 5800530 - DNA, 25 bp, Homo sapien
ggaagacagtcaaatgtctccatac

SEQ ID NO: 5800531 - DNA, 25 bp, Homo sapien
gggatcagaccaaagcaggtcacac

SEQ ID NO: 5800532 - DNA, 25 bp, Homo sapien
acctccaggttgaagttgttttgag

SEQ ID NO: 5800533 - DNA, 25 bp, Homo sapien
caaaaggcaaagaccatgtgaaaac

SEQ ID NO: 5800534 - DNA, 25 bp, Homo sapien
gcctgtggcttggctcttcctgtac

SEQ ID NO: 5800535 - DNA, 25 bp, Homo sapien
agaacagttaaactgcctgatattc

SEQ ID NO: 5800536 - DNA, 25 bp, Homo sapien
gacattcctgtttgaaggtgaaata

SEQ ID NO: 5800537 - DNA, 25 bp, Homo sapien
tgtctcgatagtctgcttgcctcct

SEQ ID NO: 5800538 - DNA, 25 bp, Homo sapien
ttacagatttcattggcccaccagc

SEQ ID NO: 5800539 - DNA, 25 bp, Homo sapien
gagcaccagaagggcgcggccaccg

SEQ ID NO: 5800540 - DNA, 25 bp, Homo sapien
gccatcttcccaatggctctgatct

SEQ ID NO: 5800541 - DNA, 25 bp, Homo sapien
catcttcccaatggctctgatctta

SEQ ID NO: 5800542 - DNA, 25 bp, Homo sapien
aaactgctggtttaagagggcagca

SEQ ID NO: 5800543 - DNA, 25 bp, Homo sapien
tgtgggtatagtgctccaaggtctt

SEQ ID NO: 5800544 - DNA, 25 bp, Homo sapien
gaatatcaccacatactgtgattgg

SEQ ID NO: 5800545 - DNA, 25 bp, Homo sapien
caaatacttccttgaaagtaagccg

SEQ ID NO: 5800546 - DNA, 25 bp, Homo sapien
tttaaactccataaatacagcacac

SEQ ID NO: 5800547 - DNA, 25 bp, Homo sapien
tcccattctcaaatacttccttgaa

SEQ ID NO: 5800548 - DNA, 25 bp, Homo sapien
aataagagcaccctcggacagtgtt

SEQ ID NO: 5800549 - DNA, 25 bp, Homo sapien
gaataaatgcagactgaattataaa

SEQ ID NO: 5800550 - DNA, 25 bp, Homo sapien
attatctttaaggctacttcctctt

SEQ ID NO: 5800551 - DNA, 25 bp, Homo sapien
ttttagatccacctgagccacggca

SEQ ID NO: 5800552 - DNA, 25 bp, Homo sapien
attcatgatttccccgaagcagaaa

SEQ ID NO: 5800553 - DNA, 25 bp, Homo sapien
attgtaataagtgatggaaagcctg

SEQ ID NO: 5800554 - DNA, 25 bp, Homo sapien
cagatgcactttttatatatattga

SEQ ID NO: 5800555 - DNA, 25 bp, Homo sapien
gaggtggaagcgcctcccggacatg

SEQ ID NO: 5800556 - DNA, 25 bp, Homo sapien
aacagttaaactgcctgatattcat

SEQ ID NO: 5800557 - DNA, 25 bp, Homo sapien
acacctgttccgaatatttgattcg

SEQ ID NO: 5800558 - DNA, 25 bp, Homo sapien
actgtggctgtctcgatagtctgct

SEQ ID NO: 5800559 - DNA, 25 bp, Homo sapien
ctatactgaaatagcctctgtccac

SEQ ID NO: 5800560 - DNA, 25 bp, Homo sapien
cagcaagaggaagacagtcaaatgt

SEQ ID NO: 5800561 - DNA, 25 bp, Homo sapien
acatcaactttaggtttcccattct

SEQ ID NO: 5800562 - DNA, 25 bp, Homo sapien
accggccgctctcttgggaggcgcc

SEQ ID NO: 5800563 - DNA, 25 bp, Homo sapien
cggacagtgttgtgggtatagtgct

SEQ ID NO: 5800564 - DNA, 25 bp, Homo sapien
ctatcctttcggggtggcattcgct

SEQ ID NO: 5800565 - DNA, 25 bp, Homo sapien
gtgtggagaacagttaaactgcctg

SEQ ID NO: 5800566 - DNA, 25 bp, Homo sapien
caggctccaggagcccgccggacgt

SEQ ID NO: 5800567 - DNA, 25 bp, Homo sapien
gggacagctttgatgacgcggtcgg

SEQ ID NO: 5800568 - DNA, 25 bp, Homo sapien
agaatttgttcttgagttttagatc

SEQ ID NO: 5800569 - DNA, 25 bp, Homo sapien
gcacatttaccagcatctctgtgac

SEQ ID NO: 5800570 - DNA, 25 bp, Homo sapien
cacactctatactgaaatagcctct

SEQ ID NO: 5800571 - DNA, 25 bp, Homo sapien
ttataaaacagtcacctttttacag

SEQ ID NO: 5800572 - DNA, 25 bp, Homo sapien
tcttcctgtacattcgatacccagc

SEQ ID NO: 5800573 - DNA, 25 bp, Homo sapien
catagtcacccagaaagaggtagcg

SEQ ID NO: 5800574 - DNA, 25 bp, Homo sapien
agaaccctctgatggcttcccgggc

SEQ ID NO: 5800575 - DNA, 25 bp, Homo sapien
ggacgagggcccaccggccgctctc

SEQ ID NO: 5800576 - DNA, 25 bp, Homo sapien
aagtttggaagccagtaggggtgtg

SEQ ID NO: 5800577 - DNA, 25 bp, Homo sapien
attcctgatgatctccttacgaact

SEQ ID NO: 5800578 - DNA, 25 bp, Homo sapien
agcggtgtccgagcaccagaagggc

SEQ ID NO: 5800579 - DNA, 25 bp, Homo sapien
aatgttttgggatgattaatcttta

SEQ ID NO: 5800580 - DNA, 25 bp, Homo sapien
gctgcccggagccgtcagccagccg

SEQ ID NO: 5800581 - DNA, 25 bp, Homo sapien
agatttcattggcccaccagcgtgt

SEQ ID NO: 5800582 - DNA, 25 bp, Homo sapien
gccagcggctaaggcggggaacacc

SEQ ID NO: 5800583 - DNA, 25 bp, Homo sapien
tgaaggtgaaatagtctgtaagatg

SEQ ID NO: 5800584 - DNA, 25 bp, Homo sapien
gacagtgttgtgggtatagtgctcc

SEQ ID NO: 5800585 - DNA, 25 bp, Homo sapien
ctccttacgaactgtagtgcttcct

SEQ ID NO: 5800586 - DNA, 25 bp, Homo sapien
cctccgacgccactgacaggacgag

SEQ ID NO: 5800587 - DNA, 25 bp, Homo sapien
tatagacatctaggtaattgggggc

SEQ ID NO: 5800588 - DNA, 25 bp, Homo sapien
tttattgttatagacatctaggtaa

SEQ ID NO: 5800589 - DNA, 25 bp, Homo sapien
tattgttctgcaaaaattcacaaac

SEQ ID NO: 5800590 - DNA, 25 bp, Homo sapien
catccataaagtttggaagccagta

SEQ ID NO: 5800591 - DNA, 25 bp, Homo sapien
tgggaggcgccagcggctaaggcgg

SEQ ID NO: 5800592 - DNA, 25 bp, Homo sapien
ttacgaactgtagtgcttccttctg

SEQ ID NO: 5800593 - DNA, 25 bp, Homo sapien
gtcacacacaggtccaaaggcggga

SEQ ID NO: 5800594 - DNA, 25 bp, Homo sapien
ggcgcggccaccgcagcgccggcct

SEQ ID NO: 5800595 - DNA, 25 bp, Homo sapien
aatgtctccatacaggcatcataca

SEQ ID NO: 5800596 - DNA, 25 bp, Homo sapien
tgttgacaacaatcagattcatttc

SEQ ID NO: 5800597 - DNA, 25 bp, Homo sapien
aagacagtcaaatgtctccatacag

SEQ ID NO: 5800598 - DNA, 25 bp, Homo sapien
gttggaggaaaggggacagctttga

SEQ ID NO: 5800599 - DNA, 25 bp, Homo sapien
tgttcttgagttttagatccacctg

SEQ ID NO: 5800600 - DNA, 25 bp, Homo sapien
atagcacaagacttcacaaatgtgt

SEQ ID NO: 5800601 - DNA, 25 bp, Homo sapien
cccaccagcgtgtatgctatccttt

SEQ ID NO: 5800602 - DNA, 25 bp, Homo sapien
catcattgattatctttaaggctac

SEQ ID NO: 5800603 - DNA, 25 bp, Homo sapien
cagttcgtcatcagagcatatgttg

SEQ ID NO: 5800604 - DNA, 25 bp, Homo sapien
cactgacaggacgagggcccaccgg

SEQ ID NO: 5800605 - DNA, 25 bp, Homo sapien
ctccaggagcccgccggacgtgcgc

SEQ ID NO: 5800606 - DNA, 25 bp, Homo sapien
ccccaacaaaaggcaaagaccatgt

SEQ ID NO: 5800607 - DNA, 25 bp, Homo sapien
ttgtccatgaatatcaccacatact

SEQ ID NO: 5800608 - DNA, 25 bp, Homo sapien
aaagaccatgtgaaaacatccataa

SEQ ID NO: 5800609 - DNA, 25 bp, Homo sapien
cggacgtgcgcctacgccgcggccg

SEQ ID NO: 5800610 - DNA, 25 bp, Homo sapien
gacgcccagagggagtgtgcctgtg

SEQ ID NO: 5800611 - DNA, 25 bp, Homo sapien
ctctcttgggaggcgccagcggcta

SEQ ID NO: 5800612 - DNA, 25 bp, Homo sapien
ggtgaaatagtctgtaagatgcctg

SEQ ID NO: 5800613 - DNA, 25 bp, Homo sapien
agagtcagcacactctcactttctt

SEQ ID NO: 5800614 - DNA, 25 bp, Homo sapien
tctgtaagatgcctgcattcatgat

SEQ ID NO: 5800615 - DNA, 25 bp, Homo sapien
catcatacacctgttccgaatattt

SEQ ID NO: 5800616 - DNA, 25 bp, Homo sapien
cagtcaaatgtctccatacaggcat

SEQ ID NO: 5800617 - DNA, 25 bp, Homo sapien
taccaaatggttttttaaaacatca

SEQ ID NO: 5800618 - DNA, 25 bp, Homo sapien
cagttaaactgcctgatattcatga

SEQ ID NO: 5800619 - DNA, 25 bp, Homo sapien
acattcctccatgtacacagagaaa

SEQ ID NO: 5800620 - DNA, 25 bp, Homo sapien
tgctgaggttacagatttcattggc

SEQ ID NO: 5800621 - DNA, 25 bp, Homo sapien
tttttacagaataaatgcagactga

SEQ ID NO: 5800622 - DNA, 25 bp, Homo sapien
cgggcctctaccgcttctactgtgg

SEQ ID NO: 5800623 - DNA, 25 bp, Homo sapien
aggtcacacacaggtccaaaggcgg

SEQ ID NO: 5800624 - DNA, 25 bp, Homo sapien
acatttaccagcatctctgtgactt

SEQ ID NO: 5800625 - DNA, 25 bp, Homo sapien
actgctggtttaagagggcagcaag

SEQ ID NO: 5800626 - DNA, 25 bp, Homo sapien
ccggacatggtcccctcggcctcct

SEQ ID NO: 5800627 - DNA, 25 bp, Homo sapien
cacaagacttcacaaatgtgttgac

SEQ ID NO: 5800628 - DNA, 25 bp, Homo sapien
ccaacaaaaggcaaagaccatgtga

SEQ ID NO: 5800629 - DNA, 25 bp, Homo sapien
gatgattaatctttaaactccataa

SEQ ID NO: 5800630 - DNA, 25 bp, Homo sapien
aagtcatgaatgggctttcttccct

SEQ ID NO: 5800631 - DNA, 25 bp, Homo sapien
gctcctgtgcgcagcatgtgagtgt

SEQ ID NO: 5800632 - DNA, 25 bp, Homo sapien
cacctttttacagaataaatgcaga

SEQ ID NO: 5800633 - DNA, 25 bp, Homo sapien
atgtacacagagaaactgctggttt

SEQ ID NO: 5800634 - DNA, 25 bp, Homo sapien
gacatctaggtaattgggggcagag

SEQ ID NO: 5800635 - DNA, 25 bp, Homo sapien
ggcctccgacgccactgacaggacg

SEQ ID NO: 5800636 - DNA, 25 bp, Homo sapien
gacctcgaccgctgctaagggtggc

SEQ ID NO: 5800637 - DNA, 25 bp, Homo sapien
ccaacttcaaataacttcattaggt

SEQ ID NO: 5800638 - DNA, 25 bp, Homo sapien
atggtcccctcggcctcctccaggc

SEQ ID NO: 5800639 - DNA, 25 bp, Homo sapien
tccatacaggcatcatacacctgtt

SEQ ID NO: 5800640 - DNA, 25 bp, Homo sapien
agagcaccctcggacagtgttgtgg

SEQ ID NO: 5800641 - DNA, 25 bp, Homo sapien
ctgacaggacgagggcccaccggcc

SEQ ID NO: 5800642 - DNA, 25 bp, Homo sapien
cagaagggcgcggccaccgcagcgc

SEQ ID NO: 5800643 - DNA, 25 bp, Homo sapien
cacggcaggactctaagtcatgaat

SEQ ID NO: 5800644 - DNA, 25 bp, Homo sapien
ccctctgatggcttcccgggcctct

SEQ ID NO: 5800645 - DNA, 25 bp, Homo sapien
taataagtgatggaaagcctgtggc

SEQ ID NO: 5800646 - DNA, 25 bp, Homo sapien
gctgtctcgatagtctgcttgcctc

SEQ ID NO: 5800647 - DNA, 25 bp, Homo sapien
cacaaatgtgttgacaacaatcaga

SEQ ID NO: 5800648 - DNA, 25 bp, Homo sapien
gtgtgttactaggtgatcctccaac

SEQ ID NO: 5800649 - DNA, 25 bp, Homo sapien
actgtagtgcttccttctgcttcat

SEQ ID NO: 5800650 - DNA, 25 bp, Homo sapien
ttcttgagttttagatccacctgag

SEQ ID NO: 5800651 - DNA, 25 bp, Homo sapien
taggggaagttcccctttatagcac

SEQ ID NO: 5800652 - DNA, 25 bp, Homo sapien
agggtaactgtagaaataagagcac

SEQ ID NO: 5800653 - DNA, 25 bp, Homo sapien
gaaaagacccgtgccatcttcccaa

SEQ ID NO: 5800654 - DNA, 25 bp, Homo sapien
agcatatgttgagcacatttaccag

SEQ ID NO: 5800655 - DNA, 25 bp, Homo sapien
tgttgagcacatttaccagcatctc

SEQ ID NO: 5800656 - DNA, 25 bp, Homo sapien
acagatttcattggcccaccagcgt

SEQ ID NO: 5800657 - DNA, 25 bp, Homo sapien
attaattcggtccagacctcgcgct

SEQ ID NO: 5800658 - DNA, 25 bp, Homo sapien
ctctatactgaaatagcctctgtcc

SEQ ID NO: 5800659 - DNA, 25 bp, Homo sapien
actttaggtttcccattctcaaata

SEQ ID NO: 5800660 - DNA, 25 bp, Homo sapien
cgaccgggacagccgcggctgctcg

SEQ ID NO: 5800661 - DNA, 25 bp, Homo sapien
ctgcttgcctcctgagaggacgccc

SEQ ID NO: 5800662 - DNA, 25 bp, Homo sapien
tccaggctccaggagcccgccggac

SEQ ID NO: 5800663 - DNA, 25 bp, Homo sapien
cctctgtccacatagtcacccagaa

SEQ ID NO: 5800664 - DNA, 25 bp, Homo sapien
ataaatacagcacacactctatact

SEQ ID NO: 5800665 - DNA, 25 bp, Homo sapien
tggaagcgcctcccggacatggtcc

SEQ ID NO: 5800666 - DNA, 25 bp, Homo sapien
cggcctcctccaggctccaggagcc

SEQ ID NO: 5800667 - DNA, 25 bp, Homo sapien
cgaagcagaaacaatgttttgggat

SEQ ID NO: 5800668 - DNA, 25 bp, Homo sapien
gtttggaagccagtaggggtgtgga

SEQ ID NO: 5800669 - DNA, 25 bp, Homo sapien
tcctcttccagtcgtccttccttta

SEQ ID NO: 5800670 - DNA, 25 bp, Homo sapien
gagcatctacttctatcatagtctt

SEQ ID NO: 5800671 - DNA, 25 bp, Homo sapien
tgtggctgtctcgatagtctgcttg

SEQ ID NO: 5800672 - DNA, 25 bp, Homo sapien
tgatgacgcggtcggtggtggagag

SEQ ID NO: 5800673 - DNA, 25 bp, Homo sapien
ttgatagtaaattattgttctgcaa

SEQ ID NO: 5800674 - DNA, 25 bp, Homo sapien
atttcctaatgtcatctaaagaagt

SEQ ID NO: 5800675 - DNA, 25 bp, Homo sapien
ttgaaagtaagccgttgggttggag

SEQ ID NO: 5800676 - DNA, 25 bp, Homo sapien
aacagtcacctttttacagaataaa

SEQ ID NO: 5800677 - DNA, 25 bp, Homo sapien
gtaggggtgtggagaacagttaaac

SEQ ID NO: 5800678 - DNA, 25 bp, Homo sapien
tctttaaggctacttcctcttccag

SEQ ID NO: 5800679 - DNA, 25 bp, Homo sapien
taaactccataaatacagcacacac

SEQ ID NO: 5800680 - DNA, 25 bp, Homo sapien
gcagcatgtgagtgtgctgaggtta

SEQ ID NO: 5800681 - DNA, 25 bp, Homo sapien
aagttgttttgagttgcttttcatt

SEQ ID NO: 5800682 - DNA, 25 bp, Homo sapien
ggaaaaacaaaacagatgcactttt

SEQ ID NO: 5800683 - DNA, 25 bp, Homo sapien
ggtggaagcgcctcccggacatggt

SEQ ID NO: 5800684 - DNA, 25 bp, Homo sapien
ggggaagttcccctttatagcacaa

SEQ ID NO: 5800685 - DNA, 25 bp, Homo sapien
ccttctcctcgggcagccttagctg

SEQ ID NO: 5800686 - DNA, 25 bp, Homo sapien
tccagtcgtccttcctttaccaaat

SEQ ID NO: 5800687 - DNA, 25 bp, Homo sapien
gcagaaacaatgttttgggatgatt

SEQ ID NO: 5800688 - DNA, 25 bp, Homo sapien
ggggtggcattcgctcattaattcg

SEQ ID NO: 5800689 - DNA, 25 bp, Homo sapien
tttcatatttcaacacagcagcttt

SEQ ID NO: 5800690 - DNA, 25 bp, Homo sapien
agcgtgtatgctatcctttcggggt

SEQ ID NO: 5800691 - DNA, 25 bp, Homo sapien
ttcttcaaaactccggatcttgtgc

SEQ ID NO: 5800692 - DNA, 25 bp, Homo sapien
tgtgaaaacatccataaagtttgga

SEQ ID NO: 5800693 - DNA, 25 bp, Homo sapien
tatattgaacataaattaaaagaat

SEQ ID NO: 5800694 - DNA, 25 bp, Homo sapien
aggcaaagaccatgtgaaaacatcc

SEQ ID NO: 5800695 - DNA, 25 bp, Homo sapien
tcctgtgcgcagcatgtgagtgtgc

SEQ ID NO: 5800696 - DNA, 25 bp, Homo sapien
ttctatcatagtcttctcttgcctc

SEQ ID NO: 5800697 - DNA, 25 bp, Homo sapien
gatcagaccaaagcaggtcacacac

SEQ ID NO: 5800698 - DNA, 25 bp, Homo sapien
gggtggcgaccgggacagccgcggc

SEQ ID NO: 5800699 - DNA, 25 bp, Homo sapien
tgatctccttacgaactgtagtgct

SEQ ID NO: 5800700 - DNA, 25 bp, Homo sapien
gaggaagacagtcaaatgtctccat

SEQ ID NO: 5800701 - DNA, 25 bp, Homo sapien
tctgcaaaaattcacaaactgcagg

SEQ ID NO: 5800702 - DNA, 25 bp, Homo sapien
acaatgttttgggatgattaatctt

SEQ ID NO: 5800703 - DNA, 25 bp, Homo sapien
ttttgggatgattaatctttaaact

SEQ ID NO: 5800704 - DNA, 25 bp, Homo sapien
caccagcgtgtatgctatcctttcg

SEQ ID NO: 5800705 - DNA, 25 bp, Homo sapien
gttttcatatttcaacacagcagct

SEQ ID NO: 5800706 - DNA, 25 bp, Homo sapien
ctcctccaggctccaggagcccgcc

SEQ ID NO: 5800707 - DNA, 25 bp, Homo sapien
tttgaaggtgaaatagtctgtaaga

SEQ ID NO: 5800708 - DNA, 25 bp, Homo sapien
attcggtccagacctcgcgcttctt

SEQ ID NO: 5800709 - DNA, 25 bp, Homo sapien
ccggatcttgtgctgaagcgagaac

SEQ ID NO: 5800710 - DNA, 25 bp, Homo sapien
ttgaaaagacccgtgccatcttccc

SEQ ID NO: 5800711 - DNA, 25 bp, Homo sapien
tccaaggtcttctcattgccataat

SEQ ID NO: 5800712 - DNA, 25 bp, Homo sapien
aaagggaaaaacaaaacagatgcac

SEQ ID NO: 5800713 - DNA, 25 bp, Homo sapien
tctgcttcatcatcagaaatcagtt

SEQ ID NO: 5800714 - DNA, 25 bp, Homo sapien
gaccgctgctaagggtggcgaccgg

SEQ ID NO: 5800715 - DNA, 25 bp, Homo sapien
ggaagccagtaggggtgtggagaac

SEQ ID NO: 5800716 - DNA, 25 bp, Homo sapien
tcaaaactccggatcttgtgctgaa

SEQ ID NO: 5800717 - DNA, 25 bp, Homo sapien
ctttcttcccttggtcgctcctgtg

SEQ ID NO: 5800718 - DNA, 25 bp, Homo sapien
tttaaggctacttcctcttccagtc

SEQ ID NO: 5800719 - DNA, 25 bp, Homo sapien
acttctatcatagtcttctcttgcc

SEQ ID NO: 5800720 - DNA, 25 bp, Homo sapien
aaatacagcacacactctatactga

SEQ ID NO: 5800721 - DNA, 25 bp, Homo sapien
aaatgcagactgaattataaatgca

SEQ ID NO: 5800722 - DNA, 25 bp, Homo sapien
gaactgtagtgcttccttctgcttc

SEQ ID NO: 5800723 - DNA, 25 bp, Homo sapien
atcttgtgctgaagcgagaaccctc

SEQ ID NO: 5800724 - DNA, 25 bp, Homo sapien
gtcacctttttacagaataaatgca

SEQ ID NO: 5800725 - DNA, 25 bp, Homo sapien
ctctgatcttattcctgatgatctc

SEQ ID NO: 5800726 - DNA, 25 bp, Homo sapien
tttgatgacgcggtcggtggtggag

SEQ ID NO: 5800727 - DNA, 25 bp, Homo sapien
ggccccggctcctcagcggtgtccg

SEQ ID NO: 5800728 - DNA, 25 bp, Homo sapien
aagaagtaatttcaggtgacattcc

SEQ ID NO: 5800729 - DNA, 25 bp, Homo sapien
agggcgcggccaccgcagcgccggc

SEQ ID NO: 5800730 - DNA, 25 bp, Homo sapien
cagtcacctttttacagaataaatg

SEQ ID NO: 5800731 - DNA, 25 bp, Homo sapien
ggaagttcccctttatagcacaaga

SEQ ID NO: 5800732 - DNA, 25 bp, Homo sapien
agggaaaaacaaaacagatgcactt

SEQ ID NO: 5800733 - DNA, 25 bp, Homo sapien
cagcggctaaggcggggaacaccgc

SEQ ID NO: 5800734 - DNA, 25 bp, Homo sapien
cagacctcgcgcttcttcaaaactc

SEQ ID NO: 5800735 - DNA, 25 bp, Homo sapien
catctaggtaattgggggcagagaa

SEQ ID NO: 5800736 - DNA, 25 bp, Homo sapien
atgcctgcattcatgatttccccga

SEQ ID NO: 5800737 - DNA, 25 bp, Homo sapien
caaaaattcacaaactgcagggtaa

SEQ ID NO: 5800738 - DNA, 25 bp, Homo sapien
aaatcagttcgtcatcagagcatat

SEQ ID NO: 5800739 - DNA, 25 bp, Homo sapien
ccacctgagccacggcaggactcta

SEQ ID NO: 5800740 - DNA, 25 bp, Homo sapien
ccctcggacagtgttgtgggtatag

SEQ ID NO: 5800741 - DNA, 25 bp, Homo sapien
cgctctcttgggaggcgccagcggc

SEQ ID NO: 5800742 - DNA, 25 bp, Homo sapien
gccactgacaggacgagggcccacc

SEQ ID NO: 5800743 - DNA, 25 bp, Homo sapien
gacaacaatcagattcatttcttaa

SEQ ID NO: 5800744 - DNA, 25 bp, Homo sapien
caaagcaggtcacacacaggtccaa

SEQ ID NO: 5800745 - DNA, 25 bp, Homo sapien
atgcagactgaattataaatgcacc

SEQ ID NO: 5800746 - DNA, 25 bp, Homo sapien
ttcgatacccagcatcttgggcttc

SEQ ID NO: 5800747 - DNA, 25 bp, Homo sapien
ccagcatcttgggcttcatgggctc

SEQ ID NO: 5800748 - DNA, 25 bp, Homo sapien
ctctaagtcatgaatgggctttctt

SEQ ID NO: 5800749 - DNA, 25 bp, Homo sapien
gttcccctttatagcacaagacttc

SEQ ID NO: 5800750 - DNA, 25 bp, Homo sapien
aaatagtctgtaagatgcctgcatt

SEQ ID NO: 5800751 - DNA, 25 bp, Homo sapien
ttgggcttcatgggctctgataatt

SEQ ID NO: 5800752 - DNA, 25 bp, Homo sapien
acccagcatcttgggcttcatgggc

SEQ ID NO: 5800753 - DNA, 25 bp, Homo sapien
tgtccacatagtcacccagaaagag

SEQ ID NO: 5800754 - DNA, 25 bp, Homo sapien
caactttaggtttcccattctcaaa

SEQ ID NO: 5800755 - DNA, 25 bp, Homo sapien
ttcctgtttgaaggtgaaatagtct

SEQ ID NO: 5800756 - DNA, 25 bp, Homo sapien
cgtgcgcctacgccgcggccgccgc

SEQ ID NO: 5800757 - DNA, 25 bp, Homo sapien
tttcggggtggcattcgctcattaa

SEQ ID NO: 5800758 - DNA, 25 bp, Homo sapien
accgcttcggcaccgacctcgaccg

SEQ ID NO: 5800759 - DNA, 25 bp, Homo sapien
cagctttgatgacgcggtcggtggt

SEQ ID NO: 5800760 - DNA, 25 bp, Homo sapien
ccgcagcgccggcctccgacgccac

SEQ ID NO: 5800761 - DNA, 25 bp, Homo sapien
gatcctccaacttcaaataacttca

SEQ ID NO: 5800762 - DNA, 25 bp, Homo sapien
gagaaaattgtaataagtgatggaa

SEQ ID NO: 5800763 - DNA, 25 bp, Homo sapien
agaattgtccatgaatatcaccaca

SEQ ID NO: 5800764 - DNA, 25 bp, Homo sapien
cttgccgaagaattgaaaagacccg

SEQ ID NO: 5800765 - DNA, 25 bp, Homo sapien
aaattattgttctgcaaaaattcac

SEQ ID NO: 5800766 - DNA, 25 bp, Homo sapien
catttcttaaaattatggagaaaaa

SEQ ID NO: 5800767 - DNA, 25 bp, Homo sapien
cttcaaataacttcattaggtcaaa

SEQ ID NO: 5800768 - DNA, 25 bp, Homo sapien
cctgagaggacgcccagagggagtg

SEQ ID NO: 5800769 - DNA, 25 bp, Homo sapien
gccggacgtgcgcctacgccgcggc

SEQ ID NO: 5800770 - DNA, 25 bp, Homo sapien
cactctcactttcttgccgaagaat

SEQ ID NO: 5800771 - DNA, 25 bp, Homo sapien
cggtcggtggtggagaggtggaagc

SEQ ID NO: 5800772 - DNA, 25 bp, Homo sapien
cgacgccactgacaggacgagggcc

SEQ ID NO: 5800773 - DNA, 25 bp, Homo sapien
atactgaaatagcctctgtccacat

SEQ ID NO: 5800774 - DNA, 25 bp, Homo sapien
gcccggccccggctcctcagcggtg

SEQ ID NO: 5800775 - DNA, 25 bp, Homo sapien
ctgtgggagtcaggcccttgagagt

SEQ ID NO: 5800776 - DNA, 25 bp, Homo sapien
ttgacaacaatcagattcatttctt

SEQ ID NO: 5800777 - DNA, 25 bp, Homo sapien
gacagctttgatgacgcggtcggtg

SEQ ID NO: 5800778 - DNA, 25 bp, Homo sapien
cttcattaggtcaaagaattgtcca

SEQ ID NO: 5800779 - DNA, 25 bp, Homo sapien
ctggtttaagagggcagcaagagga

SEQ ID NO: 5800780 - DNA, 25 bp, Homo sapien
agccagccgtgcccggccccggctc

SEQ ID NO: 5800781 - DNA, 25 bp, Homo sapien
tttgttcttgagttttagatccacc

SEQ ID NO: 5800782 - DNA, 25 bp, Homo sapien
gcatctctgtgactttttccccaac

SEQ ID NO: 5800783 - DNA, 25 bp, Homo sapien
accgggacagccgcggctgctcgcg

SEQ ID NO: 5800784 - DNA, 25 bp, Homo sapien
aactccggatcttgtgctgaagcga

SEQ ID NO: 5800785 - DNA, 25 bp, Homo sapien
ataaatagaatttgttcttgagttt

SEQ ID NO: 5800786 - DNA, 25 bp, Homo sapien
aataataaataaatagaatttgttc

SEQ ID NO: 5800787 - DNA, 25 bp, Homo sapien
cgcccagagggagtgtgcctgtggg

SEQ ID NO: 5800788 - DNA, 25 bp, Homo sapien
gaaaattgtaataagtgatggaaag

SEQ ID NO: 5800789 - DNA, 25 bp, Homo sapien
gacagtcaaatgtctccatacaggc

SEQ ID NO: 5800790 - DNA, 25 bp, Homo sapien
gcgcagcatgtgagtgtgctgaggt

SEQ ID NO: 5800791 - DNA, 25 bp, Homo sapien
gtgttactaggtgatcctccaactt

SEQ ID NO: 5800792 - DNA, 25 bp, Homo sapien
ctcttccagtcgtccttcctttacc

SEQ ID NO: 5800793 - DNA, 25 bp, Homo sapien
gttactaggtgatcctccaacttca

SEQ ID NO: 5800794 - DNA, 25 bp, Homo sapien
ggctctgatcttattcctgatgatc

SEQ ID NO: 5800795 - DNA, 25 bp, Homo sapien
ggtgacattcctccatgtacacaga

SEQ ID NO: 5800796 - DNA, 25 bp, Homo sapien
atcagttcgtcatcagagcatatgt

SEQ ID NO: 5800797 - DNA, 25 bp, Homo sapien
agcgagaaccctctgatggcttccc

SEQ ID NO: 5800798 - DNA, 25 bp, Homo sapien
agtaatttcaggtgacattcctcca

SEQ ID NO: 5800799 - DNA, 25 bp, Homo sapien
ccgaagaattgaaaagacccgtgcc

SEQ ID NO: 5800800 - DNA, 25 bp, Homo sapien
aattgatagtaaattattgttctgc

SEQ ID NO: 5800801 - DNA, 25 bp, Homo sapien
ctccaggttgaagttgttttgagtt

SEQ ID NO: 5800802 - DNA, 25 bp, Homo sapien
tgctaagggtggcgaccgggacagc

SEQ ID NO: 5800803 - DNA, 25 bp, Homo sapien
gatattcatgacattgttttcatat

SEQ ID NO: 5800804 - DNA, 25 bp, Homo sapien
tctgtccacatagtcacccagaaag

SEQ ID NO: 5800805 - DNA, 25 bp, Homo sapien
gtggcgaccgggacagccgcggctg

SEQ ID NO: 5800806 - DNA, 25 bp, Homo sapien
taaaacatcaactttaggtttccca

SEQ ID NO: 5800807 - DNA, 25 bp, Homo sapien
cattgttttcatatttcaacacagc

SEQ ID NO: 5800808 - DNA, 25 bp, Homo sapien
tcggcaccgacctcgaccgctgcta

SEQ ID NO: 5800809 - DNA, 25 bp, Homo sapien
atatcaccacatactgtgattggag

SEQ ID NO: 5800810 - DNA, 25 bp, Homo sapien
agagaaactgctggtttaagagggc

SEQ ID NO: 5800811 - DNA, 25 bp, Homo sapien
agtgtgctgaggttacagatttcat

SEQ ID NO: 5800812 - DNA, 25 bp, Homo sapien
tgaatgggctttcttcccttggtcg

SEQ ID NO: 5800813 - DNA, 25 bp, Homo sapien
caacaatcagattcatttcttaaaa

SEQ ID NO: 5800814 - DNA, 25 bp, Homo sapien
gccgccttctcctcgggcagcctta

SEQ ID NO: 5800815 - DNA, 25 bp, Homo sapien
acacagagaaactgctggtttaaga

SEQ ID NO: 5800816 - DNA, 25 bp, Homo sapien
ctccataaatacagcacacactcta

SEQ ID NO: 5800817 - DNA, 25 bp, Homo sapien
agaccatgtgaaaacatccataaag

SEQ ID NO: 5800818 - DNA, 25 bp, Homo sapien
gttgaagttgttttgagttgctttt

SEQ ID NO: 5800819 - DNA, 25 bp, Homo sapien
gaagggcgcggccaccgcagcgccg

SEQ ID NO: 5800820 - DNA, 25 bp, Homo sapien
gtgcctgtgggagtcaggcccttga

SEQ ID NO: 5800821 - DNA, 25 bp, Homo sapien
tggaggaaaggggacagctttgatg

SEQ ID NO: 5800822 - DNA, 25 bp, Homo sapien
aatcctctgagggatcagaccaaag

SEQ ID NO: 5800823 - DNA, 25 bp, Homo sapien
ttccaataataaataaatagaattt

SEQ ID NO: 5800824 - DNA, 25 bp, Homo sapien
tggcattcgctcattaattcggtcc

SEQ ID NO: 5800825 - DNA, 25 bp, Homo sapien
cgccgcggccgccgccttctcctcg

SEQ ID NO: 5800826 - DNA, 25 bp, Homo sapien
agaaacaatgttttgggatgattaa

SEQ ID NO: 5800827 - DNA, 25 bp, Homo sapien
ctgatgatctccttacgaactgtag

SEQ ID NO: 5800828 - DNA, 25 bp, Homo sapien
tgagttttagatccacctgagccac

SEQ ID NO: 5800829 - DNA, 25 bp, Homo sapien
tattgaacataaattaaaagaattt

SEQ ID NO: 5800830 - DNA, 25 bp, Homo sapien
ttggtcgctcctgtgcgcagcatgt

SEQ ID NO: 5800831 - DNA, 25 bp, Homo sapien
atttcaacacagcagctttattgtt

SEQ ID NO: 5800832 - DNA, 25 bp, Homo sapien
ctctgagggatcagaccaaagcagg

SEQ ID NO: 5800833 - DNA, 25 bp, Homo sapien
ggcgaccgggacagccgcggctgct

SEQ ID NO: 5800834 - DNA, 25 bp, Homo sapien
ataaatgcacctccaggttgaagtt

SEQ ID NO: 5800835 - DNA, 25 bp, Homo sapien
aacaaaaggcaaagaccatgtgaaa

SEQ ID NO: 5800836 - DNA, 25 bp, Homo sapien
tgtgctgaggttacagatttcattg

SEQ ID NO: 5800837 - DNA, 25 bp, Homo sapien
tgtttgaaggtgaaatagtctgtaa

SEQ ID NO: 5800838 - DNA, 25 bp, Homo sapien
tgggctttcttcccttggtcgctcc

SEQ ID NO: 5800839 - DNA, 25 bp, Homo sapien
ataatcctctgagggatcagaccaa

SEQ ID NO: 5800840 - DNA, 25 bp, Homo sapien
gcttccttctgcttcatcatcagaa

SEQ ID NO: 5800841 - DNA, 25 bp, Homo sapien
aatttgttcttgagttttagatcca

SEQ ID NO: 5800842 - DNA, 25 bp, Homo sapien
ttcctgtacattcgatacccagcat

SEQ ID NO: 5800843 - DNA, 25 bp, Homo sapien
cttccagtcgtccttcctttaccaa

SEQ ID NO: 5800844 - DNA, 25 bp, Homo sapien
agaattgaaaagacccgtgccatct

SEQ ID NO: 5800845 - DNA, 25 bp, Homo sapien
tgggctctgataattgatagtaaat

SEQ ID NO: 5800846 - DNA, 25 bp, Homo sapien
aggcgccagcggctaaggcggggaa

SEQ ID NO: 5800847 - DNA, 25 bp, Homo sapien
cataaagtttggaagccagtagggg

SEQ ID NO: 5800848 - DNA, 25 bp, Homo sapien
caggtgacattcctccatgtacaca

SEQ ID NO: 5800849 - DNA, 25 bp, Homo sapien
ggcctctaccgcttctactgtggct

SEQ ID NO: 5800850 - DNA, 25 bp, Homo sapien
aaatagcctctgtccacatagtcac

SEQ ID NO: 5800851 - DNA, 25 bp, Homo sapien
ggcaccgacctcgaccgctgctaag

SEQ ID NO: 5800852 - DNA, 25 bp, Homo sapien
tgtgttgacaacaatcagattcatt

SEQ ID NO: 5800853 - DNA, 25 bp, Homo sapien
caccgcagcgccggcctccgacgcc

SEQ ID NO: 5800854 - DNA, 25 bp, Homo sapien
gtggagaacagttaaactgcctgat

SEQ ID NO: 5800855 - DNA, 25 bp, Homo sapien
gcaaagaccatgtgaaaacatccat

SEQ ID NO: 5800856 - DNA, 25 bp, Homo sapien
tctaatttcctaatgtcatctaaag

SEQ ID NO: 5800857 - DNA, 25 bp, Homo sapien
cagccttagctgcccggagccgtca

SEQ ID NO: 5800858 - DNA, 25 bp, Homo sapien
gtaaattattgttctgcaaaaattc

SEQ ID NO: 5800859 - DNA, 25 bp, Homo sapien
tcagaccaaagcaggtcacacacag

SEQ ID NO: 5800860 - DNA, 25 bp, Homo sapien
aacatccataaagtttggaagccag

SEQ ID NO: 5800861 - DNA, 25 bp, Homo sapien
ccggccccggctcctcagcggtgtc

SEQ ID NO: 5800862 - DNA, 25 bp, Homo sapien
gagttgcttttcattttccaataat

SEQ ID NO: 5800863 - DNA, 25 bp, Homo sapien
ggtaattgggggcagagaaaattgt

SEQ ID NO: 5800864 - DNA, 25 bp, Homo sapien
gcgccagcggctaaggcggggaaca

SEQ ID NO: 5800865 - DNA, 25 bp, Homo sapien
cattcctgtttgaaggtgaaatagt

SEQ ID NO: 5800866 - DNA, 25 bp, Homo sapien
agcacacactctatactgaaatagc

SEQ ID NO: 5800867 - DNA, 25 bp, Homo sapien
aaagacccgtgccatcttcccaatg

SEQ ID NO: 5800868 - DNA, 25 bp, Homo sapien
tcccctttatagcacaagacttcac

SEQ ID NO: 5800869 - DNA, 25 bp, Homo sapien
tgagagtcagcacactctcactttc

SEQ ID NO: 5800870 - DNA, 25 bp, Homo sapien
tgccgaagaattgaaaagacccgtg

SEQ ID NO: 5800871 - DNA, 25 bp, Homo sapien
atcatagtcttctcttgcctcagga

SEQ ID NO: 5800872 - DNA, 25 bp, Homo sapien
cgcggccaccgcagcgccggcctcc

SEQ ID NO: 5800873 - DNA, 25 bp, Homo sapien
aaccctctgatggcttcccgggcct

SEQ ID NO: 5800874 - DNA, 25 bp, Homo sapien
cttcctcttccagtcgtccttcctt

SEQ ID NO: 5800875 - DNA, 25 bp, Homo sapien
acagagaaactgctggtttaagagg

SEQ ID NO: 5800876 - DNA, 25 bp, Homo sapien
aagaggaagacagtcaaatgtctcc

SEQ ID NO: 5800877 - DNA, 25 bp, Homo sapien
tagtgcttccttctgcttcatcatc

SEQ ID NO: 5800878 - DNA, 25 bp, Homo sapien
tcgatagtctgcttgcctcctgaga

SEQ ID NO: 5800879 - DNA, 25 bp, Homo sapien
ctcctcagcggtgtccgagcaccag

SEQ ID NO: 5800880 - DNA, 25 bp, Homo sapien
ttcccaatggctctgatcttattcc

SEQ ID NO: 5800881 - DNA, 25 bp, Homo sapien
actgtagaaataagagcaccctcgg

SEQ ID NO: 5800882 - DNA, 25 bp, Homo sapien
ttgttatagacatctaggtaattgg

SEQ ID NO: 5800883 - DNA, 25 bp, Homo sapien
tcccttggtcgctcctgtgcgcagc

SEQ ID NO: 5800884 - DNA, 25 bp, Homo sapien
agaccaaagcaggtcacacacaggt

SEQ ID NO: 5800885 - DNA, 25 bp, Homo sapien
gtgtccgagcaccagaagggcgcgg

SEQ ID NO: 5800886 - DNA, 25 bp, Homo sapien
acgaactgtagtgcttccttctgct

SEQ ID NO: 5800887 - DNA, 25 bp, Homo sapien
tagaaataagagcaccctcggacag

SEQ ID NO: 5800888 - DNA, 25 bp, Homo sapien
tcattgccataatcctctgagggat

SEQ ID NO: 5800889 - DNA, 25 bp, Homo sapien
agcaccctcggacagtgttgtgggt

SEQ ID NO: 5800890 - DNA, 25 bp, Homo sapien
agatccacctgagccacggcaggac

SEQ ID NO: 5800891 - DNA, 25 bp, Homo sapien
ccgagcaccagaagggcgcggccac

SEQ ID NO: 5800892 - DNA, 25 bp, Homo sapien
ttctcctcgggcagccttagctgcc

SEQ ID NO: 5800893 - DNA, 25 bp, Homo sapien
catagtcttctcttgcctcaggatg

SEQ ID NO: 5800894 - DNA, 25 bp, Homo sapien
tacattcgatacccagcatcttggg

SEQ ID NO: 5800895 - DNA, 25 bp, Homo sapien
ccctcggcctcctccaggctccagg

SEQ ID NO: 5800896 - DNA, 25 bp, Homo sapien
tcatatttcaacacagcagctttat

SEQ ID NO: 5800897 - DNA, 25 bp, Homo sapien
ttaccagcatctctgtgactttttc

SEQ ID NO: 5800898 - DNA, 25 bp, Homo sapien
caagacttcacaaatgtgttgacaa

SEQ ID NO: 5800899 - DNA, 25 bp, Homo sapien
gcctgtgggagtcaggcccttgaga

SEQ ID NO: 5800900 - DNA, 25 bp, Homo sapien
gctttgatgacgcggtcggtggtgg

SEQ ID NO: 5800901 - DNA, 25 bp, Homo sapien
tcatacacctgttccgaatatttga

SEQ ID NO: 5800902 - DNA, 25 bp, Homo sapien
cacatagtcacccagaaagaggtag

SEQ ID NO: 5800903 - DNA, 25 bp, Homo sapien
aggggacagctttgatgacgcggtc

SEQ ID NO: 5800904 - DNA, 25 bp, Homo sapien
tccgtaaacctgtctaatttcctaa

SEQ ID NO: 5800905 - DNA, 25 bp, Homo sapien
cctacgccgcggccgccgccttctc

SEQ ID NO: 5800906 - DNA, 25 bp, Homo sapien
agttttagatccacctgagccacgg

SEQ ID NO: 5800907 - DNA, 25 bp, Homo sapien
gccaccgcagcgccggcctccgacg

SEQ ID NO: 5800908 - DNA, 25 bp, Homo sapien
gtcttctcttgcctcaggatggcag

SEQ ID NO: 5800909 - DNA, 25 bp, Homo sapien
taaagaagtaatttcaggtgacatt

SEQ ID NO: 5800910 - DNA, 25 bp, Homo sapien
tcggggtggcattcgctcattaatt

SEQ ID NO: 5800911 - DNA, 25 bp, Homo sapien
atatttcaacacagcagctttattg

SEQ ID NO: 5800912 - DNA, 25 bp, Homo sapien
tccgaatatttgattcgacattcct

SEQ ID NO: 5800913 - DNA, 25 bp, Homo sapien
ccggcctccgacgccactgacagga

SEQ ID NO: 5800914 - DNA, 25 bp, Homo sapien
ttgttctgcaaaaattcacaaactg

SEQ ID NO: 5800915 - DNA, 25 bp, Homo sapien
agcgcctcccggacatggtcccctc

SEQ ID NO: 5800916 - DNA, 25 bp, Homo sapien
ggctccaggagcccgccggacgtgc

SEQ ID NO: 5800917 - DNA, 25 bp, Homo sapien
ctgaagcgagaaccctctgatggct

SEQ ID NO: 5800918 - DNA, 25 bp, Homo sapien
cagcatctctgtgactttttcccca

SEQ ID NO: 5800919 - DNA, 25 bp, Homo sapien
tagtctgcttgcctcctgagaggac

SEQ ID NO: 5800920 - DNA, 25 bp, Homo sapien
cagctttattgttatagacatctag

SEQ ID NO: 5800921 - DNA, 25 bp, Homo sapien
gagggatcagaccaaagcaggtcac

SEQ ID NO: 5800922 - DNA, 25 bp, Homo sapien
ccatgtacacagagaaactgctggt

SEQ ID NO: 5800923 - DNA, 25 bp, Homo sapien
gctgctcgcggcccgggccctcgtg

SEQ ID NO: 5800924 - DNA, 25 bp, Homo sapien
cgaatatttgattcgacattcctgt

SEQ ID NO: 5800925 - DNA, 25 bp, Homo sapien
ggcagccccatcattgattatcttt

SEQ ID NO: 5800926 - DNA, 25 bp, Homo sapien
ctactgtggctgtctcgatagtctg

SEQ ID NO: 5800927 - DNA, 25 bp, Homo sapien
ttattcctgatgatctccttacgaa

SEQ ID NO: 5800928 - DNA, 25 bp, Homo sapien
gtgcttccttctgcttcatcatcag

SEQ ID NO: 5800929 - DNA, 25 bp, Homo sapien
tattgttatagacatctaggtaatt

SEQ ID NO: 5800930 - DNA, 25 bp, Homo sapien
taggtttcccattctcaaatacttc

SEQ ID NO: 5800931 - DNA, 25 bp, Homo sapien
tgagaggacgcccagagggagtgtg

SEQ ID NO: 5800932 - DNA, 25 bp, Homo sapien
atacacctgttccgaatatttgatt

SEQ ID NO: 5800933 - DNA, 25 bp, Homo sapien
atcctttcggggtggcattcgctca

SEQ ID NO: 5800934 - DNA, 25 bp, Homo sapien
aattgtccatgaatatcaccacata

SEQ ID NO: 5800935 - DNA, 25 bp, Homo sapien
gagccacggcaggactctaagtcat

SEQ ID NO: 5800936 - DNA, 25 bp, Homo sapien
cgggacagccgcggctgctcgcggc

SEQ ID NO: 5800937 - DNA, 25 bp, Homo sapien
aagcctgtggcttggctcttcctgt

SEQ ID NO: 5800938 - DNA, 25 bp, Homo sapien
cgcggctgctcgcggcccgggccct

SEQ ID NO: 5800939 - DNA, 25 bp, Homo sapien
gaaagtaagccgttgggttggagga

SEQ ID NO: 5800940 - DNA, 25 bp, Homo sapien
aaaaacaaaacagatgcacttttta

SEQ ID NO: 5800941 - DNA, 25 bp, Homo sapien
gccagtaggggtgtggagaacagtt

SEQ ID NO: 5800942 - DNA, 25 bp, Homo sapien
attaaaagaatttataaaacagtca

SEQ ID NO: 5800943 - DNA, 25 bp, Homo sapien
gccacggcaggactctaagtcatga

SEQ ID NO: 5800944 - DNA, 25 bp, Homo sapien
agtcagcacactctcactttcttgc

SEQ ID NO: 5800945 - DNA, 25 bp, Homo sapien
cgatacccagcatcttgggcttcat

SEQ ID NO: 5800946 - DNA, 25 bp, Homo sapien
attattgttctgcaaaaattcacaa

SEQ ID NO: 5800947 - DNA, 25 bp, Homo sapien
gtgggagtcaggcccttgagagtca

SEQ ID NO: 5800948 - DNA, 25 bp, Homo sapien
ggcagcaagaggaagacagtcaaat

SEQ ID NO: 5800949 - DNA, 25 bp, Homo sapien
tgaaatagtctgtaagatgcctgca

SEQ ID NO: 5800950 - DNA, 25 bp, Homo sapien
gcggccgccgccttctcctcgggca

SEQ ID NO: 5800951 - DNA, 25 bp, Homo sapien
attgggggcagagaaaattgtaata

SEQ ID NO: 5800952 - DNA, 25 bp, Homo sapien
aactgcctgatattcatgacattgt

SEQ ID NO: 5800953 - DNA, 25 bp, Homo sapien
aaattgtaataagtgatggaaagcc

SEQ ID NO: 5800954 - DNA, 25 bp, Homo sapien
tcttgcctcaggatggcagccccat

SEQ ID NO: 5800955 - DNA, 25 bp, Homo sapien
gcatctacttctatcatagtcttct

SEQ ID NO: 5800956 - DNA, 25 bp, Homo sapien
gcattcgctcattaattcggtccag

SEQ ID NO: 5800957 - DNA, 25 bp, Homo sapien
ctgtggcttggctcttcctgtacat

SEQ ID NO: 5800958 - DNA, 25 bp, Homo sapien
ccaccggccgctctcttgggaggcg

SEQ ID NO: 5800959 - DNA, 25 bp, Homo sapien
cggggaacaccgcttcggcaccgac

SEQ ID NO: 5800960 - DNA, 25 bp, Homo sapien
gtggtggagaggtggaagcgcctcc

SEQ ID NO: 5800961 - DNA, 25 bp, Homo sapien
acctgagccacggcaggactctaag

SEQ ID NO: 5800962 - DNA, 25 bp, Homo sapien
taaggctacttcctcttccagtcgt

SEQ ID NO: 5800963 - DNA, 25 bp, Homo sapien
ataacttcattaggtcaaagaattg

SEQ ID NO: 5800964 - DNA, 25 bp, Homo sapien
aatatttgattcgacattcctgttt

SEQ ID NO: 5800965 - DNA, 25 bp, Homo sapien
cactttcttgccgaagaattgaaaa

SEQ ID NO: 5800966 - DNA, 25 bp, Homo sapien
cattggcccaccagcgtgtatgcta

SEQ ID NO: 5800967 - DNA, 25 bp, Homo sapien
ataagtgatggaaagcctgtggctt

SEQ ID NO: 5800968 - DNA, 25 bp, Homo sapien
ccctttatagcacaagacttcacaa

SEQ ID NO: 5800969 - DNA, 25 bp, Homo sapien
aagaggtagcgtgtgttactaggtg

SEQ ID NO: 5800970 - DNA, 25 bp, Homo sapien
agaggacgcccagagggagtgtgcc

SEQ ID NO: 5800971 - DNA, 25 bp, Homo sapien
gagccgtcagccagccgtgcccggc

SEQ ID NO: 5800972 - DNA, 25 bp, Homo sapien
gcagggtaactgtagaaataagagc

SEQ ID NO: 5800973 - DNA, 25 bp, Homo sapien
ggctttcttcccttggtcgctcctg

SEQ ID NO: 5800974 - DNA, 25 bp, Homo sapien
gctttattgttatagacatctaggt

SEQ ID NO: 5800975 - DNA, 25 bp, Homo sapien
tgaattataaatgcacctccaggtt

SEQ ID NO: 5800976 - DNA, 25 bp, Homo sapien
cgcctacgccgcggccgccgccttc

SEQ ID NO: 5800977 - DNA, 25 bp, Homo sapien
tatctttaaggctacttcctcttcc

SEQ ID NO: 5800978 - DNA, 25 bp, Homo sapien
catacaggcatcatacacctgttcc

SEQ ID NO: 5800979 - DNA, 25 bp, Homo sapien
atactgtgattggagcatctacttc

SEQ ID NO: 5800980 - DNA, 25 bp, Homo sapien
gacctcgcgcttcttcaaaactccg

SEQ ID NO: 5800981 - DNA, 25 bp, Homo sapien
tcctctgagggatcagaccaaagca

SEQ ID NO: 5800982 - DNA, 25 bp, Homo sapien
tgaaaacatccataaagtttggaag

SEQ ID NO: 5800983 - DNA, 25 bp, Homo sapien
cagagggagtgtgcctgtgggagtc

SEQ ID NO: 5800984 - DNA, 25 bp, Homo sapien
aattataaatgcacctccaggttga

SEQ ID NO: 5800985 - DNA, 25 bp, Homo sapien
caatggctctgatcttattcctgat

SEQ ID NO: 5800986 - DNA, 25 bp, Homo sapien
ctgcctgatattcatgacattgttt

SEQ ID NO: 5800987 - DNA, 25 bp, Homo sapien
ccgccggacgtgcgcctacgccgcg

SEQ ID NO: 5800988 - DNA, 25 bp, Homo sapien
atttcaggtgacattcctccatgta

SEQ ID NO: 5800989 - DNA, 25 bp, Homo sapien
catgggctctgataattgatagtaa

SEQ ID NO: 5800990 - DNA, 25 bp, Homo sapien
tcttcccaatggctctgatcttatt

SEQ ID NO: 5800991 - DNA, 25 bp, Homo sapien
cgcggtcggtggtggagaggtggaa

SEQ ID NO: 5800992 - DNA, 25 bp, Homo sapien
agaaatcagttcgtcatcagagcat

SEQ ID NO: 5800993 - DNA, 25 bp, Homo sapien
gatggcttcccgggcctctaccgct

SEQ ID NO: 5800994 - DNA, 25 bp, Homo sapien
gtgatcctccaacttcaaataactt

SEQ ID NO: 5800995 - DNA, 25 bp, Homo sapien
ccaggttgaagttgttttgagttgc

SEQ ID NO: 5800996 - DNA, 25 bp, Homo sapien
tttacagaataaatgcagactgaat

SEQ ID NO: 5800997 - DNA, 25 bp, Homo sapien
cctcagcggtgtccgagcaccagaa

SEQ ID NO: 5800998 - DNA, 25 bp, Homo sapien
ggctaaggcggggaacaccgcttcg

SEQ ID NO: 5800999 - DNA, 25 bp, Homo sapien
aaaggcaaagaccatgtgaaaacat

SEQ ID NO: 5801000 - DNA, 25 bp, Homo sapien
catgaatgggctttcttcccttggt

SEQ ID NO: 5801001 - DNA, 25 bp, Homo sapien
cagtgttgtgggtatagtgctccaa

SEQ ID NO: 5801002 - DNA, 25 bp, Homo sapien
aaatgcacctccaggttgaagttgt

SEQ ID NO: 5801003 - DNA, 25 bp, Homo sapien
aacctgtctaatttcctaatgtcat

SEQ ID NO: 5801004 - DNA, 25 bp, Homo sapien
atttaccagcatctctgtgactttt

SEQ ID NO: 5801005 - DNA, 25 bp, Homo sapien
atcatcagaaatcagttcgtcatca

SEQ ID NO: 5801006 - DNA, 25 bp, Homo sapien
tgggggcagagaaaattgtaataag

SEQ ID NO: 5801007 - DNA, 25 bp, Homo sapien
ggtttaagagggcagcaagaggaag

SEQ ID NO: 5801008 - DNA, 25 bp, Homo sapien
ggtagcgtgtgttactaggtgatcc

SEQ ID NO: 5801009 - DNA, 25 bp, Homo sapien
acagcacacactctatactgaaata

SEQ ID NO: 5801010 - DNA, 25 bp, Homo sapien
cgcttcggcaccgacctcgaccgct

SEQ ID NO: 5801011 - DNA, 25 bp, Homo sapien
gtcatctaaagaagtaatttcaggt

SEQ ID NO: 5801012 - DNA, 25 bp, Homo sapien
tcaaataacttcattaggtcaaaga

SEQ ID NO: 5801013 - DNA, 25 bp, Homo sapien
gggtgtggagaacagttaaactgcc

SEQ ID NO: 5801014 - DNA, 25 bp, Homo sapien
gcttgcctcctgagaggacgcccag

SEQ ID NO: 5801015 - DNA, 25 bp, Homo sapien
gcttctactgtggctgtctcgatag

SEQ ID NO: 5801016 - DNA, 25 bp, Homo sapien
tgaagttgttttgagttgcttttca

SEQ ID NO: 5801017 - DNA, 25 bp, Homo sapien
tgccataatcctctgagggatcaga

SEQ ID NO: 5801018 - DNA, 25 bp, Homo sapien
gtgctccaaggtcttctcattgcca

SEQ ID NO: 5801019 - DNA, 25 bp, Homo sapien
cctgtctaatttcctaatgtcatct

SEQ ID NO: 5801020 - DNA, 25 bp, Homo sapien
tcgaccgctgctaagggtggcgacc

SEQ ID NO: 5801021 - DNA, 25 bp, Homo sapien
tgcaaaaattcacaaactgcagggt

SEQ ID NO: 5801022 - DNA, 25 bp, Homo sapien
cagaaagaggtagcgtgtgttacta

SEQ ID NO: 5801023 - DNA, 25 bp, Homo sapien
tgcttcatcatcagaaatcagttcg

SEQ ID NO: 5801024 - DNA, 25 bp, Homo sapien
cagtaggggtgtggagaacagttaa

SEQ ID NO: 5801025 - DNA, 25 bp, Homo sapien
ttgcctcctgagaggacgcccagag

SEQ ID NO: 5801026 - DNA, 25 bp, Homo sapien
ccgcggccgccgccttctcctcggg

SEQ ID NO: 5801027 - DNA, 25 bp, Homo sapien
aatgggctttcttcccttggtcgct

SEQ ID NO: 5801028 - DNA, 25 bp, Homo sapien
tccttgaaagtaagccgttgggttg

SEQ ID NO: 5801029 - DNA, 25 bp, Homo sapien
aaaattcacaaactgcagggtaact

SEQ ID NO: 5801030 - DNA, 25 bp, Homo sapien
gaaagcctgtggcttggctcttcct

SEQ ID NO: 5801031 - DNA, 25 bp, Homo sapien
ggtggcattcgctcattaattcggt

SEQ ID NO: 5801032 - DNA, 25 bp, Homo sapien
cggctgctcgcggcccgggccctcg

SEQ ID NO: 5801033 - DNA, 25 bp, Homo sapien
ccttggtcgctcctgtgcgcagcat

SEQ ID NO: 5801034 - DNA, 25 bp, Homo sapien
tgctgaagcgagaaccctctgatgg

SEQ ID NO: 5801035 - DNA, 25 bp, Homo sapien
aagtgatggaaagcctgtggcttgg

SEQ ID NO: 5801036 - DNA, 25 bp, Homo sapien
cccgggcctctaccgcttctactgt

SEQ ID NO: 5801037 - DNA, 25 bp, Homo sapien
tgattggagcatctacttctatcat

SEQ ID NO: 5801038 - DNA, 25 bp, Homo sapien
tttcccattctcaaatacttccttg

SEQ ID NO: 5801039 - DNA, 25 bp, Homo sapien
tcagccagccgtgcccggccccggc

SEQ ID NO: 5801040 - DNA, 25 bp, Homo sapien
ggtccagacctcgcgcttcttcaaa

SEQ ID NO: 5801041 - DNA, 25 bp, Homo sapien
cctaatgtcatctaaagaagtaatt

SEQ ID NO: 5801042 - DNA, 25 bp, Homo sapien
atagcctctgtccacatagtcaccc

SEQ ID NO: 5801043 - DNA, 25 bp, Homo sapien
gcggctaaggcggggaacaccgctt

SEQ ID NO: 5801044 - DNA, 25 bp, Homo sapien
aagggtggcgaccgggacagccgcg

SEQ ID NO: 5801045 - DNA, 25 bp, Homo sapien
gggagtgtgcctgtgggagtcaggc

SEQ ID NO: 5801046 - DNA, 25 bp, Homo sapien
agcatcttgggcttcatgggctctg

SEQ ID NO: 5801047 - DNA, 25 bp, Homo sapien
agaaactgctggtttaagagggcag

SEQ ID NO: 5801048 - DNA, 25 bp, Homo sapien
ttggcccaccagcgtgtatgctatc

SEQ ID NO: 5801049 - DNA, 25 bp, Homo sapien
taaagtttggaagccagtaggggtg

SEQ ID NO: 5801050 - DNA, 25 bp, Homo sapien
cggtgtccgagcaccagaagggcgc

SEQ ID NO: 5801051 - DNA, 25 bp, Homo sapien
ttgggatgattaatctttaaactcc

SEQ ID NO: 5801052 - DNA, 25 bp, Homo sapien
ctgcattcatgatttccccgaagca

SEQ ID NO: 5801053 - DNA, 25 bp, Homo sapien
aggtgatcctccaacttcaaataac

SEQ ID NO: 5801054 - DNA, 25 bp, Homo sapien
attgattatctttaaggctacttcc

SEQ ID NO: 5801055 - DNA, 25 bp, Homo sapien
ttatagcacaagacttcacaaatgt

SEQ ID NO: 5801056 - DNA, 25 bp, Homo sapien
aggtcttctcattgccataatcctc

SEQ ID NO: 5801057 - DNA, 25 bp, Homo sapien
atgatttccccgaagcagaaacaat

SEQ ID NO: 5801058 - DNA, 25 bp, Homo sapien
cttgtgctgaagcgagaaccctctg

SEQ ID NO: 5801059 - DNA, 25 bp, Homo sapien
ttttgagttgcttttcattttccaa

SEQ ID NO: 5801060 - DNA, 25 bp, Homo sapien
tgctatcctttcggggtggcattcg

SEQ ID NO: 5801061 - DNA, 25 bp, Homo sapien
cttgggaggcgccagcggctaaggc

SEQ ID NO: 5801062 - DNA, 25 bp, Homo sapien
aactgcagggtaactgtagaaataa

SEQ ID NO: 5801063 - DNA, 25 bp, Homo sapien
catatgttgagcacatttaccagca

SEQ ID NO: 5801064 - DNA, 25 bp, Homo sapien
tgattatctttaaggctacttcctc

SEQ ID NO: 5801065 - DNA, 25 bp, Homo sapien
gatagtctgcttgcctcctgagagg

SEQ ID NO: 5801066 - DNA, 25 bp, Homo sapien
aaataaatagaatttgttcttgagt

SEQ ID NO: 5801067 - DNA, 25 bp, Homo sapien
ttagatccacctgagccacggcagg

SEQ ID NO: 5801068 - DNA, 25 bp, Homo sapien
tgtaagatgcctgcattcatgattt

SEQ ID NO: 5801069 - DNA, 25 bp, Homo sapien
tccataaagtttggaagccagtagg

SEQ ID NO: 5801070 - DNA, 25 bp, Homo sapien
cccggagccgtcagccagccgtgcc

SEQ ID NO: 5801071 - DNA, 25 bp, Homo sapien
gaagcgagaaccctctgatggcttc

SEQ ID NO: 5801072 - DNA, 25 bp, Homo sapien
gcagcgccggcctccgacgccactg

SEQ ID NO: 5801073 - DNA, 25 bp, Homo sapien
acccgtgccatcttcccaatggctc

SEQ ID NO: 5801074 - DNA, 25 bp, Homo sapien
ctctgatggcttcccgggcctctac

SEQ ID NO: 5801075 - DNA, 25 bp, Homo sapien
tgcccggagccgtcagccagccgtg

SEQ ID NO: 5801076 - DNA, 25 bp, Homo sapien
aaaacagtcacctttttacagaata

SEQ ID NO: 5801077 - DNA, 25 bp, Homo sapien
tccgacgccactgacaggacgaggg

SEQ ID NO: 5801078 - DNA, 25 bp, Homo sapien
tagcgtgtgttactaggtgatcctc

SEQ ID NO: 5801079 - DNA, 25 bp, Homo sapien
actgaattataaatgcacctccagg

SEQ ID NO: 5801080 - DNA, 25 bp, Homo sapien
caaactgcagggtaactgtagaaat

SEQ ID NO: 5801081 - DNA, 25 bp, Homo sapien
caccgacctcgaccgctgctaaggg

SEQ ID NO: 5801082 - DNA, 25 bp, Homo sapien
cattcgatacccagcatcttgggct

SEQ ID NO: 5801083 - DNA, 25 bp, Homo sapien
tgggttggaggaaaggggacagctt

SEQ ID NO: 5801084 - DNA, 25 bp, Homo sapien
acagccgcggctgctcgcggcccgg

SEQ ID NO: 5801085 - DNA, 25 bp, Homo sapien
tcctccatgtacacagagaaactgc

SEQ ID NO: 5801086 - DNA, 25 bp, Homo sapien
gaagaattgaaaagacccgtgccat

SEQ ID NO: 5801087 - DNA, 25 bp, Homo sapien
gaggttacagatttcattggcccac

SEQ ID NO: 5801088 - DNA, 25 bp, Homo sapien
cttctgcttcatcatcagaaatcag

SEQ ID NO: 5801089 - DNA, 25 bp, Homo sapien
atacccagcatcttgggcttcatgg

SEQ ID NO: 5801090 - DNA, 25 bp, Homo sapien
tcatgatttccccgaagcagaaaca

SEQ ID NO: 5801091 - DNA, 25 bp, Homo sapien
gatttccccgaagcagaaacaatgt

SEQ ID NO: 5801092 - DNA, 25 bp, Homo sapien
cggccgctctcttgggaggcgccag

SEQ ID NO: 5801093 - DNA, 25 bp, Homo sapien
tgtacattcgatacccagcatcttg

SEQ ID NO: 5801094 - DNA, 25 bp, Homo sapien
ttgagcacatttaccagcatctctg

SEQ ID NO: 5801095 - DNA, 25 bp, Homo sapien
caggcatcatacacctgttccgaat

SEQ ID NO: 5801096 - DNA, 25 bp, Homo sapien
ggcagagaaaattgtaataagtgat

SEQ ID NO: 5801097 - DNA, 25 bp, Homo sapien
gaagtaatttcaggtgacattcctc

SEQ ID NO: 5801098 - DNA, 25 bp, Homo sapien
gacgcggtcggtggtggagaggtgg

SEQ ID NO: 5801099 - DNA, 25 bp, Homo sapien
aattcacaaactgcagggtaactgt

SEQ ID NO: 5801100 - DNA, 25 bp, Homo sapien
ggcggggaacaccgcttcggcaccg

SEQ ID NO: 5801101 - DNA, 25 bp, Homo sapien
cttcggcaccgacctcgaccgctgc

SEQ ID NO: 5801102 - DNA, 25 bp, Homo sapien
ttcattggcccaccagcgtgtatgc

SEQ ID NO: 5801103 - DNA, 25 bp, Homo sapien
taatttcctaatgtcatctaaagaa

SEQ ID NO: 5801104 - DNA, 25 bp, Homo sapien
tcgctcctgtgcgcagcatgtgagt

SEQ ID NO: 5801105 - DNA, 25 bp, Homo sapien
gggcttcatgggctctgataattga

SEQ ID NO: 5801106 - DNA, 25 bp, Homo sapien
attaggtcaaagaattgtccatgaa

SEQ ID NO: 5801107 - DNA, 25 bp, Homo sapien
aacttcattaggtcaaagaattgtc

SEQ ID NO: 5801108 - DNA, 25 bp, Homo sapien
cacactctcactttcttgccgaaga

SEQ ID NO: 5801109 - DNA, 25 bp, Homo sapien
accagaagggcgcggccaccgcagc

SEQ ID NO: 5801110 - DNA, 25 bp, Homo sapien
cttcatcatcagaaatcagttcgtc

SEQ ID NO: 5801111 - DNA, 25 bp, Homo sapien
aaaacagatgcactttttatatata

SEQ ID NO: 5801112 - DNA, 25 bp, Homo sapien
gcctgatattcatgacattgttttc

SEQ ID NO: 5801113 - DNA, 25 bp, Homo sapien
gttctgcaaaaattcacaaactgca

SEQ ID NO: 5801114 - DNA, 25 bp, Homo sapien
catcagagcatatgttgagcacatt

SEQ ID NO: 5801115 - DNA, 25 bp, Homo sapien
attggagcatctacttctatcatag

SEQ ID NO: 5801116 - DNA, 25 bp, Homo sapien
ggatggcagccccatcattgattat

SEQ ID NO: 5801117 - DNA, 25 bp, Homo sapien
gcaccagaagggcgcggccaccgca

SEQ ID NO: 5801118 - DNA, 25 bp, Homo sapien
tccccgaagcagaaacaatgttttg

SEQ ID NO: 5801119 - DNA, 25 bp, Homo sapien
ttcccgggcctctaccgcttctact

SEQ ID NO: 5801120 - DNA, 25 bp, Homo sapien
tgcgcctacgccgcggccgccgcct

SEQ ID NO: 5801121 - DNA, 25 bp, Homo sapien
ggggcagagaaaattgtaataagtg

SEQ ID NO: 5801122 - DNA, 25 bp, Homo sapien
cttctcattgccataatcctctgag

SEQ ID NO: 5801123 - DNA, 25 bp, Homo sapien
tagctgcccggagccgtcagccagc

SEQ ID NO: 5801124 - DNA, 25 bp, Homo sapien
cgccggcctccgacgccactgacag

SEQ ID NO: 5801125 - DNA, 25 bp, Homo sapien
ttgagttgcttttcattttccaata

SEQ ID NO: 5801126 - DNA, 25 bp, Homo sapien
cggtggtggagaggtggaagcgcct

SEQ ID NO: 5801127 - DNA, 25 bp, Homo sapien
attgccataatcctctgagggatca

SEQ ID NO: 5801128 - DNA, 25 bp, Homo sapien
cgtcagccagccgtgcccggccccg

SEQ ID NO: 5801129 - DNA, 25 bp, Homo sapien
ggcccttgagagtcagcacactctc

SEQ ID NO: 5801130 - DNA, 25 bp, Homo sapien
agagcatatgttgagcacatttacc

SEQ ID NO: 5801131 - DNA, 25 bp, Homo sapien
cgagaaccctctgatggcttcccgg

SEQ ID NO: 5801132 - DNA, 25 bp, Homo sapien
tgttttgggatgattaatctttaaa

SEQ ID NO: 5801133 - DNA, 25 bp, Homo sapien
tggcttcccgggcctctaccgcttc

SEQ ID NO: 5801134 - DNA, 25 bp, Homo sapien
ggcatcatacacctgttccgaatat

SEQ ID NO: 5801135 - DNA, 25 bp, Homo sapien
cgtaaacctgtctaatttcctaatg

SEQ ID NO: 5801136 - DNA, 25 bp, Homo sapien
caggatggcagccccatcattgatt

SEQ ID NO: 5801137 - DNA, 25 bp, Homo sapien
tgggtatagtgctccaaggtcttct

SEQ ID NO: 5801138 - DNA, 25 bp, Homo sapien
gaggaaaggggacagctttgatgac

SEQ ID NO: 5801139 - DNA, 25 bp, Homo sapien
caaatgtctccatacaggcatcata

SEQ ID NO: 5801140 - DNA, 25 bp, Homo sapien
ctccggatcttgtgctgaagcgaga

SEQ ID NO: 5801141 - DNA, 25 bp, Homo sapien
ccgcttctactgtggctgtctcgat

SEQ ID NO: 5801142 - DNA, 25 bp, Homo sapien
tagtcacccagaaagaggtagcgtg

SEQ ID NO: 5801143 - DNA, 25 bp, Homo sapien
gccgtcagccagccgtgcccggccc

SEQ ID NO: 5801144 - DNA, 25 bp, Homo sapien
taagagggcagcaagaggaagacag

SEQ ID NO: 5801145 - DNA, 25 bp, Homo sapien
agcacactctcactttcttgccgaa

SEQ ID NO: 5801146 - DNA, 25 bp, Homo sapien
tgaggtttccaaggcccttttatta

SEQ ID NO: 5801147 - DNA, 25 bp, Homo sapien
ggacatggtcccctcggcctcctcc

SEQ ID NO: 5801148 - DNA, 25 bp, Homo sapien
gagtgtgcctgtgggagtcaggccc

SEQ ID NO: 5801149 - DNA, 25 bp, Homo sapien
gaaataagagcaccctcggacagtg

SEQ ID NO: 5801150 - DNA, 25 bp, Homo sapien
gcacctccaggttgaagttgttttg

SEQ ID NO: 5801151 - DNA, 25 bp, Homo sapien
caccacatactgtgattggagcatc

SEQ ID NO: 5801152 - DNA, 25 bp, Homo sapien
gcttcccgggcctctaccgcttcta

SEQ ID NO: 5801153 - DNA, 25 bp, Homo sapien
gtgcgcagcatgtgagtgtgctgag

SEQ ID NO: 5801154 - DNA, 25 bp, Homo sapien
ggccgccgccttctcctcgggcagc

SEQ ID NO: 5801155 - DNA, 25 bp, Homo sapien
ccttacgaactgtagtgcttccttc

SEQ ID NO: 5801156 - DNA, 25 bp, Homo sapien
atccacctgagccacggcaggactc

SEQ ID NO: 5801157 - DNA, 25 bp, Homo sapien
atacagcacacactctatactgaaa

SEQ ID NO: 5801158 - DNA, 25 bp, Homo sapien
cccttgagagtcagcacactctcac

SEQ ID NO: 5801159 - DNA, 25 bp, Homo sapien
ctccatgtacacagagaaactgctg

SEQ ID NO: 5801160 - DNA, 25 bp, Homo sapien
aaaacatccataaagtttggaagcc

SEQ ID NO: 5801161 - DNA, 25 bp, Homo sapien
gaacaccgcttcggcaccgacctcg

SEQ ID NO: 5801162 - DNA, 25 bp, Homo sapien
tgtagaaataagagcaccctcggac

SEQ ID NO: 5801163 - DNA, 25 bp, Homo sapien
gaagcgcctcccggacatggtcccc

SEQ ID NO: 5801164 - DNA, 25 bp, Homo sapien
atgaatatcaccacatactgtgatt

SEQ ID NO: 5801165 - DNA, 25 bp, Homo sapien
gagcacatttaccagcatctctgtg

SEQ ID NO: 5801166 - DNA, 25 bp, Homo sapien
taattcggtccagacctcgcgcttc

SEQ ID NO: 5801167 - DNA, 25 bp, Homo sapien
cgcctcccggacatggtcccctcgg

SEQ ID NO: 5801168 - DNA, 25 bp, Homo sapien
taagagcaccctcggacagtgttgt

SEQ ID NO: 5801169 - DNA, 25 bp, Homo sapien
gcaggtcacacacaggtccaaaggc

SEQ ID NO: 5801170 - DNA, 25 bp, Homo sapien
ctctgataattgatagtaaattatt

SEQ ID NO: 5801171 - DNA, 25 bp, Homo sapien
tcagcggtgtccgagcaccagaagg

SEQ ID NO: 5801172 - DNA, 25 bp, Homo sapien
tgttttgagttgcttttcattttcc

SEQ ID NO: 5801173 - DNA, 25 bp, Homo sapien
tatttgattcgacattcctgtttga

SEQ ID NO: 5801174 - DNA, 25 bp, Homo sapien
agacccgtgccatcttcccaatggc

SEQ ID NO: 5801175 - DNA, 25 bp, Homo sapien
tacttccttgaaagtaagccgttgg

SEQ ID NO: 5801176 - DNA, 25 bp, Homo sapien
tcgtcatcagagcatatgttgagca

SEQ ID NO: 5801177 - DNA, 25 bp, Homo sapien
cttagctgcccggagccgtcagcca

SEQ ID NO: 5801178 - DNA, 25 bp, Homo sapien
agcagctttattgttatagacatct

SEQ ID NO: 5801179 - DNA, 25 bp, Homo sapien
aacagatgcactttttatatatatt

SEQ ID NO: 5801180 - DNA, 25 bp, Homo sapien
gagcccgccggacgtgcgcctacgc

SEQ ID NO: 5801181 - DNA, 25 bp, Homo sapien
ggatcttgtgctgaagcgagaaccc

SEQ ID NO: 5801182 - DNA, 25 bp, Homo sapien
acttcacaaatgtgttgacaacaat

SEQ ID NO: 5801183 - DNA, 25 bp, Homo sapien
ccgctgctaagggtggcgaccggga

SEQ ID NO: 5801184 - DNA, 25 bp, Homo sapien
taggtcaaagaattgtccatgaata

SEQ ID NO: 5801185 - DNA, 25 bp, Homo sapien
tctcattgccataatcctctgaggg

SEQ ID NO: 5801186 - DNA, 25 bp, Homo sapien
tatgttgagcacatttaccagcatc

SEQ ID NO: 5801187 - DNA, 25 bp, Homo sapien
tacagaataaatgcagactgaatta

SEQ ID NO: 5801188 - DNA, 25 bp, Homo sapien
tgtgattggagcatctacttctatc

SEQ ID NO: 5801189 - DNA, 25 bp, Homo sapien
ttctcaaatacttccttgaaagtaa

SEQ ID NO: 5801190 - DNA, 25 bp, Homo sapien
tttgattcgacattcctgtttgaag

SEQ ID NO: 5801191 - DNA, 25 bp, Homo sapien
gcccgccggacgtgcgcctacgccg

SEQ ID NO: 5801192 - DNA, 25 bp, Homo sapien
ttcacaaatgtgttgacaacaatca

SEQ ID NO: 5801193 - DNA, 25 bp, Homo sapien
taggtaattgggggcagagaaaatt

SEQ ID NO: 5801194 - DNA, 25 bp, Homo sapien
ggcagccttagctgcccggagccgt

SEQ ID NO: 5801195 - DNA, 25 bp, Homo sapien
tcagcacactctcactttcttgccg

SEQ ID NO: 5801196 - DNA, 25 bp, Homo sapien
cctgtttgaaggtgaaatagtctgt

SEQ ID NO: 5801197 - DNA, 25 bp, Homo sapien
tacgtctctactcgaatctacatca

SEQ ID NO: 5801198 - DNA, 25 bp, Homo sapien
tgatgtagattcgagtagagacgta

SEQ ID NO: 5801199 - DNA, 25 bp, Homo sapien
atgatgccgtaaagtccataaagtc

SEQ ID NO: 5801200 - DNA, 25 bp, Homo sapien
gactttatggactttacggcatcat

SEQ ID NO: 5801201 - DNA, 25 bp, Homo sapien
cggggtccaaccctcctctgcactg

SEQ ID NO: 5801202 - DNA, 25 bp, Homo sapien
cagtgcagaggagggttggaccccg

SEQ ID NO: 5801203 - DNA, 25 bp, Homo sapien
gagacactctggggcgccgtccacg

SEQ ID NO: 5801204 - DNA, 25 bp, Homo sapien
cgtggacggcgccccagagtgtctc

SEQ ID NO: 5801205 - DNA, 25 bp, Homo sapien
cgaccgaccccgtgctgtcgcgccg

SEQ ID NO: 5801206 - DNA, 25 bp, Homo sapien
cggcgcgacagcacggggtcggtcg

SEQ ID NO: 5801207 - DNA, 25 bp, Homo sapien
gatacattttgtttgtgtttttaat

SEQ ID NO: 5801208 - DNA, 25 bp, Homo sapien
attaaaaacacaaacaaaatgtatc

SEQ ID NO: 5801209 - DNA, 25 bp, Homo sapien
aaggactatttacgtcatttcacat

SEQ ID NO: 5801210 - DNA, 25 bp, Homo sapien
atgtgaaatgacgtaaatagtcctt

SEQ ID NO: 5801211 - DNA, 25 bp, Homo sapien
acgtcatttcacattggtttttaca

SEQ ID NO: 5801212 - DNA, 25 bp, Homo sapien
tgtaaaaaccaatgtgaaatgacgt

SEQ ID NO: 5801213 - DNA, 25 bp, Homo sapien
tacttcatcccaattccgcacacgc

SEQ ID NO: 5801214 - DNA, 25 bp, Homo sapien
gcgtgtgcggaattgggatgaagta

SEQ ID NO: 5801215 - DNA, 25 bp, Homo sapien
atcaatccctagagtatctaaaaat

SEQ ID NO: 5801216 - DNA, 25 bp, Homo sapien
atttttagatactctagggattgat

SEQ ID NO: 5801217 - DNA, 25 bp, Homo sapien
cgacgaatcttttgctgacaagcac

SEQ ID NO: 5801218 - DNA, 25 bp, Homo sapien
gtgcttgtcagcaaaagattcgtcg

SEQ ID NO: 5801219 - DNA, 25 bp, Homo sapien
gaaaccggcgcgagggcgcttccgg

SEQ ID NO: 5801220 - DNA, 25 bp, Homo sapien
ccggaagcgccctcgcgccggtttc

SEQ ID NO: 5801221 - DNA, 25 bp, Homo sapien
cgggcaacgaacacgacgtctcctt

SEQ ID NO: 5801222 - DNA, 25 bp, Homo sapien
aaggagacgtcgtgttcgttgcccg

SEQ ID NO: 5801223 - DNA, 25 bp, Homo sapien
aagtgtcactagagccattaagtgg

SEQ ID NO: 5801224 - DNA, 25 bp, Homo sapien
ccacttaatggctctagtgacactt

SEQ ID NO: 5801225 - DNA, 25 bp, Homo sapien
cgagcggagcttgcgccggttgtgt

SEQ ID NO: 5801226 - DNA, 25 bp, Homo sapien
acacaaccggcgcaagctccgctcg

SEQ ID NO: 5801227 - DNA, 25 bp, Homo sapien
tgaaccaaaaagtatcagggatggt

SEQ ID NO: 5801228 - DNA, 25 bp, Homo sapien
accatccctgatactttttggttca

SEQ ID NO: 5801229 - DNA, 25 bp, Homo sapien
gtaggggtggtactggaccagaaaa

SEQ ID NO: 5801230 - DNA, 25 bp, Homo sapien
ttttctggtccagtaccacccctac

SEQ ID NO: 5801231 - DNA, 25 bp, Homo sapien
actcgggactaccttcgtcgagaag

SEQ ID NO: 5801232 - DNA, 25 bp, Homo sapien
cttctcgacgaaggtagtcccgagt

SEQ ID NO: 5801233 - DNA, 25 bp, Homo sapien
tcgtcttgaatcttcgactgtagga

SEQ ID NO: 5801234 - DNA, 25 bp, Homo sapien
tcctacagtcgaagattcaagacga

SEQ ID NO: 5801235 - DNA, 25 bp, Homo sapien
tataagtgaaagtatcttaaggact

SEQ ID NO: 5801236 - DNA, 25 bp, Homo sapien
agtccttaagatactttcacttata

SEQ ID NO: 5801237 - DNA, 25 bp, Homo sapien
cactgacatgaagtgatacttgacg

SEQ ID NO: 5801238 - DNA, 25 bp, Homo sapien
cgtcaagtatcacttcatgtcagtg

SEQ ID NO: 5801239 - DNA, 25 bp, Homo sapien
aaggatttggaggttactcattcac

SEQ ID NO: 5801240 - DNA, 25 bp, Homo sapien
gtgaatgagtaacctccaaatcctt

SEQ ID NO: 5801241 - DNA, 25 bp, Homo sapien
aatattttgcacgatttgttatcct

SEQ ID NO: 5801242 - DNA, 25 bp, Homo sapien
aggataacaaatcgtgcaaaatatt

SEQ ID NO: 5801243 - DNA, 25 bp, Homo sapien
gccctctcgcccggcccgaggcggt

SEQ ID NO: 5801244 - DNA, 25 bp, Homo sapien
accgcctcgggccgggcgagagggc

SEQ ID NO: 5801245 - DNA, 25 bp, Homo sapien
ccctctcgcccggcccgaggcggta

SEQ ID NO: 5801246 - DNA, 25 bp, Homo sapien
taccgcctcgggccgggcgagaggg

SEQ ID NO: 5801247 - DNA, 25 bp, Homo sapien
agccctctcgcccggcccgaggcgg

SEQ ID NO: 5801248 - DNA, 25 bp, Homo sapien
ccgcctcgggccgggcgagagggct

SEQ ID NO: 5801249 - DNA, 25 bp, Homo sapien
gacgcgagccctctcgcccggcccg

SEQ ID NO: 5801250 - DNA, 25 bp, Homo sapien
cgggccgggcgagagggctcgcgtc

SEQ ID NO: 5801251 - DNA, 25 bp, Homo sapien
ttagattaatagcaatttcaatgtg

SEQ ID NO: 5801252 - DNA, 25 bp, Homo sapien
cacattgaaattgctattaatctaa

SEQ ID NO: 5801253 - DNA, 25 bp, Homo sapien
agattagattaatagcaatttcaat

SEQ ID NO: 5801254 - DNA, 25 bp, Homo sapien
attgaaattgctattaatctaatct

SEQ ID NO: 5801255 - DNA, 25 bp, Homo sapien
aagagtacattacttgaactaagac

SEQ ID NO: 5801256 - DNA, 25 bp, Homo sapien
gtcttagttcaagtaatgtactctt

SEQ ID NO: 5801257 - DNA, 25 bp, Homo sapien
tcggcgccacggtcgccacggtcgg

SEQ ID NO: 5801258 - DNA, 25 bp, Homo sapien
ccgaccgtggcgaccgtggcgccga

SEQ ID NO: 5801259 - DNA, 25 bp, Homo sapien
cttctacaattaggatgaacgtaat

SEQ ID NO: 5801260 - DNA, 25 bp, Homo sapien
attacgttcatcctaattgtagaag

SEQ ID NO: 5801261 - DNA, 25 bp, Homo sapien
atcttggaagaacttttcgtcgccg

SEQ ID NO: 5801262 - DNA, 25 bp, Homo sapien
cggcgacgaaaagttcttccaagat

SEQ ID NO: 5801263 - DNA, 25 bp, Homo sapien
aaacctatgatggacaccggtgtga

SEQ ID NO: 5801264 - DNA, 25 bp, Homo sapien
tcacaccggtgtccatcataggttt

SEQ ID NO: 5801265 - DNA, 25 bp, Homo sapien
taactgaccttgatcttacggaaat

SEQ ID NO: 5801266 - DNA, 25 bp, Homo sapien
atttccgtaagatcaaggtcagtta

SEQ ID NO: 5801267 - DNA, 25 bp, Homo sapien
aagtccctctgtcgctcaagtcgcg

SEQ ID NO: 5801268 - DNA, 25 bp, Homo sapien
cgcgacttgagcgacagagggactt

SEQ ID NO: 5801269 - DNA, 25 bp, Homo sapien
accagggccaggttcggtgtgtcct

SEQ ID NO: 5801270 - DNA, 25 bp, Homo sapien
aggacacaccgaacctggccctggt

SEQ ID NO: 5801271 - DNA, 25 bp, Homo sapien
gaggtggccttcgaggcccggaccg

SEQ ID NO: 5801272 - DNA, 25 bp, Homo sapien
cggtccgggcctcgaaggccacctc

SEQ ID NO: 5801273 - DNA, 25 bp, Homo sapien
ctgcatttcttaccgcctccctcct

SEQ ID NO: 5801274 - DNA, 25 bp, Homo sapien
aggagggaggcggtaagaaatgcag

SEQ ID NO: 5801275 - DNA, 25 bp, Homo sapien
gtggtacacgacgttgggtccattg

SEQ ID NO: 5801276 - DNA, 25 bp, Homo sapien
caatggacccaacgtcgtgtaccac

SEQ ID NO: 5801277 - DNA, 25 bp, Homo sapien
gaggacaggaacactcccctgagct

SEQ ID NO: 5801278 - DNA, 25 bp, Homo sapien
agctcaggggagtgttcctgtcctc

SEQ ID NO: 5801279 - DNA, 25 bp, Homo sapien
cctcggtcgaaaccggcagcggaat

SEQ ID NO: 5801280 - DNA, 25 bp, Homo sapien
attccgctgccggtttcgaccgagg

SEQ ID NO: 5801281 - DNA, 25 bp, Homo sapien
ggtgggtcaaggtggcaggggccgt

SEQ ID NO: 5801282 - DNA, 25 bp, Homo sapien
acggcccctgccaccttgacccacc

SEQ ID NO: 5801283 - DNA, 25 bp, Homo sapien
ggagagccaggtgaggtcccaactc

SEQ ID NO: 5801284 - DNA, 25 bp, Homo sapien
aggtcctaagcaagggacatgcaga

SEQ ID NO: 5801285 - DNA, 25 bp, Homo sapien
acttagatagctcatgcaagatgac

SEQ ID NO: 5801286 - DNA, 25 bp, Homo sapien
ctttatttcgttaccgtgagataat

SEQ ID NO: 5801287 - DNA, 25 bp, Homo sapien
gcaaccaaggcaaaaaagtgtcaat

SEQ ID NO: 5801288 - DNA, 25 bp, Homo sapien
acagcaggaggtgacagacacttta

SEQ ID NO: 5801289 - DNA, 25 bp, Homo sapien
atagctcatgcaagatgacaacaca

SEQ ID NO: 5801290 - DNA, 25 bp, Homo sapien
ctgagcttcccagcaaccaaggcaa

SEQ ID NO: 5801291 - DNA, 25 bp, Homo sapien
cagtcacactcttcacaagtgcctg

SEQ ID NO: 5801292 - DNA, 25 bp, Homo sapien
cagccggaaagataagggagagcca

SEQ ID NO: 5801293 - DNA, 25 bp, Homo sapien
aaggcaaaaaagtgtcaatcagtca

SEQ ID NO: 5801294 - DNA, 25 bp, Homo sapien
ggcaaaaaagtgtcaatcagtcaca

SEQ ID NO: 5801295 - DNA, 25 bp, Homo sapien
aggggagatctgagcttcccagcaa

SEQ ID NO: 5801296 - DNA, 25 bp, Homo sapien
caactccaagtacaccatgggaggt

SEQ ID NO: 5801297 - DNA, 25 bp, Homo sapien
aggtcccaactccaagtacaccatg

SEQ ID NO: 5801298 - DNA, 25 bp, Homo sapien
agctcatgcaagatgacaacacagc

SEQ ID NO: 5801299 - DNA, 25 bp, Homo sapien
aagccacgcccttcgttagtcttac

SEQ ID NO: 5801300 - DNA, 25 bp, Homo sapien
gtaagactaacgaagggcgtggctt

SEQ ID NO: 5801301 - DNA, 25 bp, Homo sapien
gagggaccgtactcagacctcaggc

SEQ ID NO: 5801302 - DNA, 25 bp, Homo sapien
gcctgaggtctgagtacggtccctc

SEQ ID NO: 5801303 - DNA, 25 bp, Homo sapien
gaggttccgtatattgtttaaatag

SEQ ID NO: 5801304 - DNA, 25 bp, Homo sapien
ctatttaaacaatatacggaacctc

SEQ ID NO: 5801305 - DNA, 25 bp, Homo sapien
tcggatcaacgtcacactagaaggt

SEQ ID NO: 5801306 - DNA, 25 bp, Homo sapien
accttctagtgtgacgttgatccga

SEQ ID NO: 5801307 - DNA, 25 bp, Homo sapien
acagacgatgtcgaaggttatttcc

SEQ ID NO: 5801308 - DNA, 25 bp, Homo sapien
ggaaataaccttcgacatcgtctgt

SEQ ID NO: 5801309 - DNA, 25 bp, Homo sapien
gtcgagcgtcgggccccccgtgagg

SEQ ID NO: 5801310 - DNA, 25 bp, Homo sapien
cctcacggggggcccgacgctcgac

SEQ ID NO: 5801311 - DNA, 25 bp, Homo sapien
ttccatggaagggacgccgccgctg

SEQ ID NO: 5801312 - DNA, 25 bp, Homo sapien
cagcggcggcgtcccttccatggaa

SEQ ID NO: 5801313 - DNA, 25 bp, Homo sapien
acccaggggtgcgtccgcggggcag

SEQ ID NO: 5801314 - DNA, 25 bp, Homo sapien
ctgccccgcggacgcacccctgggt

SEQ ID NO: 5801315 - DNA, 25 bp, Homo sapien
ggccgcgaggcacccaggcggacgg

SEQ ID NO: 5801316 - DNA, 25 bp, Homo sapien
ccgtccgcctgggtgcctcgcggcc

SEQ ID NO: 5801317 - DNA, 25 bp, Homo sapien
acggaggccgcgaggcacccaggcg

SEQ ID NO: 5801318 - DNA, 25 bp, Homo sapien
cgcctgggtgcctcgcggcctccgt

SEQ ID NO: 5801319 - DNA, 25 bp, Homo sapien
tctctaagatattcgacggtatcat

SEQ ID NO: 5801320 - DNA, 25 bp, Homo sapien
atgataccgtcgaatatcttagaga

SEQ ID NO: 5801321 - DNA, 25 bp, Homo sapien
cggcgtgcgggcgtcggagaacgag

SEQ ID NO: 5801322 - DNA, 25 bp, Homo sapien
ctcgttctccgacgcccgcacgccg

SEQ ID NO: 5801323 - DNA, 25 bp, Homo sapien
gccctcgcgctagacgctctccggt

SEQ ID NO: 5801324 - DNA, 25 bp, Homo sapien
accggagagcgtctagcgcgagggc

SEQ ID NO: 5801325 - DNA, 25 bp, Homo sapien
actttacgaccgttggtggcatcat

SEQ ID NO: 5801326 - DNA, 25 bp, Homo sapien
atgatgccaccaacggtcgtaaagt

SEQ ID NO: 5801327 - DNA, 25 bp, Homo sapien
gcgagcctggggctgcacgcgggtc

SEQ ID NO: 5801328 - DNA, 25 bp, Homo sapien
gacccgcgtgcagccccaggctcgc

SEQ ID NO: 5801329 - DNA, 25 bp, Homo sapien
gcggcgagcctggggctgcacgcgg

SEQ ID NO: 5801330 - DNA, 25 bp, Homo sapien
ccgcgtgcagccccaggctcgccgc

SEQ ID NO: 5801331 - DNA, 25 bp, Homo sapien
agacagtctctcctggaggtgacct

SEQ ID NO: 5801332 - DNA, 25 bp, Homo sapien
aggtcacctccaggagagactgtct

SEQ ID NO: 5801333 - DNA, 25 bp, Homo sapien
gacacctatgtcaagctcaaccacg

SEQ ID NO: 5801334 - DNA, 25 bp, Homo sapien
cgtggttgagcttgacataggtgtc

SEQ ID NO: 5801335 - DNA, 25 bp, Homo sapien
gacgacacgactgcaagtcacacag

SEQ ID NO: 5801336 - DNA, 25 bp, Homo sapien
ctgtgtgacttgcagtcgtgtcgtc

SEQ ID NO: 5801337 - DNA, 25 bp, Homo sapien
gtatggcagcattttctttggaaca

SEQ ID NO: 5801338 - DNA, 25 bp, Homo sapien
attcttggtatatcaaagtaaattc

SEQ ID NO: 5801339 - DNA, 25 bp, Homo sapien
aatgcagtatggcagcattttcttt

SEQ ID NO: 5801340 - DNA, 25 bp, Homo sapien
attccaggaatgtaagaaagtctga

SEQ ID NO: 5801341 - DNA, 25 bp, Homo sapien
cattttctttggaacaaattaagaa

SEQ ID NO: 5801342 - DNA, 25 bp, Homo sapien
acagtaatcaaagcaaacattttat

SEQ ID NO: 5801343 - DNA, 25 bp, Homo sapien
tggtatatcaaagtaaattccagga

SEQ ID NO: 5801344 - DNA, 25 bp, Homo sapien
cattattattcttggtatatcaaag

SEQ ID NO: 5801345 - DNA, 25 bp, Homo sapien
aatgtaagaaagtctgacttggaaa

SEQ ID NO: 5801346 - DNA, 25 bp, Homo sapien
caggaatgtaagaaagtctgacttg

SEQ ID NO: 5801347 - DNA, 25 bp, Homo sapien
aaataacagaagaaatacttctaca

SEQ ID NO: 5801348 - DNA, 25 bp, Homo sapien
agagggaatgcagtatggcagcatt

SEQ ID NO: 5801349 - DNA, 25 bp, Homo sapien
tctgaaaagcttgtttgttttaata

SEQ ID NO: 5801350 - DNA, 25 bp, Homo sapien
acaaataacagaagaaatacttcta

SEQ ID NO: 5801351 - DNA, 25 bp, Homo sapien
ttctttggaacaaattaagaagata

SEQ ID NO: 5801352 - DNA, 25 bp, Homo sapien
catttcatctttccccccacagtaa

SEQ ID NO: 5801353 - DNA, 25 bp, Homo sapien
gacggtgagatgagtacaggaggcg

SEQ ID NO: 5801354 - DNA, 25 bp, Homo sapien
cgcctcctgtactcatctcaccgtc

SEQ ID NO: 5801355 - DNA, 25 bp, Homo sapien
cccatctacaggaggtgcacaggag

SEQ ID NO: 5801356 - DNA, 25 bp, Homo sapien
ctcctgtgcacctcctgtagatggg

SEQ ID NO: 5801357 - DNA, 25 bp, Homo sapien
agagaccgttacaggccgaactaag

SEQ ID NO: 5801358 - DNA, 25 bp, Homo sapien
cttagttcggcctgtaacggtctct

SEQ ID NO: 5801359 - DNA, 25 bp, Homo sapien
cgcgcggtgagaaacggacgccgtg

SEQ ID NO: 5801360 - DNA, 25 bp, Homo sapien
cacggcgtccgtttctcaccgcgcg

SEQ ID NO: 5801361 - DNA, 25 bp, Homo sapien
agggagcggaccaggaacactcttc

SEQ ID NO: 5801362 - DNA, 25 bp, Homo sapien
gaagagtgttcctggtccgctccct

SEQ ID NO: 5801363 - DNA, 25 bp, Homo sapien
cgtcctccgaggcctcggggcggta

SEQ ID NO: 5801364 - DNA, 25 bp, Homo sapien
taccgccccgaggcctcggaggacg

SEQ ID NO: 5801365 - DNA, 25 bp, Homo sapien
cacaccggtcgtgcttagaggtccg

SEQ ID NO: 5801366 - DNA, 25 bp, Homo sapien
cggacctctaagcacgaccggtgtg

SEQ ID NO: 5801367 - DNA, 25 bp, Homo sapien
cgactttcacggtagcggccgacga

SEQ ID NO: 5801368 - DNA, 25 bp, Homo sapien
tcgtcggccgctaccgtgaaagtcg

SEQ ID NO: 5801369 - DNA, 25 bp, Homo sapien
tctttaacgagtcacagcaatcacg

SEQ ID NO: 5801370 - DNA, 25 bp, Homo sapien
cgtgattgctgtgactcgttaaaga

SEQ ID NO: 5801371 - DNA, 25 bp, Homo sapien
gccgacggctgccgccctgacccag

SEQ ID NO: 5801372 - DNA, 25 bp, Homo sapien
ctgggtcagggcggcagccgtcggc

SEQ ID NO: 5801373 - DNA, 25 bp, Homo sapien
ggcgtcctcgcagtgcccgcggccc

SEQ ID NO: 5801374 - DNA, 25 bp, Homo sapien
gggccgcgggcactgcgaggacgcc

SEQ ID NO: 5801375 - DNA, 25 bp, Homo sapien
tcacaccacgggtgccggtgagaga

SEQ ID NO: 5801376 - DNA, 25 bp, Homo sapien
tctctcaccggcacccgtggtgtga

SEQ ID NO: 5801377 - DNA, 25 bp, Homo sapien
tgacgcgaggcttcaaacgcaagca

SEQ ID NO: 5801378 - DNA, 25 bp, Homo sapien
gtgacgcgaggcttcaaacgcaagc

SEQ ID NO: 5801379 - DNA, 25 bp, Homo sapien
ataaaaggcctcacttccaaggaga

SEQ ID NO: 5801380 - DNA, 25 bp, Homo sapien
ctgagtgacgcgaggcttcaaacgc

SEQ ID NO: 5801381 - DNA, 25 bp, Homo sapien
taataaaaggcctcacttccaagga

SEQ ID NO: 5801382 - DNA, 25 bp, Homo sapien
ccagcccaggagatccccggtgaat

SEQ ID NO: 5801383 - DNA, 25 bp, Homo sapien
cgcgactgagtgacgcgaggcttca

SEQ ID NO: 5801384 - DNA, 25 bp, Homo sapien
ttttttcatctttcggccaaggcag

SEQ ID NO: 5801385 - DNA, 25 bp, Homo sapien
gacgcgaggcttcaaacgcaagcac

SEQ ID NO: 5801386 - DNA, 25 bp, Homo sapien
aaaaggcctcacttccaaggagagc

SEQ ID NO: 5801387 - DNA, 25 bp, Homo sapien
cttcaaacgcaagcacgagtgttta

SEQ ID NO: 5801388 - DNA, 25 bp, Homo sapien
gcgaggcttcaaacgcaagcacgag

SEQ ID NO: 5801389 - DNA, 25 bp, Homo sapien
cacgcgactgagtgacgcgaggctt

SEQ ID NO: 5801390 - DNA, 25 bp, Homo sapien
catctttcggccaaggcagacaaca

SEQ ID NO: 5801391 - DNA, 25 bp, Homo sapien
ggcttcaaacgcaagcacgagtgtt

SEQ ID NO: 5801392 - DNA, 25 bp, Homo sapien
aaacgcaagcacgagtgtttagaat

SEQ ID NO: 5801393 - DNA, 25 bp, Homo sapien
gaccgtaactaaattggtgttatcc

SEQ ID NO: 5801394 - DNA, 25 bp, Homo sapien
ggataacaccaatttagttacggtc

SEQ ID NO: 5801395 - DNA, 25 bp, Homo sapien
aaatttataggaaggaaatatctct

SEQ ID NO: 5801396 - DNA, 25 bp, Homo sapien
agagatatttccttcctataaattt

SEQ ID NO: 5801397 - DNA, 25 bp, Homo sapien
agtatgtgcactgggttcttctcct

SEQ ID NO: 5801398 - DNA, 25 bp, Homo sapien
aggagaagaacccagtgcacatact

SEQ ID NO: 5801399 - DNA, 25 bp, Homo sapien
aaactcgaactattgcaccccggtc

SEQ ID NO: 5801400 - DNA, 25 bp, Homo sapien
gaccggggtgcaatagttcgagttt

SEQ ID NO: 5801401 - DNA, 25 bp, Homo sapien
tctccttactcctaaggtagaaggt

SEQ ID NO: 5801402 - DNA, 25 bp, Homo sapien
accttctaccttaggagtaaggaga

SEQ ID NO: 5801403 - DNA, 25 bp, Homo sapien
ttacatccagtcacttggctcgacg

SEQ ID NO: 5801404 - DNA, 25 bp, Homo sapien
cgtcgagccaagtgactggatgtaa

SEQ ID NO: 5801405 - DNA, 25 bp, Homo sapien
tgagaggacgacgactcagagtccc

SEQ ID NO: 5801406 - DNA, 25 bp, Homo sapien
gggactctgagtcgtcgtcctctca

SEQ ID NO: 5801407 - DNA, 25 bp, Homo sapien
ttttatacacacacatacagacgta

SEQ ID NO: 5801408 - DNA, 25 bp, Homo sapien
tacgtctgtatgtgtgtgtataaaa

SEQ ID NO: 5801409 - DNA, 25 bp, Homo sapien
cttttatacacacacatacagacgt

SEQ ID NO: 5801410 - DNA, 25 bp, Homo sapien
acgtctgtatgtgtgtgtataaaag

SEQ ID NO: 5801411 - DNA, 25 bp, Homo sapien
gacctgacagggacgttagcccttg

SEQ ID NO: 5801412 - DNA, 25 bp, Homo sapien
caagggctaacgtccctgtcaggtc

SEQ ID NO: 5801413 - DNA, 25 bp, Homo sapien
gtcgggtgccggcaagtcgggcccg

SEQ ID NO: 5801414 - DNA, 25 bp, Homo sapien
cgggcccgacttgccggcacccgac

SEQ ID NO: 5801415 - DNA, 25 bp, Homo sapien
agggactcaggcgacaggaggcggg

SEQ ID NO: 5801416 - DNA, 25 bp, Homo sapien
cccgcctcctgtcgcctgagtccct

SEQ ID NO: 5801417 - DNA, 25 bp, Homo sapien
aactatgtttggtgcggacaagggt

SEQ ID NO: 5801418 - DNA, 25 bp, Homo sapien
acccttgtccgcaccaaacatagtt

SEQ ID NO: 5801419 - DNA, 25 bp, Homo sapien
cccactttcatagctatttgtatag

SEQ ID NO: 5801420 - DNA, 25 bp, Homo sapien
ctatacaaatagctatgaaagtggg

SEQ ID NO: 5801421 - DNA, 25 bp, Homo sapien
agtaaagaagatccactgtgtcaac

SEQ ID NO: 5801422 - DNA, 25 bp, Homo sapien
gttgacacagtggatcttctttact

SEQ ID NO: 5801423 - DNA, 25 bp, Homo sapien
ggcctccctcctggccgtcccgtcc

SEQ ID NO: 5801424 - DNA, 25 bp, Homo sapien
ggacgggacggccaggagggaggcc

SEQ ID NO: 5801425 - DNA, 25 bp, Homo sapien
acgagtgtctttgtttgaacgagac

SEQ ID NO: 5801426 - DNA, 25 bp, Homo sapien
gtctcgttcaaacaaagacactcgt

SEQ ID NO: 5801427 - DNA, 25 bp, Homo sapien
gaccgcacttcaaacgtccccagcc

SEQ ID NO: 5801428 - DNA, 25 bp, Homo sapien
ggctggggacgtttgaagtgcggtc

SEQ ID NO: 5801429 - DNA, 25 bp, Homo sapien
ggcacgagacgcgttatacgagtcg

SEQ ID NO: 5801430 - DNA, 25 bp, Homo sapien
cgactcgtataacgcgtctcgtgcc

SEQ ID NO: 5801431 - DNA, 25 bp, Homo sapien
tgagcgtcgagagacctgcccacgt

SEQ ID NO: 5801432 - DNA, 25 bp, Homo sapien
acgtgggcaggtctctcgacgctca

SEQ ID NO: 5801433 - DNA, 25 bp, Homo sapien
gtcagtggtaataaccattatgtcc

SEQ ID NO: 5801434 - DNA, 25 bp, Homo sapien
ggacataatggttattaccactgac

SEQ ID NO: 5801435 - DNA, 25 bp, Homo sapien
gaaatgaacacggaagtgaatcgta

SEQ ID NO: 5801436 - DNA, 25 bp, Homo sapien
tacgattcacttccgtgttcatttc

SEQ ID NO: 5801437 - DNA, 25 bp, Homo sapien
tcggagagaggtactcatttggtct

SEQ ID NO: 5801438 - DNA, 25 bp, Homo sapien
agaccaaatgagtacctctctccga

SEQ ID NO: 5801439 - DNA, 25 bp, Homo sapien
ggtgtcgccggacggggctgccgct

SEQ ID NO: 5801440 - DNA, 25 bp, Homo sapien
agcggcagccccgtccggcgacacc

SEQ ID NO: 5801441 - DNA, 25 bp, Homo sapien
ccgacggtgtcgccggacggggctg

SEQ ID NO: 5801442 - DNA, 25 bp, Homo sapien
cagccccgtccggcgacaccgtcgg

SEQ ID NO: 5801443 - DNA, 25 bp, Homo sapien
cttccagtccagtgagtacaggttt

SEQ ID NO: 5801444 - DNA, 25 bp, Homo sapien
aaacctgtactcactggactggaag

SEQ ID NO: 5801445 - DNA, 25 bp, Homo sapien
ttgtacttagtcaaaatgcactacg

SEQ ID NO: 5801446 - DNA, 25 bp, Homo sapien
cgtagtgcattttgactaagtacaa

SEQ ID NO: 5801447 - DNA, 25 bp, Homo sapien
ttcgttcctccaactacaaatccaa

SEQ ID NO: 5801448 - DNA, 25 bp, Homo sapien
ttggatttgtagttggaggaacgaa

SEQ ID NO: 5801449 - DNA, 25 bp, Homo sapien
gtctaggtatgctaaagtgaagtct

SEQ ID NO: 5801450 - DNA, 25 bp, Homo sapien
agacttcactttagcatacctagac

SEQ ID NO: 5801451 - DNA, 25 bp, Homo sapien
tagacttgtatgtgagaattttata

SEQ ID NO: 5801452 - DNA, 25 bp, Homo sapien
tataaaattctcacatacaagtcta

SEQ ID NO: 5801453 - DNA, 25 bp, Homo sapien
gcaacaataactttaataagagaac

SEQ ID NO: 5801454 - DNA, 25 bp, Homo sapien
gttctcttattaaagttattgttgc

SEQ ID NO: 5801455 - DNA, 25 bp, Homo sapien
gaccggagagcagtcccgacgggaa

SEQ ID NO: 5801456 - DNA, 25 bp, Homo sapien
ttcccgtcgggactgctctccggtc

SEQ ID NO: 5801457 - DNA, 25 bp, Homo sapien
cagccagaaaactctggcccgaggt

SEQ ID NO: 5801458 - DNA, 25 bp, Homo sapien
acctcgggccagagttttctggctg

SEQ ID NO: 5801459 - DNA, 25 bp, Homo sapien
ttcgtccctgttcctaaagtatgat

SEQ ID NO: 5801460 - DNA, 25 bp, Homo sapien
atcatactttaggaacagggacgaa

SEQ ID NO: 5801461 - DNA, 25 bp, Homo sapien
tcctatggcggtacaggtggagtac

SEQ ID NO: 5801462 - DNA, 25 bp, Homo sapien
gtactccacctgtaccgccatagga

SEQ ID NO: 5801463 - DNA, 25 bp, Homo sapien
aaagagataagacagatatggtccg

SEQ ID NO: 5801464 - DNA, 25 bp, Homo sapien
cggaccatatctgtcttatctcttt

SEQ ID NO: 5801465 - DNA, 25 bp, Homo sapien
acaccatactaaacaaggcaaagac

SEQ ID NO: 5801466 - DNA, 25 bp, Homo sapien
gtctttgccttgtttagtatggtgt

SEQ ID NO: 5801467 - DNA, 25 bp, Homo sapien
gattgaacaatattattcacaataa

SEQ ID NO: 5801468 - DNA, 25 bp, Homo sapien
ttattgtgaataatattgttcaatc

SEQ ID NO: 5801469 - DNA, 25 bp, Homo sapien
aacaagtgaattattatctaaatgg

SEQ ID NO: 5801470 - DNA, 25 bp, Homo sapien
ccatttagataataattcacttgtt

SEQ ID NO: 5801471 - DNA, 25 bp, Homo sapien
aaacaagtgaattattatctaaatg

SEQ ID NO: 5801472 - DNA, 25 bp, Homo sapien
catttagataataattcacttgttt

SEQ ID NO: 5801473 - DNA, 25 bp, Homo sapien
acaagtgaattattatctaaatggt

SEQ ID NO: 5801474 - DNA, 25 bp, Homo sapien
accatttagataataattcacttgt

SEQ ID NO: 5801475 - DNA, 25 bp, Homo sapien
ttagtcaaacaaggagtcatttccg

SEQ ID NO: 5801476 - DNA, 25 bp, Homo sapien
cggaaatgactccttgtttgactaa

SEQ ID NO: 5801477 - DNA, 25 bp, Homo sapien
tttagtttactctttgtaatcaaaa

SEQ ID NO: 5801478 - DNA, 25 bp, Homo sapien
ttttgattacaaagagtaaactaaa

SEQ ID NO: 5801479 - DNA, 25 bp, Homo sapien
tacttcctaaaactggtcattggag

SEQ ID NO: 5801480 - DNA, 25 bp, Homo sapien
ctccaatgaccagttttaggaagta

SEQ ID NO: 5801481 - DNA, 25 bp, Homo sapien
ggaatgtgtcttgcctattagttat

SEQ ID NO: 5801482 - DNA, 25 bp, Homo sapien
ataactaataggcaagacacattcc

SEQ ID NO: 5801483 - DNA, 25 bp, Homo sapien
aggagtaggactcgcatcgtcgacg

SEQ ID NO: 5801484 - DNA, 25 bp, Homo sapien
cgtcgacgatgcgagtcctactcct

SEQ ID NO: 5801485 - DNA, 25 bp, Homo sapien
ggtccgtgtcgcctatcccgcccgc

SEQ ID NO: 5801486 - DNA, 25 bp, Homo sapien
gcgggcgggataggcgacacggacc

SEQ ID NO: 5801487 - DNA, 25 bp, Homo sapien
tagaacccggtttatggtctagaag

SEQ ID NO: 5801488 - DNA, 25 bp, Homo sapien
cttctagaccataaaccgggttcta

SEQ ID NO: 5801489 - DNA, 25 bp, Homo sapien
cggtccaagaaaggtggtgcctccg

SEQ ID NO: 5801490 - DNA, 25 bp, Homo sapien
cggaggcaccacctttcttggaccg

SEQ ID NO: 5801491 - DNA, 25 bp, Homo sapien
agatattatggtccttaaagaaaat

SEQ ID NO: 5801492 - DNA, 25 bp, Homo sapien
attttctttaaggaccataatatct

SEQ ID NO: 5801493 - DNA, 25 bp, Homo sapien
gaaccttattcttctgccgtatctg

SEQ ID NO: 5801494 - DNA, 25 bp, Homo sapien
cagatacggcagaagaataaggttc

SEQ ID NO: 5801495 - DNA, 25 bp, Homo sapien
accttccacacgtattgtcgacttt

SEQ ID NO: 5801496 - DNA, 25 bp, Homo sapien
aaagtcgacaatacgtgtggaaggt

SEQ ID NO: 5801497 - DNA, 25 bp, Homo sapien
gtcagactccaaacctattggtgag

SEQ ID NO: 5801498 - DNA, 25 bp, Homo sapien
ctcaccaataggtttggagtctgac

SEQ ID NO: 5801499 - DNA, 25 bp, Homo sapien
tttcagcatttatgttgtgtttact

SEQ ID NO: 5801500 - DNA, 25 bp, Homo sapien
agtaaacacaacataaatgctgaaa

SEQ ID NO: 5801501 - DNA, 25 bp, Homo sapien
aagctcggaagcaccgaggtgtctg

SEQ ID NO: 5801502 - DNA, 25 bp, Homo sapien
cagacacctcggtgcttccgagctt

SEQ ID NO: 5801503 - DNA, 25 bp, Homo sapien
cttccgtcacggtaacgtaacacga

SEQ ID NO: 5801504 - DNA, 25 bp, Homo sapien
tcgtgttacgttaccgtgacggaag

SEQ ID NO: 5801505 - DNA, 25 bp, Homo sapien
ggcctcgacctgtgcatccttgacg

SEQ ID NO: 5801506 - DNA, 25 bp, Homo sapien
cgtcaaggatgcacaggtcgaggcc

SEQ ID NO: 5801507 - DNA, 25 bp, Homo sapien
cgtatcgggtccattcgtagtctcg

SEQ ID NO: 5801508 - DNA, 25 bp, Homo sapien
cgagactacgaatggacccgatacg

SEQ ID NO: 5801509 - DNA, 25 bp, Homo sapien
tgggagacgagtcgtcaggtccgag

SEQ ID NO: 5801510 - DNA, 25 bp, Homo sapien
ctcggacctgacgactcgtctccca

SEQ ID NO: 5801511 - DNA, 25 bp, Homo sapien
acagggatcgacctccgaaactcga

SEQ ID NO: 5801512 - DNA, 25 bp, Homo sapien
tcgagtttcggaggtcgatccctgt

SEQ ID NO: 5801513 - DNA, 25 bp, Homo sapien
cacacttggtgactgtttcgtaaaa

SEQ ID NO: 5801514 - DNA, 25 bp, Homo sapien
ttttacgaaacagtcaccaagtgtg

SEQ ID NO: 5801515 - DNA, 25 bp, Homo sapien
ccggcggacgggtacggccacgcga

SEQ ID NO: 5801516 - DNA, 25 bp, Homo sapien
tcgcgtggccgtacccgtccgccgg

SEQ ID NO: 5801517 - DNA, 25 bp, Homo sapien
tcggtgtgcgtcacccggtgtccct

SEQ ID NO: 5801518 - DNA, 25 bp, Homo sapien
agggacaccgggtgacgcacaccga

SEQ ID NO: 5801519 - DNA, 25 bp, Homo sapien
acaccaccgtcactcagtattctat

SEQ ID NO: 5801520 - DNA, 25 bp, Homo sapien
atagaatactgagtgacggtggtgt

SEQ ID NO: 5801521 - DNA, 25 bp, Homo sapien
caattatctatgactccatctccgt

SEQ ID NO: 5801522 - DNA, 25 bp, Homo sapien
acggagatggagtcatagataattg

SEQ ID NO: 5801523 - DNA, 25 bp, Homo sapien
gggccgaaaccgtctgggctccgag

SEQ ID NO: 5801524 - DNA, 25 bp, Homo sapien
ctcggagcccagacggtttcggccc

SEQ ID NO: 5801525 - DNA, 25 bp, Homo sapien
aatcttctgtcaactccccgagaac

SEQ ID NO: 5801526 - DNA, 25 bp, Homo sapien
gttctcggggagttgacagaagatt

SEQ ID NO: 5801527 - DNA, 25 bp, Homo sapien
ccgtcgaccactggccgggcggccc

SEQ ID NO: 5801528 - DNA, 25 bp, Homo sapien
gggccgcccggccagtggtcgacgg

SEQ ID NO: 5801529 - DNA, 25 bp, Homo sapien
gccgtcgaccactggccgggcggcc

SEQ ID NO: 5801530 - DNA, 25 bp, Homo sapien
ggccgcccggccagtggtcgacggc

SEQ ID NO: 5801531 - DNA, 25 bp, Homo sapien
ctttcaggagaaagttccgagggta

SEQ ID NO: 5801532 - DNA, 25 bp, Homo sapien
taccctcggaactttctcctgaaag

SEQ ID NO: 5801533 - DNA, 25 bp, Homo sapien
gaagcacccccccgacttcttcgac

SEQ ID NO: 5801534 - DNA, 25 bp, Homo sapien
gtcgaagaagtcgggggggtgcttc

SEQ ID NO: 5801535 - DNA, 25 bp, Homo sapien
tatttgtgtaataaacatatcctct

SEQ ID NO: 5801536 - DNA, 25 bp, Homo sapien
agaggatatgtttattacacaaata

SEQ ID NO: 5801537 - DNA, 25 bp, Homo sapien
cgtcttaaatccgtgtccacggtat

SEQ ID NO: 5801538 - DNA, 25 bp, Homo sapien
ataccgtggacacggatttaagacg

SEQ ID NO: 5801539 - DNA, 25 bp, Homo sapien
agtttactaccgattagcccctcga

SEQ ID NO: 5801540 - DNA, 25 bp, Homo sapien
tcgaggggctaatcggtagtaaact

SEQ ID NO: 5801541 - DNA, 25 bp, Homo sapien
gcgggacacccacgaaacatgagtg

SEQ ID NO: 5801542 - DNA, 25 bp, Homo sapien
cactcatgtttcgtgggtgtcccgc

SEQ ID NO: 5801543 - DNA, 25 bp, Homo sapien
cggccgccgctcgtgggtgagaccc

SEQ ID NO: 5801544 - DNA, 25 bp, Homo sapien
gggtctcacccacgagcggcggccg

SEQ ID NO: 5801545 - DNA, 25 bp, Homo sapien
aaagctacaaggtcttcgtatactt

SEQ ID NO: 5801546 - DNA, 25 bp, Homo sapien
aagtatacgaagaccttgtagcttt

SEQ ID NO: 5801547 - DNA, 25 bp, Homo sapien
acccggcctccaccgcgccggcgtg

SEQ ID NO: 5801548 - DNA, 25 bp, Homo sapien
cacgccggcgcggtggaggccgggt

SEQ ID NO: 5801549 - DNA, 25 bp, Homo sapien
cacccggcctccaccgcgccggcgt

SEQ ID NO: 5801550 - DNA, 25 bp, Homo sapien
acgccggcgcggtggaggccgggtg

SEQ ID NO: 5801551 - DNA, 25 bp, Homo sapien
ccacccggcctccaccgcgccggcg

SEQ ID NO: 5801552 - DNA, 25 bp, Homo sapien
cgccggcgcggtggaggccgggtgg

SEQ ID NO: 5801553 - DNA, 25 bp, Homo sapien
tgtccggcccacccggcctccaccg

SEQ ID NO: 5801554 - DNA, 25 bp, Homo sapien
cggtggaggccgggtgggccggaca

SEQ ID NO: 5801555 - DNA, 25 bp, Homo sapien
atgtaatcaaagaagtaattgtcac

SEQ ID NO: 5801556 - DNA, 25 bp, Homo sapien
gtgacaattacttctttgattacat

SEQ ID NO: 5801557 - DNA, 25 bp, Homo sapien
aatattcagcaatcgatataaaaat

SEQ ID NO: 5801558 - DNA, 25 bp, Homo sapien
atttttatatcgattgctgaatatt

SEQ ID NO: 5801559 - DNA, 25 bp, Homo sapien
attatgacagaaacacgtcccactg

SEQ ID NO: 5801560 - DNA, 25 bp, Homo sapien
gatccctaagactgtaacatctgct

SEQ ID NO: 5801561 - DNA, 25 bp, Homo sapien
atcccggatccctaagactgtaaca

SEQ ID NO: 5801562 - DNA, 25 bp, Homo sapien
ccggatccctaagactgtaacatct

SEQ ID NO: 5801563 - DNA, 25 bp, Homo sapien
agaggattaaaggagtgacgaccct

SEQ ID NO: 5801564 - DNA, 25 bp, Homo sapien
gtacatccagagctccaaacctaag

SEQ ID NO: 5801565 - DNA, 25 bp, Homo sapien
acccttcatgcctgcattatgacag

SEQ ID NO: 5801566 - DNA, 25 bp, Homo sapien
tatgacagaaacacgtcccactgct

SEQ ID NO: 5801567 - DNA, 25 bp, Homo sapien
attaaaggagtgacgaccctttcta

SEQ ID NO: 5801568 - DNA, 25 bp, Homo sapien
cccttcatgcctgcattatgacaga

SEQ ID NO: 5801569 - DNA, 25 bp, Homo sapien
agagctccaaacctaagctgtggcc

SEQ ID NO: 5801570 - DNA, 25 bp, Homo sapien
tgcattatgacagaaacacgtccca

SEQ ID NO: 5801571 - DNA, 25 bp, Homo sapien
cctacttcccaaaagcctgtagaag

SEQ ID NO: 5801572 - DNA, 25 bp, Homo sapien
tcccggatccctaagactgtaacat

SEQ ID NO: 5801573 - DNA, 25 bp, Homo sapien
tagaggattaaaggagtgacgaccc

SEQ ID NO: 5801574 - DNA, 25 bp, Homo sapien
ttatgtatgtacatccagagctcca

SEQ ID NO: 5801575 - DNA, 25 bp, Homo sapien
cggggtcacgaggaggtgggtgcaa

SEQ ID NO: 5801576 - DNA, 25 bp, Homo sapien
ttgcacccacctcctcgtgaccccg

SEQ ID NO: 5801577 - DNA, 25 bp, Homo sapien
gttaaggtatgaagacagaacacgg

SEQ ID NO: 5801578 - DNA, 25 bp, Homo sapien
ccgtgttctgtcttcataccttaac

SEQ ID NO: 5801579 - DNA, 25 bp, Homo sapien
tcgtccatgacttaaatgaaattct

SEQ ID NO: 5801580 - DNA, 25 bp, Homo sapien
agaatttcatttaagtcatggacga

SEQ ID NO: 5801581 - DNA, 25 bp, Homo sapien
agactcgggtgtgcgagaggtgacc

SEQ ID NO: 5801582 - DNA, 25 bp, Homo sapien
ggtcacctctcgcacacccgagtct

SEQ ID NO: 5801583 - DNA, 25 bp, Homo sapien
ccgccgcggagtcggccccaaccgc

SEQ ID NO: 5801584 - DNA, 25 bp, Homo sapien
gcggttggggccgactccgcggcgg

SEQ ID NO: 5801585 - DNA, 25 bp, Homo sapien
gcctccgccccttccgggcgtccgc

SEQ ID NO: 5801586 - DNA, 25 bp, Homo sapien
gcggacgcccggaaggggcggaggc

SEQ ID NO: 5801587 - DNA, 25 bp, Homo sapien
acaatatagactgtatctcaggagc

SEQ ID NO: 5801588 - DNA, 25 bp, Homo sapien
gctcctgagatacagtctatattgt

SEQ ID NO: 5801589 - DNA, 25 bp, Homo sapien
acaggagaggaacggtctcttcgta

SEQ ID NO: 5801590 - DNA, 25 bp, Homo sapien
tacgaagagaccgttcctctcctgt

SEQ ID NO: 5801591 - DNA, 25 bp, Homo sapien
gtccatggcgcccgcgtccgggcct

SEQ ID NO: 5801592 - DNA, 25 bp, Homo sapien
ggccacgtggcctactccggccagc

SEQ ID NO: 5801593 - DNA, 25 bp, Homo sapien
gccagcctcctggtctgaactcaga

SEQ ID NO: 5801594 - DNA, 25 bp, Homo sapien
tgtatatttgtagatttatccagcc

SEQ ID NO: 5801595 - DNA, 25 bp, Homo sapien
tctgagagccccagcccacaaagga

SEQ ID NO: 5801596 - DNA, 25 bp, Homo sapien
tacacagatctctcggcccaccact

SEQ ID NO: 5801597 - DNA, 25 bp, Homo sapien
ggtaatggtgtcccaaaggtaagtc

SEQ ID NO: 5801598 - DNA, 25 bp, Homo sapien
ccacagtttattgatttcaaattgt

SEQ ID NO: 5801599 - DNA, 25 bp, Homo sapien
cagagggaccagagcttggagagtc

SEQ ID NO: 5801600 - DNA, 25 bp, Homo sapien
tcctggaggtggagtgcctgccaag

SEQ ID NO: 5801601 - DNA, 25 bp, Homo sapien
gccgcctgctttcgccaaatcacag

SEQ ID NO: 5801602 - DNA, 25 bp, Homo sapien
catcagcaagcagatcttcccctgg

SEQ ID NO: 5801603 - DNA, 25 bp, Homo sapien
ggagctgaactcaatggcagctgca

SEQ ID NO: 5801604 - DNA, 25 bp, Homo sapien
ccgcctacacggcgccactcagcag

SEQ ID NO: 5801605 - DNA, 25 bp, Homo sapien
agaaacctgaagagcctacaaaaaa

SEQ ID NO: 5801606 - DNA, 25 bp, Homo sapien
tccaatctggtaatggtgtcccaaa

SEQ ID NO: 5801607 - DNA, 25 bp, Homo sapien
attcaagaaaacacacacatacata

SEQ ID NO: 5801608 - DNA, 25 bp, Homo sapien
tgccggaggctcccaaactgacgca

SEQ ID NO: 5801609 - DNA, 25 bp, Homo sapien
ccaggcaaccaccaccatggacctt

SEQ ID NO: 5801610 - DNA, 25 bp, Homo sapien
acataattgtggtcacctggagcct

SEQ ID NO: 5801611 - DNA, 25 bp, Homo sapien
ctttcgccaaatcacagcccaatat

SEQ ID NO: 5801612 - DNA, 25 bp, Homo sapien
cttcctgagtgcacaatgcagaagg

SEQ ID NO: 5801613 - DNA, 25 bp, Homo sapien
tggcacaacacactttggtcatttc

SEQ ID NO: 5801614 - DNA, 25 bp, Homo sapien
agtcgtaaccgtggctggtgtttgt

SEQ ID NO: 5801615 - DNA, 25 bp, Homo sapien
ccagcccacaaaggagctgaactca

SEQ ID NO: 5801616 - DNA, 25 bp, Homo sapien
ccgtggctggtgtttgtagttgaca

SEQ ID NO: 5801617 - DNA, 25 bp, Homo sapien
accctcatcccacctacacagatct

SEQ ID NO: 5801618 - DNA, 25 bp, Homo sapien
acggaacgccagatcaagatctggt

SEQ ID NO: 5801619 - DNA, 25 bp, Homo sapien
gaaaacccaggactgtttggaggct

SEQ ID NO: 5801620 - DNA, 25 bp, Homo sapien
ggcccaatgcttctagctcctcagc

SEQ ID NO: 5801621 - DNA, 25 bp, Homo sapien
ccgccagcccgaactcgcggcaaaa

SEQ ID NO: 5801622 - DNA, 25 bp, Homo sapien
aatggcagctgcatgcggccgggca

SEQ ID NO: 5801623 - DNA, 25 bp, Homo sapien
tttatgtgtatatttgtagatttat

SEQ ID NO: 5801624 - DNA, 25 bp, Homo sapien
cgaccctcatcccacctacacagat

SEQ ID NO: 5801625 - DNA, 25 bp, Homo sapien
aaaaccacagtcctcaccacagttt

SEQ ID NO: 5801626 - DNA, 25 bp, Homo sapien
aggctcccaaactgacgcatctgta

SEQ ID NO: 5801627 - DNA, 25 bp, Homo sapien
ggtcagcaggccctggagcttcctg

SEQ ID NO: 5801628 - DNA, 25 bp, Homo sapien
cctacacagatctctcggcccacca

SEQ ID NO: 5801629 - DNA, 25 bp, Homo sapien
ccagtcccctgagcgcagcccaccg

SEQ ID NO: 5801630 - DNA, 25 bp, Homo sapien
aacgccagatcaagatctggttcca

SEQ ID NO: 5801631 - DNA, 25 bp, Homo sapien
ctgccgccagtgcccggcctggcct

SEQ ID NO: 5801632 - DNA, 25 bp, Homo sapien
gcctacacggcgccactcagcagct

SEQ ID NO: 5801633 - DNA, 25 bp, Homo sapien
agctgcgaggacaagagcccgccag

SEQ ID NO: 5801634 - DNA, 25 bp, Homo sapien
gaccgcaaattgtccttcatgggta

SEQ ID NO: 5801635 - DNA, 25 bp, Homo sapien
cttagtttcagagaccttaatttat

SEQ ID NO: 5801636 - DNA, 25 bp, Homo sapien
ctggccacgtggcctactccggcca

SEQ ID NO: 5801637 - DNA, 25 bp, Homo sapien
agctccctggacactgactatccag

SEQ ID NO: 5801638 - DNA, 25 bp, Homo sapien
gctatggctacagcaaaactacgga

SEQ ID NO: 5801639 - DNA, 25 bp, Homo sapien
acatacataattgtggtcacctgga

SEQ ID NO: 5801640 - DNA, 25 bp, Homo sapien
caatctggtaatggtgtcccaaagg

SEQ ID NO: 5801641 - DNA, 25 bp, Homo sapien
cagcatccaagcgggtacgcacggc

SEQ ID NO: 5801642 - DNA, 25 bp, Homo sapien
tcggcggcgcgccctgcagagggac

SEQ ID NO: 5801643 - DNA, 25 bp, Homo sapien
cgagcgcgcagctggtggaattgga

SEQ ID NO: 5801644 - DNA, 25 bp, Homo sapien
atttgacagtgccacatactgcgga

SEQ ID NO: 5801645 - DNA, 25 bp, Homo sapien
ataaaggattaagaccgcaaattgt

SEQ ID NO: 5801646 - DNA, 25 bp, Homo sapien
agcgccaacctgcagggcagcccgg

SEQ ID NO: 5801647 - DNA, 25 bp, Homo sapien
ttcctgtgccgtaaggattgcatcg

SEQ ID NO: 5801648 - DNA, 25 bp, Homo sapien
gggcgtcctttgggtgactcgccat

SEQ ID NO: 5801649 - DNA, 25 bp, Homo sapien
tcatgggtagagtcaggaagcccgg

SEQ ID NO: 5801650 - DNA, 25 bp, Homo sapien
caccaatcctggaggtggagtgcct

SEQ ID NO: 5801651 - DNA, 25 bp, Homo sapien
gcgagtcatttcgttccctgattat

SEQ ID NO: 5801652 - DNA, 25 bp, Homo sapien
ggccggcccagctctctcaggattc

SEQ ID NO: 5801653 - DNA, 25 bp, Homo sapien
tccaggttctgcctgctccatccag

SEQ ID NO: 5801654 - DNA, 25 bp, Homo sapien
gctcccaaactgacgcatctgtagc

SEQ ID NO: 5801655 - DNA, 25 bp, Homo sapien
ccatcccatggcgagcaacggcggc

SEQ ID NO: 5801656 - DNA, 25 bp, Homo sapien
aatgtatttatgtgtatatttgtag

SEQ ID NO: 5801657 - DNA, 25 bp, Homo sapien
aggattaagaccgcaaattgtcctt

SEQ ID NO: 5801658 - DNA, 25 bp, Homo sapien
ccaccgaccctgcccccatcttcac

SEQ ID NO: 5801659 - DNA, 25 bp, Homo sapien
ccggcgcatgaagtacaagaaggac

SEQ ID NO: 5801660 - DNA, 25 bp, Homo sapien
tttatccagccgagcttaggaattc

SEQ ID NO: 5801661 - DNA, 25 bp, Homo sapien
ccctacccaccccctgctgctgcca

SEQ ID NO: 5801662 - DNA, 25 bp, Homo sapien
cggccgccgccagcccgaactcgcg

SEQ ID NO: 5801663 - DNA, 25 bp, Homo sapien
tgcctgccacaacagaagcgctacg

SEQ ID NO: 5801664 - DNA, 25 bp, Homo sapien
ggccaagggcatcctgcactcgccg

SEQ ID NO: 5801665 - DNA, 25 bp, Homo sapien
tatttatgtgtatatttgtagattt

SEQ ID NO: 5801666 - DNA, 25 bp, Homo sapien
cgcttccaggccgtgggggccacat

SEQ ID NO: 5801667 - DNA, 25 bp, Homo sapien
tagttgacataaaggattaagaccg

SEQ ID NO: 5801668 - DNA, 25 bp, Homo sapien
acgcagcgccggagttcgagcccca

SEQ ID NO: 5801669 - DNA, 25 bp, Homo sapien
ggaacgccagatcaagatctggttc

SEQ ID NO: 5801670 - DNA, 25 bp, Homo sapien
cccaatgcttctagctcctcagcca

SEQ ID NO: 5801671 - DNA, 25 bp, Homo sapien
ttgacagtgccacatactgcggacc

SEQ ID NO: 5801672 - DNA, 25 bp, Homo sapien
gtggagtgcctgccaagaagcccaa

SEQ ID NO: 5801673 - DNA, 25 bp, Homo sapien
ggcatacacgagcgcgcagctggtg

SEQ ID NO: 5801674 - DNA, 25 bp, Homo sapien
caagcagatcttcccctggatgaaa

SEQ ID NO: 5801675 - DNA, 25 bp, Homo sapien
cctcagccaccatcagcaagcagat

SEQ ID NO: 5801676 - DNA, 25 bp, Homo sapien
caacctgggccacctctcgcacccg

SEQ ID NO: 5801677 - DNA, 25 bp, Homo sapien
gtctgaactagttgagagagtagtt

SEQ ID NO: 5801678 - DNA, 25 bp, Homo sapien
aagcgagtcatttcgttccctgatt

SEQ ID NO: 5801679 - DNA, 25 bp, Homo sapien
ttccccgctcttgccctgccgccgc

SEQ ID NO: 5801680 - DNA, 25 bp, Homo sapien
ccactcgtctcagggacgactgccg

SEQ ID NO: 5801681 - DNA, 25 bp, Homo sapien
ccatggaccttgcgaccctcatccc

SEQ ID NO: 5801682 - DNA, 25 bp, Homo sapien
agagtagttttgaacagtcgtaacc

SEQ ID NO: 5801683 - DNA, 25 bp, Homo sapien
tcccctccatgggcgtcctttgggt

SEQ ID NO: 5801684 - DNA, 25 bp, Homo sapien
cgggcctcccctccatgggcgtcct

SEQ ID NO: 5801685 - DNA, 25 bp, Homo sapien
aatgcagaaggctgcttactatgaa

SEQ ID NO: 5801686 - DNA, 25 bp, Homo sapien
cacttcaaccgctacttgtgccggc

SEQ ID NO: 5801687 - DNA, 25 bp, Homo sapien
acacacatacataattgtggtcacc

SEQ ID NO: 5801688 - DNA, 25 bp, Homo sapien
ttacggctacagcaccccccaccag

SEQ ID NO: 5801689 - DNA, 25 bp, Homo sapien
aggctatggctacagcaaaactacg

SEQ ID NO: 5801690 - DNA, 25 bp, Homo sapien
tcaaccgctacttgtgccggccgcg

SEQ ID NO: 5801691 - DNA, 25 bp, Homo sapien
ctacccaccccctgctgctgccagc

SEQ ID NO: 5801692 - DNA, 25 bp, Homo sapien
acaacacactttggtcatttctcaa

SEQ ID NO: 5801693 - DNA, 25 bp, Homo sapien
ccaatatgtacggcctggccgccta

SEQ ID NO: 5801694 - DNA, 25 bp, Homo sapien
tcagcaggccctggagcttcctgag

SEQ ID NO: 5801695 - DNA, 25 bp, Homo sapien
ttcaacctgggccacctctcgcacc

SEQ ID NO: 5801696 - DNA, 25 bp, Homo sapien
gtggcgtggcacaacacactttggt

SEQ ID NO: 5801697 - DNA, 25 bp, Homo sapien
tcgacagaactccaagcagaagaac

SEQ ID NO: 5801698 - DNA, 25 bp, Homo sapien
tgaagtacaagaaggaccagaaggc

SEQ ID NO: 5801699 - DNA, 25 bp, Homo sapien
tctcgcacccgtcgtcggccagcgt

SEQ ID NO: 5801700 - DNA, 25 bp, Homo sapien
gcagcccaccgctcggcggcgccgc

SEQ ID NO: 5801701 - DNA, 25 bp, Homo sapien
cagatctctcggcccaccactcgtc

SEQ ID NO: 5801702 - DNA, 25 bp, Homo sapien
agagtctcgacagaactccaagcag

SEQ ID NO: 5801703 - DNA, 25 bp, Homo sapien
ccaagaagcccaaaggtgggcccaa

SEQ ID NO: 5801704 - DNA, 25 bp, Homo sapien
cagcggcggaggcgcaggcgaccgg

SEQ ID NO: 5801705 - DNA, 25 bp, Homo sapien
ccgggcactgggaacagccagggtg

SEQ ID NO: 5801706 - DNA, 25 bp, Homo sapien
actcagagcagcagccaccacaacc

SEQ ID NO: 5801707 - DNA, 25 bp, Homo sapien
cctgtgccgtaaggattgcatcgga

SEQ ID NO: 5801708 - DNA, 25 bp, Homo sapien
agggactccaatctggtaatggtgt

SEQ ID NO: 5801709 - DNA, 25 bp, Homo sapien
aattgtggtcacctggagcctgggg

SEQ ID NO: 5801710 - DNA, 25 bp, Homo sapien
tatttatccttgtctgaatgtattt

SEQ ID NO: 5801711 - DNA, 25 bp, Homo sapien
ggtcatttctcaaaaaccacagtcc

SEQ ID NO: 5801712 - DNA, 25 bp, Homo sapien
tccttcatgggtagagtcaggaagc

SEQ ID NO: 5801713 - DNA, 25 bp, Homo sapien
cacatactgcggaccaagggactcc

SEQ ID NO: 5801714 - DNA, 25 bp, Homo sapien
gcctggccgcctacacggcgccact

SEQ ID NO: 5801715 - DNA, 25 bp, Homo sapien
tgagagccccagcccacaaaggagc

SEQ ID NO: 5801716 - DNA, 25 bp, Homo sapien
catacacgagcgcgcagctggtgga

SEQ ID NO: 5801717 - DNA, 25 bp, Homo sapien
gcggcggaggcgcaggcgaccgggc

SEQ ID NO: 5801718 - DNA, 25 bp, Homo sapien
acataaaggattaagaccgcaaatt

SEQ ID NO: 5801719 - DNA, 25 bp, Homo sapien
cgctggccacgtggcctactccggc

SEQ ID NO: 5801720 - DNA, 25 bp, Homo sapien
cgcaggcgaccgggcctcccctcca

SEQ ID NO: 5801721 - DNA, 25 bp, Homo sapien
agcctgggggccggcccagctctct

SEQ ID NO: 5801722 - DNA, 25 bp, Homo sapien
cgtcgagtccatggcgcccgcgtcc

SEQ ID NO: 5801723 - DNA, 25 bp, Homo sapien
agccgcaaggatccttccctgtaaa

SEQ ID NO: 5801724 - DNA, 25 bp, Homo sapien
ctttggtcatttctcaaaaaccaca

SEQ ID NO: 5801725 - DNA, 25 bp, Homo sapien
cttggagagtcttgggcctggcccg

SEQ ID NO: 5801726 - DNA, 25 bp, Homo sapien
actatccaggttctgcctgctccat

SEQ ID NO: 5801727 - DNA, 25 bp, Homo sapien
gttgacataaaggattaagaccgca

SEQ ID NO: 5801728 - DNA, 25 bp, Homo sapien
caaaagaaacctgaagagcctacaa

SEQ ID NO: 5801729 - DNA, 25 bp, Homo sapien
ccgtgggggccacatttcacctcct

SEQ ID NO: 5801730 - DNA, 25 bp, Homo sapien
actcaatggcagctgcatgcggccg

SEQ ID NO: 5801731 - DNA, 25 bp, Homo sapien
tgtgccggccgcgccgcgtggagat

SEQ ID NO: 5801732 - DNA, 25 bp, Homo sapien
ctgggccacctctcgcacccgtcgt

SEQ ID NO: 5801733 - DNA, 25 bp, Homo sapien
tgacataaaggattaagaccgcaaa

SEQ ID NO: 5801734 - DNA, 25 bp, Homo sapien
agcccaccgctcggcggcgccgctg

SEQ ID NO: 5801735 - DNA, 25 bp, Homo sapien
ctacgcagcgccggagttcgagccc

SEQ ID NO: 5801736 - DNA, 25 bp, Homo sapien
tggtactattggaacaaatatttag

SEQ ID NO: 5801737 - DNA, 25 bp, Homo sapien
ccttaatttatattctccttcctgt

SEQ ID NO: 5801738 - DNA, 25 bp, Homo sapien
actgactatccaggttctgcctgct

SEQ ID NO: 5801739 - DNA, 25 bp, Homo sapien
tgtcccaaaggtaagtctgagaccc

SEQ ID NO: 5801740 - DNA, 25 bp, Homo sapien
gcatctgtagcggccgccgccagcc

SEQ ID NO: 5801741 - DNA, 25 bp, Homo sapien
cggcttcgccagcgccaacctgcag

SEQ ID NO: 5801742 - DNA, 25 bp, Homo sapien
aaattcaagaaaacacacacataca

SEQ ID NO: 5801743 - DNA, 25 bp, Homo sapien
agccagtcccctgagcgcagcccac

SEQ ID NO: 5801744 - DNA, 25 bp, Homo sapien
tgattatttatccttgtctgaatgt

SEQ ID NO: 5801745 - DNA, 25 bp, Homo sapien
tcaaattgtctggtactattggaac

SEQ ID NO: 5801746 - DNA, 25 bp, Homo sapien
ccaccccctgctgctgccagctccc

SEQ ID NO: 5801747 - DNA, 25 bp, Homo sapien
ggagtgcctgccaagaagcccaaag

SEQ ID NO: 5801748 - DNA, 25 bp, Homo sapien
aggtggagtgcctgccaagaagccc

SEQ ID NO: 5801749 - DNA, 25 bp, Homo sapien
acagtcctcaccacagtttattgat

SEQ ID NO: 5801750 - DNA, 25 bp, Homo sapien
cccccatcttcacccaccaatcctg

SEQ ID NO: 5801751 - DNA, 25 bp, Homo sapien
gagtgcacaatgcagaaggctgctt

SEQ ID NO: 5801752 - DNA, 25 bp, Homo sapien
aaccgctacttgtgccggccgcgcc

SEQ ID NO: 5801753 - DNA, 25 bp, Homo sapien
tggatgaaagagtctcgacagaact

SEQ ID NO: 5801754 - DNA, 25 bp, Homo sapien
tccctgattatttatccttgtctga

SEQ ID NO: 5801755 - DNA, 25 bp, Homo sapien
attgtccttcatgggtagagtcagg

SEQ ID NO: 5801756 - DNA, 25 bp, Homo sapien
aggaagcccggtggcgtggcacaac

SEQ ID NO: 5801757 - DNA, 25 bp, Homo sapien
cttaggaattcgcttccaggccgtg

SEQ ID NO: 5801758 - DNA, 25 bp, Homo sapien
tgactcgccataaatcagccgcaag

SEQ ID NO: 5801759 - DNA, 25 bp, Homo sapien
tcagcaagcagatcttcccctggat

SEQ ID NO: 5801760 - DNA, 25 bp, Homo sapien
tggtctgaactagttgagagagtag

SEQ ID NO: 5801761 - DNA, 25 bp, Homo sapien
ctggttccagaaccggcgcatgaag

SEQ ID NO: 5801762 - DNA, 25 bp, Homo sapien
cccagcatccaagcgggtacgcacg

SEQ ID NO: 5801763 - DNA, 25 bp, Homo sapien
agagctgcgaggacaagagcccgcc

SEQ ID NO: 5801764 - DNA, 25 bp, Homo sapien
tcccaaactgacgcatctgtagcgg

SEQ ID NO: 5801765 - DNA, 25 bp, Homo sapien
tttgtagatttatccagccgagctt

SEQ ID NO: 5801766 - DNA, 25 bp, Homo sapien
cggcgcgccctgcagagggaccaga

SEQ ID NO: 5801767 - DNA, 25 bp, Homo sapien
agggtgggggtggtggcagccagcc

SEQ ID NO: 5801768 - DNA, 25 bp, Homo sapien
aatttatattctccttcctgtgccg

SEQ ID NO: 5801769 - DNA, 25 bp, Homo sapien
agtcaatgttatttgagcagggtca

SEQ ID NO: 5801770 - DNA, 25 bp, Homo sapien
atggcgcccgcgtccgggcctgtct

SEQ ID NO: 5801771 - DNA, 25 bp, Homo sapien
cccagctctctcaggattcagcaga

SEQ ID NO: 5801772 - DNA, 25 bp, Homo sapien
gcttctagctcctcagccaccatca

SEQ ID NO: 5801773 - DNA, 25 bp, Homo sapien
agatctggttccagaaccggcgcat

SEQ ID NO: 5801774 - DNA, 25 bp, Homo sapien
ctggcctacgacgcgccctcgccgc

SEQ ID NO: 5801775 - DNA, 25 bp, Homo sapien
gcaaattgtccttcatgggtagagt

SEQ ID NO: 5801776 - DNA, 25 bp, Homo sapien
gctacagcaaaactacggacactta

SEQ ID NO: 5801777 - DNA, 25 bp, Homo sapien
gggaccagagcttggagagtcttgg

SEQ ID NO: 5801778 - DNA, 25 bp, Homo sapien
ggccgcctacacggcgccactcagc

SEQ ID NO: 5801779 - DNA, 25 bp, Homo sapien
caggttctgcctgctccatccagag

SEQ ID NO: 5801780 - DNA, 25 bp, Homo sapien
acacggcgccactcagcagctgcct

SEQ ID NO: 5801781 - DNA, 25 bp, Homo sapien
ccggctagccagtcccctgagcgca

SEQ ID NO: 5801782 - DNA, 25 bp, Homo sapien
acccaccccctgctgctgccagctc

SEQ ID NO: 5801783 - DNA, 25 bp, Homo sapien
catttcacctccttagtccccctgg

SEQ ID NO: 5801784 - DNA, 25 bp, Homo sapien
gctgcctgccacaacagaagcgcta

SEQ ID NO: 5801785 - DNA, 25 bp, Homo sapien
tcaatggcagctgcatgcggccggg

SEQ ID NO: 5801786 - DNA, 25 bp, Homo sapien
ccgcaaattgtccttcatgggtaga

SEQ ID NO: 5801787 - DNA, 25 bp, Homo sapien
atccaagcgggtacgcacggcatac

SEQ ID NO: 5801788 - DNA, 25 bp, Homo sapien
gcctgctccatccagagctctgccc

SEQ ID NO: 5801789 - DNA, 25 bp, Homo sapien
tcttgccctgccgccgcctcccggg

SEQ ID NO: 5801790 - DNA, 25 bp, Homo sapien
tgcactcgccggctagccagtcccc

SEQ ID NO: 5801791 - DNA, 25 bp, Homo sapien
tgcagggcagcccggtgtacgtggg

SEQ ID NO: 5801792 - DNA, 25 bp, Homo sapien
ggtgactcgccataaatcagccgca

SEQ ID NO: 5801793 - DNA, 25 bp, Homo sapien
gccgcgtggagatggccaacctgct

SEQ ID NO: 5801794 - DNA, 25 bp, Homo sapien
agccccatcccatggcgagcaacgg

SEQ ID NO: 5801795 - DNA, 25 bp, Homo sapien
acggacacttacggctacagcaccc

SEQ ID NO: 5801796 - DNA, 25 bp, Homo sapien
ctatgaaaacccaggactgtttgga

SEQ ID NO: 5801797 - DNA, 25 bp, Homo sapien
cccatggcgagcaacggcggcggct

SEQ ID NO: 5801798 - DNA, 25 bp, Homo sapien
ccgtcgtcggccagcgtggactaca

SEQ ID NO: 5801799 - DNA, 25 bp, Homo sapien
ccgctcggcggcgccgctggccacg

SEQ ID NO: 5801800 - DNA, 25 bp, Homo sapien
gctggtggaattggaaaaggaattc

SEQ ID NO: 5801801 - DNA, 25 bp, Homo sapien
gcagtgaaggatacagtggtagtca

SEQ ID NO: 5801802 - DNA, 25 bp, Homo sapien
tgccacaacagaagcgctacgcagc

SEQ ID NO: 5801803 - DNA, 25 bp, Homo sapien
acccccttccccgctcttgccctgc

SEQ ID NO: 5801804 - DNA, 25 bp, Homo sapien
cgcagctggtggaattggaaaagga

SEQ ID NO: 5801805 - DNA, 25 bp, Homo sapien
ccctggagcttcctgagtgcacaat

SEQ ID NO: 5801806 - DNA, 25 bp, Homo sapien
aaccgtggctggtgtttgtagttga

SEQ ID NO: 5801807 - DNA, 25 bp, Homo sapien
gccaacctgctgaatctcacggaac

SEQ ID NO: 5801808 - DNA, 25 bp, Homo sapien
tcgagtccatggcgcccgcgtccgg

SEQ ID NO: 5801809 - DNA, 25 bp, Homo sapien
ccacaacagaagcgctacgcagcgc

SEQ ID NO: 5801810 - DNA, 25 bp, Homo sapien
gcacggcatacacgagcgcgcagct

SEQ ID NO: 5801811 - DNA, 25 bp, Homo sapien
gccctgcagagggaccagagcttgg

SEQ ID NO: 5801812 - DNA, 25 bp, Homo sapien
gctcggcggcgccgctggccacgtg

SEQ ID NO: 5801813 - DNA, 25 bp, Homo sapien
aactacggacacttacggctacagc

SEQ ID NO: 5801814 - DNA, 25 bp, Homo sapien
ctgagtgcacaatgcagaaggctgc

SEQ ID NO: 5801815 - DNA, 25 bp, Homo sapien
agatatcaaaagaaacctgaagagc

SEQ ID NO: 5801816 - DNA, 25 bp, Homo sapien
gaaaacacacacatacataattgtg

SEQ ID NO: 5801817 - DNA, 25 bp, Homo sapien
agcttcctgagtgcacaatgcagaa

SEQ ID NO: 5801818 - DNA, 25 bp, Homo sapien
ctgaactagttgagagagtagtttt

SEQ ID NO: 5801819 - DNA, 25 bp, Homo sapien
tccaccaccgaccctgcccccatct

SEQ ID NO: 5801820 - DNA, 25 bp, Homo sapien
ggcaacttcgtcgagtccatggcgc

SEQ ID NO: 5801821 - DNA, 25 bp, Homo sapien
cccctctgagagccccagcccacaa

SEQ ID NO: 5801822 - DNA, 25 bp, Homo sapien
atgggcgtcctttgggtgactcgcc

SEQ ID NO: 5801823 - DNA, 25 bp, Homo sapien
ccgctcttgccctgccgccgcctcc

SEQ ID NO: 5801824 - DNA, 25 bp, Homo sapien
tcttcaacctgggccacctctcgca

SEQ ID NO: 5801825 - DNA, 25 bp, Homo sapien
ctgcatgcggccgggcactgggaac

SEQ ID NO: 5801826 - DNA, 25 bp, Homo sapien
aacagctgtgccactgcaggagaga

SEQ ID NO: 5801827 - DNA, 25 bp, Homo sapien
cctggatgaaagagtctcgacagaa

SEQ ID NO: 5801828 - DNA, 25 bp, Homo sapien
ttctgcctgctccatccagagctct

SEQ ID NO: 5801829 - DNA, 25 bp, Homo sapien
ttcacccaccaatcctggaggtgga

SEQ ID NO: 5801830 - DNA, 25 bp, Homo sapien
gagtccatggcgcccgcgtccgggc

SEQ ID NO: 5801831 - DNA, 25 bp, Homo sapien
tcgccataaatcagccgcaaggatc

SEQ ID NO: 5801832 - DNA, 25 bp, Homo sapien
acggcgccactcagcagctgcctgc

SEQ ID NO: 5801833 - DNA, 25 bp, Homo sapien
ccctccatgggcgtcctttgggtga

SEQ ID NO: 5801834 - DNA, 25 bp, Homo sapien
agtccccctggtctgaactagttga

SEQ ID NO: 5801835 - DNA, 25 bp, Homo sapien
cgcccgcgtccgggcctgtcttcaa

SEQ ID NO: 5801836 - DNA, 25 bp, Homo sapien
caggcccagcatccaagcgggtacg

SEQ ID NO: 5801837 - DNA, 25 bp, Homo sapien
ttcgagccccatcccatggcgagca

SEQ ID NO: 5801838 - DNA, 25 bp, Homo sapien
ggcccagctctctcaggattcagca

SEQ ID NO: 5801839 - DNA, 25 bp, Homo sapien
ccgcgccgcgtggagatggccaacc

SEQ ID NO: 5801840 - DNA, 25 bp, Homo sapien
tcccaaaggtaagtctgagacccat

SEQ ID NO: 5801841 - DNA, 25 bp, Homo sapien
actagttgagagagtagttttgaac

SEQ ID NO: 5801842 - DNA, 25 bp, Homo sapien
ttatttgagcagggtcagcaggccc

SEQ ID NO: 5801843 - DNA, 25 bp, Homo sapien
ggccagctgccgccagtgcccggcc

SEQ ID NO: 5801844 - DNA, 25 bp, Homo sapien
tccagccgagcttaggaattcgctt

SEQ ID NO: 5801845 - DNA, 25 bp, Homo sapien
tgcttactatgaaaacccaggactg

SEQ ID NO: 5801846 - DNA, 25 bp, Homo sapien
cgaccctgcccccatcttcacccac

SEQ ID NO: 5801847 - DNA, 25 bp, Homo sapien
aaccggcgcatgaagtacaagaagg

SEQ ID NO: 5801848 - DNA, 25 bp, Homo sapien
tctcaggattcagcagacattggag

SEQ ID NO: 5801849 - DNA, 25 bp, Homo sapien
caaaggtgggcccaatgcttctagc

SEQ ID NO: 5801850 - DNA, 25 bp, Homo sapien
aatctcacggaacgccagatcaaga

SEQ ID NO: 5801851 - DNA, 25 bp, Homo sapien
gggccacctctcgcacccgtcgtcg

SEQ ID NO: 5801852 - DNA, 25 bp, Homo sapien
gcccgaactcgcggcaaaattacct

SEQ ID NO: 5801853 - DNA, 25 bp, Homo sapien
tccgggcctgtcttcaacctgggcc

SEQ ID NO: 5801854 - DNA, 25 bp, Homo sapien
ctgcgaggacaagagcccgccaggc

SEQ ID NO: 5801855 - DNA, 25 bp, Homo sapien
gaccttaatttatattctccttcct

SEQ ID NO: 5801856 - DNA, 25 bp, Homo sapien
cgacgcgccctcgccgcctgctttc

SEQ ID NO: 5801857 - DNA, 25 bp, Homo sapien
gccctcgccgcctgctttcgccaaa

SEQ ID NO: 5801858 - DNA, 25 bp, Homo sapien
cctgcccccatcttcacccaccaat

SEQ ID NO: 5801859 - DNA, 25 bp, Homo sapien
cagctggtggaattggaaaaggaat

SEQ ID NO: 5801860 - DNA, 25 bp, Homo sapien
ggccgcgccgcgtggagatggccaa

SEQ ID NO: 5801861 - DNA, 25 bp, Homo sapien
ccccttccccgctcttgccctgccg

SEQ ID NO: 5801862 - DNA, 25 bp, Homo sapien
ccctggacactgactatccaggttc

SEQ ID NO: 5801863 - DNA, 25 bp, Homo sapien
agcttaggaattcgcttccaggccg

SEQ ID NO: 5801864 - DNA, 25 bp, Homo sapien
accccctgctgctgccagctccctg

SEQ ID NO: 5801865 - DNA, 25 bp, Homo sapien
gcggaccaagggactccaatctggt

SEQ ID NO: 5801866 - DNA, 25 bp, Homo sapien
aatcctggaggtggagtgcctgcca

SEQ ID NO: 5801867 - DNA, 25 bp, Homo sapien
tacacgagcgcgcagctggtggaat

SEQ ID NO: 5801868 - DNA, 25 bp, Homo sapien
gactacagttgcgccgcgcagattc

SEQ ID NO: 5801869 - DNA, 25 bp, Homo sapien
gtctcaggcctccagcggcggaggc

SEQ ID NO: 5801870 - DNA, 25 bp, Homo sapien
cgccagatcaagatctggttccaga

SEQ ID NO: 5801871 - DNA, 25 bp, Homo sapien
tgtacggcctggccgcctacacggc

SEQ ID NO: 5801872 - DNA, 25 bp, Homo sapien
atctggttccagaaccggcgcatga

SEQ ID NO: 5801873 - DNA, 25 bp, Homo sapien
ttgagcagggtcagcaggccctgga

SEQ ID NO: 5801874 - DNA, 25 bp, Homo sapien
aaaggaattccacttcaaccgctac

SEQ ID NO: 5801875 - DNA, 25 bp, Homo sapien
tatccttgtctgaatgtatttatgt

SEQ ID NO: 5801876 - DNA, 25 bp, Homo sapien
cagtgccacatactgcggaccaagg

SEQ ID NO: 5801877 - DNA, 25 bp, Homo sapien
atggaccttgcgaccctcatcccac

SEQ ID NO: 5801878 - DNA, 25 bp, Homo sapien
cagcctcctggtctgaactcagagc

SEQ ID NO: 5801879 - DNA, 25 bp, Homo sapien
ctcctcagccaccatcagcaagcag

SEQ ID NO: 5801880 - DNA, 25 bp, Homo sapien
ttggaggctatggctacagcaaaac

SEQ ID NO: 5801881 - DNA, 25 bp, Homo sapien
gtagagtcaggaagcccggtggcgt

SEQ ID NO: 5801882 - DNA, 25 bp, Homo sapien
cagccagcctcctggtctgaactca

SEQ ID NO: 5801883 - DNA, 25 bp, Homo sapien
ggcgaccgggcctcccctccatggg

SEQ ID NO: 5801884 - DNA, 25 bp, Homo sapien
agcccacaaaggagctgaactcaat

SEQ ID NO: 5801885 - DNA, 25 bp, Homo sapien
ggctacagcaccccccaccagccct

SEQ ID NO: 5801886 - DNA, 25 bp, Homo sapien
tactccggccagctgccgccagtgc

SEQ ID NO: 5801887 - DNA, 25 bp, Homo sapien
ggttctgcctgctccatccagagct

SEQ ID NO: 5801888 - DNA, 25 bp, Homo sapien
agtttattgatttcaaattgtctgg

SEQ ID NO: 5801889 - DNA, 25 bp, Homo sapien
agtggtagtcaatgttatttgagca

SEQ ID NO: 5801890 - DNA, 25 bp, Homo sapien
ggaccaagggactccaatctggtaa

SEQ ID NO: 5801891 - DNA, 25 bp, Homo sapien
cgtcggccagcgtggactacagttg

SEQ ID NO: 5801892 - DNA, 25 bp, Homo sapien
aacggcggcggcttcgccagcgcca

SEQ ID NO: 5801893 - DNA, 25 bp, Homo sapien
gaagcccggtggcgtggcacaacac

SEQ ID NO: 5801894 - DNA, 25 bp, Homo sapien
gtactattggaacaaatatttagaa

SEQ ID NO: 5801895 - DNA, 25 bp, Homo sapien
ccaatcctggaggtggagtgcctgc

SEQ ID NO: 5801896 - DNA, 25 bp, Homo sapien
agtcctcaccacagtttattgattt

SEQ ID NO: 5801897 - DNA, 25 bp, Homo sapien
ctagctcctcagccaccatcagcaa

SEQ ID NO: 5801898 - DNA, 25 bp, Homo sapien
tcctcaccacagtttattgatttca

SEQ ID NO: 5801899 - DNA, 25 bp, Homo sapien
gagcaacggcggcggcttcgccagc

SEQ ID NO: 5801900 - DNA, 25 bp, Homo sapien
aaattgtctggtactattggaacaa

SEQ ID NO: 5801901 - DNA, 25 bp, Homo sapien
gccgctggccacgtggcctactccg

SEQ ID NO: 5801902 - DNA, 25 bp, Homo sapien
ttcccctggatgaaagagtctcgac

SEQ ID NO: 5801903 - DNA, 25 bp, Homo sapien
gtatttattatttgaagcgagtcat

SEQ ID NO: 5801904 - DNA, 25 bp, Homo sapien
gggacgactgccggaggctcccaaa

SEQ ID NO: 5801905 - DNA, 25 bp, Homo sapien
atcacagcccaatatgtacggcctg

SEQ ID NO: 5801906 - DNA, 25 bp, Homo sapien
aagaagcccaaaggtgggcccaatg

SEQ ID NO: 5801907 - DNA, 25 bp, Homo sapien
tggcgagcaacggcggcggcttcgc

SEQ ID NO: 5801908 - DNA, 25 bp, Homo sapien
cagagctctgcccctctgagagccc

SEQ ID NO: 5801909 - DNA, 25 bp, Homo sapien
tcggccagcgtggactacagttgcg

SEQ ID NO: 5801910 - DNA, 25 bp, Homo sapien
tcacctccttagtccccctggtctg

SEQ ID NO: 5801911 - DNA, 25 bp, Homo sapien
gtcatttcgttccctgattatttat

SEQ ID NO: 5801912 - DNA, 25 bp, Homo sapien
tgtagatttatccagccgagcttag

SEQ ID NO: 5801913 - DNA, 25 bp, Homo sapien
gtgggggccacatttcacctcctta

SEQ ID NO: 5801914 - DNA, 25 bp, Homo sapien
agaaggccaagggcatcctgcactc

SEQ ID NO: 5801915 - DNA, 25 bp, Homo sapien
ggggtggtggcagccagcctcctgg

SEQ ID NO: 5801916 - DNA, 25 bp, Homo sapien
tgctttcgccaaatcacagcccaat

SEQ ID NO: 5801917 - DNA, 25 bp, Homo sapien
cagcccaatatgtacggcctggccg

SEQ ID NO: 5801918 - DNA, 25 bp, Homo sapien
ttctcaaaaaccacagtcctcacca

SEQ ID NO: 5801919 - DNA, 25 bp, Homo sapien
caggagagagctgcgaggacaagag

SEQ ID NO: 5801920 - DNA, 25 bp, Homo sapien
ggacaagagcccgccaggcccagca

SEQ ID NO: 5801921 - DNA, 25 bp, Homo sapien
aaatttgacagtgccacatactgcg

SEQ ID NO: 5801922 - DNA, 25 bp, Homo sapien
cacctctcgcacccgtcgtcggcca

SEQ ID NO: 5801923 - DNA, 25 bp, Homo sapien
gttgagagagtagttttgaacagtc

SEQ ID NO: 5801924 - DNA, 25 bp, Homo sapien
cctccaccaccgaccctgcccccat

SEQ ID NO: 5801925 - DNA, 25 bp, Homo sapien
aattcgcttccaggccgtgggggcc

SEQ ID NO: 5801926 - DNA, 25 bp, Homo sapien
ccaccaccatggaccttgcgaccct

SEQ ID NO: 5801927 - DNA, 25 bp, Homo sapien
tcgccgcctgctttcgccaaatcac

SEQ ID NO: 5801928 - DNA, 25 bp, Homo sapien
tcagccgcaaggatccttccctgta

SEQ ID NO: 5801929 - DNA, 25 bp, Homo sapien
tgttatttgagcagggtcagcaggc

SEQ ID NO: 5801930 - DNA, 25 bp, Homo sapien
gccgcctcccgggtctcaggcctcc

SEQ ID NO: 5801931 - DNA, 25 bp, Homo sapien
gcgggtacgcacggcatacacgagc

SEQ ID NO: 5801932 - DNA, 25 bp, Homo sapien
cagaagcgctacgcagcgccggagt

SEQ ID NO: 5801933 - DNA, 25 bp, Homo sapien
tcctgagtgcacaatgcagaaggct

SEQ ID NO: 5801934 - DNA, 25 bp, Homo sapien
gccgcgcagattccaggcaaccacc

SEQ ID NO: 5801935 - DNA, 25 bp, Homo sapien
gcccgcgtctagcttagtttcagag

SEQ ID NO: 5801936 - DNA, 25 bp, Homo sapien
acacttacggctacagcacccccca

SEQ ID NO: 5801937 - DNA, 25 bp, Homo sapien
cctggcccgcgtctagcttagtttc

SEQ ID NO: 5801938 - DNA, 25 bp, Homo sapien
tcaggaagcccggtggcgtggcaca

SEQ ID NO: 5801939 - DNA, 25 bp, Homo sapien
tgaatgtatttatgtgtatatttgt

SEQ ID NO: 5801940 - DNA, 25 bp, Homo sapien
gaagcgctacgcagcgccggagttc

SEQ ID NO: 5801941 - DNA, 25 bp, Homo sapien
atgcttctagctcctcagccaccat

SEQ ID NO: 5801942 - DNA, 25 bp, Homo sapien
cagaagaacagctgtgccactgcag

SEQ ID NO: 5801943 - DNA, 25 bp, Homo sapien
ccctgagcgcagcccaccgctcggc

SEQ ID NO: 5801944 - DNA, 25 bp, Homo sapien
cccaccgctcggcggcgccgctggc

SEQ ID NO: 5801945 - DNA, 25 bp, Homo sapien
cagggacgactgccggaggctccca

SEQ ID NO: 5801946 - DNA, 25 bp, Homo sapien
cctcgccgcctgctttcgccaaatc

SEQ ID NO: 5801947 - DNA, 25 bp, Homo sapien
agttttgaacagtcgtaaccgtggc

SEQ ID NO: 5801948 - DNA, 25 bp, Homo sapien
agcaagcagatcttcccctggatga

SEQ ID NO: 5801949 - DNA, 25 bp, Homo sapien
ggcggcgccgctggccacgtggcct

SEQ ID NO: 5801950 - DNA, 25 bp, Homo sapien
cccaaaggtgggcccaatgcttcta

SEQ ID NO: 5801951 - DNA, 25 bp, Homo sapien
gtctgagacccatcggcggcgcgcc

SEQ ID NO: 5801952 - DNA, 25 bp, Homo sapien
gcacaacacactttggtcatttctc

SEQ ID NO: 5801953 - DNA, 25 bp, Homo sapien
cgccagcgccaacctgcagggcagc

SEQ ID NO: 5801954 - DNA, 25 bp, Homo sapien
tgccactgcaggagagagctgcgag

SEQ ID NO: 5801955 - DNA, 25 bp, Homo sapien
gttccctgattatttatccttgtct

SEQ ID NO: 5801956 - DNA, 25 bp, Homo sapien
gaactcaatggcagctgcatgcggc

SEQ ID NO: 5801957 - DNA, 25 bp, Homo sapien
agttcgagccccatcccatggcgag

SEQ ID NO: 5801958 - DNA, 25 bp, Homo sapien
aacctgcagggcagcccggtgtacg

SEQ ID NO: 5801959 - DNA, 25 bp, Homo sapien
ccggagttcgagccccatcccatgg

SEQ ID NO: 5801960 - DNA, 25 bp, Homo sapien
gcagccaccacaaccccctcctcca

SEQ ID NO: 5801961 - DNA, 25 bp, Homo sapien
tactatgaaaacccaggactgtttg

SEQ ID NO: 5801962 - DNA, 25 bp, Homo sapien
attggaggtggcagtgaaggataca

SEQ ID NO: 5801963 - DNA, 25 bp, Homo sapien
ctgagacccatcggcggcgcgccct

SEQ ID NO: 5801964 - DNA, 25 bp, Homo sapien
aatatgtacggcctggccgcctaca

SEQ ID NO: 5801965 - DNA, 25 bp, Homo sapien
gcggccgggcactgggaacagccag

SEQ ID NO: 5801966 - DNA, 25 bp, Homo sapien
gactgtttggaggctatggctacag

SEQ ID NO: 5801967 - DNA, 25 bp, Homo sapien
ggaggctcccaaactgacgcatctg

SEQ ID NO: 5801968 - DNA, 25 bp, Homo sapien
ggcggaggcgcaggcgaccgggcct

SEQ ID NO: 5801969 - DNA, 25 bp, Homo sapien
gattaagaccgcaaattgtccttca

SEQ ID NO: 5801970 - DNA, 25 bp, Homo sapien
aaggatccttccctgtaaatttgac

SEQ ID NO: 5801971 - DNA, 25 bp, Homo sapien
ttcagagaccttaatttatattctc

SEQ ID NO: 5801972 - DNA, 25 bp, Homo sapien
ccagcgccaacctgcagggcagccc

SEQ ID NO: 5801973 - DNA, 25 bp, Homo sapien
ctgctccatccagagctctgcccct

SEQ ID NO: 5801974 - DNA, 25 bp, Homo sapien
gtcctttgggtgactcgccataaat

SEQ ID NO: 5801975 - DNA, 25 bp, Homo sapien
ccagagcttggagagtcttgggcct

SEQ ID NO: 5801976 - DNA, 25 bp, Homo sapien
tgtctggtactattggaacaaatat

SEQ ID NO: 5801977 - DNA, 25 bp, Homo sapien
atggtgtcccaaaggtaagtctgag

SEQ ID NO: 5801978 - DNA, 25 bp, Homo sapien
tgtccttcatgggtagagtcaggaa

SEQ ID NO: 5801979 - DNA, 25 bp, Homo sapien
aaggccaagggcatcctgcactcgc

SEQ ID NO: 5801980 - DNA, 25 bp, Homo sapien
gacagtgccacatactgcggaccaa

SEQ ID NO: 5801981 - DNA, 25 bp, Homo sapien
cactcgccggctagccagtcccctg

SEQ ID NO: 5801982 - DNA, 25 bp, Homo sapien
ctgtagcggccgccgccagcccgaa

SEQ ID NO: 5801983 - DNA, 25 bp, Homo sapien
gacagaactccaagcagaagaacag

SEQ ID NO: 5801984 - DNA, 25 bp, Homo sapien
aggtaagtctgagacccatcggcgg

SEQ ID NO: 5801985 - DNA, 25 bp, Homo sapien
tctcttgctgtagtggtggggtaga

SEQ ID NO: 5801986 - DNA, 25 bp, Homo sapien
cctgcactcgccggctagccagtcc

SEQ ID NO: 5801987 - DNA, 25 bp, Homo sapien
acagatatcaaaagaaacctgaaga

SEQ ID NO: 5801988 - DNA, 25 bp, Homo sapien
caacctgctgaatctcacggaacgc

SEQ ID NO: 5801989 - DNA, 25 bp, Homo sapien
gctctgcccctctgagagccccagc

SEQ ID NO: 5801990 - DNA, 25 bp, Homo sapien
aggaattccacttcaaccgctactt

SEQ ID NO: 5801991 - DNA, 25 bp, Homo sapien
tccaggccgtgggggccacatttca

SEQ ID NO: 5801992 - DNA, 25 bp, Homo sapien
acctccttagtccccctggtctgaa

SEQ ID NO: 5801993 - DNA, 25 bp, Homo sapien
gattccaggcaaccaccaccatgga

SEQ ID NO: 5801994 - DNA, 25 bp, Homo sapien
gtagcggccgccgccagcccgaact

SEQ ID NO: 5801995 - DNA, 25 bp, Homo sapien
aggctgcttactatgaaaacccagg

SEQ ID NO: 5801996 - DNA, 25 bp, Homo sapien
tcgtaaccgtggctggtgtttgtag

SEQ ID NO: 5801997 - DNA, 25 bp, Homo sapien
ggaattcgcttccaggccgtggggg

SEQ ID NO: 5801998 - DNA, 25 bp, Homo sapien
tccacttcaaccgctacttgtgccg

SEQ ID NO: 5801999 - DNA, 25 bp, Homo sapien
cctgggggccggcccagctctctca

SEQ ID NO: 5802000 - DNA, 25 bp, Homo sapien
cgcagattccaggcaaccaccacca

SEQ ID NO: 5802001 - DNA, 25 bp, Homo sapien
ggcgcatgaagtacaagaaggacca

SEQ ID NO: 5802002 - DNA, 25 bp, Homo sapien
tatttgtagatttatccagccgagc

SEQ ID NO: 5802003 - DNA, 25 bp, Homo sapien
cgccgccagcccgaactcgcggcaa

SEQ ID NO: 5802004 - DNA, 25 bp, Homo sapien
attatttatccttgtctgaatgtat

SEQ ID NO: 5802005 - DNA, 25 bp, Homo sapien
tcgttccctgattatttatccttgt

SEQ ID NO: 5802006 - DNA, 25 bp, Homo sapien
cagggcagcccggtgtacgtgggcg

SEQ ID NO: 5802007 - DNA, 25 bp, Homo sapien
ggcagccagcctcctggtctgaact

SEQ ID NO: 5802008 - DNA, 25 bp, Homo sapien
ccagaaccggcgcatgaagtacaag

SEQ ID NO: 5802009 - DNA, 25 bp, Homo sapien
cgccaaatcacagcccaatatgtac

SEQ ID NO: 5802010 - DNA, 25 bp, Homo sapien
agcagctgcctgccacaacagaagc

SEQ ID NO: 5802011 - DNA, 25 bp, Homo sapien
ggccgggcactgggaacagccaggg

SEQ ID NO: 5802012 - DNA, 25 bp, Homo sapien
acaacagaagcgctacgcagcgccg

SEQ ID NO: 5802013 - DNA, 25 bp, Homo sapien
gcgccgcgcagattccaggcaacca

SEQ ID NO: 5802014 - DNA, 25 bp, Homo sapien
atccttccctgtaaatttgacagtg

SEQ ID NO: 5802015 - DNA, 25 bp, Homo sapien
tccccctggtctgaactagttgaga

SEQ ID NO: 5802016 - DNA, 25 bp, Homo sapien
cctacgacgcgccctcgccgcctgc

SEQ ID NO: 5802017 - DNA, 25 bp, Homo sapien
tgaagagcctacaaaaaaaaaaaga

SEQ ID NO: 5802018 - DNA, 25 bp, Homo sapien
gtttcagagaccttaatttatattc

SEQ ID NO: 5802019 - DNA, 25 bp, Homo sapien
gccacatttcacctccttagtcccc

SEQ ID NO: 5802020 - DNA, 25 bp, Homo sapien
cgtggagatggccaacctgctgaat

SEQ ID NO: 5802021 - DNA, 25 bp, Homo sapien
cctctgagagccccagcccacaaag

SEQ ID NO: 5802022 - DNA, 25 bp, Homo sapien
tcccgggtctcaggcctccagcggc

SEQ ID NO: 5802023 - DNA, 25 bp, Homo sapien
gtgggcggcaacttcgtcgagtcca

SEQ ID NO: 5802024 - DNA, 25 bp, Homo sapien
ctcctccaccaccgaccctgccccc

SEQ ID NO: 5802025 - DNA, 25 bp, Homo sapien
gccctgccgccgcctcccgggtctc

SEQ ID NO: 5802026 - DNA, 25 bp, Homo sapien
ccagtgcccggcctggcctacgacg

SEQ ID NO: 5802027 - DNA, 25 bp, Homo sapien
cagcaaaactacggacacttacggc

SEQ ID NO: 5802028 - DNA, 25 bp, Homo sapien
gagcccgccaggcccagcatccaag

SEQ ID NO: 5802029 - DNA, 25 bp, Homo sapien
ctgtttggaggctatggctacagca

SEQ ID NO: 5802030 - DNA, 25 bp, Homo sapien
acagttgcgccgcgcagattccagg

SEQ ID NO: 5802031 - DNA, 25 bp, Homo sapien
tacttgtgccggccgcgccgcgtgg

SEQ ID NO: 5802032 - DNA, 25 bp, Homo sapien
atttctcaaaaaccacagtcctcac

SEQ ID NO: 5802033 - DNA, 25 bp, Homo sapien
ggggccggcccagctctctcaggat

SEQ ID NO: 5802034 - DNA, 25 bp, Homo sapien
cttactatgaaaacccaggactgtt

SEQ ID NO: 5802035 - DNA, 25 bp, Homo sapien
cctgctttcgccaaatcacagccca

SEQ ID NO: 5802036 - DNA, 25 bp, Homo sapien
ggtgggcccaatgcttctagctcct

SEQ ID NO: 5802037 - DNA, 25 bp, Homo sapien
ttcgccagcgccaacctgcagggca

SEQ ID NO: 5802038 - DNA, 25 bp, Homo sapien
tgcccccatcttcacccaccaatcc

SEQ ID NO: 5802039 - DNA, 25 bp, Homo sapien
ctcaggcctccagcggcggaggcgc

SEQ ID NO: 5802040 - DNA, 25 bp, Homo sapien
taatggtgtcccaaaggtaagtctg

SEQ ID NO: 5802041 - DNA, 25 bp, Homo sapien
gaaggaccagaaggccaagggcatc

SEQ ID NO: 5802042 - DNA, 25 bp, Homo sapien
atgcggccgggcactgggaacagcc

SEQ ID NO: 5802043 - DNA, 25 bp, Homo sapien
aatcagccgcaaggatccttccctg

SEQ ID NO: 5802044 - DNA, 25 bp, Homo sapien
caaaattcaagaaaacacacacata

SEQ ID NO: 5802045 - DNA, 25 bp, Homo sapien
tctgcccctctgagagccccagccc

SEQ ID NO: 5802046 - DNA, 25 bp, Homo sapien
tatccaggttctgcctgctccatcc

SEQ ID NO: 5802047 - DNA, 25 bp, Homo sapien
gatggccaacctgctgaatctcacg

SEQ ID NO: 5802048 - DNA, 25 bp, Homo sapien
ccaccatcagcaagcagatcttccc

SEQ ID NO: 5802049 - DNA, 25 bp, Homo sapien
gagcagggtcagcaggccctggagc

SEQ ID NO: 5802050 - DNA, 25 bp, Homo sapien
atatcaaaagaaacctgaagagcct

SEQ ID NO: 5802051 - DNA, 25 bp, Homo sapien
tcacctggagcctgggggccggccc

SEQ ID NO: 5802052 - DNA, 25 bp, Homo sapien
caaaattacctctcttgctgtagtg

SEQ ID NO: 5802053 - DNA, 25 bp, Homo sapien
ccacagtcctcaccacagtttattg

SEQ ID NO: 5802054 - DNA, 25 bp, Homo sapien
caggccctggagcttcctgagtgca

SEQ ID NO: 5802055 - DNA, 25 bp, Homo sapien
ggtgggggtggtggcagccagcctc

SEQ ID NO: 5802056 - DNA, 25 bp, Homo sapien
cgcgtccgggcctgtcttcaacctg

SEQ ID NO: 5802057 - DNA, 25 bp, Homo sapien
catactgcggaccaagggactccaa

SEQ ID NO: 5802058 - DNA, 25 bp, Homo sapien
aagacaaaattcaagaaaacacaca

SEQ ID NO: 5802059 - DNA, 25 bp, Homo sapien
tctcggcccaccactcgtctcaggg

SEQ ID NO: 5802060 - DNA, 25 bp, Homo sapien
ctatctgtatttattatttgaagcg

SEQ ID NO: 5802061 - DNA, 25 bp, Homo sapien
gaactccaagcagaagaacagctgt

SEQ ID NO: 5802062 - DNA, 25 bp, Homo sapien
gcagcgccggagttcgagccccatc

SEQ ID NO: 5802063 - DNA, 25 bp, Homo sapien
cctctcgcacccgtcgtcggccagc

SEQ ID NO: 5802064 - DNA, 25 bp, Homo sapien
gggtacgcacggcatacacgagcgc

SEQ ID NO: 5802065 - DNA, 25 bp, Homo sapien
attgcatcggactaaactatctgta

SEQ ID NO: 5802066 - DNA, 25 bp, Homo sapien
cggcctggcctacgacgcgccctcg

SEQ ID NO: 5802067 - DNA, 25 bp, Homo sapien
tgggcctggcccgcgtctagcttag

SEQ ID NO: 5802068 - DNA, 25 bp, Homo sapien
tggaaaaggaattccacttcaaccg

SEQ ID NO: 5802069 - DNA, 25 bp, Homo sapien
tgcctgccaagaagcccaaaggtgg

SEQ ID NO: 5802070 - DNA, 25 bp, Homo sapien
aagaccgcaaattgtccttcatggg

SEQ ID NO: 5802071 - DNA, 25 bp, Homo sapien
aaaggtaagtctgagacccatcggc

SEQ ID NO: 5802072 - DNA, 25 bp, Homo sapien
gtaagtctgagacccatcggcggcg

SEQ ID NO: 5802073 - DNA, 25 bp, Homo sapien
gcctccacagatatcaaaagaaacc

SEQ ID NO: 5802074 - DNA, 25 bp, Homo sapien
gcacaatgcagaaggctgcttacta

SEQ ID NO: 5802075 - DNA, 25 bp, Homo sapien
acggctacagcaccccccaccagcc

SEQ ID NO: 5802076 - DNA, 25 bp, Homo sapien
acaatgcagaaggctgcttactatg

SEQ ID NO: 5802077 - DNA, 25 bp, Homo sapien
gtctagcttagtttcagagacctta

SEQ ID NO: 5802078 - DNA, 25 bp, Homo sapien
ccaaaggtaagtctgagacccatcg

SEQ ID NO: 5802079 - DNA, 25 bp, Homo sapien
tttcgttccctgattatttatcctt

SEQ ID NO: 5802080 - DNA, 25 bp, Homo sapien
ccacgtggcctactccggccagctg

SEQ ID NO: 5802081 - DNA, 25 bp, Homo sapien
tttgaagcgagtcatttcgttccct

SEQ ID NO: 5802082 - DNA, 25 bp, Homo sapien
cagctctctcaggattcagcagaca

SEQ ID NO: 5802083 - DNA, 25 bp, Homo sapien
tttgggtgactcgccataaatcagc

SEQ ID NO: 5802084 - DNA, 25 bp, Homo sapien
aaatcacagcccaatatgtacggcc

SEQ ID NO: 5802085 - DNA, 25 bp, Homo sapien
gcctcctggtctgaactcagagcag

SEQ ID NO: 5802086 - DNA, 25 bp, Homo sapien
cagattccaggcaaccaccaccatg

SEQ ID NO: 5802087 - DNA, 25 bp, Homo sapien
attatttgaagcgagtcatttcgtt

SEQ ID NO: 5802088 - DNA, 25 bp, Homo sapien
ccccagcccacaaaggagctgaact

SEQ ID NO: 5802089 - DNA, 25 bp, Homo sapien
gcgaggacaagagcccgccaggccc

SEQ ID NO: 5802090 - DNA, 25 bp, Homo sapien
gaagcccaaaggtgggcccaatgct

SEQ ID NO: 5802091 - DNA, 25 bp, Homo sapien
cccgcgtccgggcctgtcttcaacc

SEQ ID NO: 5802092 - DNA, 25 bp, Homo sapien
catccagagctctgcccctctgaga

SEQ ID NO: 5802093 - DNA, 25 bp, Homo sapien
cccctggatgaaagagtctcgacag

SEQ ID NO: 5802094 - DNA, 25 bp, Homo sapien
ccactcagcagctgcctgccacaac

SEQ ID NO: 5802095 - DNA, 25 bp, Homo sapien
ctggagcttcctgagtgcacaatgc

SEQ ID NO: 5802096 - DNA, 25 bp, Homo sapien
gatgaaagagtctcgacagaactcc

SEQ ID NO: 5802097 - DNA, 25 bp, Homo sapien
cgcgtggagatggccaacctgctga

SEQ ID NO: 5802098 - DNA, 25 bp, Homo sapien
gaactagttgagagagtagttttga

SEQ ID NO: 5802099 - DNA, 25 bp, Homo sapien
ctgtaaatttgacagtgccacatac

SEQ ID NO: 5802100 - DNA, 25 bp, Homo sapien
gtacaagaaggaccagaaggccaag

SEQ ID NO: 5802101 - DNA, 25 bp, Homo sapien
gcatccaagcgggtacgcacggcat

SEQ ID NO: 5802102 - DNA, 25 bp, Homo sapien
agcgtggactacagttgcgccgcgc

SEQ ID NO: 5802103 - DNA, 25 bp, Homo sapien
acctgggccacctctcgcacccgtc

SEQ ID NO: 5802104 - DNA, 25 bp, Homo sapien
ggtgtttgtagttgacataaaggat

SEQ ID NO: 5802105 - DNA, 25 bp, Homo sapien
caacttcgtcgagtccatggcgccc

SEQ ID NO: 5802106 - DNA, 25 bp, Homo sapien
ggttccagaaccggcgcatgaagta

SEQ ID NO: 5802107 - DNA, 25 bp, Homo sapien
caggcgaccgggcctcccctccatg

SEQ ID NO: 5802108 - DNA, 25 bp, Homo sapien
cccggtggcgtggcacaacacactt

SEQ ID NO: 5802109 - DNA, 25 bp, Homo sapien
tccatccagagctctgcccctctga

SEQ ID NO: 5802110 - DNA, 25 bp, Homo sapien
gtaaggattgcatcggactaaacta

SEQ ID NO: 5802111 - DNA, 25 bp, Homo sapien
catgaagtacaagaaggaccagaag

SEQ ID NO: 5802112 - DNA, 25 bp, Homo sapien
cctggtctgaactcagagcagcagc

SEQ ID NO: 5802113 - DNA, 25 bp, Homo sapien
cttcaaccgctacttgtgccggccg

SEQ ID NO: 5802114 - DNA, 25 bp, Homo sapien
cgtggcacaacacactttggtcatt

SEQ ID NO: 5802115 - DNA, 25 bp, Homo sapien
tgccgtaaggattgcatcggactaa

SEQ ID NO: 5802116 - DNA, 25 bp, Homo sapien
cggcggcggcttcgccagcgccaac

SEQ ID NO: 5802117 - DNA, 25 bp, Homo sapien
ctgctgaatctcacggaacgccaga

SEQ ID NO: 5802118 - DNA, 25 bp, Homo sapien
agttgcgccgcgcagattccaggca

SEQ ID NO: 5802119 - DNA, 25 bp, Homo sapien
ggccagcgtggactacagttgcgcc

SEQ ID NO: 5802120 - DNA, 25 bp, Homo sapien
cacatttcacctccttagtccccct

SEQ ID NO: 5802121 - DNA, 25 bp, Homo sapien
ctggtgtttgtagttgacataaagg

SEQ ID NO: 5802122 - DNA, 25 bp, Homo sapien
ttattatttgaagcgagtcatttcg

SEQ ID NO: 5802123 - DNA, 25 bp, Homo sapien
gagggaccagagcttggagagtctt

SEQ ID NO: 5802124 - DNA, 25 bp, Homo sapien
ctgctgccagctccctggacactga

SEQ ID NO: 5802125 - DNA, 25 bp, Homo sapien
ggcgcccgcgtccgggcctgtcttc

SEQ ID NO: 5802126 - DNA, 25 bp, Homo sapien
cccctggtctgaactagttgagaga

SEQ ID NO: 5802127 - DNA, 25 bp, Homo sapien
tatattctccttcctgtgccgtaag

SEQ ID NO: 5802128 - DNA, 25 bp, Homo sapien
ttctagctcctcagccaccatcagc

SEQ ID NO: 5802129 - DNA, 25 bp, Homo sapien
cagagaccttaatttatattctcct

SEQ ID NO: 5802130 - DNA, 25 bp, Homo sapien
ttaagaccgcaaattgtccttcatg

SEQ ID NO: 5802131 - DNA, 25 bp, Homo sapien
atacagtggtagtcaatgttatttg

SEQ ID NO: 5802132 - DNA, 25 bp, Homo sapien
gtgcacaatgcagaaggctgcttac

SEQ ID NO: 5802133 - DNA, 25 bp, Homo sapien
tattgatttcaaattgtctggtact

SEQ ID NO: 5802134 - DNA, 25 bp, Homo sapien
cacagatctctcggcccaccactcg

SEQ ID NO: 5802135 - DNA, 25 bp, Homo sapien
tcacggaacgccagatcaagatctg

SEQ ID NO: 5802136 - DNA, 25 bp, Homo sapien
gagtcttgggcctggcccgcgtcta

SEQ ID NO: 5802137 - DNA, 25 bp, Homo sapien
gaattggaaaaggaattccacttca

SEQ ID NO: 5802138 - DNA, 25 bp, Homo sapien
gcagacattggaggtggcagtgaag

SEQ ID NO: 5802139 - DNA, 25 bp, Homo sapien
ccagctccctggacactgactatcc

SEQ ID NO: 5802140 - DNA, 25 bp, Homo sapien
tgtttgtagttgacataaaggatta

SEQ ID NO: 5802141 - DNA, 25 bp, Homo sapien
ttccagaaccggcgcatgaagtaca

SEQ ID NO: 5802142 - DNA, 25 bp, Homo sapien
ccttagtccccctggtctgaactag

SEQ ID NO: 5802143 - DNA, 25 bp, Homo sapien
tggagagtcttgggcctggcccgcg

SEQ ID NO: 5802144 - DNA, 25 bp, Homo sapien
gggcagcccggtgtacgtgggcggc

SEQ ID NO: 5802145 - DNA, 25 bp, Homo sapien
cacgagcgcgcagctggtggaattg

SEQ ID NO: 5802146 - DNA, 25 bp, Homo sapien
cctgcagggcagcccggtgtacgtg

SEQ ID NO: 5802147 - DNA, 25 bp, Homo sapien
ggacactgactatccaggttctgcc

SEQ ID NO: 5802148 - DNA, 25 bp, Homo sapien
caccagccctacccaccccctgctg

SEQ ID NO: 5802149 - DNA, 25 bp, Homo sapien
ctgaactcaatggcagctgcatgcg

SEQ ID NO: 5802150 - DNA, 25 bp, Homo sapien
ccaagggcatcctgcactcgccggc

SEQ ID NO: 5802151 - DNA, 25 bp, Homo sapien
cacaaaggagctgaactcaatggca

SEQ ID NO: 5802152 - DNA, 25 bp, Homo sapien
caagatctggttccagaaccggcgc

SEQ ID NO: 5802153 - DNA, 25 bp, Homo sapien
ccaccacaaccccctcctccaccac

SEQ ID NO: 5802154 - DNA, 25 bp, Homo sapien
accgaccctgcccccatcttcaccc

SEQ ID NO: 5802155 - DNA, 25 bp, Homo sapien
cttcatgggtagagtcaggaagccc

SEQ ID NO: 5802156 - DNA, 25 bp, Homo sapien
gcgcgccctgcagagggaccagagc

SEQ ID NO: 5802157 - DNA, 25 bp, Homo sapien
acacatacataattgtggtcacctg

SEQ ID NO: 5802158 - DNA, 25 bp, Homo sapien
atttgagcagggtcagcaggccctg

SEQ ID NO: 5802159 - DNA, 25 bp, Homo sapien
cttgcgaccctcatcccacctacac

SEQ ID NO: 5802160 - DNA, 25 bp, Homo sapien
ctcaaaaaccacagtcctcaccaca

SEQ ID NO: 5802161 - DNA, 25 bp, Homo sapien
gctctctcaggattcagcagacatt

SEQ ID NO: 5802162 - DNA, 25 bp, Homo sapien
gacgactgccggaggctcccaaact

SEQ ID NO: 5802163 - DNA, 25 bp, Homo sapien
taaatcagccgcaaggatccttccc

SEQ ID NO: 5802164 - DNA, 25 bp, Homo sapien
gaagaacagctgtgccactgcagga

SEQ ID NO: 5802165 - DNA, 25 bp, Homo sapien
agcccaaaggtgggcccaatgcttc

SEQ ID NO: 5802166 - DNA, 25 bp, Homo sapien
tcgcacccgtcgtcggccagcgtgg

SEQ ID NO: 5802167 - DNA, 25 bp, Homo sapien
ctcctggtctgaactcagagcagca

SEQ ID NO: 5802168 - DNA, 25 bp, Homo sapien
agcgccggagttcgagccccatccc

SEQ ID NO: 5802169 - DNA, 25 bp, Homo sapien
aactatctgtatttattatttgaag

SEQ ID NO: 5802170 - DNA, 25 bp, Homo sapien
catcttcacccaccaatcctggagg

SEQ ID NO: 5802171 - DNA, 25 bp, Homo sapien
ttggtcatttctcaaaaaccacagt

SEQ ID NO: 5802172 - DNA, 25 bp, Homo sapien
tatccagccgagcttaggaattcgc

SEQ ID NO: 5802173 - DNA, 25 bp, Homo sapien
actcgcggcaaaattacctctcttg

SEQ ID NO: 5802174 - DNA, 25 bp, Homo sapien
atgggtagagtcaggaagcccggtg

SEQ ID NO: 5802175 - DNA, 25 bp, Homo sapien
ccaggactgtttggaggctatggct

SEQ ID NO: 5802176 - DNA, 25 bp, Homo sapien
gcagcccggtgtacgtgggcggcaa

SEQ ID NO: 5802177 - DNA, 25 bp, Homo sapien
tgcatcggactaaactatctgtatt

SEQ ID NO: 5802178 - DNA, 25 bp, Homo sapien
gctgcttactatgaaaacccaggac

SEQ ID NO: 5802179 - DNA, 25 bp, Homo sapien
gagctctgcccctctgagagcccca

SEQ ID NO: 5802180 - DNA, 25 bp, Homo sapien
ctgtatttattatttgaagcgagtc

SEQ ID NO: 5802181 - DNA, 25 bp, Homo sapien
gcccgccaggcccagcatccaagcg

SEQ ID NO: 5802182 - DNA, 25 bp, Homo sapien
acttcgtcgagtccatggcgcccgc

SEQ ID NO: 5802183 - DNA, 25 bp, Homo sapien
gcgccctcgccgcctgctttcgcca

SEQ ID NO: 5802184 - DNA, 25 bp, Homo sapien
gtacgtgggcggcaacttcgtcgag

SEQ ID NO: 5802185 - DNA, 25 bp, Homo sapien
tactgcggaccaagggactccaatc

SEQ ID NO: 5802186 - DNA, 25 bp, Homo sapien
aagtctgagacccatcggcggcgcg

SEQ ID NO: 5802187 - DNA, 25 bp, Homo sapien
gaaaaggaattccacttcaaccgct

SEQ ID NO: 5802188 - DNA, 25 bp, Homo sapien
tagttgagagagtagttttgaacag

SEQ ID NO: 5802189 - DNA, 25 bp, Homo sapien
aaaggattaagaccgcaaattgtcc

SEQ ID NO: 5802190 - DNA, 25 bp, Homo sapien
caccgctcggcggcgccgctggcca

SEQ ID NO: 5802191 - DNA, 25 bp, Homo sapien
ggcctgtcttcaacctgggccacct

SEQ ID NO: 5802192 - DNA, 25 bp, Homo sapien
ccagcgtggactacagttgcgccgc

SEQ ID NO: 5802193 - DNA, 25 bp, Homo sapien
tgagagagtagttttgaacagtcgt

SEQ ID NO: 5802194 - DNA, 25 bp, Homo sapien
tacgacgcgccctcgccgcctgctt

SEQ ID NO: 5802195 - DNA, 25 bp, Homo sapien
tcagagcagcagccaccacaacccc

SEQ ID NO: 5802196 - DNA, 25 bp, Homo sapien
acagcaccccccaccagccctaccc

SEQ ID NO: 5802197 - DNA, 25 bp, Homo sapien
cctcccctccatgggcgtcctttgg

SEQ ID NO: 5802198 - DNA, 25 bp, Homo sapien
cctactccggccagctgccgccagt

SEQ ID NO: 5802199 - DNA, 25 bp, Homo sapien
cttgggcctggcccgcgtctagctt

SEQ ID NO: 5802200 - DNA, 25 bp, Homo sapien
gtggcctactccggccagctgccgc

SEQ ID NO: 5802201 - DNA, 25 bp, Homo sapien
ttccctgtaaatttgacagtgccac

SEQ ID NO: 5802202 - DNA, 25 bp, Homo sapien
acgcatctgtagcggccgccgccag

SEQ ID NO: 5802203 - DNA, 25 bp, Homo sapien
gccgccagtgcccggcctggcctac

SEQ ID NO: 5802204 - DNA, 25 bp, Homo sapien
gaactcagagcagcagccaccacaa

SEQ ID NO: 5802205 - DNA, 25 bp, Homo sapien
aaggtgggcccaatgcttctagctc

SEQ ID NO: 5802206 - DNA, 25 bp, Homo sapien
cggaggcgcaggcgaccgggcctcc

SEQ ID NO: 5802207 - DNA, 25 bp, Homo sapien
cttgtgccggccgcgccgcgtggag

SEQ ID NO: 5802208 - DNA, 25 bp, Homo sapien
attgtctggtactattggaacaaat

SEQ ID NO: 5802209 - DNA, 25 bp, Homo sapien
cccggcctggcctacgacgcgccct

SEQ ID NO: 5802210 - DNA, 25 bp, Homo sapien
tggccaacctgctgaatctcacgga

SEQ ID NO: 5802211 - DNA, 25 bp, Homo sapien
ctacggacacttacggctacagcac

SEQ ID NO: 5802212 - DNA, 25 bp, Homo sapien
ggcccaccactcgtctcagggacga

SEQ ID NO: 5802213 - DNA, 25 bp, Homo sapien
acctgctgaatctcacggaacgcca

SEQ ID NO: 5802214 - DNA, 25 bp, Homo sapien
ataattgtggtcacctggagcctgg

SEQ ID NO: 5802215 - DNA, 25 bp, Homo sapien
cgcctcccgggtctcaggcctccag

SEQ ID NO: 5802216 - DNA, 25 bp, Homo sapien
ctagcttagtttcagagaccttaat

SEQ ID NO: 5802217 - DNA, 25 bp, Homo sapien
actgccggaggctcccaaactgacg

SEQ ID NO: 5802218 - DNA, 25 bp, Homo sapien
ggcggcttcgccagcgccaacctgc

SEQ ID NO: 5802219 - DNA, 25 bp, Homo sapien
ttgtggtcacctggagcctgggggc

SEQ ID NO: 5802220 - DNA, 25 bp, Homo sapien
ggccctggagcttcctgagtgcaca

SEQ ID NO: 5802221 - DNA, 25 bp, Homo sapien
gtggcagccagcctcctggtctgaa

SEQ ID NO: 5802222 - DNA, 25 bp, Homo sapien
ggagcctgggggccggcccagctct

SEQ ID NO: 5802223 - DNA, 25 bp, Homo sapien
ttcagcagacattggaggtggcagt

SEQ ID NO: 5802224 - DNA, 25 bp, Homo sapien
tcgtctcagggacgactgccggagg

SEQ ID NO: 5802225 - DNA, 25 bp, Homo sapien
gtctgaactcagagcagcagccacc

SEQ ID NO: 5802226 - DNA, 25 bp, Homo sapien
gggtagagtcaggaagcccggtggc

SEQ ID NO: 5802227 - DNA, 25 bp, Homo sapien
accaagggactccaatctggtaatg

SEQ ID NO: 5802228 - DNA, 25 bp, Homo sapien
tcggactaaactatctgtatttatt

SEQ ID NO: 5802229 - DNA, 25 bp, Homo sapien
tcttcacccaccaatcctggaggtg

SEQ ID NO: 5802230 - DNA, 25 bp, Homo sapien
accgggcctcccctccatgggcgtc

SEQ ID NO: 5802231 - DNA, 25 bp, Homo sapien
gtggctggtgtttgtagttgacata

SEQ ID NO: 5802232 - DNA, 25 bp, Homo sapien
ccggccgcgccgcgtggagatggcc

SEQ ID NO: 5802233 - DNA, 25 bp, Homo sapien
agcagaagaacagctgtgccactgc

SEQ ID NO: 5802234 - DNA, 25 bp, Homo sapien
ggctggtgtttgtagttgacataaa

SEQ ID NO: 5802235 - DNA, 25 bp, Homo sapien
tacagcaaaactacggacacttacg

SEQ ID NO: 5802236 - DNA, 25 bp, Homo sapien
aaacccaggactgtttggaggctat

SEQ ID NO: 5802237 - DNA, 25 bp, Homo sapien
gacccatcggcggcgcgccctgcag

SEQ ID NO: 5802238 - DNA, 25 bp, Homo sapien
tttatattctccttcctgtgccgta

SEQ ID NO: 5802239 - DNA, 25 bp, Homo sapien
atctggtaatggtgtcccaaaggta

SEQ ID NO: 5802240 - DNA, 25 bp, Homo sapien
agagtcaggaagcccggtggcgtgg

SEQ ID NO: 5802241 - DNA, 25 bp, Homo sapien
atcctgcactcgccggctagccagt

SEQ ID NO: 5802242 - DNA, 25 bp, Homo sapien
aaggatacagtggtagtcaatgtta

SEQ ID NO: 5802243 - DNA, 25 bp, Homo sapien
attccacttcaaccgctacttgtgc

SEQ ID NO: 5802244 - DNA, 25 bp, Homo sapien
atcccatggcgagcaacggcggcgg

SEQ ID NO: 5802245 - DNA, 25 bp, Homo sapien
acagtcgtaaccgtggctggtgttt

SEQ ID NO: 5802246 - DNA, 25 bp, Homo sapien
aggattcagcagacattggaggtgg

SEQ ID NO: 5802247 - DNA, 25 bp, Homo sapien
gaaggctgcttactatgaaaaccca

SEQ ID NO: 5802248 - DNA, 25 bp, Homo sapien
ttaatttatattctccttcctgtgc

SEQ ID NO: 5802249 - DNA, 25 bp, Homo sapien
agcccggtggcgtggcacaacacac

SEQ ID NO: 5802250 - DNA, 25 bp, Homo sapien
ccccatcccatggcgagcaacggcg

SEQ ID NO: 5802251 - DNA, 25 bp, Homo sapien
tggcagtgaaggatacagtggtagt

SEQ ID NO: 5802252 - DNA, 25 bp, Homo sapien
agcggccgccgccagcccgaactcg

SEQ ID NO: 5802253 - DNA, 25 bp, Homo sapien
ttcgcttccaggccgtgggggccac

SEQ ID NO: 5802254 - DNA, 25 bp, Homo sapien
tcatcccacctacacagatctctcg

SEQ ID NO: 5802255 - DNA, 25 bp, Homo sapien
acactgactatccaggttctgcctg

SEQ ID NO: 5802256 - DNA, 25 bp, Homo sapien
gtgccacatactgcggaccaaggga

SEQ ID NO: 5802257 - DNA, 25 bp, Homo sapien
ggtcacctggagcctgggggccggc

SEQ ID NO: 5802258 - DNA, 25 bp, Homo sapien
agaacagctgtgccactgcaggaga

SEQ ID NO: 5802259 - DNA, 25 bp, Homo sapien
acttacggctacagcaccccccacc

SEQ ID NO: 5802260 - DNA, 25 bp, Homo sapien
ctccacagatatcaaaagaaacctg

SEQ ID NO: 5802261 - DNA, 25 bp, Homo sapien
aaattgtccttcatgggtagagtca

SEQ ID NO: 5802262 - DNA, 25 bp, Homo sapien
catcggcggcgcgccctgcagaggg

SEQ ID NO: 5802263 - DNA, 25 bp, Homo sapien
ccgaactcgcggcaaaattacctct

SEQ ID NO: 5802264 - DNA, 25 bp, Homo sapien
cagcccgaactcgcggcaaaattac

SEQ ID NO: 5802265 - DNA, 25 bp, Homo sapien
tctcgacagaactccaagcagaaga

SEQ ID NO: 5802266 - DNA, 25 bp, Homo sapien
ggcctactccggccagctgccgcca

SEQ ID NO: 5802267 - DNA, 25 bp, Homo sapien
gcggcggcttcgccagcgccaacct

SEQ ID NO: 5802268 - DNA, 25 bp, Homo sapien
gggggccacatttcacctccttagt

SEQ ID NO: 5802269 - DNA, 25 bp, Homo sapien
taggaattcgcttccaggccgtggg

SEQ ID NO: 5802270 - DNA, 25 bp, Homo sapien
gggcatcctgcactcgccggctagc

SEQ ID NO: 5802271 - DNA, 25 bp, Homo sapien
ctggagcctgggggccggcccagct

SEQ ID NO: 5802272 - DNA, 25 bp, Homo sapien
gctacttgtgccggccgcgccgcgt

SEQ ID NO: 5802273 - DNA, 25 bp, Homo sapien
cagccgagcttaggaattcgcttcc

SEQ ID NO: 5802274 - DNA, 25 bp, Homo sapien
cctctcttgctgtagtggtggggta

SEQ ID NO: 5802275 - DNA, 25 bp, Homo sapien
tggctacagcaaaactacggacact

SEQ ID NO: 5802276 - DNA, 25 bp, Homo sapien
ccaacctgcagggcagcccggtgta

SEQ ID NO: 5802277 - DNA, 25 bp, Homo sapien
gccaggcccagcatccaagcgggta

SEQ ID NO: 5802278 - DNA, 25 bp, Homo sapien
ttgccctgccgccgcctcccgggtc

SEQ ID NO: 5802279 - DNA, 25 bp, Homo sapien
gagtcatttcgttccctgattattt

SEQ ID NO: 5802280 - DNA, 25 bp, Homo sapien
tttcacctccttagtccccctggtc

SEQ ID NO: 5802281 - DNA, 25 bp, Homo sapien
tgccagctccctggacactgactat

SEQ ID NO: 5802282 - DNA, 25 bp, Homo sapien
tgcgaccctcatcccacctacacag

SEQ ID NO: 5802283 - DNA, 25 bp, Homo sapien
attacctctcttgctgtagtggtgg

SEQ ID NO: 5802284 - DNA, 25 bp, Homo sapien
tggaattggaaaaggaattccactt

SEQ ID NO: 5802285 - DNA, 25 bp, Homo sapien
gccataaatcagccgcaaggatcct

SEQ ID NO: 5802286 - DNA, 25 bp, Homo sapien
actgacgcatctgtagcggccgccg

SEQ ID NO: 5802287 - DNA, 25 bp, Homo sapien
ccgcaaggatccttccctgtaaatt

SEQ ID NO: 5802288 - DNA, 25 bp, Homo sapien
cctgccgccgcctcccgggtctcag

SEQ ID NO: 5802289 - DNA, 25 bp, Homo sapien
aaagagtctcgacagaactccaagc

SEQ ID NO: 5802290 - DNA, 25 bp, Homo sapien
tgtgccgtaaggattgcatcggact

SEQ ID NO: 5802291 - DNA, 25 bp, Homo sapien
ggcctggcccgcgtctagcttagtt

SEQ ID NO: 5802292 - DNA, 25 bp, Homo sapien
gtctcagggacgactgccggaggct

SEQ ID NO: 5802293 - DNA, 25 bp, Homo sapien
ggcaaaattacctctcttgctgtag

SEQ ID NO: 5802294 - DNA, 25 bp, Homo sapien
ggcccagcatccaagcgggtacgca

SEQ ID NO: 5802295 - DNA, 25 bp, Homo sapien
cagaaggctgcttactatgaaaacc

SEQ ID NO: 5802296 - DNA, 25 bp, Homo sapien
tgcccctctgagagccccagcccac

SEQ ID NO: 5802297 - DNA, 25 bp, Homo sapien
tagtttcagagaccttaatttatat

SEQ ID NO: 5802298 - DNA, 25 bp, Homo sapien
gtacgcacggcatacacgagcgcgc

SEQ ID NO: 5802299 - DNA, 25 bp, Homo sapien
actaaactatctgtatttattattt

SEQ ID NO: 5802300 - DNA, 25 bp, Homo sapien
ccggccagctgccgccagtgcccgg

SEQ ID NO: 5802301 - DNA, 25 bp, Homo sapien
cttgtctgaatgtatttatgtgtat

SEQ ID NO: 5802302 - DNA, 25 bp, Homo sapien
gccacctctcgcacccgtcgtcggc

SEQ ID NO: 5802303 - DNA, 25 bp, Homo sapien
ggactccaatctggtaatggtgtcc

SEQ ID NO: 5802304 - DNA, 25 bp, Homo sapien
aaacacacacatacataattgtggt

SEQ ID NO: 5802305 - DNA, 25 bp, Homo sapien
gctgccagctccctggacactgact

SEQ ID NO: 5802306 - DNA, 25 bp, Homo sapien
cactttggtcatttctcaaaaacca

SEQ ID NO: 5802307 - DNA, 25 bp, Homo sapien
gtttggaggctatggctacagcaaa

SEQ ID NO: 5802308 - DNA, 25 bp, Homo sapien
gggtctcaggcctccagcggcggag

SEQ ID NO: 5802309 - DNA, 25 bp, Homo sapien
ccggaggctcccaaactgacgcatc

SEQ ID NO: 5802310 - DNA, 25 bp, Homo sapien
agagcttggagagtcttgggcctgg

SEQ ID NO: 5802311 - DNA, 25 bp, Homo sapien
gctgaatctcacggaacgccagatc

SEQ ID NO: 5802312 - DNA, 25 bp, Homo sapien
tcaatgttatttgagcagggtcagc

SEQ ID NO: 5802313 - DNA, 25 bp, Homo sapien
ttagtccccctggtctgaactagtt

SEQ ID NO: 5802314 - DNA, 25 bp, Homo sapien
atttattatttgaagcgagtcattt

SEQ ID NO: 5802315 - DNA, 25 bp, Homo sapien
ggaggtggagtgcctgccaagaagc

SEQ ID NO: 5802316 - DNA, 25 bp, Homo sapien
cgcgcagattccaggcaaccaccac

SEQ ID NO: 5802317 - DNA, 25 bp, Homo sapien
tcatttctcaaaaaccacagtcctc

SEQ ID NO: 5802318 - DNA, 25 bp, Homo sapien
atctgtagcggccgccgccagcccg

SEQ ID NO: 5802319 - DNA, 25 bp, Homo sapien
accttgcgaccctcatcccacctac

SEQ ID NO: 5802320 - DNA, 25 bp, Homo sapien
gccacatactgcggaccaagggact

SEQ ID NO: 5802321 - DNA, 25 bp, Homo sapien
ttgaacagtcgtaaccgtggctggt

SEQ ID NO: 5802322 - DNA, 25 bp, Homo sapien
gctgtgccactgcaggagagagctg

SEQ ID NO: 5802323 - DNA, 25 bp, Homo sapien
gatcttcccctggatgaaagagtct

SEQ ID NO: 5802324 - DNA, 25 bp, Homo sapien
gcagctgcatgcggccgggcactgg

SEQ ID NO: 5802325 - DNA, 25 bp, Homo sapien
ctggtaatggtgtcccaaaggtaag

SEQ ID NO: 5802326 - DNA, 25 bp, Homo sapien
tttattgatttcaaattgtctggta

SEQ ID NO: 5802327 - DNA, 25 bp, Homo sapien
tcggcccaccactcgtctcagggac

SEQ ID NO: 5802328 - DNA, 25 bp, Homo sapien
cttccaggccgtgggggccacattt

SEQ ID NO: 5802329 - DNA, 25 bp, Homo sapien
gcaaccaccaccatggaccttgcga

SEQ ID NO: 5802330 - DNA, 25 bp, Homo sapien
ccaaactgacgcatctgtagcggcc

SEQ ID NO: 5802331 - DNA, 25 bp, Homo sapien
ctcaccacagtttattgatttcaaa

SEQ ID NO: 5802332 - DNA, 25 bp, Homo sapien
tgccaagaagcccaaaggtgggccc

SEQ ID NO: 5802333 - DNA, 25 bp, Homo sapien
tggtggcagccagcctcctggtctg

SEQ ID NO: 5802334 - DNA, 25 bp, Homo sapien
agagccccagcccacaaaggagctg

SEQ ID NO: 5802335 - DNA, 25 bp, Homo sapien
cgccagtgcccggcctggcctacga

SEQ ID NO: 5802336 - DNA, 25 bp, Homo sapien
ctacacggcgccactcagcagctgc

SEQ ID NO: 5802337 - DNA, 25 bp, Homo sapien
ccaaatcacagcccaatatgtacgg

SEQ ID NO: 5802338 - DNA, 25 bp, Homo sapien
ccggcccagctctctcaggattcag

SEQ ID NO: 5802339 - DNA, 25 bp, Homo sapien
tgctgctgccagctccctggacact

SEQ ID NO: 5802340 - DNA, 25 bp, Homo sapien
tgaatctcacggaacgccagatcaa

SEQ ID NO: 5802341 - DNA, 25 bp, Homo sapien
gcgccctgcagagggaccagagctt

SEQ ID NO: 5802342 - DNA, 25 bp, Homo sapien
gggcggcaacttcgtcgagtccatg

SEQ ID NO: 5802343 - DNA, 25 bp, Homo sapien
ccagccctacccaccccctgctgct

SEQ ID NO: 5802344 - DNA, 25 bp, Homo sapien
ccgccaggcccagcatccaagcggg

SEQ ID NO: 5802345 - DNA, 25 bp, Homo sapien
tgaaggatacagtggtagtcaatgt

SEQ ID NO: 5802346 - DNA, 25 bp, Homo sapien
cgccggagttcgagccccatcccat

SEQ ID NO: 5802347 - DNA, 25 bp, Homo sapien
ggcctcccctccatgggcgtccttt

SEQ ID NO: 5802348 - DNA, 25 bp, Homo sapien
tccaagcagaagaacagctgtgcca

SEQ ID NO: 5802349 - DNA, 25 bp, Homo sapien
agcccggtgtacgtgggcggcaact

SEQ ID NO: 5802350 - DNA, 25 bp, Homo sapien
aaactgacgcatctgtagcggccgc

SEQ ID NO: 5802351 - DNA, 25 bp, Homo sapien
ccccctcctccaccaccgaccctgc

SEQ ID NO: 5802352 - DNA, 25 bp, Homo sapien
ccaagcgggtacgcacggcatacac

SEQ ID NO: 5802353 - DNA, 25 bp, Homo sapien
gcggcaaaattacctctcttgctgt

SEQ ID NO: 5802354 - DNA, 25 bp, Homo sapien
agcagatcttcccctggatgaaaga

SEQ ID NO: 5802355 - DNA, 25 bp, Homo sapien
acctggagcctgggggccggcccag

SEQ ID NO: 5802356 - DNA, 25 bp, Homo sapien
tgggcccaatgcttctagctcctca

SEQ ID NO: 5802357 - DNA, 25 bp, Homo sapien
tgcagaaggctgcttactatgaaaa

SEQ ID NO: 5802358 - DNA, 25 bp, Homo sapien
agcagcagccaccacaaccccctcc

SEQ ID NO: 5802359 - DNA, 25 bp, Homo sapien
agtgaaggatacagtggtagtcaat

SEQ ID NO: 5802360 - DNA, 25 bp, Homo sapien
tgtcttcaacctgggccacctctcg

SEQ ID NO: 5802361 - DNA, 25 bp, Homo sapien
ggcctacgacgcgccctcgccgcct

SEQ ID NO: 5802362 - DNA, 25 bp, Homo sapien
ttgatttcaaattgtctggtactat

SEQ ID NO: 5802363 - DNA, 25 bp, Homo sapien
gccgccgccagcccgaactcgcggc

SEQ ID NO: 5802364 - DNA, 25 bp, Homo sapien
tgggtgactcgccataaatcagccg

SEQ ID NO: 5802365 - DNA, 25 bp, Homo sapien
tggaggtggcagtgaaggatacagt

SEQ ID NO: 5802366 - DNA, 25 bp, Homo sapien
agtctcgacagaactccaagcagaa

SEQ ID NO: 5802367 - DNA, 25 bp, Homo sapien
taaactatctgtatttattatttga

SEQ ID NO: 5802368 - DNA, 25 bp, Homo sapien
aaggagctgaactcaatggcagctg

SEQ ID NO: 5802369 - DNA, 25 bp, Homo sapien
cacagcccaatatgtacggcctggc

SEQ ID NO: 5802370 - DNA, 25 bp, Homo sapien
tctggtactattggaacaaatattt

SEQ ID NO: 5802371 - DNA, 25 bp, Homo sapien
gcccaatatgtacggcctggccgcc

SEQ ID NO: 5802372 - DNA, 25 bp, Homo sapien
ctggaggtggagtgcctgccaagaa

SEQ ID NO: 5802373 - DNA, 25 bp, Homo sapien
gggcactgggaacagccagggtggg

SEQ ID NO: 5802374 - DNA, 25 bp, Homo sapien
accctgcccccatcttcacccacca

SEQ ID NO: 5802375 - DNA, 25 bp, Homo sapien
tatttgaagcgagtcatttcgttcc

SEQ ID NO: 5802376 - DNA, 25 bp, Homo sapien
gcatgcggccgggcactgggaacag

SEQ ID NO: 5802377 - DNA, 25 bp, Homo sapien
actcgtctcagggacgactgccgga

SEQ ID NO: 5802378 - DNA, 25 bp, Homo sapien
caaaggagctgaactcaatggcagc

SEQ ID NO: 5802379 - DNA, 25 bp, Homo sapien
acattggaggtggcagtgaaggata

SEQ ID NO: 5802380 - DNA, 25 bp, Homo sapien
ctgcctgctccatccagagctctgc

SEQ ID NO: 5802381 - DNA, 25 bp, Homo sapien
tatatttgtagatttatccagccga

SEQ ID NO: 5802382 - DNA, 25 bp, Homo sapien
ggtgtcccaaaggtaagtctgagac

SEQ ID NO: 5802383 - DNA, 25 bp, Homo sapien
ggaggctatggctacagcaaaacta

SEQ ID NO: 5802384 - DNA, 25 bp, Homo sapien
tggcccgcgtctagcttagtttcag

SEQ ID NO: 5802385 - DNA, 25 bp, Homo sapien
agacattggaggtggcagtgaagga

SEQ ID NO: 5802386 - DNA, 25 bp, Homo sapien
agctgccgccagtgcccggcctggc

SEQ ID NO: 5802387 - DNA, 25 bp, Homo sapien
acaagagcccgccaggcccagcatc

SEQ ID NO: 5802388 - DNA, 25 bp, Homo sapien
gatttcaaattgtctggtactattg

SEQ ID NO: 5802389 - DNA, 25 bp, Homo sapien
ggattgcatcggactaaactatctg

SEQ ID NO: 5802390 - DNA, 25 bp, Homo sapien
ttcgtcgagtccatggcgcccgcgt

SEQ ID NO: 5802391 - DNA, 25 bp, Homo sapien
cggtgtacgtgggcggcaacttcgt

SEQ ID NO: 5802392 - DNA, 25 bp, Homo sapien
agaaccggcgcatgaagtacaagaa

SEQ ID NO: 5802393 - DNA, 25 bp, Homo sapien
cgtggactacagttgcgccgcgcag

SEQ ID NO: 5802394 - DNA, 25 bp, Homo sapien
acgtgggcggcaacttcgtcgagtc

SEQ ID NO: 5802395 - DNA, 25 bp, Homo sapien
ctccttcctgtgccgtaaggattgc

SEQ ID NO: 5802396 - DNA, 25 bp, Homo sapien
caagcagaagaacagctgtgccact

SEQ ID NO: 5802397 - DNA, 25 bp, Homo sapien
atcaaaagaaacctgaagagcctac

SEQ ID NO: 5802398 - DNA, 25 bp, Homo sapien
caccacagtttattgatttcaaatt

SEQ ID NO: 5802399 - DNA, 25 bp, Homo sapien
atgaaaacccaggactgtttggagg

SEQ ID NO: 5802400 - DNA, 25 bp, Homo sapien
acgcacggcatacacgagcgcgcag

SEQ ID NO: 5802401 - DNA, 25 bp, Homo sapien
tgactatccaggttctgcctgctcc

SEQ ID NO: 5802402 - DNA, 25 bp, Homo sapien
cgccaacctgcagggcagcccggtg

SEQ ID NO: 5802403 - DNA, 25 bp, Homo sapien
tttcaaattgtctggtactattgga

SEQ ID NO: 5802404 - DNA, 25 bp, Homo sapien
tggagatggccaacctgctgaatct

SEQ ID NO: 5802405 - DNA, 25 bp, Homo sapien
gcaacggcggcggcttcgccagcgc

SEQ ID NO: 5802406 - DNA, 25 bp, Homo sapien
caccatggaccttgcgaccctcatc

SEQ ID NO: 5802407 - DNA, 25 bp, Homo sapien
ctccggccagctgccgccagtgccc

SEQ ID NO: 5802408 - DNA, 25 bp, Homo sapien
ggagagagctgcgaggacaagagcc

SEQ ID NO: 5802409 - DNA, 25 bp, Homo sapien
ggatacagtggtagtcaatgttatt

SEQ ID NO: 5802410 - DNA, 25 bp, Homo sapien
catttcgttccctgattatttatcc

SEQ ID NO: 5802411 - DNA, 25 bp, Homo sapien
ctggccgcctacacggcgccactca

SEQ ID NO: 5802412 - DNA, 25 bp, Homo sapien
ccagctgccgccagtgcccggcctg

SEQ ID NO: 5802413 - DNA, 25 bp, Homo sapien
gggccacatttcacctccttagtcc

SEQ ID NO: 5802414 - DNA, 25 bp, Homo sapien
ccagatcaagatctggttccagaac

SEQ ID NO: 5802415 - DNA, 25 bp, Homo sapien
aacagaagcgctacgcagcgccgga

SEQ ID NO: 5802416 - DNA, 25 bp, Homo sapien
agcaccccccaccagccctacccac

SEQ ID NO: 5802417 - DNA, 25 bp, Homo sapien
gcgcagcccaccgctcggcggcgcc

SEQ ID NO: 5802418 - DNA, 25 bp, Homo sapien
gtcgtcggccagcgtggactacagt

SEQ ID NO: 5802419 - DNA, 25 bp, Homo sapien
aagagcccgccaggcccagcatcca

SEQ ID NO: 5802420 - DNA, 25 bp, Homo sapien
cggcgccgctggccacgtggcctac

SEQ ID NO: 5802421 - DNA, 25 bp, Homo sapien
tatgtgtatatttgtagatttatcc

SEQ ID NO: 5802422 - DNA, 25 bp, Homo sapien
ggacacttacggctacagcaccccc

SEQ ID NO: 5802423 - DNA, 25 bp, Homo sapien
ggcgcaggcgaccgggcctcccctc

SEQ ID NO: 5802424 - DNA, 25 bp, Homo sapien
ccgggtctcaggcctccagcggcgg

SEQ ID NO: 5802425 - DNA, 25 bp, Homo sapien
cctccagcggcggaggcgcaggcga

SEQ ID NO: 5802426 - DNA, 25 bp, Homo sapien
cctggtctgaactagttgagagagt

SEQ ID NO: 5802427 - DNA, 25 bp, Homo sapien
gcgccgcgtggagatggccaacctg

SEQ ID NO: 5802428 - DNA, 25 bp, Homo sapien
cgagcttaggaattcgcttccaggc

SEQ ID NO: 5802429 - DNA, 25 bp, Homo sapien
cgccggctagccagtcccctgagcg

SEQ ID NO: 5802430 - DNA, 25 bp, Homo sapien
gaattccacttcaaccgctacttgt

SEQ ID NO: 5802431 - DNA, 25 bp, Homo sapien
tatggctacagcaaaactacggaca

SEQ ID NO: 5802432 - DNA, 25 bp, Homo sapien
tggtagtcaatgttatttgagcagg

SEQ ID NO: 5802433 - DNA, 25 bp, Homo sapien
ccgcgtctagcttagtttcagagac

SEQ ID NO: 5802434 - DNA, 25 bp, Homo sapien
tctctcaggattcagcagacattgg

SEQ ID NO: 5802435 - DNA, 25 bp, Homo sapien
gcgagcaacggcggcggcttcgcca

SEQ ID NO: 5802436 - DNA, 25 bp, Homo sapien
tccagagctctgcccctctgagagc

SEQ ID NO: 5802437 - DNA, 25 bp, Homo sapien
gacaaaattcaagaaaacacacaca

SEQ ID NO: 5802438 - DNA, 25 bp, Homo sapien
gatctctcggcccaccactcgtctc

SEQ ID NO: 5802439 - DNA, 25 bp, Homo sapien
atcccacctacacagatctctcggc

SEQ ID NO: 5802440 - DNA, 25 bp, Homo sapien
agagagtagttttgaacagtcgtaa

SEQ ID NO: 5802441 - DNA, 25 bp, Homo sapien
gcaaggatccttccctgtaaatttg

SEQ ID NO: 5802442 - DNA, 25 bp, Homo sapien
acccgtcgtcggccagcgtggacta

SEQ ID NO: 5802443 - DNA, 25 bp, Homo sapien
cggtggcgtggcacaacacactttg

SEQ ID NO: 5802444 - DNA, 25 bp, Homo sapien
gcgccgctggccacgtggcctactc

SEQ ID NO: 5802445 - DNA, 25 bp, Homo sapien
agctgcatgcggccgggcactggga

SEQ ID NO: 5802446 - DNA, 25 bp, Homo sapien
atacataattgtggtcacctggagc

SEQ ID NO: 5802447 - DNA, 25 bp, Homo sapien
gtagtcaatgttatttgagcagggt

SEQ ID NO: 5802448 - DNA, 25 bp, Homo sapien
tgcaggagagagctgcgaggacaag

SEQ ID NO: 5802449 - DNA, 25 bp, Homo sapien
tgtgccactgcaggagagagctgcg

SEQ ID NO: 5802450 - DNA, 25 bp, Homo sapien
agcgctacgcagcgccggagttcga

SEQ ID NO: 5802451 - DNA, 25 bp, Homo sapien
gcatcctgcactcgccggctagcca

SEQ ID NO: 5802452 - DNA, 25 bp, Homo sapien
tatgtacggcctggccgcctacacg

SEQ ID NO: 5802453 - DNA, 25 bp, Homo sapien
gccagcccgaactcgcggcaaaatt

SEQ ID NO: 5802454 - DNA, 25 bp, Homo sapien
ttgcgccgcgcagattccaggcaac

SEQ ID NO: 5802455 - DNA, 25 bp, Homo sapien
ctcgccggctagccagtcccctgag

SEQ ID NO: 5802456 - DNA, 25 bp, Homo sapien
caccactcgtctcagggacgactgc

SEQ ID NO: 5802457 - DNA, 25 bp, Homo sapien
tattctccttcctgtgccgtaagga

SEQ ID NO: 5802458 - DNA, 25 bp, Homo sapien
ccctgtaaatttgacagtgccacat

SEQ ID NO: 5802459 - DNA, 25 bp, Homo sapien
tacctctcttgctgtagtggtgggg

SEQ ID NO: 5802460 - DNA, 25 bp, Homo sapien
tcaagaaaacacacacatacataat

SEQ ID NO: 5802461 - DNA, 25 bp, Homo sapien
acggcatacacgagcgcgcagctgg

SEQ ID NO: 5802462 - DNA, 25 bp, Homo sapien
cggcctggccgcctacacggcgcca

SEQ ID NO: 5802463 - DNA, 25 bp, Homo sapien
aagcgggtacgcacggcatacacga

SEQ ID NO: 5802464 - DNA, 25 bp, Homo sapien
tccagcggcggaggcgcaggcgacc

SEQ ID NO: 5802465 - DNA, 25 bp, Homo sapien
acacacacatacataattgtggtca

SEQ ID NO: 5802466 - DNA, 25 bp, Homo sapien
gaccagaaggccaagggcatcctgc

SEQ ID NO: 5802467 - DNA, 25 bp, Homo sapien
cagatcttcccctggatgaaagagt

SEQ ID NO: 5802468 - DNA, 25 bp, Homo sapien
agcttggagagtcttgggcctggcc

SEQ ID NO: 5802469 - DNA, 25 bp, Homo sapien
accaccatggaccttgcgaccctca

SEQ ID NO: 5802470 - DNA, 25 bp, Homo sapien
cccacctacacagatctctcggccc

SEQ ID NO: 5802471 - DNA, 25 bp, Homo sapien
actccaatctggtaatggtgtccca

SEQ ID NO: 5802472 - DNA, 25 bp, Homo sapien
ggtggcagtgaaggatacagtggta

SEQ ID NO: 5802473 - DNA, 25 bp, Homo sapien
aggcaaccaccaccatggaccttgc

SEQ ID NO: 5802474 - DNA, 25 bp, Homo sapien
gatttatccagccgagcttaggaat

SEQ ID NO: 5802475 - DNA, 25 bp, Homo sapien
cgactgccggaggctcccaaactga

SEQ ID NO: 5802476 - DNA, 25 bp, Homo sapien
ccatgggcgtcctttgggtgactcg

SEQ ID NO: 5802477 - DNA, 25 bp, Homo sapien
acagtttattgatttcaaattgtct

SEQ ID NO: 5802478 - DNA, 25 bp, Homo sapien
agatcaagatctggttccagaaccg

SEQ ID NO: 5802479 - DNA, 25 bp, Homo sapien
cctgattatttatccttgtctgaat

SEQ ID NO: 5802480 - DNA, 25 bp, Homo sapien
tttatccttgtctgaatgtatttat

SEQ ID NO: 5802481 - DNA, 25 bp, Homo sapien
ccctcctccaccaccgaccctgccc

SEQ ID NO: 5802482 - DNA, 25 bp, Homo sapien
gctccatccagagctctgcccctct

SEQ ID NO: 5802483 - DNA, 25 bp, Homo sapien
gtgtacgtgggcggcaacttcgtcg

SEQ ID NO: 5802484 - DNA, 25 bp, Homo sapien
cgccactcagcagctgcctgccaca

SEQ ID NO: 5802485 - DNA, 25 bp, Homo sapien
ctccttagtccccctggtctgaact

SEQ ID NO: 5802486 - DNA, 25 bp, Homo sapien
cgcgcagctggtggaattggaaaag

SEQ ID NO: 5802487 - DNA, 25 bp, Homo sapien
tgccggccgcgccgcgtggagatgg

SEQ ID NO: 5802488 - DNA, 25 bp, Homo sapien
gtaaccgtggctggtgtttgtagtt

SEQ ID NO: 5802489 - DNA, 25 bp, Homo sapien
gcgtcctttgggtgactcgccataa

SEQ ID NO: 5802490 - DNA, 25 bp, Homo sapien
acgcgccctcgccgcctgctttcgc

SEQ ID NO: 5802491 - DNA, 25 bp, Homo sapien
ggctagccagtcccctgagcgcagc

SEQ ID NO: 5802492 - DNA, 25 bp, Homo sapien
cagctgtgccactgcaggagagagc

SEQ ID NO: 5802493 - DNA, 25 bp, Homo sapien
ctccctggacactgactatccaggt

SEQ ID NO: 5802494 - DNA, 25 bp, Homo sapien
ccttccctgtaaatttgacagtgcc

SEQ ID NO: 5802495 - DNA, 25 bp, Homo sapien
tacggcctggccgcctacacggcgc

SEQ ID NO: 5802496 - DNA, 25 bp, Homo sapien
cctgccacaacagaagcgctacgca

SEQ ID NO: 5802497 - DNA, 25 bp, Homo sapien
ttccaggcaaccaccaccatggacc

SEQ ID NO: 5802498 - DNA, 25 bp, Homo sapien
cctgcagagggaccagagcttggag

SEQ ID NO: 5802499 - DNA, 25 bp, Homo sapien
ctacagcaccccccaccagccctac

SEQ ID NO: 5802500 - DNA, 25 bp, Homo sapien
cctgccaagaagcccaaaggtgggc

SEQ ID NO: 5802501 - DNA, 25 bp, Homo sapien
tagatttatccagccgagcttagga

SEQ ID NO: 5802502 - DNA, 25 bp, Homo sapien
tcagccaccatcagcaagcagatct

SEQ ID NO: 5802503 - DNA, 25 bp, Homo sapien
gattcagcagacattggaggtggca

SEQ ID NO: 5802504 - DNA, 25 bp, Homo sapien
agtgcccggcctggcctacgacgcg

SEQ ID NO: 5802505 - DNA, 25 bp, Homo sapien
tgcagagggaccagagcttggagag

SEQ ID NO: 5802506 - DNA, 25 bp, Homo sapien
aaagaaacctgaagagcctacaaaa

SEQ ID NO: 5802507 - DNA, 25 bp, Homo sapien
cagaactccaagcagaagaacagct

SEQ ID NO: 5802508 - DNA, 25 bp, Homo sapien
tgggggtggtggcagccagcctcct

SEQ ID NO: 5802509 - DNA, 25 bp, Homo sapien
aagggcatcctgcactcgccggcta

SEQ ID NO: 5802510 - DNA, 25 bp, Homo sapien
tccttgtctgaatgtatttatgtgt

SEQ ID NO: 5802511 - DNA, 25 bp, Homo sapien
cgcatgaagtacaagaaggaccaga

SEQ ID NO: 5802512 - DNA, 25 bp, Homo sapien
aggactgtttggaggctatggctac

SEQ ID NO: 5802513 - DNA, 25 bp, Homo sapien
ctgagcgcagcccaccgctcggcgg

SEQ ID NO: 5802514 - DNA, 25 bp, Homo sapien
tgacgcatctgtagcggccgccgcc

SEQ ID NO: 5802515 - DNA, 25 bp, Homo sapien
ggcggcgcgccctgcagagggacca

SEQ ID NO: 5802516 - DNA, 25 bp, Homo sapien
tgaaagagtctcgacagaactccaa

SEQ ID NO: 5802517 - DNA, 25 bp, Homo sapien
tctgaatgtatttatgtgtatattt

SEQ ID NO: 5802518 - DNA, 25 bp, Homo sapien
catggcgagcaacggcggcggcttc

SEQ ID NO: 5802519 - DNA, 25 bp, Homo sapien
cccctgctgctgccagctccctgga

SEQ ID NO: 5802520 - DNA, 25 bp, Homo sapien
actgcaggagagagctgcgaggaca

SEQ ID NO: 5802521 - DNA, 25 bp, Homo sapien
ggtggtggcagccagcctcctggtc

SEQ ID NO: 5802522 - DNA, 25 bp, Homo sapien
cataaatcagccgcaaggatccttc

SEQ ID NO: 5802523 - DNA, 25 bp, Homo sapien
agctcctcagccaccatcagcaagc

SEQ ID NO: 5802524 - DNA, 25 bp, Homo sapien
cctgctgctgccagctccctggaca

SEQ ID NO: 5802525 - DNA, 25 bp, Homo sapien
gcagggtcagcaggccctggagctt

SEQ ID NO: 5802526 - DNA, 25 bp, Homo sapien
agccaccatcagcaagcagatcttc

SEQ ID NO: 5802527 - DNA, 25 bp, Homo sapien
caggccgtgggggccacatttcacc

SEQ ID NO: 5802528 - DNA, 25 bp, Homo sapien
cctcatcccacctacacagatctct

SEQ ID NO: 5802529 - DNA, 25 bp, Homo sapien
cctgtcttcaacctgggccacctct

SEQ ID NO: 5802530 - DNA, 25 bp, Homo sapien
gaactcgcggcaaaattacctctct

SEQ ID NO: 5802531 - DNA, 25 bp, Homo sapien
cccatcttcacccaccaatcctgga

SEQ ID NO: 5802532 - DNA, 25 bp, Homo sapien
aagaaggaccagaaggccaagggca

SEQ ID NO: 5802533 - DNA, 25 bp, Homo sapien
cgtccgggcctgtcttcaacctggg

SEQ ID NO: 5802534 - DNA, 25 bp, Homo sapien
ggactaaactatctgtatttattat

SEQ ID NO: 5802535 - DNA, 25 bp, Homo sapien
cgaccgggcctcccctccatgggcg

SEQ ID NO: 5802536 - DNA, 25 bp, Homo sapien
accatcagcaagcagatcttcccct

SEQ ID NO: 5802537 - DNA, 25 bp, Homo sapien
agcttagtttcagagaccttaattt

SEQ ID NO: 5802538 - DNA, 25 bp, Homo sapien
ctacagttgcgccgcgcagattcca

SEQ ID NO: 5802539 - DNA, 25 bp, Homo sapien
gagatggccaacctgctgaatctca

SEQ ID NO: 5802540 - DNA, 25 bp, Homo sapien
aaccaccaccatggaccttgcgacc

SEQ ID NO: 5802541 - DNA, 25 bp, Homo sapien
agggtcagcaggccctggagcttcc

SEQ ID NO: 5802542 - DNA, 25 bp, Homo sapien
ccagaaggccaagggcatcctgcac

SEQ ID NO: 5802543 - DNA, 25 bp, Homo sapien
aaccacagtcctcaccacagtttat

SEQ ID NO: 5802544 - DNA, 25 bp, Homo sapien
ccgccgcctcccgggtctcaggcct

SEQ ID NO: 5802545 - DNA, 25 bp, Homo sapien
aacacactttggtcatttctcaaaa

SEQ ID NO: 5802546 - DNA, 25 bp, Homo sapien
cctcccgggtctcaggcctccagcg

SEQ ID NO: 5802547 - DNA, 25 bp, Homo sapien
ctgaactcagagcagcagccaccac

SEQ ID NO: 5802548 - DNA, 25 bp, Homo sapien
ccttcctgtgccgtaaggattgcat

SEQ ID NO: 5802549 - DNA, 25 bp, Homo sapien
aaggattgcatcggactaaactatc

SEQ ID NO: 5802550 - DNA, 25 bp, Homo sapien
ccgtaaggattgcatcggactaaac

SEQ ID NO: 5802551 - DNA, 25 bp, Homo sapien
ccacagatatcaaaagaaacctgaa

SEQ ID NO: 5802552 - DNA, 25 bp, Homo sapien
ttttgaacagtcgtaaccgtggctg

SEQ ID NO: 5802553 - DNA, 25 bp, Homo sapien
cacactttggtcatttctcaaaaac

SEQ ID NO: 5802554 - DNA, 25 bp, Homo sapien
aaaactacggacacttacggctaca

SEQ ID NO: 5802555 - DNA, 25 bp, Homo sapien
caagggactccaatctggtaatggt

SEQ ID NO: 5802556 - DNA, 25 bp, Homo sapien
aggaccagaaggccaagggcatcct

SEQ ID NO: 5802557 - DNA, 25 bp, Homo sapien
aagtacaagaaggaccagaaggcca

SEQ ID NO: 5802558 - DNA, 25 bp, Homo sapien
agtgcctgccaagaagcccaaaggt

SEQ ID NO: 5802559 - DNA, 25 bp, Homo sapien
gcaaaactacggacacttacggcta

SEQ ID NO: 5802560 - DNA, 25 bp, Homo sapien
agcgcgcagctggtggaattggaaa

SEQ ID NO: 5802561 - DNA, 25 bp, Homo sapien
gcgtctagcttagtttcagagacct

SEQ ID NO: 5802562 - DNA, 25 bp, Homo sapien
tggactacagttgcgccgcgcagat

SEQ ID NO: 5802563 - DNA, 25 bp, Homo sapien
tgtgtatatttgtagatttatccag

SEQ ID NO: 5802564 - DNA, 25 bp, Homo sapien
cagcagccaccacaaccccctcctc

SEQ ID NO: 5802565 - DNA, 25 bp, Homo sapien
agagagctgcgaggacaagagcccg

SEQ ID NO: 5802566 - DNA, 25 bp, Homo sapien
ccactgcaggagagagctgcgagga

SEQ ID NO: 5802567 - DNA, 25 bp, Homo sapien
ccccgctcttgccctgccgccgcct

SEQ ID NO: 5802568 - DNA, 25 bp, Homo sapien
gagacccatcggcggcgcgccctgc

SEQ ID NO: 5802569 - DNA, 25 bp, Homo sapien
tggtctgaactcagagcagcagcca

SEQ ID NO: 5802570 - DNA, 25 bp, Homo sapien
tggcagctgcatgcggccgggcact

SEQ ID NO: 5802571 - DNA, 25 bp, Homo sapien
agccaccacaaccccctcctccacc

SEQ ID NO: 5802572 - DNA, 25 bp, Homo sapien
tcttcccctggatgaaagagtctcg

SEQ ID NO: 5802573 - DNA, 25 bp, Homo sapien
tgggggccggcccagctctctcagg

SEQ ID NO: 5802574 - DNA, 25 bp, Homo sapien
tgaagcgagtcatttcgttccctga

SEQ ID NO: 5802575 - DNA, 25 bp, Homo sapien
agctgaactcaatggcagctgcatg

SEQ ID NO: 5802576 - DNA, 25 bp, Homo sapien
ctggacactgactatccaggttctg

SEQ ID NO: 5802577 - DNA, 25 bp, Homo sapien
catcggactaaactatctgtattta

SEQ ID NO: 5802578 - DNA, 25 bp, Homo sapien
gtagttttgaacagtcgtaaccgtg

SEQ ID NO: 5802579 - DNA, 25 bp, Homo sapien
gtggtcacctggagcctgggggccg

SEQ ID NO: 5802580 - DNA, 25 bp, Homo sapien
cgagccccatcccatggcgagcaac

SEQ ID NO: 5802581 - DNA, 25 bp, Homo sapien
agcaggccctggagcttcctgagtg

SEQ ID NO: 5802582 - DNA, 25 bp, Homo sapien
ccatggcgcccgcgtccgggcctgt

SEQ ID NO: 5802583 - DNA, 25 bp, Homo sapien
ggaccttgcgaccctcatcccacct

SEQ ID NO: 5802584 - DNA, 25 bp, Homo sapien
gtcttgggcctggcccgcgtctagc

SEQ ID NO: 5802585 - DNA, 25 bp, Homo sapien
ggcgtggcacaacacactttggtca

SEQ ID NO: 5802586 - DNA, 25 bp, Homo sapien
acagtggtagtcaatgttatttgag

SEQ ID NO: 5802587 - DNA, 25 bp, Homo sapien
gcttcgccagcgccaacctgcaggg

SEQ ID NO: 5802588 - DNA, 25 bp, Homo sapien
acgtggcctactccggccagctgcc

SEQ ID NO: 5802589 - DNA, 25 bp, Homo sapien
tcccctgagcgcagcccaccgctcg

SEQ ID NO: 5802590 - DNA, 25 bp, Homo sapien
tcgcggcaaaattacctctcttgct

SEQ ID NO: 5802591 - DNA, 25 bp, Homo sapien
acaagaaggaccagaaggccaaggg

SEQ ID NO: 5802592 - DNA, 25 bp, Homo sapien
ctcagggacgactgccggaggctcc

SEQ ID NO: 5802593 - DNA, 25 bp, Homo sapien
ccacaaccccctcctccaccaccga

SEQ ID NO: 5802594 - DNA, 25 bp, Homo sapien
ctccatgggcgtcctttgggtgact

SEQ ID NO: 5802595 - DNA, 25 bp, Homo sapien
gtaaatttgacagtgccacatactg

SEQ ID NO: 5802596 - DNA, 25 bp, Homo sapien
cccaccaatcctggaggtggagtgc

SEQ ID NO: 5802597 - DNA, 25 bp, Homo sapien
caatgcttctagctcctcagccacc

SEQ ID NO: 5802598 - DNA, 25 bp, Homo sapien
tctcacggaacgccagatcaagatc

SEQ ID NO: 5802599 - DNA, 25 bp, Homo sapien
ttctccttcctgtgccgtaaggatt

SEQ ID NO: 5802600 - DNA, 25 bp, Homo sapien
ccttccccgctcttgccctgccgcc

SEQ ID NO: 5802601 - DNA, 25 bp, Homo sapien
cacctacacagatctctcggcccac

SEQ ID NO: 5802602 - DNA, 25 bp, Homo sapien
ttcgccaaatcacagcccaatatgt

SEQ ID NO: 5802603 - DNA, 25 bp, Homo sapien
acccaggactgtttggaggctatgg

SEQ ID NO: 5802604 - DNA, 25 bp, Homo sapien
actcgccataaatcagccgcaagga

SEQ ID NO: 5802605 - DNA, 25 bp, Homo sapien
cacccaccaatcctggaggtggagt

SEQ ID NO: 5802606 - DNA, 25 bp, Homo sapien
gcctggcctacgacgcgccctcgcc

SEQ ID NO: 5802607 - DNA, 25 bp, Homo sapien
caaaaaccacagtcctcaccacagt

SEQ ID NO: 5802608 - DNA, 25 bp, Homo sapien
agccctacccaccccctgctgctgc

SEQ ID NO: 5802609 - DNA, 25 bp, Homo sapien
tctctcggcccaccactcgtctcag

SEQ ID NO: 5802610 - DNA, 25 bp, Homo sapien
gccgagcttaggaattcgcttccag

SEQ ID NO: 5802611 - DNA, 25 bp, Homo sapien
gagaccttaatttatattctccttc

SEQ ID NO: 5802612 - DNA, 25 bp, Homo sapien
ggcgccactcagcagctgcctgcca

SEQ ID NO: 5802613 - DNA, 25 bp, Homo sapien
tgtctgaatgtatttatgtgtatat

SEQ ID NO: 5802614 - DNA, 25 bp, Homo sapien
actcagcagctgcctgccacaacag

SEQ ID NO: 5802615 - DNA, 25 bp, Homo sapien
ttagaataaaaaaatttcccagtca

SEQ ID NO: 5802616 - DNA, 25 bp, Homo sapien
cagcagacattggaggtggcagtga

SEQ ID NO: 5802617 - DNA, 25 bp, Homo sapien
cccatcggcggcgcgccctgcagag

SEQ ID NO: 5802618 - DNA, 25 bp, Homo sapien
gaggacaagagcccgccaggcccag

SEQ ID NO: 5802619 - DNA, 25 bp, Homo sapien
tttgtagttgacataaaggattaag

SEQ ID NO: 5802620 - DNA, 25 bp, Homo sapien
gaacagtcgtaaccgtggctggtgt

SEQ ID NO: 5802621 - DNA, 25 bp, Homo sapien
gagagtcttgggcctggcccgcgtc

SEQ ID NO: 5802622 - DNA, 25 bp, Homo sapien
gaccagagcttggagagtcttgggc

SEQ ID NO: 5802623 - DNA, 25 bp, Homo sapien
tcggcggcgccgctggccacgtggc

SEQ ID NO: 5802624 - DNA, 25 bp, Homo sapien
aaattacctctcttgctgtagtggt

SEQ ID NO: 5802625 - DNA, 25 bp, Homo sapien
cgcctgctttcgccaaatcacagcc

SEQ ID NO: 5802626 - DNA, 25 bp, Homo sapien
aagaaaacacacacatacataattg

SEQ ID NO: 5802627 - DNA, 25 bp, Homo sapien
atctgtatttattatttgaagcgag

SEQ ID NO: 5802628 - DNA, 25 bp, Homo sapien
caccaccgaccctgcccccatcttc

SEQ ID NO: 5802629 - DNA, 25 bp, Homo sapien
tgtagttgacataaaggattaagac

SEQ ID NO: 5802630 - DNA, 25 bp, Homo sapien
cccaccagccctacccaccccctgc

SEQ ID NO: 5802631 - DNA, 25 bp, Homo sapien
ggatccttccctgtaaatttgacag

SEQ ID NO: 5802632 - DNA, 25 bp, Homo sapien
cccacaaaggagctgaactcaatgg

SEQ ID NO: 5802633 - DNA, 25 bp, Homo sapien
cgctacgcagcgccggagttcgagc

SEQ ID NO: 5802634 - DNA, 25 bp, Homo sapien
tgcccggcctggcctacgacgcgcc

SEQ ID NO: 5802635 - DNA, 25 bp, Homo sapien
tcagcagctgcctgccacaacagaa

SEQ ID NO: 5802636 - DNA, 25 bp, Homo sapien
ggagcttcctgagtgcacaatgcag

SEQ ID NO: 5802637 - DNA, 25 bp, Homo sapien
gagcgcagcccaccgctcggcggcg

SEQ ID NO: 5802638 - DNA, 25 bp, Homo sapien
actccaagcagaagaacagctgtgc

SEQ ID NO: 5802639 - DNA, 25 bp, Homo sapien
cctttgggtgactcgccataaatca

SEQ ID NO: 5802640 - DNA, 25 bp, Homo sapien
cagctgcctgccacaacagaagcgc

SEQ ID NO: 5802641 - DNA, 25 bp, Homo sapien
agagcagcagccaccacaaccccct

SEQ ID NO: 5802642 - DNA, 25 bp, Homo sapien
tgccgccgcctcccgggtctcaggc

SEQ ID NO: 5802643 - DNA, 25 bp, Homo sapien
attggaaaaggaattccacttcaac

SEQ ID NO: 5802644 - DNA, 25 bp, Homo sapien
atcaagatctggttccagaaccggc

SEQ ID NO: 5802645 - DNA, 25 bp, Homo sapien
gaggtggcagtgaaggatacagtgg

SEQ ID NO: 5802646 - DNA, 25 bp, Homo sapien
gctcttgccctgccgccgcctcccg

SEQ ID NO: 5802647 - DNA, 25 bp, Homo sapien
gcacccgtcgtcggccagcgtggac

SEQ ID NO: 5802648 - DNA, 25 bp, Homo sapien
cccaccactcgtctcagggacgact

SEQ ID NO: 5802649 - DNA, 25 bp, Homo sapien
cccggtgtacgtgggcggcaacttc

SEQ ID NO: 5802650 - DNA, 25 bp, Homo sapien
ctagccagtcccctgagcgcagccc

SEQ ID NO: 5802651 - DNA, 25 bp, Homo sapien
ccgctacttgtgccggccgcgccgc

SEQ ID NO: 5802652 - DNA, 25 bp, Homo sapien
ggagttcgagccccatcccatggcg

SEQ ID NO: 5802653 - DNA, 25 bp, Homo sapien
ctgcggaccaagggactccaatctg

SEQ ID NO: 5802654 - DNA, 25 bp, Homo sapien
tcaggattcagcagacattggaggt

SEQ ID NO: 5802655 - DNA, 25 bp, Homo sapien
agccccagcccacaaaggagctgaa

SEQ ID NO: 5802656 - DNA, 25 bp, Homo sapien
gcggcaacttcgtcgagtccatggc

SEQ ID NO: 5802657 - DNA, 25 bp, Homo sapien
cgggcctgtcttcaacctgggccac

SEQ ID NO: 5802658 - DNA, 25 bp, Homo sapien
agtcaggaagcccggtggcgtggca

SEQ ID NO: 5802659 - DNA, 25 bp, Homo sapien
agtcccctgagcgcagcccaccgct

SEQ ID NO: 5802660 - DNA, 25 bp, Homo sapien
ggccgtgggggccacatttcacctc

SEQ ID NO: 5802661 - DNA, 25 bp, Homo sapien
aatgttatttgagcagggtcagcag

SEQ ID NO: 5802662 - DNA, 25 bp, Homo sapien
gaggcgcaggcgaccgggcctcccc

SEQ ID NO: 5802663 - DNA, 25 bp, Homo sapien
tgtatttatgtgtatatttgtagat

SEQ ID NO: 5802664 - DNA, 25 bp, Homo sapien
gaacctggatagtcagtgtccaggg

SEQ ID NO: 5802665 - DNA, 25 bp, Homo sapien
acagctgttcttctgcttggagttc

SEQ ID NO: 5802666 - DNA, 25 bp, Homo sapien
aagcagccttctgcattgtgcactc

SEQ ID NO: 5802667 - DNA, 25 bp, Homo sapien
tccaggtgaccacaattatgtatgt

SEQ ID NO: 5802668 - DNA, 25 bp, Homo sapien
taacattgactaccactgtatcctt

SEQ ID NO: 5802669 - DNA, 25 bp, Homo sapien
taatcctttatgtcaactacaaaca

SEQ ID NO: 5802670 - DNA, 25 bp, Homo sapien
cagcagggggtgggtagggctggtg

SEQ ID NO: 5802671 - DNA, 25 bp, Homo sapien
tggcgctggcgaagccgccgccgtt

SEQ ID NO: 5802672 - DNA, 25 bp, Homo sapien
ctacagcaagagaggtaattttgcc

SEQ ID NO: 5802673 - DNA, 25 bp, Homo sapien
cctgagagagctgggccggccccca

SEQ ID NO: 5802674 - DNA, 25 bp, Homo sapien
cttgtacttcatgcgccggttctgg

SEQ ID NO: 5802675 - DNA, 25 bp, Homo sapien
cccacggcctggaagcgaattccta

SEQ ID NO: 5802676 - DNA, 25 bp, Homo sapien
ctccaatgtctgctgaatcctgaga

SEQ ID NO: 5802677 - DNA, 25 bp, Homo sapien
ccgccgatgggtctcagacttacct

SEQ ID NO: 5802678 - DNA, 25 bp, Homo sapien
gacgggtgcgagaggtggcccaggt

SEQ ID NO: 5802679 - DNA, 25 bp, Homo sapien
gattggagtcccttggtccgcagta

SEQ ID NO: 5802680 - DNA, 25 bp, Homo sapien
aggagaatataaattaaggtctctg

SEQ ID NO: 5802681 - DNA, 25 bp, Homo sapien
ttgatctggcgttccgtgagattca

SEQ ID NO: 5802682 - DNA, 25 bp, Homo sapien
ctgtagccatagcctccaaacagtc

SEQ ID NO: 5802683 - DNA, 25 bp, Homo sapien
ggataaatctacaaatatacacata

SEQ ID NO: 5802684 - DNA, 25 bp, Homo sapien
cagctcctttgtgggctggggctct

SEQ ID NO: 5802685 - DNA, 25 bp, Homo sapien
gcacagctgttcttctgcttggagt

SEQ ID NO: 5802686 - DNA, 25 bp, Homo sapien
ctttgggcttcttggcaggcactcc

SEQ ID NO: 5802687 - DNA, 25 bp, Homo sapien
ctgaaactaagctagacgcgggcca

SEQ ID NO: 5802688 - DNA, 25 bp, Homo sapien
gctgatttatggcgagtcacccaaa

SEQ ID NO: 5802689 - DNA, 25 bp, Homo sapien
ggactggctagccggcgagtgcagg

SEQ ID NO: 5802690 - DNA, 25 bp, Homo sapien
cagatcttgatctggcgttccgtga

SEQ ID NO: 5802691 - DNA, 25 bp, Homo sapien
tgctgtagccatagcctccaaacag

SEQ ID NO: 5802692 - DNA, 25 bp, Homo sapien
tggaggggaggcccggtcgcctgcg

SEQ ID NO: 5802693 - DNA, 25 bp, Homo sapien
gctgcgctcaggggactggctagcc

SEQ ID NO: 5802694 - DNA, 25 bp, Homo sapien
cgcttggatgctgggcctggcgggc

SEQ ID NO: 5802695 - DNA, 25 bp, Homo sapien
cggcgctgcgtagcgcttctgttgt

SEQ ID NO: 5802696 - DNA, 25 bp, Homo sapien
gttccaatagtaccagacaatttga

SEQ ID NO: 5802697 - DNA, 25 bp, Homo sapien
gcgccgtgtaggcggccaggccgta

SEQ ID NO: 5802698 - DNA, 25 bp, Homo sapien
gcaggcggcgagggcgcgtcgtagg

SEQ ID NO: 5802699 - DNA, 25 bp, Homo sapien
cttacggcacaggaaggagaatata

SEQ ID NO: 5802700 - DNA, 25 bp, Homo sapien
tgtccagggagctggcagcagcagg

SEQ ID NO: 5802701 - DNA, 25 bp, Homo sapien
caggattggtgggtgaagatggggg

SEQ ID NO: 5802702 - DNA, 25 bp, Homo sapien
aagctctggtccctctgcagggcgc

SEQ ID NO: 5802703 - DNA, 25 bp, Homo sapien
acctccaatgtctgctgaatcctga

SEQ ID NO: 5802704 - DNA, 25 bp, Homo sapien
tggccggagtaggccacgtggccag

SEQ ID NO: 5802705 - DNA, 25 bp, Homo sapien
ttgccgcgagttcgggctggcggcg

SEQ ID NO: 5802706 - DNA, 25 bp, Homo sapien
gactgttcaaaactactctctcaac

SEQ ID NO: 5802707 - DNA, 25 bp, Homo sapien
gcattgtgcactcaggaagctccag

SEQ ID NO: 5802708 - DNA, 25 bp, Homo sapien
agagatctgtgtaggtgggatgagg

SEQ ID NO: 5802709 - DNA, 25 bp, Homo sapien
atgggtctcagacttacctttggga

SEQ ID NO: 5802710 - DNA, 25 bp, Homo sapien
tggtggtggttgcctggaatctgcg

SEQ ID NO: 5802711 - DNA, 25 bp, Homo sapien
tggcgaaagcaggcggcgagggcgc

SEQ ID NO: 5802712 - DNA, 25 bp, Homo sapien
agttcagctcctttgtgggctgggg

SEQ ID NO: 5802713 - DNA, 25 bp, Homo sapien
cttgcggctgatttatggcgagtca

SEQ ID NO: 5802714 - DNA, 25 bp, Homo sapien
ggaagctccagggcctgctgaccct

SEQ ID NO: 5802715 - DNA, 25 bp, Homo sapien
ttgccgcccacgtacaccgggctgc

SEQ ID NO: 5802716 - DNA, 25 bp, Homo sapien
cgcccatggaggggaggcccggtcg

SEQ ID NO: 5802717 - DNA, 25 bp, Homo sapien
ctggctgttcccagtgcccggccgc

SEQ ID NO: 5802718 - DNA, 25 bp, Homo sapien
aggcagctgctgagtggcgccgtgt

SEQ ID NO: 5802719 - DNA, 25 bp, Homo sapien
ctgttcaaaactactctctcaacta

SEQ ID NO: 5802720 - DNA, 25 bp, Homo sapien
gtgctgtagccgtaagtgtccgtag

SEQ ID NO: 5802721 - DNA, 25 bp, Homo sapien
gtagcggttgaagtggaattccttt

SEQ ID NO: 5802722 - DNA, 25 bp, Homo sapien
gatccttgcggctgatttatggcga

SEQ ID NO: 5802723 - DNA, 25 bp, Homo sapien
tgaaggacaatttgcggtcttaatc

SEQ ID NO: 5802724 - DNA, 25 bp, Homo sapien
tatccttcactgccacctccaatgt

SEQ ID NO: 5802725 - DNA, 25 bp, Homo sapien
gctgaccctgctcaaataacattga

SEQ ID NO: 5802726 - DNA, 25 bp, Homo sapien
tatgtatgtgtgtgttttcttgaat

SEQ ID NO: 5802727 - DNA, 25 bp, Homo sapien
ggctggcggcggccgctacagatgc

SEQ ID NO: 5802728 - DNA, 25 bp, Homo sapien
gaagccgccgccgttgctcgccatg

SEQ ID NO: 5802729 - DNA, 25 bp, Homo sapien
tccttcactgccacctccaatgtct

SEQ ID NO: 5802730 - DNA, 25 bp, Homo sapien
tgaccctgctcaaataacattgact

SEQ ID NO: 5802731 - DNA, 25 bp, Homo sapien
cgctggaggcctgagacccgggagg

SEQ ID NO: 5802732 - DNA, 25 bp, Homo sapien
gcggcgcggccggcacaagtagcgg

SEQ ID NO: 5802733 - DNA, 25 bp, Homo sapien
actgtggtgaggactgtggtttttg

SEQ ID NO: 5802734 - DNA, 25 bp, Homo sapien
caactgtagtccacgctggccgacg

SEQ ID NO: 5802735 - DNA, 25 bp, Homo sapien
ggagcaggcagaacctggatagtca

SEQ ID NO: 5802736 - DNA, 25 bp, Homo sapien
gatgctgggcctggcgggctcttgt

SEQ ID NO: 5802737 - DNA, 25 bp, Homo sapien
gccgtaagtgtccgtagttttgctg

SEQ ID NO: 5802738 - DNA, 25 bp, Homo sapien
aggcccggtcgcctgcgcctccgcc

SEQ ID NO: 5802739 - DNA, 25 bp, Homo sapien
ctggataaatctacaaatatacaca

SEQ ID NO: 5802740 - DNA, 25 bp, Homo sapien
caaataacattgactaccactgtat

SEQ ID NO: 5802741 - DNA, 25 bp, Homo sapien
gctcttcaggtttcttttgatatct

SEQ ID NO: 5802742 - DNA, 25 bp, Homo sapien
gcagcagcagggggtgggtagggct

SEQ ID NO: 5802743 - DNA, 25 bp, Homo sapien
ctggatggagcaggcagaacctgga

SEQ ID NO: 5802744 - DNA, 25 bp, Homo sapien
cttggatgctgggcctggcgggctc

SEQ ID NO: 5802745 - DNA, 25 bp, Homo sapien
tggtgggtgaagatgggggcagggt

SEQ ID NO: 5802746 - DNA, 25 bp, Homo sapien
gaggactgtggtttttgagaaatga

SEQ ID NO: 5802747 - DNA, 25 bp, Homo sapien
tggtttttgagaaatgaccaaagtg

SEQ ID NO: 5802748 - DNA, 25 bp, Homo sapien
atttatggcgagtcacccaaaggac

SEQ ID NO: 5802749 - DNA, 25 bp, Homo sapien
gccaccgggcttcctgactctaccc

SEQ ID NO: 5802750 - DNA, 25 bp, Homo sapien
gctccagggcctgctgaccctgctc

SEQ ID NO: 5802751 - DNA, 25 bp, Homo sapien
agttcagaccaggaggctggctgcc

SEQ ID NO: 5802752 - DNA, 25 bp, Homo sapien
gcactggcggcagctggccggagta

SEQ ID NO: 5802753 - DNA, 25 bp, Homo sapien
tggccgacgacgggtgcgagaggtg

SEQ ID NO: 5802754 - DNA, 25 bp, Homo sapien
atgcgccggttctggaaccagatct

SEQ ID NO: 5802755 - DNA, 25 bp, Homo sapien
gtgaagatgggggcagggtcggtgg

SEQ ID NO: 5802756 - DNA, 25 bp, Homo sapien
tgtctgctgaatcctgagagagctg

SEQ ID NO: 5802757 - DNA, 25 bp, Homo sapien
gtagggctggtggggggtgctgtag

SEQ ID NO: 5802758 - DNA, 25 bp, Homo sapien
tcacccaaaggacgcccatggaggg

SEQ ID NO: 5802759 - DNA, 25 bp, Homo sapien
ggtttcttttgatatctgtggaggc

SEQ ID NO: 5802760 - DNA, 25 bp, Homo sapien
gggctgcgctcaggggactggctag

SEQ ID NO: 5802761 - DNA, 25 bp, Homo sapien
ctccaagctctggtccctctgcagg

SEQ ID NO: 5802762 - DNA, 25 bp, Homo sapien
atccaggggaagatctgcttgctga

SEQ ID NO: 5802763 - DNA, 25 bp, Homo sapien
taccccaccactacagcaagagagg

SEQ ID NO: 5802764 - DNA, 25 bp, Homo sapien
accattaccagattggagtcccttg

SEQ ID NO: 5802765 - DNA, 25 bp, Homo sapien
cgtacaccgggctgccctgcaggtt

SEQ ID NO: 5802766 - DNA, 25 bp, Homo sapien
gctctggtccctctgcagggcgcgc

SEQ ID NO: 5802767 - DNA, 25 bp, Homo sapien
ctaagctcggctggataaatctaca

SEQ ID NO: 5802768 - DNA, 25 bp, Homo sapien
cgaaatgactcgcttcaaataataa

SEQ ID NO: 5802769 - DNA, 25 bp, Homo sapien
cctccggcagtcgtccctgagacga

SEQ ID NO: 5802770 - DNA, 25 bp, Homo sapien
gtgttgtgccacgccaccgggcttc

SEQ ID NO: 5802771 - DNA, 25 bp, Homo sapien
tccaattccaccagctgcgcgctcg

SEQ ID NO: 5802772 - DNA, 25 bp, Homo sapien
gagaaatgaccaaagtgtgttgtgc

SEQ ID NO: 5802773 - DNA, 25 bp, Homo sapien
cgcagtatgtggcactgtcaaattt

SEQ ID NO: 5802774 - DNA, 25 bp, Homo sapien
ttcttggcaggcactccacctccag

SEQ ID NO: 5802775 - DNA, 25 bp, Homo sapien
gtacatattgggctgtgatttggcg

SEQ ID NO: 5802776 - DNA, 25 bp, Homo sapien
gcgctcgtgtatgccgtgcgtaccc

SEQ ID NO: 5802777 - DNA, 25 bp, Homo sapien
gaatataaattaaggtctctgaaac

SEQ ID NO: 5802778 - DNA, 25 bp, Homo sapien
caattccaccagctgcgcgctcgtg

SEQ ID NO: 5802779 - DNA, 25 bp, Homo sapien
aggtaattttgccgcgagttcgggc

SEQ ID NO: 5802780 - DNA, 25 bp, Homo sapien
ttgggcccacctttgggcttcttgg

SEQ ID NO: 5802781 - DNA, 25 bp, Homo sapien
aaataataaatacagatagtttagt

SEQ ID NO: 5802782 - DNA, 25 bp, Homo sapien
ggagttctgtcgagactctttcatc

SEQ ID NO: 5802783 - DNA, 25 bp, Homo sapien
aaggtccatggtggtggttgcctgg

SEQ ID NO: 5802784 - DNA, 25 bp, Homo sapien
tagtttagtccgatgcaatccttac

SEQ ID NO: 5802785 - DNA, 25 bp, Homo sapien
tcagtttgggagcctccggcagtcg

SEQ ID NO: 5802786 - DNA, 25 bp, Homo sapien
aatcagggaacgaaatgactcgctt

SEQ ID NO: 5802787 - DNA, 25 bp, Homo sapien
ggccgggcactggcggcagctggcc

SEQ ID NO: 5802788 - DNA, 25 bp, Homo sapien
ctgcaggttggcgctggcgaagccg

SEQ ID NO: 5802789 - DNA, 25 bp, Homo sapien
tccatggtggtggttgcctggaatc

SEQ ID NO: 5802790 - DNA, 25 bp, Homo sapien
ggcgcaactgtagtccacgctggcc

SEQ ID NO: 5802791 - DNA, 25 bp, Homo sapien
tccaatagtaccagacaatttgaaa

SEQ ID NO: 5802792 - DNA, 25 bp, Homo sapien
agggcgcgccgccgatgggtctcag

SEQ ID NO: 5802793 - DNA, 25 bp, Homo sapien
ctgcgcggcgcaactgtagtccacg

SEQ ID NO: 5802794 - DNA, 25 bp, Homo sapien
tacaccgggctgccctgcaggttgg

SEQ ID NO: 5802795 - DNA, 25 bp, Homo sapien
atgtggcccccacggcctggaagcg

SEQ ID NO: 5802796 - DNA, 25 bp, Homo sapien
ggggactaaggaggtgaaatgtggc

SEQ ID NO: 5802797 - DNA, 25 bp, Homo sapien
ctcttgtcctcgcagctctctcctg

SEQ ID NO: 5802798 - DNA, 25 bp, Homo sapien
gttgctcgccatgggatggggctcg

SEQ ID NO: 5802799 - DNA, 25 bp, Homo sapien
aaatatacacataaatacattcaga

SEQ ID NO: 5802800 - DNA, 25 bp, Homo sapien
caccgggctgccctgcaggttggcg

SEQ ID NO: 5802801 - DNA, 25 bp, Homo sapien
cgagactctttcatccaggggaaga

SEQ ID NO: 5802802 - DNA, 25 bp, Homo sapien
caggcagaacctggatagtcagtgt

SEQ ID NO: 5802803 - DNA, 25 bp, Homo sapien
cttacctttgggacaccattaccag

SEQ ID NO: 5802804 - DNA, 25 bp, Homo sapien
agtggtgggccgagagatctgtgta

SEQ ID NO: 5802805 - DNA, 25 bp, Homo sapien
ttttgagaaatgaccaaagtgtgtt

SEQ ID NO: 5802806 - DNA, 25 bp, Homo sapien
caaatttacagggaaggatccttgc

SEQ ID NO: 5802807 - DNA, 25 bp, Homo sapien
gatcttgatctggcgttccgtgaga

SEQ ID NO: 5802808 - DNA, 25 bp, Homo sapien
gcctgctgaccctgctcaaataaca

SEQ ID NO: 5802809 - DNA, 25 bp, Homo sapien
cttcactgccacctccaatgtctgc

SEQ ID NO: 5802810 - DNA, 25 bp, Homo sapien
gctacagatgcgtcagtttgggagc

SEQ ID NO: 5802811 - DNA, 25 bp, Homo sapien
ctgggccggcccccaggctccaggt

SEQ ID NO: 5802812 - DNA, 25 bp, Homo sapien
ccgttgctcgccatgggatggggct

SEQ ID NO: 5802813 - DNA, 25 bp, Homo sapien
ccccaccactacagcaagagaggta

SEQ ID NO: 5802814 - DNA, 25 bp, Homo sapien
attcagcaggttggccatctccacg

SEQ ID NO: 5802815 - DNA, 25 bp, Homo sapien
attgtgcactcaggaagctccaggg

SEQ ID NO: 5802816 - DNA, 25 bp, Homo sapien
aggccacgtggccagcggcgccgcc

SEQ ID NO: 5802817 - DNA, 25 bp, Homo sapien
ggaggcctgagacccgggaggcggc

SEQ ID NO: 5802818 - DNA, 25 bp, Homo sapien
agacaaggataaataatcagggaac

SEQ ID NO: 5802819 - DNA, 25 bp, Homo sapien
ccctgagacgagtggtgggccgaga

SEQ ID NO: 5802820 - DNA, 25 bp, Homo sapien
cccaggttgaagacaggcccggacg

SEQ ID NO: 5802821 - DNA, 25 bp, Homo sapien
aggtctctgaaactaagctagacgc

SEQ ID NO: 5802822 - DNA, 25 bp, Homo sapien
aagcaggcggcgagggcgcgtcgta

SEQ ID NO: 5802823 - DNA, 25 bp, Homo sapien
tgggctgtgatttggcgaaagcagg

SEQ ID NO: 5802824 - DNA, 25 bp, Homo sapien
ttggagtcccttggtccgcagtatg

SEQ ID NO: 5802825 - DNA, 25 bp, Homo sapien
gtggtggctgctgctctgagttcag

SEQ ID NO: 5802826 - DNA, 25 bp, Homo sapien
agctgctgagtggcgccgtgtaggc

SEQ ID NO: 5802827 - DNA, 25 bp, Homo sapien
taccagacaatttgaaatcaataaa

SEQ ID NO: 5802828 - DNA, 25 bp, Homo sapien
caataaactgtggtgaggactgtgg

SEQ ID NO: 5802829 - DNA, 25 bp, Homo sapien
ccaagactctccaagctctggtccc

SEQ ID NO: 5802830 - DNA, 25 bp, Homo sapien
tggtccctctgcagggcgcgccgcc

SEQ ID NO: 5802831 - DNA, 25 bp, Homo sapien
gtctcagacttacctttgggacacc

SEQ ID NO: 5802832 - DNA, 25 bp, Homo sapien
tgcggtcttaatcctttatgtcaac

SEQ ID NO: 5802833 - DNA, 25 bp, Homo sapien
tttgggacaccattaccagattgga

SEQ ID NO: 5802834 - DNA, 25 bp, Homo sapien
ggattggtgggtgaagatgggggca

SEQ ID NO: 5802835 - DNA, 25 bp, Homo sapien
ctcaaataacattgactaccactgt

SEQ ID NO: 5802836 - DNA, 25 bp, Homo sapien
ttggccatctccacgcggcgcggcc

SEQ ID NO: 5802837 - DNA, 25 bp, Homo sapien
ttcagctcctttgtgggctggggct

SEQ ID NO: 5802838 - DNA, 25 bp, Homo sapien
gaagacaggcccggacgcgggcgcc

SEQ ID NO: 5802839 - DNA, 25 bp, Homo sapien
ttcctgactctacccatgaaggaca

SEQ ID NO: 5802840 - DNA, 25 bp, Homo sapien
gcgttccgtgagattcagcaggttg

SEQ ID NO: 5802841 - DNA, 25 bp, Homo sapien
accactacagcaagagaggtaattt

SEQ ID NO: 5802842 - DNA, 25 bp, Homo sapien
ccgccgctggaggcctgagacccgg

SEQ ID NO: 5802843 - DNA, 25 bp, Homo sapien
aatttgcggtcttaatcctttatgt

SEQ ID NO: 5802844 - DNA, 25 bp, Homo sapien
agcggttgaagtggaattccttttc

SEQ ID NO: 5802845 - DNA, 25 bp, Homo sapien
tacagatagtttagtccgatgcaat

SEQ ID NO: 5802846 - DNA, 25 bp, Homo sapien
tgccacgccaccgggcttcctgact

SEQ ID NO: 5802847 - DNA, 25 bp, Homo sapien
ctcgcagctctctcctgcagtggca

SEQ ID NO: 5802848 - DNA, 25 bp, Homo sapien
tgggagcctccggcagtcgtccctg

SEQ ID NO: 5802849 - DNA, 25 bp, Homo sapien
ctggtggggggtgctgtagccgtaa

SEQ ID NO: 5802850 - DNA, 25 bp, Homo sapien
aagtggaattccttttccaattcca

SEQ ID NO: 5802851 - DNA, 25 bp, Homo sapien
gatgcgtcagtttgggagcctccgg

SEQ ID NO: 5802852 - DNA, 25 bp, Homo sapien
tggaggagggggttgtggtggctgc

SEQ ID NO: 5802853 - DNA, 25 bp, Homo sapien
actccacctccaggattggtgggtg

SEQ ID NO: 5802854 - DNA, 25 bp, Homo sapien
gtgcaggatgcccttggccttctgg

SEQ ID NO: 5802855 - DNA, 25 bp, Homo sapien
cggctgatttatggcgagtcaccca

SEQ ID NO: 5802856 - DNA, 25 bp, Homo sapien
tgagagagctgggccggcccccagg

SEQ ID NO: 5802857 - DNA, 25 bp, Homo sapien
cgctcaggggactggctagccggcg

SEQ ID NO: 5802858 - DNA, 25 bp, Homo sapien
cttgtcctcgcagctctctcctgca

SEQ ID NO: 5802859 - DNA, 25 bp, Homo sapien
tcatgcgccggttctggaaccagat

SEQ ID NO: 5802860 - DNA, 25 bp, Homo sapien
acaccagccacggttacgactgttc

SEQ ID NO: 5802861 - DNA, 25 bp, Homo sapien
tgtgtgtgttttcttgaattttgtc

SEQ ID NO: 5802862 - DNA, 25 bp, Homo sapien
gctcgtgtatgccgtgcgtacccgc

SEQ ID NO: 5802863 - DNA, 25 bp, Homo sapien
gctgcgtagcgcttctgttgtggca

SEQ ID NO: 5802864 - DNA, 25 bp, Homo sapien
cgtcagtttgggagcctccggcagt

SEQ ID NO: 5802865 - DNA, 25 bp, Homo sapien
tggaaccagatcttgatctggcgtt

SEQ ID NO: 5802866 - DNA, 25 bp, Homo sapien
aatgtctgctgaatcctgagagagc

SEQ ID NO: 5802867 - DNA, 25 bp, Homo sapien
gctgaggagctagaagcattgggcc

SEQ ID NO: 5802868 - DNA, 25 bp, Homo sapien
ctactctctcaactagttcagacca

SEQ ID NO: 5802869 - DNA, 25 bp, Homo sapien
gtgggccgagagatctgtgtaggtg

SEQ ID NO: 5802870 - DNA, 25 bp, Homo sapien
aagtagcggttgaagtggaattcct

SEQ ID NO: 5802871 - DNA, 25 bp, Homo sapien
caattatgtatgtgtgtgttttctt

SEQ ID NO: 5802872 - DNA, 25 bp, Homo sapien
tggggctctcagaggggcagagctc

SEQ ID NO: 5802873 - DNA, 25 bp, Homo sapien
ttcaggtttcttttgatatctgtgg

SEQ ID NO: 5802874 - DNA, 25 bp, Homo sapien
ccagctgcgcgctcgtgtatgccgt

SEQ ID NO: 5802875 - DNA, 25 bp, Homo sapien
cgagtggtgggccgagagatctgtg

SEQ ID NO: 5802876 - DNA, 25 bp, Homo sapien
gcaatccttacggcacaggaaggag

SEQ ID NO: 5802877 - DNA, 25 bp, Homo sapien
tcagggaacgaaatgactcgcttca

SEQ ID NO: 5802878 - DNA, 25 bp, Homo sapien
gggagctggcagcagcagggggtgg

SEQ ID NO: 5802879 - DNA, 25 bp, Homo sapien
ggacaccattaccagattggagtcc

SEQ ID NO: 5802880 - DNA, 25 bp, Homo sapien
cgagggcgcgtcgtaggccaggccg

SEQ ID NO: 5802881 - DNA, 25 bp, Homo sapien
gctgatggtggctgaggagctagaa

SEQ ID NO: 5802882 - DNA, 25 bp, Homo sapien
ggcgggctcttgtcctcgcagctct

SEQ ID NO: 5802883 - DNA, 25 bp, Homo sapien
tagccggcgagtgcaggatgccctt

SEQ ID NO: 5802884 - DNA, 25 bp, Homo sapien
tccgcagtatgtggcactgtcaaat

SEQ ID NO: 5802885 - DNA, 25 bp, Homo sapien
aatccttacggcacaggaaggagaa

SEQ ID NO: 5802886 - DNA, 25 bp, Homo sapien
tcccttggtccgcagtatgtggcac

SEQ ID NO: 5802887 - DNA, 25 bp, Homo sapien
caggtttcttttgatatctgtggag

SEQ ID NO: 5802888 - DNA, 25 bp, Homo sapien
atggcgagtcacccaaaggacgccc

SEQ ID NO: 5802889 - DNA, 25 bp, Homo sapien
gtgatttggcgaaagcaggcggcga

SEQ ID NO: 5802890 - DNA, 25 bp, Homo sapien
tctctcctgcagtggcacagctgtt

SEQ ID NO: 5802891 - DNA, 25 bp, Homo sapien
agggggttgtggtggctgctgctct

SEQ ID NO: 5802892 - DNA, 25 bp, Homo sapien
cccggccgcatgcagctgccattga

SEQ ID NO: 5802893 - DNA, 25 bp, Homo sapien
gcagccttctgcattgtgcactcag

SEQ ID NO: 5802894 - DNA, 25 bp, Homo sapien
aatacagatagtttagtccgatgca

SEQ ID NO: 5802895 - DNA, 25 bp, Homo sapien
ctggaagcgaattcctaagctcggc

SEQ ID NO: 5802896 - DNA, 25 bp, Homo sapien
gtcttaatcctttatgtcaactaca

SEQ ID NO: 5802897 - DNA, 25 bp, Homo sapien
ccacgcggcgcggccggcacaagta

SEQ ID NO: 5802898 - DNA, 25 bp, Homo sapien
gggcttcctgactctacccatgaag

SEQ ID NO: 5802899 - DNA, 25 bp, Homo sapien
tctggtccttcttgtacttcatgcg

SEQ ID NO: 5802900 - DNA, 25 bp, Homo sapien
tccttgcggctgatttatggcgagt

SEQ ID NO: 5802901 - DNA, 25 bp, Homo sapien
cacggcctggaagcgaattcctaag

SEQ ID NO: 5802902 - DNA, 25 bp, Homo sapien
ggacaatttgcggtcttaatccttt

SEQ ID NO: 5802903 - DNA, 25 bp, Homo sapien
caggttgaagacaggcccggacgcg

SEQ ID NO: 5802904 - DNA, 25 bp, Homo sapien
attgactaccactgtatccttcact

SEQ ID NO: 5802905 - DNA, 25 bp, Homo sapien
cgtgcgtacccgcttggatgctggg

SEQ ID NO: 5802906 - DNA, 25 bp, Homo sapien
gcgcggcgcaactgtagtccacgct

SEQ ID NO: 5802907 - DNA, 25 bp, Homo sapien
ggactaaggaggtgaaatgtggccc

SEQ ID NO: 5802908 - DNA, 25 bp, Homo sapien
gggggcagggtcggtggtggaggag

SEQ ID NO: 5802909 - DNA, 25 bp, Homo sapien
aggccaggccgggcactggcggcag

SEQ ID NO: 5802910 - DNA, 25 bp, Homo sapien
tcgtgtatgccgtgcgtacccgctt

SEQ ID NO: 5802911 - DNA, 25 bp, Homo sapien
tttgggagcctccggcagtcgtccc

SEQ ID NO: 5802912 - DNA, 25 bp, Homo sapien
ggctgtgatttggcgaaagcaggcg

SEQ ID NO: 5802913 - DNA, 25 bp, Homo sapien
cggcgagtgcaggatgcccttggcc

SEQ ID NO: 5802914 - DNA, 25 bp, Homo sapien
tggcacagctgttcttctgcttgga

SEQ ID NO: 5802915 - DNA, 25 bp, Homo sapien
tatgtgtgtgttttcttgaattttg

SEQ ID NO: 5802916 - DNA, 25 bp, Homo sapien
tctttttttttttgtaggctcttca

SEQ ID NO: 5802917 - DNA, 25 bp, Homo sapien
cactgtcaaatttacagggaaggat

SEQ ID NO: 5802918 - DNA, 25 bp, Homo sapien
ggactgtggtttttgagaaatgacc

SEQ ID NO: 5802919 - DNA, 25 bp, Homo sapien
ttcagaccaggaggctggctgccac

SEQ ID NO: 5802920 - DNA, 25 bp, Homo sapien
attaaggtctctgaaactaagctag

SEQ ID NO: 5802921 - DNA, 25 bp, Homo sapien
aggaggtgaaatgtggcccccacgg

SEQ ID NO: 5802922 - DNA, 25 bp, Homo sapien
atgcaatccttacggcacaggaagg

SEQ ID NO: 5802923 - DNA, 25 bp, Homo sapien
caatagtaccagacaatttgaaatc

SEQ ID NO: 5802924 - DNA, 25 bp, Homo sapien
agcctccggcagtcgtccctgagac

SEQ ID NO: 5802925 - DNA, 25 bp, Homo sapien
ccatagcctccaaacagtcctgggt

SEQ ID NO: 5802926 - DNA, 25 bp, Homo sapien
ttgtaggctcttcaggtttcttttg

SEQ ID NO: 5802927 - DNA, 25 bp, Homo sapien
agactctttcatccaggggaagatc

SEQ ID NO: 5802928 - DNA, 25 bp, Homo sapien
ttacgactgttcaaaactactctct

SEQ ID NO: 5802929 - DNA, 25 bp, Homo sapien
agatgggggcagggtcggtggtgga

SEQ ID NO: 5802930 - DNA, 25 bp, Homo sapien
ggaacgaaatgactcgcttcaaata

SEQ ID NO: 5802931 - DNA, 25 bp, Homo sapien
acatattgggctgtgatttggcgaa

SEQ ID NO: 5802932 - DNA, 25 bp, Homo sapien
tccagggagctggcagcagcagggg

SEQ ID NO: 5802933 - DNA, 25 bp, Homo sapien
gactcgacgaagttgccgcccacgt

SEQ ID NO: 5802934 - DNA, 25 bp, Homo sapien
cccatgaaggacaatttgcggtctt

SEQ ID NO: 5802935 - DNA, 25 bp, Homo sapien
cgccgccgagcggtgggctgcgctc

SEQ ID NO: 5802936 - DNA, 25 bp, Homo sapien
gggccggcccccaggctccaggtga

SEQ ID NO: 5802937 - DNA, 25 bp, Homo sapien
cggcctggaagcgaattcctaagct

SEQ ID NO: 5802938 - DNA, 25 bp, Homo sapien
agctgggccggcccccaggctccag

SEQ ID NO: 5802939 - DNA, 25 bp, Homo sapien
tgcgtacccgcttggatgctgggcc

SEQ ID NO: 5802940 - DNA, 25 bp, Homo sapien
ttggagttctgtcgagactctttca

SEQ ID NO: 5802941 - DNA, 25 bp, Homo sapien
ccaggaggctggctgccaccacccc

SEQ ID NO: 5802942 - DNA, 25 bp, Homo sapien
tggcgaagccgccgccgttgctcgc

SEQ ID NO: 5802943 - DNA, 25 bp, Homo sapien
ttgggcttcttggcaggcactccac

SEQ ID NO: 5802944 - DNA, 25 bp, Homo sapien
cctccaggattggtgggtgaagatg

SEQ ID NO: 5802945 - DNA, 25 bp, Homo sapien
tacccgcttggatgctgggcctggc

SEQ ID NO: 5802946 - DNA, 25 bp, Homo sapien
tcgcaaggtccatggtggtggttgc

SEQ ID NO: 5802947 - DNA, 25 bp, Homo sapien
gaagttgccgcccacgtacaccggg

SEQ ID NO: 5802948 - DNA, 25 bp, Homo sapien
acaatttgcggtcttaatcctttat

SEQ ID NO: 5802949 - DNA, 25 bp, Homo sapien
gctggcgaagccgccgccgttgctc

SEQ ID NO: 5802950 - DNA, 25 bp, Homo sapien
cgagcggtgggctgcgctcagggga

SEQ ID NO: 5802951 - DNA, 25 bp, Homo sapien
cgcatgcagctgccattgagttcag

SEQ ID NO: 5802952 - DNA, 25 bp, Homo sapien
cggcacaggaaggagaatataaatt

SEQ ID NO: 5802953 - DNA, 25 bp, Homo sapien
actgtagtccacgctggccgacgac

SEQ ID NO: 5802954 - DNA, 25 bp, Homo sapien
cgacgacgggtgcgagaggtggccc

SEQ ID NO: 5802955 - DNA, 25 bp, Homo sapien
aagtgtgttgtgccacgccaccggg

SEQ ID NO: 5802956 - DNA, 25 bp, Homo sapien
ggtggctgctgctctgagttcagac

SEQ ID NO: 5802957 - DNA, 25 bp, Homo sapien
gcaaggtccatggtggtggttgcct

SEQ ID NO: 5802958 - DNA, 25 bp, Homo sapien
gcaggttggcgctggcgaagccgcc

SEQ ID NO: 5802959 - DNA, 25 bp, Homo sapien
ctcagacttacctttgggacaccat

SEQ ID NO: 5802960 - DNA, 25 bp, Homo sapien
ccaagctctggtccctctgcagggc

SEQ ID NO: 5802961 - DNA, 25 bp, Homo sapien
tccagggcctgctgaccctgctcaa

SEQ ID NO: 5802962 - DNA, 25 bp, Homo sapien
gcgaaagcaggcggcgagggcgcgt

SEQ ID NO: 5802963 - DNA, 25 bp, Homo sapien
ggttgaagacaggcccggacgcggg

SEQ ID NO: 5802964 - DNA, 25 bp, Homo sapien
gcagtggcacagctgttcttctgct

SEQ ID NO: 5802965 - DNA, 25 bp, Homo sapien
cgtagttttgctgtagccatagcct

SEQ ID NO: 5802966 - DNA, 25 bp, Homo sapien
atcaataaactgtggtgaggactgt

SEQ ID NO: 5802967 - DNA, 25 bp, Homo sapien
ctggatagtcagtgtccagggagct

SEQ ID NO: 5802968 - DNA, 25 bp, Homo sapien
gtaattttgccgcgagttcgggctg

SEQ ID NO: 5802969 - DNA, 25 bp, Homo sapien
cggccgcatgcagctgccattgagt

SEQ ID NO: 5802970 - DNA, 25 bp, Homo sapien
aaatgactcgcttcaaataataaat

SEQ ID NO: 5802971 - DNA, 25 bp, Homo sapien
tgcccttggccttctggtccttctt

SEQ ID NO: 5802972 - DNA, 25 bp, Homo sapien
aggcccggacgcgggcgccatggac

SEQ ID NO: 5802973 - DNA, 25 bp, Homo sapien
cacaattatgtatgtgtgtgttttc

SEQ ID NO: 5802974 - DNA, 25 bp, Homo sapien
gctagccggcgagtgcaggatgccc

SEQ ID NO: 5802975 - DNA, 25 bp, Homo sapien
cgatgcaatccttacggcacaggaa

SEQ ID NO: 5802976 - DNA, 25 bp, Homo sapien
gactcgcttcaaataataaatacag

SEQ ID NO: 5802977 - DNA, 25 bp, Homo sapien
cacgtggccagcggcgccgccgagc

SEQ ID NO: 5802978 - DNA, 25 bp, Homo sapien
ctgagacgagtggtgggccgagaga

SEQ ID NO: 5802979 - DNA, 25 bp, Homo sapien
cccatggaggggaggcccggtcgcc

SEQ ID NO: 5802980 - DNA, 25 bp, Homo sapien
ataaatctacaaatatacacataaa

SEQ ID NO: 5802981 - DNA, 25 bp, Homo sapien
tggcgccgtgtaggcggccaggccg

SEQ ID NO: 5802982 - DNA, 25 bp, Homo sapien
tcagaggggcagagctctggatgga

SEQ ID NO: 5802983 - DNA, 25 bp, Homo sapien
tccggcagtcgtccctgagacgagt

SEQ ID NO: 5802984 - DNA, 25 bp, Homo sapien
aacgaaatgactcgcttcaaataat

SEQ ID NO: 5802985 - DNA, 25 bp, Homo sapien
ttttgccgcgagttcgggctggcgg

SEQ ID NO: 5802986 - DNA, 25 bp, Homo sapien
tgaagtggaattccttttccaattc

SEQ ID NO: 5802987 - DNA, 25 bp, Homo sapien
cggttgaagtggaattccttttcca

SEQ ID NO: 5802988 - DNA, 25 bp, Homo sapien
cgtgtaggcggccaggccgtacata

SEQ ID NO: 5802989 - DNA, 25 bp, Homo sapien
cttctggtccttcttgtacttcatg

SEQ ID NO: 5802990 - DNA, 25 bp, Homo sapien
ctaaatatttgttccaatagtacca

SEQ ID NO: 5802991 - DNA, 25 bp, Homo sapien
cgagagatctgtgtaggtgggatga

SEQ ID NO: 5802992 - DNA, 25 bp, Homo sapien
gcagggcgcgccgccgatgggtctc

SEQ ID NO: 5802993 - DNA, 25 bp, Homo sapien
tggggggtgctgtagccgtaagtgt

SEQ ID NO: 5802994 - DNA, 25 bp, Homo sapien
aatttacagggaaggatccttgcgg

SEQ ID NO: 5802995 - DNA, 25 bp, Homo sapien
gtttagtccgatgcaatccttacgg

SEQ ID NO: 5802996 - DNA, 25 bp, Homo sapien
ccgccgagcggtgggctgcgctcag

SEQ ID NO: 5802997 - DNA, 25 bp, Homo sapien
tcctttgtgggctggggctctcaga

SEQ ID NO: 5802998 - DNA, 25 bp, Homo sapien
gccgatgggtctcagacttaccttt

SEQ ID NO: 5802999 - DNA, 25 bp, Homo sapien
acgactgttcaaaactactctctca

SEQ ID NO: 5803000 - DNA, 25 bp, Homo sapien
ggtggggggtgctgtagccgtaagt

SEQ ID NO: 5803001 - DNA, 25 bp, Homo sapien
gcctccgccgctggaggcctgagac

SEQ ID NO: 5803002 - DNA, 25 bp, Homo sapien
catgcagctgccattgagttcagct

SEQ ID NO: 5803003 - DNA, 25 bp, Homo sapien
gcgagtgcaggatgcccttggcctt

SEQ ID NO: 5803004 - DNA, 25 bp, Homo sapien
ttagtccgatgcaatccttacggca

SEQ ID NO: 5803005 - DNA, 25 bp, Homo sapien
ccacctttgggcttcttggcaggca

SEQ ID NO: 5803006 - DNA, 25 bp, Homo sapien
cgcagctctctcctgcagtggcaca

SEQ ID NO: 5803007 - DNA, 25 bp, Homo sapien
tttacagggaaggatccttgcggct

SEQ ID NO: 5803008 - DNA, 25 bp, Homo sapien
cagaccagggggactaaggaggtga

SEQ ID NO: 5803009 - DNA, 25 bp, Homo sapien
gctctcagaggggcagagctctgga

SEQ ID NO: 5803010 - DNA, 25 bp, Homo sapien
gcaggcagctgctgagtggcgccgt

SEQ ID NO: 5803011 - DNA, 25 bp, Homo sapien
gcttcttggcaggcactccacctcc

SEQ ID NO: 5803012 - DNA, 25 bp, Homo sapien
gccgagagatctgtgtaggtgggat

SEQ ID NO: 5803013 - DNA, 25 bp, Homo sapien
agtttgggagcctccggcagtcgtc

SEQ ID NO: 5803014 - DNA, 25 bp, Homo sapien
atcctttatgtcaactacaaacacc

SEQ ID NO: 5803015 - DNA, 25 bp, Homo sapien
ccggacgcgggcgccatggactcga

SEQ ID NO: 5803016 - DNA, 25 bp, Homo sapien
gcaggcactccacctccaggattgg

SEQ ID NO: 5803017 - DNA, 25 bp, Homo sapien
gtgggctgcgctcaggggactggct

SEQ ID NO: 5803018 - DNA, 25 bp, Homo sapien
agttcagaccagggggactaaggag

SEQ ID NO: 5803019 - DNA, 25 bp, Homo sapien
gcccggacgcgggcgccatggactc

SEQ ID NO: 5803020 - DNA, 25 bp, Homo sapien
cccgcttggatgctgggcctggcgg

SEQ ID NO: 5803021 - DNA, 25 bp, Homo sapien
ctgcgcgctcgtgtatgccgtgcgt

SEQ ID NO: 5803022 - DNA, 25 bp, Homo sapien
ctgctgagtggcgccgtgtaggcgg

SEQ ID NO: 5803023 - DNA, 25 bp, Homo sapien
ttttgtaggctcttcaggtttcttt

SEQ ID NO: 5803024 - DNA, 25 bp, Homo sapien
cttaatcctttatgtcaactacaaa

SEQ ID NO: 5803025 - DNA, 25 bp, Homo sapien
acagcaagagaggtaattttgccgc

SEQ ID NO: 5803026 - DNA, 25 bp, Homo sapien
attcctaagctcggctggataaatc

SEQ ID NO: 5803027 - DNA, 25 bp, Homo sapien
cgccatgggatggggctcgaactcc

SEQ ID NO: 5803028 - DNA, 25 bp, Homo sapien
tcttgatctggcgttccgtgagatt

SEQ ID NO: 5803029 - DNA, 25 bp, Homo sapien
agccatagcctccaaacagtcctgg

SEQ ID NO: 5803030 - DNA, 25 bp, Homo sapien
ctccgccgctggaggcctgagaccc

SEQ ID NO: 5803031 - DNA, 25 bp, Homo sapien
cggcggccgctacagatgcgtcagt

SEQ ID NO: 5803032 - DNA, 25 bp, Homo sapien
gttgaagtggaattccttttccaat

SEQ ID NO: 5803033 - DNA, 25 bp, Homo sapien
acaggaaggagaatataaattaagg

SEQ ID NO: 5803034 - DNA, 25 bp, Homo sapien
tccggcgctgcgtagcgcttctgtt

SEQ ID NO: 5803035 - DNA, 25 bp, Homo sapien
tccgtgagattcagcaggttggcca

SEQ ID NO: 5803036 - DNA, 25 bp, Homo sapien
ggttttcatagtaagcagccttctg

SEQ ID NO: 5803037 - DNA, 25 bp, Homo sapien
agcagcagggggtgggtagggctgg

SEQ ID NO: 5803038 - DNA, 25 bp, Homo sapien
aggcggcggcagggcaagagcgggg

SEQ ID NO: 5803039 - DNA, 25 bp, Homo sapien
ggccatctccacgcggcgcggccgg

SEQ ID NO: 5803040 - DNA, 25 bp, Homo sapien
taccactgtatccttcactgccacc

SEQ ID NO: 5803041 - DNA, 25 bp, Homo sapien
acaccattaccagattggagtccct

SEQ ID NO: 5803042 - DNA, 25 bp, Homo sapien
ggccgctacagatgcgtcagtttgg

SEQ ID NO: 5803043 - DNA, 25 bp, Homo sapien
gaaccagatcttgatctggcgttcc

SEQ ID NO: 5803044 - DNA, 25 bp, Homo sapien
cgggctcttgtcctcgcagctctct

SEQ ID NO: 5803045 - DNA, 25 bp, Homo sapien
gccgccgttgctcgccatgggatgg

SEQ ID NO: 5803046 - DNA, 25 bp, Homo sapien
ccacgccaccgggcttcctgactct

SEQ ID NO: 5803047 - DNA, 25 bp, Homo sapien
gaggtgaaatgtggcccccacggcc

SEQ ID NO: 5803048 - DNA, 25 bp, Homo sapien
agttctgtcgagactctttcatcca

SEQ ID NO: 5803049 - DNA, 25 bp, Homo sapien
ggcgagggcgcgtcgtaggccaggc

SEQ ID NO: 5803050 - DNA, 25 bp, Homo sapien
aaatacattcagacaaggataaata

SEQ ID NO: 5803051 - DNA, 25 bp, Homo sapien
gaattccttttccaattccaccagc

SEQ ID NO: 5803052 - DNA, 25 bp, Homo sapien
ttgtggtggctgctgctctgagttc

SEQ ID NO: 5803053 - DNA, 25 bp, Homo sapien
tgagttcagaccaggaggctggctg

SEQ ID NO: 5803054 - DNA, 25 bp, Homo sapien
agctctggatggagcaggcagaacc

SEQ ID NO: 5803055 - DNA, 25 bp, Homo sapien
gcttggagttctgtcgagactcttt

SEQ ID NO: 5803056 - DNA, 25 bp, Homo sapien
actctttcatccaggggaagatctg

SEQ ID NO: 5803057 - DNA, 25 bp, Homo sapien
ctcgcttcaaataataaatacagat

SEQ ID NO: 5803058 - DNA, 25 bp, Homo sapien
cgagtcacccaaaggacgcccatgg

SEQ ID NO: 5803059 - DNA, 25 bp, Homo sapien
tggccttctggtccttcttgtactt

SEQ ID NO: 5803060 - DNA, 25 bp, Homo sapien
tctggcgttccgtgagattcagcag

SEQ ID NO: 5803061 - DNA, 25 bp, Homo sapien
cgggctggcggcggccgctacagat

SEQ ID NO: 5803062 - DNA, 25 bp, Homo sapien
agtggcgccgtgtaggcggccaggc

SEQ ID NO: 5803063 - DNA, 25 bp, Homo sapien
cggtgggctgcgctcaggggactgg

SEQ ID NO: 5803064 - DNA, 25 bp, Homo sapien
agtgtccagggagctggcagcagca

SEQ ID NO: 5803065 - DNA, 25 bp, Homo sapien
ctgttcttctgcttggagttctgtc

SEQ ID NO: 5803066 - DNA, 25 bp, Homo sapien
tgtatccttcactgccacctccaat

SEQ ID NO: 5803067 - DNA, 25 bp, Homo sapien
cagggagctggcagcagcagggggt

SEQ ID NO: 5803068 - DNA, 25 bp, Homo sapien
caggtgaccacaattatgtatgtgt

SEQ ID NO: 5803069 - DNA, 25 bp, Homo sapien
ctagttcagaccagggggactaagg

SEQ ID NO: 5803070 - DNA, 25 bp, Homo sapien
gaatctgcgcggcgcaactgtagtc

SEQ ID NO: 5803071 - DNA, 25 bp, Homo sapien
tgcgtcagtttgggagcctccggca

SEQ ID NO: 5803072 - DNA, 25 bp, Homo sapien
tctttcatccaggggaagatctgct

SEQ ID NO: 5803073 - DNA, 25 bp, Homo sapien
tacagggaaggatccttgcggctga

SEQ ID NO: 5803074 - DNA, 25 bp, Homo sapien
tggttgcctggaatctgcgcggcgc

SEQ ID NO: 5803075 - DNA, 25 bp, Homo sapien
ccctgcaggttggcgctggcgaagc

SEQ ID NO: 5803076 - DNA, 25 bp, Homo sapien
tgggttttcatagtaagcagccttc

SEQ ID NO: 5803077 - DNA, 25 bp, Homo sapien
tgtagccgtaagtgtccgtagtttt

SEQ ID NO: 5803078 - DNA, 25 bp, Homo sapien
gtggtggttgcctggaatctgcgcg

SEQ ID NO: 5803079 - DNA, 25 bp, Homo sapien
cagtcctgggttttcatagtaagca

SEQ ID NO: 5803080 - DNA, 25 bp, Homo sapien
agcaagagaggtaattttgccgcga

SEQ ID NO: 5803081 - DNA, 25 bp, Homo sapien
cggttctggaaccagatcttgatct

SEQ ID NO: 5803082 - DNA, 25 bp, Homo sapien
gctagaagcattgggcccacctttg

SEQ ID NO: 5803083 - DNA, 25 bp, Homo sapien
tgtggtttttgagaaatgaccaaag

SEQ ID NO: 5803084 - DNA, 25 bp, Homo sapien
tggggctcgaactccggcgctgcgt

SEQ ID NO: 5803085 - DNA, 25 bp, Homo sapien
gctctctcctgcagtggcacagctg

SEQ ID NO: 5803086 - DNA, 25 bp, Homo sapien
gctgctgctctgagttcagaccagg

SEQ ID NO: 5803087 - DNA, 25 bp, Homo sapien
cgtcgtaggccaggccgggcactgg

SEQ ID NO: 5803088 - DNA, 25 bp, Homo sapien
tgccacctccaatgtctgctgaatc

SEQ ID NO: 5803089 - DNA, 25 bp, Homo sapien
gccgcatgcagctgccattgagttc

SEQ ID NO: 5803090 - DNA, 25 bp, Homo sapien
aggggaagatctgcttgctgatggt

SEQ ID NO: 5803091 - DNA, 25 bp, Homo sapien
gccgcccacgtacaccgggctgccc

SEQ ID NO: 5803092 - DNA, 25 bp, Homo sapien
gatttggcgaaagcaggcggcgagg

SEQ ID NO: 5803093 - DNA, 25 bp, Homo sapien
gtatgccgtgcgtacccgcttggat

SEQ ID NO: 5803094 - DNA, 25 bp, Homo sapien
aggcctgagacccgggaggcggcgg

SEQ ID NO: 5803095 - DNA, 25 bp, Homo sapien
acaatttgaaatcaataaactgtgg

SEQ ID NO: 5803096 - DNA, 25 bp, Homo sapien
agtcccttggtccgcagtatgtggc

SEQ ID NO: 5803097 - DNA, 25 bp, Homo sapien
cttttccaattccaccagctgcgcg

SEQ ID NO: 5803098 - DNA, 25 bp, Homo sapien
gctggccggagtaggccacgtggcc

SEQ ID NO: 5803099 - DNA, 25 bp, Homo sapien
tagaagcattgggcccacctttggg

SEQ ID NO: 5803100 - DNA, 25 bp, Homo sapien
gcgggcgccatggactcgacgaagt

SEQ ID NO: 5803101 - DNA, 25 bp, Homo sapien
tggaatctgcgcggcgcaactgtag

SEQ ID NO: 5803102 - DNA, 25 bp, Homo sapien
tgcccggccgcatgcagctgccatt

SEQ ID NO: 5803103 - DNA, 25 bp, Homo sapien
ggtcgcaaggtccatggtggtggtt

SEQ ID NO: 5803104 - DNA, 25 bp, Homo sapien
cctttgggacaccattaccagattg

SEQ ID NO: 5803105 - DNA, 25 bp, Homo sapien
acaagtagcggttgaagtggaattc

SEQ ID NO: 5803106 - DNA, 25 bp, Homo sapien
ccctggctgttcccagtgcccggcc

SEQ ID NO: 5803107 - DNA, 25 bp, Homo sapien
acctttgggcttcttggcaggcact

SEQ ID NO: 5803108 - DNA, 25 bp, Homo sapien
acccaaaggacgcccatggagggga

SEQ ID NO: 5803109 - DNA, 25 bp, Homo sapien
aaggataaataatcagggaacgaaa

SEQ ID NO: 5803110 - DNA, 25 bp, Homo sapien
gggtctcagacttacctttgggaca

SEQ ID NO: 5803111 - DNA, 25 bp, Homo sapien
gtggtggaggagggggttgtggtgg

SEQ ID NO: 5803112 - DNA, 25 bp, Homo sapien
tttgctgtagccatagcctccaaac

SEQ ID NO: 5803113 - DNA, 25 bp, Homo sapien
cggtcttaatcctttatgtcaacta

SEQ ID NO: 5803114 - DNA, 25 bp, Homo sapien
tggcgttccgtgagattcagcaggt

SEQ ID NO: 5803115 - DNA, 25 bp, Homo sapien
ataataaatacagatagtttagtcc

SEQ ID NO: 5803116 - DNA, 25 bp, Homo sapien
ctgtgtaggtgggatgagggtcgca

SEQ ID NO: 5803117 - DNA, 25 bp, Homo sapien
tctacccatgaaggacaatttgcgg

SEQ ID NO: 5803118 - DNA, 25 bp, Homo sapien
gccgacgacgggtgcgagaggtggc

SEQ ID NO: 5803119 - DNA, 25 bp, Homo sapien
ttatggcgagtcacccaaaggacgc

SEQ ID NO: 5803120 - DNA, 25 bp, Homo sapien
gccggcccccaggctccaggtgacc

SEQ ID NO: 5803121 - DNA, 25 bp, Homo sapien
cctggaatctgcgcggcgcaactgt

SEQ ID NO: 5803122 - DNA, 25 bp, Homo sapien
acaaacaccagccacggttacgact

SEQ ID NO: 5803123 - DNA, 25 bp, Homo sapien
gaggctggctgccaccacccccacc

SEQ ID NO: 5803124 - DNA, 25 bp, Homo sapien
cgcgtcgtaggccaggccgggcact

SEQ ID NO: 5803125 - DNA, 25 bp, Homo sapien
ggtccatggtggtggttgcctggaa

SEQ ID NO: 5803126 - DNA, 25 bp, Homo sapien
tcggctggataaatctacaaatata

SEQ ID NO: 5803127 - DNA, 25 bp, Homo sapien
gagctagaagcattgggcccacctt

SEQ ID NO: 5803128 - DNA, 25 bp, Homo sapien
cgcggccggcacaagtagcggttga

SEQ ID NO: 5803129 - DNA, 25 bp, Homo sapien
ccagtgcccggccgcatgcagctgc

SEQ ID NO: 5803130 - DNA, 25 bp, Homo sapien
cagattggagtcccttggtccgcag

SEQ ID NO: 5803131 - DNA, 25 bp, Homo sapien
gtcgagactctttcatccaggggaa

SEQ ID NO: 5803132 - DNA, 25 bp, Homo sapien
attccaccagctgcgcgctcgtgta

SEQ ID NO: 5803133 - DNA, 25 bp, Homo sapien
agctgttcttctgcttggagttctg

SEQ ID NO: 5803134 - DNA, 25 bp, Homo sapien
atctacaaatatacacataaataca

SEQ ID NO: 5803135 - DNA, 25 bp, Homo sapien
gctggggctctcagaggggcagagc

SEQ ID NO: 5803136 - DNA, 25 bp, Homo sapien
aataaatacagatagtttagtccga

SEQ ID NO: 5803137 - DNA, 25 bp, Homo sapien
ccatctccacgcggcgcggccggca

SEQ ID NO: 5803138 - DNA, 25 bp, Homo sapien
ttcgggctggcggcggccgctacag

SEQ ID NO: 5803139 - DNA, 25 bp, Homo sapien
taagtgtccgtagttttgctgtagc

SEQ ID NO: 5803140 - DNA, 25 bp, Homo sapien
tgtagtccacgctggccgacgacgg

SEQ ID NO: 5803141 - DNA, 25 bp, Homo sapien
gctcgaactccggcgctgcgtagcg

SEQ ID NO: 5803142 - DNA, 25 bp, Homo sapien
atctgcgcggcgcaactgtagtcca

SEQ ID NO: 5803143 - DNA, 25 bp, Homo sapien
ggagtcccttggtccgcagtatgtg

SEQ ID NO: 5803144 - DNA, 25 bp, Homo sapien
tggcagcagcagggggtgggtaggg

SEQ ID NO: 5803145 - DNA, 25 bp, Homo sapien
tgcgtagcgcttctgttgtggcagg

SEQ ID NO: 5803146 - DNA, 25 bp, Homo sapien
ggttacgactgttcaaaactactct

SEQ ID NO: 5803147 - DNA, 25 bp, Homo sapien
ggatagtcagtgtccagggagctgg

SEQ ID NO: 5803148 - DNA, 25 bp, Homo sapien
gatctggcgttccgtgagattcagc

SEQ ID NO: 5803149 - DNA, 25 bp, Homo sapien
tcagcaggttggccatctccacgcg

SEQ ID NO: 5803150 - DNA, 25 bp, Homo sapien
tgaaatgtggcccccacggcctgga

SEQ ID NO: 5803151 - DNA, 25 bp, Homo sapien
ccattgagttcagctcctttgtggg

SEQ ID NO: 5803152 - DNA, 25 bp, Homo sapien
gggatgagggtcgcaaggtccatgg

SEQ ID NO: 5803153 - DNA, 25 bp, Homo sapien
gttcaaaactactctctcaactagt

SEQ ID NO: 5803154 - DNA, 25 bp, Homo sapien
gtggcccaggttgaagacaggcccg

SEQ ID NO: 5803155 - DNA, 25 bp, Homo sapien
gtccttcttgtacttcatgcgccgg

SEQ ID NO: 5803156 - DNA, 25 bp, Homo sapien
acgcggcgcggccggcacaagtagc

SEQ ID NO: 5803157 - DNA, 25 bp, Homo sapien
cgcgggccaggcccaagactctcca

SEQ ID NO: 5803158 - DNA, 25 bp, Homo sapien
aggggcagagctctggatggagcag

SEQ ID NO: 5803159 - DNA, 25 bp, Homo sapien
cagtatgtggcactgtcaaatttac

SEQ ID NO: 5803160 - DNA, 25 bp, Homo sapien
gccaggccgggcactggcggcagct

SEQ ID NO: 5803161 - DNA, 25 bp, Homo sapien
aggacgcccatggaggggaggcccg

SEQ ID NO: 5803162 - DNA, 25 bp, Homo sapien
gacttacctttgggacaccattacc

SEQ ID NO: 5803163 - DNA, 25 bp, Homo sapien
gggtagggctggtggggggtgctgt

SEQ ID NO: 5803164 - DNA, 25 bp, Homo sapien
aagctagacgcgggccaggcccaag

SEQ ID NO: 5803165 - DNA, 25 bp, Homo sapien
ccagggggactaaggaggtgaaatg

SEQ ID NO: 5803166 - DNA, 25 bp, Homo sapien
aaatgtggcccccacggcctggaag

SEQ ID NO: 5803167 - DNA, 25 bp, Homo sapien
tgatggtggctgaggagctagaagc

SEQ ID NO: 5803168 - DNA, 25 bp, Homo sapien
atcctgagagagctgggccggcccc

SEQ ID NO: 5803169 - DNA, 25 bp, Homo sapien
gtcaaatttacagggaaggatcctt

SEQ ID NO: 5803170 - DNA, 25 bp, Homo sapien
gctgagtggcgccgtgtaggcggcc

SEQ ID NO: 5803171 - DNA, 25 bp, Homo sapien
gcagggcaagagcggggaagggggt

SEQ ID NO: 5803172 - DNA, 25 bp, Homo sapien
atattgggctgtgatttggcgaaag

SEQ ID NO: 5803173 - DNA, 25 bp, Homo sapien
cggccggcacaagtagcggttgaag

SEQ ID NO: 5803174 - DNA, 25 bp, Homo sapien
gcagctgctgagtggcgccgtgtag

SEQ ID NO: 5803175 - DNA, 25 bp, Homo sapien
cagctggccggagtaggccacgtgg

SEQ ID NO: 5803176 - DNA, 25 bp, Homo sapien
catggaggggaggcccggtcgcctg

SEQ ID NO: 5803177 - DNA, 25 bp, Homo sapien
cgtggccagcggcgccgccgagcgg

SEQ ID NO: 5803178 - DNA, 25 bp, Homo sapien
gcggcggcagggcaagagcggggaa

SEQ ID NO: 5803179 - DNA, 25 bp, Homo sapien
atctgcttgctgatggtggctgagg

SEQ ID NO: 5803180 - DNA, 25 bp, Homo sapien
aaactgtggtgaggactgtggtttt

SEQ ID NO: 5803181 - DNA, 25 bp, Homo sapien
tccttacggcacaggaaggagaata

SEQ ID NO: 5803182 - DNA, 25 bp, Homo sapien
tggccagcggcgccgccgagcggtg

SEQ ID NO: 5803183 - DNA, 25 bp, Homo sapien
ctgcattgtgcactcaggaagctcc

SEQ ID NO: 5803184 - DNA, 25 bp, Homo sapien
acaggcccggacgcgggcgccatgg

SEQ ID NO: 5803185 - DNA, 25 bp, Homo sapien
gggcagggtcggtggtggaggaggg

SEQ ID NO: 5803186 - DNA, 25 bp, Homo sapien
ggcactgtcaaatttacagggaagg

SEQ ID NO: 5803187 - DNA, 25 bp, Homo sapien
aggctccaggtgaccacaattatgt

SEQ ID NO: 5803188 - DNA, 25 bp, Homo sapien
agaggtggcccaggttgaagacagg

SEQ ID NO: 5803189 - DNA, 25 bp, Homo sapien
accagattggagtcccttggtccgc

SEQ ID NO: 5803190 - DNA, 25 bp, Homo sapien
tgagattcagcaggttggccatctc

SEQ ID NO: 5803191 - DNA, 25 bp, Homo sapien
ggccgtacatattgggctgtgattt

SEQ ID NO: 5803192 - DNA, 25 bp, Homo sapien
tctggaaccagatcttgatctggcg

SEQ ID NO: 5803193 - DNA, 25 bp, Homo sapien
tcgcctgcgcctccgccgctggagg

SEQ ID NO: 5803194 - DNA, 25 bp, Homo sapien
aaatcaataaactgtggtgaggact

SEQ ID NO: 5803195 - DNA, 25 bp, Homo sapien
cattgggcccacctttgggcttctt

SEQ ID NO: 5803196 - DNA, 25 bp, Homo sapien
gggcttcttggcaggcactccacct

SEQ ID NO: 5803197 - DNA, 25 bp, Homo sapien
ggaggcggcggcagggcaagagcgg

SEQ ID NO: 5803198 - DNA, 25 bp, Homo sapien
gagacccgggaggcggcggcagggc

SEQ ID NO: 5803199 - DNA, 25 bp, Homo sapien
actgccacctccaatgtctgctgaa

SEQ ID NO: 5803200 - DNA, 25 bp, Homo sapien
attggtgggtgaagatgggggcagg

SEQ ID NO: 5803201 - DNA, 25 bp, Homo sapien
tggtgaggactgtggtttttgagaa

SEQ ID NO: 5803202 - DNA, 25 bp, Homo sapien
gggcagagctctggatggagcaggc

SEQ ID NO: 5803203 - DNA, 25 bp, Homo sapien
aaaggacgcccatggaggggaggcc

SEQ ID NO: 5803204 - DNA, 25 bp, Homo sapien
ctgaatcctgagagagctgggccgg

SEQ ID NO: 5803205 - DNA, 25 bp, Homo sapien
cacgtacaccgggctgccctgcagg

SEQ ID NO: 5803206 - DNA, 25 bp, Homo sapien
agacaatttgaaatcaataaactgt

SEQ ID NO: 5803207 - DNA, 25 bp, Homo sapien
gaccaggaggctggctgccaccacc

SEQ ID NO: 5803208 - DNA, 25 bp, Homo sapien
ataaactgtggtgaggactgtggtt

SEQ ID NO: 5803209 - DNA, 25 bp, Homo sapien
gtccacgctggccgacgacgggtgc

SEQ ID NO: 5803210 - DNA, 25 bp, Homo sapien
gtagccatagcctccaaacagtcct

SEQ ID NO: 5803211 - DNA, 25 bp, Homo sapien
cggcacaagtagcggttgaagtgga

SEQ ID NO: 5803212 - DNA, 25 bp, Homo sapien
cccaccctggctgttcccagtgccc

SEQ ID NO: 5803213 - DNA, 25 bp, Homo sapien
cggcagggcaagagcggggaagggg

SEQ ID NO: 5803214 - DNA, 25 bp, Homo sapien
tccaaacagtcctgggttttcatag

SEQ ID NO: 5803215 - DNA, 25 bp, Homo sapien
gaactccggcgctgcgtagcgcttc

SEQ ID NO: 5803216 - DNA, 25 bp, Homo sapien
atagtcagtgtccagggagctggca

SEQ ID NO: 5803217 - DNA, 25 bp, Homo sapien
gctcctttgtgggctggggctctca

SEQ ID NO: 5803218 - DNA, 25 bp, Homo sapien
actctacccatgaaggacaatttgc

SEQ ID NO: 5803219 - DNA, 25 bp, Homo sapien
cttggccttctggtccttcttgtac

SEQ ID NO: 5803220 - DNA, 25 bp, Homo sapien
ttcatagtaagcagccttctgcatt

SEQ ID NO: 5803221 - DNA, 25 bp, Homo sapien
ggtggctgaggagctagaagcattg

SEQ ID NO: 5803222 - DNA, 25 bp, Homo sapien
tcaactagttcagaccagggggact

SEQ ID NO: 5803223 - DNA, 25 bp, Homo sapien
gtatgtggcactgtcaaatttacag

SEQ ID NO: 5803224 - DNA, 25 bp, Homo sapien
caggccgggcactggcggcagctgg

SEQ ID NO: 5803225 - DNA, 25 bp, Homo sapien
accaaagtgtgttgtgccacgccac

SEQ ID NO: 5803226 - DNA, 25 bp, Homo sapien
tcttcaggtttcttttgatatctgt

SEQ ID NO: 5803227 - DNA, 25 bp, Homo sapien
tcggtggtggaggagggggttgtgg

SEQ ID NO: 5803228 - DNA, 25 bp, Homo sapien
ggcccaggttgaagacaggcccgga

SEQ ID NO: 5803229 - DNA, 25 bp, Homo sapien
gtccctgagacgagtggtgggccga

SEQ ID NO: 5803230 - DNA, 25 bp, Homo sapien
ctgagacccgggaggcggcggcagg

SEQ ID NO: 5803231 - DNA, 25 bp, Homo sapien
gcccggtcgcctgcgcctccgccgc

SEQ ID NO: 5803232 - DNA, 25 bp, Homo sapien
gaatcctgagagagctgggccggcc

SEQ ID NO: 5803233 - DNA, 25 bp, Homo sapien
ggagcctccggcagtcgtccctgag

SEQ ID NO: 5803234 - DNA, 25 bp, Homo sapien
catggactcgacgaagttgccgccc

SEQ ID NO: 5803235 - DNA, 25 bp, Homo sapien
acgcgggcgccatggactcgacgaa

SEQ ID NO: 5803236 - DNA, 25 bp, Homo sapien
gtaggccacgtggccagcggcgccg

SEQ ID NO: 5803237 - DNA, 25 bp, Homo sapien
tccttttccaattccaccagctgcg

SEQ ID NO: 5803238 - DNA, 25 bp, Homo sapien
tgaccaaagtgtgttgtgccacgcc

SEQ ID NO: 5803239 - DNA, 25 bp, Homo sapien
gtgtaggtgggatgagggtcgcaag

SEQ ID NO: 5803240 - DNA, 25 bp, Homo sapien
tttggcgaaagcaggcggcgagggc

SEQ ID NO: 5803241 - DNA, 25 bp, Homo sapien
ggggactggctagccggcgagtgca

SEQ ID NO: 5803242 - DNA, 25 bp, Homo sapien
ccgccgccgttgctcgccatgggat

SEQ ID NO: 5803243 - DNA, 25 bp, Homo sapien
tgctgctctgagttcagaccaggag

SEQ ID NO: 5803244 - DNA, 25 bp, Homo sapien
cagatgcgtcagtttgggagcctcc

SEQ ID NO: 5803245 - DNA, 25 bp, Homo sapien
caggggactggctagccggcgagtg

SEQ ID NO: 5803246 - DNA, 25 bp, Homo sapien
gcctggcgggctcttgtcctcgcag

SEQ ID NO: 5803247 - DNA, 25 bp, Homo sapien
gccggcgagtgcaggatgcccttgg

SEQ ID NO: 5803248 - DNA, 25 bp, Homo sapien
cggagtaggccacgtggccagcggc

SEQ ID NO: 5803249 - DNA, 25 bp, Homo sapien
tccaccagctgcgcgctcgtgtatg

SEQ ID NO: 5803250 - DNA, 25 bp, Homo sapien
gcccaagactctccaagctctggtc

SEQ ID NO: 5803251 - DNA, 25 bp, Homo sapien
gccggttctggaaccagatcttgat

SEQ ID NO: 5803252 - DNA, 25 bp, Homo sapien
gcctggaagcgaattcctaagctcg

SEQ ID NO: 5803253 - DNA, 25 bp, Homo sapien
gaattcctaagctcggctggataaa

SEQ ID NO: 5803254 - DNA, 25 bp, Homo sapien
ttggtccgcagtatgtggcactgtc

SEQ ID NO: 5803255 - DNA, 25 bp, Homo sapien
cagggaaggatccttgcggctgatt

SEQ ID NO: 5803256 - DNA, 25 bp, Homo sapien
gctcggctggataaatctacaaata

SEQ ID NO: 5803257 - DNA, 25 bp, Homo sapien
aactaagctagacgcgggccaggcc

SEQ ID NO: 5803258 - DNA, 25 bp, Homo sapien
ataaatacattcagacaaggataaa

SEQ ID NO: 5803259 - DNA, 25 bp, Homo sapien
gtaagcagccttctgcattgtgcac

SEQ ID NO: 5803260 - DNA, 25 bp, Homo sapien
gccatggactcgacgaagttgccgc

SEQ ID NO: 5803261 - DNA, 25 bp, Homo sapien
cagctctctcctgcagtggcacagc

SEQ ID NO: 5803262 - DNA, 25 bp, Homo sapien
cctttatgtcaactacaaacaccag

SEQ ID NO: 5803263 - DNA, 25 bp, Homo sapien
aagactctccaagctctggtccctc

SEQ ID NO: 5803264 - DNA, 25 bp, Homo sapien
tctcaactagttcagaccaggggga

SEQ ID NO: 5803265 - DNA, 25 bp, Homo sapien
cagatagtttagtccgatgcaatcc

SEQ ID NO: 5803266 - DNA, 25 bp, Homo sapien
cgcgccgccgatgggtctcagactt

SEQ ID NO: 5803267 - DNA, 25 bp, Homo sapien
gcgcctccgccgctggaggcctgag

SEQ ID NO: 5803268 - DNA, 25 bp, Homo sapien
gggatggggctcgaactccggcgct

SEQ ID NO: 5803269 - DNA, 25 bp, Homo sapien
aactacaaacaccagccacggttac

SEQ ID NO: 5803270 - DNA, 25 bp, Homo sapien
tctggtccctctgcagggcgcgccg

SEQ ID NO: 5803271 - DNA, 25 bp, Homo sapien
ccgtacatattgggctgtgatttgg

SEQ ID NO: 5803272 - DNA, 25 bp, Homo sapien
ggtgaaatgtggcccccacggcctg

SEQ ID NO: 5803273 - DNA, 25 bp, Homo sapien
ttgaagacaggcccggacgcgggcg

SEQ ID NO: 5803274 - DNA, 25 bp, Homo sapien
agattcagcaggttggccatctcca

SEQ ID NO: 5803275 - DNA, 25 bp, Homo sapien
gctctgagttcagaccaggaggctg

SEQ ID NO: 5803276 - DNA, 25 bp, Homo sapien
ctgcttgctgatggtggctgaggag

SEQ ID NO: 5803277 - DNA, 25 bp, Homo sapien
gcaggatgcccttggccttctggtc

SEQ ID NO: 5803278 - DNA, 25 bp, Homo sapien
gcagggggtgggtagggctggtggg

SEQ ID NO: 5803279 - DNA, 25 bp, Homo sapien
gatgcccttggccttctggtccttc

SEQ ID NO: 5803280 - DNA, 25 bp, Homo sapien
agtaccagacaatttgaaatcaata

SEQ ID NO: 5803281 - DNA, 25 bp, Homo sapien
gcccccaggctccaggtgaccacaa

SEQ ID NO: 5803282 - DNA, 25 bp, Homo sapien
gctccaggtgaccacaattatgtat

SEQ ID NO: 5803283 - DNA, 25 bp, Homo sapien
gcggcgcaactgtagtccacgctgg

SEQ ID NO: 5803284 - DNA, 25 bp, Homo sapien
gaaactaagctagacgcgggccagg

SEQ ID NO: 5803285 - DNA, 25 bp, Homo sapien
ctgggcctggcgggctcttgtcctc

SEQ ID NO: 5803286 - DNA, 25 bp, Homo sapien
ggcgcgtcgtaggccaggccgggca

SEQ ID NO: 5803287 - DNA, 25 bp, Homo sapien
ccaggctccaggtgaccacaattat

SEQ ID NO: 5803288 - DNA, 25 bp, Homo sapien
ggcggcagggcaagagcggggaagg

SEQ ID NO: 5803289 - DNA, 25 bp, Homo sapien
tccgatgcaatccttacggcacagg

SEQ ID NO: 5803290 - DNA, 25 bp, Homo sapien
tagttttgctgtagccatagcctcc

SEQ ID NO: 5803291 - DNA, 25 bp, Homo sapien
tacagatgcgtcagtttgggagcct

SEQ ID NO: 5803292 - DNA, 25 bp, Homo sapien
ggaagcgaattcctaagctcggctg

SEQ ID NO: 5803293 - DNA, 25 bp, Homo sapien
ccgggcactggcggcagctggccgg

SEQ ID NO: 5803294 - DNA, 25 bp, Homo sapien
tacggcacaggaaggagaatataaa

SEQ ID NO: 5803295 - DNA, 25 bp, Homo sapien
ggacgcgggcgccatggactcgacg

SEQ ID NO: 5803296 - DNA, 25 bp, Homo sapien
cgggtgcgagaggtggcccaggttg

SEQ ID NO: 5803297 - DNA, 25 bp, Homo sapien
ggggttgtggtggctgctgctctga

SEQ ID NO: 5803298 - DNA, 25 bp, Homo sapien
tggatgctgggcctggcgggctctt

SEQ ID NO: 5803299 - DNA, 25 bp, Homo sapien
agccttctgcattgtgcactcagga

SEQ ID NO: 5803300 - DNA, 25 bp, Homo sapien
gtggcactgtcaaatttacagggaa

SEQ ID NO: 5803301 - DNA, 25 bp, Homo sapien
ggtgcgagaggtggcccaggttgaa

SEQ ID NO: 5803302 - DNA, 25 bp, Homo sapien
ggtgaccacaattatgtatgtgtgt

SEQ ID NO: 5803303 - DNA, 25 bp, Homo sapien
aagctccagggcctgctgaccctgc

SEQ ID NO: 5803304 - DNA, 25 bp, Homo sapien
aggaggctggctgccaccaccccca

SEQ ID NO: 5803305 - DNA, 25 bp, Homo sapien
atgccgtgcgtacccgcttggatgc

SEQ ID NO: 5803306 - DNA, 25 bp, Homo sapien
agctgcgcgctcgtgtatgccgtgc

SEQ ID NO: 5803307 - DNA, 25 bp, Homo sapien
agagctctggatggagcaggcagaa

SEQ ID NO: 5803308 - DNA, 25 bp, Homo sapien
aggttggcgctggcgaagccgccgc

SEQ ID NO: 5803309 - DNA, 25 bp, Homo sapien
atatttgttccaatagtaccagaca

SEQ ID NO: 5803310 - DNA, 25 bp, Homo sapien
ggctggataaatctacaaatataca

SEQ ID NO: 5803311 - DNA, 25 bp, Homo sapien
tgaccacaattatgtatgtgtgtgt

SEQ ID NO: 5803312 - DNA, 25 bp, Homo sapien
gttccgtgagattcagcaggttggc

SEQ ID NO: 5803313 - DNA, 25 bp, Homo sapien
ggagggggttgtggtggctgctgct

SEQ ID NO: 5803314 - DNA, 25 bp, Homo sapien
actccggcgctgcgtagcgcttctg

SEQ ID NO: 5803315 - DNA, 25 bp, Homo sapien
actaaggaggtgaaatgtggccccc

SEQ ID NO: 5803316 - DNA, 25 bp, Homo sapien
gagaatataaattaaggtctctgaa

SEQ ID NO: 5803317 - DNA, 25 bp, Homo sapien
ccaccactacagcaagagaggtaat

SEQ ID NO: 5803318 - DNA, 25 bp, Homo sapien
acctggatagtcagtgtccagggag

SEQ ID NO: 5803319 - DNA, 25 bp, Homo sapien
accctgctcaaataacattgactac

SEQ ID NO: 5803320 - DNA, 25 bp, Homo sapien
agtcgtccctgagacgagtggtggg

SEQ ID NO: 5803321 - DNA, 25 bp, Homo sapien
gaccagggggactaaggaggtgaaa

SEQ ID NO: 5803322 - DNA, 25 bp, Homo sapien
cacggttacgactgttcaaaactac

SEQ ID NO: 5803323 - DNA, 25 bp, Homo sapien
tctcagaggggcagagctctggatg

SEQ ID NO: 5803324 - DNA, 25 bp, Homo sapien
ccgggctgccctgcaggttggcgct

SEQ ID NO: 5803325 - DNA, 25 bp, Homo sapien
ggctcttgtcctcgcagctctctcc

SEQ ID NO: 5803326 - DNA, 25 bp, Homo sapien
atatacacataaatacattcagaca

SEQ ID NO: 5803327 - DNA, 25 bp, Homo sapien
cagctgccattgagttcagctcctt

SEQ ID NO: 5803328 - DNA, 25 bp, Homo sapien
ggcccccacggcctggaagcgaatt

SEQ ID NO: 5803329 - DNA, 25 bp, Homo sapien
cgtagcgcttctgttgtggcaggca

SEQ ID NO: 5803330 - DNA, 25 bp, Homo sapien
aggctcttcaggtttcttttgatat

SEQ ID NO: 5803331 - DNA, 25 bp, Homo sapien
ctgttcccagtgcccggccgcatgc

SEQ ID NO: 5803332 - DNA, 25 bp, Homo sapien
acgacgggtgcgagaggtggcccag

SEQ ID NO: 5803333 - DNA, 25 bp, Homo sapien
cgcgagttcgggctggcggcggccg

SEQ ID NO: 5803334 - DNA, 25 bp, Homo sapien
actgtggtttttgagaaatgaccaa

SEQ ID NO: 5803335 - DNA, 25 bp, Homo sapien
ctcgccatgggatggggctcgaact

SEQ ID NO: 5803336 - DNA, 25 bp, Homo sapien
gctgccctgcaggttggcgctggcg

SEQ ID NO: 5803337 - DNA, 25 bp, Homo sapien
gaaatgaccaaagtgtgttgtgcca

SEQ ID NO: 5803338 - DNA, 25 bp, Homo sapien
gccttctggtccttcttgtacttca

SEQ ID NO: 5803339 - DNA, 25 bp, Homo sapien
gggaaggatccttgcggctgattta

SEQ ID NO: 5803340 - DNA, 25 bp, Homo sapien
tctaccccaccactacagcaagaga

SEQ ID NO: 5803341 - DNA, 25 bp, Homo sapien
ctggcggcggccgctacagatgcgt

SEQ ID NO: 5803342 - DNA, 25 bp, Homo sapien
atggagcaggcagaacctggatagt

SEQ ID NO: 5803343 - DNA, 25 bp, Homo sapien
agttcgggctggcggcggccgctac

SEQ ID NO: 5803344 - DNA, 25 bp, Homo sapien
gcgccatggactcgacgaagttgcc

SEQ ID NO: 5803345 - DNA, 25 bp, Homo sapien
tgagggtcgcaaggtccatggtggt

SEQ ID NO: 5803346 - DNA, 25 bp, Homo sapien
tcagacaaggataaataatcaggga

SEQ ID NO: 5803347 - DNA, 25 bp, Homo sapien
actgtatccttcactgccacctcca

SEQ ID NO: 5803348 - DNA, 25 bp, Homo sapien
tgatttatggcgagtcacccaaagg

SEQ ID NO: 5803349 - DNA, 25 bp, Homo sapien
gatagtttagtccgatgcaatcctt

SEQ ID NO: 5803350 - DNA, 25 bp, Homo sapien
gtttttgagaaatgaccaaagtgtg

SEQ ID NO: 5803351 - DNA, 25 bp, Homo sapien
atgggatggggctcgaactccggcg

SEQ ID NO: 5803352 - DNA, 25 bp, Homo sapien
gggggtgctgtagccgtaagtgtcc

SEQ ID NO: 5803353 - DNA, 25 bp, Homo sapien
cccccacggcctggaagcgaattcc

SEQ ID NO: 5803354 - DNA, 25 bp, Homo sapien
tacctttgggacaccattaccagat

SEQ ID NO: 5803355 - DNA, 25 bp, Homo sapien
ttcagaccagggggactaaggaggt

SEQ ID NO: 5803356 - DNA, 25 bp, Homo sapien
gcgctggcgaagccgccgccgttgc

SEQ ID NO: 5803357 - DNA, 25 bp, Homo sapien
catgaaggacaatttgcggtcttaa

SEQ ID NO: 5803358 - DNA, 25 bp, Homo sapien
gcggccgctacagatgcgtcagttt

SEQ ID NO: 5803359 - DNA, 25 bp, Homo sapien
aaatctacaaatatacacataaata

SEQ ID NO: 5803360 - DNA, 25 bp, Homo sapien
agcaggttggccatctccacgcggc

SEQ ID NO: 5803361 - DNA, 25 bp, Homo sapien
gctagacgcgggccaggcccaagac

SEQ ID NO: 5803362 - DNA, 25 bp, Homo sapien
cgagttcgggctggcggcggccgct

SEQ ID NO: 5803363 - DNA, 25 bp, Homo sapien
atgtggcactgtcaaatttacaggg

SEQ ID NO: 5803364 - DNA, 25 bp, Homo sapien
acattcagacaaggataaataatca

SEQ ID NO: 5803365 - DNA, 25 bp, Homo sapien
ccactgtatccttcactgccacctc

SEQ ID NO: 5803366 - DNA, 25 bp, Homo sapien
gacgcccatggaggggaggcccggt

SEQ ID NO: 5803367 - DNA, 25 bp, Homo sapien
cactacagcaagagaggtaattttg

SEQ ID NO: 5803368 - DNA, 25 bp, Homo sapien
ccacctccaatgtctgctgaatcct

SEQ ID NO: 5803369 - DNA, 25 bp, Homo sapien
cccttggccttctggtccttcttgt

SEQ ID NO: 5803370 - DNA, 25 bp, Homo sapien
acgctggccgacgacgggtgcgaga

SEQ ID NO: 5803371 - DNA, 25 bp, Homo sapien
gccgctggaggcctgagacccggga

SEQ ID NO: 5803372 - DNA, 25 bp, Homo sapien
agccgccgccgttgctcgccatggg

SEQ ID NO: 5803373 - DNA, 25 bp, Homo sapien
gctgccattgagttcagctcctttg

SEQ ID NO: 5803374 - DNA, 25 bp, Homo sapien
tagtccacgctggccgacgacgggt

SEQ ID NO: 5803375 - DNA, 25 bp, Homo sapien
aatgaccaaagtgtgttgtgccacg

SEQ ID NO: 5803376 - DNA, 25 bp, Homo sapien
gcacaagtagcggttgaagtggaat

SEQ ID NO: 5803377 - DNA, 25 bp, Homo sapien
cagacttacctttgggacaccatta

SEQ ID NO: 5803378 - DNA, 25 bp, Homo sapien
ttcttgtacttcatgcgccggttct

SEQ ID NO: 5803379 - DNA, 25 bp, Homo sapien
acaaggataaataatcagggaacga

SEQ ID NO: 5803380 - DNA, 25 bp, Homo sapien
tgccattgagttcagctcctttgtg

SEQ ID NO: 5803381 - DNA, 25 bp, Homo sapien
aggtggcccaggttgaagacaggcc

SEQ ID NO: 5803382 - DNA, 25 bp, Homo sapien
ttaccagattggagtcccttggtcc

SEQ ID NO: 5803383 - DNA, 25 bp, Homo sapien
ccgctacagatgcgtcagtttggga

SEQ ID NO: 5803384 - DNA, 25 bp, Homo sapien
tgactaccactgtatccttcactgc

SEQ ID NO: 5803385 - DNA, 25 bp, Homo sapien
agtggcacagctgttcttctgcttg

SEQ ID NO: 5803386 - DNA, 25 bp, Homo sapien
gccggagtaggccacgtggccagcg

SEQ ID NO: 5803387 - DNA, 25 bp, Homo sapien
ggttggccatctccacgcggcgcgg

SEQ ID NO: 5803388 - DNA, 25 bp, Homo sapien
gaagcattgggcccacctttgggct

SEQ ID NO: 5803389 - DNA, 25 bp, Homo sapien
ccaggggaagatctgcttgctgatg

SEQ ID NO: 5803390 - DNA, 25 bp, Homo sapien
gcagagctctggatggagcaggcag

SEQ ID NO: 5803391 - DNA, 25 bp, Homo sapien
gttctggaaccagatcttgatctgg

SEQ ID NO: 5803392 - DNA, 25 bp, Homo sapien
ataatcagggaacgaaatgactcgc

SEQ ID NO: 5803393 - DNA, 25 bp, Homo sapien
attgagttcagctcctttgtgggct

SEQ ID NO: 5803394 - DNA, 25 bp, Homo sapien
tgcgagaggtggcccaggttgaaga

SEQ ID NO: 5803395 - DNA, 25 bp, Homo sapien
cgtacccgcttggatgctgggcctg

SEQ ID NO: 5803396 - DNA, 25 bp, Homo sapien
agggaacgaaatgactcgcttcaaa

SEQ ID NO: 5803397 - DNA, 25 bp, Homo sapien
attatgtatgtgtgtgttttcttga

SEQ ID NO: 5803398 - DNA, 25 bp, Homo sapien
ctgcagtggcacagctgttcttctg

SEQ ID NO: 5803399 - DNA, 25 bp, Homo sapien
tccacctccaggattggtgggtgaa

SEQ ID NO: 5803400 - DNA, 25 bp, Homo sapien
tcactgccacctccaatgtctgctg

SEQ ID NO: 5803401 - DNA, 25 bp, Homo sapien
tgagttcagctcctttgtgggctgg

SEQ ID NO: 5803402 - DNA, 25 bp, Homo sapien
atgggggcagggtcggtggtggagg

SEQ ID NO: 5803403 - DNA, 25 bp, Homo sapien
aataacattgactaccactgtatcc

SEQ ID NO: 5803404 - DNA, 25 bp, Homo sapien
atataaattaaggtctctgaaacta

SEQ ID NO: 5803405 - DNA, 25 bp, Homo sapien
gcttcctgactctacccatgaagga

SEQ ID NO: 5803406 - DNA, 25 bp, Homo sapien
gggctgccctgcaggttggcgctgg

SEQ ID NO: 5803407 - DNA, 25 bp, Homo sapien
gccacgtggccagcggcgccgccga

SEQ ID NO: 5803408 - DNA, 25 bp, Homo sapien
cctgactctacccatgaaggacaat

SEQ ID NO: 5803409 - DNA, 25 bp, Homo sapien
ctccacgcggcgcggccggcacaag

SEQ ID NO: 5803410 - DNA, 25 bp, Homo sapien
tctgagttcagaccaggaggctggc

SEQ ID NO: 5803411 - DNA, 25 bp, Homo sapien
gcccacctttgggcttcttggcagg

SEQ ID NO: 5803412 - DNA, 25 bp, Homo sapien
gttgcctggaatctgcgcggcgcaa

SEQ ID NO: 5803413 - DNA, 25 bp, Homo sapien
agatctgtgtaggtgggatgagggt

SEQ ID NO: 5803414 - DNA, 25 bp, Homo sapien
atttgttccaatagtaccagacaat

SEQ ID NO: 5803415 - DNA, 25 bp, Homo sapien
gggaagatctgcttgctgatggtgg

SEQ ID NO: 5803416 - DNA, 25 bp, Homo sapien
agggtcgcaaggtccatggtggtgg

SEQ ID NO: 5803417 - DNA, 25 bp, Homo sapien
tggctagccggcgagtgcaggatgc

SEQ ID NO: 5803418 - DNA, 25 bp, Homo sapien
aggatgcccttggccttctggtcct

SEQ ID NO: 5803419 - DNA, 25 bp, Homo sapien
attcagacaaggataaataatcagg

SEQ ID NO: 5803420 - DNA, 25 bp, Homo sapien
ggtcgcctgcgcctccgccgctgga

SEQ ID NO: 5803421 - DNA, 25 bp, Homo sapien
tttcatccaggggaagatctgcttg

SEQ ID NO: 5803422 - DNA, 25 bp, Homo sapien
tgtaggcggccaggccgtacatatt

SEQ ID NO: 5803423 - DNA, 25 bp, Homo sapien
tccgtagttttgctgtagccatagc

SEQ ID NO: 5803424 - DNA, 25 bp, Homo sapien
gcagggtcggtggtggaggaggggg

SEQ ID NO: 5803425 - DNA, 25 bp, Homo sapien
ttctgcttggagttctgtcgagact

SEQ ID NO: 5803426 - DNA, 25 bp, Homo sapien
tggctgctgctctgagttcagacca

SEQ ID NO: 5803427 - DNA, 25 bp, Homo sapien
atacattcagacaaggataaataat

SEQ ID NO: 5803428 - DNA, 25 bp, Homo sapien
tacccatgaaggacaatttgcggtc

SEQ ID NO: 5803429 - DNA, 25 bp, Homo sapien
ccggtcgcctgcgcctccgccgctg

SEQ ID NO: 5803430 - DNA, 25 bp, Homo sapien
gaaggagaatataaattaaggtctc

SEQ ID NO: 5803431 - DNA, 25 bp, Homo sapien
gggcactggcggcagctggccggag

SEQ ID NO: 5803432 - DNA, 25 bp, Homo sapien
aactactctctcaactagttcagac

SEQ ID NO: 5803433 - DNA, 25 bp, Homo sapien
tgtacttcatgcgccggttctggaa

SEQ ID NO: 5803434 - DNA, 25 bp, Homo sapien
aaatatttgttccaatagtaccaga

SEQ ID NO: 5803435 - DNA, 25 bp, Homo sapien
acgccaccgggcttcctgactctac

SEQ ID NO: 5803436 - DNA, 25 bp, Homo sapien
cggcagtcgtccctgagacgagtgg

SEQ ID NO: 5803437 - DNA, 25 bp, Homo sapien
taggcggccaggccgtacatattgg

SEQ ID NO: 5803438 - DNA, 25 bp, Homo sapien
gcgaagccgccgccgttgctcgcca

SEQ ID NO: 5803439 - DNA, 25 bp, Homo sapien
gccaggccgtacatattgggctgtg

SEQ ID NO: 5803440 - DNA, 25 bp, Homo sapien
attgggctgtgatttggcgaaagca

SEQ ID NO: 5803441 - DNA, 25 bp, Homo sapien
cagggcctgctgaccctgctcaaat

SEQ ID NO: 5803442 - DNA, 25 bp, Homo sapien
gttttgctgtagccatagcctccaa

SEQ ID NO: 5803443 - DNA, 25 bp, Homo sapien
ccttggtccgcagtatgtggcactg

SEQ ID NO: 5803444 - DNA, 25 bp, Homo sapien
gttggcgctggcgaagccgccgccg

SEQ ID NO: 5803445 - DNA, 25 bp, Homo sapien
tggctgaggagctagaagcattggg

SEQ ID NO: 5803446 - DNA, 25 bp, Homo sapien
tgcctggaatctgcgcggcgcaact

SEQ ID NO: 5803447 - DNA, 25 bp, Homo sapien
tcagtgtccagggagctggcagcag

SEQ ID NO: 5803448 - DNA, 25 bp, Homo sapien
acgaagttgccgcccacgtacaccg

SEQ ID NO: 5803449 - DNA, 25 bp, Homo sapien
agggcgcgtcgtaggccaggccggg

SEQ ID NO: 5803450 - DNA, 25 bp, Homo sapien
cgacgaagttgccgcccacgtacac

SEQ ID NO: 5803451 - DNA, 25 bp, Homo sapien
gcacaggaaggagaatataaattaa

SEQ ID NO: 5803452 - DNA, 25 bp, Homo sapien
gacgagtggtgggccgagagatctg

SEQ ID NO: 5803453 - DNA, 25 bp, Homo sapien
aggatccttgcggctgatttatggc

SEQ ID NO: 5803454 - DNA, 25 bp, Homo sapien
gtgggtagggctggtggggggtgct

SEQ ID NO: 5803455 - DNA, 25 bp, Homo sapien
aattttgccgcgagttcgggctggc

SEQ ID NO: 5803456 - DNA, 25 bp, Homo sapien
cttcaaataataaatacagatagtt

SEQ ID NO: 5803457 - DNA, 25 bp, Homo sapien
ggtggttgcctggaatctgcgcggc

SEQ ID NO: 5803458 - DNA, 25 bp, Homo sapien
ctacaaacaccagccacggttacga

SEQ ID NO: 5803459 - DNA, 25 bp, Homo sapien
tctcctgcagtggcacagctgttct

SEQ ID NO: 5803460 - DNA, 25 bp, Homo sapien
gtgggatgagggtcgcaaggtccat

SEQ ID NO: 5803461 - DNA, 25 bp, Homo sapien
ctggaggcctgagacccgggaggcg

SEQ ID NO: 5803462 - DNA, 25 bp, Homo sapien
ctctgcagggcgcgccgccgatggg

SEQ ID NO: 5803463 - DNA, 25 bp, Homo sapien
tcaaataataaatacagatagttta

SEQ ID NO: 5803464 - DNA, 25 bp, Homo sapien
gcggcagctggccggagtaggccac

SEQ ID NO: 5803465 - DNA, 25 bp, Homo sapien
tgtccgtagttttgctgtagccata

SEQ ID NO: 5803466 - DNA, 25 bp, Homo sapien
ttctgttgtggcaggcagctgctga

SEQ ID NO: 5803467 - DNA, 25 bp, Homo sapien
accagccacggttacgactgttcaa

SEQ ID NO: 5803468 - DNA, 25 bp, Homo sapien
atgactcgcttcaaataataaatac

SEQ ID NO: 5803469 - DNA, 25 bp, Homo sapien
agagctgggccggcccccaggctcc

SEQ ID NO: 5803470 - DNA, 25 bp, Homo sapien
tatgtcaactacaaacaccagccac

SEQ ID NO: 5803471 - DNA, 25 bp, Homo sapien
ctgtcgagactctttcatccagggg

SEQ ID NO: 5803472 - DNA, 25 bp, Homo sapien
ccttctgcattgtgcactcaggaag

SEQ ID NO: 5803473 - DNA, 25 bp, Homo sapien
caggaagctccagggcctgctgacc

SEQ ID NO: 5803474 - DNA, 25 bp, Homo sapien
cccgggaggcggcggcagggcaaga

SEQ ID NO: 5803475 - DNA, 25 bp, Homo sapien
ttttcatagtaagcagccttctgca

SEQ ID NO: 5803476 - DNA, 25 bp, Homo sapien
ggcgcgccgccgatgggtctcagac

SEQ ID NO: 5803477 - DNA, 25 bp, Homo sapien
acaaatatacacataaatacattca

SEQ ID NO: 5803478 - DNA, 25 bp, Homo sapien
tgcagctgccattgagttcagctcc

SEQ ID NO: 5803479 - DNA, 25 bp, Homo sapien
tagtaagcagccttctgcattgtgc

SEQ ID NO: 5803480 - DNA, 25 bp, Homo sapien
agaggtaattttgccgcgagttcgg

SEQ ID NO: 5803481 - DNA, 25 bp, Homo sapien
tctctcaactagttcagaccagggg

SEQ ID NO: 5803482 - DNA, 25 bp, Homo sapien
gccgcgagttcgggctggcggcggc

SEQ ID NO: 5803483 - DNA, 25 bp, Homo sapien
ggcagaacctggatagtcagtgtcc

SEQ ID NO: 5803484 - DNA, 25 bp, Homo sapien
tcctcgcagctctctcctgcagtgg

SEQ ID NO: 5803485 - DNA, 25 bp, Homo sapien
tggcggcagctggccggagtaggcc

SEQ ID NO: 5803486 - DNA, 25 bp, Homo sapien
ccaggcccaagactctccaagctct

SEQ ID NO: 5803487 - DNA, 25 bp, Homo sapien
tccaggattggtgggtgaagatggg

SEQ ID NO: 5803488 - DNA, 25 bp, Homo sapien
tgtcaactacaaacaccagccacgg

SEQ ID NO: 5803489 - DNA, 25 bp, Homo sapien
cgccgccgatgggtctcagacttac

SEQ ID NO: 5803490 - DNA, 25 bp, Homo sapien
gaaagcaggcggcgagggcgcgtcg

SEQ ID NO: 5803491 - DNA, 25 bp, Homo sapien
ccgggcttcctgactctacccatga

SEQ ID NO: 5803492 - DNA, 25 bp, Homo sapien
aaattaaggtctctgaaactaagct

SEQ ID NO: 5803493 - DNA, 25 bp, Homo sapien
cgatgggtctcagacttacctttgg

SEQ ID NO: 5803494 - DNA, 25 bp, Homo sapien
ttttttgtaggctcttcaggtttct

SEQ ID NO: 5803495 - DNA, 25 bp, Homo sapien
acacataaatacattcagacaagga

SEQ ID NO: 5803496 - DNA, 25 bp, Homo sapien
ccttcttgtacttcatgcgccggtt

SEQ ID NO: 5803497 - DNA, 25 bp, Homo sapien
gtgggtgaagatgggggcagggtcg

SEQ ID NO: 5803498 - DNA, 25 bp, Homo sapien
cgtaagtgtccgtagttttgctgta

SEQ ID NO: 5803499 - DNA, 25 bp, Homo sapien
aaaactactctctcaactagttcag

SEQ ID NO: 5803500 - DNA, 25 bp, Homo sapien
gttcttctgcttggagttctgtcga

SEQ ID NO: 5803501 - DNA, 25 bp, Homo sapien
ctttgtgggctggggctctcagagg

SEQ ID NO: 5803502 - DNA, 25 bp, Homo sapien
cagccacggttacgactgttcaaaa

SEQ ID NO: 5803503 - DNA, 25 bp, Homo sapien
aaacaccagccacggttacgactgt

SEQ ID NO: 5803504 - DNA, 25 bp, Homo sapien
gacgcgggccaggcccaagactctc

SEQ ID NO: 5803505 - DNA, 25 bp, Homo sapien
cattaccagattggagtcccttggt

SEQ ID NO: 5803506 - DNA, 25 bp, Homo sapien
ccaatgtctgctgaatcctgagaga

SEQ ID NO: 5803507 - DNA, 25 bp, Homo sapien
ctcaggaagctccagggcctgctga

SEQ ID NO: 5803508 - DNA, 25 bp, Homo sapien
tgcactcaggaagctccagggcctg

SEQ ID NO: 5803509 - DNA, 25 bp, Homo sapien
agggggactaaggaggtgaaatgtg

SEQ ID NO: 5803510 - DNA, 25 bp, Homo sapien
gtctctgaaactaagctagacgcgg

SEQ ID NO: 5803511 - DNA, 25 bp, Homo sapien
aggcccaagactctccaagctctgg

SEQ ID NO: 5803512 - DNA, 25 bp, Homo sapien
aaggacaatttgcggtcttaatcct

SEQ ID NO: 5803513 - DNA, 25 bp, Homo sapien
aactagttcagaccagggggactaa

SEQ ID NO: 5803514 - DNA, 25 bp, Homo sapien
tctgctgaatcctgagagagctggg

SEQ ID NO: 5803515 - DNA, 25 bp, Homo sapien
ggctggctgccaccacccccaccct

SEQ ID NO: 5803516 - DNA, 25 bp, Homo sapien
ttgctgatggtggctgaggagctag

SEQ ID NO: 5803517 - DNA, 25 bp, Homo sapien
gccggcacaagtagcggttgaagtg

SEQ ID NO: 5803518 - DNA, 25 bp, Homo sapien
gcagtcgtccctgagacgagtggtg

SEQ ID NO: 5803519 - DNA, 25 bp, Homo sapien
ctgctctgagttcagaccaggaggc

SEQ ID NO: 5803520 - DNA, 25 bp, Homo sapien
cgggaggcggcggcagggcaagagc

SEQ ID NO: 5803521 - DNA, 25 bp, Homo sapien
agcggtgggctgcgctcaggggact

SEQ ID NO: 5803522 - DNA, 25 bp, Homo sapien
aatttgaaatcaataaactgtggtg

SEQ ID NO: 5803523 - DNA, 25 bp, Homo sapien
gggcctggcgggctcttgtcctcgc

SEQ ID NO: 5803524 - DNA, 25 bp, Homo sapien
ggcggcggccgctacagatgcgtca

SEQ ID NO: 5803525 - DNA, 25 bp, Homo sapien
actggctagccggcgagtgcaggat

SEQ ID NO: 5803526 - DNA, 25 bp, Homo sapien
gtccctctgcagggcgcgccgccga

SEQ ID NO: 5803527 - DNA, 25 bp, Homo sapien
cggccaggccgtacatattgggctg

SEQ ID NO: 5803528 - DNA, 25 bp, Homo sapien
tgtggcaggcagctgctgagtggcg

SEQ ID NO: 5803529 - DNA, 25 bp, Homo sapien
tgtggtgaggactgtggtttttgag

SEQ ID NO: 5803530 - DNA, 25 bp, Homo sapien
tgactctacccatgaaggacaattt

SEQ ID NO: 5803531 - DNA, 25 bp, Homo sapien
agagaggtaattttgccgcgagttc

SEQ ID NO: 5803532 - DNA, 25 bp, Homo sapien
ctggcgggctcttgtcctcgcagct

SEQ ID NO: 5803533 - DNA, 25 bp, Homo sapien
atctgtgtaggtgggatgagggtcg

SEQ ID NO: 5803534 - DNA, 25 bp, Homo sapien
gggtgctgtagccgtaagtgtccgt

SEQ ID NO: 5803535 - DNA, 25 bp, Homo sapien
catagtaagcagccttctgcattgt

SEQ ID NO: 5803536 - DNA, 25 bp, Homo sapien
ctgtcaaatttacagggaaggatcc

SEQ ID NO: 5803537 - DNA, 25 bp, Homo sapien
aggcggcgagggcgcgtcgtaggcc

SEQ ID NO: 5803538 - DNA, 25 bp, Homo sapien
tgctgaatcctgagagagctgggcc

SEQ ID NO: 5803539 - DNA, 25 bp, Homo sapien
aacagtcctgggttttcatagtaag

SEQ ID NO: 5803540 - DNA, 25 bp, Homo sapien
agtccgatgcaatccttacggcaca

SEQ ID NO: 5803541 - DNA, 25 bp, Homo sapien
actggcggcagctggccggagtagg

SEQ ID NO: 5803542 - DNA, 25 bp, Homo sapien
ggttgtggtggctgctgctctgagt

SEQ ID NO: 5803543 - DNA, 25 bp, Homo sapien
cggcccccaggctccaggtgaccac

SEQ ID NO: 5803544 - DNA, 25 bp, Homo sapien
aggaaggagaatataaattaaggtc

SEQ ID NO: 5803545 - DNA, 25 bp, Homo sapien
ggcgagtcacccaaaggacgcccat

SEQ ID NO: 5803546 - DNA, 25 bp, Homo sapien
gccagcggcgccgccgagcggtggg

SEQ ID NO: 5803547 - DNA, 25 bp, Homo sapien
ctgtgatttggcgaaagcaggcggc

SEQ ID NO: 5803548 - DNA, 25 bp, Homo sapien
gggcctgctgaccctgctcaaataa

SEQ ID NO: 5803549 - DNA, 25 bp, Homo sapien
agcctccaaacagtcctgggttttc

SEQ ID NO: 5803550 - DNA, 25 bp, Homo sapien
atctccacgcggcgcggccggcaca

SEQ ID NO: 5803551 - DNA, 25 bp, Homo sapien
ttgttccaatagtaccagacaattt

SEQ ID NO: 5803552 - DNA, 25 bp, Homo sapien
ctacaaatatacacataaatacatt

SEQ ID NO: 5803553 - DNA, 25 bp, Homo sapien
ctctccaagctctggtccctctgca

SEQ ID NO: 5803554 - DNA, 25 bp, Homo sapien
gctgtagccgtaagtgtccgtagtt

SEQ ID NO: 5803555 - DNA, 25 bp, Homo sapien
cgcccacgtacaccgggctgccctg

SEQ ID NO: 5803556 - DNA, 25 bp, Homo sapien
aaataatcagggaacgaaatgactc

SEQ ID NO: 5803557 - DNA, 25 bp, Homo sapien
gaggggaggcccggtcgcctgcgcc

SEQ ID NO: 5803558 - DNA, 25 bp, Homo sapien
gccgtgcgtacccgcttggatgctg

SEQ ID NO: 5803559 - DNA, 25 bp, Homo sapien
gactctccaagctctggtccctctg

SEQ ID NO: 5803560 - DNA, 25 bp, Homo sapien
cctgggttttcatagtaagcagcct

SEQ ID NO: 5803561 - DNA, 25 bp, Homo sapien
ttctgcattgtgcactcaggaagct

SEQ ID NO: 5803562 - DNA, 25 bp, Homo sapien
agagagctgggccggcccccaggct

SEQ ID NO: 5803563 - DNA, 25 bp, Homo sapien
tagccgtaagtgtccgtagttttgc

SEQ ID NO: 5803564 - DNA, 25 bp, Homo sapien
gttgtggcaggcagctgctgagtgg

SEQ ID NO: 5803565 - DNA, 25 bp, Homo sapien
aagctcggctggataaatctacaaa

SEQ ID NO: 5803566 - DNA, 25 bp, Homo sapien
gtggcccccacggcctggaagcgaa

SEQ ID NO: 5803567 - DNA, 25 bp, Homo sapien
gttcccagtgcccggccgcatgcag

SEQ ID NO: 5803568 - DNA, 25 bp, Homo sapien
cgcaactgtagtccacgctggccga

SEQ ID NO: 5803569 - DNA, 25 bp, Homo sapien
gctggcagcagcagggggtgggtag

SEQ ID NO: 5803570 - DNA, 25 bp, Homo sapien
ctcgacgaagttgccgcccacgtac

SEQ ID NO: 5803571 - DNA, 25 bp, Homo sapien
gagacgagtggtgggccgagagatc

SEQ ID NO: 5803572 - DNA, 25 bp, Homo sapien
gggtgaagatgggggcagggtcggt

SEQ ID NO: 5803573 - DNA, 25 bp, Homo sapien
gtgtgttgtgccacgccaccgggct

SEQ ID NO: 5803574 - DNA, 25 bp, Homo sapien
gggccgagagatctgtgtaggtggg

SEQ ID NO: 5803575 - DNA, 25 bp, Homo sapien
tagacgcgggccaggcccaagactc

SEQ ID NO: 5803576 - DNA, 25 bp, Homo sapien
ctaagctagacgcgggccaggccca

SEQ ID NO: 5803577 - DNA, 25 bp, Homo sapien
cagaacctggatagtcagtgtccag

SEQ ID NO: 5803578 - DNA, 25 bp, Homo sapien
ctgcagggcgcgccgccgatgggtc

SEQ ID NO: 5803579 - DNA, 25 bp, Homo sapien
tgtgccacgccaccgggcttcctga

SEQ ID NO: 5803580 - DNA, 25 bp, Homo sapien
taaatacagatagtttagtccgatg

SEQ ID NO: 5803581 - DNA, 25 bp, Homo sapien
gcactccacctccaggattggtggg

SEQ ID NO: 5803582 - DNA, 25 bp, Homo sapien
tggtgggccgagagatctgtgtagg

SEQ ID NO: 5803583 - DNA, 25 bp, Homo sapien
gtgtatgccgtgcgtacccgcttgg

SEQ ID NO: 5803584 - DNA, 25 bp, Homo sapien
tgctcgccatgggatggggctcgaa

SEQ ID NO: 5803585 - DNA, 25 bp, Homo sapien
acataaatacattcagacaaggata

SEQ ID NO: 5803586 - DNA, 25 bp, Homo sapien
gtaggtgggatgagggtcgcaaggt

SEQ ID NO: 5803587 - DNA, 25 bp, Homo sapien
ttgtgggctggggctctcagagggg

SEQ ID NO: 5803588 - DNA, 25 bp, Homo sapien
gtcctgggttttcatagtaagcagc

SEQ ID NO: 5803589 - DNA, 25 bp, Homo sapien
tgtgcactcaggaagctccagggcc

SEQ ID NO: 5803590 - DNA, 25 bp, Homo sapien
tttccaattccaccagctgcgcgct

SEQ ID NO: 5803591 - DNA, 25 bp, Homo sapien
ccctctgcagggcgcgccgccgatg

SEQ ID NO: 5803592 - DNA, 25 bp, Homo sapien
gaagatctgcttgctgatggtggct

SEQ ID NO: 5803593 - DNA, 25 bp, Homo sapien
caccagctgcgcgctcgtgtatgcc

SEQ ID NO: 5803594 - DNA, 25 bp, Homo sapien
agaggggcagagctctggatggagc

SEQ ID NO: 5803595 - DNA, 25 bp, Homo sapien
gatggggctcgaactccggcgctgc

SEQ ID NO: 5803596 - DNA, 25 bp, Homo sapien
cctgctcaaataacattgactacca

SEQ ID NO: 5803597 - DNA, 25 bp, Homo sapien
gtgaggactgtggtttttgagaaat

SEQ ID NO: 5803598 - DNA, 25 bp, Homo sapien
ctctgaaactaagctagacgcgggc

SEQ ID NO: 5803599 - DNA, 25 bp, Homo sapien
cagaccaggaggctggctgccacca

SEQ ID NO: 5803600 - DNA, 25 bp, Homo sapien
agatctgcttgctgatggtggctga

SEQ ID NO: 5803601 - DNA, 25 bp, Homo sapien
agttgccgcccacgtacaccgggct

SEQ ID NO: 5803602 - DNA, 25 bp, Homo sapien
cccacgtacaccgggctgccctgca

SEQ ID NO: 5803603 - DNA, 25 bp, Homo sapien
tgtgtgttttcttgaattttgtctt

SEQ ID NO: 5803604 - DNA, 25 bp, Homo sapien
ctctggatggagcaggcagaacctg

SEQ ID NO: 5803605 - DNA, 25 bp, Homo sapien
tttgaaatcaataaactgtggtgag

SEQ ID NO: 5803606 - DNA, 25 bp, Homo sapien
cgagaggtggcccaggttgaagaca

SEQ ID NO: 5803607 - DNA, 25 bp, Homo sapien
tgcggctgatttatggcgagtcacc

SEQ ID NO: 5803608 - DNA, 25 bp, Homo sapien
gagctggcagcagcagggggtgggt

SEQ ID NO: 5803609 - DNA, 25 bp, Homo sapien
caggccgtacatattgggctgtgat

SEQ ID NO: 5803610 - DNA, 25 bp, Homo sapien
ccagacaatttgaaatcaataaact

SEQ ID NO: 5803611 - DNA, 25 bp, Homo sapien
ggatggagcaggcagaacctggata

SEQ ID NO: 5803612 - DNA, 25 bp, Homo sapien
tttatgtcaactacaaacaccagcc

SEQ ID NO: 5803613 - DNA, 25 bp, Homo sapien
gccgtgtaggcggccaggccgtaca

SEQ ID NO: 5803614 - DNA, 25 bp, Homo sapien
agtgtccgtagttttgctgtagcca

SEQ ID NO: 5803615 - DNA, 25 bp, Homo sapien
tcgtccctgagacgagtggtgggcc

SEQ ID NO: 5803616 - DNA, 25 bp, Homo sapien
ccatgggatggggctcgaactccgg

SEQ ID NO: 5803617 - DNA, 25 bp, Homo sapien
gcgctgcgtagcgcttctgttgtgg

SEQ ID NO: 5803618 - DNA, 25 bp, Homo sapien
gggcgccatggactcgacgaagttg

SEQ ID NO: 5803619 - DNA, 25 bp, Homo sapien
tacttcatgcgccggttctggaacc

SEQ ID NO: 5803620 - DNA, 25 bp, Homo sapien
gtgggctggggctctcagaggggca

SEQ ID NO: 5803621 - DNA, 25 bp, Homo sapien
ctgttgtggcaggcagctgctgagt

SEQ ID NO: 5803622 - DNA, 25 bp, Homo sapien
tcgtaggccaggccgggcactggcg

SEQ ID NO: 5803623 - DNA, 25 bp, Homo sapien
ttctgtcgagactctttcatccagg

SEQ ID NO: 5803624 - DNA, 25 bp, Homo sapien
gggctggggctctcagaggggcaga

SEQ ID NO: 5803625 - DNA, 25 bp, Homo sapien
gggctctcagaggggcagagctctg

SEQ ID NO: 5803626 - DNA, 25 bp, Homo sapien
gtaggctcttcaggtttcttttgat

SEQ ID NO: 5803627 - DNA, 25 bp, Homo sapien
gccgagcggtgggctgcgctcaggg

SEQ ID NO: 5803628 - DNA, 25 bp, Homo sapien
ataaattaaggtctctgaaactaag

SEQ ID NO: 5803629 - DNA, 25 bp, Homo sapien
gccacggttacgactgttcaaaact

SEQ ID NO: 5803630 - DNA, 25 bp, Homo sapien
ggtggaggagggggttgtggtggct

SEQ ID NO: 5803631 - DNA, 25 bp, Homo sapien
caccgggcttcctgactctacccat

SEQ ID NO: 5803632 - DNA, 25 bp, Homo sapien
atggtggctgaggagctagaagcat

SEQ ID NO: 5803633 - DNA, 25 bp, Homo sapien
gcttgctgatggtggctgaggagct

SEQ ID NO: 5803634 - DNA, 25 bp, Homo sapien
caaagtgtgttgtgccacgccaccg

SEQ ID NO: 5803635 - DNA, 25 bp, Homo sapien
ggcgcggccggcacaagtagcggtt

SEQ ID NO: 5803636 - DNA, 25 bp, Homo sapien
agcattgggcccacctttgggcttc

SEQ ID NO: 5803637 - DNA, 25 bp, Homo sapien
gcggcgagggcgcgtcgtaggccag

SEQ ID NO: 5803638 - DNA, 25 bp, Homo sapien
gggctcgaactccggcgctgcgtag

SEQ ID NO: 5803639 - DNA, 25 bp, Homo sapien
gtaggccaggccgggcactggcggc

SEQ ID NO: 5803640 - DNA, 25 bp, Homo sapien
aagcgaattcctaagctcggctgga

SEQ ID NO: 5803641 - DNA, 25 bp, Homo sapien
tcaaaactactctctcaactagttc

SEQ ID NO: 5803642 - DNA, 25 bp, Homo sapien
caaacagtcctgggttttcatagta

SEQ ID NO: 5803643 - DNA, 25 bp, Homo sapien
cagcggcgccgccgagcggtgggct

SEQ ID NO: 5803644 - DNA, 25 bp, Homo sapien
tgactgggaaatttttttattctaa

SEQ ID NO: 5803645 - DNA, 25 bp, Homo sapien
cttcatgcgccggttctggaaccag

SEQ ID NO: 5803646 - DNA, 25 bp, Homo sapien
atagtaccagacaatttgaaatcaa

SEQ ID NO: 5803647 - DNA, 25 bp, Homo sapien
tgggacaccattaccagattggagt

SEQ ID NO: 5803648 - DNA, 25 bp, Homo sapien
cttggcaggcactccacctccagga

SEQ ID NO: 5803649 - DNA, 25 bp, Homo sapien
accagatcttgatctggcgttccgt

SEQ ID NO: 5803650 - DNA, 25 bp, Homo sapien
taaggaggtgaaatgtggcccccac

SEQ ID NO: 5803651 - DNA, 25 bp, Homo sapien
gcttctgttgtggcaggcagctgct

SEQ ID NO: 5803652 - DNA, 25 bp, Homo sapien
ctgcttggagttctgtcgagactct

SEQ ID NO: 5803653 - DNA, 25 bp, Homo sapien
gcctgagacccgggaggcggcggca

SEQ ID NO: 5803654 - DNA, 25 bp, Homo sapien
cgcttcaaataataaatacagatag

SEQ ID NO: 5803655 - DNA, 25 bp, Homo sapien
ctgctgaccctgctcaaataacatt

SEQ ID NO: 5803656 - DNA, 25 bp, Homo sapien
ctcaggggactggctagccggcgag

SEQ ID NO: 5803657 - DNA, 25 bp, Homo sapien
tcatccaggggaagatctgcttgct

SEQ ID NO: 5803658 - DNA, 25 bp, Homo sapien
tgaggagctagaagcattgggccca

SEQ ID NO: 5803659 - DNA, 25 bp, Homo sapien
tggcaggcactccacctccaggatt

SEQ ID NO: 5803660 - DNA, 25 bp, Homo sapien
ggaggcccggtcgcctgcgcctccg

SEQ ID NO: 5803661 - DNA, 25 bp, Homo sapien
ttctaaatatttgttccaatagtac

SEQ ID NO: 5803662 - DNA, 25 bp, Homo sapien
ggcggccaggccgtacatattgggc

SEQ ID NO: 5803663 - DNA, 25 bp, Homo sapien
ccccaggctccaggtgaccacaatt

SEQ ID NO: 5803664 - DNA, 25 bp, Homo sapien
attccttttccaattccaccagctg

SEQ ID NO: 5803665 - DNA, 25 bp, Homo sapien
tcgaactccggcgctgcgtagcgct

SEQ ID NO: 5803666 - DNA, 25 bp, Homo sapien
taaggtctctgaaactaagctagac

SEQ ID NO: 5803667 - DNA, 25 bp, Homo sapien
ggcagctggccggagtaggccacgt

SEQ ID NO: 5803668 - DNA, 25 bp, Homo sapien
gaagatgggggcagggtcggtggtg

SEQ ID NO: 5803669 - DNA, 25 bp, Homo sapien
tgtcctcgcagctctctcctgcagt

SEQ ID NO: 5803670 - DNA, 25 bp, Homo sapien
tcctaagctcggctggataaatcta

SEQ ID NO: 5803671 - DNA, 25 bp, Homo sapien
gttgtgccacgccaccgggcttcct

SEQ ID NO: 5803672 - DNA, 25 bp, Homo sapien
ggggaggcccggtcgcctgcgcctc

SEQ ID NO: 5803673 - DNA, 25 bp, Homo sapien
agtgcccggccgcatgcagctgcca

SEQ ID NO: 5803674 - DNA, 25 bp, Homo sapien
gatgagggtcgcaaggtccatggtg

SEQ ID NO: 5803675 - DNA, 25 bp, Homo sapien
gaaggatccttgcggctgatttatg

SEQ ID NO: 5803676 - DNA, 25 bp, Homo sapien
agtcacccaaaggacgcccatggag

SEQ ID NO: 5803677 - DNA, 25 bp, Homo sapien
gagtgcaggatgcccttggccttct

SEQ ID NO: 5803678 - DNA, 25 bp, Homo sapien
gagtaggccacgtggccagcggcgc

SEQ ID NO: 5803679 - DNA, 25 bp, Homo sapien
tggactcgacgaagttgccgcccac

SEQ ID NO: 5803680 - DNA, 25 bp, Homo sapien
tgccctgcaggttggcgctggcgaa

SEQ ID NO: 5803681 - DNA, 25 bp, Homo sapien
cactcaggaagctccagggcctgct

SEQ ID NO: 5803682 - DNA, 25 bp, Homo sapien
tgcgctcaggggactggctagccgg

SEQ ID NO: 5803683 - DNA, 25 bp, Homo sapien
tgctcaaataacattgactaccact

SEQ ID NO: 5803684 - DNA, 25 bp, Homo sapien
gcgccggttctggaaccagatcttg

SEQ ID NO: 5803685 - DNA, 25 bp, Homo sapien
caggttggccatctccacgcggcgc

SEQ ID NO: 5803686 - DNA, 25 bp, Homo sapien
agcaggcagaacctggatagtcagt

SEQ ID NO: 5803687 - DNA, 25 bp, Homo sapien
cgccgttgctcgccatgggatgggg

SEQ ID NO: 5803688 - DNA, 25 bp, Homo sapien
tcttctgcttggagttctgtcgaga

SEQ ID NO: 5803689 - DNA, 25 bp, Homo sapien
tgagtggcgccgtgtaggcggccag

SEQ ID NO: 5803690 - DNA, 25 bp, Homo sapien
ggcgccgccgagcggtgggctgcgc

SEQ ID NO: 5803691 - DNA, 25 bp, Homo sapien
tgctgggcctggcgggctcttgtcc

SEQ ID NO: 5803692 - DNA, 25 bp, Homo sapien
tcctgcagtggcacagctgttcttc

SEQ ID NO: 5803693 - DNA, 25 bp, Homo sapien
catggtggtggttgcctggaatctg

SEQ ID NO: 5803694 - DNA, 25 bp, Homo sapien
ccaaaggacgcccatggaggggagg

SEQ ID NO: 5803695 - DNA, 25 bp, Homo sapien
gctggccgacgacgggtgcgagagg

SEQ ID NO: 5803696 - DNA, 25 bp, Homo sapien
agtcagtgtccagggagctggcagc

SEQ ID NO: 5803697 - DNA, 25 bp, Homo sapien
ttgagaaatgaccaaagtgtgttgt

SEQ ID NO: 5803698 - DNA, 25 bp, Homo sapien
actaccactgtatccttcactgcca

SEQ ID NO: 5803699 - DNA, 25 bp, Homo sapien
gcgcttctgttgtggcaggcagctg

SEQ ID NO: 5803700 - DNA, 25 bp, Homo sapien
gcgaattcctaagctcggctggata

SEQ ID NO: 5803701 - DNA, 25 bp, Homo sapien
tggcaggcagctgctgagtggcgcc

SEQ ID NO: 5803702 - DNA, 25 bp, Homo sapien
tttgcggtcttaatcctttatgtca

SEQ ID NO: 5803703 - DNA, 25 bp, Homo sapien
ggataaataatcagggaacgaaatg

SEQ ID NO: 5803704 - DNA, 25 bp, Homo sapien
aggcactccacctccaggattggtg

SEQ ID NO: 5803705 - DNA, 25 bp, Homo sapien
tgtatgtgtgtgttttcttgaattt

SEQ ID NO: 5803706 - DNA, 25 bp, Homo sapien
cgtgagattcagcaggttggccatc

SEQ ID NO: 5803707 - DNA, 25 bp, Homo sapien
gcgcgctcgtgtatgccgtgcgtac

SEQ ID NO: 5803708 - DNA, 25 bp, Homo sapien
gaggagggggttgtggtggctgctg

SEQ ID NO: 5803709 - DNA, 25 bp, Homo sapien
gggcccacctttgggcttcttggca

SEQ ID NO: 5803710 - DNA, 25 bp, Homo sapien
tcaactacaaacaccagccacggtt

SEQ ID NO: 5803711 - DNA, 25 bp, Homo sapien
atagcctccaaacagtcctgggttt

SEQ ID NO: 5803712 - DNA, 25 bp, Homo sapien
ggctgttcccagtgcccggccgcat

SEQ ID NO: 5803713 - DNA, 25 bp, Homo sapien
aggagctagaagcattgggcccacc

SEQ ID NO: 5803714 - DNA, 25 bp, Homo sapien
agacaggcccggacgcgggcgccat

SEQ ID NO: 5803715 - DNA, 25 bp, Homo sapien
aggtgggatgagggtcgcaaggtcc

SEQ ID NO: 5803716 - DNA, 25 bp, Homo sapien
ggccaggcccaagactctccaagct

SEQ ID NO: 5803717 - DNA, 25 bp, Homo sapien
ggctggtggggggtgctgtagccgt

SEQ ID NO: 5803718 - DNA, 25 bp, Homo sapien
caagagaggtaattttgccgcgagt

SEQ ID NO: 5803719 - DNA, 25 bp, Homo sapien
cgggccaggcccaagactctccaag

SEQ ID NO: 5803720 - DNA, 25 bp, Homo sapien
agggctggtggggggtgctgtagcc

SEQ ID NO: 5803721 - DNA, 25 bp, Homo sapien
acattgactaccactgtatccttca

SEQ ID NO: 5803722 - DNA, 25 bp, Homo sapien
cacctccaggattggtgggtgaaga

SEQ ID NO: 5803723 - DNA, 25 bp, Homo sapien
gcggcgccgccgagcggtgggctgc

SEQ ID NO: 5803724 - DNA, 25 bp, Homo sapien
tagcgcttctgttgtggcaggcagc

SEQ ID NO: 5803725 - DNA, 25 bp, Homo sapien
ccacgctggccgacgacgggtgcga

SEQ ID NO: 5803726 - DNA, 25 bp, Homo sapien
actctctcaactagttcagaccagg

SEQ ID NO: 5803727 - DNA, 25 bp, Homo sapien
ggtccgcagtatgtggcactgtcaa

SEQ ID NO: 5803728 - DNA, 25 bp, Homo sapien
accacaattatgtatgtgtgtgttt

SEQ ID NO: 5803729 - DNA, 25 bp, Homo sapien
tgaaatcaataaactgtggtgagga

SEQ ID NO: 5803730 - DNA, 25 bp, Homo sapien
caccctggctgttcccagtgcccgg

SEQ ID NO: 5803731 - DNA, 25 bp, Homo sapien
ataaataatcagggaacgaaatgac

SEQ ID NO: 5803732 - DNA, 25 bp, Homo sapien
tggtccttcttgtacttcatgcgcc

SEQ ID NO: 5803733 - DNA, 25 bp, Homo sapien
gacccgggaggcggcggcagggcaa

SEQ ID NO: 5803734 - DNA, 25 bp, Homo sapien
cctccaaacagtcctgggttttcat

SEQ ID NO: 5803735 - DNA, 25 bp, Homo sapien
tcccagtgcccggccgcatgcagct

SEQ ID NO: 5803736 - DNA, 25 bp, Homo sapien
atacacataaatacattcagacaag

SEQ ID NO: 5803737 - DNA, 25 bp, Homo sapien
gggagggcacagcccctctcaaagc

SEQ ID NO: 5803738 - DNA, 25 bp, Homo sapien
ccacttttggtggatttcccaggat

SEQ ID NO: 5803739 - DNA, 25 bp, Homo sapien
accaccttttgaagaggcagttcat

SEQ ID NO: 5803740 - DNA, 25 bp, Homo sapien
gccggggctggcatggcgtggccct

SEQ ID NO: 5803741 - DNA, 25 bp, Homo sapien
gggaactcaccaccttttgaagagg

SEQ ID NO: 5803742 - DNA, 25 bp, Homo sapien
ccgccgggcccaaggatccgccgcc

SEQ ID NO: 5803743 - DNA, 25 bp, Homo sapien
acaaagacaaaaccagcccgagtca

SEQ ID NO: 5803744 - DNA, 25 bp, Homo sapien
gctcttgatgagaggctcgctttaa

SEQ ID NO: 5803745 - DNA, 25 bp, Homo sapien
agaaccagttatgtccacttttggt

SEQ ID NO: 5803746 - DNA, 25 bp, Homo sapien
ggctcttcctacaaatggcccctgc

SEQ ID NO: 5803747 - DNA, 25 bp, Homo sapien
gagacgagcatttaagctgcaggtg

SEQ ID NO: 5803748 - DNA, 25 bp, Homo sapien
agcatggcatgggcccctgcgggag

SEQ ID NO: 5803749 - DNA, 25 bp, Homo sapien
ggcgagagcatggcatgggcccctg

SEQ ID NO: 5803750 - DNA, 25 bp, Homo sapien
gtctcattccctgaaataccttaaa

SEQ ID NO: 5803751 - DNA, 25 bp, Homo sapien
tttaccttgtgctaggttctaaaga

SEQ ID NO: 5803752 - DNA, 25 bp, Homo sapien
tccgcgcagtcctccgcgccacctg

SEQ ID NO: 5803753 - DNA, 25 bp, Homo sapien
cgtggccctgtatcagccgcctgtg

SEQ ID NO: 5803754 - DNA, 25 bp, Homo sapien
cctgctgggtgtctgtggaaatgag

SEQ ID NO: 5803755 - DNA, 25 bp, Homo sapien
tgcctgcaccgtgacaccatggctg

SEQ ID NO: 5803756 - DNA, 25 bp, Homo sapien
ctcatggtgatgctgagtatccagg

SEQ ID NO: 5803757 - DNA, 25 bp, Homo sapien
ttttggtggatttcccaggatgcgt

SEQ ID NO: 5803758 - DNA, 25 bp, Homo sapien
ccacgtcgtacagacaggaattcca

SEQ ID NO: 5803759 - DNA, 25 bp, Homo sapien
ttttctaagagaaaagaggctgcct

SEQ ID NO: 5803760 - DNA, 25 bp, Homo sapien
tgtggagcagatgcaccgatggact

SEQ ID NO: 5803761 - DNA, 25 bp, Homo sapien
gatgagaggctcgctttaaagaagc

SEQ ID NO: 5803762 - DNA, 25 bp, Homo sapien
ggaaccgaattggtccatggaagct

SEQ ID NO: 5803763 - DNA, 25 bp, Homo sapien
gtccctcccaggtgctagccctggc

SEQ ID NO: 5803764 - DNA, 25 bp, Homo sapien
ctccttatggccaagatgagcctca

SEQ ID NO: 5803765 - DNA, 25 bp, Homo sapien
gacctcgacagcgaggagccgggca

SEQ ID NO: 5803766 - DNA, 25 bp, Homo sapien
agccctggcaggcacagccctcccc

SEQ ID NO: 5803767 - DNA, 25 bp, Homo sapien
ttatggccaagatgagcctcatgtt

SEQ ID NO: 5803768 - DNA, 25 bp, Homo sapien
aatccacattttgttactaatgatt

SEQ ID NO: 5803769 - DNA, 25 bp, Homo sapien
actcgggtctcagagccaccagacg

SEQ ID NO: 5803770 - DNA, 25 bp, Homo sapien
ttgaatgactcacatttaccttgtg

SEQ ID NO: 5803771 - DNA, 25 bp, Homo sapien
ccagccagcatggccacatgggtca

SEQ ID NO: 5803772 - DNA, 25 bp, Homo sapien
cccgcggggtctacgtgctgcccat

SEQ ID NO: 5803773 - DNA, 25 bp, Homo sapien
cggccgggacgtgccgctcactcag

SEQ ID NO: 5803774 - DNA, 25 bp, Homo sapien
catgccagcaaaggaaatgctcttg

SEQ ID NO: 5803775 - DNA, 25 bp, Homo sapien
ccaacccttccgtctaccctgctca

SEQ ID NO: 5803776 - DNA, 25 bp, Homo sapien
tttgggaaggtggcatttgtctcat

SEQ ID NO: 5803777 - DNA, 25 bp, Homo sapien
agctctctcctaacttcctccgtaa

SEQ ID NO: 5803778 - DNA, 25 bp, Homo sapien
gggccagcctcccgcgggcgcccgg

SEQ ID NO: 5803779 - DNA, 25 bp, Homo sapien
gccagcctcccgcgggcgcccggga

SEQ ID NO: 5803780 - DNA, 25 bp, Homo sapien
actgccatctggccgtctctcagtt

SEQ ID NO: 5803781 - DNA, 25 bp, Homo sapien
cacagccctcccctcatgccagcaa

SEQ ID NO: 5803782 - DNA, 25 bp, Homo sapien
ctctctcctaacttcctccgtaaat

SEQ ID NO: 5803783 - DNA, 25 bp, Homo sapien
agcctcatgttttaacaaaacagtt

SEQ ID NO: 5803784 - DNA, 25 bp, Homo sapien
tggaaggctcctgcgttcgttaact

SEQ ID NO: 5803785 - DNA, 25 bp, Homo sapien
ccagacgtgcaggtgggacagtggt

SEQ ID NO: 5803786 - DNA, 25 bp, Homo sapien
cgtgagcacttgattaatttcataa

SEQ ID NO: 5803787 - DNA, 25 bp, Homo sapien
gttgaagctgttggaatcttgggcc

SEQ ID NO: 5803788 - DNA, 25 bp, Homo sapien
aagcttagaggtacaagctcaggac

SEQ ID NO: 5803789 - DNA, 25 bp, Homo sapien
cattccctgaaataccttaaaatgt

SEQ ID NO: 5803790 - DNA, 25 bp, Homo sapien
acacatccggcccttgaaagaacca

SEQ ID NO: 5803791 - DNA, 25 bp, Homo sapien
accgatggacttggcacacccagct

SEQ ID NO: 5803792 - DNA, 25 bp, Homo sapien
tgctgggtgtctgtggaaatgagat

SEQ ID NO: 5803793 - DNA, 25 bp, Homo sapien
cttccaggtcccagaggtgaggaag

SEQ ID NO: 5803794 - DNA, 25 bp, Homo sapien
gctggggagcggcctcaggacccac

SEQ ID NO: 5803795 - DNA, 25 bp, Homo sapien
ccttatggccaagatgagcctcatg

SEQ ID NO: 5803796 - DNA, 25 bp, Homo sapien
ctcattccctgaaataccttaaaat

SEQ ID NO: 5803797 - DNA, 25 bp, Homo sapien
gggtctacgtgctgcccatcggcga

SEQ ID NO: 5803798 - DNA, 25 bp, Homo sapien
gaggaagaagttcactcctaacccc

SEQ ID NO: 5803799 - DNA, 25 bp, Homo sapien
aggaggaaatttccagaagaaacag

SEQ ID NO: 5803800 - DNA, 25 bp, Homo sapien
tacaccaacccttccgtctaccctg

SEQ ID NO: 5803801 - DNA, 25 bp, Homo sapien
cctcgacagcgaggagccgggcacg

SEQ ID NO: 5803802 - DNA, 25 bp, Homo sapien
agctccgactgcctgtcagcgtccc

SEQ ID NO: 5803803 - DNA, 25 bp, Homo sapien
ttctaaagattgaatccacattttg

SEQ ID NO: 5803804 - DNA, 25 bp, Homo sapien
tttcccgctaacataaggatgatga

SEQ ID NO: 5803805 - DNA, 25 bp, Homo sapien
aggctgcctgctgggtgtctgtgga

SEQ ID NO: 5803806 - DNA, 25 bp, Homo sapien
agctccccggattctcaacgtgtga

SEQ ID NO: 5803807 - DNA, 25 bp, Homo sapien
gccctgtatcagccgcctgtgctgc

SEQ ID NO: 5803808 - DNA, 25 bp, Homo sapien
gactcacatttaccttgtgctaggt

SEQ ID NO: 5803809 - DNA, 25 bp, Homo sapien
atgtggacacatccggcccttgaaa

SEQ ID NO: 5803810 - DNA, 25 bp, Homo sapien
tcatacacactggctgagaactgga

SEQ ID NO: 5803811 - DNA, 25 bp, Homo sapien
atgcaccgatggacttggcacaccc

SEQ ID NO: 5803812 - DNA, 25 bp, Homo sapien
gcgggagggcacagcccctctcaaa

SEQ ID NO: 5803813 - DNA, 25 bp, Homo sapien
gctcaggacagtcttcagtaaggaa

SEQ ID NO: 5803814 - DNA, 25 bp, Homo sapien
ccggattctcaacgtgtgactgcct

SEQ ID NO: 5803815 - DNA, 25 bp, Homo sapien
gttttgaaatctctgaggagcctga

SEQ ID NO: 5803816 - DNA, 25 bp, Homo sapien
cctcatgttttaacaaaacagttct

SEQ ID NO: 5803817 - DNA, 25 bp, Homo sapien
cccctgcagttgaagctgttggaat

SEQ ID NO: 5803818 - DNA, 25 bp, Homo sapien
cctctcaaagctgtcaccagggcca

SEQ ID NO: 5803819 - DNA, 25 bp, Homo sapien
aggggcaaatcctccgcgcagtcct

SEQ ID NO: 5803820 - DNA, 25 bp, Homo sapien
tcctacaaatggcccctgcagttga

SEQ ID NO: 5803821 - DNA, 25 bp, Homo sapien
actggctgagaactggaactgtttt

SEQ ID NO: 5803822 - DNA, 25 bp, Homo sapien
gaaacagaccgtcagtcacgggctt

SEQ ID NO: 5803823 - DNA, 25 bp, Homo sapien
caagatccacaaagacaaaaccagc

SEQ ID NO: 5803824 - DNA, 25 bp, Homo sapien
cccctctcaaagctgtcaccagggc

SEQ ID NO: 5803825 - DNA, 25 bp, Homo sapien
aggacagggctggggagcggcctca

SEQ ID NO: 5803826 - DNA, 25 bp, Homo sapien
aattccaggcttggactggagtgaa

SEQ ID NO: 5803827 - DNA, 25 bp, Homo sapien
caccttttgaagaggcagttcattt

SEQ ID NO: 5803828 - DNA, 25 bp, Homo sapien
caccaacccttccgtctaccctgct

SEQ ID NO: 5803829 - DNA, 25 bp, Homo sapien
ggcccttgaaagaaccagttatgtc

SEQ ID NO: 5803830 - DNA, 25 bp, Homo sapien
ccggcgcccgcggggtctacgtgct

SEQ ID NO: 5803831 - DNA, 25 bp, Homo sapien
acaagctcaggacagtcttcagtaa

SEQ ID NO: 5803832 - DNA, 25 bp, Homo sapien
ctgcgttcgttaactgccatctggc

SEQ ID NO: 5803833 - DNA, 25 bp, Homo sapien
ccctcccaggtgctagccctggcag

SEQ ID NO: 5803834 - DNA, 25 bp, Homo sapien
cacgtttgaggggtcttcgtctctt

SEQ ID NO: 5803835 - DNA, 25 bp, Homo sapien
gcgtgtgcttatccaaggggttcag

SEQ ID NO: 5803836 - DNA, 25 bp, Homo sapien
atgtccacttttggtggatttccca

SEQ ID NO: 5803837 - DNA, 25 bp, Homo sapien
cccctccgccatctttcaggcctca

SEQ ID NO: 5803838 - DNA, 25 bp, Homo sapien
gtcaccagggccaaagtgctggtgt

SEQ ID NO: 5803839 - DNA, 25 bp, Homo sapien
gctcctgcgttcgttaactgccatc

SEQ ID NO: 5803840 - DNA, 25 bp, Homo sapien
ccaggaggaaatttccagaagaaac

SEQ ID NO: 5803841 - DNA, 25 bp, Homo sapien
catggccacatgggtcacgcctggt

SEQ ID NO: 5803842 - DNA, 25 bp, Homo sapien
ccctggcaggcacagccctcccctc

SEQ ID NO: 5803843 - DNA, 25 bp, Homo sapien
aagctgaggaatgtggacacatccg

SEQ ID NO: 5803844 - DNA, 25 bp, Homo sapien
gcatgggcccctgcgggagggcaca

SEQ ID NO: 5803845 - DNA, 25 bp, Homo sapien
aaaatgtcctctacaccaacccttc

SEQ ID NO: 5803846 - DNA, 25 bp, Homo sapien
ccgtcagtcacgggcttccacttca

SEQ ID NO: 5803847 - DNA, 25 bp, Homo sapien
gcagatgcaccgatggacttggcac

SEQ ID NO: 5803848 - DNA, 25 bp, Homo sapien
cacggcttgcatgtttgatttttct

SEQ ID NO: 5803849 - DNA, 25 bp, Homo sapien
aaagtgctggtgtggagcagatgca

SEQ ID NO: 5803850 - DNA, 25 bp, Homo sapien
cagtaccagcgggacttcggcttgt

SEQ ID NO: 5803851 - DNA, 25 bp, Homo sapien
ttgtgctaggttctaaagattgaat

SEQ ID NO: 5803852 - DNA, 25 bp, Homo sapien
ccgaattggtccatggaagctgagg

SEQ ID NO: 5803853 - DNA, 25 bp, Homo sapien
tttgaggggtcttcgtctcttttta

SEQ ID NO: 5803854 - DNA, 25 bp, Homo sapien
tcacgcctggtgccttcacacgttt

SEQ ID NO: 5803855 - DNA, 25 bp, Homo sapien
ggtggcactcgggtctcagagccac

SEQ ID NO: 5803856 - DNA, 25 bp, Homo sapien
ctgcagcagtgaccacgtcgtacag

SEQ ID NO: 5803857 - DNA, 25 bp, Homo sapien
cttgattaatttcataacctacagt

SEQ ID NO: 5803858 - DNA, 25 bp, Homo sapien
agcccgagtcatcacaacccacact

SEQ ID NO: 5803859 - DNA, 25 bp, Homo sapien
tttttgggaaggtggcatttgtctc

SEQ ID NO: 5803860 - DNA, 25 bp, Homo sapien
gaaaagaggctgcctgctgggtgtc

SEQ ID NO: 5803861 - DNA, 25 bp, Homo sapien
gaagaggcagttcattttctttgca

SEQ ID NO: 5803862 - DNA, 25 bp, Homo sapien
gggattgaatgactcacatttacct

SEQ ID NO: 5803863 - DNA, 25 bp, Homo sapien
gcggctgcagcagtgaccacgtcgt

SEQ ID NO: 5803864 - DNA, 25 bp, Homo sapien
ggaaatgagattaaaaactgtacaa

SEQ ID NO: 5803865 - DNA, 25 bp, Homo sapien
ggcttccacttcacagacctcctta

SEQ ID NO: 5803866 - DNA, 25 bp, Homo sapien
cggggctggcatggcgtggccctgt

SEQ ID NO: 5803867 - DNA, 25 bp, Homo sapien
aatcttgggccgtcacctgcatgac

SEQ ID NO: 5803868 - DNA, 25 bp, Homo sapien
ccatggctgccgacaggacagggct

SEQ ID NO: 5803869 - DNA, 25 bp, Homo sapien
ctgggtgtctgtggaaatgagatta

SEQ ID NO: 5803870 - DNA, 25 bp, Homo sapien
ctgcgcccggcgcccgcggggtcta

SEQ ID NO: 5803871 - DNA, 25 bp, Homo sapien
cagcgggacttcggcttgtggacca

SEQ ID NO: 5803872 - DNA, 25 bp, Homo sapien
gacagtcttcagtaaggaaatttgt

SEQ ID NO: 5803873 - DNA, 25 bp, Homo sapien
gaggaaatttccagaagaaacagac

SEQ ID NO: 5803874 - DNA, 25 bp, Homo sapien
tcaaagctgtcaccagggccaaagt

SEQ ID NO: 5803875 - DNA, 25 bp, Homo sapien
tggcatggcgtggccctgtatcagc

SEQ ID NO: 5803876 - DNA, 25 bp, Homo sapien
tggctgagaactggaactgtttttg

SEQ ID NO: 5803877 - DNA, 25 bp, Homo sapien
cacaagtggctctagtgagacgagc

SEQ ID NO: 5803878 - DNA, 25 bp, Homo sapien
agcgaggagccgggcacgggcggcg

SEQ ID NO: 5803879 - DNA, 25 bp, Homo sapien
gtggtggcactcgggtctcagagcc

SEQ ID NO: 5803880 - DNA, 25 bp, Homo sapien
catttaagctgcaggtggtggcact

SEQ ID NO: 5803881 - DNA, 25 bp, Homo sapien
caccagggccaaagtgctggtgtgg

SEQ ID NO: 5803882 - DNA, 25 bp, Homo sapien
cattttgttactaatgattttcccg

SEQ ID NO: 5803883 - DNA, 25 bp, Homo sapien
cgggacgtgccgctcactcagtacc

SEQ ID NO: 5803884 - DNA, 25 bp, Homo sapien
gctcgctttaaagaagcccaaagcg

SEQ ID NO: 5803885 - DNA, 25 bp, Homo sapien
tgccttcacacgtttgaggggtctt

SEQ ID NO: 5803886 - DNA, 25 bp, Homo sapien
gcggtgccgctcactctgcacggct

SEQ ID NO: 5803887 - DNA, 25 bp, Homo sapien
ggacgtgccgctcactcagtaccag

SEQ ID NO: 5803888 - DNA, 25 bp, Homo sapien
gcatcctcttgagaagcctgtggaa

SEQ ID NO: 5803889 - DNA, 25 bp, Homo sapien
gtacaagctcaggacagtcttcagt

SEQ ID NO: 5803890 - DNA, 25 bp, Homo sapien
gatttcccaggatgcgtgagcactt

SEQ ID NO: 5803891 - DNA, 25 bp, Homo sapien
tcttgagaagcctgtggaaggctcc

SEQ ID NO: 5803892 - DNA, 25 bp, Homo sapien
gaatgtggacacatccggcccttga

SEQ ID NO: 5803893 - DNA, 25 bp, Homo sapien
cctgcagttgaagctgttggaatct

SEQ ID NO: 5803894 - DNA, 25 bp, Homo sapien
agaagttcactcctaacccctccgc

SEQ ID NO: 5803895 - DNA, 25 bp, Homo sapien
tctcaaagctgtcaccagggccaaa

SEQ ID NO: 5803896 - DNA, 25 bp, Homo sapien
gaccgtcagtcacgggcttccactt

SEQ ID NO: 5803897 - DNA, 25 bp, Homo sapien
gcccgggattccggccgggacgtgc

SEQ ID NO: 5803898 - DNA, 25 bp, Homo sapien
tggagtgaagccctcaagatccaca

SEQ ID NO: 5803899 - DNA, 25 bp, Homo sapien
ctgctcacatgtacagtgacgggga

SEQ ID NO: 5803900 - DNA, 25 bp, Homo sapien
tccacattttgttactaatgatttt

SEQ ID NO: 5803901 - DNA, 25 bp, Homo sapien
aaaacagttcttgggattgaatgac

SEQ ID NO: 5803902 - DNA, 25 bp, Homo sapien
cgcctcgcgcaggggccagcctccc

SEQ ID NO: 5803903 - DNA, 25 bp, Homo sapien
aggagccgggcacgggcggcgccgc

SEQ ID NO: 5803904 - DNA, 25 bp, Homo sapien
gctgcctgctgggtgtctgtggaaa

SEQ ID NO: 5803905 - DNA, 25 bp, Homo sapien
gcgcccggcgcccgcggggtctacg

SEQ ID NO: 5803906 - DNA, 25 bp, Homo sapien
cacccagctcagcctcaagcatcct

SEQ ID NO: 5803907 - DNA, 25 bp, Homo sapien
cagtggttccagctccgactgcctg

SEQ ID NO: 5803908 - DNA, 25 bp, Homo sapien
ctggtgtggagcagatgcaccgatg

SEQ ID NO: 5803909 - DNA, 25 bp, Homo sapien
ccagaggtgaggaagaagttcactc

SEQ ID NO: 5803910 - DNA, 25 bp, Homo sapien
gcctgtcagcgtccctcccaggtgc

SEQ ID NO: 5803911 - DNA, 25 bp, Homo sapien
tgactgcctgcaccgtgacaccatg

SEQ ID NO: 5803912 - DNA, 25 bp, Homo sapien
aaccagctggaccgctccgacgtgg

SEQ ID NO: 5803913 - DNA, 25 bp, Homo sapien
tggcggtgccgctcactctgcacgg

SEQ ID NO: 5803914 - DNA, 25 bp, Homo sapien
aaccagcccgagtcatcacaaccca

SEQ ID NO: 5803915 - DNA, 25 bp, Homo sapien
agttatgtccacttttggtggattt

SEQ ID NO: 5803916 - DNA, 25 bp, Homo sapien
tgcctgctgggtgtctgtggaaatg

SEQ ID NO: 5803917 - DNA, 25 bp, Homo sapien
aaagctgtcaccagggccaaagtgc

SEQ ID NO: 5803918 - DNA, 25 bp, Homo sapien
tcccgcgggcgcccgggattccggc

SEQ ID NO: 5803919 - DNA, 25 bp, Homo sapien
acaaaaccagcccgagtcatcacaa

SEQ ID NO: 5803920 - DNA, 25 bp, Homo sapien
tgaaagaaccagttatgtccacttt

SEQ ID NO: 5803921 - DNA, 25 bp, Homo sapien
atctggccgtctctcagttttgaaa

SEQ ID NO: 5803922 - DNA, 25 bp, Homo sapien
tcactcctaacccctccgccatctt

SEQ ID NO: 5803923 - DNA, 25 bp, Homo sapien
aggtgggacagtggttccagctccg

SEQ ID NO: 5803924 - DNA, 25 bp, Homo sapien
cacacgtttgaggggtcttcgtctc

SEQ ID NO: 5803925 - DNA, 25 bp, Homo sapien
ggccggcttccaggtcccagaggtg

SEQ ID NO: 5803926 - DNA, 25 bp, Homo sapien
atggccaagatgagcctcatgtttt

SEQ ID NO: 5803927 - DNA, 25 bp, Homo sapien
gagcggcctcaggacccactgccgc

SEQ ID NO: 5803928 - DNA, 25 bp, Homo sapien
tcctaacccctccgccatctttcag

SEQ ID NO: 5803929 - DNA, 25 bp, Homo sapien
tagtgagacgagcatttaagctgca

SEQ ID NO: 5803930 - DNA, 25 bp, Homo sapien
ggacgcggctgcagcagtgaccacg

SEQ ID NO: 5803931 - DNA, 25 bp, Homo sapien
caccagacgtgcaggtgggacagtg

SEQ ID NO: 5803932 - DNA, 25 bp, Homo sapien
gtgatgctgagtatccaggaggaaa

SEQ ID NO: 5803933 - DNA, 25 bp, Homo sapien
ggttctaaagattgaatccacattt

SEQ ID NO: 5803934 - DNA, 25 bp, Homo sapien
ggatttccctttggatctttcttcc

SEQ ID NO: 5803935 - DNA, 25 bp, Homo sapien
tttaaagaagcccaaagcgtgtgct

SEQ ID NO: 5803936 - DNA, 25 bp, Homo sapien
gcgcaggggccagcctcccgcgggc

SEQ ID NO: 5803937 - DNA, 25 bp, Homo sapien
aaatggcccctgcagttgaagctgt

SEQ ID NO: 5803938 - DNA, 25 bp, Homo sapien
ctctacaccaacccttccgtctacc

SEQ ID NO: 5803939 - DNA, 25 bp, Homo sapien
ccagctggaccgctccgacgtggcg

SEQ ID NO: 5803940 - DNA, 25 bp, Homo sapien
ctccagcccacaagtggctctagtg

SEQ ID NO: 5803941 - DNA, 25 bp, Homo sapien
ctttggatctttcttcctctccagc

SEQ ID NO: 5803942 - DNA, 25 bp, Homo sapien
ctctcctaacttcctccgtaaattc

SEQ ID NO: 5803943 - DNA, 25 bp, Homo sapien
tgttttaacaaaacagttcttggga

SEQ ID NO: 5803944 - DNA, 25 bp, Homo sapien
gtgctgcctggcgcggcgctggaac

SEQ ID NO: 5803945 - DNA, 25 bp, Homo sapien
ccagcatggccacatgggtcacgcc

SEQ ID NO: 5803946 - DNA, 25 bp, Homo sapien
gaagccctcaagatccacaaagaca

SEQ ID NO: 5803947 - DNA, 25 bp, Homo sapien
cgtaaattccagccagcatggccac

SEQ ID NO: 5803948 - DNA, 25 bp, Homo sapien
gtctacgtgctgcccatcggcgacg

SEQ ID NO: 5803949 - DNA, 25 bp, Homo sapien
aaatttgtggatttccctttggatc

SEQ ID NO: 5803950 - DNA, 25 bp, Homo sapien
cccttgaaagaaccagttatgtcca

SEQ ID NO: 5803951 - DNA, 25 bp, Homo sapien
gcgggacttcggcttgtggaccacg

SEQ ID NO: 5803952 - DNA, 25 bp, Homo sapien
gactcatggtgatgctgagtatcca

SEQ ID NO: 5803953 - DNA, 25 bp, Homo sapien
cagacaggaattccaggcttggact

SEQ ID NO: 5803954 - DNA, 25 bp, Homo sapien
ggcgacgcggacgcggctgcagcag

SEQ ID NO: 5803955 - DNA, 25 bp, Homo sapien
actctgcacggctactcggacctcg

SEQ ID NO: 5803956 - DNA, 25 bp, Homo sapien
tggcatgggcccctgcgggagggca

SEQ ID NO: 5803957 - DNA, 25 bp, Homo sapien
ttgtctcattccctgaaatacctta

SEQ ID NO: 5803958 - DNA, 25 bp, Homo sapien
accagcgggacttcggcttgtggac

SEQ ID NO: 5803959 - DNA, 25 bp, Homo sapien
cagtcctccgcgccacctgcgcccg

SEQ ID NO: 5803960 - DNA, 25 bp, Homo sapien
gcctcccgcgggcgcccgggattcc

SEQ ID NO: 5803961 - DNA, 25 bp, Homo sapien
caggtcccagaggtgaggaagaagt

SEQ ID NO: 5803962 - DNA, 25 bp, Homo sapien
ggaaccagctggaccgctccgacgt

SEQ ID NO: 5803963 - DNA, 25 bp, Homo sapien
ttgagaagcctgtggaaggctcctg

SEQ ID NO: 5803964 - DNA, 25 bp, Homo sapien
cccttccgtctaccctgctcacatg

SEQ ID NO: 5803965 - DNA, 25 bp, Homo sapien
tcagccgcctgtgctgcctggcgcg

SEQ ID NO: 5803966 - DNA, 25 bp, Homo sapien
ttcgtctctttttaaagcttagagg

SEQ ID NO: 5803967 - DNA, 25 bp, Homo sapien
taacataaggatgatgagcagggca

SEQ ID NO: 5803968 - DNA, 25 bp, Homo sapien
gggcactatcatacacactggctga

SEQ ID NO: 5803969 - DNA, 25 bp, Homo sapien
atttgtctcattccctgaaatacct

SEQ ID NO: 5803970 - DNA, 25 bp, Homo sapien
ttggaatcttgggccgtcacctgca

SEQ ID NO: 5803971 - DNA, 25 bp, Homo sapien
gggctgggcgagagcatggcatggg

SEQ ID NO: 5803972 - DNA, 25 bp, Homo sapien
agcctcaagcatcctcttgagaagc

SEQ ID NO: 5803973 - DNA, 25 bp, Homo sapien
gacaggaattccaggcttggactgg

SEQ ID NO: 5803974 - DNA, 25 bp, Homo sapien
agaggcagttcattttctttgcaaa

SEQ ID NO: 5803975 - DNA, 25 bp, Homo sapien
taggttctaaagattgaatccacat

SEQ ID NO: 5803976 - DNA, 25 bp, Homo sapien
taccctgctcacatgtacagtgacg

SEQ ID NO: 5803977 - DNA, 25 bp, Homo sapien
agccctggggccggcttccaggtcc

SEQ ID NO: 5803978 - DNA, 25 bp, Homo sapien
aagctcaggacagtcttcagtaagg

SEQ ID NO: 5803979 - DNA, 25 bp, Homo sapien
cagctcagcctcaagcatcctcttg

SEQ ID NO: 5803980 - DNA, 25 bp, Homo sapien
ggatgatgagcagggcactatcata

SEQ ID NO: 5803981 - DNA, 25 bp, Homo sapien
agtggctctagtgagacgagcattt

SEQ ID NO: 5803982 - DNA, 25 bp, Homo sapien
aaactgtacaatctcagattttact

SEQ ID NO: 5803983 - DNA, 25 bp, Homo sapien
agacccttggctcttcctacaaatg

SEQ ID NO: 5803984 - DNA, 25 bp, Homo sapien
aaagctctctcctaacttcctccgt

SEQ ID NO: 5803985 - DNA, 25 bp, Homo sapien
ctaacccctccgccatctttcaggc

SEQ ID NO: 5803986 - DNA, 25 bp, Homo sapien
cctccgccatctttcaggcctcagc

SEQ ID NO: 5803987 - DNA, 25 bp, Homo sapien
ccttaaaatgtcctctacaccaacc

SEQ ID NO: 5803988 - DNA, 25 bp, Homo sapien
tgagaactggaactgtttttgggaa

SEQ ID NO: 5803989 - DNA, 25 bp, Homo sapien
tgtgactgcctgcaccgtgacacca

SEQ ID NO: 5803990 - DNA, 25 bp, Homo sapien
ggctgcagcagtgaccacgtcgtac

SEQ ID NO: 5803991 - DNA, 25 bp, Homo sapien
aatgattttcccgctaacataagga

SEQ ID NO: 5803992 - DNA, 25 bp, Homo sapien
ctccccggattctcaacgtgtgact

SEQ ID NO: 5803993 - DNA, 25 bp, Homo sapien
agaggctcgctttaaagaagcccaa

SEQ ID NO: 5803994 - DNA, 25 bp, Homo sapien
gacaccatggctgccgacaggacag

SEQ ID NO: 5803995 - DNA, 25 bp, Homo sapien
gaggagcctgaggatcaagtcagtt

SEQ ID NO: 5803996 - DNA, 25 bp, Homo sapien
gctaacataaggatgatgagcaggg

SEQ ID NO: 5803997 - DNA, 25 bp, Homo sapien
gcactcgggtctcagagccaccaga

SEQ ID NO: 5803998 - DNA, 25 bp, Homo sapien
ggatgggacagcagccctggggccg

SEQ ID NO: 5803999 - DNA, 25 bp, Homo sapien
cataacctacagtgagacccttggc

SEQ ID NO: 5804000 - DNA, 25 bp, Homo sapien
aggatgcgtgagcacttgattaatt

SEQ ID NO: 5804001 - DNA, 25 bp, Homo sapien
gaactcaccaccttttgaagaggca

SEQ ID NO: 5804002 - DNA, 25 bp, Homo sapien
tcatgttttaacaaaacagttcttg

SEQ ID NO: 5804003 - DNA, 25 bp, Homo sapien
cgcggggctgggcgagagcatggca

SEQ ID NO: 5804004 - DNA, 25 bp, Homo sapien
ggggttcagctattcctgacttcac

SEQ ID NO: 5804005 - DNA, 25 bp, Homo sapien
gcttatccaaggggttcagctattc

SEQ ID NO: 5804006 - DNA, 25 bp, Homo sapien
cctgtatcagccgcctgtgctgcct

SEQ ID NO: 5804007 - DNA, 25 bp, Homo sapien
gttcgttaactgccatctggccgtc

SEQ ID NO: 5804008 - DNA, 25 bp, Homo sapien
tgaggggtcttcgtctctttttaaa

SEQ ID NO: 5804009 - DNA, 25 bp, Homo sapien
tgctggtgtggagcagatgcaccga

SEQ ID NO: 5804010 - DNA, 25 bp, Homo sapien
tggtccatggaagctgaggaatgtg

SEQ ID NO: 5804011 - DNA, 25 bp, Homo sapien
gctgggcgagagcatggcatgggcc

SEQ ID NO: 5804012 - DNA, 25 bp, Homo sapien
ccacaaagacaaaaccagcccgagt

SEQ ID NO: 5804013 - DNA, 25 bp, Homo sapien
tgggtcacgcctggtgccttcacac

SEQ ID NO: 5804014 - DNA, 25 bp, Homo sapien
taactgccatctggccgtctctcag

SEQ ID NO: 5804015 - DNA, 25 bp, Homo sapien
ttcacacgtttgaggggtcttcgtc

SEQ ID NO: 5804016 - DNA, 25 bp, Homo sapien
agctgcaggtggtggcactcgggtc

SEQ ID NO: 5804017 - DNA, 25 bp, Homo sapien
gacagcgaggagccgggcacgggcg

SEQ ID NO: 5804018 - DNA, 25 bp, Homo sapien
ttcacggcttgcatgtttgattttt

SEQ ID NO: 5804019 - DNA, 25 bp, Homo sapien
ctaatgattttcccgctaacataag

SEQ ID NO: 5804020 - DNA, 25 bp, Homo sapien
cagcctcccgcgggcgcccgggatt

SEQ ID NO: 5804021 - DNA, 25 bp, Homo sapien
gcacagcccctctcaaagctgtcac

SEQ ID NO: 5804022 - DNA, 25 bp, Homo sapien
ttcaggcctcagctccccggattct

SEQ ID NO: 5804023 - DNA, 25 bp, Homo sapien
cgtcacctgcatgactcatggtgat

SEQ ID NO: 5804024 - DNA, 25 bp, Homo sapien
attccggccgggacgtgccgctcac

SEQ ID NO: 5804025 - DNA, 25 bp, Homo sapien
acctgcatgactcatggtgatgctg

SEQ ID NO: 5804026 - DNA, 25 bp, Homo sapien
atttttctaagagaaaagaggctgc

SEQ ID NO: 5804027 - DNA, 25 bp, Homo sapien
ggcggcgccgcctcgcgcaggggcc

SEQ ID NO: 5804028 - DNA, 25 bp, Homo sapien
agcatttaagctgcaggtggtggca

SEQ ID NO: 5804029 - DNA, 25 bp, Homo sapien
ctgagtatccaggaggaaatttcca

SEQ ID NO: 5804030 - DNA, 25 bp, Homo sapien
aggacagtcttcagtaaggaaattt

SEQ ID NO: 5804031 - DNA, 25 bp, Homo sapien
tgggaaggtggcatttgtctcattc

SEQ ID NO: 5804032 - DNA, 25 bp, Homo sapien
ttcattttctttgcaaagctctctc

SEQ ID NO: 5804033 - DNA, 25 bp, Homo sapien
gcttgcatgtttgatttttctaaga

SEQ ID NO: 5804034 - DNA, 25 bp, Homo sapien
gttcactcctaacccctccgccatc

SEQ ID NO: 5804035 - DNA, 25 bp, Homo sapien
gtcagtcacgggcttccacttcaca

SEQ ID NO: 5804036 - DNA, 25 bp, Homo sapien
aagaagcccaaagcgtgtgcttatc

SEQ ID NO: 5804037 - DNA, 25 bp, Homo sapien
gcgccggggctggcatggcgtggcc

SEQ ID NO: 5804038 - DNA, 25 bp, Homo sapien
atgactcatggtgatgctgagtatc

SEQ ID NO: 5804039 - DNA, 25 bp, Homo sapien
cgggcttccacttcacagacctcct

SEQ ID NO: 5804040 - DNA, 25 bp, Homo sapien
gtcagcgtccctcccaggtgctagc

SEQ ID NO: 5804041 - DNA, 25 bp, Homo sapien
ttctaagagaaaagaggctgcctgc

SEQ ID NO: 5804042 - DNA, 25 bp, Homo sapien
cacatgggtcacgcctggtgccttc

SEQ ID NO: 5804043 - DNA, 25 bp, Homo sapien
atttgtggatttccctttggatctt

SEQ ID NO: 5804044 - DNA, 25 bp, Homo sapien
cctcccctcatgccagcaaaggaaa

SEQ ID NO: 5804045 - DNA, 25 bp, Homo sapien
ccggcccttgaaagaaccagttatg

SEQ ID NO: 5804046 - DNA, 25 bp, Homo sapien
gtggttccagctccgactgcctgtc

SEQ ID NO: 5804047 - DNA, 25 bp, Homo sapien
atccggcccttgaaagaaccagtta

SEQ ID NO: 5804048 - DNA, 25 bp, Homo sapien
tgctgagtatccaggaggaaatttc

SEQ ID NO: 5804049 - DNA, 25 bp, Homo sapien
ccagttatgtccacttttggtggat

SEQ ID NO: 5804050 - DNA, 25 bp, Homo sapien
ccacctgcgcccggcgcccgcgggg

SEQ ID NO: 5804051 - DNA, 25 bp, Homo sapien
aagatgagcctcatgttttaacaaa

SEQ ID NO: 5804052 - DNA, 25 bp, Homo sapien
gaagcctgtggaaggctcctgcgtt

SEQ ID NO: 5804053 - DNA, 25 bp, Homo sapien
cggcttgcatgtttgatttttctaa

SEQ ID NO: 5804054 - DNA, 25 bp, Homo sapien
gccaccagacgtgcaggtgggacag

SEQ ID NO: 5804055 - DNA, 25 bp, Homo sapien
agaggtgaggaagaagttcactcct

SEQ ID NO: 5804056 - DNA, 25 bp, Homo sapien
gagccaccagacgtgcaggtgggac

SEQ ID NO: 5804057 - DNA, 25 bp, Homo sapien
tgcagttgaagctgttggaatcttg

SEQ ID NO: 5804058 - DNA, 25 bp, Homo sapien
cgaggagccgggcacgggcggcgcc

SEQ ID NO: 5804059 - DNA, 25 bp, Homo sapien
ggaactgtttttgggaaggtggcat

SEQ ID NO: 5804060 - DNA, 25 bp, Homo sapien
caagtggctctagtgagacgagcat

SEQ ID NO: 5804061 - DNA, 25 bp, Homo sapien
attttcccgctaacataaggatgat

SEQ ID NO: 5804062 - DNA, 25 bp, Homo sapien
cacgggcggcgccgcctcgcgcagg

SEQ ID NO: 5804063 - DNA, 25 bp, Homo sapien
tcaagcatcctcttgagaagcctgt

SEQ ID NO: 5804064 - DNA, 25 bp, Homo sapien
cgctggaaccagctggaccgctccg

SEQ ID NO: 5804065 - DNA, 25 bp, Homo sapien
aagagaaaagaggctgcctgctggg

SEQ ID NO: 5804066 - DNA, 25 bp, Homo sapien
tgaggatcaagtcagttgggaaccg

SEQ ID NO: 5804067 - DNA, 25 bp, Homo sapien
cctccgcgccacctgcgcccggcgc

SEQ ID NO: 5804068 - DNA, 25 bp, Homo sapien
atttccctttggatctttcttcctc

SEQ ID NO: 5804069 - DNA, 25 bp, Homo sapien
cccaggtgctagccctggcaggcac

SEQ ID NO: 5804070 - DNA, 25 bp, Homo sapien
actcctaacccctccgccatctttc

SEQ ID NO: 5804071 - DNA, 25 bp, Homo sapien
caaaggaaatgctcttgatgagagg

SEQ ID NO: 5804072 - DNA, 25 bp, Homo sapien
gcatgactcatggtgatgctgagta

SEQ ID NO: 5804073 - DNA, 25 bp, Homo sapien
tcttcgtctctttttaaagcttaga

SEQ ID NO: 5804074 - DNA, 25 bp, Homo sapien
gcctggtgccttcacacgtttgagg

SEQ ID NO: 5804075 - DNA, 25 bp, Homo sapien
gcggccgcaggggcaaatcctccgc

SEQ ID NO: 5804076 - DNA, 25 bp, Homo sapien
aacagttcttgggattgaatgactc

SEQ ID NO: 5804077 - DNA, 25 bp, Homo sapien
aattccagccagcatggccacatgg

SEQ ID NO: 5804078 - DNA, 25 bp, Homo sapien
aaatttccagaagaaacagaccgtc

SEQ ID NO: 5804079 - DNA, 25 bp, Homo sapien
tcagtaaggaaatttgtggatttcc

SEQ ID NO: 5804080 - DNA, 25 bp, Homo sapien
gtgctgcccatcggcgacgcggacg

SEQ ID NO: 5804081 - DNA, 25 bp, Homo sapien
atggcgtggccctgtatcagccgcc

SEQ ID NO: 5804082 - DNA, 25 bp, Homo sapien
aaagattgaatccacattttgttac

SEQ ID NO: 5804083 - DNA, 25 bp, Homo sapien
gcgtccctcccaggtgctagccctg

SEQ ID NO: 5804084 - DNA, 25 bp, Homo sapien
agaggctgcctgctgggtgtctgtg

SEQ ID NO: 5804085 - DNA, 25 bp, Homo sapien
ggggccggcttccaggtcccagagg

SEQ ID NO: 5804086 - DNA, 25 bp, Homo sapien
cgatggacttggcacacccagctca

SEQ ID NO: 5804087 - DNA, 25 bp, Homo sapien
cacttgattaatttcataacctaca

SEQ ID NO: 5804088 - DNA, 25 bp, Homo sapien
gctgcccatcggcgacgcggacgcg

SEQ ID NO: 5804089 - DNA, 25 bp, Homo sapien
tccaggtcccagaggtgaggaagaa

SEQ ID NO: 5804090 - DNA, 25 bp, Homo sapien
ggtggcatttgtctcattccctgaa

SEQ ID NO: 5804091 - DNA, 25 bp, Homo sapien
ctggccgtctctcagttttgaaatc

SEQ ID NO: 5804092 - DNA, 25 bp, Homo sapien
agaggtacaagctcaggacagtctt

SEQ ID NO: 5804093 - DNA, 25 bp, Homo sapien
gcaaagctctctcctaacttcctcc

SEQ ID NO: 5804094 - DNA, 25 bp, Homo sapien
gctaggttctaaagattgaatccac

SEQ ID NO: 5804095 - DNA, 25 bp, Homo sapien
gggacagtggttccagctccgactg

SEQ ID NO: 5804096 - DNA, 25 bp, Homo sapien
taccttaaaatgtcctctacaccaa

SEQ ID NO: 5804097 - DNA, 25 bp, Homo sapien
catgggtcacgcctggtgccttcac

SEQ ID NO: 5804098 - DNA, 25 bp, Homo sapien
atctttcttcctctccagcccacaa

SEQ ID NO: 5804099 - DNA, 25 bp, Homo sapien
cggggctgggcgagagcatggcatg

SEQ ID NO: 5804100 - DNA, 25 bp, Homo sapien
acagtgacggggaactcaccacctt

SEQ ID NO: 5804101 - DNA, 25 bp, Homo sapien
gcactatcatacacactggctgaga

SEQ ID NO: 5804102 - DNA, 25 bp, Homo sapien
tgtatcagccgcctgtgctgcctgg

SEQ ID NO: 5804103 - DNA, 25 bp, Homo sapien
tcacctgcatgactcatggtgatgc

SEQ ID NO: 5804104 - DNA, 25 bp, Homo sapien
acgtgccgctcactcagtaccagcg

SEQ ID NO: 5804105 - DNA, 25 bp, Homo sapien
gatgagcagggcactatcatacaca

SEQ ID NO: 5804106 - DNA, 25 bp, Homo sapien
aaatctctgaggagcctgaggatca

SEQ ID NO: 5804107 - DNA, 25 bp, Homo sapien
ttcctgacttcacggcttgcatgtt

SEQ ID NO: 5804108 - DNA, 25 bp, Homo sapien
cgtctaccctgctcacatgtacagt

SEQ ID NO: 5804109 - DNA, 25 bp, Homo sapien
ttagaggtacaagctcaggacagtc

SEQ ID NO: 5804110 - DNA, 25 bp, Homo sapien
ccaggcttggactggagtgaagccc

SEQ ID NO: 5804111 - DNA, 25 bp, Homo sapien
acctacagtgagacccttggctctt

SEQ ID NO: 5804112 - DNA, 25 bp, Homo sapien
ggtgccgctcactctgcacggctac

SEQ ID NO: 5804113 - DNA, 25 bp, Homo sapien
ggatctttcttcctctccagcccac

SEQ ID NO: 5804114 - DNA, 25 bp, Homo sapien
gtggaaatgagattaaaaactgtac

SEQ ID NO: 5804115 - DNA, 25 bp, Homo sapien
aaggatgatgagcagggcactatca

SEQ ID NO: 5804116 - DNA, 25 bp, Homo sapien
ttttctttgcaaagctctctcctaa

SEQ ID NO: 5804117 - DNA, 25 bp, Homo sapien
gcgggcggccgcaggggcaaatcct

SEQ ID NO: 5804118 - DNA, 25 bp, Homo sapien
ccctcatgccagcaaaggaaatgct

SEQ ID NO: 5804119 - DNA, 25 bp, Homo sapien
acactggctgagaactggaactgtt

SEQ ID NO: 5804120 - DNA, 25 bp, Homo sapien
tgattttcccgctaacataaggatg

SEQ ID NO: 5804121 - DNA, 25 bp, Homo sapien
cttccgtctaccctgctcacatgta

SEQ ID NO: 5804122 - DNA, 25 bp, Homo sapien
catggcatgggcccctgcgggaggg

SEQ ID NO: 5804123 - DNA, 25 bp, Homo sapien
taaattccagccagcatggccacat

SEQ ID NO: 5804124 - DNA, 25 bp, Homo sapien
aggtacaagctcaggacagtcttca

SEQ ID NO: 5804125 - DNA, 25 bp, Homo sapien
aaagacaaaaccagcccgagtcatc

SEQ ID NO: 5804126 - DNA, 25 bp, Homo sapien
tccgccatctttcaggcctcagctc

SEQ ID NO: 5804127 - DNA, 25 bp, Homo sapien
ccgtctctcagttttgaaatctctg

SEQ ID NO: 5804128 - DNA, 25 bp, Homo sapien
ggcacagccctcccctcatgccagc

SEQ ID NO: 5804129 - DNA, 25 bp, Homo sapien
cttgtggaccacgcccgccgggccc

SEQ ID NO: 5804130 - DNA, 25 bp, Homo sapien
attggtccatggaagctgaggaatg

SEQ ID NO: 5804131 - DNA, 25 bp, Homo sapien
gtcgtacagacaggaattccaggct

SEQ ID NO: 5804132 - DNA, 25 bp, Homo sapien
gacagcagccctggggccggcttcc

SEQ ID NO: 5804133 - DNA, 25 bp, Homo sapien
cgagtcatcacaacccacacttcgg

SEQ ID NO: 5804134 - DNA, 25 bp, Homo sapien
aacccttccgtctaccctgctcaca

SEQ ID NO: 5804135 - DNA, 25 bp, Homo sapien
gacagtggttccagctccgactgcc

SEQ ID NO: 5804136 - DNA, 25 bp, Homo sapien
tcgggtctcagagccaccagacgtg

SEQ ID NO: 5804137 - DNA, 25 bp, Homo sapien
cagtcacgggcttccacttcacaga

SEQ ID NO: 5804138 - DNA, 25 bp, Homo sapien
ttggctcttcctacaaatggcccct

SEQ ID NO: 5804139 - DNA, 25 bp, Homo sapien
cccatcggcgacgcggacgcggctg

SEQ ID NO: 5804140 - DNA, 25 bp, Homo sapien
agaagaaacagaccgtcagtcacgg

SEQ ID NO: 5804141 - DNA, 25 bp, Homo sapien
tctcaacgtgtgactgcctgcaccg

SEQ ID NO: 5804142 - DNA, 25 bp, Homo sapien
gattgaatgactcacatttaccttg

SEQ ID NO: 5804143 - DNA, 25 bp, Homo sapien
tcaggacccactgccgcggggctgg

SEQ ID NO: 5804144 - DNA, 25 bp, Homo sapien
cctgcaccgtgacaccatggctgcc

SEQ ID NO: 5804145 - DNA, 25 bp, Homo sapien
cagccctcccctcatgccagcaaag

SEQ ID NO: 5804146 - DNA, 25 bp, Homo sapien
tggccacatgggtcacgcctggtgc

SEQ ID NO: 5804147 - DNA, 25 bp, Homo sapien
ccgcaggggcaaatcctccgcgcag

SEQ ID NO: 5804148 - DNA, 25 bp, Homo sapien
agacgtgcaggtgggacagtggttc

SEQ ID NO: 5804149 - DNA, 25 bp, Homo sapien
tgccgctcactctgcacggctactc

SEQ ID NO: 5804150 - DNA, 25 bp, Homo sapien
ccacacttcgggatgggacagcagc

SEQ ID NO: 5804151 - DNA, 25 bp, Homo sapien
tgcaccgtgacaccatggctgccga

SEQ ID NO: 5804152 - DNA, 25 bp, Homo sapien
tgcgtgagcacttgattaatttcat

SEQ ID NO: 5804153 - DNA, 25 bp, Homo sapien
ggcttccaggtcccagaggtgagga

SEQ ID NO: 5804154 - DNA, 25 bp, Homo sapien
cctgacttcacggcttgcatgtttg

SEQ ID NO: 5804155 - DNA, 25 bp, Homo sapien
cttcctacaaatggcccctgcagtt

SEQ ID NO: 5804156 - DNA, 25 bp, Homo sapien
ggtcacgcctggtgccttcacacgt

SEQ ID NO: 5804157 - DNA, 25 bp, Homo sapien
gagtgaagccctcaagatccacaaa

SEQ ID NO: 5804158 - DNA, 25 bp, Homo sapien
cctggcgcggcgctggaaccagctg

SEQ ID NO: 5804159 - DNA, 25 bp, Homo sapien
acaaatggcccctgcagttgaagct

SEQ ID NO: 5804160 - DNA, 25 bp, Homo sapien
agcccctctcaaagctgtcaccagg

SEQ ID NO: 5804161 - DNA, 25 bp, Homo sapien
cacgggcttccacttcacagacctc

SEQ ID NO: 5804162 - DNA, 25 bp, Homo sapien
ctaaagattgaatccacattttgtt

SEQ ID NO: 5804163 - DNA, 25 bp, Homo sapien
gacccactgccgcggggctgggcga

SEQ ID NO: 5804164 - DNA, 25 bp, Homo sapien
aaatcctccgcgcagtcctccgcgc

SEQ ID NO: 5804165 - DNA, 25 bp, Homo sapien
ctgtcagcgtccctcccaggtgcta

SEQ ID NO: 5804166 - DNA, 25 bp, Homo sapien
tttaacaaaacagttcttgggattg

SEQ ID NO: 5804167 - DNA, 25 bp, Homo sapien
catttaccttgtgctaggttctaaa

SEQ ID NO: 5804168 - DNA, 25 bp, Homo sapien
gcagcagtgaccacgtcgtacagac

SEQ ID NO: 5804169 - DNA, 25 bp, Homo sapien
agcccaaagcgtgtgcttatccaag

SEQ ID NO: 5804170 - DNA, 25 bp, Homo sapien
tttaagctgcaggtggtggcactcg

SEQ ID NO: 5804171 - DNA, 25 bp, Homo sapien
cctccgtaaattccagccagcatgg

SEQ ID NO: 5804172 - DNA, 25 bp, Homo sapien
cctcagctccccggattctcaacgt

SEQ ID NO: 5804173 - DNA, 25 bp, Homo sapien
tcttgatgagaggctcgctttaaag

SEQ ID NO: 5804174 - DNA, 25 bp, Homo sapien
acgtgcaggtgggacagtggttcca

SEQ ID NO: 5804175 - DNA, 25 bp, Homo sapien
ggcacacccagctcagcctcaagca

SEQ ID NO: 5804176 - DNA, 25 bp, Homo sapien
caacccacacttcgggatgggacag

SEQ ID NO: 5804177 - DNA, 25 bp, Homo sapien
ctttcaggcctcagctccccggatt

SEQ ID NO: 5804178 - DNA, 25 bp, Homo sapien
gggctggcatggcgtggccctgtat

SEQ ID NO: 5804179 - DNA, 25 bp, Homo sapien
tattcctgacttcacggcttgcatg

SEQ ID NO: 5804180 - DNA, 25 bp, Homo sapien
ggtgctagccctggcaggcacagcc

SEQ ID NO: 5804181 - DNA, 25 bp, Homo sapien
gcaggtggtggcactcgggtctcag

SEQ ID NO: 5804182 - DNA, 25 bp, Homo sapien
tacagacaggaattccaggcttgga

SEQ ID NO: 5804183 - DNA, 25 bp, Homo sapien
cctcgcgcaggggccagcctcccgc

SEQ ID NO: 5804184 - DNA, 25 bp, Homo sapien
tgagcctcatgttttaacaaaacag

SEQ ID NO: 5804185 - DNA, 25 bp, Homo sapien
ctggaactgtttttgggaaggtggc

SEQ ID NO: 5804186 - DNA, 25 bp, Homo sapien
tccggccgggacgtgccgctcactc

SEQ ID NO: 5804187 - DNA, 25 bp, Homo sapien
agatccacaaagacaaaaccagccc

SEQ ID NO: 5804188 - DNA, 25 bp, Homo sapien
ttccagccagcatggccacatgggt

SEQ ID NO: 5804189 - DNA, 25 bp, Homo sapien
ttcctccgtaaattccagccagcat

SEQ ID NO: 5804190 - DNA, 25 bp, Homo sapien
ctcctaacttcctccgtaaattcca

SEQ ID NO: 5804191 - DNA, 25 bp, Homo sapien
ggttccagctccgactgcctgtcag

SEQ ID NO: 5804192 - DNA, 25 bp, Homo sapien
attctcaacgtgtgactgcctgcac

SEQ ID NO: 5804193 - DNA, 25 bp, Homo sapien
ggcgcccgcggggtctacgtgctgc

SEQ ID NO: 5804194 - DNA, 25 bp, Homo sapien
gagggcacagcccctctcaaagctg

SEQ ID NO: 5804195 - DNA, 25 bp, Homo sapien
ctggggccggcttccaggtcccaga

SEQ ID NO: 5804196 - DNA, 25 bp, Homo sapien
ttgggattgaatgactcacatttac

SEQ ID NO: 5804197 - DNA, 25 bp, Homo sapien
gtcagttgggaaccgaattggtcca

SEQ ID NO: 5804198 - DNA, 25 bp, Homo sapien
gggccgtcacctgcatgactcatgg

SEQ ID NO: 5804199 - DNA, 25 bp, Homo sapien
gccgctcactcagtaccagcgggac

SEQ ID NO: 5804200 - DNA, 25 bp, Homo sapien
cgcagtcctccgcgccacctgcgcc

SEQ ID NO: 5804201 - DNA, 25 bp, Homo sapien
agtcatcacaacccacacttcggga

SEQ ID NO: 5804202 - DNA, 25 bp, Homo sapien
cagttgggaaccgaattggtccatg

SEQ ID NO: 5804203 - DNA, 25 bp, Homo sapien
gctactcggacctcgacagcgagga

SEQ ID NO: 5804204 - DNA, 25 bp, Homo sapien
ggcaggcacagccctcccctcatgc

SEQ ID NO: 5804205 - DNA, 25 bp, Homo sapien
actcaccaccttttgaagaggcagt

SEQ ID NO: 5804206 - DNA, 25 bp, Homo sapien
aataccttaaaatgtcctctacacc

SEQ ID NO: 5804207 - DNA, 25 bp, Homo sapien
ccagggccaaagtgctggtgtggag

SEQ ID NO: 5804208 - DNA, 25 bp, Homo sapien
ccaggatgcgtgagcacttgattaa

SEQ ID NO: 5804209 - DNA, 25 bp, Homo sapien
atgctcttgatgagaggctcgcttt

SEQ ID NO: 5804210 - DNA, 25 bp, Homo sapien
cttcggcttgtggaccacgcccgcc

SEQ ID NO: 5804211 - DNA, 25 bp, Homo sapien
ctgccgcggggctgggcgagagcat

SEQ ID NO: 5804212 - DNA, 25 bp, Homo sapien
ctcagttttgaaatctctgaggagc

SEQ ID NO: 5804213 - DNA, 25 bp, Homo sapien
actatcatacacactggctgagaac

SEQ ID NO: 5804214 - DNA, 25 bp, Homo sapien
tgccagcaaaggaaatgctcttgat

SEQ ID NO: 5804215 - DNA, 25 bp, Homo sapien
gtgagacgagcatttaagctgcagg

SEQ ID NO: 5804216 - DNA, 25 bp, Homo sapien
ctacgtgctgcccatcggcgacgcg

SEQ ID NO: 5804217 - DNA, 25 bp, Homo sapien
gaccacgcccgccgggcccaaggat

SEQ ID NO: 5804218 - DNA, 25 bp, Homo sapien
ctacagtgagacccttggctcttcc

SEQ ID NO: 5804219 - DNA, 25 bp, Homo sapien
tccgtctaccctgctcacatgtaca

SEQ ID NO: 5804220 - DNA, 25 bp, Homo sapien
aaatgagattaaaaactgtacaatc

SEQ ID NO: 5804221 - DNA, 25 bp, Homo sapien
gccgggcacgggcggcgccgcctcg

SEQ ID NO: 5804222 - DNA, 25 bp, Homo sapien
ttggcacacccagctcagcctcaag

SEQ ID NO: 5804223 - DNA, 25 bp, Homo sapien
cgagcatttaagctgcaggtggtgg

SEQ ID NO: 5804224 - DNA, 25 bp, Homo sapien
tgtcctctacaccaacccttccgtc

SEQ ID NO: 5804225 - DNA, 25 bp, Homo sapien
acataaggatgatgagcagggcact

SEQ ID NO: 5804226 - DNA, 25 bp, Homo sapien
ccctgctcacatgtacagtgacggg

SEQ ID NO: 5804227 - DNA, 25 bp, Homo sapien
ccctcaagatccacaaagacaaaac

SEQ ID NO: 5804228 - DNA, 25 bp, Homo sapien
ttcataacctacagtgagacccttg

SEQ ID NO: 5804229 - DNA, 25 bp, Homo sapien
ttggatctttcttcctctccagccc

SEQ ID NO: 5804230 - DNA, 25 bp, Homo sapien
tgaagctgttggaatcttgggccgt

SEQ ID NO: 5804231 - DNA, 25 bp, Homo sapien
gagtatccaggaggaaatttccaga

SEQ ID NO: 5804232 - DNA, 25 bp, Homo sapien
aaggaaatgctcttgatgagaggct

SEQ ID NO: 5804233 - DNA, 25 bp, Homo sapien
ctgtggaaatgagattaaaaactgt

SEQ ID NO: 5804234 - DNA, 25 bp, Homo sapien
cagtcttcagtaaggaaatttgtgg

SEQ ID NO: 5804235 - DNA, 25 bp, Homo sapien
acccacacttcgggatgggacagca

SEQ ID NO: 5804236 - DNA, 25 bp, Homo sapien
gagattaaaaactgtacaatctcag

SEQ ID NO: 5804237 - DNA, 25 bp, Homo sapien
taacttcctccgtaaattccagcca

SEQ ID NO: 5804238 - DNA, 25 bp, Homo sapien
agattgaatccacattttgttacta

SEQ ID NO: 5804239 - DNA, 25 bp, Homo sapien
tggcgcggcgctggaaccagctgga

SEQ ID NO: 5804240 - DNA, 25 bp, Homo sapien
atgtacagtgacggggaactcacca

SEQ ID NO: 5804241 - DNA, 25 bp, Homo sapien
ccagaagaaacagaccgtcagtcac

SEQ ID NO: 5804242 - DNA, 25 bp, Homo sapien
gctcacatgtacagtgacggggaac

SEQ ID NO: 5804243 - DNA, 25 bp, Homo sapien
tcccaggatgcgtgagcacttgatt

SEQ ID NO: 5804244 - DNA, 25 bp, Homo sapien
gagaagcctgtggaaggctcctgcg

SEQ ID NO: 5804245 - DNA, 25 bp, Homo sapien
ggaaggtggcatttgtctcattccc

SEQ ID NO: 5804246 - DNA, 25 bp, Homo sapien
tggcatttgtctcattccctgaaat

SEQ ID NO: 5804247 - DNA, 25 bp, Homo sapien
cagggcactatcatacacactggct

SEQ ID NO: 5804248 - DNA, 25 bp, Homo sapien
gttactaatgattttcccgctaaca

SEQ ID NO: 5804249 - DNA, 25 bp, Homo sapien
ccggcttccaggtcccagaggtgag

SEQ ID NO: 5804250 - DNA, 25 bp, Homo sapien
gtcctccgcgccacctgcgcccggc

SEQ ID NO: 5804251 - DNA, 25 bp, Homo sapien
aggcttggactggagtgaagccctc

SEQ ID NO: 5804252 - DNA, 25 bp, Homo sapien
ttcagctattcctgacttcacggct

SEQ ID NO: 5804253 - DNA, 25 bp, Homo sapien
atcacaacccacacttcgggatggg

SEQ ID NO: 5804254 - DNA, 25 bp, Homo sapien
cttcagtaaggaaatttgtggattt

SEQ ID NO: 5804255 - DNA, 25 bp, Homo sapien
acccttggctcttcctacaaatggc

SEQ ID NO: 5804256 - DNA, 25 bp, Homo sapien
tgacttcacggcttgcatgtttgat

SEQ ID NO: 5804257 - DNA, 25 bp, Homo sapien
gcatttgtctcattccctgaaatac

SEQ ID NO: 5804258 - DNA, 25 bp, Homo sapien
ttttgttactaatgattttcccgct

SEQ ID NO: 5804259 - DNA, 25 bp, Homo sapien
ctgaggagcctgaggatcaagtcag

SEQ ID NO: 5804260 - DNA, 25 bp, Homo sapien
agccctcaagatccacaaagacaaa

SEQ ID NO: 5804261 - DNA, 25 bp, Homo sapien
ttaaaaactgtacaatctcagattt

SEQ ID NO: 5804262 - DNA, 25 bp, Homo sapien
ccagcccgagtcatcacaacccaca

SEQ ID NO: 5804263 - DNA, 25 bp, Homo sapien
gtatccaggaggaaatttccagaag

SEQ ID NO: 5804264 - DNA, 25 bp, Homo sapien
gtgcttatccaaggggttcagctat

SEQ ID NO: 5804265 - DNA, 25 bp, Homo sapien
gtctgtggaaatgagattaaaaact

SEQ ID NO: 5804266 - DNA, 25 bp, Homo sapien
tggggagcggcctcaggacccactg

SEQ ID NO: 5804267 - DNA, 25 bp, Homo sapien
cccaaagcgtgtgcttatccaaggg

SEQ ID NO: 5804268 - DNA, 25 bp, Homo sapien
ttatccaaggggttcagctattcct

SEQ ID NO: 5804269 - DNA, 25 bp, Homo sapien
taaagcttagaggtacaagctcagg

SEQ ID NO: 5804270 - DNA, 25 bp, Homo sapien
tcagcctcaagcatcctcttgagaa

SEQ ID NO: 5804271 - DNA, 25 bp, Homo sapien
gtggatttccctttggatctttctt

SEQ ID NO: 5804272 - DNA, 25 bp, Homo sapien
gctctagtgagacgagcatttaagc

SEQ ID NO: 5804273 - DNA, 25 bp, Homo sapien
caggcacagccctcccctcatgcca

SEQ ID NO: 5804274 - DNA, 25 bp, Homo sapien
ggcttgtggaccacgcccgccgggc

SEQ ID NO: 5804275 - DNA, 25 bp, Homo sapien
ggaaatttccagaagaaacagaccg

SEQ ID NO: 5804276 - DNA, 25 bp, Homo sapien
cgtctctttttaaagcttagaggta

SEQ ID NO: 5804277 - DNA, 25 bp, Homo sapien
agccagcatggccacatgggtcacg

SEQ ID NO: 5804278 - DNA, 25 bp, Homo sapien
tttaaagcttagaggtacaagctca

SEQ ID NO: 5804279 - DNA, 25 bp, Homo sapien
gggctggggagcggcctcaggaccc

SEQ ID NO: 5804280 - DNA, 25 bp, Homo sapien
gtcacgggcttccacttcacagacc

SEQ ID NO: 5804281 - DNA, 25 bp, Homo sapien
gtgaagccctcaagatccacaaaga

SEQ ID NO: 5804282 - DNA, 25 bp, Homo sapien
gtgtctgtggaaatgagattaaaaa

SEQ ID NO: 5804283 - DNA, 25 bp, Homo sapien
accgctccgacgtggcggtgccgct

SEQ ID NO: 5804284 - DNA, 25 bp, Homo sapien
gaaataccttaaaatgtcctctaca

SEQ ID NO: 5804285 - DNA, 25 bp, Homo sapien
aaccgaattggtccatggaagctga

SEQ ID NO: 5804286 - DNA, 25 bp, Homo sapien
cactcagtaccagcgggacttcggc

SEQ ID NO: 5804287 - DNA, 25 bp, Homo sapien
cccgagtcatcacaacccacacttc

SEQ ID NO: 5804288 - DNA, 25 bp, Homo sapien
cgggcacgggcggcgccgcctcgcg

SEQ ID NO: 5804289 - DNA, 25 bp, Homo sapien
cgccatctttcaggcctcagctccc

SEQ ID NO: 5804290 - DNA, 25 bp, Homo sapien
tcttgggattgaatgactcacattt

SEQ ID NO: 5804291 - DNA, 25 bp, Homo sapien
ccgacgtggcggtgccgctcactct

SEQ ID NO: 5804292 - DNA, 25 bp, Homo sapien
ctcactcagtaccagcgggacttcg

SEQ ID NO: 5804293 - DNA, 25 bp, Homo sapien
tcaagtcagttgggaaccgaattgg

SEQ ID NO: 5804294 - DNA, 25 bp, Homo sapien
ttcgggatgggacagcagccctggg

SEQ ID NO: 5804295 - DNA, 25 bp, Homo sapien
cggggaactcaccaccttttgaaga

SEQ ID NO: 5804296 - DNA, 25 bp, Homo sapien
agggccaaagtgctggtgtggagca

SEQ ID NO: 5804297 - DNA, 25 bp, Homo sapien
ctcagagccaccagacgtgcaggtg

SEQ ID NO: 5804298 - DNA, 25 bp, Homo sapien
tgcacggctactcggacctcgacag

SEQ ID NO: 5804299 - DNA, 25 bp, Homo sapien
atgactcacatttaccttgtgctag

SEQ ID NO: 5804300 - DNA, 25 bp, Homo sapien
tttttaaagcttagaggtacaagct

SEQ ID NO: 5804301 - DNA, 25 bp, Homo sapien
cagttcttgggattgaatgactcac

SEQ ID NO: 5804302 - DNA, 25 bp, Homo sapien
ccagctccgactgcctgtcagcgtc

SEQ ID NO: 5804303 - DNA, 25 bp, Homo sapien
ctcccaggtgctagccctggcaggc

SEQ ID NO: 5804304 - DNA, 25 bp, Homo sapien
ccttttgaagaggcagttcattttc

SEQ ID NO: 5804305 - DNA, 25 bp, Homo sapien
gccgcctcgcgcaggggccagcctc

SEQ ID NO: 5804306 - DNA, 25 bp, Homo sapien
tgctagccctggcaggcacagccct

SEQ ID NO: 5804307 - DNA, 25 bp, Homo sapien
tgtttttgggaaggtggcatttgtc

SEQ ID NO: 5804308 - DNA, 25 bp, Homo sapien
tgttggaatcttgggccgtcacctg

SEQ ID NO: 5804309 - DNA, 25 bp, Homo sapien
gtgacggggaactcaccaccttttg

SEQ ID NO: 5804310 - DNA, 25 bp, Homo sapien
tgaaatctctgaggagcctgaggat

SEQ ID NO: 5804311 - DNA, 25 bp, Homo sapien
gaagcccaaagcgtgtgcttatcca

SEQ ID NO: 5804312 - DNA, 25 bp, Homo sapien
gctgagaactggaactgtttttggg

SEQ ID NO: 5804313 - DNA, 25 bp, Homo sapien
tcaggacagtcttcagtaaggaaat

SEQ ID NO: 5804314 - DNA, 25 bp, Homo sapien
actgtacaatctcagattttactaa

SEQ ID NO: 5804315 - DNA, 25 bp, Homo sapien
cctcaagcatcctcttgagaagcct

SEQ ID NO: 5804316 - DNA, 25 bp, Homo sapien
taccttgtgctaggttctaaagatt

SEQ ID NO: 5804317 - DNA, 25 bp, Homo sapien
ccttcacacgtttgaggggtcttcg

SEQ ID NO: 5804318 - DNA, 25 bp, Homo sapien
gcccgccgggcccaaggatccgccg

SEQ ID NO: 5804319 - DNA, 25 bp, Homo sapien
cctcaggacccactgccgcggggct

SEQ ID NO: 5804320 - DNA, 25 bp, Homo sapien
ggactggagtgaagccctcaagatc

SEQ ID NO: 5804321 - DNA, 25 bp, Homo sapien
atctcagattttactaaaatgcaaa

SEQ ID NO: 5804322 - DNA, 25 bp, Homo sapien
ggcgtggccctgtatcagccgcctg

SEQ ID NO: 5804323 - DNA, 25 bp, Homo sapien
cagcgtccctcccaggtgctagccc

SEQ ID NO: 5804324 - DNA, 25 bp, Homo sapien
tcaccaccttttgaagaggcagttc

SEQ ID NO: 5804325 - DNA, 25 bp, Homo sapien
tctaccctgctcacatgtacagtga

SEQ ID NO: 5804326 - DNA, 25 bp, Homo sapien
aaagaaccagttatgtccacttttg

SEQ ID NO: 5804327 - DNA, 25 bp, Homo sapien
cgcggggtctacgtgctgcccatcg

SEQ ID NO: 5804328 - DNA, 25 bp, Homo sapien
tccgcgccacctgcgcccggcgccc

SEQ ID NO: 5804329 - DNA, 25 bp, Homo sapien
atacacactggctgagaactggaac

SEQ ID NO: 5804330 - DNA, 25 bp, Homo sapien
aggacccactgccgcggggctgggc

SEQ ID NO: 5804331 - DNA, 25 bp, Homo sapien
ctctccagcccacaagtggctctag

SEQ ID NO: 5804332 - DNA, 25 bp, Homo sapien
cacttcacagacctccttatggcca

SEQ ID NO: 5804333 - DNA, 25 bp, Homo sapien
tcaacgtgtgactgcctgcaccgtg

SEQ ID NO: 5804334 - DNA, 25 bp, Homo sapien
ctggaccgctccgacgtggcggtgc

SEQ ID NO: 5804335 - DNA, 25 bp, Homo sapien
taagctgcaggtggtggcactcggg

SEQ ID NO: 5804336 - DNA, 25 bp, Homo sapien
ggtggatttcccaggatgcgtgagc

SEQ ID NO: 5804337 - DNA, 25 bp, Homo sapien
cccagctcagcctcaagcatcctct

SEQ ID NO: 5804338 - DNA, 25 bp, Homo sapien
atgggacagcagccctggggccggc

SEQ ID NO: 5804339 - DNA, 25 bp, Homo sapien
ccatctttcaggcctcagctccccg

SEQ ID NO: 5804340 - DNA, 25 bp, Homo sapien
cacaacccacacttcgggatgggac

SEQ ID NO: 5804341 - DNA, 25 bp, Homo sapien
cagttgaagctgttggaatcttggg

SEQ ID NO: 5804342 - DNA, 25 bp, Homo sapien
caggtgctagccctggcaggcacag

SEQ ID NO: 5804343 - DNA, 25 bp, Homo sapien
tactaatgattttcccgctaacata

SEQ ID NO: 5804344 - DNA, 25 bp, Homo sapien
caggaattccaggcttggactggag

SEQ ID NO: 5804345 - DNA, 25 bp, Homo sapien
tggcactcgggtctcagagccacca

SEQ ID NO: 5804346 - DNA, 25 bp, Homo sapien
ggaccgctccgacgtggcggtgccg

SEQ ID NO: 5804347 - DNA, 25 bp, Homo sapien
gcatgtttgatttttctaagagaaa

SEQ ID NO: 5804348 - DNA, 25 bp, Homo sapien
agcagggcactatcatacacactgg

SEQ ID NO: 5804349 - DNA, 25 bp, Homo sapien
catggtgatgctgagtatccaggag

SEQ ID NO: 5804350 - DNA, 25 bp, Homo sapien
aagctgttggaatcttgggccgtca

SEQ ID NO: 5804351 - DNA, 25 bp, Homo sapien
agacctccttatggccaagatgagc

SEQ ID NO: 5804352 - DNA, 25 bp, Homo sapien
cccacaagtggctctagtgagacga

SEQ ID NO: 5804353 - DNA, 25 bp, Homo sapien
atggacttggcacacccagctcagc

SEQ ID NO: 5804354 - DNA, 25 bp, Homo sapien
ctgtcaccagggccaaagtgctggt

SEQ ID NO: 5804355 - DNA, 25 bp, Homo sapien
cattttctttgcaaagctctctcct

SEQ ID NO: 5804356 - DNA, 25 bp, Homo sapien
atctttcaggcctcagctccccgga

SEQ ID NO: 5804357 - DNA, 25 bp, Homo sapien
tccgtaaattccagccagcatggcc

SEQ ID NO: 5804358 - DNA, 25 bp, Homo sapien
tgcctggcgcggcgctggaaccagc

SEQ ID NO: 5804359 - DNA, 25 bp, Homo sapien
agcagtgaccacgtcgtacagacag

SEQ ID NO: 5804360 - DNA, 25 bp, Homo sapien
cagcagccctggggccggcttccag

SEQ ID NO: 5804361 - DNA, 25 bp, Homo sapien
gctcagcctcaagcatcctcttgag

SEQ ID NO: 5804362 - DNA, 25 bp, Homo sapien
gaattggtccatggaagctgaggaa

SEQ ID NO: 5804363 - DNA, 25 bp, Homo sapien
aatgtcctctacaccaacccttccg

SEQ ID NO: 5804364 - DNA, 25 bp, Homo sapien
cgcgccacctgcgcccggcgcccgc

SEQ ID NO: 5804365 - DNA, 25 bp, Homo sapien
acgtcgtacagacaggaattccagg

SEQ ID NO: 5804366 - DNA, 25 bp, Homo sapien
ctacaaatggcccctgcagttgaag

SEQ ID NO: 5804367 - DNA, 25 bp, Homo sapien
gtgacaccatggctgccgacaggac

SEQ ID NO: 5804368 - DNA, 25 bp, Homo sapien
gcagttcattttctttgcaaagctc

SEQ ID NO: 5804369 - DNA, 25 bp, Homo sapien
gctattcctgacttcacggcttgca

SEQ ID NO: 5804370 - DNA, 25 bp, Homo sapien
gggcccctgcgggagggcacagccc

SEQ ID NO: 5804371 - DNA, 25 bp, Homo sapien
ggagcctgaggatcaagtcagttgg

SEQ ID NO: 5804372 - DNA, 25 bp, Homo sapien
gatgctgagtatccaggaggaaatt

SEQ ID NO: 5804373 - DNA, 25 bp, Homo sapien
ccaagatgagcctcatgttttaaca

SEQ ID NO: 5804374 - DNA, 25 bp, Homo sapien
ttgggccgtcacctgcatgactcat

SEQ ID NO: 5804375 - DNA, 25 bp, Homo sapien
tgcccatcggcgacgcggacgcggc

SEQ ID NO: 5804376 - DNA, 25 bp, Homo sapien
agccgcctgtgctgcctggcgcggc

SEQ ID NO: 5804377 - DNA, 25 bp, Homo sapien
ttgtggatttccctttggatctttc

SEQ ID NO: 5804378 - DNA, 25 bp, Homo sapien
tgagcagggcactatcatacacact

SEQ ID NO: 5804379 - DNA, 25 bp, Homo sapien
ctggcaggcacagccctcccctcat

SEQ ID NO: 5804380 - DNA, 25 bp, Homo sapien
tggtgatgctgagtatccaggagga

SEQ ID NO: 5804381 - DNA, 25 bp, Homo sapien
agcacttgattaatttcataaccta

SEQ ID NO: 5804382 - DNA, 25 bp, Homo sapien
gggcgggcggccgcaggggcaaatc

SEQ ID NO: 5804383 - DNA, 25 bp, Homo sapien
gcttggactggagtgaagccctcaa

SEQ ID NO: 5804384 - DNA, 25 bp, Homo sapien
ggcccctgcagttgaagctgttgga

SEQ ID NO: 5804385 - DNA, 25 bp, Homo sapien
gacgtggcggtgccgctcactctgc

SEQ ID NO: 5804386 - DNA, 25 bp, Homo sapien
tcccctcatgccagcaaaggaaatg

SEQ ID NO: 5804387 - DNA, 25 bp, Homo sapien
acttcctccgtaaattccagccagc

SEQ ID NO: 5804388 - DNA, 25 bp, Homo sapien
ctccgactgcctgtcagcgtccctc

SEQ ID NO: 5804389 - DNA, 25 bp, Homo sapien
aaaaactgtacaatctcagatttta

SEQ ID NO: 5804390 - DNA, 25 bp, Homo sapien
ggaaatgctcttgatgagaggctcg

SEQ ID NO: 5804391 - DNA, 25 bp, Homo sapien
ctccgacgtggcggtgccgctcact

SEQ ID NO: 5804392 - DNA, 25 bp, Homo sapien
agcaaaggaaatgctcttgatgaga

SEQ ID NO: 5804393 - DNA, 25 bp, Homo sapien
tcggcgacgcggacgcggctgcagc

SEQ ID NO: 5804394 - DNA, 25 bp, Homo sapien
acttttggtggatttcccaggatgc

SEQ ID NO: 5804395 - DNA, 25 bp, Homo sapien
ggccgtctctcagttttgaaatctc

SEQ ID NO: 5804396 - DNA, 25 bp, Homo sapien
ctcggacctcgacagcgaggagccg

SEQ ID NO: 5804397 - DNA, 25 bp, Homo sapien
gcaccgatggacttggcacacccag

SEQ ID NO: 5804398 - DNA, 25 bp, Homo sapien
tcacagacctccttatggccaagat

SEQ ID NO: 5804399 - DNA, 25 bp, Homo sapien
gagaaaagaggctgcctgctgggtg

SEQ ID NO: 5804400 - DNA, 25 bp, Homo sapien
aacgtgtgactgcctgcaccgtgac

SEQ ID NO: 5804401 - DNA, 25 bp, Homo sapien
acacactggctgagaactggaactg

SEQ ID NO: 5804402 - DNA, 25 bp, Homo sapien
ggacttggcacacccagctcagcct

SEQ ID NO: 5804403 - DNA, 25 bp, Homo sapien
ggttcagctattcctgacttcacgg

SEQ ID NO: 5804404 - DNA, 25 bp, Homo sapien
aaggtggcatttgtctcattccctg

SEQ ID NO: 5804405 - DNA, 25 bp, Homo sapien
gacagggctggggagcggcctcagg

SEQ ID NO: 5804406 - DNA, 25 bp, Homo sapien
ccctggggccggcttccaggtccca

SEQ ID NO: 5804407 - DNA, 25 bp, Homo sapien
agacaaaaccagcccgagtcatcac

SEQ ID NO: 5804408 - DNA, 25 bp, Homo sapien
cttgaaagaaccagttatgtccact

SEQ ID NO: 5804409 - DNA, 25 bp, Homo sapien
cacggctactcggacctcgacagcg

SEQ ID NO: 5804410 - DNA, 25 bp, Homo sapien
ggtcccagaggtgaggaagaagttc

SEQ ID NO: 5804411 - DNA, 25 bp, Homo sapien
ctaagagaaaagaggctgcctgctg

SEQ ID NO: 5804412 - DNA, 25 bp, Homo sapien
aagaaacagaccgtcagtcacgggc

SEQ ID NO: 5804413 - DNA, 25 bp, Homo sapien
aacccctccgccatctttcaggcct

SEQ ID NO: 5804414 - DNA, 25 bp, Homo sapien
actgtttttgggaaggtggcatttg

SEQ ID NO: 5804415 - DNA, 25 bp, Homo sapien
gattaaaaactgtacaatctcagat

SEQ ID NO: 5804416 - DNA, 25 bp, Homo sapien
aaatgctcttgatgagaggctcgct

SEQ ID NO: 5804417 - DNA, 25 bp, Homo sapien
gggcccaaggatccgccgccggggc

SEQ ID NO: 5804418 - DNA, 25 bp, Homo sapien
aaggatccgccgccggggcgcggac

SEQ ID NO: 5804419 - DNA, 25 bp, Homo sapien
ggccgcaggggcaaatcctccgcgc

SEQ ID NO: 5804420 - DNA, 25 bp, Homo sapien
gtccatggaagctgaggaatgtgga

SEQ ID NO: 5804421 - DNA, 25 bp, Homo sapien
ataaggatgatgagcagggcactat

SEQ ID NO: 5804422 - DNA, 25 bp, Homo sapien
tcttgggccgtcacctgcatgactc

SEQ ID NO: 5804423 - DNA, 25 bp, Homo sapien
gtctcagagccaccagacgtgcagg

SEQ ID NO: 5804424 - DNA, 25 bp, Homo sapien
ttgcatgtttgatttttctaagaga

SEQ ID NO: 5804425 - DNA, 25 bp, Homo sapien
aggtggtggcactcgggtctcagag

SEQ ID NO: 5804426 - DNA, 25 bp, Homo sapien
caccatggctgccgacaggacaggg

SEQ ID NO: 5804427 - DNA, 25 bp, Homo sapien
tcatcacaacccacacttcgggatg

SEQ ID NO: 5804428 - DNA, 25 bp, Homo sapien
atccacaaagacaaaaccagcccga

SEQ ID NO: 5804429 - DNA, 25 bp, Homo sapien
atctctgaggagcctgaggatcaag

SEQ ID NO: 5804430 - DNA, 25 bp, Homo sapien
gggtctcagagccaccagacgtgca

SEQ ID NO: 5804431 - DNA, 25 bp, Homo sapien
ttggactggagtgaagccctcaaga

SEQ ID NO: 5804432 - DNA, 25 bp, Homo sapien
tatcatacacactggctgagaactg

SEQ ID NO: 5804433 - DNA, 25 bp, Homo sapien
ccaaagtgctggtgtggagcagatg

SEQ ID NO: 5804434 - DNA, 25 bp, Homo sapien
gggacagcagccctggggccggctt

SEQ ID NO: 5804435 - DNA, 25 bp, Homo sapien
cggcgccgcctcgcgcaggggccag

SEQ ID NO: 5804436 - DNA, 25 bp, Homo sapien
gtaccagcgggacttcggcttgtgg

SEQ ID NO: 5804437 - DNA, 25 bp, Homo sapien
tgtggaaggctcctgcgttcgttaa

SEQ ID NO: 5804438 - DNA, 25 bp, Homo sapien
tgaatccacattttgttactaatga

SEQ ID NO: 5804439 - DNA, 25 bp, Homo sapien
cttcctctccagcccacaagtggct

SEQ ID NO: 5804440 - DNA, 25 bp, Homo sapien
ccctgcgggagggcacagcccctct

SEQ ID NO: 5804441 - DNA, 25 bp, Homo sapien
cgacgcggacgcggctgcagcagtg

SEQ ID NO: 5804442 - DNA, 25 bp, Homo sapien
gcggacgcggctgcagcagtgacca

SEQ ID NO: 5804443 - DNA, 25 bp, Homo sapien
gctttaaagaagcccaaagcgtgtg

SEQ ID NO: 5804444 - DNA, 25 bp, Homo sapien
gcccctgcgggagggcacagcccct

SEQ ID NO: 5804445 - DNA, 25 bp, Homo sapien
cgtgtgactgcctgcaccgtgacac

SEQ ID NO: 5804446 - DNA, 25 bp, Homo sapien
cgcgcagtcctccgcgccacctgcg

SEQ ID NO: 5804447 - DNA, 25 bp, Homo sapien
tcctctccagcccacaagtggctct

SEQ ID NO: 5804448 - DNA, 25 bp, Homo sapien
atccaaggggttcagctattcctga

SEQ ID NO: 5804449 - DNA, 25 bp, Homo sapien
cggggtctacgtgctgcccatcggc

SEQ ID NO: 5804450 - DNA, 25 bp, Homo sapien
tactcggacctcgacagcgaggagc

SEQ ID NO: 5804451 - DNA, 25 bp, Homo sapien
gaaggctcctgcgttcgttaactgc

SEQ ID NO: 5804452 - DNA, 25 bp, Homo sapien
acatccggcccttgaaagaaccagt

SEQ ID NO: 5804453 - DNA, 25 bp, Homo sapien
agtgctggtgtggagcagatgcacc

SEQ ID NO: 5804454 - DNA, 25 bp, Homo sapien
caatctcagattttactaaaatgca

SEQ ID NO: 5804455 - DNA, 25 bp, Homo sapien
tcgacagcgaggagccgggcacggg

SEQ ID NO: 5804456 - DNA, 25 bp, Homo sapien
ttgaagaggcagttcattttctttg

SEQ ID NO: 5804457 - DNA, 25 bp, Homo sapien
tcactctgcacggctactcggacct

SEQ ID NO: 5804458 - DNA, 25 bp, Homo sapien
ggccaagatgagcctcatgttttaa

SEQ ID NO: 5804459 - DNA, 25 bp, Homo sapien
ccagcaaaggaaatgctcttgatga

SEQ ID NO: 5804460 - DNA, 25 bp, Homo sapien
tgattaatttcataacctacagtga

SEQ ID NO: 5804461 - DNA, 25 bp, Homo sapien
tttcccaggatgcgtgagcacttga

SEQ ID NO: 5804462 - DNA, 25 bp, Homo sapien
atccaggaggaaatttccagaagaa

SEQ ID NO: 5804463 - DNA, 25 bp, Homo sapien
ccatctggccgtctctcagttttga

SEQ ID NO: 5804464 - DNA, 25 bp, Homo sapien
gctgttggaatcttgggccgtcacc

SEQ ID NO: 5804465 - DNA, 25 bp, Homo sapien
ctcagtaccagcgggacttcggctt

SEQ ID NO: 5804466 - DNA, 25 bp, Homo sapien
tcagctccccggattctcaacgtgt

SEQ ID NO: 5804467 - DNA, 25 bp, Homo sapien
cttcacagacctccttatggccaag

SEQ ID NO: 5804468 - DNA, 25 bp, Homo sapien
gcccggcgcccgcggggtctacgtg

SEQ ID NO: 5804469 - DNA, 25 bp, Homo sapien
cagtgaccacgtcgtacagacagga

SEQ ID NO: 5804470 - DNA, 25 bp, Homo sapien
ttgatgagaggctcgctttaaagaa

SEQ ID NO: 5804471 - DNA, 25 bp, Homo sapien
gcttagaggtacaagctcaggacag

SEQ ID NO: 5804472 - DNA, 25 bp, Homo sapien
acgcccgccgggcccaaggatccgc

SEQ ID NO: 5804473 - DNA, 25 bp, Homo sapien
aaagaggctgcctgctgggtgtctg

SEQ ID NO: 5804474 - DNA, 25 bp, Homo sapien
ttctttgcaaagctctctcctaact

SEQ ID NO: 5804475 - DNA, 25 bp, Homo sapien
cacatttaccttgtgctaggttcta

SEQ ID NO: 5804476 - DNA, 25 bp, Homo sapien
cgctcactcagtaccagcgggactt

SEQ ID NO: 5804477 - DNA, 25 bp, Homo sapien
gacgagcatttaagctgcaggtggt

SEQ ID NO: 5804478 - DNA, 25 bp, Homo sapien
tctttttaaagcttagaggtacaag

SEQ ID NO: 5804479 - DNA, 25 bp, Homo sapien
ggattccggccgggacgtgccgctc

SEQ ID NO: 5804480 - DNA, 25 bp, Homo sapien
cgtggcggtgccgctcactctgcac

SEQ ID NO: 5804481 - DNA, 25 bp, Homo sapien
cgggatgggacagcagccctggggc

SEQ ID NO: 5804482 - DNA, 25 bp, Homo sapien
aaggggttcagctattcctgacttc

SEQ ID NO: 5804483 - DNA, 25 bp, Homo sapien
ttaaaatgtcctctacaccaaccct

SEQ ID NO: 5804484 - DNA, 25 bp, Homo sapien
taaagaagcccaaagcgtgtgctta

SEQ ID NO: 5804485 - DNA, 25 bp, Homo sapien
cctccgcgcagtcctccgcgccacc

SEQ ID NO: 5804486 - DNA, 25 bp, Homo sapien
caaagcgtgtgcttatccaaggggt

SEQ ID NO: 5804487 - DNA, 25 bp, Homo sapien
gcgttcgttaactgccatctggccg

SEQ ID NO: 5804488 - DNA, 25 bp, Homo sapien
gttcttgggattgaatgactcacat

SEQ ID NO: 5804489 - DNA, 25 bp, Homo sapien
ccgactgcctgtcagcgtccctccc

SEQ ID NO: 5804490 - DNA, 25 bp, Homo sapien
aagcatcctcttgagaagcctgtgg

SEQ ID NO: 5804491 - DNA, 25 bp, Homo sapien
gcgccgcctcgcgcaggggccagcc

SEQ ID NO: 5804492 - DNA, 25 bp, Homo sapien
actgcctgcaccgtgacaccatggc

SEQ ID NO: 5804493 - DNA, 25 bp, Homo sapien
caccgtgacaccatggctgccgaca

SEQ ID NO: 5804494 - DNA, 25 bp, Homo sapien
agagcatggcatgggcccctgcggg

SEQ ID NO: 5804495 - DNA, 25 bp, Homo sapien
tcgttaactgccatctggccgtctc

SEQ ID NO: 5804496 - DNA, 25 bp, Homo sapien
tcacatgtacagtgacggggaactc

SEQ ID NO: 5804497 - DNA, 25 bp, Homo sapien
gcccaaggatccgccgccggggcgc

SEQ ID NO: 5804498 - DNA, 25 bp, Homo sapien
tggagcagatgcaccgatggacttg

SEQ ID NO: 5804499 - DNA, 25 bp, Homo sapien
acagacctccttatggccaagatga

SEQ ID NO: 5804500 - DNA, 25 bp, Homo sapien
ctcatgccagcaaaggaaatgctct

SEQ ID NO: 5804501 - DNA, 25 bp, Homo sapien
tcctgcgttcgttaactgccatctg

SEQ ID NO: 5804502 - DNA, 25 bp, Homo sapien
acgcggacgcggctgcagcagtgac

SEQ ID NO: 5804503 - DNA, 25 bp, Homo sapien
tacaatctcagattttactaaaatg

SEQ ID NO: 5804504 - DNA, 25 bp, Homo sapien
cgccacctgcgcccggcgcccgcgg

SEQ ID NO: 5804505 - DNA, 25 bp, Homo sapien
acgtgctgcccatcggcgacgcgga

SEQ ID NO: 5804506 - DNA, 25 bp, Homo sapien
tgagaggctcgctttaaagaagccc

SEQ ID NO: 5804507 - DNA, 25 bp, Homo sapien
acatgtacagtgacggggaactcac

SEQ ID NO: 5804508 - DNA, 25 bp, Homo sapien
ggaagaagttcactcctaacccctc

SEQ ID NO: 5804509 - DNA, 25 bp, Homo sapien
gctgaggaatgtggacacatccggc

SEQ ID NO: 5804510 - DNA, 25 bp, Homo sapien
agctgtcaccagggccaaagtgctg

SEQ ID NO: 5804511 - DNA, 25 bp, Homo sapien
ccctttggatctttcttcctctcca

SEQ ID NO: 5804512 - DNA, 25 bp, Homo sapien
agcctgaggatcaagtcagttggga

SEQ ID NO: 5804513 - DNA, 25 bp, Homo sapien
gcggcctcaggacccactgccgcgg

SEQ ID NO: 5804514 - DNA, 25 bp, Homo sapien
tatcagccgcctgtgctgcctggcg

SEQ ID NO: 5804515 - DNA, 25 bp, Homo sapien
ggcgctggaaccagctggaccgctc

SEQ ID NO: 5804516 - DNA, 25 bp, Homo sapien
cctgtggaaggctcctgcgttcgtt

SEQ ID NO: 5804517 - DNA, 25 bp, Homo sapien
gtacagtgacggggaactcaccacc

SEQ ID NO: 5804518 - DNA, 25 bp, Homo sapien
atggctgccgacaggacagggctgg

SEQ ID NO: 5804519 - DNA, 25 bp, Homo sapien
tctgcacggctactcggacctcgac

SEQ ID NO: 5804520 - DNA, 25 bp, Homo sapien
ggccaaagtgctggtgtggagcaga

SEQ ID NO: 5804521 - DNA, 25 bp, Homo sapien
acaaaacagttcttgggattgaatg

SEQ ID NO: 5804522 - DNA, 25 bp, Homo sapien
ccttgtgctaggttctaaagattga

SEQ ID NO: 5804523 - DNA, 25 bp, Homo sapien
ggcctcagctccccggattctcaac

SEQ ID NO: 5804524 - DNA, 25 bp, Homo sapien
gctgcctggcgcggcgctggaacca

SEQ ID NO: 5804525 - DNA, 25 bp, Homo sapien
gtctctcagttttgaaatctctgag

SEQ ID NO: 5804526 - DNA, 25 bp, Homo sapien
aggaatgtggacacatccggccctt

SEQ ID NO: 5804527 - DNA, 25 bp, Homo sapien
gcctgtgctgcctggcgcggcgctg

SEQ ID NO: 5804528 - DNA, 25 bp, Homo sapien
gccgggcccaaggatccgccgccgg

SEQ ID NO: 5804529 - DNA, 25 bp, Homo sapien
acctccttatggccaagatgagcct

SEQ ID NO: 5804530 - DNA, 25 bp, Homo sapien
ctggaaccagctggaccgctccgac

SEQ ID NO: 5804531 - DNA, 25 bp, Homo sapien
gcggcgggcgccggggctggcatgg

SEQ ID NO: 5804532 - DNA, 25 bp, Homo sapien
cgggcggcgccgcctcgcgcagggg

SEQ ID NO: 5804533 - DNA, 25 bp, Homo sapien
ctttcttcctctccagcccacaagt

SEQ ID NO: 5804534 - DNA, 25 bp, Homo sapien
ccgcctgtgctgcctggcgcggcgc

SEQ ID NO: 5804535 - DNA, 25 bp, Homo sapien
cttccacttcacagacctccttatg

SEQ ID NO: 5804536 - DNA, 25 bp, Homo sapien
gactgcctgtcagcgtccctcccag

SEQ ID NO: 5804537 - DNA, 25 bp, Homo sapien
aaaaccagcccgagtcatcacaacc

SEQ ID NO: 5804538 - DNA, 25 bp, Homo sapien
gcaaatcctccgcgcagtcctccgc

SEQ ID NO: 5804539 - DNA, 25 bp, Homo sapien
atttccagaagaaacagaccgtcag

SEQ ID NO: 5804540 - DNA, 25 bp, Homo sapien
aggctcctgcgttcgttaactgcca

SEQ ID NO: 5804541 - DNA, 25 bp, Homo sapien
ggcctcaggacccactgccgcgggg

SEQ ID NO: 5804542 - DNA, 25 bp, Homo sapien
tgggcgagagcatggcatgggcccc

SEQ ID NO: 5804543 - DNA, 25 bp, Homo sapien
acgcggctgcagcagtgaccacgtc

SEQ ID NO: 5804544 - DNA, 25 bp, Homo sapien
caggcctcagctccccggattctca

SEQ ID NO: 5804545 - DNA, 25 bp, Homo sapien
atgggcccctgcgggagggcacagc

SEQ ID NO: 5804546 - DNA, 25 bp, Homo sapien
gcgcggcgctggaaccagctggacc

SEQ ID NO: 5804547 - DNA, 25 bp, Homo sapien
agctggaccgctccgacgtggcggt

SEQ ID NO: 5804548 - DNA, 25 bp, Homo sapien
gatgcgtgagcacttgattaatttc

SEQ ID NO: 5804549 - DNA, 25 bp, Homo sapien
ccctgaaataccttaaaatgtcctc

SEQ ID NO: 5804550 - DNA, 25 bp, Homo sapien
ttccaggcttggactggagtgaagc

SEQ ID NO: 5804551 - DNA, 25 bp, Homo sapien
gatcaagtcagttgggaaccgaatt

SEQ ID NO: 5804552 - DNA, 25 bp, Homo sapien
ctcacatttaccttgtgctaggttc

SEQ ID NO: 5804553 - DNA, 25 bp, Homo sapien
gtcttcagtaaggaaatttgtggat

SEQ ID NO: 5804554 - DNA, 25 bp, Homo sapien
cacattttgttactaatgattttcc

SEQ ID NO: 5804555 - DNA, 25 bp, Homo sapien
cgagagcatggcatgggcccctgcg

SEQ ID NO: 5804556 - DNA, 25 bp, Homo sapien
cggctactcggacctcgacagcgag

SEQ ID NO: 5804557 - DNA, 25 bp, Homo sapien
cgcccgcggggtctacgtgctgccc

SEQ ID NO: 5804558 - DNA, 25 bp, Homo sapien
gtccacttttggtggatttcccagg

SEQ ID NO: 5804559 - DNA, 25 bp, Homo sapien
ctctcagttttgaaatctctgagga

SEQ ID NO: 5804560 - DNA, 25 bp, Homo sapien
gcggcgctggaaccagctggaccgc

SEQ ID NO: 5804561 - DNA, 25 bp, Homo sapien
gtgaggaagaagttcactcctaacc

SEQ ID NO: 5804562 - DNA, 25 bp, Homo sapien
ccagcccacaagtggctctagtgag

SEQ ID NO: 5804563 - DNA, 25 bp, Homo sapien
gggtgtctgtggaaatgagattaaa

SEQ ID NO: 5804564 - DNA, 25 bp, Homo sapien
aggatcaagtcagttgggaaccgaa

SEQ ID NO: 5804565 - DNA, 25 bp, Homo sapien
tgtacaatctcagattttactaaaa

SEQ ID NO: 5804566 - DNA, 25 bp, Homo sapien
ctttgcaaagctctctcctaacttc

SEQ ID NO: 5804567 - DNA, 25 bp, Homo sapien
gctggcatggcgtggccctgtatca

SEQ ID NO: 5804568 - DNA, 25 bp, Homo sapien
acagcccctctcaaagctgtcacca

SEQ ID NO: 5804569 - DNA, 25 bp, Homo sapien
ggatccgccgccggggcgcggaccg

SEQ ID NO: 5804570 - DNA, 25 bp, Homo sapien
acttcgggatgggacagcagccctg

SEQ ID NO: 5804571 - DNA, 25 bp, Homo sapien
atttcataacctacagtgagaccct

SEQ ID NO: 5804572 - DNA, 25 bp, Homo sapien
gccgtcacctgcatgactcatggtg

SEQ ID NO: 5804573 - DNA, 25 bp, Homo sapien
tggatttcccaggatgcgtgagcac

SEQ ID NO: 5804574 - DNA, 25 bp, Homo sapien
gctcactctgcacggctactcggac

SEQ ID NO: 5804575 - DNA, 25 bp, Homo sapien
agttcattttctttgcaaagctctc

SEQ ID NO: 5804576 - DNA, 25 bp, Homo sapien
agtgagacccttggctcttcctaca

SEQ ID NO: 5804577 - DNA, 25 bp, Homo sapien
ggtgccttcacacgtttgaggggtc

SEQ ID NO: 5804578 - DNA, 25 bp, Homo sapien
ttgttactaatgattttcccgctaa

SEQ ID NO: 5804579 - DNA, 25 bp, Homo sapien
acctgcgcccggcgcccgcggggtc

SEQ ID NO: 5804580 - DNA, 25 bp, Homo sapien
cctgaggatcaagtcagttgggaac

SEQ ID NO: 5804581 - DNA, 25 bp, Homo sapien
ttccagctccgactgcctgtcagcg

SEQ ID NO: 5804582 - DNA, 25 bp, Homo sapien
cagggctggggagcggcctcaggac

SEQ ID NO: 5804583 - DNA, 25 bp, Homo sapien
ctgcatgactcatggtgatgctgag

SEQ ID NO: 5804584 - DNA, 25 bp, Homo sapien
aagcgtgtgcttatccaaggggttc

SEQ ID NO: 5804585 - DNA, 25 bp, Homo sapien
gccgggacgtgccgctcactcagta

SEQ ID NO: 5804586 - DNA, 25 bp, Homo sapien
ggaatcttgggccgtcacctgcatg

SEQ ID NO: 5804587 - DNA, 25 bp, Homo sapien
acacttcgggatgggacagcagccc

SEQ ID NO: 5804588 - DNA, 25 bp, Homo sapien
ggaaatttgtggatttccctttgga

SEQ ID NO: 5804589 - DNA, 25 bp, Homo sapien
ttccctttggatctttcttcctctc

SEQ ID NO: 5804590 - DNA, 25 bp, Homo sapien
tttgaaatctctgaggagcctgagg

SEQ ID NO: 5804591 - DNA, 25 bp, Homo sapien
aggtgaggaagaagttcactcctaa

SEQ ID NO: 5804592 - DNA, 25 bp, Homo sapien
ctctgaggagcctgaggatcaagtc

SEQ ID NO: 5804593 - DNA, 25 bp, Homo sapien
tgagacccttggctcttcctacaaa

SEQ ID NO: 5804594 - DNA, 25 bp, Homo sapien
ccccggattctcaacgtgtgactgc

SEQ ID NO: 5804595 - DNA, 25 bp, Homo sapien
tcccgctaacataaggatgatgagc

SEQ ID NO: 5804596 - DNA, 25 bp, Homo sapien
aagtcagttgggaaccgaattggtc

SEQ ID NO: 5804597 - DNA, 25 bp, Homo sapien
gtgaccacgtcgtacagacaggaat

SEQ ID NO: 5804598 - DNA, 25 bp, Homo sapien
cagaccgtcagtcacgggcttccac

SEQ ID NO: 5804599 - DNA, 25 bp, Homo sapien
tggctctagtgagacgagcatttaa

SEQ ID NO: 5804600 - DNA, 25 bp, Homo sapien
ctagccctggcaggcacagccctcc

SEQ ID NO: 5804601 - DNA, 25 bp, Homo sapien
ttggtggatttcccaggatgcgtga

SEQ ID NO: 5804602 - DNA, 25 bp, Homo sapien
cctaacttcctccgtaaattccagc

SEQ ID NO: 5804603 - DNA, 25 bp, Homo sapien
ttttgaagaggcagttcattttctt

SEQ ID NO: 5804604 - DNA, 25 bp, Homo sapien
gccacatgggtcacgcctggtgcct

SEQ ID NO: 5804605 - DNA, 25 bp, Homo sapien
gcagccctggggccggcttccaggt

SEQ ID NO: 5804606 - DNA, 25 bp, Homo sapien
atcctcttgagaagcctgtggaagg

SEQ ID NO: 5804607 - DNA, 25 bp, Homo sapien
atgatgagcagggcactatcataca

SEQ ID NO: 5804608 - DNA, 25 bp, Homo sapien
cccactgccgcggggctgggcgaga

SEQ ID NO: 5804609 - DNA, 25 bp, Homo sapien
gaccacgtcgtacagacaggaattc

SEQ ID NO: 5804610 - DNA, 25 bp, Homo sapien
atcctccgcgcagtcctccgcgcca

SEQ ID NO: 5804611 - DNA, 25 bp, Homo sapien
acgcctggtgccttcacacgtttga

SEQ ID NO: 5804612 - DNA, 25 bp, Homo sapien
ccttggctcttcctacaaatggccc

SEQ ID NO: 5804613 - DNA, 25 bp, Homo sapien
gacggggaactcaccaccttttgaa

SEQ ID NO: 5804614 - DNA, 25 bp, Homo sapien
gggcggccgcaggggcaaatcctcc

SEQ ID NO: 5804615 - DNA, 25 bp, Homo sapien
ggtgtggagcagatgcaccgatgga

SEQ ID NO: 5804616 - DNA, 25 bp, Homo sapien
tctagtgagacgagcatttaagctg

SEQ ID NO: 5804617 - DNA, 25 bp, Homo sapien
ccatggaagctgaggaatgtggaca

SEQ ID NO: 5804618 - DNA, 25 bp, Homo sapien
cctcttgagaagcctgtggaaggct

SEQ ID NO: 5804619 - DNA, 25 bp, Homo sapien
attaatttcataacctacagtgaga

SEQ ID NO: 5804620 - DNA, 25 bp, Homo sapien
ccaaggatccgccgccggggcgcgg

SEQ ID NO: 5804621 - DNA, 25 bp, Homo sapien
ttccagaagaaacagaccgtcagtc

SEQ ID NO: 5804622 - DNA, 25 bp, Homo sapien
cggacctcgacagcgaggagccggg

SEQ ID NO: 5804623 - DNA, 25 bp, Homo sapien
ctgcgggagggcacagcccctctca

SEQ ID NO: 5804624 - DNA, 25 bp, Homo sapien
ctcaagatccacaaagacaaaacca

SEQ ID NO: 5804625 - DNA, 25 bp, Homo sapien
gtgctaggttctaaagattgaatcc

SEQ ID NO: 5804626 - DNA, 25 bp, Homo sapien
tgggaaccgaattggtccatggaag

SEQ ID NO: 5804627 - DNA, 25 bp, Homo sapien
taatttcataacctacagtgagacc

SEQ ID NO: 5804628 - DNA, 25 bp, Homo sapien
agcatggccacatgggtcacgcctg

SEQ ID NO: 5804629 - DNA, 25 bp, Homo sapien
tcggcttgtggaccacgcccgccgg

SEQ ID NO: 5804630 - DNA, 25 bp, Homo sapien
acagtgagacccttggctcttccta

SEQ ID NO: 5804631 - DNA, 25 bp, Homo sapien
ggaagctgaggaatgtggacacatc

SEQ ID NO: 5804632 - DNA, 25 bp, Homo sapien
gcaggggcaaatcctccgcgcagtc

SEQ ID NO: 5804633 - DNA, 25 bp, Homo sapien
ggacacatccggcccttgaaagaac

SEQ ID NO: 5804634 - DNA, 25 bp, Homo sapien
tccacttcacagacctccttatggc

SEQ ID NO: 5804635 - DNA, 25 bp, Homo sapien
ctgcaggtggtggcactcgggtctc

SEQ ID NO: 5804636 - DNA, 25 bp, Homo sapien
cagttttgaaatctctgaggagcct

SEQ ID NO: 5804637 - DNA, 25 bp, Homo sapien
taacaaaacagttcttgggattgaa

SEQ ID NO: 5804638 - DNA, 25 bp, Homo sapien
gatgagcctcatgttttaacaaaac

SEQ ID NO: 5804639 - DNA, 25 bp, Homo sapien
ttcttcctctccagcccacaagtgg

SEQ ID NO: 5804640 - DNA, 25 bp, Homo sapien
gcaggtgggacagtggttccagctc

SEQ ID NO: 5804641 - DNA, 25 bp, Homo sapien
cactgccgcggggctgggcgagagc

SEQ ID NO: 5804642 - DNA, 25 bp, Homo sapien
gttaactgccatctggccgtctctc

SEQ ID NO: 5804643 - DNA, 25 bp, Homo sapien
tgccatctggccgtctctcagtttt

SEQ ID NO: 5804644 - DNA, 25 bp, Homo sapien
tgtggaccacgcccgccgggcccaa

SEQ ID NO: 5804645 - DNA, 25 bp, Homo sapien
gggcaaatcctccgcgcagtcctcc

SEQ ID NO: 5804646 - DNA, 25 bp, Homo sapien
gaatgactcacatttaccttgtgct

SEQ ID NO: 5804647 - DNA, 25 bp, Homo sapien
tggccctgtatcagccgcctgtgct

SEQ ID NO: 5804648 - DNA, 25 bp, Homo sapien
ggaattccaggcttggactggagtg

SEQ ID NO: 5804649 - DNA, 25 bp, Homo sapien
aagttcactcctaacccctccgcca

SEQ ID NO: 5804650 - DNA, 25 bp, Homo sapien
ttgcaaagctctctcctaacttcct

SEQ ID NO: 5804651 - DNA, 25 bp, Homo sapien
actggagtgaagccctcaagatcca

SEQ ID NO: 5804652 - DNA, 25 bp, Homo sapien
ggattctcaacgtgtgactgcctgc

SEQ ID NO: 5804653 - DNA, 25 bp, Homo sapien
tcccagaggtgaggaagaagttcac

SEQ ID NO: 5804654 - DNA, 25 bp, Homo sapien
gccctcccctcatgccagcaaagga

SEQ ID NO: 5804655 - DNA, 25 bp, Homo sapien
ccgtgacaccatggctgccgacagg

SEQ ID NO: 5804656 - DNA, 25 bp, Homo sapien
gggagcggcctcaggacccactgcc

SEQ ID NO: 5804657 - DNA, 25 bp, Homo sapien
ccacgcccgccgggcccaaggatcc

SEQ ID NO: 5804658 - DNA, 25 bp, Homo sapien
taacctacagtgagacccttggctc

SEQ ID NO: 5804659 - DNA, 25 bp, Homo sapien
ttccctgaaataccttaaaatgtcc

SEQ ID NO: 5804660 - DNA, 25 bp, Homo sapien
ctgcctgtcagcgtccctcccaggt

SEQ ID NO: 5804661 - DNA, 25 bp, Homo sapien
aacagaccgtcagtcacgggcttcc

SEQ ID NO: 5804662 - DNA, 25 bp, Homo sapien
tctctttttaaagcttagaggtaca

SEQ ID NO: 5804663 - DNA, 25 bp, Homo sapien
aggctcgctttaaagaagcccaaag

SEQ ID NO: 5804664 - DNA, 25 bp, Homo sapien
ctgtgctgcctggcgcggcgctgga

SEQ ID NO: 5804665 - DNA, 25 bp, Homo sapien
ccgctaacataaggatgatgagcag

SEQ ID NO: 5804666 - DNA, 25 bp, Homo sapien
cgtacagacaggaattccaggcttg

SEQ ID NO: 5804667 - DNA, 25 bp, Homo sapien
gtggacacatccggcccttgaaaga

SEQ ID NO: 5804668 - DNA, 25 bp, Homo sapien
gacttcggcttgtggaccacgcccg

SEQ ID NO: 5804669 - DNA, 25 bp, Homo sapien
ttatgtccacttttggtggatttcc

SEQ ID NO: 5804670 - DNA, 25 bp, Homo sapien
gcatggcgtggccctgtatcagccg

SEQ ID NO: 5804671 - DNA, 25 bp, Homo sapien
aggggccagcctcccgcgggcgccc

SEQ ID NO: 5804672 - DNA, 25 bp, Homo sapien
ccgctcactctgcacggctactcgg

SEQ ID NO: 5804673 - DNA, 25 bp, Homo sapien
atggcccctgcagttgaagctgttg

SEQ ID NO: 5804674 - DNA, 25 bp, Homo sapien
gtgccgctcactcagtaccagcggg

SEQ ID NO: 5804675 - DNA, 25 bp, Homo sapien
gagcagatgcaccgatggacttggc

SEQ ID NO: 5804676 - DNA, 25 bp, Homo sapien
catcggcgacgcggacgcggctgca

SEQ ID NO: 5804677 - DNA, 25 bp, Homo sapien
agcccacaagtggctctagtgagac

SEQ ID NO: 5804678 - DNA, 25 bp, Homo sapien
gggacttcggcttgtggaccacgcc

SEQ ID NO: 5804679 - DNA, 25 bp, Homo sapien
gcaggggccagcctcccgcgggcgc

SEQ ID NO: 5804680 - DNA, 25 bp, Homo sapien
tcctctacaccaacccttccgtcta

SEQ ID NO: 5804681 - DNA, 25 bp, Homo sapien
aaccagttatgtccacttttggtgg

SEQ ID NO: 5804682 - DNA, 25 bp, Homo sapien
ccaaggggttcagctattcctgact

SEQ ID NO: 5804683 - DNA, 25 bp, Homo sapien
gtgtgcttatccaaggggttcagct

SEQ ID NO: 5804684 - DNA, 25 bp, Homo sapien
tcgcgcaggggccagcctcccgcgg

SEQ ID NO: 5804685 - DNA, 25 bp, Homo sapien
agcctgtggaaggctcctgcgttcg

SEQ ID NO: 5804686 - DNA, 25 bp, Homo sapien
acttcacggcttgcatgtttgattt

SEQ ID NO: 5804687 - DNA, 25 bp, Homo sapien
gagccgggcacgggcggcgccgcct

SEQ ID NO: 5804688 - DNA, 25 bp, Homo sapien
atggaagctgaggaatgtggacaca

SEQ ID NO: 5804689 - DNA, 25 bp, Homo sapien
gggcacagcccctctcaaagctgtc

SEQ ID NO: 5804690 - DNA, 25 bp, Homo sapien
aggcagttcattttctttgcaaagc

SEQ ID NO: 5804691 - DNA, 25 bp, Homo sapien
cacacccagctcagcctcaagcatc

SEQ ID NO: 5804692 - DNA, 25 bp, Homo sapien
ctggtgccttcacacgtttgagggg

SEQ ID NO: 5804693 - DNA, 25 bp, Homo sapien
acttggcacacccagctcagcctca

SEQ ID NO: 5804694 - DNA, 25 bp, Homo sapien
gtgggacagtggttccagctccgac

SEQ ID NO: 5804695 - DNA, 25 bp, Homo sapien
ctcttcctacaaatggcccctgcag

SEQ ID NO: 5804696 - DNA, 25 bp, Homo sapien
cagctattcctgacttcacggcttg

SEQ ID NO: 5804697 - DNA, 25 bp, Homo sapien
ctgaaataccttaaaatgtcctcta

SEQ ID NO: 5804698 - DNA, 25 bp, Homo sapien
tcgctttaaagaagcccaaagcgtg

SEQ ID NO: 5804699 - DNA, 25 bp, Homo sapien
gtgcaggtgggacagtggttccagc

SEQ ID NO: 5804700 - DNA, 25 bp, Homo sapien
ggtcttcgtctctttttaaagctta

SEQ ID NO: 5804701 - DNA, 25 bp, Homo sapien
cgggattccggccgggacgtgccgc

SEQ ID NO: 5804702 - DNA, 25 bp, Homo sapien
tggaccacgcccgccgggcccaagg

SEQ ID NO: 5804703 - DNA, 25 bp, Homo sapien
tgagcacttgattaatttcataacc

SEQ ID NO: 5804704 - DNA, 25 bp, Homo sapien
tgaggaatgtggacacatccggccc

SEQ ID NO: 5804705 - DNA, 25 bp, Homo sapien
ggcacgggcggcgccgcctcgcgca

SEQ ID NO: 5804706 - DNA, 25 bp, Homo sapien
agatgcaccgatggacttggcacac

SEQ ID NO: 5804707 - DNA, 25 bp, Homo sapien
gttgggaaccgaattggtccatgga

SEQ ID NO: 5804708 - DNA, 25 bp, Homo sapien
cagagccaccagacgtgcaggtggg

SEQ ID NO: 5804709 - DNA, 25 bp, Homo sapien
attgaatccacattttgttactaat

SEQ ID NO: 5804710 - DNA, 25 bp, Homo sapien
cgctccgacgtggcggtgccgctca

SEQ ID NO: 5804711 - DNA, 25 bp, Homo sapien
agcacaggcggctgatacagggcca

SEQ ID NO: 5804712 - DNA, 25 bp, Homo sapien
ctcactagagccacttgtgggctgg

SEQ ID NO: 5804713 - DNA, 25 bp, Homo sapien
gggcttcactccagtccaagcctgg

SEQ ID NO: 5804714 - DNA, 25 bp, Homo sapien
caggggcccatgccatgctctcgcc

SEQ ID NO: 5804715 - DNA, 25 bp, Homo sapien
cattcctcagcttccatggaccaat

SEQ ID NO: 5804716 - DNA, 25 bp, Homo sapien
gggaggctggcccctgcgcgaggcg

SEQ ID NO: 5804717 - DNA, 25 bp, Homo sapien
gacggtctgtttcttctggaaattt

SEQ ID NO: 5804718 - DNA, 25 bp, Homo sapien
taaggtatttcagggaatgagacaa

SEQ ID NO: 5804719 - DNA, 25 bp, Homo sapien
tctaagctttaaaaagagacgaaga

SEQ ID NO: 5804720 - DNA, 25 bp, Homo sapien
atcaaacatgcaagccgtgaagtca

SEQ ID NO: 5804721 - DNA, 25 bp, Homo sapien
cctgggaaatccaccaaaagtggac

SEQ ID NO: 5804722 - DNA, 25 bp, Homo sapien
aagtcccgctggtactgagtgagcg

SEQ ID NO: 5804723 - DNA, 25 bp, Homo sapien
gagtgagcggcacgtcccggccgga

SEQ ID NO: 5804724 - DNA, 25 bp, Homo sapien
acacgttgagaatccggggagctga

SEQ ID NO: 5804725 - DNA, 25 bp, Homo sapien
gggctagcacctgggagggacgctg

SEQ ID NO: 5804726 - DNA, 25 bp, Homo sapien
gaggaagaaagatccaaagggaaat

SEQ ID NO: 5804727 - DNA, 25 bp, Homo sapien
tgtacatgtgagcagggtagacgga

SEQ ID NO: 5804728 - DNA, 25 bp, Homo sapien
acctgggagggacgctgacaggcag

SEQ ID NO: 5804729 - DNA, 25 bp, Homo sapien
catgtgagcagggtagacggaaggg

SEQ ID NO: 5804730 - DNA, 25 bp, Homo sapien
ctgtgcctgccagggctagcacctg

SEQ ID NO: 5804731 - DNA, 25 bp, Homo sapien
tccggggagctgaggcctgaaagat

SEQ ID NO: 5804732 - DNA, 25 bp, Homo sapien
cgcgaggcggcgccgcccgtgcccg

SEQ ID NO: 5804733 - DNA, 25 bp, Homo sapien
gtgactgacggtctgtttcttctgg

SEQ ID NO: 5804734 - DNA, 25 bp, Homo sapien
ggcagccatggtgtcacggtgcagg

SEQ ID NO: 5804735 - DNA, 25 bp, Homo sapien
gctcctcgctgtcgaggtccgagta

SEQ ID NO: 5804736 - DNA, 25 bp, Homo sapien
tttggccctggtgacagctttgaga

SEQ ID NO: 5804737 - DNA, 25 bp, Homo sapien
atgagtcatgcaggtgacggcccaa

SEQ ID NO: 5804738 - DNA, 25 bp, Homo sapien
gacaggcagtcggagctggaaccac

SEQ ID NO: 5804739 - DNA, 25 bp, Homo sapien
aatccggggagctgaggcctgaaag

SEQ ID NO: 5804740 - DNA, 25 bp, Homo sapien
cccgtcactgtacatgtgagcaggg

SEQ ID NO: 5804741 - DNA, 25 bp, Homo sapien
ttgtgggctggagaggaagaaagat

SEQ ID NO: 5804742 - DNA, 25 bp, Homo sapien
ttgggcccggcgggcgtggtccaca

SEQ ID NO: 5804743 - DNA, 25 bp, Homo sapien
gtgcagagtgagcggcaccgccacg

SEQ ID NO: 5804744 - DNA, 25 bp, Homo sapien
tgaagactgtcctgagcttgtacct

SEQ ID NO: 5804745 - DNA, 25 bp, Homo sapien
gagctttgcaaagaaaatgaactgc

SEQ ID NO: 5804746 - DNA, 25 bp, Homo sapien
gaaattaatcaagtgctcacgcatc

SEQ ID NO: 5804747 - DNA, 25 bp, Homo sapien
tcctgtctgtacgacgtggtcactg

SEQ ID NO: 5804748 - DNA, 25 bp, Homo sapien
ggagggctgtgcctgccagggctag

SEQ ID NO: 5804749 - DNA, 25 bp, Homo sapien
cacagacacccagcaggcagcctct

SEQ ID NO: 5804750 - DNA, 25 bp, Homo sapien
ccagtccaagcctggaattcctgtc

SEQ ID NO: 5804751 - DNA, 25 bp, Homo sapien
cttctggaaatttcctcctggatac

SEQ ID NO: 5804752 - DNA, 25 bp, Homo sapien
agttaggagagagctttgcaaagaa

SEQ ID NO: 5804753 - DNA, 25 bp, Homo sapien
gtatttcagggaatgagacaaatgc

SEQ ID NO: 5804754 - DNA, 25 bp, Homo sapien
cccgcaggggcccatgccatgctct

SEQ ID NO: 5804755 - DNA, 25 bp, Homo sapien
gtcattcaatcccaagaactgtttt

SEQ ID NO: 5804756 - DNA, 25 bp, Homo sapien
gttccccgtcactgtacatgtgagc

SEQ ID NO: 5804757 - DNA, 25 bp, Homo sapien
atgaggggagggctgtgcctgccag

SEQ ID NO: 5804758 - DNA, 25 bp, Homo sapien
tttaatctcatttccacagacaccc

SEQ ID NO: 5804759 - DNA, 25 bp, Homo sapien
ctgtcccatcccgaagtgtgggttg

SEQ ID NO: 5804760 - DNA, 25 bp, Homo sapien
tgtagaggacattttaaggtatttc

SEQ ID NO: 5804761 - DNA, 25 bp, Homo sapien
ggattcaatctttagaacctagcac

SEQ ID NO: 5804762 - DNA, 25 bp, Homo sapien
atgagacaaatgccaccttcccaaa

SEQ ID NO: 5804763 - DNA, 25 bp, Homo sapien
acaggcttctcaagaggatgcttga

SEQ ID NO: 5804764 - DNA, 25 bp, Homo sapien
agcagggtagacggaagggttggtg

SEQ ID NO: 5804765 - DNA, 25 bp, Homo sapien
cccctcaaacgtgtgaaggcaccag

SEQ ID NO: 5804766 - DNA, 25 bp, Homo sapien
aagcccgtgactgacggtctgtttc

SEQ ID NO: 5804767 - DNA, 25 bp, Homo sapien
tggagaggaagaaagatccaaaggg

SEQ ID NO: 5804768 - DNA, 25 bp, Homo sapien
ttctcaagaggatgcttgaggctga

SEQ ID NO: 5804769 - DNA, 25 bp, Homo sapien
gtcacggtgcaggcagtcacacgtt

SEQ ID NO: 5804770 - DNA, 25 bp, Homo sapien
tcccgaagtgtgggttgtgatgact

SEQ ID NO: 5804771 - DNA, 25 bp, Homo sapien
ctgtcctgagcttgtacctctaagc

SEQ ID NO: 5804772 - DNA, 25 bp, Homo sapien
aggggccatttgtaggaagagccaa

SEQ ID NO: 5804773 - DNA, 25 bp, Homo sapien
ctcgctgtcgaggtccgagtagccg

SEQ ID NO: 5804774 - DNA, 25 bp, Homo sapien
aggatgcttgaggctgagctgggtg

SEQ ID NO: 5804775 - DNA, 25 bp, Homo sapien
agcacaaggtaaatgtgagtcattc

SEQ ID NO: 5804776 - DNA, 25 bp, Homo sapien
gatcttgagggcttcactccagtcc

SEQ ID NO: 5804777 - DNA, 25 bp, Homo sapien
tggtccacaagccgaagtcccgctg

SEQ ID NO: 5804778 - DNA, 25 bp, Homo sapien
ggcgccgcccgtgcccggctcctcg

SEQ ID NO: 5804779 - DNA, 25 bp, Homo sapien
gctggaatttacggaggaagttagg

SEQ ID NO: 5804780 - DNA, 25 bp, Homo sapien
atgctggctggaatttacggaggaa

SEQ ID NO: 5804781 - DNA, 25 bp, Homo sapien
gctcctcagagatttcaaaactgag

SEQ ID NO: 5804782 - DNA, 25 bp, Homo sapien
tccagttctcagccagtgtgtatga

SEQ ID NO: 5804783 - DNA, 25 bp, Homo sapien
tggccctggtgacagctttgagagg

SEQ ID NO: 5804784 - DNA, 25 bp, Homo sapien
tctttcaagggccggatgtgtccac

SEQ ID NO: 5804785 - DNA, 25 bp, Homo sapien
cctggatactcagcatcaccatgag

SEQ ID NO: 5804786 - DNA, 25 bp, Homo sapien
gacccctcaaacgtgtgaaggcacc

SEQ ID NO: 5804787 - DNA, 25 bp, Homo sapien
tttgttaaaacatgaggctcatctt

SEQ ID NO: 5804788 - DNA, 25 bp, Homo sapien
agcggcaccgccacgtcggagcggt

SEQ ID NO: 5804789 - DNA, 25 bp, Homo sapien
tcttcaaaaggtggtgagttccccg

SEQ ID NO: 5804790 - DNA, 25 bp, Homo sapien
caaaaggtggtgagttccccgtcac

SEQ ID NO: 5804791 - DNA, 25 bp, Homo sapien
aggactgcgcggaggatttgcccct

SEQ ID NO: 5804792 - DNA, 25 bp, Homo sapien
ccgagtagccgtgcagagtgagcgg

SEQ ID NO: 5804793 - DNA, 25 bp, Homo sapien
gtcggagctggaaccactgtcccac

SEQ ID NO: 5804794 - DNA, 25 bp, Homo sapien
aaatgtggattcaatctttagaacc

SEQ ID NO: 5804795 - DNA, 25 bp, Homo sapien
gctggagaggaagaaagatccaaag

SEQ ID NO: 5804796 - DNA, 25 bp, Homo sapien
agtgccctgctcatcatccttatgt

SEQ ID NO: 5804797 - DNA, 25 bp, Homo sapien
tggttttgtctttgtggatcttgag

SEQ ID NO: 5804798 - DNA, 25 bp, Homo sapien
gtgagtcattcaatcccaagaactg

SEQ ID NO: 5804799 - DNA, 25 bp, Homo sapien
ggaggaagttaggagagagctttgc

SEQ ID NO: 5804800 - DNA, 25 bp, Homo sapien
caaggtaaatgtgagtcattcaatc

SEQ ID NO: 5804801 - DNA, 25 bp, Homo sapien
atagctgaaccccttggataagcac

SEQ ID NO: 5804802 - DNA, 25 bp, Homo sapien
taatctcatttccacagacacccag

SEQ ID NO: 5804803 - DNA, 25 bp, Homo sapien
ttaaatgctcgtctcactagagcca

SEQ ID NO: 5804804 - DNA, 25 bp, Homo sapien
aggcagtcacacgttgagaatccgg

SEQ ID NO: 5804805 - DNA, 25 bp, Homo sapien
cgcccgtgcccggctcctcgctgtc

SEQ ID NO: 5804806 - DNA, 25 bp, Homo sapien
tgtgaagtggaagcccgtgactgac

SEQ ID NO: 5804807 - DNA, 25 bp, Homo sapien
ttcagggaatgagacaaatgccacc

SEQ ID NO: 5804808 - DNA, 25 bp, Homo sapien
gccatttgtaggaagagccaagggt

SEQ ID NO: 5804809 - DNA, 25 bp, Homo sapien
atgccaccttcccaaaaacagttcc

SEQ ID NO: 5804810 - DNA, 25 bp, Homo sapien
catgcaagccgtgaagtcaggaata

SEQ ID NO: 5804811 - DNA, 25 bp, Homo sapien
cctgagcttgtacctctaagcttta

SEQ ID NO: 5804812 - DNA, 25 bp, Homo sapien
agaaaaatcaaacatgcaagccgtg

SEQ ID NO: 5804813 - DNA, 25 bp, Homo sapien
aggcagcctcttttctcttagaaaa

SEQ ID NO: 5804814 - DNA, 25 bp, Homo sapien
cgtcgccgatgggcagcacgtagac

SEQ ID NO: 5804815 - DNA, 25 bp, Homo sapien
gccagatggcagttaacgaacgcag

SEQ ID NO: 5804816 - DNA, 25 bp, Homo sapien
gacggaagggttggtgtagaggaca

SEQ ID NO: 5804817 - DNA, 25 bp, Homo sapien
cccacctgcacgtctggtggctctg

SEQ ID NO: 5804818 - DNA, 25 bp, Homo sapien
gaagggttggtgtagaggacatttt

SEQ ID NO: 5804819 - DNA, 25 bp, Homo sapien
gatgtgtccacattcctcagcttcc

SEQ ID NO: 5804820 - DNA, 25 bp, Homo sapien
gggtgtgccaagtccatcggtgcat

SEQ ID NO: 5804821 - DNA, 25 bp, Homo sapien
cccatgccatgctctcgcccagccc

SEQ ID NO: 5804822 - DNA, 25 bp, Homo sapien
tcaaacgtgtgaaggcaccaggcgt

SEQ ID NO: 5804823 - DNA, 25 bp, Homo sapien
tggaatttacggaggaagttaggag

SEQ ID NO: 5804824 - DNA, 25 bp, Homo sapien
aggaggtctgtgaagtggaagcccg

SEQ ID NO: 5804825 - DNA, 25 bp, Homo sapien
aggagagagctttgcaaagaaaatg

SEQ ID NO: 5804826 - DNA, 25 bp, Homo sapien
acctggaagccggccccagggctgc

SEQ ID NO: 5804827 - DNA, 25 bp, Homo sapien
gtcactgctgcagccgcgtccgcgt

SEQ ID NO: 5804828 - DNA, 25 bp, Homo sapien
gacgtggtcactgctgcagccgcgt

SEQ ID NO: 5804829 - DNA, 25 bp, Homo sapien
atcaccatgagtcatgcaggtgacg

SEQ ID NO: 5804830 - DNA, 25 bp, Homo sapien
agtccatcggtgcatctgctccaca

SEQ ID NO: 5804831 - DNA, 25 bp, Homo sapien
ccctgctcatcatccttatgttagc

SEQ ID NO: 5804832 - DNA, 25 bp, Homo sapien
gcggaggggttaggagtgaacttct

SEQ ID NO: 5804833 - DNA, 25 bp, Homo sapien
gccggatgtgtccacattcctcagc

SEQ ID NO: 5804834 - DNA, 25 bp, Homo sapien
cacgctttgggcttctttaaagcga

SEQ ID NO: 5804835 - DNA, 25 bp, Homo sapien
ttagaaaaatcaaacatgcaagccg

SEQ ID NO: 5804836 - DNA, 25 bp, Homo sapien
gcttcactccagtccaagcctggaa

SEQ ID NO: 5804837 - DNA, 25 bp, Homo sapien
gagagctttgcaaagaaaatgaact

SEQ ID NO: 5804838 - DNA, 25 bp, Homo sapien
gcagcctcttttctcttagaaaaat

SEQ ID NO: 5804839 - DNA, 25 bp, Homo sapien
cgtctggtggctctgagacccgagt

SEQ ID NO: 5804840 - DNA, 25 bp, Homo sapien
gggcgccgggcgcaggtggcgcgga

SEQ ID NO: 5804841 - DNA, 25 bp, Homo sapien
caagggtctcactgtaggttatgaa

SEQ ID NO: 5804842 - DNA, 25 bp, Homo sapien
gctcatcatccttatgttagcggga

SEQ ID NO: 5804843 - DNA, 25 bp, Homo sapien
taggttatgaaattaatcaagtgct

SEQ ID NO: 5804844 - DNA, 25 bp, Homo sapien
tttgtctttgtggatcttgagggct

SEQ ID NO: 5804845 - DNA, 25 bp, Homo sapien
aagtgctcacgcatcctgggaaatc

SEQ ID NO: 5804846 - DNA, 25 bp, Homo sapien
gccgatgggcagcacgtagaccccg

SEQ ID NO: 5804847 - DNA, 25 bp, Homo sapien
gcaggggccatttgtaggaagagcc

SEQ ID NO: 5804848 - DNA, 25 bp, Homo sapien
gtaacaaaatgtggattcaatcttt

SEQ ID NO: 5804849 - DNA, 25 bp, Homo sapien
gcgggcgccgggcgcaggtggcgcg

SEQ ID NO: 5804850 - DNA, 25 bp, Homo sapien
gggctgctgtcccatcccgaagtgt

SEQ ID NO: 5804851 - DNA, 25 bp, Homo sapien
aatcccgggcgcccgcgggaggctg

SEQ ID NO: 5804852 - DNA, 25 bp, Homo sapien
cggtctgtttcttctggaaatttcc

SEQ ID NO: 5804853 - DNA, 25 bp, Homo sapien
ggaagccggccccagggctgctgtc

SEQ ID NO: 5804854 - DNA, 25 bp, Homo sapien
caagaactgttttgttaaaacatga

SEQ ID NO: 5804855 - DNA, 25 bp, Homo sapien
gctgagctgggtgtgccaagtccat

SEQ ID NO: 5804856 - DNA, 25 bp, Homo sapien
taagcacacgctttgggcttcttta

SEQ ID NO: 5804857 - DNA, 25 bp, Homo sapien
ctgagattgtacagtttttaatctc

SEQ ID NO: 5804858 - DNA, 25 bp, Homo sapien
tagacggaagggttggtgtagagga

SEQ ID NO: 5804859 - DNA, 25 bp, Homo sapien
aggatttgcccctgcggccgcccgc

SEQ ID NO: 5804860 - DNA, 25 bp, Homo sapien
agagccacttgtgggctggagagga

SEQ ID NO: 5804861 - DNA, 25 bp, Homo sapien
ctgtcctgtcggcagccatggtgtc

SEQ ID NO: 5804862 - DNA, 25 bp, Homo sapien
ctttaaagcgagcctctcatcaaga

SEQ ID NO: 5804863 - DNA, 25 bp, Homo sapien
gggaatgagacaaatgccaccttcc

SEQ ID NO: 5804864 - DNA, 25 bp, Homo sapien
acttgtgggctggagaggaagaaag

SEQ ID NO: 5804865 - DNA, 25 bp, Homo sapien
cgctgacaggcagtcggagctggaa

SEQ ID NO: 5804866 - DNA, 25 bp, Homo sapien
gtgcctgccagggctagcacctggg

SEQ ID NO: 5804867 - DNA, 25 bp, Homo sapien
ttagcgggaaaatcattagtaacaa

SEQ ID NO: 5804868 - DNA, 25 bp, Homo sapien
atgctctcgcccagccccgcggcag

SEQ ID NO: 5804869 - DNA, 25 bp, Homo sapien
tcaagggccggatgtgtccacattc

SEQ ID NO: 5804870 - DNA, 25 bp, Homo sapien
aaaacagttccagttctcagccagt

SEQ ID NO: 5804871 - DNA, 25 bp, Homo sapien
gggagggacgctgacaggcagtcgg

SEQ ID NO: 5804872 - DNA, 25 bp, Homo sapien
tgtccacattcctcagcttccatgg

SEQ ID NO: 5804873 - DNA, 25 bp, Homo sapien
cccgagtgccaccacctgcagctta

SEQ ID NO: 5804874 - DNA, 25 bp, Homo sapien
gtcccgctggtactgagtgagcggc

SEQ ID NO: 5804875 - DNA, 25 bp, Homo sapien
agagcatttcctttgctggcatgag

SEQ ID NO: 5804876 - DNA, 25 bp, Homo sapien
agccccgcggcagtgggtcctgagg

SEQ ID NO: 5804877 - DNA, 25 bp, Homo sapien
tctgctccacaccagcactttggcc

SEQ ID NO: 5804878 - DNA, 25 bp, Homo sapien
cgtggtccacaagccgaagtcccgc

SEQ ID NO: 5804879 - DNA, 25 bp, Homo sapien
caagcctggaattcctgtctgtacg

SEQ ID NO: 5804880 - DNA, 25 bp, Homo sapien
taggaagagccaagggtctcactgt

SEQ ID NO: 5804881 - DNA, 25 bp, Homo sapien
gaccccgcgggcgccgggcgcaggt

SEQ ID NO: 5804882 - DNA, 25 bp, Homo sapien
tcaggctcctcagagatttcaaaac

SEQ ID NO: 5804883 - DNA, 25 bp, Homo sapien
gcactttggccctggtgacagcttt

SEQ ID NO: 5804884 - DNA, 25 bp, Homo sapien
cccctgcgcgaggcggcgccgcccg

SEQ ID NO: 5804885 - DNA, 25 bp, Homo sapien
cacggtgcaggcagtcacacgttga

SEQ ID NO: 5804886 - DNA, 25 bp, Homo sapien
cagggtagacggaagggttggtgta

SEQ ID NO: 5804887 - DNA, 25 bp, Homo sapien
gacggccagatggcagttaacgaac

SEQ ID NO: 5804888 - DNA, 25 bp, Homo sapien
acggcccaagattccaacagcttca

SEQ ID NO: 5804889 - DNA, 25 bp, Homo sapien
ctgacggtctgtttcttctggaaat

SEQ ID NO: 5804890 - DNA, 25 bp, Homo sapien
gaactgcctcttcaaaaggtggtga

SEQ ID NO: 5804891 - DNA, 25 bp, Homo sapien
gtgtcacggtgcaggcagtcacacg

SEQ ID NO: 5804892 - DNA, 25 bp, Homo sapien
gtacgacgtggtcactgctgcagcc

SEQ ID NO: 5804893 - DNA, 25 bp, Homo sapien
aggtccgagtagccgtgcagagtga

SEQ ID NO: 5804894 - DNA, 25 bp, Homo sapien
caggtgacggcccaagattccaaca

SEQ ID NO: 5804895 - DNA, 25 bp, Homo sapien
ctcagcatcaccatgagtcatgcag

SEQ ID NO: 5804896 - DNA, 25 bp, Homo sapien
tagaggacattttaaggtatttcag

SEQ ID NO: 5804897 - DNA, 25 bp, Homo sapien
agcacgtagaccccgcgggcgccgg

SEQ ID NO: 5804898 - DNA, 25 bp, Homo sapien
agccctgtcctgtcggcagccatgg

SEQ ID NO: 5804899 - DNA, 25 bp, Homo sapien
gccaagtccatcggtgcatctgctc

SEQ ID NO: 5804900 - DNA, 25 bp, Homo sapien
aggagtgaacttcttcctcacctct

SEQ ID NO: 5804901 - DNA, 25 bp, Homo sapien
agttaacgaacgcaggagccttcca

SEQ ID NO: 5804902 - DNA, 25 bp, Homo sapien
tggaaatttcctcctggatactcag

SEQ ID NO: 5804903 - DNA, 25 bp, Homo sapien
cggtgcaggcagtcacacgttgaga

SEQ ID NO: 5804904 - DNA, 25 bp, Homo sapien
tcctcagagatttcaaaactgagag

SEQ ID NO: 5804905 - DNA, 25 bp, Homo sapien
tttcctcctggatactcagcatcac

SEQ ID NO: 5804906 - DNA, 25 bp, Homo sapien
ctgcaggggccatttgtaggaagag

SEQ ID NO: 5804907 - DNA, 25 bp, Homo sapien
ttaggagtgaacttcttcctcacct

SEQ ID NO: 5804908 - DNA, 25 bp, Homo sapien
agggttggtgtagaggacattttaa

SEQ ID NO: 5804909 - DNA, 25 bp, Homo sapien
agagtgagcggcaccgccacgtcgg

SEQ ID NO: 5804910 - DNA, 25 bp, Homo sapien
gtagccgtgcagagtgagcggcacc

SEQ ID NO: 5804911 - DNA, 25 bp, Homo sapien
ggcggcggatccttgggcccggcgg

SEQ ID NO: 5804912 - DNA, 25 bp, Homo sapien
ctccacaccagcactttggccctgg

SEQ ID NO: 5804913 - DNA, 25 bp, Homo sapien
gcaccaggcgtgacccatgtggcca

SEQ ID NO: 5804914 - DNA, 25 bp, Homo sapien
aatttcctcctggatactcagcatc

SEQ ID NO: 5804915 - DNA, 25 bp, Homo sapien
atgtggccatgctggctggaattta

SEQ ID NO: 5804916 - DNA, 25 bp, Homo sapien
cgctgtcgaggtccgagtagccgtg

SEQ ID NO: 5804917 - DNA, 25 bp, Homo sapien
ccgcgggaggctggcccctgcgcga

SEQ ID NO: 5804918 - DNA, 25 bp, Homo sapien
ccagccctgtcctgtcggcagccat

SEQ ID NO: 5804919 - DNA, 25 bp, Homo sapien
ttactgaagactgtcctgagcttgt

SEQ ID NO: 5804920 - DNA, 25 bp, Homo sapien
catttcctttgctggcatgagggga

SEQ ID NO: 5804921 - DNA, 25 bp, Homo sapien
acagcttcaactgcaggggccattt

SEQ ID NO: 5804922 - DNA, 25 bp, Homo sapien
agaggggctgtgccctcccgcaggg

SEQ ID NO: 5804923 - DNA, 25 bp, Homo sapien
catttgtaggaagagccaagggtct

SEQ ID NO: 5804924 - DNA, 25 bp, Homo sapien
gttccagttctcagccagtgtgtat

SEQ ID NO: 5804925 - DNA, 25 bp, Homo sapien
tgcctcttcaaaaggtggtgagttc

SEQ ID NO: 5804926 - DNA, 25 bp, Homo sapien
cacgtctggtggctctgagacccga

SEQ ID NO: 5804927 - DNA, 25 bp, Homo sapien
ttgggcttctttaaagcgagcctct

SEQ ID NO: 5804928 - DNA, 25 bp, Homo sapien
gagcggtccagctggttccagcgcc

SEQ ID NO: 5804929 - DNA, 25 bp, Homo sapien
gccgcgccaggcagcacaggcggct

SEQ ID NO: 5804930 - DNA, 25 bp, Homo sapien
ctccagtccaagcctggaattcctg

SEQ ID NO: 5804931 - DNA, 25 bp, Homo sapien
aagggccggatgtgtccacattcct

SEQ ID NO: 5804932 - DNA, 25 bp, Homo sapien
ccaactgacttgatcctcaggctcc

SEQ ID NO: 5804933 - DNA, 25 bp, Homo sapien
cgccgcccgtgcccggctcctcgct

SEQ ID NO: 5804934 - DNA, 25 bp, Homo sapien
gtcgaggtccgagtagccgtgcaga

SEQ ID NO: 5804935 - DNA, 25 bp, Homo sapien
cagggctagcacctgggagggacgc

SEQ ID NO: 5804936 - DNA, 25 bp, Homo sapien
gggcttctttaaagcgagcctctca

SEQ ID NO: 5804937 - DNA, 25 bp, Homo sapien
ctgagtgagcggcacgtcccggccg

SEQ ID NO: 5804938 - DNA, 25 bp, Homo sapien
tgccatgctctcgcccagccccgcg

SEQ ID NO: 5804939 - DNA, 25 bp, Homo sapien
aactgacttgatcctcaggctcctc

SEQ ID NO: 5804940 - DNA, 25 bp, Homo sapien
gccccggcggcggatccttgggccc

SEQ ID NO: 5804941 - DNA, 25 bp, Homo sapien
accaaaagtggacataactggttct

SEQ ID NO: 5804942 - DNA, 25 bp, Homo sapien
gggccatttgtaggaagagccaagg

SEQ ID NO: 5804943 - DNA, 25 bp, Homo sapien
gttctcagccagtgtgtatgatagt

SEQ ID NO: 5804944 - DNA, 25 bp, Homo sapien
ggcccaagattccaacagcttcaac

SEQ ID NO: 5804945 - DNA, 25 bp, Homo sapien
ttcctcagcttccatggaccaattc

SEQ ID NO: 5804946 - DNA, 25 bp, Homo sapien
ttaaaacatgaggctcatcttggcc

SEQ ID NO: 5804947 - DNA, 25 bp, Homo sapien
agccttccacaggcttctcaagagg

SEQ ID NO: 5804948 - DNA, 25 bp, Homo sapien
tcgccgatgggcagcacgtagaccc

SEQ ID NO: 5804949 - DNA, 25 bp, Homo sapien
tagtaacaaaatgtggattcaatct

SEQ ID NO: 5804950 - DNA, 25 bp, Homo sapien
agccgtgcagagtgagcggcaccgc

SEQ ID NO: 5804951 - DNA, 25 bp, Homo sapien
tgcccggctcctcgctgtcgaggtc

SEQ ID NO: 5804952 - DNA, 25 bp, Homo sapien
gaaggcaccaggcgtgacccatgtg

SEQ ID NO: 5804953 - DNA, 25 bp, Homo sapien
ccacaaatttccttactgaagactg

SEQ ID NO: 5804954 - DNA, 25 bp, Homo sapien
acgttgagaatccggggagctgagg

SEQ ID NO: 5804955 - DNA, 25 bp, Homo sapien
gccagggctagcacctgggagggac

SEQ ID NO: 5804956 - DNA, 25 bp, Homo sapien
atgaaattaatcaagtgctcacgca

SEQ ID NO: 5804957 - DNA, 25 bp, Homo sapien
cccttggataagcacacgctttggg

SEQ ID NO: 5804958 - DNA, 25 bp, Homo sapien
ccgggcgcccgcgggaggctggccc

SEQ ID NO: 5804959 - DNA, 25 bp, Homo sapien
ggaatcccgggcgcccgcgggaggc

SEQ ID NO: 5804960 - DNA, 25 bp, Homo sapien
ctgcgcggaggatttgcccctgcgg

SEQ ID NO: 5804961 - DNA, 25 bp, Homo sapien
gcgccgcgccaggcagcacaggcgg

SEQ ID NO: 5804962 - DNA, 25 bp, Homo sapien
tgcaagccgtgaagtcaggaatagc

SEQ ID NO: 5804963 - DNA, 25 bp, Homo sapien
cagcactttggccctggtgacagct

SEQ ID NO: 5804964 - DNA, 25 bp, Homo sapien
cctggaattcctgtctgtacgacgt

SEQ ID NO: 5804965 - DNA, 25 bp, Homo sapien
cataactggttctttcaagggccgg

SEQ ID NO: 5804966 - DNA, 25 bp, Homo sapien
cggcaccgccacgtcggagcggtcc

SEQ ID NO: 5804967 - DNA, 25 bp, Homo sapien
tcacacgttgagaatccggggagct

SEQ ID NO: 5804968 - DNA, 25 bp, Homo sapien
cactccagtccaagcctggaattcc

SEQ ID NO: 5804969 - DNA, 25 bp, Homo sapien
ctcctggatactcagcatcaccatg

SEQ ID NO: 5804970 - DNA, 25 bp, Homo sapien
gaagttaggagagagctttgcaaag

SEQ ID NO: 5804971 - DNA, 25 bp, Homo sapien
gtccgagtagccgtgcagagtgagc

SEQ ID NO: 5804972 - DNA, 25 bp, Homo sapien
tgtaggttatgaaattaatcaagtg

SEQ ID NO: 5804973 - DNA, 25 bp, Homo sapien
ccacaagccgaagtcccgctggtac

SEQ ID NO: 5804974 - DNA, 25 bp, Homo sapien
tactgagtgagcggcacgtcccggc

SEQ ID NO: 5804975 - DNA, 25 bp, Homo sapien
ctcagagatttcaaaactgagagac

SEQ ID NO: 5804976 - DNA, 25 bp, Homo sapien
gatgactcgggctggttttgtcttt

SEQ ID NO: 5804977 - DNA, 25 bp, Homo sapien
cggggagctgaggcctgaaagatgg

SEQ ID NO: 5804978 - DNA, 25 bp, Homo sapien
cttatgttagcgggaaaatcattag

SEQ ID NO: 5804979 - DNA, 25 bp, Homo sapien
ggcgtgacccatgtggccatgctgg

SEQ ID NO: 5804980 - DNA, 25 bp, Homo sapien
taagctttaaaaagagacgaagacc

SEQ ID NO: 5804981 - DNA, 25 bp, Homo sapien
aaatttccttactgaagactgtcct

SEQ ID NO: 5804982 - DNA, 25 bp, Homo sapien
cattcaatcccaagaactgttttgt

SEQ ID NO: 5804983 - DNA, 25 bp, Homo sapien
gaggggttaggagtgaacttcttcc

SEQ ID NO: 5804984 - DNA, 25 bp, Homo sapien
gaccaattcggttcccaactgactt

SEQ ID NO: 5804985 - DNA, 25 bp, Homo sapien
atcctgggaaatccaccaaaagtgg

SEQ ID NO: 5804986 - DNA, 25 bp, Homo sapien
cgtagaccccgcgggcgccgggcgc

SEQ ID NO: 5804987 - DNA, 25 bp, Homo sapien
gggctggttttgtctttgtggatct

SEQ ID NO: 5804988 - DNA, 25 bp, Homo sapien
tccatcggtgcatctgctccacacc

SEQ ID NO: 5804989 - DNA, 25 bp, Homo sapien
tgatagtgccctgctcatcatcctt

SEQ ID NO: 5804990 - DNA, 25 bp, Homo sapien
cagccgcgtccgcgtcgccgatggg

SEQ ID NO: 5804991 - DNA, 25 bp, Homo sapien
gatggcggaggggttaggagtgaac

SEQ ID NO: 5804992 - DNA, 25 bp, Homo sapien
aggctgagctgggtgtgccaagtcc

SEQ ID NO: 5804993 - DNA, 25 bp, Homo sapien
acgcatcctgggaaatccaccaaaa

SEQ ID NO: 5804994 - DNA, 25 bp, Homo sapien
ggttggtgtagaggacattttaagg

SEQ ID NO: 5804995 - DNA, 25 bp, Homo sapien
gcgcggaggatttgcccctgcggcc

SEQ ID NO: 5804996 - DNA, 25 bp, Homo sapien
gagagagctttgcaaagaaaatgaa

SEQ ID NO: 5804997 - DNA, 25 bp, Homo sapien
ggcggctgatacagggccacgccat

SEQ ID NO: 5804998 - DNA, 25 bp, Homo sapien
gctagcacctgggagggacgctgac

SEQ ID NO: 5804999 - DNA, 25 bp, Homo sapien
gtgaagtcaggaatagctgaacccc

SEQ ID NO: 5805000 - DNA, 25 bp, Homo sapien
gtgtgaaggcaccaggcgtgaccca

SEQ ID NO: 5805001 - DNA, 25 bp, Homo sapien
aagaaaatgaactgcctcttcaaaa

SEQ ID NO: 5805002 - DNA, 25 bp, Homo sapien
ctgggtgtgccaagtccatcggtgc

SEQ ID NO: 5805003 - DNA, 25 bp, Homo sapien
gcaccgccacgtcggagcggtccag

SEQ ID NO: 5805004 - DNA, 25 bp, Homo sapien
ccatgctggctggaatttacggagg

SEQ ID NO: 5805005 - DNA, 25 bp, Homo sapien
tgcgcgaggcggcgccgcccgtgcc

SEQ ID NO: 5805006 - DNA, 25 bp, Homo sapien
gcatcctgggaaatccaccaaaagt

SEQ ID NO: 5805007 - DNA, 25 bp, Homo sapien
ggtgcatctgctccacaccagcact

SEQ ID NO: 5805008 - DNA, 25 bp, Homo sapien
catgcaggtgacggcccaagattcc

SEQ ID NO: 5805009 - DNA, 25 bp, Homo sapien
gagtcatgcaggtgacggcccaaga

SEQ ID NO: 5805010 - DNA, 25 bp, Homo sapien
gctggaaccactgtcccacctgcac

SEQ ID NO: 5805011 - DNA, 25 bp, Homo sapien
gccaagggtctcactgtaggttatg

SEQ ID NO: 5805012 - DNA, 25 bp, Homo sapien
cgcgtcgccgatgggcagcacgtag

SEQ ID NO: 5805013 - DNA, 25 bp, Homo sapien
acccatgtggccatgctggctggaa

SEQ ID NO: 5805014 - DNA, 25 bp, Homo sapien
gccaccttcccaaaaacagttccag

SEQ ID NO: 5805015 - DNA, 25 bp, Homo sapien
ggaagaaagatccaaagggaaatcc

SEQ ID NO: 5805016 - DNA, 25 bp, Homo sapien
gcccgcgggaggctggcccctgcgc

SEQ ID NO: 5805017 - DNA, 25 bp, Homo sapien
actggttctttcaagggccggatgt

SEQ ID NO: 5805018 - DNA, 25 bp, Homo sapien
cacattcctcagcttccatggacca

SEQ ID NO: 5805019 - DNA, 25 bp, Homo sapien
cgggcgtggtccacaagccgaagtc

SEQ ID NO: 5805020 - DNA, 25 bp, Homo sapien
ttcttctggaaatttcctcctggat

SEQ ID NO: 5805021 - DNA, 25 bp, Homo sapien
ggtggtgagttccccgtcactgtac

SEQ ID NO: 5805022 - DNA, 25 bp, Homo sapien
agtcaggaatagctgaaccccttgg

SEQ ID NO: 5805023 - DNA, 25 bp, Homo sapien
aactgagagacggccagatggcagt

SEQ ID NO: 5805024 - DNA, 25 bp, Homo sapien
cgggcgcaggtggcgcggaggactg

SEQ ID NO: 5805025 - DNA, 25 bp, Homo sapien
caaaatgtggattcaatctttagaa

SEQ ID NO: 5805026 - DNA, 25 bp, Homo sapien
caggagccttccacaggcttctcaa

SEQ ID NO: 5805027 - DNA, 25 bp, Homo sapien
tggtcactgctgcagccgcgtccgc

SEQ ID NO: 5805028 - DNA, 25 bp, Homo sapien
atccacaaatttccttactgaagac

SEQ ID NO: 5805029 - DNA, 25 bp, Homo sapien
gctgcagccgcgtccgcgtcgccga

SEQ ID NO: 5805030 - DNA, 25 bp, Homo sapien
cactagagccacttgtgggctggag

SEQ ID NO: 5805031 - DNA, 25 bp, Homo sapien
gctcacgcatcctgggaaatccacc

SEQ ID NO: 5805032 - DNA, 25 bp, Homo sapien
gggctggagaggaagaaagatccaa

SEQ ID NO: 5805033 - DNA, 25 bp, Homo sapien
aaatgtgagtcattcaatcccaaga

SEQ ID NO: 5805034 - DNA, 25 bp, Homo sapien
ctagagccacttgtgggctggagag

SEQ ID NO: 5805035 - DNA, 25 bp, Homo sapien
cggctcctcgctgtcgaggtccgag

SEQ ID NO: 5805036 - DNA, 25 bp, Homo sapien
aggggctgtgccctcccgcaggggc

SEQ ID NO: 5805037 - DNA, 25 bp, Homo sapien
gctgatacagggccacgccatgcca

SEQ ID NO: 5805038 - DNA, 25 bp, Homo sapien
gtgagttccccgtcactgtacatgt

SEQ ID NO: 5805039 - DNA, 25 bp, Homo sapien
tttcctttgctggcatgaggggagg

SEQ ID NO: 5805040 - DNA, 25 bp, Homo sapien
tttgtggatcttgagggcttcactc

SEQ ID NO: 5805041 - DNA, 25 bp, Homo sapien
gagagacggccagatggcagttaac

SEQ ID NO: 5805042 - DNA, 25 bp, Homo sapien
tgcttgaggctgagctgggtgtgcc

SEQ ID NO: 5805043 - DNA, 25 bp, Homo sapien
tctcttagaaaaatcaaacatgcaa

SEQ ID NO: 5805044 - DNA, 25 bp, Homo sapien
gagctgaggcctgaaagatggcgga

SEQ ID NO: 5805045 - DNA, 25 bp, Homo sapien
cccggctcctcgctgtcgaggtccg

SEQ ID NO: 5805046 - DNA, 25 bp, Homo sapien
gggacgctgacaggcagtcggagct

SEQ ID NO: 5805047 - DNA, 25 bp, Homo sapien
tggtggctctgagacccgagtgcca

SEQ ID NO: 5805048 - DNA, 25 bp, Homo sapien
tggatactcagcatcaccatgagtc

SEQ ID NO: 5805049 - DNA, 25 bp, Homo sapien
tccgcgtcgccgatgggcagcacgt

SEQ ID NO: 5805050 - DNA, 25 bp, Homo sapien
ctttgctggcatgaggggagggctg

SEQ ID NO: 5805051 - DNA, 25 bp, Homo sapien
ctgctcatcatccttatgttagcgg

SEQ ID NO: 5805052 - DNA, 25 bp, Homo sapien
ccagccccgcggcagtgggtcctga

SEQ ID NO: 5805053 - DNA, 25 bp, Homo sapien
tccttatgttagcgggaaaatcatt

SEQ ID NO: 5805054 - DNA, 25 bp, Homo sapien
ggtccagctggttccagcgccgcgc

SEQ ID NO: 5805055 - DNA, 25 bp, Homo sapien
aggctcatcttggccataaggaggt

SEQ ID NO: 5805056 - DNA, 25 bp, Homo sapien
aggcaccaggcgtgacccatgtggc

SEQ ID NO: 5805057 - DNA, 25 bp, Homo sapien
ttggtgtagaggacattttaaggta

SEQ ID NO: 5805058 - DNA, 25 bp, Homo sapien
gcacgtcccggccggaatcccgggc

SEQ ID NO: 5805059 - DNA, 25 bp, Homo sapien
gagatttcaaaactgagagacggcc

SEQ ID NO: 5805060 - DNA, 25 bp, Homo sapien
tgacggcccaagattccaacagctt

SEQ ID NO: 5805061 - DNA, 25 bp, Homo sapien
cctggtgacagctttgagaggggct

SEQ ID NO: 5805062 - DNA, 25 bp, Homo sapien
ctgagacccgagtgccaccacctgc

SEQ ID NO: 5805063 - DNA, 25 bp, Homo sapien
gtggctctgagacccgagtgccacc

SEQ ID NO: 5805064 - DNA, 25 bp, Homo sapien
agctgaaccccttggataagcacac

SEQ ID NO: 5805065 - DNA, 25 bp, Homo sapien
gggagctgaggcctgaaagatggcg

SEQ ID NO: 5805066 - DNA, 25 bp, Homo sapien
tccagcgccgcgccaggcagcacag

SEQ ID NO: 5805067 - DNA, 25 bp, Homo sapien
taactggttctttcaagggccggat

SEQ ID NO: 5805068 - DNA, 25 bp, Homo sapien
cgctttgggcttctttaaagcgagc

SEQ ID NO: 5805069 - DNA, 25 bp, Homo sapien
cctctaagctttaaaaagagacgaa

SEQ ID NO: 5805070 - DNA, 25 bp, Homo sapien
gaatagctgaaccccttggataagc

SEQ ID NO: 5805071 - DNA, 25 bp, Homo sapien
tgcattttagtaaaatctgagattg

SEQ ID NO: 5805072 - DNA, 25 bp, Homo sapien
gcgcccgcgggaggctggcccctgc

SEQ ID NO: 5805073 - DNA, 25 bp, Homo sapien
cctcaaacgtgtgaaggcaccaggc

SEQ ID NO: 5805074 - DNA, 25 bp, Homo sapien
cagtgggtcctgaggccgctcccca

SEQ ID NO: 5805075 - DNA, 25 bp, Homo sapien
gctggcatgaggggagggctgtgcc

SEQ ID NO: 5805076 - DNA, 25 bp, Homo sapien
tttgcaaagaaaatgaactgcctct

SEQ ID NO: 5805077 - DNA, 25 bp, Homo sapien
ctgtttcttctggaaatttcctcct

SEQ ID NO: 5805078 - DNA, 25 bp, Homo sapien
cgaagacccctcaaacgtgtgaagg

SEQ ID NO: 5805079 - DNA, 25 bp, Homo sapien
catcccgaagtgtgggttgtgatga

SEQ ID NO: 5805080 - DNA, 25 bp, Homo sapien
gccgaagtcccgctggtactgagtg

SEQ ID NO: 5805081 - DNA, 25 bp, Homo sapien
cgccacgtcggagcggtccagctgg

SEQ ID NO: 5805082 - DNA, 25 bp, Homo sapien
tctttgtggatcttgagggcttcac

SEQ ID NO: 5805083 - DNA, 25 bp, Homo sapien
tcagcttccatggaccaattcggtt

SEQ ID NO: 5805084 - DNA, 25 bp, Homo sapien
gcagttaacgaacgcaggagccttc

SEQ ID NO: 5805085 - DNA, 25 bp, Homo sapien
ggaggatttgcccctgcggccgccc

SEQ ID NO: 5805086 - DNA, 25 bp, Homo sapien
gtgggtcctgaggccgctccccagc

SEQ ID NO: 5805087 - DNA, 25 bp, Homo sapien
ccggcgggcgtggtccacaagccga

SEQ ID NO: 5805088 - DNA, 25 bp, Homo sapien
cttcctcacctctgggacctggaag

SEQ ID NO: 5805089 - DNA, 25 bp, Homo sapien
attcctgtctgtacgacgtggtcac

SEQ ID NO: 5805090 - DNA, 25 bp, Homo sapien
tcactgtaggttatgaaattaatca

SEQ ID NO: 5805091 - DNA, 25 bp, Homo sapien
gagttccccgtcactgtacatgtga

SEQ ID NO: 5805092 - DNA, 25 bp, Homo sapien
tcactgtacatgtgagcagggtaga

SEQ ID NO: 5805093 - DNA, 25 bp, Homo sapien
ctgacaggcagtcggagctggaacc

SEQ ID NO: 5805094 - DNA, 25 bp, Homo sapien
gcttctcaagaggatgcttgaggct

SEQ ID NO: 5805095 - DNA, 25 bp, Homo sapien
caccatgagtcatgcaggtgacggc

SEQ ID NO: 5805096 - DNA, 25 bp, Homo sapien
aggcagcacaggcggctgatacagg

SEQ ID NO: 5805097 - DNA, 25 bp, Homo sapien
tgggttgtgatgactcgggctggtt

SEQ ID NO: 5805098 - DNA, 25 bp, Homo sapien
ggtggcgcggaggactgcgcggagg

SEQ ID NO: 5805099 - DNA, 25 bp, Homo sapien
gacagctttgagaggggctgtgccc

SEQ ID NO: 5805100 - DNA, 25 bp, Homo sapien
cccagggctgctgtcccatcccgaa

SEQ ID NO: 5805101 - DNA, 25 bp, Homo sapien
ccgcgccccggcggcggatccttgg

SEQ ID NO: 5805102 - DNA, 25 bp, Homo sapien
gctgctgtcccatcccgaagtgtgg

SEQ ID NO: 5805103 - DNA, 25 bp, Homo sapien
ccacgtcggagcggtccagctggtt

SEQ ID NO: 5805104 - DNA, 25 bp, Homo sapien
cagggctgctgtcccatcccgaagt

SEQ ID NO: 5805105 - DNA, 25 bp, Homo sapien
ggaggactgcgcggaggatttgccc

SEQ ID NO: 5805106 - DNA, 25 bp, Homo sapien
ggccatgctggctggaatttacgga

SEQ ID NO: 5805107 - DNA, 25 bp, Homo sapien
cggagctggaaccactgtcccacct

SEQ ID NO: 5805108 - DNA, 25 bp, Homo sapien
cggatgtgtccacattcctcagctt

SEQ ID NO: 5805109 - DNA, 25 bp, Homo sapien
tgaagtggaagcccgtgactgacgg

SEQ ID NO: 5805110 - DNA, 25 bp, Homo sapien
tgttaaaacatgaggctcatcttgg

SEQ ID NO: 5805111 - DNA, 25 bp, Homo sapien
gaggacattttaaggtatttcaggg

SEQ ID NO: 5805112 - DNA, 25 bp, Homo sapien
cctctcatcaagagcatttcctttg

SEQ ID NO: 5805113 - DNA, 25 bp, Homo sapien
attagtaacaaaatgtggattcaat

SEQ ID NO: 5805114 - DNA, 25 bp, Homo sapien
tgaggctcatcttggccataaggag

SEQ ID NO: 5805115 - DNA, 25 bp, Homo sapien
actgaagactgtcctgagcttgtac

SEQ ID NO: 5805116 - DNA, 25 bp, Homo sapien
gcgccgggcgcaggtggcgcggagg

SEQ ID NO: 5805117 - DNA, 25 bp, Homo sapien
tcaaaactgagagacggccagatgg

SEQ ID NO: 5805118 - DNA, 25 bp, Homo sapien
tctgggacctggaagccggccccag

SEQ ID NO: 5805119 - DNA, 25 bp, Homo sapien
agtaaaatctgagattgtacagttt

SEQ ID NO: 5805120 - DNA, 25 bp, Homo sapien
cagatggcagttaacgaacgcagga

SEQ ID NO: 5805121 - DNA, 25 bp, Homo sapien
caagtccatcggtgcatctgctcca

SEQ ID NO: 5805122 - DNA, 25 bp, Homo sapien
gtgatgactcgggctggttttgtct

SEQ ID NO: 5805123 - DNA, 25 bp, Homo sapien
ccaccaaaagtggacataactggtt

SEQ ID NO: 5805124 - DNA, 25 bp, Homo sapien
acattttaaggtatttcagggaatg

SEQ ID NO: 5805125 - DNA, 25 bp, Homo sapien
ctgaaccccttggataagcacacgc

SEQ ID NO: 5805126 - DNA, 25 bp, Homo sapien
tggatcttgagggcttcactccagt

SEQ ID NO: 5805127 - DNA, 25 bp, Homo sapien
aactgttttgttaaaacatgaggct

SEQ ID NO: 5805128 - DNA, 25 bp, Homo sapien
cagagatttcaaaactgagagacgg

SEQ ID NO: 5805129 - DNA, 25 bp, Homo sapien
ggcagtcggagctggaaccactgtc

SEQ ID NO: 5805130 - DNA, 25 bp, Homo sapien
ctctgagacccgagtgccaccacct

SEQ ID NO: 5805131 - DNA, 25 bp, Homo sapien
tccaacagcttcaactgcaggggcc

SEQ ID NO: 5805132 - DNA, 25 bp, Homo sapien
ggaagcccgtgactgacggtctgtt

SEQ ID NO: 5805133 - DNA, 25 bp, Homo sapien
gacttgatcctcaggctcctcagag

SEQ ID NO: 5805134 - DNA, 25 bp, Homo sapien
cactgctgcagccgcgtccgcgtcg

SEQ ID NO: 5805135 - DNA, 25 bp, Homo sapien
ctggcccctgcgcgaggcggcgccg

SEQ ID NO: 5805136 - DNA, 25 bp, Homo sapien
gcagagtgagcggcaccgccacgtc

SEQ ID NO: 5805137 - DNA, 25 bp, Homo sapien
tggttctttcaagggccggatgtgt

SEQ ID NO: 5805138 - DNA, 25 bp, Homo sapien
gaattcctgtctgtacgacgtggtc

SEQ ID NO: 5805139 - DNA, 25 bp, Homo sapien
aatctttagaacctagcacaaggta

SEQ ID NO: 5805140 - DNA, 25 bp, Homo sapien
tggcatgaggggagggctgtgcctg

SEQ ID NO: 5805141 - DNA, 25 bp, Homo sapien
cagctttgagaggggctgtgccctc

SEQ ID NO: 5805142 - DNA, 25 bp, Homo sapien
aaaacatgaggctcatcttggccat

SEQ ID NO: 5805143 - DNA, 25 bp, Homo sapien
gagacaaatgccaccttcccaaaaa

SEQ ID NO: 5805144 - DNA, 25 bp, Homo sapien
cttgtacctctaagctttaaaaaga

SEQ ID NO: 5805145 - DNA, 25 bp, Homo sapien
ggagccttccacaggcttctcaaga

SEQ ID NO: 5805146 - DNA, 25 bp, Homo sapien
aagatccaaagggaaatccacaaat

SEQ ID NO: 5805147 - DNA, 25 bp, Homo sapien
gctggttccagcgccgcgccaggca

SEQ ID NO: 5805148 - DNA, 25 bp, Homo sapien
cctgaggccgctccccagccctgtc

SEQ ID NO: 5805149 - DNA, 25 bp, Homo sapien
acgtgtgaaggcaccaggcgtgacc

SEQ ID NO: 5805150 - DNA, 25 bp, Homo sapien
tgcagcttaaatgctcgtctcacta

SEQ ID NO: 5805151 - DNA, 25 bp, Homo sapien
aaatctgagattgtacagtttttaa

SEQ ID NO: 5805152 - DNA, 25 bp, Homo sapien
tccagctggttccagcgccgcgcca

SEQ ID NO: 5805153 - DNA, 25 bp, Homo sapien
aaatccacaaatttccttactgaag

SEQ ID NO: 5805154 - DNA, 25 bp, Homo sapien
gagaggaagaaagatccaaagggaa

SEQ ID NO: 5805155 - DNA, 25 bp, Homo sapien
agcctggaattcctgtctgtacgac

SEQ ID NO: 5805156 - DNA, 25 bp, Homo sapien
acgacgtggtcactgctgcagccgc

SEQ ID NO: 5805157 - DNA, 25 bp, Homo sapien
tcgtctcactagagccacttgtggg

SEQ ID NO: 5805158 - DNA, 25 bp, Homo sapien
gtcatgcaggtgacggcccaagatt

SEQ ID NO: 5805159 - DNA, 25 bp, Homo sapien
gtccgcgccccggcggcggatcctt

SEQ ID NO: 5805160 - DNA, 25 bp, Homo sapien
tttaaggtatttcagggaatgagac

SEQ ID NO: 5805161 - DNA, 25 bp, Homo sapien
gcttaaatgctcgtctcactagagc

SEQ ID NO: 5805162 - DNA, 25 bp, Homo sapien
gaaatttcctcctggatactcagca

SEQ ID NO: 5805163 - DNA, 25 bp, Homo sapien
gacgctgacaggcagtcggagctgg

SEQ ID NO: 5805164 - DNA, 25 bp, Homo sapien
tccccgtcactgtacatgtgagcag

SEQ ID NO: 5805165 - DNA, 25 bp, Homo sapien
cccaagattccaacagcttcaactg

SEQ ID NO: 5805166 - DNA, 25 bp, Homo sapien
ggttgtgatgactcgggctggtttt

SEQ ID NO: 5805167 - DNA, 25 bp, Homo sapien
ttaacgaacgcaggagccttccaca

SEQ ID NO: 5805168 - DNA, 25 bp, Homo sapien
gggtcctgaggccgctccccagccc

SEQ ID NO: 5805169 - DNA, 25 bp, Homo sapien
gacataactggttctttcaagggcc

SEQ ID NO: 5805170 - DNA, 25 bp, Homo sapien
ggaagagccaagggtctcactgtag

SEQ ID NO: 5805171 - DNA, 25 bp, Homo sapien
agattccaacagcttcaactgcagg

SEQ ID NO: 5805172 - DNA, 25 bp, Homo sapien
cggctgatacagggccacgccatgc

SEQ ID NO: 5805173 - DNA, 25 bp, Homo sapien
gataagcacacgctttgggcttctt

SEQ ID NO: 5805174 - DNA, 25 bp, Homo sapien
tcccaactgacttgatcctcaggct

SEQ ID NO: 5805175 - DNA, 25 bp, Homo sapien
gagggacgctgacaggcagtcggag

SEQ ID NO: 5805176 - DNA, 25 bp, Homo sapien
gcccgtgactgacggtctgtttctt

SEQ ID NO: 5805177 - DNA, 25 bp, Homo sapien
tggacataactggttctttcaaggg

SEQ ID NO: 5805178 - DNA, 25 bp, Homo sapien
gcatgaggggagggctgtgcctgcc

SEQ ID NO: 5805179 - DNA, 25 bp, Homo sapien
catccttatgttagcgggaaaatca

SEQ ID NO: 5805180 - DNA, 25 bp, Homo sapien
agccgtgaagtcaggaatagctgaa

SEQ ID NO: 5805181 - DNA, 25 bp, Homo sapien
ctgtctgtacgacgtggtcactgct

SEQ ID NO: 5805182 - DNA, 25 bp, Homo sapien
ttaatcaagtgctcacgcatcctgg

SEQ ID NO: 5805183 - DNA, 25 bp, Homo sapien
cagttccagttctcagccagtgtgt

SEQ ID NO: 5805184 - DNA, 25 bp, Homo sapien
cctgcgcgaggcggcgccgcccgtg

SEQ ID NO: 5805185 - DNA, 25 bp, Homo sapien
agtgagcggcaccgccacgtcggag

SEQ ID NO: 5805186 - DNA, 25 bp, Homo sapien
gtgaacttcttcctcacctctggga

SEQ ID NO: 5805187 - DNA, 25 bp, Homo sapien
aaaatcattagtaacaaaatgtgga

SEQ ID NO: 5805188 - DNA, 25 bp, Homo sapien
tgagcttgtacctctaagctttaaa

SEQ ID NO: 5805189 - DNA, 25 bp, Homo sapien
gagctggaaccactgtcccacctgc

SEQ ID NO: 5805190 - DNA, 25 bp, Homo sapien
cgaggtccgagtagccgtgcagagt

SEQ ID NO: 5805191 - DNA, 25 bp, Homo sapien
cacaaggtaaatgtgagtcattcaa

SEQ ID NO: 5805192 - DNA, 25 bp, Homo sapien
cacctctgggacctggaagccggcc

SEQ ID NO: 5805193 - DNA, 25 bp, Homo sapien
aaagtggacataactggttctttca

SEQ ID NO: 5805194 - DNA, 25 bp, Homo sapien
atcaagagcatttcctttgctggca

SEQ ID NO: 5805195 - DNA, 25 bp, Homo sapien
caaaaacagttccagttctcagcca

SEQ ID NO: 5805196 - DNA, 25 bp, Homo sapien
gctctcgcccagccccgcggcagtg

SEQ ID NO: 5805197 - DNA, 25 bp, Homo sapien
tgccctcccgcaggggcccatgcca

SEQ ID NO: 5805198 - DNA, 25 bp, Homo sapien
tcggcagccatggtgtcacggtgca

SEQ ID NO: 5805199 - DNA, 25 bp, Homo sapien
cacaggcggctgatacagggccacg

SEQ ID NO: 5805200 - DNA, 25 bp, Homo sapien
ccaccacctgcagcttaaatgctcg

SEQ ID NO: 5805201 - DNA, 25 bp, Homo sapien
ggtctcactgtaggttatgaaatta

SEQ ID NO: 5805202 - DNA, 25 bp, Homo sapien
acttcttcctcacctctgggacctg

SEQ ID NO: 5805203 - DNA, 25 bp, Homo sapien
cttccatggaccaattcggttccca

SEQ ID NO: 5805204 - DNA, 25 bp, Homo sapien
tggctggaatttacggaggaagtta

SEQ ID NO: 5805205 - DNA, 25 bp, Homo sapien
tttaaaaagagacgaagacccctca

SEQ ID NO: 5805206 - DNA, 25 bp, Homo sapien
tcctcgctgtcgaggtccgagtagc

SEQ ID NO: 5805207 - DNA, 25 bp, Homo sapien
aagccgaagtcccgctggtactgag

SEQ ID NO: 5805208 - DNA, 25 bp, Homo sapien
agcttccatggaccaattcggttcc

SEQ ID NO: 5805209 - DNA, 25 bp, Homo sapien
tttgtaggaagagccaagggtctca

SEQ ID NO: 5805210 - DNA, 25 bp, Homo sapien
agcacacgctttgggcttctttaaa

SEQ ID NO: 5805211 - DNA, 25 bp, Homo sapien
gcctgccagggctagcacctgggag

SEQ ID NO: 5805212 - DNA, 25 bp, Homo sapien
cgtccgcgtcgccgatgggcagcac

SEQ ID NO: 5805213 - DNA, 25 bp, Homo sapien
gacccgagtgccaccacctgcagct

SEQ ID NO: 5805214 - DNA, 25 bp, Homo sapien
gaggtctgtgaagtggaagcccgtg

SEQ ID NO: 5805215 - DNA, 25 bp, Homo sapien
cgaggcggcgccgcccgtgcccggc

SEQ ID NO: 5805216 - DNA, 25 bp, Homo sapien
cccgctggtactgagtgagcggcac

SEQ ID NO: 5805217 - DNA, 25 bp, Homo sapien
gcggcagtgggtcctgaggccgctc

SEQ ID NO: 5805218 - DNA, 25 bp, Homo sapien
gttccagcgccgcgccaggcagcac

SEQ ID NO: 5805219 - DNA, 25 bp, Homo sapien
actcgggctggttttgtctttgtgg

SEQ ID NO: 5805220 - DNA, 25 bp, Homo sapien
gggcccggcgggcgtggtccacaag

SEQ ID NO: 5805221 - DNA, 25 bp, Homo sapien
cggaagggttggtgtagaggacatt

SEQ ID NO: 5805222 - DNA, 25 bp, Homo sapien
tgggacctggaagccggccccaggg

SEQ ID NO: 5805223 - DNA, 25 bp, Homo sapien
gtcggagcggtccagctggttccag

SEQ ID NO: 5805224 - DNA, 25 bp, Homo sapien
tgaggctgagctgggtgtgccaagt

SEQ ID NO: 5805225 - DNA, 25 bp, Homo sapien
taaaaagagacgaagacccctcaaa

SEQ ID NO: 5805226 - DNA, 25 bp, Homo sapien
tcttgagggcttcactccagtccaa

SEQ ID NO: 5805227 - DNA, 25 bp, Homo sapien
tcatcaagagcatttcctttgctgg

SEQ ID NO: 5805228 - DNA, 25 bp, Homo sapien
ccacttgtgggctggagaggaagaa

SEQ ID NO: 5805229 - DNA, 25 bp, Homo sapien
gactgacggtctgtttcttctggaa

SEQ ID NO: 5805230 - DNA, 25 bp, Homo sapien
gtgaaggcaccaggcgtgacccatg

SEQ ID NO: 5805231 - DNA, 25 bp, Homo sapien
gtcctgtcggcagccatggtgtcac

SEQ ID NO: 5805232 - DNA, 25 bp, Homo sapien
cttgatcctcaggctcctcagagat

SEQ ID NO: 5805233 - DNA, 25 bp, Homo sapien
gcagtcacacgttgagaatccgggg

SEQ ID NO: 5805234 - DNA, 25 bp, Homo sapien
ccgtgaagtcaggaatagctgaacc

SEQ ID NO: 5805235 - DNA, 25 bp, Homo sapien
ccaggcagcacaggcggctgataca

SEQ ID NO: 5805236 - DNA, 25 bp, Homo sapien
ccagtgtgtatgatagtgccctgct

SEQ ID NO: 5805237 - DNA, 25 bp, Homo sapien
atcctcaggctcctcagagatttca

SEQ ID NO: 5805238 - DNA, 25 bp, Homo sapien
caagaggatgcttgaggctgagctg

SEQ ID NO: 5805239 - DNA, 25 bp, Homo sapien
gactgcgcggaggatttgcccctgc

SEQ ID NO: 5805240 - DNA, 25 bp, Homo sapien
cagcaggcagcctcttttctcttag

SEQ ID NO: 5805241 - DNA, 25 bp, Homo sapien
attttaaggtatttcagggaatgag

SEQ ID NO: 5805242 - DNA, 25 bp, Homo sapien
gtctgtttcttctggaaatttcctc

SEQ ID NO: 5805243 - DNA, 25 bp, Homo sapien
gcagcacgtagaccccgcgggcgcc

SEQ ID NO: 5805244 - DNA, 25 bp, Homo sapien
tctgtgaagtggaagcccgtgactg

SEQ ID NO: 5805245 - DNA, 25 bp, Homo sapien
tgagctgggtgtgccaagtccatcg

SEQ ID NO: 5805246 - DNA, 25 bp, Homo sapien
ggacattttaaggtatttcagggaa

SEQ ID NO: 5805247 - DNA, 25 bp, Homo sapien
ccttactgaagactgtcctgagctt

SEQ ID NO: 5805248 - DNA, 25 bp, Homo sapien
gaacctagcacaaggtaaatgtgag

SEQ ID NO: 5805249 - DNA, 25 bp, Homo sapien
ccccgcgggcgccgggcgcaggtgg

SEQ ID NO: 5805250 - DNA, 25 bp, Homo sapien
gcgggaggctggcccctgcgcgagg

SEQ ID NO: 5805251 - DNA, 25 bp, Homo sapien
cggccccagggctgctgtcccatcc

SEQ ID NO: 5805252 - DNA, 25 bp, Homo sapien
agccagtgtgtatgatagtgccctg

SEQ ID NO: 5805253 - DNA, 25 bp, Homo sapien
actgtaggttatgaaattaatcaag

SEQ ID NO: 5805254 - DNA, 25 bp, Homo sapien
aaatccaccaaaagtggacataact

SEQ ID NO: 5805255 - DNA, 25 bp, Homo sapien
caagagcatttcctttgctggcatg

SEQ ID NO: 5805256 - DNA, 25 bp, Homo sapien
ggcgggcgtggtccacaagccgaag

SEQ ID NO: 5805257 - DNA, 25 bp, Homo sapien
ggctgtgcctgccagggctagcacc

SEQ ID NO: 5805258 - DNA, 25 bp, Homo sapien
gctttgagaggggctgtgccctccc

SEQ ID NO: 5805259 - DNA, 25 bp, Homo sapien
aggtatttcagggaatgagacaaat

SEQ ID NO: 5805260 - DNA, 25 bp, Homo sapien
gcgcggaggactgcgcggaggattt

SEQ ID NO: 5805261 - DNA, 25 bp, Homo sapien
acgtcggagcggtccagctggttcc

SEQ ID NO: 5805262 - DNA, 25 bp, Homo sapien
tggcagttaacgaacgcaggagcct

SEQ ID NO: 5805263 - DNA, 25 bp, Homo sapien
atgaactgcctcttcaaaaggtggt

SEQ ID NO: 5805264 - DNA, 25 bp, Homo sapien
agtggacataactggttctttcaag

SEQ ID NO: 5805265 - DNA, 25 bp, Homo sapien
tcacgcatcctgggaaatccaccaa

SEQ ID NO: 5805266 - DNA, 25 bp, Homo sapien
tgtgtccacattcctcagcttccat

SEQ ID NO: 5805267 - DNA, 25 bp, Homo sapien
aagtggaagcccgtgactgacggtc

SEQ ID NO: 5805268 - DNA, 25 bp, Homo sapien
aattcggttcccaactgacttgatc

SEQ ID NO: 5805269 - DNA, 25 bp, Homo sapien
aggaagttaggagagagctttgcaa

SEQ ID NO: 5805270 - DNA, 25 bp, Homo sapien
tcaatctttagaacctagcacaagg

SEQ ID NO: 5805271 - DNA, 25 bp, Homo sapien
tgtcggcagccatggtgtcacggtg

SEQ ID NO: 5805272 - DNA, 25 bp, Homo sapien
ttgagggcttcactccagtccaagc

SEQ ID NO: 5805273 - DNA, 25 bp, Homo sapien
tggaaccactgtcccacctgcacgt

SEQ ID NO: 5805274 - DNA, 25 bp, Homo sapien
cactgtcccacctgcacgtctggtg

SEQ ID NO: 5805275 - DNA, 25 bp, Homo sapien
tcctcacctctgggacctggaagcc

SEQ ID NO: 5805276 - DNA, 25 bp, Homo sapien
tggaattcctgtctgtacgacgtgg

SEQ ID NO: 5805277 - DNA, 25 bp, Homo sapien
cagttctcagccagtgtgtatgata

SEQ ID NO: 5805278 - DNA, 25 bp, Homo sapien
ttccacaggcttctcaagaggatgc

SEQ ID NO: 5805279 - DNA, 25 bp, Homo sapien
aattaatcaagtgctcacgcatcct

SEQ ID NO: 5805280 - DNA, 25 bp, Homo sapien
atcttggccataaggaggtctgtga

SEQ ID NO: 5805281 - DNA, 25 bp, Homo sapien
gccataaggaggtctgtgaagtgga

SEQ ID NO: 5805282 - DNA, 25 bp, Homo sapien
tgtctttgtggatcttgagggcttc

SEQ ID NO: 5805283 - DNA, 25 bp, Homo sapien
acctagcacaaggtaaatgtgagtc

SEQ ID NO: 5805284 - DNA, 25 bp, Homo sapien
tcgggctggttttgtctttgtggat

SEQ ID NO: 5805285 - DNA, 25 bp, Homo sapien
tgatacagggccacgccatgccagc

SEQ ID NO: 5805286 - DNA, 25 bp, Homo sapien
gttctttcaagggccggatgtgtcc

SEQ ID NO: 5805287 - DNA, 25 bp, Homo sapien
ctgtcgaggtccgagtagccgtgca

SEQ ID NO: 5805288 - DNA, 25 bp, Homo sapien
ccttgggcccggcgggcgtggtcca

SEQ ID NO: 5805289 - DNA, 25 bp, Homo sapien
cgcaggtggcgcggaggactgcgcg

SEQ ID NO: 5805290 - DNA, 25 bp, Homo sapien
atacagggccacgccatgccagccc

SEQ ID NO: 5805291 - DNA, 25 bp, Homo sapien
aaaaatcaaacatgcaagccgtgaa

SEQ ID NO: 5805292 - DNA, 25 bp, Homo sapien
caagccgtgaagtcaggaatagctg

SEQ ID NO: 5805293 - DNA, 25 bp, Homo sapien
catttccacagacacccagcaggca

SEQ ID NO: 5805294 - DNA, 25 bp, Homo sapien
acagtttttaatctcatttccacag

SEQ ID NO: 5805295 - DNA, 25 bp, Homo sapien
gcggaggactgcgcggaggatttgc

SEQ ID NO: 5805296 - DNA, 25 bp, Homo sapien
accgccacgtcggagcggtccagct

SEQ ID NO: 5805297 - DNA, 25 bp, Homo sapien
catggaccaattcggttcccaactg

SEQ ID NO: 5805298 - DNA, 25 bp, Homo sapien
caacagcttcaactgcaggggccat

SEQ ID NO: 5805299 - DNA, 25 bp, Homo sapien
cagcatcaccatgagtcatgcaggt

SEQ ID NO: 5805300 - DNA, 25 bp, Homo sapien
cgtgcccggctcctcgctgtcgagg

SEQ ID NO: 5805301 - DNA, 25 bp, Homo sapien
gaagtcaggaatagctgaacccctt

SEQ ID NO: 5805302 - DNA, 25 bp, Homo sapien
tagaacctagcacaaggtaaatgtg

SEQ ID NO: 5805303 - DNA, 25 bp, Homo sapien
cagcgccgcgccaggcagcacaggc

SEQ ID NO: 5805304 - DNA, 25 bp, Homo sapien
tgtaggaagagccaagggtctcact

SEQ ID NO: 5805305 - DNA, 25 bp, Homo sapien
cgaagtcccgctggtactgagtgag

SEQ ID NO: 5805306 - DNA, 25 bp, Homo sapien
gcttctttaaagcgagcctctcatc

SEQ ID NO: 5805307 - DNA, 25 bp, Homo sapien
tgggaaatccaccaaaagtggacat

SEQ ID NO: 5805308 - DNA, 25 bp, Homo sapien
tgtgagcagggtagacggaagggtt

SEQ ID NO: 5805309 - DNA, 25 bp, Homo sapien
ttttagtaaaatctgagattgtaca

SEQ ID NO: 5805310 - DNA, 25 bp, Homo sapien
gctcatcttggccataaggaggtct

SEQ ID NO: 5805311 - DNA, 25 bp, Homo sapien
aggcggcgccgcccgtgcccggctc

SEQ ID NO: 5805312 - DNA, 25 bp, Homo sapien
gagcggcacgtcccggccggaatcc

SEQ ID NO: 5805313 - DNA, 25 bp, Homo sapien
caggcggctgatacagggccacgcc

SEQ ID NO: 5805314 - DNA, 25 bp, Homo sapien
ccacaggcttctcaagaggatgctt

SEQ ID NO: 5805315 - DNA, 25 bp, Homo sapien
ggaaaatcattagtaacaaaatgtg

SEQ ID NO: 5805316 - DNA, 25 bp, Homo sapien
atgggcagcacgtagaccccgcggg

SEQ ID NO: 5805317 - DNA, 25 bp, Homo sapien
ggcagtgggtcctgaggccgctccc

SEQ ID NO: 5805318 - DNA, 25 bp, Homo sapien
aggaatagctgaaccccttggataa

SEQ ID NO: 5805319 - DNA, 25 bp, Homo sapien
gtttcttctggaaatttcctcctgg

SEQ ID NO: 5805320 - DNA, 25 bp, Homo sapien
agcatttcctttgctggcatgaggg

SEQ ID NO: 5805321 - DNA, 25 bp, Homo sapien
tgagaggggctgtgccctcccgcag

SEQ ID NO: 5805322 - DNA, 25 bp, Homo sapien
caaagaaaatgaactgcctcttcaa

SEQ ID NO: 5805323 - DNA, 25 bp, Homo sapien
tcaggaatagctgaaccccttggat

SEQ ID NO: 5805324 - DNA, 25 bp, Homo sapien
accccttggataagcacacgctttg

SEQ ID NO: 5805325 - DNA, 25 bp, Homo sapien
tctcatcaagagcatttcctttgct

SEQ ID NO: 5805326 - DNA, 25 bp, Homo sapien
aacaaaatgtggattcaatctttag

SEQ ID NO: 5805327 - DNA, 25 bp, Homo sapien
ttcaaaaggtggtgagttccccgtc

SEQ ID NO: 5805328 - DNA, 25 bp, Homo sapien
ttcccaaaaacagttccagttctca

SEQ ID NO: 5805329 - DNA, 25 bp, Homo sapien
ggaaatccacaaatttccttactga

SEQ ID NO: 5805330 - DNA, 25 bp, Homo sapien
tgtggatcttgagggcttcactcca

SEQ ID NO: 5805331 - DNA, 25 bp, Homo sapien
tctggtggctctgagacccgagtgc

SEQ ID NO: 5805332 - DNA, 25 bp, Homo sapien
ccatgccagccccggcgcccgccgc

SEQ ID NO: 5805333 - DNA, 25 bp, Homo sapien
caggcgtgacccatgtggccatgct

SEQ ID NO: 5805334 - DNA, 25 bp, Homo sapien
accacctgcagcttaaatgctcgtc

SEQ ID NO: 5805335 - DNA, 25 bp, Homo sapien
tgcaaagaaaatgaactgcctcttc

SEQ ID NO: 5805336 - DNA, 25 bp, Homo sapien
taaggaggtctgtgaagtggaagcc

SEQ ID NO: 5805337 - DNA, 25 bp, Homo sapien
agcttgtacctctaagctttaaaaa

SEQ ID NO: 5805338 - DNA, 25 bp, Homo sapien
gtctgtacgacgtggtcactgctgc

SEQ ID NO: 5805339 - DNA, 25 bp, Homo sapien
aacgcaggagccttccacaggcttc

SEQ ID NO: 5805340 - DNA, 25 bp, Homo sapien
gcaggcagtcacacgttgagaatcc

SEQ ID NO: 5805341 - DNA, 25 bp, Homo sapien
gtcctgagcttgtacctctaagctt

SEQ ID NO: 5805342 - DNA, 25 bp, Homo sapien
gcccagccccgcggcagtgggtcct

SEQ ID NO: 5805343 - DNA, 25 bp, Homo sapien
ctcccgcaggggcccatgccatgct

SEQ ID NO: 5805344 - DNA, 25 bp, Homo sapien
agtgtgtatgatagtgccctgctca

SEQ ID NO: 5805345 - DNA, 25 bp, Homo sapien
tcggtgcatctgctccacaccagca

SEQ ID NO: 5805346 - DNA, 25 bp, Homo sapien
cttggataagcacacgctttgggct

SEQ ID NO: 5805347 - DNA, 25 bp, Homo sapien
gtccacaagccgaagtcccgctggt

SEQ ID NO: 5805348 - DNA, 25 bp, Homo sapien
cgccaggcagcacaggcggctgata

SEQ ID NO: 5805349 - DNA, 25 bp, Homo sapien
agcctctcatcaagagcatttcctt

SEQ ID NO: 5805350 - DNA, 25 bp, Homo sapien
tccacattcctcagcttccatggac

SEQ ID NO: 5805351 - DNA, 25 bp, Homo sapien
cctcttcaaaaggtggtgagttccc

SEQ ID NO: 5805352 - DNA, 25 bp, Homo sapien
ctagcacaaggtaaatgtgagtcat

SEQ ID NO: 5805353 - DNA, 25 bp, Homo sapien
cgaacgcaggagccttccacaggct

SEQ ID NO: 5805354 - DNA, 25 bp, Homo sapien
cgcgtccgcgtcgccgatgggcagc

SEQ ID NO: 5805355 - DNA, 25 bp, Homo sapien
tgagcggcaccgccacgtcggagcg

SEQ ID NO: 5805356 - DNA, 25 bp, Homo sapien
gccggaatcccgggcgcccgcggga

SEQ ID NO: 5805357 - DNA, 25 bp, Homo sapien
ctgtcccacctgcacgtctggtggc

SEQ ID NO: 5805358 - DNA, 25 bp, Homo sapien
cagggaatgagacaaatgccacctt

SEQ ID NO: 5805359 - DNA, 25 bp, Homo sapien
gctgaggcctgaaagatggcggagg

SEQ ID NO: 5805360 - DNA, 25 bp, Homo sapien
gaaccactgtcccacctgcacgtct

SEQ ID NO: 5805361 - DNA, 25 bp, Homo sapien
aatcattagtaacaaaatgtggatt

SEQ ID NO: 5805362 - DNA, 25 bp, Homo sapien
cacgtagaccccgcgggcgccgggc

SEQ ID NO: 5805363 - DNA, 25 bp, Homo sapien
agtttttaatctcatttccacagac

SEQ ID NO: 5805364 - DNA, 25 bp, Homo sapien
gcagcacaggcggctgatacagggc

SEQ ID NO: 5805365 - DNA, 25 bp, Homo sapien
gggcgcccgcgggaggctggcccct

SEQ ID NO: 5805366 - DNA, 25 bp, Homo sapien
atccttgggcccggcgggcgtggtc

SEQ ID NO: 5805367 - DNA, 25 bp, Homo sapien
ggcgcaggtggcgcggaggactgcg

SEQ ID NO: 5805368 - DNA, 25 bp, Homo sapien
gatactcagcatcaccatgagtcat

SEQ ID NO: 5805369 - DNA, 25 bp, Homo sapien
ttaaagcgagcctctcatcaagagc

SEQ ID NO: 5805370 - DNA, 25 bp, Homo sapien
ccacaccagcactttggccctggtg

SEQ ID NO: 5805371 - DNA, 25 bp, Homo sapien
aaatcaaacatgcaagccgtgaagt

SEQ ID NO: 5805372 - DNA, 25 bp, Homo sapien
gccccagggctgctgtcccatcccg

SEQ ID NO: 5805373 - DNA, 25 bp, Homo sapien
cgagtgccaccacctgcagcttaaa

SEQ ID NO: 5805374 - DNA, 25 bp, Homo sapien
cagcttaaatgctcgtctcactaga

SEQ ID NO: 5805375 - DNA, 25 bp, Homo sapien
gagacggccagatggcagttaacga

SEQ ID NO: 5805376 - DNA, 25 bp, Homo sapien
atgtggattcaatctttagaaccta

SEQ ID NO: 5805377 - DNA, 25 bp, Homo sapien
gcatcaccatgagtcatgcaggtga

SEQ ID NO: 5805378 - DNA, 25 bp, Homo sapien
taaaatctgagattgtacagttttt

SEQ ID NO: 5805379 - DNA, 25 bp, Homo sapien
acagggccacgccatgccagccccg

SEQ ID NO: 5805380 - DNA, 25 bp, Homo sapien
ggtctgtgaagtggaagcccgtgac

SEQ ID NO: 5805381 - DNA, 25 bp, Homo sapien
cacctgcagcttaaatgctcgtctc

SEQ ID NO: 5805382 - DNA, 25 bp, Homo sapien
tcatcttggccataaggaggtctgt

SEQ ID NO: 5805383 - DNA, 25 bp, Homo sapien
cacccagcaggcagcctcttttctc

SEQ ID NO: 5805384 - DNA, 25 bp, Homo sapien
tgatcctcaggctcctcagagattt

SEQ ID NO: 5805385 - DNA, 25 bp, Homo sapien
tgaggcctgaaagatggcggagggg

SEQ ID NO: 5805386 - DNA, 25 bp, Homo sapien
gagtagccgtgcagagtgagcggca

SEQ ID NO: 5805387 - DNA, 25 bp, Homo sapien
tttcaagggccggatgtgtccacat

SEQ ID NO: 5805388 - DNA, 25 bp, Homo sapien
accagcactttggccctggtgacag

SEQ ID NO: 5805389 - DNA, 25 bp, Homo sapien
tgtatgatagtgccctgctcatcat

SEQ ID NO: 5805390 - DNA, 25 bp, Homo sapien
gtgggctggagaggaagaaagatcc

SEQ ID NO: 5805391 - DNA, 25 bp, Homo sapien
tggtgacagctttgagaggggctgt

SEQ ID NO: 5805392 - DNA, 25 bp, Homo sapien
gcggaggatttgcccctgcggccgc

SEQ ID NO: 5805393 - DNA, 25 bp, Homo sapien
ttaggagagagctttgcaaagaaaa

SEQ ID NO: 5805394 - DNA, 25 bp, Homo sapien
aggctcctcagagatttcaaaactg

SEQ ID NO: 5805395 - DNA, 25 bp, Homo sapien
cacacgctttgggcttctttaaagc

SEQ ID NO: 5805396 - DNA, 25 bp, Homo sapien
ctgacttgatcctcaggctcctcag

SEQ ID NO: 5805397 - DNA, 25 bp, Homo sapien
cgcaggagccttccacaggcttctc

SEQ ID NO: 5805398 - DNA, 25 bp, Homo sapien
tctcactgtaggttatgaaattaat

SEQ ID NO: 5805399 - DNA, 25 bp, Homo sapien
tcccgggcgcccgcgggaggctggc

SEQ ID NO: 5805400 - DNA, 25 bp, Homo sapien
aggcttctcaagaggatgcttgagg

SEQ ID NO: 5805401 - DNA, 25 bp, Homo sapien
cccaaaaacagttccagttctcagc

SEQ ID NO: 5805402 - DNA, 25 bp, Homo sapien
ggttatgaaattaatcaagtgctca

SEQ ID NO: 5805403 - DNA, 25 bp, Homo sapien
gtggattcaatctttagaacctagc

SEQ ID NO: 5805404 - DNA, 25 bp, Homo sapien
gagtgaacttcttcctcacctctgg

SEQ ID NO: 5805405 - DNA, 25 bp, Homo sapien
tgagcagggtagacggaagggttgg

SEQ ID NO: 5805406 - DNA, 25 bp, Homo sapien
aagagacgaagacccctcaaacgtg

SEQ ID NO: 5805407 - DNA, 25 bp, Homo sapien
gctcgtctcactagagccacttgtg

SEQ ID NO: 5805408 - DNA, 25 bp, Homo sapien
ttcggttcccaactgacttgatcct

SEQ ID NO: 5805409 - DNA, 25 bp, Homo sapien
cctgtcggcagccatggtgtcacgg

SEQ ID NO: 5805410 - DNA, 25 bp, Homo sapien
catctgctccacaccagcactttgg

SEQ ID NO: 5805411 - DNA, 25 bp, Homo sapien
aacatgcaagccgtgaagtcaggaa

SEQ ID NO: 5805412 - DNA, 25 bp, Homo sapien
attcaatctttagaacctagcacaa

SEQ ID NO: 5805413 - DNA, 25 bp, Homo sapien
acggaggaagttaggagagagcttt

SEQ ID NO: 5805414 - DNA, 25 bp, Homo sapien
tcattagtaacaaaatgtggattca

SEQ ID NO: 5805415 - DNA, 25 bp, Homo sapien
agccacttgtgggctggagaggaag

SEQ ID NO: 5805416 - DNA, 25 bp, Homo sapien
aaggtggtgagttccccgtcactgt

SEQ ID NO: 5805417 - DNA, 25 bp, Homo sapien
gggccggatgtgtccacattcctca

SEQ ID NO: 5805418 - DNA, 25 bp, Homo sapien
ccgcgggcgccgggcgcaggtggcg

SEQ ID NO: 5805419 - DNA, 25 bp, Homo sapien
gccctggtgacagctttgagagggg

SEQ ID NO: 5805420 - DNA, 25 bp, Homo sapien
gagccaagggtctcactgtaggtta

SEQ ID NO: 5805421 - DNA, 25 bp, Homo sapien
ttcaatcccaagaactgttttgtta

SEQ ID NO: 5805422 - DNA, 25 bp, Homo sapien
tgctccacaccagcactttggccct

SEQ ID NO: 5805423 - DNA, 25 bp, Homo sapien
tttagaacctagcacaaggtaaatg

SEQ ID NO: 5805424 - DNA, 25 bp, Homo sapien
ccggcggcggatccttgggcccggc

SEQ ID NO: 5805425 - DNA, 25 bp, Homo sapien
atcatccttatgttagcgggaaaat

SEQ ID NO: 5805426 - DNA, 25 bp, Homo sapien
tggaccaattcggttcccaactgac

SEQ ID NO: 5805427 - DNA, 25 bp, Homo sapien
catgccatgctctcgcccagccccg

SEQ ID NO: 5805428 - DNA, 25 bp, Homo sapien
tccacagacacccagcaggcagcct

SEQ ID NO: 5805429 - DNA, 25 bp, Homo sapien
tcaagtgctcacgcatcctgggaaa

SEQ ID NO: 5805430 - DNA, 25 bp, Homo sapien
aacatgaggctcatcttggccataa

SEQ ID NO: 5805431 - DNA, 25 bp, Homo sapien
ttctttaaagcgagcctctcatcaa

SEQ ID NO: 5805432 - DNA, 25 bp, Homo sapien
gtcccatcccgaagtgtgggttgtg

SEQ ID NO: 5805433 - DNA, 25 bp, Homo sapien
ctcaagaggatgcttgaggctgagc

SEQ ID NO: 5805434 - DNA, 25 bp, Homo sapien
cattttagtaaaatctgagattgta

SEQ ID NO: 5805435 - DNA, 25 bp, Homo sapien
gattgtacagtttttaatctcattt

SEQ ID NO: 5805436 - DNA, 25 bp, Homo sapien
tatgatagtgccctgctcatcatcc

SEQ ID NO: 5805437 - DNA, 25 bp, Homo sapien
gaacttcttcctcacctctgggacc

SEQ ID NO: 5805438 - DNA, 25 bp, Homo sapien
tttcaaaactgagagacggccagat

SEQ ID NO: 5805439 - DNA, 25 bp, Homo sapien
aaagcgagcctctcatcaagagcat

SEQ ID NO: 5805440 - DNA, 25 bp, Homo sapien
gctgtgccctcccgcaggggcccat

SEQ ID NO: 5805441 - DNA, 25 bp, Homo sapien
ccatgtggccatgctggctggaatt

SEQ ID NO: 5805442 - DNA, 25 bp, Homo sapien
gtcccacctgcacgtctggtggctc

SEQ ID NO: 5805443 - DNA, 25 bp, Homo sapien
ggctctgagacccgagtgccaccac

SEQ ID NO: 5805444 - DNA, 25 bp, Homo sapien
ccttccacaggcttctcaagaggat

SEQ ID NO: 5805445 - DNA, 25 bp, Homo sapien
aacagttccagttctcagccagtgt

SEQ ID NO: 5805446 - DNA, 25 bp, Homo sapien
caggcagtcggagctggaaccactg

SEQ ID NO: 5805447 - DNA, 25 bp, Homo sapien
tcatcatccttatgttagcgggaaa

SEQ ID NO: 5805448 - DNA, 25 bp, Homo sapien
gcggcgccgcccgtgcccggctcct

SEQ ID NO: 5805449 - DNA, 25 bp, Homo sapien
aagatggcggaggggttaggagtga

SEQ ID NO: 5805450 - DNA, 25 bp, Homo sapien
tggataagcacacgctttgggcttc

SEQ ID NO: 5805451 - DNA, 25 bp, Homo sapien
tccaagcctggaattcctgtctgta

SEQ ID NO: 5805452 - DNA, 25 bp, Homo sapien
tggtgagttccccgtcactgtacat

SEQ ID NO: 5805453 - DNA, 25 bp, Homo sapien
caatcccaagaactgttttgttaaa

SEQ ID NO: 5805454 - DNA, 25 bp, Homo sapien
ccgcggcagtgggtcctgaggccgc

SEQ ID NO: 5805455 - DNA, 25 bp, Homo sapien
agggtctcactgtaggttatgaaat

SEQ ID NO: 5805456 - DNA, 25 bp, Homo sapien
gcggtccagctggttccagcgccgc

SEQ ID NO: 5805457 - DNA, 25 bp, Homo sapien
gtgtgccaagtccatcggtgcatct

SEQ ID NO: 5805458 - DNA, 25 bp, Homo sapien
gagggcttcactccagtccaagcct

SEQ ID NO: 5805459 - DNA, 25 bp, Homo sapien
cctctgggacctggaagccggcccc

SEQ ID NO: 5805460 - DNA, 25 bp, Homo sapien
tacctctaagctttaaaaagagacg

SEQ ID NO: 5805461 - DNA, 25 bp, Homo sapien
ggcccctgcgcgaggcggcgccgcc

SEQ ID NO: 5805462 - DNA, 25 bp, Homo sapien
gaatgagacaaatgccaccttccca

SEQ ID NO: 5805463 - DNA, 25 bp, Homo sapien
gacaaatgccaccttcccaaaaaca

SEQ ID NO: 5805464 - DNA, 25 bp, Homo sapien
catgaggctcatcttggccataagg

SEQ ID NO: 5805465 - DNA, 25 bp, Homo sapien
ggtactgagtgagcggcacgtcccg

SEQ ID NO: 5805466 - DNA, 25 bp, Homo sapien
tccatggaccaattcggttcccaac

SEQ ID NO: 5805467 - DNA, 25 bp, Homo sapien
cgtcactgtacatgtgagcagggta

SEQ ID NO: 5805468 - DNA, 25 bp, Homo sapien
tcctcctggatactcagcatcacca

SEQ ID NO: 5805469 - DNA, 25 bp, Homo sapien
gagtcattcaatcccaagaactgtt

SEQ ID NO: 5805470 - DNA, 25 bp, Homo sapien
aaatgctcgtctcactagagccact

SEQ ID NO: 5805471 - DNA, 25 bp, Homo sapien
ggtagacggaagggttggtgtagag

SEQ ID NO: 5805472 - DNA, 25 bp, Homo sapien
ccctcccgcaggggcccatgccatg

SEQ ID NO: 5805473 - DNA, 25 bp, Homo sapien
tctggaaatttcctcctggatactc

SEQ ID NO: 5805474 - DNA, 25 bp, Homo sapien
atgtgagtcattcaatcccaagaac

SEQ ID NO: 5805475 - DNA, 25 bp, Homo sapien
cctcagcttccatggaccaattcgg

SEQ ID NO: 5805476 - DNA, 25 bp, Homo sapien
gacgaagacccctcaaacgtgtgaa

SEQ ID NO: 5805477 - DNA, 25 bp, Homo sapien
tacatgtgagcagggtagacggaag

SEQ ID NO: 5805478 - DNA, 25 bp, Homo sapien
catcggtgcatctgctccacaccag

SEQ ID NO: 5805479 - DNA, 25 bp, Homo sapien
ggaaatccaccaaaagtggacataa

SEQ ID NO: 5805480 - DNA, 25 bp, Homo sapien
agcgagcctctcatcaagagcattt

SEQ ID NO: 5805481 - DNA, 25 bp, Homo sapien
tttgcattttagtaaaatctgagat

SEQ ID NO: 5805482 - DNA, 25 bp, Homo sapien
aactgcaggggccatttgtaggaag

SEQ ID NO: 5805483 - DNA, 25 bp, Homo sapien
actgcctcttcaaaaggtggtgagt

SEQ ID NO: 5805484 - DNA, 25 bp, Homo sapien
gttttgttaaaacatgaggctcatc

SEQ ID NO: 5805485 - DNA, 25 bp, Homo sapien
gggctgtgccctcccgcaggggccc

SEQ ID NO: 5805486 - DNA, 25 bp, Homo sapien
gtgcaggcagtcacacgttgagaat

SEQ ID NO: 5805487 - DNA, 25 bp, Homo sapien
gaagtgtgggttgtgatgactcggg

SEQ ID NO: 5805488 - DNA, 25 bp, Homo sapien
gtacagtttttaatctcatttccac

SEQ ID NO: 5805489 - DNA, 25 bp, Homo sapien
ttgtacagtttttaatctcatttcc

SEQ ID NO: 5805490 - DNA, 25 bp, Homo sapien
ccgtgcagagtgagcggcaccgcca

SEQ ID NO: 5805491 - DNA, 25 bp, Homo sapien
tactcagcatcaccatgagtcatgc

SEQ ID NO: 5805492 - DNA, 25 bp, Homo sapien
cagacacccagcaggcagcctcttt

SEQ ID NO: 5805493 - DNA, 25 bp, Homo sapien
caaatgccaccttcccaaaaacagt

SEQ ID NO: 5805494 - DNA, 25 bp, Homo sapien
ctgtacgacgtggtcactgctgcag

SEQ ID NO: 5805495 - DNA, 25 bp, Homo sapien
ccgtgactgacggtctgtttcttct

SEQ ID NO: 5805496 - DNA, 25 bp, Homo sapien
ggatccttgggcccggcgggcgtgg

SEQ ID NO: 5805497 - DNA, 25 bp, Homo sapien
ggcccatgccatgctctcgcccagc

SEQ ID NO: 5805498 - DNA, 25 bp, Homo sapien
actgtacatgtgagcagggtagacg

SEQ ID NO: 5805499 - DNA, 25 bp, Homo sapien
gtaaatgtgagtcattcaatcccaa

SEQ ID NO: 5805500 - DNA, 25 bp, Homo sapien
cggagcggtccagctggttccagcg

SEQ ID NO: 5805501 - DNA, 25 bp, Homo sapien
aatcaagtgctcacgcatcctggga

SEQ ID NO: 5805502 - DNA, 25 bp, Homo sapien
ggtgtagaggacattttaaggtatt

SEQ ID NO: 5805503 - DNA, 25 bp, Homo sapien
attccaacagcttcaactgcagggg

SEQ ID NO: 5805504 - DNA, 25 bp, Homo sapien
ttacggaggaagttaggagagagct

SEQ ID NO: 5805505 - DNA, 25 bp, Homo sapien
gcggatccttgggcccggcgggcgt

SEQ ID NO: 5805506 - DNA, 25 bp, Homo sapien
aaatgaactgcctcttcaaaaggtg

SEQ ID NO: 5805507 - DNA, 25 bp, Homo sapien
gtgctcacgcatcctgggaaatcca

SEQ ID NO: 5805508 - DNA, 25 bp, Homo sapien
atgctcgtctcactagagccacttg

SEQ ID NO: 5805509 - DNA, 25 bp, Homo sapien
gaaccccttggataagcacacgctt

SEQ ID NO: 5805510 - DNA, 25 bp, Homo sapien
agtcacacgttgagaatccggggag

SEQ ID NO: 5805511 - DNA, 25 bp, Homo sapien
agaactgttttgttaaaacatgagg

SEQ ID NO: 5805512 - DNA, 25 bp, Homo sapien
gttgagaatccggggagctgaggcc

SEQ ID NO: 5805513 - DNA, 25 bp, Homo sapien
gaggggagggctgtgcctgccaggg

SEQ ID NO: 5805514 - DNA, 25 bp, Homo sapien
tttgagaggggctgtgccctcccgc

SEQ ID NO: 5805515 - DNA, 25 bp, Homo sapien
cggtccgcgccccggcggcggatcc

SEQ ID NO: 5805516 - DNA, 25 bp, Homo sapien
tttctcttagaaaaatcaaacatgc

SEQ ID NO: 5805517 - DNA, 25 bp, Homo sapien
gttttgtctttgtggatcttgaggg

SEQ ID NO: 5805518 - DNA, 25 bp, Homo sapien
gtcctgaggccgctccccagccctg

SEQ ID NO: 5805519 - DNA, 25 bp, Homo sapien
gtggaagcccgtgactgacggtctg

SEQ ID NO: 5805520 - DNA, 25 bp, Homo sapien
aagccggccccagggctgctgtccc

SEQ ID NO: 5805521 - DNA, 25 bp, Homo sapien
gccgcgtccgcgtcgccgatgggca

SEQ ID NO: 5805522 - DNA, 25 bp, Homo sapien
cgtgacccatgtggccatgctggct

SEQ ID NO: 5805523 - DNA, 25 bp, Homo sapien
tgcaggtgacggcccaagattccaa

SEQ ID NO: 5805524 - DNA, 25 bp, Homo sapien
tctcgcccagccccgcggcagtggg

SEQ ID NO: 5805525 - DNA, 25 bp, Homo sapien
cttcaactgcaggggccatttgtag

SEQ ID NO: 5805526 - DNA, 25 bp, Homo sapien
ttagtaaaatctgagattgtacagt

SEQ ID NO: 5805527 - DNA, 25 bp, Homo sapien
acaccagcactttggccctggtgac

SEQ ID NO: 5805528 - DNA, 25 bp, Homo sapien
atttcagggaatgagacaaatgcca

SEQ ID NO: 5805529 - DNA, 25 bp, Homo sapien
aaacgtgtgaaggcaccaggcgtga

SEQ ID NO: 5805530 - DNA, 25 bp, Homo sapien
ctgagagacggccagatggcagtta

SEQ ID NO: 5805531 - DNA, 25 bp, Homo sapien
tggcgcggaggactgcgcggaggat

SEQ ID NO: 5805532 - DNA, 25 bp, Homo sapien
catggtgtcacggtgcaggcagtca

SEQ ID NO: 5805533 - DNA, 25 bp, Homo sapien
tgcagccgcgtccgcgtcgccgatg

SEQ ID NO: 5805534 - DNA, 25 bp, Homo sapien
gccggccccagggctgctgtcccat

SEQ ID NO: 5805535 - DNA, 25 bp, Homo sapien
gctggctggaatttacggaggaagt

SEQ ID NO: 5805536 - DNA, 25 bp, Homo sapien
agggccacgccatgccagccccggc

SEQ ID NO: 5805537 - DNA, 25 bp, Homo sapien
tcgcccagccccgcggcagtgggtc

SEQ ID NO: 5805538 - DNA, 25 bp, Homo sapien
tgccctgctcatcatccttatgtta

SEQ ID NO: 5805539 - DNA, 25 bp, Homo sapien
tgccaccacctgcagcttaaatgct

SEQ ID NO: 5805540 - DNA, 25 bp, Homo sapien
aggcctgaaagatggcggaggggtt

SEQ ID NO: 5805541 - DNA, 25 bp, Homo sapien
gaggctggcccctgcgcgaggcggc

SEQ ID NO: 5805542 - DNA, 25 bp, Homo sapien
gacacccagcaggcagcctcttttc

SEQ ID NO: 5805543 - DNA, 25 bp, Homo sapien
caagattccaacagcttcaactgca

SEQ ID NO: 5805544 - DNA, 25 bp, Homo sapien
ttgtgatgactcgggctggttttgt

SEQ ID NO: 5805545 - DNA, 25 bp, Homo sapien
actttggccctggtgacagctttga

SEQ ID NO: 5805546 - DNA, 25 bp, Homo sapien
gtgagcggcacgtcccggccggaat

SEQ ID NO: 5805547 - DNA, 25 bp, Homo sapien
ggggagggctgtgcctgccagggct

SEQ ID NO: 5805548 - DNA, 25 bp, Homo sapien
tggccataaggaggtctgtgaagtg

SEQ ID NO: 5805549 - DNA, 25 bp, Homo sapien
tgagaatccggggagctgaggcctg

SEQ ID NO: 5805550 - DNA, 25 bp, Homo sapien
ctgctgcagccgcgtccgcgtcgcc

SEQ ID NO: 5805551 - DNA, 25 bp, Homo sapien
aagaaagatccaaagggaaatccac

SEQ ID NO: 5805552 - DNA, 25 bp, Homo sapien
cagtcggagctggaaccactgtccc

SEQ ID NO: 5805553 - DNA, 25 bp, Homo sapien
gtggccatgctggctggaatttacg

SEQ ID NO: 5805554 - DNA, 25 bp, Homo sapien
gggcagcacgtagaccccgcgggcg

SEQ ID NO: 5805555 - DNA, 25 bp, Homo sapien
ttccttactgaagactgtcctgagc

SEQ ID NO: 5805556 - DNA, 25 bp, Homo sapien
caggtggcgcggaggactgcgcgga

SEQ ID NO: 5805557 - DNA, 25 bp, Homo sapien
cgcaggggcccatgccatgctctcg

SEQ ID NO: 5805558 - DNA, 25 bp, Homo sapien
tcccaagaactgttttgttaaaaca

SEQ ID NO: 5805559 - DNA, 25 bp, Homo sapien
agcgggaaaatcattagtaacaaaa

SEQ ID NO: 5805560 - DNA, 25 bp, Homo sapien
tcaactgcaggggccatttgtagga

SEQ ID NO: 5805561 - DNA, 25 bp, Homo sapien
cccatcccgaagtgtgggttgtgat

SEQ ID NO: 5805562 - DNA, 25 bp, Homo sapien
gatccaaagggaaatccacaaattt

SEQ ID NO: 5805563 - DNA, 25 bp, Homo sapien
ccgaagtgtgggttgtgatgactcg

SEQ ID NO: 5805564 - DNA, 25 bp, Homo sapien
gatttcaaaactgagagacggccag

SEQ ID NO: 5805565 - DNA, 25 bp, Homo sapien
ggttaggagtgaacttcttcctcac

SEQ ID NO: 5805566 - DNA, 25 bp, Homo sapien
agaggatgcttgaggctgagctggg

SEQ ID NO: 5805567 - DNA, 25 bp, Homo sapien
ttcactccagtccaagcctggaatt

SEQ ID NO: 5805568 - DNA, 25 bp, Homo sapien
tgtgggttgtgatgactcgggctgg

SEQ ID NO: 5805569 - DNA, 25 bp, Homo sapien
atctgagattgtacagtttttaatc

SEQ ID NO: 5805570 - DNA, 25 bp, Homo sapien
tatgttagcgggaaaatcattagta

SEQ ID NO: 5805571 - DNA, 25 bp, Homo sapien
cgagcctctcatcaagagcatttcc

SEQ ID NO: 5805572 - DNA, 25 bp, Homo sapien
tctcagccagtgtgtatgatagtgc

SEQ ID NO: 5805573 - DNA, 25 bp, Homo sapien
accactgtcccacctgcacgtctgg

SEQ ID NO: 5805574 - DNA, 25 bp, Homo sapien
tcttagaaaaatcaaacatgcaagc

SEQ ID NO: 5805575 - DNA, 25 bp, Homo sapien
gcctgaaagatggcggaggggttag

SEQ ID NO: 5805576 - DNA, 25 bp, Homo sapien
ggacctggaagccggccccagggct

SEQ ID NO: 5805577 - DNA, 25 bp, Homo sapien
atttacggaggaagttaggagagag

SEQ ID NO: 5805578 - DNA, 25 bp, Homo sapien
tggcggaggggttaggagtgaactt

SEQ ID NO: 5805579 - DNA, 25 bp, Homo sapien
gcggcacgtcccggccggaatcccg

SEQ ID NO: 5805580 - DNA, 25 bp, Homo sapien
tgtgccctcccgcaggggcccatgc

SEQ ID NO: 5805581 - DNA, 25 bp, Homo sapien
ctgggagggacgctgacaggcagtc

SEQ ID NO: 5805582 - DNA, 25 bp, Homo sapien
ctgttttgttaaaacatgaggctca

SEQ ID NO: 5805583 - DNA, 25 bp, Homo sapien
atccaccaaaagtggacataactgg

SEQ ID NO: 5805584 - DNA, 25 bp, Homo sapien
tggtgtcacggtgcaggcagtcaca

SEQ ID NO: 5805585 - DNA, 25 bp, Homo sapien
cgctggtactgagtgagcggcacgt

SEQ ID NO: 5805586 - DNA, 25 bp, Homo sapien
tagcacctgggagggacgctgacag

SEQ ID NO: 5805587 - DNA, 25 bp, Homo sapien
ctggaagccggccccagggctgctg

SEQ ID NO: 5805588 - DNA, 25 bp, Homo sapien
aacgaacgcaggagccttccacagg

SEQ ID NO: 5805589 - DNA, 25 bp, Homo sapien
aaaactgagagacggccagatggca

SEQ ID NO: 5805590 - DNA, 25 bp, Homo sapien
ggtgacggcccaagattccaacagc

SEQ ID NO: 5805591 - DNA, 25 bp, Homo sapien
gccgggcgcaggtggcgcggaggac

SEQ ID NO: 5805592 - DNA, 25 bp, Homo sapien
ccccgcggcagtgggtcctgaggcc

SEQ ID NO: 5805593 - DNA, 25 bp, Homo sapien
ctttgggcttctttaaagcgagcct

SEQ ID NO: 5805594 - DNA, 25 bp, Homo sapien
aggtaaatgtgagtcattcaatccc

SEQ ID NO: 5805595 - DNA, 25 bp, Homo sapien
agcttcaactgcaggggccatttgt

SEQ ID NO: 5805596 - DNA, 25 bp, Homo sapien
caaacatgcaagccgtgaagtcagg

SEQ ID NO: 5805597 - DNA, 25 bp, Homo sapien
tagaccccgcgggcgccgggcgcag

SEQ ID NO: 5805598 - DNA, 25 bp, Homo sapien
acaaatttccttactgaagactgtc

SEQ ID NO: 5805599 - DNA, 25 bp, Homo sapien
cgatgggcagcacgtagaccccgcg

SEQ ID NO: 5805600 - DNA, 25 bp, Homo sapien
gtgccaagtccatcggtgcatctgc

SEQ ID NO: 5805601 - DNA, 25 bp, Homo sapien
gatgcttgaggctgagctgggtgtg

SEQ ID NO: 5805602 - DNA, 25 bp, Homo sapien
atctcatttccacagacacccagca

SEQ ID NO: 5805603 - DNA, 25 bp, Homo sapien
aagagccaagggtctcactgtaggt

SEQ ID NO: 5805604 - DNA, 25 bp, Homo sapien
tggttccagcgccgcgccaggcagc

SEQ ID NO: 5805605 - DNA, 25 bp, Homo sapien
ggcgtggtccacaagccgaagtccc

SEQ ID NO: 5805606 - DNA, 25 bp, Homo sapien
tgtacctctaagctttaaaaagaga

SEQ ID NO: 5805607 - DNA, 25 bp, Homo sapien
tccaaagggaaatccacaaatttcc

SEQ ID NO: 5805608 - DNA, 25 bp, Homo sapien
agggctgtgcctgccagggctagca

SEQ ID NO: 5805609 - DNA, 25 bp, Homo sapien
cctcaggctcctcagagatttcaaa

SEQ ID NO: 5805610 - DNA, 25 bp, Homo sapien
tttccacagacacccagcaggcagc

SEQ ID NO: 5805611 - DNA, 25 bp, Homo sapien
atagtgccctgctcatcatccttat

SEQ ID NO: 5805612 - DNA, 25 bp, Homo sapien
cgggaaaatcattagtaacaaaatg

SEQ ID NO: 5805613 - DNA, 25 bp, Homo sapien
cagctggttccagcgccgcgccagg

SEQ ID NO: 5805614 - DNA, 25 bp, Homo sapien
cataaggaggtctgtgaagtggaag

SEQ ID NO: 5805615 - DNA, 25 bp, Homo sapien
cctgcagcttaaatgctcgtctcac

SEQ ID NO: 5805616 - DNA, 25 bp, Homo sapien
cacctgcacgtctggtggctctgag

SEQ ID NO: 5805617 - DNA, 25 bp, Homo sapien
tcctttgctggcatgaggggagggc

SEQ ID NO: 5805618 - DNA, 25 bp, Homo sapien
cccgtgcccggctcctcgctgtcga

SEQ ID NO: 5805619 - DNA, 25 bp, Homo sapien
cgtggtcactgctgcagccgcgtcc

SEQ ID NO: 5805620 - DNA, 25 bp, Homo sapien
cggcggatccttgggcccggcgggc

SEQ ID NO: 5805621 - DNA, 25 bp, Homo sapien
gtctcactagagccacttgtgggct

SEQ ID NO: 5805622 - DNA, 25 bp, Homo sapien
gatggcagttaacgaacgcaggagc

SEQ ID NO: 5805623 - DNA, 25 bp, Homo sapien
cttggccataaggaggtctgtgaag

SEQ ID NO: 5805624 - DNA, 25 bp, Homo sapien
tgctgtcccatcccgaagtgtgggt

SEQ ID NO: 5805625 - DNA, 25 bp, Homo sapien
gcgccccggcggcggatccttgggc

SEQ ID NO: 5805626 - DNA, 25 bp, Homo sapien
ttatgaaattaatcaagtgctcacg

SEQ ID NO: 5805627 - DNA, 25 bp, Homo sapien
cggttcccaactgacttgatcctca

SEQ ID NO: 5805628 - DNA, 25 bp, Homo sapien
tctttagaacctagcacaaggtaaa

SEQ ID NO: 5805629 - DNA, 25 bp, Homo sapien
ccctgtcctgtcggcagccatggtg

SEQ ID NO: 5805630 - DNA, 25 bp, Homo sapien
gatttgcccctgcggccgcccgccc

SEQ ID NO: 5805631 - DNA, 25 bp, Homo sapien
ctggtactgagtgagcggcacgtcc

SEQ ID NO: 5805632 - DNA, 25 bp, Homo sapien
ctgaaagatggcggaggggttagga

SEQ ID NO: 5805633 - DNA, 25 bp, Homo sapien
agtccaagcctggaattcctgtctg

SEQ ID NO: 5805634 - DNA, 25 bp, Homo sapien
gcccggcgggcgtggtccacaagcc

SEQ ID NO: 5805635 - DNA, 25 bp, Homo sapien
aagactgtcctgagcttgtacctct

SEQ ID NO: 5805636 - DNA, 25 bp, Homo sapien
gcacctgggagggacgctgacaggc

SEQ ID NO: 5805637 - DNA, 25 bp, Homo sapien
agtgtgggttgtgatgactcgggct

SEQ ID NO: 5805638 - DNA, 25 bp, Homo sapien
ctgccagggctagcacctgggaggg

SEQ ID NO: 5805639 - DNA, 25 bp, Homo sapien
tgacccatgtggccatgctggctgg

SEQ ID NO: 5805640 - DNA, 25 bp, Homo sapien
gcaggcagcctcttttctcttagaa

SEQ ID NO: 5805641 - DNA, 25 bp, Homo sapien
caaaagtggacataactggttcttt

SEQ ID NO: 5805642 - DNA, 25 bp, Homo sapien
gtgacagctttgagaggggctgtgc

SEQ ID NO: 5805643 - DNA, 25 bp, Homo sapien
atttccttactgaagactgtcctga

SEQ ID NO: 5805644 - DNA, 25 bp, Homo sapien
gttcccaactgacttgatcctcagg

SEQ ID NO: 5805645 - DNA, 25 bp, Homo sapien
ccatgagtcatgcaggtgacggccc

SEQ ID NO: 5805646 - DNA, 25 bp, Homo sapien
ccaattcggttcccaactgacttga

SEQ ID NO: 5805647 - DNA, 25 bp, Homo sapien
gaaaatgaactgcctcttcaaaagg

SEQ ID NO: 5805648 - DNA, 25 bp, Homo sapien
ttcttcctcacctctgggacctgga

SEQ ID NO: 5805649 - DNA, 25 bp, Homo sapien
agtgccaccacctgcagcttaaatg

SEQ ID NO: 5805650 - DNA, 25 bp, Homo sapien
ctcatttccacagacacccagcagg

SEQ ID NO: 5805651 - DNA, 25 bp, Homo sapien
aagacccctcaaacgtgtgaaggca

SEQ ID NO: 5805652 - DNA, 25 bp, Homo sapien
tgaggccgctccccagccctgtcct

SEQ ID NO: 5805653 - DNA, 25 bp, Homo sapien
gactgtcctgagcttgtacctctaa

SEQ ID NO: 5805654 - DNA, 25 bp, Homo sapien
cctgcacgtctggtggctctgagac

SEQ ID NO: 5805655 - DNA, 25 bp, Homo sapien
cttgaggctgagctgggtgtgccaa

SEQ ID NO: 5805656 - DNA, 25 bp, Homo sapien
gaaagatggcggaggggttaggagt

SEQ ID NO: 5805657 - DNA, 25 bp, Homo sapien
ttgctggcatgaggggagggctgtg

SEQ ID NO: 5805658 - DNA, 25 bp, Homo sapien
cgcgccaggcagcacaggcggctga

SEQ ID NO: 5805659 - DNA, 25 bp, Homo sapien
tgtgtatgatagtgccctgctcatc

SEQ ID NO: 5805660 - DNA, 25 bp, Homo sapien
agctgggtgtgccaagtccatcggt

SEQ ID NO: 5805661 - DNA, 25 bp, Homo sapien
tgcacgtctggtggctctgagaccc

SEQ ID NO: 5805662 - DNA, 25 bp, Homo sapien
gctggttttgtctttgtggatcttg

SEQ ID NO: 5805663 - DNA, 25 bp, Homo sapien
tttttaatctcatttccacagacac

SEQ ID NO: 5805664 - DNA, 25 bp, Homo sapien
gagacccgagtgccaccacctgcag

SEQ ID NO: 5805665 - DNA, 25 bp, Homo sapien
agaatccggggagctgaggcctgaa

SEQ ID NO: 5805666 - DNA, 25 bp, Homo sapien
cagccatggtgtcacggtgcaggca

SEQ ID NO: 5805667 - DNA, 25 bp, Homo sapien
accaggcgtgacccatgtggccatg

SEQ ID NO: 5805668 - DNA, 25 bp, Homo sapien
gaaagatccaaagggaaatccacaa

SEQ ID NO: 5805669 - DNA, 25 bp, Homo sapien
cggccagatggcagttaacgaacgc

SEQ ID NO: 5805670 - DNA, 25 bp, Homo sapien
ggctggcccctgcgcgaggcggcgc

SEQ ID NO: 5805671 - DNA, 25 bp, Homo sapien
tgcatctgctccacaccagcacttt

SEQ ID NO: 5805672 - DNA, 25 bp, Homo sapien
ggccacgccatgccagccccggcgc

SEQ ID NO: 5805673 - DNA, 25 bp, Homo sapien
acaagccgaagtcccgctggtactg

SEQ ID NO: 5805674 - DNA, 25 bp, Homo sapien
tgttagcgggaaaatcattagtaac

SEQ ID NO: 5805675 - DNA, 25 bp, Homo sapien
ggggcccatgccatgctctcgccca

SEQ ID NO: 5805676 - DNA, 25 bp, Homo sapien
tcagccagtgtgtatgatagtgccc

SEQ ID NO: 5805677 - DNA, 25 bp, Homo sapien
gctttgcaaagaaaatgaactgcct

SEQ ID NO: 5805678 - DNA, 25 bp, Homo sapien
cccagcaggcagcctcttttctctt

SEQ ID NO: 5805679 - DNA, 25 bp, Homo sapien
gaatttacggaggaagttaggagag

SEQ ID NO: 5805680 - DNA, 25 bp, Homo sapien
gccatggtgtcacggtgcaggcagt

SEQ ID NO: 5805681 - DNA, 25 bp, Homo sapien
ctcacctctgggacctggaagccgg

SEQ ID NO: 5805682 - DNA, 25 bp, Homo sapien
ggggttaggagtgaacttcttcctc

SEQ ID NO: 5805683 - DNA, 25 bp, Homo sapien
tgactcgggctggttttgtctttgt

SEQ ID NO: 5805684 - DNA, 25 bp, Homo sapien
gagacgaagacccctcaaacgtgtg

SEQ ID NO: 5805685 - DNA, 25 bp, Homo sapien
ggccggctccgcggggagccccact

SEQ ID NO: 5805686 - DNA, 25 bp, Homo sapien
agtggggctccccgcggagccggcc

SEQ ID NO: 5805687 - DNA, 25 bp, Homo sapien
ccgcggggagccccactggctgact

SEQ ID NO: 5805688 - DNA, 25 bp, Homo sapien
agtcagccagtggggctccccgcgg

SEQ ID NO: 5805689 - DNA, 25 bp, Homo sapien
ggctccgcggggagccccactggct

SEQ ID NO: 5805690 - DNA, 25 bp, Homo sapien
agccagtggggctccccgcggagcc

SEQ ID NO: 5805691 - DNA, 25 bp, Homo sapien
gaaaaaagtcgttgtgattgtcaag

SEQ ID NO: 5805692 - DNA, 25 bp, Homo sapien
cttgacaatcacaacgacttttttc

SEQ ID NO: 5805693 - DNA, 25 bp, Homo sapien
gcacagattggagagggctctgtgc

SEQ ID NO: 5805694 - DNA, 25 bp, Homo sapien
cggcggcgggggtgccccagctctc

SEQ ID NO: 5805695 - DNA, 25 bp, Homo sapien
gtgggcagcggtggcgccggccttg

SEQ ID NO: 5805696 - DNA, 25 bp, Homo sapien
cagaagtacctgtcggcgccggagc

SEQ ID NO: 5805697 - DNA, 25 bp, Homo sapien
acgcccacgcaggtcaagatctggt

SEQ ID NO: 5805698 - DNA, 25 bp, Homo sapien
ctaaagaccaaacttcactctgggc

SEQ ID NO: 5805699 - DNA, 25 bp, Homo sapien
tgtcccacctgaactcctcgggctc

SEQ ID NO: 5805700 - DNA, 25 bp, Homo sapien
gctagggcggggcacagattggaga

SEQ ID NO: 5805701 - DNA, 25 bp, Homo sapien
aatgcctagtttttagtaatctgta

SEQ ID NO: 5805702 - DNA, 25 bp, Homo sapien
cggggctccgctggcggcgtacagg

SEQ ID NO: 5805703 - DNA, 25 bp, Homo sapien
gccagcaaagaggactcgcttgtaa

SEQ ID NO: 5805704 - DNA, 25 bp, Homo sapien
gcgggagggaggagcagccccggca

SEQ ID NO: 5805705 - DNA, 25 bp, Homo sapien
ccccgctgccaagcgcgccgcgcag

SEQ ID NO: 5805706 - DNA, 25 bp, Homo sapien
gcggcatgggcggcctgggctcgct

SEQ ID NO: 5805707 - DNA, 25 bp, Homo sapien
ttccacgctagggcggggcacagat

SEQ ID NO: 5805708 - DNA, 25 bp, Homo sapien
aatatagttcctaagaagcttctaa

SEQ ID NO: 5805709 - DNA, 25 bp, Homo sapien
acatgagcggcatgggcggcctggg

SEQ ID NO: 5805710 - DNA, 25 bp, Homo sapien
cgcgtggcggtgccggtcctggtga

SEQ ID NO: 5805711 - DNA, 25 bp, Homo sapien
cggcatgaacatgagcggcatgggc

SEQ ID NO: 5805712 - DNA, 25 bp, Homo sapien
cgccggccttggcgcacacccgggc

SEQ ID NO: 5805713 - DNA, 25 bp, Homo sapien
ctcgcttgtaaataccaggattttt

SEQ ID NO: 5805714 - DNA, 25 bp, Homo sapien
aacaacctggccgcgtttagaccaa

SEQ ID NO: 5805715 - DNA, 25 bp, Homo sapien
aacaaccaagcgcatccaatctcaa

SEQ ID NO: 5805716 - DNA, 25 bp, Homo sapien
tctgtgctgacatggctctggactc

SEQ ID NO: 5805717 - DNA, 25 bp, Homo sapien
gcgacgcgtggcggtgccggtcctg

SEQ ID NO: 5805718 - DNA, 25 bp, Homo sapien
gccgccgtaccaggacaccatgagg

SEQ ID NO: 5805719 - DNA, 25 bp, Homo sapien
tcgcaggcgcaggtgtacgagctgg

SEQ ID NO: 5805720 - DNA, 25 bp, Homo sapien
taaatatagttcctaagaagcttct

SEQ ID NO: 5805721 - DNA, 25 bp, Homo sapien
atctgtgtatattatttggcagttt

SEQ ID NO: 5805722 - DNA, 25 bp, Homo sapien
cggcgtacaggcagggccaggcggc

SEQ ID NO: 5805723 - DNA, 25 bp, Homo sapien
acctggccgcgtttagaccaaggaa

SEQ ID NO: 5805724 - DNA, 25 bp, Homo sapien
cattttttatgggcattgacaaatc

SEQ ID NO: 5805725 - DNA, 25 bp, Homo sapien
ttttccacgctagggcggggcacag

SEQ ID NO: 5805726 - DNA, 25 bp, Homo sapien
atgggcccggcgagcggcatgaaca

SEQ ID NO: 5805727 - DNA, 25 bp, Homo sapien
ggcggcggcagcggccatctccgtg

SEQ ID NO: 5805728 - DNA, 25 bp, Homo sapien
ggcgccggccttggcgcacacccgg

SEQ ID NO: 5805729 - DNA, 25 bp, Homo sapien
tgagtcccctggaggaaagctacaa

SEQ ID NO: 5805730 - DNA, 25 bp, Homo sapien
tcactgacacaaaggaagtgccccc

SEQ ID NO: 5805731 - DNA, 25 bp, Homo sapien
cctagcccagcgctctgcctcaccg

SEQ ID NO: 5805732 - DNA, 25 bp, Homo sapien
gcctgggctcgctgggggacgtgag

SEQ ID NO: 5805733 - DNA, 25 bp, Homo sapien
agtttgtttaatgtgaacttgtagc

SEQ ID NO: 5805734 - DNA, 25 bp, Homo sapien
gctccacgcgcttcgacttttctta

SEQ ID NO: 5805735 - DNA, 25 bp, Homo sapien
aggccagtctccggacctggcgcac

SEQ ID NO: 5805736 - DNA, 25 bp, Homo sapien
ctgcagcaggacagcggcggcggcg

SEQ ID NO: 5805737 - DNA, 25 bp, Homo sapien
cgccgaatcatgtcgatgagtccaa

SEQ ID NO: 5805738 - DNA, 25 bp, Homo sapien
aaatctgtgtatattatttggcagt

SEQ ID NO: 5805739 - DNA, 25 bp, Homo sapien
gccctccgcgaaaatagtttgttta

SEQ ID NO: 5805740 - DNA, 25 bp, Homo sapien
gccagtctccggacctggcgcacca

SEQ ID NO: 5805741 - DNA, 25 bp, Homo sapien
aggccgcggcgggagggaggagcag

SEQ ID NO: 5805742 - DNA, 25 bp, Homo sapien
ttccctcctgcccgccacacagacc

SEQ ID NO: 5805743 - DNA, 25 bp, Homo sapien
agccgccgccgaatcatgtcgatga

SEQ ID NO: 5805744 - DNA, 25 bp, Homo sapien
gctttggggtgtctttttttggtga

SEQ ID NO: 5805745 - DNA, 25 bp, Homo sapien
tacaaggccacgcgcagcagcaggc

SEQ ID NO: 5805746 - DNA, 25 bp, Homo sapien
aggtatccagcctgtcccacctgaa

SEQ ID NO: 5805747 - DNA, 25 bp, Homo sapien
agcagccccggcaggctcagccgcc

SEQ ID NO: 5805748 - DNA, 25 bp, Homo sapien
accttgctatacggtcggacctggt

SEQ ID NO: 5805749 - DNA, 25 bp, Homo sapien
ggcaccatgtcctgctccaccttgc

SEQ ID NO: 5805750 - DNA, 25 bp, Homo sapien
cttgtcactgacacaaaggaagtgc

SEQ ID NO: 5805751 - DNA, 25 bp, Homo sapien
gcagagaagggcataaaacagcttt

SEQ ID NO: 5805752 - DNA, 25 bp, Homo sapien
ccgccgtggggggctactgcaacgg

SEQ ID NO: 5805753 - DNA, 25 bp, Homo sapien
cgagctgccgccgtaccaggacacc

SEQ ID NO: 5805754 - DNA, 25 bp, Homo sapien
agagtcttcaacataacccacttgt

SEQ ID NO: 5805755 - DNA, 25 bp, Homo sapien
ccaccttgctatacggtcggacctg

SEQ ID NO: 5805756 - DNA, 25 bp, Homo sapien
cgtcagtctttttctgttgtaactt

SEQ ID NO: 5805757 - DNA, 25 bp, Homo sapien
gacgccgggccggccctagcccagc

SEQ ID NO: 5805758 - DNA, 25 bp, Homo sapien
ccaggtatccagcctgtcccacctg

SEQ ID NO: 5805759 - DNA, 25 bp, Homo sapien
ctctgccagcaaagaggactcgctt

SEQ ID NO: 5805760 - DNA, 25 bp, Homo sapien
aagcgcgccgcgcaggaagcgccgg

SEQ ID NO: 5805761 - DNA, 25 bp, Homo sapien
agttggactaaatgcctagttttta

SEQ ID NO: 5805762 - DNA, 25 bp, Homo sapien
atgggcattgacaaatctgtgtata

SEQ ID NO: 5805763 - DNA, 25 bp, Homo sapien
cagcaactgcagcaggacagcggcg

SEQ ID NO: 5805764 - DNA, 25 bp, Homo sapien
gccagcatgatccacctgacgccca

SEQ ID NO: 5805765 - DNA, 25 bp, Homo sapien
caggaagcgccgggtgctcttctcg

SEQ ID NO: 5805766 - DNA, 25 bp, Homo sapien
agaccaccatccaccgctgctccac

SEQ ID NO: 5805767 - DNA, 25 bp, Homo sapien
tgcccccgcgccgggcgccgccagc

SEQ ID NO: 5805768 - DNA, 25 bp, Homo sapien
tttaatgtgaacttgtagctgtaaa

SEQ ID NO: 5805769 - DNA, 25 bp, Homo sapien
cagccaggcagcgcaggccagtctc

SEQ ID NO: 5805770 - DNA, 25 bp, Homo sapien
gaagtacctgtcggcgccggagcgc

SEQ ID NO: 5805771 - DNA, 25 bp, Homo sapien
aaggcggcgcagcagcaactgcagc

SEQ ID NO: 5805772 - DNA, 25 bp, Homo sapien
gccgtggggcaccacggcgccgtca

SEQ ID NO: 5805773 - DNA, 25 bp, Homo sapien
ggggacgtgagcaagaacatggccc

SEQ ID NO: 5805774 - DNA, 25 bp, Homo sapien
aacccagacccgcgcttccccgcca

SEQ ID NO: 5805775 - DNA, 25 bp, Homo sapien
tgggcggcctgggctcgctggggga

SEQ ID NO: 5805776 - DNA, 25 bp, Homo sapien
tgaggaacagcgcctctggccccgg

SEQ ID NO: 5805777 - DNA, 25 bp, Homo sapien
gcaggctcagccgccgccgaatcat

SEQ ID NO: 5805778 - DNA, 25 bp, Homo sapien
ctgaactcctcgggctcggactacg

SEQ ID NO: 5805779 - DNA, 25 bp, Homo sapien
gtggtccggaggcagtgggaaggcg

SEQ ID NO: 5805780 - DNA, 25 bp, Homo sapien
ctcgggctcggactacggcaccatg

SEQ ID NO: 5805781 - DNA, 25 bp, Homo sapien
ccgtaccaggacaccatgaggaaca

SEQ ID NO: 5805782 - DNA, 25 bp, Homo sapien
atttggcttaaatatagttcctaag

SEQ ID NO: 5805783 - DNA, 25 bp, Homo sapien
ttggcgcacacccgggccaccagcc

SEQ ID NO: 5805784 - DNA, 25 bp, Homo sapien
tcctcgggctcggactacggcacca

SEQ ID NO: 5805785 - DNA, 25 bp, Homo sapien
ggaggaaagctacaagaaagtgggc

SEQ ID NO: 5805786 - DNA, 25 bp, Homo sapien
tctggactctaaagaccaaacttca

SEQ ID NO: 5805787 - DNA, 25 bp, Homo sapien
agcagcaactgcagcaggacagcgg

SEQ ID NO: 5805788 - DNA, 25 bp, Homo sapien
gtgagcaagaacatggccccgctgc

SEQ ID NO: 5805789 - DNA, 25 bp, Homo sapien
ccgcgacgcgtggcggtgccggtcc

SEQ ID NO: 5805790 - DNA, 25 bp, Homo sapien
ccaacccagacccgcgcttccccgc

SEQ ID NO: 5805791 - DNA, 25 bp, Homo sapien
cccgcgcttccccgccatctcccgc

SEQ ID NO: 5805792 - DNA, 25 bp, Homo sapien
ccccagctctcgcactccgccgtgg

SEQ ID NO: 5805793 - DNA, 25 bp, Homo sapien
aggaatctttaagcagagaagggca

SEQ ID NO: 5805794 - DNA, 25 bp, Homo sapien
cgcctctggccccggatggtacggc

SEQ ID NO: 5805795 - DNA, 25 bp, Homo sapien
ctcggactacggcaccatgtcctgc

SEQ ID NO: 5805796 - DNA, 25 bp, Homo sapien
agtgggcatggagggcggcggcctc

SEQ ID NO: 5805797 - DNA, 25 bp, Homo sapien
gtcaaaagttggactaaatgcctag

SEQ ID NO: 5805798 - DNA, 25 bp, Homo sapien
agcgcagcgaagcccgatgtggtcc

SEQ ID NO: 5805799 - DNA, 25 bp, Homo sapien
ttcacattttttatgggcattgaca

SEQ ID NO: 5805800 - DNA, 25 bp, Homo sapien
ccttggcgcacacccgggccaccag

SEQ ID NO: 5805801 - DNA, 25 bp, Homo sapien
cgctacaaaatgaagcgccaggcca

SEQ ID NO: 5805802 - DNA, 25 bp, Homo sapien
gggcggcggcctcggggctccgctg

SEQ ID NO: 5805803 - DNA, 25 bp, Homo sapien
taccacatgacggcggcgggggtgc

SEQ ID NO: 5805804 - DNA, 25 bp, Homo sapien
atgtggtccggaggcagtgggaagg

SEQ ID NO: 5805805 - DNA, 25 bp, Homo sapien
tccaatctcaaggaatctttaagca

SEQ ID NO: 5805806 - DNA, 25 bp, Homo sapien
acaggcagggccaggcggcaccgcc

SEQ ID NO: 5805807 - DNA, 25 bp, Homo sapien
ggcgtcagtctttttctgttgtaac

SEQ ID NO: 5805808 - DNA, 25 bp, Homo sapien
gaaagctacaagaaagtgggcatgg

SEQ ID NO: 5805809 - DNA, 25 bp, Homo sapien
tgctcttctcgcaggcgcaggtgta

SEQ ID NO: 5805810 - DNA, 25 bp, Homo sapien
gctggggagaggaaagagtcttcaa

SEQ ID NO: 5805811 - DNA, 25 bp, Homo sapien
agcgcgagcacctggccagcatgat

SEQ ID NO: 5805812 - DNA, 25 bp, Homo sapien
ggcaccgggtgcccgcagcagcaac

SEQ ID NO: 5805813 - DNA, 25 bp, Homo sapien
gggcataaaacagctttggggtgtc

SEQ ID NO: 5805814 - DNA, 25 bp, Homo sapien
tgtttaatgtgaacttgtagctgta

SEQ ID NO: 5805815 - DNA, 25 bp, Homo sapien
tgtcactgacacaaaggaagtgccc

SEQ ID NO: 5805816 - DNA, 25 bp, Homo sapien
ggggtgccccagctctcgcactccg

SEQ ID NO: 5805817 - DNA, 25 bp, Homo sapien
cttcaagcaacagaagtacctgtcg

SEQ ID NO: 5805818 - DNA, 25 bp, Homo sapien
gcgaaaatagtttgtttaatgtgaa

SEQ ID NO: 5805819 - DNA, 25 bp, Homo sapien
tgaaagacggcaaaccgtgccaggc

SEQ ID NO: 5805820 - DNA, 25 bp, Homo sapien
agggccaggcggcaccgccaacagc

SEQ ID NO: 5805821 - DNA, 25 bp, Homo sapien
cagacccgcgcttccccgccatctc

SEQ ID NO: 5805822 - DNA, 25 bp, Homo sapien
aggtcaagatctggttccagaacca

SEQ ID NO: 5805823 - DNA, 25 bp, Homo sapien
aacccacttgtcactgacacaaagg

SEQ ID NO: 5805824 - DNA, 25 bp, Homo sapien
aagaaaatgaaaaacaaccaagcgc

SEQ ID NO: 5805825 - DNA, 25 bp, Homo sapien
cgcggcgggagggaggagcagcccc

SEQ ID NO: 5805826 - DNA, 25 bp, Homo sapien
cgccaacccagacccgcgcttcccc

SEQ ID NO: 5805827 - DNA, 25 bp, Homo sapien
tttttctgttgtaacttatgtagat

SEQ ID NO: 5805828 - DNA, 25 bp, Homo sapien
agcggcatgaacatgagcggcatgg

SEQ ID NO: 5805829 - DNA, 25 bp, Homo sapien
atgaacatgagcggcatgggcggcc

SEQ ID NO: 5805830 - DNA, 25 bp, Homo sapien
caggcgggtgcccccgcgccgggcg

SEQ ID NO: 5805831 - DNA, 25 bp, Homo sapien
ccgggtgcccgcagcagcaacaggc

SEQ ID NO: 5805832 - DNA, 25 bp, Homo sapien
ggcgccaacccagacccgcgcttcc

SEQ ID NO: 5805833 - DNA, 25 bp, Homo sapien
gtttttagtaatctgtacattttgt

SEQ ID NO: 5805834 - DNA, 25 bp, Homo sapien
gcattgacaaatctgtgtatattat

SEQ ID NO: 5805835 - DNA, 25 bp, Homo sapien
aagcagagaagggcataaaacagct

SEQ ID NO: 5805836 - DNA, 25 bp, Homo sapien
ttttagtaatctgtacattttgttg

SEQ ID NO: 5805837 - DNA, 25 bp, Homo sapien
cttctcgcaggcgcaggtgtacgag

SEQ ID NO: 5805838 - DNA, 25 bp, Homo sapien
cgctgcagggccaggtatccagcct

SEQ ID NO: 5805839 - DNA, 25 bp, Homo sapien
caacagcggccatgcagcagcacgc

SEQ ID NO: 5805840 - DNA, 25 bp, Homo sapien
gcccgcagcagcaacaggctcagca

SEQ ID NO: 5805841 - DNA, 25 bp, Homo sapien
agaaccaccgctacaaaatgaagcg

SEQ ID NO: 5805842 - DNA, 25 bp, Homo sapien
accaagcgcatccaatctcaaggaa

SEQ ID NO: 5805843 - DNA, 25 bp, Homo sapien
gcgccaggccaaggacaaggcggcg

SEQ ID NO: 5805844 - DNA, 25 bp, Homo sapien
gcgccgcgcaggaagcgccgggtgc

SEQ ID NO: 5805845 - DNA, 25 bp, Homo sapien
tggggctcagcgcagcgaagcccga

SEQ ID NO: 5805846 - DNA, 25 bp, Homo sapien
ctgcctcaccgcttccctcctgccc

SEQ ID NO: 5805847 - DNA, 25 bp, Homo sapien
cacctggccagcatgatccacctga

SEQ ID NO: 5805848 - DNA, 25 bp, Homo sapien
cttccccgccatctcccgcttcatg

SEQ ID NO: 5805849 - DNA, 25 bp, Homo sapien
atgtgaacttgtagctgtaaaacgc

SEQ ID NO: 5805850 - DNA, 25 bp, Homo sapien
tggtacggcgccaacccagacccgc

SEQ ID NO: 5805851 - DNA, 25 bp, Homo sapien
cacgcgcttcgacttttcttaacaa

SEQ ID NO: 5805852 - DNA, 25 bp, Homo sapien
tgctgacatggctctggactctaaa

SEQ ID NO: 5805853 - DNA, 25 bp, Homo sapien
gcggcaccgccaacagcggccatgc

SEQ ID NO: 5805854 - DNA, 25 bp, Homo sapien
tccacctgacgcccacgcaggtcaa

SEQ ID NO: 5805855 - DNA, 25 bp, Homo sapien
tgcctagtttttagtaatctgtaca

SEQ ID NO: 5805856 - DNA, 25 bp, Homo sapien
cgcgccgggcgccgccagcctacaa

SEQ ID NO: 5805857 - DNA, 25 bp, Homo sapien
ctccgcgaaaatagtttgtttaatg

SEQ ID NO: 5805858 - DNA, 25 bp, Homo sapien
agaccaaacttcactctgggcacac

SEQ ID NO: 5805859 - DNA, 25 bp, Homo sapien
agtccaaagcacacgactccgttct

SEQ ID NO: 5805860 - DNA, 25 bp, Homo sapien
gtgtatattatttggcagtttggta

SEQ ID NO: 5805861 - DNA, 25 bp, Homo sapien
gcctcaccgcttccctcctgcccgc

SEQ ID NO: 5805862 - DNA, 25 bp, Homo sapien
agtcccctggaggaaagctacaaga

SEQ ID NO: 5805863 - DNA, 25 bp, Homo sapien
accaaacttcactctgggcacactc

SEQ ID NO: 5805864 - DNA, 25 bp, Homo sapien
ttcaacataacccacttgtcactga

SEQ ID NO: 5805865 - DNA, 25 bp, Homo sapien
tctggccgcctaggctcagcggcga

SEQ ID NO: 5805866 - DNA, 25 bp, Homo sapien
agcgagctgccgccgtaccaggaca

SEQ ID NO: 5805867 - DNA, 25 bp, Homo sapien
tcgctgggggacgtgagcaagaaca

SEQ ID NO: 5805868 - DNA, 25 bp, Homo sapien
tggccccggatggtacggcgccaac

SEQ ID NO: 5805869 - DNA, 25 bp, Homo sapien
gacggcggcgggggtgccccagctc

SEQ ID NO: 5805870 - DNA, 25 bp, Homo sapien
tgccccctccccggcaccctctggc

SEQ ID NO: 5805871 - DNA, 25 bp, Homo sapien
cgccatctcccgcttcatgggcccg

SEQ ID NO: 5805872 - DNA, 25 bp, Homo sapien
ctggtgagaggacgccgggccggcc

SEQ ID NO: 5805873 - DNA, 25 bp, Homo sapien
cgcactccgccgtggggggctactg

SEQ ID NO: 5805874 - DNA, 25 bp, Homo sapien
aggactcgcttgtaaataccaggat

SEQ ID NO: 5805875 - DNA, 25 bp, Homo sapien
gcaagaacatggccccgctgccaag

SEQ ID NO: 5805876 - DNA, 25 bp, Homo sapien
tggagcgacgcttcaagcaacagaa

SEQ ID NO: 5805877 - DNA, 25 bp, Homo sapien
gcggcgtcagtctttttctgttgta

SEQ ID NO: 5805878 - DNA, 25 bp, Homo sapien
atctttaagcagagaagggcataaa

SEQ ID NO: 5805879 - DNA, 25 bp, Homo sapien
atctgtacattttgttgtaaaaaga

SEQ ID NO: 5805880 - DNA, 25 bp, Homo sapien
agaggactcgcttgtaaataccagg

SEQ ID NO: 5805881 - DNA, 25 bp, Homo sapien
aaatagtttgtttaatgtgaacttg

SEQ ID NO: 5805882 - DNA, 25 bp, Homo sapien
atctcccgcttcatgggcccggcga

SEQ ID NO: 5805883 - DNA, 25 bp, Homo sapien
ccagcctgtcccacctgaactcctc

SEQ ID NO: 5805884 - DNA, 25 bp, Homo sapien
tgctccaccttgctatacggtcgga

SEQ ID NO: 5805885 - DNA, 25 bp, Homo sapien
gcagcagtcgccgcgacgcgtggcg

SEQ ID NO: 5805886 - DNA, 25 bp, Homo sapien
cccgatgtggtccggaggcagtggg

SEQ ID NO: 5805887 - DNA, 25 bp, Homo sapien
tctgacatcttgagtcccctggagg

SEQ ID NO: 5805888 - DNA, 25 bp, Homo sapien
cgccggagcgcgagcacctggccag

SEQ ID NO: 5805889 - DNA, 25 bp, Homo sapien
cgggggtgccccagctctcgcactc

SEQ ID NO: 5805890 - DNA, 25 bp, Homo sapien
attggagagggctctgtgctgacat

SEQ ID NO: 5805891 - DNA, 25 bp, Homo sapien
gccgcggcgggagggaggagcagcc

SEQ ID NO: 5805892 - DNA, 25 bp, Homo sapien
ccggagcgcgagcacctggccagca

SEQ ID NO: 5805893 - DNA, 25 bp, Homo sapien
ccggacctggcgcaccacgccgcca

SEQ ID NO: 5805894 - DNA, 25 bp, Homo sapien
gagcgacgcttcaagcaacagaagt

SEQ ID NO: 5805895 - DNA, 25 bp, Homo sapien
gcgcgccgcgcaggaagcgccgggt

SEQ ID NO: 5805896 - DNA, 25 bp, Homo sapien
gcggcagcggccatctccgtgggca

SEQ ID NO: 5805897 - DNA, 25 bp, Homo sapien
ttttgaagggaggacgggagctggg

SEQ ID NO: 5805898 - DNA, 25 bp, Homo sapien
aaggccaaactgctggacgtctttc

SEQ ID NO: 5805899 - DNA, 25 bp, Homo sapien
ccaccgctacaaaatgaagcgccag

SEQ ID NO: 5805900 - DNA, 25 bp, Homo sapien
ctatacggtcggacctggtgagagg

SEQ ID NO: 5805901 - DNA, 25 bp, Homo sapien
acaccatgaggaacagcgcctctgg

SEQ ID NO: 5805902 - DNA, 25 bp, Homo sapien
cgcgcttcgacttttcttaacaacc

SEQ ID NO: 5805903 - DNA, 25 bp, Homo sapien
tttgtttaatgtgaacttgtagctg

SEQ ID NO: 5805904 - DNA, 25 bp, Homo sapien
ggcaacctgggcaacatgagcgagc

SEQ ID NO: 5805905 - DNA, 25 bp, Homo sapien
acatggccccgctgccaagcgcgcc

SEQ ID NO: 5805906 - DNA, 25 bp, Homo sapien
tcagtctttttctgttgtaacttat

SEQ ID NO: 5805907 - DNA, 25 bp, Homo sapien
caccacgccgccagccccgcggcgc

SEQ ID NO: 5805908 - DNA, 25 bp, Homo sapien
tggagagggctctgtgctgacatgg

SEQ ID NO: 5805909 - DNA, 25 bp, Homo sapien
tttcttaacaacctggccgcgttta

SEQ ID NO: 5805910 - DNA, 25 bp, Homo sapien
gctggagcgacgcttcaagcaacag

SEQ ID NO: 5805911 - DNA, 25 bp, Homo sapien
gagagggctctgtgctgacatggct

SEQ ID NO: 5805912 - DNA, 25 bp, Homo sapien
gcaggcgcaggtgtacgagctggag

SEQ ID NO: 5805913 - DNA, 25 bp, Homo sapien
ctccgttctcagtgtctgacatctt

SEQ ID NO: 5805914 - DNA, 25 bp, Homo sapien
gcgcaggtgtacgagctggagcgac

SEQ ID NO: 5805915 - DNA, 25 bp, Homo sapien
agtgtctgacatcttgagtcccctg

SEQ ID NO: 5805916 - DNA, 25 bp, Homo sapien
cccgccatctcccgcttcatgggcc

SEQ ID NO: 5805917 - DNA, 25 bp, Homo sapien
ggccgcgtttagaccaaggaacaaa

SEQ ID NO: 5805918 - DNA, 25 bp, Homo sapien
atgatccacctgacgcccacgcagg

SEQ ID NO: 5805919 - DNA, 25 bp, Homo sapien
aatgaagcgccaggccaaggacaag

SEQ ID NO: 5805920 - DNA, 25 bp, Homo sapien
ggttttccacgctagggcggggcac

SEQ ID NO: 5805921 - DNA, 25 bp, Homo sapien
cgggtgctcttctcgcaggcgcagg

SEQ ID NO: 5805922 - DNA, 25 bp, Homo sapien
gactcgcttgtaaataccaggattt

SEQ ID NO: 5805923 - DNA, 25 bp, Homo sapien
cctggccagcatgatccacctgacg

SEQ ID NO: 5805924 - DNA, 25 bp, Homo sapien
gaagcttctaataaattatacaaat

SEQ ID NO: 5805925 - DNA, 25 bp, Homo sapien
cagcggcgaccgccctccgcgaaaa

SEQ ID NO: 5805926 - DNA, 25 bp, Homo sapien
taatctgtacattttgttgtaaaaa

SEQ ID NO: 5805927 - DNA, 25 bp, Homo sapien
ttagtaatctgtacattttgttgta

SEQ ID NO: 5805928 - DNA, 25 bp, Homo sapien
tggcagtttggtatttgcggcgtca

SEQ ID NO: 5805929 - DNA, 25 bp, Homo sapien
caaggccacgcgcagcagcaggcgc

SEQ ID NO: 5805930 - DNA, 25 bp, Homo sapien
agatatttggcttaaatatagttcc

SEQ ID NO: 5805931 - DNA, 25 bp, Homo sapien
gggcaacatgagcgagctgccgccg

SEQ ID NO: 5805932 - DNA, 25 bp, Homo sapien
tggtatttgcggcgtcagtcttttt

SEQ ID NO: 5805933 - DNA, 25 bp, Homo sapien
acgtgagcaagaacatggccccgct

SEQ ID NO: 5805934 - DNA, 25 bp, Homo sapien
tctgttgtaacttatgtagatattt

SEQ ID NO: 5805935 - DNA, 25 bp, Homo sapien
ccactcccagtccccagcccttcac

SEQ ID NO: 5805936 - DNA, 25 bp, Homo sapien
ttatgggcattgacaaatctgtgta

SEQ ID NO: 5805937 - DNA, 25 bp, Homo sapien
ccatccaccgctgctccacgcgctt

SEQ ID NO: 5805938 - DNA, 25 bp, Homo sapien
cgccgggccggccctagcccagcgc

SEQ ID NO: 5805939 - DNA, 25 bp, Homo sapien
ggccatctccgtgggcagcggtggc

SEQ ID NO: 5805940 - DNA, 25 bp, Homo sapien
caaaggccaaactgctggacgtctt

SEQ ID NO: 5805941 - DNA, 25 bp, Homo sapien
gagggctctgtgctgacatggctct

SEQ ID NO: 5805942 - DNA, 25 bp, Homo sapien
aagcacacgactccgttctcagtgt

SEQ ID NO: 5805943 - DNA, 25 bp, Homo sapien
gcttccctcctgcccgccacacaga

SEQ ID NO: 5805944 - DNA, 25 bp, Homo sapien
caggcagcgcaggccagtctccgga

SEQ ID NO: 5805945 - DNA, 25 bp, Homo sapien
gtacgagctggagcgacgcttcaag

SEQ ID NO: 5805946 - DNA, 25 bp, Homo sapien
gactacggcaccatgtcctgctcca

SEQ ID NO: 5805947 - DNA, 25 bp, Homo sapien
accgctacaaaatgaagcgccaggc

SEQ ID NO: 5805948 - DNA, 25 bp, Homo sapien
ttaagcagagaagggcataaaacag

SEQ ID NO: 5805949 - DNA, 25 bp, Homo sapien
cccacttgtcactgacacaaaggaa

SEQ ID NO: 5805950 - DNA, 25 bp, Homo sapien
ctcctgcccgccacacagaccacca

SEQ ID NO: 5805951 - DNA, 25 bp, Homo sapien
aaggacaaggcggcgcagcagcaac

SEQ ID NO: 5805952 - DNA, 25 bp, Homo sapien
gccctagcccagcgctctgcctcac

SEQ ID NO: 5805953 - DNA, 25 bp, Homo sapien
caacctggccgcgtttagaccaagg

SEQ ID NO: 5805954 - DNA, 25 bp, Homo sapien
caatctcaaggaatctttaagcaga

SEQ ID NO: 5805955 - DNA, 25 bp, Homo sapien
gacgcttcaagcaacagaagtacct

SEQ ID NO: 5805956 - DNA, 25 bp, Homo sapien
ggcgcagcaccaggcgcaggccgcg

SEQ ID NO: 5805957 - DNA, 25 bp, Homo sapien
gcggcggcctcggggctccgctggc

SEQ ID NO: 5805958 - DNA, 25 bp, Homo sapien
gccccggcaggctcagccgccgccg

SEQ ID NO: 5805959 - DNA, 25 bp, Homo sapien
cctgcccgccacacagaccaccatc

SEQ ID NO: 5805960 - DNA, 25 bp, Homo sapien
ggacaccatgaggaacagcgcctct

SEQ ID NO: 5805961 - DNA, 25 bp, Homo sapien
gtagatatttggcttaaatatagtt

SEQ ID NO: 5805962 - DNA, 25 bp, Homo sapien
ggcggggcacagattggagagggct

SEQ ID NO: 5805963 - DNA, 25 bp, Homo sapien
tgccccagctctcgcactccgccgt

SEQ ID NO: 5805964 - DNA, 25 bp, Homo sapien
atcatgtcgatgagtccaaagcaca

SEQ ID NO: 5805965 - DNA, 25 bp, Homo sapien
tgtctgacatcttgagtcccctgga

SEQ ID NO: 5805966 - DNA, 25 bp, Homo sapien
ctcggggctccgctggcggcgtaca

SEQ ID NO: 5805967 - DNA, 25 bp, Homo sapien
ctctaaagaccaaacttcactctgg

SEQ ID NO: 5805968 - DNA, 25 bp, Homo sapien
ttaacaacctggccgcgtttagacc

SEQ ID NO: 5805969 - DNA, 25 bp, Homo sapien
tggcggtgccggtcctggtgaaaga

SEQ ID NO: 5805970 - DNA, 25 bp, Homo sapien
aggcggcaccgccaacagcggccat

SEQ ID NO: 5805971 - DNA, 25 bp, Homo sapien
gccgcgcaggcggcggcagcggcca

SEQ ID NO: 5805972 - DNA, 25 bp, Homo sapien
agaaagtgggcatggagggcggcgg

SEQ ID NO: 5805973 - DNA, 25 bp, Homo sapien
acaaatctgtgtatattatttggca

SEQ ID NO: 5805974 - DNA, 25 bp, Homo sapien
cagcagcaggcgcagcaccaggcgc

SEQ ID NO: 5805975 - DNA, 25 bp, Homo sapien
aagaacatggccccgctgccaagcg

SEQ ID NO: 5805976 - DNA, 25 bp, Homo sapien
acagcgcctctggccccggatggta

SEQ ID NO: 5805977 - DNA, 25 bp, Homo sapien
gcaggtcaagatctggttccagaac

SEQ ID NO: 5805978 - DNA, 25 bp, Homo sapien
ccgggccggccctagcccagcgctc

SEQ ID NO: 5805979 - DNA, 25 bp, Homo sapien
ttggggtgtctttttttggtgattc

SEQ ID NO: 5805980 - DNA, 25 bp, Homo sapien
gatgagtccaaagcacacgactccg

SEQ ID NO: 5805981 - DNA, 25 bp, Homo sapien
agaggacgccgggccggccctagcc

SEQ ID NO: 5805982 - DNA, 25 bp, Homo sapien
ggagcagccccggcaggctcagccg

SEQ ID NO: 5805983 - DNA, 25 bp, Homo sapien
ggcgctgcagggccaggtatccagc

SEQ ID NO: 5805984 - DNA, 25 bp, Homo sapien
atctccgtgggcagcggtggcgccg

SEQ ID NO: 5805985 - DNA, 25 bp, Homo sapien
gcggccatctccgtgggcagcggtg

SEQ ID NO: 5805986 - DNA, 25 bp, Homo sapien
acagaccaccatccaccgctgctcc

SEQ ID NO: 5805987 - DNA, 25 bp, Homo sapien
tgagcgagctgccgccgtaccagga

SEQ ID NO: 5805988 - DNA, 25 bp, Homo sapien
aaagaggactcgcttgtaaatacca

SEQ ID NO: 5805989 - DNA, 25 bp, Homo sapien
cgactggggctcagcgcagcgaagc

SEQ ID NO: 5805990 - DNA, 25 bp, Homo sapien
ccgcggcgctgcagggccaggtatc

SEQ ID NO: 5805991 - DNA, 25 bp, Homo sapien
gtgccaggcgggtgcccccgcgccg

SEQ ID NO: 5805992 - DNA, 25 bp, Homo sapien
gcaaagaggactcgcttgtaaatac

SEQ ID NO: 5805993 - DNA, 25 bp, Homo sapien
ttgtagctgtaaaacgctgtcaaaa

SEQ ID NO: 5805994 - DNA, 25 bp, Homo sapien
gcggcgaccgccctccgcgaaaata

SEQ ID NO: 5805995 - DNA, 25 bp, Homo sapien
aacttcactctgggcacactctgcc

SEQ ID NO: 5805996 - DNA, 25 bp, Homo sapien
ccagccccgcggcgctgcagggcca

SEQ ID NO: 5805997 - DNA, 25 bp, Homo sapien
ggggcaccgggtgcccgcagcagca

SEQ ID NO: 5805998 - DNA, 25 bp, Homo sapien
gaccgccctccgcgaaaatagtttg

SEQ ID NO: 5805999 - DNA, 25 bp, Homo sapien
gaacatggccccgctgccaagcgcg

SEQ ID NO: 5806000 - DNA, 25 bp, Homo sapien
cgccgggcgccgccagcctacaagg

SEQ ID NO: 5806001 - DNA, 25 bp, Homo sapien
ctggccgcgtttagaccaaggaaca

SEQ ID NO: 5806002 - DNA, 25 bp, Homo sapien
tctcagtgtctgacatcttgagtcc

SEQ ID NO: 5806003 - DNA, 25 bp, Homo sapien
ctggtgaaagacggcaaaccgtgcc

SEQ ID NO: 5806004 - DNA, 25 bp, Homo sapien
agcgctctgcctcaccgcttccctc

SEQ ID NO: 5806005 - DNA, 25 bp, Homo sapien
gttcctaagaagcttctaataaatt

SEQ ID NO: 5806006 - DNA, 25 bp, Homo sapien
ggcggcctcggggctccgctggcgg

SEQ ID NO: 5806007 - DNA, 25 bp, Homo sapien
cacaaaggccaaactgctggacgtc

SEQ ID NO: 5806008 - DNA, 25 bp, Homo sapien
agcccgatgtggtccggaggcagtg

SEQ ID NO: 5806009 - DNA, 25 bp, Homo sapien
aaagagtcttcaacataacccactt

SEQ ID NO: 5806010 - DNA, 25 bp, Homo sapien
ccagcgctctgcctcaccgcttccc

SEQ ID NO: 5806011 - DNA, 25 bp, Homo sapien
agacggcaaaccgtgccaggcgggt

SEQ ID NO: 5806012 - DNA, 25 bp, Homo sapien
ttcaaatgggttttccacgctaggg

SEQ ID NO: 5806013 - DNA, 25 bp, Homo sapien
ctgacatggctctggactctaaaga

SEQ ID NO: 5806014 - DNA, 25 bp, Homo sapien
gcgcaggccagtctccggacctggc

SEQ ID NO: 5806015 - DNA, 25 bp, Homo sapien
cacgcgcagcagcaggcgcagcacc

SEQ ID NO: 5806016 - DNA, 25 bp, Homo sapien
ctcaaggaatctttaagcagagaag

SEQ ID NO: 5806017 - DNA, 25 bp, Homo sapien
gcggcgggggtgccccagctctcgc

SEQ ID NO: 5806018 - DNA, 25 bp, Homo sapien
ccagcctacaaggccacgcgcagca

SEQ ID NO: 5806019 - DNA, 25 bp, Homo sapien
tctgggcacactctgccagcaaaga

SEQ ID NO: 5806020 - DNA, 25 bp, Homo sapien
atctcaaggaatctttaagcagaga

SEQ ID NO: 5806021 - DNA, 25 bp, Homo sapien
agtccccagcccttcacatttttta

SEQ ID NO: 5806022 - DNA, 25 bp, Homo sapien
ctacggcaccatgtcctgctccacc

SEQ ID NO: 5806023 - DNA, 25 bp, Homo sapien
tggctctggactctaaagaccaaac

SEQ ID NO: 5806024 - DNA, 25 bp, Homo sapien
gcctcggggctccgctggcggcgta

SEQ ID NO: 5806025 - DNA, 25 bp, Homo sapien
ctcagcagcagtcgccgcgacgcgt

SEQ ID NO: 5806026 - DNA, 25 bp, Homo sapien
taaaaagattctttttctgattaaa

SEQ ID NO: 5806027 - DNA, 25 bp, Homo sapien
agatctggttccagaaccaccgcta

SEQ ID NO: 5806028 - DNA, 25 bp, Homo sapien
caggcggcggcagcggccatctccg

SEQ ID NO: 5806029 - DNA, 25 bp, Homo sapien
cccggcaggctcagccgccgccgaa

SEQ ID NO: 5806030 - DNA, 25 bp, Homo sapien
gcagcagcaacaggctcagcagcag

SEQ ID NO: 5806031 - DNA, 25 bp, Homo sapien
agcctacaaggccacgcgcagcagc

SEQ ID NO: 5806032 - DNA, 25 bp, Homo sapien
gcaggccagtctccggacctggcgc

SEQ ID NO: 5806033 - DNA, 25 bp, Homo sapien
tcagtgtctgacatcttgagtcccc

SEQ ID NO: 5806034 - DNA, 25 bp, Homo sapien
ccggcgagcggcatgaacatgagcg

SEQ ID NO: 5806035 - DNA, 25 bp, Homo sapien
cgcttcgacttttcttaacaacctg

SEQ ID NO: 5806036 - DNA, 25 bp, Homo sapien
ggagcgcgagcacctggccagcatg

SEQ ID NO: 5806037 - DNA, 25 bp, Homo sapien
gggccggccctagcccagcgctctg

SEQ ID NO: 5806038 - DNA, 25 bp, Homo sapien
gacgcgtggcggtgccggtcctggt

SEQ ID NO: 5806039 - DNA, 25 bp, Homo sapien
ggacaaggcggcgcagcagcaactg

SEQ ID NO: 5806040 - DNA, 25 bp, Homo sapien
ccacacagaccaccatccaccgctg

SEQ ID NO: 5806041 - DNA, 25 bp, Homo sapien
caccgggtgcccgcagcagcaacag

SEQ ID NO: 5806042 - DNA, 25 bp, Homo sapien
agcaggcgcagcaccaggcgcaggc

SEQ ID NO: 5806043 - DNA, 25 bp, Homo sapien
gcagggccaggtatccagcctgtcc

SEQ ID NO: 5806044 - DNA, 25 bp, Homo sapien
gcgcaggccgcgcaggcggcggcag

SEQ ID NO: 5806045 - DNA, 25 bp, Homo sapien
ggactaaatgcctagtttttagtaa

SEQ ID NO: 5806046 - DNA, 25 bp, Homo sapien
gggctctgtgctgacatggctctgg

SEQ ID NO: 5806047 - DNA, 25 bp, Homo sapien
cttgagtcccctggaggaaagctac

SEQ ID NO: 5806048 - DNA, 25 bp, Homo sapien
ggcaaaccgtgccaggcgggtgccc

SEQ ID NO: 5806049 - DNA, 25 bp, Homo sapien
ctccgtgggcagcggtggcgccggc

SEQ ID NO: 5806050 - DNA, 25 bp, Homo sapien
accatgaggaacagcgcctctggcc

SEQ ID NO: 5806051 - DNA, 25 bp, Homo sapien
accaggcgcaggccgcgcaggcggc

SEQ ID NO: 5806052 - DNA, 25 bp, Homo sapien
tccacgcgcttcgacttttcttaac

SEQ ID NO: 5806053 - DNA, 25 bp, Homo sapien
gccgccagccccgcggcgctgcagg

SEQ ID NO: 5806054 - DNA, 25 bp, Homo sapien
acggcaccatgtcctgctccacctt

SEQ ID NO: 5806055 - DNA, 25 bp, Homo sapien
acatcttgagtcccctggaggaaag

SEQ ID NO: 5806056 - DNA, 25 bp, Homo sapien
cgcgagcacctggccagcatgatcc

SEQ ID NO: 5806057 - DNA, 25 bp, Homo sapien
agcagtcgccgcgacgcgtggcggt

SEQ ID NO: 5806058 - DNA, 25 bp, Homo sapien
aactgcagcaggacagcggcggcgg

SEQ ID NO: 5806059 - DNA, 25 bp, Homo sapien
ctgtacattttgttgtaaaaagaaa

SEQ ID NO: 5806060 - DNA, 25 bp, Homo sapien
tgtcgatgagtccaaagcacacgac

SEQ ID NO: 5806061 - DNA, 25 bp, Homo sapien
tgtgctgacatggctctggactcta

SEQ ID NO: 5806062 - DNA, 25 bp, Homo sapien
tgacacaaaggaagtgccccctccc

SEQ ID NO: 5806063 - DNA, 25 bp, Homo sapien
accgctgctccacgcgcttcgactt

SEQ ID NO: 5806064 - DNA, 25 bp, Homo sapien
cagcgaagcccgatgtggtccggag

SEQ ID NO: 5806065 - DNA, 25 bp, Homo sapien
ttttatgggcattgacaaatctgtg

SEQ ID NO: 5806066 - DNA, 25 bp, Homo sapien
ctgcagggccaggtatccagcctgt

SEQ ID NO: 5806067 - DNA, 25 bp, Homo sapien
ctgggctcgctgggggacgtgagca

SEQ ID NO: 5806068 - DNA, 25 bp, Homo sapien
aaagaccaaacttcactctgggcac

SEQ ID NO: 5806069 - DNA, 25 bp, Homo sapien
gagctggggagaggaaagagtcttc

SEQ ID NO: 5806070 - DNA, 25 bp, Homo sapien
ggacctggcgcaccacgccgccagc

SEQ ID NO: 5806071 - DNA, 25 bp, Homo sapien
gggcccggcgagcggcatgaacatg

SEQ ID NO: 5806072 - DNA, 25 bp, Homo sapien
caagaaagtgggcatggagggcggc

SEQ ID NO: 5806073 - DNA, 25 bp, Homo sapien
aaatgaaaaacaaccaagcgcatcc

SEQ ID NO: 5806074 - DNA, 25 bp, Homo sapien
catgggcggcctgggctcgctgggg

SEQ ID NO: 5806075 - DNA, 25 bp, Homo sapien
acgccgccagccccgcggcgctgca

SEQ ID NO: 5806076 - DNA, 25 bp, Homo sapien
catgcagcagcacgccgtggggcac

SEQ ID NO: 5806077 - DNA, 25 bp, Homo sapien
ccgctgccaagcgcgccgcgcagga

SEQ ID NO: 5806078 - DNA, 25 bp, Homo sapien
tcatgggcccggcgagcggcatgaa

SEQ ID NO: 5806079 - DNA, 25 bp, Homo sapien
ctcccgcttcatgggcccggcgagc

SEQ ID NO: 5806080 - DNA, 25 bp, Homo sapien
caaatgggttttccacgctagggcg

SEQ ID NO: 5806081 - DNA, 25 bp, Homo sapien
acctgaactcctcgggctcggacta

SEQ ID NO: 5806082 - DNA, 25 bp, Homo sapien
cggtggcgccggccttggcgcacac

SEQ ID NO: 5806083 - DNA, 25 bp, Homo sapien
ttttttatgggcattgacaaatctg

SEQ ID NO: 5806084 - DNA, 25 bp, Homo sapien
gccgcgcaggaagcgccgggtgctc

SEQ ID NO: 5806085 - DNA, 25 bp, Homo sapien
cccccgcgccgggcgccgccagcct

SEQ ID NO: 5806086 - DNA, 25 bp, Homo sapien
tgccaagcgcgccgcgcaggaagcg

SEQ ID NO: 5806087 - DNA, 25 bp, Homo sapien
aggaacagcgcctctggccccggat

SEQ ID NO: 5806088 - DNA, 25 bp, Homo sapien
atgtcctgctccaccttgctatacg

SEQ ID NO: 5806089 - DNA, 25 bp, Homo sapien
tcggacctggtgagaggacgccggg

SEQ ID NO: 5806090 - DNA, 25 bp, Homo sapien
ttccagaaccaccgctacaaaatga

SEQ ID NO: 5806091 - DNA, 25 bp, Homo sapien
gggcacagattggagagggctctgt

SEQ ID NO: 5806092 - DNA, 25 bp, Homo sapien
ggcttaaatatagttcctaagaagc

SEQ ID NO: 5806093 - DNA, 25 bp, Homo sapien
actgacacaaaggaagtgccccctc

SEQ ID NO: 5806094 - DNA, 25 bp, Homo sapien
ggccaggcggcaccgccaacagcgg

SEQ ID NO: 5806095 - DNA, 25 bp, Homo sapien
cggcaccctctggccgcctaggctc

SEQ ID NO: 5806096 - DNA, 25 bp, Homo sapien
ggctactgcaacggcaacctgggca

SEQ ID NO: 5806097 - DNA, 25 bp, Homo sapien
gctccgctggcggcgtacaggcagg

SEQ ID NO: 5806098 - DNA, 25 bp, Homo sapien
ggccaaggacaaggcggcgcagcag

SEQ ID NO: 5806099 - DNA, 25 bp, Homo sapien
ccacctgaactcctcgggctcggac

SEQ ID NO: 5806100 - DNA, 25 bp, Homo sapien
caacataacccacttgtcactgaca

SEQ ID NO: 5806101 - DNA, 25 bp, Homo sapien
cagcagcagtcgccgcgacgcgtgg

SEQ ID NO: 5806102 - DNA, 25 bp, Homo sapien
gaatcatgtcgatgagtccaaagca

SEQ ID NO: 5806103 - DNA, 25 bp, Homo sapien
gctgggggacgtgagcaagaacatg

SEQ ID NO: 5806104 - DNA, 25 bp, Homo sapien
ccacgccgccagccccgcggcgctg

SEQ ID NO: 5806105 - DNA, 25 bp, Homo sapien
tgggcatggagggcggcggcctcgg

SEQ ID NO: 5806106 - DNA, 25 bp, Homo sapien
agtaatctgtacattttgttgtaaa

SEQ ID NO: 5806107 - DNA, 25 bp, Homo sapien
ccatctcccgcttcatgggcccggc

SEQ ID NO: 5806108 - DNA, 25 bp, Homo sapien
ccctcctgcccgccacacagaccac

SEQ ID NO: 5806109 - DNA, 25 bp, Homo sapien
gccgccgaatcatgtcgatgagtcc

SEQ ID NO: 5806110 - DNA, 25 bp, Homo sapien
cagcagcacgccgtggggcaccacg

SEQ ID NO: 5806111 - DNA, 25 bp, Homo sapien
aaaccacaaaggccaaactgctgga

SEQ ID NO: 5806112 - DNA, 25 bp, Homo sapien
cagcgcaggccagtctccggacctg

SEQ ID NO: 5806113 - DNA, 25 bp, Homo sapien
gaaaaacaaccaagcgcatccaatc

SEQ ID NO: 5806114 - DNA, 25 bp, Homo sapien
cggatggtacggcgccaacccagac

SEQ ID NO: 5806115 - DNA, 25 bp, Homo sapien
cgtcaccgccgcctaccacatgacg

SEQ ID NO: 5806116 - DNA, 25 bp, Homo sapien
aggaaagctacaagaaagtgggcat

SEQ ID NO: 5806117 - DNA, 25 bp, Homo sapien
gccccggatggtacggcgccaaccc

SEQ ID NO: 5806118 - DNA, 25 bp, Homo sapien
gagctggagcgacgcttcaagcaac

SEQ ID NO: 5806119 - DNA, 25 bp, Homo sapien
tgctggacgtctttctttttttccc

SEQ ID NO: 5806120 - DNA, 25 bp, Homo sapien
aaaaaccacaaaggccaaactgctg

SEQ ID NO: 5806121 - DNA, 25 bp, Homo sapien
tggggcaccacggcgccgtcaccgc

SEQ ID NO: 5806122 - DNA, 25 bp, Homo sapien
acaaaatgaagcgccaggccaagga

SEQ ID NO: 5806123 - DNA, 25 bp, Homo sapien
acatgacggcggcgggggtgcccca

SEQ ID NO: 5806124 - DNA, 25 bp, Homo sapien
gccgccagcctacaaggccacgcgc

SEQ ID NO: 5806125 - DNA, 25 bp, Homo sapien
ccgtgggcagcggtggcgccggcct

SEQ ID NO: 5806126 - DNA, 25 bp, Homo sapien
acacgactccgttctcagtgtctga

SEQ ID NO: 5806127 - DNA, 25 bp, Homo sapien
gcaggtgtacgagctggagcgacgc

SEQ ID NO: 5806128 - DNA, 25 bp, Homo sapien
agcctgtcccacctgaactcctcgg

SEQ ID NO: 5806129 - DNA, 25 bp, Homo sapien
acggcaaaccgtgccaggcgggtgc

SEQ ID NO: 5806130 - DNA, 25 bp, Homo sapien
cctacaaggccacgcgcagcagcag

SEQ ID NO: 5806131 - DNA, 25 bp, Homo sapien
gacccgcgcttccccgccatctccc

SEQ ID NO: 5806132 - DNA, 25 bp, Homo sapien
gcccagcgctctgcctcaccgcttc

SEQ ID NO: 5806133 - DNA, 25 bp, Homo sapien
cccagcccttcacattttttatggg

SEQ ID NO: 5806134 - DNA, 25 bp, Homo sapien
ggtgccggtcctggtgaaagacggc

SEQ ID NO: 5806135 - DNA, 25 bp, Homo sapien
gggcattgacaaatctgtgtatatt

SEQ ID NO: 5806136 - DNA, 25 bp, Homo sapien
aaaacgctgtcaaaagttggactaa

SEQ ID NO: 5806137 - DNA, 25 bp, Homo sapien
ctgctccacgcgcttcgacttttct

SEQ ID NO: 5806138 - DNA, 25 bp, Homo sapien
aaccaccgctacaaaatgaagcgcc

SEQ ID NO: 5806139 - DNA, 25 bp, Homo sapien
cagtctccggacctggcgcaccacg

SEQ ID NO: 5806140 - DNA, 25 bp, Homo sapien
aagcaacagaagtacctgtcggcgc

SEQ ID NO: 5806141 - DNA, 25 bp, Homo sapien
gagggcggcggcctcggggctccgc

SEQ ID NO: 5806142 - DNA, 25 bp, Homo sapien
agcagcaacaggctcagcagcagtc

SEQ ID NO: 5806143 - DNA, 25 bp, Homo sapien
tgcaacggcaacctgggcaacatga

SEQ ID NO: 5806144 - DNA, 25 bp, Homo sapien
gctctggactctaaagaccaaactt

SEQ ID NO: 5806145 - DNA, 25 bp, Homo sapien
gtgattcaaatgggttttccacgct

SEQ ID NO: 5806146 - DNA, 25 bp, Homo sapien
ctcgcactccgccgtggggggctac

SEQ ID NO: 5806147 - DNA, 25 bp, Homo sapien
tgagaggacgccgggccggccctag

SEQ ID NO: 5806148 - DNA, 25 bp, Homo sapien
atattatttggcagtttggtatttg

SEQ ID NO: 5806149 - DNA, 25 bp, Homo sapien
tgtctttttttggtgattcaaatgg

SEQ ID NO: 5806150 - DNA, 25 bp, Homo sapien
tgacgcccacgcaggtcaagatctg

SEQ ID NO: 5806151 - DNA, 25 bp, Homo sapien
cacttgtcactgacacaaaggaagt

SEQ ID NO: 5806152 - DNA, 25 bp, Homo sapien
ccgaatcatgtcgatgagtccaaag

SEQ ID NO: 5806153 - DNA, 25 bp, Homo sapien
gagaggaaagagtcttcaacataac

SEQ ID NO: 5806154 - DNA, 25 bp, Homo sapien
agccccgcggcgctgcagggccagg

SEQ ID NO: 5806155 - DNA, 25 bp, Homo sapien
aaagtgggcatggagggcggcggcc

SEQ ID NO: 5806156 - DNA, 25 bp, Homo sapien
tcccctggaggaaagctacaagaaa

SEQ ID NO: 5806157 - DNA, 25 bp, Homo sapien
cgcgcttccccgccatctcccgctt

SEQ ID NO: 5806158 - DNA, 25 bp, Homo sapien
ctactgcaacggcaacctgggcaac

SEQ ID NO: 5806159 - DNA, 25 bp, Homo sapien
cgtggggcaccacggcgccgtcacc

SEQ ID NO: 5806160 - DNA, 25 bp, Homo sapien
gcaccaggcgcaggccgcgcaggcg

SEQ ID NO: 5806161 - DNA, 25 bp, Homo sapien
cagcaccaggcgcaggccgcgcagg

SEQ ID NO: 5806162 - DNA, 25 bp, Homo sapien
tttggcagtttggtatttgcggcgt

SEQ ID NO: 5806163 - DNA, 25 bp, Homo sapien
gggcgccgccagcctacaaggccac

SEQ ID NO: 5806164 - DNA, 25 bp, Homo sapien
tcggcgccggagcgcgagcacctgg

SEQ ID NO: 5806165 - DNA, 25 bp, Homo sapien
gccaggccaaggacaaggcggcgca

SEQ ID NO: 5806166 - DNA, 25 bp, Homo sapien
catccaatctcaaggaatctttaag

SEQ ID NO: 5806167 - DNA, 25 bp, Homo sapien
cccggatggtacggcgccaacccag

SEQ ID NO: 5806168 - DNA, 25 bp, Homo sapien
tccccgccatctcccgcttcatggg

SEQ ID NO: 5806169 - DNA, 25 bp, Homo sapien
cactctgccagcaaagaggactcgc

SEQ ID NO: 5806170 - DNA, 25 bp, Homo sapien
gaacatgagcggcatgggcggcctg

SEQ ID NO: 5806171 - DNA, 25 bp, Homo sapien
gcagcaggacagcggcggcggcggg

SEQ ID NO: 5806172 - DNA, 25 bp, Homo sapien
gctacaagaaagtgggcatggaggg

SEQ ID NO: 5806173 - DNA, 25 bp, Homo sapien
agcggccatgcagcagcacgccgtg

SEQ ID NO: 5806174 - DNA, 25 bp, Homo sapien
acggcaacctgggcaacatgagcga

SEQ ID NO: 5806175 - DNA, 25 bp, Homo sapien
cttcgacttttcttaacaacctggc

SEQ ID NO: 5806176 - DNA, 25 bp, Homo sapien
gctcagcgcagcgaagcccgatgtg

SEQ ID NO: 5806177 - DNA, 25 bp, Homo sapien
cgcatccaatctcaaggaatcttta

SEQ ID NO: 5806178 - DNA, 25 bp, Homo sapien
agtcttcaacataacccacttgtca

SEQ ID NO: 5806179 - DNA, 25 bp, Homo sapien
acgctagggcggggcacagattgga

SEQ ID NO: 5806180 - DNA, 25 bp, Homo sapien
cgcgcaggaagcgccgggtgctctt

SEQ ID NO: 5806181 - DNA, 25 bp, Homo sapien
cggccctagcccagcgctctgcctc

SEQ ID NO: 5806182 - DNA, 25 bp, Homo sapien
gtcgccgcgacgcgtggcggtgccg

SEQ ID NO: 5806183 - DNA, 25 bp, Homo sapien
gcgccgtcaccgccgcctaccacat

SEQ ID NO: 5806184 - DNA, 25 bp, Homo sapien
cagcatgatccacctgacgcccacg

SEQ ID NO: 5806185 - DNA, 25 bp, Homo sapien
cagcaaagaggactcgcttgtaaat

SEQ ID NO: 5806186 - DNA, 25 bp, Homo sapien
gcgtacaggcagggccaggcggcac

SEQ ID NO: 5806187 - DNA, 25 bp, Homo sapien
aggccacgcgcagcagcaggcgcag

SEQ ID NO: 5806188 - DNA, 25 bp, Homo sapien
cttcactctgggcacactctgccag

SEQ ID NO: 5806189 - DNA, 25 bp, Homo sapien
ggccccgctgccaagcgcgccgcgc

SEQ ID NO: 5806190 - DNA, 25 bp, Homo sapien
ccgccgccgaatcatgtcgatgagt

SEQ ID NO: 5806191 - DNA, 25 bp, Homo sapien
cggcgggagggaggagcagccccgg

SEQ ID NO: 5806192 - DNA, 25 bp, Homo sapien
tttctgttgtaacttatgtagatat

SEQ ID NO: 5806193 - DNA, 25 bp, Homo sapien
ccaagcgcgccgcgcaggaagcgcc

SEQ ID NO: 5806194 - DNA, 25 bp, Homo sapien
caaaccgtgccaggcgggtgccccc

SEQ ID NO: 5806195 - DNA, 25 bp, Homo sapien
tgctatacggtcggacctggtgaga

SEQ ID NO: 5806196 - DNA, 25 bp, Homo sapien
acaaggcggcgcagcagcaactgca

SEQ ID NO: 5806197 - DNA, 25 bp, Homo sapien
acgcaggtcaagatctggttccaga

SEQ ID NO: 5806198 - DNA, 25 bp, Homo sapien
tgacaaatctgtgtatattatttgg

SEQ ID NO: 5806199 - DNA, 25 bp, Homo sapien
aacaggctcagcagcagtcgccgcg

SEQ ID NO: 5806200 - DNA, 25 bp, Homo sapien
tttttggtgattcaaatgggttttc

SEQ ID NO: 5806201 - DNA, 25 bp, Homo sapien
tatttggcagtttggtatttgcggc

SEQ ID NO: 5806202 - DNA, 25 bp, Homo sapien
gcgccgggtgctcttctcgcaggcg

SEQ ID NO: 5806203 - DNA, 25 bp, Homo sapien
gtgtacgagctggagcgacgcttca

SEQ ID NO: 5806204 - DNA, 25 bp, Homo sapien
gccgcctaccacatgacggcggcgg

SEQ ID NO: 5806205 - DNA, 25 bp, Homo sapien
acgactccgttctcagtgtctgaca

SEQ ID NO: 5806206 - DNA, 25 bp, Homo sapien
cacctgacgcccacgcaggtcaaga

SEQ ID NO: 5806207 - DNA, 25 bp, Homo sapien
ggccaggtatccagcctgtcccacc

SEQ ID NO: 5806208 - DNA, 25 bp, Homo sapien
ggcgggggtgccccagctctcgcac

SEQ ID NO: 5806209 - DNA, 25 bp, Homo sapien
atccaccgctgctccacgcgcttcg

SEQ ID NO: 5806210 - DNA, 25 bp, Homo sapien
acagattggagagggctctgtgctg

SEQ ID NO: 5806211 - DNA, 25 bp, Homo sapien
tgaagcgccaggccaaggacaaggc

SEQ ID NO: 5806212 - DNA, 25 bp, Homo sapien
gccacgcgcagcagcaggcgcagca

SEQ ID NO: 5806213 - DNA, 25 bp, Homo sapien
gggtgcccgcagcagcaacaggctc

SEQ ID NO: 5806214 - DNA, 25 bp, Homo sapien
tccccggcaccctctggccgcctag

SEQ ID NO: 5806215 - DNA, 25 bp, Homo sapien
gctctgtgctgacatggctctggac

SEQ ID NO: 5806216 - DNA, 25 bp, Homo sapien
ggccttggcgcacacccgggccacc

SEQ ID NO: 5806217 - DNA, 25 bp, Homo sapien
atcttgagtcccctggaggaaagct

SEQ ID NO: 5806218 - DNA, 25 bp, Homo sapien
ccacatgacggcggcgggggtgccc

SEQ ID NO: 5806219 - DNA, 25 bp, Homo sapien
tttggtatttgcggcgtcagtcttt

SEQ ID NO: 5806220 - DNA, 25 bp, Homo sapien
atctggttccagaaccaccgctaca

SEQ ID NO: 5806221 - DNA, 25 bp, Homo sapien
cgccgtaccaggacaccatgaggaa

SEQ ID NO: 5806222 - DNA, 25 bp, Homo sapien
gtctccggacctggcgcaccacgcc

SEQ ID NO: 5806223 - DNA, 25 bp, Homo sapien
aggcgcaggccgcgcaggcggcggc

SEQ ID NO: 5806224 - DNA, 25 bp, Homo sapien
ccaggcggcaccgccaacagcggcc

SEQ ID NO: 5806225 - DNA, 25 bp, Homo sapien
ccgcttccctcctgcccgccacaca

SEQ ID NO: 5806226 - DNA, 25 bp, Homo sapien
actaaatgcctagtttttagtaatc

SEQ ID NO: 5806227 - DNA, 25 bp, Homo sapien
ggctcggactacggcaccatgtcct

SEQ ID NO: 5806228 - DNA, 25 bp, Homo sapien
ccgtgccaggcgggtgcccccgcgc

SEQ ID NO: 5806229 - DNA, 25 bp, Homo sapien
cttgctatacggtcggacctggtga

SEQ ID NO: 5806230 - DNA, 25 bp, Homo sapien
caaagcacacgactccgttctcagt

SEQ ID NO: 5806231 - DNA, 25 bp, Homo sapien
agtttggtatttgcggcgtcagtct

SEQ ID NO: 5806232 - DNA, 25 bp, Homo sapien
cacattttttatgggcattgacaaa

SEQ ID NO: 5806233 - DNA, 25 bp, Homo sapien
acgagctggagcgacgcttcaagca

SEQ ID NO: 5806234 - DNA, 25 bp, Homo sapien
agattggagagggctctgtgctgac

SEQ ID NO: 5806235 - DNA, 25 bp, Homo sapien
cggggcacagattggagagggctct

SEQ ID NO: 5806236 - DNA, 25 bp, Homo sapien
cgcttccccgccatctcccgcttca

SEQ ID NO: 5806237 - DNA, 25 bp, Homo sapien
ggtcggacctggtgagaggacgccg

SEQ ID NO: 5806238 - DNA, 25 bp, Homo sapien
ctttaagcagagaagggcataaaac

SEQ ID NO: 5806239 - DNA, 25 bp, Homo sapien
tgtcggcgccggagcgcgagcacct

SEQ ID NO: 5806240 - DNA, 25 bp, Homo sapien
ctggcggcgtacaggcagggccagg

SEQ ID NO: 5806241 - DNA, 25 bp, Homo sapien
cctaggctcagcggcgaccgccctc

SEQ ID NO: 5806242 - DNA, 25 bp, Homo sapien
aaagacggcaaaccgtgccaggcgg

SEQ ID NO: 5806243 - DNA, 25 bp, Homo sapien
caaacttcactctgggcacactctg

SEQ ID NO: 5806244 - DNA, 25 bp, Homo sapien
cgcgcaggcggcggcagcggccatc

SEQ ID NO: 5806245 - DNA, 25 bp, Homo sapien
ctctcgcactccgccgtggggggct

SEQ ID NO: 5806246 - DNA, 25 bp, Homo sapien
ctctgcctcaccgcttccctcctgc

SEQ ID NO: 5806247 - DNA, 25 bp, Homo sapien
gcacacgactccgttctcagtgtct

SEQ ID NO: 5806248 - DNA, 25 bp, Homo sapien
acggcgccaacccagacccgcgctt

SEQ ID NO: 5806249 - DNA, 25 bp, Homo sapien
tggactctaaagaccaaacttcact

SEQ ID NO: 5806250 - DNA, 25 bp, Homo sapien
catggagggcggcggcctcggggct

SEQ ID NO: 5806251 - DNA, 25 bp, Homo sapien
cccgcgccgggcgccgccagcctac

SEQ ID NO: 5806252 - DNA, 25 bp, Homo sapien
tgggggacgtgagcaagaacatggc

SEQ ID NO: 5806253 - DNA, 25 bp, Homo sapien
gtagctgtaaaacgctgtcaaaagt

SEQ ID NO: 5806254 - DNA, 25 bp, Homo sapien
ggccaaactgctggacgtctttctt

SEQ ID NO: 5806255 - DNA, 25 bp, Homo sapien
aagaagcttctaataaattatacaa

SEQ ID NO: 5806256 - DNA, 25 bp, Homo sapien
ggtgagaggacgccgggccggccct

SEQ ID NO: 5806257 - DNA, 25 bp, Homo sapien
gggctccgctggcggcgtacaggca

SEQ ID NO: 5806258 - DNA, 25 bp, Homo sapien
gccaggcgggtgcccccgcgccggg

SEQ ID NO: 5806259 - DNA, 25 bp, Homo sapien
ccacgcaggtcaagatctggttcca

SEQ ID NO: 5806260 - DNA, 25 bp, Homo sapien
ccttcacattttttatgggcattga

SEQ ID NO: 5806261 - DNA, 25 bp, Homo sapien
ctaagaagcttctaataaattatac

SEQ ID NO: 5806262 - DNA, 25 bp, Homo sapien
gtgaacttgtagctgtaaaacgctg

SEQ ID NO: 5806263 - DNA, 25 bp, Homo sapien
gccggccctagcccagcgctctgcc

SEQ ID NO: 5806264 - DNA, 25 bp, Homo sapien
gggaggagcagccccggcaggctca

SEQ ID NO: 5806265 - DNA, 25 bp, Homo sapien
ctcaccgcttccctcctgcccgcca

SEQ ID NO: 5806266 - DNA, 25 bp, Homo sapien
tcttcaacataacccacttgtcact

SEQ ID NO: 5806267 - DNA, 25 bp, Homo sapien
cctaccacatgacggcggcgggggt

SEQ ID NO: 5806268 - DNA, 25 bp, Homo sapien
ctgggcaacatgagcgagctgccgc

SEQ ID NO: 5806269 - DNA, 25 bp, Homo sapien
actgctggacgtctttctttttttc

SEQ ID NO: 5806270 - DNA, 25 bp, Homo sapien
atgacggcggcgggggtgccccagc

SEQ ID NO: 5806271 - DNA, 25 bp, Homo sapien
gagcggcatgggcggcctgggctcg

SEQ ID NO: 5806272 - DNA, 25 bp, Homo sapien
gcagcagcaactgcagcaggacagc

SEQ ID NO: 5806273 - DNA, 25 bp, Homo sapien
gcaacagaagtacctgtcggcgccg

SEQ ID NO: 5806274 - DNA, 25 bp, Homo sapien
ccacgctagggcggggcacagattg

SEQ ID NO: 5806275 - DNA, 25 bp, Homo sapien
ctgccgccgtaccaggacaccatga

SEQ ID NO: 5806276 - DNA, 25 bp, Homo sapien
catgtcgatgagtccaaagcacacg

SEQ ID NO: 5806277 - DNA, 25 bp, Homo sapien
gccgtcaccgccgcctaccacatga

SEQ ID NO: 5806278 - DNA, 25 bp, Homo sapien
cccgcttcatgggcccggcgagcgg

SEQ ID NO: 5806279 - DNA, 25 bp, Homo sapien
gcaccctctggccgcctaggctcag

SEQ ID NO: 5806280 - DNA, 25 bp, Homo sapien
ctgccagcaaagaggactcgcttgt

SEQ ID NO: 5806281 - DNA, 25 bp, Homo sapien
gcgacgcttcaagcaacagaagtac

SEQ ID NO: 5806282 - DNA, 25 bp, Homo sapien
caacggcaacctgggcaacatgagc

SEQ ID NO: 5806283 - DNA, 25 bp, Homo sapien
ggcggcctgggctcgctgggggacg

SEQ ID NO: 5806284 - DNA, 25 bp, Homo sapien
aggtgtacgagctggagcgacgctt

SEQ ID NO: 5806285 - DNA, 25 bp, Homo sapien
gaatctttaagcagagaagggcata

SEQ ID NO: 5806286 - DNA, 25 bp, Homo sapien
cctccccggcaccctctggccgcct

SEQ ID NO: 5806287 - DNA, 25 bp, Homo sapien
agggccaggtatccagcctgtccca

SEQ ID NO: 5806288 - DNA, 25 bp, Homo sapien
cgagcggcatgaacatgagcggcat

SEQ ID NO: 5806289 - DNA, 25 bp, Homo sapien
agcgcatccaatctcaaggaatctt

SEQ ID NO: 5806290 - DNA, 25 bp, Homo sapien
cggcctgggctcgctgggggacgtg

SEQ ID NO: 5806291 - DNA, 25 bp, Homo sapien
cagtcgccgcgacgcgtggcggtgc

SEQ ID NO: 5806292 - DNA, 25 bp, Homo sapien
ctacaaaatgaagcgccaggccaag

SEQ ID NO: 5806293 - DNA, 25 bp, Homo sapien
cagcccttcacattttttatgggca

SEQ ID NO: 5806294 - DNA, 25 bp, Homo sapien
ctggcgcaccacgccgccagccccg

SEQ ID NO: 5806295 - DNA, 25 bp, Homo sapien
cggccatgcagcagcacgccgtggg

SEQ ID NO: 5806296 - DNA, 25 bp, Homo sapien
caccgccaacagcggccatgcagca

SEQ ID NO: 5806297 - DNA, 25 bp, Homo sapien
tctcgcaggcgcaggtgtacgagct

SEQ ID NO: 5806298 - DNA, 25 bp, Homo sapien
ggcgccggagcgcgagcacctggcc

SEQ ID NO: 5806299 - DNA, 25 bp, Homo sapien
tagggcggggcacagattggagagg

SEQ ID NO: 5806300 - DNA, 25 bp, Homo sapien
aggcgcaggtgtacgagctggagcg

SEQ ID NO: 5806301 - DNA, 25 bp, Homo sapien
tgagtccaaagcacacgactccgtt

SEQ ID NO: 5806302 - DNA, 25 bp, Homo sapien
gctgccaagcgcgccgcgcaggaag

SEQ ID NO: 5806303 - DNA, 25 bp, Homo sapien
cttaaatatagttcctaagaagctt

SEQ ID NO: 5806304 - DNA, 25 bp, Homo sapien
tgggcacactctgccagcaaagagg

SEQ ID NO: 5806305 - DNA, 25 bp, Homo sapien
cgatgtggtccggaggcagtgggaa

SEQ ID NO: 5806306 - DNA, 25 bp, Homo sapien
cgccagcctacaaggccacgcgcag

SEQ ID NO: 5806307 - DNA, 25 bp, Homo sapien
ggtgccccagctctcgcactccgcc

SEQ ID NO: 5806308 - DNA, 25 bp, Homo sapien
gcatgaacatgagcggcatgggcgg

SEQ ID NO: 5806309 - DNA, 25 bp, Homo sapien
ctccgccgtggggggctactgcaac

SEQ ID NO: 5806310 - DNA, 25 bp, Homo sapien
tcgatgagtccaaagcacacgactc

SEQ ID NO: 5806311 - DNA, 25 bp, Homo sapien
gtatattatttggcagtttggtatt

SEQ ID NO: 5806312 - DNA, 25 bp, Homo sapien
tggagggcggcggcctcggggctcc

SEQ ID NO: 5806313 - DNA, 25 bp, Homo sapien
aacatgagcgagctgccgccgtacc

SEQ ID NO: 5806314 - DNA, 25 bp, Homo sapien
aaaacaaccaagcgcatccaatctc

SEQ ID NO: 5806315 - DNA, 25 bp, Homo sapien
gttctcagtgtctgacatcttgagt

SEQ ID NO: 5806316 - DNA, 25 bp, Homo sapien
ggctcagcagcagtcgccgcgacgc

SEQ ID NO: 5806317 - DNA, 25 bp, Homo sapien
cttcatgggcccggcgagcggcatg

SEQ ID NO: 5806318 - DNA, 25 bp, Homo sapien
ggtcctggtgaaagacggcaaaccg

SEQ ID NO: 5806319 - DNA, 25 bp, Homo sapien
gaaaatagtttgtttaatgtgaact

SEQ ID NO: 5806320 - DNA, 25 bp, Homo sapien
agctgccgccgtaccaggacaccat

SEQ ID NO: 5806321 - DNA, 25 bp, Homo sapien
ccctggaggaaagctacaagaaagt

SEQ ID NO: 5806322 - DNA, 25 bp, Homo sapien
accaggacaccatgaggaacagcgc

SEQ ID NO: 5806323 - DNA, 25 bp, Homo sapien
cagcaacaggctcagcagcagtcgc

SEQ ID NO: 5806324 - DNA, 25 bp, Homo sapien
gcgccgccagcctacaaggccacgc

SEQ ID NO: 5806325 - DNA, 25 bp, Homo sapien
caaccaagcgcatccaatctcaagg

SEQ ID NO: 5806326 - DNA, 25 bp, Homo sapien
actctgggcacactctgccagcaaa

SEQ ID NO: 5806327 - DNA, 25 bp, Homo sapien
aagcgccaggccaaggacaaggcgg

SEQ ID NO: 5806328 - DNA, 25 bp, Homo sapien
gtaccaggacaccatgaggaacagc

SEQ ID NO: 5806329 - DNA, 25 bp, Homo sapien
tccccagcccttcacattttttatg

SEQ ID NO: 5806330 - DNA, 25 bp, Homo sapien
ggggggctactgcaacggcaacctg

SEQ ID NO: 5806331 - DNA, 25 bp, Homo sapien
taaatgcctagtttttagtaatctg

SEQ ID NO: 5806332 - DNA, 25 bp, Homo sapien
ccaccagccaggcagcgcaggccag

SEQ ID NO: 5806333 - DNA, 25 bp, Homo sapien
gggctcagcgcagcgaagcccgatg

SEQ ID NO: 5806334 - DNA, 25 bp, Homo sapien
cctctggccccggatggtacggcgc

SEQ ID NO: 5806335 - DNA, 25 bp, Homo sapien
ttggactaaatgcctagtttttagt

SEQ ID NO: 5806336 - DNA, 25 bp, Homo sapien
gcaacaggctcagcagcagtcgccg

SEQ ID NO: 5806337 - DNA, 25 bp, Homo sapien
ccaaactgctggacgtctttctttt

SEQ ID NO: 5806338 - DNA, 25 bp, Homo sapien
cctgtcccacctgaactcctcgggc

SEQ ID NO: 5806339 - DNA, 25 bp, Homo sapien
cggcctcggggctccgctggcggcg

SEQ ID NO: 5806340 - DNA, 25 bp, Homo sapien
cctgtcggcgccggagcgcgagcac

SEQ ID NO: 5806341 - DNA, 25 bp, Homo sapien
atttgcggcgtcagtctttttctgt

SEQ ID NO: 5806342 - DNA, 25 bp, Homo sapien
cctgctccaccttgctatacggtcg

SEQ ID NO: 5806343 - DNA, 25 bp, Homo sapien
gccatgcagcagcacgccgtggggc

SEQ ID NO: 5806344 - DNA, 25 bp, Homo sapien
gacttttcttaacaacctggccgcg

SEQ ID NO: 5806345 - DNA, 25 bp, Homo sapien
tgggttttccacgctagggcggggc

SEQ ID NO: 5806346 - DNA, 25 bp, Homo sapien
ataacccacttgtcactgacacaaa

SEQ ID NO: 5806347 - DNA, 25 bp, Homo sapien
cacacccgggccaccagccaggcag

SEQ ID NO: 5806348 - DNA, 25 bp, Homo sapien
caagcgcatccaatctcaaggaatc

SEQ ID NO: 5806349 - DNA, 25 bp, Homo sapien
cccagacccgcgcttccccgccatc

SEQ ID NO: 5806350 - DNA, 25 bp, Homo sapien
cgcttcaagcaacagaagtacctgt

SEQ ID NO: 5806351 - DNA, 25 bp, Homo sapien
tgttgtaacttatgtagatatttgg

SEQ ID NO: 5806352 - DNA, 25 bp, Homo sapien
agcggtggcgccggccttggcgcac

SEQ ID NO: 5806353 - DNA, 25 bp, Homo sapien
ccaccgctgctccacgcgcttcgac

SEQ ID NO: 5806354 - DNA, 25 bp, Homo sapien
agagaagggcataaaacagctttgg

SEQ ID NO: 5806355 - DNA, 25 bp, Homo sapien
agtctttttctgttgtaacttatgt

SEQ ID NO: 5806356 - DNA, 25 bp, Homo sapien
tacctgtcggcgccggagcgcgagc

SEQ ID NO: 5806357 - DNA, 25 bp, Homo sapien
acggtcggacctggtgagaggacgc

SEQ ID NO: 5806358 - DNA, 25 bp, Homo sapien
ccggtcctggtgaaagacggcaaac

SEQ ID NO: 5806359 - DNA, 25 bp, Homo sapien
ggaagcgccgggtgctcttctcgca

SEQ ID NO: 5806360 - DNA, 25 bp, Homo sapien
ccatctccgtgggcagcggtggcgc

SEQ ID NO: 5806361 - DNA, 25 bp, Homo sapien
catggctctggactctaaagaccaa

SEQ ID NO: 5806362 - DNA, 25 bp, Homo sapien
tcccacctgaactcctcgggctcgg

SEQ ID NO: 5806363 - DNA, 25 bp, Homo sapien
ctgtaaaacgctgtcaaaagttgga

SEQ ID NO: 5806364 - DNA, 25 bp, Homo sapien
actggggctcagcgcagcgaagccc

SEQ ID NO: 5806365 - DNA, 25 bp, Homo sapien
acctgggcaacatgagcgagctgcc

SEQ ID NO: 5806366 - DNA, 25 bp, Homo sapien
gtaaaacgctgtcaaaagttggact

SEQ ID NO: 5806367 - DNA, 25 bp, Homo sapien
ccatgtcctgctccaccttgctata

SEQ ID NO: 5806368 - DNA, 25 bp, Homo sapien
cgcaggaagcgccgggtgctcttct

SEQ ID NO: 5806369 - DNA, 25 bp, Homo sapien
tacaagaaagtgggcatggagggcg

SEQ ID NO: 5806370 - DNA, 25 bp, Homo sapien
tggccgcctaggctcagcggcgacc

SEQ ID NO: 5806371 - DNA, 25 bp, Homo sapien
tggtgattcaaatgggttttccacg

SEQ ID NO: 5806372 - DNA, 25 bp, Homo sapien
ccgggcgccgccagcctacaaggcc

SEQ ID NO: 5806373 - DNA, 25 bp, Homo sapien
gcaacatgagcgagctgccgccgta

SEQ ID NO: 5806374 - DNA, 25 bp, Homo sapien
cacactctgccagcaaagaggactc

SEQ ID NO: 5806375 - DNA, 25 bp, Homo sapien
caaaggaagtgccccctccccggca

SEQ ID NO: 5806376 - DNA, 25 bp, Homo sapien
gtacaggcagggccaggcggcaccg

SEQ ID NO: 5806377 - DNA, 25 bp, Homo sapien
ggcaccgccaacagcggccatgcag

SEQ ID NO: 5806378 - DNA, 25 bp, Homo sapien
ggaaagagtcttcaacataacccac

SEQ ID NO: 5806379 - DNA, 25 bp, Homo sapien
cagcggccatctccgtgggcagcgg

SEQ ID NO: 5806380 - DNA, 25 bp, Homo sapien
tagaccaaggaacaaaaaaaccaca

SEQ ID NO: 5806381 - DNA, 25 bp, Homo sapien
caccatgtcctgctccaccttgcta

SEQ ID NO: 5806382 - DNA, 25 bp, Homo sapien
gaacttgtagctgtaaaacgctgtc

SEQ ID NO: 5806383 - DNA, 25 bp, Homo sapien
gcaccacggcgccgtcaccgccgcc

SEQ ID NO: 5806384 - DNA, 25 bp, Homo sapien
aaaatgaagcgccaggccaaggaca

SEQ ID NO: 5806385 - DNA, 25 bp, Homo sapien
ctgtgtatattatttggcagtttgg

SEQ ID NO: 5806386 - DNA, 25 bp, Homo sapien
caaaagttggactaaatgcctagtt

SEQ ID NO: 5806387 - DNA, 25 bp, Homo sapien
ccgtggggggctactgcaacggcaa

SEQ ID NO: 5806388 - DNA, 25 bp, Homo sapien
tagttcctaagaagcttctaataaa

SEQ ID NO: 5806389 - DNA, 25 bp, Homo sapien
gtggcgccggccttggcgcacaccc

SEQ ID NO: 5806390 - DNA, 25 bp, Homo sapien
accaccatccaccgctgctccacgc

SEQ ID NO: 5806391 - DNA, 25 bp, Homo sapien
cgcagcgaagcccgatgtggtccgg

SEQ ID NO: 5806392 - DNA, 25 bp, Homo sapien
cgctgctccacgcgcttcgactttt

SEQ ID NO: 5806393 - DNA, 25 bp, Homo sapien
tccgctggcggcgtacaggcagggc

SEQ ID NO: 5806394 - DNA, 25 bp, Homo sapien
aaccactcccagtccccagcccttc

SEQ ID NO: 5806395 - DNA, 25 bp, Homo sapien
actcctcgggctcggactacggcac

SEQ ID NO: 5806396 - DNA, 25 bp, Homo sapien
ggcatgggcggcctgggctcgctgg

SEQ ID NO: 5806397 - DNA, 25 bp, Homo sapien
ggtgtctttttttggtgattcaaat

SEQ ID NO: 5806398 - DNA, 25 bp, Homo sapien
cgggctcggactacggcaccatgtc

SEQ ID NO: 5806399 - DNA, 25 bp, Homo sapien
cccgccacacagaccaccatccacc

SEQ ID NO: 5806400 - DNA, 25 bp, Homo sapien
ggcacactctgccagcaaagaggac

SEQ ID NO: 5806401 - DNA, 25 bp, Homo sapien
ctccggacctggcgcaccacgccgc

SEQ ID NO: 5806402 - DNA, 25 bp, Homo sapien
cgcagcagcaggcgcagcaccaggc

SEQ ID NO: 5806403 - DNA, 25 bp, Homo sapien
acagcggccatgcagcagcacgccg

SEQ ID NO: 5806404 - DNA, 25 bp, Homo sapien
ggcgggtgcccccgcgccgggcgcc

SEQ ID NO: 5806405 - DNA, 25 bp, Homo sapien
ggcgcaccacgccgccagccccgcg

SEQ ID NO: 5806406 - DNA, 25 bp, Homo sapien
gtgcccgcagcagcaacaggctcag

SEQ ID NO: 5806407 - DNA, 25 bp, Homo sapien
cgctctgcctcaccgcttccctcct

SEQ ID NO: 5806408 - DNA, 25 bp, Homo sapien
cgctggcggcgtacaggcagggcca

SEQ ID NO: 5806409 - DNA, 25 bp, Homo sapien
taggctcagcggcgaccgccctccg

SEQ ID NO: 5806410 - DNA, 25 bp, Homo sapien
aagctacaagaaagtgggcatggag

SEQ ID NO: 5806411 - DNA, 25 bp, Homo sapien
cttatgtagatatttggcttaaata

SEQ ID NO: 5806412 - DNA, 25 bp, Homo sapien
aacagaagtacctgtcggcgccgga

SEQ ID NO: 5806413 - DNA, 25 bp, Homo sapien
gaggaaagagtcttcaacataaccc

SEQ ID NO: 5806414 - DNA, 25 bp, Homo sapien
caccatccaccgctgctccacgcgc

SEQ ID NO: 5806415 - DNA, 25 bp, Homo sapien
tatagttcctaagaagcttctaata

SEQ ID NO: 5806416 - DNA, 25 bp, Homo sapien
attatttggcagtttggtatttgcg

SEQ ID NO: 5806417 - DNA, 25 bp, Homo sapien
gtatttgcggcgtcagtctttttct

SEQ ID NO: 5806418 - DNA, 25 bp, Homo sapien
caaggaatctttaagcagagaaggg

SEQ ID NO: 5806419 - DNA, 25 bp, Homo sapien
agctctcgcactccgccgtgggggg

SEQ ID NO: 5806420 - DNA, 25 bp, Homo sapien
agaagggcataaaacagctttgggg

SEQ ID NO: 5806421 - DNA, 25 bp, Homo sapien
cgtggcggtgccggtcctggtgaaa

SEQ ID NO: 5806422 - DNA, 25 bp, Homo sapien
gcccggcgagcggcatgaacatgag

SEQ ID NO: 5806423 - DNA, 25 bp, Homo sapien
cgccagccccgcggcgctgcagggc

SEQ ID NO: 5806424 - DNA, 25 bp, Homo sapien
gccgggtgctcttctcgcaggcgca

SEQ ID NO: 5806425 - DNA, 25 bp, Homo sapien
ggggtgtctttttttggtgattcaa

SEQ ID NO: 5806426 - DNA, 25 bp, Homo sapien
ttgtaacttatgtagatatttggct

SEQ ID NO: 5806427 - DNA, 25 bp, Homo sapien
ggccaccagccaggcagcgcaggcc

SEQ ID NO: 5806428 - DNA, 25 bp, Homo sapien
ggcgactggggctcagcgcagcgaa

SEQ ID NO: 5806429 - DNA, 25 bp, Homo sapien
agcgcctctggccccggatggtacg

SEQ ID NO: 5806430 - DNA, 25 bp, Homo sapien
tgcccgccacacagaccaccatcca

SEQ ID NO: 5806431 - DNA, 25 bp, Homo sapien
ccagtccccagcccttcacattttt

SEQ ID NO: 5806432 - DNA, 25 bp, Homo sapien
gtcctgctccaccttgctatacggt

SEQ ID NO: 5806433 - DNA, 25 bp, Homo sapien
gggagggaggagcagccccggcagg

SEQ ID NO: 5806434 - DNA, 25 bp, Homo sapien
cgcgcagcagcaggcgcagcaccag

SEQ ID NO: 5806435 - DNA, 25 bp, Homo sapien
tgccggtcctggtgaaagacggcaa

SEQ ID NO: 5806436 - DNA, 25 bp, Homo sapien
tccggaggcagtgggaaggcgcggg

SEQ ID NO: 5806437 - DNA, 25 bp, Homo sapien
tctttttttggtgattcaaatgggt

SEQ ID NO: 5806438 - DNA, 25 bp, Homo sapien
cggcggcagcggccatctccgtggg

SEQ ID NO: 5806439 - DNA, 25 bp, Homo sapien
cggactacggcaccatgtcctgctc

SEQ ID NO: 5806440 - DNA, 25 bp, Homo sapien
tctggccccggatggtacggcgcca

SEQ ID NO: 5806441 - DNA, 25 bp, Homo sapien
aggacgccgggccggccctagccca

SEQ ID NO: 5806442 - DNA, 25 bp, Homo sapien
tcctaagaagcttctaataaattat

SEQ ID NO: 5806443 - DNA, 25 bp, Homo sapien
caggccaaggacaaggcggcgcagc

SEQ ID NO: 5806444 - DNA, 25 bp, Homo sapien
tcagcgcagcgaagcccgatgtggt

SEQ ID NO: 5806445 - DNA, 25 bp, Homo sapien
tagcccagcgctctgcctcaccgct

SEQ ID NO: 5806446 - DNA, 25 bp, Homo sapien
tttggtgattcaaatgggttttcca

SEQ ID NO: 5806447 - DNA, 25 bp, Homo sapien
catgaggaacagcgcctctggcccc

SEQ ID NO: 5806448 - DNA, 25 bp, Homo sapien
gcccacgcaggtcaagatctggttc

SEQ ID NO: 5806449 - DNA, 25 bp, Homo sapien
ggtccggaggcagtgggaaggcgcg

SEQ ID NO: 5806450 - DNA, 25 bp, Homo sapien
attgacaaatctgtgtatattattt

SEQ ID NO: 5806451 - DNA, 25 bp, Homo sapien
gattcaaatgggttttccacgctag

SEQ ID NO: 5806452 - DNA, 25 bp, Homo sapien
atccagcctgtcccacctgaactcc

SEQ ID NO: 5806453 - DNA, 25 bp, Homo sapien
gactctaaagaccaaacttcactct

SEQ ID NO: 5806454 - DNA, 25 bp, Homo sapien
caggacaccatgaggaacagcgcct

SEQ ID NO: 5806455 - DNA, 25 bp, Homo sapien
taatgtgaacttgtagctgtaaaac

SEQ ID NO: 5806456 - DNA, 25 bp, Homo sapien
gaagcccgatgtggtccggaggcag

SEQ ID NO: 5806457 - DNA, 25 bp, Homo sapien
gaactcctcgggctcggactacggc

SEQ ID NO: 5806458 - DNA, 25 bp, Homo sapien
tggccagcatgatccacctgacgcc

SEQ ID NO: 5806459 - DNA, 25 bp, Homo sapien
gccaacagcggccatgcagcagcac

SEQ ID NO: 5806460 - DNA, 25 bp, Homo sapien
accacggcgccgtcaccgccgccta

SEQ ID NO: 5806461 - DNA, 25 bp, Homo sapien
catgagcgagctgccgccgtaccag

SEQ ID NO: 5806462 - DNA, 25 bp, Homo sapien
cggcaggctcagccgccgccgaatc

SEQ ID NO: 5806463 - DNA, 25 bp, Homo sapien
gatccacctgacgcccacgcaggtc

SEQ ID NO: 5806464 - DNA, 25 bp, Homo sapien
ccgccaacagcggccatgcagcagc

SEQ ID NO: 5806465 - DNA, 25 bp, Homo sapien
ccagaaccaccgctacaaaatgaag

SEQ ID NO: 5806466 - DNA, 25 bp, Homo sapien
tcctggtgaaagacggcaaaccgtg

SEQ ID NO: 5806467 - DNA, 25 bp, Homo sapien
cacggcgccgtcaccgccgcctacc

SEQ ID NO: 5806468 - DNA, 25 bp, Homo sapien
gctcagccgccgccgaatcatgtcg

SEQ ID NO: 5806469 - DNA, 25 bp, Homo sapien
gcggtgccggtcctggtgaaagacg

SEQ ID NO: 5806470 - DNA, 25 bp, Homo sapien
cctagtttttagtaatctgtacatt

SEQ ID NO: 5806471 - DNA, 25 bp, Homo sapien
gtatccagcctgtcccacctgaact

SEQ ID NO: 5806472 - DNA, 25 bp, Homo sapien
cgccgcgacgcgtggcggtgccggt

SEQ ID NO: 5806473 - DNA, 25 bp, Homo sapien
tcagccgccgccgaatcatgtcgat

SEQ ID NO: 5806474 - DNA, 25 bp, Homo sapien
ggcggcgcagcagcaactgcagcag

SEQ ID NO: 5806475 - DNA, 25 bp, Homo sapien
tccaaagcacacgactccgttctca

SEQ ID NO: 5806476 - DNA, 25 bp, Homo sapien
acctggcgcaccacgccgccagccc

SEQ ID NO: 5806477 - DNA, 25 bp, Homo sapien
ccaaggacaaggcggcgcagcagca

SEQ ID NO: 5806478 - DNA, 25 bp, Homo sapien
caacctgggcaacatgagcgagctg

SEQ ID NO: 5806479 - DNA, 25 bp, Homo sapien
actgcaacggcaacctgggcaacat

SEQ ID NO: 5806480 - DNA, 25 bp, Homo sapien
gcagggccaggcggcaccgccaaca

SEQ ID NO: 5806481 - DNA, 25 bp, Homo sapien
ccgcagcagcaacaggctcagcagc

SEQ ID NO: 5806482 - DNA, 25 bp, Homo sapien
gaagtgccccctccccggcaccctc

SEQ ID NO: 5806483 - DNA, 25 bp, Homo sapien
gcaactgcagcaggacagcggcggc

SEQ ID NO: 5806484 - DNA, 25 bp, Homo sapien
aagcgccgggtgctcttctcgcagg

SEQ ID NO: 5806485 - DNA, 25 bp, Homo sapien
ctgtcaaaagttggactaaatgcct

SEQ ID NO: 5806486 - DNA, 25 bp, Homo sapien
acacagaccaccatccaccgctgct

SEQ ID NO: 5806487 - DNA, 25 bp, Homo sapien
ggcagcggccatctccgtgggcagc

SEQ ID NO: 5806488 - DNA, 25 bp, Homo sapien
accagccaggcagcgcaggccagtc

SEQ ID NO: 5806489 - DNA, 25 bp, Homo sapien
cgggccaccagccaggcagcgcagg

SEQ ID NO: 5806490 - DNA, 25 bp, Homo sapien
caggctcagcagcagtcgccgcgac

SEQ ID NO: 5806491 - DNA, 25 bp, Homo sapien
cctgacgcccacgcaggtcaagatc

SEQ ID NO: 5806492 - DNA, 25 bp, Homo sapien
atggccccgctgccaagcgcgccgc

SEQ ID NO: 5806493 - DNA, 25 bp, Homo sapien
gaggagcagccccggcaggctcagc

SEQ ID NO: 5806494 - DNA, 25 bp, Homo sapien
ggcgaccgccctccgcgaaaatagt

SEQ ID NO: 5806495 - DNA, 25 bp, Homo sapien
ggacgtgagcaagaacatggccccg

SEQ ID NO: 5806496 - DNA, 25 bp, Homo sapien
cgagcacctggccagcatgatccac

SEQ ID NO: 5806497 - DNA, 25 bp, Homo sapien
ggaggccgcggcgggagggaggagc

SEQ ID NO: 5806498 - DNA, 25 bp, Homo sapien
gaaaatgaaaaacaaccaagcgcat

SEQ ID NO: 5806499 - DNA, 25 bp, Homo sapien
ggttccagaaccaccgctacaaaat

SEQ ID NO: 5806500 - DNA, 25 bp, Homo sapien
cgctgtcaaaagttggactaaatgc

SEQ ID NO: 5806501 - DNA, 25 bp, Homo sapien
gcgcagcagcaactgcagcaggaca

SEQ ID NO: 5806502 - DNA, 25 bp, Homo sapien
ttgcggcgtcagtctttttctgttg

SEQ ID NO: 5806503 - DNA, 25 bp, Homo sapien
tggggagaggaaagagtcttcaaca

SEQ ID NO: 5806504 - DNA, 25 bp, Homo sapien
aacttatgtagatatttggcttaaa

SEQ ID NO: 5806505 - DNA, 25 bp, Homo sapien
accacaaaggccaaactgctggacg

SEQ ID NO: 5806506 - DNA, 25 bp, Homo sapien
accgccgcctaccacatgacggcgg

SEQ ID NO: 5806507 - DNA, 25 bp, Homo sapien
ggtgaaagacggcaaaccgtgccag

SEQ ID NO: 5806508 - DNA, 25 bp, Homo sapien
atgagcggcatgggcggcctgggct

SEQ ID NO: 5806509 - DNA, 25 bp, Homo sapien
gtacggcgccaacccagacccgcgc

SEQ ID NO: 5806510 - DNA, 25 bp, Homo sapien
cgcaccacgccgccagccccgcggc

SEQ ID NO: 5806511 - DNA, 25 bp, Homo sapien
ttggcttaaatatagttcctaagaa

SEQ ID NO: 5806512 - DNA, 25 bp, Homo sapien
gacatggctctggactctaaagacc

SEQ ID NO: 5806513 - DNA, 25 bp, Homo sapien
gtggggggctactgcaacggcaacc

SEQ ID NO: 5806514 - DNA, 25 bp, Homo sapien
ccgcgaaaatagtttgtttaatgtg

SEQ ID NO: 5806515 - DNA, 25 bp, Homo sapien
agcacctggccagcatgatccacct

SEQ ID NO: 5806516 - DNA, 25 bp, Homo sapien
gcatgatccacctgacgcccacgca

SEQ ID NO: 5806517 - DNA, 25 bp, Homo sapien
ggtgcccccgcgccgggcgccgcca

SEQ ID NO: 5806518 - DNA, 25 bp, Homo sapien
ggctgggaggccgcggcgggaggga

SEQ ID NO: 5806519 - DNA, 25 bp, Homo sapien
ctgggaggccgcggcgggagggagg

SEQ ID NO: 5806520 - DNA, 25 bp, Homo sapien
aaccgtgccaggcgggtgcccccgc

SEQ ID NO: 5806521 - DNA, 25 bp, Homo sapien
ggggctactgcaacggcaacctggg

SEQ ID NO: 5806522 - DNA, 25 bp, Homo sapien
gcagcggtggcgccggccttggcgc

SEQ ID NO: 5806523 - DNA, 25 bp, Homo sapien
tcgacttttcttaacaacctggccg

SEQ ID NO: 5806524 - DNA, 25 bp, Homo sapien
cactccgccgtggggggctactgca

SEQ ID NO: 5806525 - DNA, 25 bp, Homo sapien
acataacccacttgtcactgacaca

SEQ ID NO: 5806526 - DNA, 25 bp, Homo sapien
gggagaggaaagagtcttcaacata

SEQ ID NO: 5806527 - DNA, 25 bp, Homo sapien
ggacctggtgagaggacgccgggcc

SEQ ID NO: 5806528 - DNA, 25 bp, Homo sapien
cgcaggcggcggcagcggccatctc

SEQ ID NO: 5806529 - DNA, 25 bp, Homo sapien
cggcgccgtcaccgccgcctaccac

SEQ ID NO: 5806530 - DNA, 25 bp, Homo sapien
gcggcgctgcagggccaggtatcca

SEQ ID NO: 5806531 - DNA, 25 bp, Homo sapien
aagggcataaaacagctttggggtg

SEQ ID NO: 5806532 - DNA, 25 bp, Homo sapien
gagcaagaacatggccccgctgcca

SEQ ID NO: 5806533 - DNA, 25 bp, Homo sapien
agtgccccctccccggcaccctctg

SEQ ID NO: 5806534 - DNA, 25 bp, Homo sapien
atagtttgtttaatgtgaacttgta

SEQ ID NO: 5806535 - DNA, 25 bp, Homo sapien
ggcggcgtacaggcagggccaggcg

SEQ ID NO: 5806536 - DNA, 25 bp, Homo sapien
gccgcctaggctcagcggcgaccgc

SEQ ID NO: 5806537 - DNA, 25 bp, Homo sapien
actcccagtccccagcccttcacat

SEQ ID NO: 5806538 - DNA, 25 bp, Homo sapien
ccgttctcagtgtctgacatcttga

SEQ ID NO: 5806539 - DNA, 25 bp, Homo sapien
acttgtagctgtaaaacgctgtcaa

SEQ ID NO: 5806540 - DNA, 25 bp, Homo sapien
gcgaagcccgatgtggtccggaggc

SEQ ID NO: 5806541 - DNA, 25 bp, Homo sapien
tctttttctgttgtaacttatgtag

SEQ ID NO: 5806542 - DNA, 25 bp, Homo sapien
aggctcagccgccgccgaatcatgt

SEQ ID NO: 5806543 - DNA, 25 bp, Homo sapien
ctggaggaaagctacaagaaagtgg

SEQ ID NO: 5806544 - DNA, 25 bp, Homo sapien
ctccaccttgctatacggtcggacc

SEQ ID NO: 5806545 - DNA, 25 bp, Homo sapien
gaacagcgcctctggccccggatgg

SEQ ID NO: 5806546 - DNA, 25 bp, Homo sapien
tcaagcaacagaagtacctgtcggc

SEQ ID NO: 5806547 - DNA, 25 bp, Homo sapien
cgcttcatgggcccggcgagcggca

SEQ ID NO: 5806548 - DNA, 25 bp, Homo sapien
ggcgagcggcatgaacatgagcggc

SEQ ID NO: 5806549 - DNA, 25 bp, Homo sapien
ggcagcgcaggccagtctccggacc

SEQ ID NO: 5806550 - DNA, 25 bp, Homo sapien
cccggcaccctctggccgcctaggc

SEQ ID NO: 5806551 - DNA, 25 bp, Homo sapien
cgcctaggctcagcggcgaccgccc

SEQ ID NO: 5806552 - DNA, 25 bp, Homo sapien
cgcctaccacatgacggcggcgggg

SEQ ID NO: 5806553 - DNA, 25 bp, Homo sapien
cacccgggccaccagccaggcagcg

SEQ ID NO: 5806554 - DNA, 25 bp, Homo sapien
cccgggccaccagccaggcagcgca

SEQ ID NO: 5806555 - DNA, 25 bp, Homo sapien
tcactctgggcacactctgccagca

SEQ ID NO: 5806556 - DNA, 25 bp, Homo sapien
caccgcttccctcctgcccgccaca

SEQ ID NO: 5806557 - DNA, 25 bp, Homo sapien
caggcgcagcaccaggcgcaggccg

SEQ ID NO: 5806558 - DNA, 25 bp, Homo sapien
tagtttttagtaatctgtacatttt

SEQ ID NO: 5806559 - DNA, 25 bp, Homo sapien
ccagctctcgcactccgccgtgggg

SEQ ID NO: 5806560 - DNA, 25 bp, Homo sapien
gcccttcacattttttatgggcatt

SEQ ID NO: 5806561 - DNA, 25 bp, Homo sapien
cagccccggcaggctcagccgccgc

SEQ ID NO: 5806562 - DNA, 25 bp, Homo sapien
cggcgcagcagcaactgcagcagga

SEQ ID NO: 5806563 - DNA, 25 bp, Homo sapien
ggcgcacacccgggccaccagccag

SEQ ID NO: 5806564 - DNA, 25 bp, Homo sapien
gcagcaggcgcagcaccaggcgcag

SEQ ID NO: 5806565 - DNA, 25 bp, Homo sapien
gcagtttggtatttgcggcgtcagt

SEQ ID NO: 5806566 - DNA, 25 bp, Homo sapien
aacgctgtcaaaagttggactaaat

SEQ ID NO: 5806567 - DNA, 25 bp, Homo sapien
tcaccgccgcctaccacatgacggc

SEQ ID NO: 5806568 - DNA, 25 bp, Homo sapien
atgaaaaacaaccaagcgcatccaa

SEQ ID NO: 5806569 - DNA, 25 bp, Homo sapien
cgcacacccgggccaccagccaggc

SEQ ID NO: 5806570 - DNA, 25 bp, Homo sapien
agaaaaaccactcccagtccccagc

SEQ ID NO: 5806571 - DNA, 25 bp, Homo sapien
gggcaccacggcgccgtcaccgccg

SEQ ID NO: 5806572 - DNA, 25 bp, Homo sapien
gtaacttatgtagatatttggctta

SEQ ID NO: 5806573 - DNA, 25 bp, Homo sapien
atacggtcggacctggtgagaggac

SEQ ID NO: 5806574 - DNA, 25 bp, Homo sapien
agctgtaaaacgctgtcaaaagttg

SEQ ID NO: 5806575 - DNA, 25 bp, Homo sapien
gggcagcggtggcgccggccttggc

SEQ ID NO: 5806576 - DNA, 25 bp, Homo sapien
cctctggccgcctaggctcagcggc

SEQ ID NO: 5806577 - DNA, 25 bp, Homo sapien
cgggtgcccccgcgccgggcgccgc

SEQ ID NO: 5806578 - DNA, 25 bp, Homo sapien
gactccgttctcagtgtctgacatc

SEQ ID NO: 5806579 - DNA, 25 bp, Homo sapien
ctcttctcgcaggcgcaggtgtacg

SEQ ID NO: 5806580 - DNA, 25 bp, Homo sapien
ctcagcggcgaccgccctccgcgaa

SEQ ID NO: 5806581 - DNA, 25 bp, Homo sapien
gtcaagatctggttccagaaccacc

SEQ ID NO: 5806582 - DNA, 25 bp, Homo sapien
agtacctgtcggcgccggagcgcga

SEQ ID NO: 5806583 - DNA, 25 bp, Homo sapien
gatggtacggcgccaacccagaccc

SEQ ID NO: 5806584 - DNA, 25 bp, Homo sapien
gccaggcagcgcaggccagtctccg

SEQ ID NO: 5806585 - DNA, 25 bp, Homo sapien
caagatctggttccagaaccaccgc

SEQ ID NO: 5806586 - DNA, 25 bp, Homo sapien
gcataaaacagctttggggtgtctt

SEQ ID NO: 5806587 - DNA, 25 bp, Homo sapien
atatttggcttaaatatagttccta

SEQ ID NO: 5806588 - DNA, 25 bp, Homo sapien
gagggaggagcagccccggcaggct

SEQ ID NO: 5806589 - DNA, 25 bp, Homo sapien
tgacatcttgagtcccctggaggaa

SEQ ID NO: 5806590 - DNA, 25 bp, Homo sapien
tcttaacaacctggccgcgtttaga

SEQ ID NO: 5806591 - DNA, 25 bp, Homo sapien
ggctcagcggcgaccgccctccgcg

SEQ ID NO: 5806592 - DNA, 25 bp, Homo sapien
cgcagcaccaggcgcaggccgcgca

SEQ ID NO: 5806593 - DNA, 25 bp, Homo sapien
ccggccttggcgcacacccgggcca

SEQ ID NO: 5806594 - DNA, 25 bp, Homo sapien
tcccagtccccagcccttcacattt

SEQ ID NO: 5806595 - DNA, 25 bp, Homo sapien
cccctccccggcaccctctggccgc

SEQ ID NO: 5806596 - DNA, 25 bp, Homo sapien
acctggtgagaggacgccgggccgg

SEQ ID NO: 5806597 - DNA, 25 bp, Homo sapien
tgcagcagcacgccgtggggcacca

SEQ ID NO: 5806598 - DNA, 25 bp, Homo sapien
aggcagggccaggcggcaccgccaa

SEQ ID NO: 5806599 - DNA, 25 bp, Homo sapien
ttttttgaagggaggacgggagctg

SEQ ID NO: 5806600 - DNA, 25 bp, Homo sapien
ctggttccagaaccaccgctacaaa

SEQ ID NO: 5806601 - DNA, 25 bp, Homo sapien
ccccgcggcgctgcagggccaggta

SEQ ID NO: 5806602 - DNA, 25 bp, Homo sapien
cgccacacagaccaccatccaccgc

SEQ ID NO: 5806603 - DNA, 25 bp, Homo sapien
accctctggccgcctaggctcagcg

SEQ ID NO: 5806604 - DNA, 25 bp, Homo sapien
ggtgctcttctcgcaggcgcaggtg

SEQ ID NO: 5806605 - DNA, 25 bp, Homo sapien
cgaccgtatagcaaggtggagcagg

SEQ ID NO: 5806606 - DNA, 25 bp, Homo sapien
gtatttacaagcgagtcctctttgc

SEQ ID NO: 5806607 - DNA, 25 bp, Homo sapien
cttgaagcgtcgctccagctcgtac

SEQ ID NO: 5806608 - DNA, 25 bp, Homo sapien
ggaactatatttaagccaaatatct

SEQ ID NO: 5806609 - DNA, 25 bp, Homo sapien
cgcttcattttgtagcggtggttct

SEQ ID NO: 5806610 - DNA, 25 bp, Homo sapien
gcgccgtaccatccggggccagagg

SEQ ID NO: 5806611 - DNA, 25 bp, Homo sapien
cgggcccatgaagcgggagatggcg

SEQ ID NO: 5806612 - DNA, 25 bp, Homo sapien
gtcgctccagctcgtacacctgcgc

SEQ ID NO: 5806613 - DNA, 25 bp, Homo sapien
cgacatgattcggcggcggctgagc

SEQ ID NO: 5806614 - DNA, 25 bp, Homo sapien
ccagagccatgtcagcacagagccc

SEQ ID NO: 5806615 - DNA, 25 bp, Homo sapien
cggcggcagctcgctcatgttgccc

SEQ ID NO: 5806616 - DNA, 25 bp, Homo sapien
tgccaaataatatacacagatttgt

SEQ ID NO: 5806617 - DNA, 25 bp, Homo sapien
caaggccggcgccaccgctgcccac

SEQ ID NO: 5806618 - DNA, 25 bp, Homo sapien
gcctaggcggccagagggtgccggg

SEQ ID NO: 5806619 - DNA, 25 bp, Homo sapien
gcggggaagcgcgggtctgggttgg

SEQ ID NO: 5806620 - DNA, 25 bp, Homo sapien
tgtcaatgcccataaaaaatgtgaa

SEQ ID NO: 5806621 - DNA, 25 bp, Homo sapien
ggctggtggcccgggtgtgcgccaa

SEQ ID NO: 5806622 - DNA, 25 bp, Homo sapien
tttatgcccttctctgcttaaagat

SEQ ID NO: 5806623 - DNA, 25 bp, Homo sapien
tcctgcgcggcgcgcttggcagcgg

SEQ ID NO: 5806624 - DNA, 25 bp, Homo sapien
agacactgagaacggagtcgtgtgc

SEQ ID NO: 5806625 - DNA, 25 bp, Homo sapien
tgctggcagagtgtgcccagagtga

SEQ ID NO: 5806626 - DNA, 25 bp, Homo sapien
cagcacagagccctctccaatctgt

SEQ ID NO: 5806627 - DNA, 25 bp, Homo sapien
ttcggcggcggctgagcctgccggg

SEQ ID NO: 5806628 - DNA, 25 bp, Homo sapien
gcgccaggtccggagactggcctgc

SEQ ID NO: 5806629 - DNA, 25 bp, Homo sapien
gacctgcgtgggcgtcaggtggatc

SEQ ID NO: 5806630 - DNA, 25 bp, Homo sapien
cagctcgctcatgttgcccaggttg

SEQ ID NO: 5806631 - DNA, 25 bp, Homo sapien
gcaaggtggagcaggacatggtgcc

SEQ ID NO: 5806632 - DNA, 25 bp, Homo sapien
gccgccgcctgcgcggcctgcgcct

SEQ ID NO: 5806633 - DNA, 25 bp, Homo sapien
gcgccgacaggtacttctgttgctt

SEQ ID NO: 5806634 - DNA, 25 bp, Homo sapien
cggcgtcctctcaccaggtccgacc

SEQ ID NO: 5806635 - DNA, 25 bp, Homo sapien
cctgtacgccgccagcggagccccg

SEQ ID NO: 5806636 - DNA, 25 bp, Homo sapien
cccaggttgccgttgcagtagcccc

SEQ ID NO: 5806637 - DNA, 25 bp, Homo sapien
ctggctggtggcccgggtgtgcgcc

SEQ ID NO: 5806638 - DNA, 25 bp, Homo sapien
ccactttcttgtagctttcctccag

SEQ ID NO: 5806639 - DNA, 25 bp, Homo sapien
tggccctgcctgtacgccgccagcg

SEQ ID NO: 5806640 - DNA, 25 bp, Homo sapien
cgctcatgttcatgccgctcgccgg

SEQ ID NO: 5806641 - DNA, 25 bp, Homo sapien
gcgctgggctagggccggcccggcg

SEQ ID NO: 5806642 - DNA, 25 bp, Homo sapien
gccaaggccggcgccaccgctgccc

SEQ ID NO: 5806643 - DNA, 25 bp, Homo sapien
tggtatttacaagcgagtcctcttt

SEQ ID NO: 5806644 - DNA, 25 bp, Homo sapien
tgtggtttttttgttccttggtcta

SEQ ID NO: 5806645 - DNA, 25 bp, Homo sapien
agagtgaagtttggtctttagagtc

SEQ ID NO: 5806646 - DNA, 25 bp, Homo sapien
caagttcacattaaacaaactattt

SEQ ID NO: 5806647 - DNA, 25 bp, Homo sapien
tggatggtggtctgtgtggcgggca

SEQ ID NO: 5806648 - DNA, 25 bp, Homo sapien
ccgccttgtccttggcctggcgctt

SEQ ID NO: 5806649 - DNA, 25 bp, Homo sapien
tatagcaaggtggagcaggacatgg

SEQ ID NO: 5806650 - DNA, 25 bp, Homo sapien
ccacggcggagtgcgagagctgggg

SEQ ID NO: 5806651 - DNA, 25 bp, Homo sapien
cgtggtgccccacggcgtgctgctg

SEQ ID NO: 5806652 - DNA, 25 bp, Homo sapien
cctgcctgtacgccgccagcggagc

SEQ ID NO: 5806653 - DNA, 25 bp, Homo sapien
gctgctgagcctgttgctgctgcgg

SEQ ID NO: 5806654 - DNA, 25 bp, Homo sapien
cgcgcttggcagcggggccatgttc

SEQ ID NO: 5806655 - DNA, 25 bp, Homo sapien
gtgccccgccctagcgtggaaaacc

SEQ ID NO: 5806656 - DNA, 25 bp, Homo sapien
gagcacccggcgcttcctgcgcggc

SEQ ID NO: 5806657 - DNA, 25 bp, Homo sapien
tgcgcctgcgagaagagcacccggc

SEQ ID NO: 5806658 - DNA, 25 bp, Homo sapien
gagggaagcggtgaggcagagcgct

SEQ ID NO: 5806659 - DNA, 25 bp, Homo sapien
cctgcgagaagagcacccggcgctt

SEQ ID NO: 5806660 - DNA, 25 bp, Homo sapien
ctgcctggctggtggcccgggtgtg

SEQ ID NO: 5806661 - DNA, 25 bp, Homo sapien
gtagctttcctccaggggactcaag

SEQ ID NO: 5806662 - DNA, 25 bp, Homo sapien
ggaccggcaccgccacgcgtcgcgg

SEQ ID NO: 5806663 - DNA, 25 bp, Homo sapien
gttggcgccgtaccatccggggcca

SEQ ID NO: 5806664 - DNA, 25 bp, Homo sapien
tcatgtggtaggcggcggtgacggc

SEQ ID NO: 5806665 - DNA, 25 bp, Homo sapien
ccttgtaggctggcggcgcccggcg

SEQ ID NO: 5806666 - DNA, 25 bp, Homo sapien
gggagggggcacttcctttgtgtca

SEQ ID NO: 5806667 - DNA, 25 bp, Homo sapien
cggagggcggtcgccgctgagccta

SEQ ID NO: 5806668 - DNA, 25 bp, Homo sapien
tacacctgcgcctgcgagaagagca

SEQ ID NO: 5806669 - DNA, 25 bp, Homo sapien
actgagaacggagtcgtgtgctttg

SEQ ID NO: 5806670 - DNA, 25 bp, Homo sapien
aaatgtgaagggctggggactggga

SEQ ID NO: 5806671 - DNA, 25 bp, Homo sapien
gcctgctgctgcgcgtggccttgta

SEQ ID NO: 5806672 - DNA, 25 bp, Homo sapien
gcgctgttcctcatggtgtcctggt

SEQ ID NO: 5806673 - DNA, 25 bp, Homo sapien
ggtggagcaggacatggtgccgtag

SEQ ID NO: 5806674 - DNA, 25 bp, Homo sapien
gccgcaaataccaaactgccaaata

SEQ ID NO: 5806675 - DNA, 25 bp, Homo sapien
cctggccctgcagcgccgcggggct

SEQ ID NO: 5806676 - DNA, 25 bp, Homo sapien
ccggcgcttcctgcgcggcgcgctt

SEQ ID NO: 5806677 - DNA, 25 bp, Homo sapien
gacagcgttttacagctacaagttc

SEQ ID NO: 5806678 - DNA, 25 bp, Homo sapien
ctggtacggcggcagctcgctcatg

SEQ ID NO: 5806679 - DNA, 25 bp, Homo sapien
tcagtgacaagtgggttatgttgaa

SEQ ID NO: 5806680 - DNA, 25 bp, Homo sapien
cggtgaggcagagcgctgggctagg

SEQ ID NO: 5806681 - DNA, 25 bp, Homo sapien
gggggcacttcctttgtgtcagtga

SEQ ID NO: 5806682 - DNA, 25 bp, Homo sapien
ccgccgtcatgtggtaggcggcggt

SEQ ID NO: 5806683 - DNA, 25 bp, Homo sapien
tgtgtcagtgacaagtgggttatgt

SEQ ID NO: 5806684 - DNA, 25 bp, Homo sapien
cgcggggctggcggcgtggtgcgcc

SEQ ID NO: 5806685 - DNA, 25 bp, Homo sapien
gccgtctttcaccaggaccggcacc

SEQ ID NO: 5806686 - DNA, 25 bp, Homo sapien
agcgtggaaaacccatttgaatcac

SEQ ID NO: 5806687 - DNA, 25 bp, Homo sapien
ctccagctcgtacacctgcgcctgc

SEQ ID NO: 5806688 - DNA, 25 bp, Homo sapien
ccggcccggcgtcctctcaccaggt

SEQ ID NO: 5806689 - DNA, 25 bp, Homo sapien
tgccggggagggggcacttcctttg

SEQ ID NO: 5806690 - DNA, 25 bp, Homo sapien
tagcggtggttctggaaccagatct

SEQ ID NO: 5806691 - DNA, 25 bp, Homo sapien
cgtccagcagtttggcctttgtggt

SEQ ID NO: 5806692 - DNA, 25 bp, Homo sapien
ctgttgcttgaagcgtcgctccagc

SEQ ID NO: 5806693 - DNA, 25 bp, Homo sapien
tggttctggaaccagatcttgacct

SEQ ID NO: 5806694 - DNA, 25 bp, Homo sapien
atttacaagcgagtcctctttgctg

SEQ ID NO: 5806695 - DNA, 25 bp, Homo sapien
gatttgtcaatgcccataaaaaatg

SEQ ID NO: 5806696 - DNA, 25 bp, Homo sapien
gcccgggtgtgcgccaaggccggcg

SEQ ID NO: 5806697 - DNA, 25 bp, Homo sapien
tcccccagcgagcccaggccgccca

SEQ ID NO: 5806698 - DNA, 25 bp, Homo sapien
ccaaagctgttttatgcccttctct

SEQ ID NO: 5806699 - DNA, 25 bp, Homo sapien
catgaagcgggagatggcggggaag

SEQ ID NO: 5806700 - DNA, 25 bp, Homo sapien
cttaggaactatatttaagccaaat

SEQ ID NO: 5806701 - DNA, 25 bp, Homo sapien
ttcctccaggggactcaagatgtca

SEQ ID NO: 5806702 - DNA, 25 bp, Homo sapien
acttttgacagcgttttacagctac

SEQ ID NO: 5806703 - DNA, 25 bp, Homo sapien
gagtccagagccatgtcagcacaga

SEQ ID NO: 5806704 - DNA, 25 bp, Homo sapien
ccgccgccctccatgcccactttct

SEQ ID NO: 5806705 - DNA, 25 bp, Homo sapien
gccggcgccaccgctgcccacggag

SEQ ID NO: 5806706 - DNA, 25 bp, Homo sapien
aagtgggttatgttgaagactcttt

SEQ ID NO: 5806707 - DNA, 25 bp, Homo sapien
cgtcaggtggatcatgctggccagg

SEQ ID NO: 5806708 - DNA, 25 bp, Homo sapien
cggtgccgcctggccctgcctgtac

SEQ ID NO: 5806709 - DNA, 25 bp, Homo sapien
tgaagtttggtctttagagtccaga

SEQ ID NO: 5806710 - DNA, 25 bp, Homo sapien
ttggtctttagagtccagagccatg

SEQ ID NO: 5806711 - DNA, 25 bp, Homo sapien
ggtgctgcgcctgctgctgcgcgtg

SEQ ID NO: 5806712 - DNA, 25 bp, Homo sapien
cgccgccgccgctgtcctgctgcag

SEQ ID NO: 5806713 - DNA, 25 bp, Homo sapien
cacctgcgcctgcgagaagagcacc

SEQ ID NO: 5806714 - DNA, 25 bp, Homo sapien
aagacgtccagcagtttggcctttg

SEQ ID NO: 5806715 - DNA, 25 bp, Homo sapien
catgttcatgccgctcgccgggccc

SEQ ID NO: 5806716 - DNA, 25 bp, Homo sapien
cgtctttcaccaggaccggcaccgc

SEQ ID NO: 5806717 - DNA, 25 bp, Homo sapien
acggcggagtgcgagagctggggca

SEQ ID NO: 5806718 - DNA, 25 bp, Homo sapien
cgcggagggcggtcgccgctgagcc

SEQ ID NO: 5806719 - DNA, 25 bp, Homo sapien
ttgagattggatgcgcttggttgtt

SEQ ID NO: 5806720 - DNA, 25 bp, Homo sapien
tttgttccttggtctaaacgcggcc

SEQ ID NO: 5806721 - DNA, 25 bp, Homo sapien
tttgctggcagagtgtgcccagagt

SEQ ID NO: 5806722 - DNA, 25 bp, Homo sapien
aaatatctacataagttacaacaga

SEQ ID NO: 5806723 - DNA, 25 bp, Homo sapien
gctcatgttgcccaggttgccgttg

SEQ ID NO: 5806724 - DNA, 25 bp, Homo sapien
gtccagagccatgtcagcacagagc

SEQ ID NO: 5806725 - DNA, 25 bp, Homo sapien
gggctggcggcgtggtgcgccaggt

SEQ ID NO: 5806726 - DNA, 25 bp, Homo sapien
ccgctgcccacggagatggccgctg

SEQ ID NO: 5806727 - DNA, 25 bp, Homo sapien
tcaggtggatcatgctggccaggtg

SEQ ID NO: 5806728 - DNA, 25 bp, Homo sapien
gcaggacatggtgccgtagtccgag

SEQ ID NO: 5806729 - DNA, 25 bp, Homo sapien
ggctagggccggcccggcgtcctct

SEQ ID NO: 5806730 - DNA, 25 bp, Homo sapien
ccgagcccgaggagttcaggtggga

SEQ ID NO: 5806731 - DNA, 25 bp, Homo sapien
aggtacttctgttgcttgaagcgtc

SEQ ID NO: 5806732 - DNA, 25 bp, Homo sapien
cccataaaaaatgtgaagggctggg

SEQ ID NO: 5806733 - DNA, 25 bp, Homo sapien
cgccctagcgtggaaaacccatttg

SEQ ID NO: 5806734 - DNA, 25 bp, Homo sapien
tgctgcatggccgctgttggcggtg

SEQ ID NO: 5806735 - DNA, 25 bp, Homo sapien
atgcccactttcttgtagctttcct

SEQ ID NO: 5806736 - DNA, 25 bp, Homo sapien
aagtcgaagcgcgtggagcagcggt

SEQ ID NO: 5806737 - DNA, 25 bp, Homo sapien
aggcgctgttcctcatggtgtcctg

SEQ ID NO: 5806738 - DNA, 25 bp, Homo sapien
ccggggctgctcctccctcccgccg

SEQ ID NO: 5806739 - DNA, 25 bp, Homo sapien
acatgattcggcggcggctgagcct

SEQ ID NO: 5806740 - DNA, 25 bp, Homo sapien
cgagaagagcacccggcgcttcctg

SEQ ID NO: 5806741 - DNA, 25 bp, Homo sapien
tatgcccttctctgcttaaagattc

SEQ ID NO: 5806742 - DNA, 25 bp, Homo sapien
tgctgcgcgtggccttgtaggctgg

SEQ ID NO: 5806743 - DNA, 25 bp, Homo sapien
aatgcccataaaaaatgtgaagggc

SEQ ID NO: 5806744 - DNA, 25 bp, Homo sapien
gggcacccgcctggcacggtttgcc

SEQ ID NO: 5806745 - DNA, 25 bp, Homo sapien
taggaactatatttaagccaaatat

SEQ ID NO: 5806746 - DNA, 25 bp, Homo sapien
aaatcctggtatttacaagcgagtc

SEQ ID NO: 5806747 - DNA, 25 bp, Homo sapien
gattccttgagattggatgcgcttg

SEQ ID NO: 5806748 - DNA, 25 bp, Homo sapien
ctgggttggcgccgtaccatccggg

SEQ ID NO: 5806749 - DNA, 25 bp, Homo sapien
ccgccgccgtcatgtggtaggcggc

SEQ ID NO: 5806750 - DNA, 25 bp, Homo sapien
ggtccggagactggcctgcgctgcc

SEQ ID NO: 5806751 - DNA, 25 bp, Homo sapien
gattactaaaaactaggcatttagt

SEQ ID NO: 5806752 - DNA, 25 bp, Homo sapien
cgtgggcgtcaggtggatcatgctg

SEQ ID NO: 5806753 - DNA, 25 bp, Homo sapien
ggcctgcgctgcctggctggtggcc

SEQ ID NO: 5806754 - DNA, 25 bp, Homo sapien
cctgcgcggcctgcgcctggtgctg

SEQ ID NO: 5806755 - DNA, 25 bp, Homo sapien
gcacccgcctggcacggtttgccgt

SEQ ID NO: 5806756 - DNA, 25 bp, Homo sapien
gccagagggtgccggggagggggca

SEQ ID NO: 5806757 - DNA, 25 bp, Homo sapien
gagatggccgctgccgccgcctgcg

SEQ ID NO: 5806758 - DNA, 25 bp, Homo sapien
atgattcggcggcggctgagcctgc

SEQ ID NO: 5806759 - DNA, 25 bp, Homo sapien
ctggcgcttcattttgtagcggtgg

SEQ ID NO: 5806760 - DNA, 25 bp, Homo sapien
gccaggttgttaagaaaagtcgaag

SEQ ID NO: 5806761 - DNA, 25 bp, Homo sapien
ataagttacaacagaaaaagactga

SEQ ID NO: 5806762 - DNA, 25 bp, Homo sapien
aggagggaagcggtgaggcagagcg

SEQ ID NO: 5806763 - DNA, 25 bp, Homo sapien
tcgctcatgttgcccaggttgccgt

SEQ ID NO: 5806764 - DNA, 25 bp, Homo sapien
gatcttgacctgcgtgggcgtcagg

SEQ ID NO: 5806765 - DNA, 25 bp, Homo sapien
ccgctgttggcggtgccgcctggcc

SEQ ID NO: 5806766 - DNA, 25 bp, Homo sapien
tgttcctcatggtgtcctggtacgg

SEQ ID NO: 5806767 - DNA, 25 bp, Homo sapien
ctagcgtggaaaacccatttgaatc

SEQ ID NO: 5806768 - DNA, 25 bp, Homo sapien
gtgcgccaaggccggcgccaccgct

SEQ ID NO: 5806769 - DNA, 25 bp, Homo sapien
cgcctggccctgcctgtacgccgcc

SEQ ID NO: 5806770 - DNA, 25 bp, Homo sapien
ccaaataatatacacagatttgtca

SEQ ID NO: 5806771 - DNA, 25 bp, Homo sapien
ctttcctccaggggactcaagatgt

SEQ ID NO: 5806772 - DNA, 25 bp, Homo sapien
aggcatttagtccaacttttgacag

SEQ ID NO: 5806773 - DNA, 25 bp, Homo sapien
gtggagcagcggtggatggtggtct

SEQ ID NO: 5806774 - DNA, 25 bp, Homo sapien
ttccttggtctaaacgcggccaggt

SEQ ID NO: 5806775 - DNA, 25 bp, Homo sapien
aatttattagaagcttcttaggaac

SEQ ID NO: 5806776 - DNA, 25 bp, Homo sapien
tgaagcgggagatggcggggaagcg

SEQ ID NO: 5806777 - DNA, 25 bp, Homo sapien
aacggagtcgtgtgctttggactca

SEQ ID NO: 5806778 - DNA, 25 bp, Homo sapien
gagagctggggcacccccgccgccg

SEQ ID NO: 5806779 - DNA, 25 bp, Homo sapien
cccgccgccgccgctgtcctgctgc

SEQ ID NO: 5806780 - DNA, 25 bp, Homo sapien
tctttttacaacaaaatgtacagat

SEQ ID NO: 5806781 - DNA, 25 bp, Homo sapien
ccgaggagttcaggtgggacaggct

SEQ ID NO: 5806782 - DNA, 25 bp, Homo sapien
gttgcttgaagcgtcgctccagctc

SEQ ID NO: 5806783 - DNA, 25 bp, Homo sapien
gcaccgccacgcgtcgcggcgactg

SEQ ID NO: 5806784 - DNA, 25 bp, Homo sapien
ctgttgctgctgcgggcacccggtg

SEQ ID NO: 5806785 - DNA, 25 bp, Homo sapien
gcgctccggcgccgacaggtacttc

SEQ ID NO: 5806786 - DNA, 25 bp, Homo sapien
gctgcccacggagatggccgctgcc

SEQ ID NO: 5806787 - DNA, 25 bp, Homo sapien
acagaaaaagactgacgccgcaaat

SEQ ID NO: 5806788 - DNA, 25 bp, Homo sapien
gggcacttcctttgtgtcagtgaca

SEQ ID NO: 5806789 - DNA, 25 bp, Homo sapien
ggggactcaagatgtcagacactga

SEQ ID NO: 5806790 - DNA, 25 bp, Homo sapien
atggccgctgttggcggtgccgcct

SEQ ID NO: 5806791 - DNA, 25 bp, Homo sapien
caggggactcaagatgtcagacact

SEQ ID NO: 5806792 - DNA, 25 bp, Homo sapien
cgtggtgcgccaggtccggagactg

SEQ ID NO: 5806793 - DNA, 25 bp, Homo sapien
cttcattttgtagcggtggttctgg

SEQ ID NO: 5806794 - DNA, 25 bp, Homo sapien
gagggggcacttcctttgtgtcagt

SEQ ID NO: 5806795 - DNA, 25 bp, Homo sapien
gagtgcgagagctggggcacccccg

SEQ ID NO: 5806796 - DNA, 25 bp, Homo sapien
ggcgcttcctgcgcggcgcgcttgg

SEQ ID NO: 5806797 - DNA, 25 bp, Homo sapien
agccctctccaatctgtgccccgcc

SEQ ID NO: 5806798 - DNA, 25 bp, Homo sapien
gagcaggacatggtgccgtagtccg

SEQ ID NO: 5806799 - DNA, 25 bp, Homo sapien
ctgctgcgccgccttgtccttggcc

SEQ ID NO: 5806800 - DNA, 25 bp, Homo sapien
atatctacataagttacaacagaaa

SEQ ID NO: 5806801 - DNA, 25 bp, Homo sapien
ttgtagctttcctccaggggactca

SEQ ID NO: 5806802 - DNA, 25 bp, Homo sapien
tgcttaaagattccttgagattgga

SEQ ID NO: 5806803 - DNA, 25 bp, Homo sapien
aactaggcatttagtccaacttttg

SEQ ID NO: 5806804 - DNA, 25 bp, Homo sapien
agactgacgccgcaaataccaaact

SEQ ID NO: 5806805 - DNA, 25 bp, Homo sapien
tttaagccaaatatctacataagtt

SEQ ID NO: 5806806 - DNA, 25 bp, Homo sapien
ggcggcggtgacggcgccgtggtgc

SEQ ID NO: 5806807 - DNA, 25 bp, Homo sapien
ggcagagcgctgggctagggccggc

SEQ ID NO: 5806808 - DNA, 25 bp, Homo sapien
tgggcgtcaggtggatcatgctggc

SEQ ID NO: 5806809 - DNA, 25 bp, Homo sapien
acccggcgcttcctgcgcggcgcgc

SEQ ID NO: 5806810 - DNA, 25 bp, Homo sapien
gtggatcatgctggccaggtgctcg

SEQ ID NO: 5806811 - DNA, 25 bp, Homo sapien
agttcaggtgggacaggctggatac

SEQ ID NO: 5806812 - DNA, 25 bp, Homo sapien
gggagatggcggggaagcgcgggtc

SEQ ID NO: 5806813 - DNA, 25 bp, Homo sapien
ttacaagcgagtcctctttgctggc

SEQ ID NO: 5806814 - DNA, 25 bp, Homo sapien
acaggtacttctgttgcttgaagcg

SEQ ID NO: 5806815 - DNA, 25 bp, Homo sapien
gtggccttgtaggctggcggcgccc

SEQ ID NO: 5806816 - DNA, 25 bp, Homo sapien
cccgcgccttcccactgcctccgga

SEQ ID NO: 5806817 - DNA, 25 bp, Homo sapien
ccccagcgagcccaggccgcccatg

SEQ ID NO: 5806818 - DNA, 25 bp, Homo sapien
cttaaagattccttgagattggatg

SEQ ID NO: 5806819 - DNA, 25 bp, Homo sapien
gcgcctgctgctgcgcgtggccttg

SEQ ID NO: 5806820 - DNA, 25 bp, Homo sapien
gcggtgacggcgccgtggtgcccca

SEQ ID NO: 5806821 - DNA, 25 bp, Homo sapien
caacagaaaaagactgacgccgcaa

SEQ ID NO: 5806822 - DNA, 25 bp, Homo sapien
agaaaagtcgaagcgcgtggagcag

SEQ ID NO: 5806823 - DNA, 25 bp, Homo sapien
gtgctgctgcatggccgctgttggc

SEQ ID NO: 5806824 - DNA, 25 bp, Homo sapien
ccctccatgcccactttcttgtagc

SEQ ID NO: 5806825 - DNA, 25 bp, Homo sapien
tgctgctgcgccgccttgtccttgg

SEQ ID NO: 5806826 - DNA, 25 bp, Homo sapien
atgccgctcatgttcatgccgctcg

SEQ ID NO: 5806827 - DNA, 25 bp, Homo sapien
ggccagaggcgctgttcctcatggt

SEQ ID NO: 5806828 - DNA, 25 bp, Homo sapien
ccgttgcagtagccccccacggcgg

SEQ ID NO: 5806829 - DNA, 25 bp, Homo sapien
gcgggcaggagggaagcggtgaggc

SEQ ID NO: 5806830 - DNA, 25 bp, Homo sapien
aaataatatacacagatttgtcaat

SEQ ID NO: 5806831 - DNA, 25 bp, Homo sapien
gccttgtccttggcctggcgcttca

SEQ ID NO: 5806832 - DNA, 25 bp, Homo sapien
accagatcttgacctgcgtgggcgt

SEQ ID NO: 5806833 - DNA, 25 bp, Homo sapien
taccatccggggccagaggcgctgt

SEQ ID NO: 5806834 - DNA, 25 bp, Homo sapien
cagtagccccccacggcggagtgcg

SEQ ID NO: 5806835 - DNA, 25 bp, Homo sapien
taagccaaatatctacataagttac

SEQ ID NO: 5806836 - DNA, 25 bp, Homo sapien
catcgggcttcgctgcgctgagccc

SEQ ID NO: 5806837 - DNA, 25 bp, Homo sapien
cgcccggcgcgggggcacccgcctg

SEQ ID NO: 5806838 - DNA, 25 bp, Homo sapien
agtccaacttttgacagcgttttac

SEQ ID NO: 5806839 - DNA, 25 bp, Homo sapien
gcggcgtggtgcgccaggtccggag

SEQ ID NO: 5806840 - DNA, 25 bp, Homo sapien
ccgcctggcacggtttgccgtcttt

SEQ ID NO: 5806841 - DNA, 25 bp, Homo sapien
ggcgtcaggtggatcatgctggcca

SEQ ID NO: 5806842 - DNA, 25 bp, Homo sapien
ccccaaagctgttttatgcccttct

SEQ ID NO: 5806843 - DNA, 25 bp, Homo sapien
tccgaccgtatagcaaggtggagca

SEQ ID NO: 5806844 - DNA, 25 bp, Homo sapien
tgctgcgcctgctgctgcgcgtggc

SEQ ID NO: 5806845 - DNA, 25 bp, Homo sapien
ccgggtgtgcgccaaggccggcgcc

SEQ ID NO: 5806846 - DNA, 25 bp, Homo sapien
aaagactgacgccgcaaataccaaa

SEQ ID NO: 5806847 - DNA, 25 bp, Homo sapien
ttccttgagattggatgcgcttggt

SEQ ID NO: 5806848 - DNA, 25 bp, Homo sapien
aaaatgtacagattactaaaaacta

SEQ ID NO: 5806849 - DNA, 25 bp, Homo sapien
ccgctgtcctgctgcagttgctgct

SEQ ID NO: 5806850 - DNA, 25 bp, Homo sapien
ctggtggcccgggtgtgcgccaagg

SEQ ID NO: 5806851 - DNA, 25 bp, Homo sapien
ccatccggggccagaggcgctgttc

SEQ ID NO: 5806852 - DNA, 25 bp, Homo sapien
ggagttcaggtgggacaggctggat

SEQ ID NO: 5806853 - DNA, 25 bp, Homo sapien
atttgaatcaccaaaaaaagacacc

SEQ ID NO: 5806854 - DNA, 25 bp, Homo sapien
gcctggctggtggcccgggtgtgcg

SEQ ID NO: 5806855 - DNA, 25 bp, Homo sapien
cactgcctccggaccacatcgggct

SEQ ID NO: 5806856 - DNA, 25 bp, Homo sapien
tgtcagtgacaagtgggttatgttg

SEQ ID NO: 5806857 - DNA, 25 bp, Homo sapien
gccctgcctgtacgccgccagcgga

SEQ ID NO: 5806858 - DNA, 25 bp, Homo sapien
ggccgcccatgccgctcatgttcat

SEQ ID NO: 5806859 - DNA, 25 bp, Homo sapien
cttggcctggcgcttcattttgtag

SEQ ID NO: 5806860 - DNA, 25 bp, Homo sapien
tgagcctgccggggctgctcctccc

SEQ ID NO: 5806861 - DNA, 25 bp, Homo sapien
gtgtgcgccaaggccggcgccaccg

SEQ ID NO: 5806862 - DNA, 25 bp, Homo sapien
gttgcccaggttgccgttgcagtag

SEQ ID NO: 5806863 - DNA, 25 bp, Homo sapien
tagagtccagagccatgtcagcaca

SEQ ID NO: 5806864 - DNA, 25 bp, Homo sapien
cgtatagcaaggtggagcaggacat

SEQ ID NO: 5806865 - DNA, 25 bp, Homo sapien
cccaggccgcccatgccgctcatgt

SEQ ID NO: 5806866 - DNA, 25 bp, Homo sapien
tccggagactggcctgcgctgcctg

SEQ ID NO: 5806867 - DNA, 25 bp, Homo sapien
cgcaaataccaaactgccaaataat

SEQ ID NO: 5806868 - DNA, 25 bp, Homo sapien
gtcctctcaccaggtccgaccgtat

SEQ ID NO: 5806869 - DNA, 25 bp, Homo sapien
gggtctgggttggcgccgtaccatc

SEQ ID NO: 5806870 - DNA, 25 bp, Homo sapien
gctcgccgggcccatgaagcgggag

SEQ ID NO: 5806871 - DNA, 25 bp, Homo sapien
ctaggcatttagtccaacttttgac

SEQ ID NO: 5806872 - DNA, 25 bp, Homo sapien
aagcgcgggtctgggttggcgccgt

SEQ ID NO: 5806873 - DNA, 25 bp, Homo sapien
cacggcgtgctgctgcatggccgct

SEQ ID NO: 5806874 - DNA, 25 bp, Homo sapien
ggtggttctggaaccagatcttgac

SEQ ID NO: 5806875 - DNA, 25 bp, Homo sapien
ctttggactcatcgacatgattcgg

SEQ ID NO: 5806876 - DNA, 25 bp, Homo sapien
cgaagcgcgtggagcagcggtggat

SEQ ID NO: 5806877 - DNA, 25 bp, Homo sapien
cggcgcgggggcacccgcctggcac

SEQ ID NO: 5806878 - DNA, 25 bp, Homo sapien
gacatggtgccgtagtccgagcccg

SEQ ID NO: 5806879 - DNA, 25 bp, Homo sapien
aggacatggtgccgtagtccgagcc

SEQ ID NO: 5806880 - DNA, 25 bp, Homo sapien
ccgcccatgccgctcatgttcatgc

SEQ ID NO: 5806881 - DNA, 25 bp, Homo sapien
gctacaagttcacattaaacaaact

SEQ ID NO: 5806882 - DNA, 25 bp, Homo sapien
acttctgttgcttgaagcgtcgctc

SEQ ID NO: 5806883 - DNA, 25 bp, Homo sapien
tatacacagatttgtcaatgcccat

SEQ ID NO: 5806884 - DNA, 25 bp, Homo sapien
caacttttgacagcgttttacagct

SEQ ID NO: 5806885 - DNA, 25 bp, Homo sapien
cagcgccgcggggctggcggcgtgg

SEQ ID NO: 5806886 - DNA, 25 bp, Homo sapien
ccatgcccactttcttgtagctttc

SEQ ID NO: 5806887 - DNA, 25 bp, Homo sapien
gcgggtctgggttggcgccgtacca

SEQ ID NO: 5806888 - DNA, 25 bp, Homo sapien
gctcgctcatgttgcccaggttgcc

SEQ ID NO: 5806889 - DNA, 25 bp, Homo sapien
accggcaccgccacgcgtcgcggcg

SEQ ID NO: 5806890 - DNA, 25 bp, Homo sapien
cccagctcccgtcctcccttcaaaa

SEQ ID NO: 5806891 - DNA, 25 bp, Homo sapien
aagcgtcgctccagctcgtacacct

SEQ ID NO: 5806892 - DNA, 25 bp, Homo sapien
taggcggcggtgacggcgccgtggt

SEQ ID NO: 5806893 - DNA, 25 bp, Homo sapien
catggtgccgtagtccgagcccgag

SEQ ID NO: 5806894 - DNA, 25 bp, Homo sapien
caccccaaagctgttttatgccctt

SEQ ID NO: 5806895 - DNA, 25 bp, Homo sapien
tttttacaacaaaatgtacagatta

SEQ ID NO: 5806896 - DNA, 25 bp, Homo sapien
gcggcgcccggcgcgggggcacccg

SEQ ID NO: 5806897 - DNA, 25 bp, Homo sapien
ccaggtgctcgcgctccggcgccga

SEQ ID NO: 5806898 - DNA, 25 bp, Homo sapien
gccgggcccatgaagcgggagatgg

SEQ ID NO: 5806899 - DNA, 25 bp, Homo sapien
gcttcgctgcgctgagccccagtcg

SEQ ID NO: 5806900 - DNA, 25 bp, Homo sapien
gacgtccagcagtttggcctttgtg

SEQ ID NO: 5806901 - DNA, 25 bp, Homo sapien
ccatgccgctcatgttcatgccgct

SEQ ID NO: 5806902 - DNA, 25 bp, Homo sapien
gagcccgaggagttcaggtgggaca

SEQ ID NO: 5806903 - DNA, 25 bp, Homo sapien
ccacgcgtcgcggcgactgctgctg

SEQ ID NO: 5806904 - DNA, 25 bp, Homo sapien
ttcaggtgggacaggctggatacct

SEQ ID NO: 5806905 - DNA, 25 bp, Homo sapien
cctgcgtgggcgtcaggtggatcat

SEQ ID NO: 5806906 - DNA, 25 bp, Homo sapien
gagggcggtcgccgctgagcctagg

SEQ ID NO: 5806907 - DNA, 25 bp, Homo sapien
cccatgaagcgggagatggcgggga

SEQ ID NO: 5806908 - DNA, 25 bp, Homo sapien
ctgagcctaggcggccagagggtgc

SEQ ID NO: 5806909 - DNA, 25 bp, Homo sapien
tgtgctttggactcatcgacatgat

SEQ ID NO: 5806910 - DNA, 25 bp, Homo sapien
tcatgttgcccaggttgccgttgca

SEQ ID NO: 5806911 - DNA, 25 bp, Homo sapien
gagatggcggggaagcgcgggtctg

SEQ ID NO: 5806912 - DNA, 25 bp, Homo sapien
gagcctaggcggccagagggtgccg

SEQ ID NO: 5806913 - DNA, 25 bp, Homo sapien
caatctgtgccccgccctagcgtgg

SEQ ID NO: 5806914 - DNA, 25 bp, Homo sapien
gttctggaaccagatcttgacctgc

SEQ ID NO: 5806915 - DNA, 25 bp, Homo sapien
cggcgtgctgctgcatggccgctgt

SEQ ID NO: 5806916 - DNA, 25 bp, Homo sapien
cggagtgcgagagctggggcacccc

SEQ ID NO: 5806917 - DNA, 25 bp, Homo sapien
ggagcagcggtggatggtggtctgt

SEQ ID NO: 5806918 - DNA, 25 bp, Homo sapien
gccgtagtccgagcccgaggagttc

SEQ ID NO: 5806919 - DNA, 25 bp, Homo sapien
tacctggccctgcagcgccgcgggg

SEQ ID NO: 5806920 - DNA, 25 bp, Homo sapien
aaggtggagcaggacatggtgccgt

SEQ ID NO: 5806921 - DNA, 25 bp, Homo sapien
cctctccaatctgtgccccgcccta

SEQ ID NO: 5806922 - DNA, 25 bp, Homo sapien
ggtgggacaggctggatacctggcc

SEQ ID NO: 5806923 - DNA, 25 bp, Homo sapien
tggggcacccccgccgccgtcatgt

SEQ ID NO: 5806924 - DNA, 25 bp, Homo sapien
gctgtcctgctgcagttgctgctgc

SEQ ID NO: 5806925 - DNA, 25 bp, Homo sapien
cacatcgggcttcgctgcgctgagc

SEQ ID NO: 5806926 - DNA, 25 bp, Homo sapien
agcagcggtggatggtggtctgtgt

SEQ ID NO: 5806927 - DNA, 25 bp, Homo sapien
cataaaaaatgtgaagggctgggga

SEQ ID NO: 5806928 - DNA, 25 bp, Homo sapien
tctttcaccaggaccggcaccgcca

SEQ ID NO: 5806929 - DNA, 25 bp, Homo sapien
tgcgtgggcgtcaggtggatcatgc

SEQ ID NO: 5806930 - DNA, 25 bp, Homo sapien
ctgcgcctggtgctgcgcctgctgc

SEQ ID NO: 5806931 - DNA, 25 bp, Homo sapien
cctgccggggctgctcctccctccc

SEQ ID NO: 5806932 - DNA, 25 bp, Homo sapien
tccttggcctggcgcttcattttgt

SEQ ID NO: 5806933 - DNA, 25 bp, Homo sapien
tggtgcgccaggtccggagactggc

SEQ ID NO: 5806934 - DNA, 25 bp, Homo sapien
tggagcaggacatggtgccgtagtc

SEQ ID NO: 5806935 - DNA, 25 bp, Homo sapien
tttaatcagaaaaagaatcttttta

SEQ ID NO: 5806936 - DNA, 25 bp, Homo sapien
tctccaatctgtgccccgccctagc

SEQ ID NO: 5806937 - DNA, 25 bp, Homo sapien
gcgccgcggggctggcggcgtggtg

SEQ ID NO: 5806938 - DNA, 25 bp, Homo sapien
cgcggcctgcgcctggtgctgcgcc

SEQ ID NO: 5806939 - DNA, 25 bp, Homo sapien
tggaaaacccatttgaatcaccaaa

SEQ ID NO: 5806940 - DNA, 25 bp, Homo sapien
tgccgctcgccgggcccatgaagcg

SEQ ID NO: 5806941 - DNA, 25 bp, Homo sapien
tttacaacaaaatgtacagattact

SEQ ID NO: 5806942 - DNA, 25 bp, Homo sapien
gacaccccaaagctgttttatgccc

SEQ ID NO: 5806943 - DNA, 25 bp, Homo sapien
agggccggcccggcgtcctctcacc

SEQ ID NO: 5806944 - DNA, 25 bp, Homo sapien
ccaaactgccaaataatatacacag

SEQ ID NO: 5806945 - DNA, 25 bp, Homo sapien
cgcgccttcccactgcctccggacc

SEQ ID NO: 5806946 - DNA, 25 bp, Homo sapien
catgccgctcgccgggcccatgaag

SEQ ID NO: 5806947 - DNA, 25 bp, Homo sapien
gcggccagagggtgccggggagggg

SEQ ID NO: 5806948 - DNA, 25 bp, Homo sapien
gcaggagggaagcggtgaggcagag

SEQ ID NO: 5806949 - DNA, 25 bp, Homo sapien
ttgaagactctttcctctccccagc

SEQ ID NO: 5806950 - DNA, 25 bp, Homo sapien
gctgcagttgctgctgcgccgcctt

SEQ ID NO: 5806951 - DNA, 25 bp, Homo sapien
ttctgttgcttgaagcgtcgctcca

SEQ ID NO: 5806952 - DNA, 25 bp, Homo sapien
aatatacacagatttgtcaatgccc

SEQ ID NO: 5806953 - DNA, 25 bp, Homo sapien
ggaagcgcgggtctgggttggcgcc

SEQ ID NO: 5806954 - DNA, 25 bp, Homo sapien
gtcgcggcgactgctgctgagcctg

SEQ ID NO: 5806955 - DNA, 25 bp, Homo sapien
gcatggccgctgttggcggtgccgc

SEQ ID NO: 5806956 - DNA, 25 bp, Homo sapien
gccgacaggtacttctgttgcttga

SEQ ID NO: 5806957 - DNA, 25 bp, Homo sapien
ctcacgtcccccagcgagcccaggc

SEQ ID NO: 5806958 - DNA, 25 bp, Homo sapien
ttagtccaacttttgacagcgtttt

SEQ ID NO: 5806959 - DNA, 25 bp, Homo sapien
tctgcttaaagattccttgagattg

SEQ ID NO: 5806960 - DNA, 25 bp, Homo sapien
tgttcttgctcacgtcccccagcga

SEQ ID NO: 5806961 - DNA, 25 bp, Homo sapien
gcggagccccgaggccgccgccctc

SEQ ID NO: 5806962 - DNA, 25 bp, Homo sapien
tttctttttacaacaaaatgtacag

SEQ ID NO: 5806963 - DNA, 25 bp, Homo sapien
gtgaggcagagcgctgggctagggc

SEQ ID NO: 5806964 - DNA, 25 bp, Homo sapien
cggctgagcctgccggggctgctcc

SEQ ID NO: 5806965 - DNA, 25 bp, Homo sapien
tcaccaggtccgaccgtatagcaag

SEQ ID NO: 5806966 - DNA, 25 bp, Homo sapien
ggcagctcgctcatgttgcccaggt

SEQ ID NO: 5806967 - DNA, 25 bp, Homo sapien
tccaacttttgacagcgttttacag

SEQ ID NO: 5806968 - DNA, 25 bp, Homo sapien
aggctggatacctggccctgcagcg

SEQ ID NO: 5806969 - DNA, 25 bp, Homo sapien
cgctgcctggctggtggcccgggtg

SEQ ID NO: 5806970 - DNA, 25 bp, Homo sapien
ctcgtacacctgcgcctgcgagaag

SEQ ID NO: 5806971 - DNA, 25 bp, Homo sapien
caggttgttaagaaaagtcgaagcg

SEQ ID NO: 5806972 - DNA, 25 bp, Homo sapien
gtaggctggcggcgcccggcgcggg

SEQ ID NO: 5806973 - DNA, 25 bp, Homo sapien
ggtccgaccgtatagcaaggtggag

SEQ ID NO: 5806974 - DNA, 25 bp, Homo sapien
gagggtgccggggagggggcacttc

SEQ ID NO: 5806975 - DNA, 25 bp, Homo sapien
acaaaatgtacagattactaaaaac

SEQ ID NO: 5806976 - DNA, 25 bp, Homo sapien
acccatttgaatcaccaaaaaaaga

SEQ ID NO: 5806977 - DNA, 25 bp, Homo sapien
catgttcttgctcacgtcccccagc

SEQ ID NO: 5806978 - DNA, 25 bp, Homo sapien
ttcctcatggtgtcctggtacggcg

SEQ ID NO: 5806979 - DNA, 25 bp, Homo sapien
cagagggtgccggggagggggcact

SEQ ID NO: 5806980 - DNA, 25 bp, Homo sapien
acccccgccgccgtcatgtggtagg

SEQ ID NO: 5806981 - DNA, 25 bp, Homo sapien
tctgtgtggcgggcaggagggaagc

SEQ ID NO: 5806982 - DNA, 25 bp, Homo sapien
gagactggcctgcgctgcctggctg

SEQ ID NO: 5806983 - DNA, 25 bp, Homo sapien
ccgctcgccgggcccatgaagcggg

SEQ ID NO: 5806984 - DNA, 25 bp, Homo sapien
cagcggagccccgaggccgccgccc

SEQ ID NO: 5806985 - DNA, 25 bp, Homo sapien
tttcttgtagctttcctccagggga

SEQ ID NO: 5806986 - DNA, 25 bp, Homo sapien
tcgccgctgagcctaggcggccaga

SEQ ID NO: 5806987 - DNA, 25 bp, Homo sapien
aaactgccaaataatatacacagat

SEQ ID NO: 5806988 - DNA, 25 bp, Homo sapien
tcctgctgcagttgctgctgcgccg

SEQ ID NO: 5806989 - DNA, 25 bp, Homo sapien
gtcctctttgctggcagagtgtgcc

SEQ ID NO: 5806990 - DNA, 25 bp, Homo sapien
acaagtgggttatgttgaagactct

SEQ ID NO: 5806991 - DNA, 25 bp, Homo sapien
ctggcacggtttgccgtctttcacc

SEQ ID NO: 5806992 - DNA, 25 bp, Homo sapien
cccggcgtcctctcaccaggtccga

SEQ ID NO: 5806993 - DNA, 25 bp, Homo sapien
tggcagcggggccatgttcttgctc

SEQ ID NO: 5806994 - DNA, 25 bp, Homo sapien
cggcggtgacggcgccgtggtgccc

SEQ ID NO: 5806995 - DNA, 25 bp, Homo sapien
gtgcgagagctggggcacccccgcc

SEQ ID NO: 5806996 - DNA, 25 bp, Homo sapien
actgccaaataatatacacagattt

SEQ ID NO: 5806997 - DNA, 25 bp, Homo sapien
tgctgagcctgttgctgctgcgggc

SEQ ID NO: 5806998 - DNA, 25 bp, Homo sapien
atggtgtcctggtacggcggcagct

SEQ ID NO: 5806999 - DNA, 25 bp, Homo sapien
gcctggtgctgcgcctgctgctgcg

SEQ ID NO: 5807000 - DNA, 25 bp, Homo sapien
gcgcggcgcgcttggcagcggggcc

SEQ ID NO: 5807001 - DNA, 25 bp, Homo sapien
ggttgttaagaaaagtcgaagcgcg

SEQ ID NO: 5807002 - DNA, 25 bp, Homo sapien
gccgcggggctggcggcgtggtgcg

SEQ ID NO: 5807003 - DNA, 25 bp, Homo sapien
gtacttctgttgcttgaagcgtcgc

SEQ ID NO: 5807004 - DNA, 25 bp, Homo sapien
ctagggccggcccggcgtcctctca

SEQ ID NO: 5807005 - DNA, 25 bp, Homo sapien
agcggtgaggcagagcgctgggcta

SEQ ID NO: 5807006 - DNA, 25 bp, Homo sapien
gctccggcgccgacaggtacttctg

SEQ ID NO: 5807007 - DNA, 25 bp, Homo sapien
aatgtacagattactaaaaactagg

SEQ ID NO: 5807008 - DNA, 25 bp, Homo sapien
tgagaacggagtcgtgtgctttgga

SEQ ID NO: 5807009 - DNA, 25 bp, Homo sapien
caggaccggcaccgccacgcgtcgc

SEQ ID NO: 5807010 - DNA, 25 bp, Homo sapien
gtgcccagagtgaagtttggtcttt

SEQ ID NO: 5807011 - DNA, 25 bp, Homo sapien
ttactaaaaactaggcatttagtcc

SEQ ID NO: 5807012 - DNA, 25 bp, Homo sapien
agaacggagtcgtgtgctttggact

SEQ ID NO: 5807013 - DNA, 25 bp, Homo sapien
taccaaactgccaaataatatacac

SEQ ID NO: 5807014 - DNA, 25 bp, Homo sapien
cgcttggcagcggggccatgttctt

SEQ ID NO: 5807015 - DNA, 25 bp, Homo sapien
gtttgccgtctttcaccaggaccgg

SEQ ID NO: 5807016 - DNA, 25 bp, Homo sapien
aactatatttaagccaaatatctac

SEQ ID NO: 5807017 - DNA, 25 bp, Homo sapien
gcgcctggtgctgcgcctgctgctg

SEQ ID NO: 5807018 - DNA, 25 bp, Homo sapien
cagcggtggatggtggtctgtgtgg

SEQ ID NO: 5807019 - DNA, 25 bp, Homo sapien
gctgctgcgcgtggccttgtaggct

SEQ ID NO: 5807020 - DNA, 25 bp, Homo sapien
aagagcacccggcgcttcctgcgcg

SEQ ID NO: 5807021 - DNA, 25 bp, Homo sapien
gcggcggctgagcctgccggggctg

SEQ ID NO: 5807022 - DNA, 25 bp, Homo sapien
taaacgcggccaggttgttaagaaa

SEQ ID NO: 5807023 - DNA, 25 bp, Homo sapien
gcctccggaccacatcgggcttcgc

SEQ ID NO: 5807024 - DNA, 25 bp, Homo sapien
tttattagaagcttcttaggaacta

SEQ ID NO: 5807025 - DNA, 25 bp, Homo sapien
atctacataagttacaacagaaaaa

SEQ ID NO: 5807026 - DNA, 25 bp, Homo sapien
actcaagatgtcagacactgagaac

SEQ ID NO: 5807027 - DNA, 25 bp, Homo sapien
ccccacggcggagtgcgagagctgg

SEQ ID NO: 5807028 - DNA, 25 bp, Homo sapien
ctgctcctccctcccgccgcggcct

SEQ ID NO: 5807029 - DNA, 25 bp, Homo sapien
gggccatgttcttgctcacgtcccc

SEQ ID NO: 5807030 - DNA, 25 bp, Homo sapien
tgtacagattactaaaaactaggca

SEQ ID NO: 5807031 - DNA, 25 bp, Homo sapien
cctccaggggactcaagatgtcaga

SEQ ID NO: 5807032 - DNA, 25 bp, Homo sapien
ttgccgtctttcaccaggaccggca

SEQ ID NO: 5807033 - DNA, 25 bp, Homo sapien
cttgtccttggcctggcgcttcatt

SEQ ID NO: 5807034 - DNA, 25 bp, Homo sapien
cggcctgcgcctggtgctgcgcctg

SEQ ID NO: 5807035 - DNA, 25 bp, Homo sapien
tacaagttcacattaaacaaactat

SEQ ID NO: 5807036 - DNA, 25 bp, Homo sapien
cccacggcgtgctgctgcatggccg

SEQ ID NO: 5807037 - DNA, 25 bp, Homo sapien
tccctcccgccgcggcctcccagcc

SEQ ID NO: 5807038 - DNA, 25 bp, Homo sapien
cagatcttgacctgcgtgggcgtca

SEQ ID NO: 5807039 - DNA, 25 bp, Homo sapien
ctacataagttacaacagaaaaaga

SEQ ID NO: 5807040 - DNA, 25 bp, Homo sapien
ctggccaggtgctcgcgctccggcg

SEQ ID NO: 5807041 - DNA, 25 bp, Homo sapien
gggcacccccgccgccgtcatgtgg

SEQ ID NO: 5807042 - DNA, 25 bp, Homo sapien
cgcggcgactgctgctgagcctgtt

SEQ ID NO: 5807043 - DNA, 25 bp, Homo sapien
tggcctggcgcttcattttgtagcg

SEQ ID NO: 5807044 - DNA, 25 bp, Homo sapien
ggcggctgagcctgccggggctgct

SEQ ID NO: 5807045 - DNA, 25 bp, Homo sapien
acccgcctggcacggtttgccgtct

SEQ ID NO: 5807046 - DNA, 25 bp, Homo sapien
cggccaggttgttaagaaaagtcga

SEQ ID NO: 5807047 - DNA, 25 bp, Homo sapien
cgtcccccagcgagcccaggccgcc

SEQ ID NO: 5807048 - DNA, 25 bp, Homo sapien
ctgctgctgcgcgtggccttgtagg

SEQ ID NO: 5807049 - DNA, 25 bp, Homo sapien
gcgtcgctccagctcgtacacctgc

SEQ ID NO: 5807050 - DNA, 25 bp, Homo sapien
gcgttttacagctacaagttcacat

SEQ ID NO: 5807051 - DNA, 25 bp, Homo sapien
gaggcagagcgctgggctagggccg

SEQ ID NO: 5807052 - DNA, 25 bp, Homo sapien
ttcccactgcctccggaccacatcg

SEQ ID NO: 5807053 - DNA, 25 bp, Homo sapien
tacgccgccagcggagccccgaggc

SEQ ID NO: 5807054 - DNA, 25 bp, Homo sapien
atcctggtatttacaagcgagtcct

SEQ ID NO: 5807055 - DNA, 25 bp, Homo sapien
ggtctaaacgcggccaggttgttaa

SEQ ID NO: 5807056 - DNA, 25 bp, Homo sapien
tgctttggactcatcgacatgattc

SEQ ID NO: 5807057 - DNA, 25 bp, Homo sapien
gcctgcgcctggtgctgcgcctgct

SEQ ID NO: 5807058 - DNA, 25 bp, Homo sapien
tgtacgccgccagcggagccccgag

SEQ ID NO: 5807059 - DNA, 25 bp, Homo sapien
tcctggtacggcggcagctcgctca

SEQ ID NO: 5807060 - DNA, 25 bp, Homo sapien
accaggaccggcaccgccacgcgtc

SEQ ID NO: 5807061 - DNA, 25 bp, Homo sapien
tggcggcgtggtgcgccaggtccgg

SEQ ID NO: 5807062 - DNA, 25 bp, Homo sapien
gccgtaccatccggggccagaggcg

SEQ ID NO: 5807063 - DNA, 25 bp, Homo sapien
tgaagcgtcgctccagctcgtacac

SEQ ID NO: 5807064 - DNA, 25 bp, Homo sapien
atccggggccagaggcgctgttcct

SEQ ID NO: 5807065 - DNA, 25 bp, Homo sapien
ttcacattaaacaaactattttcgc

SEQ ID NO: 5807066 - DNA, 25 bp, Homo sapien
aagcgagtcctctttgctggcagag

SEQ ID NO: 5807067 - DNA, 25 bp, Homo sapien
gaagggctggggactgggagtggtt

SEQ ID NO: 5807068 - DNA, 25 bp, Homo sapien
tggcccgggtgtgcgccaaggccgg

SEQ ID NO: 5807069 - DNA, 25 bp, Homo sapien
ttgtataatttattagaagcttctt

SEQ ID NO: 5807070 - DNA, 25 bp, Homo sapien
agaaaaagactgacgccgcaaatac

SEQ ID NO: 5807071 - DNA, 25 bp, Homo sapien
gtcgtgtgctttggactcatcgaca

SEQ ID NO: 5807072 - DNA, 25 bp, Homo sapien
taaaaactaggcatttagtccaact

SEQ ID NO: 5807073 - DNA, 25 bp, Homo sapien
ccagagtgaagtttggtctttagag

SEQ ID NO: 5807074 - DNA, 25 bp, Homo sapien
ggagccccgaggccgccgccctcca

SEQ ID NO: 5807075 - DNA, 25 bp, Homo sapien
ctaggcggccagagggtgccgggga

SEQ ID NO: 5807076 - DNA, 25 bp, Homo sapien
atcatgctggccaggtgctcgcgct

SEQ ID NO: 5807077 - DNA, 25 bp, Homo sapien
tggatacctggccctgcagcgccgc

SEQ ID NO: 5807078 - DNA, 25 bp, Homo sapien
ggcgcttcattttgtagcggtggtt

SEQ ID NO: 5807079 - DNA, 25 bp, Homo sapien
ctccggaccacatcgggcttcgctg

SEQ ID NO: 5807080 - DNA, 25 bp, Homo sapien
cggcggcggctgagcctgccggggc

SEQ ID NO: 5807081 - DNA, 25 bp, Homo sapien
catgctggccaggtgctcgcgctcc

SEQ ID NO: 5807082 - DNA, 25 bp, Homo sapien
gctggggactgggagtggtttttct

SEQ ID NO: 5807083 - DNA, 25 bp, Homo sapien
gatggccgctgccgccgcctgcgcg

SEQ ID NO: 5807084 - DNA, 25 bp, Homo sapien
aataccaaactgccaaataatatac

SEQ ID NO: 5807085 - DNA, 25 bp, Homo sapien
gcgtggagcagcggtggatggtggt

SEQ ID NO: 5807086 - DNA, 25 bp, Homo sapien
gccctgcagcgccgcggggctggcg

SEQ ID NO: 5807087 - DNA, 25 bp, Homo sapien
ccggaccacatcgggcttcgctgcg

SEQ ID NO: 5807088 - DNA, 25 bp, Homo sapien
actcatcgacatgattcggcggcgg

SEQ ID NO: 5807089 - DNA, 25 bp, Homo sapien
gaaccagatcttgacctgcgtgggc

SEQ ID NO: 5807090 - DNA, 25 bp, Homo sapien
cgagcccaggccgcccatgccgctc

SEQ ID NO: 5807091 - DNA, 25 bp, Homo sapien
cctggccctgcctgtacgccgccag

SEQ ID NO: 5807092 - DNA, 25 bp, Homo sapien
aagcgggagatggcggggaagcgcg

SEQ ID NO: 5807093 - DNA, 25 bp, Homo sapien
gcacttcctttgtgtcagtgacaag

SEQ ID NO: 5807094 - DNA, 25 bp, Homo sapien
cgacaggtacttctgttgcttgaag

SEQ ID NO: 5807095 - DNA, 25 bp, Homo sapien
gtttggtctttagagtccagagcca

SEQ ID NO: 5807096 - DNA, 25 bp, Homo sapien
ctgcgcgtggccttgtaggctggcg

SEQ ID NO: 5807097 - DNA, 25 bp, Homo sapien
atgttgcccaggttgccgttgcagt

SEQ ID NO: 5807098 - DNA, 25 bp, Homo sapien
tgtggcgggcaggagggaagcggtg

SEQ ID NO: 5807099 - DNA, 25 bp, Homo sapien
cgccgccagcggagccccgaggccg

SEQ ID NO: 5807100 - DNA, 25 bp, Homo sapien
actttcttgtagctttcctccaggg

SEQ ID NO: 5807101 - DNA, 25 bp, Homo sapien
tttacagctacaagttcacattaaa

SEQ ID NO: 5807102 - DNA, 25 bp, Homo sapien
cagagcgctgggctagggccggccc

SEQ ID NO: 5807103 - DNA, 25 bp, Homo sapien
aagcgcgtggagcagcggtggatgg

SEQ ID NO: 5807104 - DNA, 25 bp, Homo sapien
cgccgctgtcctgctgcagttgctg

SEQ ID NO: 5807105 - DNA, 25 bp, Homo sapien
gcatttagtccaacttttgacagcg

SEQ ID NO: 5807106 - DNA, 25 bp, Homo sapien
ggcggagtgcgagagctggggcacc

SEQ ID NO: 5807107 - DNA, 25 bp, Homo sapien
ccggggccagaggcgctgttcctca

SEQ ID NO: 5807108 - DNA, 25 bp, Homo sapien
ctggcagagtgtgcccagagtgaag

SEQ ID NO: 5807109 - DNA, 25 bp, Homo sapien
gccagcggagccccgaggccgccgc

SEQ ID NO: 5807110 - DNA, 25 bp, Homo sapien
tctttgctggcagagtgtgcccaga

SEQ ID NO: 5807111 - DNA, 25 bp, Homo sapien
cggagactggcctgcgctgcctggc

SEQ ID NO: 5807112 - DNA, 25 bp, Homo sapien
gaatcaccaaaaaaagacaccccaa

SEQ ID NO: 5807113 - DNA, 25 bp, Homo sapien
cgtaccatccggggccagaggcgct

SEQ ID NO: 5807114 - DNA, 25 bp, Homo sapien
ggtggcccgggtgtgcgccaaggcc

SEQ ID NO: 5807115 - DNA, 25 bp, Homo sapien
ctgttttatgcccttctctgcttaa

SEQ ID NO: 5807116 - DNA, 25 bp, Homo sapien
cggcgccaccgctgcccacggagat

SEQ ID NO: 5807117 - DNA, 25 bp, Homo sapien
tcaagatgtcagacactgagaacgg

SEQ ID NO: 5807118 - DNA, 25 bp, Homo sapien
ggtaggcggcggtgacggcgccgtg

SEQ ID NO: 5807119 - DNA, 25 bp, Homo sapien
caggccgcccatgccgctcatgttc

SEQ ID NO: 5807120 - DNA, 25 bp, Homo sapien
cggagatggccgctgccgccgcctg

SEQ ID NO: 5807121 - DNA, 25 bp, Homo sapien
tgcttgaagcgtcgctccagctcgt

SEQ ID NO: 5807122 - DNA, 25 bp, Homo sapien
gcctggcacggtttgccgtctttca

SEQ ID NO: 5807123 - DNA, 25 bp, Homo sapien
ccatgtcagcacagagccctctcca

SEQ ID NO: 5807124 - DNA, 25 bp, Homo sapien
tttagagtccagagccatgtcagca

SEQ ID NO: 5807125 - DNA, 25 bp, Homo sapien
gtgtgcccagagtgaagtttggtct

SEQ ID NO: 5807126 - DNA, 25 bp, Homo sapien
tacagattactaaaaactaggcatt

SEQ ID NO: 5807127 - DNA, 25 bp, Homo sapien
ttagaagcttcttaggaactatatt

SEQ ID NO: 5807128 - DNA, 25 bp, Homo sapien
tgtcctgctgcagttgctgctgcgc

SEQ ID NO: 5807129 - DNA, 25 bp, Homo sapien
agaggcgctgttcctcatggtgtcc

SEQ ID NO: 5807130 - DNA, 25 bp, Homo sapien
aagatgtcagacactgagaacggag

SEQ ID NO: 5807131 - DNA, 25 bp, Homo sapien
tttgtcaatgcccataaaaaatgtg

SEQ ID NO: 5807132 - DNA, 25 bp, Homo sapien
tgcagtagccccccacggcggagtg

SEQ ID NO: 5807133 - DNA, 25 bp, Homo sapien
tacaacaaaatgtacagattactaa

SEQ ID NO: 5807134 - DNA, 25 bp, Homo sapien
cctctcaccaggtccgaccgtatag

SEQ ID NO: 5807135 - DNA, 25 bp, Homo sapien
gatgtcagacactgagaacggagtc

SEQ ID NO: 5807136 - DNA, 25 bp, Homo sapien
ccagcgagcccaggccgcccatgcc

SEQ ID NO: 5807137 - DNA, 25 bp, Homo sapien
ggctgctcctccctcccgccgcggc

SEQ ID NO: 5807138 - DNA, 25 bp, Homo sapien
gtcagcacagagccctctccaatct

SEQ ID NO: 5807139 - DNA, 25 bp, Homo sapien
tcatcgacatgattcggcggcggct

SEQ ID NO: 5807140 - DNA, 25 bp, Homo sapien
aggtgctcgcgctccggcgccgaca

SEQ ID NO: 5807141 - DNA, 25 bp, Homo sapien
gcccagagtgaagtttggtctttag

SEQ ID NO: 5807142 - DNA, 25 bp, Homo sapien
gagctggggcacccccgccgccgtc

SEQ ID NO: 5807143 - DNA, 25 bp, Homo sapien
ctgtgccccgccctagcgtggaaaa

SEQ ID NO: 5807144 - DNA, 25 bp, Homo sapien
cgcggccaggttgttaagaaaagtc

SEQ ID NO: 5807145 - DNA, 25 bp, Homo sapien
ggcgtggtgcgccaggtccggagac

SEQ ID NO: 5807146 - DNA, 25 bp, Homo sapien
tcgccgggcccatgaagcgggagat

SEQ ID NO: 5807147 - DNA, 25 bp, Homo sapien
gcgcgggggcacccgcctggcacgg

SEQ ID NO: 5807148 - DNA, 25 bp, Homo sapien
tacacagatttgtcaatgcccataa

SEQ ID NO: 5807149 - DNA, 25 bp, Homo sapien
gactggcctgcgctgcctggctggt

SEQ ID NO: 5807150 - DNA, 25 bp, Homo sapien
gcggtggatggtggtctgtgtggcg

SEQ ID NO: 5807151 - DNA, 25 bp, Homo sapien
ggtctgtgtggcgggcaggagggaa

SEQ ID NO: 5807152 - DNA, 25 bp, Homo sapien
gcccatgccgctcatgttcatgccg

SEQ ID NO: 5807153 - DNA, 25 bp, Homo sapien
ggccggcccggcgtcctctcaccag

SEQ ID NO: 5807154 - DNA, 25 bp, Homo sapien
gttacaacagaaaaagactgacgcc

SEQ ID NO: 5807155 - DNA, 25 bp, Homo sapien
gttttacagctacaagttcacatta

SEQ ID NO: 5807156 - DNA, 25 bp, Homo sapien
tgtagcggtggttctggaaccagat

SEQ ID NO: 5807157 - DNA, 25 bp, Homo sapien
gtgcgccaggtccggagactggcct

SEQ ID NO: 5807158 - DNA, 25 bp, Homo sapien
tccaatctgtgccccgccctagcgt

SEQ ID NO: 5807159 - DNA, 25 bp, Homo sapien
gggaaaaaaagaaagacgtccagca

SEQ ID NO: 5807160 - DNA, 25 bp, Homo sapien
ggacaggctggatacctggccctgc

SEQ ID NO: 5807161 - DNA, 25 bp, Homo sapien
ctccatgcccactttcttgtagctt

SEQ ID NO: 5807162 - DNA, 25 bp, Homo sapien
gatggcggggaagcgcgggtctggg

SEQ ID NO: 5807163 - DNA, 25 bp, Homo sapien
caggtgggacaggctggatacctgg

SEQ ID NO: 5807164 - DNA, 25 bp, Homo sapien
gggcggtcgccgctgagcctaggcg

SEQ ID NO: 5807165 - DNA, 25 bp, Homo sapien
atttagtccaacttttgacagcgtt

SEQ ID NO: 5807166 - DNA, 25 bp, Homo sapien
cacgtcccccagcgagcccaggccg

SEQ ID NO: 5807167 - DNA, 25 bp, Homo sapien
cggagtcgtgtgctttggactcatc

SEQ ID NO: 5807168 - DNA, 25 bp, Homo sapien
gggtgtgcgccaaggccggcgccac

SEQ ID NO: 5807169 - DNA, 25 bp, Homo sapien
gttaagaaaagtcgaagcgcgtgga

SEQ ID NO: 5807170 - DNA, 25 bp, Homo sapien
cagattactaaaaactaggcattta

SEQ ID NO: 5807171 - DNA, 25 bp, Homo sapien
gcgtgctgctgcatggccgctgttg

SEQ ID NO: 5807172 - DNA, 25 bp, Homo sapien
tccggcgccgacaggtacttctgtt

SEQ ID NO: 5807173 - DNA, 25 bp, Homo sapien
taaaaaatgtgaagggctggggact

SEQ ID NO: 5807174 - DNA, 25 bp, Homo sapien
ccttggtctaaacgcggccaggttg

SEQ ID NO: 5807175 - DNA, 25 bp, Homo sapien
ctgcctccggaccacatcgggcttc

SEQ ID NO: 5807176 - DNA, 25 bp, Homo sapien
gaggagttcaggtgggacaggctgg

SEQ ID NO: 5807177 - DNA, 25 bp, Homo sapien
gcggcgcgcttggcagcggggccat

SEQ ID NO: 5807178 - DNA, 25 bp, Homo sapien
tgcgccgccttgtccttggcctggc

SEQ ID NO: 5807179 - DNA, 25 bp, Homo sapien
ggtgtcctggtacggcggcagctcg

SEQ ID NO: 5807180 - DNA, 25 bp, Homo sapien
ggcacggtttgccgtctttcaccag

SEQ ID NO: 5807181 - DNA, 25 bp, Homo sapien
tttcaccaggaccggcaccgccacg

SEQ ID NO: 5807182 - DNA, 25 bp, Homo sapien
gggttatgttgaagactctttcctc

SEQ ID NO: 5807183 - DNA, 25 bp, Homo sapien
tccaggggactcaagatgtcagaca

SEQ ID NO: 5807184 - DNA, 25 bp, Homo sapien
gtgctcgcgctccggcgccgacagg

SEQ ID NO: 5807185 - DNA, 25 bp, Homo sapien
tggtgccccacggcgtgctgctgca

SEQ ID NO: 5807186 - DNA, 25 bp, Homo sapien
ttggactcatcgacatgattcggcg

SEQ ID NO: 5807187 - DNA, 25 bp, Homo sapien
agcctgccggggctgctcctccctc

SEQ ID NO: 5807188 - DNA, 25 bp, Homo sapien
gaagactctttcctctccccagctc

SEQ ID NO: 5807189 - DNA, 25 bp, Homo sapien
cgcttcctgcgcggcgcgcttggca

SEQ ID NO: 5807190 - DNA, 25 bp, Homo sapien
ttgccgttgcagtagccccccacgg

SEQ ID NO: 5807191 - DNA, 25 bp, Homo sapien
cctctttgctggcagagtgtgccca

SEQ ID NO: 5807192 - DNA, 25 bp, Homo sapien
tctaaacgcggccaggttgttaaga

SEQ ID NO: 5807193 - DNA, 25 bp, Homo sapien
aagcttcttaggaactatatttaag

SEQ ID NO: 5807194 - DNA, 25 bp, Homo sapien
accgtatagcaaggtggagcaggac

SEQ ID NO: 5807195 - DNA, 25 bp, Homo sapien
tccagcagtttggcctttgtggttt

SEQ ID NO: 5807196 - DNA, 25 bp, Homo sapien
gcgcttggttgtttttcattttctt

SEQ ID NO: 5807197 - DNA, 25 bp, Homo sapien
gaaaacccatttgaatcaccaaaaa

SEQ ID NO: 5807198 - DNA, 25 bp, Homo sapien
gggttggcgccgtaccatccggggc

SEQ ID NO: 5807199 - DNA, 25 bp, Homo sapien
gcgagagctggggcacccccgccgc

SEQ ID NO: 5807200 - DNA, 25 bp, Homo sapien
ttcctttgtgtcagtgacaagtggg

SEQ ID NO: 5807201 - DNA, 25 bp, Homo sapien
tgtgtggcgggcaggagggaagcgg

SEQ ID NO: 5807202 - DNA, 25 bp, Homo sapien
agtgacaagtgggttatgttgaaga

SEQ ID NO: 5807203 - DNA, 25 bp, Homo sapien
ttggtctaaacgcggccaggttgtt

SEQ ID NO: 5807204 - DNA, 25 bp, Homo sapien
tggcgccgtaccatccggggccaga

SEQ ID NO: 5807205 - DNA, 25 bp, Homo sapien
ctgccgccgcctgcgcggcctgcgc

SEQ ID NO: 5807206 - DNA, 25 bp, Homo sapien
ttcatgccgctcgccgggcccatga

SEQ ID NO: 5807207 - DNA, 25 bp, Homo sapien
taaacaaactattttcgcggagggc

SEQ ID NO: 5807208 - DNA, 25 bp, Homo sapien
ggcccatgaagcgggagatggcggg

SEQ ID NO: 5807209 - DNA, 25 bp, Homo sapien
ggccgctgttggcggtgccgcctgg

SEQ ID NO: 5807210 - DNA, 25 bp, Homo sapien
tctggaaccagatcttgacctgcgt

SEQ ID NO: 5807211 - DNA, 25 bp, Homo sapien
cgccacgcgtcgcggcgactgctgc

SEQ ID NO: 5807212 - DNA, 25 bp, Homo sapien
gcgagtcctctttgctggcagagtg

SEQ ID NO: 5807213 - DNA, 25 bp, Homo sapien
actaaaaactaggcatttagtccaa

SEQ ID NO: 5807214 - DNA, 25 bp, Homo sapien
atgtcagcacagagccctctccaat

SEQ ID NO: 5807215 - DNA, 25 bp, Homo sapien
gcgccaccgctgcccacggagatgg

SEQ ID NO: 5807216 - DNA, 25 bp, Homo sapien
tgcccaggttgccgttgcagtagcc

SEQ ID NO: 5807217 - DNA, 25 bp, Homo sapien
cacggagatggccgctgccgccgcc

SEQ ID NO: 5807218 - DNA, 25 bp, Homo sapien
ggcgcgcttggcagcggggccatgt

SEQ ID NO: 5807219 - DNA, 25 bp, Homo sapien
cagcagtttggcctttgtggttttt

SEQ ID NO: 5807220 - DNA, 25 bp, Homo sapien
cctttgtgtcagtgacaagtgggtt

SEQ ID NO: 5807221 - DNA, 25 bp, Homo sapien
gttgctgctgcgccgccttgtcctt

SEQ ID NO: 5807222 - DNA, 25 bp, Homo sapien
cagttgctgctgcgccgccttgtcc

SEQ ID NO: 5807223 - DNA, 25 bp, Homo sapien
tacaacagaaaaagactgacgccgc

SEQ ID NO: 5807224 - DNA, 25 bp, Homo sapien
ggcagagtgtgcccagagtgaagtt

SEQ ID NO: 5807225 - DNA, 25 bp, Homo sapien
acagagccctctccaatctgtgccc

SEQ ID NO: 5807226 - DNA, 25 bp, Homo sapien
tgcccttctctgcttaaagattcct

SEQ ID NO: 5807227 - DNA, 25 bp, Homo sapien
cggggccatgttcttgctcacgtcc

SEQ ID NO: 5807228 - DNA, 25 bp, Homo sapien
agagccatgtcagcacagagccctc

SEQ ID NO: 5807229 - DNA, 25 bp, Homo sapien
gcgactgctgctgagcctgttgctg

SEQ ID NO: 5807230 - DNA, 25 bp, Homo sapien
ggccaggtgctcgcgctccggcgcc

SEQ ID NO: 5807231 - DNA, 25 bp, Homo sapien
gcacagagccctctccaatctgtgc

SEQ ID NO: 5807232 - DNA, 25 bp, Homo sapien
aagaaagacgtccagcagtttggcc

SEQ ID NO: 5807233 - DNA, 25 bp, Homo sapien
cgctgagcctaggcggccagagggt

SEQ ID NO: 5807234 - DNA, 25 bp, Homo sapien
gccccgccctagcgtggaaaaccca

SEQ ID NO: 5807235 - DNA, 25 bp, Homo sapien
ggtggatggtggtctgtgtggcggg

SEQ ID NO: 5807236 - DNA, 25 bp, Homo sapien
ttgacctgcgtgggcgtcaggtgga

SEQ ID NO: 5807237 - DNA, 25 bp, Homo sapien
ggggccagaggcgctgttcctcatg

SEQ ID NO: 5807238 - DNA, 25 bp, Homo sapien
ggttgccgttgcagtagccccccac

SEQ ID NO: 5807239 - DNA, 25 bp, Homo sapien
gcgtcctctcaccaggtccgaccgt

SEQ ID NO: 5807240 - DNA, 25 bp, Homo sapien
gggaagcggtgaggcagagcgctgg

SEQ ID NO: 5807241 - DNA, 25 bp, Homo sapien
tgttggcggtgccgcctggccctgc

SEQ ID NO: 5807242 - DNA, 25 bp, Homo sapien
tgcccacggagatggccgctgccgc

SEQ ID NO: 5807243 - DNA, 25 bp, Homo sapien
ggactcaagatgtcagacactgaga

SEQ ID NO: 5807244 - DNA, 25 bp, Homo sapien
agttcacattaaacaaactattttc

SEQ ID NO: 5807245 - DNA, 25 bp, Homo sapien
ttttgacagcgttttacagctacaa

SEQ ID NO: 5807246 - DNA, 25 bp, Homo sapien
ggatcatgctggccaggtgctcgcg

SEQ ID NO: 5807247 - DNA, 25 bp, Homo sapien
agcgagcccaggccgcccatgccgc

SEQ ID NO: 5807248 - DNA, 25 bp, Homo sapien
aagattccttgagattggatgcgct

SEQ ID NO: 5807249 - DNA, 25 bp, Homo sapien
attttgtagcggtggttctggaacc

SEQ ID NO: 5807250 - DNA, 25 bp, Homo sapien
ccgccagcggagccccgaggccgcc

SEQ ID NO: 5807251 - DNA, 25 bp, Homo sapien
cagctcccgtcctcccttcaaaaaa

SEQ ID NO: 5807252 - DNA, 25 bp, Homo sapien
gggggcacccgcctggcacggtttg

SEQ ID NO: 5807253 - DNA, 25 bp, Homo sapien
gtgccgcctggccctgcctgtacgc

SEQ ID NO: 5807254 - DNA, 25 bp, Homo sapien
tctctgcttaaagattccttgagat

SEQ ID NO: 5807255 - DNA, 25 bp, Homo sapien
gggcttcgctgcgctgagccccagt

SEQ ID NO: 5807256 - DNA, 25 bp, Homo sapien
cgccttcccactgcctccggaccac

SEQ ID NO: 5807257 - DNA, 25 bp, Homo sapien
agaagagcacccggcgcttcctgcg

SEQ ID NO: 5807258 - DNA, 25 bp, Homo sapien
tgcccataaaaaatgtgaagggctg

SEQ ID NO: 5807259 - DNA, 25 bp, Homo sapien
tgtcctggtacggcggcagctcgct

SEQ ID NO: 5807260 - DNA, 25 bp, Homo sapien
gctgggctagggccggcccggcgtc

SEQ ID NO: 5807261 - DNA, 25 bp, Homo sapien
ggcgcccggcgcgggggcacccgcc

SEQ ID NO: 5807262 - DNA, 25 bp, Homo sapien
gaagcggtgaggcagagcgctgggc

SEQ ID NO: 5807263 - DNA, 25 bp, Homo sapien
tgcctgtacgccgccagcggagccc

SEQ ID NO: 5807264 - DNA, 25 bp, Homo sapien
caaactattttcgcggagggcggtc

SEQ ID NO: 5807265 - DNA, 25 bp, Homo sapien
ttgtaggctggcggcgcccggcgcg

SEQ ID NO: 5807266 - DNA, 25 bp, Homo sapien
tgcgagaagagcacccggcgcttcc

SEQ ID NO: 5807267 - DNA, 25 bp, Homo sapien
tcattttgtagcggtggttctggaa

SEQ ID NO: 5807268 - DNA, 25 bp, Homo sapien
agccaaatatctacataagttacaa

SEQ ID NO: 5807269 - DNA, 25 bp, Homo sapien
ggcggtgccgcctggccctgcctgt

SEQ ID NO: 5807270 - DNA, 25 bp, Homo sapien
aaaagaaagacgtccagcagtttgg

SEQ ID NO: 5807271 - DNA, 25 bp, Homo sapien
aaaaagactgacgccgcaaatacca

SEQ ID NO: 5807272 - DNA, 25 bp, Homo sapien
gccgcctgcgcggcctgcgcctggt

SEQ ID NO: 5807273 - DNA, 25 bp, Homo sapien
ctgcgcggcgcgcttggcagcgggg

SEQ ID NO: 5807274 - DNA, 25 bp, Homo sapien
gcggcagctcgctcatgttgcccag

SEQ ID NO: 5807275 - DNA, 25 bp, Homo sapien
cctccctcccgccgcggcctcccag

SEQ ID NO: 5807276 - DNA, 25 bp, Homo sapien
taaagattccttgagattggatgcg

SEQ ID NO: 5807277 - DNA, 25 bp, Homo sapien
ggatgcgcttggttgtttttcattt

SEQ ID NO: 5807278 - DNA, 25 bp, Homo sapien
gagtcctctttgctggcagagtgtg

SEQ ID NO: 5807279 - DNA, 25 bp, Homo sapien
cttggcagcggggccatgttcttgc

SEQ ID NO: 5807280 - DNA, 25 bp, Homo sapien
tcgcgctccggcgccgacaggtact

SEQ ID NO: 5807281 - DNA, 25 bp, Homo sapien
cacagatttgtcaatgcccataaaa

SEQ ID NO: 5807282 - DNA, 25 bp, Homo sapien
tgggacaggctggatacctggccct

SEQ ID NO: 5807283 - DNA, 25 bp, Homo sapien
tatttaagccaaatatctacataag

SEQ ID NO: 5807284 - DNA, 25 bp, Homo sapien
cacattaaacaaactattttcgcgg

SEQ ID NO: 5807285 - DNA, 25 bp, Homo sapien
ggcccggcgtcctctcaccaggtcc

SEQ ID NO: 5807286 - DNA, 25 bp, Homo sapien
tgcagttgctgctgcgccgccttgt

SEQ ID NO: 5807287 - DNA, 25 bp, Homo sapien
ccttcccactgcctccggaccacat

SEQ ID NO: 5807288 - DNA, 25 bp, Homo sapien
tgtccttggcctggcgcttcatttt

SEQ ID NO: 5807289 - DNA, 25 bp, Homo sapien
agagccctctccaatctgtgccccg

SEQ ID NO: 5807290 - DNA, 25 bp, Homo sapien
aggccggcgccaccgctgcccacgg

SEQ ID NO: 5807291 - DNA, 25 bp, Homo sapien
cagcgttttacagctacaagttcac

SEQ ID NO: 5807292 - DNA, 25 bp, Homo sapien
aagttacaacagaaaaagactgacg

SEQ ID NO: 5807293 - DNA, 25 bp, Homo sapien
cgccgccttgtccttggcctggcgc

SEQ ID NO: 5807294 - DNA, 25 bp, Homo sapien
gattggatgcgcttggttgtttttc

SEQ ID NO: 5807295 - DNA, 25 bp, Homo sapien
cccacggagatggccgctgccgccg

SEQ ID NO: 5807296 - DNA, 25 bp, Homo sapien
accgccacgcgtcgcggcgactgct

SEQ ID NO: 5807297 - DNA, 25 bp, Homo sapien
cagagtgtgcccagagtgaagtttg

SEQ ID NO: 5807298 - DNA, 25 bp, Homo sapien
cggggctggcggcgtggtgcgccag

SEQ ID NO: 5807299 - DNA, 25 bp, Homo sapien
ggtgacggcgccgtggtgccccacg

SEQ ID NO: 5807300 - DNA, 25 bp, Homo sapien
cccactgcctccggaccacatcggg

SEQ ID NO: 5807301 - DNA, 25 bp, Homo sapien
gctggatacctggccctgcagcgcc

SEQ ID NO: 5807302 - DNA, 25 bp, Homo sapien
cgtacacctgcgcctgcgagaagag

SEQ ID NO: 5807303 - DNA, 25 bp, Homo sapien
gagcctgttgctgctgcgggcaccc

SEQ ID NO: 5807304 - DNA, 25 bp, Homo sapien
ttttcgcggagggcggtcgccgctg

SEQ ID NO: 5807305 - DNA, 25 bp, Homo sapien
gccgctcatgttcatgccgctcgcc

SEQ ID NO: 5807306 - DNA, 25 bp, Homo sapien
ccagctcgtacacctgcgcctgcga

SEQ ID NO: 5807307 - DNA, 25 bp, Homo sapien
gcgccaaggccggcgccaccgctgc

SEQ ID NO: 5807308 - DNA, 25 bp, Homo sapien
tttgtgtcagtgacaagtgggttat

SEQ ID NO: 5807309 - DNA, 25 bp, Homo sapien
caggttgccgttgcagtagcccccc

SEQ ID NO: 5807310 - DNA, 25 bp, Homo sapien
gtgccgtagtccgagcccgaggagt

SEQ ID NO: 5807311 - DNA, 25 bp, Homo sapien
gccgccgctgtcctgctgcagttgc

SEQ ID NO: 5807312 - DNA, 25 bp, Homo sapien
ctggcctgcgctgcctggctggtgg

SEQ ID NO: 5807313 - DNA, 25 bp, Homo sapien
agctgttttatgcccttctctgctt

SEQ ID NO: 5807314 - DNA, 25 bp, Homo sapien
cccggcgcgggggcacccgcctggc

SEQ ID NO: 5807315 - DNA, 25 bp, Homo sapien
cttcctgcgcggcgcgcttggcagc

SEQ ID NO: 5807316 - DNA, 25 bp, Homo sapien
tgttgaagactctttcctctcccca

SEQ ID NO: 5807317 - DNA, 25 bp, Homo sapien
caaataccaaactgccaaataatat

SEQ ID NO: 5807318 - DNA, 25 bp, Homo sapien
gcacccccgccgccgtcatgtggta

SEQ ID NO: 5807319 - DNA, 25 bp, Homo sapien
tcatggtgtcctggtacggcggcag

SEQ ID NO: 5807320 - DNA, 25 bp, Homo sapien
gccgtcatgtggtaggcggcggtga

SEQ ID NO: 5807321 - DNA, 25 bp, Homo sapien
agcggggccatgttcttgctcacgt

SEQ ID NO: 5807322 - DNA, 25 bp, Homo sapien
agccccgaggccgccgccctccatg

SEQ ID NO: 5807323 - DNA, 25 bp, Homo sapien
ccccgccgccgtcatgtggtaggcg

SEQ ID NO: 5807324 - DNA, 25 bp, Homo sapien
tatgttgaagactctttcctctccc

SEQ ID NO: 5807325 - DNA, 25 bp, Homo sapien
cagatttgtcaatgcccataaaaaa

SEQ ID NO: 5807326 - DNA, 25 bp, Homo sapien
tggcgggcaggagggaagcggtgag

SEQ ID NO: 5807327 - DNA, 25 bp, Homo sapien
cctgcgcctgcgagaagagcacccg

SEQ ID NO: 5807328 - DNA, 25 bp, Homo sapien
tagtccgagcccgaggagttcaggt

SEQ ID NO: 5807329 - DNA, 25 bp, Homo sapien
gcgtcgcggcgactgctgctgagcc

SEQ ID NO: 5807330 - DNA, 25 bp, Homo sapien
atctgtgccccgccctagcgtggaa

SEQ ID NO: 5807331 - DNA, 25 bp, Homo sapien
gcgggagatggcggggaagcgcggg

SEQ ID NO: 5807332 - DNA, 25 bp, Homo sapien
acttcctttgtgtcagtgacaagtg

SEQ ID NO: 5807333 - DNA, 25 bp, Homo sapien
gtggtctgtgtggcgggcaggaggg

SEQ ID NO: 5807334 - DNA, 25 bp, Homo sapien
cctggtatttacaagcgagtcctct

SEQ ID NO: 5807335 - DNA, 25 bp, Homo sapien
ggaccacatcgggcttcgctgcgct

SEQ ID NO: 5807336 - DNA, 25 bp, Homo sapien
aaaaatgtgaagggctggggactgg

SEQ ID NO: 5807337 - DNA, 25 bp, Homo sapien
tctcaccaggtccgaccgtatagca

SEQ ID NO: 5807338 - DNA, 25 bp, Homo sapien
acaagcgagtcctctttgctggcag

SEQ ID NO: 5807339 - DNA, 25 bp, Homo sapien
tcttgtagctttcctccaggggact

SEQ ID NO: 5807340 - DNA, 25 bp, Homo sapien
ctggtgctgcgcctgctgctgcgcg

SEQ ID NO: 5807341 - DNA, 25 bp, Homo sapien
tggtggtctgtgtggcgggcaggag

SEQ ID NO: 5807342 - DNA, 25 bp, Homo sapien
ccctagcgtggaaaacccatttgaa

SEQ ID NO: 5807343 - DNA, 25 bp, Homo sapien
gtgccccacggcgtgctgctgcatg

SEQ ID NO: 5807344 - DNA, 25 bp, Homo sapien
tggcggggaagcgcgggtctgggtt

SEQ ID NO: 5807345 - DNA, 25 bp, Homo sapien
cccttctctgcttaaagattccttg

SEQ ID NO: 5807346 - DNA, 25 bp, Homo sapien
gcgcgggtctgggttggcgccgtac

SEQ ID NO: 5807347 - DNA, 25 bp, Homo sapien
ggactcatcgacatgattcggcggc

SEQ ID NO: 5807348 - DNA, 25 bp, Homo sapien
gatggtggtctgtgtggcgggcagg

SEQ ID NO: 5807349 - DNA, 25 bp, Homo sapien
cctcatggtgtcctggtacggcggc

SEQ ID NO: 5807350 - DNA, 25 bp, Homo sapien
aaagctgttttatgcccttctctgc

SEQ ID NO: 5807351 - DNA, 25 bp, Homo sapien
agaagcttcttaggaactatattta

SEQ ID NO: 5807352 - DNA, 25 bp, Homo sapien
ggccttgtaggctggcggcgcccgg

SEQ ID NO: 5807353 - DNA, 25 bp, Homo sapien
gtgggttatgttgaagactctttcc

SEQ ID NO: 5807354 - DNA, 25 bp, Homo sapien
gctgttggcggtgccgcctggccct

SEQ ID NO: 5807355 - DNA, 25 bp, Homo sapien
ttgttaagaaaagtcgaagcgcgtg

SEQ ID NO: 5807356 - DNA, 25 bp, Homo sapien
caggtccgaccgtatagcaaggtgg

SEQ ID NO: 5807357 - DNA, 25 bp, Homo sapien
tgttcatgccgctcgccgggcccat

SEQ ID NO: 5807358 - DNA, 25 bp, Homo sapien
taagaaaagtcgaagcgcgtggagc

SEQ ID NO: 5807359 - DNA, 25 bp, Homo sapien
ccccccacggcggagtgcgagagct

SEQ ID NO: 5807360 - DNA, 25 bp, Homo sapien
ataatatacacagatttgtcaatgc

SEQ ID NO: 5807361 - DNA, 25 bp, Homo sapien
tgccggggctgctcctccctcccgc

SEQ ID NO: 5807362 - DNA, 25 bp, Homo sapien
tgctcacgtcccccagcgagcccag

SEQ ID NO: 5807363 - DNA, 25 bp, Homo sapien
ctgctgctgagcctgttgctgctgc

SEQ ID NO: 5807364 - DNA, 25 bp, Homo sapien
cacggtttgccgtctttcaccagga

SEQ ID NO: 5807365 - DNA, 25 bp, Homo sapien
cgctccagctcgtacacctgcgcct

SEQ ID NO: 5807366 - DNA, 25 bp, Homo sapien
ccgccgccgctgtcctgctgcagtt

SEQ ID NO: 5807367 - DNA, 25 bp, Homo sapien
gctggggcacccccgccgccgtcat

SEQ ID NO: 5807368 - DNA, 25 bp, Homo sapien
ctgcgcctgctgctgcgcgtggcct

SEQ ID NO: 5807369 - DNA, 25 bp, Homo sapien
aagtttggtctttagagtccagagc

SEQ ID NO: 5807370 - DNA, 25 bp, Homo sapien
ttgacagcgttttacagctacaagt

SEQ ID NO: 5807371 - DNA, 25 bp, Homo sapien
tattttcgcggagggcggtcgccgc

SEQ ID NO: 5807372 - DNA, 25 bp, Homo sapien
ccatttgaatcaccaaaaaaagaca

SEQ ID NO: 5807373 - DNA, 25 bp, Homo sapien
tgggctagggccggcccggcgtcct

SEQ ID NO: 5807374 - DNA, 25 bp, Homo sapien
ttgaatcaccaaaaaaagacacccc

SEQ ID NO: 5807375 - DNA, 25 bp, Homo sapien
gctggcggcgcccggcgcgggggca

SEQ ID NO: 5807376 - DNA, 25 bp, Homo sapien
atttgtataatttattagaagcttc

SEQ ID NO: 5807377 - DNA, 25 bp, Homo sapien
gccgccctccatgcccactttcttg

SEQ ID NO: 5807378 - DNA, 25 bp, Homo sapien
caccgctgcccacggagatggccgc

SEQ ID NO: 5807379 - DNA, 25 bp, Homo sapien
caacaaaatgtacagattactaaaa

SEQ ID NO: 5807380 - DNA, 25 bp, Homo sapien
gccaccgctgcccacggagatggcc

SEQ ID NO: 5807381 - DNA, 25 bp, Homo sapien
cgccctccatgcccactttcttgta

SEQ ID NO: 5807382 - DNA, 25 bp, Homo sapien
gagcgctgggctagggccggcccgg

SEQ ID NO: 5807383 - DNA, 25 bp, Homo sapien
gtgaagggctggggactgggagtgg

SEQ ID NO: 5807384 - DNA, 25 bp, Homo sapien
ccagaggcgctgttcctcatggtgt

SEQ ID NO: 5807385 - DNA, 25 bp, Homo sapien
tgttccttggtctaaacgcggccag

SEQ ID NO: 5807386 - DNA, 25 bp, Homo sapien
cggcgactgctgctgagcctgttgc

SEQ ID NO: 5807387 - DNA, 25 bp, Homo sapien
caggtccggagactggcctgcgctg

SEQ ID NO: 5807388 - DNA, 25 bp, Homo sapien
gatacctggccctgcagcgccgcgg

SEQ ID NO: 5807389 - DNA, 25 bp, Homo sapien
acgcgtcgcggcgactgctgctgag

SEQ ID NO: 5807390 - DNA, 25 bp, Homo sapien
tggccgctgccgccgcctgcgcggc

SEQ ID NO: 5807391 - DNA, 25 bp, Homo sapien
gctgttcctcatggtgtcctggtac

SEQ ID NO: 5807392 - DNA, 25 bp, Homo sapien
gaaagacgtccagcagtttggcctt

SEQ ID NO: 5807393 - DNA, 25 bp, Homo sapien
ggggaagcgcgggtctgggttggcg

SEQ ID NO: 5807394 - DNA, 25 bp, Homo sapien
gcggtcgccgctgagcctaggcggc

SEQ ID NO: 5807395 - DNA, 25 bp, Homo sapien
tacggcggcagctcgctcatgttgc

SEQ ID NO: 5807396 - DNA, 25 bp, Homo sapien
ttggatgcgcttggttgtttttcat

SEQ ID NO: 5807397 - DNA, 25 bp, Homo sapien
gtggtaggcggcggtgacggcgccg

SEQ ID NO: 5807398 - DNA, 25 bp, Homo sapien
aaaagtcgaagcgcgtggagcagcg

SEQ ID NO: 5807399 - DNA, 25 bp, Homo sapien
gcttcttaggaactatatttaagcc

SEQ ID NO: 5807400 - DNA, 25 bp, Homo sapien
gttgcagtagccccccacggcggag

SEQ ID NO: 5807401 - DNA, 25 bp, Homo sapien
gattcggcggcggctgagcctgccg

SEQ ID NO: 5807402 - DNA, 25 bp, Homo sapien
tgcgctgcctggctggtggcccggg

SEQ ID NO: 5807403 - DNA, 25 bp, Homo sapien
gcctgttgctgctgcgggcacccgg

SEQ ID NO: 5807404 - DNA, 25 bp, Homo sapien
tgacggcgccgtggtgccccacggc

SEQ ID NO: 5807405 - DNA, 25 bp, Homo sapien
gccaggtccggagactggcctgcgc

SEQ ID NO: 5807406 - DNA, 25 bp, Homo sapien
tggtgccgtagtccgagcccgagga

SEQ ID NO: 5807407 - DNA, 25 bp, Homo sapien
atgcgcttggttgtttttcattttc

SEQ ID NO: 5807408 - DNA, 25 bp, Homo sapien
gcgcgtggagcagcggtggatggtg

SEQ ID NO: 5807409 - DNA, 25 bp, Homo sapien
ttcgctgcgctgagccccagtcgcc

SEQ ID NO: 5807410 - DNA, 25 bp, Homo sapien
aggctggcggcgcccggcgcggggg

SEQ ID NO: 5807411 - DNA, 25 bp, Homo sapien
gcgggggcacccgcctggcacggtt

SEQ ID NO: 5807412 - DNA, 25 bp, Homo sapien
cgcctgcgagaagagcacccggcgc

SEQ ID NO: 5807413 - DNA, 25 bp, Homo sapien
gctgagcctgccggggctgctcctc

SEQ ID NO: 5807414 - DNA, 25 bp, Homo sapien
ctgctgcagttgctgctgcgccgcc

SEQ ID NO: 5807415 - DNA, 25 bp, Homo sapien
accaggtccgaccgtatagcaaggt

SEQ ID NO: 5807416 - DNA, 25 bp, Homo sapien
cgtgtgctttggactcatcgacatg

SEQ ID NO: 5807417 - DNA, 25 bp, Homo sapien
gccccacggcgtgctgctgcatggc

SEQ ID NO: 5807418 - DNA, 25 bp, Homo sapien
gctcgcgctccggcgccgacaggta

SEQ ID NO: 5807419 - DNA, 25 bp, Homo sapien
atgtggtaggcggcggtgacggcgc

SEQ ID NO: 5807420 - DNA, 25 bp, Homo sapien
gttttatgcccttctctgcttaaag

SEQ ID NO: 5807421 - DNA, 25 bp, Homo sapien
tttgtagcggtggttctggaaccag

SEQ ID NO: 5807422 - DNA, 25 bp, Homo sapien
gagtcgtgtgctttggactcatcga

SEQ ID NO: 5807423 - DNA, 25 bp, Homo sapien
tgtcagacactgagaacggagtcgt

SEQ ID NO: 5807424 - DNA, 25 bp, Homo sapien
gcccactttcttgtagctttcctcc

SEQ ID NO: 5807425 - DNA, 25 bp, Homo sapien
tcaatgcccataaaaaatgtgaagg

SEQ ID NO: 5807426 - DNA, 25 bp, Homo sapien
ccgaggccgccgccctccatgccca

SEQ ID NO: 5807427 - DNA, 25 bp, Homo sapien
tagcaaggtggagcaggacatggtg

SEQ ID NO: 5807428 - DNA, 25 bp, Homo sapien
gtcgaagcgcgtggagcagcggtgg

SEQ ID NO: 5807429 - DNA, 25 bp, Homo sapien
gcagcggggccatgttcttgctcac

SEQ ID NO: 5807430 - DNA, 25 bp, Homo sapien
agcccaggccgcccatgccgctcat

SEQ ID NO: 5807431 - DNA, 25 bp, Homo sapien
aggtggatcatgctggccaggtgct

SEQ ID NO: 5807432 - DNA, 25 bp, Homo sapien
gctggcggcgtggtgcgccaggtcc

SEQ ID NO: 5807433 - DNA, 25 bp, Homo sapien
tcttgacctgcgtgggcgtcaggtg

SEQ ID NO: 5807434 - DNA, 25 bp, Homo sapien
gttatgttgaagactctttcctctc

SEQ ID NO: 5807435 - DNA, 25 bp, Homo sapien
gcctggcgcttcattttgtagcggt

SEQ ID NO: 5807436 - DNA, 25 bp, Homo sapien
tcaccaaaaaaagacaccccaaagc

SEQ ID NO: 5807437 - DNA, 25 bp, Homo sapien
agctttcctccaggggactcaagat

SEQ ID NO: 5807438 - DNA, 25 bp, Homo sapien
ggccgccgccctccatgcccacttt

SEQ ID NO: 5807439 - DNA, 25 bp, Homo sapien
cctgcagcgccgcggggctggcggc

SEQ ID NO: 5807440 - DNA, 25 bp, Homo sapien
gctgcgccgccttgtccttggcctg

SEQ ID NO: 5807441 - DNA, 25 bp, Homo sapien
cggtttgccgtctttcaccaggacc

SEQ ID NO: 5807442 - DNA, 25 bp, Homo sapien
gcgcgtggccttgtaggctggcggc

SEQ ID NO: 5807443 - DNA, 25 bp, Homo sapien
cattaaacaaactattttcgcggag

SEQ ID NO: 5807444 - DNA, 25 bp, Homo sapien
cgtggaaaacccatttgaatcacca

SEQ ID NO: 5807445 - DNA, 25 bp, Homo sapien
acaggctggatacctggccctgcag

SEQ ID NO: 5807446 - DNA, 25 bp, Homo sapien
gcacccggcgcttcctgcgcggcgc

SEQ ID NO: 5807447 - DNA, 25 bp, Homo sapien
agccatgtcagcacagagccctctc

SEQ ID NO: 5807448 - DNA, 25 bp, Homo sapien
ccttgagattggatgcgcttggttg

SEQ ID NO: 5807449 - DNA, 25 bp, Homo sapien
atgtgaagggctggggactgggagt

SEQ ID NO: 5807450 - DNA, 25 bp, Homo sapien
agctcgtacacctgcgcctgcgaga

SEQ ID NO: 5807451 - DNA, 25 bp, Homo sapien
ggtcgccgctgagcctaggcggcca

SEQ ID NO: 5807452 - DNA, 25 bp, Homo sapien
ccaaatatctacataagttacaaca

SEQ ID NO: 5807453 - DNA, 25 bp, Homo sapien
gactgctgctgagcctgttgctgct

SEQ ID NO: 5807454 - DNA, 25 bp, Homo sapien
ttcttaggaactatatttaagccaa

SEQ ID NO: 5807455 - DNA, 25 bp, Homo sapien
aagacaccccaaagctgttttatgc

SEQ ID NO: 5807456 - DNA, 25 bp, Homo sapien
tcgggcttcgctgcgctgagcccca

SEQ ID NO: 5807457 - DNA, 25 bp, Homo sapien
gcggtggttctggaaccagatcttg

SEQ ID NO: 5807458 - DNA, 25 bp, Homo sapien
ggtctttagagtccagagccatgtc

SEQ ID NO: 5807459 - DNA, 25 bp, Homo sapien
gggcaggagggaagcggtgaggcag

SEQ ID NO: 5807460 - DNA, 25 bp, Homo sapien
accacatcgggcttcgctgcgctga

SEQ ID NO: 5807461 - DNA, 25 bp, Homo sapien
gctgctgcatggccgctgttggcgg

SEQ ID NO: 5807462 - DNA, 25 bp, Homo sapien
ctgcatggccgctgttggcggtgcc

SEQ ID NO: 5807463 - DNA, 25 bp, Homo sapien
tgacaagtgggttatgttgaagact

SEQ ID NO: 5807464 - DNA, 25 bp, Homo sapien
agccccccacggcggagtgcgagag

SEQ ID NO: 5807465 - DNA, 25 bp, Homo sapien
cggcaccgccacgcgtcgcggcgac

SEQ ID NO: 5807466 - DNA, 25 bp, Homo sapien
tggcggcgcccggcgcgggggcacc

SEQ ID NO: 5807467 - DNA, 25 bp, Homo sapien
cagctacaagttcacattaaacaaa

SEQ ID NO: 5807468 - DNA, 25 bp, Homo sapien
acgccgcaaataccaaactgccaaa

SEQ ID NO: 5807469 - DNA, 25 bp, Homo sapien
agtgaagtttggtctttagagtcca

SEQ ID NO: 5807470 - DNA, 25 bp, Homo sapien
tgctggccaggtgctcgcgctccgg

SEQ ID NO: 5807471 - DNA, 25 bp, Homo sapien
ttggcggtgccgcctggccctgcct

SEQ ID NO: 5807472 - DNA, 25 bp, Homo sapien
actattttcgcggagggcggtcgcc

SEQ ID NO: 5807473 - DNA, 25 bp, Homo sapien
gaaaaaaagaaagacgtccagcagt

SEQ ID NO: 5807474 - DNA, 25 bp, Homo sapien
tggccctgcagcgccgcggggctgg

SEQ ID NO: 5807475 - DNA, 25 bp, Homo sapien
tgctgctgcgggcacccggtgcccc

SEQ ID NO: 5807476 - DNA, 25 bp, Homo sapien
gctcctccctcccgccgcggcctcc

SEQ ID NO: 5807477 - DNA, 25 bp, Homo sapien
gccgctgagcctaggcggccagagg

SEQ ID NO: 5807478 - DNA, 25 bp, Homo sapien
actgacgccgcaaataccaaactgc

SEQ ID NO: 5807479 - DNA, 25 bp, Homo sapien
tgcgcggcctgcgcctggtgctgcg

SEQ ID NO: 5807480 - DNA, 25 bp, Homo sapien
gtccgagcccgaggagttcaggtgg

SEQ ID NO: 5807481 - DNA, 25 bp, Homo sapien
tctttagagtccagagccatgtcag

SEQ ID NO: 5807482 - DNA, 25 bp, Homo sapien
acataagttacaacagaaaaagact

SEQ ID NO: 5807483 - DNA, 25 bp, Homo sapien
aggcggccagagggtgccggggagg

SEQ ID NO: 5807484 - DNA, 25 bp, Homo sapien
gccatgttcttgctcacgtccccca

SEQ ID NO: 5807485 - DNA, 25 bp, Homo sapien
gagattggatgcgcttggttgtttt

SEQ ID NO: 5807486 - DNA, 25 bp, Homo sapien
acactgagaacggagtcgtgtgctt

SEQ ID NO: 5807487 - DNA, 25 bp, Homo sapien
cgtagtccgagcccgaggagttcag

SEQ ID NO: 5807488 - DNA, 25 bp, Homo sapien
ctgagcctgttgctgctgcgggcac

SEQ ID NO: 5807489 - DNA, 25 bp, Homo sapien
atcgacatgattcggcggcggctga

SEQ ID NO: 5807490 - DNA, 25 bp, Homo sapien
gcgtggccttgtaggctggcggcgc

SEQ ID NO: 5807491 - DNA, 25 bp, Homo sapien
ttcgcggagggcggtcgccgctgag

SEQ ID NO: 5807492 - DNA, 25 bp, Homo sapien
aaaaatcctggtatttacaagcgag

SEQ ID NO: 5807493 - DNA, 25 bp, Homo sapien
cgcctgcgcggcctgcgcctggtgc

SEQ ID NO: 5807494 - DNA, 25 bp, Homo sapien
tggaaccagatcttgacctgcgtgg

SEQ ID NO: 5807495 - DNA, 25 bp, Homo sapien
gttgctgctgcgggcacccggtgcc

SEQ ID NO: 5807496 - DNA, 25 bp, Homo sapien
cggcgccgacaggtacttctgttgc

SEQ ID NO: 5807497 - DNA, 25 bp, Homo sapien
tgacgccgcaaataccaaactgcca

SEQ ID NO: 5807498 - DNA, 25 bp, Homo sapien
gtataatttattagaagcttcttag

SEQ ID NO: 5807499 - DNA, 25 bp, Homo sapien
gccgcctggccctgcctgtacgccg

SEQ ID NO: 5807500 - DNA, 25 bp, Homo sapien
gtctgggttggcgccgtaccatccg

SEQ ID NO: 5807501 - DNA, 25 bp, Homo sapien
cgtcatgtggtaggcggcggtgacg

SEQ ID NO: 5807502 - DNA, 25 bp, Homo sapien
ggggctgctcctccctcccgccgcg

SEQ ID NO: 5807503 - DNA, 25 bp, Homo sapien
tacagctacaagttcacattaaaca

SEQ ID NO: 5807504 - DNA, 25 bp, Homo sapien
gcccgaggagttcaggtgggacagg

SEQ ID NO: 5807505 - DNA, 25 bp, Homo sapien
tcaccaggaccggcaccgccacgcg

SEQ ID NO: 5807506 - DNA, 25 bp, Homo sapien
gtagccccccacggcggagtgcgag

SEQ ID NO: 5807507 - DNA, 25 bp, Homo sapien
gagtgtgcccagagtgaagtttggt

SEQ ID NO: 5807508 - DNA, 25 bp, Homo sapien
tgcagcgccgcggggctggcggcgt

SEQ ID NO: 5807509 - DNA, 25 bp, Homo sapien
cctgcgctgcctggctggtggcccg

SEQ ID NO: 5807510 - DNA, 25 bp, Homo sapien
ggtacggcggcagctcgctcatgtt

SEQ ID NO: 5807511 - DNA, 25 bp, Homo sapien
ataatttattagaagcttcttagga

SEQ ID NO: 5807512 - DNA, 25 bp, Homo sapien
tcagacactgagaacggagtcgtgt

SEQ ID NO: 5807513 - DNA, 25 bp, Homo sapien
cttctctgcttaaagattccttgag

SEQ ID NO: 5807514 - DNA, 25 bp, Homo sapien
ctcatgttcatgccgctcgccgggc

SEQ ID NO: 5807515 - DNA, 25 bp, Homo sapien
tattagaagcttcttaggaactata

SEQ ID NO: 5807516 - DNA, 25 bp, Homo sapien
gaggccgccgccctccatgcccact

SEQ ID NO: 5807517 - DNA, 25 bp, Homo sapien
ctaaagagttcaccgaggaggagat

SEQ ID NO: 5807518 - DNA, 25 bp, Homo sapien
atctcctcctcggtgaactctttag

SEQ ID NO: 5807519 - DNA, 25 bp, Homo sapien
ggcctggcttccacgccgccgcctc

SEQ ID NO: 5807520 - DNA, 25 bp, Homo sapien
gaggcggcggcgtggaagccaggcc

SEQ ID NO: 5807521 - DNA, 25 bp, Homo sapien
tggtgccggcctggcttccacgccg

SEQ ID NO: 5807522 - DNA, 25 bp, Homo sapien
cggcgtggaagccaggccggcacca

SEQ ID NO: 5807523 - DNA, 25 bp, Homo sapien
gggagaccgcaacgttcctgaccca

SEQ ID NO: 5807524 - DNA, 25 bp, Homo sapien
tgggtcaggaacgttgcggtctccc

SEQ ID NO: 5807525 - DNA, 25 bp, Homo sapien
gtcgaaaagccaattaaacttatcg

SEQ ID NO: 5807526 - DNA, 25 bp, Homo sapien
cgataagtttaattggcttttcgac

SEQ ID NO: 5807527 - DNA, 25 bp, Homo sapien
atggcgattcgtcacaccctggcct

SEQ ID NO: 5807528 - DNA, 25 bp, Homo sapien
aggccagggtgtgacgaatcgccat

SEQ ID NO: 5807529 - DNA, 25 bp, Homo sapien
ggacttccaggcgcatagggtagaa

SEQ ID NO: 5807530 - DNA, 25 bp, Homo sapien
agcaaatccccatctcggatcactg

SEQ ID NO: 5807531 - DNA, 25 bp, Homo sapien
cagcttcattgagagagattcattg

SEQ ID NO: 5807532 - DNA, 25 bp, Homo sapien
ttcattgagagagattcattgacac

SEQ ID NO: 5807533 - DNA, 25 bp, Homo sapien
ggggcctgcggatcagctctgactc

SEQ ID NO: 5807534 - DNA, 25 bp, Homo sapien
ggaggaacaaaaactatctgggcag

SEQ ID NO: 5807535 - DNA, 25 bp, Homo sapien
tgggcttaaaagaaattatccaaag

SEQ ID NO: 5807536 - DNA, 25 bp, Homo sapien
cttcgagaggacgctgggactcagc

SEQ ID NO: 5807537 - DNA, 25 bp, Homo sapien
taattggatttcattcactggggag

SEQ ID NO: 5807538 - DNA, 25 bp, Homo sapien
tttcctttgatgggcttaaaagaaa

SEQ ID NO: 5807539 - DNA, 25 bp, Homo sapien
caacagggttccagcacagcagctg

SEQ ID NO: 5807540 - DNA, 25 bp, Homo sapien
ggctcgtgtagcagcagctcgccgc

SEQ ID NO: 5807541 - DNA, 25 bp, Homo sapien
gaatacgggcggcgagtcggtgctc

SEQ ID NO: 5807542 - DNA, 25 bp, Homo sapien
cgggcatcatgctgcggcgcctgca

SEQ ID NO: 5807543 - DNA, 25 bp, Homo sapien
tgaattgtgtttgttttttcctttg

SEQ ID NO: 5807544 - DNA, 25 bp, Homo sapien
ccgaggggcgtctggtaggcacccc

SEQ ID NO: 5807545 - DNA, 25 bp, Homo sapien
caaatccccatctcggatcactgga

SEQ ID NO: 5807546 - DNA, 25 bp, Homo sapien
tgagtccaagagatagcaaatcgag

SEQ ID NO: 5807547 - DNA, 25 bp, Homo sapien
cttgggctgtgccaaagactccacc

SEQ ID NO: 5807548 - DNA, 25 bp, Homo sapien
taggagcatgtgttctttagggcct

SEQ ID NO: 5807549 - DNA, 25 bp, Homo sapien
ggccccaggtgtcaaaatgacacca

SEQ ID NO: 5807550 - DNA, 25 bp, Homo sapien
tggcttaccttatgcagaagctcaa

SEQ ID NO: 5807551 - DNA, 25 bp, Homo sapien
agggtagaaccaaatgatagggtag

SEQ ID NO: 5807552 - DNA, 25 bp, Homo sapien
tctcggatcactggagccaaaacct

SEQ ID NO: 5807553 - DNA, 25 bp, Homo sapien
caacatatcccctaacttcaacttc

SEQ ID NO: 5807554 - DNA, 25 bp, Homo sapien
gaccgagaccccaatagtgcaacag

SEQ ID NO: 5807555 - DNA, 25 bp, Homo sapien
aactgtggtgtcttggtacattgct

SEQ ID NO: 5807556 - DNA, 25 bp, Homo sapien
gacaccagctgtctgtactagacaa

SEQ ID NO: 5807557 - DNA, 25 bp, Homo sapien
agagcggcagcttcgcgcgcggtgc

SEQ ID NO: 5807558 - DNA, 25 bp, Homo sapien
gtaaatatttgatcttgaatcactt

SEQ ID NO: 5807559 - DNA, 25 bp, Homo sapien
ttggttaatactaacagagagattt

SEQ ID NO: 5807560 - DNA, 25 bp, Homo sapien
cgagaccaatctagacggctcgtgt

SEQ ID NO: 5807561 - DNA, 25 bp, Homo sapien
aattggttaatactaacagagagat

SEQ ID NO: 5807562 - DNA, 25 bp, Homo sapien
ccaatagtgcaacagactcggatgg

SEQ ID NO: 5807563 - DNA, 25 bp, Homo sapien
atcaagtacatcttgaacgtcaccc

SEQ ID NO: 5807564 - DNA, 25 bp, Homo sapien
cactggggaggaacaaaaactatct

SEQ ID NO: 5807565 - DNA, 25 bp, Homo sapien
ccaccccttccaaccagaatgtata

SEQ ID NO: 5807566 - DNA, 25 bp, Homo sapien
ggcaagaactgtggtgtcttggtac

SEQ ID NO: 5807567 - DNA, 25 bp, Homo sapien
gggctgctttctttgtgtgtggccc

SEQ ID NO: 5807568 - DNA, 25 bp, Homo sapien
tacttctgtctcgtctgccccaacc

SEQ ID NO: 5807569 - DNA, 25 bp, Homo sapien
catagatgaagcccggggcaagaac

SEQ ID NO: 5807570 - DNA, 25 bp, Homo sapien
catcagctgggctgctttctttgtg

SEQ ID NO: 5807571 - DNA, 25 bp, Homo sapien
cctgccggtgcgcgcgctcttcacg

SEQ ID NO: 5807572 - DNA, 25 bp, Homo sapien
cgctcggcctatgcctgccccgagg

SEQ ID NO: 5807573 - DNA, 25 bp, Homo sapien
catctcggatcactggagccaaaac

SEQ ID NO: 5807574 - DNA, 25 bp, Homo sapien
gatttgaggtgcagccttggaggga

SEQ ID NO: 5807575 - DNA, 25 bp, Homo sapien
gatggtagtccgctgtccaacagcc

SEQ ID NO: 5807576 - DNA, 25 bp, Homo sapien
tttcagctctgtatttgtggtatca

SEQ ID NO: 5807577 - DNA, 25 bp, Homo sapien
cccttccaaccagaatgtataccag

SEQ ID NO: 5807578 - DNA, 25 bp, Homo sapien
gagtctgaccttgaccgagacccca

SEQ ID NO: 5807579 - DNA, 25 bp, Homo sapien
agaccaatctagacggctcgtgtag

SEQ ID NO: 5807580 - DNA, 25 bp, Homo sapien
caaaatgacaccagctgtctgtact

SEQ ID NO: 5807581 - DNA, 25 bp, Homo sapien
gtgtcaaaatgacaccagctgtctg

SEQ ID NO: 5807582 - DNA, 25 bp, Homo sapien
tgctttctttgtgtgtggccccagg

SEQ ID NO: 5807583 - DNA, 25 bp, Homo sapien
cctccggctttacttctgtctcgtc

SEQ ID NO: 5807584 - DNA, 25 bp, Homo sapien
gctgcggcgcctgcagaagggtaac

SEQ ID NO: 5807585 - DNA, 25 bp, Homo sapien
gaggacttccaggcgcatagggtag

SEQ ID NO: 5807586 - DNA, 25 bp, Homo sapien
tgtacagcctacccatgcagggact

SEQ ID NO: 5807587 - DNA, 25 bp, Homo sapien
cagcccatgtgacaacagggttcca

SEQ ID NO: 5807588 - DNA, 25 bp, Homo sapien
aagtgcggaattggttaatactaac

SEQ ID NO: 5807589 - DNA, 25 bp, Homo sapien
agagagaacctccggctttacttct

SEQ ID NO: 5807590 - DNA, 25 bp, Homo sapien
cagtttctcttggcagcatcagctg

SEQ ID NO: 5807591 - DNA, 25 bp, Homo sapien
tgtgtacagcctacccatgcaggga

SEQ ID NO: 5807592 - DNA, 25 bp, Homo sapien
ctttctttgtgtgtggccccaggtg

SEQ ID NO: 5807593 - DNA, 25 bp, Homo sapien
ctgtcgatgaacgatgcctatgaca

SEQ ID NO: 5807594 - DNA, 25 bp, Homo sapien
agaggagccaaagagagatttcagc

SEQ ID NO: 5807595 - DNA, 25 bp, Homo sapien
accttatgcagaagctcaatctgtc

SEQ ID NO: 5807596 - DNA, 25 bp, Homo sapien
tgggcaacgagcggctgctgctgat

SEQ ID NO: 5807597 - DNA, 25 bp, Homo sapien
gcggctgcagctgggtgcagagaga

SEQ ID NO: 5807598 - DNA, 25 bp, Homo sapien
ttctccctgcattgcgagaccaatc

SEQ ID NO: 5807599 - DNA, 25 bp, Homo sapien
agaaagacgcccgggtagatttgag

SEQ ID NO: 5807600 - DNA, 25 bp, Homo sapien
tcggatcactggagccaaaacctgt

SEQ ID NO: 5807601 - DNA, 25 bp, Homo sapien
acttcaacttcatgggtcagctgct

SEQ ID NO: 5807602 - DNA, 25 bp, Homo sapien
gaacgtcacccccaatttgccgaat

SEQ ID NO: 5807603 - DNA, 25 bp, Homo sapien
ccagtggagatcttgcccttcctct

SEQ ID NO: 5807604 - DNA, 25 bp, Homo sapien
aaccccgctccgagagcggcagctt

SEQ ID NO: 5807605 - DNA, 25 bp, Homo sapien
tggagctgggcaacgagcggctgct

SEQ ID NO: 5807606 - DNA, 25 bp, Homo sapien
cttcctcggacatcgagtctgacct

SEQ ID NO: 5807607 - DNA, 25 bp, Homo sapien
actcagcagcccatgtgacaacagg

SEQ ID NO: 5807608 - DNA, 25 bp, Homo sapien
gtggtgtcttggtacattgcttggc

SEQ ID NO: 5807609 - DNA, 25 bp, Homo sapien
gacatcgagtctgaccttgaccgag

SEQ ID NO: 5807610 - DNA, 25 bp, Homo sapien
ccagctgtctgtactagacaaggtt

SEQ ID NO: 5807611 - DNA, 25 bp, Homo sapien
ttaatactaacagagagatttgctc

SEQ ID NO: 5807612 - DNA, 25 bp, Homo sapien
cttctgtctcgtctgccccaaccgc

SEQ ID NO: 5807613 - DNA, 25 bp, Homo sapien
gatgcctatgacattgtcaaaatga

SEQ ID NO: 5807614 - DNA, 25 bp, Homo sapien
attggatttcattcactggggagga

SEQ ID NO: 5807615 - DNA, 25 bp, Homo sapien
ctttagggccttgtaaggctgtttc

SEQ ID NO: 5807616 - DNA, 25 bp, Homo sapien
gactctctgcaatctacgtgaaaga

SEQ ID NO: 5807617 - DNA, 25 bp, Homo sapien
aggcgcatagggtagaaccaaatga

SEQ ID NO: 5807618 - DNA, 25 bp, Homo sapien
gagaatacgggcggcgagtcggtgc

SEQ ID NO: 5807619 - DNA, 25 bp, Homo sapien
cgagcagctggagctgggcaacgag

SEQ ID NO: 5807620 - DNA, 25 bp, Homo sapien
ctgcaatctacgtgaaagaccccac

SEQ ID NO: 5807621 - DNA, 25 bp, Homo sapien
cgagtcggccatcaacgtggccatc

SEQ ID NO: 5807622 - DNA, 25 bp, Homo sapien
gtgccaaagactccaccaacttgga

SEQ ID NO: 5807623 - DNA, 25 bp, Homo sapien
cgtgtagcagcagctcgccgccgtt

SEQ ID NO: 5807624 - DNA, 25 bp, Homo sapien
ctctcccgcagctcgacccccatga

SEQ ID NO: 5807625 - DNA, 25 bp, Homo sapien
cttcgcgcgcggtgcgctcggccta

SEQ ID NO: 5807626 - DNA, 25 bp, Homo sapien
tgaagcccggggcaagaactgtggt

SEQ ID NO: 5807627 - DNA, 25 bp, Homo sapien
aaatgacaccagctgtctgtactag

SEQ ID NO: 5807628 - DNA, 25 bp, Homo sapien
gatcttgcccttcctctacttgggc

SEQ ID NO: 5807629 - DNA, 25 bp, Homo sapien
catgggtcagctgctggacttcgag

SEQ ID NO: 5807630 - DNA, 25 bp, Homo sapien
acgtgttggaggaattcggcatcaa

SEQ ID NO: 5807631 - DNA, 25 bp, Homo sapien
gacacagtggtgctctacgacgaga

SEQ ID NO: 5807632 - DNA, 25 bp, Homo sapien
gtgtggccccaggtgtcaaaatgac

SEQ ID NO: 5807633 - DNA, 25 bp, Homo sapien
gatttgctccattctctttggaata

SEQ ID NO: 5807634 - DNA, 25 bp, Homo sapien
ttagccgctcagtcactgtgactgt

SEQ ID NO: 5807635 - DNA, 25 bp, Homo sapien
atcccgggcatcatgctgcggcgcc

SEQ ID NO: 5807636 - DNA, 25 bp, Homo sapien
ttcctcccctctcagtagcacggag

SEQ ID NO: 5807637 - DNA, 25 bp, Homo sapien
caagagatagcaaatcgagtcttaa

SEQ ID NO: 5807638 - DNA, 25 bp, Homo sapien
aattcggcatcaagtacatcttgaa

SEQ ID NO: 5807639 - DNA, 25 bp, Homo sapien
gttaccaagtgcggaattggttaat

SEQ ID NO: 5807640 - DNA, 25 bp, Homo sapien
ctcccgcagctcgacccccatgata

SEQ ID NO: 5807641 - DNA, 25 bp, Homo sapien
cagcaagacggtggcgtggctcaac

SEQ ID NO: 5807642 - DNA, 25 bp, Homo sapien
ctaagagccagcggctgcagctggg

SEQ ID NO: 5807643 - DNA, 25 bp, Homo sapien
gagggctgccgggcgttctacctgg

SEQ ID NO: 5807644 - DNA, 25 bp, Homo sapien
acgggcggcgagtcggtgctcgggc

SEQ ID NO: 5807645 - DNA, 25 bp, Homo sapien
ttccagcacagcagctgtattttac

SEQ ID NO: 5807646 - DNA, 25 bp, Homo sapien
gcggtgcgctcggcctatgcctgcc

SEQ ID NO: 5807647 - DNA, 25 bp, Homo sapien
gaattaaaccccgctccgagagcgg

SEQ ID NO: 5807648 - DNA, 25 bp, Homo sapien
atactccatttgattattgtaaata

SEQ ID NO: 5807649 - DNA, 25 bp, Homo sapien
acatgctgtatagatacaggcagta

SEQ ID NO: 5807650 - DNA, 25 bp, Homo sapien
gagtcgtcgcacatcgagtcggcca

SEQ ID NO: 5807651 - DNA, 25 bp, Homo sapien
cgtcgcacatcgagtcggccatcaa

SEQ ID NO: 5807652 - DNA, 25 bp, Homo sapien
agtgctggggctcgggggcctgcgg

SEQ ID NO: 5807653 - DNA, 25 bp, Homo sapien
gcctacccatgcagggactgggatt

SEQ ID NO: 5807654 - DNA, 25 bp, Homo sapien
gctgagtccaagagatagcaaatcg

SEQ ID NO: 5807655 - DNA, 25 bp, Homo sapien
tggatttcattcactggggaggaac

SEQ ID NO: 5807656 - DNA, 25 bp, Homo sapien
gactccaccaacttggacgtgttgg

SEQ ID NO: 5807657 - DNA, 25 bp, Homo sapien
gagccaaaacctgtcccagtttttc

SEQ ID NO: 5807658 - DNA, 25 bp, Homo sapien
ccaaagggagaaagagcagtatgcc

SEQ ID NO: 5807659 - DNA, 25 bp, Homo sapien
agctatacgagtcgtcgcacatcga

SEQ ID NO: 5807660 - DNA, 25 bp, Homo sapien
ctcggacatcgagtctgaccttgac

SEQ ID NO: 5807661 - DNA, 25 bp, Homo sapien
ctgtcccagtttttccctgaggcca

SEQ ID NO: 5807662 - DNA, 25 bp, Homo sapien
caaccagaatgtataccaggtggac

SEQ ID NO: 5807663 - DNA, 25 bp, Homo sapien
aaaaactatctgggcagcttcattg

SEQ ID NO: 5807664 - DNA, 25 bp, Homo sapien
ggagggattagaagccgctagactt

SEQ ID NO: 5807665 - DNA, 25 bp, Homo sapien
aatgatagggtaggagcatgtgttc

SEQ ID NO: 5807666 - DNA, 25 bp, Homo sapien
gcctgcagaagggtaacctgccggt

SEQ ID NO: 5807667 - DNA, 25 bp, Homo sapien
tggaataacaggacatgctgtatag

SEQ ID NO: 5807668 - DNA, 25 bp, Homo sapien
atatagaggagccaaagagagattt

SEQ ID NO: 5807669 - DNA, 25 bp, Homo sapien
gtcccagtttttccctgaggccatt

SEQ ID NO: 5807670 - DNA, 25 bp, Homo sapien
gaggacgctgggactcagcagccca

SEQ ID NO: 5807671 - DNA, 25 bp, Homo sapien
tcttgcccttcctctacttgggctg

SEQ ID NO: 5807672 - DNA, 25 bp, Homo sapien
gcgttctacctggaaggtggcttca

SEQ ID NO: 5807673 - DNA, 25 bp, Homo sapien
tttttcctttgatgggcttaaaaga

SEQ ID NO: 5807674 - DNA, 25 bp, Homo sapien
gtttccttttgcatctggaactgac

SEQ ID NO: 5807675 - DNA, 25 bp, Homo sapien
gtaggtttgctctgtacccatgtgt

SEQ ID NO: 5807676 - DNA, 25 bp, Homo sapien
gggcgttctacctggaaggtggctt

SEQ ID NO: 5807677 - DNA, 25 bp, Homo sapien
gcccttcctctacttgggctgtgcc

SEQ ID NO: 5807678 - DNA, 25 bp, Homo sapien
ggcttcagtaagttccaagccgagt

SEQ ID NO: 5807679 - DNA, 25 bp, Homo sapien
acatatcccctaacttcaacttcat

SEQ ID NO: 5807680 - DNA, 25 bp, Homo sapien
tcggtgctcgggctgctgctcaaga

SEQ ID NO: 5807681 - DNA, 25 bp, Homo sapien
tcagctgctggacttcgagaggacg

SEQ ID NO: 5807682 - DNA, 25 bp, Homo sapien
tccttcccagtggagatcttgccct

SEQ ID NO: 5807683 - DNA, 25 bp, Homo sapien
ccgctcagtcactgtgactgtggct

SEQ ID NO: 5807684 - DNA, 25 bp, Homo sapien
cgcgtcggaaatggcgatcagcaag

SEQ ID NO: 5807685 - DNA, 25 bp, Homo sapien
cagtagcacggagtccgaattaatt

SEQ ID NO: 5807686 - DNA, 25 bp, Homo sapien
aggtttgctctgtacccatgtgtac

SEQ ID NO: 5807687 - DNA, 25 bp, Homo sapien
tcgagtcttaaataatccggggaga

SEQ ID NO: 5807688 - DNA, 25 bp, Homo sapien
ggcgagtcggtgctcgggctgctgc

SEQ ID NO: 5807689 - DNA, 25 bp, Homo sapien
tcagtaagttccaagccgagttctc

SEQ ID NO: 5807690 - DNA, 25 bp, Homo sapien
tcactgtgactgtggcttaccttat

SEQ ID NO: 5807691 - DNA, 25 bp, Homo sapien
gatggactgccggccgcaggagcta

SEQ ID NO: 5807692 - DNA, 25 bp, Homo sapien
gctgctgatggactgccggccgcag

SEQ ID NO: 5807693 - DNA, 25 bp, Homo sapien
ctagcctcggcttgggtaaggcgag

SEQ ID NO: 5807694 - DNA, 25 bp, Homo sapien
catcttgaacgtcacccccaatttg

SEQ ID NO: 5807695 - DNA, 25 bp, Homo sapien
tggagatcttgcccttcctctactt

SEQ ID NO: 5807696 - DNA, 25 bp, Homo sapien
tctacgtgaaagaccccacacccct

SEQ ID NO: 5807697 - DNA, 25 bp, Homo sapien
aaaatctgatactccatttgattat

SEQ ID NO: 5807698 - DNA, 25 bp, Homo sapien
gtccaacagccagccttccttccca

SEQ ID NO: 5807699 - DNA, 25 bp, Homo sapien
cgctgtccaacagccagccttcctt

SEQ ID NO: 5807700 - DNA, 25 bp, Homo sapien
cagctcgccgccgttgccagtgctg

SEQ ID NO: 5807701 - DNA, 25 bp, Homo sapien
tcccctctcagtagcacggagtccg

SEQ ID NO: 5807702 - DNA, 25 bp, Homo sapien
tttaaatacaagcaaatccccatct

SEQ ID NO: 5807703 - DNA, 25 bp, Homo sapien
tgggtcagctgctggacttcgagag

SEQ ID NO: 5807704 - DNA, 25 bp, Homo sapien
caaggttaccaagtgcggaattggt

SEQ ID NO: 5807705 - DNA, 25 bp, Homo sapien
gagagagattcattgacactaagag

SEQ ID NO: 5807706 - DNA, 25 bp, Homo sapien
acctgtcccagtttttccctgaggc

SEQ ID NO: 5807707 - DNA, 25 bp, Homo sapien
tagactttttttcctcccctctcag

SEQ ID NO: 5807708 - DNA, 25 bp, Homo sapien
ctctgcaatctacgtgaaagacccc

SEQ ID NO: 5807709 - DNA, 25 bp, Homo sapien
gtttggaaaaaaaatctgatactcc

SEQ ID NO: 5807710 - DNA, 25 bp, Homo sapien
agacccgtgcccttcgcgtcggaaa

SEQ ID NO: 5807711 - DNA, 25 bp, Homo sapien
agcggcagcttcgcgcgcggtgcgc

SEQ ID NO: 5807712 - DNA, 25 bp, Homo sapien
agctctgactcttcctcggacatcg

SEQ ID NO: 5807713 - DNA, 25 bp, Homo sapien
cggatcagctctgactcttcctcgg

SEQ ID NO: 5807714 - DNA, 25 bp, Homo sapien
ctggagccaaaacctgtcccagttt

SEQ ID NO: 5807715 - DNA, 25 bp, Homo sapien
atcacttgacagtgtttgtttgaat

SEQ ID NO: 5807716 - DNA, 25 bp, Homo sapien
ccttggagggagggattagaagccg

SEQ ID NO: 5807717 - DNA, 25 bp, Homo sapien
ttgcttggctggcattagccgctca

SEQ ID NO: 5807718 - DNA, 25 bp, Homo sapien
cctctacttgggctgtgccaaagac

SEQ ID NO: 5807719 - DNA, 25 bp, Homo sapien
caggtggactctctgcaatctacgt

SEQ ID NO: 5807720 - DNA, 25 bp, Homo sapien
gaatgtataccaggtggactctctg

SEQ ID NO: 5807721 - DNA, 25 bp, Homo sapien
cagaatgtataccaggtggactctc

SEQ ID NO: 5807722 - DNA, 25 bp, Homo sapien
ctctgactcttcctcggacatcgag

SEQ ID NO: 5807723 - DNA, 25 bp, Homo sapien
gctcgacccccatgatagatacgct

SEQ ID NO: 5807724 - DNA, 25 bp, Homo sapien
agaactgtggtgtcttggtacattg

SEQ ID NO: 5807725 - DNA, 25 bp, Homo sapien
ccaggcgcatagggtagaaccaaat

SEQ ID NO: 5807726 - DNA, 25 bp, Homo sapien
atgacaccagctgtctgtactagac

SEQ ID NO: 5807727 - DNA, 25 bp, Homo sapien
tcaattttgcatatagaggagccaa

SEQ ID NO: 5807728 - DNA, 25 bp, Homo sapien
cggctttacttctgtctcgtctgcc

SEQ ID NO: 5807729 - DNA, 25 bp, Homo sapien
gcgcggcgaggaccgggaccgcttc

SEQ ID NO: 5807730 - DNA, 25 bp, Homo sapien
tgtgactgtggcttaccttatgcag

SEQ ID NO: 5807731 - DNA, 25 bp, Homo sapien
gctcgccgccgttgccagtgctggg

SEQ ID NO: 5807732 - DNA, 25 bp, Homo sapien
aatagtgcaacagactcggatggta

SEQ ID NO: 5807733 - DNA, 25 bp, Homo sapien
gcatatagaggagccaaagagagat

SEQ ID NO: 5807734 - DNA, 25 bp, Homo sapien
acgagggctgccgggcgttctacct

SEQ ID NO: 5807735 - DNA, 25 bp, Homo sapien
cgagagcggcagcttcgcgcgcggt

SEQ ID NO: 5807736 - DNA, 25 bp, Homo sapien
caatttgccgaatctctttgagaac

SEQ ID NO: 5807737 - DNA, 25 bp, Homo sapien
tagtgcaacagactcggatggtagt

SEQ ID NO: 5807738 - DNA, 25 bp, Homo sapien
ttgagagagattcattgacactaag

SEQ ID NO: 5807739 - DNA, 25 bp, Homo sapien
ggagaaagagcagtatgccacttct

SEQ ID NO: 5807740 - DNA, 25 bp, Homo sapien
tcaacgagcagctggagctgggcaa

SEQ ID NO: 5807741 - DNA, 25 bp, Homo sapien
ttgaacgtcacccccaatttgccga

SEQ ID NO: 5807742 - DNA, 25 bp, Homo sapien
cattgagagagattcattgacacta

SEQ ID NO: 5807743 - DNA, 25 bp, Homo sapien
atttgccgaatctctttgagaacgc

SEQ ID NO: 5807744 - DNA, 25 bp, Homo sapien
acttcatgggtcagctgctggactt

SEQ ID NO: 5807745 - DNA, 25 bp, Homo sapien
tccatttgattattgtaaatatttg

SEQ ID NO: 5807746 - DNA, 25 bp, Homo sapien
ctacccatgcagggactgggattcg

SEQ ID NO: 5807747 - DNA, 25 bp, Homo sapien
gtcgtcgcacatcgagtcggccatc

SEQ ID NO: 5807748 - DNA, 25 bp, Homo sapien
actccatttgattattgtaaatatt

SEQ ID NO: 5807749 - DNA, 25 bp, Homo sapien
gattcattgacactaagagccagcg

SEQ ID NO: 5807750 - DNA, 25 bp, Homo sapien
tgactgtggcttaccttatgcagaa

SEQ ID NO: 5807751 - DNA, 25 bp, Homo sapien
ccccgaggggcgtctggtaggcacc

SEQ ID NO: 5807752 - DNA, 25 bp, Homo sapien
cttcagcagtttctcttggcagcat

SEQ ID NO: 5807753 - DNA, 25 bp, Homo sapien
acgctcagacccgtgcccttcgcgt

SEQ ID NO: 5807754 - DNA, 25 bp, Homo sapien
gtctggcccttcagcagtttctctt

SEQ ID NO: 5807755 - DNA, 25 bp, Homo sapien
atcgagtcggccatcaacgtggcca

SEQ ID NO: 5807756 - DNA, 25 bp, Homo sapien
aacagagagatttgctccattctct

SEQ ID NO: 5807757 - DNA, 25 bp, Homo sapien
cgcgcgctcttcacgcgcggcgagg

SEQ ID NO: 5807758 - DNA, 25 bp, Homo sapien
tagcagcagctcgccgccgttgcca

SEQ ID NO: 5807759 - DNA, 25 bp, Homo sapien
aacagccagccttccttcccagtgg

SEQ ID NO: 5807760 - DNA, 25 bp, Homo sapien
agcacagcagctgtattttaccacc

SEQ ID NO: 5807761 - DNA, 25 bp, Homo sapien
cttgggtaaggcgaggcggaattaa

SEQ ID NO: 5807762 - DNA, 25 bp, Homo sapien
agcacggagtccgaattaattggat

SEQ ID NO: 5807763 - DNA, 25 bp, Homo sapien
agagcagtatgccacttcttaaaac

SEQ ID NO: 5807764 - DNA, 25 bp, Homo sapien
cggcgcctgcagaagggtaacctgc

SEQ ID NO: 5807765 - DNA, 25 bp, Homo sapien
aatacaagcaaatccccatctcgga

SEQ ID NO: 5807766 - DNA, 25 bp, Homo sapien
cccctaacttcaacttcatgggtca

SEQ ID NO: 5807767 - DNA, 25 bp, Homo sapien
ttgtttgaattgtgtttgttttttc

SEQ ID NO: 5807768 - DNA, 25 bp, Homo sapien
gaaggtggcttcagtaagttccaag

SEQ ID NO: 5807769 - DNA, 25 bp, Homo sapien
gagtcttaaataatccggggagaaa

SEQ ID NO: 5807770 - DNA, 25 bp, Homo sapien
gactcttcctcggacatcgagtctg

SEQ ID NO: 5807771 - DNA, 25 bp, Homo sapien
ggccatcaacgtggccatcccgggc

SEQ ID NO: 5807772 - DNA, 25 bp, Homo sapien
agccgctcagtcactgtgactgtgg

SEQ ID NO: 5807773 - DNA, 25 bp, Homo sapien
tgggattcgaggacttccaggcgca

SEQ ID NO: 5807774 - DNA, 25 bp, Homo sapien
ttggagggagggattagaagccgct

SEQ ID NO: 5807775 - DNA, 25 bp, Homo sapien
gtttctcttggcagcatcagctggg

SEQ ID NO: 5807776 - DNA, 25 bp, Homo sapien
caaatgatagggtaggagcatgtgt

SEQ ID NO: 5807777 - DNA, 25 bp, Homo sapien
gcccttcgcgtcggaaatggcgatc

SEQ ID NO: 5807778 - DNA, 25 bp, Homo sapien
aagggtaacctgccggtgcgcgcgc

SEQ ID NO: 5807779 - DNA, 25 bp, Homo sapien
cagtaggtttgctctgtacccatgt

SEQ ID NO: 5807780 - DNA, 25 bp, Homo sapien
cgagagcagcagcgactggaacgag

SEQ ID NO: 5807781 - DNA, 25 bp, Homo sapien
gcggaattggttaatactaacagag

SEQ ID NO: 5807782 - DNA, 25 bp, Homo sapien
agatacgctcagacccgtgcccttc

SEQ ID NO: 5807783 - DNA, 25 bp, Homo sapien
acttggacgtgttggaggaattcgg

SEQ ID NO: 5807784 - DNA, 25 bp, Homo sapien
aaactatctgggcagcttcattgag

SEQ ID NO: 5807785 - DNA, 25 bp, Homo sapien
tgctcgggctgctgctcaagaagct

SEQ ID NO: 5807786 - DNA, 25 bp, Homo sapien
gtcgatgaacgatgcctatgacatt

SEQ ID NO: 5807787 - DNA, 25 bp, Homo sapien
acccatgcagggactgggattcgag

SEQ ID NO: 5807788 - DNA, 25 bp, Homo sapien
tctacttgggctgtgccaaagactc

SEQ ID NO: 5807789 - DNA, 25 bp, Homo sapien
cgcaggagctatacgagtcgtcgca

SEQ ID NO: 5807790 - DNA, 25 bp, Homo sapien
ttagggccttgtaaggctgtttcct

SEQ ID NO: 5807791 - DNA, 25 bp, Homo sapien
ccaagtgcggaattggttaatacta

SEQ ID NO: 5807792 - DNA, 25 bp, Homo sapien
ggaaaaaaaatctgatactccattt

SEQ ID NO: 5807793 - DNA, 25 bp, Homo sapien
gaagactaattcaattttgcatata

SEQ ID NO: 5807794 - DNA, 25 bp, Homo sapien
taattcaattttgcatatagaggag

SEQ ID NO: 5807795 - DNA, 25 bp, Homo sapien
ggagggagggattagaagccgctag

SEQ ID NO: 5807796 - DNA, 25 bp, Homo sapien
tttgagaacgcaggagagtttaaat

SEQ ID NO: 5807797 - DNA, 25 bp, Homo sapien
gagctgggcaacgagcggctgctgc

SEQ ID NO: 5807798 - DNA, 25 bp, Homo sapien
gcagaagggtaacctgccggtgcgc

SEQ ID NO: 5807799 - DNA, 25 bp, Homo sapien
ggcagtaggtttgctctgtacccat

SEQ ID NO: 5807800 - DNA, 25 bp, Homo sapien
ctgcagctgggtgcagagagaacct

SEQ ID NO: 5807801 - DNA, 25 bp, Homo sapien
tcagcagcccatgtgacaacagggt

SEQ ID NO: 5807802 - DNA, 25 bp, Homo sapien
ctttttttcctcccctctcagtagc

SEQ ID NO: 5807803 - DNA, 25 bp, Homo sapien
gactgccggccgcaggagctatacg

SEQ ID NO: 5807804 - DNA, 25 bp, Homo sapien
ggctgctgctgatggactgccggcc

SEQ ID NO: 5807805 - DNA, 25 bp, Homo sapien
cgcagctcgacccccatgatagata

SEQ ID NO: 5807806 - DNA, 25 bp, Homo sapien
taaaccccgctccgagagcggcagc

SEQ ID NO: 5807807 - DNA, 25 bp, Homo sapien
cttcacccggcgctgtggcaccgac

SEQ ID NO: 5807808 - DNA, 25 bp, Homo sapien
atagatacgctcagacccgtgccct

SEQ ID NO: 5807809 - DNA, 25 bp, Homo sapien
aagaccccacacccctccttgctgg

SEQ ID NO: 5807810 - DNA, 25 bp, Homo sapien
cccagtttttccctgaggccatttc

SEQ ID NO: 5807811 - DNA, 25 bp, Homo sapien
agtgtttgtttgaattgtgtttgtt

SEQ ID NO: 5807812 - DNA, 25 bp, Homo sapien
cttggcagcatcagctgggctgctt

SEQ ID NO: 5807813 - DNA, 25 bp, Homo sapien
tccgctgtccaacagccagccttcc

SEQ ID NO: 5807814 - DNA, 25 bp, Homo sapien
tggtagtccgctgtccaacagccag

SEQ ID NO: 5807815 - DNA, 25 bp, Homo sapien
ccctgaggccatttctttcatagat

SEQ ID NO: 5807816 - DNA, 25 bp, Homo sapien
cagtttggaaaaaaaatctgatact

SEQ ID NO: 5807817 - DNA, 25 bp, Homo sapien
caaagagagatttcagctctgtatt

SEQ ID NO: 5807818 - DNA, 25 bp, Homo sapien
tggacttcgagaggacgctgggact

SEQ ID NO: 5807819 - DNA, 25 bp, Homo sapien
gtaggcaccccgccctctcccgcag

SEQ ID NO: 5807820 - DNA, 25 bp, Homo sapien
tgatagggtaggagcatgtgttctt

SEQ ID NO: 5807821 - DNA, 25 bp, Homo sapien
gtaacctgccggtgcgcgcgctctt

SEQ ID NO: 5807822 - DNA, 25 bp, Homo sapien
ctgtactagacaaggttaccaagtg

SEQ ID NO: 5807823 - DNA, 25 bp, Homo sapien
cgactggaacgagaatacgggcggc

SEQ ID NO: 5807824 - DNA, 25 bp, Homo sapien
agcagtttctcttggcagcatcagc

SEQ ID NO: 5807825 - DNA, 25 bp, Homo sapien
agctgtattttaccaccccttccaa

SEQ ID NO: 5807826 - DNA, 25 bp, Homo sapien
agtggagatcttgcccttcctctac

SEQ ID NO: 5807827 - DNA, 25 bp, Homo sapien
tcttcaatgaagactaattcaattt

SEQ ID NO: 5807828 - DNA, 25 bp, Homo sapien
ggcaccgacacagtggtgctctacg

SEQ ID NO: 5807829 - DNA, 25 bp, Homo sapien
ctatacgagtcgtcgcacatcgagt

SEQ ID NO: 5807830 - DNA, 25 bp, Homo sapien
gcccatgtgacaacagggttccagc

SEQ ID NO: 5807831 - DNA, 25 bp, Homo sapien
tgacagtgtttgtttgaattgtgtt

SEQ ID NO: 5807832 - DNA, 25 bp, Homo sapien
agttctccctgcattgcgagaccaa

SEQ ID NO: 5807833 - DNA, 25 bp, Homo sapien
ccatcccgggcatcatgctgcggcg

SEQ ID NO: 5807834 - DNA, 25 bp, Homo sapien
ggcctgcggatcagctctgactctt

SEQ ID NO: 5807835 - DNA, 25 bp, Homo sapien
gaacaaaaactatctgggcagcttc

SEQ ID NO: 5807836 - DNA, 25 bp, Homo sapien
ccatcaacgtggccatcccgggcat

SEQ ID NO: 5807837 - DNA, 25 bp, Homo sapien
tttaccaccccttccaaccagaatg

SEQ ID NO: 5807838 - DNA, 25 bp, Homo sapien
gatttcattcactggggaggaacaa

SEQ ID NO: 5807839 - DNA, 25 bp, Homo sapien
ctggaactgactatataattgtctt

SEQ ID NO: 5807840 - DNA, 25 bp, Homo sapien
agaagggtaacctgccggtgcgcgc

SEQ ID NO: 5807841 - DNA, 25 bp, Homo sapien
cccttcagcagtttctcttggcagc

SEQ ID NO: 5807842 - DNA, 25 bp, Homo sapien
ttccttttgcatctggaactgacta

SEQ ID NO: 5807843 - DNA, 25 bp, Homo sapien
aaaaaaaatctgatactccatttga

SEQ ID NO: 5807844 - DNA, 25 bp, Homo sapien
ctccctgcattgcgagaccaatcta

SEQ ID NO: 5807845 - DNA, 25 bp, Homo sapien
gaagctcaatctgtcgatgaacgat

SEQ ID NO: 5807846 - DNA, 25 bp, Homo sapien
ctcaagaagctcaaggacgagggct

SEQ ID NO: 5807847 - DNA, 25 bp, Homo sapien
cagctggagctgggcaacgagcggc

SEQ ID NO: 5807848 - DNA, 25 bp, Homo sapien
gaaagaccccacacccctccttgct

SEQ ID NO: 5807849 - DNA, 25 bp, Homo sapien
tcgagaggacgctgggactcagcag

SEQ ID NO: 5807850 - DNA, 25 bp, Homo sapien
tactaacagagagatttgctccatt

SEQ ID NO: 5807851 - DNA, 25 bp, Homo sapien
ggtatcagtttggaaaaaaaatctg

SEQ ID NO: 5807852 - DNA, 25 bp, Homo sapien
tattttaccaccccttccaaccaga

SEQ ID NO: 5807853 - DNA, 25 bp, Homo sapien
agaacctccggctttacttctgtct

SEQ ID NO: 5807854 - DNA, 25 bp, Homo sapien
ggagagtttaaatacaagcaaatcc

SEQ ID NO: 5807855 - DNA, 25 bp, Homo sapien
ccatgcagggactgggattcgagga

SEQ ID NO: 5807856 - DNA, 25 bp, Homo sapien
ctgtggtgtcttggtacattgcttg

SEQ ID NO: 5807857 - DNA, 25 bp, Homo sapien
ggcatcatgctgcggcgcctgcaga

SEQ ID NO: 5807858 - DNA, 25 bp, Homo sapien
gccacttcttaaaacagaacaaaac

SEQ ID NO: 5807859 - DNA, 25 bp, Homo sapien
tcttggtacattgcttggctggcat

SEQ ID NO: 5807860 - DNA, 25 bp, Homo sapien
cccccaatttgccgaatctctttga

SEQ ID NO: 5807861 - DNA, 25 bp, Homo sapien
agtaagttccaagccgagttctccc

SEQ ID NO: 5807862 - DNA, 25 bp, Homo sapien
gccgagttctccctgcattgcgaga

SEQ ID NO: 5807863 - DNA, 25 bp, Homo sapien
tggcagcatcagctgggctgctttc

SEQ ID NO: 5807864 - DNA, 25 bp, Homo sapien
tgctggggctcgggggcctgcggat

SEQ ID NO: 5807865 - DNA, 25 bp, Homo sapien
aatctacgtgaaagaccccacaccc

SEQ ID NO: 5807866 - DNA, 25 bp, Homo sapien
cactaagagccagcggctgcagctg

SEQ ID NO: 5807867 - DNA, 25 bp, Homo sapien
tctgtctcgtctgccccaaccgcta

SEQ ID NO: 5807868 - DNA, 25 bp, Homo sapien
gaattaattggatttcattcactgg

SEQ ID NO: 5807869 - DNA, 25 bp, Homo sapien
ggttccagcacagcagctgtatttt

SEQ ID NO: 5807870 - DNA, 25 bp, Homo sapien
gagtccgaattaattggatttcatt

SEQ ID NO: 5807871 - DNA, 25 bp, Homo sapien
ctgtttccttttgcatctggaactg

SEQ ID NO: 5807872 - DNA, 25 bp, Homo sapien
gtcacccccaatttgccgaatctct

SEQ ID NO: 5807873 - DNA, 25 bp, Homo sapien
agagatagcaaatcgagtcttaaat

SEQ ID NO: 5807874 - DNA, 25 bp, Homo sapien
ctggggctcgggggcctgcggatca

SEQ ID NO: 5807875 - DNA, 25 bp, Homo sapien
gtggcaccgacacagtggtgctcta

SEQ ID NO: 5807876 - DNA, 25 bp, Homo sapien
ggacatgctgtatagatacaggcag

SEQ ID NO: 5807877 - DNA, 25 bp, Homo sapien
tcggccatcaacgtggccatcccgg

SEQ ID NO: 5807878 - DNA, 25 bp, Homo sapien
gaaattatccaaagggagaaagagc

SEQ ID NO: 5807879 - DNA, 25 bp, Homo sapien
gctggaatgtgtctggcccttcagc

SEQ ID NO: 5807880 - DNA, 25 bp, Homo sapien
gatcagctctgactcttcctcggac

SEQ ID NO: 5807881 - DNA, 25 bp, Homo sapien
aatccaacatatcccctaacttcaa

SEQ ID NO: 5807882 - DNA, 25 bp, Homo sapien
gtttgctctgtacccatgtgtacag

SEQ ID NO: 5807883 - DNA, 25 bp, Homo sapien
ctgccccaaccgctagcctcggctt

SEQ ID NO: 5807884 - DNA, 25 bp, Homo sapien
ggcccttcagcagtttctcttggca

SEQ ID NO: 5807885 - DNA, 25 bp, Homo sapien
ggtagaaccaaatgatagggtagga

SEQ ID NO: 5807886 - DNA, 25 bp, Homo sapien
gtgacaacagggttccagcacagca

SEQ ID NO: 5807887 - DNA, 25 bp, Homo sapien
aatctgatactccatttgattattg

SEQ ID NO: 5807888 - DNA, 25 bp, Homo sapien
actatctgggcagcttcattgagag

SEQ ID NO: 5807889 - DNA, 25 bp, Homo sapien
ctgctgctcaagaagctcaaggacg

SEQ ID NO: 5807890 - DNA, 25 bp, Homo sapien
gctgctttctttgtgtgtggcccca

SEQ ID NO: 5807891 - DNA, 25 bp, Homo sapien
tgcggatcagctctgactcttcctc

SEQ ID NO: 5807892 - DNA, 25 bp, Homo sapien
actgtggcttaccttatgcagaagc

SEQ ID NO: 5807893 - DNA, 25 bp, Homo sapien
cttgacagtgtttgtttgaattgtg

SEQ ID NO: 5807894 - DNA, 25 bp, Homo sapien
ccttcctctacttgggctgtgccaa

SEQ ID NO: 5807895 - DNA, 25 bp, Homo sapien
gcagcagctcgccgccgttgccagt

SEQ ID NO: 5807896 - DNA, 25 bp, Homo sapien
aagacgcccgggtagatttgaggtg

SEQ ID NO: 5807897 - DNA, 25 bp, Homo sapien
tgtgttctttagggccttgtaaggc

SEQ ID NO: 5807898 - DNA, 25 bp, Homo sapien
tgggactcagcagcccatgtgacaa

SEQ ID NO: 5807899 - DNA, 25 bp, Homo sapien
gcagagagaacctccggctttactt

SEQ ID NO: 5807900 - DNA, 25 bp, Homo sapien
gatgggcttaaaagaaattatccaa

SEQ ID NO: 5807901 - DNA, 25 bp, Homo sapien
agcatgtgttctttagggccttgta

SEQ ID NO: 5807902 - DNA, 25 bp, Homo sapien
gatttcagctctgtatttgtggtat

SEQ ID NO: 5807903 - DNA, 25 bp, Homo sapien
ccttgctggaatgtgtctggccctt

SEQ ID NO: 5807904 - DNA, 25 bp, Homo sapien
gtccgaattaattggatttcattca

SEQ ID NO: 5807905 - DNA, 25 bp, Homo sapien
cggagtccgaattaattggatttca

SEQ ID NO: 5807906 - DNA, 25 bp, Homo sapien
cccgggcatcatgctgcggcgcctg

SEQ ID NO: 5807907 - DNA, 25 bp, Homo sapien
agcttcgcgcgcggtgcgctcggcc

SEQ ID NO: 5807908 - DNA, 25 bp, Homo sapien
gaccttgaccgagaccccaatagtg

SEQ ID NO: 5807909 - DNA, 25 bp, Homo sapien
gagccaaagagagatttcagctctg

SEQ ID NO: 5807910 - DNA, 25 bp, Homo sapien
tcagtcactgtgactgtggcttacc

SEQ ID NO: 5807911 - DNA, 25 bp, Homo sapien
ggagaaagacgcccgggtagatttg

SEQ ID NO: 5807912 - DNA, 25 bp, Homo sapien
tgtctcgtctgccccaaccgctagc

SEQ ID NO: 5807913 - DNA, 25 bp, Homo sapien
gagatcttgcccttcctctacttgg

SEQ ID NO: 5807914 - DNA, 25 bp, Homo sapien
aaatggcgatcagcaagacggtggc

SEQ ID NO: 5807915 - DNA, 25 bp, Homo sapien
agggttccagcacagcagctgtatt

SEQ ID NO: 5807916 - DNA, 25 bp, Homo sapien
attgtgtttgttttttcctttgatg

SEQ ID NO: 5807917 - DNA, 25 bp, Homo sapien
gcaagacggtggcgtggctcaacga

SEQ ID NO: 5807918 - DNA, 25 bp, Homo sapien
cccaaccgctagcctcggcttgggt

SEQ ID NO: 5807919 - DNA, 25 bp, Homo sapien
aatactaacagagagatttgctcca

SEQ ID NO: 5807920 - DNA, 25 bp, Homo sapien
agagtttaaatacaagcaaatcccc

SEQ ID NO: 5807921 - DNA, 25 bp, Homo sapien
atgctgtatagatacaggcagtagg

SEQ ID NO: 5807922 - DNA, 25 bp, Homo sapien
tttgttttttcctttgatgggctta

SEQ ID NO: 5807923 - DNA, 25 bp, Homo sapien
agggactgggattcgaggacttcca

SEQ ID NO: 5807924 - DNA, 25 bp, Homo sapien
ttcatgggtcagctgctggacttcg

SEQ ID NO: 5807925 - DNA, 25 bp, Homo sapien
ccggggcaagaactgtggtgtcttg

SEQ ID NO: 5807926 - DNA, 25 bp, Homo sapien
ttctttagggccttgtaaggctgtt

SEQ ID NO: 5807927 - DNA, 25 bp, Homo sapien
cattgcttggctggcattagccgct

SEQ ID NO: 5807928 - DNA, 25 bp, Homo sapien
tgggcagcttcattgagagagattc

SEQ ID NO: 5807929 - DNA, 25 bp, Homo sapien
ccccaatagtgcaacagactcggat

SEQ ID NO: 5807930 - DNA, 25 bp, Homo sapien
acggctcgtgtagcagcagctcgcc

SEQ ID NO: 5807931 - DNA, 25 bp, Homo sapien
ggtcagctgctggacttcgagagga

SEQ ID NO: 5807932 - DNA, 25 bp, Homo sapien
ggctggcattagccgctcagtcact

SEQ ID NO: 5807933 - DNA, 25 bp, Homo sapien
cggcctatgcctgccccgaggggcg

SEQ ID NO: 5807934 - DNA, 25 bp, Homo sapien
aattatccaaagggagaaagagcag

SEQ ID NO: 5807935 - DNA, 25 bp, Homo sapien
ccgacacagtggtgctctacgacga

SEQ ID NO: 5807936 - DNA, 25 bp, Homo sapien
tcgcacatcgagtcggccatcaacg

SEQ ID NO: 5807937 - DNA, 25 bp, Homo sapien
caagtacatcttgaacgtcaccccc

SEQ ID NO: 5807938 - DNA, 25 bp, Homo sapien
caacgagcggctgctgctgatggac

SEQ ID NO: 5807939 - DNA, 25 bp, Homo sapien
caaagactccaccaacttggacgtg

SEQ ID NO: 5807940 - DNA, 25 bp, Homo sapien
atcaacgtggccatcccgggcatca

SEQ ID NO: 5807941 - DNA, 25 bp, Homo sapien
tagatttgaggtgcagccttggagg

SEQ ID NO: 5807942 - DNA, 25 bp, Homo sapien
ctgtccaacagccagccttccttcc

SEQ ID NO: 5807943 - DNA, 25 bp, Homo sapien
gacactaagagccagcggctgcagc

SEQ ID NO: 5807944 - DNA, 25 bp, Homo sapien
ctccttgctggaatgtgtctggccc

SEQ ID NO: 5807945 - DNA, 25 bp, Homo sapien
ggacgctgggactcagcagcccatg

SEQ ID NO: 5807946 - DNA, 25 bp, Homo sapien
gcggctgctgctgatggactgccgg

SEQ ID NO: 5807947 - DNA, 25 bp, Homo sapien
gacgagagcagcagcgactggaacg

SEQ ID NO: 5807948 - DNA, 25 bp, Homo sapien
gaggaattcggcatcaagtacatct

SEQ ID NO: 5807949 - DNA, 25 bp, Homo sapien
cgtggctcaacgagcagctggagct

SEQ ID NO: 5807950 - DNA, 25 bp, Homo sapien
gcgcatagggtagaaccaaatgata

SEQ ID NO: 5807951 - DNA, 25 bp, Homo sapien
gaataacaggacatgctgtatagat

SEQ ID NO: 5807952 - DNA, 25 bp, Homo sapien
tcggcttgggtaaggcgaggcggaa

SEQ ID NO: 5807953 - DNA, 25 bp, Homo sapien
ggacgagggctgccgggcgttctac

SEQ ID NO: 5807954 - DNA, 25 bp, Homo sapien
cacagcagctgtattttaccacccc

SEQ ID NO: 5807955 - DNA, 25 bp, Homo sapien
tttgaggtgcagccttggagggagg

SEQ ID NO: 5807956 - DNA, 25 bp, Homo sapien
ctgcattgcgagaccaatctagacg

SEQ ID NO: 5807957 - DNA, 25 bp, Homo sapien
acgagcggctgctgctgatggactg

SEQ ID NO: 5807958 - DNA, 25 bp, Homo sapien
atgcctgccccgaggggcgtctggt

SEQ ID NO: 5807959 - DNA, 25 bp, Homo sapien
atcagcaagacggtggcgtggctca

SEQ ID NO: 5807960 - DNA, 25 bp, Homo sapien
ctctctgcaatctacgtgaaagacc

SEQ ID NO: 5807961 - DNA, 25 bp, Homo sapien
gttctacctggaaggtggcttcagt

SEQ ID NO: 5807962 - DNA, 25 bp, Homo sapien
ttgtggtatcagtttggaaaaaaaa

SEQ ID NO: 5807963 - DNA, 25 bp, Homo sapien
gactatataattgtcttcaatgaag

SEQ ID NO: 5807964 - DNA, 25 bp, Homo sapien
ctatataattgtcttcaatgaagac

SEQ ID NO: 5807965 - DNA, 25 bp, Homo sapien
gcatctggaactgactatataattg

SEQ ID NO: 5807966 - DNA, 25 bp, Homo sapien
ctttcatagatgaagcccggggcaa

SEQ ID NO: 5807967 - DNA, 25 bp, Homo sapien
acccggcgctgtggcaccgacacag

SEQ ID NO: 5807968 - DNA, 25 bp, Homo sapien
accagaatgtataccaggtggactc

SEQ ID NO: 5807969 - DNA, 25 bp, Homo sapien
agtccgctgtccaacagccagcctt

SEQ ID NO: 5807970 - DNA, 25 bp, Homo sapien
accgctagcctcggcttgggtaagg

SEQ ID NO: 5807971 - DNA, 25 bp, Homo sapien
tctgggcagcttcattgagagagat

SEQ ID NO: 5807972 - DNA, 25 bp, Homo sapien
cccatctcggatcactggagccaaa

SEQ ID NO: 5807973 - DNA, 25 bp, Homo sapien
aattttgcatatagaggagccaaag

SEQ ID NO: 5807974 - DNA, 25 bp, Homo sapien
ctgtctgtactagacaaggttacca

SEQ ID NO: 5807975 - DNA, 25 bp, Homo sapien
acgtggccatcccgggcatcatgct

SEQ ID NO: 5807976 - DNA, 25 bp, Homo sapien
aaagagcagtatgccacttcttaaa

SEQ ID NO: 5807977 - DNA, 25 bp, Homo sapien
cagcctacccatgcagggactggga

SEQ ID NO: 5807978 - DNA, 25 bp, Homo sapien
atagggtaggagcatgtgttcttta

SEQ ID NO: 5807979 - DNA, 25 bp, Homo sapien
tggtaggcaccccgccctctcccgc

SEQ ID NO: 5807980 - DNA, 25 bp, Homo sapien
cggtggcgtggctcaacgagcagct

SEQ ID NO: 5807981 - DNA, 25 bp, Homo sapien
atgcagggactgggattcgaggact

SEQ ID NO: 5807982 - DNA, 25 bp, Homo sapien
ttgtaaatatttgatcttgaatcac

SEQ ID NO: 5807983 - DNA, 25 bp, Homo sapien
cttccttcccagtggagatcttgcc

SEQ ID NO: 5807984 - DNA, 25 bp, Homo sapien
ggatcactggagccaaaacctgtcc

SEQ ID NO: 5807985 - DNA, 25 bp, Homo sapien
cccatgtgtacagcctacccatgca

SEQ ID NO: 5807986 - DNA, 25 bp, Homo sapien
gaggggcgtctggtaggcaccccgc

SEQ ID NO: 5807987 - DNA, 25 bp, Homo sapien
ggattagaagccgctagactttttt

SEQ ID NO: 5807988 - DNA, 25 bp, Homo sapien
ccggcgctgtggcaccgacacagtg

SEQ ID NO: 5807989 - DNA, 25 bp, Homo sapien
aacgcaggagagtttaaatacaagc

SEQ ID NO: 5807990 - DNA, 25 bp, Homo sapien
tatagatacaggcagtaggtttgct

SEQ ID NO: 5807991 - DNA, 25 bp, Homo sapien
ggaccgcttcacccggcgctgtggc

SEQ ID NO: 5807992 - DNA, 25 bp, Homo sapien
gcagcttcgcgcgcggtgcgctcgg

SEQ ID NO: 5807993 - DNA, 25 bp, Homo sapien
atagaggagccaaagagagatttca

SEQ ID NO: 5807994 - DNA, 25 bp, Homo sapien
aaggacgagggctgccgggcgttct

SEQ ID NO: 5807995 - DNA, 25 bp, Homo sapien
taagttccaagccgagttctccctg

SEQ ID NO: 5807996 - DNA, 25 bp, Homo sapien
aacctccggctttacttctgtctcg

SEQ ID NO: 5807997 - DNA, 25 bp, Homo sapien
ggggcgtctggtaggcaccccgccc

SEQ ID NO: 5807998 - DNA, 25 bp, Homo sapien
ggaattcggcatcaagtacatcttg

SEQ ID NO: 5807999 - DNA, 25 bp, Homo sapien
ggattcgaggacttccaggcgcata

SEQ ID NO: 5808000 - DNA, 25 bp, Homo sapien
ccaacagccagccttccttcccagt

SEQ ID NO: 5808001 - DNA, 25 bp, Homo sapien
ttggaaaaaaaatctgatactccat

SEQ ID NO: 5808002 - DNA, 25 bp, Homo sapien
tggactctctgcaatctacgtgaaa

SEQ ID NO: 5808003 - DNA, 25 bp, Homo sapien
aggtggcttcagtaagttccaagcc

SEQ ID NO: 5808004 - DNA, 25 bp, Homo sapien
tatctgggcagcttcattgagagag

SEQ ID NO: 5808005 - DNA, 25 bp, Homo sapien
acccgtgcccttcgcgtcggaaatg

SEQ ID NO: 5808006 - DNA, 25 bp, Homo sapien
ttaaaagaaattatccaaagggaga

SEQ ID NO: 5808007 - DNA, 25 bp, Homo sapien
ctgccggccgcaggagctatacgag

SEQ ID NO: 5808008 - DNA, 25 bp, Homo sapien
atagggtagaaccaaatgatagggt

SEQ ID NO: 5808009 - DNA, 25 bp, Homo sapien
agctgggctgctttctttgtgtgtg

SEQ ID NO: 5808010 - DNA, 25 bp, Homo sapien
ggcgaggcggaattaaaccccgctc

SEQ ID NO: 5808011 - DNA, 25 bp, Homo sapien
ccttgtaaggctgtttccttttgca

SEQ ID NO: 5808012 - DNA, 25 bp, Homo sapien
gcctgccccgaggggcgtctggtag

SEQ ID NO: 5808013 - DNA, 25 bp, Homo sapien
ggcggaattaaaccccgctccgaga

SEQ ID NO: 5808014 - DNA, 25 bp, Homo sapien
gtactagacaaggttaccaagtgcg

SEQ ID NO: 5808015 - DNA, 25 bp, Homo sapien
cagccagccttccttcccagtggag

SEQ ID NO: 5808016 - DNA, 25 bp, Homo sapien
tcacgcgcggcgaggaccgggaccg

SEQ ID NO: 5808017 - DNA, 25 bp, Homo sapien
atttctttcatagatgaagcccggg

SEQ ID NO: 5808018 - DNA, 25 bp, Homo sapien
gtggcgtggctcaacgagcagctgg

SEQ ID NO: 5808019 - DNA, 25 bp, Homo sapien
ccttcgcgtcggaaatggcgatcag

SEQ ID NO: 5808020 - DNA, 25 bp, Homo sapien
ctcggcctatgcctgccccgagggg

SEQ ID NO: 5808021 - DNA, 25 bp, Homo sapien
tgttctttagggccttgtaaggctg

SEQ ID NO: 5808022 - DNA, 25 bp, Homo sapien
gctggacttcgagaggacgctggga

SEQ ID NO: 5808023 - DNA, 25 bp, Homo sapien
ctgctggacttcgagaggacgctgg

SEQ ID NO: 5808024 - DNA, 25 bp, Homo sapien
gctcagtcactgtgactgtggctta

SEQ ID NO: 5808025 - DNA, 25 bp, Homo sapien
agcaaatcgagtcttaaataatccg

SEQ ID NO: 5808026 - DNA, 25 bp, Homo sapien
aatgaaaaaatccaacatatcccct

SEQ ID NO: 5808027 - DNA, 25 bp, Homo sapien
gcaccccgccctctcccgcagctcg

SEQ ID NO: 5808028 - DNA, 25 bp, Homo sapien
attaaaccccgctccgagagcggca

SEQ ID NO: 5808029 - DNA, 25 bp, Homo sapien
gaggccatttctttcatagatgaag

SEQ ID NO: 5808030 - DNA, 25 bp, Homo sapien
gagatttgctccattctctttggaa

SEQ ID NO: 5808031 - DNA, 25 bp, Homo sapien
attagaagccgctagactttttttc

SEQ ID NO: 5808032 - DNA, 25 bp, Homo sapien
ccattctctttggaataacaggaca

SEQ ID NO: 5808033 - DNA, 25 bp, Homo sapien
gctgccgggcgttctacctggaagg

SEQ ID NO: 5808034 - DNA, 25 bp, Homo sapien
gcttcattgagagagattcattgac

SEQ ID NO: 5808035 - DNA, 25 bp, Homo sapien
atgccacttcttaaaacagaacaaa

SEQ ID NO: 5808036 - DNA, 25 bp, Homo sapien
tctctttggaataacaggacatgct

SEQ ID NO: 5808037 - DNA, 25 bp, Homo sapien
aacagactcggatggtagtccgctg

SEQ ID NO: 5808038 - DNA, 25 bp, Homo sapien
atctggaactgactatataattgtc

SEQ ID NO: 5808039 - DNA, 25 bp, Homo sapien
gtgcagagagaacctccggctttac

SEQ ID NO: 5808040 - DNA, 25 bp, Homo sapien
atcactggagccaaaacctgtccca

SEQ ID NO: 5808041 - DNA, 25 bp, Homo sapien
ataccaggtggactctctgcaatct

SEQ ID NO: 5808042 - DNA, 25 bp, Homo sapien
acagggttccagcacagcagctgta

SEQ ID NO: 5808043 - DNA, 25 bp, Homo sapien
tgctcaagaagctcaaggacgaggg

SEQ ID NO: 5808044 - DNA, 25 bp, Homo sapien
ggggaggaacaaaaactatctgggc

SEQ ID NO: 5808045 - DNA, 25 bp, Homo sapien
aatctctttgagaacgcaggagagt

SEQ ID NO: 5808046 - DNA, 25 bp, Homo sapien
cgaatctctttgagaacgcaggaga

SEQ ID NO: 5808047 - DNA, 25 bp, Homo sapien
gtgtctggcccttcagcagtttctc

SEQ ID NO: 5808048 - DNA, 25 bp, Homo sapien
agggagggattagaagccgctagac

SEQ ID NO: 5808049 - DNA, 25 bp, Homo sapien
cgcaggagagtttaaatacaagcaa

SEQ ID NO: 5808050 - DNA, 25 bp, Homo sapien
ctcgggggcctgcggatcagctctg

SEQ ID NO: 5808051 - DNA, 25 bp, Homo sapien
tgatactccatttgattattgtaaa

SEQ ID NO: 5808052 - DNA, 25 bp, Homo sapien
agtcggtgctcgggctgctgctcaa

SEQ ID NO: 5808053 - DNA, 25 bp, Homo sapien
gtataccaggtggactctctgcaat

SEQ ID NO: 5808054 - DNA, 25 bp, Homo sapien
aatccccatctcggatcactggagc

SEQ ID NO: 5808055 - DNA, 25 bp, Homo sapien
gctgggactcagcagcccatgtgac

SEQ ID NO: 5808056 - DNA, 25 bp, Homo sapien
gagccagcggctgcagctgggtgca

SEQ ID NO: 5808057 - DNA, 25 bp, Homo sapien
ttcgcgtcggaaatggcgatcagca

SEQ ID NO: 5808058 - DNA, 25 bp, Homo sapien
agacggctcgtgtagcagcagctcg

SEQ ID NO: 5808059 - DNA, 25 bp, Homo sapien
ggctcgggggcctgcggatcagctc

SEQ ID NO: 5808060 - DNA, 25 bp, Homo sapien
gcccggggcaagaactgtggtgtct

SEQ ID NO: 5808061 - DNA, 25 bp, Homo sapien
aggaacaaaaactatctgggcagct

SEQ ID NO: 5808062 - DNA, 25 bp, Homo sapien
tagatgaagcccggggcaagaactg

SEQ ID NO: 5808063 - DNA, 25 bp, Homo sapien
tgtacccatgtgtacagcctaccca

SEQ ID NO: 5808064 - DNA, 25 bp, Homo sapien
actggaacgagaatacgggcggcga

SEQ ID NO: 5808065 - DNA, 25 bp, Homo sapien
ctcttggcagcatcagctgggctgc

SEQ ID NO: 5808066 - DNA, 25 bp, Homo sapien
gagattcattgacactaagagccag

SEQ ID NO: 5808067 - DNA, 25 bp, Homo sapien
tgcagaagctcaatctgtcgatgaa

SEQ ID NO: 5808068 - DNA, 25 bp, Homo sapien
ccacacccctccttgctggaatgtg

SEQ ID NO: 5808069 - DNA, 25 bp, Homo sapien
tattgtaaatatttgatcttgaatc

SEQ ID NO: 5808070 - DNA, 25 bp, Homo sapien
aagccgagttctccctgcattgcga

SEQ ID NO: 5808071 - DNA, 25 bp, Homo sapien
ggcgtctggtaggcaccccgccctc

SEQ ID NO: 5808072 - DNA, 25 bp, Homo sapien
ccggtgcgcgcgctcttcacgcgcg

SEQ ID NO: 5808073 - DNA, 25 bp, Homo sapien
gcaacagactcggatggtagtccgc

SEQ ID NO: 5808074 - DNA, 25 bp, Homo sapien
tctttgagaacgcaggagagtttaa

SEQ ID NO: 5808075 - DNA, 25 bp, Homo sapien
agctgctggacttcgagaggacgct

SEQ ID NO: 5808076 - DNA, 25 bp, Homo sapien
ccaagccgagttctccctgcattgc

SEQ ID NO: 5808077 - DNA, 25 bp, Homo sapien
ggccttgtaaggctgtttccttttg

SEQ ID NO: 5808078 - DNA, 25 bp, Homo sapien
tggaatgtgtctggcccttcagcag

SEQ ID NO: 5808079 - DNA, 25 bp, Homo sapien
gctttacttctgtctcgtctgcccc

SEQ ID NO: 5808080 - DNA, 25 bp, Homo sapien
ctcggatggtagtccgctgtccaac

SEQ ID NO: 5808081 - DNA, 25 bp, Homo sapien
tgcgctcggcctatgcctgccccga

SEQ ID NO: 5808082 - DNA, 25 bp, Homo sapien
accgcttcacccggcgctgtggcac

SEQ ID NO: 5808083 - DNA, 25 bp, Homo sapien
agggattagaagccgctagactttt

SEQ ID NO: 5808084 - DNA, 25 bp, Homo sapien
ggttaatactaacagagagatttgc

SEQ ID NO: 5808085 - DNA, 25 bp, Homo sapien
gcatagggtagaaccaaatgatagg

SEQ ID NO: 5808086 - DNA, 25 bp, Homo sapien
agctcaatctgtcgatgaacgatgc

SEQ ID NO: 5808087 - DNA, 25 bp, Homo sapien
gctccgagagcggcagcttcgcgcg

SEQ ID NO: 5808088 - DNA, 25 bp, Homo sapien
ctgactatataattgtcttcaatga

SEQ ID NO: 5808089 - DNA, 25 bp, Homo sapien
ggactcagcagcccatgtgacaaca

SEQ ID NO: 5808090 - DNA, 25 bp, Homo sapien
gcacatcgagtcggccatcaacgtg

SEQ ID NO: 5808091 - DNA, 25 bp, Homo sapien
tctctttgagaacgcaggagagttt

SEQ ID NO: 5808092 - DNA, 25 bp, Homo sapien
cttcagtaagttccaagccgagttc

SEQ ID NO: 5808093 - DNA, 25 bp, Homo sapien
tgctgatggactgccggccgcagga

SEQ ID NO: 5808094 - DNA, 25 bp, Homo sapien
tgcgagaccaatctagacggctcgt

SEQ ID NO: 5808095 - DNA, 25 bp, Homo sapien
tgcctatgacattgtcaaaatgaaa

SEQ ID NO: 5808096 - DNA, 25 bp, Homo sapien
gaccccaatagtgcaacagactcgg

SEQ ID NO: 5808097 - DNA, 25 bp, Homo sapien
agctctgtatttgtggtatcagttt

SEQ ID NO: 5808098 - DNA, 25 bp, Homo sapien
gtctgccccaaccgctagcctcggc

SEQ ID NO: 5808099 - DNA, 25 bp, Homo sapien
tcggaaatggcgatcagcaagacgg

SEQ ID NO: 5808100 - DNA, 25 bp, Homo sapien
gtggccatcccgggcatcatgctgc

SEQ ID NO: 5808101 - DNA, 25 bp, Homo sapien
ctcagtagcacggagtccgaattaa

SEQ ID NO: 5808102 - DNA, 25 bp, Homo sapien
tccggctttacttctgtctcgtctg

SEQ ID NO: 5808103 - DNA, 25 bp, Homo sapien
gaacgagaatacgggcggcgagtcg

SEQ ID NO: 5808104 - DNA, 25 bp, Homo sapien
ttcaacttcatgggtcagctgctgg

SEQ ID NO: 5808105 - DNA, 25 bp, Homo sapien
ccgggcgttctacctggaaggtggc

SEQ ID NO: 5808106 - DNA, 25 bp, Homo sapien
gtcaaaatgacaccagctgtctgta

SEQ ID NO: 5808107 - DNA, 25 bp, Homo sapien
gcagcatcagctgggctgctttctt

SEQ ID NO: 5808108 - DNA, 25 bp, Homo sapien
caggagctatacgagtcgtcgcaca

SEQ ID NO: 5808109 - DNA, 25 bp, Homo sapien
ctggggaggaacaaaaactatctgg

SEQ ID NO: 5808110 - DNA, 25 bp, Homo sapien
actgtgactgtggcttaccttatgc

SEQ ID NO: 5808111 - DNA, 25 bp, Homo sapien
tgtgtttgttttttcctttgatggg

SEQ ID NO: 5808112 - DNA, 25 bp, Homo sapien
tgcgcgcgctcttcacgcgcggcga

SEQ ID NO: 5808113 - DNA, 25 bp, Homo sapien
tggctcaacgagcagctggagctgg

SEQ ID NO: 5808114 - DNA, 25 bp, Homo sapien
aaagggagaaagagcagtatgccac

SEQ ID NO: 5808115 - DNA, 25 bp, Homo sapien
ttccaggcgcatagggtagaaccaa

SEQ ID NO: 5808116 - DNA, 25 bp, Homo sapien
gccgaatctctttgagaacgcagga

SEQ ID NO: 5808117 - DNA, 25 bp, Homo sapien
cctaacttcaacttcatgggtcagc

SEQ ID NO: 5808118 - DNA, 25 bp, Homo sapien
cagtggtgctctacgacgagagcag

SEQ ID NO: 5808119 - DNA, 25 bp, Homo sapien
cgggtagatttgaggtgcagccttg

SEQ ID NO: 5808120 - DNA, 25 bp, Homo sapien
agcagcagcgactggaacgagaata

SEQ ID NO: 5808121 - DNA, 25 bp, Homo sapien
gtttttccctgaggccatttctttc

SEQ ID NO: 5808122 - DNA, 25 bp, Homo sapien
tacttgggctgtgccaaagactcca

SEQ ID NO: 5808123 - DNA, 25 bp, Homo sapien
gtgcaacagactcggatggtagtcc

SEQ ID NO: 5808124 - DNA, 25 bp, Homo sapien
ccttttgcatctggaactgactata

SEQ ID NO: 5808125 - DNA, 25 bp, Homo sapien
tacgtgaaagaccccacacccctcc

SEQ ID NO: 5808126 - DNA, 25 bp, Homo sapien
tgccgggcgttctacctggaaggtg

SEQ ID NO: 5808127 - DNA, 25 bp, Homo sapien
tcgacccccatgatagatacgctca

SEQ ID NO: 5808128 - DNA, 25 bp, Homo sapien
tctggtaggcaccccgccctctccc

SEQ ID NO: 5808129 - DNA, 25 bp, Homo sapien
taacttcaacttcatgggtcagctg

SEQ ID NO: 5808130 - DNA, 25 bp, Homo sapien
ggcagcttcattgagagagattcat

SEQ ID NO: 5808131 - DNA, 25 bp, Homo sapien
caacgtggccatcccgggcatcatg

SEQ ID NO: 5808132 - DNA, 25 bp, Homo sapien
cttccaaccagaatgtataccaggt

SEQ ID NO: 5808133 - DNA, 25 bp, Homo sapien
cgccctctcccgcagctcgaccccc

SEQ ID NO: 5808134 - DNA, 25 bp, Homo sapien
ggtgcgcgcgctcttcacgcgcggc

SEQ ID NO: 5808135 - DNA, 25 bp, Homo sapien
tgtcttggtacattgcttggctggc

SEQ ID NO: 5808136 - DNA, 25 bp, Homo sapien
agcagcccatgtgacaacagggttc

SEQ ID NO: 5808137 - DNA, 25 bp, Homo sapien
atctgtcgatgaacgatgcctatga

SEQ ID NO: 5808138 - DNA, 25 bp, Homo sapien
atatcccctaacttcaacttcatgg

SEQ ID NO: 5808139 - DNA, 25 bp, Homo sapien
caaatcgagtcttaaataatccggg

SEQ ID NO: 5808140 - DNA, 25 bp, Homo sapien
tcagcagtttctcttggcagcatca

SEQ ID NO: 5808141 - DNA, 25 bp, Homo sapien
agcctcggcttgggtaaggcgaggc

SEQ ID NO: 5808142 - DNA, 25 bp, Homo sapien
gagatttcagctctgtatttgtggt

SEQ ID NO: 5808143 - DNA, 25 bp, Homo sapien
tttacttctgtctcgtctgccccaa

SEQ ID NO: 5808144 - DNA, 25 bp, Homo sapien
ggggctcgggggcctgcggatcagc

SEQ ID NO: 5808145 - DNA, 25 bp, Homo sapien
atagcaaatcgagtcttaaataatc

SEQ ID NO: 5808146 - DNA, 25 bp, Homo sapien
cttcacgcgcggcgaggaccgggac

SEQ ID NO: 5808147 - DNA, 25 bp, Homo sapien
ccgagaccccaatagtgcaacagac

SEQ ID NO: 5808148 - DNA, 25 bp, Homo sapien
cacccccaatttgccgaatctcttt

SEQ ID NO: 5808149 - DNA, 25 bp, Homo sapien
tgttttttcctttgatgggcttaaa

SEQ ID NO: 5808150 - DNA, 25 bp, Homo sapien
gggtaacctgccggtgcgcgcgctc

SEQ ID NO: 5808151 - DNA, 25 bp, Homo sapien
ctgggtgcagagagaacctccggct

SEQ ID NO: 5808152 - DNA, 25 bp, Homo sapien
ctgactcttcctcggacatcgagtc

SEQ ID NO: 5808153 - DNA, 25 bp, Homo sapien
ctggcattagccgctcagtcactgt

SEQ ID NO: 5808154 - DNA, 25 bp, Homo sapien
gtatgccacttcttaaaacagaaca

SEQ ID NO: 5808155 - DNA, 25 bp, Homo sapien
ggtgctctacgacgagagcagcagc

SEQ ID NO: 5808156 - DNA, 25 bp, Homo sapien
taaatacaagcaaatccccatctcg

SEQ ID NO: 5808157 - DNA, 25 bp, Homo sapien
attattgtaaatatttgatcttgaa

SEQ ID NO: 5808158 - DNA, 25 bp, Homo sapien
cgtctggtaggcaccccgccctctc

SEQ ID NO: 5808159 - DNA, 25 bp, Homo sapien
cttcccagtggagatcttgcccttc

SEQ ID NO: 5808160 - DNA, 25 bp, Homo sapien
gtggcttcagtaagttccaagccga

SEQ ID NO: 5808161 - DNA, 25 bp, Homo sapien
ctcgggctgctgctcaagaagctca

SEQ ID NO: 5808162 - DNA, 25 bp, Homo sapien
atatttgatcttgaatcacttgaca

SEQ ID NO: 5808163 - DNA, 25 bp, Homo sapien
cacttgacagtgtttgtttgaattg

SEQ ID NO: 5808164 - DNA, 25 bp, Homo sapien
ttcactggggaggaacaaaaactat

SEQ ID NO: 5808165 - DNA, 25 bp, Homo sapien
aacgagcagctggagctgggcaacg

SEQ ID NO: 5808166 - DNA, 25 bp, Homo sapien
gccggccgcaggagctatacgagtc

SEQ ID NO: 5808167 - DNA, 25 bp, Homo sapien
gcaatctacgtgaaagaccccacac

SEQ ID NO: 5808168 - DNA, 25 bp, Homo sapien
gtaaggctgtttccttttgcatctg

SEQ ID NO: 5808169 - DNA, 25 bp, Homo sapien
tgtatagatacaggcagtaggtttg

SEQ ID NO: 5808170 - DNA, 25 bp, Homo sapien
atggcgatcagcaagacggtggcgt

SEQ ID NO: 5808171 - DNA, 25 bp, Homo sapien
tccgagagcggcagcttcgcgcgcg

SEQ ID NO: 5808172 - DNA, 25 bp, Homo sapien
atttgtggtatcagtttggaaaaaa

SEQ ID NO: 5808173 - DNA, 25 bp, Homo sapien
ggcgtggctcaacgagcagctggag

SEQ ID NO: 5808174 - DNA, 25 bp, Homo sapien
cagtatgccacttcttaaaacagaa

SEQ ID NO: 5808175 - DNA, 25 bp, Homo sapien
gcttaaaagaaattatccaaaggga

SEQ ID NO: 5808176 - DNA, 25 bp, Homo sapien
ggctgtttccttttgcatctggaac

SEQ ID NO: 5808177 - DNA, 25 bp, Homo sapien
atgtgacaacagggttccagcacag

SEQ ID NO: 5808178 - DNA, 25 bp, Homo sapien
gctctgtacccatgtgtacagccta

SEQ ID NO: 5808179 - DNA, 25 bp, Homo sapien
ttggctggcattagccgctcagtca

SEQ ID NO: 5808180 - DNA, 25 bp, Homo sapien
gacattgtcaaaatgaaaaaatcca

SEQ ID NO: 5808181 - DNA, 25 bp, Homo sapien
ctgatggactgccggccgcaggagc

SEQ ID NO: 5808182 - DNA, 25 bp, Homo sapien
cggacatcgagtctgaccttgaccg

SEQ ID NO: 5808183 - DNA, 25 bp, Homo sapien
ctgctgctgatggactgccggccgc

SEQ ID NO: 5808184 - DNA, 25 bp, Homo sapien
ctgtgccaaagactccaccaacttg

SEQ ID NO: 5808185 - DNA, 25 bp, Homo sapien
caaccgctagcctcggcttgggtaa

SEQ ID NO: 5808186 - DNA, 25 bp, Homo sapien
agtccaagagatagcaaatcgagtc

SEQ ID NO: 5808187 - DNA, 25 bp, Homo sapien
ccgtgcccttcgcgtcggaaatggc

SEQ ID NO: 5808188 - DNA, 25 bp, Homo sapien
tcaaggacgagggctgccgggcgtt

SEQ ID NO: 5808189 - DNA, 25 bp, Homo sapien
ttctcttggcagcatcagctgggct

SEQ ID NO: 5808190 - DNA, 25 bp, Homo sapien
ccgaattaattggatttcattcact

SEQ ID NO: 5808191 - DNA, 25 bp, Homo sapien
cttatgcagaagctcaatctgtcga

SEQ ID NO: 5808192 - DNA, 25 bp, Homo sapien
gctcaacgagcagctggagctgggc

SEQ ID NO: 5808193 - DNA, 25 bp, Homo sapien
ctgcagaagggtaacctgccggtgc

SEQ ID NO: 5808194 - DNA, 25 bp, Homo sapien
ggtacattgcttggctggcattagc

SEQ ID NO: 5808195 - DNA, 25 bp, Homo sapien
ttgtaaggctgtttccttttgcatc

SEQ ID NO: 5808196 - DNA, 25 bp, Homo sapien
ggcgatcagcaagacggtggcgtgg

SEQ ID NO: 5808197 - DNA, 25 bp, Homo sapien
ctccaccaacttggacgtgttggag

SEQ ID NO: 5808198 - DNA, 25 bp, Homo sapien
gtgtgtggccccaggtgtcaaaatg

SEQ ID NO: 5808199 - DNA, 25 bp, Homo sapien
ttgaatcacttgacagtgtttgttt

SEQ ID NO: 5808200 - DNA, 25 bp, Homo sapien
gagagatttgctccattctctttgg

SEQ ID NO: 5808201 - DNA, 25 bp, Homo sapien
gcctatgcctgccccgaggggcgtc

SEQ ID NO: 5808202 - DNA, 25 bp, Homo sapien
cctggaaggtggcttcagtaagttc

SEQ ID NO: 5808203 - DNA, 25 bp, Homo sapien
caggcagtaggtttgctctgtaccc

SEQ ID NO: 5808204 - DNA, 25 bp, Homo sapien
tgtattttaccaccccttccaacca

SEQ ID NO: 5808205 - DNA, 25 bp, Homo sapien
agcatcagctgggctgctttctttg

SEQ ID NO: 5808206 - DNA, 25 bp, Homo sapien
ggaattggttaatactaacagagag

SEQ ID NO: 5808207 - DNA, 25 bp, Homo sapien
ttggtacattgcttggctggcatta

SEQ ID NO: 5808208 - DNA, 25 bp, Homo sapien
caggacatgctgtatagatacaggc

SEQ ID NO: 5808209 - DNA, 25 bp, Homo sapien
gcggcgaggaccgggaccgcttcac

SEQ ID NO: 5808210 - DNA, 25 bp, Homo sapien
tgccggtgcgcgcgctcttcacgcg

SEQ ID NO: 5808211 - DNA, 25 bp, Homo sapien
cagctcgacccccatgatagatacg

SEQ ID NO: 5808212 - DNA, 25 bp, Homo sapien
atacgagtcgtcgcacatcgagtcg

SEQ ID NO: 5808213 - DNA, 25 bp, Homo sapien
gcagctgtattttaccaccccttcc

SEQ ID NO: 5808214 - DNA, 25 bp, Homo sapien
cagagagatttgctccattctcttt

SEQ ID NO: 5808215 - DNA, 25 bp, Homo sapien
gagagattcattgacactaagagcc

SEQ ID NO: 5808216 - DNA, 25 bp, Homo sapien
tgaggtgcagccttggagggaggga

SEQ ID NO: 5808217 - DNA, 25 bp, Homo sapien
ttgctctgtacccatgtgtacagcc

SEQ ID NO: 5808218 - DNA, 25 bp, Homo sapien
ggagcatgtgttctttagggccttg

SEQ ID NO: 5808219 - DNA, 25 bp, Homo sapien
agaagctcaaggacgagggctgccg

SEQ ID NO: 5808220 - DNA, 25 bp, Homo sapien
gatcttgaatcacttgacagtgttt

SEQ ID NO: 5808221 - DNA, 25 bp, Homo sapien
ctctcagtagcacggagtccgaatt

SEQ ID NO: 5808222 - DNA, 25 bp, Homo sapien
ttgccgaatctctttgagaacgcag

SEQ ID NO: 5808223 - DNA, 25 bp, Homo sapien
gtgcccttcgcgtcggaaatggcga

SEQ ID NO: 5808224 - DNA, 25 bp, Homo sapien
ttaccttatgcagaagctcaatctg

SEQ ID NO: 5808225 - DNA, 25 bp, Homo sapien
actagacaaggttaccaagtgcgga

SEQ ID NO: 5808226 - DNA, 25 bp, Homo sapien
ccagcacagcagctgtattttacca

SEQ ID NO: 5808227 - DNA, 25 bp, Homo sapien
atacgggcggcgagtcggtgctcgg

SEQ ID NO: 5808228 - DNA, 25 bp, Homo sapien
ctgaccttgaccgagaccccaatag

SEQ ID NO: 5808229 - DNA, 25 bp, Homo sapien
ggctgctgctcaagaagctcaagga

SEQ ID NO: 5808230 - DNA, 25 bp, Homo sapien
gggctgccgggcgttctacctggaa

SEQ ID NO: 5808231 - DNA, 25 bp, Homo sapien
ctatgcctgccccgaggggcgtctg

SEQ ID NO: 5808232 - DNA, 25 bp, Homo sapien
gaggaccgggaccgcttcacccggc

SEQ ID NO: 5808233 - DNA, 25 bp, Homo sapien
ttcattgacactaagagccagcggc

SEQ ID NO: 5808234 - DNA, 25 bp, Homo sapien
tgctccattctctttggaataacag

SEQ ID NO: 5808235 - DNA, 25 bp, Homo sapien
tcctttgatgggcttaaaagaaatt

SEQ ID NO: 5808236 - DNA, 25 bp, Homo sapien
ggtgtcttggtacattgcttggctg

SEQ ID NO: 5808237 - DNA, 25 bp, Homo sapien
ctgggctgctttctttgtgtgtggc

SEQ ID NO: 5808238 - DNA, 25 bp, Homo sapien
ccatgtgacaacagggttccagcac

SEQ ID NO: 5808239 - DNA, 25 bp, Homo sapien
ggagctatacgagtcgtcgcacatc

SEQ ID NO: 5808240 - DNA, 25 bp, Homo sapien
tctcgtctgccccaaccgctagcct

SEQ ID NO: 5808241 - DNA, 25 bp, Homo sapien
gcattgcgagaccaatctagacggc

SEQ ID NO: 5808242 - DNA, 25 bp, Homo sapien
ggtgcgctcggcctatgcctgcccc

SEQ ID NO: 5808243 - DNA, 25 bp, Homo sapien
tggactgccggccgcaggagctata

SEQ ID NO: 5808244 - DNA, 25 bp, Homo sapien
acatcgagtcggccatcaacgtggc

SEQ ID NO: 5808245 - DNA, 25 bp, Homo sapien
atgaagactaattcaattttgcata

SEQ ID NO: 5808246 - DNA, 25 bp, Homo sapien
caagaagctcaaggacgagggctgc

SEQ ID NO: 5808247 - DNA, 25 bp, Homo sapien
gaggcggaattaaaccccgctccga

SEQ ID NO: 5808248 - DNA, 25 bp, Homo sapien
aagacggtggcgtggctcaacgagc

SEQ ID NO: 5808249 - DNA, 25 bp, Homo sapien
cagaagctcaatctgtcgatgaacg

SEQ ID NO: 5808250 - DNA, 25 bp, Homo sapien
cgtcggaaatggcgatcagcaagac

SEQ ID NO: 5808251 - DNA, 25 bp, Homo sapien
gagaggacgctgggactcagcagcc

SEQ ID NO: 5808252 - DNA, 25 bp, Homo sapien
gctgtatagatacaggcagtaggtt

SEQ ID NO: 5808253 - DNA, 25 bp, Homo sapien
gtagtccgctgtccaacagccagcc

SEQ ID NO: 5808254 - DNA, 25 bp, Homo sapien
cacggagtccgaattaattggattt

SEQ ID NO: 5808255 - DNA, 25 bp, Homo sapien
cggcatcaagtacatcttgaacgtc

SEQ ID NO: 5808256 - DNA, 25 bp, Homo sapien
ggaaatggcgatcagcaagacggtg

SEQ ID NO: 5808257 - DNA, 25 bp, Homo sapien
tagaagccgctagactttttttcct

SEQ ID NO: 5808258 - DNA, 25 bp, Homo sapien
tcagctgggctgctttctttgtgtg

SEQ ID NO: 5808259 - DNA, 25 bp, Homo sapien
ttgatgggcttaaaagaaattatcc

SEQ ID NO: 5808260 - DNA, 25 bp, Homo sapien
catcgagtctgaccttgaccgagac

SEQ ID NO: 5808261 - DNA, 25 bp, Homo sapien
ttgcccttcctctacttgggctgtg

SEQ ID NO: 5808262 - DNA, 25 bp, Homo sapien
gctggagctgggcaacgagcggctg

SEQ ID NO: 5808263 - DNA, 25 bp, Homo sapien
ttgatcttgaatcacttgacagtgt

SEQ ID NO: 5808264 - DNA, 25 bp, Homo sapien
tcagctctgactcttcctcggacat

SEQ ID NO: 5808265 - DNA, 25 bp, Homo sapien
ctcttcacgcgcggcgaggaccggg

SEQ ID NO: 5808266 - DNA, 25 bp, Homo sapien
ggtagatttgaggtgcagccttgga

SEQ ID NO: 5808267 - DNA, 25 bp, Homo sapien
ggcaacgagcggctgctgctgatgg

SEQ ID NO: 5808268 - DNA, 25 bp, Homo sapien
cccaatttgccgaatctctttgaga

SEQ ID NO: 5808269 - DNA, 25 bp, Homo sapien
ttgtcaaaatgaaaaaatccaacat

SEQ ID NO: 5808270 - DNA, 25 bp, Homo sapien
ggactgggattcgaggacttccagg

SEQ ID NO: 5808271 - DNA, 25 bp, Homo sapien
atgaacgatgcctatgacattgtca

SEQ ID NO: 5808272 - DNA, 25 bp, Homo sapien
ccttgaccgagaccccaatagtgca

SEQ ID NO: 5808273 - DNA, 25 bp, Homo sapien
gccccaaccgctagcctcggcttgg

SEQ ID NO: 5808274 - DNA, 25 bp, Homo sapien
agtcggccatcaacgtggccatccc

SEQ ID NO: 5808275 - DNA, 25 bp, Homo sapien
ccaccaacttggacgtgttggagga

SEQ ID NO: 5808276 - DNA, 25 bp, Homo sapien
caagaactgtggtgtcttggtacat

SEQ ID NO: 5808277 - DNA, 25 bp, Homo sapien
tagaaccaaatgatagggtaggagc

SEQ ID NO: 5808278 - DNA, 25 bp, Homo sapien
caatgaagactaattcaattttgca

SEQ ID NO: 5808279 - DNA, 25 bp, Homo sapien
tctacctggaaggtggcttcagtaa

SEQ ID NO: 5808280 - DNA, 25 bp, Homo sapien
tcatgctgcggcgcctgcagaaggg

SEQ ID NO: 5808281 - DNA, 25 bp, Homo sapien
ggacgtgttggaggaattcggcatc

SEQ ID NO: 5808282 - DNA, 25 bp, Homo sapien
agtcactgtgactgtggcttacctt

SEQ ID NO: 5808283 - DNA, 25 bp, Homo sapien
tttgctccattctctttggaataac

SEQ ID NO: 5808284 - DNA, 25 bp, Homo sapien
tcgaggacttccaggcgcatagggt

SEQ ID NO: 5808285 - DNA, 25 bp, Homo sapien
aaggctgtttccttttgcatctgga

SEQ ID NO: 5808286 - DNA, 25 bp, Homo sapien
cactggagccaaaacctgtcccagt

SEQ ID NO: 5808287 - DNA, 25 bp, Homo sapien
tgtttgttttttcctttgatgggct

SEQ ID NO: 5808288 - DNA, 25 bp, Homo sapien
attctctttggaataacaggacatg

SEQ ID NO: 5808289 - DNA, 25 bp, Homo sapien
gtctgtactagacaaggttaccaag

SEQ ID NO: 5808290 - DNA, 25 bp, Homo sapien
cgagtcggtgctcgggctgctgctc

SEQ ID NO: 5808291 - DNA, 25 bp, Homo sapien
agaacgcaggagagtttaaatacaa

SEQ ID NO: 5808292 - DNA, 25 bp, Homo sapien
ataacaggacatgctgtatagatac

SEQ ID NO: 5808293 - DNA, 25 bp, Homo sapien
ttttccctgaggccatttctttcat

SEQ ID NO: 5808294 - DNA, 25 bp, Homo sapien
cccgggtagatttgaggtgcagcct

SEQ ID NO: 5808295 - DNA, 25 bp, Homo sapien
gccttccttcccagtggagatcttg

SEQ ID NO: 5808296 - DNA, 25 bp, Homo sapien
tggaacgagaatacgggcggcgagt

SEQ ID NO: 5808297 - DNA, 25 bp, Homo sapien
catgtgttctttagggccttgtaag

SEQ ID NO: 5808298 - DNA, 25 bp, Homo sapien
cggccgcaggagctatacgagtcgt

SEQ ID NO: 5808299 - DNA, 25 bp, Homo sapien
tttcattcactggggaggaacaaaa

SEQ ID NO: 5808300 - DNA, 25 bp, Homo sapien
gaaccaaatgatagggtaggagcat

SEQ ID NO: 5808301 - DNA, 25 bp, Homo sapien
tacaggcagtaggtttgctctgtac

SEQ ID NO: 5808302 - DNA, 25 bp, Homo sapien
ggtgctcgggctgctgctcaagaag

SEQ ID NO: 5808303 - DNA, 25 bp, Homo sapien
ctttgtgtgtggccccaggtgtcaa

SEQ ID NO: 5808304 - DNA, 25 bp, Homo sapien
agttccaagccgagttctccctgca

SEQ ID NO: 5808305 - DNA, 25 bp, Homo sapien
accccttccaaccagaatgtatacc

SEQ ID NO: 5808306 - DNA, 25 bp, Homo sapien
agctgggtgcagagagaacctccgg

SEQ ID NO: 5808307 - DNA, 25 bp, Homo sapien
tccaagagatagcaaatcgagtctt

SEQ ID NO: 5808308 - DNA, 25 bp, Homo sapien
caccagctgtctgtactagacaagg

SEQ ID NO: 5808309 - DNA, 25 bp, Homo sapien
atccaaagggagaaagagcagtatg

SEQ ID NO: 5808310 - DNA, 25 bp, Homo sapien
ttggacgtgttggaggaattcggca

SEQ ID NO: 5808311 - DNA, 25 bp, Homo sapien
tcgagtctgaccttgaccgagaccc

SEQ ID NO: 5808312 - DNA, 25 bp, Homo sapien
cagccttccttcccagtggagatct

SEQ ID NO: 5808313 - DNA, 25 bp, Homo sapien
ccccaggtgtcaaaatgacaccagc

SEQ ID NO: 5808314 - DNA, 25 bp, Homo sapien
gcagctgggtgcagagagaacctcc

SEQ ID NO: 5808315 - DNA, 25 bp, Homo sapien
ggaccgggaccgcttcacccggcgc

SEQ ID NO: 5808316 - DNA, 25 bp, Homo sapien
ggccatttctttcatagatgaagcc

SEQ ID NO: 5808317 - DNA, 25 bp, Homo sapien
tgcggcgcctgcagaagggtaacct

SEQ ID NO: 5808318 - DNA, 25 bp, Homo sapien
tcacccggcgctgtggcaccgacac

SEQ ID NO: 5808319 - DNA, 25 bp, Homo sapien
cgcttcacccggcgctgtggcaccg

SEQ ID NO: 5808320 - DNA, 25 bp, Homo sapien
ctgtatttgtggtatcagtttggaa

SEQ ID NO: 5808321 - DNA, 25 bp, Homo sapien
caacttcatgggtcagctgctggac

SEQ ID NO: 5808322 - DNA, 25 bp, Homo sapien
tttggaataacaggacatgctgtat

SEQ ID NO: 5808323 - DNA, 25 bp, Homo sapien
acagtgtttgtttgaattgtgtttg

SEQ ID NO: 5808324 - DNA, 25 bp, Homo sapien
atgtataccaggtggactctctgca

SEQ ID NO: 5808325 - DNA, 25 bp, Homo sapien
agtttaaatacaagcaaatccccat

SEQ ID NO: 5808326 - DNA, 25 bp, Homo sapien
ccgctccgagagcggcagcttcgcg

SEQ ID NO: 5808327 - DNA, 25 bp, Homo sapien
aagaaattatccaaagggagaaaga

SEQ ID NO: 5808328 - DNA, 25 bp, Homo sapien
ttctttcatagatgaagcccggggc

SEQ ID NO: 5808329 - DNA, 25 bp, Homo sapien
acacccctccttgctggaatgtgtc

SEQ ID NO: 5808330 - DNA, 25 bp, Homo sapien
aagagccagcggctgcagctgggtg

SEQ ID NO: 5808331 - DNA, 25 bp, Homo sapien
agcagctcgccgccgttgccagtgc

SEQ ID NO: 5808332 - DNA, 25 bp, Homo sapien
actgggattcgaggacttccaggcg

SEQ ID NO: 5808333 - DNA, 25 bp, Homo sapien
gccgcaggagctatacgagtcgtcg

SEQ ID NO: 5808334 - DNA, 25 bp, Homo sapien
gtgcggaattggttaatactaacag

SEQ ID NO: 5808335 - DNA, 25 bp, Homo sapien
accaggtggactctctgcaatctac

SEQ ID NO: 5808336 - DNA, 25 bp, Homo sapien
gggtgcagagagaacctccggcttt

SEQ ID NO: 5808337 - DNA, 25 bp, Homo sapien
acgatgcctatgacattgtcaaaat

SEQ ID NO: 5808338 - DNA, 25 bp, Homo sapien
attaattggatttcattcactgggg

SEQ ID NO: 5808339 - DNA, 25 bp, Homo sapien
ggccatcccgggcatcatgctgcgg

SEQ ID NO: 5808340 - DNA, 25 bp, Homo sapien
caggagagtttaaatacaagcaaat

SEQ ID NO: 5808341 - DNA, 25 bp, Homo sapien
tgagaacgcaggagagtttaaatac

SEQ ID NO: 5808342 - DNA, 25 bp, Homo sapien
gcagggactgggattcgaggacttc

SEQ ID NO: 5808343 - DNA, 25 bp, Homo sapien
cagactcggatggtagtccgctgtc

SEQ ID NO: 5808344 - DNA, 25 bp, Homo sapien
cgcccgggtagatttgaggtgcagc

SEQ ID NO: 5808345 - DNA, 25 bp, Homo sapien
ttgctggaatgtgtctggcccttca

SEQ ID NO: 5808346 - DNA, 25 bp, Homo sapien
aaaatgaaaaaatccaacatatccc

SEQ ID NO: 5808347 - DNA, 25 bp, Homo sapien
cagcagcgactggaacgagaatacg

SEQ ID NO: 5808348 - DNA, 25 bp, Homo sapien
ttctttgtgtgtggccccaggtgtc

SEQ ID NO: 5808349 - DNA, 25 bp, Homo sapien
gaatcacttgacagtgtttgtttga

SEQ ID NO: 5808350 - DNA, 25 bp, Homo sapien
cctcggcttgggtaaggcgaggcgg

SEQ ID NO: 5808351 - DNA, 25 bp, Homo sapien
gagagatttcagctctgtatttgtg

SEQ ID NO: 5808352 - DNA, 25 bp, Homo sapien
taaataatccggggagaaagacgcc

SEQ ID NO: 5808353 - DNA, 25 bp, Homo sapien
ctaacagagagatttgctccattct

SEQ ID NO: 5808354 - DNA, 25 bp, Homo sapien
tctgatactccatttgattattgta

SEQ ID NO: 5808355 - DNA, 25 bp, Homo sapien
cagcagctgtattttaccacccctt

SEQ ID NO: 5808356 - DNA, 25 bp, Homo sapien
ggctgtgccaaagactccaccaact

SEQ ID NO: 5808357 - DNA, 25 bp, Homo sapien
gtggtgctctacgacgagagcagca

SEQ ID NO: 5808358 - DNA, 25 bp, Homo sapien
gaatgtgtctggcccttcagcagtt

SEQ ID NO: 5808359 - DNA, 25 bp, Homo sapien
ggcattagccgctcagtcactgtga

SEQ ID NO: 5808360 - DNA, 25 bp, Homo sapien
tgtggcttaccttatgcagaagctc

SEQ ID NO: 5808361 - DNA, 25 bp, Homo sapien
aaatatttgatcttgaatcacttga

SEQ ID NO: 5808362 - DNA, 25 bp, Homo sapien
ggcttgggtaaggcgaggcggaatt

SEQ ID NO: 5808363 - DNA, 25 bp, Homo sapien
catgtgtacagcctacccatgcagg

SEQ ID NO: 5808364 - DNA, 25 bp, Homo sapien
aacaggacatgctgtatagatacag

SEQ ID NO: 5808365 - DNA, 25 bp, Homo sapien
tacccatgtgtacagcctacccatg

SEQ ID NO: 5808366 - DNA, 25 bp, Homo sapien
gcggcgagtcggtgctcgggctgct

SEQ ID NO: 5808367 - DNA, 25 bp, Homo sapien
atctagacggctcgtgtagcagcag

SEQ ID NO: 5808368 - DNA, 25 bp, Homo sapien
tccaacatatcccctaacttcaact

SEQ ID NO: 5808369 - DNA, 25 bp, Homo sapien
gtctgaccttgaccgagaccccaat

SEQ ID NO: 5808370 - DNA, 25 bp, Homo sapien
tcgccgccgttgccagtgctggggc

SEQ ID NO: 5808371 - DNA, 25 bp, Homo sapien
ttttgcatctggaactgactatata

SEQ ID NO: 5808372 - DNA, 25 bp, Homo sapien
aggagccaaagagagatttcagctc

SEQ ID NO: 5808373 - DNA, 25 bp, Homo sapien
ccccacacccctccttgctggaatg

SEQ ID NO: 5808374 - DNA, 25 bp, Homo sapien
cccatgatagatacgctcagacccg

SEQ ID NO: 5808375 - DNA, 25 bp, Homo sapien
gtggtatcagtttggaaaaaaaatc

SEQ ID NO: 5808376 - DNA, 25 bp, Homo sapien
agccttggagggagggattagaagc

SEQ ID NO: 5808377 - DNA, 25 bp, Homo sapien
cgcgctcttcacgcgcggcgaggac

SEQ ID NO: 5808378 - DNA, 25 bp, Homo sapien
gcagcgactggaacgagaatacggg

SEQ ID NO: 5808379 - DNA, 25 bp, Homo sapien
accaacttggacgtgttggaggaat

SEQ ID NO: 5808380 - DNA, 25 bp, Homo sapien
accaatctagacggctcgtgtagca

SEQ ID NO: 5808381 - DNA, 25 bp, Homo sapien
ctcgtgtagcagcagctcgccgccg

SEQ ID NO: 5808382 - DNA, 25 bp, Homo sapien
aggcaccccgccctctcccgcagct

SEQ ID NO: 5808383 - DNA, 25 bp, Homo sapien
ggggcaagaactgtggtgtcttggt

SEQ ID NO: 5808384 - DNA, 25 bp, Homo sapien
cccgccctctcccgcagctcgaccc

SEQ ID NO: 5808385 - DNA, 25 bp, Homo sapien
gcgcctgcagaagggtaacctgccg

SEQ ID NO: 5808386 - DNA, 25 bp, Homo sapien
gttggaggaattcggcatcaagtac

SEQ ID NO: 5808387 - DNA, 25 bp, Homo sapien
gcgcggtgcgctcggcctatgcctg

SEQ ID NO: 5808388 - DNA, 25 bp, Homo sapien
agatagcaaatcgagtcttaaataa

SEQ ID NO: 5808389 - DNA, 25 bp, Homo sapien
gcatcaagtacatcttgaacgtcac

SEQ ID NO: 5808390 - DNA, 25 bp, Homo sapien
tcagacccgtgcccttcgcgtcgga

SEQ ID NO: 5808391 - DNA, 25 bp, Homo sapien
cgctagcctcggcttgggtaaggcg

SEQ ID NO: 5808392 - DNA, 25 bp, Homo sapien
ctagacggctcgtgtagcagcagct

SEQ ID NO: 5808393 - DNA, 25 bp, Homo sapien
gcagccttggagggagggattagaa

SEQ ID NO: 5808394 - DNA, 25 bp, Homo sapien
gactcggatggtagtccgctgtcca

SEQ ID NO: 5808395 - DNA, 25 bp, Homo sapien
tatgcagaagctcaatctgtcgatg

SEQ ID NO: 5808396 - DNA, 25 bp, Homo sapien
tacattgcttggctggcattagccg

SEQ ID NO: 5808397 - DNA, 25 bp, Homo sapien
aacctgccggtgcgcgcgctcttca

SEQ ID NO: 5808398 - DNA, 25 bp, Homo sapien
tggaggaattcggcatcaagtacat

SEQ ID NO: 5808399 - DNA, 25 bp, Homo sapien
ggtggactctctgcaatctacgtga

SEQ ID NO: 5808400 - DNA, 25 bp, Homo sapien
attcgaggacttccaggcgcatagg

SEQ ID NO: 5808401 - DNA, 25 bp, Homo sapien
catgatagatacgctcagacccgtg

SEQ ID NO: 5808402 - DNA, 25 bp, Homo sapien
tgccccgaggggcgtctggtaggca

SEQ ID NO: 5808403 - DNA, 25 bp, Homo sapien
ctggcccttcagcagtttctcttgg

SEQ ID NO: 5808404 - DNA, 25 bp, Homo sapien
gccgccgttgccagtgctggggctc

SEQ ID NO: 5808405 - DNA, 25 bp, Homo sapien
tgggctgtgccaaagactccaccaa

SEQ ID NO: 5808406 - DNA, 25 bp, Homo sapien
ttgcatctggaactgactatataat

SEQ ID NO: 5808407 - DNA, 25 bp, Homo sapien
attgcgagaccaatctagacggctc

SEQ ID NO: 5808408 - DNA, 25 bp, Homo sapien
gacgcccgggtagatttgaggtgca

SEQ ID NO: 5808409 - DNA, 25 bp, Homo sapien
ccctctcagtagcacggagtccgaa

SEQ ID NO: 5808410 - DNA, 25 bp, Homo sapien
caatctgtcgatgaacgatgcctat

SEQ ID NO: 5808411 - DNA, 25 bp, Homo sapien
cgggctgctgctcaagaagctcaag

SEQ ID NO: 5808412 - DNA, 25 bp, Homo sapien
gtggccccaggtgtcaaaatgacac

SEQ ID NO: 5808413 - DNA, 25 bp, Homo sapien
tccccatctcggatcactggagcca

SEQ ID NO: 5808414 - DNA, 25 bp, Homo sapien
atgtgtctggcccttcagcagtttc

SEQ ID NO: 5808415 - DNA, 25 bp, Homo sapien
ggctgcagctgggtgcagagagaac

SEQ ID NO: 5808416 - DNA, 25 bp, Homo sapien
aagctcaaggacgagggctgccggg

SEQ ID NO: 5808417 - DNA, 25 bp, Homo sapien
aatcgagtcttaaataatccgggga

SEQ ID NO: 5808418 - DNA, 25 bp, Homo sapien
cagcggctgcagctgggtgcagaga

SEQ ID NO: 5808419 - DNA, 25 bp, Homo sapien
ttgcatatagaggagccaaagagag

SEQ ID NO: 5808420 - DNA, 25 bp, Homo sapien
tcgtctgccccaaccgctagcctcg

SEQ ID NO: 5808421 - DNA, 25 bp, Homo sapien
tcattcactggggaggaacaaaaac

SEQ ID NO: 5808422 - DNA, 25 bp, Homo sapien
acgagtcgtcgcacatcgagtcggc

SEQ ID NO: 5808423 - DNA, 25 bp, Homo sapien
ttgtgtgtggccccaggtgtcaaaa

SEQ ID NO: 5808424 - DNA, 25 bp, Homo sapien
gacaaggttaccaagtgcggaattg

SEQ ID NO: 5808425 - DNA, 25 bp, Homo sapien
tagacaaggttaccaagtgcggaat

SEQ ID NO: 5808426 - DNA, 25 bp, Homo sapien
tacatcttgaacgtcacccccaatt

SEQ ID NO: 5808427 - DNA, 25 bp, Homo sapien
ggaactgactatataattgtcttca

SEQ ID NO: 5808428 - DNA, 25 bp, Homo sapien
tgtttgtttgaattgtgtttgtttt

SEQ ID NO: 5808429 - DNA, 25 bp, Homo sapien
gagaccccaatagtgcaacagactc

SEQ ID NO: 5808430 - DNA, 25 bp, Homo sapien
gtagcacggagtccgaattaattgg

SEQ ID NO: 5808431 - DNA, 25 bp, Homo sapien
tggaaggtggcttcagtaagttcca

SEQ ID NO: 5808432 - DNA, 25 bp, Homo sapien
gctgctcaagaagctcaaggacgag

SEQ ID NO: 5808433 - DNA, 25 bp, Homo sapien
agctgtctgtactagacaaggttac

SEQ ID NO: 5808434 - DNA, 25 bp, Homo sapien
ctacgacgagagcagcagcgactgg

SEQ ID NO: 5808435 - DNA, 25 bp, Homo sapien
attcaattttgcatatagaggagcc

SEQ ID NO: 5808436 - DNA, 25 bp, Homo sapien
tctgtacccatgtgtacagcctacc

SEQ ID NO: 5808437 - DNA, 25 bp, Homo sapien
gacttcgagaggacgctgggactca

SEQ ID NO: 5808438 - DNA, 25 bp, Homo sapien
cccccatgatagatacgctcagacc

SEQ ID NO: 5808439 - DNA, 25 bp, Homo sapien
ccccgctccgagagcggcagcttcg

SEQ ID NO: 5808440 - DNA, 25 bp, Homo sapien
acgctgggactcagcagcccatgtg

SEQ ID NO: 5808441 - DNA, 25 bp, Homo sapien
gccagcggctgcagctgggtgcaga

SEQ ID NO: 5808442 - DNA, 25 bp, Homo sapien
cctcccctctcagtagcacggagtc

SEQ ID NO: 5808443 - DNA, 25 bp, Homo sapien
agggagaaagagcagtatgccactt

SEQ ID NO: 5808444 - DNA, 25 bp, Homo sapien
gtgcagccttggagggagggattag

SEQ ID NO: 5808445 - DNA, 25 bp, Homo sapien
ccatttctttcatagatgaagcccg

SEQ ID NO: 5808446 - DNA, 25 bp, Homo sapien
agggtaggagcatgtgttctttagg

SEQ ID NO: 5808447 - DNA, 25 bp, Homo sapien
gccaaagagagatttcagctctgta

SEQ ID NO: 5808448 - DNA, 25 bp, Homo sapien
ttttttcctcccctctcagtagcac

SEQ ID NO: 5808449 - DNA, 25 bp, Homo sapien
acttccaggcgcatagggtagaacc

SEQ ID NO: 5808450 - DNA, 25 bp, Homo sapien
acgtcacccccaatttgccgaatct

SEQ ID NO: 5808451 - DNA, 25 bp, Homo sapien
ctcttcctcggacatcgagtctgac

SEQ ID NO: 5808452 - DNA, 25 bp, Homo sapien
agcagctggagctgggcaacgagcg

SEQ ID NO: 5808453 - DNA, 25 bp, Homo sapien
actaattcaattttgcatatagagg

SEQ ID NO: 5808454 - DNA, 25 bp, Homo sapien
ggtaggagcatgtgttctttagggc

SEQ ID NO: 5808455 - DNA, 25 bp, Homo sapien
tcttgaatcacttgacagtgtttgt

SEQ ID NO: 5808456 - DNA, 25 bp, Homo sapien
atcccctaacttcaacttcatgggt

SEQ ID NO: 5808457 - DNA, 25 bp, Homo sapien
tgattattgtaaatatttgatcttg

SEQ ID NO: 5808458 - DNA, 25 bp, Homo sapien
gtcaaaatgaaaaaatccaacatat

SEQ ID NO: 5808459 - DNA, 25 bp, Homo sapien
aaaatccaacatatcccctaacttc

SEQ ID NO: 5808460 - DNA, 25 bp, Homo sapien
cggatggtagtccgctgtccaacag

SEQ ID NO: 5808461 - DNA, 25 bp, Homo sapien
ctctacgacgagagcagcagcgact

SEQ ID NO: 5808462 - DNA, 25 bp, Homo sapien
tcctcggacatcgagtctgaccttg

SEQ ID NO: 5808463 - DNA, 25 bp, Homo sapien
ggcgaggaccgggaccgcttcaccc

SEQ ID NO: 5808464 - DNA, 25 bp, Homo sapien
tcttgaacgtcacccccaatttgcc

SEQ ID NO: 5808465 - DNA, 25 bp, Homo sapien
tcccagtggagatcttgcccttcct

SEQ ID NO: 5808466 - DNA, 25 bp, Homo sapien
gcttaccttatgcagaagctcaatc

SEQ ID NO: 5808467 - DNA, 25 bp, Homo sapien
aaaaaatctgatactccatttgatt

SEQ ID NO: 5808468 - DNA, 25 bp, Homo sapien
ttcatagatgaagcccggggcaaga

SEQ ID NO: 5808469 - DNA, 25 bp, Homo sapien
ccctgcattgcgagaccaatctaga

SEQ ID NO: 5808470 - DNA, 25 bp, Homo sapien
acgcgcggcgaggaccgggaccgct

SEQ ID NO: 5808471 - DNA, 25 bp, Homo sapien
tcagctctgtatttgtggtatcagt

SEQ ID NO: 5808472 - DNA, 25 bp, Homo sapien
gaccccacacccctccttgctggaa

SEQ ID NO: 5808473 - DNA, 25 bp, Homo sapien
aggttaccaagtgcggaattggtta

SEQ ID NO: 5808474 - DNA, 25 bp, Homo sapien
agtacatcttgaacgtcacccccaa

SEQ ID NO: 5808475 - DNA, 25 bp, Homo sapien
ttttcctcccctctcagtagcacgg

SEQ ID NO: 5808476 - DNA, 25 bp, Homo sapien
tagatacaggcagtaggtttgctct

SEQ ID NO: 5808477 - DNA, 25 bp, Homo sapien
ccaggtgtcaaaatgacaccagctg

SEQ ID NO: 5808478 - DNA, 25 bp, Homo sapien
cgctgtggcaccgacacagtggtgc

SEQ ID NO: 5808479 - DNA, 25 bp, Homo sapien
gagcggctgctgctgatggactgcc

SEQ ID NO: 5808480 - DNA, 25 bp, Homo sapien
agagcagcagcgactggaacgagaa

SEQ ID NO: 5808481 - DNA, 25 bp, Homo sapien
cgatgaacgatgcctatgacattgt

SEQ ID NO: 5808482 - DNA, 25 bp, Homo sapien
cccgcagctcgacccccatgataga

SEQ ID NO: 5808483 - DNA, 25 bp, Homo sapien
cattgacactaagagccagcggctg

SEQ ID NO: 5808484 - DNA, 25 bp, Homo sapien
accccgccctctcccgcagctcgac

SEQ ID NO: 5808485 - DNA, 25 bp, Homo sapien
cgatcagcaagacggtggcgtggct

SEQ ID NO: 5808486 - DNA, 25 bp, Homo sapien
gcttggctggcattagccgctcagt

SEQ ID NO: 5808487 - DNA, 25 bp, Homo sapien
atttgatcttgaatcacttgacagt

SEQ ID NO: 5808488 - DNA, 25 bp, Homo sapien
cgggaccgcttcacccggcgctgtg

SEQ ID NO: 5808489 - DNA, 25 bp, Homo sapien
accaaatgatagggtaggagcatgt

SEQ ID NO: 5808490 - DNA, 25 bp, Homo sapien
acgagaatacgggcggcgagtcggt

SEQ ID NO: 5808491 - DNA, 25 bp, Homo sapien
gctgggcaacgagcggctgctgctg

SEQ ID NO: 5808492 - DNA, 25 bp, Homo sapien
ccctccttgctggaatgtgtctggc

SEQ ID NO: 5808493 - DNA, 25 bp, Homo sapien
acaaaaactatctgggcagcttcat

SEQ ID NO: 5808494 - DNA, 25 bp, Homo sapien
ttcctctacttgggctgtgccaaag

SEQ ID NO: 5808495 - DNA, 25 bp, Homo sapien
agcagtatgccacttcttaaaacag

SEQ ID NO: 5808496 - DNA, 25 bp, Homo sapien
gtgaaagaccccacacccctccttg

SEQ ID NO: 5808497 - DNA, 25 bp, Homo sapien
taccaagtgcggaattggttaatac

SEQ ID NO: 5808498 - DNA, 25 bp, Homo sapien
agactaattcaattttgcatataga

SEQ ID NO: 5808499 - DNA, 25 bp, Homo sapien
taccaccccttccaaccagaatgta

SEQ ID NO: 5808500 - DNA, 25 bp, Homo sapien
ttccctgaggccatttctttcatag

SEQ ID NO: 5808501 - DNA, 25 bp, Homo sapien
aagcccggggcaagaactgtggtgt

SEQ ID NO: 5808502 - DNA, 25 bp, Homo sapien
tacaagcaaatccccatctcggatc

SEQ ID NO: 5808503 - DNA, 25 bp, Homo sapien
cgagttctccctgcattgcgagacc

SEQ ID NO: 5808504 - DNA, 25 bp, Homo sapien
cgctcttcacgcgcggcgaggaccg

SEQ ID NO: 5808505 - DNA, 25 bp, Homo sapien
ctgtggcaccgacacagtggtgctc

SEQ ID NO: 5808506 - DNA, 25 bp, Homo sapien
catcatgctgcggcgcctgcagaag

SEQ ID NO: 5808507 - DNA, 25 bp, Homo sapien
agaaagagcagtatgccacttctta

SEQ ID NO: 5808508 - DNA, 25 bp, Homo sapien
ctcaatctgtcgatgaacgatgcct

SEQ ID NO: 5808509 - DNA, 25 bp, Homo sapien
agagaacctccggctttacttctgt

SEQ ID NO: 5808510 - DNA, 25 bp, Homo sapien
caccgacacagtggtgctctacgac

SEQ ID NO: 5808511 - DNA, 25 bp, Homo sapien
atacgctcagacccgtgcccttcgc

SEQ ID NO: 5808512 - DNA, 25 bp, Homo sapien
cggcagcttcgcgcgcggtgcgctc

SEQ ID NO: 5808513 - DNA, 25 bp, Homo sapien
ttcaatgaagactaattcaattttg

SEQ ID NO: 5808514 - DNA, 25 bp, Homo sapien
aagagagatttcagctctgtatttg

SEQ ID NO: 5808515 - DNA, 25 bp, Homo sapien
ttgaccgagaccccaatagtgcaac

SEQ ID NO: 5808516 - DNA, 25 bp, Homo sapien
gctcaaggacgagggctgccgggcg

SEQ ID NO: 5808517 - DNA, 25 bp, Homo sapien
gctcagacccgtgcccttcgcgtcg

SEQ ID NO: 5808518 - DNA, 25 bp, Homo sapien
gtgttggaggaattcggcatcaagt

SEQ ID NO: 5808519 - DNA, 25 bp, Homo sapien
cggaattaaaccccgctccgagagc

SEQ ID NO: 5808520 - DNA, 25 bp, Homo sapien
caacttggacgtgttggaggaattc

SEQ ID NO: 5808521 - DNA, 25 bp, Homo sapien
ggcgctgtggcaccgacacagtggt

SEQ ID NO: 5808522 - DNA, 25 bp, Homo sapien
ctccattctctttggaataacagga

SEQ ID NO: 5808523 - DNA, 25 bp, Homo sapien
gccaaagactccaccaacttggacg

SEQ ID NO: 5808524 - DNA, 25 bp, Homo sapien
cgccgttgccagtgctggggctcgg

SEQ ID NO: 5808525 - DNA, 25 bp, Homo sapien
gccagccttccttcccagtggagat

SEQ ID NO: 5808526 - DNA, 25 bp, Homo sapien
atgctgcggcgcctgcagaagggta

SEQ ID NO: 5808527 - DNA, 25 bp, Homo sapien
ttcggcatcaagtacatcttgaacg

SEQ ID NO: 5808528 - DNA, 25 bp, Homo sapien
gactttttttcctcccctctcagta

SEQ ID NO: 5808529 - DNA, 25 bp, Homo sapien
ttgacactaagagccagcggctgca

SEQ ID NO: 5808530 - DNA, 25 bp, Homo sapien
tccaaccagaatgtataccaggtgg

SEQ ID NO: 5808531 - DNA, 25 bp, Homo sapien
acgacgagagcagcagcgactggaa

SEQ ID NO: 5808532 - DNA, 25 bp, Homo sapien
agcgactggaacgagaatacgggcg

SEQ ID NO: 5808533 - DNA, 25 bp, Homo sapien
aggtgtcaaaatgacaccagctgtc

SEQ ID NO: 5808534 - DNA, 25 bp, Homo sapien
cagtttttccctgaggccatttctt

SEQ ID NO: 5808535 - DNA, 25 bp, Homo sapien
cctgcggatcagctctgactcttcc

SEQ ID NO: 5808536 - DNA, 25 bp, Homo sapien
gcgcgcggtgcgctcggcctatgcc

SEQ ID NO: 5808537 - DNA, 25 bp, Homo sapien
cacagtggtgctctacgacgagagc

SEQ ID NO: 5808538 - DNA, 25 bp, Homo sapien
ctgaggccatttctttcatagatga

SEQ ID NO: 5808539 - DNA, 25 bp, Homo sapien
tgctctacgacgagagcagcagcga

SEQ ID NO: 5808540 - DNA, 25 bp, Homo sapien
ctctgtatttgtggtatcagtttgg

SEQ ID NO: 5808541 - DNA, 25 bp, Homo sapien
gacccccatgatagatacgctcaga

SEQ ID NO: 5808542 - DNA, 25 bp, Homo sapien
caatctagacggctcgtgtagcagc

SEQ ID NO: 5808543 - DNA, 25 bp, Homo sapien
aactgactatataattgtcttcaat

SEQ ID NO: 5808544 - DNA, 25 bp, Homo sapien
tgaaaaaatccaacatatcccctaa

SEQ ID NO: 5808545 - DNA, 25 bp, Homo sapien
gggcggcgagtcggtgctcgggctg

SEQ ID NO: 5808546 - DNA, 25 bp, Homo sapien
tctttggaataacaggacatgctgt

SEQ ID NO: 5808547 - DNA, 25 bp, Homo sapien
accgggaccgcttcacccggcgctg

SEQ ID NO: 5808548 - DNA, 25 bp, Homo sapien
tacctggaaggtggcttcagtaagt

SEQ ID NO: 5808549 - DNA, 25 bp, Homo sapien
ccctctcccgcagctcgacccccat

SEQ ID NO: 5808550 - DNA, 25 bp, Homo sapien
caagcaaatccccatctcggatcac

SEQ ID NO: 5808551 - DNA, 25 bp, Homo sapien
tacagcctacccatgcagggactgg

SEQ ID NO: 5808552 - DNA, 25 bp, Homo sapien
gatacaggcagtaggtttgctctgt

SEQ ID NO: 5808553 - DNA, 25 bp, Homo sapien
tgtcttcaatgaagactaattcaat

SEQ ID NO: 5808554 - DNA, 25 bp, Homo sapien
ttttgcatatagaggagccaaagag

SEQ ID NO: 5808555 - DNA, 25 bp, Homo sapien
cattgtcaaaatgaaaaaatccaac

SEQ ID NO: 5808556 - DNA, 25 bp, Homo sapien
gctagactttttttcctcccctctc

SEQ ID NO: 5808557 - DNA, 25 bp, Homo sapien
gacaacagggttccagcacagcagc

SEQ ID NO: 5808558 - DNA, 25 bp, Homo sapien
aagactccaccaacttggacgtgtt

SEQ ID NO: 5808559 - DNA, 25 bp, Homo sapien
aggtgcagccttggagggagggatt

SEQ ID NO: 5808560 - DNA, 25 bp, Homo sapien
tcgcgcgcggtgcgctcggcctatg

SEQ ID NO: 5808561 - DNA, 25 bp, Homo sapien
tgtagcagcagctcgccgccgttgc

SEQ ID NO: 5808562 - DNA, 25 bp, Homo sapien
cattagccgctcagtcactgtgact

SEQ ID NO: 5808563 - DNA, 25 bp, Homo sapien
tgggtaaggcgaggcggaattaaac

SEQ ID NO: 5808564 - DNA, 25 bp, Homo sapien
gaacgatgcctatgacattgtcaaa

SEQ ID NO: 5808565 - DNA, 25 bp, Homo sapien
ttccaagccgagttctccctgcatt

SEQ ID NO: 5808566 - DNA, 25 bp, Homo sapien
gaagccgctagactttttttcctcc

SEQ ID NO: 5808567 - DNA, 25 bp, Homo sapien
cgggggcctgcggatcagctctgac

SEQ ID NO: 5808568 - DNA, 25 bp, Homo sapien
gtatttgtggtatcagtttggaaaa

SEQ ID NO: 5808569 - DNA, 25 bp, Homo sapien
tgatagatacgctcagacccgtgcc

SEQ ID NO: 5808570 - DNA, 25 bp, Homo sapien
ttatccaaagggagaaagagcagta

SEQ ID NO: 5808571 - DNA, 25 bp, Homo sapien
ctttgatgggcttaaaagaaattat

SEQ ID NO: 5808572 - DNA, 25 bp, Homo sapien
acccctccttgctggaatgtgtctg

SEQ ID NO: 5808573 - DNA, 25 bp, Homo sapien
gacggtggcgtggctcaacgagcag

SEQ ID NO: 5808574 - DNA, 25 bp, Homo sapien
cgtctagattggtctcgcaatgcag

SEQ ID NO: 5808575 - DNA, 25 bp, Homo sapien
acctggtatacattctggttggaag

SEQ ID NO: 5808576 - DNA, 25 bp, Homo sapien
ggctcttagtgtcaatgaatctctc

SEQ ID NO: 5808577 - DNA, 25 bp, Homo sapien
gggccacacacaaagaaagcagccc

SEQ ID NO: 5808578 - DNA, 25 bp, Homo sapien
caaatatttacaataatcaaatgga

SEQ ID NO: 5808579 - DNA, 25 bp, Homo sapien
cgccgcagcatgatgcccgggatgg

SEQ ID NO: 5808580 - DNA, 25 bp, Homo sapien
aatggagcaaatctctctgttagta

SEQ ID NO: 5808581 - DNA, 25 bp, Homo sapien
aggaaaaaaagtctagcggcttcta

SEQ ID NO: 5808582 - DNA, 25 bp, Homo sapien
aagaacacatgctcctaccctatca

SEQ ID NO: 5808583 - DNA, 25 bp, Homo sapien
gctgccgctctcggagcggggttta

SEQ ID NO: 5808584 - DNA, 25 bp, Homo sapien
cgcacttggtaaccttgtctagtac

SEQ ID NO: 5808585 - DNA, 25 bp, Homo sapien
tgagtcccagcgtcctctcgaagtc

SEQ ID NO: 5808586 - DNA, 25 bp, Homo sapien
ggcagtccatcagcagcagccgctc

SEQ ID NO: 5808587 - DNA, 25 bp, Homo sapien
tcatttggttctaccctatgcgcct

SEQ ID NO: 5808588 - DNA, 25 bp, Homo sapien
gctgagtcccagcgtcctctcgaag

SEQ ID NO: 5808589 - DNA, 25 bp, Homo sapien
atcgttcatcgacagattgagcttc

SEQ ID NO: 5808590 - DNA, 25 bp, Homo sapien
ccgctctcggagcggggtttaattc

SEQ ID NO: 5808591 - DNA, 25 bp, Homo sapien
agctgcccagatagtttttgttcct

SEQ ID NO: 5808592 - DNA, 25 bp, Homo sapien
tgagcttcttgagcagcagcccgag

SEQ ID NO: 5808593 - DNA, 25 bp, Homo sapien
ctgttagtattaaccaattccgcac

SEQ ID NO: 5808594 - DNA, 25 bp, Homo sapien
gagcttctgcataaggtaagccaca

SEQ ID NO: 5808595 - DNA, 25 bp, Homo sapien
ggccgagcgcaccgcgcgcgaagct

SEQ ID NO: 5808596 - DNA, 25 bp, Homo sapien
gcagcagccgctcgttgcccagctc

SEQ ID NO: 5808597 - DNA, 25 bp, Homo sapien
gctgaagggccagacacattccagc

SEQ ID NO: 5808598 - DNA, 25 bp, Homo sapien
caagttggtggagtctttggcacag

SEQ ID NO: 5808599 - DNA, 25 bp, Homo sapien
tctgagcgtatctatcatgggggtc

SEQ ID NO: 5808600 - DNA, 25 bp, Homo sapien
ctatacagcatgtcctgttattcca

SEQ ID NO: 5808601 - DNA, 25 bp, Homo sapien
aatgtcataggcatcgttcatcgac

SEQ ID NO: 5808602 - DNA, 25 bp, Homo sapien
ggaaggaaggctggctgttggacag

SEQ ID NO: 5808603 - DNA, 25 bp, Homo sapien
aacacaattcaaacaaacactgtca

SEQ ID NO: 5808604 - DNA, 25 bp, Homo sapien
gtagattgcagagagtccacctggt

SEQ ID NO: 5808605 - DNA, 25 bp, Homo sapien
caaatacagagctgaaatctctctt

SEQ ID NO: 5808606 - DNA, 25 bp, Homo sapien
ctaccctatcatttggttctaccct

SEQ ID NO: 5808607 - DNA, 25 bp, Homo sapien
tccctccaaggctgcacctcaaatc

SEQ ID NO: 5808608 - DNA, 25 bp, Homo sapien
ctaccagacgcccctcggggcaggc

SEQ ID NO: 5808609 - DNA, 25 bp, Homo sapien
ggaaggggtggtaaaatacagctgc

SEQ ID NO: 5808610 - DNA, 25 bp, Homo sapien
ataaggtaagccacagtcacagtga

SEQ ID NO: 5808611 - DNA, 25 bp, Homo sapien
gttctcaaagagattcggcaaattg

SEQ ID NO: 5808612 - DNA, 25 bp, Homo sapien
tgcgacgactcgtatagctcctgcg

SEQ ID NO: 5808613 - DNA, 25 bp, Homo sapien
gagaaactgctgaagggccagacac

SEQ ID NO: 5808614 - DNA, 25 bp, Homo sapien
agcatgatgcccgggatggccacgt

SEQ ID NO: 5808615 - DNA, 25 bp, Homo sapien
cctaaagaacacatgctcctaccct

SEQ ID NO: 5808616 - DNA, 25 bp, Homo sapien
ctgagaggggaggaaaaaaagtcta

SEQ ID NO: 5808617 - DNA, 25 bp, Homo sapien
acttgatgccgaattcctccaacac

SEQ ID NO: 5808618 - DNA, 25 bp, Homo sapien
ctcgatttgctatctcttggactca

SEQ ID NO: 5808619 - DNA, 25 bp, Homo sapien
tcccagcgtcctctcgaagtccagc

SEQ ID NO: 5808620 - DNA, 25 bp, Homo sapien
gttcctccccagtgaatgaaatcca

SEQ ID NO: 5808621 - DNA, 25 bp, Homo sapien
gtccgaggaagagtcagagctgatc

SEQ ID NO: 5808622 - DNA, 25 bp, Homo sapien
cacaaagaaagcagcccagctgatg

SEQ ID NO: 5808623 - DNA, 25 bp, Homo sapien
gacgcccctcggggcaggcataggc

SEQ ID NO: 5808624 - DNA, 25 bp, Homo sapien
tgtcaagtgattcaagatcaaatat

SEQ ID NO: 5808625 - DNA, 25 bp, Homo sapien
actcgatgtgcgacgactcgtatag

SEQ ID NO: 5808626 - DNA, 25 bp, Homo sapien
ttttttccaaactgataccacaaat

SEQ ID NO: 5808627 - DNA, 25 bp, Homo sapien
attcaaacaaacactgtcaagtgat

SEQ ID NO: 5808628 - DNA, 25 bp, Homo sapien
agctccagctgctcgttgagccacg

SEQ ID NO: 5808629 - DNA, 25 bp, Homo sapien
tccaaggctgcacctcaaatctacc

SEQ ID NO: 5808630 - DNA, 25 bp, Homo sapien
accactgtgtcggtgccacagcgcc

SEQ ID NO: 5808631 - DNA, 25 bp, Homo sapien
cagctgatgctgccaagagaaactg

SEQ ID NO: 5808632 - DNA, 25 bp, Homo sapien
caaggaggggtgtggggtctttcac

SEQ ID NO: 5808633 - DNA, 25 bp, Homo sapien
cagacgagacagaagtaaagccgga

SEQ ID NO: 5808634 - DNA, 25 bp, Homo sapien
ttgcccagctccagctgctcgttga

SEQ ID NO: 5808635 - DNA, 25 bp, Homo sapien
ccttacccaagccgaggctagcggt

SEQ ID NO: 5808636 - DNA, 25 bp, Homo sapien
cgcgaagctgccgctctcggagcgg

SEQ ID NO: 5808637 - DNA, 25 bp, Homo sapien
caatgaatctctctcaatgaagctg

SEQ ID NO: 5808638 - DNA, 25 bp, Homo sapien
ctctttggctcctctatatgcaaaa

SEQ ID NO: 5808639 - DNA, 25 bp, Homo sapien
ctcgccttacccaagccgaggctag

SEQ ID NO: 5808640 - DNA, 25 bp, Homo sapien
ctccaacacgtccaagttggtggag

SEQ ID NO: 5808641 - DNA, 25 bp, Homo sapien
gagtctttggcacagcccaagtaga

SEQ ID NO: 5808642 - DNA, 25 bp, Homo sapien
aatccctccctccaaggctgcacct

SEQ ID NO: 5808643 - DNA, 25 bp, Homo sapien
cggtcaaggtcagactcgatgtccg

SEQ ID NO: 5808644 - DNA, 25 bp, Homo sapien
aagaaatggcctcagggaaaaactg

SEQ ID NO: 5808645 - DNA, 25 bp, Homo sapien
agcccatcaaaggaaaaaacaaaca

SEQ ID NO: 5808646 - DNA, 25 bp, Homo sapien
agccacagtcacagtgactgagcgg

SEQ ID NO: 5808647 - DNA, 25 bp, Homo sapien
cgcgcgtgaagagcgcgcgcaccgg

SEQ ID NO: 5808648 - DNA, 25 bp, Homo sapien
ggcttcatctatgaaagaaatggcc

SEQ ID NO: 5808649 - DNA, 25 bp, Homo sapien
cagctgacccatgaagttgaagtta

SEQ ID NO: 5808650 - DNA, 25 bp, Homo sapien
cagccgctcgttgcccagctccagc

SEQ ID NO: 5808651 - DNA, 25 bp, Homo sapien
gattgagcttctgcataaggtaagc

SEQ ID NO: 5808652 - DNA, 25 bp, Homo sapien
atgcccgggatggccacgttgatgg

SEQ ID NO: 5808653 - DNA, 25 bp, Homo sapien
tcattttgacaatgtcataggcatc

SEQ ID NO: 5808654 - DNA, 25 bp, Homo sapien
tgcagccgctggctcttagtgtcaa

SEQ ID NO: 5808655 - DNA, 25 bp, Homo sapien
cgtattctcgttccagtcgctgctg

SEQ ID NO: 5808656 - DNA, 25 bp, Homo sapien
tcataggcatcgttcatcgacagat

SEQ ID NO: 5808657 - DNA, 25 bp, Homo sapien
atctctctttggctcctctatatgc

SEQ ID NO: 5808658 - DNA, 25 bp, Homo sapien
cacaattcaaacaaacactgtcaag

SEQ ID NO: 5808659 - DNA, 25 bp, Homo sapien
cattctggttggaaggggtggtaaa

SEQ ID NO: 5808660 - DNA, 25 bp, Homo sapien
atctccactgggaaggaaggctggc

SEQ ID NO: 5808661 - DNA, 25 bp, Homo sapien
cccttctgcaggcgccgcagcatga

SEQ ID NO: 5808662 - DNA, 25 bp, Homo sapien
tgagcggctaatgccagccaagcaa

SEQ ID NO: 5808663 - DNA, 25 bp, Homo sapien
ccaaagagaatggagcaaatctctc

SEQ ID NO: 5808664 - DNA, 25 bp, Homo sapien
gaagcggtcccggtcctcgccgcgc

SEQ ID NO: 5808665 - DNA, 25 bp, Homo sapien
ctgctgaagggccagacacattcca

SEQ ID NO: 5808666 - DNA, 25 bp, Homo sapien
agtcgctgctgctctcgtcgtagag

SEQ ID NO: 5808667 - DNA, 25 bp, Homo sapien
acccaagccgaggctagcggttggg

SEQ ID NO: 5808668 - DNA, 25 bp, Homo sapien
ccgagcgcaccgcgcgcgaagctgc

SEQ ID NO: 5808669 - DNA, 25 bp, Homo sapien
catgatgcccgggatggccacgttg

SEQ ID NO: 5808670 - DNA, 25 bp, Homo sapien
catgtcctgttattccaaagagaat

SEQ ID NO: 5808671 - DNA, 25 bp, Homo sapien
gcccgggatggccacgttgatggcc

SEQ ID NO: 5808672 - DNA, 25 bp, Homo sapien
cgaggctagcggttggggcagacga

SEQ ID NO: 5808673 - DNA, 25 bp, Homo sapien
acaggttttggctccagtgatccga

SEQ ID NO: 5808674 - DNA, 25 bp, Homo sapien
acaaacactgtcaagtgattcaaga

SEQ ID NO: 5808675 - DNA, 25 bp, Homo sapien
gccgactcgatgtgcgacgactcgt

SEQ ID NO: 5808676 - DNA, 25 bp, Homo sapien
cgagacagaagtaaagccggaggtt

SEQ ID NO: 5808677 - DNA, 25 bp, Homo sapien
gtgtcattttgacacctggggccac

SEQ ID NO: 5808678 - DNA, 25 bp, Homo sapien
cgttgcccagctccagctgctcgtt

SEQ ID NO: 5808679 - DNA, 25 bp, Homo sapien
aggttctctctgcacccagctgcag

SEQ ID NO: 5808680 - DNA, 25 bp, Homo sapien
cttcttgagcagcagcccgagcacc

SEQ ID NO: 5808681 - DNA, 25 bp, Homo sapien
agccctcgtccttgagcttcttgag

SEQ ID NO: 5808682 - DNA, 25 bp, Homo sapien
aacaaacacaattcaaacaaacact

SEQ ID NO: 5808683 - DNA, 25 bp, Homo sapien
cacctggggccacacacaaagaaag

SEQ ID NO: 5808684 - DNA, 25 bp, Homo sapien
aggggtgtggggtctttcacgtaga

SEQ ID NO: 5808685 - DNA, 25 bp, Homo sapien
cgcgcgaagctgccgctctcggagc

SEQ ID NO: 5808686 - DNA, 25 bp, Homo sapien
gacagattgagcttctgcataaggt

SEQ ID NO: 5808687 - DNA, 25 bp, Homo sapien
caagatctccactgggaaggaaggc

SEQ ID NO: 5808688 - DNA, 25 bp, Homo sapien
gaacacatgctcctaccctatcatt

SEQ ID NO: 5808689 - DNA, 25 bp, Homo sapien
aggcatcgttcatcgacagattgag

SEQ ID NO: 5808690 - DNA, 25 bp, Homo sapien
gctgctgctctcgtcgtagagcacc

SEQ ID NO: 5808691 - DNA, 25 bp, Homo sapien
ccgaggaagagtcagagctgatccg

SEQ ID NO: 5808692 - DNA, 25 bp, Homo sapien
cgctcgttgcccagctccagctgct

SEQ ID NO: 5808693 - DNA, 25 bp, Homo sapien
ggactaccatccgagtctgttgcac

SEQ ID NO: 5808694 - DNA, 25 bp, Homo sapien
cgcgcgcgaagctgccgctctcgga

SEQ ID NO: 5808695 - DNA, 25 bp, Homo sapien
caccgtcttgctgatcgccatttcc

SEQ ID NO: 5808696 - DNA, 25 bp, Homo sapien
acagtgactgagcggctaatgccag

SEQ ID NO: 5808697 - DNA, 25 bp, Homo sapien
tgtgcgacgactcgtatagctcctg

SEQ ID NO: 5808698 - DNA, 25 bp, Homo sapien
gagcgcgcgcaccggcaggttaccc

SEQ ID NO: 5808699 - DNA, 25 bp, Homo sapien
ggcataggccgagcgcaccgcgcgc

SEQ ID NO: 5808700 - DNA, 25 bp, Homo sapien
ctccactgggaaggaaggctggctg

SEQ ID NO: 5808701 - DNA, 25 bp, Homo sapien
aagtaaagccggaggttctctctgc

SEQ ID NO: 5808702 - DNA, 25 bp, Homo sapien
tcttgccccgggcttcatctatgaa

SEQ ID NO: 5808703 - DNA, 25 bp, Homo sapien
agattcggcaaattgggggtgacgt

SEQ ID NO: 5808704 - DNA, 25 bp, Homo sapien
tgctgtgctggaaccctgttgtcac

SEQ ID NO: 5808705 - DNA, 25 bp, Homo sapien
ttgtcacatgggctgctgagtccca

SEQ ID NO: 5808706 - DNA, 25 bp, Homo sapien
cgttgatggccgactcgatgtgcga

SEQ ID NO: 5808707 - DNA, 25 bp, Homo sapien
aagagtcagagctgatccgcaggcc

SEQ ID NO: 5808708 - DNA, 25 bp, Homo sapien
ccaaactgataccacaaatacagag

SEQ ID NO: 5808709 - DNA, 25 bp, Homo sapien
aacgcccggcagccctcgtccttga

SEQ ID NO: 5808710 - DNA, 25 bp, Homo sapien
gaaacagccttacaaggccctaaag

SEQ ID NO: 5808711 - DNA, 25 bp, Homo sapien
acgagccgtctagattggtctcgca

SEQ ID NO: 5808712 - DNA, 25 bp, Homo sapien
agacaccacagttcttgccccgggc

SEQ ID NO: 5808713 - DNA, 25 bp, Homo sapien
gcatcgttcatcgacagattgagct

SEQ ID NO: 5808714 - DNA, 25 bp, Homo sapien
gttttggctccagtgatccgagatg

SEQ ID NO: 5808715 - DNA, 25 bp, Homo sapien
tttgacaatgtcataggcatcgttc

SEQ ID NO: 5808716 - DNA, 25 bp, Homo sapien
gatcgccatttccgacgcgaagggc

SEQ ID NO: 5808717 - DNA, 25 bp, Homo sapien
cgcccggcagccctcgtccttgagc

SEQ ID NO: 5808718 - DNA, 25 bp, Homo sapien
ttctaatccctccctccaaggctgc

SEQ ID NO: 5808719 - DNA, 25 bp, Homo sapien
ctttggcacagcccaagtagaggaa

SEQ ID NO: 5808720 - DNA, 25 bp, Homo sapien
gctcgttgagccacgccaccgtctt

SEQ ID NO: 5808721 - DNA, 25 bp, Homo sapien
cattccagcaaggaggggtgtgggg

SEQ ID NO: 5808722 - DNA, 25 bp, Homo sapien
accggcaggttacccttctgcaggc

SEQ ID NO: 5808723 - DNA, 25 bp, Homo sapien
cagggagaactcggcttggaactta

SEQ ID NO: 5808724 - DNA, 25 bp, Homo sapien
gttattccaaagagaatggagcaaa

SEQ ID NO: 5808725 - DNA, 25 bp, Homo sapien
aaacactgtcaagtgattcaagatc

SEQ ID NO: 5808726 - DNA, 25 bp, Homo sapien
aatacagctgctgtgctggaaccct

SEQ ID NO: 5808727 - DNA, 25 bp, Homo sapien
aaaagtctagcggcttctaatccct

SEQ ID NO: 5808728 - DNA, 25 bp, Homo sapien
tctcaaagagattcggcaaattggg

SEQ ID NO: 5808729 - DNA, 25 bp, Homo sapien
ggcacagcccaagtagaggaagggc

SEQ ID NO: 5808730 - DNA, 25 bp, Homo sapien
cacatgggctgctgagtcccagcgt

SEQ ID NO: 5808731 - DNA, 25 bp, Homo sapien
gtgccacagcgccgggtgaagcggt

SEQ ID NO: 5808732 - DNA, 25 bp, Homo sapien
ttatttaagactcgatttgctatct

SEQ ID NO: 5808733 - DNA, 25 bp, Homo sapien
ctacacgagccgtctagattggtct

SEQ ID NO: 5808734 - DNA, 25 bp, Homo sapien
acatgctcctaccctatcatttggt

SEQ ID NO: 5808735 - DNA, 25 bp, Homo sapien
gaaaaaaagtctagcggcttctaat

SEQ ID NO: 5808736 - DNA, 25 bp, Homo sapien
agccggaggttctctctgcacccag

SEQ ID NO: 5808737 - DNA, 25 bp, Homo sapien
tatacattctggttggaaggggtgg

SEQ ID NO: 5808738 - DNA, 25 bp, Homo sapien
tgctacacgagccgtctagattggt

SEQ ID NO: 5808739 - DNA, 25 bp, Homo sapien
accgcgcgcgaagctgccgctctcg

SEQ ID NO: 5808740 - DNA, 25 bp, Homo sapien
gccgcccgtattctcgttccagtcg

SEQ ID NO: 5808741 - DNA, 25 bp, Homo sapien
cccagcactggcaacggcggcgagc

SEQ ID NO: 5808742 - DNA, 25 bp, Homo sapien
accctgttgtcacatgggctgctga

SEQ ID NO: 5808743 - DNA, 25 bp, Homo sapien
agcttcttgagcagcagcccgagca

SEQ ID NO: 5808744 - DNA, 25 bp, Homo sapien
tccagatgcaaaaggaaacagcctt

SEQ ID NO: 5808745 - DNA, 25 bp, Homo sapien
tttccgacgcgaagggcacgggtct

SEQ ID NO: 5808746 - DNA, 25 bp, Homo sapien
acacgagccgtctagattggtctcg

SEQ ID NO: 5808747 - DNA, 25 bp, Homo sapien
tccaagttggtggagtctttggcac

SEQ ID NO: 5808748 - DNA, 25 bp, Homo sapien
tttcattttgacaatgtcataggca

SEQ ID NO: 5808749 - DNA, 25 bp, Homo sapien
taatgccagccaagcaatgtaccaa

SEQ ID NO: 5808750 - DNA, 25 bp, Homo sapien
tgagccacgccaccgtcttgctgat

SEQ ID NO: 5808751 - DNA, 25 bp, Homo sapien
tagtattaaccaattccgcacttgg

SEQ ID NO: 5808752 - DNA, 25 bp, Homo sapien
ttgtctagtacagacagctggtgtc

SEQ ID NO: 5808753 - DNA, 25 bp, Homo sapien
tctgcacccagctgcagccgctggc

SEQ ID NO: 5808754 - DNA, 25 bp, Homo sapien
cccggattatttaagactcgatttg

SEQ ID NO: 5808755 - DNA, 25 bp, Homo sapien
accacagttcttgccccgggcttca

SEQ ID NO: 5808756 - DNA, 25 bp, Homo sapien
gacgttcaagatgtacttgatgccg

SEQ ID NO: 5808757 - DNA, 25 bp, Homo sapien
gcaatgcagggagaactcggcttgg

SEQ ID NO: 5808758 - DNA, 25 bp, Homo sapien
aattgggggtgacgttcaagatgta

SEQ ID NO: 5808759 - DNA, 25 bp, Homo sapien
gaggaagagtcagagctgatccgca

SEQ ID NO: 5808760 - DNA, 25 bp, Homo sapien
gccgtctagattggtctcgcaatgc

SEQ ID NO: 5808761 - DNA, 25 bp, Homo sapien
tcctctcgaagtccagcagctgacc

SEQ ID NO: 5808762 - DNA, 25 bp, Homo sapien
taaagaacacatgctcctaccctat

SEQ ID NO: 5808763 - DNA, 25 bp, Homo sapien
ggggtggtaaaatacagctgctgtg

SEQ ID NO: 5808764 - DNA, 25 bp, Homo sapien
gaagggcaagatctccactgggaag

SEQ ID NO: 5808765 - DNA, 25 bp, Homo sapien
tgcctaccagacgcccctcggggca

SEQ ID NO: 5808766 - DNA, 25 bp, Homo sapien
gcgttctcaaagagattcggcaaat

SEQ ID NO: 5808767 - DNA, 25 bp, Homo sapien
caataatcaaatggagtatcagatt

SEQ ID NO: 5808768 - DNA, 25 bp, Homo sapien
ctgatcgccatttccgacgcgaagg

SEQ ID NO: 5808769 - DNA, 25 bp, Homo sapien
gcactggcaacggcggcgagctgct

SEQ ID NO: 5808770 - DNA, 25 bp, Homo sapien
ataatcaaatggagtatcagatttt

SEQ ID NO: 5808771 - DNA, 25 bp, Homo sapien
cccctcggggcaggcataggccgag

SEQ ID NO: 5808772 - DNA, 25 bp, Homo sapien
gccctaaagaacacatgctcctacc

SEQ ID NO: 5808773 - DNA, 25 bp, Homo sapien
gacaattatatagtcagttccagat

SEQ ID NO: 5808774 - DNA, 25 bp, Homo sapien
cataggccgagcgcaccgcgcgcga

SEQ ID NO: 5808775 - DNA, 25 bp, Homo sapien
ggggcaggcataggccgagcgcacc

SEQ ID NO: 5808776 - DNA, 25 bp, Homo sapien
gttggacagcggactaccatccgag

SEQ ID NO: 5808777 - DNA, 25 bp, Homo sapien
tggagtctttggcacagcccaagta

SEQ ID NO: 5808778 - DNA, 25 bp, Homo sapien
ccacctggtatacattctggttgga

SEQ ID NO: 5808779 - DNA, 25 bp, Homo sapien
gcggcgagctgctgctacacgagcc

SEQ ID NO: 5808780 - DNA, 25 bp, Homo sapien
ccagcagctgacccatgaagttgaa

SEQ ID NO: 5808781 - DNA, 25 bp, Homo sapien
gccgcgcgtgaagagcgcgcgcacc

SEQ ID NO: 5808782 - DNA, 25 bp, Homo sapien
tggagcaaatctctctgttagtatt

SEQ ID NO: 5808783 - DNA, 25 bp, Homo sapien
gggagaactcggcttggaacttact

SEQ ID NO: 5808784 - DNA, 25 bp, Homo sapien
tctccctttggataatttcttttaa

SEQ ID NO: 5808785 - DNA, 25 bp, Homo sapien
tttctccccggattatttaagactc

SEQ ID NO: 5808786 - DNA, 25 bp, Homo sapien
gcgggagagggcggggtgcctacca

SEQ ID NO: 5808787 - DNA, 25 bp, Homo sapien
acacatgctcctaccctatcatttg

SEQ ID NO: 5808788 - DNA, 25 bp, Homo sapien
gttggattttttcattttgacaatg

SEQ ID NO: 5808789 - DNA, 25 bp, Homo sapien
agcggctaatgccagccaagcaatg

SEQ ID NO: 5808790 - DNA, 25 bp, Homo sapien
agcagctgacccatgaagttgaagt

SEQ ID NO: 5808791 - DNA, 25 bp, Homo sapien
actctcctgcgttctcaaagagatt

SEQ ID NO: 5808792 - DNA, 25 bp, Homo sapien
gcccagatagtttttgttcctcccc

SEQ ID NO: 5808793 - DNA, 25 bp, Homo sapien
ccaagtagaggaagggcaagatctc

SEQ ID NO: 5808794 - DNA, 25 bp, Homo sapien
ataccacaaatacagagctgaaatc

SEQ ID NO: 5808795 - DNA, 25 bp, Homo sapien
cggtgccacagcgccgggtgaagcg

SEQ ID NO: 5808796 - DNA, 25 bp, Homo sapien
atgggtacagagcaaacctactgcc

SEQ ID NO: 5808797 - DNA, 25 bp, Homo sapien
cagagagtccacctggtatacattc

SEQ ID NO: 5808798 - DNA, 25 bp, Homo sapien
gtcagactcgatgtccgaggaagag

SEQ ID NO: 5808799 - DNA, 25 bp, Homo sapien
gattatttaagactcgatttgctat

SEQ ID NO: 5808800 - DNA, 25 bp, Homo sapien
aagtggcatactgctctttctccct

SEQ ID NO: 5808801 - DNA, 25 bp, Homo sapien
atgtacttgatgccgaattcctcca

SEQ ID NO: 5808802 - DNA, 25 bp, Homo sapien
atccgagtctgttgcactattgggg

SEQ ID NO: 5808803 - DNA, 25 bp, Homo sapien
aaactctcctgcgttctcaaagaga

SEQ ID NO: 5808804 - DNA, 25 bp, Homo sapien
ccaagccgaggctagcggttggggc

SEQ ID NO: 5808805 - DNA, 25 bp, Homo sapien
ctctcaatgaagctgcccagatagt

SEQ ID NO: 5808806 - DNA, 25 bp, Homo sapien
gcagcccagctgatgctgccaagag

SEQ ID NO: 5808807 - DNA, 25 bp, Homo sapien
tcgctgctgctctcgtcgtagagca

SEQ ID NO: 5808808 - DNA, 25 bp, Homo sapien
ctcaaatctacccgggcgtctttct

SEQ ID NO: 5808809 - DNA, 25 bp, Homo sapien
ttggtctcgcaatgcagggagaact

SEQ ID NO: 5808810 - DNA, 25 bp, Homo sapien
caatgaagctgcccagatagttttt

SEQ ID NO: 5808811 - DNA, 25 bp, Homo sapien
gtctagcggcttctaatccctccct

SEQ ID NO: 5808812 - DNA, 25 bp, Homo sapien
agctgctcgttgagccacgccaccg

SEQ ID NO: 5808813 - DNA, 25 bp, Homo sapien
tcctccaacacgtccaagttggtgg

SEQ ID NO: 5808814 - DNA, 25 bp, Homo sapien
actcggcttggaacttactgaagcc

SEQ ID NO: 5808815 - DNA, 25 bp, Homo sapien
gtgatccgagatggggatttgcttg

SEQ ID NO: 5808816 - DNA, 25 bp, Homo sapien
cggactccgtgctactgagagggga

SEQ ID NO: 5808817 - DNA, 25 bp, Homo sapien
gtagaggaagggcaagatctccact

SEQ ID NO: 5808818 - DNA, 25 bp, Homo sapien
tcctgttattccaaagagaatggag

SEQ ID NO: 5808819 - DNA, 25 bp, Homo sapien
ggtgcctaccagacgcccctcgggg

SEQ ID NO: 5808820 - DNA, 25 bp, Homo sapien
ggggcagacgagacagaagtaaagc

SEQ ID NO: 5808821 - DNA, 25 bp, Homo sapien
tcttgagcagcagcccgagcaccga

SEQ ID NO: 5808822 - DNA, 25 bp, Homo sapien
ggcgagctgctgctacacgagccgt

SEQ ID NO: 5808823 - DNA, 25 bp, Homo sapien
agaagtggcatactgctctttctcc

SEQ ID NO: 5808824 - DNA, 25 bp, Homo sapien
gccccagcactggcaacggcggcga

SEQ ID NO: 5808825 - DNA, 25 bp, Homo sapien
caaggtcagactcgatgtccgagga

SEQ ID NO: 5808826 - DNA, 25 bp, Homo sapien
tgttctgttttaagaagtggcatac

SEQ ID NO: 5808827 - DNA, 25 bp, Homo sapien
cagagctgatccgcaggcccccgag

SEQ ID NO: 5808828 - DNA, 25 bp, Homo sapien
caaattgggggtgacgttcaagatg

SEQ ID NO: 5808829 - DNA, 25 bp, Homo sapien
cggattatttaagactcgatttgct

SEQ ID NO: 5808830 - DNA, 25 bp, Homo sapien
gaagttgaagttaggggatatgttg

SEQ ID NO: 5808831 - DNA, 25 bp, Homo sapien
ttctaccctatgcgcctggaagtcc

SEQ ID NO: 5808832 - DNA, 25 bp, Homo sapien
actaccatccgagtctgttgcacta

SEQ ID NO: 5808833 - DNA, 25 bp, Homo sapien
gaagggcacgggtctgagcgtatct

SEQ ID NO: 5808834 - DNA, 25 bp, Homo sapien
aagtccagcagctgacccatgaagt

SEQ ID NO: 5808835 - DNA, 25 bp, Homo sapien
gccaccgtcttgctgatcgccattt

SEQ ID NO: 5808836 - DNA, 25 bp, Homo sapien
aaactgggacaggttttggctccag

SEQ ID NO: 5808837 - DNA, 25 bp, Homo sapien
gttgcactattggggtctcggtcaa

SEQ ID NO: 5808838 - DNA, 25 bp, Homo sapien
atgaagctgcccagatagtttttgt

SEQ ID NO: 5808839 - DNA, 25 bp, Homo sapien
gcgcgcaccggcaggttacccttct

SEQ ID NO: 5808840 - DNA, 25 bp, Homo sapien
ttggcacagcccaagtagaggaagg

SEQ ID NO: 5808841 - DNA, 25 bp, Homo sapien
cgtccttgagcttcttgagcagcag

SEQ ID NO: 5808842 - DNA, 25 bp, Homo sapien
ccaacacgtccaagttggtggagtc

SEQ ID NO: 5808843 - DNA, 25 bp, Homo sapien
agttgaagttaggggatatgttgga

SEQ ID NO: 5808844 - DNA, 25 bp, Homo sapien
tattctcgttccagtcgctgctgct

SEQ ID NO: 5808845 - DNA, 25 bp, Homo sapien
caggcgccgcagcatgatgcccggg

SEQ ID NO: 5808846 - DNA, 25 bp, Homo sapien
tatatagtcagttccagatgcaaaa

SEQ ID NO: 5808847 - DNA, 25 bp, Homo sapien
tggtaaaatacagctgctgtgctgg

SEQ ID NO: 5808848 - DNA, 25 bp, Homo sapien
gtccatcagcagcagccgctcgttg

SEQ ID NO: 5808849 - DNA, 25 bp, Homo sapien
ttactgaagccaccttccaggtaga

SEQ ID NO: 5808850 - DNA, 25 bp, Homo sapien
caaacacaattcaaacaaacactgt

SEQ ID NO: 5808851 - DNA, 25 bp, Homo sapien
acgcgaagggcacgggtctgagcgt

SEQ ID NO: 5808852 - DNA, 25 bp, Homo sapien
tacagacagctggtgtcattttgac

SEQ ID NO: 5808853 - DNA, 25 bp, Homo sapien
ccagcgtcctctcgaagtccagcag

SEQ ID NO: 5808854 - DNA, 25 bp, Homo sapien
tgcatgggtaggctgtacacatggg

SEQ ID NO: 5808855 - DNA, 25 bp, Homo sapien
ttaattcggactccgtgctactgag

SEQ ID NO: 5808856 - DNA, 25 bp, Homo sapien
ccacagtcacagtgactgagcggct

SEQ ID NO: 5808857 - DNA, 25 bp, Homo sapien
agatctccactgggaaggaaggctg

SEQ ID NO: 5808858 - DNA, 25 bp, Homo sapien
attcggcaaattgggggtgacgttc

SEQ ID NO: 5808859 - DNA, 25 bp, Homo sapien
gagctgatccgcaggcccccgagcc

SEQ ID NO: 5808860 - DNA, 25 bp, Homo sapien
agattgcagagagtccacctggtat

SEQ ID NO: 5808861 - DNA, 25 bp, Homo sapien
attttgacaatgtcataggcatcgt

SEQ ID NO: 5808862 - DNA, 25 bp, Homo sapien
gtaaccttgtctagtacagacagct

SEQ ID NO: 5808863 - DNA, 25 bp, Homo sapien
caaaattgaattagtcttcattgaa

SEQ ID NO: 5808864 - DNA, 25 bp, Homo sapien
atatgttggattttttcattttgac

SEQ ID NO: 5808865 - DNA, 25 bp, Homo sapien
aagtctagcggcttctaatccctcc

SEQ ID NO: 5808866 - DNA, 25 bp, Homo sapien
cgggtctgagcgtatctatcatggg

SEQ ID NO: 5808867 - DNA, 25 bp, Homo sapien
gtaaaatacagctgctgtgctggaa

SEQ ID NO: 5808868 - DNA, 25 bp, Homo sapien
tcatgggggtcgagctgcgggagag

SEQ ID NO: 5808869 - DNA, 25 bp, Homo sapien
cttggaacttactgaagccaccttc

SEQ ID NO: 5808870 - DNA, 25 bp, Homo sapien
gaactcggcttggaacttactgaag

SEQ ID NO: 5808871 - DNA, 25 bp, Homo sapien
ggcaaattgggggtgacgttcaaga

SEQ ID NO: 5808872 - DNA, 25 bp, Homo sapien
tttcacgtagattgcagagagtcca

SEQ ID NO: 5808873 - DNA, 25 bp, Homo sapien
gtgacgttcaagatgtacttgatgc

SEQ ID NO: 5808874 - DNA, 25 bp, Homo sapien
gagtcagagctgatccgcaggcccc

SEQ ID NO: 5808875 - DNA, 25 bp, Homo sapien
ttccaaactgataccacaaatacag

SEQ ID NO: 5808876 - DNA, 25 bp, Homo sapien
ggcaggcataggccgagcgcaccgc

SEQ ID NO: 5808877 - DNA, 25 bp, Homo sapien
aggttacccttctgcaggcgccgca

SEQ ID NO: 5808878 - DNA, 25 bp, Homo sapien
agtcctcgaatcccagtccctgcat

SEQ ID NO: 5808879 - DNA, 25 bp, Homo sapien
agtatcagattttttttccaaactg

SEQ ID NO: 5808880 - DNA, 25 bp, Homo sapien
gtaaagccggaggttctctctgcac

SEQ ID NO: 5808881 - DNA, 25 bp, Homo sapien
tggaacttactgaagccaccttcca

SEQ ID NO: 5808882 - DNA, 25 bp, Homo sapien
ctagcggcttctaatccctccctcc

SEQ ID NO: 5808883 - DNA, 25 bp, Homo sapien
tgccaagagaaactgctgaagggcc

SEQ ID NO: 5808884 - DNA, 25 bp, Homo sapien
ctctcgaagtccagcagctgaccca

SEQ ID NO: 5808885 - DNA, 25 bp, Homo sapien
accctatcatttggttctaccctat

SEQ ID NO: 5808886 - DNA, 25 bp, Homo sapien
ccgtgctactgagaggggaggaaaa

SEQ ID NO: 5808887 - DNA, 25 bp, Homo sapien
atctatgaaagaaatggcctcaggg

SEQ ID NO: 5808888 - DNA, 25 bp, Homo sapien
tcgccgcccgtattctcgttccagt

SEQ ID NO: 5808889 - DNA, 25 bp, Homo sapien
caagacaccacagttcttgccccgg

SEQ ID NO: 5808890 - DNA, 25 bp, Homo sapien
ctgcgggagagggcggggtgcctac

SEQ ID NO: 5808891 - DNA, 25 bp, Homo sapien
cagcccaagtagaggaagggcaaga

SEQ ID NO: 5808892 - DNA, 25 bp, Homo sapien
tatagctcctgcggccggcagtcca

SEQ ID NO: 5808893 - DNA, 25 bp, Homo sapien
aactgctgaagggccagacacattc

SEQ ID NO: 5808894 - DNA, 25 bp, Homo sapien
atgtccgaggaagagtcagagctga

SEQ ID NO: 5808895 - DNA, 25 bp, Homo sapien
ttggaaggggtggtaaaatacagct

SEQ ID NO: 5808896 - DNA, 25 bp, Homo sapien
tattccaaagagaatggagcaaatc

SEQ ID NO: 5808897 - DNA, 25 bp, Homo sapien
ttctcgttccagtcgctgctgctct

SEQ ID NO: 5808898 - DNA, 25 bp, Homo sapien
cgcccgtattctcgttccagtcgct

SEQ ID NO: 5808899 - DNA, 25 bp, Homo sapien
ggccggcagtccatcagcagcagcc

SEQ ID NO: 5808900 - DNA, 25 bp, Homo sapien
ggtctttcacgtagattgcagagag

SEQ ID NO: 5808901 - DNA, 25 bp, Homo sapien
tatatgcaaaattgaattagtcttc

SEQ ID NO: 5808902 - DNA, 25 bp, Homo sapien
aagactcgatttgctatctcttgga

SEQ ID NO: 5808903 - DNA, 25 bp, Homo sapien
ttttgttcctccccagtgaatgaaa

SEQ ID NO: 5808904 - DNA, 25 bp, Homo sapien
catcgacagattgagcttctgcata

SEQ ID NO: 5808905 - DNA, 25 bp, Homo sapien
ctatgaaagaaatggcctcagggaa

SEQ ID NO: 5808906 - DNA, 25 bp, Homo sapien
ccatcagcagcagccgctcgttgcc

SEQ ID NO: 5808907 - DNA, 25 bp, Homo sapien
aggctgcacctcaaatctacccggg

SEQ ID NO: 5808908 - DNA, 25 bp, Homo sapien
ggtaagccacagtcacagtgactga

SEQ ID NO: 5808909 - DNA, 25 bp, Homo sapien
gagccgtctagattggtctcgcaat

SEQ ID NO: 5808910 - DNA, 25 bp, Homo sapien
ctgtgctggaaccctgttgtcacat

SEQ ID NO: 5808911 - DNA, 25 bp, Homo sapien
cggtcccggtcctcgccgcgcgtga

SEQ ID NO: 5808912 - DNA, 25 bp, Homo sapien
ttgttcctccccagtgaatgaaatc

SEQ ID NO: 5808913 - DNA, 25 bp, Homo sapien
cacattccagcaaggaggggtgtgg

SEQ ID NO: 5808914 - DNA, 25 bp, Homo sapien
tgaatgaaatccaattaattcggac

SEQ ID NO: 5808915 - DNA, 25 bp, Homo sapien
tggaagtcctcgaatcccagtccct

SEQ ID NO: 5808916 - DNA, 25 bp, Homo sapien
tcattgaagacaattatatagtcag

SEQ ID NO: 5808917 - DNA, 25 bp, Homo sapien
gcaacggcggcgagctgctgctaca

SEQ ID NO: 5808918 - DNA, 25 bp, Homo sapien
cacacacaaagaaagcagcccagct

SEQ ID NO: 5808919 - DNA, 25 bp, Homo sapien
gctctcgtcgtagagcaccactgtg

SEQ ID NO: 5808920 - DNA, 25 bp, Homo sapien
accagacgcccctcggggcaggcat

SEQ ID NO: 5808921 - DNA, 25 bp, Homo sapien
cttcattgaagacaattatatagtc

SEQ ID NO: 5808922 - DNA, 25 bp, Homo sapien
cagacacattccagcaaggaggggt

SEQ ID NO: 5808923 - DNA, 25 bp, Homo sapien
ttaattccgcctcgccttacccaag

SEQ ID NO: 5808924 - DNA, 25 bp, Homo sapien
ctgttattccaaagagaatggagca

SEQ ID NO: 5808925 - DNA, 25 bp, Homo sapien
ttccagcaaggaggggtgtggggtc

SEQ ID NO: 5808926 - DNA, 25 bp, Homo sapien
ccagtcgctgctgctctcgtcgtag

SEQ ID NO: 5808927 - DNA, 25 bp, Homo sapien
agccacgccaccgtcttgctgatcg

SEQ ID NO: 5808928 - DNA, 25 bp, Homo sapien
cacacaaagaaagcagcccagctga

SEQ ID NO: 5808929 - DNA, 25 bp, Homo sapien
ctggtatacattctggttggaaggg

SEQ ID NO: 5808930 - DNA, 25 bp, Homo sapien
attaaccaattccgcacttggtaac

SEQ ID NO: 5808931 - DNA, 25 bp, Homo sapien
ggatttgcttgtatttaaactctcc

SEQ ID NO: 5808932 - DNA, 25 bp, Homo sapien
actggcaacggcggcgagctgctgc

SEQ ID NO: 5808933 - DNA, 25 bp, Homo sapien
cttgctgatcgccatttccgacgcg

SEQ ID NO: 5808934 - DNA, 25 bp, Homo sapien
ttgagcttctgcataaggtaagcca

SEQ ID NO: 5808935 - DNA, 25 bp, Homo sapien
attgaagacaattatatagtcagtt

SEQ ID NO: 5808936 - DNA, 25 bp, Homo sapien
tcccagtccctgcatgggtaggctg

SEQ ID NO: 5808937 - DNA, 25 bp, Homo sapien
ggaagagtcagagctgatccgcagg

SEQ ID NO: 5808938 - DNA, 25 bp, Homo sapien
ctggctcttagtgtcaatgaatctc

SEQ ID NO: 5808939 - DNA, 25 bp, Homo sapien
gcccgagcaccgactcgccgcccgt

SEQ ID NO: 5808940 - DNA, 25 bp, Homo sapien
gctgctacacgagccgtctagattg

SEQ ID NO: 5808941 - DNA, 25 bp, Homo sapien
tctctgcacccagctgcagccgctg

SEQ ID NO: 5808942 - DNA, 25 bp, Homo sapien
tgtcataggcatcgttcatcgacag

SEQ ID NO: 5808943 - DNA, 25 bp, Homo sapien
ggttggggcagacgagacagaagta

SEQ ID NO: 5808944 - DNA, 25 bp, Homo sapien
ccgagtctgttgcactattggggtc

SEQ ID NO: 5808945 - DNA, 25 bp, Homo sapien
gggtacagagcaaacctactgcctg

SEQ ID NO: 5808946 - DNA, 25 bp, Homo sapien
tgatccgcaggcccccgagccccag

SEQ ID NO: 5808947 - DNA, 25 bp, Homo sapien
gcttgtatttaaactctcctgcgtt

SEQ ID NO: 5808948 - DNA, 25 bp, Homo sapien
gtccagcagctgacccatgaagttg

SEQ ID NO: 5808949 - DNA, 25 bp, Homo sapien
ccagctgctcgttgagccacgccac

SEQ ID NO: 5808950 - DNA, 25 bp, Homo sapien
cagacgcccctcggggcaggcatag

SEQ ID NO: 5808951 - DNA, 25 bp, Homo sapien
ttgcttgtatttaaactctcctgcg

SEQ ID NO: 5808952 - DNA, 25 bp, Homo sapien
tcgatgtgcgacgactcgtatagct

SEQ ID NO: 5808953 - DNA, 25 bp, Homo sapien
caagatgtacttgatgccgaattcc

SEQ ID NO: 5808954 - DNA, 25 bp, Homo sapien
acagagcaaacctactgcctgtatc

SEQ ID NO: 5808955 - DNA, 25 bp, Homo sapien
agtccctgcatgggtaggctgtaca

SEQ ID NO: 5808956 - DNA, 25 bp, Homo sapien
gttgagccacgccaccgtcttgctg

SEQ ID NO: 5808957 - DNA, 25 bp, Homo sapien
ctgctcgttgagccacgccaccgtc

SEQ ID NO: 5808958 - DNA, 25 bp, Homo sapien
cgcgtgaagagcgcgcgcaccggca

SEQ ID NO: 5808959 - DNA, 25 bp, Homo sapien
gatccgagatggggatttgcttgta

SEQ ID NO: 5808960 - DNA, 25 bp, Homo sapien
cttagtgtcaatgaatctctctcaa

SEQ ID NO: 5808961 - DNA, 25 bp, Homo sapien
ccgtcttgctgatcgccatttccga

SEQ ID NO: 5808962 - DNA, 25 bp, Homo sapien
agcccagctgatgctgccaagagaa

SEQ ID NO: 5808963 - DNA, 25 bp, Homo sapien
tcggcttggaacttactgaagccac

SEQ ID NO: 5808964 - DNA, 25 bp, Homo sapien
gtcggtgccacagcgccgggtgaag

SEQ ID NO: 5808965 - DNA, 25 bp, Homo sapien
acgactcgtatagctcctgcggccg

SEQ ID NO: 5808966 - DNA, 25 bp, Homo sapien
gactccgtgctactgagaggggagg

SEQ ID NO: 5808967 - DNA, 25 bp, Homo sapien
tccgcacttggtaaccttgtctagt

SEQ ID NO: 5808968 - DNA, 25 bp, Homo sapien
atgccagccaagcaatgtaccaaga

SEQ ID NO: 5808969 - DNA, 25 bp, Homo sapien
catactgctctttctccctttggat

SEQ ID NO: 5808970 - DNA, 25 bp, Homo sapien
ctttggctcctctatatgcaaaatt

SEQ ID NO: 5808971 - DNA, 25 bp, Homo sapien
agtacagacagctggtgtcattttg

SEQ ID NO: 5808972 - DNA, 25 bp, Homo sapien
acgtagattgcagagagtccacctg

SEQ ID NO: 5808973 - DNA, 25 bp, Homo sapien
gggtctcggtcaaggtcagactcga

SEQ ID NO: 5808974 - DNA, 25 bp, Homo sapien
tagtcagttccagatgcaaaaggaa

SEQ ID NO: 5808975 - DNA, 25 bp, Homo sapien
acaatgtcataggcatcgttcatcg

SEQ ID NO: 5808976 - DNA, 25 bp, Homo sapien
gcaccactgtgtcggtgccacagcg

SEQ ID NO: 5808977 - DNA, 25 bp, Homo sapien
gagtctgttgcactattggggtctc

SEQ ID NO: 5808978 - DNA, 25 bp, Homo sapien
aagaaagcagcccagctgatgctgc

SEQ ID NO: 5808979 - DNA, 25 bp, Homo sapien
ggtatacattctggttggaaggggt

SEQ ID NO: 5808980 - DNA, 25 bp, Homo sapien
ctcctctatatgcaaaattgaatta

SEQ ID NO: 5808981 - DNA, 25 bp, Homo sapien
ttggataatttcttttaagcccatc

SEQ ID NO: 5808982 - DNA, 25 bp, Homo sapien
aaggctggctgttggacagcggact

SEQ ID NO: 5808983 - DNA, 25 bp, Homo sapien
ataatttcttttaagcccatcaaag

SEQ ID NO: 5808984 - DNA, 25 bp, Homo sapien
aatggcctcagggaaaaactgggac

SEQ ID NO: 5808985 - DNA, 25 bp, Homo sapien
ccaggtagaacgcccggcagccctc

SEQ ID NO: 5808986 - DNA, 25 bp, Homo sapien
tgcgcctggaagtcctcgaatccca

SEQ ID NO: 5808987 - DNA, 25 bp, Homo sapien
gaaagcagcccagctgatgctgcca

SEQ ID NO: 5808988 - DNA, 25 bp, Homo sapien
gccacgttgatggccgactcgatgt

SEQ ID NO: 5808989 - DNA, 25 bp, Homo sapien
ataggcatcgttcatcgacagattg

SEQ ID NO: 5808990 - DNA, 25 bp, Homo sapien
gctctcggagcggggtttaattccg

SEQ ID NO: 5808991 - DNA, 25 bp, Homo sapien
aagagcgcgcgcaccggcaggttac

SEQ ID NO: 5808992 - DNA, 25 bp, Homo sapien
ctaatccctccctccaaggctgcac

SEQ ID NO: 5808993 - DNA, 25 bp, Homo sapien
accacaaatacagagctgaaatctc

SEQ ID NO: 5808994 - DNA, 25 bp, Homo sapien
gtcgagctgcgggagagggcggggt

SEQ ID NO: 5808995 - DNA, 25 bp, Homo sapien
ttccgcctcgccttacccaagccga

SEQ ID NO: 5808996 - DNA, 25 bp, Homo sapien
taggctgtacacatgggtacagagc

SEQ ID NO: 5808997 - DNA, 25 bp, Homo sapien
tcgttgagccacgccaccgtcttgc

SEQ ID NO: 5808998 - DNA, 25 bp, Homo sapien
caaatctacccgggcgtctttctcc

SEQ ID NO: 5808999 - DNA, 25 bp, Homo sapien
gcaccgactcgccgcccgtattctc

SEQ ID NO: 5809000 - DNA, 25 bp, Homo sapien
cgaagctgccgctctcggagcgggg

SEQ ID NO: 5809001 - DNA, 25 bp, Homo sapien
caatgtaccaagacaccacagttct

SEQ ID NO: 5809002 - DNA, 25 bp, Homo sapien
cacgtccaagttggtggagtctttg

SEQ ID NO: 5809003 - DNA, 25 bp, Homo sapien
ctctctttggctcctctatatgcaa

SEQ ID NO: 5809004 - DNA, 25 bp, Homo sapien
cacaaatacagagctgaaatctctc

SEQ ID NO: 5809005 - DNA, 25 bp, Homo sapien
ccgcaggcccccgagccccagcact

SEQ ID NO: 5809006 - DNA, 25 bp, Homo sapien
accctatgcgcctggaagtcctcga

SEQ ID NO: 5809007 - DNA, 25 bp, Homo sapien
gtttaattccgcctcgccttaccca

SEQ ID NO: 5809008 - DNA, 25 bp, Homo sapien
gcaccgcgcgcgaagctgccgctct

SEQ ID NO: 5809009 - DNA, 25 bp, Homo sapien
acacatgggtacagagcaaacctac

SEQ ID NO: 5809010 - DNA, 25 bp, Homo sapien
agagaatggagcaaatctctctgtt

SEQ ID NO: 5809011 - DNA, 25 bp, Homo sapien
cgtatctatcatgggggtcgagctg

SEQ ID NO: 5809012 - DNA, 25 bp, Homo sapien
tcacgtagattgcagagagtccacc

SEQ ID NO: 5809013 - DNA, 25 bp, Homo sapien
taagcccatcaaaggaaaaaacaaa

SEQ ID NO: 5809014 - DNA, 25 bp, Homo sapien
agcgtatctatcatgggggtcgagc

SEQ ID NO: 5809015 - DNA, 25 bp, Homo sapien
gtccacctggtatacattctggttg

SEQ ID NO: 5809016 - DNA, 25 bp, Homo sapien
cccagctgatgctgccaagagaaac

SEQ ID NO: 5809017 - DNA, 25 bp, Homo sapien
gttcttgccccgggcttcatctatg

SEQ ID NO: 5809018 - DNA, 25 bp, Homo sapien
tggctccagtgatccgagatgggga

SEQ ID NO: 5809019 - DNA, 25 bp, Homo sapien
tatgcaaaattgaattagtcttcat

SEQ ID NO: 5809020 - DNA, 25 bp, Homo sapien
gattcaagatcaaatatttacaata

SEQ ID NO: 5809021 - DNA, 25 bp, Homo sapien
catcaaaggaaaaaacaaacacaat

SEQ ID NO: 5809022 - DNA, 25 bp, Homo sapien
agcaaggaggggtgtggggtctttc

SEQ ID NO: 5809023 - DNA, 25 bp, Homo sapien
caccttccaggtagaacgcccggca

SEQ ID NO: 5809024 - DNA, 25 bp, Homo sapien
tcctccccagtgaatgaaatccaat

SEQ ID NO: 5809025 - DNA, 25 bp, Homo sapien
agcagccgctcgttgcccagctcca

SEQ ID NO: 5809026 - DNA, 25 bp, Homo sapien
cagctgctgtgctggaaccctgttg

SEQ ID NO: 5809027 - DNA, 25 bp, Homo sapien
ctctctcaatgaagctgcccagata

SEQ ID NO: 5809028 - DNA, 25 bp, Homo sapien
ttccaaagagaatggagcaaatctc

SEQ ID NO: 5809029 - DNA, 25 bp, Homo sapien
tagctcctgcggccggcagtccatc

SEQ ID NO: 5809030 - DNA, 25 bp, Homo sapien
ttaagactcgatttgctatctcttg

SEQ ID NO: 5809031 - DNA, 25 bp, Homo sapien
cgacgactcgtatagctcctgcggc

SEQ ID NO: 5809032 - DNA, 25 bp, Homo sapien
gaagctgcccagatagtttttgttc

SEQ ID NO: 5809033 - DNA, 25 bp, Homo sapien
actcgccgcccgtattctcgttcca

SEQ ID NO: 5809034 - DNA, 25 bp, Homo sapien
atgaaagaaatggcctcagggaaaa

SEQ ID NO: 5809035 - DNA, 25 bp, Homo sapien
gagcagcagcccgagcaccgactcg

SEQ ID NO: 5809036 - DNA, 25 bp, Homo sapien
gaagttaggggatatgttggatttt

SEQ ID NO: 5809037 - DNA, 25 bp, Homo sapien
atccaattaattcggactccgtgct

SEQ ID NO: 5809038 - DNA, 25 bp, Homo sapien
cggtcctcgccgcgcgtgaagagcg

SEQ ID NO: 5809039 - DNA, 25 bp, Homo sapien
ctccccagtgaatgaaatccaatta

SEQ ID NO: 5809040 - DNA, 25 bp, Homo sapien
cagccgctggctcttagtgtcaatg

SEQ ID NO: 5809041 - DNA, 25 bp, Homo sapien
ggctggctgttggacagcggactac

SEQ ID NO: 5809042 - DNA, 25 bp, Homo sapien
agaacgcccggcagccctcgtcctt

SEQ ID NO: 5809043 - DNA, 25 bp, Homo sapien
actgagcggctaatgccagccaagc

SEQ ID NO: 5809044 - DNA, 25 bp, Homo sapien
gccagacacattccagcaaggaggg

SEQ ID NO: 5809045 - DNA, 25 bp, Homo sapien
attatatagtcagttccagatgcaa

SEQ ID NO: 5809046 - DNA, 25 bp, Homo sapien
gctagcggttggggcagacgagaca

SEQ ID NO: 5809047 - DNA, 25 bp, Homo sapien
tgcactattggggtctcggtcaagg

SEQ ID NO: 5809048 - DNA, 25 bp, Homo sapien
ccactgggaaggaaggctggctgtt

SEQ ID NO: 5809049 - DNA, 25 bp, Homo sapien
cctatcatttggttctaccctatgc

SEQ ID NO: 5809050 - DNA, 25 bp, Homo sapien
ctgtatctatacagcatgtcctgtt

SEQ ID NO: 5809051 - DNA, 25 bp, Homo sapien
gcctgtatctatacagcatgtcctg

SEQ ID NO: 5809052 - DNA, 25 bp, Homo sapien
tgataccacaaatacagagctgaaa

SEQ ID NO: 5809053 - DNA, 25 bp, Homo sapien
gctgaaatctctctttggctcctct

SEQ ID NO: 5809054 - DNA, 25 bp, Homo sapien
ctgtgtcggtgccacagcgccgggt

SEQ ID NO: 5809055 - DNA, 25 bp, Homo sapien
gtacttgatgccgaattcctccaac

SEQ ID NO: 5809056 - DNA, 25 bp, Homo sapien
tacagagctgaaatctctctttggc

SEQ ID NO: 5809057 - DNA, 25 bp, Homo sapien
gcgcgcgcaccggcaggttaccctt

SEQ ID NO: 5809058 - DNA, 25 bp, Homo sapien
accaagacaccacagttcttgcccc

SEQ ID NO: 5809059 - DNA, 25 bp, Homo sapien
ccagtccctgcatgggtaggctgta

SEQ ID NO: 5809060 - DNA, 25 bp, Homo sapien
cgctggctcttagtgtcaatgaatc

SEQ ID NO: 5809061 - DNA, 25 bp, Homo sapien
cacagcccaagtagaggaagggcaa

SEQ ID NO: 5809062 - DNA, 25 bp, Homo sapien
ctcgtccttgagcttcttgagcagc

SEQ ID NO: 5809063 - DNA, 25 bp, Homo sapien
aggggatatgttggattttttcatt

SEQ ID NO: 5809064 - DNA, 25 bp, Homo sapien
agatagtttttgttcctccccagtg

SEQ ID NO: 5809065 - DNA, 25 bp, Homo sapien
gccgggtgaagcggtcccggtcctc

SEQ ID NO: 5809066 - DNA, 25 bp, Homo sapien
aagcagcccagctgatgctgccaag

SEQ ID NO: 5809067 - DNA, 25 bp, Homo sapien
aagacaattatatagtcagttccag

SEQ ID NO: 5809068 - DNA, 25 bp, Homo sapien
attggggtctcggtcaaggtcagac

SEQ ID NO: 5809069 - DNA, 25 bp, Homo sapien
tctatcatgggggtcgagctgcggg

SEQ ID NO: 5809070 - DNA, 25 bp, Homo sapien
tagagcaccactgtgtcggtgccac

SEQ ID NO: 5809071 - DNA, 25 bp, Homo sapien
ccggcagtccatcagcagcagccgc

SEQ ID NO: 5809072 - DNA, 25 bp, Homo sapien
tggtaaccttgtctagtacagacag

SEQ ID NO: 5809073 - DNA, 25 bp, Homo sapien
ttttttttccaaactgataccacaa

SEQ ID NO: 5809074 - DNA, 25 bp, Homo sapien
tggggccacacacaaagaaagcagc

SEQ ID NO: 5809075 - DNA, 25 bp, Homo sapien
ccgcctcgccttacccaagccgagg

SEQ ID NO: 5809076 - DNA, 25 bp, Homo sapien
aagccaccttccaggtagaacgccc

SEQ ID NO: 5809077 - DNA, 25 bp, Homo sapien
caggcataggccgagcgcaccgcgc

SEQ ID NO: 5809078 - DNA, 25 bp, Homo sapien
tcgacagattgagcttctgcataag

SEQ ID NO: 5809079 - DNA, 25 bp, Homo sapien
gtcaatgaatctctctcaatgaagc

SEQ ID NO: 5809080 - DNA, 25 bp, Homo sapien
ggggatttgcttgtatttaaactct

SEQ ID NO: 5809081 - DNA, 25 bp, Homo sapien
gactcgtatagctcctgcggccggc

SEQ ID NO: 5809082 - DNA, 25 bp, Homo sapien
aaacaaacactgtcaagtgattcaa

SEQ ID NO: 5809083 - DNA, 25 bp, Homo sapien
caattatatagtcagttccagatgc

SEQ ID NO: 5809084 - DNA, 25 bp, Homo sapien
acccatgaagttgaagttaggggat

SEQ ID NO: 5809085 - DNA, 25 bp, Homo sapien
caaaaggaaacagccttacaaggcc

SEQ ID NO: 5809086 - DNA, 25 bp, Homo sapien
gggatatgttggattttttcatttt

SEQ ID NO: 5809087 - DNA, 25 bp, Homo sapien
cactgtgtcggtgccacagcgccgg

SEQ ID NO: 5809088 - DNA, 25 bp, Homo sapien
tatttacaataatcaaatggagtat

SEQ ID NO: 5809089 - DNA, 25 bp, Homo sapien
gagagtccacctggtatacattctg

SEQ ID NO: 5809090 - DNA, 25 bp, Homo sapien
ccggaggttctctctgcacccagct

SEQ ID NO: 5809091 - DNA, 25 bp, Homo sapien
gaaactgctgaagggccagacacat

SEQ ID NO: 5809092 - DNA, 25 bp, Homo sapien
gctgccaagagaaactgctgaaggg

SEQ ID NO: 5809093 - DNA, 25 bp, Homo sapien
cgcccctcggggcaggcataggccg

SEQ ID NO: 5809094 - DNA, 25 bp, Homo sapien
gtgattcaagatcaaatatttacaa

SEQ ID NO: 5809095 - DNA, 25 bp, Homo sapien
atctctctgttagtattaaccaatt

SEQ ID NO: 5809096 - DNA, 25 bp, Homo sapien
actgaagccaccttccaggtagaac

SEQ ID NO: 5809097 - DNA, 25 bp, Homo sapien
gtatctatacagcatgtcctgttat

SEQ ID NO: 5809098 - DNA, 25 bp, Homo sapien
ctcaatgaagctgcccagatagttt

SEQ ID NO: 5809099 - DNA, 25 bp, Homo sapien
gtcctcgccgcgcgtgaagagcgcg

SEQ ID NO: 5809100 - DNA, 25 bp, Homo sapien
aagtagaggaagggcaagatctcca

SEQ ID NO: 5809101 - DNA, 25 bp, Homo sapien
tttaagaagtggcatactgctcttt

SEQ ID NO: 5809102 - DNA, 25 bp, Homo sapien
tgactgagcggctaatgccagccaa

SEQ ID NO: 5809103 - DNA, 25 bp, Homo sapien
gcgcaccgcgcgcgaagctgccgct

SEQ ID NO: 5809104 - DNA, 25 bp, Homo sapien
atgctgccaagagaaactgctgaag

SEQ ID NO: 5809105 - DNA, 25 bp, Homo sapien
gcggactaccatccgagtctgttgc

SEQ ID NO: 5809106 - DNA, 25 bp, Homo sapien
atggggatttgcttgtatttaaact

SEQ ID NO: 5809107 - DNA, 25 bp, Homo sapien
ttttgacacctggggccacacacaa

SEQ ID NO: 5809108 - DNA, 25 bp, Homo sapien
atttaaactctcctgcgttctcaaa

SEQ ID NO: 5809109 - DNA, 25 bp, Homo sapien
gagaactcggcttggaacttactga

SEQ ID NO: 5809110 - DNA, 25 bp, Homo sapien
ttccagtcgctgctgctctcgtcgt

SEQ ID NO: 5809111 - DNA, 25 bp, Homo sapien
tcaagtgattcaagatcaaatattt

SEQ ID NO: 5809112 - DNA, 25 bp, Homo sapien
gtctgttgcactattggggtctcgg

SEQ ID NO: 5809113 - DNA, 25 bp, Homo sapien
gatggccgactcgatgtgcgacgac

SEQ ID NO: 5809114 - DNA, 25 bp, Homo sapien
ctgtacacatgggtacagagcaaac

SEQ ID NO: 5809115 - DNA, 25 bp, Homo sapien
agcatgtcctgttattccaaagaga

SEQ ID NO: 5809116 - DNA, 25 bp, Homo sapien
aggccctaaagaacacatgctccta

SEQ ID NO: 5809117 - DNA, 25 bp, Homo sapien
agtgactgagcggctaatgccagcc

SEQ ID NO: 5809118 - DNA, 25 bp, Homo sapien
tagtgtcaatgaatctctctcaatg

SEQ ID NO: 5809119 - DNA, 25 bp, Homo sapien
ggcagacgagacagaagtaaagccg

SEQ ID NO: 5809120 - DNA, 25 bp, Homo sapien
caaggccctaaagaacacatgctcc

SEQ ID NO: 5809121 - DNA, 25 bp, Homo sapien
cctcggggcaggcataggccgagcg

SEQ ID NO: 5809122 - DNA, 25 bp, Homo sapien
tgttgtcacatgggctgctgagtcc

SEQ ID NO: 5809123 - DNA, 25 bp, Homo sapien
gaaccctgttgtcacatgggctgct

SEQ ID NO: 5809124 - DNA, 25 bp, Homo sapien
agcaatgtaccaagacaccacagtt

SEQ ID NO: 5809125 - DNA, 25 bp, Homo sapien
gaagtcctcgaatcccagtccctgc

SEQ ID NO: 5809126 - DNA, 25 bp, Homo sapien
cattttgacacctggggccacacac

SEQ ID NO: 5809127 - DNA, 25 bp, Homo sapien
gtcgtagagcaccactgtgtcggtg

SEQ ID NO: 5809128 - DNA, 25 bp, Homo sapien
ctcgaagtccagcagctgacccatg

SEQ ID NO: 5809129 - DNA, 25 bp, Homo sapien
atacagcatgtcctgttattccaaa

SEQ ID NO: 5809130 - DNA, 25 bp, Homo sapien
cgagctgctgctacacgagccgtct

SEQ ID NO: 5809131 - DNA, 25 bp, Homo sapien
agctgcgggagagggcggggtgcct

SEQ ID NO: 5809132 - DNA, 25 bp, Homo sapien
cagcgccgggtgaagcggtcccggt

SEQ ID NO: 5809133 - DNA, 25 bp, Homo sapien
ctaccctatgcgcctggaagtcctc

SEQ ID NO: 5809134 - DNA, 25 bp, Homo sapien
acagcatgtcctgttattccaaaga

SEQ ID NO: 5809135 - DNA, 25 bp, Homo sapien
aatatttacaataatcaaatggagt

SEQ ID NO: 5809136 - DNA, 25 bp, Homo sapien
aagagaaactgctgaagggccagac

SEQ ID NO: 5809137 - DNA, 25 bp, Homo sapien
caattcaaacaaacactgtcaagtg

SEQ ID NO: 5809138 - DNA, 25 bp, Homo sapien
gcaggttacccttctgcaggcgccg

SEQ ID NO: 5809139 - DNA, 25 bp, Homo sapien
ggggtctttcacgtagattgcagag

SEQ ID NO: 5809140 - DNA, 25 bp, Homo sapien
cgagctgcgggagagggcggggtgc

SEQ ID NO: 5809141 - DNA, 25 bp, Homo sapien
gattggtctcgcaatgcagggagaa

SEQ ID NO: 5809142 - DNA, 25 bp, Homo sapien
gactcgatttgctatctcttggact

SEQ ID NO: 5809143 - DNA, 25 bp, Homo sapien
gctgcagccgctggctcttagtgtc

SEQ ID NO: 5809144 - DNA, 25 bp, Homo sapien
atgttggattttttcattttgacaa

SEQ ID NO: 5809145 - DNA, 25 bp, Homo sapien
cgccttacccaagccgaggctagcg

SEQ ID NO: 5809146 - DNA, 25 bp, Homo sapien
gctactgagaggggaggaaaaaaag

SEQ ID NO: 5809147 - DNA, 25 bp, Homo sapien
aaatccaattaattcggactccgtg

SEQ ID NO: 5809148 - DNA, 25 bp, Homo sapien
gggtgacgttcaagatgtacttgat

SEQ ID NO: 5809149 - DNA, 25 bp, Homo sapien
acagaagtaaagccggaggttctct

SEQ ID NO: 5809150 - DNA, 25 bp, Homo sapien
aaccttgtctagtacagacagctgg

SEQ ID NO: 5809151 - DNA, 25 bp, Homo sapien
cagtccatcagcagcagccgctcgt

SEQ ID NO: 5809152 - DNA, 25 bp, Homo sapien
cacgttgatggccgactcgatgtgc

SEQ ID NO: 5809153 - DNA, 25 bp, Homo sapien
tgggaaggaaggctggctgttggac

SEQ ID NO: 5809154 - DNA, 25 bp, Homo sapien
ttacccaagccgaggctagcggttg

SEQ ID NO: 5809155 - DNA, 25 bp, Homo sapien
atctctctcaatgaagctgcccaga

SEQ ID NO: 5809156 - DNA, 25 bp, Homo sapien
caaggctgcacctcaaatctacccg

SEQ ID NO: 5809157 - DNA, 25 bp, Homo sapien
acgccaccgtcttgctgatcgccat

SEQ ID NO: 5809158 - DNA, 25 bp, Homo sapien
tgcaaaattgaattagtcttcattg

SEQ ID NO: 5809159 - DNA, 25 bp, Homo sapien
agggcacgggtctgagcgtatctat

SEQ ID NO: 5809160 - DNA, 25 bp, Homo sapien
ttgggggtgacgttcaagatgtact

SEQ ID NO: 5809161 - DNA, 25 bp, Homo sapien
atgaatctctctcaatgaagctgcc

SEQ ID NO: 5809162 - DNA, 25 bp, Homo sapien
ggcttggaacttactgaagccacct

SEQ ID NO: 5809163 - DNA, 25 bp, Homo sapien
gagggcggggtgcctaccagacgcc

SEQ ID NO: 5809164 - DNA, 25 bp, Homo sapien
gtcccggtcctcgccgcgcgtgaag

SEQ ID NO: 5809165 - DNA, 25 bp, Homo sapien
gttacccttctgcaggcgccgcagc

SEQ ID NO: 5809166 - DNA, 25 bp, Homo sapien
cagcccgagcaccgactcgccgccc

SEQ ID NO: 5809167 - DNA, 25 bp, Homo sapien
ctattggggtctcggtcaaggtcag

SEQ ID NO: 5809168 - DNA, 25 bp, Homo sapien
gcttctgcataaggtaagccacagt

SEQ ID NO: 5809169 - DNA, 25 bp, Homo sapien
tcggggcaggcataggccgagcgca

SEQ ID NO: 5809170 - DNA, 25 bp, Homo sapien
ttgacacctggggccacacacaaag

SEQ ID NO: 5809171 - DNA, 25 bp, Homo sapien
ccatccgagtctgttgcactattgg

SEQ ID NO: 5809172 - DNA, 25 bp, Homo sapien
tactgcctgtatctatacagcatgt

SEQ ID NO: 5809173 - DNA, 25 bp, Homo sapien
gtttttgttcctccccagtgaatga

SEQ ID NO: 5809174 - DNA, 25 bp, Homo sapien
ttcaagatcaaatatttacaataat

SEQ ID NO: 5809175 - DNA, 25 bp, Homo sapien
cccagctgcagccgctggctcttag

SEQ ID NO: 5809176 - DNA, 25 bp, Homo sapien
cacccagctgcagccgctggctctt

SEQ ID NO: 5809177 - DNA, 25 bp, Homo sapien
gctggaaccctgttgtcacatgggc

SEQ ID NO: 5809178 - DNA, 25 bp, Homo sapien
cagactcgatgtccgaggaagagtc

SEQ ID NO: 5809179 - DNA, 25 bp, Homo sapien
tgaagagcgcgcgcaccggcaggtt

SEQ ID NO: 5809180 - DNA, 25 bp, Homo sapien
ggtggagtctttggcacagcccaag

SEQ ID NO: 5809181 - DNA, 25 bp, Homo sapien
gcttctaatccctccctccaaggct

SEQ ID NO: 5809182 - DNA, 25 bp, Homo sapien
caaagaaagcagcccagctgatgct

SEQ ID NO: 5809183 - DNA, 25 bp, Homo sapien
cccggcagccctcgtccttgagctt

SEQ ID NO: 5809184 - DNA, 25 bp, Homo sapien
actgggaaggaaggctggctgttgg

SEQ ID NO: 5809185 - DNA, 25 bp, Homo sapien
ttccaggtagaacgcccggcagccc

SEQ ID NO: 5809186 - DNA, 25 bp, Homo sapien
tagattggtctcgcaatgcagggag

SEQ ID NO: 5809187 - DNA, 25 bp, Homo sapien
ggataatttcttttaagcccatcaa

SEQ ID NO: 5809188 - DNA, 25 bp, Homo sapien
tctccccggattatttaagactcga

SEQ ID NO: 5809189 - DNA, 25 bp, Homo sapien
tactgagaggggaggaaaaaaagtc

SEQ ID NO: 5809190 - DNA, 25 bp, Homo sapien
aatcccagtccctgcatgggtaggc

SEQ ID NO: 5809191 - DNA, 25 bp, Homo sapien
ctccagctgctcgttgagccacgcc

SEQ ID NO: 5809192 - DNA, 25 bp, Homo sapien
tcgtcgtagagcaccactgtgtcgg

SEQ ID NO: 5809193 - DNA, 25 bp, Homo sapien
gctcctaccctatcatttggttcta

SEQ ID NO: 5809194 - DNA, 25 bp, Homo sapien
aagccgaggctagcggttggggcag

SEQ ID NO: 5809195 - DNA, 25 bp, Homo sapien
cgcctggaagtcctcgaatcccagt

SEQ ID NO: 5809196 - DNA, 25 bp, Homo sapien
tcgcaatgcagggagaactcggctt

SEQ ID NO: 5809197 - DNA, 25 bp, Homo sapien
cagctggtgtcattttgacacctgg

SEQ ID NO: 5809198 - DNA, 25 bp, Homo sapien
cggctaatgccagccaagcaatgta

SEQ ID NO: 5809199 - DNA, 25 bp, Homo sapien
gttagtattaaccaattccgcactt

SEQ ID NO: 5809200 - DNA, 25 bp, Homo sapien
cactattggggtctcggtcaaggtc

SEQ ID NO: 5809201 - DNA, 25 bp, Homo sapien
tcgccatttccgacgcgaagggcac

SEQ ID NO: 5809202 - DNA, 25 bp, Homo sapien
cagctgcagccgctggctcttagtg

SEQ ID NO: 5809203 - DNA, 25 bp, Homo sapien
tgccgaattcctccaacacgtccaa

SEQ ID NO: 5809204 - DNA, 25 bp, Homo sapien
tggcctcagggaaaaactgggacag

SEQ ID NO: 5809205 - DNA, 25 bp, Homo sapien
gcagccctcgtccttgagcttcttg

SEQ ID NO: 5809206 - DNA, 25 bp, Homo sapien
cgttccagtcgctgctgctctcgtc

SEQ ID NO: 5809207 - DNA, 25 bp, Homo sapien
agcaaacctactgcctgtatctata

SEQ ID NO: 5809208 - DNA, 25 bp, Homo sapien
gagagggcggggtgcctaccagacg

SEQ ID NO: 5809209 - DNA, 25 bp, Homo sapien
cgggcttcatctatgaaagaaatgg

SEQ ID NO: 5809210 - DNA, 25 bp, Homo sapien
atttggttctaccctatgcgcctgg

SEQ ID NO: 5809211 - DNA, 25 bp, Homo sapien
cagccttacaaggccctaaagaaca

SEQ ID NO: 5809212 - DNA, 25 bp, Homo sapien
accgactcgccgcccgtattctcgt

SEQ ID NO: 5809213 - DNA, 25 bp, Homo sapien
cgactcgccgcccgtattctcgttc

SEQ ID NO: 5809214 - DNA, 25 bp, Homo sapien
aagtgattcaagatcaaatatttac

SEQ ID NO: 5809215 - DNA, 25 bp, Homo sapien
gacagctggtgtcattttgacacct

SEQ ID NO: 5809216 - DNA, 25 bp, Homo sapien
aaatctctctgttagtattaaccaa

SEQ ID NO: 5809217 - DNA, 25 bp, Homo sapien
ggctgtacacatgggtacagagcaa

SEQ ID NO: 5809218 - DNA, 25 bp, Homo sapien
gagaggggaggaaaaaaagtctagc

SEQ ID NO: 5809219 - DNA, 25 bp, Homo sapien
ggcatactgctctttctccctttgg

SEQ ID NO: 5809220 - DNA, 25 bp, Homo sapien
ttgaagttaggggatatgttggatt

SEQ ID NO: 5809221 - DNA, 25 bp, Homo sapien
gtcagttccagatgcaaaaggaaac

SEQ ID NO: 5809222 - DNA, 25 bp, Homo sapien
ttgatggccgactcgatgtgcgacg

SEQ ID NO: 5809223 - DNA, 25 bp, Homo sapien
gcgaagggcacgggtctgagcgtat

SEQ ID NO: 5809224 - DNA, 25 bp, Homo sapien
gacacattccagcaaggaggggtgt

SEQ ID NO: 5809225 - DNA, 25 bp, Homo sapien
gcggttggggcagacgagacagaag

SEQ ID NO: 5809226 - DNA, 25 bp, Homo sapien
ctcgatgtccgaggaagagtcagag

SEQ ID NO: 5809227 - DNA, 25 bp, Homo sapien
ctgcgttctcaaagagattcggcaa

SEQ ID NO: 5809228 - DNA, 25 bp, Homo sapien
ttggttctaccctatgcgcctggaa

SEQ ID NO: 5809229 - DNA, 25 bp, Homo sapien
gccttacaaggccctaaagaacaca

SEQ ID NO: 5809230 - DNA, 25 bp, Homo sapien
tgacaatgtcataggcatcgttcat

SEQ ID NO: 5809231 - DNA, 25 bp, Homo sapien
tccagtgatccgagatggggatttg

SEQ ID NO: 5809232 - DNA, 25 bp, Homo sapien
tcctaccctatcatttggttctacc

SEQ ID NO: 5809233 - DNA, 25 bp, Homo sapien
cagttccagatgcaaaaggaaacag

SEQ ID NO: 5809234 - DNA, 25 bp, Homo sapien
tccctgcatgggtaggctgtacaca

SEQ ID NO: 5809235 - DNA, 25 bp, Homo sapien
gaaaaaacaaacacaattcaaacaa

SEQ ID NO: 5809236 - DNA, 25 bp, Homo sapien
cagattgagcttctgcataaggtaa

SEQ ID NO: 5809237 - DNA, 25 bp, Homo sapien
gggatggccacgttgatggccgact

SEQ ID NO: 5809238 - DNA, 25 bp, Homo sapien
gaacttactgaagccaccttccagg

SEQ ID NO: 5809239 - DNA, 25 bp, Homo sapien
gccatttccgacgcgaagggcacgg

SEQ ID NO: 5809240 - DNA, 25 bp, Homo sapien
ctctctgttagtattaaccaattcc

SEQ ID NO: 5809241 - DNA, 25 bp, Homo sapien
gcgcaccggcaggttacccttctgc

SEQ ID NO: 5809242 - DNA, 25 bp, Homo sapien
tcaaacaaacactgtcaagtgattc

SEQ ID NO: 5809243 - DNA, 25 bp, Homo sapien
tgaagacaattatatagtcagttcc

SEQ ID NO: 5809244 - DNA, 25 bp, Homo sapien
gtggcatactgctctttctcccttt

SEQ ID NO: 5809245 - DNA, 25 bp, Homo sapien
ctctgttagtattaaccaattccgc

SEQ ID NO: 5809246 - DNA, 25 bp, Homo sapien
taagccacagtcacagtgactgagc

SEQ ID NO: 5809247 - DNA, 25 bp, Homo sapien
cgatgtccgaggaagagtcagagct

SEQ ID NO: 5809248 - DNA, 25 bp, Homo sapien
tatgcgcctggaagtcctcgaatcc

SEQ ID NO: 5809249 - DNA, 25 bp, Homo sapien
tggacagcggactaccatccgagtc

SEQ ID NO: 5809250 - DNA, 25 bp, Homo sapien
tcttttaagcccatcaaaggaaaaa

SEQ ID NO: 5809251 - DNA, 25 bp, Homo sapien
atctatacagcatgtcctgttattc

SEQ ID NO: 5809252 - DNA, 25 bp, Homo sapien
tactgctctttctccctttggataa

SEQ ID NO: 5809253 - DNA, 25 bp, Homo sapien
caagatcaaatatttacaataatca

SEQ ID NO: 5809254 - DNA, 25 bp, Homo sapien
agcggcttctaatccctccctccaa

SEQ ID NO: 5809255 - DNA, 25 bp, Homo sapien
agaagtaaagccggaggttctctct

SEQ ID NO: 5809256 - DNA, 25 bp, Homo sapien
ctgctgctacacgagccgtctagat

SEQ ID NO: 5809257 - DNA, 25 bp, Homo sapien
cctcgccgcgcgtgaagagcgcgcg

SEQ ID NO: 5809258 - DNA, 25 bp, Homo sapien
tcctcgaatcccagtccctgcatgg

SEQ ID NO: 5809259 - DNA, 25 bp, Homo sapien
gcataaggtaagccacagtcacagt

SEQ ID NO: 5809260 - DNA, 25 bp, Homo sapien
aaattgaattagtcttcattgaaga

SEQ ID NO: 5809261 - DNA, 25 bp, Homo sapien
tcggagcggggtttaattccgcctc

SEQ ID NO: 5809262 - DNA, 25 bp, Homo sapien
atttaagactcgatttgctatctct

SEQ ID NO: 5809263 - DNA, 25 bp, Homo sapien
agagattcggcaaattgggggtgac

SEQ ID NO: 5809264 - DNA, 25 bp, Homo sapien
tcctgcggccggcagtccatcagca

SEQ ID NO: 5809265 - DNA, 25 bp, Homo sapien
cagttcttgccccgggcttcatcta

SEQ ID NO: 5809266 - DNA, 25 bp, Homo sapien
ccatgaagttgaagttaggggatat

SEQ ID NO: 5809267 - DNA, 25 bp, Homo sapien
ttcggactccgtgctactgagaggg

SEQ ID NO: 5809268 - DNA, 25 bp, Homo sapien
ttggggcagacgagacagaagtaaa

SEQ ID NO: 5809269 - DNA, 25 bp, Homo sapien
gccagccaagcaatgtaccaagaca

SEQ ID NO: 5809270 - DNA, 25 bp, Homo sapien
ctgctctttctccctttggataatt

SEQ ID NO: 5809271 - DNA, 25 bp, Homo sapien
gtatttaaactctcctgcgttctca

SEQ ID NO: 5809272 - DNA, 25 bp, Homo sapien
tctttcacgtagattgcagagagtc

SEQ ID NO: 5809273 - DNA, 25 bp, Homo sapien
ctggctgttggacagcggactacca

SEQ ID NO: 5809274 - DNA, 25 bp, Homo sapien
gtagaacgcccggcagccctcgtcc

SEQ ID NO: 5809275 - DNA, 25 bp, Homo sapien
cctactgcctgtatctatacagcat

SEQ ID NO: 5809276 - DNA, 25 bp, Homo sapien
cgactcgatgtgcgacgactcgtat

SEQ ID NO: 5809277 - DNA, 25 bp, Homo sapien
accaattccgcacttggtaaccttg

SEQ ID NO: 5809278 - DNA, 25 bp, Homo sapien
cttggtaaccttgtctagtacagac

SEQ ID NO: 5809279 - DNA, 25 bp, Homo sapien
tctcggagcggggtttaattccgcc

SEQ ID NO: 5809280 - DNA, 25 bp, Homo sapien
agcagcccgagcaccgactcgccgc

SEQ ID NO: 5809281 - DNA, 25 bp, Homo sapien
tttgttctgttttaagaagtggcat

SEQ ID NO: 5809282 - DNA, 25 bp, Homo sapien
ggttctaccctatgcgcctggaagt

SEQ ID NO: 5809283 - DNA, 25 bp, Homo sapien
atggagtatcagattttttttccaa

SEQ ID NO: 5809284 - DNA, 25 bp, Homo sapien
tcctgcgttctcaaagagattcggc

SEQ ID NO: 5809285 - DNA, 25 bp, Homo sapien
caaacctactgcctgtatctataca

SEQ ID NO: 5809286 - DNA, 25 bp, Homo sapien
gccacagcgccgggtgaagcggtcc

SEQ ID NO: 5809287 - DNA, 25 bp, Homo sapien
cgagatggggatttgcttgtattta

SEQ ID NO: 5809288 - DNA, 25 bp, Homo sapien
cagcggactaccatccgagtctgtt

SEQ ID NO: 5809289 - DNA, 25 bp, Homo sapien
agttggtggagtctttggcacagcc

SEQ ID NO: 5809290 - DNA, 25 bp, Homo sapien
gtctagtacagacagctggtgtcat

SEQ ID NO: 5809291 - DNA, 25 bp, Homo sapien
cgttcatcgacagattgagcttctg

SEQ ID NO: 5809292 - DNA, 25 bp, Homo sapien
tatcatgggggtcgagctgcgggag

SEQ ID NO: 5809293 - DNA, 25 bp, Homo sapien
taccatccgagtctgttgcactatt

SEQ ID NO: 5809294 - DNA, 25 bp, Homo sapien
tctggttggaaggggtggtaaaata

SEQ ID NO: 5809295 - DNA, 25 bp, Homo sapien
gtgtggggtctttcacgtagattgc

SEQ ID NO: 5809296 - DNA, 25 bp, Homo sapien
tggttggaaggggtggtaaaataca

SEQ ID NO: 5809297 - DNA, 25 bp, Homo sapien
ccacgccaccgtcttgctgatcgcc

SEQ ID NO: 5809298 - DNA, 25 bp, Homo sapien
cctccctccaaggctgcacctcaaa

SEQ ID NO: 5809299 - DNA, 25 bp, Homo sapien
agagcaaacctactgcctgtatcta

SEQ ID NO: 5809300 - DNA, 25 bp, Homo sapien
ggctcctctatatgcaaaattgaat

SEQ ID NO: 5809301 - DNA, 25 bp, Homo sapien
ctgttttaagaagtggcatactgct

SEQ ID NO: 5809302 - DNA, 25 bp, Homo sapien
tcaaatggagtatcagatttttttt

SEQ ID NO: 5809303 - DNA, 25 bp, Homo sapien
tgcagagagtccacctggtatacat

SEQ ID NO: 5809304 - DNA, 25 bp, Homo sapien
gatgtgcgacgactcgtatagctcc

SEQ ID NO: 5809305 - DNA, 25 bp, Homo sapien
gctcctgcggccggcagtccatcag

SEQ ID NO: 5809306 - DNA, 25 bp, Homo sapien
gggagagggcggggtgcctaccaga

SEQ ID NO: 5809307 - DNA, 25 bp, Homo sapien
ctcgtatagctcctgcggccggcag

SEQ ID NO: 5809308 - DNA, 25 bp, Homo sapien
tgcacctcaaatctacccgggcgtc

SEQ ID NO: 5809309 - DNA, 25 bp, Homo sapien
tctcgcaatgcagggagaactcggc

SEQ ID NO: 5809310 - DNA, 25 bp, Homo sapien
gcggccggcagtccatcagcagcag

SEQ ID NO: 5809311 - DNA, 25 bp, Homo sapien
ctcgaatcccagtccctgcatgggt

SEQ ID NO: 5809312 - DNA, 25 bp, Homo sapien
tcggcaaattgggggtgacgttcaa

SEQ ID NO: 5809313 - DNA, 25 bp, Homo sapien
gggggtcgagctgcgggagagggcg

SEQ ID NO: 5809314 - DNA, 25 bp, Homo sapien
gcaccggcaggttacccttctgcag

SEQ ID NO: 5809315 - DNA, 25 bp, Homo sapien
ggtctgagcgtatctatcatggggg

SEQ ID NO: 5809316 - DNA, 25 bp, Homo sapien
ctcggtcaaggtcagactcgatgtc

SEQ ID NO: 5809317 - DNA, 25 bp, Homo sapien
cttctgcaggcgccgcagcatgatg

SEQ ID NO: 5809318 - DNA, 25 bp, Homo sapien
tgtcctgttattccaaagagaatgg

SEQ ID NO: 5809319 - DNA, 25 bp, Homo sapien
gcccagctccagctgctcgttgagc

SEQ ID NO: 5809320 - DNA, 25 bp, Homo sapien
gagcaccactgtgtcggtgccacag

SEQ ID NO: 5809321 - DNA, 25 bp, Homo sapien
atgctcctaccctatcatttggttc

SEQ ID NO: 5809322 - DNA, 25 bp, Homo sapien
gtcacatgggctgctgagtcccagc

SEQ ID NO: 5809323 - DNA, 25 bp, Homo sapien
ttcaagatgtacttgatgccgaatt

SEQ ID NO: 5809324 - DNA, 25 bp, Homo sapien
ttaggggatatgttggattttttca

SEQ ID NO: 5809325 - DNA, 25 bp, Homo sapien
cctggggccacacacaaagaaagca

SEQ ID NO: 5809326 - DNA, 25 bp, Homo sapien
ggaggttctctctgcacccagctgc

SEQ ID NO: 5809327 - DNA, 25 bp, Homo sapien
gcccaagtagaggaagggcaagatc

SEQ ID NO: 5809328 - DNA, 25 bp, Homo sapien
aaggaaggctggctgttggacagcg

SEQ ID NO: 5809329 - DNA, 25 bp, Homo sapien
tatagtcagttccagatgcaaaagg

SEQ ID NO: 5809330 - DNA, 25 bp, Homo sapien
tggaaccctgttgtcacatgggctg

SEQ ID NO: 5809331 - DNA, 25 bp, Homo sapien
gctgatccgcaggcccccgagcccc

SEQ ID NO: 5809332 - DNA, 25 bp, Homo sapien
gtgtcggtgccacagcgccgggtga

SEQ ID NO: 5809333 - DNA, 25 bp, Homo sapien
cagcagcagccgctcgttgcccagc

SEQ ID NO: 5809334 - DNA, 25 bp, Homo sapien
attccgcacttggtaaccttgtcta

SEQ ID NO: 5809335 - DNA, 25 bp, Homo sapien
cagagctgaaatctctctttggctc

SEQ ID NO: 5809336 - DNA, 25 bp, Homo sapien
ccttgtctagtacagacagctggtg

SEQ ID NO: 5809337 - DNA, 25 bp, Homo sapien
tctttctccctttggataatttctt

SEQ ID NO: 5809338 - DNA, 25 bp, Homo sapien
gggtcgagctgcgggagagggcggg

SEQ ID NO: 5809339 - DNA, 25 bp, Homo sapien
tgaagggccagacacattccagcaa

SEQ ID NO: 5809340 - DNA, 25 bp, Homo sapien
acaccacagttcttgccccgggctt

SEQ ID NO: 5809341 - DNA, 25 bp, Homo sapien
cagccaagcaatgtaccaagacacc

SEQ ID NO: 5809342 - DNA, 25 bp, Homo sapien
ggcaagatctccactgggaaggaag

SEQ ID NO: 5809343 - DNA, 25 bp, Homo sapien
ccagctccagctgctcgttgagcca

SEQ ID NO: 5809344 - DNA, 25 bp, Homo sapien
gctaatgccagccaagcaatgtacc

SEQ ID NO: 5809345 - DNA, 25 bp, Homo sapien
tttggctccagtgatccgagatggg

SEQ ID NO: 5809346 - DNA, 25 bp, Homo sapien
gttccagatgcaaaaggaaacagcc

SEQ ID NO: 5809347 - DNA, 25 bp, Homo sapien
aggttttggctccagtgatccgaga

SEQ ID NO: 5809348 - DNA, 25 bp, Homo sapien
tccgacgcgaagggcacgggtctga

SEQ ID NO: 5809349 - DNA, 25 bp, Homo sapien
tgcaggcgccgcagcatgatgcccg

SEQ ID NO: 5809350 - DNA, 25 bp, Homo sapien
tctctctgcacccagctgcagccgc

SEQ ID NO: 5809351 - DNA, 25 bp, Homo sapien
ccaagagaaactgctgaagggccag

SEQ ID NO: 5809352 - DNA, 25 bp, Homo sapien
aaagagattcggcaaattgggggtg

SEQ ID NO: 5809353 - DNA, 25 bp, Homo sapien
gatgcaaaaggaaacagccttacaa

SEQ ID NO: 5809354 - DNA, 25 bp, Homo sapien
agctgctgctacacgagccgtctag

SEQ ID NO: 5809355 - DNA, 25 bp, Homo sapien
aaatctctctttggctcctctatat

SEQ ID NO: 5809356 - DNA, 25 bp, Homo sapien
tttcttttaagcccatcaaaggaaa

SEQ ID NO: 5809357 - DNA, 25 bp, Homo sapien
tacaataatcaaatggagtatcaga

SEQ ID NO: 5809358 - DNA, 25 bp, Homo sapien
gtcagagctgatccgcaggcccccg

SEQ ID NO: 5809359 - DNA, 25 bp, Homo sapien
tgccgctctcggagcggggtttaat

SEQ ID NO: 5809360 - DNA, 25 bp, Homo sapien
aagctgccgctctcggagcggggtt

SEQ ID NO: 5809361 - DNA, 25 bp, Homo sapien
tagcggttggggcagacgagacaga

SEQ ID NO: 5809362 - DNA, 25 bp, Homo sapien
gctgctgtgctggaaccctgttgtc

SEQ ID NO: 5809363 - DNA, 25 bp, Homo sapien
acagtcacagtgactgagcggctaa

SEQ ID NO: 5809364 - DNA, 25 bp, Homo sapien
caaaggaaaaaacaaacacaattca

SEQ ID NO: 5809365 - DNA, 25 bp, Homo sapien
ccgggatggccacgttgatggccga

SEQ ID NO: 5809366 - DNA, 25 bp, Homo sapien
tgacccatgaagttgaagttagggg

SEQ ID NO: 5809367 - DNA, 25 bp, Homo sapien
gcggggtgcctaccagacgcccctc

SEQ ID NO: 5809368 - DNA, 25 bp, Homo sapien
actgtcaagtgattcaagatcaaat

SEQ ID NO: 5809369 - DNA, 25 bp, Homo sapien
gccgctcgttgcccagctccagctg

SEQ ID NO: 5809370 - DNA, 25 bp, Homo sapien
atgaagttgaagttaggggatatgt

SEQ ID NO: 5809371 - DNA, 25 bp, Homo sapien
gaaatggcctcagggaaaaactggg

SEQ ID NO: 5809372 - DNA, 25 bp, Homo sapien
ctagtacagacagctggtgtcattt

SEQ ID NO: 5809373 - DNA, 25 bp, Homo sapien
gctgacccatgaagttgaagttagg

SEQ ID NO: 5809374 - DNA, 25 bp, Homo sapien
tctagattggtctcgcaatgcaggg

SEQ ID NO: 5809375 - DNA, 25 bp, Homo sapien
tacccttctgcaggcgccgcagcat

SEQ ID NO: 5809376 - DNA, 25 bp, Homo sapien
tgatgctgccaagagaaactgctga

SEQ ID NO: 5809377 - DNA, 25 bp, Homo sapien
tccccggattatttaagactcgatt

SEQ ID NO: 5809378 - DNA, 25 bp, Homo sapien
aacctactgcctgtatctatacagc

SEQ ID NO: 5809379 - DNA, 25 bp, Homo sapien
gctctttctccctttggataatttc

SEQ ID NO: 5809380 - DNA, 25 bp, Homo sapien
ggcacgggtctgagcgtatctatca

SEQ ID NO: 5809381 - DNA, 25 bp, Homo sapien
acactgtcaagtgattcaagatcaa

SEQ ID NO: 5809382 - DNA, 25 bp, Homo sapien
taagaagtggcatactgctctttct

SEQ ID NO: 5809383 - DNA, 25 bp, Homo sapien
aggaaacagccttacaaggccctaa

SEQ ID NO: 5809384 - DNA, 25 bp, Homo sapien
gattttttttccaaactgataccac

SEQ ID NO: 5809385 - DNA, 25 bp, Homo sapien
gcgccgggtgaagcggtcccggtcc

SEQ ID NO: 5809386 - DNA, 25 bp, Homo sapien
catttccgacgcgaagggcacgggt

SEQ ID NO: 5809387 - DNA, 25 bp, Homo sapien
atagtttttgttcctccccagtgaa

SEQ ID NO: 5809388 - DNA, 25 bp, Homo sapien
aaggtaagccacagtcacagtgact

SEQ ID NO: 5809389 - DNA, 25 bp, Homo sapien
atttgcttgtatttaaactctcctg

SEQ ID NO: 5809390 - DNA, 25 bp, Homo sapien
agtgaatgaaatccaattaattcgg

SEQ ID NO: 5809391 - DNA, 25 bp, Homo sapien
ttaaactctcctgcgttctcaaaga

SEQ ID NO: 5809392 - DNA, 25 bp, Homo sapien
tctatatgcaaaattgaattagtct

SEQ ID NO: 5809393 - DNA, 25 bp, Homo sapien
ccgaattcctccaacacgtccaagt

SEQ ID NO: 5809394 - DNA, 25 bp, Homo sapien
taaccaattccgcacttggtaacct

SEQ ID NO: 5809395 - DNA, 25 bp, Homo sapien
ttctgttttaagaagtggcatactg

SEQ ID NO: 5809396 - DNA, 25 bp, Homo sapien
gtggggtctttcacgtagattgcag

SEQ ID NO: 5809397 - DNA, 25 bp, Homo sapien
aaagccggaggttctctctgcaccc

SEQ ID NO: 5809398 - DNA, 25 bp, Homo sapien
ggcgccgcagcatgatgcccgggat

SEQ ID NO: 5809399 - DNA, 25 bp, Homo sapien
tgatgcccgggatggccacgttgat

SEQ ID NO: 5809400 - DNA, 25 bp, Homo sapien
cggcagccctcgtccttgagcttct

SEQ ID NO: 5809401 - DNA, 25 bp, Homo sapien
aaagagaatggagcaaatctctctg

SEQ ID NO: 5809402 - DNA, 25 bp, Homo sapien
ctgttgcactattggggtctcggtc

SEQ ID NO: 5809403 - DNA, 25 bp, Homo sapien
gtattaaccaattccgcacttggta

SEQ ID NO: 5809404 - DNA, 25 bp, Homo sapien
agaatggagcaaatctctctgttag

SEQ ID NO: 5809405 - DNA, 25 bp, Homo sapien
tttaagcccatcaaaggaaaaaaca

SEQ ID NO: 5809406 - DNA, 25 bp, Homo sapien
cctgcatgggtaggctgtacacatg

SEQ ID NO: 5809407 - DNA, 25 bp, Homo sapien
gccaagcaatgtaccaagacaccac

SEQ ID NO: 5809408 - DNA, 25 bp, Homo sapien
cccatcaaaggaaaaaacaaacaca

SEQ ID NO: 5809409 - DNA, 25 bp, Homo sapien
aacggcggcgagctgctgctacacg

SEQ ID NO: 5809410 - DNA, 25 bp, Homo sapien
gagccccagcactggcaacggcggc

SEQ ID NO: 5809411 - DNA, 25 bp, Homo sapien
cggcaggttacccttctgcaggcgc

SEQ ID NO: 5809412 - DNA, 25 bp, Homo sapien
tgcagggagaactcggcttggaact

SEQ ID NO: 5809413 - DNA, 25 bp, Homo sapien
ctgcccagatagtttttgttcctcc

SEQ ID NO: 5809414 - DNA, 25 bp, Homo sapien
tcatctatgaaagaaatggcctcag

SEQ ID NO: 5809415 - DNA, 25 bp, Homo sapien
tgctgctctcgtcgtagagcaccac

SEQ ID NO: 5809416 - DNA, 25 bp, Homo sapien
cacagcgccgggtgaagcggtcccg

SEQ ID NO: 5809417 - DNA, 25 bp, Homo sapien
agtcccagcgtcctctcgaagtcca

SEQ ID NO: 5809418 - DNA, 25 bp, Homo sapien
gttttaagaagtggcatactgctct

SEQ ID NO: 5809419 - DNA, 25 bp, Homo sapien
tgcaaaaggaaacagccttacaagg

SEQ ID NO: 5809420 - DNA, 25 bp, Homo sapien
ggcgtctttctccccggattattta

SEQ ID NO: 5809421 - DNA, 25 bp, Homo sapien
tccttgagcttcttgagcagcagcc

SEQ ID NO: 5809422 - DNA, 25 bp, Homo sapien
ggagtatcagattttttttccaaac

SEQ ID NO: 5809423 - DNA, 25 bp, Homo sapien
tccctttggataatttcttttaagc

SEQ ID NO: 5809424 - DNA, 25 bp, Homo sapien
gtaccaagacaccacagttcttgcc

SEQ ID NO: 5809425 - DNA, 25 bp, Homo sapien
ggaaggctggctgttggacagcgga

SEQ ID NO: 5809426 - DNA, 25 bp, Homo sapien
gggggtgacgttcaagatgtacttg

SEQ ID NO: 5809427 - DNA, 25 bp, Homo sapien
tggattttttcattttgacaatgtc

SEQ ID NO: 5809428 - DNA, 25 bp, Homo sapien
gtgaagcggtcccggtcctcgccgc

SEQ ID NO: 5809429 - DNA, 25 bp, Homo sapien
gagtccacctggtatacattctggt

SEQ ID NO: 5809430 - DNA, 25 bp, Homo sapien
gtgctggaaccctgttgtcacatgg

SEQ ID NO: 5809431 - DNA, 25 bp, Homo sapien
tcgccgcgcgtgaagagcgcgcgca

SEQ ID NO: 5809432 - DNA, 25 bp, Homo sapien
ttgatgccgaattcctccaacacgt

SEQ ID NO: 5809433 - DNA, 25 bp, Homo sapien
aggaagggcaagatctccactggga

SEQ ID NO: 5809434 - DNA, 25 bp, Homo sapien
tggcaacggcggcgagctgctgcta

SEQ ID NO: 5809435 - DNA, 25 bp, Homo sapien
cctgttgtcacatgggctgctgagt

SEQ ID NO: 5809436 - DNA, 25 bp, Homo sapien
cgaatcccagtccctgcatgggtag

SEQ ID NO: 5809437 - DNA, 25 bp, Homo sapien
cagattttttttccaaactgatacc

SEQ ID NO: 5809438 - DNA, 25 bp, Homo sapien
gccacacacaaagaaagcagcccag

SEQ ID NO: 5809439 - DNA, 25 bp, Homo sapien
gttctctctgcacccagctgcagcc

SEQ ID NO: 5809440 - DNA, 25 bp, Homo sapien
gaaaaactgggacaggttttggctc

SEQ ID NO: 5809441 - DNA, 25 bp, Homo sapien
gtcttgctgatcgccatttccgacg

SEQ ID NO: 5809442 - DNA, 25 bp, Homo sapien
tccgagatggggatttgcttgtatt

SEQ ID NO: 5809443 - DNA, 25 bp, Homo sapien
cagatgcaaaaggaaacagccttac

SEQ ID NO: 5809444 - DNA, 25 bp, Homo sapien
aggtcagactcgatgtccgaggaag

SEQ ID NO: 5809445 - DNA, 25 bp, Homo sapien
ttcatcgacagattgagcttctgca

SEQ ID NO: 5809446 - DNA, 25 bp, Homo sapien
atcagcagcagccgctcgttgccca

SEQ ID NO: 5809447 - DNA, 25 bp, Homo sapien
gtctttggcacagcccaagtagagg

SEQ ID NO: 5809448 - DNA, 25 bp, Homo sapien
agcgtcctctcgaagtccagcagct

SEQ ID NO: 5809449 - DNA, 25 bp, Homo sapien
ttgccccgggcttcatctatgaaag

SEQ ID NO: 5809450 - DNA, 25 bp, Homo sapien
gatggccacgttgatggccgactcg

SEQ ID NO: 5809451 - DNA, 25 bp, Homo sapien
aaactgataccacaaatacagagct

SEQ ID NO: 5809452 - DNA, 25 bp, Homo sapien
tgagcgtatctatcatgggggtcga

SEQ ID NO: 5809453 - DNA, 25 bp, Homo sapien
gggcggggtgcctaccagacgcccc

SEQ ID NO: 5809454 - DNA, 25 bp, Homo sapien
aaaaaagtctagcggcttctaatcc

SEQ ID NO: 5809455 - DNA, 25 bp, Homo sapien
aacacgtccaagttggtggagtctt

SEQ ID NO: 5809456 - DNA, 25 bp, Homo sapien
gaatctctctcaatgaagctgccca

SEQ ID NO: 5809457 - DNA, 25 bp, Homo sapien
ctgctctcgtcgtagagcaccactg

SEQ ID NO: 5809458 - DNA, 25 bp, Homo sapien
attgaattagtcttcattgaagaca

SEQ ID NO: 5809459 - DNA, 25 bp, Homo sapien
cgtgaagagcgcgcgcaccggcagg

SEQ ID NO: 5809460 - DNA, 25 bp, Homo sapien
gtcattttgacacctggggccacac

SEQ ID NO: 5809461 - DNA, 25 bp, Homo sapien
ccctcgtccttgagcttcttgagca

SEQ ID NO: 5809462 - DNA, 25 bp, Homo sapien
attgcagagagtccacctggtatac

SEQ ID NO: 5809463 - DNA, 25 bp, Homo sapien
tatcatttggttctaccctatgcgc

SEQ ID NO: 5809464 - DNA, 25 bp, Homo sapien
ggtaggctgtacacatgggtacaga

SEQ ID NO: 5809465 - DNA, 25 bp, Homo sapien
tacagctgctgtgctggaaccctgt

SEQ ID NO: 5809466 - DNA, 25 bp, Homo sapien
ctcgttccagtcgctgctgctctcg

SEQ ID NO: 5809467 - DNA, 25 bp, Homo sapien
cagacagctggtgtcattttgacac

SEQ ID NO: 5809468 - DNA, 25 bp, Homo sapien
gccaccttccaggtagaacgcccgg

SEQ ID NO: 5809469 - DNA, 25 bp, Homo sapien
aatttcttttaagcccatcaaagga

SEQ ID NO: 5809470 - DNA, 25 bp, Homo sapien
tgggtaggctgtacacatgggtaca

SEQ ID NO: 5809471 - DNA, 25 bp, Homo sapien
agaggaagggcaagatctccactgg

SEQ ID NO: 5809472 - DNA, 25 bp, Homo sapien
ccccagtgaatgaaatccaattaat

SEQ ID NO: 5809473 - DNA, 25 bp, Homo sapien
ttctgcataaggtaagccacagtca

SEQ ID NO: 5809474 - DNA, 25 bp, Homo sapien
actgataccacaaatacagagctga

SEQ ID NO: 5809475 - DNA, 25 bp, Homo sapien
gaattcctccaacacgtccaagttg

SEQ ID NO: 5809476 - DNA, 25 bp, Homo sapien
tctcctgcgttctcaaagagattcg

SEQ ID NO: 5809477 - DNA, 25 bp, Homo sapien
cttcatctatgaaagaaatggcctc

SEQ ID NO: 5809478 - DNA, 25 bp, Homo sapien
gagcaccgactcgccgcccgtattc

SEQ ID NO: 5809479 - DNA, 25 bp, Homo sapien
ctgcataaggtaagccacagtcaca

SEQ ID NO: 5809480 - DNA, 25 bp, Homo sapien
cgtcctctcgaagtccagcagctga

SEQ ID NO: 5809481 - DNA, 25 bp, Homo sapien
gtctcggtcaaggtcagactcgatg

SEQ ID NO: 5809482 - DNA, 25 bp, Homo sapien
cgatttgctatctcttggactcagc

SEQ ID NO: 5809483 - DNA, 25 bp, Homo sapien
cctatgcgcctggaagtcctcgaat

SEQ ID NO: 5809484 - DNA, 25 bp, Homo sapien
ttgtatttaaactctcctgcgttct

SEQ ID NO: 5809485 - DNA, 25 bp, Homo sapien
gccgaggctagcggttggggcagac

SEQ ID NO: 5809486 - DNA, 25 bp, Homo sapien
ggacaggttttggctccagtgatcc

SEQ ID NO: 5809487 - DNA, 25 bp, Homo sapien
tgaaatccaattaattcggactccg

SEQ ID NO: 5809488 - DNA, 25 bp, Homo sapien
tacattctggttggaaggggtggta

SEQ ID NO: 5809489 - DNA, 25 bp, Homo sapien
tgaagccaccttccaggtagaacgc

SEQ ID NO: 5809490 - DNA, 25 bp, Homo sapien
aagggccagacacattccagcaagg

SEQ ID NO: 5809491 - DNA, 25 bp, Homo sapien
ttggctcctctatatgcaaaattga

SEQ ID NO: 5809492 - DNA, 25 bp, Homo sapien
gagctgaaatctctctttggctcct

SEQ ID NO: 5809493 - DNA, 25 bp, Homo sapien
aaaatacagctgctgtgctggaacc

SEQ ID NO: 5809494 - DNA, 25 bp, Homo sapien
gcctcgccttacccaagccgaggct

SEQ ID NO: 5809495 - DNA, 25 bp, Homo sapien
tcacagtgactgagcggctaatgcc

SEQ ID NO: 5809496 - DNA, 25 bp, Homo sapien
tggccgactcgatgtgcgacgactc

SEQ ID NO: 5809497 - DNA, 25 bp, Homo sapien
gcagcagcccgagcaccgactcgcc

SEQ ID NO: 5809498 - DNA, 25 bp, Homo sapien
ctttggataatttcttttaagccca

SEQ ID NO: 5809499 - DNA, 25 bp, Homo sapien
agacagaagtaaagccggaggttct

SEQ ID NO: 5809500 - DNA, 25 bp, Homo sapien
tttacaataatcaaatggagtatca

SEQ ID NO: 5809501 - DNA, 25 bp, Homo sapien
cgtatagctcctgcggccggcagtc

SEQ ID NO: 5809502 - DNA, 25 bp, Homo sapien
tggtgtcattttgacacctggggcc

SEQ ID NO: 5809503 - DNA, 25 bp, Homo sapien
ctcttagtgtcaatgaatctctctc

SEQ ID NO: 5809504 - DNA, 25 bp, Homo sapien
ctccgtgctactgagaggggaggaa

SEQ ID NO: 5809505 - DNA, 25 bp, Homo sapien
tctgcaggcgccgcagcatgatgcc

SEQ ID NO: 5809506 - DNA, 25 bp, Homo sapien
cagtgatccgagatggggatttgct

SEQ ID NO: 5809507 - DNA, 25 bp, Homo sapien
gcaaatctctctgttagtattaacc

SEQ ID NO: 5809508 - DNA, 25 bp, Homo sapien
cctccaaggctgcacctcaaatcta

SEQ ID NO: 5809509 - DNA, 25 bp, Homo sapien
aatcaaatggagtatcagatttttt

SEQ ID NO: 5809510 - DNA, 25 bp, Homo sapien
cacttggtaaccttgtctagtacag

SEQ ID NO: 5809511 - DNA, 25 bp, Homo sapien
tggggtctcggtcaaggtcagactc

SEQ ID NO: 5809512 - DNA, 25 bp, Homo sapien
cctggaagtcctcgaatcccagtcc

SEQ ID NO: 5809513 - DNA, 25 bp, Homo sapien
tgcacccagctgcagccgctggctc

SEQ ID NO: 5809514 - DNA, 25 bp, Homo sapien
cggcttctaatccctccctccaagg

SEQ ID NO: 5809515 - DNA, 25 bp, Homo sapien
ggaggaaaaaaagtctagcggcttc

SEQ ID NO: 5809516 - DNA, 25 bp, Homo sapien
tccctccctccaaggctgcacctca

SEQ ID NO: 5809517 - DNA, 25 bp, Homo sapien
tgggctgctgagtcccagcgtcctc

SEQ ID NO: 5809518 - DNA, 25 bp, Homo sapien
cacgggtctgagcgtatctatcatg

SEQ ID NO: 5809519 - DNA, 25 bp, Homo sapien
gtcaaggtcagactcgatgtccgag

SEQ ID NO: 5809520 - DNA, 25 bp, Homo sapien
ctgcggccggcagtccatcagcagc

SEQ ID NO: 5809521 - DNA, 25 bp, Homo sapien
gtacacatgggtacagagcaaacct

SEQ ID NO: 5809522 - DNA, 25 bp, Homo sapien
gagcggggtttaattccgcctcgcc

SEQ ID NO: 5809523 - DNA, 25 bp, Homo sapien
ttgagcagcagcccgagcaccgact

SEQ ID NO: 5809524 - DNA, 25 bp, Homo sapien
gccgctggctcttagtgtcaatgaa

SEQ ID NO: 5809525 - DNA, 25 bp, Homo sapien
tggccacgttgatggccgactcgat

SEQ ID NO: 5809526 - DNA, 25 bp, Homo sapien
gggtgaagcggtcccggtcctcgcc

SEQ ID NO: 5809527 - DNA, 25 bp, Homo sapien
gtgtcaatgaatctctctcaatgaa

SEQ ID NO: 5809528 - DNA, 25 bp, Homo sapien
tgctgatcgccatttccgacgcgaa

SEQ ID NO: 5809529 - DNA, 25 bp, Homo sapien
cccgggcttcatctatgaaagaaat

SEQ ID NO: 5809530 - DNA, 25 bp, Homo sapien
atgtaccaagacaccacagttcttg

SEQ ID NO: 5809531 - DNA, 25 bp, Homo sapien
cgttcaagatgtacttgatgccgaa

SEQ ID NO: 5809532 - DNA, 25 bp, Homo sapien
agcggtcccggtcctcgccgcgcgt

SEQ ID NO: 5809533 - DNA, 25 bp, Homo sapien
cttacaaggccctaaagaacacatg

SEQ ID NO: 5809534 - DNA, 25 bp, Homo sapien
gggccagacacattccagcaaggag

SEQ ID NO: 5809535 - DNA, 25 bp, Homo sapien
ccgcagcatgatgcccgggatggcc

SEQ ID NO: 5809536 - DNA, 25 bp, Homo sapien
gcagcatgatgcccgggatggccac

SEQ ID NO: 5809537 - DNA, 25 bp, Homo sapien
cacctcaaatctacccgggcgtctt

SEQ ID NO: 5809538 - DNA, 25 bp, Homo sapien
ggaggggtgtggggtctttcacgta

SEQ ID NO: 5809539 - DNA, 25 bp, Homo sapien
gttttgttctgttttaagaagtggc

SEQ ID NO: 5809540 - DNA, 25 bp, Homo sapien
cccgtattctcgttccagtcgctgc

SEQ ID NO: 5809541 - DNA, 25 bp, Homo sapien
gtcttcattgaagacaattatatag

SEQ ID NO: 5809542 - DNA, 25 bp, Homo sapien
aattcggactccgtgctactgagag

SEQ ID NO: 5809543 - DNA, 25 bp, Homo sapien
ctgctgagtcccagcgtcctctcga

SEQ ID NO: 5809544 - DNA, 25 bp, Homo sapien
cgacgcgaagggcacgggtctgagc

SEQ ID NO: 5809545 - DNA, 25 bp, Homo sapien
gacagcggactaccatccgagtctg

SEQ ID NO: 5809546 - DNA, 25 bp, Homo sapien
tatctatcatgggggtcgagctgcg

SEQ ID NO: 5809547 - DNA, 25 bp, Homo sapien
catgggctgctgagtcccagcgtcc

SEQ ID NO: 5809548 - DNA, 25 bp, Homo sapien
gaaagaaatggcctcagggaaaaac

SEQ ID NO: 5809549 - DNA, 25 bp, Homo sapien
ggctgttggacagcggactaccatc

SEQ ID NO: 5809550 - DNA, 25 bp, Homo sapien
tcaaagagattcggcaaattggggg

SEQ ID NO: 5809551 - DNA, 25 bp, Homo sapien
ttggtggagtctttggcacagccca

SEQ ID NO: 5809552 - DNA, 25 bp, Homo sapien
ccgagcaccgactcgccgcccgtat

SEQ ID NO: 5809553 - DNA, 25 bp, Homo sapien
ccagatagtttttgttcctccccag

SEQ ID NO: 5809554 - DNA, 25 bp, Homo sapien
aattccgcctcgccttacccaagcc

SEQ ID NO: 5809555 - DNA, 25 bp, Homo sapien
aaatggagtatcagattttttttcc

SEQ ID NO: 5809556 - DNA, 25 bp, Homo sapien
acatgggtacagagcaaacctactg

SEQ ID NO: 5809557 - DNA, 25 bp, Homo sapien
taggccgagcgcaccgcgcgcgaag

SEQ ID NO: 5809558 - DNA, 25 bp, Homo sapien
ggtctcgcaatgcagggagaactcg

SEQ ID NO: 5809559 - DNA, 25 bp, Homo sapien
gctccagtgatccgagatggggatt

SEQ ID NO: 5809560 - DNA, 25 bp, Homo sapien
ccagcaaggaggggtgtggggtctt

SEQ ID NO: 5809561 - DNA, 25 bp, Homo sapien
atccgcaggcccccgagccccagca

SEQ ID NO: 5809562 - DNA, 25 bp, Homo sapien
ggctgctgagtcccagcgtcctctc

SEQ ID NO: 5809563 - DNA, 25 bp, Homo sapien
tgaaatctctctttggctcctctat

SEQ ID NO: 5809564 - DNA, 25 bp, Homo sapien
agtcacagtgactgagcggctaatg

SEQ ID NO: 5809565 - DNA, 25 bp, Homo sapien
tgggacaggttttggctccagtgat

SEQ ID NO: 5809566 - DNA, 25 bp, Homo sapien
agatggggatttgcttgtatttaaa

SEQ ID NO: 5809567 - DNA, 25 bp, Homo sapien
tctcgtcgtagagcaccactgtgtc

SEQ ID NO: 5809568 - DNA, 25 bp, Homo sapien
gctgcacctcaaatctacccgggcg

SEQ ID NO: 5809569 - DNA, 25 bp, Homo sapien
ccagtgaatgaaatccaattaattc

SEQ ID NO: 5809570 - DNA, 25 bp, Homo sapien
aaggggtggtaaaatacagctgctg

SEQ ID NO: 5809571 - DNA, 25 bp, Homo sapien
cctctatatgcaaaattgaattagt

SEQ ID NO: 5809572 - DNA, 25 bp, Homo sapien
aggtagaacgcccggcagccctcgt

SEQ ID NO: 5809573 - DNA, 25 bp, Homo sapien
cgtccaagttggtggagtctttggc

SEQ ID NO: 5809574 - DNA, 25 bp, Homo sapien
aggctagcggttggggcagacgaga

SEQ ID NO: 5809575 - DNA, 25 bp, Homo sapien
aaaacaaacacaattcaaacaaaca

SEQ ID NO: 5809576 - DNA, 25 bp, Homo sapien
caagcaatgtaccaagacaccacag

SEQ ID NO: 5809577 - DNA, 25 bp, Homo sapien
aatgcagggagaactcggcttggaa

SEQ ID NO: 5809578 - DNA, 25 bp, Homo sapien
acttactgaagccaccttccaggta

SEQ ID NO: 5809579 - DNA, 25 bp, Homo sapien
ggggtgcctaccagacgcccctcgg

SEQ ID NO: 5809580 - DNA, 25 bp, Homo sapien
catgggtaggctgtacacatgggta

SEQ ID NO: 5809581 - DNA, 25 bp, Homo sapien
gagcaaatctctctgttagtattaa

SEQ ID NO: 5809582 - DNA, 25 bp, Homo sapien
aattaattcggactccgtgctactg

SEQ ID NO: 5809583 - DNA, 25 bp, Homo sapien
ccgagccccagcactggcaacggcg

SEQ ID NO: 5809584 - DNA, 25 bp, Homo sapien
ctgcctgtatctatacagcatgtcc

SEQ ID NO: 5809585 - DNA, 25 bp, Homo sapien
gagcgcaccgcgcgcgaagctgccg

SEQ ID NO: 5809586 - DNA, 25 bp, Homo sapien
cttgagcttcttgagcagcagcccg

SEQ ID NO: 5809587 - DNA, 25 bp, Homo sapien
ctcgttgcccagctccagctgctcg

SEQ ID NO: 5809588 - DNA, 25 bp, Homo sapien
tacaaggccctaaagaacacatgct

SEQ ID NO: 5809589 - DNA, 25 bp, Homo sapien
attcctccaacacgtccaagttggt

SEQ ID NO: 5809590 - DNA, 25 bp, Homo sapien
cagcactggcaacggcggcgagctg

SEQ ID NO: 5809591 - DNA, 25 bp, Homo sapien
caattccgcacttggtaaccttgtc

SEQ ID NO: 5809592 - DNA, 25 bp, Homo sapien
cgtagagcaccactgtgtcggtgcc

SEQ ID NO: 5809593 - DNA, 25 bp, Homo sapien
agatgtacttgatgccgaattcctc

SEQ ID NO: 5809594 - DNA, 25 bp, Homo sapien
gatgccgaattcctccaacacgtcc

SEQ ID NO: 5809595 - DNA, 25 bp, Homo sapien
gcctcagggaaaaactgggacaggt

SEQ ID NO: 5809596 - DNA, 25 bp, Homo sapien
ttttccaaactgataccacaaatac

SEQ ID NO: 5809597 - DNA, 25 bp, Homo sapien
gactcgatgtccgaggaagagtcag

SEQ ID NO: 5809598 - DNA, 25 bp, Homo sapien
gtacagagcaaacctactgcctgta

SEQ ID NO: 5809599 - DNA, 25 bp, Homo sapien
ctgttggacagcggactaccatccg

SEQ ID NO: 5809600 - DNA, 25 bp, Homo sapien
cgaagtccagcagctgacccatgaa

SEQ ID NO: 5809601 - DNA, 25 bp, Homo sapien
gggtgtggggtctttcacgtagatt

SEQ ID NO: 5809602 - DNA, 25 bp, Homo sapien
aacagccttacaaggccctaaagaa

SEQ ID NO: 5809603 - DNA, 25 bp, Homo sapien
gctggtgtcattttgacacctgggg

SEQ ID NO: 5809604 - DNA, 25 bp, Homo sapien
agggcaagatctccactgggaagga

SEQ ID NO: 5809605 - DNA, 25 bp, Homo sapien
gacacctggggccacacacaaagaa

SEQ ID NO: 5809606 - DNA, 25 bp, Homo sapien
actgggacaggttttggctccagtg

SEQ ID NO: 5809607 - DNA, 25 bp, Homo sapien
cccggtcctcgccgcgcgtgaagag

SEQ ID NO: 5809608 - DNA, 25 bp, Homo sapien
gacgagacagaagtaaagccggagg

SEQ ID NO: 5809609 - DNA, 25 bp, Homo sapien
aatgaaatccaattaattcggactc

SEQ ID NO: 5809610 - DNA, 25 bp, Homo sapien
gctgatgctgccaagagaaactgct

SEQ ID NO: 5809611 - DNA, 25 bp, Homo sapien
aatacagagctgaaatctctctttg

SEQ ID NO: 5809612 - DNA, 25 bp, Homo sapien
cggcggcgagctgctgctacacgag

SEQ ID NO: 5809613 - DNA, 25 bp, Homo sapien
atgggggtcgagctgcgggagaggg

SEQ ID NO: 5809614 - DNA, 25 bp, Homo sapien
ccttccaggtagaacgcccggcagc

SEQ ID NO: 5809615 - DNA, 25 bp, Homo sapien
ccaattaattcggactccgtgctac

SEQ ID NO: 5809616 - DNA, 25 bp, Homo sapien
ggtggtaaaatacagctgctgtgct

SEQ ID NO: 5809617 - DNA, 25 bp, Homo sapien
gtgctactgagaggggaggaaaaaa

SEQ ID NO: 5809618 - DNA, 25 bp, Homo sapien
gccccgggcttcatctatgaaagaa

SEQ ID NO: 5809619 - DNA, 25 bp, Homo sapien
ggtcattattacaacagctgtacaa

SEQ ID NO: 5809620 - DNA, 25 bp, Homo sapien
aggaactggtatctcagatacaaaa

SEQ ID NO: 5809621 - DNA, 25 bp, Homo sapien
ctcagtattctcatgaagatatgta

SEQ ID NO: 5809622 - DNA, 25 bp, Homo sapien
cccaggcctgtctggcttgtaaaac

SEQ ID NO: 5809623 - DNA, 25 bp, Homo sapien
atatgtagaaagatgcagcattctc

SEQ ID NO: 5809624 - DNA, 25 bp, Homo sapien
ggaactggtatctcagatacaaaat

SEQ ID NO: 5809625 - DNA, 25 bp, Homo sapien
ttctcagtattctcatgaagatatg

SEQ ID NO: 5809626 - DNA, 25 bp, Homo sapien
cagaattctggaatgttggctggca

SEQ ID NO: 5809627 - DNA, 25 bp, Homo sapien
ccagcatgtggcagggtctccttgg

SEQ ID NO: 5809628 - DNA, 25 bp, Homo sapien
caatgaagtaaacaggaaatagtcc

SEQ ID NO: 5809629 - DNA, 25 bp, Homo sapien
aggtcattattacaacagctgtaca

SEQ ID NO: 5809630 - DNA, 25 bp, Homo sapien
ttggggactgcagtcccccaggcct

SEQ ID NO: 5809631 - DNA, 25 bp, Homo sapien
aaaaggaactggtatctcagataca

SEQ ID NO: 5809632 - DNA, 25 bp, Homo sapien
ccctcacagacttggagttctcagc

SEQ ID NO: 5809633 - DNA, 25 bp, Homo sapien
gaaaaggaactggtatctcagatac

SEQ ID NO: 5809634 - DNA, 25 bp, Homo sapien
cctttgtagttgcaatcaatgaagt

SEQ ID NO: 5809635 - DNA, 25 bp, Homo sapien
tttcgtccagcagtcgtaaaaggag

SEQ ID NO: 5809636 - DNA, 25 bp, Homo sapien
ctccttttacgactgctggacgaaa

SEQ ID NO: 5809637 - DNA, 25 bp, Homo sapien
aaacctgaaaaactacatgaagcct

SEQ ID NO: 5809638 - DNA, 25 bp, Homo sapien
aggcttcatgtagtttttcaggttt

SEQ ID NO: 5809639 - DNA, 25 bp, Homo sapien
cgtcgacgccccgcgcgaccgcgtg

SEQ ID NO: 5809640 - DNA, 25 bp, Homo sapien
cacgcggtcgcgcggggcgtcgacg

SEQ ID NO: 5809641 - DNA, 25 bp, Homo sapien
taccctcgcgcccaacccaccctcc

SEQ ID NO: 5809642 - DNA, 25 bp, Homo sapien
ggagggtgggttgggcgcgagggta

SEQ ID NO: 5809643 - DNA, 25 bp, Homo sapien
gacggggcccgccctaccctcgcgc

SEQ ID NO: 5809644 - DNA, 25 bp, Homo sapien
gcgcgagggtagggcgggccccgtc

SEQ ID NO: 5809645 - DNA, 25 bp, Homo sapien
ggtccaccgatacctcttgacgtcc

SEQ ID NO: 5809646 - DNA, 25 bp, Homo sapien
ggacgtcaagaggtatcggtggacc

SEQ ID NO: 5809647 - DNA, 25 bp, Homo sapien
ggccccttatggtcgcgcaggtcag

SEQ ID NO: 5809648 - DNA, 25 bp, Homo sapien
ctgacctgcgcgaccataaggggcc

SEQ ID NO: 5809649 - DNA, 25 bp, Homo sapien
ccatgaactaccataaccacggtac

SEQ ID NO: 5809650 - DNA, 25 bp, Homo sapien
gtaccgtggttatggtagttcatgg

SEQ ID NO: 5809651 - DNA, 25 bp, Homo sapien
cgccgtgggacgtccgatctgtctc

SEQ ID NO: 5809652 - DNA, 25 bp, Homo sapien
gagacagatcggacgtcccacggcg

SEQ ID NO: 5809653 - DNA, 25 bp, Homo sapien
tttgttgtcagatttgttatatgaa

SEQ ID NO: 5809654 - DNA, 25 bp, Homo sapien
ttcatataacaaatctgacaacaaa

SEQ ID NO: 5809655 - DNA, 25 bp, Homo sapien
ttgttgtcagatttgttatatgaaa

SEQ ID NO: 5809656 - DNA, 25 bp, Homo sapien
tttcatataacaaatctgacaacaa

SEQ ID NO: 5809657 - DNA, 25 bp, Homo sapien
gtttggaacattctctacttcacgg

SEQ ID NO: 5809658 - DNA, 25 bp, Homo sapien
ccgtgaagtagagaatgttccaaac

SEQ ID NO: 5809659 - DNA, 25 bp, Homo sapien
tctcagtgatcatcgtctataatgt

SEQ ID NO: 5809660 - DNA, 25 bp, Homo sapien
acattatagacgatgatcactgaga

SEQ ID NO: 5809661 - DNA, 25 bp, Homo sapien
tgactcaggagaccttctacacctg

SEQ ID NO: 5809662 - DNA, 25 bp, Homo sapien
caggtgtagaaggtctcctgagtca

SEQ ID NO: 5809663 - DNA, 25 bp, Homo sapien
agatgagcaggaggatgcttctgag

SEQ ID NO: 5809664 - DNA, 25 bp, Homo sapien
tgagcaggaggatgcttctgagcct

SEQ ID NO: 5809665 - DNA, 25 bp, Homo sapien
agcagatgagcaggaggatgcttct

SEQ ID NO: 5809666 - DNA, 25 bp, Homo sapien
agccaaagcagatgagcaggaggat

SEQ ID NO: 5809667 - DNA, 25 bp, Homo sapien
gagcaggaggatgcttctgagcctt

SEQ ID NO: 5809668 - DNA, 25 bp, Homo sapien
atgagcaggaggatgcttctgagcc

SEQ ID NO: 5809669 - DNA, 25 bp, Homo sapien
gcagatgagcaggaggatgcttctg

SEQ ID NO: 5809670 - DNA, 25 bp, Homo sapien
agcaggaggatgcttctgagccttc

SEQ ID NO: 5809671 - DNA, 25 bp, Homo sapien
cagatgagcaggaggatgcttctga

SEQ ID NO: 5809672 - DNA, 25 bp, Homo sapien
gatgagcaggaggatgcttctgagc

SEQ ID NO: 5809673 - DNA, 25 bp, Homo sapien
gcaggaggatgcttctgagccttca

SEQ ID NO: 5809674 - DNA, 25 bp, Homo sapien
tctctcacgagagcccataaatgag

SEQ ID NO: 5809675 - DNA, 25 bp, Homo sapien
ctcatttatgggctctcgtgagaga

SEQ ID NO: 5809676 - DNA, 25 bp, Homo sapien
actacagtattcgttaattgtagtg

SEQ ID NO: 5809677 - DNA, 25 bp, Homo sapien
cactacaattaacgaatactgtagt

SEQ ID NO: 5809678 - DNA, 25 bp, Homo sapien
gctcctccgccgagtcgtaatgacg

SEQ ID NO: 5809679 - DNA, 25 bp, Homo sapien
cgtcattacgactcggcggaggagc

SEQ ID NO: 5809680 - DNA, 25 bp, Homo sapien
cgcgcgcctagccccttcggggcag

SEQ ID NO: 5809681 - DNA, 25 bp, Homo sapien
ctgccccgaaggggctaggcgcgcg

SEQ ID NO: 5809682 - DNA, 25 bp, Homo sapien
gacgcgcgcctagccccttcggggc

SEQ ID NO: 5809683 - DNA, 25 bp, Homo sapien
gccccgaaggggctaggcgcgcgtc

SEQ ID NO: 5809684 - DNA, 25 bp, Homo sapien
ccggaatgtcggtgcaggtccctcg

SEQ ID NO: 5809685 - DNA, 25 bp, Homo sapien
cgagggacctgcaccgacattccgg

SEQ ID NO: 5809686 - DNA, 25 bp, Homo sapien
tccgagctttttacgatattaatcg

SEQ ID NO: 5809687 - DNA, 25 bp, Homo sapien
cgattaatatcgtaaaaagctcgga

SEQ ID NO: 5809688 - DNA, 25 bp, Homo sapien
gcggcccggcccagctccggcggcg

SEQ ID NO: 5809689 - DNA, 25 bp, Homo sapien
cgccgccggagctgggccgggccgc

SEQ ID NO: 5809690 - DNA, 25 bp, Homo sapien
ccggcccagctccggcggcggagtt

SEQ ID NO: 5809691 - DNA, 25 bp, Homo sapien
aactccgccgccggagctgggccgg

SEQ ID NO: 5809692 - DNA, 25 bp, Homo sapien
gccctacggggtacgggactactgc

SEQ ID NO: 5809693 - DNA, 25 bp, Homo sapien
gcagtagtcccgtaccccgtagggc

SEQ ID NO: 5809694 - DNA, 25 bp, Homo sapien
tactttaatcgaaacaagtacaagt

SEQ ID NO: 5809695 - DNA, 25 bp, Homo sapien
acttgtacttgtttcgattaaagta

SEQ ID NO: 5809696 - DNA, 25 bp, Homo sapien
catcaaggtcctccgaaacagggta

SEQ ID NO: 5809697 - DNA, 25 bp, Homo sapien
taccctgtttcggaggaccttgatg

SEQ ID NO: 5809698 - DNA, 25 bp, Homo sapien
gacgactattcgactgcgaccagac

SEQ ID NO: 5809699 - DNA, 25 bp, Homo sapien
gtctggtcgcagtcgaatagtcgtc

SEQ ID NO: 5809700 - DNA, 25 bp, Homo sapien
tgttcactcgagaactgccactctt

SEQ ID NO: 5809701 - DNA, 25 bp, Homo sapien
aagagtggcagttctcgagtgaaca

SEQ ID NO: 5809702 - DNA, 25 bp, Homo sapien
cacctcttttgagaaggttagggag

SEQ ID NO: 5809703 - DNA, 25 bp, Homo sapien
ccccagctcaaactgtgagttgtgc

SEQ ID NO: 5809704 - DNA, 25 bp, Homo sapien
tcgaacctcacagagggccagtgct

SEQ ID NO: 5809705 - DNA, 25 bp, Homo sapien
agaggctgtgcacctcttttgagaa

SEQ ID NO: 5809706 - DNA, 25 bp, Homo sapien
tgcccaggtccaaggcacagggcag

SEQ ID NO: 5809707 - DNA, 25 bp, Homo sapien
agacaggagccttgccaagaccacc

SEQ ID NO: 5809708 - DNA, 25 bp, Homo sapien
gaatggaatttgtccaggagtttcc

SEQ ID NO: 5809709 - DNA, 25 bp, Homo sapien
atctctaaacagttggtttgtatac

SEQ ID NO: 5809710 - DNA, 25 bp, Homo sapien
ctcccttcagtttccaagaccaagg

SEQ ID NO: 5809711 - DNA, 25 bp, Homo sapien
aagtcacccgagaggctgtgcacct

SEQ ID NO: 5809712 - DNA, 25 bp, Homo sapien
aaactgtgagttgtgctgtttcctc

SEQ ID NO: 5809713 - DNA, 25 bp, Homo sapien
ggcgttcaagtatcgaacctcacag

SEQ ID NO: 5809714 - DNA, 25 bp, Homo sapien
acaagtggaatctctaaacagttgg

SEQ ID NO: 5809715 - DNA, 25 bp, Homo sapien
ctctaaacagttggtttgtatacat

SEQ ID NO: 5809716 - DNA, 25 bp, Homo sapien
ctagctttgcccaggtccaaggcac

SEQ ID NO: 5809717 - DNA, 25 bp, Homo sapien
aggggtacagacaggagccttgcca

SEQ ID NO: 5809718 - DNA, 25 bp, Homo sapien
tggtcgatccaaaactaaatctaat

SEQ ID NO: 5809719 - DNA, 25 bp, Homo sapien
attagatttagttttggatcgacca

SEQ ID NO: 5809720 - DNA, 25 bp, Homo sapien
gtgacatccacctcatcgtcggctt

SEQ ID NO: 5809721 - DNA, 25 bp, Homo sapien
aagccgacgatgaggtggatgtcac

SEQ ID NO: 5809722 - DNA, 25 bp, Homo sapien
tccggcccccgggcggatcgtcgtc

SEQ ID NO: 5809723 - DNA, 25 bp, Homo sapien
gacgacgatccgcccgggggccgga

SEQ ID NO: 5809724 - DNA, 25 bp, Homo sapien
ttccggttcgagcacccggccgagt

SEQ ID NO: 5809725 - DNA, 25 bp, Homo sapien
actcggccgggtgctcgaaccggaa

SEQ ID NO: 5809726 - DNA, 25 bp, Homo sapien
gggtaactcacgcgtgacacaccac

SEQ ID NO: 5809727 - DNA, 25 bp, Homo sapien
gtggtgtgtcacgcgtgagttaccc

SEQ ID NO: 5809728 - DNA, 25 bp, Homo sapien
gactcggactcctatctgaggaccc

SEQ ID NO: 5809729 - DNA, 25 bp, Homo sapien
gggtcctcagataggagtccgagtc

SEQ ID NO: 5809730 - DNA, 25 bp, Homo sapien
ccggtcccgccgccctctccgcctg

SEQ ID NO: 5809731 - DNA, 25 bp, Homo sapien
caggcggagagggcggcgggaccgg

SEQ ID NO: 5809732 - DNA, 25 bp, Homo sapien
tccggtcccgccgccctctccgcct

SEQ ID NO: 5809733 - DNA, 25 bp, Homo sapien
aggcggagagggcggcgggaccgga

SEQ ID NO: 5809734 - DNA, 25 bp, Homo sapien
tgaccgacccgggatgaaggaggtc

SEQ ID NO: 5809735 - DNA, 25 bp, Homo sapien
gacctccttcatcccgggtcggtca

SEQ ID NO: 5809736 - DNA, 25 bp, Homo sapien
gaaatccacgtccttacaagcagag

SEQ ID NO: 5809737 - DNA, 25 bp, Homo sapien
ctctgcttgtaaggacgtggatttc

SEQ ID NO: 5809738 - DNA, 25 bp, Homo sapien
caaaaagctaaacgtaagatagaag

SEQ ID NO: 5809739 - DNA, 25 bp, Homo sapien
cttctatcttacgtttagctttttg

SEQ ID NO: 5809740 - DNA, 25 bp, Homo sapien
gttacagtaatggtgttaaaaatag

SEQ ID NO: 5809741 - DNA, 25 bp, Homo sapien
ctatttttaacaccattactgtaac

SEQ ID NO: 5809742 - DNA, 25 bp, Homo sapien
gcattaacaggatcaccaacacaat

SEQ ID NO: 5809743 - DNA, 25 bp, Homo sapien
attgtgttggtgatcctgttaatgc

SEQ ID NO: 5809744 - DNA, 25 bp, Homo sapien
tgcctcgccgctgcggtccccgggt

SEQ ID NO: 5809745 - DNA, 25 bp, Homo sapien
acccggggaccgcagcggcgaggca

SEQ ID NO: 5809746 - DNA, 25 bp, Homo sapien
ggtgcctcgccgctgcggtccccgg

SEQ ID NO: 5809747 - DNA, 25 bp, Homo sapien
ccggggaccgcagcggcgaggcacc

SEQ ID NO: 5809748 - DNA, 25 bp, Homo sapien
agagctctttccatcgtgacgagag

SEQ ID NO: 5809749 - DNA, 25 bp, Homo sapien
ctctcgtcacgatggaaagagctct

SEQ ID NO: 5809750 - DNA, 25 bp, Homo sapien
aggccttcggacgagcgggtctgga

SEQ ID NO: 5809751 - DNA, 25 bp, Homo sapien
tccagacccgctcgtccgaaggcct

SEQ ID NO: 5809752 - DNA, 25 bp, Homo sapien
ccggacccagaggacaggtggcgag

SEQ ID NO: 5809753 - DNA, 25 bp, Homo sapien
ctcgccacctgtcctctgggtccgg

SEQ ID NO: 5809754 - DNA, 25 bp, Homo sapien
taaggccctaaccatgactatccgt

SEQ ID NO: 5809755 - DNA, 25 bp, Homo sapien
acggatagtcatggttagggcctta

SEQ ID NO: 5809756 - DNA, 25 bp, Homo sapien
cccccgccggtcccagtcacaggtg

SEQ ID NO: 5809757 - DNA, 25 bp, Homo sapien
cacctgtgactgggaccggcggggg

SEQ ID NO: 5809758 - DNA, 25 bp, Homo sapien
gaccgtggctcccacactcctcgga

SEQ ID NO: 5809759 - DNA, 25 bp, Homo sapien
tccgaggagtgtgggagccacggtc

SEQ ID NO: 5809760 - DNA, 25 bp, Homo sapien
cgtcgggactgctacgtgccagaga

SEQ ID NO: 5809761 - DNA, 25 bp, Homo sapien
tctctggcacgtagcagtcccgacg

SEQ ID NO: 5809762 - DNA, 25 bp, Homo sapien
tggcaagcgtcaggactgagccctg

SEQ ID NO: 5809763 - DNA, 25 bp, Homo sapien
aacattagtgcaaatcctagcgccg

SEQ ID NO: 5809764 - DNA, 25 bp, Homo sapien
acgaacaggggatatgaatttcccc

SEQ ID NO: 5809765 - DNA, 25 bp, Homo sapien
ttagtgcaaatcctagcgccggccc

SEQ ID NO: 5809766 - DNA, 25 bp, Homo sapien
cctcagccatcctggccgggtagga

SEQ ID NO: 5809767 - DNA, 25 bp, Homo sapien
attagtgcaaatcctagcgccggcc

SEQ ID NO: 5809768 - DNA, 25 bp, Homo sapien
tgattggccagctaaatggaggcac

SEQ ID NO: 5809769 - DNA, 25 bp, Homo sapien
catcacgtctggtcccatgaaagcg

SEQ ID NO: 5809770 - DNA, 25 bp, Homo sapien
gccagctaaatggaggcaccggagt

SEQ ID NO: 5809771 - DNA, 25 bp, Homo sapien
cattgatcaggcactaccctcggga

SEQ ID NO: 5809772 - DNA, 25 bp, Homo sapien
ccagctaaatggaggcaccggagtg

SEQ ID NO: 5809773 - DNA, 25 bp, Homo sapien
acgcgcatgagacgaacaggggata

SEQ ID NO: 5809774 - DNA, 25 bp, Homo sapien
gaatgaagcgactgcctttattgca

SEQ ID NO: 5809775 - DNA, 25 bp, Homo sapien
cgcgcatgagacgaacaggggatat

SEQ ID NO: 5809776 - DNA, 25 bp, Homo sapien
tgcatctgtgcctgtagcggcccat

SEQ ID NO: 5809777 - DNA, 25 bp, Homo sapien
tgaccggccgactcactgaggccta

SEQ ID NO: 5809778 - DNA, 25 bp, Homo sapien
ccgttaatataaggactctaccagt

SEQ ID NO: 5809779 - DNA, 25 bp, Homo sapien
actggtagagtccttatattaacgg

SEQ ID NO: 5809780 - DNA, 25 bp, Homo sapien
acgaattacggcagacagggacctc

SEQ ID NO: 5809781 - DNA, 25 bp, Homo sapien
gaggtccctgtctgccgtaattcgt

SEQ ID NO: 5809782 - DNA, 25 bp, Homo sapien
actattgctgtagagtccttttaac

SEQ ID NO: 5809783 - DNA, 25 bp, Homo sapien
gttaaaaggactctacagcaatagt

SEQ ID NO: 5809784 - DNA, 25 bp, Homo sapien
tctttcatagctcgtacgtatctaa

SEQ ID NO: 5809785 - DNA, 25 bp, Homo sapien
ttagatacgtacgagctatgaaaga

SEQ ID NO: 5809786 - DNA, 25 bp, Homo sapien
ccttactttggagtaagggcaggag

SEQ ID NO: 5809787 - DNA, 25 bp, Homo sapien
ctcctgcccttactccaaagtaagg

SEQ ID NO: 5809788 - DNA, 25 bp, Homo sapien
acactcaagagtctggtaaagactt

SEQ ID NO: 5809789 - DNA, 25 bp, Homo sapien
aagtctttaccagactcttgagtgt

SEQ ID NO: 5809790 - DNA, 25 bp, Homo sapien
gtaaaccgctcacaggtcgttctac

SEQ ID NO: 5809791 - DNA, 25 bp, Homo sapien
gtagaacgacctgtgagcggtttac

SEQ ID NO: 5809792 - DNA, 25 bp, Homo sapien
acccagcgttgcattgaactcagac

SEQ ID NO: 5809793 - DNA, 25 bp, Homo sapien
gtctgagttcaatgcaacgctgggt

SEQ ID NO: 5809794 - DNA, 25 bp, Homo sapien
gagagatagtggtaggaataaataa

SEQ ID NO: 5809795 - DNA, 25 bp, Homo sapien
ttatttattcctaccactatctctc

SEQ ID NO: 5809796 - DNA, 25 bp, Homo sapien
ataaagtatcaggtaacaatactgg

SEQ ID NO: 5809797 - DNA, 25 bp, Homo sapien
ccagtattgttacctgatactttat

SEQ ID NO: 5809798 - DNA, 25 bp, Homo sapien
atataacattcaaacgtatattgga

SEQ ID NO: 5809799 - DNA, 25 bp, Homo sapien
tccaatatacgtttgaatgttatat

SEQ ID NO: 5809800 - DNA, 25 bp, Homo sapien
aaagtcacaaactttgtatcatgag

SEQ ID NO: 5809801 - DNA, 25 bp, Homo sapien
ctcatgatacaaagtttgtgacttt

SEQ ID NO: 5809802 - DNA, 25 bp, Homo sapien
gacgttattcatacgaacgttagtg

SEQ ID NO: 5809803 - DNA, 25 bp, Homo sapien
cactaacgttcgtatgaataacgtc

SEQ ID NO: 5809804 - DNA, 25 bp, Homo sapien
tcaatgatacgtggttcataaggat

SEQ ID NO: 5809805 - DNA, 25 bp, Homo sapien
atccttatgaaccacgtatcattga

SEQ ID NO: 5809806 - DNA, 25 bp, Homo sapien
ggtgtctccaccttggtccctggac

SEQ ID NO: 5809807 - DNA, 25 bp, Homo sapien
gtccagggaccaaggtggagacacc

SEQ ID NO: 5809808 - DNA, 25 bp, Homo sapien
cggtgccgctcgtcgggcgaggtgg

SEQ ID NO: 5809809 - DNA, 25 bp, Homo sapien
ccacctcgcccgacgagcggcaccg

SEQ ID NO: 5809810 - DNA, 25 bp, Homo sapien
tgtccggtgccgctcgtcgggcgag

SEQ ID NO: 5809811 - DNA, 25 bp, Homo sapien
ctcgcccgacgagcggcaccggaca

SEQ ID NO: 5809812 - DNA, 25 bp, Homo sapien
taaaagcgacacagacgtcgtgacg

SEQ ID NO: 5809813 - DNA, 25 bp, Homo sapien
cgtcacgacgtctgtgtcgctttta

SEQ ID NO: 5809814 - DNA, 25 bp, Homo sapien
gaagaatatctggaaatcttaaaga

SEQ ID NO: 5809815 - DNA, 25 bp, Homo sapien
tctttaagatttccagatattcttc

SEQ ID NO: 5809816 - DNA, 25 bp, Homo sapien
acggcagtcaaaagtgtgttagaag

SEQ ID NO: 5809817 - DNA, 25 bp, Homo sapien
cttctaacacacttttgactgccgt

SEQ ID NO: 5809818 - DNA, 25 bp, Homo sapien
ccccactcactcttcgacccgtgta

SEQ ID NO: 5809819 - DNA, 25 bp, Homo sapien
tacacgggtcgaagagtgagtgggg

SEQ ID NO: 5809820 - DNA, 25 bp, Homo sapien
agaaacccaccttcaagatcctcgg

SEQ ID NO: 5809821 - DNA, 25 bp, Homo sapien
ccgaggatcttgaaggtgggtttct

SEQ ID NO: 5809822 - DNA, 25 bp, Homo sapien
cagtaacaacaataggtctagtttg

SEQ ID NO: 5809823 - DNA, 25 bp, Homo sapien
caaactagacctattgttgttactg

SEQ ID NO: 5809824 - DNA, 25 bp, Homo sapien
ggttttgccctacacggatctttct

SEQ ID NO: 5809825 - DNA, 25 bp, Homo sapien
agaaagatccgtgtagggcaaaacc

SEQ ID NO: 5809826 - DNA, 25 bp, Homo sapien
taaatacttcttacaaaaccattat

SEQ ID NO: 5809827 - DNA, 25 bp, Homo sapien
ataatggttttgtaagaagtattta

SEQ ID NO: 5809828 - DNA, 25 bp, Homo sapien
aatacttcttacaaaaccattattg

SEQ ID NO: 5809829 - DNA, 25 bp, Homo sapien
caataatggttttgtaagaagtatt

SEQ ID NO: 5809830 - DNA, 25 bp, Homo sapien
gacattcttcaaactatattttgta

SEQ ID NO: 5809831 - DNA, 25 bp, Homo sapien
tacaaaatatagtttgaagaatgtc

SEQ ID NO: 5809832 - DNA, 25 bp, Homo sapien
gaccgttctaggtctgagagactat

SEQ ID NO: 5809833 - DNA, 25 bp, Homo sapien
atagtctctcagacctagaacggtc

SEQ ID NO: 5809834 - DNA, 25 bp, Homo sapien
ttacgtgtcttactgtgggcaaaaa

SEQ ID NO: 5809835 - DNA, 25 bp, Homo sapien
tttttgcccacagtaagacacgtaa

SEQ ID NO: 5809836 - DNA, 25 bp, Homo sapien
gacgggcgcggtgtcagccgttggc

SEQ ID NO: 5809837 - DNA, 25 bp, Homo sapien
gccaacggctgacaccgcgcccgtc

SEQ ID NO: 5809838 - DNA, 25 bp, Homo sapien
gagcacctgtaccccgggcggaaac

SEQ ID NO: 5809839 - DNA, 25 bp, Homo sapien
gtttccgcccggggtacaggtgctc

SEQ ID NO: 5809840 - DNA, 25 bp, Homo sapien
cagtcggcggttcatacactgggat

SEQ ID NO: 5809841 - DNA, 25 bp, Homo sapien
atcccagtgtatgaaccgccgactg

SEQ ID NO: 5809842 - DNA, 25 bp, Homo sapien
tcgaatccccgacattttggttatt

SEQ ID NO: 5809843 - DNA, 25 bp, Homo sapien
aataaccaaaatgtcggggattcga

SEQ ID NO: 5809844 - DNA, 25 bp, Homo sapien
ggcggggcctccgtcgcagcctgca

SEQ ID NO: 5809845 - DNA, 25 bp, Homo sapien
tgcaggctgcgacggaggccccgcc

SEQ ID NO: 5809846 - DNA, 25 bp, Homo sapien
ctctttcttctagggtggtagcaat

SEQ ID NO: 5809847 - DNA, 25 bp, Homo sapien
attgctaccaccctagaagaaagag

SEQ ID NO: 5809848 - DNA, 25 bp, Homo sapien
accccgactctgacggtgtgaggtg

SEQ ID NO: 5809849 - DNA, 25 bp, Homo sapien
cacctcacaccgtcagagtcggggt

SEQ ID NO: 5809850 - DNA, 25 bp, Homo sapien
gaggtacaacttgtcacaatggtgt

SEQ ID NO: 5809851 - DNA, 25 bp, Homo sapien
acaccattgtgacaagttgtacctc

SEQ ID NO: 5809852 - DNA, 25 bp, Homo sapien
tagtggataaagtaataagtagtcg

SEQ ID NO: 5809853 - DNA, 25 bp, Homo sapien
cgactacttattactttatccacta

SEQ ID NO: 5809854 - DNA, 25 bp, Homo sapien
catgagtagtggataaagtaataag

SEQ ID NO: 5809855 - DNA, 25 bp, Homo sapien
cttattactttatccactactcatg

SEQ ID NO: 5809856 - DNA, 25 bp, Homo sapien
ggtttgcctctccttacgtcgaaag

SEQ ID NO: 5809857 - DNA, 25 bp, Homo sapien
ctttcgacgtaaggagaggcaaacc

SEQ ID NO: 5809858 - DNA, 25 bp, Homo sapien
agttcactcaaatagttgacccagt

SEQ ID NO: 5809859 - DNA, 25 bp, Homo sapien
actgggtcaactatttgagtgaact

SEQ ID NO: 5809860 - DNA, 25 bp, Homo sapien
acaccatcattcataacgcaacact

SEQ ID NO: 5809861 - DNA, 25 bp, Homo sapien
agtgttgcgttatgaatgatggtgt

SEQ ID NO: 5809862 - DNA, 25 bp, Homo sapien
aacgagaccacgaccagatcgtcgg

SEQ ID NO: 5809863 - DNA, 25 bp, Homo sapien
ccgacgatctggtcgtggtctcgtt

SEQ ID NO: 5809864 - DNA, 25 bp, Homo sapien
actttgatttatgacagtaatgtct

SEQ ID NO: 5809865 - DNA, 25 bp, Homo sapien
agacattactgtcataaatcaaagt

SEQ ID NO: 5809866 - DNA, 25 bp, Homo sapien
gttttatctaaatagtatcatctta

SEQ ID NO: 5809867 - DNA, 25 bp, Homo sapien
taagatgatactatttagataaaac

SEQ ID NO: 5809868 - DNA, 25 bp, Homo sapien
catcatattcgattagagtgtcggt

SEQ ID NO: 5809869 - DNA, 25 bp, Homo sapien
accgacactctaatcgaatatgatg

SEQ ID NO: 5809870 - DNA, 25 bp, Homo sapien
acatttgaatttagctgtatgtcct

SEQ ID NO: 5809871 - DNA, 25 bp, Homo sapien
aggacatacagctaaattcaaatgt

SEQ ID NO: 5809872 - DNA, 25 bp, Homo sapien
gagggacctcaagtgtcggccgtaa

SEQ ID NO: 5809873 - DNA, 25 bp, Homo sapien
ttacggccgacacttgaggtccctc

SEQ ID NO: 5809874 - DNA, 25 bp, Homo sapien
ctccagtcaaacatacatatcctac

SEQ ID NO: 5809875 - DNA, 25 bp, Homo sapien
gtaggatatgtatgtttgactggag

SEQ ID NO: 5809876 - DNA, 25 bp, Homo sapien
tttgtaaaactctcaccttataaaa

SEQ ID NO: 5809877 - DNA, 25 bp, Homo sapien
ttttataaggtgagagttttacaaa

SEQ ID NO: 5809878 - DNA, 25 bp, Homo sapien
gggctccagactccgccctgagcct

SEQ ID NO: 5809879 - DNA, 25 bp, Homo sapien
aggctcagggcggagtctggagccc

SEQ ID NO: 5809880 - DNA, 25 bp, Homo sapien
gcgagcctcgggaacccctgggcgg

SEQ ID NO: 5809881 - DNA, 25 bp, Homo sapien
ccgcccaggggttcccgaggctcgc

SEQ ID NO: 5809882 - DNA, 25 bp, Homo sapien
atgagcccggaggtcatcaaggacg

SEQ ID NO: 5809883 - DNA, 25 bp, Homo sapien
cgtccttgatgacctccgggctcat

SEQ ID NO: 5809884 - DNA, 25 bp, Homo sapien
ttgttggtctaaggttccccgtcac

SEQ ID NO: 5809885 - DNA, 25 bp, Homo sapien
gtgacggggaaccttagaccaacaa

SEQ ID NO: 5809886 - DNA, 25 bp, Homo sapien
gacttgaggcctgacgtccgactac

SEQ ID NO: 5809887 - DNA, 25 bp, Homo sapien
gtagtcggacgtcaggcctcaagtc

SEQ ID NO: 5809888 - DNA, 25 bp, Homo sapien
ggtttccatagctgccctacgactt

SEQ ID NO: 5809889 - DNA, 25 bp, Homo sapien
aaggactctatcacactgcttgtct

SEQ ID NO: 5809890 - DNA, 25 bp, Homo sapien
gaacccagtggtttccatagctgcc

SEQ ID NO: 5809891 - DNA, 25 bp, Homo sapien
agtggtttccatagctgccctacga

SEQ ID NO: 5809892 - DNA, 25 bp, Homo sapien
gacttccgagatgactaaacccacc

SEQ ID NO: 5809893 - DNA, 25 bp, Homo sapien
cgagatgactaaacccaccaaggac

SEQ ID NO: 5809894 - DNA, 25 bp, Homo sapien
catagctgccctacgacttccgaga

SEQ ID NO: 5809895 - DNA, 25 bp, Homo sapien
atggagcatcccaggctgggatgaa

SEQ ID NO: 5809896 - DNA, 25 bp, Homo sapien
acaaatgcaatggagcatcccaggc

SEQ ID NO: 5809897 - DNA, 25 bp, Homo sapien
acccaccgtggatgtgcacagacca

SEQ ID NO: 5809898 - DNA, 25 bp, Homo sapien
gcacgtatatacagtgactaggtga

SEQ ID NO: 5809899 - DNA, 25 bp, Homo sapien
caaaagctggaaggtgaaggcttct

SEQ ID NO: 5809900 - DNA, 25 bp, Homo sapien
tgtgcacagaccagtggctcccacg

SEQ ID NO: 5809901 - DNA, 25 bp, Homo sapien
tcacactgcttgtcttggccactca

SEQ ID NO: 5809902 - DNA, 25 bp, Homo sapien
gcagcacaggccagacaaaagctgg

SEQ ID NO: 5809903 - DNA, 25 bp, Homo sapien
aaatgtgcacgtatatacagtgact

SEQ ID NO: 5809904 - DNA, 25 bp, Homo sapien
cataattaaatatgactagttcttg

SEQ ID NO: 5809905 - DNA, 25 bp, Homo sapien
caagaactagtcatatttaattatg

SEQ ID NO: 5809906 - DNA, 25 bp, Homo sapien
acttcctcgtcttcggtgcggtcct

SEQ ID NO: 5809907 - DNA, 25 bp, Homo sapien
aggaccgcaccgaagacgaggaagt

SEQ ID NO: 5809908 - DNA, 25 bp, Homo sapien
gtgaaaataccccacacaccagtag

SEQ ID NO: 5809909 - DNA, 25 bp, Homo sapien
ctactggtgtgtggggtattttcac

SEQ ID NO: 5809910 - DNA, 25 bp, Homo sapien
gtcttgttccaaagtaatgacacct

SEQ ID NO: 5809911 - DNA, 25 bp, Homo sapien
aggtgtcattactttggaacaagac

SEQ ID NO: 5809912 - DNA, 25 bp, Homo sapien
gggcgctccgctcgggagcaccgta

SEQ ID NO: 5809913 - DNA, 25 bp, Homo sapien
tacggtgctcccgagcggagcgccc

SEQ ID NO: 5809914 - DNA, 25 bp, Homo sapien
agtcaaaactcatgcttcgaaaagt

SEQ ID NO: 5809915 - DNA, 25 bp, Homo sapien
acttttcgaagcatgagttttgact

SEQ ID NO: 5809916 - DNA, 25 bp, Homo sapien
ttctagtcgacctaagcctctatag

SEQ ID NO: 5809917 - DNA, 25 bp, Homo sapien
ctatagaggcttaggtcgactagaa

SEQ ID NO: 5809918 - DNA, 25 bp, Homo sapien
cacacttgttgatggacctggttct

SEQ ID NO: 5809919 - DNA, 25 bp, Homo sapien
agaaccaggtccatcaacaagtgtg

SEQ ID NO: 5809920 - DNA, 25 bp, Homo sapien
tcgtcccgggcccccgaggtgtgaa

SEQ ID NO: 5809921 - DNA, 25 bp, Homo sapien
ttcacacctcgggggcccgggacga

SEQ ID NO: 5809922 - DNA, 25 bp, Homo sapien
gagaggacgtcattcagtatataga

SEQ ID NO: 5809923 - DNA, 25 bp, Homo sapien
tctatatactgaatgacgtcctctc

SEQ ID NO: 5809924 - DNA, 25 bp, Homo sapien
caagattaaaggtgtaacgagcaac

SEQ ID NO: 5809925 - DNA, 25 bp, Homo sapien
gttgctcgttacacctttaatcttg

SEQ ID NO: 5809926 - DNA, 25 bp, Homo sapien
ggatgggacgctgcaggccctggca

SEQ ID NO: 5809927 - DNA, 25 bp, Homo sapien
tggaccacgtgctcacccacggctg

SEQ ID NO: 5809928 - DNA, 25 bp, Homo sapien
aggctgccgagatggccctgagcga

SEQ ID NO: 5809929 - DNA, 25 bp, Homo sapien
gccgatgtagagcctgttttagatt

SEQ ID NO: 5809930 - DNA, 25 bp, Homo sapien
gatagaccacctggttaccatgaag

SEQ ID NO: 5809931 - DNA, 25 bp, Homo sapien
gcgaggatttgccagactgttggtg

SEQ ID NO: 5809932 - DNA, 25 bp, Homo sapien
attcagagcgacccgcaggccctgg

SEQ ID NO: 5809933 - DNA, 25 bp, Homo sapien
gggaggtgcacggcggcggcgcgga

SEQ ID NO: 5809934 - DNA, 25 bp, Homo sapien
tggctttcgcgctctagcggagtgg

SEQ ID NO: 5809935 - DNA, 25 bp, Homo sapien
tcatccttcatccctggctttcgcg

SEQ ID NO: 5809936 - DNA, 25 bp, Homo sapien
tcacccctgcctggtgaggatgtct

SEQ ID NO: 5809937 - DNA, 25 bp, Homo sapien
cgacatcttcaccacggaggaggac

SEQ ID NO: 5809938 - DNA, 25 bp, Homo sapien
ttgccgatgtagagcctgttttaga

SEQ ID NO: 5809939 - DNA, 25 bp, Homo sapien
gcgcggagcgcgaggtggccctgga

SEQ ID NO: 5809940 - DNA, 25 bp, Homo sapien
gcagtgtgtgttttaatagaaaagt

SEQ ID NO: 5809941 - DNA, 25 bp, Homo sapien
gggtgcctgcagcgtgggcaccaac

SEQ ID NO: 5809942 - DNA, 25 bp, Homo sapien
ctgttggacccgcaccttgaatgga

SEQ ID NO: 5809943 - DNA, 25 bp, Homo sapien
ggcccgttcctccttccagaccatg

SEQ ID NO: 5809944 - DNA, 25 bp, Homo sapien
cctctgccaccgtttcccgctgatc

SEQ ID NO: 5809945 - DNA, 25 bp, Homo sapien
ggacgccgcctgctacgtgtgctgg

SEQ ID NO: 5809946 - DNA, 25 bp, Homo sapien
ccgagttcagcgccacgcaagtctt

SEQ ID NO: 5809947 - DNA, 25 bp, Homo sapien
aggagaactggaaaagctgtttccc

SEQ ID NO: 5809948 - DNA, 25 bp, Homo sapien
tagaccacctggttaccatgaagat

SEQ ID NO: 5809949 - DNA, 25 bp, Homo sapien
tcagcgccacgcaagtcttcccgag

SEQ ID NO: 5809950 - DNA, 25 bp, Homo sapien
gtggcccagcaggccagtgagaaga

SEQ ID NO: 5809951 - DNA, 25 bp, Homo sapien
aggtggcagcatggaggtaccagcg

SEQ ID NO: 5809952 - DNA, 25 bp, Homo sapien
tttactgtgcgctgctgggctgcat

SEQ ID NO: 5809953 - DNA, 25 bp, Homo sapien
tgggcgcccttccaggcttccttct

SEQ ID NO: 5809954 - DNA, 25 bp, Homo sapien
gagcagttacccacacttcccccga

SEQ ID NO: 5809955 - DNA, 25 bp, Homo sapien
gatgacgacgaagatgacgacgtcc

SEQ ID NO: 5809956 - DNA, 25 bp, Homo sapien
ttgctcacctacagtgacgtcgtgg

SEQ ID NO: 5809957 - DNA, 25 bp, Homo sapien
tgtggggagacagggcactttccct

SEQ ID NO: 5809958 - DNA, 25 bp, Homo sapien
tcctctctgcacctgcgctctggtg

SEQ ID NO: 5809959 - DNA, 25 bp, Homo sapien
acagcttttcctctctgcacctgcg

SEQ ID NO: 5809960 - DNA, 25 bp, Homo sapien
caatgatagaccacctggttaccat

SEQ ID NO: 5809961 - DNA, 25 bp, Homo sapien
gcgctgctgggccgcctgcgggagg

SEQ ID NO: 5809962 - DNA, 25 bp, Homo sapien
atggatgggacgctgcaggccctgg

SEQ ID NO: 5809963 - DNA, 25 bp, Homo sapien
atgcagggggtcatcaccatggatg

SEQ ID NO: 5809964 - DNA, 25 bp, Homo sapien
acagtgacgtcgtgggcgcggatgt

SEQ ID NO: 5809965 - DNA, 25 bp, Homo sapien
atcgaggcccatacctgtgagcgca

SEQ ID NO: 5809966 - DNA, 25 bp, Homo sapien
gctgccgagatggccctgagcgacg

SEQ ID NO: 5809967 - DNA, 25 bp, Homo sapien
tcgtgtccctgggcggcttgacgga

SEQ ID NO: 5809968 - DNA, 25 bp, Homo sapien
gtggctgccgatctttggctgcaaa

SEQ ID NO: 5809969 - DNA, 25 bp, Homo sapien
ccttgtacatctggcttttaaattt

SEQ ID NO: 5809970 - DNA, 25 bp, Homo sapien
tcgacgatccggcactccacccaga

SEQ ID NO: 5809971 - DNA, 25 bp, Homo sapien
cgcgtgcctatgagcctcaggagct

SEQ ID NO: 5809972 - DNA, 25 bp, Homo sapien
gcggagcttgcagtggtgagagagc

SEQ ID NO: 5809973 - DNA, 25 bp, Homo sapien
agcgacccgcaggccctgggcagct

SEQ ID NO: 5809974 - DNA, 25 bp, Homo sapien
gatatccagaagctcctgtcaggca

SEQ ID NO: 5809975 - DNA, 25 bp, Homo sapien
gtaagttttgctgagtccaggagag

SEQ ID NO: 5809976 - DNA, 25 bp, Homo sapien
taaatttctttacatcatcaccaag

SEQ ID NO: 5809977 - DNA, 25 bp, Homo sapien
gctgacctacgacgagaagcggggt

SEQ ID NO: 5809978 - DNA, 25 bp, Homo sapien
actgtcctcaggtgcctcgatggct

SEQ ID NO: 5809979 - DNA, 25 bp, Homo sapien
cttctgaatgagagggtgtccgtgc

SEQ ID NO: 5809980 - DNA, 25 bp, Homo sapien
gaggccggtgtggaaagcctcgcac

SEQ ID NO: 5809981 - DNA, 25 bp, Homo sapien
ggctgcgagggcgctgcacaacctg

SEQ ID NO: 5809982 - DNA, 25 bp, Homo sapien
ttggtcacaattcagaatcccaagg

SEQ ID NO: 5809983 - DNA, 25 bp, Homo sapien
tcctcaggtgcctcgatggctgcag

SEQ ID NO: 5809984 - DNA, 25 bp, Homo sapien
acggaccatctggacgagcaggcag

SEQ ID NO: 5809985 - DNA, 25 bp, Homo sapien
ccagctccttgggctgcccacctac

SEQ ID NO: 5809986 - DNA, 25 bp, Homo sapien
gcattcagagcgacccgcaggccct

SEQ ID NO: 5809987 - DNA, 25 bp, Homo sapien
caggtgcctcgatggctgcagactc

SEQ ID NO: 5809988 - DNA, 25 bp, Homo sapien
ttcctccttccagaccatgcagggg

SEQ ID NO: 5809989 - DNA, 25 bp, Homo sapien
gcaggttctcacaggtttaagagca

SEQ ID NO: 5809990 - DNA, 25 bp, Homo sapien
atgtggtcgggtctgtgctggactg

SEQ ID NO: 5809991 - DNA, 25 bp, Homo sapien
cctcgatggctgcagactccctgag

SEQ ID NO: 5809992 - DNA, 25 bp, Homo sapien
cgccttccaggagaatgtggggaga

SEQ ID NO: 5809993 - DNA, 25 bp, Homo sapien
atcaccaaggttcgaggctataaaa

SEQ ID NO: 5809994 - DNA, 25 bp, Homo sapien
gcctgagctgatcgaggcccatacc

SEQ ID NO: 5809995 - DNA, 25 bp, Homo sapien
agtctgatggatctgacacttctgc

SEQ ID NO: 5809996 - DNA, 25 bp, Homo sapien
cggggtgcctgcagcgtgggcacca

SEQ ID NO: 5809997 - DNA, 25 bp, Homo sapien
ttgcttgcgctctgtaagaaagaaa

SEQ ID NO: 5809998 - DNA, 25 bp, Homo sapien
tgcctcgatggctgcagactccctg

SEQ ID NO: 5809999 - DNA, 25 bp, Homo sapien
gcaggccctggcacaaatatttaaa

SEQ ID NO: 5810000 - DNA, 25 bp, Homo sapien
gtgaccttctgggcgtacccaggcc

SEQ ID NO: 5810001 - DNA, 25 bp, Homo sapien
tgatgtggtcgggtctgtgctggac

SEQ ID NO: 5810002 - DNA, 25 bp, Homo sapien
cctgggcagcttcagcgggaccctt

SEQ ID NO: 5810003 - DNA, 25 bp, Homo sapien
tcatcctgaccgaagatgacgacga

SEQ ID NO: 5810004 - DNA, 25 bp, Homo sapien
acatctggcttttaaatttctttac

SEQ ID NO: 5810005 - DNA, 25 bp, Homo sapien
ggaccgtattctccaaatagcagag

SEQ ID NO: 5810006 - DNA, 25 bp, Homo sapien
catgcttttgctctggctctccgtg

SEQ ID NO: 5810007 - DNA, 25 bp, Homo sapien
tgccgctgctgaagacgctggacca

SEQ ID NO: 5810008 - DNA, 25 bp, Homo sapien
gcttgtgcagcgactggggctgaca

SEQ ID NO: 5810009 - DNA, 25 bp, Homo sapien
ctgcaggccctggcacaaatattta

SEQ ID NO: 5810010 - DNA, 25 bp, Homo sapien
gacagccctcccatcccccacgtgc

SEQ ID NO: 5810011 - DNA, 25 bp, Homo sapien
ctggtgattgctgcggtgtttgacc

SEQ ID NO: 5810012 - DNA, 25 bp, Homo sapien
cgaggctataaaacatttcttcgtt

SEQ ID NO: 5810013 - DNA, 25 bp, Homo sapien
gaacacaaatgtgcttcctataaaa

SEQ ID NO: 5810014 - DNA, 25 bp, Homo sapien
tttgaggacaaccttctgaatgaga

SEQ ID NO: 5810015 - DNA, 25 bp, Homo sapien
tgacactgcgtgggacgcggagctt

SEQ ID NO: 5810016 - DNA, 25 bp, Homo sapien
ctgaaggacaaggacacggtcgtgc

SEQ ID NO: 5810017 - DNA, 25 bp, Homo sapien
cctcatggtattgatattttgacca

SEQ ID NO: 5810018 - DNA, 25 bp, Homo sapien
ggaggtaccagcgtggctgccgatc

SEQ ID NO: 5810019 - DNA, 25 bp, Homo sapien
gcgctgcacaacctggcccagcagg

SEQ ID NO: 5810020 - DNA, 25 bp, Homo sapien
gcgctggcccttggaggctggcact

SEQ ID NO: 5810021 - DNA, 25 bp, Homo sapien
cagatttatcacacgtcctgatgtc

SEQ ID NO: 5810022 - DNA, 25 bp, Homo sapien
tttttctcgccttgacgggaacctc

SEQ ID NO: 5810023 - DNA, 25 bp, Homo sapien
gaggaccacccctttgctgtgaagt

SEQ ID NO: 5810024 - DNA, 25 bp, Homo sapien
taccgctaccacgtcctgctggggc

SEQ ID NO: 5810025 - DNA, 25 bp, Homo sapien
tagcgctggcccttggaggctggca

SEQ ID NO: 5810026 - DNA, 25 bp, Homo sapien
cgggtggccccgaggaggaggcgga

SEQ ID NO: 5810027 - DNA, 25 bp, Homo sapien
cacatgaggcatgggtcgattctcg

SEQ ID NO: 5810028 - DNA, 25 bp, Homo sapien
gtggtcgggtctgtgctggactgct

SEQ ID NO: 5810029 - DNA, 25 bp, Homo sapien
ccacgcaagtcttcccgaggctgct

SEQ ID NO: 5810030 - DNA, 25 bp, Homo sapien
acaggtttaagagcagttacccaca

SEQ ID NO: 5810031 - DNA, 25 bp, Homo sapien
gtacccaggccccagctggtgcccc

SEQ ID NO: 5810032 - DNA, 25 bp, Homo sapien
gatcagccactgggatggggtcatc

SEQ ID NO: 5810033 - DNA, 25 bp, Homo sapien
aggcccatacctgtgagcgcatcat

SEQ ID NO: 5810034 - DNA, 25 bp, Homo sapien
gtctcgactcgtggatgttgtcgcc

SEQ ID NO: 5810035 - DNA, 25 bp, Homo sapien
cactggtgattgctgcggtgtttga

SEQ ID NO: 5810036 - DNA, 25 bp, Homo sapien
gctgatccggaagaccacggccagc

SEQ ID NO: 5810037 - DNA, 25 bp, Homo sapien
tgatcgaggcccatacctgtgagcg

SEQ ID NO: 5810038 - DNA, 25 bp, Homo sapien
gaacctcctcacccagcctgggcaa

SEQ ID NO: 5810039 - DNA, 25 bp, Homo sapien
acttgaacacaaatgtgcttcctat

SEQ ID NO: 5810040 - DNA, 25 bp, Homo sapien
atgatcgtcagttatacaggggtct

SEQ ID NO: 5810041 - DNA, 25 bp, Homo sapien
gtggtgagagagcagcgcaaccgtc

SEQ ID NO: 5810042 - DNA, 25 bp, Homo sapien
tgccggctttcctgagtacacgcag

SEQ ID NO: 5810043 - DNA, 25 bp, Homo sapien
ggctttcctgagtacacgcagccaa

SEQ ID NO: 5810044 - DNA, 25 bp, Homo sapien
ctatgatcgtcagttatacaggggt

SEQ ID NO: 5810045 - DNA, 25 bp, Homo sapien
ctacgtgtgctgggccttcgcgcgt

SEQ ID NO: 5810046 - DNA, 25 bp, Homo sapien
aggagctgaagccctttgtgactgc

SEQ ID NO: 5810047 - DNA, 25 bp, Homo sapien
cagtgcagggcctgaagcagattca

SEQ ID NO: 5810048 - DNA, 25 bp, Homo sapien
ccaacgtcagggacgccgcctgcta

SEQ ID NO: 5810049 - DNA, 25 bp, Homo sapien
gctgctgggccgcctgcgggaggtg

SEQ ID NO: 5810050 - DNA, 25 bp, Homo sapien
tgtctggcgctggcagagctgggca

SEQ ID NO: 5810051 - DNA, 25 bp, Homo sapien
gtcttcccgaggctgctgtccatga

SEQ ID NO: 5810052 - DNA, 25 bp, Homo sapien
agaggggacgtgggcacctgggtcc

SEQ ID NO: 5810053 - DNA, 25 bp, Homo sapien
aagcggggtgcctgcagcgtgggca

SEQ ID NO: 5810054 - DNA, 25 bp, Homo sapien
cgagagttggctgcgagggcgctgc

SEQ ID NO: 5810055 - DNA, 25 bp, Homo sapien
ttgaagggtagcgctggcccttgga

SEQ ID NO: 5810056 - DNA, 25 bp, Homo sapien
ggccggtgtggaaagcctcgcacag

SEQ ID NO: 5810057 - DNA, 25 bp, Homo sapien
gatttactgtgcgctgctgggctgc

SEQ ID NO: 5810058 - DNA, 25 bp, Homo sapien
agttgtcactttccaaaatgccctt

SEQ ID NO: 5810059 - DNA, 25 bp, Homo sapien
acctggttaccatgaagatcagcca

SEQ ID NO: 5810060 - DNA, 25 bp, Homo sapien
cttgtgtccagatttatcacacgtc

SEQ ID NO: 5810061 - DNA, 25 bp, Homo sapien
atttggtcacaattcagaatcccaa

SEQ ID NO: 5810062 - DNA, 25 bp, Homo sapien
cgaggaggaggcggaggacgagaca

SEQ ID NO: 5810063 - DNA, 25 bp, Homo sapien
gccattgcgaggatttgccagactg

SEQ ID NO: 5810064 - DNA, 25 bp, Homo sapien
ctgtgctggactgcttcagtttcca

SEQ ID NO: 5810065 - DNA, 25 bp, Homo sapien
aggggacgtgggcacctgggtccgc

SEQ ID NO: 5810066 - DNA, 25 bp, Homo sapien
acaaggcccgagatgcagctgctgt

SEQ ID NO: 5810067 - DNA, 25 bp, Homo sapien
ccgagatggccctgagcgacgaacc

SEQ ID NO: 5810068 - DNA, 25 bp, Homo sapien
gacggcttgaaggccattgcgagga

SEQ ID NO: 5810069 - DNA, 25 bp, Homo sapien
tgctggggctagtcgtgtccctggg

SEQ ID NO: 5810070 - DNA, 25 bp, Homo sapien
tggacccgcaccttgaatggatgat

SEQ ID NO: 5810071 - DNA, 25 bp, Homo sapien
tcacaattcagaatcccaaggacca

SEQ ID NO: 5810072 - DNA, 25 bp, Homo sapien
aggaggaccacccctttgctgtgaa

SEQ ID NO: 5810073 - DNA, 25 bp, Homo sapien
ggctctccgtgacctgcctgatccc

SEQ ID NO: 5810074 - DNA, 25 bp, Homo sapien
acgacgaagatgacgacgtcccaga

SEQ ID NO: 5810075 - DNA, 25 bp, Homo sapien
gcgggacccttctgcagatctttga

SEQ ID NO: 5810076 - DNA, 25 bp, Homo sapien
gctggcactagctgacagcttttcc

SEQ ID NO: 5810077 - DNA, 25 bp, Homo sapien
aatgtggggagacagggcactttcc

SEQ ID NO: 5810078 - DNA, 25 bp, Homo sapien
ggtccgcaaggccgccatgaccagt

SEQ ID NO: 5810079 - DNA, 25 bp, Homo sapien
catggaaaacgtgaagactgtttgc

SEQ ID NO: 5810080 - DNA, 25 bp, Homo sapien
aatgtccataatggaccgtattctc

SEQ ID NO: 5810081 - DNA, 25 bp, Homo sapien
gcaagatcagacatctccagcttcc

SEQ ID NO: 5810082 - DNA, 25 bp, Homo sapien
tgcactggtgattgctgcggtgttt

SEQ ID NO: 5810083 - DNA, 25 bp, Homo sapien
agctcatgagacaagcagtgtgtgt

SEQ ID NO: 5810084 - DNA, 25 bp, Homo sapien
ttcttcgtttatttcctcatgaagt

SEQ ID NO: 5810085 - DNA, 25 bp, Homo sapien
tctggcgctggcagagctgggcagg

SEQ ID NO: 5810086 - DNA, 25 bp, Homo sapien
gccctggcacaaatatttaaacatg

SEQ ID NO: 5810087 - DNA, 25 bp, Homo sapien
ttctccaaatagcagagtcctactt

SEQ ID NO: 5810088 - DNA, 25 bp, Homo sapien
ggtgtggaaagcctcgcacagtggt

SEQ ID NO: 5810089 - DNA, 25 bp, Homo sapien
tttgatttttctcgccttgacggga

SEQ ID NO: 5810090 - DNA, 25 bp, Homo sapien
cgtgaactggagtgcaccttcccag

SEQ ID NO: 5810091 - DNA, 25 bp, Homo sapien
tgtgtctgctcctctgccaccgttt

SEQ ID NO: 5810092 - DNA, 25 bp, Homo sapien
catgaagatcagccactgggatggg

SEQ ID NO: 5810093 - DNA, 25 bp, Homo sapien
tggctgagttcctggactggagcct

SEQ ID NO: 5810094 - DNA, 25 bp, Homo sapien
ttccaggagactgacaaggcgtggc

SEQ ID NO: 5810095 - DNA, 25 bp, Homo sapien
tttgtgactgcaatctcgagtgcac

SEQ ID NO: 5810096 - DNA, 25 bp, Homo sapien
ttgtcactttccaaaatgcccttta

SEQ ID NO: 5810097 - DNA, 25 bp, Homo sapien
gcgctctgtaagaaagaaatcaaga

SEQ ID NO: 5810098 - DNA, 25 bp, Homo sapien
gggtctgtgctggactgcttcagtt

SEQ ID NO: 5810099 - DNA, 25 bp, Homo sapien
aggagagacggcttgaaggccattg

SEQ ID NO: 5810100 - DNA, 25 bp, Homo sapien
cttgacgggaacctcctcacccagc

SEQ ID NO: 5810101 - DNA, 25 bp, Homo sapien
gagacggcttgaaggccattgcgag

SEQ ID NO: 5810102 - DNA, 25 bp, Homo sapien
gcatgggggatgtctggcgctggca

SEQ ID NO: 5810103 - DNA, 25 bp, Homo sapien
gcccttggaggctggcactagctga

SEQ ID NO: 5810104 - DNA, 25 bp, Homo sapien
cacgaatgtccataatggaccgtat

SEQ ID NO: 5810105 - DNA, 25 bp, Homo sapien
gtcctgctggggctagtcgtgtccc

SEQ ID NO: 5810106 - DNA, 25 bp, Homo sapien
ctgaagacgctggaccacgtgctca

SEQ ID NO: 5810107 - DNA, 25 bp, Homo sapien
ctgcagctcctcactcagggtcaga

SEQ ID NO: 5810108 - DNA, 25 bp, Homo sapien
gagttcagcgccacgcaagtcttcc

SEQ ID NO: 5810109 - DNA, 25 bp, Homo sapien
ttataagtgtgtttattgccggctt

SEQ ID NO: 5810110 - DNA, 25 bp, Homo sapien
tgaaaggccggctccagcaggttct

SEQ ID NO: 5810111 - DNA, 25 bp, Homo sapien
ccagagccctggcggatgatgtggt

SEQ ID NO: 5810112 - DNA, 25 bp, Homo sapien
tccccggcgacgtgaggaggcaggc

SEQ ID NO: 5810113 - DNA, 25 bp, Homo sapien
cctgaccgaagatgacgacgaagat

SEQ ID NO: 5810114 - DNA, 25 bp, Homo sapien
atccttcatccctggctttcgcgct

SEQ ID NO: 5810115 - DNA, 25 bp, Homo sapien
gcactttccctcatggtattgatat

SEQ ID NO: 5810116 - DNA, 25 bp, Homo sapien
aggccagtgagaagattgaccgttt

SEQ ID NO: 5810117 - DNA, 25 bp, Homo sapien
gtgtgttttaatagaaaagttgtca

SEQ ID NO: 5810118 - DNA, 25 bp, Homo sapien
aggtttaagagcagttacccacact

SEQ ID NO: 5810119 - DNA, 25 bp, Homo sapien
gatgtcttgttcctgagggaggccg

SEQ ID NO: 5810120 - DNA, 25 bp, Homo sapien
cagcaggccagtgagaagattgacc

SEQ ID NO: 5810121 - DNA, 25 bp, Homo sapien
aaagctgtttcccaggtccgatgtg

SEQ ID NO: 5810122 - DNA, 25 bp, Homo sapien
gtagagcctgttttagatttggtca

SEQ ID NO: 5810123 - DNA, 25 bp, Homo sapien
aatcaagaattcaaaagatatccag

SEQ ID NO: 5810124 - DNA, 25 bp, Homo sapien
gtacatctggcttttaaatttcttt

SEQ ID NO: 5810125 - DNA, 25 bp, Homo sapien
tgaagcttgtgcagcgactggggct

SEQ ID NO: 5810126 - DNA, 25 bp, Homo sapien
tgctggctcggagccagcctgagct

SEQ ID NO: 5810127 - DNA, 25 bp, Homo sapien
gtgtgtttattgccggctttcctga

SEQ ID NO: 5810128 - DNA, 25 bp, Homo sapien
gcaaccagaccctgctgcggaagct

SEQ ID NO: 5810129 - DNA, 25 bp, Homo sapien
ggatgttgtcgccgtgatcctgaag

SEQ ID NO: 5810130 - DNA, 25 bp, Homo sapien
aggctataaaacatttcttcgttta

SEQ ID NO: 5810131 - DNA, 25 bp, Homo sapien
gaaagcctcgcacagtggtgcctcc

SEQ ID NO: 5810132 - DNA, 25 bp, Homo sapien
cccttctgcagatctttgaggacaa

SEQ ID NO: 5810133 - DNA, 25 bp, Homo sapien
gggaacctcctcacccagcctgggc

SEQ ID NO: 5810134 - DNA, 25 bp, Homo sapien
tcgatggctgcagactccctgagag

SEQ ID NO: 5810135 - DNA, 25 bp, Homo sapien
atctgcagctcctcactcagggtca

SEQ ID NO: 5810136 - DNA, 25 bp, Homo sapien
cacgcatcacccagctccttgggct

SEQ ID NO: 5810137 - DNA, 25 bp, Homo sapien
acgacgagaagcggggtgcctgcag

SEQ ID NO: 5810138 - DNA, 25 bp, Homo sapien
cgctcctgcactttgacagccctcc

SEQ ID NO: 5810139 - DNA, 25 bp, Homo sapien
tacctcacccctgcctggtgaggat

SEQ ID NO: 5810140 - DNA, 25 bp, Homo sapien
tgctgtgaagttgcttgcgctctgt

SEQ ID NO: 5810141 - DNA, 25 bp, Homo sapien
ctgttggtgtgaaagcaggagcccc

SEQ ID NO: 5810142 - DNA, 25 bp, Homo sapien
aggttctcacaggtttaagagcagt

SEQ ID NO: 5810143 - DNA, 25 bp, Homo sapien
agaagcggggtgcctgcagcgtggg

SEQ ID NO: 5810144 - DNA, 25 bp, Homo sapien
gtccctgggcggcttgacggagtcg

SEQ ID NO: 5810145 - DNA, 25 bp, Homo sapien
ggtgcagttccccggcgacgtgagg

SEQ ID NO: 5810146 - DNA, 25 bp, Homo sapien
caacctggcccagcaggcacccgag

SEQ ID NO: 5810147 - DNA, 25 bp, Homo sapien
aagatcagacatctccagcttccct

SEQ ID NO: 5810148 - DNA, 25 bp, Homo sapien
cgcgcgtgcctatgagcctcaggag

SEQ ID NO: 5810149 - DNA, 25 bp, Homo sapien
gcaagtcttcccgaggctgctgtcc

SEQ ID NO: 5810150 - DNA, 25 bp, Homo sapien
tgaccgaagatgacgacgaagatga

SEQ ID NO: 5810151 - DNA, 25 bp, Homo sapien
ccagtctgatggatctgacacttct

SEQ ID NO: 5810152 - DNA, 25 bp, Homo sapien
tacatcatcaccaaggttcgaggct

SEQ ID NO: 5810153 - DNA, 25 bp, Homo sapien
cactccacccagagcctctttgagt

SEQ ID NO: 5810154 - DNA, 25 bp, Homo sapien
agtgacaaggcccgagatgcagctg

SEQ ID NO: 5810155 - DNA, 25 bp, Homo sapien
acaattcagaatcccaaggaccatg

SEQ ID NO: 5810156 - DNA, 25 bp, Homo sapien
catcatcaccaaggttcgaggctat

SEQ ID NO: 5810157 - DNA, 25 bp, Homo sapien
ctgcgctctggtgacttggggtgga

SEQ ID NO: 5810158 - DNA, 25 bp, Homo sapien
cccaaggaccatgaagcttgggaaa

SEQ ID NO: 5810159 - DNA, 25 bp, Homo sapien
gccgcgggtggccccgaggaggagg

SEQ ID NO: 5810160 - DNA, 25 bp, Homo sapien
gaaaacgtgaagactgtttgcccta

SEQ ID NO: 5810161 - DNA, 25 bp, Homo sapien
aggccccagctggtgccccagcctg

SEQ ID NO: 5810162 - DNA, 25 bp, Homo sapien
cagttccccggcgacgtgaggaggc

SEQ ID NO: 5810163 - DNA, 25 bp, Homo sapien
aacgtcagggacgccgcctgctacg

SEQ ID NO: 5810164 - DNA, 25 bp, Homo sapien
cgactcgtggatgttgtcgccgtga

SEQ ID NO: 5810165 - DNA, 25 bp, Homo sapien
cggcgacgtgaggaggcaggccctc

SEQ ID NO: 5810166 - DNA, 25 bp, Homo sapien
gtcctgatgtcaagcaaagcaagat

SEQ ID NO: 5810167 - DNA, 25 bp, Homo sapien
gcagctcctcactcagggtcagagt

SEQ ID NO: 5810168 - DNA, 25 bp, Homo sapien
tgacgacgaagatgacgacgtccca

SEQ ID NO: 5810169 - DNA, 25 bp, Homo sapien
gtgtggcccagcaggccagtgagaa

SEQ ID NO: 5810170 - DNA, 25 bp, Homo sapien
cccccacgtgccccaccgaggagaa

SEQ ID NO: 5810171 - DNA, 25 bp, Homo sapien
tccttctgaaaggccggctccagca

SEQ ID NO: 5810172 - DNA, 25 bp, Homo sapien
acgcaagtcttcccgaggctgctgt

SEQ ID NO: 5810173 - DNA, 25 bp, Homo sapien
agacataaactgcagaagagcagcc

SEQ ID NO: 5810174 - DNA, 25 bp, Homo sapien
gtgtgaaagcaggagccccagacga

SEQ ID NO: 5810175 - DNA, 25 bp, Homo sapien
tgcctgatcccttttgatttttctc

SEQ ID NO: 5810176 - DNA, 25 bp, Homo sapien
agcgacgaaccggccgcgggtggcc

SEQ ID NO: 5810177 - DNA, 25 bp, Homo sapien
attcaccagcagctctatgatcgtc

SEQ ID NO: 5810178 - DNA, 25 bp, Homo sapien
ggagtgggatctgcgaacacgtgag

SEQ ID NO: 5810179 - DNA, 25 bp, Homo sapien
ctggtgaggatgtcttgttcctgag

SEQ ID NO: 5810180 - DNA, 25 bp, Homo sapien
agcagcgcaaccgtctgtgtgacct

SEQ ID NO: 5810181 - DNA, 25 bp, Homo sapien
gtccaggagagacggcttgaaggcc

SEQ ID NO: 5810182 - DNA, 25 bp, Homo sapien
ttgcgaggatttgccagactgttgg

SEQ ID NO: 5810183 - DNA, 25 bp, Homo sapien
acggctgcttcgacatcttcaccac

SEQ ID NO: 5810184 - DNA, 25 bp, Homo sapien
gcctgcagcgtgggcaccaacgtca

SEQ ID NO: 5810185 - DNA, 25 bp, Homo sapien
gactccctgagagcaaccagaccct

SEQ ID NO: 5810186 - DNA, 25 bp, Homo sapien
aggatgtcttgttcctgagggaggc

SEQ ID NO: 5810187 - DNA, 25 bp, Homo sapien
cttgcagtggtgagagagcagcgca

SEQ ID NO: 5810188 - DNA, 25 bp, Homo sapien
ccttccaggagaatgtggggagaca

SEQ ID NO: 5810189 - DNA, 25 bp, Homo sapien
gcaatggctgataaatgactcgctg

SEQ ID NO: 5810190 - DNA, 25 bp, Homo sapien
acaaacttgcagcccaagagaacag

SEQ ID NO: 5810191 - DNA, 25 bp, Homo sapien
gaagactgtttgccctatgctgcca

SEQ ID NO: 5810192 - DNA, 25 bp, Homo sapien
taccaggagcagcctcatctgttgg

SEQ ID NO: 5810193 - DNA, 25 bp, Homo sapien
gacatagtgcaagatcagacatctc

SEQ ID NO: 5810194 - DNA, 25 bp, Homo sapien
aattcagaatcccaaggaccatgaa

SEQ ID NO: 5810195 - DNA, 25 bp, Homo sapien
gacctgcctgatcccttttgatttt

SEQ ID NO: 5810196 - DNA, 25 bp, Homo sapien
gtgctcagtgacactgcgtgggacg

SEQ ID NO: 5810197 - DNA, 25 bp, Homo sapien
ggtattgatattttgaccacagctg

SEQ ID NO: 5810198 - DNA, 25 bp, Homo sapien
gaggctgctgtccatgacactgagt

SEQ ID NO: 5810199 - DNA, 25 bp, Homo sapien
ggccctggagcggttccgcgtaata

SEQ ID NO: 5810200 - DNA, 25 bp, Homo sapien
tgcagatctttgaggacaaccttct

SEQ ID NO: 5810201 - DNA, 25 bp, Homo sapien
ctcggagccagcctgagctgatcga

SEQ ID NO: 5810202 - DNA, 25 bp, Homo sapien
gctgataaatgactcgctgtggctt

SEQ ID NO: 5810203 - DNA, 25 bp, Homo sapien
aatagaaaagttgtcactttccaaa

SEQ ID NO: 5810204 - DNA, 25 bp, Homo sapien
gagcagcctcatctgttggacccgc

SEQ ID NO: 5810205 - DNA, 25 bp, Homo sapien
accgaagatgacgacgaagatgacg

SEQ ID NO: 5810206 - DNA, 25 bp, Homo sapien
gtggtgcctccagctgttgaagggt

SEQ ID NO: 5810207 - DNA, 25 bp, Homo sapien
cagcgtgttcctgacgctcctgcac

SEQ ID NO: 5810208 - DNA, 25 bp, Homo sapien
ctcaggtgcctcgatggctgcagac

SEQ ID NO: 5810209 - DNA, 25 bp, Homo sapien
tgaatgagagggtgtccgtgccgct

SEQ ID NO: 5810210 - DNA, 25 bp, Homo sapien
gggatgtctggcgctggcagagctg

SEQ ID NO: 5810211 - DNA, 25 bp, Homo sapien
tgcagtggtgagagagcagcgcaac

SEQ ID NO: 5810212 - DNA, 25 bp, Homo sapien
tgctacgtgtgctgggccttcgcgc

SEQ ID NO: 5810213 - DNA, 25 bp, Homo sapien
agtacacgcagccaatgatagacca

SEQ ID NO: 5810214 - DNA, 25 bp, Homo sapien
ccaggagcagcctcatctgttggac

SEQ ID NO: 5810215 - DNA, 25 bp, Homo sapien
cagcctctgccgccttccaggagaa

SEQ ID NO: 5810216 - DNA, 25 bp, Homo sapien
tcagtgacactgcgtgggacgcgga

SEQ ID NO: 5810217 - DNA, 25 bp, Homo sapien
caccaaggttcgaggctataaaaca

SEQ ID NO: 5810218 - DNA, 25 bp, Homo sapien
tcgccgtgatcctgaaggcgctgac

SEQ ID NO: 5810219 - DNA, 25 bp, Homo sapien
atacaggggtctgggaggacagctc

SEQ ID NO: 5810220 - DNA, 25 bp, Homo sapien
gctggcagagctgggcaggagaggc

SEQ ID NO: 5810221 - DNA, 25 bp, Homo sapien
tccaggcttccttctgaaaggccgg

SEQ ID NO: 5810222 - DNA, 25 bp, Homo sapien
ggcccgtcacggaccatctggacga

SEQ ID NO: 5810223 - DNA, 25 bp, Homo sapien
atgtttcccagatttactgtgcgct

SEQ ID NO: 5810224 - DNA, 25 bp, Homo sapien
cccgagatgcagctgctgtccttgt

SEQ ID NO: 5810225 - DNA, 25 bp, Homo sapien
cagtggtgagagagcagcgcaaccg

SEQ ID NO: 5810226 - DNA, 25 bp, Homo sapien
gaagacgctggaccacgtgctcacc

SEQ ID NO: 5810227 - DNA, 25 bp, Homo sapien
cctctttgagtacatgaagggcatt

SEQ ID NO: 5810228 - DNA, 25 bp, Homo sapien
ctcgcacagtggtgcctccagctgt

SEQ ID NO: 5810229 - DNA, 25 bp, Homo sapien
cttcgtttatttcctcatgaagttg

SEQ ID NO: 5810230 - DNA, 25 bp, Homo sapien
ggccagccaggtgtacgagacattg

SEQ ID NO: 5810231 - DNA, 25 bp, Homo sapien
tttacatcatcaccaaggttcgagg

SEQ ID NO: 5810232 - DNA, 25 bp, Homo sapien
ctcctcactcagggtcagagtgagc

SEQ ID NO: 5810233 - DNA, 25 bp, Homo sapien
tgagcagaagccactcatcctgacc

SEQ ID NO: 5810234 - DNA, 25 bp, Homo sapien
gcctcgcacagtggtgcctccagct

SEQ ID NO: 5810235 - DNA, 25 bp, Homo sapien
gcaggccctgggcagcttcagcggg

SEQ ID NO: 5810236 - DNA, 25 bp, Homo sapien
cctccgtgaactggagtgcaccttc

SEQ ID NO: 5810237 - DNA, 25 bp, Homo sapien
cccagcaggccagtgagaagattga

SEQ ID NO: 5810238 - DNA, 25 bp, Homo sapien
tacgccttgtacaaacttgcagccc

SEQ ID NO: 5810239 - DNA, 25 bp, Homo sapien
gcagcctcatctgttggacccgcac

SEQ ID NO: 5810240 - DNA, 25 bp, Homo sapien
ctgtgtgaccttctgggcgtaccca

SEQ ID NO: 5810241 - DNA, 25 bp, Homo sapien
gccggctccagcaggttctcacagg

SEQ ID NO: 5810242 - DNA, 25 bp, Homo sapien
aacatggaaaacgtgaagactgttt

SEQ ID NO: 5810243 - DNA, 25 bp, Homo sapien
agacgctggaccacgtgctcaccca

SEQ ID NO: 5810244 - DNA, 25 bp, Homo sapien
acggccagccaggtgtacgagacat

SEQ ID NO: 5810245 - DNA, 25 bp, Homo sapien
tccgatgtggcctccgtgaactgga

SEQ ID NO: 5810246 - DNA, 25 bp, Homo sapien
tgcagactccctgagagcaaccaga

SEQ ID NO: 5810247 - DNA, 25 bp, Homo sapien
agtgacgtcgtgggcgcggatgtgc

SEQ ID NO: 5810248 - DNA, 25 bp, Homo sapien
ctttgacagccctcccatcccccac

SEQ ID NO: 5810249 - DNA, 25 bp, Homo sapien
agaacaggcccgtcacggaccatct

SEQ ID NO: 5810250 - DNA, 25 bp, Homo sapien
aggagcagcctcatctgttggaccc

SEQ ID NO: 5810251 - DNA, 25 bp, Homo sapien
gtgtttattgccggctttcctgagt

SEQ ID NO: 5810252 - DNA, 25 bp, Homo sapien
cacaacctggcccagcaggcacccg

SEQ ID NO: 5810253 - DNA, 25 bp, Homo sapien
cctataaaatcatgtaccaagaaaa

SEQ ID NO: 5810254 - DNA, 25 bp, Homo sapien
cgtcagggacgccgcctgctacgtg

SEQ ID NO: 5810255 - DNA, 25 bp, Homo sapien
acctgcgctctggtgacttggggtg

SEQ ID NO: 5810256 - DNA, 25 bp, Homo sapien
gatgtctggcgctggcagagctggg

SEQ ID NO: 5810257 - DNA, 25 bp, Homo sapien
aggaccatgaagcttgggaaacccg

SEQ ID NO: 5810258 - DNA, 25 bp, Homo sapien
cttttcctctctgcacctgcgctct

SEQ ID NO: 5810259 - DNA, 25 bp, Homo sapien
ctgcctggtgaggatgtcttgttcc

SEQ ID NO: 5810260 - DNA, 25 bp, Homo sapien
tccgcgtaataatggacaaatacca

SEQ ID NO: 5810261 - DNA, 25 bp, Homo sapien
gtgctgggccttcgcgcgtgcctat

SEQ ID NO: 5810262 - DNA, 25 bp, Homo sapien
cggtaacagatccaactgtttcctg

SEQ ID NO: 5810263 - DNA, 25 bp, Homo sapien
ggacgaggtggtgactgtgctcagt

SEQ ID NO: 5810264 - DNA, 25 bp, Homo sapien
tgcagccaagggcatcggtaggatg

SEQ ID NO: 5810265 - DNA, 25 bp, Homo sapien
tgcacaacctggcccagcaggcacc

SEQ ID NO: 5810266 - DNA, 25 bp, Homo sapien
cttcccttgtacatctggcttttaa

SEQ ID NO: 5810267 - DNA, 25 bp, Homo sapien
gttgtcgccgtgatcctgaaggcgc

SEQ ID NO: 5810268 - DNA, 25 bp, Homo sapien
ggcgggggcgcggtccccaggctgc

SEQ ID NO: 5810269 - DNA, 25 bp, Homo sapien
tggaaaagctgtttcccaggtccga

SEQ ID NO: 5810270 - DNA, 25 bp, Homo sapien
gggctgcccacctaccgctaccacg

SEQ ID NO: 5810271 - DNA, 25 bp, Homo sapien
cagcgcaaccgtctgtgtgaccttc

SEQ ID NO: 5810272 - DNA, 25 bp, Homo sapien
catagtgcaagatcagacatctcca

SEQ ID NO: 5810273 - DNA, 25 bp, Homo sapien
acccagctccttgggctgcccacct

SEQ ID NO: 5810274 - DNA, 25 bp, Homo sapien
ttgatattttgaccacagctgacta

SEQ ID NO: 5810275 - DNA, 25 bp, Homo sapien
ctccctgagagcaaccagaccctgc

SEQ ID NO: 5810276 - DNA, 25 bp, Homo sapien
cgcccttccaggcttccttctgaaa

SEQ ID NO: 5810277 - DNA, 25 bp, Homo sapien
gcctggtgcctgctgaagccagtcc

SEQ ID NO: 5810278 - DNA, 25 bp, Homo sapien
gagccccagacgaagctgtgtgcgg

SEQ ID NO: 5810279 - DNA, 25 bp, Homo sapien
ccaggctgccgagatggccctgagc

SEQ ID NO: 5810280 - DNA, 25 bp, Homo sapien
acccacggctgcttcgacatcttca

SEQ ID NO: 5810281 - DNA, 25 bp, Homo sapien
tgcactttgacagccctcccatccc

SEQ ID NO: 5810282 - DNA, 25 bp, Homo sapien
gtgagaagattgaccgtttccgtgc

SEQ ID NO: 5810283 - DNA, 25 bp, Homo sapien
cagcgggacccttctgcagatcttt

SEQ ID NO: 5810284 - DNA, 25 bp, Homo sapien
ctgctgtccttgtgtccagatttat

SEQ ID NO: 5810285 - DNA, 25 bp, Homo sapien
gatggggtcatccgagagttggctg

SEQ ID NO: 5810286 - DNA, 25 bp, Homo sapien
gctgcatggacgactacaccacgga

SEQ ID NO: 5810287 - DNA, 25 bp, Homo sapien
gactcgctgtggcttctcgttggcc

SEQ ID NO: 5810288 - DNA, 25 bp, Homo sapien
cgccttgtacaaacttgcagcccaa

SEQ ID NO: 5810289 - DNA, 25 bp, Homo sapien
tcagccactgggatggggtcatccg

SEQ ID NO: 5810290 - DNA, 25 bp, Homo sapien
tggggtggacgcctctgccttcact

SEQ ID NO: 5810291 - DNA, 25 bp, Homo sapien
aagatcagccactgggatggggtca

SEQ ID NO: 5810292 - DNA, 25 bp, Homo sapien
cgatgtagagcctgttttagatttg

SEQ ID NO: 5810293 - DNA, 25 bp, Homo sapien
tacccacacttcccccgaggacgta

SEQ ID NO: 5810294 - DNA, 25 bp, Homo sapien
gcgtggctgccgatctttggctgca

SEQ ID NO: 5810295 - DNA, 25 bp, Homo sapien
cgtgccccaccgaggagaactggaa

SEQ ID NO: 5810296 - DNA, 25 bp, Homo sapien
cagatctttgaggacaaccttctga

SEQ ID NO: 5810297 - DNA, 25 bp, Homo sapien
gaaaagttgtcactttccaaaatgc

SEQ ID NO: 5810298 - DNA, 25 bp, Homo sapien
gaattcaaaagatatccagaagctc

SEQ ID NO: 5810299 - DNA, 25 bp, Homo sapien
tcgggtctgtgctggactgcttcag

SEQ ID NO: 5810300 - DNA, 25 bp, Homo sapien
aggccattgcgaggatttgccagac

SEQ ID NO: 5810301 - DNA, 25 bp, Homo sapien
ggaccatctggacgagcaggcagtg

SEQ ID NO: 5810302 - DNA, 25 bp, Homo sapien
gagccagcctgagctgatcgaggcc

SEQ ID NO: 5810303 - DNA, 25 bp, Homo sapien
ttcccaggtccgatgtggcctccgt

SEQ ID NO: 5810304 - DNA, 25 bp, Homo sapien
ttcagtttccaggagactgacaagg

SEQ ID NO: 5810305 - DNA, 25 bp, Homo sapien
ggcttttaaatttctttacatcatc

SEQ ID NO: 5810306 - DNA, 25 bp, Homo sapien
tgacaaggcccgagatgcagctgct

SEQ ID NO: 5810307 - DNA, 25 bp, Homo sapien
caatctggcccgttcctccttccag

SEQ ID NO: 5810308 - DNA, 25 bp, Homo sapien
gcgacgtgaggaggcaggccctcct

SEQ ID NO: 5810309 - DNA, 25 bp, Homo sapien
cggcgcggagcgcgaggtggccctg

SEQ ID NO: 5810310 - DNA, 25 bp, Homo sapien
gaggaggcggaggacgagacactgg

SEQ ID NO: 5810311 - DNA, 25 bp, Homo sapien
tccagaagctcctgtcaggcatcgc

SEQ ID NO: 5810312 - DNA, 25 bp, Homo sapien
agcacgaatgtccataatggaccgt

SEQ ID NO: 5810313 - DNA, 25 bp, Homo sapien
actttccctcatggtattgatattt

SEQ ID NO: 5810314 - DNA, 25 bp, Homo sapien
accttctgaatgagagggtgtccgt

SEQ ID NO: 5810315 - DNA, 25 bp, Homo sapien
agagcgacccgcaggccctgggcag

SEQ ID NO: 5810316 - DNA, 25 bp, Homo sapien
cagcctggtgcctgctgaagccagt

SEQ ID NO: 5810317 - DNA, 25 bp, Homo sapien
agttcctggactggagcctgtgcaa

SEQ ID NO: 5810318 - DNA, 25 bp, Homo sapien
ctgcgggaggtgcacggcggcggcg

SEQ ID NO: 5810319 - DNA, 25 bp, Homo sapien
gagagacggcttgaaggccattgcg

SEQ ID NO: 5810320 - DNA, 25 bp, Homo sapien
gctgatcgaggcccatacctgtgag

SEQ ID NO: 5810321 - DNA, 25 bp, Homo sapien
cgaagatgacgacgtcccagagggg

SEQ ID NO: 5810322 - DNA, 25 bp, Homo sapien
tgacctacgacgagaagcggggtgc

SEQ ID NO: 5810323 - DNA, 25 bp, Homo sapien
agatttggtcacaattcagaatccc

SEQ ID NO: 5810324 - DNA, 25 bp, Homo sapien
caggcccgtcacggaccatctggac

SEQ ID NO: 5810325 - DNA, 25 bp, Homo sapien
tctgcagccaagggcatcggtagga

SEQ ID NO: 5810326 - DNA, 25 bp, Homo sapien
gactggagcctgtgcaatctggccc

SEQ ID NO: 5810327 - DNA, 25 bp, Homo sapien
ggtcgggtctgtgctggactgcttc

SEQ ID NO: 5810328 - DNA, 25 bp, Homo sapien
gagatggccctgagcgacgaaccgg

SEQ ID NO: 5810329 - DNA, 25 bp, Homo sapien
tgcgggatggtgcagttccccggcg

SEQ ID NO: 5810330 - DNA, 25 bp, Homo sapien
caccgtaattgatggttggcaatgg

SEQ ID NO: 5810331 - DNA, 25 bp, Homo sapien
ctcctgcagctgtgtctgctcctct

SEQ ID NO: 5810332 - DNA, 25 bp, Homo sapien
gcctctgccttcacttgaacacaaa

SEQ ID NO: 5810333 - DNA, 25 bp, Homo sapien
ggcttgacggagtcgacgatccggc

SEQ ID NO: 5810334 - DNA, 25 bp, Homo sapien
tcatgaagttgccgatgtagagcct

SEQ ID NO: 5810335 - DNA, 25 bp, Homo sapien
ccatgcagggggtcatcaccatgga

SEQ ID NO: 5810336 - DNA, 25 bp, Homo sapien
gacagggcactttccctcatggtat

SEQ ID NO: 5810337 - DNA, 25 bp, Homo sapien
caagagaacaggcccgtcacggacc

SEQ ID NO: 5810338 - DNA, 25 bp, Homo sapien
ctgagggaggccggtgtggaaagcc

SEQ ID NO: 5810339 - DNA, 25 bp, Homo sapien
gacacggtcgtgcggtggtctgcag

SEQ ID NO: 5810340 - DNA, 25 bp, Homo sapien
tggcagagctgggcaggagaggcct

SEQ ID NO: 5810341 - DNA, 25 bp, Homo sapien
cggcttgaaggccattgcgaggatt

SEQ ID NO: 5810342 - DNA, 25 bp, Homo sapien
gctgccactgtcctcaggtgcctcg

SEQ ID NO: 5810343 - DNA, 25 bp, Homo sapien
ccatggatgggacgctgcaggccct

SEQ ID NO: 5810344 - DNA, 25 bp, Homo sapien
tgaccgagacataaactgcagaaga

SEQ ID NO: 5810345 - DNA, 25 bp, Homo sapien
actcgtggatgttgtcgccgtgatc

SEQ ID NO: 5810346 - DNA, 25 bp, Homo sapien
ccgggcgctgctgggccgcctgcgg

SEQ ID NO: 5810347 - DNA, 25 bp, Homo sapien
ctgccgatctttggctgcaaatctg

SEQ ID NO: 5810348 - DNA, 25 bp, Homo sapien
tggcgctggcagagctgggcaggag

SEQ ID NO: 5810349 - DNA, 25 bp, Homo sapien
gccagcctgagctgatcgaggccca

SEQ ID NO: 5810350 - DNA, 25 bp, Homo sapien
aacagatccaactgtttcctggtta

SEQ ID NO: 5810351 - DNA, 25 bp, Homo sapien
gcagaggggacgtgggcacctgggt

SEQ ID NO: 5810352 - DNA, 25 bp, Homo sapien
gagtccaggagagacggcttgaagg

SEQ ID NO: 5810353 - DNA, 25 bp, Homo sapien
agagaacaggcccgtcacggaccat

SEQ ID NO: 5810354 - DNA, 25 bp, Homo sapien
atctcgagtgcactggtgattgctg

SEQ ID NO: 5810355 - DNA, 25 bp, Homo sapien
agaagttgcttacgccttgtacaaa

SEQ ID NO: 5810356 - DNA, 25 bp, Homo sapien
cccgttcctccttccagaccatgca

SEQ ID NO: 5810357 - DNA, 25 bp, Homo sapien
gggacgtgggcacctgggtccgcaa

SEQ ID NO: 5810358 - DNA, 25 bp, Homo sapien
tttatcacacgtcctgatgtcaagc

SEQ ID NO: 5810359 - DNA, 25 bp, Homo sapien
gaggacgtaagttttgctgagtcca

SEQ ID NO: 5810360 - DNA, 25 bp, Homo sapien
ggaggaggaccacccctttgctgtg

SEQ ID NO: 5810361 - DNA, 25 bp, Homo sapien
tgctctggctctccgtgacctgcct

SEQ ID NO: 5810362 - DNA, 25 bp, Homo sapien
tgcctatgagcctcaggagctgaag

SEQ ID NO: 5810363 - DNA, 25 bp, Homo sapien
cagaagccactcatcctgaccgaag

SEQ ID NO: 5810364 - DNA, 25 bp, Homo sapien
tggccttgggcgcccttccaggctt

SEQ ID NO: 5810365 - DNA, 25 bp, Homo sapien
ccaccgaggagaactggaaaagctg

SEQ ID NO: 5810366 - DNA, 25 bp, Homo sapien
actgcgtgggacgcggagcttgcag

SEQ ID NO: 5810367 - DNA, 25 bp, Homo sapien
gatcgtcagttatacaggggtctgg

SEQ ID NO: 5810368 - DNA, 25 bp, Homo sapien
cttctgcagatctttgaggacaacc

SEQ ID NO: 5810369 - DNA, 25 bp, Homo sapien
gtcaagcaaagcaagatggctgagt

SEQ ID NO: 5810370 - DNA, 25 bp, Homo sapien
ggtggtgactgtgctcagtgacact

SEQ ID NO: 5810371 - DNA, 25 bp, Homo sapien
gcttcagcgggacccttctgcagat

SEQ ID NO: 5810372 - DNA, 25 bp, Homo sapien
ctatgctgccactgtcctcaggtgc

SEQ ID NO: 5810373 - DNA, 25 bp, Homo sapien
gaccacagctgactattttgccgtc

SEQ ID NO: 5810374 - DNA, 25 bp, Homo sapien
gcaggcacccgagttcagcgccacg

SEQ ID NO: 5810375 - DNA, 25 bp, Homo sapien
agtgagcagaagccactcatcctga

SEQ ID NO: 5810376 - DNA, 25 bp, Homo sapien
agcttcccttgtacatctggctttt

SEQ ID NO: 5810377 - DNA, 25 bp, Homo sapien
caggcttcccagagccctggcggat

SEQ ID NO: 5810378 - DNA, 25 bp, Homo sapien
caaataccaggagcagcctcatctg

SEQ ID NO: 5810379 - DNA, 25 bp, Homo sapien
tgccactgtcctcaggtgcctcgat

SEQ ID NO: 5810380 - DNA, 25 bp, Homo sapien
catgaagggcattcagagcgacccg

SEQ ID NO: 5810381 - DNA, 25 bp, Homo sapien
atgctgccactgtcctcaggtgcct

SEQ ID NO: 5810382 - DNA, 25 bp, Homo sapien
acccaggccccagctggtgccccag

SEQ ID NO: 5810383 - DNA, 25 bp, Homo sapien
ctggcccgttcctccttccagacca

SEQ ID NO: 5810384 - DNA, 25 bp, Homo sapien
gtgtccctgggcggcttgacggagt

SEQ ID NO: 5810385 - DNA, 25 bp, Homo sapien
cttctgctggctcggagccagcctg

SEQ ID NO: 5810386 - DNA, 25 bp, Homo sapien
tgcctccagctgttgaagggtagcg

SEQ ID NO: 5810387 - DNA, 25 bp, Homo sapien
cttggggtggacgcctctgccttca

SEQ ID NO: 5810388 - DNA, 25 bp, Homo sapien
gggagacagggcactttccctcatg

SEQ ID NO: 5810389 - DNA, 25 bp, Homo sapien
ataatggacaaataccaggagcagc

SEQ ID NO: 5810390 - DNA, 25 bp, Homo sapien
aggagccccagacgaagctgtgtgc

SEQ ID NO: 5810391 - DNA, 25 bp, Homo sapien
ggatctgacacttctgctggctcgg

SEQ ID NO: 5810392 - DNA, 25 bp, Homo sapien
gatcttcacatgaggcatgggtcga

SEQ ID NO: 5810393 - DNA, 25 bp, Homo sapien
tgtcagtgacaaggcccgagatgca

SEQ ID NO: 5810394 - DNA, 25 bp, Homo sapien
tcctgacgctcctgcactttgacag

SEQ ID NO: 5810395 - DNA, 25 bp, Homo sapien
cctccagctgttgaagggtagcgct

SEQ ID NO: 5810396 - DNA, 25 bp, Homo sapien
aagttttgctgagtccaggagagac

SEQ ID NO: 5810397 - DNA, 25 bp, Homo sapien
aagttgcttacgccttgtacaaact

SEQ ID NO: 5810398 - DNA, 25 bp, Homo sapien
gtgctcacccacggctgcttcgaca

SEQ ID NO: 5810399 - DNA, 25 bp, Homo sapien
gagcaaccagaccctgctgcggaag

SEQ ID NO: 5810400 - DNA, 25 bp, Homo sapien
gcctttggcgcggcgctggaagcgt

SEQ ID NO: 5810401 - DNA, 25 bp, Homo sapien
tgaggatgtcttgttcctgagggag

SEQ ID NO: 5810402 - DNA, 25 bp, Homo sapien
ggcggcgcggagcgcgaggtggccc

SEQ ID NO: 5810403 - DNA, 25 bp, Homo sapien
cgtgcctatgagcctcaggagctga

SEQ ID NO: 5810404 - DNA, 25 bp, Homo sapien
agacactggcctttggcgcggcgct

SEQ ID NO: 5810405 - DNA, 25 bp, Homo sapien
tgtttgaccgagacataaactgcag

SEQ ID NO: 5810406 - DNA, 25 bp, Homo sapien
tatcacacgtcctgatgtcaagcaa

SEQ ID NO: 5810407 - DNA, 25 bp, Homo sapien
tgggcacctgggtccgcaaggccgc

SEQ ID NO: 5810408 - DNA, 25 bp, Homo sapien
tgaggaggcaggccctcctgcagct

SEQ ID NO: 5810409 - DNA, 25 bp, Homo sapien
agggcctgaagcagattcaccagca

SEQ ID NO: 5810410 - DNA, 25 bp, Homo sapien
gctgttgaagggtagcgctggccct

SEQ ID NO: 5810411 - DNA, 25 bp, Homo sapien
atggatctgacacttctgctggctc

SEQ ID NO: 5810412 - DNA, 25 bp, Homo sapien
cttctgaaaggccggctccagcagg

SEQ ID NO: 5810413 - DNA, 25 bp, Homo sapien
actcatcctgaccgaagatgacgac

SEQ ID NO: 5810414 - DNA, 25 bp, Homo sapien
gcctggtgaggatgtcttgttcctg

SEQ ID NO: 5810415 - DNA, 25 bp, Homo sapien
tgtccttgtgtccagatttatcaca

SEQ ID NO: 5810416 - DNA, 25 bp, Homo sapien
ggcttcccagagccctggcggatga

SEQ ID NO: 5810417 - DNA, 25 bp, Homo sapien
tccgcaaggccgccatgaccagtct

SEQ ID NO: 5810418 - DNA, 25 bp, Homo sapien
tcacctacagtgacgtcgtgggcgc

SEQ ID NO: 5810419 - DNA, 25 bp, Homo sapien
tctggtgacttggggtggacgcctc

SEQ ID NO: 5810420 - DNA, 25 bp, Homo sapien
tacaccacggacagcagaggggacg

SEQ ID NO: 5810421 - DNA, 25 bp, Homo sapien
caaggacacggtcgtgcggtggtct

SEQ ID NO: 5810422 - DNA, 25 bp, Homo sapien
aggtaccagcgtggctgccgatctt

SEQ ID NO: 5810423 - DNA, 25 bp, Homo sapien
gccctgagcgacgaaccggccgcgg

SEQ ID NO: 5810424 - DNA, 25 bp, Homo sapien
ttgttcctgagggaggccggtgtgg

SEQ ID NO: 5810425 - DNA, 25 bp, Homo sapien
tgtgtccagatttatcacacgtcct

SEQ ID NO: 5810426 - DNA, 25 bp, Homo sapien
cacggtcgtgcggtggtctgcagcc

SEQ ID NO: 5810427 - DNA, 25 bp, Homo sapien
gacacttctgctggctcggagccag

SEQ ID NO: 5810428 - DNA, 25 bp, Homo sapien
gttgcttacgccttgtacaaacttg

SEQ ID NO: 5810429 - DNA, 25 bp, Homo sapien
atgtggcctccgtgaactggagtgc

SEQ ID NO: 5810430 - DNA, 25 bp, Homo sapien
cggtcgtgcggtggtctgcagccaa

SEQ ID NO: 5810431 - DNA, 25 bp, Homo sapien
aggcatcgcagtgttctgcgggatg

SEQ ID NO: 5810432 - DNA, 25 bp, Homo sapien
agagagcagcgcaaccgtctgtgtg

SEQ ID NO: 5810433 - DNA, 25 bp, Homo sapien
tgagtacatgaagggcattcagagc

SEQ ID NO: 5810434 - DNA, 25 bp, Homo sapien
tgtttgccctatgctgccactgtcc

SEQ ID NO: 5810435 - DNA, 25 bp, Homo sapien
caggccttcccacgcatcacccagc

SEQ ID NO: 5810436 - DNA, 25 bp, Homo sapien
tggaaagcctcgcacagtggtgcct

SEQ ID NO: 5810437 - DNA, 25 bp, Homo sapien
ccagcctgggcaagcacgaatgtcc

SEQ ID NO: 5810438 - DNA, 25 bp, Homo sapien
gctgccgtctcgactcgtggatgtt

SEQ ID NO: 5810439 - DNA, 25 bp, Homo sapien
gacaccgtaattgatggttggcaat

SEQ ID NO: 5810440 - DNA, 25 bp, Homo sapien
cgcggatgtgctggacgaggtggtg

SEQ ID NO: 5810441 - DNA, 25 bp, Homo sapien
atggtgcagttccccggcgacgtga

SEQ ID NO: 5810442 - DNA, 25 bp, Homo sapien
cagtgagaagattgaccgtttccgt

SEQ ID NO: 5810443 - DNA, 25 bp, Homo sapien
ctggagcggttccgcgtaataatgg

SEQ ID NO: 5810444 - DNA, 25 bp, Homo sapien
atggctggcaggcttcccagagccc

SEQ ID NO: 5810445 - DNA, 25 bp, Homo sapien
accgtattctccaaatagcagagtc

SEQ ID NO: 5810446 - DNA, 25 bp, Homo sapien
ggtgcctcgatggctgcagactccc

SEQ ID NO: 5810447 - DNA, 25 bp, Homo sapien
tttgccctatgctgccactgtcctc

SEQ ID NO: 5810448 - DNA, 25 bp, Homo sapien
gatagagcagctgctggtcgggctg

SEQ ID NO: 5810449 - DNA, 25 bp, Homo sapien
gcaaatctgcagctcctcactcagg

SEQ ID NO: 5810450 - DNA, 25 bp, Homo sapien
cttgggcgcccttccaggcttcctt

SEQ ID NO: 5810451 - DNA, 25 bp, Homo sapien
caaagcaagatggctgagttcctgg

SEQ ID NO: 5810452 - DNA, 25 bp, Homo sapien
caaggcgtggcatgggggatgtctg

SEQ ID NO: 5810453 - DNA, 25 bp, Homo sapien
ctagtcgtgtccctgggcggcttga

SEQ ID NO: 5810454 - DNA, 25 bp, Homo sapien
tccagatcttcacatgaggcatggg

SEQ ID NO: 5810455 - DNA, 25 bp, Homo sapien
agcctgggcaagcacgaatgtccat

SEQ ID NO: 5810456 - DNA, 25 bp, Homo sapien
agcttttcctctctgcacctgcgct

SEQ ID NO: 5810457 - DNA, 25 bp, Homo sapien
cggcgctggaagcgttcggcgagag

SEQ ID NO: 5810458 - DNA, 25 bp, Homo sapien
ttgttggacatagtgcaagatcaga

SEQ ID NO: 5810459 - DNA, 25 bp, Homo sapien
ggtaggatggctggcaggcttccca

SEQ ID NO: 5810460 - DNA, 25 bp, Homo sapien
tgttgttggacatagtgcaagatca

SEQ ID NO: 5810461 - DNA, 25 bp, Homo sapien
ctctgccttcacttgaacacaaatg

SEQ ID NO: 5810462 - DNA, 25 bp, Homo sapien
agctgactattttgccgtcggtaac

SEQ ID NO: 5810463 - DNA, 25 bp, Homo sapien
gacgagacactggcctttggcgcgg

SEQ ID NO: 5810464 - DNA, 25 bp, Homo sapien
tcactcagggtcagagtgagcagaa

SEQ ID NO: 5810465 - DNA, 25 bp, Homo sapien
tgacgggaacctcctcacccagcct

SEQ ID NO: 5810466 - DNA, 25 bp, Homo sapien
gtgcagggcctgaagcagattcacc

SEQ ID NO: 5810467 - DNA, 25 bp, Homo sapien
gtgtgtgttttaatagaaaagttgt

SEQ ID NO: 5810468 - DNA, 25 bp, Homo sapien
gccagtgagaagattgaccgtttcc

SEQ ID NO: 5810469 - DNA, 25 bp, Homo sapien
ggcaggcttcccagagccctggcgg

SEQ ID NO: 5810470 - DNA, 25 bp, Homo sapien
ccactcatcctgaccgaagatgacg

SEQ ID NO: 5810471 - DNA, 25 bp, Homo sapien
cagttatacaggggtctgggaggac

SEQ ID NO: 5810472 - DNA, 25 bp, Homo sapien
catgagacaagcagtgtgtgtttta

SEQ ID NO: 5810473 - DNA, 25 bp, Homo sapien
ccttggaggctggcactagctgaca

SEQ ID NO: 5810474 - DNA, 25 bp, Homo sapien
cacagtggtgcctccagctgttgaa

SEQ ID NO: 5810475 - DNA, 25 bp, Homo sapien
tggcactagctgacagcttttcctc

SEQ ID NO: 5810476 - DNA, 25 bp, Homo sapien
gggacgctgcaggccctggcacaaa

SEQ ID NO: 5810477 - DNA, 25 bp, Homo sapien
tgctgggctgcatggacgactacac

SEQ ID NO: 5810478 - DNA, 25 bp, Homo sapien
caccatggatgggacgctgcaggcc

SEQ ID NO: 5810479 - DNA, 25 bp, Homo sapien
ctgacaaggcgtggcatgggggatg

SEQ ID NO: 5810480 - DNA, 25 bp, Homo sapien
ccctgggcggcttgacggagtcgac

SEQ ID NO: 5810481 - DNA, 25 bp, Homo sapien
actggggctgacattcctgaagccg

SEQ ID NO: 5810482 - DNA, 25 bp, Homo sapien
tgttgaagggtagcgctggcccttg

SEQ ID NO: 5810483 - DNA, 25 bp, Homo sapien
atcctgaaggcgctgacctacgacg

SEQ ID NO: 5810484 - DNA, 25 bp, Homo sapien
gggcgctgctgggccgcctgcggga

SEQ ID NO: 5810485 - DNA, 25 bp, Homo sapien
tccagctgttgaagggtagcgctgg

SEQ ID NO: 5810486 - DNA, 25 bp, Homo sapien
agtgcactggtgattgctgcggtgt

SEQ ID NO: 5810487 - DNA, 25 bp, Homo sapien
ttgctgccgtctcgactcgtggatg

SEQ ID NO: 5810488 - DNA, 25 bp, Homo sapien
cgaggcccatacctgtgagcgcatc

SEQ ID NO: 5810489 - DNA, 25 bp, Homo sapien
gatgtgctggacgaggtggtgactg

SEQ ID NO: 5810490 - DNA, 25 bp, Homo sapien
ttggctgcaaatctgcagctcctca

SEQ ID NO: 5810491 - DNA, 25 bp, Homo sapien
cccagcaggcacccgagttcagcgc

SEQ ID NO: 5810492 - DNA, 25 bp, Homo sapien
tgctcctctgccaccgtttcccgct

SEQ ID NO: 5810493 - DNA, 25 bp, Homo sapien
caaccttctgaatgagagggtgtcc

SEQ ID NO: 5810494 - DNA, 25 bp, Homo sapien
ttctgggcgtacccaggccccagct

SEQ ID NO: 5810495 - DNA, 25 bp, Homo sapien
ttcctataaaatcatgtaccaagaa

SEQ ID NO: 5810496 - DNA, 25 bp, Homo sapien
ccctatgctgccactgtcctcaggt

SEQ ID NO: 5810497 - DNA, 25 bp, Homo sapien
taaacatggaaaacgtgaagactgt

SEQ ID NO: 5810498 - DNA, 25 bp, Homo sapien
cccgcaccttgaatggatgatgaac

SEQ ID NO: 5810499 - DNA, 25 bp, Homo sapien
tgattgctgcggtgtttgaccgaga

SEQ ID NO: 5810500 - DNA, 25 bp, Homo sapien
tctgaatgagagggtgtccgtgccg

SEQ ID NO: 5810501 - DNA, 25 bp, Homo sapien
gatggccctgagcgacgaaccggcc

SEQ ID NO: 5810502 - DNA, 25 bp, Homo sapien
acagctcatgagacaagcagtgtgt

SEQ ID NO: 5810503 - DNA, 25 bp, Homo sapien
ctgtgctcagtgacactgcgtggga

SEQ ID NO: 5810504 - DNA, 25 bp, Homo sapien
gctctagcggagtgggatctgcgaa

SEQ ID NO: 5810505 - DNA, 25 bp, Homo sapien
cttgttgttggacatagtgcaagat

SEQ ID NO: 5810506 - DNA, 25 bp, Homo sapien
agcctcatctgttggacccgcacct

SEQ ID NO: 5810507 - DNA, 25 bp, Homo sapien
taataatggacaaataccaggagca

SEQ ID NO: 5810508 - DNA, 25 bp, Homo sapien
aagcttgtgcagcgactggggctga

SEQ ID NO: 5810509 - DNA, 25 bp, Homo sapien
cgcagtgttctgcgggatggtgcag

SEQ ID NO: 5810510 - DNA, 25 bp, Homo sapien
gagctgatcgaggcccatacctgtg

SEQ ID NO: 5810511 - DNA, 25 bp, Homo sapien
ctccaaatagcagagtcctacttga

SEQ ID NO: 5810512 - DNA, 25 bp, Homo sapien
gcgagagcgcggagacccgggcgct

SEQ ID NO: 5810513 - DNA, 25 bp, Homo sapien
tgatcctgaaggcgctgacctacga

SEQ ID NO: 5810514 - DNA, 25 bp, Homo sapien
gcgcggagacccgggcgctgctggg

SEQ ID NO: 5810515 - DNA, 25 bp, Homo sapien
tttcccgctgatccggaagaccacg

SEQ ID NO: 5810516 - DNA, 25 bp, Homo sapien
tttgctctggctctccgtgacctgc

SEQ ID NO: 5810517 - DNA, 25 bp, Homo sapien
gacttggggtggacgcctctgcctt

SEQ ID NO: 5810518 - DNA, 25 bp, Homo sapien
catgacactgagtccagatcttcac

SEQ ID NO: 5810519 - DNA, 25 bp, Homo sapien
ggcctgttgctgccgtctcgactcg

SEQ ID NO: 5810520 - DNA, 25 bp, Homo sapien
aggcgtggcatgggggatgtctggc

SEQ ID NO: 5810521 - DNA, 25 bp, Homo sapien
ccttcatccctggctttcgcgctct

SEQ ID NO: 5810522 - DNA, 25 bp, Homo sapien
aagcctcgcacagtggtgcctccag

SEQ ID NO: 5810523 - DNA, 25 bp, Homo sapien
cttcaccacggaggaggaccacccc

SEQ ID NO: 5810524 - DNA, 25 bp, Homo sapien
gctggtgccccagcctggtgcctgc

SEQ ID NO: 5810525 - DNA, 25 bp, Homo sapien
ttttaatagaaaagttgtcactttc

SEQ ID NO: 5810526 - DNA, 25 bp, Homo sapien
atccggcactccacccagagcctct

SEQ ID NO: 5810527 - DNA, 25 bp, Homo sapien
ccacggctgcttcgacatcttcacc

SEQ ID NO: 5810528 - DNA, 25 bp, Homo sapien
ccaggccccagctggtgccccagcc

SEQ ID NO: 5810529 - DNA, 25 bp, Homo sapien
ggctgaaggacaaggacacggtcgt

SEQ ID NO: 5810530 - DNA, 25 bp, Homo sapien
ggagacccgggcgctgctgggccgc

SEQ ID NO: 5810531 - DNA, 25 bp, Homo sapien
cccaggtccgatgtggcctccgtga

SEQ ID NO: 5810532 - DNA, 25 bp, Homo sapien
tatccagaagctcctgtcaggcatc

SEQ ID NO: 5810533 - DNA, 25 bp, Homo sapien
tctttacatcatcaccaaggttcga

SEQ ID NO: 5810534 - DNA, 25 bp, Homo sapien
atacctgtgagcgcatcatgtgctg

SEQ ID NO: 5810535 - DNA, 25 bp, Homo sapien
gctaccacgtcctgctggggctagt

SEQ ID NO: 5810536 - DNA, 25 bp, Homo sapien
cccttccaggcttccttctgaaagg

SEQ ID NO: 5810537 - DNA, 25 bp, Homo sapien
acccagcctgggcaagcacgaatgt

SEQ ID NO: 5810538 - DNA, 25 bp, Homo sapien
gttcctgagggaggccggtgtggaa

SEQ ID NO: 5810539 - DNA, 25 bp, Homo sapien
ctacagtgacgtcgtgggcgcggat

SEQ ID NO: 5810540 - DNA, 25 bp, Homo sapien
cagaagagcagcctctgccgccttc

SEQ ID NO: 5810541 - DNA, 25 bp, Homo sapien
tgcttacgccttgtacaaacttgca

SEQ ID NO: 5810542 - DNA, 25 bp, Homo sapien
cgtattctccaaatagcagagtcct

SEQ ID NO: 5810543 - DNA, 25 bp, Homo sapien
actgtttcctggttataagtgtgtt

SEQ ID NO: 5810544 - DNA, 25 bp, Homo sapien
ggcggatgatgtggtcgggtctgtg

SEQ ID NO: 5810545 - DNA, 25 bp, Homo sapien
cagctgttgaagggtagcgctggcc

SEQ ID NO: 5810546 - DNA, 25 bp, Homo sapien
atgggtcgattctcgcctgcgcaga

SEQ ID NO: 5810547 - DNA, 25 bp, Homo sapien
tgcacggcggcggcgcggagcgcga

SEQ ID NO: 5810548 - DNA, 25 bp, Homo sapien
cctgctacgtgtgctgggccttcgc

SEQ ID NO: 5810549 - DNA, 25 bp, Homo sapien
gaatcccaaggaccatgaagcttgg

SEQ ID NO: 5810550 - DNA, 25 bp, Homo sapien
ccagtcctggagcccatacctcacc

SEQ ID NO: 5810551 - DNA, 25 bp, Homo sapien
ttggcgcggcgctggaagcgttcgg

SEQ ID NO: 5810552 - DNA, 25 bp, Homo sapien
agagcagcctctgccgccttccagg

SEQ ID NO: 5810553 - DNA, 25 bp, Homo sapien
tccgtgctcacgccgccagcgtgtt

SEQ ID NO: 5810554 - DNA, 25 bp, Homo sapien
tcctggttataagtgtgtttattgc

SEQ ID NO: 5810555 - DNA, 25 bp, Homo sapien
ccttgggctgcccacctaccgctac

SEQ ID NO: 5810556 - DNA, 25 bp, Homo sapien
gtgtgaccttctgggcgtacccagg

SEQ ID NO: 5810557 - DNA, 25 bp, Homo sapien
ttgaacacaaatgtgcttcctataa

SEQ ID NO: 5810558 - DNA, 25 bp, Homo sapien
tgaaggcgctgacctacgacgagaa

SEQ ID NO: 5810559 - DNA, 25 bp, Homo sapien
gactgtgctcagtgacactgcgtgg

SEQ ID NO: 5810560 - DNA, 25 bp, Homo sapien
tccttccagaccatgcagggggtca

SEQ ID NO: 5810561 - DNA, 25 bp, Homo sapien
ggcctgaagcagattcaccagcagc

SEQ ID NO: 5810562 - DNA, 25 bp, Homo sapien
ccaggagactgacaaggcgtggcat

SEQ ID NO: 5810563 - DNA, 25 bp, Homo sapien
ggtgattgctgcggtgtttgaccga

SEQ ID NO: 5810564 - DNA, 25 bp, Homo sapien
tgctgtgtggcccagcaggccagtg

SEQ ID NO: 5810565 - DNA, 25 bp, Homo sapien
gaaatcaagaattcaaaagatatcc

SEQ ID NO: 5810566 - DNA, 25 bp, Homo sapien
tgaacttgttgttggacatagtgca

SEQ ID NO: 5810567 - DNA, 25 bp, Homo sapien
agcttgggaaacccgctacatgctt

SEQ ID NO: 5810568 - DNA, 25 bp, Homo sapien
attttgccgtcggtaacagatccaa

SEQ ID NO: 5810569 - DNA, 25 bp, Homo sapien
gcaaccgtctgtgtgaccttctggg

SEQ ID NO: 5810570 - DNA, 25 bp, Homo sapien
tgtccatgacactgagtccagatct

SEQ ID NO: 5810571 - DNA, 25 bp, Homo sapien
tggacgagcaggcagtgcagggcct

SEQ ID NO: 5810572 - DNA, 25 bp, Homo sapien
gggctgacattcctgaagccgaagg

SEQ ID NO: 5810573 - DNA, 25 bp, Homo sapien
ctcctgtcaggcatcgcagtgttct

SEQ ID NO: 5810574 - DNA, 25 bp, Homo sapien
ctcgagtgcactggtgattgctgcg

SEQ ID NO: 5810575 - DNA, 25 bp, Homo sapien
gttccgcgtaataatggacaaatac

SEQ ID NO: 5810576 - DNA, 25 bp, Homo sapien
cctgaaggcgctgacctacgacgag

SEQ ID NO: 5810577 - DNA, 25 bp, Homo sapien
ctgtgagcgcatcatgtgctgtgtg

SEQ ID NO: 5810578 - DNA, 25 bp, Homo sapien
ctgcagcgtgggcaccaacgtcagg

SEQ ID NO: 5810579 - DNA, 25 bp, Homo sapien
accgtttcccgctgatccggaagac

SEQ ID NO: 5810580 - DNA, 25 bp, Homo sapien
gtgtgctgggccttcgcgcgtgcct

SEQ ID NO: 5810581 - DNA, 25 bp, Homo sapien
cctgatgtcaagcaaagcaagatgg

SEQ ID NO: 5810582 - DNA, 25 bp, Homo sapien
tccgagagttggctgcgagggcgct

SEQ ID NO: 5810583 - DNA, 25 bp, Homo sapien
actggcctttggcgcggcgctggaa

SEQ ID NO: 5810584 - DNA, 25 bp, Homo sapien
acccgctacatgcttttgctctggc

SEQ ID NO: 5810585 - DNA, 25 bp, Homo sapien
tgggaaacccgctacatgcttttgc

SEQ ID NO: 5810586 - DNA, 25 bp, Homo sapien
aaacccgctacatgcttttgctctg

SEQ ID NO: 5810587 - DNA, 25 bp, Homo sapien
ttgcagcccaagagaacaggcccgt

SEQ ID NO: 5810588 - DNA, 25 bp, Homo sapien
gaggatttgccagactgttggtgtg

SEQ ID NO: 5810589 - DNA, 25 bp, Homo sapien
cgactacaccacggacagcagaggg

SEQ ID NO: 5810590 - DNA, 25 bp, Homo sapien
gaggcaggccctcctgcagctgtgt

SEQ ID NO: 5810591 - DNA, 25 bp, Homo sapien
atcatgtgctgtgtggcccagcagg

SEQ ID NO: 5810592 - DNA, 25 bp, Homo sapien
aaggcccgagatgcagctgctgtcc

SEQ ID NO: 5810593 - DNA, 25 bp, Homo sapien
ccctgcctggtgaggatgtcttgtt

SEQ ID NO: 5810594 - DNA, 25 bp, Homo sapien
ggtagcgctggcccttggaggctgg

SEQ ID NO: 5810595 - DNA, 25 bp, Homo sapien
tgagtacacgcagccaatgatagac

SEQ ID NO: 5810596 - DNA, 25 bp, Homo sapien
ggtggccccgaggaggaggcggagg

SEQ ID NO: 5810597 - DNA, 25 bp, Homo sapien
cagcctgagctgatcgaggcccata

SEQ ID NO: 5810598 - DNA, 25 bp, Homo sapien
tcgcctgcgcagaagttgcttacgc

SEQ ID NO: 5810599 - DNA, 25 bp, Homo sapien
gatgaacttgttgttggacatagtg

SEQ ID NO: 5810600 - DNA, 25 bp, Homo sapien
aagaattcaaaagatatccagaagc

SEQ ID NO: 5810601 - DNA, 25 bp, Homo sapien
gcggagacccgggcgctgctgggcc

SEQ ID NO: 5810602 - DNA, 25 bp, Homo sapien
gtccccaggctgccgagatggccct

SEQ ID NO: 5810603 - DNA, 25 bp, Homo sapien
gacccttctgcagatctttgaggac

SEQ ID NO: 5810604 - DNA, 25 bp, Homo sapien
gaggtgcacggcggcggcgcggagc

SEQ ID NO: 5810605 - DNA, 25 bp, Homo sapien
cgtcacggaccatctggacgagcag

SEQ ID NO: 5810606 - DNA, 25 bp, Homo sapien
cagcaggcacccgagttcagcgcca

SEQ ID NO: 5810607 - DNA, 25 bp, Homo sapien
aagcagtgtgtgttttaatagaaaa

SEQ ID NO: 5810608 - DNA, 25 bp, Homo sapien
cagatcttcacatgaggcatgggtc

SEQ ID NO: 5810609 - DNA, 25 bp, Homo sapien
gctcagtgacactgcgtgggacgcg

SEQ ID NO: 5810610 - DNA, 25 bp, Homo sapien
gccttcacttgaacacaaatgtgct

SEQ ID NO: 5810611 - DNA, 25 bp, Homo sapien
gtggtctgcagccaagggcatcggt

SEQ ID NO: 5810612 - DNA, 25 bp, Homo sapien
tggactggagcctgtgcaatctggc

SEQ ID NO: 5810613 - DNA, 25 bp, Homo sapien
ttgaaggccattgcgaggatttgcc

SEQ ID NO: 5810614 - DNA, 25 bp, Homo sapien
ggagtcgacgatccggcactccacc

SEQ ID NO: 5810615 - DNA, 25 bp, Homo sapien
gtaccagcgtggctgccgatctttg

SEQ ID NO: 5810616 - DNA, 25 bp, Homo sapien
aagagcagttacccacacttccccc

SEQ ID NO: 5810617 - DNA, 25 bp, Homo sapien
gagggaggccggtgtggaaagcctc

SEQ ID NO: 5810618 - DNA, 25 bp, Homo sapien
cgaggagaactggaaaagctgtttc

SEQ ID NO: 5810619 - DNA, 25 bp, Homo sapien
tcagtgacaaggcccgagatgcagc

SEQ ID NO: 5810620 - DNA, 25 bp, Homo sapien
ttgaccacagctgactattttgccg

SEQ ID NO: 5810621 - DNA, 25 bp, Homo sapien
agctgctgtccttgtgtccagattt

SEQ ID NO: 5810622 - DNA, 25 bp, Homo sapien
cccctttgctgtgaagttgcttgcg

SEQ ID NO: 5810623 - DNA, 25 bp, Homo sapien
agtccagatcttcacatgaggcatg

SEQ ID NO: 5810624 - DNA, 25 bp, Homo sapien
agctcctgtcaggcatcgcagtgtt

SEQ ID NO: 5810625 - DNA, 25 bp, Homo sapien
tcccgaggctgctgtccatgacact

SEQ ID NO: 5810626 - DNA, 25 bp, Homo sapien
gtgaagttgcttgcgctctgtaaga

SEQ ID NO: 5810627 - DNA, 25 bp, Homo sapien
gcttcgacatcttcaccacggagga

SEQ ID NO: 5810628 - DNA, 25 bp, Homo sapien
gttggcaatggctgataaatgactc

SEQ ID NO: 5810629 - DNA, 25 bp, Homo sapien
ccccaccgaggagaactggaaaagc

SEQ ID NO: 5810630 - DNA, 25 bp, Homo sapien
gggcgtacccaggccccagctggtg

SEQ ID NO: 5810631 - DNA, 25 bp, Homo sapien
gaccacggccagccaggtgtacgag

SEQ ID NO: 5810632 - DNA, 25 bp, Homo sapien
acgtcctgatgtcaagcaaagcaag

SEQ ID NO: 5810633 - DNA, 25 bp, Homo sapien
gtgacaccgtaattgatggttggca

SEQ ID NO: 5810634 - DNA, 25 bp, Homo sapien
agggggtcatcaccatggatgggac

SEQ ID NO: 5810635 - DNA, 25 bp, Homo sapien
agcctctttgagtacatgaagggca

SEQ ID NO: 5810636 - DNA, 25 bp, Homo sapien
acgtgtgctgggccttcgcgcgtgc

SEQ ID NO: 5810637 - DNA, 25 bp, Homo sapien
tgttgctgccgtctcgactcgtgga

SEQ ID NO: 5810638 - DNA, 25 bp, Homo sapien
aggacacggtcgtgcggtggtctgc

SEQ ID NO: 5810639 - DNA, 25 bp, Homo sapien
cagctggtgccccagcctggtgcct

SEQ ID NO: 5810640 - DNA, 25 bp, Homo sapien
tggggtcatccgagagttggctgcg

SEQ ID NO: 5810641 - DNA, 25 bp, Homo sapien
ttgtacaaacttgcagcccaagaga

SEQ ID NO: 5810642 - DNA, 25 bp, Homo sapien
cctggcacaaatatttaaacatgga

SEQ ID NO: 5810643 - DNA, 25 bp, Homo sapien
catacctcacccctgcctggtgagg

SEQ ID NO: 5810644 - DNA, 25 bp, Homo sapien
ttgatggttggcaatggctgataaa

SEQ ID NO: 5810645 - DNA, 25 bp, Homo sapien
gctgctgaagacgctggaccacgtg

SEQ ID NO: 5810646 - DNA, 25 bp, Homo sapien
aattgatggttggcaatggctgata

SEQ ID NO: 5810647 - DNA, 25 bp, Homo sapien
acaagcagtgtgtgttttaatagaa

SEQ ID NO: 5810648 - DNA, 25 bp, Homo sapien
ctgctggtcgggctgaaggacaagg

SEQ ID NO: 5810649 - DNA, 25 bp, Homo sapien
tgccgtctcgactcgtggatgttgt

SEQ ID NO: 5810650 - DNA, 25 bp, Homo sapien
ctctgcacctgcgctctggtgactt

SEQ ID NO: 5810651 - DNA, 25 bp, Homo sapien
cagtttccaggagactgacaaggcg

SEQ ID NO: 5810652 - DNA, 25 bp, Homo sapien
gaccatgaagcttgggaaacccgct

SEQ ID NO: 5810653 - DNA, 25 bp, Homo sapien
agcttgcagtggtgagagagcagcg

SEQ ID NO: 5810654 - DNA, 25 bp, Homo sapien
cccgtcacggaccatctggacgagc

SEQ ID NO: 5810655 - DNA, 25 bp, Homo sapien
acaggggtctgggaggacagctcat

SEQ ID NO: 5810656 - DNA, 25 bp, Homo sapien
atcccttttgatttttctcgccttg

SEQ ID NO: 5810657 - DNA, 25 bp, Homo sapien
ggcagcatggaggtaccagcgtggc

SEQ ID NO: 5810658 - DNA, 25 bp, Homo sapien
gctgacattcctgaagccgaaggtg

SEQ ID NO: 5810659 - DNA, 25 bp, Homo sapien
tttctttacatcatcaccaaggttc

SEQ ID NO: 5810660 - DNA, 25 bp, Homo sapien
cgacccgcaggccctgggcagcttc

SEQ ID NO: 5810661 - DNA, 25 bp, Homo sapien
ccgtctcgactcgtggatgttgtcg

SEQ ID NO: 5810662 - DNA, 25 bp, Homo sapien
tggcaatggctgataaatgactcgc

SEQ ID NO: 5810663 - DNA, 25 bp, Homo sapien
gccagcgtgttcctgacgctcctgc

SEQ ID NO: 5810664 - DNA, 25 bp, Homo sapien
cctgctgaagccagtcctggagccc

SEQ ID NO: 5810665 - DNA, 25 bp, Homo sapien
actgcagaagagcagcctctgccgc

SEQ ID NO: 5810666 - DNA, 25 bp, Homo sapien
gcgctgctgggctgcatggacgact

SEQ ID NO: 5810667 - DNA, 25 bp, Homo sapien
cgagacactggcctttggcgcggcg

SEQ ID NO: 5810668 - DNA, 25 bp, Homo sapien
catcacccagctccttgggctgccc

SEQ ID NO: 5810669 - DNA, 25 bp, Homo sapien
ctgagagcaaccagaccctgctgcg

SEQ ID NO: 5810670 - DNA, 25 bp, Homo sapien
gacgactacaccacggacagcagag

SEQ ID NO: 5810671 - DNA, 25 bp, Homo sapien
ggtcagagtgagcagaagccactca

SEQ ID NO: 5810672 - DNA, 25 bp, Homo sapien
agcaaagcaagatggctgagttcct

SEQ ID NO: 5810673 - DNA, 25 bp, Homo sapien
ataaactgcagaagagcagcctctg

SEQ ID NO: 5810674 - DNA, 25 bp, Homo sapien
agctgggcaggagaggcctgttgct

SEQ ID NO: 5810675 - DNA, 25 bp, Homo sapien
gctgaagccctttgtgactgcaatc

SEQ ID NO: 5810676 - DNA, 25 bp, Homo sapien
tattttgaccacagctgactatttt

SEQ ID NO: 5810677 - DNA, 25 bp, Homo sapien
cccgaggaggaggcggaggacgaga

SEQ ID NO: 5810678 - DNA, 25 bp, Homo sapien
agagcctctttgagtacatgaaggg

SEQ ID NO: 5810679 - DNA, 25 bp, Homo sapien
gtgttttaatagaaaagttgtcact

SEQ ID NO: 5810680 - DNA, 25 bp, Homo sapien
ggaggcggaggacgagacactggcc

SEQ ID NO: 5810681 - DNA, 25 bp, Homo sapien
cacgcagccaatgatagaccacctg

SEQ ID NO: 5810682 - DNA, 25 bp, Homo sapien
gaccttctgggcgtacccaggcccc

SEQ ID NO: 5810683 - DNA, 25 bp, Homo sapien
accgtttccgtgctcacgccgccag

SEQ ID NO: 5810684 - DNA, 25 bp, Homo sapien
cctcccatcccccacgtgccccacc

SEQ ID NO: 5810685 - DNA, 25 bp, Homo sapien
gtcgattctcgcctgcgcagaagtt

SEQ ID NO: 5810686 - DNA, 25 bp, Homo sapien
cacctgggtccgcaaggccgccatg

SEQ ID NO: 5810687 - DNA, 25 bp, Homo sapien
attcctgaagccgaaggtggcagca

SEQ ID NO: 5810688 - DNA, 25 bp, Homo sapien
ggcctccgtgaactggagtgcacct

SEQ ID NO: 5810689 - DNA, 25 bp, Homo sapien
catggacgactacaccacggacagc

SEQ ID NO: 5810690 - DNA, 25 bp, Homo sapien
cgagaagcggggtgcctgcagcgtg

SEQ ID NO: 5810691 - DNA, 25 bp, Homo sapien
ccttcccaggccttcccacgcatca

SEQ ID NO: 5810692 - DNA, 25 bp, Homo sapien
ttcctcatgaagttgccgatgtaga

SEQ ID NO: 5810693 - DNA, 25 bp, Homo sapien
ggtgaggatgtcttgttcctgaggg

SEQ ID NO: 5810694 - DNA, 25 bp, Homo sapien
gtgcgctgctgggctgcatggacga

SEQ ID NO: 5810695 - DNA, 25 bp, Homo sapien
tgctggacgaggtggtgactgtgct

SEQ ID NO: 5810696 - DNA, 25 bp, Homo sapien
ccgaaggtggcagcatggaggtacc

SEQ ID NO: 5810697 - DNA, 25 bp, Homo sapien
gcagagctgggcaggagaggcctgt

SEQ ID NO: 5810698 - DNA, 25 bp, Homo sapien
agctcctcactcagggtcagagtga

SEQ ID NO: 5810699 - DNA, 25 bp, Homo sapien
cgctgcaggccctggcacaaatatt

SEQ ID NO: 5810700 - DNA, 25 bp, Homo sapien
cttgggaaacccgctacatgctttt

SEQ ID NO: 5810701 - DNA, 25 bp, Homo sapien
cggtggtctgcagccaagggcatcg

SEQ ID NO: 5810702 - DNA, 25 bp, Homo sapien
ttttagatttggtcacaattcagaa

SEQ ID NO: 5810703 - DNA, 25 bp, Homo sapien
gagacagggcactttccctcatggt

SEQ ID NO: 5810704 - DNA, 25 bp, Homo sapien
gtcctacttgattgtcagtgacaag

SEQ ID NO: 5810705 - DNA, 25 bp, Homo sapien
atctgttggacccgcaccttgaatg

SEQ ID NO: 5810706 - DNA, 25 bp, Homo sapien
gctgctgggctgcatggacgactac

SEQ ID NO: 5810707 - DNA, 25 bp, Homo sapien
gccccagctggtgccccagcctggt

SEQ ID NO: 5810708 - DNA, 25 bp, Homo sapien
ggacgtaagttttgctgagtccagg

SEQ ID NO: 5810709 - DNA, 25 bp, Homo sapien
tgcccacctaccgctaccacgtcct

SEQ ID NO: 5810710 - DNA, 25 bp, Homo sapien
ctacgacgagaagcggggtgcctgc

SEQ ID NO: 5810711 - DNA, 25 bp, Homo sapien
gagcagctgctggtcgggctgaagg

SEQ ID NO: 5810712 - DNA, 25 bp, Homo sapien
tgggcagcttcagcgggacccttct

SEQ ID NO: 5810713 - DNA, 25 bp, Homo sapien
gtggacgcctctgccttcacttgaa

SEQ ID NO: 5810714 - DNA, 25 bp, Homo sapien
gtggcctccgtgaactggagtgcac

SEQ ID NO: 5810715 - DNA, 25 bp, Homo sapien
acgcctctgccttcacttgaacaca

SEQ ID NO: 5810716 - DNA, 25 bp, Homo sapien
gctgggggtgaagcttgtgcagcga

SEQ ID NO: 5810717 - DNA, 25 bp, Homo sapien
caagcaaagcaagatggctgagttc

SEQ ID NO: 5810718 - DNA, 25 bp, Homo sapien
tctagcggagtgggatctgcgaaca

SEQ ID NO: 5810719 - DNA, 25 bp, Homo sapien
aagtcttcccgaggctgctgtccat

SEQ ID NO: 5810720 - DNA, 25 bp, Homo sapien
gaaagcaggagccccagacgaagct

SEQ ID NO: 5810721 - DNA, 25 bp, Homo sapien
ccggaagaccacggccagccaggtg

SEQ ID NO: 5810722 - DNA, 25 bp, Homo sapien
cagagggggtggagcgtgtgataga

SEQ ID NO: 5810723 - DNA, 25 bp, Homo sapien
ctggttataagtgtgtttattgccg

SEQ ID NO: 5810724 - DNA, 25 bp, Homo sapien
aatggctgataaatgactcgctgtg

SEQ ID NO: 5810725 - DNA, 25 bp, Homo sapien
accagcgtggctgccgatctttggc

SEQ ID NO: 5810726 - DNA, 25 bp, Homo sapien
tgagcgacgaaccggccgcgggtgg

SEQ ID NO: 5810727 - DNA, 25 bp, Homo sapien
acactgagtccagatcttcacatga

SEQ ID NO: 5810728 - DNA, 25 bp, Homo sapien
atgaccagtctgatggatctgacac

SEQ ID NO: 5810729 - DNA, 25 bp, Homo sapien
tgctgagtccaggagagacggcttg

SEQ ID NO: 5810730 - DNA, 25 bp, Homo sapien
ggggtggagcgtgtgatagagcagc

SEQ ID NO: 5810731 - DNA, 25 bp, Homo sapien
tgcatggacgactacaccacggaca

SEQ ID NO: 5810732 - DNA, 25 bp, Homo sapien
ttagatttggtcacaattcagaatc

SEQ ID NO: 5810733 - DNA, 25 bp, Homo sapien
cctcacccagcctgggcaagcacga

SEQ ID NO: 5810734 - DNA, 25 bp, Homo sapien
ttcagaatcccaaggaccatgaagc

SEQ ID NO: 5810735 - DNA, 25 bp, Homo sapien
gtttaagagcagttacccacacttc

SEQ ID NO: 5810736 - DNA, 25 bp, Homo sapien
gtgcagcgactggggctgacattcc

SEQ ID NO: 5810737 - DNA, 25 bp, Homo sapien
cgtttcccgctgatccggaagacca

SEQ ID NO: 5810738 - DNA, 25 bp, Homo sapien
gaagagcagcctctgccgccttcca

SEQ ID NO: 5810739 - DNA, 25 bp, Homo sapien
tcccgctgatccggaagaccacggc

SEQ ID NO: 5810740 - DNA, 25 bp, Homo sapien
tttcctggttataagtgtgtttatt

SEQ ID NO: 5810741 - DNA, 25 bp, Homo sapien
agaatgtggggagacagggcacttt

SEQ ID NO: 5810742 - DNA, 25 bp, Homo sapien
gccgccatgaccagtctgatggatc

SEQ ID NO: 5810743 - DNA, 25 bp, Homo sapien
agagcagcgcaaccgtctgtgtgac

SEQ ID NO: 5810744 - DNA, 25 bp, Homo sapien
gatcagacatctccagcttcccttg

SEQ ID NO: 5810745 - DNA, 25 bp, Homo sapien
agaggtgacaccgtaattgatggtt

SEQ ID NO: 5810746 - DNA, 25 bp, Homo sapien
ttcgcgcgtgcctatgagcctcagg

SEQ ID NO: 5810747 - DNA, 25 bp, Homo sapien
ccaaatagcagagtcctacttgatt

SEQ ID NO: 5810748 - DNA, 25 bp, Homo sapien
gaagttgccgatgtagagcctgttt

SEQ ID NO: 5810749 - DNA, 25 bp, Homo sapien
ggttaccatgaagatcagccactgg

SEQ ID NO: 5810750 - DNA, 25 bp, Homo sapien
atggatgatgaacttgttgttggac

SEQ ID NO: 5810751 - DNA, 25 bp, Homo sapien
gcttcagtttccaggagactgacaa

SEQ ID NO: 5810752 - DNA, 25 bp, Homo sapien
gacgaagctgtgtgcggagagaatg

SEQ ID NO: 5810753 - DNA, 25 bp, Homo sapien
aaccgtctgtgtgaccttctgggcg

SEQ ID NO: 5810754 - DNA, 25 bp, Homo sapien
atgttgtcgccgtgatcctgaaggc

SEQ ID NO: 5810755 - DNA, 25 bp, Homo sapien
atcctgaccgaagatgacgacgaag

SEQ ID NO: 5810756 - DNA, 25 bp, Homo sapien
ccatcccccacgtgccccaccgagg

SEQ ID NO: 5810757 - DNA, 25 bp, Homo sapien
gctggaagcgttcggcgagagcgcg

SEQ ID NO: 5810758 - DNA, 25 bp, Homo sapien
ttccaaaatgccctttagaggtgac

SEQ ID NO: 5810759 - DNA, 25 bp, Homo sapien
ccaaaatgccctttagaggtgacac

SEQ ID NO: 5810760 - DNA, 25 bp, Homo sapien
cccttttgatttttctcgccttgac

SEQ ID NO: 5810761 - DNA, 25 bp, Homo sapien
tgcaccttcccaggccttcccacgc

SEQ ID NO: 5810762 - DNA, 25 bp, Homo sapien
aggctggcactagctgacagctttt

SEQ ID NO: 5810763 - DNA, 25 bp, Homo sapien
tgtcaggcatcgcagtgttctgcgg

SEQ ID NO: 5810764 - DNA, 25 bp, Homo sapien
tgtctgctcctctgccaccgtttcc

SEQ ID NO: 5810765 - DNA, 25 bp, Homo sapien
gaaaagctgtttcccaggtccgatg

SEQ ID NO: 5810766 - DNA, 25 bp, Homo sapien
caggccctcctgcagctgtgtctgc

SEQ ID NO: 5810767 - DNA, 25 bp, Homo sapien
tgtgctggacgaggtggtgactgtg

SEQ ID NO: 5810768 - DNA, 25 bp, Homo sapien
ggctgctgtccatgacactgagtcc

SEQ ID NO: 5810769 - DNA, 25 bp, Homo sapien
tttaaatttctttacatcatcacca

SEQ ID NO: 5810770 - DNA, 25 bp, Homo sapien
ctgcaaatctgcagctcctcactca

SEQ ID NO: 5810771 - DNA, 25 bp, Homo sapien
cgtgggacgcggagcttgcagtggt

SEQ ID NO: 5810772 - DNA, 25 bp, Homo sapien
tgggatctgcgaacacgtgaggcgg

SEQ ID NO: 5810773 - DNA, 25 bp, Homo sapien
tgtcctcaggtgcctcgatggctgc

SEQ ID NO: 5810774 - DNA, 25 bp, Homo sapien
agcctgttttagatttggtcacaat

SEQ ID NO: 5810775 - DNA, 25 bp, Homo sapien
ctggagcctgtgcaatctggcccgt

SEQ ID NO: 5810776 - DNA, 25 bp, Homo sapien
gacccgcaccttgaatggatgatga

SEQ ID NO: 5810777 - DNA, 25 bp, Homo sapien
agggacgccgcctgctacgtgtgct

SEQ ID NO: 5810778 - DNA, 25 bp, Homo sapien
tgatttttctcgccttgacgggaac

SEQ ID NO: 5810779 - DNA, 25 bp, Homo sapien
ttcccacgcatcacccagctccttg

SEQ ID NO: 5810780 - DNA, 25 bp, Homo sapien
gacgatccggcactccacccagagc

SEQ ID NO: 5810781 - DNA, 25 bp, Homo sapien
ccggctttcctgagtacacgcagcc

SEQ ID NO: 5810782 - DNA, 25 bp, Homo sapien
accagcagctctatgatcgtcagtt

SEQ ID NO: 5810783 - DNA, 25 bp, Homo sapien
ccgcaggccctgggcagcttcagcg

SEQ ID NO: 5810784 - DNA, 25 bp, Homo sapien
gcgctggcagagctgggcaggagag

SEQ ID NO: 5810785 - DNA, 25 bp, Homo sapien
cgtgggcacctgggtccgcaaggcc

SEQ ID NO: 5810786 - DNA, 25 bp, Homo sapien
cgtggcatgggggatgtctggcgct

SEQ ID NO: 5810787 - DNA, 25 bp, Homo sapien
cgcagccaatgatagaccacctggt

SEQ ID NO: 5810788 - DNA, 25 bp, Homo sapien
tgctgaagccagtcctggagcccat

SEQ ID NO: 5810789 - DNA, 25 bp, Homo sapien
cccacctaccgctaccacgtcctgc

SEQ ID NO: 5810790 - DNA, 25 bp, Homo sapien
gcagcgactggggctgacattcctg

SEQ ID NO: 5810791 - DNA, 25 bp, Homo sapien
ccttcgcgcgtgcctatgagcctca

SEQ ID NO: 5810792 - DNA, 25 bp, Homo sapien
agagttggctgcgagggcgctgcac

SEQ ID NO: 5810793 - DNA, 25 bp, Homo sapien
tggctgcagactccctgagagcaac

SEQ ID NO: 5810794 - DNA, 25 bp, Homo sapien
tggcccttggaggctggcactagct

SEQ ID NO: 5810795 - DNA, 25 bp, Homo sapien
gagtcctacttgattgtcagtgaca

SEQ ID NO: 5810796 - DNA, 25 bp, Homo sapien
ctgggctgcatggacgactacacca

SEQ ID NO: 5810797 - DNA, 25 bp, Homo sapien
ctctatgatcgtcagttatacaggg

SEQ ID NO: 5810798 - DNA, 25 bp, Homo sapien
tcaccacggaggaggaccacccctt

SEQ ID NO: 5810799 - DNA, 25 bp, Homo sapien
tcatcaccatggatgggacgctgca

SEQ ID NO: 5810800 - DNA, 25 bp, Homo sapien
cgcacagtggtgcctccagctgttg

SEQ ID NO: 5810801 - DNA, 25 bp, Homo sapien
tgtcgccgtgatcctgaaggcgctg

SEQ ID NO: 5810802 - DNA, 25 bp, Homo sapien
gaagggtagcgctggcccttggagg

SEQ ID NO: 5810803 - DNA, 25 bp, Homo sapien
atgggacgctgcaggccctggcaca

SEQ ID NO: 5810804 - DNA, 25 bp, Homo sapien
agtcctggagcccatacctcacccc

SEQ ID NO: 5810805 - DNA, 25 bp, Homo sapien
ctctccgtgacctgcctgatccctt

SEQ ID NO: 5810806 - DNA, 25 bp, Homo sapien
aggtgtacgagacattgctcaccta

SEQ ID NO: 5810807 - DNA, 25 bp, Homo sapien
tgaactggagtgcaccttcccaggc

SEQ ID NO: 5810808 - DNA, 25 bp, Homo sapien
gcttgaaggccattgcgaggatttg

SEQ ID NO: 5810809 - DNA, 25 bp, Homo sapien
gtcgtgcggtggtctgcagccaagg

SEQ ID NO: 5810810 - DNA, 25 bp, Homo sapien
agcggttccgcgtaataatggacaa

SEQ ID NO: 5810811 - DNA, 25 bp, Homo sapien
cgatctttggctgcaaatctgcagc

SEQ ID NO: 5810812 - DNA, 25 bp, Homo sapien
ggcccgagatgcagctgctgtcctt

SEQ ID NO: 5810813 - DNA, 25 bp, Homo sapien
gcgctctggtgacttggggtggacg

SEQ ID NO: 5810814 - DNA, 25 bp, Homo sapien
ggctcggagccagcctgagctgatc

SEQ ID NO: 5810815 - DNA, 25 bp, Homo sapien
agggtgtccgtgccgctgctgaaga

SEQ ID NO: 5810816 - DNA, 25 bp, Homo sapien
aggaggaggcggaggacgagacact

SEQ ID NO: 5810817 - DNA, 25 bp, Homo sapien
cccaggccttcccacgcatcaccca

SEQ ID NO: 5810818 - DNA, 25 bp, Homo sapien
ggtccgatgtggcctccgtgaactg

SEQ ID NO: 5810819 - DNA, 25 bp, Homo sapien
cagacgaagctgtgtgcggagagaa

SEQ ID NO: 5810820 - DNA, 25 bp, Homo sapien
cgaatgtccataatggaccgtattc

SEQ ID NO: 5810821 - DNA, 25 bp, Homo sapien
tgtttcctggttataagtgtgttta

SEQ ID NO: 5810822 - DNA, 25 bp, Homo sapien
tgacattcctgaagccgaaggtggc

SEQ ID NO: 5810823 - DNA, 25 bp, Homo sapien
acacgtcctgatgtcaagcaaagca

SEQ ID NO: 5810824 - DNA, 25 bp, Homo sapien
acataaactgcagaagagcagcctc

SEQ ID NO: 5810825 - DNA, 25 bp, Homo sapien
tcacttgaacacaaatgtgcttcct

SEQ ID NO: 5810826 - DNA, 25 bp, Homo sapien
agcgcgaggtggccctggagcggtt

SEQ ID NO: 5810827 - DNA, 25 bp, Homo sapien
ggccttcgcgcgtgcctatgagcct

SEQ ID NO: 5810828 - DNA, 25 bp, Homo sapien
ctgggcggcttgacggagtcgacga

SEQ ID NO: 5810829 - DNA, 25 bp, Homo sapien
gtttccaggagactgacaaggcgtg

SEQ ID NO: 5810830 - DNA, 25 bp, Homo sapien
ctgcgagggcgctgcacaacctggc

SEQ ID NO: 5810831 - DNA, 25 bp, Homo sapien
atcaccatggatgggacgctgcagg

SEQ ID NO: 5810832 - DNA, 25 bp, Homo sapien
aggaggcaggccctcctgcagctgt

SEQ ID NO: 5810833 - DNA, 25 bp, Homo sapien
gcggagtgggatctgcgaacacgtg

SEQ ID NO: 5810834 - DNA, 25 bp, Homo sapien
aaatagcagagtcctacttgattgt

SEQ ID NO: 5810835 - DNA, 25 bp, Homo sapien
agacaagcagtgtgtgttttaatag

SEQ ID NO: 5810836 - DNA, 25 bp, Homo sapien
gactgttggtgtgaaagcaggagcc

SEQ ID NO: 5810837 - DNA, 25 bp, Homo sapien
tcacggaccatctggacgagcaggc

SEQ ID NO: 5810838 - DNA, 25 bp, Homo sapien
ctctggctctccgtgacctgcctga

SEQ ID NO: 5810839 - DNA, 25 bp, Homo sapien
ttggctgcgagggcgctgcacaacc

SEQ ID NO: 5810840 - DNA, 25 bp, Homo sapien
ggcccagcaggccagtgagaagatt

SEQ ID NO: 5810841 - DNA, 25 bp, Homo sapien
gctgtccatgacactgagtccagat

SEQ ID NO: 5810842 - DNA, 25 bp, Homo sapien
cttttgatttttctcgccttgacgg

SEQ ID NO: 5810843 - DNA, 25 bp, Homo sapien
cctttgtgactgcaatctcgagtgc

SEQ ID NO: 5810844 - DNA, 25 bp, Homo sapien
agctgtttcccaggtccgatgtggc

SEQ ID NO: 5810845 - DNA, 25 bp, Homo sapien
gaccatgcagggggtcatcaccatg

SEQ ID NO: 5810846 - DNA, 25 bp, Homo sapien
ggttcgaggctataaaacatttctt

SEQ ID NO: 5810847 - DNA, 25 bp, Homo sapien
gtgacttggggtggacgcctctgcc

SEQ ID NO: 5810848 - DNA, 25 bp, Homo sapien
cagatttactgtgcgctgctgggct

SEQ ID NO: 5810849 - DNA, 25 bp, Homo sapien
gtcatccgagagttggctgcgaggg

SEQ ID NO: 5810850 - DNA, 25 bp, Homo sapien
gcaggagaggcctgttgctgccgtc

SEQ ID NO: 5810851 - DNA, 25 bp, Homo sapien
tcctgaagccgaaggtggcagcatg

SEQ ID NO: 5810852 - DNA, 25 bp, Homo sapien
aggacaaccttctgaatgagagggt

SEQ ID NO: 5810853 - DNA, 25 bp, Homo sapien
cgggatggtgcagttccccggcgac

SEQ ID NO: 5810854 - DNA, 25 bp, Homo sapien
atgaagttgccgatgtagagcctgt

SEQ ID NO: 5810855 - DNA, 25 bp, Homo sapien
cagcagctctatgatcgtcagttat

SEQ ID NO: 5810856 - DNA, 25 bp, Homo sapien
ctcacgccgccagcgtgttcctgac

SEQ ID NO: 5810857 - DNA, 25 bp, Homo sapien
gtcgggctgaaggacaaggacacgg

SEQ ID NO: 5810858 - DNA, 25 bp, Homo sapien
ggtgcctccagctgttgaagggtag

SEQ ID NO: 5810859 - DNA, 25 bp, Homo sapien
ccacctggttaccatgaagatcagc

SEQ ID NO: 5810860 - DNA, 25 bp, Homo sapien
cacccctttgctgtgaagttgcttg

SEQ ID NO: 5810861 - DNA, 25 bp, Homo sapien
ggtcacaattcagaatcccaaggac

SEQ ID NO: 5810862 - DNA, 25 bp, Homo sapien
ccgtgacctgcctgatcccttttga

SEQ ID NO: 5810863 - DNA, 25 bp, Homo sapien
aagcaagatggctgagttcctggac

SEQ ID NO: 5810864 - DNA, 25 bp, Homo sapien
cctacttgattgtcagtgacaaggc

SEQ ID NO: 5810865 - DNA, 25 bp, Homo sapien
ggagcttgcagtggtgagagagcag

SEQ ID NO: 5810866 - DNA, 25 bp, Homo sapien
gtggatgttgtcgccgtgatcctga

SEQ ID NO: 5810867 - DNA, 25 bp, Homo sapien
actacaccacggacagcagagggga

SEQ ID NO: 5810868 - DNA, 25 bp, Homo sapien
gacgtgaggaggcaggccctcctgc

SEQ ID NO: 5810869 - DNA, 25 bp, Homo sapien
tgagagggtgtccgtgccgctgctg

SEQ ID NO: 5810870 - DNA, 25 bp, Homo sapien
cacgtgccccaccgaggagaactgg

SEQ ID NO: 5810871 - DNA, 25 bp, Homo sapien
cctgggtccgcaaggccgccatgac

SEQ ID NO: 5810872 - DNA, 25 bp, Homo sapien
gttggacccgcaccttgaatggatg

SEQ ID NO: 5810873 - DNA, 25 bp, Homo sapien
aaatgtgcttcctataaaatcatgt

SEQ ID NO: 5810874 - DNA, 25 bp, Homo sapien
cctggactggagcctgtgcaatctg

SEQ ID NO: 5810875 - DNA, 25 bp, Homo sapien
tgagagagcagcgcaaccgtctgtg

SEQ ID NO: 5810876 - DNA, 25 bp, Homo sapien
atttgccagactgttggtgtgaaag

SEQ ID NO: 5810877 - DNA, 25 bp, Homo sapien
ggggctagtcgtgtccctgggcggc

SEQ ID NO: 5810878 - DNA, 25 bp, Homo sapien
gctctggtgacttggggtggacgcc

SEQ ID NO: 5810879 - DNA, 25 bp, Homo sapien
accatgaagatcagccactgggatg

SEQ ID NO: 5810880 - DNA, 25 bp, Homo sapien
agatgcagctgctgtccttgtgtcc

SEQ ID NO: 5810881 - DNA, 25 bp, Homo sapien
atggaccgtattctccaaatagcag

SEQ ID NO: 5810882 - DNA, 25 bp, Homo sapien
ccttgtacaaacttgcagcccaaga

SEQ ID NO: 5810883 - DNA, 25 bp, Homo sapien
aagatatccagaagctcctgtcagg

SEQ ID NO: 5810884 - DNA, 25 bp, Homo sapien
tcgtggatgttgtcgccgtgatcct

SEQ ID NO: 5810885 - DNA, 25 bp, Homo sapien
cgaagatgacgacgaagatgacgac

SEQ ID NO: 5810886 - DNA, 25 bp, Homo sapien
gcagcccaagagaacaggcccgtca

SEQ ID NO: 5810887 - DNA, 25 bp, Homo sapien
gaccacctggttaccatgaagatca

SEQ ID NO: 5810888 - DNA, 25 bp, Homo sapien
agactgtttgccctatgctgccact

SEQ ID NO: 5810889 - DNA, 25 bp, Homo sapien
gacgctcctgcactttgacagccct

SEQ ID NO: 5810890 - DNA, 25 bp, Homo sapien
tgtgcggagagaatgtttcccagat

SEQ ID NO: 5810891 - DNA, 25 bp, Homo sapien
cgaagctgtgtgcggagagaatgtt

SEQ ID NO: 5810892 - DNA, 25 bp, Homo sapien
tgggtccgcaaggccgccatgacca

SEQ ID NO: 5810893 - DNA, 25 bp, Homo sapien
gcttgcgctctgtaagaaagaaatc

SEQ ID NO: 5810894 - DNA, 25 bp, Homo sapien
tcccatcccccacgtgccccaccga

SEQ ID NO: 5810895 - DNA, 25 bp, Homo sapien
agagccctggcggatgatgtggtcg

SEQ ID NO: 5810896 - DNA, 25 bp, Homo sapien
gacaaggacacggtcgtgcggtggt

SEQ ID NO: 5810897 - DNA, 25 bp, Homo sapien
ctttggcgcggcgctggaagcgttc

SEQ ID NO: 5810898 - DNA, 25 bp, Homo sapien
cttcccagagccctggcggatgatg

SEQ ID NO: 5810899 - DNA, 25 bp, Homo sapien
tccataatggaccgtattctccaaa

SEQ ID NO: 5810900 - DNA, 25 bp, Homo sapien
atcccaaggaccatgaagcttggga

SEQ ID NO: 5810901 - DNA, 25 bp, Homo sapien
gtttcccagatttactgtgcgctgc

SEQ ID NO: 5810902 - DNA, 25 bp, Homo sapien
agccctggcggatgatgtggtcggg

SEQ ID NO: 5810903 - DNA, 25 bp, Homo sapien
cgagacataaactgcagaagagcag

SEQ ID NO: 5810904 - DNA, 25 bp, Homo sapien
ccggcactccacccagagcctcttt

SEQ ID NO: 5810905 - DNA, 25 bp, Homo sapien
gaagttgcttgcgctctgtaagaaa

SEQ ID NO: 5810906 - DNA, 25 bp, Homo sapien
ccaggagagacggcttgaaggccat

SEQ ID NO: 5810907 - DNA, 25 bp, Homo sapien
gacgaagatgacgacgtcccagagg

SEQ ID NO: 5810908 - DNA, 25 bp, Homo sapien
gctcacccacggctgcttcgacatc

SEQ ID NO: 5810909 - DNA, 25 bp, Homo sapien
tggtgccccagcctggtgcctgctg

SEQ ID NO: 5810910 - DNA, 25 bp, Homo sapien
tgctgaagacgctggaccacgtgct

SEQ ID NO: 5810911 - DNA, 25 bp, Homo sapien
caggtccgatgtggcctccgtgaac

SEQ ID NO: 5810912 - DNA, 25 bp, Homo sapien
ctcctgcactttgacagccctccca

SEQ ID NO: 5810913 - DNA, 25 bp, Homo sapien
acaaatgtgcttcctataaaatcat

SEQ ID NO: 5810914 - DNA, 25 bp, Homo sapien
aaatctgcagctcctcactcagggt

SEQ ID NO: 5810915 - DNA, 25 bp, Homo sapien
tcatggtattgatattttgaccaca

SEQ ID NO: 5810916 - DNA, 25 bp, Homo sapien
agcccatacctcacccctgcctggt

SEQ ID NO: 5810917 - DNA, 25 bp, Homo sapien
atgatgaacttgttgttggacatag

SEQ ID NO: 5810918 - DNA, 25 bp, Homo sapien
cgtgcggtggtctgcagccaagggc

SEQ ID NO: 5810919 - DNA, 25 bp, Homo sapien
cactttccaaaatgccctttagagg

SEQ ID NO: 5810920 - DNA, 25 bp, Homo sapien
agccagtcctggagcccatacctca

SEQ ID NO: 5810921 - DNA, 25 bp, Homo sapien
catccctggctttcgcgctctagcg

SEQ ID NO: 5810922 - DNA, 25 bp, Homo sapien
tgatggatctgacacttctgctggc

SEQ ID NO: 5810923 - DNA, 25 bp, Homo sapien
cgtgccgctgctgaagacgctggac

SEQ ID NO: 5810924 - DNA, 25 bp, Homo sapien
gcggcttgacggagtcgacgatccg

SEQ ID NO: 5810925 - DNA, 25 bp, Homo sapien
gagcgcggagacccgggcgctgctg

SEQ ID NO: 5810926 - DNA, 25 bp, Homo sapien
aaccagaccctgctgcggaagctgg

SEQ ID NO: 5810927 - DNA, 25 bp, Homo sapien
agcagagtcctacttgattgtcagt

SEQ ID NO: 5810928 - DNA, 25 bp, Homo sapien
tggccccgaggaggaggcggaggac

SEQ ID NO: 5810929 - DNA, 25 bp, Homo sapien
ctccttgggctgcccacctaccgct

SEQ ID NO: 5810930 - DNA, 25 bp, Homo sapien
tgccaccgtttcccgctgatccgga

SEQ ID NO: 5810931 - DNA, 25 bp, Homo sapien
ggtggagcgtgtgatagagcagctg

SEQ ID NO: 5810932 - DNA, 25 bp, Homo sapien
gaagccgaaggtggcagcatggagg

SEQ ID NO: 5810933 - DNA, 25 bp, Homo sapien
gccctgggcagcttcagcgggaccc

SEQ ID NO: 5810934 - DNA, 25 bp, Homo sapien
ggagcccatacctcacccctgcctg

SEQ ID NO: 5810935 - DNA, 25 bp, Homo sapien
gtggcagcatggaggtaccagcgtg

SEQ ID NO: 5810936 - DNA, 25 bp, Homo sapien
ttcgacatcttcaccacggaggagg

SEQ ID NO: 5810937 - DNA, 25 bp, Homo sapien
tggacaaataccaggagcagcctca

SEQ ID NO: 5810938 - DNA, 25 bp, Homo sapien
agattcaccagcagctctatgatcg

SEQ ID NO: 5810939 - DNA, 25 bp, Homo sapien
tattgatattttgaccacagctgac

SEQ ID NO: 5810940 - DNA, 25 bp, Homo sapien
gcgagggcgctgcacaacctggccc

SEQ ID NO: 5810941 - DNA, 25 bp, Homo sapien
atctgacacttctgctggctcggag

SEQ ID NO: 5810942 - DNA, 25 bp, Homo sapien
cccagcctggtgcctgctgaagcca

SEQ ID NO: 5810943 - DNA, 25 bp, Homo sapien
ctgggccgcctgcgggaggtgcacg

SEQ ID NO: 5810944 - DNA, 25 bp, Homo sapien
gcgcagaagttgcttacgccttgta

SEQ ID NO: 5810945 - DNA, 25 bp, Homo sapien
ccccgaggacgtaagttttgctgag

SEQ ID NO: 5810946 - DNA, 25 bp, Homo sapien
gtgccccagcctggtgcctgctgaa

SEQ ID NO: 5810947 - DNA, 25 bp, Homo sapien
ctgtgaagttgcttgcgctctgtaa

SEQ ID NO: 5810948 - DNA, 25 bp, Homo sapien
ttcccagatttactgtgcgctgctg

SEQ ID NO: 5810949 - DNA, 25 bp, Homo sapien
ccgaggacgtaagttttgctgagtc

SEQ ID NO: 5810950 - DNA, 25 bp, Homo sapien
tcagagtgagcagaagccactcatc

SEQ ID NO: 5810951 - DNA, 25 bp, Homo sapien
ttttgaccacagctgactattttgc

SEQ ID NO: 5810952 - DNA, 25 bp, Homo sapien
agcagaagccactcatcctgaccga

SEQ ID NO: 5810953 - DNA, 25 bp, Homo sapien
acggagtcgacgatccggcactcca

SEQ ID NO: 5810954 - DNA, 25 bp, Homo sapien
acctacagtgacgtcgtgggcgcgg

SEQ ID NO: 5810955 - DNA, 25 bp, Homo sapien
tgagtccagatcttcacatgaggca

SEQ ID NO: 5810956 - DNA, 25 bp, Homo sapien
gaggcgggggcgcggtccccaggct

SEQ ID NO: 5810957 - DNA, 25 bp, Homo sapien
ctctctgcacctgcgctctggtgac

SEQ ID NO: 5810958 - DNA, 25 bp, Homo sapien
gatggctgagttcctggactggagc

SEQ ID NO: 5810959 - DNA, 25 bp, Homo sapien
ccctggcggatgatgtggtcgggtc

SEQ ID NO: 5810960 - DNA, 25 bp, Homo sapien
gtgaggcgggggcgcggtccccagg

SEQ ID NO: 5810961 - DNA, 25 bp, Homo sapien
cgcaaggccgccatgaccagtctga

SEQ ID NO: 5810962 - DNA, 25 bp, Homo sapien
accatctggacgagcaggcagtgca

SEQ ID NO: 5810963 - DNA, 25 bp, Homo sapien
tcaggcatcgcagtgttctgcggga

SEQ ID NO: 5810964 - DNA, 25 bp, Homo sapien
gctcacctacagtgacgtcgtgggc

SEQ ID NO: 5810965 - DNA, 25 bp, Homo sapien
gccttgacgggaacctcctcaccca

SEQ ID NO: 5810966 - DNA, 25 bp, Homo sapien
attctcgcctgcgcagaagttgctt

SEQ ID NO: 5810967 - DNA, 25 bp, Homo sapien
cattgcgaggatttgccagactgtt

SEQ ID NO: 5810968 - DNA, 25 bp, Homo sapien
cgatgtggcctccgtgaactggagt

SEQ ID NO: 5810969 - DNA, 25 bp, Homo sapien
cggcgagagcgcggagacccgggcg

SEQ ID NO: 5810970 - DNA, 25 bp, Homo sapien
ctgtggcttctcgttggccttgggc

SEQ ID NO: 5810971 - DNA, 25 bp, Homo sapien
ggtcatcaccatggatgggacgctg

SEQ ID NO: 5810972 - DNA, 25 bp, Homo sapien
gcagaagttgcttacgccttgtaca

SEQ ID NO: 5810973 - DNA, 25 bp, Homo sapien
ttaccatgaagatcagccactggga

SEQ ID NO: 5810974 - DNA, 25 bp, Homo sapien
gggaggacagctcatgagacaagca

SEQ ID NO: 5810975 - DNA, 25 bp, Homo sapien
gagagaatgtttcccagatttactg

SEQ ID NO: 5810976 - DNA, 25 bp, Homo sapien
ccgtctgtgtgaccttctgggcgta

SEQ ID NO: 5810977 - DNA, 25 bp, Homo sapien
tgagacaagcagtgtgtgttttaat

SEQ ID NO: 5810978 - DNA, 25 bp, Homo sapien
tcatctgttggacccgcaccttgaa

SEQ ID NO: 5810979 - DNA, 25 bp, Homo sapien
gggcactttccctcatggtattgat

SEQ ID NO: 5810980 - DNA, 25 bp, Homo sapien
ttcctgagtacacgcagccaatgat

SEQ ID NO: 5810981 - DNA, 25 bp, Homo sapien
tgggcaccaacgtcagggacgccgc

SEQ ID NO: 5810982 - DNA, 25 bp, Homo sapien
ggatggtgcagttccccggcgacgt

SEQ ID NO: 5810983 - DNA, 25 bp, Homo sapien
ctcctcacccagcctgggcaagcac

SEQ ID NO: 5810984 - DNA, 25 bp, Homo sapien
cattgctcacctacagtgacgtcgt

SEQ ID NO: 5810985 - DNA, 25 bp, Homo sapien
gctggactgcttcagtttccaggag

SEQ ID NO: 5810986 - DNA, 25 bp, Homo sapien
atggtattgatattttgaccacagc

SEQ ID NO: 5810987 - DNA, 25 bp, Homo sapien
tgcaatctggcccgttcctccttcc

SEQ ID NO: 5810988 - DNA, 25 bp, Homo sapien
tgacactgagtccagatcttcacat

SEQ ID NO: 5810989 - DNA, 25 bp, Homo sapien
ctccagcttcccttgtacatctggc

SEQ ID NO: 5810990 - DNA, 25 bp, Homo sapien
gtgcttcctataaaatcatgtacca

SEQ ID NO: 5810991 - DNA, 25 bp, Homo sapien
cgcctgctacgtgtgctgggccttc

SEQ ID NO: 5810992 - DNA, 25 bp, Homo sapien
cagaatcccaaggaccatgaagctt

SEQ ID NO: 5810993 - DNA, 25 bp, Homo sapien
agcgttcggcgagagcgcggagacc

SEQ ID NO: 5810994 - DNA, 25 bp, Homo sapien
cctggctttcgcgctctagcggagt

SEQ ID NO: 5810995 - DNA, 25 bp, Homo sapien
tggcatgggggatgtctggcgctgg

SEQ ID NO: 5810996 - DNA, 25 bp, Homo sapien
ttcgaggctataaaacatttcttcg

SEQ ID NO: 5810997 - DNA, 25 bp, Homo sapien
agggcatcggtaggatggctggcag

SEQ ID NO: 5810998 - DNA, 25 bp, Homo sapien
ggcatcggtaggatggctggcaggc

SEQ ID NO: 5810999 - DNA, 25 bp, Homo sapien
gcgtgttcctgacgctcctgcactt

SEQ ID NO: 5811000 - DNA, 25 bp, Homo sapien
cagtgttctgcgggatggtgcagtt

SEQ ID NO: 5811001 - DNA, 25 bp, Homo sapien
ccgtcggtaacagatccaactgttt

SEQ ID NO: 5811002 - DNA, 25 bp, Homo sapien
tggctgataaatgactcgctgtggc

SEQ ID NO: 5811003 - DNA, 25 bp, Homo sapien
gcatcatgtgctgtgtggcccagca

SEQ ID NO: 5811004 - DNA, 25 bp, Homo sapien
ttcagcgggacccttctgcagatct

SEQ ID NO: 5811005 - DNA, 25 bp, Homo sapien
tgacgtcgtgggcgcggatgtgctg

SEQ ID NO: 5811006 - DNA, 25 bp, Homo sapien
atgtgcttcctataaaatcatgtac

SEQ ID NO: 5811007 - DNA, 25 bp, Homo sapien
gtcgtgggcgcggatgtgctggacg

SEQ ID NO: 5811008 - DNA, 25 bp, Homo sapien
gcgggaggtgcacggcggcggcgcg

SEQ ID NO: 5811009 - DNA, 25 bp, Homo sapien
cttccagaccatgcagggggtcatc

SEQ ID NO: 5811010 - DNA, 25 bp, Homo sapien
atgaagcttgggaaacccgctacat

SEQ ID NO: 5811011 - DNA, 25 bp, Homo sapien
actgcaatctcgagtgcactggtga

SEQ ID NO: 5811012 - DNA, 25 bp, Homo sapien
cagaagctcctgtcaggcatcgcag

SEQ ID NO: 5811013 - DNA, 25 bp, Homo sapien
aggagactgacaaggcgtggcatgg

SEQ ID NO: 5811014 - DNA, 25 bp, Homo sapien
tttaaacatggaaaacgtgaagact

SEQ ID NO: 5811015 - DNA, 25 bp, Homo sapien
tgacagcttttcctctctgcacctg

SEQ ID NO: 5811016 - DNA, 25 bp, Homo sapien
gtgagcgcatcatgtgctgtgtggc

SEQ ID NO: 5811017 - DNA, 25 bp, Homo sapien
gatttatcacacgtcctgatgtcaa

SEQ ID NO: 5811018 - DNA, 25 bp, Homo sapien
atagcagagtcctacttgattgtca

SEQ ID NO: 5811019 - DNA, 25 bp, Homo sapien
gatctttgaggacaaccttctgaat

SEQ ID NO: 5811020 - DNA, 25 bp, Homo sapien
ctgggcgtacccaggccccagctgg

SEQ ID NO: 5811021 - DNA, 25 bp, Homo sapien
cagccaatgatagaccacctggtta

SEQ ID NO: 5811022 - DNA, 25 bp, Homo sapien
gttggtgtgaaagcaggagccccag

SEQ ID NO: 5811023 - DNA, 25 bp, Homo sapien
atctccagcttcccttgtacatctg

SEQ ID NO: 5811024 - DNA, 25 bp, Homo sapien
atctggcttttaaatttctttacat

SEQ ID NO: 5811025 - DNA, 25 bp, Homo sapien
aggcacccgagttcagcgccacgca

SEQ ID NO: 5811026 - DNA, 25 bp, Homo sapien
gcagggggtcatcaccatggatggg

SEQ ID NO: 5811027 - DNA, 25 bp, Homo sapien
gcgctggaagcgttcggcgagagcg

SEQ ID NO: 5811028 - DNA, 25 bp, Homo sapien
ccatgaccagtctgatggatctgac

SEQ ID NO: 5811029 - DNA, 25 bp, Homo sapien
tctttgagtacatgaagggcattca

SEQ ID NO: 5811030 - DNA, 25 bp, Homo sapien
gggctgcatggacgactacaccacg

SEQ ID NO: 5811031 - DNA, 25 bp, Homo sapien
ctgtttcccaggtccgatgtggcct

SEQ ID NO: 5811032 - DNA, 25 bp, Homo sapien
ggcgcggatgtgctggacgaggtgg

SEQ ID NO: 5811033 - DNA, 25 bp, Homo sapien
gaagccagtcctggagcccatacct

SEQ ID NO: 5811034 - DNA, 25 bp, Homo sapien
tcgtcagttatacaggggtctggga

SEQ ID NO: 5811035 - DNA, 25 bp, Homo sapien
gccccagcctggtgcctgctgaagc

SEQ ID NO: 5811036 - DNA, 25 bp, Homo sapien
ccctgagagcaaccagaccctgctg

SEQ ID NO: 5811037 - DNA, 25 bp, Homo sapien
cggagagaatgtttcccagatttac

SEQ ID NO: 5811038 - DNA, 25 bp, Homo sapien
ccatgaagcttgggaaacccgctac

SEQ ID NO: 5811039 - DNA, 25 bp, Homo sapien
gctacatgcttttgctctggctctc

SEQ ID NO: 5811040 - DNA, 25 bp, Homo sapien
ccttcccacgcatcacccagctcct

SEQ ID NO: 5811041 - DNA, 25 bp, Homo sapien
caaatatttaaacatggaaaacgtg

SEQ ID NO: 5811042 - DNA, 25 bp, Homo sapien
ggagcgcgaggtggccctggagcgg

SEQ ID NO: 5811043 - DNA, 25 bp, Homo sapien
gggcattcagagcgacccgcaggcc

SEQ ID NO: 5811044 - DNA, 25 bp, Homo sapien
ctcgctgtggcttctcgttggcctt

SEQ ID NO: 5811045 - DNA, 25 bp, Homo sapien
acgggaacctcctcacccagcctgg

SEQ ID NO: 5811046 - DNA, 25 bp, Homo sapien
gccccgaggaggaggcggaggacga

SEQ ID NO: 5811047 - DNA, 25 bp, Homo sapien
agttgcttgcgctctgtaagaaaga

SEQ ID NO: 5811048 - DNA, 25 bp, Homo sapien
tcccccgaggacgtaagttttgctg

SEQ ID NO: 5811049 - DNA, 25 bp, Homo sapien
tctgctggctcggagccagcctgag

SEQ ID NO: 5811050 - DNA, 25 bp, Homo sapien
gtgatagagcagctgctggtcgggc

SEQ ID NO: 5811051 - DNA, 25 bp, Homo sapien
ctgtgtggcccagcaggccagtgag

SEQ ID NO: 5811052 - DNA, 25 bp, Homo sapien
cctgttgctgccgtctcgactcgtg

SEQ ID NO: 5811053 - DNA, 25 bp, Homo sapien
tggacgactacaccacggacagcag

SEQ ID NO: 5811054 - DNA, 25 bp, Homo sapien
ggaaacccgctacatgcttttgctc

SEQ ID NO: 5811055 - DNA, 25 bp, Homo sapien
tggtgtgaaagcaggagccccagac

SEQ ID NO: 5811056 - DNA, 25 bp, Homo sapien
gaggacagctcatgagacaagcagt

SEQ ID NO: 5811057 - DNA, 25 bp, Homo sapien
agaccctgctgcggaagctgggggt

SEQ ID NO: 5811058 - DNA, 25 bp, Homo sapien
tcagacatctccagcttcccttgta

SEQ ID NO: 5811059 - DNA, 25 bp, Homo sapien
gcatgggtcgattctcgcctgcgca

SEQ ID NO: 5811060 - DNA, 25 bp, Homo sapien
tctgccaccgtttcccgctgatccg

SEQ ID NO: 5811061 - DNA, 25 bp, Homo sapien
tgtgactgcaatctcgagtgcactg

SEQ ID NO: 5811062 - DNA, 25 bp, Homo sapien
ggcagtgcagggcctgaagcagatt

SEQ ID NO: 5811063 - DNA, 25 bp, Homo sapien
tctttgaggacaaccttctgaatga

SEQ ID NO: 5811064 - DNA, 25 bp, Homo sapien
ggcgcggtccccaggctgccgagat

SEQ ID NO: 5811065 - DNA, 25 bp, Homo sapien
tgcagaagagcagcctctgccgcct

SEQ ID NO: 5811066 - DNA, 25 bp, Homo sapien
agcctgtgcaatctggcccgttcct

SEQ ID NO: 5811067 - DNA, 25 bp, Homo sapien
caactgtttcctggttataagtgtg

SEQ ID NO: 5811068 - DNA, 25 bp, Homo sapien
ggctagtcgtgtccctgggcggctt

SEQ ID NO: 5811069 - DNA, 25 bp, Homo sapien
tccttgtgtccagatttatcacacg

SEQ ID NO: 5811070 - DNA, 25 bp, Homo sapien
agcgtgggcaccaacgtcagggacg

SEQ ID NO: 5811071 - DNA, 25 bp, Homo sapien
gcagcgtgggcaccaacgtcaggga

SEQ ID NO: 5811072 - DNA, 25 bp, Homo sapien
tccgtgccgctgctgaagacgctgg

SEQ ID NO: 5811073 - DNA, 25 bp, Homo sapien
ggatctgcgaacacgtgaggcgggg

SEQ ID NO: 5811074 - DNA, 25 bp, Homo sapien
tttcctctctgcacctgcgctctgg

SEQ ID NO: 5811075 - DNA, 25 bp, Homo sapien
tttccctcatggtattgatattttg

SEQ ID NO: 5811076 - DNA, 25 bp, Homo sapien
ggaagaccacggccagccaggtgta

SEQ ID NO: 5811077 - DNA, 25 bp, Homo sapien
atcttcaccacggaggaggaccacc

SEQ ID NO: 5811078 - DNA, 25 bp, Homo sapien
gggcaggagaggcctgttgctgccg

SEQ ID NO: 5811079 - DNA, 25 bp, Homo sapien
gatggctgcagactccctgagagca

SEQ ID NO: 5811080 - DNA, 25 bp, Homo sapien
atgcagctgctgtccttgtgtccag

SEQ ID NO: 5811081 - DNA, 25 bp, Homo sapien
gtgcctgcagcgtgggcaccaacgt

SEQ ID NO: 5811082 - DNA, 25 bp, Homo sapien
gggacccttctgcagatctttgagg

SEQ ID NO: 5811083 - DNA, 25 bp, Homo sapien
ggggtcatcaccatggatgggacgc

SEQ ID NO: 5811084 - DNA, 25 bp, Homo sapien
cctccttccagaccatgcagggggt

SEQ ID NO: 5811085 - DNA, 25 bp, Homo sapien
ttgtacatctggcttttaaatttct

SEQ ID NO: 5811086 - DNA, 25 bp, Homo sapien
ttcccaggccttcccacgcatcacc

SEQ ID NO: 5811087 - DNA, 25 bp, Homo sapien
cgagtgcactggtgattgctgcggt

SEQ ID NO: 5811088 - DNA, 25 bp, Homo sapien
cttccaggcttccttctgaaaggcc

SEQ ID NO: 5811089 - DNA, 25 bp, Homo sapien
ggtctgcagccaagggcatcggtag

SEQ ID NO: 5811090 - DNA, 25 bp, Homo sapien
gcagattcaccagcagctctatgat

SEQ ID NO: 5811091 - DNA, 25 bp, Homo sapien
gctgtccttgtgtccagatttatca

SEQ ID NO: 5811092 - DNA, 25 bp, Homo sapien
gggggatgtctggcgctggcagagc

SEQ ID NO: 5811093 - DNA, 25 bp, Homo sapien
gccgtgatcctgaaggcgctgacct

SEQ ID NO: 5811094 - DNA, 25 bp, Homo sapien
acctggcccagcaggcacccgagtt

SEQ ID NO: 5811095 - DNA, 25 bp, Homo sapien
aacacgtgaggcgggggcgcggtcc

SEQ ID NO: 5811096 - DNA, 25 bp, Homo sapien
gtgaaagcaggagccccagacgaag

SEQ ID NO: 5811097 - DNA, 25 bp, Homo sapien
cgcgtaataatggacaaataccagg

SEQ ID NO: 5811098 - DNA, 25 bp, Homo sapien
tcaagaattcaaaagatatccagaa

SEQ ID NO: 5811099 - DNA, 25 bp, Homo sapien
tggaagcgttcggcgagagcgcgga

SEQ ID NO: 5811100 - DNA, 25 bp, Homo sapien
cgtgggcgcggatgtgctggacgag

SEQ ID NO: 5811101 - DNA, 25 bp, Homo sapien
cctgatcccttttgatttttctcgc

SEQ ID NO: 5811102 - DNA, 25 bp, Homo sapien
gcctgcgcagaagttgcttacgcct

SEQ ID NO: 5811103 - DNA, 25 bp, Homo sapien
cgcggcgctggaagcgttcggcgag

SEQ ID NO: 5811104 - DNA, 25 bp, Homo sapien
acgtgaggcgggggcgcggtcccca

SEQ ID NO: 5811105 - DNA, 25 bp, Homo sapien
gaagcttgggaaacccgctacatgc

SEQ ID NO: 5811106 - DNA, 25 bp, Homo sapien
gccaatgatagaccacctggttacc

SEQ ID NO: 5811107 - DNA, 25 bp, Homo sapien
tgaagggcattcagagcgacccgca

SEQ ID NO: 5811108 - DNA, 25 bp, Homo sapien
gttttgctgagtccaggagagacgg

SEQ ID NO: 5811109 - DNA, 25 bp, Homo sapien
gcagttacccacacttcccccgagg

SEQ ID NO: 5811110 - DNA, 25 bp, Homo sapien
cagactccctgagagcaaccagacc

SEQ ID NO: 5811111 - DNA, 25 bp, Homo sapien
tgcagttccccggcgacgtgaggag

SEQ ID NO: 5811112 - DNA, 25 bp, Homo sapien
agccaggtgtacgagacattgctca

SEQ ID NO: 5811113 - DNA, 25 bp, Homo sapien
acgtgctcacccacggctgcttcga

SEQ ID NO: 5811114 - DNA, 25 bp, Homo sapien
acatctccagcttcccttgtacatc

SEQ ID NO: 5811115 - DNA, 25 bp, Homo sapien
attgctgcggtgtttgaccgagaca

SEQ ID NO: 5811116 - DNA, 25 bp, Homo sapien
cgctgtggcttctcgttggccttgg

SEQ ID NO: 5811117 - DNA, 25 bp, Homo sapien
tttgaccgagacataaactgcagaa

SEQ ID NO: 5811118 - DNA, 25 bp, Homo sapien
tgggccttcgcgcgtgcctatgagc

SEQ ID NO: 5811119 - DNA, 25 bp, Homo sapien
tttcgcgctctagcggagtgggatc

SEQ ID NO: 5811120 - DNA, 25 bp, Homo sapien
acctgtgagcgcatcatgtgctgtg

SEQ ID NO: 5811121 - DNA, 25 bp, Homo sapien
ctgcttcagtttccaggagactgac

SEQ ID NO: 5811122 - DNA, 25 bp, Homo sapien
agagtgagcagaagccactcatcct

SEQ ID NO: 5811123 - DNA, 25 bp, Homo sapien
tgattgtcagtgacaaggcccgaga

SEQ ID NO: 5811124 - DNA, 25 bp, Homo sapien
agccgaaggtggcagcatggaggta

SEQ ID NO: 5811125 - DNA, 25 bp, Homo sapien
cagcaggttctcacaggtttaagag

SEQ ID NO: 5811126 - DNA, 25 bp, Homo sapien
ccacgtgctcacccacggctgcttc

SEQ ID NO: 5811127 - DNA, 25 bp, Homo sapien
ggcgctgacctacgacgagaagcgg

SEQ ID NO: 5811128 - DNA, 25 bp, Homo sapien
ctggcggatgatgtggtcgggtctg

SEQ ID NO: 5811129 - DNA, 25 bp, Homo sapien
ctgacgctcctgcactttgacagcc

SEQ ID NO: 5811130 - DNA, 25 bp, Homo sapien
tgtccgtgccgctgctgaagacgct

SEQ ID NO: 5811131 - DNA, 25 bp, Homo sapien
atctgcgaacacgtgaggcgggggc

SEQ ID NO: 5811132 - DNA, 25 bp, Homo sapien
acactggcctttggcgcggcgctgg

SEQ ID NO: 5811133 - DNA, 25 bp, Homo sapien
tgggcaagcacgaatgtccataatg

SEQ ID NO: 5811134 - DNA, 25 bp, Homo sapien
cttcccgaggctgctgtccatgaca

SEQ ID NO: 5811135 - DNA, 25 bp, Homo sapien
tggttggcaatggctgataaatgac

SEQ ID NO: 5811136 - DNA, 25 bp, Homo sapien
ttgggctgcccacctaccgctacca

SEQ ID NO: 5811137 - DNA, 25 bp, Homo sapien
atggaggtaccagcgtggctgccga

SEQ ID NO: 5811138 - DNA, 25 bp, Homo sapien
gtcagttatacaggggtctgggagg

SEQ ID NO: 5811139 - DNA, 25 bp, Homo sapien
ggaggctggcactagctgacagctt

SEQ ID NO: 5811140 - DNA, 25 bp, Homo sapien
ttggaggctggcactagctgacagc

SEQ ID NO: 5811141 - DNA, 25 bp, Homo sapien
ccttgaatggatgatgaacttgttg

SEQ ID NO: 5811142 - DNA, 25 bp, Homo sapien
tgtgctgtgtggcccagcaggccag

SEQ ID NO: 5811143 - DNA, 25 bp, Homo sapien
cctgttttagatttggtcacaattc

SEQ ID NO: 5811144 - DNA, 25 bp, Homo sapien
cagccaagggcatcggtaggatggc

SEQ ID NO: 5811145 - DNA, 25 bp, Homo sapien
ctcatgagacaagcagtgtgtgttt

SEQ ID NO: 5811146 - DNA, 25 bp, Homo sapien
ctggcaggcttcccagagccctggc

SEQ ID NO: 5811147 - DNA, 25 bp, Homo sapien
cctcacccctgcctggtgaggatgt

SEQ ID NO: 5811148 - DNA, 25 bp, Homo sapien
gcgctctagcggagtgggatctgcg

SEQ ID NO: 5811149 - DNA, 25 bp, Homo sapien
caaggaccatgaagcttgggaaacc

SEQ ID NO: 5811150 - DNA, 25 bp, Homo sapien
gagagcaaccagaccctgctgcgga

SEQ ID NO: 5811151 - DNA, 25 bp, Homo sapien
atctttggctgcaaatctgcagctc

SEQ ID NO: 5811152 - DNA, 25 bp, Homo sapien
tcttgttcctgagggaggccggtgt

SEQ ID NO: 5811153 - DNA, 25 bp, Homo sapien
ttgaatggatgatgaacttgttgtt

SEQ ID NO: 5811154 - DNA, 25 bp, Homo sapien
cgcggtccccaggctgccgagatgg

SEQ ID NO: 5811155 - DNA, 25 bp, Homo sapien
cgtaataatggacaaataccaggag

SEQ ID NO: 5811156 - DNA, 25 bp, Homo sapien
ggagcctgtgcaatctggcccgttc

SEQ ID NO: 5811157 - DNA, 25 bp, Homo sapien
ctgagtccaggagagacggcttgaa

SEQ ID NO: 5811158 - DNA, 25 bp, Homo sapien
ccctggagcggttccgcgtaataat

SEQ ID NO: 5811159 - DNA, 25 bp, Homo sapien
ccacccagagcctctttgagtacat

SEQ ID NO: 5811160 - DNA, 25 bp, Homo sapien
ggagtgcaccttcccaggccttccc

SEQ ID NO: 5811161 - DNA, 25 bp, Homo sapien
accgaggagaactggaaaagctgtt

SEQ ID NO: 5811162 - DNA, 25 bp, Homo sapien
gtgaagactgtttgccctatgctgc

SEQ ID NO: 5811163 - DNA, 25 bp, Homo sapien
cacgccgccagcgtgttcctgacgc

SEQ ID NO: 5811164 - DNA, 25 bp, Homo sapien
gccccagacgaagctgtgtgcggag

SEQ ID NO: 5811165 - DNA, 25 bp, Homo sapien
cctgtcaggcatcgcagtgttctgc

SEQ ID NO: 5811166 - DNA, 25 bp, Homo sapien
cggatgatgtggtcgggtctgtgct

SEQ ID NO: 5811167 - DNA, 25 bp, Homo sapien
acgagacattgctcacctacagtga

SEQ ID NO: 5811168 - DNA, 25 bp, Homo sapien
aaatgactcgctgtggcttctcgtt

SEQ ID NO: 5811169 - DNA, 25 bp, Homo sapien
agcagcctctgccgccttccaggag

SEQ ID NO: 5811170 - DNA, 25 bp, Homo sapien
gcagctgctggtcgggctgaaggac

SEQ ID NO: 5811171 - DNA, 25 bp, Homo sapien
gctggaccacgtgctcacccacggc

SEQ ID NO: 5811172 - DNA, 25 bp, Homo sapien
ccgctgctgaagacgctggaccacg

SEQ ID NO: 5811173 - DNA, 25 bp, Homo sapien
gacaaataccaggagcagcctcatc

SEQ ID NO: 5811174 - DNA, 25 bp, Homo sapien
agacatctccagcttcccttgtaca

SEQ ID NO: 5811175 - DNA, 25 bp, Homo sapien
gcacccgagttcagcgccacgcaag

SEQ ID NO: 5811176 - DNA, 25 bp, Homo sapien
ctttccaaaatgccctttagaggtg

SEQ ID NO: 5811177 - DNA, 25 bp, Homo sapien
agtgggatctgcgaacacgtgaggc

SEQ ID NO: 5811178 - DNA, 25 bp, Homo sapien
ccgccagcgtgttcctgacgctcct

SEQ ID NO: 5811179 - DNA, 25 bp, Homo sapien
acccagagcctctttgagtacatga

SEQ ID NO: 5811180 - DNA, 25 bp, Homo sapien
ctgaagccgaaggtggcagcatgga

SEQ ID NO: 5811181 - DNA, 25 bp, Homo sapien
ctggctcggagccagcctgagctga

SEQ ID NO: 5811182 - DNA, 25 bp, Homo sapien
gcggtgtttgaccgagacataaact

SEQ ID NO: 5811183 - DNA, 25 bp, Homo sapien
ctggcccagcaggcacccgagttca

SEQ ID NO: 5811184 - DNA, 25 bp, Homo sapien
tgactgcaatctcgagtgcactggt

SEQ ID NO: 5811185 - DNA, 25 bp, Homo sapien
aagggcattcagagcgacccgcagg

SEQ ID NO: 5811186 - DNA, 25 bp, Homo sapien
cgccgccagcgtgttcctgacgctc

SEQ ID NO: 5811187 - DNA, 25 bp, Homo sapien
ctgccttcacttgaacacaaatgtg

SEQ ID NO: 5811188 - DNA, 25 bp, Homo sapien
gggtggacgcctctgccttcacttg

SEQ ID NO: 5811189 - DNA, 25 bp, Homo sapien
tcttcacatgaggcatgggtcgatt

SEQ ID NO: 5811190 - DNA, 25 bp, Homo sapien
gccgcctgctacgtgtgctgggcct

SEQ ID NO: 5811191 - DNA, 25 bp, Homo sapien
actcagggtcagagtgagcagaagc

SEQ ID NO: 5811192 - DNA, 25 bp, Homo sapien
cagagtcctacttgattgtcagtga

SEQ ID NO: 5811193 - DNA, 25 bp, Homo sapien
tttgagtacatgaagggcattcaga

SEQ ID NO: 5811194 - DNA, 25 bp, Homo sapien
cttccttctgaaaggccggctccag

SEQ ID NO: 5811195 - DNA, 25 bp, Homo sapien
tcatcaccaaggttcgaggctataa

SEQ ID NO: 5811196 - DNA, 25 bp, Homo sapien
gggcggcttgacggagtcgacgatc

SEQ ID NO: 5811197 - DNA, 25 bp, Homo sapien
ccagagcctctttgagtacatgaag

SEQ ID NO: 5811198 - DNA, 25 bp, Homo sapien
cgatccggcactccacccagagcct

SEQ ID NO: 5811199 - DNA, 25 bp, Homo sapien
ggtgagagagcagcgcaaccgtctg

SEQ ID NO: 5811200 - DNA, 25 bp, Homo sapien
ccaccgtttcccgctgatccggaag

SEQ ID NO: 5811201 - DNA, 25 bp, Homo sapien
acccgggcgctgctgggccgcctgc

SEQ ID NO: 5811202 - DNA, 25 bp, Homo sapien
cgattctcgcctgcgcagaagttgc

SEQ ID NO: 5811203 - DNA, 25 bp, Homo sapien
caccaacgtcagggacgccgcctgc

SEQ ID NO: 5811204 - DNA, 25 bp, Homo sapien
acatttcttcgtttatttcctcatg

SEQ ID NO: 5811205 - DNA, 25 bp, Homo sapien
cccggcgacgtgaggaggcaggccc

SEQ ID NO: 5811206 - DNA, 25 bp, Homo sapien
tgaagatcagccactgggatggggt

SEQ ID NO: 5811207 - DNA, 25 bp, Homo sapien
tgtgtgcggagagaatgtttcccag

SEQ ID NO: 5811208 - DNA, 25 bp, Homo sapien
tttccgtgctcacgccgccagcgtg

SEQ ID NO: 5811209 - DNA, 25 bp, Homo sapien
gccctttgtgactgcaatctcgagt

SEQ ID NO: 5811210 - DNA, 25 bp, Homo sapien
cgttcctccttccagaccatgcagg

SEQ ID NO: 5811211 - DNA, 25 bp, Homo sapien
ggtgtttgaccgagacataaactgc

SEQ ID NO: 5811212 - DNA, 25 bp, Homo sapien
tgatccggaagaccacggccagcca

SEQ ID NO: 5811213 - DNA, 25 bp, Homo sapien
cagcgtggctgccgatctttggctg

SEQ ID NO: 5811214 - DNA, 25 bp, Homo sapien
ctccacccagagcctctttgagtac

SEQ ID NO: 5811215 - DNA, 25 bp, Homo sapien
gacgtgggcacctgggtccgcaagg

SEQ ID NO: 5811216 - DNA, 25 bp, Homo sapien
catcggtaggatggctggcaggctt

SEQ ID NO: 5811217 - DNA, 25 bp, Homo sapien
cctttgctgtgaagttgcttgcgct

SEQ ID NO: 5811218 - DNA, 25 bp, Homo sapien
acccgagttcagcgccacgcaagtc

SEQ ID NO: 5811219 - DNA, 25 bp, Homo sapien
caagcacgaatgtccataatggacc

SEQ ID NO: 5811220 - DNA, 25 bp, Homo sapien
gttcagcgccacgcaagtcttcccg

SEQ ID NO: 5811221 - DNA, 25 bp, Homo sapien
tcgtttatttcctcatgaagttgcc

SEQ ID NO: 5811222 - DNA, 25 bp, Homo sapien
gccaagggcatcggtaggatggctg

SEQ ID NO: 5811223 - DNA, 25 bp, Homo sapien
tcacccagctccttgggctgcccac

SEQ ID NO: 5811224 - DNA, 25 bp, Homo sapien
aggccctggcacaaatatttaaaca

SEQ ID NO: 5811225 - DNA, 25 bp, Homo sapien
gtgactgtgctcagtgacactgcgt

SEQ ID NO: 5811226 - DNA, 25 bp, Homo sapien
ctgcggtgtttgaccgagacataaa

SEQ ID NO: 5811227 - DNA, 25 bp, Homo sapien
agattgaccgtttccgtgctcacgc

SEQ ID NO: 5811228 - DNA, 25 bp, Homo sapien
agagctgggcaggagaggcctgttg

SEQ ID NO: 5811229 - DNA, 25 bp, Homo sapien
ctgtgcgctgctgggctgcatggac

SEQ ID NO: 5811230 - DNA, 25 bp, Homo sapien
ggctgcttcgacatcttcaccacgg

SEQ ID NO: 5811231 - DNA, 25 bp, Homo sapien
taatggaccgtattctccaaatagc

SEQ ID NO: 5811232 - DNA, 25 bp, Homo sapien
cctgaagcagattcaccagcagctc

SEQ ID NO: 5811233 - DNA, 25 bp, Homo sapien
tgagttcctggactggagcctgtgc

SEQ ID NO: 5811234 - DNA, 25 bp, Homo sapien
gttcctgacgctcctgcactttgac

SEQ ID NO: 5811235 - DNA, 25 bp, Homo sapien
taggatggctggcaggcttcccaga

SEQ ID NO: 5811236 - DNA, 25 bp, Homo sapien
ccgtaattgatggttggcaatggct

SEQ ID NO: 5811237 - DNA, 25 bp, Homo sapien
gaactggaaaagctgtttcccaggt

SEQ ID NO: 5811238 - DNA, 25 bp, Homo sapien
cttcacttgaacacaaatgtgcttc

SEQ ID NO: 5811239 - DNA, 25 bp, Homo sapien
agcgactggggctgacattcctgaa

SEQ ID NO: 5811240 - DNA, 25 bp, Homo sapien
ggcaggccctcctgcagctgtgtct

SEQ ID NO: 5811241 - DNA, 25 bp, Homo sapien
acgcggagcttgcagtggtgagaga

SEQ ID NO: 5811242 - DNA, 25 bp, Homo sapien
gggtcatccgagagttggctgcgag

SEQ ID NO: 5811243 - DNA, 25 bp, Homo sapien
gggaggccggtgtggaaagcctcgc

SEQ ID NO: 5811244 - DNA, 25 bp, Homo sapien
ctgactattttgccgtcggtaacag

SEQ ID NO: 5811245 - DNA, 25 bp, Homo sapien
tcaccagcagctctatgatcgtcag

SEQ ID NO: 5811246 - DNA, 25 bp, Homo sapien
ggccctcctgcagctgtgtctgctc

SEQ ID NO: 5811247 - DNA, 25 bp, Homo sapien
ctctgccgccttccaggagaatgtg

SEQ ID NO: 5811248 - DNA, 25 bp, Homo sapien
aaaagatatccagaagctcctgtca

SEQ ID NO: 5811249 - DNA, 25 bp, Homo sapien
aaaggccggctccagcaggttctca

SEQ ID NO: 5811250 - DNA, 25 bp, Homo sapien
ggccttcccacgcatcacccagctc

SEQ ID NO: 5811251 - DNA, 25 bp, Homo sapien
gtgcaagatcagacatctccagctt

SEQ ID NO: 5811252 - DNA, 25 bp, Homo sapien
cgcgggtggccccgaggaggaggcg

SEQ ID NO: 5811253 - DNA, 25 bp, Homo sapien
acctcctcacccagcctgggcaagc

SEQ ID NO: 5811254 - DNA, 25 bp, Homo sapien
agagggtgtccgtgccgctgctgaa

SEQ ID NO: 5811255 - DNA, 25 bp, Homo sapien
ctccgtgacctgcctgatccctttt

SEQ ID NO: 5811256 - DNA, 25 bp, Homo sapien
gcatcgcagtgttctgcgggatggt

SEQ ID NO: 5811257 - DNA, 25 bp, Homo sapien
agcccaagagaacaggcccgtcacg

SEQ ID NO: 5811258 - DNA, 25 bp, Homo sapien
tccgtgaactggagtgcaccttccc

SEQ ID NO: 5811259 - DNA, 25 bp, Homo sapien
aaactgcagaagagcagcctctgcc

SEQ ID NO: 5811260 - DNA, 25 bp, Homo sapien
ttcggcgagagcgcggagacccggg

SEQ ID NO: 5811261 - DNA, 25 bp, Homo sapien
tggacatagtgcaagatcagacatc

SEQ ID NO: 5811262 - DNA, 25 bp, Homo sapien
tccctcatggtattgatattttgac

SEQ ID NO: 5811263 - DNA, 25 bp, Homo sapien
cttttaaatttctttacatcatcac

SEQ ID NO: 5811264 - DNA, 25 bp, Homo sapien
gtgctggactgcttcagtttccagg

SEQ ID NO: 5811265 - DNA, 25 bp, Homo sapien
tctgatggatctgacacttctgctg

SEQ ID NO: 5811266 - DNA, 25 bp, Homo sapien
gacaaccttctgaatgagagggtgt

SEQ ID NO: 5811267 - DNA, 25 bp, Homo sapien
ccagcttcccttgtacatctggctt

SEQ ID NO: 5811268 - DNA, 25 bp, Homo sapien
agtgacactgcgtgggacgcggagc

SEQ ID NO: 5811269 - DNA, 25 bp, Homo sapien
ctttagaggtgacaccgtaattgat

SEQ ID NO: 5811270 - DNA, 25 bp, Homo sapien
acacaaatgtgcttcctataaaatc

SEQ ID NO: 5811271 - DNA, 25 bp, Homo sapien
aggccggctccagcaggttctcaca

SEQ ID NO: 5811272 - DNA, 25 bp, Homo sapien
gttctgcgggatggtgcagttcccc

SEQ ID NO: 5811273 - DNA, 25 bp, Homo sapien
atgtcaagcaaagcaagatggctga

SEQ ID NO: 5811274 - DNA, 25 bp, Homo sapien
cgtgaggaggcaggccctcctgcag

SEQ ID NO: 5811275 - DNA, 25 bp, Homo sapien
agacccgggcgctgctgggccgcct

SEQ ID NO: 5811276 - DNA, 25 bp, Homo sapien
agctccttgggctgcccacctaccg

SEQ ID NO: 5811277 - DNA, 25 bp, Homo sapien
ctgggaggacagctcatgagacaag

SEQ ID NO: 5811278 - DNA, 25 bp, Homo sapien
tctcgttggccttgggcgcccttcc

SEQ ID NO: 5811279 - DNA, 25 bp, Homo sapien
cttttgctctggctctccgtgacct

SEQ ID NO: 5811280 - DNA, 25 bp, Homo sapien
gccgatctttggctgcaaatctgca

SEQ ID NO: 5811281 - DNA, 25 bp, Homo sapien
gcgtacccaggccccagctggtgcc

SEQ ID NO: 5811282 - DNA, 25 bp, Homo sapien
caccttcccaggccttcccacgcat

SEQ ID NO: 5811283 - DNA, 25 bp, Homo sapien
aagaccacggccagccaggtgtacg

SEQ ID NO: 5811284 - DNA, 25 bp, Homo sapien
ggctgcaaatctgcagctcctcact

SEQ ID NO: 5811285 - DNA, 25 bp, Homo sapien
tctcacaggtttaagagcagttacc

SEQ ID NO: 5811286 - DNA, 25 bp, Homo sapien
tcagggacgccgcctgctacgtgtg

SEQ ID NO: 5811287 - DNA, 25 bp, Homo sapien
cgactggggctgacattcctgaagc

SEQ ID NO: 5811288 - DNA, 25 bp, Homo sapien
gctgcagactccctgagagcaacca

SEQ ID NO: 5811289 - DNA, 25 bp, Homo sapien
tagcggagtgggatctgcgaacacg

SEQ ID NO: 5811290 - DNA, 25 bp, Homo sapien
agcaggcagtgcagggcctgaagca

SEQ ID NO: 5811291 - DNA, 25 bp, Homo sapien
ggggtgaagcttgtgcagcgactgg

SEQ ID NO: 5811292 - DNA, 25 bp, Homo sapien
accgagacataaactgcagaagagc

SEQ ID NO: 5811293 - DNA, 25 bp, Homo sapien
cttgacggagtcgacgatccggcac

SEQ ID NO: 5811294 - DNA, 25 bp, Homo sapien
ctggagcccatacctcacccctgcc

SEQ ID NO: 5811295 - DNA, 25 bp, Homo sapien
gagctgaagccctttgtgactgcaa

SEQ ID NO: 5811296 - DNA, 25 bp, Homo sapien
gtctgtgctggactgcttcagtttc

SEQ ID NO: 5811297 - DNA, 25 bp, Homo sapien
cctaccgctaccacgtcctgctggg

SEQ ID NO: 5811298 - DNA, 25 bp, Homo sapien
gctttcgcgctctagcggagtggga

SEQ ID NO: 5811299 - DNA, 25 bp, Homo sapien
tgaggcatgggtcgattctcgcctg

SEQ ID NO: 5811300 - DNA, 25 bp, Homo sapien
tcccagagccctggcggatgatgtg

SEQ ID NO: 5811301 - DNA, 25 bp, Homo sapien
tcaggagctgaagccctttgtgact

SEQ ID NO: 5811302 - DNA, 25 bp, Homo sapien
ggcaccaacgtcagggacgccgcct

SEQ ID NO: 5811303 - DNA, 25 bp, Homo sapien
atcccccacgtgccccaccgaggag

SEQ ID NO: 5811304 - DNA, 25 bp, Homo sapien
ccgctacatgcttttgctctggctc

SEQ ID NO: 5811305 - DNA, 25 bp, Homo sapien
tgaagcagattcaccagcagctcta

SEQ ID NO: 5811306 - DNA, 25 bp, Homo sapien
cgccacgcaagtcttcccgaggctg

SEQ ID NO: 5811307 - DNA, 25 bp, Homo sapien
cctatgagcctcaggagctgaagcc

SEQ ID NO: 5811308 - DNA, 25 bp, Homo sapien
cgcaccttgaatggatgatgaactt

SEQ ID NO: 5811309 - DNA, 25 bp, Homo sapien
cggagccagcctgagctgatcgagg

SEQ ID NO: 5811310 - DNA, 25 bp, Homo sapien
cggctccagcaggttctcacaggtt

SEQ ID NO: 5811311 - DNA, 25 bp, Homo sapien
cacttctgctggctcggagccagcc

SEQ ID NO: 5811312 - DNA, 25 bp, Homo sapien
gactgcttcagtttccaggagactg

SEQ ID NO: 5811313 - DNA, 25 bp, Homo sapien
tatttaaacatggaaaacgtgaaga

SEQ ID NO: 5811314 - DNA, 25 bp, Homo sapien
ccaggtgtacgagacattgctcacc

SEQ ID NO: 5811315 - DNA, 25 bp, Homo sapien
tactgtgcgctgctgggctgcatgg

SEQ ID NO: 5811316 - DNA, 25 bp, Homo sapien
cccatacctcacccctgcctggtga

SEQ ID NO: 5811317 - DNA, 25 bp, Homo sapien
aaacttgcagcccaagagaacaggc

SEQ ID NO: 5811318 - DNA, 25 bp, Homo sapien
agtacatgaagggcattcagagcga

SEQ ID NO: 5811319 - DNA, 25 bp, Homo sapien
aataccaggagcagcctcatctgtt

SEQ ID NO: 5811320 - DNA, 25 bp, Homo sapien
ccttctgggcgtacccaggccccag

SEQ ID NO: 5811321 - DNA, 25 bp, Homo sapien
acgctggaccacgtgctcacccacg

SEQ ID NO: 5811322 - DNA, 25 bp, Homo sapien
gcactagctgacagcttttcctctc

SEQ ID NO: 5811323 - DNA, 25 bp, Homo sapien
ctggggctagtcgtgtccctgggcg

SEQ ID NO: 5811324 - DNA, 25 bp, Homo sapien
ctggtgcctgctgaagccagtcctg

SEQ ID NO: 5811325 - DNA, 25 bp, Homo sapien
cctgagtacacgcagccaatgatag

SEQ ID NO: 5811326 - DNA, 25 bp, Homo sapien
aggccctgggcagcttcagcgggac

SEQ ID NO: 5811327 - DNA, 25 bp, Homo sapien
ggatggctggcaggcttcccagagc

SEQ ID NO: 5811328 - DNA, 25 bp, Homo sapien
tgccctatgctgccactgtcctcag

SEQ ID NO: 5811329 - DNA, 25 bp, Homo sapien
tgcctgctgaagccagtcctggagc

SEQ ID NO: 5811330 - DNA, 25 bp, Homo sapien
gtttcccaggtccgatgtggcctcc

SEQ ID NO: 5811331 - DNA, 25 bp, Homo sapien
agtgcaccttcccaggccttcccac

SEQ ID NO: 5811332 - DNA, 25 bp, Homo sapien
cttgattgtcagtgacaaggcccga

SEQ ID NO: 5811333 - DNA, 25 bp, Homo sapien
ttcatccctggctttcgcgctctag

SEQ ID NO: 5811334 - DNA, 25 bp, Homo sapien
tagtgcaagatcagacatctccagc

SEQ ID NO: 5811335 - DNA, 25 bp, Homo sapien
ctttcctgagtacacgcagccaatg

SEQ ID NO: 5811336 - DNA, 25 bp, Homo sapien
atttcctcatgaagttgccgatgta

SEQ ID NO: 5811337 - DNA, 25 bp, Homo sapien
agggtcagagtgagcagaagccact

SEQ ID NO: 5811338 - DNA, 25 bp, Homo sapien
gtcactttccaaaatgccctttaga

SEQ ID NO: 5811339 - DNA, 25 bp, Homo sapien
tggactgcttcagtttccaggagac

SEQ ID NO: 5811340 - DNA, 25 bp, Homo sapien
gggtcgattctcgcctgcgcagaag

SEQ ID NO: 5811341 - DNA, 25 bp, Homo sapien
gtaacagatccaactgtttcctggt

SEQ ID NO: 5811342 - DNA, 25 bp, Homo sapien
cctgctggggctagtcgtgtccctg

SEQ ID NO: 5811343 - DNA, 25 bp, Homo sapien
gaatggatgatgaacttgttgttgg

SEQ ID NO: 5811344 - DNA, 25 bp, Homo sapien
tcagagcgacccgcaggccctgggc

SEQ ID NO: 5811345 - DNA, 25 bp, Homo sapien
tctgcagatctttgaggacaacctt

SEQ ID NO: 5811346 - DNA, 25 bp, Homo sapien
ttgcgctctgtaagaaagaaatcaa

SEQ ID NO: 5811347 - DNA, 25 bp, Homo sapien
gctctgtaagaaagaaatcaagaat

SEQ ID NO: 5811348 - DNA, 25 bp, Homo sapien
gagaagattgaccgtttccgtgctc

SEQ ID NO: 5811349 - DNA, 25 bp, Homo sapien
atccggaagaccacggccagccagg

SEQ ID NO: 5811350 - DNA, 25 bp, Homo sapien
tgccccaccgaggagaactggaaaa

SEQ ID NO: 5811351 - DNA, 25 bp, Homo sapien
ctgccgccttccaggagaatgtggg

SEQ ID NO: 5811352 - DNA, 25 bp, Homo sapien
tccatgacactgagtccagatcttc

SEQ ID NO: 5811353 - DNA, 25 bp, Homo sapien
gtttattgccggctttcctgagtac

SEQ ID NO: 5811354 - DNA, 25 bp, Homo sapien
aggggtctgggaggacagctcatga

SEQ ID NO: 5811355 - DNA, 25 bp, Homo sapien
gatattttgaccacagctgactatt

SEQ ID NO: 5811356 - DNA, 25 bp, Homo sapien
cctgtgcaatctggcccgttcctcc

SEQ ID NO: 5811357 - DNA, 25 bp, Homo sapien
tctgaaaggccggctccagcaggtt

SEQ ID NO: 5811358 - DNA, 25 bp, Homo sapien
aaagttgtcactttccaaaatgccc

SEQ ID NO: 5811359 - DNA, 25 bp, Homo sapien
gcctctgccgccttccaggagaatg

SEQ ID NO: 5811360 - DNA, 25 bp, Homo sapien
caggcagtgcagggcctgaagcaga

SEQ ID NO: 5811361 - DNA, 25 bp, Homo sapien
gcaagatggctgagttcctggactg

SEQ ID NO: 5811362 - DNA, 25 bp, Homo sapien
gctgcccacctaccgctaccacgtc

SEQ ID NO: 5811363 - DNA, 25 bp, Homo sapien
cacctaccgctaccacgtcctgctg

SEQ ID NO: 5811364 - DNA, 25 bp, Homo sapien
agcctcaggagctgaagccctttgt

SEQ ID NO: 5811365 - DNA, 25 bp, Homo sapien
catctggacgagcaggcagtgcagg

SEQ ID NO: 5811366 - DNA, 25 bp, Homo sapien
tctggacgagcaggcagtgcagggc

SEQ ID NO: 5811367 - DNA, 25 bp, Homo sapien
acttgcagcccaagagaacaggccc

SEQ ID NO: 5811368 - DNA, 25 bp, Homo sapien
aggacgagacactggcctttggcgc

SEQ ID NO: 5811369 - DNA, 25 bp, Homo sapien
tcacacgtcctgatgtcaagcaaag

SEQ ID NO: 5811370 - DNA, 25 bp, Homo sapien
tgtggaaagcctcgcacagtggtgc

SEQ ID NO: 5811371 - DNA, 25 bp, Homo sapien
cagcagaggggacgtgggcacctgg

SEQ ID NO: 5811372 - DNA, 25 bp, Homo sapien
atgtagagcctgttttagatttggt

SEQ ID NO: 5811373 - DNA, 25 bp, Homo sapien
gtgtgatagagcagctgctggtcgg

SEQ ID NO: 5811374 - DNA, 25 bp, Homo sapien
agtcgtgtccctgggcggcttgacg

SEQ ID NO: 5811375 - DNA, 25 bp, Homo sapien
tcgccttgacgggaacctcctcacc

SEQ ID NO: 5811376 - DNA, 25 bp, Homo sapien
attgaccgtttccgtgctcacgccg

SEQ ID NO: 5811377 - DNA, 25 bp, Homo sapien
aagatgacgacgtcccagagggggt

SEQ ID NO: 5811378 - DNA, 25 bp, Homo sapien
aagtgtgtttattgccggctttcct

SEQ ID NO: 5811379 - DNA, 25 bp, Homo sapien
ggtgtccgtgccgctgctgaagacg

SEQ ID NO: 5811380 - DNA, 25 bp, Homo sapien
acgtcctgctggggctagtcgtgtc

SEQ ID NO: 5811381 - DNA, 25 bp, Homo sapien
gaggtggtgactgtgctcagtgaca

SEQ ID NO: 5811382 - DNA, 25 bp, Homo sapien
gtttatttcctcatgaagttgccga

SEQ ID NO: 5811383 - DNA, 25 bp, Homo sapien
tgttttagatttggtcacaattcag

SEQ ID NO: 5811384 - DNA, 25 bp, Homo sapien
gagaggcctgttgctgccgtctcga

SEQ ID NO: 5811385 - DNA, 25 bp, Homo sapien
cctgcagctgtgtctgctcctctgc

SEQ ID NO: 5811386 - DNA, 25 bp, Homo sapien
aaacatttcttcgtttatttcctca

SEQ ID NO: 5811387 - DNA, 25 bp, Homo sapien
gactgacaaggcgtggcatggggga

SEQ ID NO: 5811388 - DNA, 25 bp, Homo sapien
tccctggctttcgcgctctagcgga

SEQ ID NO: 5811389 - DNA, 25 bp, Homo sapien
ccacgtcctgctggggctagtcgtg

SEQ ID NO: 5811390 - DNA, 25 bp, Homo sapien
agagcctgttttagatttggtcaca

SEQ ID NO: 5811391 - DNA, 25 bp, Homo sapien
gaaggccattgcgaggatttgccag

SEQ ID NO: 5811392 - DNA, 25 bp, Homo sapien
gggatggggtcatccgagagttggc

SEQ ID NO: 5811393 - DNA, 25 bp, Homo sapien
gttggccttgggcgcccttccaggc

SEQ ID NO: 5811394 - DNA, 25 bp, Homo sapien
acgtgaagactgtttgccctatgct

SEQ ID NO: 5811395 - DNA, 25 bp, Homo sapien
cctgggcaagcacgaatgtccataa

SEQ ID NO: 5811396 - DNA, 25 bp, Homo sapien
gtacgagacattgctcacctacagt

SEQ ID NO: 5811397 - DNA, 25 bp, Homo sapien
tggggagacagggcactttccctca

SEQ ID NO: 5811398 - DNA, 25 bp, Homo sapien
gtcggtaacagatccaactgtttcc

SEQ ID NO: 5811399 - DNA, 25 bp, Homo sapien
tgctcacgccgccagcgtgttcctg

SEQ ID NO: 5811400 - DNA, 25 bp, Homo sapien
ggaccacccctttgctgtgaagttg

SEQ ID NO: 5811401 - DNA, 25 bp, Homo sapien
tctcgcctgcgcagaagttgcttac

SEQ ID NO: 5811402 - DNA, 25 bp, Homo sapien
ggcaagcacgaatgtccataatgga

SEQ ID NO: 5811403 - DNA, 25 bp, Homo sapien
tgggcgcggatgtgctggacgaggt

SEQ ID NO: 5811404 - DNA, 25 bp, Homo sapien
ggtgaagcttgtgcagcgactgggg

SEQ ID NO: 5811405 - DNA, 25 bp, Homo sapien
gctgtgtgcggagagaatgtttccc

SEQ ID NO: 5811406 - DNA, 25 bp, Homo sapien
aggtgacaccgtaattgatggttgg

SEQ ID NO: 5811407 - DNA, 25 bp, Homo sapien
ggtgcacggcggcggcgcggagcgc

SEQ ID NO: 5811408 - DNA, 25 bp, Homo sapien
aagccctttgtgactgcaatctcga

SEQ ID NO: 5811409 - DNA, 25 bp, Homo sapien
gacagcagaggggacgtgggcacct

SEQ ID NO: 5811410 - DNA, 25 bp, Homo sapien
cggtccccaggctgccgagatggcc

SEQ ID NO: 5811411 - DNA, 25 bp, Homo sapien
tctgctcctctgccaccgtttcccg

SEQ ID NO: 5811412 - DNA, 25 bp, Homo sapien
ctcctctgccaccgtttcccgctga

SEQ ID NO: 5811413 - DNA, 25 bp, Homo sapien
tgggggtgaagcttgtgcagcgact

SEQ ID NO: 5811414 - DNA, 25 bp, Homo sapien
gagcgcatcatgtgctgtgtggccc

SEQ ID NO: 5811415 - DNA, 25 bp, Homo sapien
gctgtgtctgctcctctgccaccgt

SEQ ID NO: 5811416 - DNA, 25 bp, Homo sapien
acatcttcaccacggaggaggacca

SEQ ID NO: 5811417 - DNA, 25 bp, Homo sapien
cttacgccttgtacaaacttgcagc

SEQ ID NO: 5811418 - DNA, 25 bp, Homo sapien
ggctgccgatctttggctgcaaatc

SEQ ID NO: 5811419 - DNA, 25 bp, Homo sapien
tacttgattgtcagtgacaaggccc

SEQ ID NO: 5811420 - DNA, 25 bp, Homo sapien
agttggctgcgagggcgctgcacaa

SEQ ID NO: 5811421 - DNA, 25 bp, Homo sapien
tcctgagggaggccggtgtggaaag

SEQ ID NO: 5811422 - DNA, 25 bp, Homo sapien
cgttcggcgagagcgcggagacccg

SEQ ID NO: 5811423 - DNA, 25 bp, Homo sapien
ctttggctgcaaatctgcagctcct

SEQ ID NO: 5811424 - DNA, 25 bp, Homo sapien
tccaactgtttcctggttataagtg

SEQ ID NO: 5811425 - DNA, 25 bp, Homo sapien
tgccgtcggtaacagatccaactgt

SEQ ID NO: 5811426 - DNA, 25 bp, Homo sapien
gaaggacaaggacacggtcgtgcgg

SEQ ID NO: 5811427 - DNA, 25 bp, Homo sapien
aatttctttacatcatcaccaaggt

SEQ ID NO: 5811428 - DNA, 25 bp, Homo sapien
tgataaatgactcgctgtggcttct

SEQ ID NO: 5811429 - DNA, 25 bp, Homo sapien
gaatgtttcccagatttactgtgcg

SEQ ID NO: 5811430 - DNA, 25 bp, Homo sapien
gggccgcctgcgggaggtgcacggc

SEQ ID NO: 5811431 - DNA, 25 bp, Homo sapien
cctgcctgatcccttttgatttttc

SEQ ID NO: 5811432 - DNA, 25 bp, Homo sapien
tggagcgtgtgatagagcagctgct

SEQ ID NO: 5811433 - DNA, 25 bp, Homo sapien
ccgctaccacgtcctgctggggcta

SEQ ID NO: 5811434 - DNA, 25 bp, Homo sapien
aggcggaggacgagacactggcctt

SEQ ID NO: 5811435 - DNA, 25 bp, Homo sapien
gtggccctggagcggttccgcgtaa

SEQ ID NO: 5811436 - DNA, 25 bp, Homo sapien
ctgctgtccatgacactgagtccag

SEQ ID NO: 5811437 - DNA, 25 bp, Homo sapien
aagctgtgtgcggagagaatgtttc

SEQ ID NO: 5811438 - DNA, 25 bp, Homo sapien
ctgggcaggagaggcctgttgctgc

SEQ ID NO: 5811439 - DNA, 25 bp, Homo sapien
gagaactggaaaagctgtttcccag

SEQ ID NO: 5811440 - DNA, 25 bp, Homo sapien
ttaagagcagttacccacacttccc

SEQ ID NO: 5811441 - DNA, 25 bp, Homo sapien
gcagctgctgtccttgtgtccagat

SEQ ID NO: 5811442 - DNA, 25 bp, Homo sapien
ccacagctgactattttgccgtcgg

SEQ ID NO: 5811443 - DNA, 25 bp, Homo sapien
ctgcacctgcgctctggtgacttgg

SEQ ID NO: 5811444 - DNA, 25 bp, Homo sapien
cggccgcgggtggccccgaggagga

SEQ ID NO: 5811445 - DNA, 25 bp, Homo sapien
aagatggctgagttcctggactgga

SEQ ID NO: 5811446 - DNA, 25 bp, Homo sapien
ttatacaggggtctgggaggacagc

SEQ ID NO: 5811447 - DNA, 25 bp, Homo sapien
ggtgcctgctgaagccagtcctgga

SEQ ID NO: 5811448 - DNA, 25 bp, Homo sapien
tagctgacagcttttcctctctgca

SEQ ID NO: 5811449 - DNA, 25 bp, Homo sapien
tcgcgctctagcggagtgggatctg

SEQ ID NO: 5811450 - DNA, 25 bp, Homo sapien
agggtagcgctggcccttggaggct

SEQ ID NO: 5811451 - DNA, 25 bp, Homo sapien
gctgcacaacctggcccagcaggca

SEQ ID NO: 5811452 - DNA, 25 bp, Homo sapien
ggatttgccagactgttggtgtgaa

SEQ ID NO: 5811453 - DNA, 25 bp, Homo sapien
tcctggagcccatacctcacccctg

SEQ ID NO: 5811454 - DNA, 25 bp, Homo sapien
aatgccctttagaggtgacaccgta

SEQ ID NO: 5811455 - DNA, 25 bp, Homo sapien
ccaaggttcgaggctataaaacatt

SEQ ID NO: 5811456 - DNA, 25 bp, Homo sapien
ccgctgatccggaagaccacggcca

SEQ ID NO: 5811457 - DNA, 25 bp, Homo sapien
gcgcaaccgtctgtgtgaccttctg

SEQ ID NO: 5811458 - DNA, 25 bp, Homo sapien
gaccacgtgctcacccacggctgct

SEQ ID NO: 5811459 - DNA, 25 bp, Homo sapien
attcaaaagatatccagaagctcct

SEQ ID NO: 5811460 - DNA, 25 bp, Homo sapien
aagatgacgacgaagatgacgacgt

SEQ ID NO: 5811461 - DNA, 25 bp, Homo sapien
tatgagcctcaggagctgaagccct

SEQ ID NO: 5811462 - DNA, 25 bp, Homo sapien
ctggacgaggtggtgactgtgctca

SEQ ID NO: 5811463 - DNA, 25 bp, Homo sapien
tagagcagctgctggtcgggctgaa

SEQ ID NO: 5811464 - DNA, 25 bp, Homo sapien
aatatttaaacatggaaaacgtgaa

SEQ ID NO: 5811465 - DNA, 25 bp, Homo sapien
tgaagccctttgtgactgcaatctc

SEQ ID NO: 5811466 - DNA, 25 bp, Homo sapien
aaggttcgaggctataaaacatttc

SEQ ID NO: 5811467 - DNA, 25 bp, Homo sapien
aggccgccatgaccagtctgatgga

SEQ ID NO: 5811468 - DNA, 25 bp, Homo sapien
ggcccagcaggcacccgagttcagc

SEQ ID NO: 5811469 - DNA, 25 bp, Homo sapien
actggaaaagctgtttcccaggtcc

SEQ ID NO: 5811470 - DNA, 25 bp, Homo sapien
ccctcctgcagctgtgtctgctcct

SEQ ID NO: 5811471 - DNA, 25 bp, Homo sapien
tggcacaaatatttaaacatggaaa

SEQ ID NO: 5811472 - DNA, 25 bp, Homo sapien
gaagattgaccgtttccgtgctcac

SEQ ID NO: 5811473 - DNA, 25 bp, Homo sapien
gccgccttccaggagaatgtgggga

SEQ ID NO: 5811474 - DNA, 25 bp, Homo sapien
tccagaccatgcagggggtcatcac

SEQ ID NO: 5811475 - DNA, 25 bp, Homo sapien
agctctatgatcgtcagttatacag

SEQ ID NO: 5811476 - DNA, 25 bp, Homo sapien
agtcgacgatccggcactccaccca

SEQ ID NO: 5811477 - DNA, 25 bp, Homo sapien
cccagatttactgtgcgctgctggg

SEQ ID NO: 5811478 - DNA, 25 bp, Homo sapien
tggggctgacattcctgaagccgaa

SEQ ID NO: 5811479 - DNA, 25 bp, Homo sapien
gctgagttcctggactggagcctgt

SEQ ID NO: 5811480 - DNA, 25 bp, Homo sapien
tgtccataatggaccgtattctcca

SEQ ID NO: 5811481 - DNA, 25 bp, Homo sapien
tacatgcttttgctctggctctccg

SEQ ID NO: 5811482 - DNA, 25 bp, Homo sapien
tcccttgtacatctggcttttaaat

SEQ ID NO: 5811483 - DNA, 25 bp, Homo sapien
aaaatgccctttagaggtgacaccg

SEQ ID NO: 5811484 - DNA, 25 bp, Homo sapien
cgtgctcacgccgccagcgtgttcc

SEQ ID NO: 5811485 - DNA, 25 bp, Homo sapien
ttcctggactggagcctgtgcaatc

SEQ ID NO: 5811486 - DNA, 25 bp, Homo sapien
tgtcttgttcctgagggaggccggt

SEQ ID NO: 5811487 - DNA, 25 bp, Homo sapien
gttggacatagtgcaagatcagaca

SEQ ID NO: 5811488 - DNA, 25 bp, Homo sapien
ccatacctgtgagcgcatcatgtgc

SEQ ID NO: 5811489 - DNA, 25 bp, Homo sapien
cctcatctgttggacccgcaccttg

SEQ ID NO: 5811490 - DNA, 25 bp, Homo sapien
gggcgctgcacaacctggcccagca

SEQ ID NO: 5811491 - DNA, 25 bp, Homo sapien
acactgcgtgggacgcggagcttgc

SEQ ID NO: 5811492 - DNA, 25 bp, Homo sapien
gacgagaagcggggtgcctgcagcg

SEQ ID NO: 5811493 - DNA, 25 bp, Homo sapien
aaggcgctgacctacgacgagaagc

SEQ ID NO: 5811494 - DNA, 25 bp, Homo sapien
cagtggtgcctccagctgttgaagg

SEQ ID NO: 5811495 - DNA, 25 bp, Homo sapien
cagcttcagcgggacccttctgcag

SEQ ID NO: 5811496 - DNA, 25 bp, Homo sapien
cccacgtgccccaccgaggagaact

SEQ ID NO: 5811497 - DNA, 25 bp, Homo sapien
caccttgaatggatgatgaacttgt

SEQ ID NO: 5811498 - DNA, 25 bp, Homo sapien
gccctcccatcccccacgtgcccca

SEQ ID NO: 5811499 - DNA, 25 bp, Homo sapien
gcagctctatgatcgtcagttatac

SEQ ID NO: 5811500 - DNA, 25 bp, Homo sapien
cgtgatcctgaaggcgctgacctac

SEQ ID NO: 5811501 - DNA, 25 bp, Homo sapien
tttgctgagtccaggagagacggct

SEQ ID NO: 5811502 - DNA, 25 bp, Homo sapien
tgcggagagaatgtttcccagattt

SEQ ID NO: 5811503 - DNA, 25 bp, Homo sapien
gcctgcgggaggtgcacggcggcgg

SEQ ID NO: 5811504 - DNA, 25 bp, Homo sapien
ataaatgactcgctgtggcttctcg

SEQ ID NO: 5811505 - DNA, 25 bp, Homo sapien
ggcttctcgttggccttgggcgccc

SEQ ID NO: 5811506 - DNA, 25 bp, Homo sapien
ttgacagccctcccatcccccacgt

SEQ ID NO: 5811507 - DNA, 25 bp, Homo sapien
tccagatttatcacacgtcctgatg

SEQ ID NO: 5811508 - DNA, 25 bp, Homo sapien
gtgttctgcgggatggtgcagttcc

SEQ ID NO: 5811509 - DNA, 25 bp, Homo sapien
ctattttgccgtcggtaacagatcc

SEQ ID NO: 5811510 - DNA, 25 bp, Homo sapien
tcgttggccttgggcgcccttccag

SEQ ID NO: 5811511 - DNA, 25 bp, Homo sapien
aactggagtgcaccttcccaggcct

SEQ ID NO: 5811512 - DNA, 25 bp, Homo sapien
ttatttcctcatgaagttgccgatg

SEQ ID NO: 5811513 - DNA, 25 bp, Homo sapien
ccggtgtggaaagcctcgcacagtg

SEQ ID NO: 5811514 - DNA, 25 bp, Homo sapien
ccacggaggaggaccacccctttgc

SEQ ID NO: 5811515 - DNA, 25 bp, Homo sapien
gtctgtgtgaccttctgggcgtacc

SEQ ID NO: 5811516 - DNA, 25 bp, Homo sapien
ttaatagaaaagttgtcactttcca

SEQ ID NO: 5811517 - DNA, 25 bp, Homo sapien
ggcttccttctgaaaggccggctcc

SEQ ID NO: 5811518 - DNA, 25 bp, Homo sapien
gaagccactcatcctgaccgaagat

SEQ ID NO: 5811519 - DNA, 25 bp, Homo sapien
acccgcaggccctgggcagcttcag

SEQ ID NO: 5811520 - DNA, 25 bp, Homo sapien
ctgcgcagaagttgcttacgccttg

SEQ ID NO: 5811521 - DNA, 25 bp, Homo sapien
tctcgccttgacgggaacctcctca

SEQ ID NO: 5811522 - DNA, 25 bp, Homo sapien
cataatggaccgtattctccaaata

SEQ ID NO: 5811523 - DNA, 25 bp, Homo sapien
tgtgcaatctggcccgttcctcctt

SEQ ID NO: 5811524 - DNA, 25 bp, Homo sapien
tcaaaagatatccagaagctcctgt

SEQ ID NO: 5811525 - DNA, 25 bp, Homo sapien
attgccggctttcctgagtacacgc

SEQ ID NO: 5811526 - DNA, 25 bp, Homo sapien
tgatgtcaagcaaagcaagatggct

SEQ ID NO: 5811527 - DNA, 25 bp, Homo sapien
cagatccaactgtttcctggttata

SEQ ID NO: 5811528 - DNA, 25 bp, Homo sapien
gacgctgcaggccctggcacaaata

SEQ ID NO: 5811529 - DNA, 25 bp, Homo sapien
tcacccacggctgcttcgacatctt

SEQ ID NO: 5811530 - DNA, 25 bp, Homo sapien
gcacctgcgctctggtgacttgggg

SEQ ID NO: 5811531 - DNA, 25 bp, Homo sapien
cctcatccttcatccctggctttcg

SEQ ID NO: 5811532 - DNA, 25 bp, Homo sapien
tgatcccttttgatttttctcgcct

SEQ ID NO: 5811533 - DNA, 25 bp, Homo sapien
gccttgggcgcccttccaggcttcc

SEQ ID NO: 5811534 - DNA, 25 bp, Homo sapien
ggacgcctctgccttcacttgaaca

SEQ ID NO: 5811535 - DNA, 25 bp, Homo sapien
aatggacaaataccaggagcagcct

SEQ ID NO: 5811536 - DNA, 25 bp, Homo sapien
gctataaaacatttcttcgtttatt

SEQ ID NO: 5811537 - DNA, 25 bp, Homo sapien
gctggcccttggaggctggcactag

SEQ ID NO: 5811538 - DNA, 25 bp, Homo sapien
ccgaggctgctgtccatgacactga

SEQ ID NO: 5811539 - DNA, 25 bp, Homo sapien
gtggcttctcgttggccttgggcgc

SEQ ID NO: 5811540 - DNA, 25 bp, Homo sapien
tggaaaacgtgaagactgtttgccc

SEQ ID NO: 5811541 - DNA, 25 bp, Homo sapien
attgtcagtgacaaggcccgagatg

SEQ ID NO: 5811542 - DNA, 25 bp, Homo sapien
gcagggcctgaagcagattcaccag

SEQ ID NO: 5811543 - DNA, 25 bp, Homo sapien
gacgagcaggcagtgcagggcctga

SEQ ID NO: 5811544 - DNA, 25 bp, Homo sapien
aaacgtgaagactgtttgccctatg

SEQ ID NO: 5811545 - DNA, 25 bp, Homo sapien
acgaggtggtgactgtgctcagtga

SEQ ID NO: 5811546 - DNA, 25 bp, Homo sapien
tacatgaagggcattcagagcgacc

SEQ ID NO: 5811547 - DNA, 25 bp, Homo sapien
gcttcctataaaatcatgtaccaag

SEQ ID NO: 5811548 - DNA, 25 bp, Homo sapien
gttctcacaggtttaagagcagtta

SEQ ID NO: 5811549 - DNA, 25 bp, Homo sapien
ccctttagaggtgacaccgtaattg

SEQ ID NO: 5811550 - DNA, 25 bp, Homo sapien
acattcctgaagccgaaggtggcag

SEQ ID NO: 5811551 - DNA, 25 bp, Homo sapien
gcccatacctgtgagcgcatcatgt

SEQ ID NO: 5811552 - DNA, 25 bp, Homo sapien
caatctcgagtgcactggtgattgc

SEQ ID NO: 5811553 - DNA, 25 bp, Homo sapien
gtctgggaggacagctcatgagaca

SEQ ID NO: 5811554 - DNA, 25 bp, Homo sapien
tgcgtgggacgcggagcttgcagtg

SEQ ID NO: 5811555 - DNA, 25 bp, Homo sapien
tcagggtcagagtgagcagaagcca

SEQ ID NO: 5811556 - DNA, 25 bp, Homo sapien
cgtgggcaccaacgtcagggacgcc

SEQ ID NO: 5811557 - DNA, 25 bp, Homo sapien
cccacgcatcacccagctccttggg

SEQ ID NO: 5811558 - DNA, 25 bp, Homo sapien
ctggttaccatgaagatcagccact

SEQ ID NO: 5811559 - DNA, 25 bp, Homo sapien
catgtgctgtgtggcccagcaggcc

SEQ ID NO: 5811560 - DNA, 25 bp, Homo sapien
ggacgcggagcttgcagtggtgaga

SEQ ID NO: 5811561 - DNA, 25 bp, Homo sapien
ataagtgtgtttattgccggctttc

SEQ ID NO: 5811562 - DNA, 25 bp, Homo sapien
tttctcgccttgacgggaacctcct

SEQ ID NO: 5811563 - DNA, 25 bp, Homo sapien
acctacgacgagaagcggggtgcct

SEQ ID NO: 5811564 - DNA, 25 bp, Homo sapien
gcaggccagtgagaagattgaccgt

SEQ ID NO: 5811565 - DNA, 25 bp, Homo sapien
aagcaggagccccagacgaagctgt

SEQ ID NO: 5811566 - DNA, 25 bp, Homo sapien
cctcaggagctgaagccctttgtga

SEQ ID NO: 5811567 - DNA, 25 bp, Homo sapien
ccccaggctgccgagatggccctga

SEQ ID NO: 5811568 - DNA, 25 bp, Homo sapien
gcggaggacgagacactggcctttg

SEQ ID NO: 5811569 - DNA, 25 bp, Homo sapien
tggtgacttggggtggacgcctctg

SEQ ID NO: 5811570 - DNA, 25 bp, Homo sapien
catgaggcatgggtcgattctcgcc

SEQ ID NO: 5811571 - DNA, 25 bp, Homo sapien
ctggctctccgtgacctgcctgatc

SEQ ID NO: 5811572 - DNA, 25 bp, Homo sapien
cactttgacagccctcccatccccc

SEQ ID NO: 5811573 - DNA, 25 bp, Homo sapien
cctcatgaagttgccgatgtagagc

SEQ ID NO: 5811574 - DNA, 25 bp, Homo sapien
ttcacatgaggcatgggtcgattct

SEQ ID NO: 5811575 - DNA, 25 bp, Homo sapien
ggttataagtgtgtttattgccggc

SEQ ID NO: 5811576 - DNA, 25 bp, Homo sapien
gccagactgttggtgtgaaagcagg

SEQ ID NO: 5811577 - DNA, 25 bp, Homo sapien
tgacggagtcgacgatccggcactc

SEQ ID NO: 5811578 - DNA, 25 bp, Homo sapien
gtacaaacttgcagcccaagagaac

SEQ ID NO: 5811579 - DNA, 25 bp, Homo sapien
ggacagctcatgagacaagcagtgt

SEQ ID NO: 5811580 - DNA, 25 bp, Homo sapien
cgggggcgcggtccccaggctgccg

SEQ ID NO: 5811581 - DNA, 25 bp, Homo sapien
gatgacgacgtcccagagggggtgg

SEQ ID NO: 5811582 - DNA, 25 bp, Homo sapien
ctggagtgcaccttcccaggccttc

SEQ ID NO: 5811583 - DNA, 25 bp, Homo sapien
ggctggcaggcttcccagagccctg

SEQ ID NO: 5811584 - DNA, 25 bp, Homo sapien
tgcaatctcgagtgcactggtgatt

SEQ ID NO: 5811585 - DNA, 25 bp, Homo sapien
catccgagagttggctgcgagggcg

SEQ ID NO: 5811586 - DNA, 25 bp, Homo sapien
cgagcaggcagtgcagggcctgaag

SEQ ID NO: 5811587 - DNA, 25 bp, Homo sapien
tgaggacaaccttctgaatgagagg

SEQ ID NO: 5811588 - DNA, 25 bp, Homo sapien
gcggagcgcgaggtggccctggagc

SEQ ID NO: 5811589 - DNA, 25 bp, Homo sapien
cgccatgaccagtctgatggatctg

SEQ ID NO: 5811590 - DNA, 25 bp, Homo sapien
ttgccagactgttggtgtgaaagca

SEQ ID NO: 5811591 - DNA, 25 bp, Homo sapien
gcgtgtgatagagcagctgctggtc

SEQ ID NO: 5811592 - DNA, 25 bp, Homo sapien
gagacattgctcacctacagtgacg

SEQ ID NO: 5811593 - DNA, 25 bp, Homo sapien
caagggcatcggtaggatggctggc

SEQ ID NO: 5811594 - DNA, 25 bp, Homo sapien
acgccgcctgctacgtgtgctgggc

SEQ ID NO: 5811595 - DNA, 25 bp, Homo sapien
tgcttttgctctggctctccgtgac

SEQ ID NO: 5811596 - DNA, 25 bp, Homo sapien
aggcatgggtcgattctcgcctgcg

SEQ ID NO: 5811597 - DNA, 25 bp, Homo sapien
cctgcactttgacagccctcccatc

SEQ ID NO: 5811598 - DNA, 25 bp, Homo sapien
tgagcctcaggagctgaagcccttt

SEQ ID NO: 5811599 - DNA, 25 bp, Homo sapien
agggggtggagcgtgtgatagagca

SEQ ID NO: 5811600 - DNA, 25 bp, Homo sapien
gatggttggcaatggctgataaatg

SEQ ID NO: 5811601 - DNA, 25 bp, Homo sapien
aacttgttgttggacatagtgcaag

SEQ ID NO: 5811602 - DNA, 25 bp, Homo sapien
tgccctttagaggtgacaccgtaat

SEQ ID NO: 5811603 - DNA, 25 bp, Homo sapien
cccagctggtgccccagcctggtgc

SEQ ID NO: 5811604 - DNA, 25 bp, Homo sapien
tgcagctgtgtctgctcctctgcca

SEQ ID NO: 5811605 - DNA, 25 bp, Homo sapien
aagctgggggtgaagcttgtgcagc

SEQ ID NO: 5811606 - DNA, 25 bp, Homo sapien
tgcggtggtctgcagccaagggcat

SEQ ID NO: 5811607 - DNA, 25 bp, Homo sapien
gttccccggcgacgtgaggaggcag

SEQ ID NO: 5811608 - DNA, 25 bp, Homo sapien
ccacggccagccaggtgtacgagac

SEQ ID NO: 5811609 - DNA, 25 bp, Homo sapien
tccagcaggttctcacaggtttaag

SEQ ID NO: 5811610 - DNA, 25 bp, Homo sapien
gtgacctgcctgatcccttttgatt

SEQ ID NO: 5811611 - DNA, 25 bp, Homo sapien
tcacccagcctgggcaagcacgaat

SEQ ID NO: 5811612 - DNA, 25 bp, Homo sapien
cgggctgaaggacaaggacacggtc

SEQ ID NO: 5811613 - DNA, 25 bp, Homo sapien
taccacgtcctgctggggctagtcg

SEQ ID NO: 5811614 - DNA, 25 bp, Homo sapien
gatccaactgtttcctggttataag

SEQ ID NO: 5811615 - DNA, 25 bp, Homo sapien
gcaggagccccagacgaagctgtgt

SEQ ID NO: 5811616 - DNA, 25 bp, Homo sapien
cttctcgttggccttgggcgccctt

SEQ ID NO: 5811617 - DNA, 25 bp, Homo sapien
aggtggccctggagcggttccgcgt

SEQ ID NO: 5811618 - DNA, 25 bp, Homo sapien
gagaatgtttcccagatttactgtg

SEQ ID NO: 5811619 - DNA, 25 bp, Homo sapien
tttgctgtgaagttgcttgcgctct

SEQ ID NO: 5811620 - DNA, 25 bp, Homo sapien
tgccgagatggccctgagcgacgaa

SEQ ID NO: 5811621 - DNA, 25 bp, Homo sapien
cctgagcgacgaaccggccgcgggt

SEQ ID NO: 5811622 - DNA, 25 bp, Homo sapien
ccagaccctgctgcggaagctgggg

SEQ ID NO: 5811623 - DNA, 25 bp, Homo sapien
tgaccgtttccgtgctcacgccgcc

SEQ ID NO: 5811624 - DNA, 25 bp, Homo sapien
gtgttcctgacgctcctgcactttg

SEQ ID NO: 5811625 - DNA, 25 bp, Homo sapien
gctggtcgggctgaaggacaaggac

SEQ ID NO: 5811626 - DNA, 25 bp, Homo sapien
agctgctggtcgggctgaaggacaa

SEQ ID NO: 5811627 - DNA, 25 bp, Homo sapien
ttgtgcagcgactggggctgacatt

SEQ ID NO: 5811628 - DNA, 25 bp, Homo sapien
actgtttgccctatgctgccactgt

SEQ ID NO: 5811629 - DNA, 25 bp, Homo sapien
ctgagctgatcgaggcccatacctg

SEQ ID NO: 5811630 - DNA, 25 bp, Homo sapien
ggcgcggcgctggaagcgttcggcg

SEQ ID NO: 5811631 - DNA, 25 bp, Homo sapien
tattctccaaatagcagagtcctac

SEQ ID NO: 5811632 - DNA, 25 bp, Homo sapien
cagcatggaggtaccagcgtggctg

SEQ ID NO: 5811633 - DNA, 25 bp, Homo sapien
cagccctcccatcccccacgtgccc

SEQ ID NO: 5811634 - DNA, 25 bp, Homo sapien
ctgcttcgacatcttcaccacggag

SEQ ID NO: 5811635 - DNA, 25 bp, Homo sapien
atcgcagtgttctgcgggatggtgc

SEQ ID NO: 5811636 - DNA, 25 bp, Homo sapien
cagaccatgcagggggtcatcacca

SEQ ID NO: 5811637 - DNA, 25 bp, Homo sapien
ctcgactcgtggatgttgtcgccgt

SEQ ID NO: 5811638 - DNA, 25 bp, Homo sapien
gaagctcctgtcaggcatcgcagtg

SEQ ID NO: 5811639 - DNA, 25 bp, Homo sapien
tggcctttggcgcggcgctggaagc

SEQ ID NO: 5811640 - DNA, 25 bp, Homo sapien
gagcgtgtgatagagcagctgctgg

SEQ ID NO: 5811641 - DNA, 25 bp, Homo sapien
acggaggaggaccacccctttgctg

SEQ ID NO: 5811642 - DNA, 25 bp, Homo sapien
atgggggatgtctggcgctggcaga

SEQ ID NO: 5811643 - DNA, 25 bp, Homo sapien
ggatgatgaacttgttgttggacat

SEQ ID NO: 5811644 - DNA, 25 bp, Homo sapien
ggggcgcggtccccaggctgccgag

SEQ ID NO: 5811645 - DNA, 25 bp, Homo sapien
cagggcactttccctcatggtattg

SEQ ID NO: 5811646 - DNA, 25 bp, Homo sapien
cctcactcagggtcagagtgagcag

SEQ ID NO: 5811647 - DNA, 25 bp, Homo sapien
ggcactccacccagagcctctttga

SEQ ID NO: 5811648 - DNA, 25 bp, Homo sapien
acagctgactattttgccgtcggta

SEQ ID NO: 5811649 - DNA, 25 bp, Homo sapien
gagagcgcggagacccgggcgctgc

SEQ ID NO: 5811650 - DNA, 25 bp, Homo sapien
tggtgactgtgctcagtgacactgc

SEQ ID NO: 5811651 - DNA, 25 bp, Homo sapien
ggaggacgagacactggcctttggc

SEQ ID NO: 5811652 - DNA, 25 bp, Homo sapien
tttgccgtcggtaacagatccaact

SEQ ID NO: 5811653 - DNA, 25 bp, Homo sapien
caaggccgccatgaccagtctgatg

SEQ ID NO: 5811654 - DNA, 25 bp, Homo sapien
agccactcatcctgaccgaagatga

SEQ ID NO: 5811655 - DNA, 25 bp, Homo sapien
actagctgacagcttttcctctctg

SEQ ID NO: 5811656 - DNA, 25 bp, Homo sapien
cagactgttggtgtgaaagcaggag

SEQ ID NO: 5811657 - DNA, 25 bp, Homo sapien
aggagaggcctgttgctgccgtctc

SEQ ID NO: 5811658 - DNA, 25 bp, Homo sapien
ctgacacttctgctggctcggagcc

SEQ ID NO: 5811659 - DNA, 25 bp, Homo sapien
agttgccgatgtagagcctgtttta

SEQ ID NO: 5811660 - DNA, 25 bp, Homo sapien
gcacaaatatttaaacatggaaaac

SEQ ID NO: 5811661 - DNA, 25 bp, Homo sapien
gtaattgatggttggcaatggctga

SEQ ID NO: 5811662 - DNA, 25 bp, Homo sapien
aacaggcccgtcacggaccatctgg

SEQ ID NO: 5811663 - DNA, 25 bp, Homo sapien
atctggcccgttcctccttccagac

SEQ ID NO: 5811664 - DNA, 25 bp, Homo sapien
gaagcgttcggcgagagcgcggaga

SEQ ID NO: 5811665 - DNA, 25 bp, Homo sapien
tctgcgggatggtgcagttccccgg

SEQ ID NO: 5811666 - DNA, 25 bp, Homo sapien
aggacaaggacacggtcgtgcggtg

SEQ ID NO: 5811667 - DNA, 25 bp, Homo sapien
tacacgcagccaatgatagaccacc

SEQ ID NO: 5811668 - DNA, 25 bp, Homo sapien
tgggacgcggagcttgcagtggtga

SEQ ID NO: 5811669 - DNA, 25 bp, Homo sapien
gcgcatcatgtgctgtgtggcccag

SEQ ID NO: 5811670 - DNA, 25 bp, Homo sapien
ggagcggttccgcgtaataatggac

SEQ ID NO: 5811671 - DNA, 25 bp, Homo sapien
tgctgcggtgtttgaccgagacata

SEQ ID NO: 5811672 - DNA, 25 bp, Homo sapien
ttattgccggctttcctgagtacac

SEQ ID NO: 5811673 - DNA, 25 bp, Homo sapien
ggcgcccttccaggcttccttctga

SEQ ID NO: 5811674 - DNA, 25 bp, Homo sapien
tcggtaggatggctggcaggcttcc

SEQ ID NO: 5811675 - DNA, 25 bp, Homo sapien
acgtcgtgggcgcggatgtgctgga

SEQ ID NO: 5811676 - DNA, 25 bp, Homo sapien
caggcttccttctgaaaggccggct

SEQ ID NO: 5811677 - DNA, 25 bp, Homo sapien
acggcggcggcgcggagcgcgaggt

SEQ ID NO: 5811678 - DNA, 25 bp, Homo sapien
cggttccgcgtaataatggacaaat

SEQ ID NO: 5811679 - DNA, 25 bp, Homo sapien
accacccctttgctgtgaagttgct

SEQ ID NO: 5811680 - DNA, 25 bp, Homo sapien
ctggcttttaaatttctttacatca

SEQ ID NO: 5811681 - DNA, 25 bp, Homo sapien
ggcacctgggtccgcaaggccgcca

SEQ ID NO: 5811682 - DNA, 25 bp, Homo sapien
tggccctgagcgacgaaccggccgc

SEQ ID NO: 5811683 - DNA, 25 bp, Homo sapien
gactattttgccgtcggtaacagat

SEQ ID NO: 5811684 - DNA, 25 bp, Homo sapien
gaaggtggcagcatggaggtaccag

SEQ ID NO: 5811685 - DNA, 25 bp, Homo sapien
agcgccacgcaagtcttcccgaggc

SEQ ID NO: 5811686 - DNA, 25 bp, Homo sapien
gagggcgctgcacaacctggcccag

SEQ ID NO: 5811687 - DNA, 25 bp, Homo sapien
gctccagcaggttctcacaggttta

SEQ ID NO: 5811688 - DNA, 25 bp, Homo sapien
cccaagagaacaggcccgtcacgga

SEQ ID NO: 5811689 - DNA, 25 bp, Homo sapien
gaggcctgttgctgccgtctcgact

SEQ ID NO: 5811690 - DNA, 25 bp, Homo sapien
ccactgtcctcaggtgcctcgatgg

SEQ ID NO: 5811691 - DNA, 25 bp, Homo sapien
gacattgctcacctacagtgacgtc

SEQ ID NO: 5811692 - DNA, 25 bp, Homo sapien
atttcttcgtttatttcctcatgaa

SEQ ID NO: 5811693 - DNA, 25 bp, Homo sapien
ccagccaggtgtacgagacattgct

SEQ ID NO: 5811694 - DNA, 25 bp, Homo sapien
tagaaaagttgtcactttccaaaat

SEQ ID NO: 5811695 - DNA, 25 bp, Homo sapien
gagactgacaaggcgtggcatgggg

SEQ ID NO: 5811696 - DNA, 25 bp, Homo sapien
accctgctgcggaagctgggggtga

SEQ ID NO: 5811697 - DNA, 25 bp, Homo sapien
aatgagagggtgtccgtgccgctgc

SEQ ID NO: 5811698 - DNA, 25 bp, Homo sapien
tataaaacatttcttcgtttatttc

SEQ ID NO: 5811699 - DNA, 25 bp, Homo sapien
ttagaggtgacaccgtaattgatgg

SEQ ID NO: 5811700 - DNA, 25 bp, Homo sapien
cccagacgaagctgtgtgcggagag

SEQ ID NO: 5811701 - DNA, 25 bp, Homo sapien
cggatgtgctggacgaggtggtgac

SEQ ID NO: 5811702 - DNA, 25 bp, Homo sapien
gatgatgtggtcgggtctgtgctgg

SEQ ID NO: 5811703 - DNA, 25 bp, Homo sapien
actgagtccagatcttcacatgagg

SEQ ID NO: 5811704 - DNA, 25 bp, Homo sapien
cgaggtggccctggagcggttccgc

SEQ ID NO: 5811705 - DNA, 25 bp, Homo sapien
cgcatcacccagctccttgggctgc

SEQ ID NO: 5811706 - DNA, 25 bp, Homo sapien
ggcagcttcagcgggacccttctgc

SEQ ID NO: 5811707 - DNA, 25 bp, Homo sapien
tggtcgggctgaaggacaaggacac

SEQ ID NO: 5811708 - DNA, 25 bp, Homo sapien
acgtaagttttgctgagtccaggag

SEQ ID NO: 5811709 - DNA, 25 bp, Homo sapien
tgtccagatttatcacacgtcctga

SEQ ID NO: 5811710 - DNA, 25 bp, Homo sapien
agccactgggatggggtcatccgag

SEQ ID NO: 5811711 - DNA, 25 bp, Homo sapien
cgcgaggtggccctggagcggttcc

SEQ ID NO: 5811712 - DNA, 25 bp, Homo sapien
tgctgggccgcctgcgggaggtgca

SEQ ID NO: 5811713 - DNA, 25 bp, Homo sapien
gcatggaggtaccagcgtggctgcc

SEQ ID NO: 5811714 - DNA, 25 bp, Homo sapien
tataaaatcatgtaccaagaaaaaa

SEQ ID NO: 5811715 - DNA, 25 bp, Homo sapien
tcacaggtttaagagcagttaccca

SEQ ID NO: 5811716 - DNA, 25 bp, Homo sapien
cgtttccgtgctcacgccgccagcg

SEQ ID NO: 5811717 - DNA, 25 bp, Homo sapien
gctgggccttcgcgcgtgcctatga

SEQ ID NO: 5811718 - DNA, 25 bp, Homo sapien
cggacagcagaggggacgtgggcac

SEQ ID NO: 5811719 - DNA, 25 bp, Homo sapien
gggtctgggaggacagctcatgaga

SEQ ID NO: 5811720 - DNA, 25 bp, Homo sapien
gctgacagcttttcctctctgcacc

SEQ ID NO: 5811721 - DNA, 25 bp, Homo sapien
acccctgcctggtgaggatgtcttg

SEQ ID NO: 5811722 - DNA, 25 bp, Homo sapien
ctgaagccagtcctggagcccatac

SEQ ID NO: 5811723 - DNA, 25 bp, Homo sapien
cagctgtgtctgctcctctgccacc

SEQ ID NO: 5811724 - DNA, 25 bp, Homo sapien
atgactcgctgtggcttctcgttgg

SEQ ID NO: 5811725 - DNA, 25 bp, Homo sapien
gtgtacgagacattgctcacctaca

SEQ ID NO: 5811726 - DNA, 25 bp, Homo sapien
cgagatgcagctgctgtccttgtgt

SEQ ID NO: 5811727 - DNA, 25 bp, Homo sapien
atgatagaccacctggttaccatga

SEQ ID NO: 5811728 - DNA, 25 bp, Homo sapien
gaccagtctgatggatctgacactt

SEQ ID NO: 5811729 - DNA, 25 bp, Homo sapien
aagcagattcaccagcagctctatg

SEQ ID NO: 5811730 - DNA, 25 bp, Homo sapien
tgacaatcaagtaggactctgctat

SEQ ID NO: 5811731 - DNA, 25 bp, Homo sapien
tggtagcggtaggtgggcagcccaa

SEQ ID NO: 5811732 - DNA, 25 bp, Homo sapien
tgggcctcgatcagctcaggctggc

SEQ ID NO: 5811733 - DNA, 25 bp, Homo sapien
ttctcgtcgtaggtcagcgccttca

SEQ ID NO: 5811734 - DNA, 25 bp, Homo sapien
gagatgtctgatcttgcactatgtc

SEQ ID NO: 5811735 - DNA, 25 bp, Homo sapien
tccagcacatccgcgcccacgacgt

SEQ ID NO: 5811736 - DNA, 25 bp, Homo sapien
gatgagtggcttctgctcactctga

SEQ ID NO: 5811737 - DNA, 25 bp, Homo sapien
tcaagtaggactctgctatttggag

SEQ ID NO: 5811738 - DNA, 25 bp, Homo sapien
agtcgagacggcagcaacaggcctc

SEQ ID NO: 5811739 - DNA, 25 bp, Homo sapien
ccagtggctgatcttcatggtaacc

SEQ ID NO: 5811740 - DNA, 25 bp, Homo sapien
aggcaccactgtgcgaggctttcca

SEQ ID NO: 5811741 - DNA, 25 bp, Homo sapien
agaagggtcccgctgaagctgccca

SEQ ID NO: 5811742 - DNA, 25 bp, Homo sapien
cctggactcagcaaaacttacgtcc

SEQ ID NO: 5811743 - DNA, 25 bp, Homo sapien
actctgaccctgagtgaggagctgc

SEQ ID NO: 5811744 - DNA, 25 bp, Homo sapien
gccacatcggacctgggaaacagct

SEQ ID NO: 5811745 - DNA, 25 bp, Homo sapien
ccatgcagcccagcagcgcacagta

SEQ ID NO: 5811746 - DNA, 25 bp, Homo sapien
ctcgccgaacgcttccagcgccgcg

SEQ ID NO: 5811747 - DNA, 25 bp, Homo sapien
cagggacacgactagccccagcagg

SEQ ID NO: 5811748 - DNA, 25 bp, Homo sapien
ccttgtcagtctcctggaaactgaa

SEQ ID NO: 5811749 - DNA, 25 bp, Homo sapien
atctgttaccgacggcaaaatagtc

SEQ ID NO: 5811750 - DNA, 25 bp, Homo sapien
ccaccccctctgggacgtcgtcatc

SEQ ID NO: 5811751 - DNA, 25 bp, Homo sapien
caggaatgtcagccccagtcgctgc

SEQ ID NO: 5811752 - DNA, 25 bp, Homo sapien
tgagtggcttctgctcactctgacc

SEQ ID NO: 5811753 - DNA, 25 bp, Homo sapien
gacacgactagccccagcaggacgt

SEQ ID NO: 5811754 - DNA, 25 bp, Homo sapien
atgattttataggaagcacatttgt

SEQ ID NO: 5811755 - DNA, 25 bp, Homo sapien
gctcgtccagatggtccgtgacggg

SEQ ID NO: 5811756 - DNA, 25 bp, Homo sapien
ttcagcccgaccagcagctgctcta

SEQ ID NO: 5811757 - DNA, 25 bp, Homo sapien
gccagccatcctaccgatgcccttg

SEQ ID NO: 5811758 - DNA, 25 bp, Homo sapien
cttgtctcatgagctgtcctcccag

SEQ ID NO: 5811759 - DNA, 25 bp, Homo sapien
ggaaaagctgtcagctagtgccagc

SEQ ID NO: 5811760 - DNA, 25 bp, Homo sapien
gcctgctcgtccagatggtccgtga

SEQ ID NO: 5811761 - DNA, 25 bp, Homo sapien
acgcgcgaaggcccagcacacgtag

SEQ ID NO: 5811762 - DNA, 25 bp, Homo sapien
ccagcgtcttcagcagcggcacgga

SEQ ID NO: 5811763 - DNA, 25 bp, Homo sapien
gctccgcgccgccgccgtgcacctc

SEQ ID NO: 5811764 - DNA, 25 bp, Homo sapien
ctgctcgtccagatggtccgtgacg

SEQ ID NO: 5811765 - DNA, 25 bp, Homo sapien
gctctgccagcgccagacatccccc

SEQ ID NO: 5811766 - DNA, 25 bp, Homo sapien
atttaaaagccagatgtacaaggga

SEQ ID NO: 5811767 - DNA, 25 bp, Homo sapien
agtcacaaagggcttcagctcctga

SEQ ID NO: 5811768 - DNA, 25 bp, Homo sapien
atggtccgtgacgggcctgttctct

SEQ ID NO: 5811769 - DNA, 25 bp, Homo sapien
tgggtgaggaggttcccgtcaaggc

SEQ ID NO: 5811770 - DNA, 25 bp, Homo sapien
ggttgtcctcaaagatctgcagaag

SEQ ID NO: 5811771 - DNA, 25 bp, Homo sapien
gaagcagccgtgggtgagcacgtgg

SEQ ID NO: 5811772 - DNA, 25 bp, Homo sapien
aagatcggcagccacgctggtacct

SEQ ID NO: 5811773 - DNA, 25 bp, Homo sapien
ccttcaagccgtctctcctggactc

SEQ ID NO: 5811774 - DNA, 25 bp, Homo sapien
tcccgcaggcggcccagcagcgccc

SEQ ID NO: 5811775 - DNA, 25 bp, Homo sapien
agtgacaacttttctattaaaacac

SEQ ID NO: 5811776 - DNA, 25 bp, Homo sapien
ctgaattgtgaccaaatctaaaaca

SEQ ID NO: 5811777 - DNA, 25 bp, Homo sapien
gctgctcctggtatttgtccattat

SEQ ID NO: 5811778 - DNA, 25 bp, Homo sapien
cgcctcctcctcggggccacccgcg

SEQ ID NO: 5811779 - DNA, 25 bp, Homo sapien
attttggaaagtgacaacttttcta

SEQ ID NO: 5811780 - DNA, 25 bp, Homo sapien
tccgtgacgggcctgttctcttggg

SEQ ID NO: 5811781 - DNA, 25 bp, Homo sapien
cagggagtctgcagccatcgaggca

SEQ ID NO: 5811782 - DNA, 25 bp, Homo sapien
gagctgcagatttgcagccaaagat

SEQ ID NO: 5811783 - DNA, 25 bp, Homo sapien
aacgaagaaatgttttatagcctcg

SEQ ID NO: 5811784 - DNA, 25 bp, Homo sapien
cacgccttgtcagtctcctggaaac

SEQ ID NO: 5811785 - DNA, 25 bp, Homo sapien
acacagctgcaggagggcctgcctc

SEQ ID NO: 5811786 - DNA, 25 bp, Homo sapien
gcagtcacaaagggcttcagctcct

SEQ ID NO: 5811787 - DNA, 25 bp, Homo sapien
catccatggtgatgaccccctgcat

SEQ ID NO: 5811788 - DNA, 25 bp, Homo sapien
gtgcaggagcgtcaggaacacgctg

SEQ ID NO: 5811789 - DNA, 25 bp, Homo sapien
agtggcttctgctcactctgaccct

SEQ ID NO: 5811790 - DNA, 25 bp, Homo sapien
caataccatgagggaaagtgccctg

SEQ ID NO: 5811791 - DNA, 25 bp, Homo sapien
ttaaaagccagatgtacaagggaag

SEQ ID NO: 5811792 - DNA, 25 bp, Homo sapien
gagcgtcaggaacacgctggcggcg

SEQ ID NO: 5811793 - DNA, 25 bp, Homo sapien
tgcatggtctggaaggaggaacggg

SEQ ID NO: 5811794 - DNA, 25 bp, Homo sapien
tagcaggcggcgtccctgacgttgg

SEQ ID NO: 5811795 - DNA, 25 bp, Homo sapien
gggggatgggagggctgtcaaagtg

SEQ ID NO: 5811796 - DNA, 25 bp, Homo sapien
cactgcgatgcctgacaggagcttc

SEQ ID NO: 5811797 - DNA, 25 bp, Homo sapien
gcaccccgcttctcgtcgtaggtca

SEQ ID NO: 5811798 - DNA, 25 bp, Homo sapien
ccggcctttcagaaggaagcctgga

SEQ ID NO: 5811799 - DNA, 25 bp, Homo sapien
ccgagccagcagaagtgtcagatcc

SEQ ID NO: 5811800 - DNA, 25 bp, Homo sapien
tcattcagaaggttgtcctcaaaga

SEQ ID NO: 5811801 - DNA, 25 bp, Homo sapien
tctcattcagaaggttgtcctcaaa

SEQ ID NO: 5811802 - DNA, 25 bp, Homo sapien
gctggagatgtctgatcttgcacta

SEQ ID NO: 5811803 - DNA, 25 bp, Homo sapien
gtactcaggaaagccggcaataaac

SEQ ID NO: 5811804 - DNA, 25 bp, Homo sapien
tgctttgcttgacatcaggacgtgt

SEQ ID NO: 5811805 - DNA, 25 bp, Homo sapien
ctcctggaaggcggcagaggctgct

SEQ ID NO: 5811806 - DNA, 25 bp, Homo sapien
acaacatccacgagtcgagacggca

SEQ ID NO: 5811807 - DNA, 25 bp, Homo sapien
gagtctgcagccatcgaggcacctg

SEQ ID NO: 5811808 - DNA, 25 bp, Homo sapien
actgctcttaaacctgtgagaacct

SEQ ID NO: 5811809 - DNA, 25 bp, Homo sapien
agttctcctcggtggggcacgtggg

SEQ ID NO: 5811810 - DNA, 25 bp, Homo sapien
agggcttcagctcctgaggctcata

SEQ ID NO: 5811811 - DNA, 25 bp, Homo sapien
taaaacacacactgcttgtctcatg

SEQ ID NO: 5811812 - DNA, 25 bp, Homo sapien
ccgcacacagcttcgtctggggctc

SEQ ID NO: 5811813 - DNA, 25 bp, Homo sapien
caaaggccagtgtctcgtcctccgc

SEQ ID NO: 5811814 - DNA, 25 bp, Homo sapien
gggggaagtgtgggtaactgctctt

SEQ ID NO: 5811815 - DNA, 25 bp, Homo sapien
ccagtcgctgcacaagcttcacccc

SEQ ID NO: 5811816 - DNA, 25 bp, Homo sapien
gcggccggttcgtcgctcagggcca

SEQ ID NO: 5811817 - DNA, 25 bp, Homo sapien
cagcttttccagttctcctcggtgg

SEQ ID NO: 5811818 - DNA, 25 bp, Homo sapien
tgcctgacaggagcttctggatatc

SEQ ID NO: 5811819 - DNA, 25 bp, Homo sapien
tcgctcagggccatctcggcagcct

SEQ ID NO: 5811820 - DNA, 25 bp, Homo sapien
atgcagcccagcagcgcacagtaaa

SEQ ID NO: 5811821 - DNA, 25 bp, Homo sapien
aggtcacacagacggttgcgctgct

SEQ ID NO: 5811822 - DNA, 25 bp, Homo sapien
ggtgaagatgtcgaagcagccgtgg

SEQ ID NO: 5811823 - DNA, 25 bp, Homo sapien
gagctgtcctcccagacccctgtat

SEQ ID NO: 5811824 - DNA, 25 bp, Homo sapien
ctcctggaaactgaagcagtccagc

SEQ ID NO: 5811825 - DNA, 25 bp, Homo sapien
gaggctgctcttctgcagtttatgt

SEQ ID NO: 5811826 - DNA, 25 bp, Homo sapien
cagaaggtcacacagacggttgcgc

SEQ ID NO: 5811827 - DNA, 25 bp, Homo sapien
gcccacgacgtcactgtaggtgagc

SEQ ID NO: 5811828 - DNA, 25 bp, Homo sapien
gtatttgtccattattacgcggaac

SEQ ID NO: 5811829 - DNA, 25 bp, Homo sapien
cccgctgaagctgcccagggcctgc

SEQ ID NO: 5811830 - DNA, 25 bp, Homo sapien
gaaagtgacaacttttctattaaaa

SEQ ID NO: 5811831 - DNA, 25 bp, Homo sapien
atcgaggcacctgaggacagtggca

SEQ ID NO: 5811832 - DNA, 25 bp, Homo sapien
cgatgcccttggctgcagaccaccg

SEQ ID NO: 5811833 - DNA, 25 bp, Homo sapien
actgtaggtgagcaatgtctcgtac

SEQ ID NO: 5811834 - DNA, 25 bp, Homo sapien
cgtcttcagcagcggcacggacacc

SEQ ID NO: 5811835 - DNA, 25 bp, Homo sapien
ctgctatttggagaatacggtccat

SEQ ID NO: 5811836 - DNA, 25 bp, Homo sapien
catgaggaaataaacgaagaaatgt

SEQ ID NO: 5811837 - DNA, 25 bp, Homo sapien
aatctgcttcaggccctgcactgcc

SEQ ID NO: 5811838 - DNA, 25 bp, Homo sapien
ggagggctgtcaaagtgcaggagcg

SEQ ID NO: 5811839 - DNA, 25 bp, Homo sapien
ccagagcgcaggtgcagagaggaaa

SEQ ID NO: 5811840 - DNA, 25 bp, Homo sapien
ggtggagtgccggatcgtcgactcc

SEQ ID NO: 5811841 - DNA, 25 bp, Homo sapien
tttctttcttacagagcgcaagcaa

SEQ ID NO: 5811842 - DNA, 25 bp, Homo sapien
aggtcacggagagccagagcaaaag

SEQ ID NO: 5811843 - DNA, 25 bp, Homo sapien
ccgtgtccttgtccttcagcccgac

SEQ ID NO: 5811844 - DNA, 25 bp, Homo sapien
ctacccttcaacagctggaggcacc

SEQ ID NO: 5811845 - DNA, 25 bp, Homo sapien
cgcgctctcgccgaacgcttccagc

SEQ ID NO: 5811846 - DNA, 25 bp, Homo sapien
tcaggacgtgtgataaatctggaca

SEQ ID NO: 5811847 - DNA, 25 bp, Homo sapien
tgtgaccaaatctaaaacaggctct

SEQ ID NO: 5811848 - DNA, 25 bp, Homo sapien
taaccaggtggtctatcattggctg

SEQ ID NO: 5811849 - DNA, 25 bp, Homo sapien
ggcaccagctggggcctgggtacgc

SEQ ID NO: 5811850 - DNA, 25 bp, Homo sapien
ctgcctcctcacgtcgccggggaac

SEQ ID NO: 5811851 - DNA, 25 bp, Homo sapien
gaccgtgtccttgtccttcagcccg

SEQ ID NO: 5811852 - DNA, 25 bp, Homo sapien
gctctacatcggcaacttcatgagg

SEQ ID NO: 5811853 - DNA, 25 bp, Homo sapien
tgaatgcccttcatgtactcaaaga

SEQ ID NO: 5811854 - DNA, 25 bp, Homo sapien
gtccaggaactcagccatcttgctt

SEQ ID NO: 5811855 - DNA, 25 bp, Homo sapien
gccatcctaccgatgcccttggctg

SEQ ID NO: 5811856 - DNA, 25 bp, Homo sapien
ccttgcggacccaggtgcccacgtc

SEQ ID NO: 5811857 - DNA, 25 bp, Homo sapien
aagccacagcgagtcatttatcagc

SEQ ID NO: 5811858 - DNA, 25 bp, Homo sapien
acagtggcagcatagggcaaacagt

SEQ ID NO: 5811859 - DNA, 25 bp, Homo sapien
tttgtacaaggcgtaagcaacttct

SEQ ID NO: 5811860 - DNA, 25 bp, Homo sapien
ggctgcgtgtactcaggaaagccgg

SEQ ID NO: 5811861 - DNA, 25 bp, Homo sapien
ttcttggtacatgattttataggaa

SEQ ID NO: 5811862 - DNA, 25 bp, Homo sapien
agcgccagacatcccccatgccacg

SEQ ID NO: 5811863 - DNA, 25 bp, Homo sapien
tgttttatagcctcgaaccttggtg

SEQ ID NO: 5811864 - DNA, 25 bp, Homo sapien
tccgctagagcgcgaaagccaggga

SEQ ID NO: 5811865 - DNA, 25 bp, Homo sapien
gccgtgcacctcccgcaggcggccc

SEQ ID NO: 5811866 - DNA, 25 bp, Homo sapien
tgagcacagtcaccacctcgtccag

SEQ ID NO: 5811867 - DNA, 25 bp, Homo sapien
cgccgccgccgtgcacctcccgcag

SEQ ID NO: 5811868 - DNA, 25 bp, Homo sapien
gcggcccagcagcgcccgggtctcc

SEQ ID NO: 5811869 - DNA, 25 bp, Homo sapien
gtcctccgcctcctcctcggggcca

SEQ ID NO: 5811870 - DNA, 25 bp, Homo sapien
gcaccactgtgcgaggctttccaca

SEQ ID NO: 5811871 - DNA, 25 bp, Homo sapien
gtctgcagccatcgaggcacctgag

SEQ ID NO: 5811872 - DNA, 25 bp, Homo sapien
tcacaaagggcttcagctcctgagg

SEQ ID NO: 5811873 - DNA, 25 bp, Homo sapien
gtaggactctgctatttggagaata

SEQ ID NO: 5811874 - DNA, 25 bp, Homo sapien
aagcaacttctgcgcaggcgagaat

SEQ ID NO: 5811875 - DNA, 25 bp, Homo sapien
aaagatctgcagaagggtcccgctg

SEQ ID NO: 5811876 - DNA, 25 bp, Homo sapien
gcaaaggggtggtcctcctccgtgg

SEQ ID NO: 5811877 - DNA, 25 bp, Homo sapien
cctctgggacgtcgtcatcttcgtc

SEQ ID NO: 5811878 - DNA, 25 bp, Homo sapien
ggcgagaatcgacccatgcctcatg

SEQ ID NO: 5811879 - DNA, 25 bp, Homo sapien
cgtcaagccgcccagggacacgact

SEQ ID NO: 5811880 - DNA, 25 bp, Homo sapien
ggaagctggagatgtctgatcttgc

SEQ ID NO: 5811881 - DNA, 25 bp, Homo sapien
cagcaatcaccagtgcactcgagat

SEQ ID NO: 5811882 - DNA, 25 bp, Homo sapien
tccgcgctctcgccgaacgcttcca

SEQ ID NO: 5811883 - DNA, 25 bp, Homo sapien
agtcgctgcacaagcttcaccccca

SEQ ID NO: 5811884 - DNA, 25 bp, Homo sapien
ctcacaggtatgggcctcgatcagc

SEQ ID NO: 5811885 - DNA, 25 bp, Homo sapien
gccaggttgtgcagcgccctcgcag

SEQ ID NO: 5811886 - DNA, 25 bp, Homo sapien
ctgcaccatcccgcagaacactgcg

SEQ ID NO: 5811887 - DNA, 25 bp, Homo sapien
acatgattttataggaagcacattt

SEQ ID NO: 5811888 - DNA, 25 bp, Homo sapien
catcctaccgatgcccttggctgca

SEQ ID NO: 5811889 - DNA, 25 bp, Homo sapien
accaaatctaaaacaggctctacat

SEQ ID NO: 5811890 - DNA, 25 bp, Homo sapien
gcttctggatatcttttgaattctt

SEQ ID NO: 5811891 - DNA, 25 bp, Homo sapien
agctggggcctgggtacgcccagaa

SEQ ID NO: 5811892 - DNA, 25 bp, Homo sapien
acactgcttgtctcatgagctgtcc

SEQ ID NO: 5811893 - DNA, 25 bp, Homo sapien
gtgccggatcgtcgactccgtcaag

SEQ ID NO: 5811894 - DNA, 25 bp, Homo sapien
cattctctccgcacacagcttcgtc

SEQ ID NO: 5811895 - DNA, 25 bp, Homo sapien
ccatcgaggcacctgaggacagtgg

SEQ ID NO: 5811896 - DNA, 25 bp, Homo sapien
ctcctggactcagcaaaacttacgt

SEQ ID NO: 5811897 - DNA, 25 bp, Homo sapien
cctggggaccgcgcccccgcctcac

SEQ ID NO: 5811898 - DNA, 25 bp, Homo sapien
tagagctgctggtgaatctgcttca

SEQ ID NO: 5811899 - DNA, 25 bp, Homo sapien
ggcagaggcgtccaccccaagtcac

SEQ ID NO: 5811900 - DNA, 25 bp, Homo sapien
tgctgggccacacagcacatgatgc

SEQ ID NO: 5811901 - DNA, 25 bp, Homo sapien
aaaagccagatgtacaagggaagct

SEQ ID NO: 5811902 - DNA, 25 bp, Homo sapien
tcagtgtcatggacagcagcctcgg

SEQ ID NO: 5811903 - DNA, 25 bp, Homo sapien
cgcaggtgcagagaggaaaagctgt

SEQ ID NO: 5811904 - DNA, 25 bp, Homo sapien
gcaggagggcctgcctcctcacgtc

SEQ ID NO: 5811905 - DNA, 25 bp, Homo sapien
catggtctggaaggaggaacgggcc

SEQ ID NO: 5811906 - DNA, 25 bp, Homo sapien
gaactcagccatcttgctttgcttg

SEQ ID NO: 5811907 - DNA, 25 bp, Homo sapien
ttggctgcagaccaccgcacgaccg

SEQ ID NO: 5811908 - DNA, 25 bp, Homo sapien
ctcagggagtctgcagccatcgagg

SEQ ID NO: 5811909 - DNA, 25 bp, Homo sapien
gatgtctgatcttgcactatgtcca

SEQ ID NO: 5811910 - DNA, 25 bp, Homo sapien
gccagggctctgggaagcctgccag

SEQ ID NO: 5811911 - DNA, 25 bp, Homo sapien
agcacatttgtgttcaagtgaaggc

SEQ ID NO: 5811912 - DNA, 25 bp, Homo sapien
taccgacggcaaaatagtcagctgt

SEQ ID NO: 5811913 - DNA, 25 bp, Homo sapien
atatcaataccatgagggaaagtgc

SEQ ID NO: 5811914 - DNA, 25 bp, Homo sapien
acatgatgcgctcacaggtatgggc

SEQ ID NO: 5811915 - DNA, 25 bp, Homo sapien
accatcccgcagaacactgcgatgc

SEQ ID NO: 5811916 - DNA, 25 bp, Homo sapien
tcctaccgatgcccttggctgcaga

SEQ ID NO: 5811917 - DNA, 25 bp, Homo sapien
aatgtcagccccagtcgctgcacaa

SEQ ID NO: 5811918 - DNA, 25 bp, Homo sapien
gccttcaggatcacggcgacaacat

SEQ ID NO: 5811919 - DNA, 25 bp, Homo sapien
tgcagcgtcccatccatggtgatga

SEQ ID NO: 5811920 - DNA, 25 bp, Homo sapien
gtcacctctaaagggcattttggaa

SEQ ID NO: 5811921 - DNA, 25 bp, Homo sapien
ttgtcctcaaagatctgcagaaggg

SEQ ID NO: 5811922 - DNA, 25 bp, Homo sapien
tagccccagcaggacgtggtagcgg

SEQ ID NO: 5811923 - DNA, 25 bp, Homo sapien
aatctaaaacaggctctacatcggc

SEQ ID NO: 5811924 - DNA, 25 bp, Homo sapien
ccgctccagggccacctcgcgctcc

SEQ ID NO: 5811925 - DNA, 25 bp, Homo sapien
ccatgccacgccttgtcagtctcct

SEQ ID NO: 5811926 - DNA, 25 bp, Homo sapien
ggctgtcaaagtgcaggagcgtcag

SEQ ID NO: 5811927 - DNA, 25 bp, Homo sapien
ggactggcttcagcaggcaccaggc

SEQ ID NO: 5811928 - DNA, 25 bp, Homo sapien
caggttgtgcagcgccctcgcagcc

SEQ ID NO: 5811929 - DNA, 25 bp, Homo sapien
gccgtgggtgagcacgtggtccagc

SEQ ID NO: 5811930 - DNA, 25 bp, Homo sapien
gtgcagcgccctcgcagccaactct

SEQ ID NO: 5811931 - DNA, 25 bp, Homo sapien
tctgggtggagtgccggatcgtcga

SEQ ID NO: 5811932 - DNA, 25 bp, Homo sapien
tggtatttgtccattattacgcgga

SEQ ID NO: 5811933 - DNA, 25 bp, Homo sapien
gcacatccgcgcccacgacgtcact

SEQ ID NO: 5811934 - DNA, 25 bp, Homo sapien
cagccgtgggtgagcacgtggtcca

SEQ ID NO: 5811935 - DNA, 25 bp, Homo sapien
actcgagattgcagtcacaaagggc

SEQ ID NO: 5811936 - DNA, 25 bp, Homo sapien
caaagtgcaggagcgtcaggaacac

SEQ ID NO: 5811937 - DNA, 25 bp, Homo sapien
ggaaggaggaacgggccagattgca

SEQ ID NO: 5811938 - DNA, 25 bp, Homo sapien
ctgcgtgtactcaggaaagccggca

SEQ ID NO: 5811939 - DNA, 25 bp, Homo sapien
agcgggaaacggtggcagaggagca

SEQ ID NO: 5811940 - DNA, 25 bp, Homo sapien
tctctcaccactgcaagctccgcgt

SEQ ID NO: 5811941 - DNA, 25 bp, Homo sapien
catttatcagccattgccaaccatc

SEQ ID NO: 5811942 - DNA, 25 bp, Homo sapien
cggcacggacaccctctcattcaga

SEQ ID NO: 5811943 - DNA, 25 bp, Homo sapien
ggtcgctctgaatgcccttcatgta

SEQ ID NO: 5811944 - DNA, 25 bp, Homo sapien
gggaaacagcttttccagttctcct

SEQ ID NO: 5811945 - DNA, 25 bp, Homo sapien
ctattaaaacacacactgcttgtct

SEQ ID NO: 5811946 - DNA, 25 bp, Homo sapien
ggtctccgcgctctcgccgaacgct

SEQ ID NO: 5811947 - DNA, 25 bp, Homo sapien
ctcgtcgtaggtcagcgccttcagg

SEQ ID NO: 5811948 - DNA, 25 bp, Homo sapien
ccgccgccgtgcacctcccgcaggc

SEQ ID NO: 5811949 - DNA, 25 bp, Homo sapien
actccgtcaagccgcccagggacac

SEQ ID NO: 5811950 - DNA, 25 bp, Homo sapien
ctgcctgctcgtccagatggtccgt

SEQ ID NO: 5811951 - DNA, 25 bp, Homo sapien
tgggaagcctgccagccatcctacc

SEQ ID NO: 5811952 - DNA, 25 bp, Homo sapien
tggagaatacggtccattatggaca

SEQ ID NO: 5811953 - DNA, 25 bp, Homo sapien
gcttctcgtcgtaggtcagcgcctt

SEQ ID NO: 5811954 - DNA, 25 bp, Homo sapien
gaacgcttccagcgccgcgccaaag

SEQ ID NO: 5811955 - DNA, 25 bp, Homo sapien
ggaaagtgccctgtctccccacatt

SEQ ID NO: 5811956 - DNA, 25 bp, Homo sapien
gaaggcctgggaaggtgcactccag

SEQ ID NO: 5811957 - DNA, 25 bp, Homo sapien
tcacggcgacaacatccacgagtcg

SEQ ID NO: 5811958 - DNA, 25 bp, Homo sapien
tgcgctcacaggtatgggcctcgat

SEQ ID NO: 5811959 - DNA, 25 bp, Homo sapien
gccccagcaggacgtggtagcggta

SEQ ID NO: 5811960 - DNA, 25 bp, Homo sapien
cccctctgggacgtcgtcatcttcg

SEQ ID NO: 5811961 - DNA, 25 bp, Homo sapien
tcagccattgccaaccatcaattac

SEQ ID NO: 5811962 - DNA, 25 bp, Homo sapien
gctcataggcacgcgcgaaggccca

SEQ ID NO: 5811963 - DNA, 25 bp, Homo sapien
cggagagccagagcaaaagcatgta

SEQ ID NO: 5811964 - DNA, 25 bp, Homo sapien
cgtcatcttcgtcgtcatcttcggt

SEQ ID NO: 5811965 - DNA, 25 bp, Homo sapien
tccattcaaggtgcgggtccaacag

SEQ ID NO: 5811966 - DNA, 25 bp, Homo sapien
aaacagttggatctgttaccgacgg

SEQ ID NO: 5811967 - DNA, 25 bp, Homo sapien
aaaagggatcaggcaggtcacggag

SEQ ID NO: 5811968 - DNA, 25 bp, Homo sapien
cacgtgttcgcagatcccactccgc

SEQ ID NO: 5811969 - DNA, 25 bp, Homo sapien
tgcactgcctgctcgtccagatggt

SEQ ID NO: 5811970 - DNA, 25 bp, Homo sapien
tataaccaggaaacagttggatctg

SEQ ID NO: 5811971 - DNA, 25 bp, Homo sapien
ccgaacgcttccagcgccgcgccaa

SEQ ID NO: 5811972 - DNA, 25 bp, Homo sapien
acccaggtgcccacgtcccctctgc

SEQ ID NO: 5811973 - DNA, 25 bp, Homo sapien
ggtgaggtatgggctccaggactgg

SEQ ID NO: 5811974 - DNA, 25 bp, Homo sapien
aacaagacatcctcaccaggcaggg

SEQ ID NO: 5811975 - DNA, 25 bp, Homo sapien
cgaaagccagggatgaaggatgagg

SEQ ID NO: 5811976 - DNA, 25 bp, Homo sapien
ggtcaggatgagtggcttctgctca

SEQ ID NO: 5811977 - DNA, 25 bp, Homo sapien
gagacggcagcaacaggcctctcct

SEQ ID NO: 5811978 - DNA, 25 bp, Homo sapien
cgctggtacctccatgctgccacct

SEQ ID NO: 5811979 - DNA, 25 bp, Homo sapien
cgggtgcctgctgggccaggttgtg

SEQ ID NO: 5811980 - DNA, 25 bp, Homo sapien
ggtctggttgctctcagggagtctg

SEQ ID NO: 5811981 - DNA, 25 bp, Homo sapien
tgagcacgtggtccagcgtcttcag

SEQ ID NO: 5811982 - DNA, 25 bp, Homo sapien
ccttgtccttcagcccgaccagcag

SEQ ID NO: 5811983 - DNA, 25 bp, Homo sapien
gtgtactcaggaaagccggcaataa

SEQ ID NO: 5811984 - DNA, 25 bp, Homo sapien
aggaacgggccagattgcacaggct

SEQ ID NO: 5811985 - DNA, 25 bp, Homo sapien
tggaaagtgacaacttttctattaa

SEQ ID NO: 5811986 - DNA, 25 bp, Homo sapien
gtcagtctcctggaaactgaagcag

SEQ ID NO: 5811987 - DNA, 25 bp, Homo sapien
ctggactcagtgtcatggacagcag

SEQ ID NO: 5811988 - DNA, 25 bp, Homo sapien
gaacgggccagattgcacaggctcc

SEQ ID NO: 5811989 - DNA, 25 bp, Homo sapien
cacagacccgaccacatcatccgcc

SEQ ID NO: 5811990 - DNA, 25 bp, Homo sapien
tgtggtcaaaatatcaataccatga

SEQ ID NO: 5811991 - DNA, 25 bp, Homo sapien
ccctctgctgtccgtggtgtagtcg

SEQ ID NO: 5811992 - DNA, 25 bp, Homo sapien
catcggcaacttcatgaggaaataa

SEQ ID NO: 5811993 - DNA, 25 bp, Homo sapien
tccatgctgccaccttcggcttcag

SEQ ID NO: 5811994 - DNA, 25 bp, Homo sapien
gggaagtgtgggtaactgctcttaa

SEQ ID NO: 5811995 - DNA, 25 bp, Homo sapien
gcttgacatcaggacgtgtgataaa

SEQ ID NO: 5811996 - DNA, 25 bp, Homo sapien
ttcaaggtgcgggtccaacagatga

SEQ ID NO: 5811997 - DNA, 25 bp, Homo sapien
cagtgcactcgagattgcagtcaca

SEQ ID NO: 5811998 - DNA, 25 bp, Homo sapien
gccggcaataaacacacttataacc

SEQ ID NO: 5811999 - DNA, 25 bp, Homo sapien
aatcctcgcaatggccttcaagccg

SEQ ID NO: 5812000 - DNA, 25 bp, Homo sapien
acacagcttcgtctggggctcctgc

SEQ ID NO: 5812001 - DNA, 25 bp, Homo sapien
gcgtcccatccatggtgatgacccc

SEQ ID NO: 5812002 - DNA, 25 bp, Homo sapien
cctgcagcgtcccatccatggtgat

SEQ ID NO: 5812003 - DNA, 25 bp, Homo sapien
ccaaccatcaattacggtgtcacct

SEQ ID NO: 5812004 - DNA, 25 bp, Homo sapien
ggccggttcgtcgctcagggccatc

SEQ ID NO: 5812005 - DNA, 25 bp, Homo sapien
cgtcactgtaggtgagcaatgtctc

SEQ ID NO: 5812006 - DNA, 25 bp, Homo sapien
tcaggatcacggcgacaacatccac

SEQ ID NO: 5812007 - DNA, 25 bp, Homo sapien
cattggctgcgtgtactcaggaaag

SEQ ID NO: 5812008 - DNA, 25 bp, Homo sapien
cagaggcgtccaccccaagtcacca

SEQ ID NO: 5812009 - DNA, 25 bp, Homo sapien
gctgggtgaggaggttcccgtcaag

SEQ ID NO: 5812010 - DNA, 25 bp, Homo sapien
gtagcggtaggtgggcagcccaagg

SEQ ID NO: 5812011 - DNA, 25 bp, Homo sapien
ctagagcgcgaaagccagggatgaa

SEQ ID NO: 5812012 - DNA, 25 bp, Homo sapien
atttgtccattattacgcggaaccg

SEQ ID NO: 5812013 - DNA, 25 bp, Homo sapien
ggcccagcagcgcccgggtctccgc

SEQ ID NO: 5812014 - DNA, 25 bp, Homo sapien
caccagctggggcctgggtacgccc

SEQ ID NO: 5812015 - DNA, 25 bp, Homo sapien
ttgcggacccaggtgcccacgtccc

SEQ ID NO: 5812016 - DNA, 25 bp, Homo sapien
caggcgagaatcgacccatgcctca

SEQ ID NO: 5812017 - DNA, 25 bp, Homo sapien
aggcaggtcacggagagccagagca

SEQ ID NO: 5812018 - DNA, 25 bp, Homo sapien
tggcttctgctcactctgaccctga

SEQ ID NO: 5812019 - DNA, 25 bp, Homo sapien
agggcctgcagcgtcccatccatgg

SEQ ID NO: 5812020 - DNA, 25 bp, Homo sapien
aggtgcccacgtcccctctgctgtc

SEQ ID NO: 5812021 - DNA, 25 bp, Homo sapien
agggtctggttgctctcagggagtc

SEQ ID NO: 5812022 - DNA, 25 bp, Homo sapien
ggcggcgtgagcacggaaacggtca

SEQ ID NO: 5812023 - DNA, 25 bp, Homo sapien
atcatagagctgctggtgaatctgc

SEQ ID NO: 5812024 - DNA, 25 bp, Homo sapien
caatggccttcaagccgtctctcct

SEQ ID NO: 5812025 - DNA, 25 bp, Homo sapien
tcccctctgctgtccgtggtgtagt

SEQ ID NO: 5812026 - DNA, 25 bp, Homo sapien
caaggcgagaaaaatcaaaagggat

SEQ ID NO: 5812027 - DNA, 25 bp, Homo sapien
ttacgcggaaccgctccagggccac

SEQ ID NO: 5812028 - DNA, 25 bp, Homo sapien
gtcaaaatatcaataccatgaggga

SEQ ID NO: 5812029 - DNA, 25 bp, Homo sapien
tggtctatcattggctgcgtgtact

SEQ ID NO: 5812030 - DNA, 25 bp, Homo sapien
acctcgtccagcacatccgcgccca

SEQ ID NO: 5812031 - DNA, 25 bp, Homo sapien
atcaataccatgagggaaagtgccc

SEQ ID NO: 5812032 - DNA, 25 bp, Homo sapien
cgctgaagctgcccagggcctgcgg

SEQ ID NO: 5812033 - DNA, 25 bp, Homo sapien
gtcagcgccttcaggatcacggcga

SEQ ID NO: 5812034 - DNA, 25 bp, Homo sapien
gcccccgcctcacgtgttcgcagat

SEQ ID NO: 5812035 - DNA, 25 bp, Homo sapien
ccgcacgaccgtgtccttgtccttc

SEQ ID NO: 5812036 - DNA, 25 bp, Homo sapien
cctcctcctcggggccacccgcggc

SEQ ID NO: 5812037 - DNA, 25 bp, Homo sapien
tacgtcctcgggggaagtgtgggta

SEQ ID NO: 5812038 - DNA, 25 bp, Homo sapien
ggaactgcaccatcccgcagaacac

SEQ ID NO: 5812039 - DNA, 25 bp, Homo sapien
cttcagctcctgaggctcataggca

SEQ ID NO: 5812040 - DNA, 25 bp, Homo sapien
caggtggtctatcattggctgcgtg

SEQ ID NO: 5812041 - DNA, 25 bp, Homo sapien
ccaagtcaccagagcgcaggtgcag

SEQ ID NO: 5812042 - DNA, 25 bp, Homo sapien
aactcgggtgcctgctgggccaggt

SEQ ID NO: 5812043 - DNA, 25 bp, Homo sapien
ggtggggcacgtgggggatgggagg

SEQ ID NO: 5812044 - DNA, 25 bp, Homo sapien
gagattgcagtcacaaagggcttca

SEQ ID NO: 5812045 - DNA, 25 bp, Homo sapien
ggaacacgctggcggcgtgagcacg

SEQ ID NO: 5812046 - DNA, 25 bp, Homo sapien
caggaacaagacatcctcaccaggc

SEQ ID NO: 5812047 - DNA, 25 bp, Homo sapien
caccttcggcttcaggaatgtcagc

SEQ ID NO: 5812048 - DNA, 25 bp, Homo sapien
aggatgagtggcttctgctcactct

SEQ ID NO: 5812049 - DNA, 25 bp, Homo sapien
accaggaaacagttggatctgttac

SEQ ID NO: 5812050 - DNA, 25 bp, Homo sapien
cagcaggcaccaggctggggcacca

SEQ ID NO: 5812051 - DNA, 25 bp, Homo sapien
aggcggcccagcagcgcccgggtct

SEQ ID NO: 5812052 - DNA, 25 bp, Homo sapien
atgcccttggctgcagaccaccgca

SEQ ID NO: 5812053 - DNA, 25 bp, Homo sapien
agactggtcatggcggccttgcgga

SEQ ID NO: 5812054 - DNA, 25 bp, Homo sapien
ggctcctgctttcacaccaacagtc

SEQ ID NO: 5812055 - DNA, 25 bp, Homo sapien
ctttcacaccaacagtctggcaaat

SEQ ID NO: 5812056 - DNA, 25 bp, Homo sapien
cgctggcggcgtgagcacggaaacg

SEQ ID NO: 5812057 - DNA, 25 bp, Homo sapien
cgggaagacttgcgtggcgctgaac

SEQ ID NO: 5812058 - DNA, 25 bp, Homo sapien
ggtgaggaggttcccgtcaaggcga

SEQ ID NO: 5812059 - DNA, 25 bp, Homo sapien
atcctcaccaggcaggggtgaggta

SEQ ID NO: 5812060 - DNA, 25 bp, Homo sapien
aactgcaccatcccgcagaacactg

SEQ ID NO: 5812061 - DNA, 25 bp, Homo sapien
gaccagcagctgctctatcacacgc

SEQ ID NO: 5812062 - DNA, 25 bp, Homo sapien
tgtacaagggaagctggagatgtct

SEQ ID NO: 5812063 - DNA, 25 bp, Homo sapien
cctcaccaggcaggggtgaggtatg

SEQ ID NO: 5812064 - DNA, 25 bp, Homo sapien
tggctggccgtggtcttccggatca

SEQ ID NO: 5812065 - DNA, 25 bp, Homo sapien
cagccacgctggtacctccatgctg

SEQ ID NO: 5812066 - DNA, 25 bp, Homo sapien
gcaagctccgcgtcccacgcagtgt

SEQ ID NO: 5812067 - DNA, 25 bp, Homo sapien
aggcaccaggctggggcaccagctg

SEQ ID NO: 5812068 - DNA, 25 bp, Homo sapien
gggccagattgcacaggctccagtc

SEQ ID NO: 5812069 - DNA, 25 bp, Homo sapien
accggcctccctcaggaacaagaca

SEQ ID NO: 5812070 - DNA, 25 bp, Homo sapien
tccatcagactggtcatggcggcct

SEQ ID NO: 5812071 - DNA, 25 bp, Homo sapien
aaggaggaacgggccagattgcaca

SEQ ID NO: 5812072 - DNA, 25 bp, Homo sapien
cagattgcacaggctccagtccagg

SEQ ID NO: 5812073 - DNA, 25 bp, Homo sapien
gtcgactccgtcaagccgcccaggg

SEQ ID NO: 5812074 - DNA, 25 bp, Homo sapien
gactcagcaaaacttacgtcctcgg

SEQ ID NO: 5812075 - DNA, 25 bp, Homo sapien
gtctcgtacacctggctggccgtgg

SEQ ID NO: 5812076 - DNA, 25 bp, Homo sapien
gtctggcaaatcctcgcaatggcct

SEQ ID NO: 5812077 - DNA, 25 bp, Homo sapien
ccctcgcagccaactctcggatgac

SEQ ID NO: 5812078 - DNA, 25 bp, Homo sapien
cagtccagcacagacccgaccacat

SEQ ID NO: 5812079 - DNA, 25 bp, Homo sapien
gccaaagatcggcagccacgctggt

SEQ ID NO: 5812080 - DNA, 25 bp, Homo sapien
tttccatgtttaaatatttgtgcca

SEQ ID NO: 5812081 - DNA, 25 bp, Homo sapien
acacacactgcttgtctcatgagct

SEQ ID NO: 5812082 - DNA, 25 bp, Homo sapien
caccacctcgtccagcacatccgcg

SEQ ID NO: 5812083 - DNA, 25 bp, Homo sapien
cgtggtgtagtcgtccatgcagccc

SEQ ID NO: 5812084 - DNA, 25 bp, Homo sapien
ctcctgctttcacaccaacagtctg

SEQ ID NO: 5812085 - DNA, 25 bp, Homo sapien
agccccagtcgctgcacaagcttca

SEQ ID NO: 5812086 - DNA, 25 bp, Homo sapien
tcgctctgaatgcccttcatgtact

SEQ ID NO: 5812087 - DNA, 25 bp, Homo sapien
tcaaagaggctctgggtggagtgcc

SEQ ID NO: 5812088 - DNA, 25 bp, Homo sapien
cacatcggacctgggaaacagcttt

SEQ ID NO: 5812089 - DNA, 25 bp, Homo sapien
agcgggtttcccaagcttcatggtc

SEQ ID NO: 5812090 - DNA, 25 bp, Homo sapien
acccttcaacagctggaggcaccac

SEQ ID NO: 5812091 - DNA, 25 bp, Homo sapien
gatcaggcaggtcacggagagccag

SEQ ID NO: 5812092 - DNA, 25 bp, Homo sapien
cgtggcgctgaactcgggtgcctgc

SEQ ID NO: 5812093 - DNA, 25 bp, Homo sapien
agaatcgacccatgcctcatgtgaa

SEQ ID NO: 5812094 - DNA, 25 bp, Homo sapien
tggcgctgaactcgggtgcctgctg

SEQ ID NO: 5812095 - DNA, 25 bp, Homo sapien
acatccgcgcccacgacgtcactgt

SEQ ID NO: 5812096 - DNA, 25 bp, Homo sapien
ccagacccctgtataactgacgatc

SEQ ID NO: 5812097 - DNA, 25 bp, Homo sapien
gatcagctcaggctggctccgagcc

SEQ ID NO: 5812098 - DNA, 25 bp, Homo sapien
gttgctctcagggagtctgcagcca

SEQ ID NO: 5812099 - DNA, 25 bp, Homo sapien
ccccagtcgctgcacaagcttcacc

SEQ ID NO: 5812100 - DNA, 25 bp, Homo sapien
tcatgagctgtcctcccagacccct

SEQ ID NO: 5812101 - DNA, 25 bp, Homo sapien
tggaaggcggcagaggctgctcttc

SEQ ID NO: 5812102 - DNA, 25 bp, Homo sapien
gaaataaacgaagaaatgttttata

SEQ ID NO: 5812103 - DNA, 25 bp, Homo sapien
ctctccgcacacagcttcgtctggg

SEQ ID NO: 5812104 - DNA, 25 bp, Homo sapien
agcgcgaaagccagggatgaaggat

SEQ ID NO: 5812105 - DNA, 25 bp, Homo sapien
gcaaaatagtcagctgtggtcaaaa

SEQ ID NO: 5812106 - DNA, 25 bp, Homo sapien
tgcagccaaagatcggcagccacgc

SEQ ID NO: 5812107 - DNA, 25 bp, Homo sapien
acctcgcgctccgcgccgccgccgt

SEQ ID NO: 5812108 - DNA, 25 bp, Homo sapien
gcaacttctgcgcaggcgagaatcg

SEQ ID NO: 5812109 - DNA, 25 bp, Homo sapien
cagccaactctcggatgaccccatc

SEQ ID NO: 5812110 - DNA, 25 bp, Homo sapien
cagctgtggtcaaaatatcaatacc

SEQ ID NO: 5812111 - DNA, 25 bp, Homo sapien
tcatccgccagggctctgggaagcc

SEQ ID NO: 5812112 - DNA, 25 bp, Homo sapien
ccgcttctcgtcgtaggtcagcgcc

SEQ ID NO: 5812113 - DNA, 25 bp, Homo sapien
agggaaagtgccctgtctccccaca

SEQ ID NO: 5812114 - DNA, 25 bp, Homo sapien
cacagtcaccacctcgtccagcaca

SEQ ID NO: 5812115 - DNA, 25 bp, Homo sapien
acagcagctgcatctcgggccttgt

SEQ ID NO: 5812116 - DNA, 25 bp, Homo sapien
gtcaaagtgcaggagcgtcaggaac

SEQ ID NO: 5812117 - DNA, 25 bp, Homo sapien
gcagaagggtcccgctgaagctgcc

SEQ ID NO: 5812118 - DNA, 25 bp, Homo sapien
caccgcacgaccgtgtccttgtcct

SEQ ID NO: 5812119 - DNA, 25 bp, Homo sapien
tgatgcgtgggaaggcctgggaagg

SEQ ID NO: 5812120 - DNA, 25 bp, Homo sapien
tttaaatatttgtgccagggcctgc

SEQ ID NO: 5812121 - DNA, 25 bp, Homo sapien
tgctctatcacacgctccaccccct

SEQ ID NO: 5812122 - DNA, 25 bp, Homo sapien
atctgcagaagggtcccgctgaagc

SEQ ID NO: 5812123 - DNA, 25 bp, Homo sapien
cggcaataaacacacttataaccag

SEQ ID NO: 5812124 - DNA, 25 bp, Homo sapien
cgctcacaggtatgggcctcgatca

SEQ ID NO: 5812125 - DNA, 25 bp, Homo sapien
gcccttggctgcagaccaccgcacg

SEQ ID NO: 5812126 - DNA, 25 bp, Homo sapien
gtcatggcggccttgcggacccagg

SEQ ID NO: 5812127 - DNA, 25 bp, Homo sapien
actcagccatcttgctttgcttgac

SEQ ID NO: 5812128 - DNA, 25 bp, Homo sapien
tggtcatggcggccttgcggaccca

SEQ ID NO: 5812129 - DNA, 25 bp, Homo sapien
cgtagcaggcggcgtccctgacgtt

SEQ ID NO: 5812130 - DNA, 25 bp, Homo sapien
tcttcagcagcggcacggacaccct

SEQ ID NO: 5812131 - DNA, 25 bp, Homo sapien
cagcagcgcccgggtctccgcgctc

SEQ ID NO: 5812132 - DNA, 25 bp, Homo sapien
agcctcgaaccttggtgatgatgta

SEQ ID NO: 5812133 - DNA, 25 bp, Homo sapien
cagcagaagtgtcagatccatcaga

SEQ ID NO: 5812134 - DNA, 25 bp, Homo sapien
ttgggattctgaattgtgaccaaat

SEQ ID NO: 5812135 - DNA, 25 bp, Homo sapien
aaacggtcaatcttctcactggcct

SEQ ID NO: 5812136 - DNA, 25 bp, Homo sapien
acccgcggccggttcgtcgctcagg

SEQ ID NO: 5812137 - DNA, 25 bp, Homo sapien
gttaccgacggcaaaatagtcagct

SEQ ID NO: 5812138 - DNA, 25 bp, Homo sapien
cacacagacggttgcgctgctctct

SEQ ID NO: 5812139 - DNA, 25 bp, Homo sapien
ccattattacgcggaaccgctccag

SEQ ID NO: 5812140 - DNA, 25 bp, Homo sapien
catggtgatgaccccctgcatggtc

SEQ ID NO: 5812141 - DNA, 25 bp, Homo sapien
ccttcagcccgaccagcagctgctc

SEQ ID NO: 5812142 - DNA, 25 bp, Homo sapien
tcccgtcaaggcgagaaaaatcaaa

SEQ ID NO: 5812143 - DNA, 25 bp, Homo sapien
gctgtcctcccagacccctgtataa

SEQ ID NO: 5812144 - DNA, 25 bp, Homo sapien
gaagatctggactcagtgtcatgga

SEQ ID NO: 5812145 - DNA, 25 bp, Homo sapien
gctgtcagctagtgccagcctccaa

SEQ ID NO: 5812146 - DNA, 25 bp, Homo sapien
gcagcggcacggacaccctctcatt

SEQ ID NO: 5812147 - DNA, 25 bp, Homo sapien
cagcaggacgtggtagcggtaggtg

SEQ ID NO: 5812148 - DNA, 25 bp, Homo sapien
cacctctaaagggcattttggaaag

SEQ ID NO: 5812149 - DNA, 25 bp, Homo sapien
ctcagcaaaacttacgtcctcgggg

SEQ ID NO: 5812150 - DNA, 25 bp, Homo sapien
cttcatggtaaccaggtggtctatc

SEQ ID NO: 5812151 - DNA, 25 bp, Homo sapien
ccttcggcttcaggaatgtcagccc

SEQ ID NO: 5812152 - DNA, 25 bp, Homo sapien
tccatgtttaaatatttgtgccagg

SEQ ID NO: 5812153 - DNA, 25 bp, Homo sapien
catgagggaaagtgccctgtctccc

SEQ ID NO: 5812154 - DNA, 25 bp, Homo sapien
ctttccacaccggcctccctcagga

SEQ ID NO: 5812155 - DNA, 25 bp, Homo sapien
gatgaccccatcccagtggctgatc

SEQ ID NO: 5812156 - DNA, 25 bp, Homo sapien
atcttgctttgcttgacatcaggac

SEQ ID NO: 5812157 - DNA, 25 bp, Homo sapien
tggctgatcttcatggtaaccaggt

SEQ ID NO: 5812158 - DNA, 25 bp, Homo sapien
gggccttgtcactgacaatcaagta

SEQ ID NO: 5812159 - DNA, 25 bp, Homo sapien
gacccatgcctcatgtgaagatctg

SEQ ID NO: 5812160 - DNA, 25 bp, Homo sapien
cggcgtgagcacggaaacggtcaat

SEQ ID NO: 5812161 - DNA, 25 bp, Homo sapien
aaggttgtcctcaaagatctgcaga

SEQ ID NO: 5812162 - DNA, 25 bp, Homo sapien
tcacgtcgccggggaactgcaccat

SEQ ID NO: 5812163 - DNA, 25 bp, Homo sapien
tcgtaggtcagcgccttcaggatca

SEQ ID NO: 5812164 - DNA, 25 bp, Homo sapien
agggccatctcggcagcctggggac

SEQ ID NO: 5812165 - DNA, 25 bp, Homo sapien
cgtgttcgcagatcccactccgcta

SEQ ID NO: 5812166 - DNA, 25 bp, Homo sapien
ctgggaaggtgcactccagttcacg

SEQ ID NO: 5812167 - DNA, 25 bp, Homo sapien
gcagcctggggaccgcgcccccgcc

SEQ ID NO: 5812168 - DNA, 25 bp, Homo sapien
cacttataaccaggaaacagttgga

SEQ ID NO: 5812169 - DNA, 25 bp, Homo sapien
cactgcaagctccgcgtcccacgca

SEQ ID NO: 5812170 - DNA, 25 bp, Homo sapien
ggtggtctatcattggctgcgtgta

SEQ ID NO: 5812171 - DNA, 25 bp, Homo sapien
tcctcgcaatggccttcaagccgtc

SEQ ID NO: 5812172 - DNA, 25 bp, Homo sapien
agccatcttgctttgcttgacatca

SEQ ID NO: 5812173 - DNA, 25 bp, Homo sapien
tctgatcttgcactatgtccaacaa

SEQ ID NO: 5812174 - DNA, 25 bp, Homo sapien
gtcctcctccgtggtgaagatgtcg

SEQ ID NO: 5812175 - DNA, 25 bp, Homo sapien
ctcgcagccaactctcggatgaccc

SEQ ID NO: 5812176 - DNA, 25 bp, Homo sapien
ttccagcgccgcgccaaaggccagt

SEQ ID NO: 5812177 - DNA, 25 bp, Homo sapien
aagtgtcagatccatcagactggtc

SEQ ID NO: 5812178 - DNA, 25 bp, Homo sapien
ttttccagttctcctcggtggggca

SEQ ID NO: 5812179 - DNA, 25 bp, Homo sapien
cagctgctctatcacacgctccacc

SEQ ID NO: 5812180 - DNA, 25 bp, Homo sapien
agctgcaggagggcctgcctcctca

SEQ ID NO: 5812181 - DNA, 25 bp, Homo sapien
gtggtgaagatgtcgaagcagccgt

SEQ ID NO: 5812182 - DNA, 25 bp, Homo sapien
agagcgcaggtgcagagaggaaaag

SEQ ID NO: 5812183 - DNA, 25 bp, Homo sapien
agcttccgcagcagggtctggttgc

SEQ ID NO: 5812184 - DNA, 25 bp, Homo sapien
ggaggcaccactgtgcgaggctttc

SEQ ID NO: 5812185 - DNA, 25 bp, Homo sapien
ccgtctctcctggactcagcaaaac

SEQ ID NO: 5812186 - DNA, 25 bp, Homo sapien
gagaaaaatcaaaagggatcaggca

SEQ ID NO: 5812187 - DNA, 25 bp, Homo sapien
ggacccaggtgcccacgtcccctct

SEQ ID NO: 5812188 - DNA, 25 bp, Homo sapien
cctcgatcagctcaggctggctccg

SEQ ID NO: 5812189 - DNA, 25 bp, Homo sapien
gcaggcaccaggctggggcaccagc

SEQ ID NO: 5812190 - DNA, 25 bp, Homo sapien
aaaagctgtcagctagtgccagcct

SEQ ID NO: 5812191 - DNA, 25 bp, Homo sapien
ctcctcggtggggcacgtgggggat

SEQ ID NO: 5812192 - DNA, 25 bp, Homo sapien
ggcaggggtgaggtatgggctccag

SEQ ID NO: 5812193 - DNA, 25 bp, Homo sapien
ttttatagcctcgaaccttggtgat

SEQ ID NO: 5812194 - DNA, 25 bp, Homo sapien
tgggtacgcccagaaggtcacacag

SEQ ID NO: 5812195 - DNA, 25 bp, Homo sapien
gccaactctcggatgaccccatccc

SEQ ID NO: 5812196 - DNA, 25 bp, Homo sapien
gatttgcagccaaagatcggcagcc

SEQ ID NO: 5812197 - DNA, 25 bp, Homo sapien
aatcaccagtgcactcgagattgca

SEQ ID NO: 5812198 - DNA, 25 bp, Homo sapien
tgtctcggtcaaacaccgcagcaat

SEQ ID NO: 5812199 - DNA, 25 bp, Homo sapien
caacaggcctctcctgcccagctct

SEQ ID NO: 5812200 - DNA, 25 bp, Homo sapien
ctggcctgctgggccacacagcaca

SEQ ID NO: 5812201 - DNA, 25 bp, Homo sapien
acctgggaaacagcttttccagttc

SEQ ID NO: 5812202 - DNA, 25 bp, Homo sapien
aggcacgcgcgaaggcccagcacac

SEQ ID NO: 5812203 - DNA, 25 bp, Homo sapien
gtagcgggtttcccaagcttcatgg

SEQ ID NO: 5812204 - DNA, 25 bp, Homo sapien
tgtccgtggtgtagtcgtccatgca

SEQ ID NO: 5812205 - DNA, 25 bp, Homo sapien
acaccgcagcaatcaccagtgcact

SEQ ID NO: 5812206 - DNA, 25 bp, Homo sapien
gccagatgtacaagggaagctggag

SEQ ID NO: 5812207 - DNA, 25 bp, Homo sapien
ccccatgccacgccttgtcagtctc

SEQ ID NO: 5812208 - DNA, 25 bp, Homo sapien
gctctctcaccactgcaagctccgc

SEQ ID NO: 5812209 - DNA, 25 bp, Homo sapien
cggtaggtgggcagcccaaggagct

SEQ ID NO: 5812210 - DNA, 25 bp, Homo sapien
aggaggttcccgtcaaggcgagaaa

SEQ ID NO: 5812211 - DNA, 25 bp, Homo sapien
acgggccagattgcacaggctccag

SEQ ID NO: 5812212 - DNA, 25 bp, Homo sapien
gcgctccgcgccgccgccgtgcacc

SEQ ID NO: 5812213 - DNA, 25 bp, Homo sapien
agatggtccgtgacgggcctgttct

SEQ ID NO: 5812214 - DNA, 25 bp, Homo sapien
gcccgaccagcagctgctctatcac

SEQ ID NO: 5812215 - DNA, 25 bp, Homo sapien
tggaaactgaagcagtccagcacag

SEQ ID NO: 5812216 - DNA, 25 bp, Homo sapien
tgctcttaaacctgtgagaacctgc

SEQ ID NO: 5812217 - DNA, 25 bp, Homo sapien
aagccagatgtacaagggaagctgg

SEQ ID NO: 5812218 - DNA, 25 bp, Homo sapien
tcaggatgagtggcttctgctcact

SEQ ID NO: 5812219 - DNA, 25 bp, Homo sapien
ggccagcgctacccttcaacagctg

SEQ ID NO: 5812220 - DNA, 25 bp, Homo sapien
cgggtcgctctgaatgcccttcatg

SEQ ID NO: 5812221 - DNA, 25 bp, Homo sapien
gcagcccaaggagctgggtgatgcg

SEQ ID NO: 5812222 - DNA, 25 bp, Homo sapien
cgtcatcttcggtcaggatgagtgg

SEQ ID NO: 5812223 - DNA, 25 bp, Homo sapien
ggtgagcacgtggtccagcgtcttc

SEQ ID NO: 5812224 - DNA, 25 bp, Homo sapien
cacacgtagcaggcggcgtccctga

SEQ ID NO: 5812225 - DNA, 25 bp, Homo sapien
gtaaagaaatttaaaagccagatgt

SEQ ID NO: 5812226 - DNA, 25 bp, Homo sapien
cggtgtcacctctaaagggcatttt

SEQ ID NO: 5812227 - DNA, 25 bp, Homo sapien
aggagcgtcaggaacacgctggcgg

SEQ ID NO: 5812228 - DNA, 25 bp, Homo sapien
gcatgtagcgggtttcccaagcttc

SEQ ID NO: 5812229 - DNA, 25 bp, Homo sapien
cccatcccagtggctgatcttcatg

SEQ ID NO: 5812230 - DNA, 25 bp, Homo sapien
ccccgcctcacgtgttcgcagatcc

SEQ ID NO: 5812231 - DNA, 25 bp, Homo sapien
atgtccaacaacaagttcatcatcc

SEQ ID NO: 5812232 - DNA, 25 bp, Homo sapien
aatcttctcactggcctgctgggcc

SEQ ID NO: 5812233 - DNA, 25 bp, Homo sapien
tgcccacgctgcaggcaccccgctt

SEQ ID NO: 5812234 - DNA, 25 bp, Homo sapien
ccacctcgtccagcacatccgcgcc

SEQ ID NO: 5812235 - DNA, 25 bp, Homo sapien
ggcctgcagcgtcccatccatggtg

SEQ ID NO: 5812236 - DNA, 25 bp, Homo sapien
cggcaaaatagtcagctgtggtcaa

SEQ ID NO: 5812237 - DNA, 25 bp, Homo sapien
caaatctaaaacaggctctacatcg

SEQ ID NO: 5812238 - DNA, 25 bp, Homo sapien
tcgtctggggctcctgctttcacac

SEQ ID NO: 5812239 - DNA, 25 bp, Homo sapien
gcccaaggccaacgagaagccacag

SEQ ID NO: 5812240 - DNA, 25 bp, Homo sapien
gcgccttcaggatcacggcgacaac

SEQ ID NO: 5812241 - DNA, 25 bp, Homo sapien
agcgctacccttcaacagctggagg

SEQ ID NO: 5812242 - DNA, 25 bp, Homo sapien
cacgagtcgagacggcagcaacagg

SEQ ID NO: 5812243 - DNA, 25 bp, Homo sapien
ttcatggtccttgggattctgaatt

SEQ ID NO: 5812244 - DNA, 25 bp, Homo sapien
aaggcagaggcgtccaccccaagtc

SEQ ID NO: 5812245 - DNA, 25 bp, Homo sapien
agaacctgctggagccggcctttca

SEQ ID NO: 5812246 - DNA, 25 bp, Homo sapien
gcgtcaggaacacgctggcggcgtg

SEQ ID NO: 5812247 - DNA, 25 bp, Homo sapien
gggctctgggaagcctgccagccat

SEQ ID NO: 5812248 - DNA, 25 bp, Homo sapien
acaatcaagtaggactctgctattt

SEQ ID NO: 5812249 - DNA, 25 bp, Homo sapien
ttcaagccgtctctcctggactcag

SEQ ID NO: 5812250 - DNA, 25 bp, Homo sapien
gttttccatgtttaaatatttgtgc

SEQ ID NO: 5812251 - DNA, 25 bp, Homo sapien
aacagtctggcaaatcctcgcaatg

SEQ ID NO: 5812252 - DNA, 25 bp, Homo sapien
ctcaggaacaagacatcctcaccag

SEQ ID NO: 5812253 - DNA, 25 bp, Homo sapien
tgaactcgggtgcctgctgggccag

SEQ ID NO: 5812254 - DNA, 25 bp, Homo sapien
tgctcctggtatttgtccattatta

SEQ ID NO: 5812255 - DNA, 25 bp, Homo sapien
tgagaacctgctggagccggccttt

SEQ ID NO: 5812256 - DNA, 25 bp, Homo sapien
tatcagccattgccaaccatcaatt

SEQ ID NO: 5812257 - DNA, 25 bp, Homo sapien
gcagcccagcagcgcacagtaaatc

SEQ ID NO: 5812258 - DNA, 25 bp, Homo sapien
ggactcagtgtcatggacagcagcc

SEQ ID NO: 5812259 - DNA, 25 bp, Homo sapien
gcttcaggaatgtcagccccagtcg

SEQ ID NO: 5812260 - DNA, 25 bp, Homo sapien
tccgcctcctcctcggggccacccg

SEQ ID NO: 5812261 - DNA, 25 bp, Homo sapien
cccagcagcgcacagtaaatctggg

SEQ ID NO: 5812262 - DNA, 25 bp, Homo sapien
tgtctccccacattctcctggaagg

SEQ ID NO: 5812263 - DNA, 25 bp, Homo sapien
cgccgaacgcttccagcgccgcgcc

SEQ ID NO: 5812264 - DNA, 25 bp, Homo sapien
gtgatgatgtaaagaaatttaaaag

SEQ ID NO: 5812265 - DNA, 25 bp, Homo sapien
gctccagtccaggaactcagccatc

SEQ ID NO: 5812266 - DNA, 25 bp, Homo sapien
ttgacatcaggacgtgtgataaatc

SEQ ID NO: 5812267 - DNA, 25 bp, Homo sapien
tgtcgaagcagccgtgggtgagcac

SEQ ID NO: 5812268 - DNA, 25 bp, Homo sapien
cggttgcgctgctctctcaccactg

SEQ ID NO: 5812269 - DNA, 25 bp, Homo sapien
tggagatgtctgatcttgcactatg

SEQ ID NO: 5812270 - DNA, 25 bp, Homo sapien
acggtccattatggacattcgtgct

SEQ ID NO: 5812271 - DNA, 25 bp, Homo sapien
gtcacacagacggttgcgctgctct

SEQ ID NO: 5812272 - DNA, 25 bp, Homo sapien
accaggctggggcaccagctggggc

SEQ ID NO: 5812273 - DNA, 25 bp, Homo sapien
tgctttcacaccaacagtctggcaa

SEQ ID NO: 5812274 - DNA, 25 bp, Homo sapien
ttcaacagctggaggcaccactgtg

SEQ ID NO: 5812275 - DNA, 25 bp, Homo sapien
gctcagggccatctcggcagcctgg

SEQ ID NO: 5812276 - DNA, 25 bp, Homo sapien
cctgctggagccggcctttcagaag

SEQ ID NO: 5812277 - DNA, 25 bp, Homo sapien
caattacggtgtcacctctaaaggg

SEQ ID NO: 5812278 - DNA, 25 bp, Homo sapien
cgccgcgccaaaggccagtgtctcg

SEQ ID NO: 5812279 - DNA, 25 bp, Homo sapien
cggcctccctcaggaacaagacatc

SEQ ID NO: 5812280 - DNA, 25 bp, Homo sapien
cctgctttcacaccaacagtctggc

SEQ ID NO: 5812281 - DNA, 25 bp, Homo sapien
gccagcagaagtgtcagatccatca

SEQ ID NO: 5812282 - DNA, 25 bp, Homo sapien
aagcttcatggtccttgggattctg

SEQ ID NO: 5812283 - DNA, 25 bp, Homo sapien
cccgggtctccgcgctctcgccgaa

SEQ ID NO: 5812284 - DNA, 25 bp, Homo sapien
cctccaagggccagcgctacccttc

SEQ ID NO: 5812285 - DNA, 25 bp, Homo sapien
agcacacgtagcaggcggcgtccct

SEQ ID NO: 5812286 - DNA, 25 bp, Homo sapien
cctgcgggtcgctctgaatgccctt

SEQ ID NO: 5812287 - DNA, 25 bp, Homo sapien
atgtactcaaagaggctctgggtgg

SEQ ID NO: 5812288 - DNA, 25 bp, Homo sapien
ctatgtccaacaacaagttcatcat

SEQ ID NO: 5812289 - DNA, 25 bp, Homo sapien
gtaggtcagcgccttcaggatcacg

SEQ ID NO: 5812290 - DNA, 25 bp, Homo sapien
tcgctgcacaagcttcacccccagc

SEQ ID NO: 5812291 - DNA, 25 bp, Homo sapien
gacggcagcaacaggcctctcctgc

SEQ ID NO: 5812292 - DNA, 25 bp, Homo sapien
cttcaggatcacggcgacaacatcc

SEQ ID NO: 5812293 - DNA, 25 bp, Homo sapien
gcacggacaccctctcattcagaag

SEQ ID NO: 5812294 - DNA, 25 bp, Homo sapien
gcgggtccaacagatgaggctgctc

SEQ ID NO: 5812295 - DNA, 25 bp, Homo sapien
acaggcctctcctgcccagctctgc

SEQ ID NO: 5812296 - DNA, 25 bp, Homo sapien
cgagaatcgacccatgcctcatgtg

SEQ ID NO: 5812297 - DNA, 25 bp, Homo sapien
gtgggaaggcctgggaaggtgcact

SEQ ID NO: 5812298 - DNA, 25 bp, Homo sapien
gctctgggaagcctgccagccatcc

SEQ ID NO: 5812299 - DNA, 25 bp, Homo sapien
gatgtacaagggaagctggagatgt

SEQ ID NO: 5812300 - DNA, 25 bp, Homo sapien
ctgcaggagggcctgcctcctcacg

SEQ ID NO: 5812301 - DNA, 25 bp, Homo sapien
ccttcaacagctggaggcaccactg

SEQ ID NO: 5812302 - DNA, 25 bp, Homo sapien
catagggcaaacagtcttcacgttt

SEQ ID NO: 5812303 - DNA, 25 bp, Homo sapien
gaaggtgcactccagttcacggagg

SEQ ID NO: 5812304 - DNA, 25 bp, Homo sapien
atccgccagggctctgggaagcctg

SEQ ID NO: 5812305 - DNA, 25 bp, Homo sapien
cagatgaggctgctcctggtatttg

SEQ ID NO: 5812306 - DNA, 25 bp, Homo sapien
ctcgcaatggccttcaagccgtctc

SEQ ID NO: 5812307 - DNA, 25 bp, Homo sapien
tgaggctgctcctggtatttgtcca

SEQ ID NO: 5812308 - DNA, 25 bp, Homo sapien
agcgtcttcagcagcggcacggaca

SEQ ID NO: 5812309 - DNA, 25 bp, Homo sapien
tccgcgtcccacgcagtgtcactga

SEQ ID NO: 5812310 - DNA, 25 bp, Homo sapien
agaaatttaaaagccagatgtacaa

SEQ ID NO: 5812311 - DNA, 25 bp, Homo sapien
gctatttggagaatacggtccatta

SEQ ID NO: 5812312 - DNA, 25 bp, Homo sapien
atcttcatggtaaccaggtggtcta

SEQ ID NO: 5812313 - DNA, 25 bp, Homo sapien
cctcaaagatctgcagaagggtccc

SEQ ID NO: 5812314 - DNA, 25 bp, Homo sapien
gccagattgcacaggctccagtcca

SEQ ID NO: 5812315 - DNA, 25 bp, Homo sapien
tcttacagagcgcaagcaacttcac

SEQ ID NO: 5812316 - DNA, 25 bp, Homo sapien
tggtgatgatgtaaagaaatttaaa

SEQ ID NO: 5812317 - DNA, 25 bp, Homo sapien
tctcttgggctgcaagtttgtacaa

SEQ ID NO: 5812318 - DNA, 25 bp, Homo sapien
ggtccgtgacgggcctgttctcttg

SEQ ID NO: 5812319 - DNA, 25 bp, Homo sapien
caggcaggggtgaggtatgggctcc

SEQ ID NO: 5812320 - DNA, 25 bp, Homo sapien
gctgcacaagcttcacccccagctt

SEQ ID NO: 5812321 - DNA, 25 bp, Homo sapien
accgcagcaatcaccagtgcactcg

SEQ ID NO: 5812322 - DNA, 25 bp, Homo sapien
tcggtcaaacaccgcagcaatcacc

SEQ ID NO: 5812323 - DNA, 25 bp, Homo sapien
aggctctgggtggagtgccggatcg

SEQ ID NO: 5812324 - DNA, 25 bp, Homo sapien
caggaaacagttggatctgttaccg

SEQ ID NO: 5812325 - DNA, 25 bp, Homo sapien
cacatcatccgccagggctctggga

SEQ ID NO: 5812326 - DNA, 25 bp, Homo sapien
tcggtcaggatgagtggcttctgct

SEQ ID NO: 5812327 - DNA, 25 bp, Homo sapien
acacactgcttgtctcatgagctgt

SEQ ID NO: 5812328 - DNA, 25 bp, Homo sapien
tctcggtcaaacaccgcagcaatca

SEQ ID NO: 5812329 - DNA, 25 bp, Homo sapien
cagacatcccccatgccacgccttg

SEQ ID NO: 5812330 - DNA, 25 bp, Homo sapien
cctgctgggccacacagcacatgat

SEQ ID NO: 5812331 - DNA, 25 bp, Homo sapien
tgaaggcagaggcgtccaccccaag

SEQ ID NO: 5812332 - DNA, 25 bp, Homo sapien
cctgggtacgcccagaaggtcacac

SEQ ID NO: 5812333 - DNA, 25 bp, Homo sapien
gttcccgtcaaggcgagaaaaatca

SEQ ID NO: 5812334 - DNA, 25 bp, Homo sapien
aagctgtcagctagtgccagcctcc

SEQ ID NO: 5812335 - DNA, 25 bp, Homo sapien
catcccgcagaacactgcgatgcct

SEQ ID NO: 5812336 - DNA, 25 bp, Homo sapien
acagctgcaggagggcctgcctcct

SEQ ID NO: 5812337 - DNA, 25 bp, Homo sapien
tgaggtatgggctccaggactggct

SEQ ID NO: 5812338 - DNA, 25 bp, Homo sapien
ctcggcagcctggggaccgcgcccc

SEQ ID NO: 5812339 - DNA, 25 bp, Homo sapien
tgcccagctctgccagcgccagaca

SEQ ID NO: 5812340 - DNA, 25 bp, Homo sapien
cattcaaggtgcgggtccaacagat

SEQ ID NO: 5812341 - DNA, 25 bp, Homo sapien
gtcttccggatcagcgggaaacggt

SEQ ID NO: 5812342 - DNA, 25 bp, Homo sapien
agaggagcagacacagctgcaggag

SEQ ID NO: 5812343 - DNA, 25 bp, Homo sapien
caggtgcagagaggaaaagctgtca

SEQ ID NO: 5812344 - DNA, 25 bp, Homo sapien
tatgtctcggtcaaacaccgcagca

SEQ ID NO: 5812345 - DNA, 25 bp, Homo sapien
acgacgtcactgtaggtgagcaatg

SEQ ID NO: 5812346 - DNA, 25 bp, Homo sapien
gcagaacactgcgatgcctgacagg

SEQ ID NO: 5812347 - DNA, 25 bp, Homo sapien
aagggcgcccaaggccaacgagaag

SEQ ID NO: 5812348 - DNA, 25 bp, Homo sapien
gcagaccaccgcacgaccgtgtcct

SEQ ID NO: 5812349 - DNA, 25 bp, Homo sapien
ctgcccagggcctgcgggtcgctct

SEQ ID NO: 5812350 - DNA, 25 bp, Homo sapien
caagacatcctcaccaggcaggggt

SEQ ID NO: 5812351 - DNA, 25 bp, Homo sapien
agctggaggcaccactgtgcgaggc

SEQ ID NO: 5812352 - DNA, 25 bp, Homo sapien
gcagtttatgtctcggtcaaacacc

SEQ ID NO: 5812353 - DNA, 25 bp, Homo sapien
gacgtcactgtaggtgagcaatgtc

SEQ ID NO: 5812354 - DNA, 25 bp, Homo sapien
agttggatctgttaccgacggcaaa

SEQ ID NO: 5812355 - DNA, 25 bp, Homo sapien
acagctggaggcaccactgtgcgag

SEQ ID NO: 5812356 - DNA, 25 bp, Homo sapien
caggtatgggcctcgatcagctcag

SEQ ID NO: 5812357 - DNA, 25 bp, Homo sapien
agctcctgaggctcataggcacgcg

SEQ ID NO: 5812358 - DNA, 25 bp, Homo sapien
gtgggggatgggagggctgtcaaag

SEQ ID NO: 5812359 - DNA, 25 bp, Homo sapien
ccccaagtcaccagagcgcaggtgc

SEQ ID NO: 5812360 - DNA, 25 bp, Homo sapien
agccgtctctcctggactcagcaaa

SEQ ID NO: 5812361 - DNA, 25 bp, Homo sapien
gctgcagatttgcagccaaagatcg

SEQ ID NO: 5812362 - DNA, 25 bp, Homo sapien
aggcaccccgcttctcgtcgtaggt

SEQ ID NO: 5812363 - DNA, 25 bp, Homo sapien
agcttcgtctggggctcctgctttc

SEQ ID NO: 5812364 - DNA, 25 bp, Homo sapien
aaacacacactgcttgtctcatgag

SEQ ID NO: 5812365 - DNA, 25 bp, Homo sapien
attgtgaccaaatctaaaacaggct

SEQ ID NO: 5812366 - DNA, 25 bp, Homo sapien
cctttcagaaggaagcctggaaggg

SEQ ID NO: 5812367 - DNA, 25 bp, Homo sapien
caaggtgcgggtccaacagatgagg

SEQ ID NO: 5812368 - DNA, 25 bp, Homo sapien
agcagcctcgggaagacttgcgtgg

SEQ ID NO: 5812369 - DNA, 25 bp, Homo sapien
gcgcccaaggccaacgagaagccac

SEQ ID NO: 5812370 - DNA, 25 bp, Homo sapien
ggtgcagagaggaaaagctgtcagc

SEQ ID NO: 5812371 - DNA, 25 bp, Homo sapien
tggtcttccggatcagcgggaaacg

SEQ ID NO: 5812372 - DNA, 25 bp, Homo sapien
aatatttgtgccagggcctgcagcg

SEQ ID NO: 5812373 - DNA, 25 bp, Homo sapien
ctgttaccgacggcaaaatagtcag

SEQ ID NO: 5812374 - DNA, 25 bp, Homo sapien
tgtgataaatctggacacaaggaca

SEQ ID NO: 5812375 - DNA, 25 bp, Homo sapien
agatctggactcagtgtcatggaca

SEQ ID NO: 5812376 - DNA, 25 bp, Homo sapien
caggactggcttcagcaggcaccag

SEQ ID NO: 5812377 - DNA, 25 bp, Homo sapien
gcagccatcgaggcacctgaggaca

SEQ ID NO: 5812378 - DNA, 25 bp, Homo sapien
agtgtctcgtcctccgcctcctcct

SEQ ID NO: 5812379 - DNA, 25 bp, Homo sapien
aaagtgccctgtctccccacattct

SEQ ID NO: 5812380 - DNA, 25 bp, Homo sapien
ataactgacgatcatagagctgctg

SEQ ID NO: 5812381 - DNA, 25 bp, Homo sapien
aggtgggcagcccaaggagctgggt

SEQ ID NO: 5812382 - DNA, 25 bp, Homo sapien
gtccttgtccttcagcccgaccagc

SEQ ID NO: 5812383 - DNA, 25 bp, Homo sapien
aaatctgggaaacattctctccgca

SEQ ID NO: 5812384 - DNA, 25 bp, Homo sapien
aggtcagcgccttcaggatcacggc

SEQ ID NO: 5812385 - DNA, 25 bp, Homo sapien
cagagaggaaaagctgtcagctagt

SEQ ID NO: 5812386 - DNA, 25 bp, Homo sapien
cccagcaggacgtggtagcggtagg

SEQ ID NO: 5812387 - DNA, 25 bp, Homo sapien
aacagcttttccagttctcctcggt

SEQ ID NO: 5812388 - DNA, 25 bp, Homo sapien
aggacgtggtagcggtaggtgggca

SEQ ID NO: 5812389 - DNA, 25 bp, Homo sapien
aggcctgggaaggtgcactccagtt

SEQ ID NO: 5812390 - DNA, 25 bp, Homo sapien
taaacacacttataaccaggaaaca

SEQ ID NO: 5812391 - DNA, 25 bp, Homo sapien
caatgtctcgtacacctggctggcc

SEQ ID NO: 5812392 - DNA, 25 bp, Homo sapien
gtccatgcagcccagcagcgcacag

SEQ ID NO: 5812393 - DNA, 25 bp, Homo sapien
ccgccagggctctgggaagcctgcc

SEQ ID NO: 5812394 - DNA, 25 bp, Homo sapien
gaaatgttttatagcctcgaacctt

SEQ ID NO: 5812395 - DNA, 25 bp, Homo sapien
tctaaaacaggctctacatcggcaa

SEQ ID NO: 5812396 - DNA, 25 bp, Homo sapien
gagccagagcaaaagcatgtagcgg

SEQ ID NO: 5812397 - DNA, 25 bp, Homo sapien
tcttctcactggcctgctgggccac

SEQ ID NO: 5812398 - DNA, 25 bp, Homo sapien
cgcgaaagccagggatgaaggatga

SEQ ID NO: 5812399 - DNA, 25 bp, Homo sapien
aaggaagcctggaagggcgcccaag

SEQ ID NO: 5812400 - DNA, 25 bp, Homo sapien
aatgttttatagcctcgaaccttgg

SEQ ID NO: 5812401 - DNA, 25 bp, Homo sapien
cacgctgcaggcaccccgcttctcg

SEQ ID NO: 5812402 - DNA, 25 bp, Homo sapien
actagccccagcaggacgtggtagc

SEQ ID NO: 5812403 - DNA, 25 bp, Homo sapien
acaaggacagcagctgcatctcggg

SEQ ID NO: 5812404 - DNA, 25 bp, Homo sapien
agtgccagcctccaagggccagcgc

SEQ ID NO: 5812405 - DNA, 25 bp, Homo sapien
tcctccgtggtgaagatgtcgaagc

SEQ ID NO: 5812406 - DNA, 25 bp, Homo sapien
aacagatgaggctgctcctggtatt

SEQ ID NO: 5812407 - DNA, 25 bp, Homo sapien
gtctggggctcctgctttcacacca

SEQ ID NO: 5812408 - DNA, 25 bp, Homo sapien
cacacagcacatgatgcgctcacag

SEQ ID NO: 5812409 - DNA, 25 bp, Homo sapien
caacttcatgaggaaataaacgaag

SEQ ID NO: 5812410 - DNA, 25 bp, Homo sapien
aagccggcaataaacacacttataa

SEQ ID NO: 5812411 - DNA, 25 bp, Homo sapien
ccaacagatgaggctgctcctggta

SEQ ID NO: 5812412 - DNA, 25 bp, Homo sapien
cttgcactatgtccaacaacaagtt

SEQ ID NO: 5812413 - DNA, 25 bp, Homo sapien
cctggctggccgtggtcttccggat

SEQ ID NO: 5812414 - DNA, 25 bp, Homo sapien
ctgccagccatcctaccgatgccct

SEQ ID NO: 5812415 - DNA, 25 bp, Homo sapien
ctccgtggtgaagatgtcgaagcag

SEQ ID NO: 5812416 - DNA, 25 bp, Homo sapien
gggcacgtgggggatgggagggctg

SEQ ID NO: 5812417 - DNA, 25 bp, Homo sapien
cctgcccagctctgccagcgccaga

SEQ ID NO: 5812418 - DNA, 25 bp, Homo sapien
cacggagagccagagcaaaagcatg

SEQ ID NO: 5812419 - DNA, 25 bp, Homo sapien
cgctctcgccgaacgcttccagcgc

SEQ ID NO: 5812420 - DNA, 25 bp, Homo sapien
gaaagccggcaataaacacacttat

SEQ ID NO: 5812421 - DNA, 25 bp, Homo sapien
aggcgagaaaaatcaaaagggatca

SEQ ID NO: 5812422 - DNA, 25 bp, Homo sapien
cacaccaacagtctggcaaatcctc

SEQ ID NO: 5812423 - DNA, 25 bp, Homo sapien
atggccttcaagccgtctctcctgg

SEQ ID NO: 5812424 - DNA, 25 bp, Homo sapien
acattcgtgcttgcccaggctgggt

SEQ ID NO: 5812425 - DNA, 25 bp, Homo sapien
ccagcttccgcagcagggtctggtt

SEQ ID NO: 5812426 - DNA, 25 bp, Homo sapien
gtcaccacctcgtccagcacatccg

SEQ ID NO: 5812427 - DNA, 25 bp, Homo sapien
tcccacgcagtgtcactgagcacag

SEQ ID NO: 5812428 - DNA, 25 bp, Homo sapien
cctggaaactgaagcagtccagcac

SEQ ID NO: 5812429 - DNA, 25 bp, Homo sapien
ttctggatatcttttgaattcttga

SEQ ID NO: 5812430 - DNA, 25 bp, Homo sapien
gatgcctgacaggagcttctggata

SEQ ID NO: 5812431 - DNA, 25 bp, Homo sapien
attcagaaggttgtcctcaaagatc

SEQ ID NO: 5812432 - DNA, 25 bp, Homo sapien
acttcacagcaaaggggtggtcctc

SEQ ID NO: 5812433 - DNA, 25 bp, Homo sapien
agcaacttcacagcaaaggggtggt

SEQ ID NO: 5812434 - DNA, 25 bp, Homo sapien
cgaccacatcatccgccagggctct

SEQ ID NO: 5812435 - DNA, 25 bp, Homo sapien
ccagttctcctcggtggggcacgtg

SEQ ID NO: 5812436 - DNA, 25 bp, Homo sapien
gattgcagtcacaaagggcttcagc

SEQ ID NO: 5812437 - DNA, 25 bp, Homo sapien
ggcctcgatcagctcaggctggctc

SEQ ID NO: 5812438 - DNA, 25 bp, Homo sapien
gtcagctgtggtcaaaatatcaata

SEQ ID NO: 5812439 - DNA, 25 bp, Homo sapien
accccctctgggacgtcgtcatctt

SEQ ID NO: 5812440 - DNA, 25 bp, Homo sapien
tttcttacagagcgcaagcaacttc

SEQ ID NO: 5812441 - DNA, 25 bp, Homo sapien
tggtctggaaggaggaacgggccag

SEQ ID NO: 5812442 - DNA, 25 bp, Homo sapien
acctgaggacagtggcagcataggg

SEQ ID NO: 5812443 - DNA, 25 bp, Homo sapien
gagctgctggtgaatctgcttcagg

SEQ ID NO: 5812444 - DNA, 25 bp, Homo sapien
aaggacagcagctgcatctcgggcc

SEQ ID NO: 5812445 - DNA, 25 bp, Homo sapien
agcgccgcgccaaaggccagtgtct

SEQ ID NO: 5812446 - DNA, 25 bp, Homo sapien
caccccaagtcaccagagcgcaggt

SEQ ID NO: 5812447 - DNA, 25 bp, Homo sapien
ggaccgcgcccccgcctcacgtgtt

SEQ ID NO: 5812448 - DNA, 25 bp, Homo sapien
aggagggcctgcctcctcacgtcgc

SEQ ID NO: 5812449 - DNA, 25 bp, Homo sapien
ttcacgttttccatgtttaaatatt

SEQ ID NO: 5812450 - DNA, 25 bp, Homo sapien
tttgtgttcaagtgaaggcagaggc

SEQ ID NO: 5812451 - DNA, 25 bp, Homo sapien
cttctgcgcaggcgagaatcgaccc

SEQ ID NO: 5812452 - DNA, 25 bp, Homo sapien
cacagcgagtcatttatcagccatt

SEQ ID NO: 5812453 - DNA, 25 bp, Homo sapien
cgcccagggacacgactagccccag

SEQ ID NO: 5812454 - DNA, 25 bp, Homo sapien
cggcagcctggggaccgcgcccccg

SEQ ID NO: 5812455 - DNA, 25 bp, Homo sapien
ctcgggaagacttgcgtggcgctga

SEQ ID NO: 5812456 - DNA, 25 bp, Homo sapien
cccacattctcctggaaggcggcag

SEQ ID NO: 5812457 - DNA, 25 bp, Homo sapien
aggagctgggtgatgcgtgggaagg

SEQ ID NO: 5812458 - DNA, 25 bp, Homo sapien
gcacgtgggggatgggagggctgtc

SEQ ID NO: 5812459 - DNA, 25 bp, Homo sapien
aatcgacccatgcctcatgtgaaga

SEQ ID NO: 5812460 - DNA, 25 bp, Homo sapien
tctgcgcaggcgagaatcgacccat

SEQ ID NO: 5812461 - DNA, 25 bp, Homo sapien
gaaacattctctccgcacacagctt

SEQ ID NO: 5812462 - DNA, 25 bp, Homo sapien
ggtccattatggacattcgtgcttg

SEQ ID NO: 5812463 - DNA, 25 bp, Homo sapien
aggagcagacacagctgcaggaggg

SEQ ID NO: 5812464 - DNA, 25 bp, Homo sapien
gcgcccacgacgtcactgtaggtga

SEQ ID NO: 5812465 - DNA, 25 bp, Homo sapien
tcgaagcagccgtgggtgagcacgt

SEQ ID NO: 5812466 - DNA, 25 bp, Homo sapien
tgcaagtttgtacaaggcgtaagca

SEQ ID NO: 5812467 - DNA, 25 bp, Homo sapien
gaggcgtccaccccaagtcaccaga

SEQ ID NO: 5812468 - DNA, 25 bp, Homo sapien
caaggagctgggtgatgcgtgggaa

SEQ ID NO: 5812469 - DNA, 25 bp, Homo sapien
gctcactctgaccctgagtgaggag

SEQ ID NO: 5812470 - DNA, 25 bp, Homo sapien
atgcgtgggaaggcctgggaaggtg

SEQ ID NO: 5812471 - DNA, 25 bp, Homo sapien
cactgtgcgaggctttccacaccgg

SEQ ID NO: 5812472 - DNA, 25 bp, Homo sapien
ttttataggaagcacatttgtgttc

SEQ ID NO: 5812473 - DNA, 25 bp, Homo sapien
acagttggatctgttaccgacggca

SEQ ID NO: 5812474 - DNA, 25 bp, Homo sapien
tgtctcatgagctgtcctcccagac

SEQ ID NO: 5812475 - DNA, 25 bp, Homo sapien
agcacagacccgaccacatcatccg

SEQ ID NO: 5812476 - DNA, 25 bp, Homo sapien
gcctctcctgcccagctctgccagc

SEQ ID NO: 5812477 - DNA, 25 bp, Homo sapien
ataggcacgcgcgaaggcccagcac

SEQ ID NO: 5812478 - DNA, 25 bp, Homo sapien
gtgagcacggaaacggtcaatcttc

SEQ ID NO: 5812479 - DNA, 25 bp, Homo sapien
tggcggccttgcggacccaggtgcc

SEQ ID NO: 5812480 - DNA, 25 bp, Homo sapien
ttctgaattgtgaccaaatctaaaa

SEQ ID NO: 5812481 - DNA, 25 bp, Homo sapien
ggatctgttaccgacggcaaaatag

SEQ ID NO: 5812482 - DNA, 25 bp, Homo sapien
tgacaacttttctattaaaacacac

SEQ ID NO: 5812483 - DNA, 25 bp, Homo sapien
gaaactgaagcagtccagcacagac

SEQ ID NO: 5812484 - DNA, 25 bp, Homo sapien
ctcaggctggctccgagccagcaga

SEQ ID NO: 5812485 - DNA, 25 bp, Homo sapien
gatgggagggctgtcaaagtgcagg

SEQ ID NO: 5812486 - DNA, 25 bp, Homo sapien
acgttggtgcccacgctgcaggcac

SEQ ID NO: 5812487 - DNA, 25 bp, Homo sapien
actgacaatcaagtaggactctgct

SEQ ID NO: 5812488 - DNA, 25 bp, Homo sapien
tcgatcagctcaggctggctccgag

SEQ ID NO: 5812489 - DNA, 25 bp, Homo sapien
ggcgacaacatccacgagtcgagac

SEQ ID NO: 5812490 - DNA, 25 bp, Homo sapien
gtacatgattttataggaagcacat

SEQ ID NO: 5812491 - DNA, 25 bp, Homo sapien
aagctccgcgtcccacgcagtgtca

SEQ ID NO: 5812492 - DNA, 25 bp, Homo sapien
caacaagttcatcatccattcaagg

SEQ ID NO: 5812493 - DNA, 25 bp, Homo sapien
cctggtatttgtccattattacgcg

SEQ ID NO: 5812494 - DNA, 25 bp, Homo sapien
gcctgcctcctcacgtcgccgggga

SEQ ID NO: 5812495 - DNA, 25 bp, Homo sapien
agaagccacagcgagtcatttatca

SEQ ID NO: 5812496 - DNA, 25 bp, Homo sapien
caccaacagtctggcaaatcctcgc

SEQ ID NO: 5812497 - DNA, 25 bp, Homo sapien
gagagccagagcaaaagcatgtagc

SEQ ID NO: 5812498 - DNA, 25 bp, Homo sapien
tgccagggcctgcagcgtcccatcc

SEQ ID NO: 5812499 - DNA, 25 bp, Homo sapien
acaagttcatcatccattcaaggtg

SEQ ID NO: 5812500 - DNA, 25 bp, Homo sapien
ctggggcaccagctggggcctgggt

SEQ ID NO: 5812501 - DNA, 25 bp, Homo sapien
atgccacgccttgtcagtctcctgg

SEQ ID NO: 5812502 - DNA, 25 bp, Homo sapien
ggccagtgtctcgtcctccgcctcc

SEQ ID NO: 5812503 - DNA, 25 bp, Homo sapien
acaccggcctccctcaggaacaaga

SEQ ID NO: 5812504 - DNA, 25 bp, Homo sapien
taaaacaggctctacatcggcaact

SEQ ID NO: 5812505 - DNA, 25 bp, Homo sapien
tggtcaaaatatcaataccatgagg

SEQ ID NO: 5812506 - DNA, 25 bp, Homo sapien
agccattgccaaccatcaattacgg

SEQ ID NO: 5812507 - DNA, 25 bp, Homo sapien
agtgaggagctgcagatttgcagcc

SEQ ID NO: 5812508 - DNA, 25 bp, Homo sapien
cctcccgcaggcggcccagcagcgc

SEQ ID NO: 5812509 - DNA, 25 bp, Homo sapien
ttggctgcgtgtactcaggaaagcc

SEQ ID NO: 5812510 - DNA, 25 bp, Homo sapien
atctggacacaaggacagcagctgc

SEQ ID NO: 5812511 - DNA, 25 bp, Homo sapien
ccgcctcacgtgttcgcagatccca

SEQ ID NO: 5812512 - DNA, 25 bp, Homo sapien
aggaagcacatttgtgttcaagtga

SEQ ID NO: 5812513 - DNA, 25 bp, Homo sapien
cccttcatgtactcaaagaggctct

SEQ ID NO: 5812514 - DNA, 25 bp, Homo sapien
ctggaaggaggaacgggccagattg

SEQ ID NO: 5812515 - DNA, 25 bp, Homo sapien
tgttcgcagatcccactccgctaga

SEQ ID NO: 5812516 - DNA, 25 bp, Homo sapien
ttatggacattcgtgcttgcccagg

SEQ ID NO: 5812517 - DNA, 25 bp, Homo sapien
ccaacaacaagttcatcatccattc

SEQ ID NO: 5812518 - DNA, 25 bp, Homo sapien
gctctgaatgcccttcatgtactca

SEQ ID NO: 5812519 - DNA, 25 bp, Homo sapien
catccattcaaggtgcgggtccaac

SEQ ID NO: 5812520 - DNA, 25 bp, Homo sapien
gtccaacagatgaggctgctcctgg

SEQ ID NO: 5812521 - DNA, 25 bp, Homo sapien
cgcagcaatcaccagtgcactcgag

SEQ ID NO: 5812522 - DNA, 25 bp, Homo sapien
accaggtggtctatcattggctgcg

SEQ ID NO: 5812523 - DNA, 25 bp, Homo sapien
cacagtaaatctgggaaacattctc

SEQ ID NO: 5812524 - DNA, 25 bp, Homo sapien
gccgtggtcttccggatcagcggga

SEQ ID NO: 5812525 - DNA, 25 bp, Homo sapien
tgggtgagcacgtggtccagcgtct

SEQ ID NO: 5812526 - DNA, 25 bp, Homo sapien
tggggaccgcgcccccgcctcacgt

SEQ ID NO: 5812527 - DNA, 25 bp, Homo sapien
gcgaggctttccacaccggcctccc

SEQ ID NO: 5812528 - DNA, 25 bp, Homo sapien
gtcctcaaagatctgcagaagggtc

SEQ ID NO: 5812529 - DNA, 25 bp, Homo sapien
ccgcggccggttcgtcgctcagggc

SEQ ID NO: 5812530 - DNA, 25 bp, Homo sapien
tgctgccaccttcggcttcaggaat

SEQ ID NO: 5812531 - DNA, 25 bp, Homo sapien
cgcgccgccgccgtgcacctcccgc

SEQ ID NO: 5812532 - DNA, 25 bp, Homo sapien
ggaaacggtcaatcttctcactggc

SEQ ID NO: 5812533 - DNA, 25 bp, Homo sapien
ccagcacagacccgaccacatcatc

SEQ ID NO: 5812534 - DNA, 25 bp, Homo sapien
ctcctgaggctcataggcacgcgcg

SEQ ID NO: 5812535 - DNA, 25 bp, Homo sapien
ataaatctggacacaaggacagcag

SEQ ID NO: 5812536 - DNA, 25 bp, Homo sapien
catctcgggccttgtcactgacaat

SEQ ID NO: 5812537 - DNA, 25 bp, Homo sapien
acaccctctcattcagaaggttgtc

SEQ ID NO: 5812538 - DNA, 25 bp, Homo sapien
tgcttcaggccctgcactgcctgct

SEQ ID NO: 5812539 - DNA, 25 bp, Homo sapien
ggtgaatctgcttcaggccctgcac

SEQ ID NO: 5812540 - DNA, 25 bp, Homo sapien
aggctgctcctggtatttgtccatt

SEQ ID NO: 5812541 - DNA, 25 bp, Homo sapien
cacgactagccccagcaggacgtgg

SEQ ID NO: 5812542 - DNA, 25 bp, Homo sapien
cccatccatggtgatgaccccctgc

SEQ ID NO: 5812543 - DNA, 25 bp, Homo sapien
ggggaactgcaccatcccgcagaac

SEQ ID NO: 5812544 - DNA, 25 bp, Homo sapien
tcccaagcttcatggtccttgggat

SEQ ID NO: 5812545 - DNA, 25 bp, Homo sapien
ccggggaactgcaccatcccgcaga

SEQ ID NO: 5812546 - DNA, 25 bp, Homo sapien
tttatcagccattgccaaccatcaa

SEQ ID NO: 5812547 - DNA, 25 bp, Homo sapien
ggttgtgcagcgccctcgcagccaa

SEQ ID NO: 5812548 - DNA, 25 bp, Homo sapien
tccaccccaagtcaccagagcgcag

SEQ ID NO: 5812549 - DNA, 25 bp, Homo sapien
cgacaacatccacgagtcgagacgg

SEQ ID NO: 5812550 - DNA, 25 bp, Homo sapien
tcatgtgaagatctggactcagtgt

SEQ ID NO: 5812551 - DNA, 25 bp, Homo sapien
tctgcttcaggccctgcactgcctg

SEQ ID NO: 5812552 - DNA, 25 bp, Homo sapien
gggaaggcctgggaaggtgcactcc

SEQ ID NO: 5812553 - DNA, 25 bp, Homo sapien
ggtgcctgctgggccaggttgtgca

SEQ ID NO: 5812554 - DNA, 25 bp, Homo sapien
gttcatcatccattcaaggtgcggg

SEQ ID NO: 5812555 - DNA, 25 bp, Homo sapien
gcagcgcacagtaaatctgggaaac

SEQ ID NO: 5812556 - DNA, 25 bp, Homo sapien
cgagaagccacagcgagtcatttat

SEQ ID NO: 5812557 - DNA, 25 bp, Homo sapien
aagggcattttggaaagtgacaact

SEQ ID NO: 5812558 - DNA, 25 bp, Homo sapien
acaacttttctattaaaacacacac

SEQ ID NO: 5812559 - DNA, 25 bp, Homo sapien
caaagatcggcagccacgctggtac

SEQ ID NO: 5812560 - DNA, 25 bp, Homo sapien
ctgtgcgaggctttccacaccggcc

SEQ ID NO: 5812561 - DNA, 25 bp, Homo sapien
gcagacacagctgcaggagggcctg

SEQ ID NO: 5812562 - DNA, 25 bp, Homo sapien
aaccgctccagggccacctcgcgct

SEQ ID NO: 5812563 - DNA, 25 bp, Homo sapien
gctccagggccacctcgcgctccgc

SEQ ID NO: 5812564 - DNA, 25 bp, Homo sapien
caccagagcgcaggtgcagagagga

SEQ ID NO: 5812565 - DNA, 25 bp, Homo sapien
gtgtcagatccatcagactggtcat

SEQ ID NO: 5812566 - DNA, 25 bp, Homo sapien
ataccatgagggaaagtgccctgtc

SEQ ID NO: 5812567 - DNA, 25 bp, Homo sapien
ccagtgtctcgtcctccgcctcctc

SEQ ID NO: 5812568 - DNA, 25 bp, Homo sapien
attaaaacacacactgcttgtctca

SEQ ID NO: 5812569 - DNA, 25 bp, Homo sapien
gcgtaagcaacttctgcgcaggcga

SEQ ID NO: 5812570 - DNA, 25 bp, Homo sapien
cagccatcctaccgatgcccttggc

SEQ ID NO: 5812571 - DNA, 25 bp, Homo sapien
cggcagcaacaggcctctcctgccc

SEQ ID NO: 5812572 - DNA, 25 bp, Homo sapien
tctttcttacagagcgcaagcaact

SEQ ID NO: 5812573 - DNA, 25 bp, Homo sapien
ggcagccacgctggtacctccatgc

SEQ ID NO: 5812574 - DNA, 25 bp, Homo sapien
tacgcccagaaggtcacacagacgg

SEQ ID NO: 5812575 - DNA, 25 bp, Homo sapien
gcaatcaccagtgcactcgagattg

SEQ ID NO: 5812576 - DNA, 25 bp, Homo sapien
ggtgatgcgtgggaaggcctgggaa

SEQ ID NO: 5812577 - DNA, 25 bp, Homo sapien
ctcctgcccagctctgccagcgcca

SEQ ID NO: 5812578 - DNA, 25 bp, Homo sapien
tcagctagtgccagcctccaagggc

SEQ ID NO: 5812579 - DNA, 25 bp, Homo sapien
ctgctctctcaccactgcaagctcc

SEQ ID NO: 5812580 - DNA, 25 bp, Homo sapien
gtataactgacgatcatagagctgc

SEQ ID NO: 5812581 - DNA, 25 bp, Homo sapien
acgaccgtgtccttgtccttcagcc

SEQ ID NO: 5812582 - DNA, 25 bp, Homo sapien
cagcgccttcaggatcacggcgaca

SEQ ID NO: 5812583 - DNA, 25 bp, Homo sapien
tcatggtaaccaggtggtctatcat

SEQ ID NO: 5812584 - DNA, 25 bp, Homo sapien
gccttgtcactgacaatcaagtagg

SEQ ID NO: 5812585 - DNA, 25 bp, Homo sapien
tcataggcacgcgcgaaggcccagc

SEQ ID NO: 5812586 - DNA, 25 bp, Homo sapien
gtctcctggaaactgaagcagtcca

SEQ ID NO: 5812587 - DNA, 25 bp, Homo sapien
ctctcctgcccagctctgccagcgc

SEQ ID NO: 5812588 - DNA, 25 bp, Homo sapien
cggatgaccccatcccagtggctga

SEQ ID NO: 5812589 - DNA, 25 bp, Homo sapien
cgccggggaactgcaccatcccgca

SEQ ID NO: 5812590 - DNA, 25 bp, Homo sapien
gatgcgctcacaggtatgggcctcg

SEQ ID NO: 5812591 - DNA, 25 bp, Homo sapien
aaaagcatgtagcgggtttcccaag

SEQ ID NO: 5812592 - DNA, 25 bp, Homo sapien
aaggggtggtcctcctccgtggtga

SEQ ID NO: 5812593 - DNA, 25 bp, Homo sapien
tgacgttggtgcccacgctgcaggc

SEQ ID NO: 5812594 - DNA, 25 bp, Homo sapien
cgcagcagggtctggttgctctcag

SEQ ID NO: 5812595 - DNA, 25 bp, Homo sapien
acggaggccacatcggacctgggaa

SEQ ID NO: 5812596 - DNA, 25 bp, Homo sapien
ccttgggattctgaattgtgaccaa

SEQ ID NO: 5812597 - DNA, 25 bp, Homo sapien
actccagttcacggaggccacatcg

SEQ ID NO: 5812598 - DNA, 25 bp, Homo sapien
accccatcccagtggctgatcttca

SEQ ID NO: 5812599 - DNA, 25 bp, Homo sapien
tccgtcaagccgcccagggacacga

SEQ ID NO: 5812600 - DNA, 25 bp, Homo sapien
cagtcaccacctcgtccagcacatc

SEQ ID NO: 5812601 - DNA, 25 bp, Homo sapien
tgtacaaggcgtaagcaacttctgc

SEQ ID NO: 5812602 - DNA, 25 bp, Homo sapien
agtgtcactgagcacagtcaccacc

SEQ ID NO: 5812603 - DNA, 25 bp, Homo sapien
tgaggagctgcagatttgcagccaa

SEQ ID NO: 5812604 - DNA, 25 bp, Homo sapien
cctcccagacccctgtataactgac

SEQ ID NO: 5812605 - DNA, 25 bp, Homo sapien
gatgatgtaaagaaatttaaaagcc

SEQ ID NO: 5812606 - DNA, 25 bp, Homo sapien
cattatggacattcgtgcttgccca

SEQ ID NO: 5812607 - DNA, 25 bp, Homo sapien
atggacattcgtgcttgcccaggct

SEQ ID NO: 5812608 - DNA, 25 bp, Homo sapien
ctgctcactctgaccctgagtgagg

SEQ ID NO: 5812609 - DNA, 25 bp, Homo sapien
gttctcttgggctgcaagtttgtac

SEQ ID NO: 5812610 - DNA, 25 bp, Homo sapien
aatcaaaagggatcaggcaggtcac

SEQ ID NO: 5812611 - DNA, 25 bp, Homo sapien
gcaccatcccgcagaacactgcgat

SEQ ID NO: 5812612 - DNA, 25 bp, Homo sapien
agtggctgatcttcatggtaaccag

SEQ ID NO: 5812613 - DNA, 25 bp, Homo sapien
tcttgatttctttcttacagagcgc

SEQ ID NO: 5812614 - DNA, 25 bp, Homo sapien
cttccgcagcagggtctggttgctc

SEQ ID NO: 5812615 - DNA, 25 bp, Homo sapien
gcaggtcacggagagccagagcaaa

SEQ ID NO: 5812616 - DNA, 25 bp, Homo sapien
gcctccctcaggaacaagacatcct

SEQ ID NO: 5812617 - DNA, 25 bp, Homo sapien
atccgcgcccacgacgtcactgtag

SEQ ID NO: 5812618 - DNA, 25 bp, Homo sapien
aggatcacggcgacaacatccacga

SEQ ID NO: 5812619 - DNA, 25 bp, Homo sapien
gccggatcgtcgactccgtcaagcc

SEQ ID NO: 5812620 - DNA, 25 bp, Homo sapien
tctaaagggcattttggaaagtgac

SEQ ID NO: 5812621 - DNA, 25 bp, Homo sapien
gtccttgggattctgaattgtgacc

SEQ ID NO: 5812622 - DNA, 25 bp, Homo sapien
tgtaggtgagcaatgtctcgtacac

SEQ ID NO: 5812623 - DNA, 25 bp, Homo sapien
acgtcgtcatcttcgtcgtcatctt

SEQ ID NO: 5812624 - DNA, 25 bp, Homo sapien
gttggtgcccacgctgcaggcaccc

SEQ ID NO: 5812625 - DNA, 25 bp, Homo sapien
aggctccagtccaggaactcagcca

SEQ ID NO: 5812626 - DNA, 25 bp, Homo sapien
agcagctgcatctcgggccttgtca

SEQ ID NO: 5812627 - DNA, 25 bp, Homo sapien
cgcagatcccactccgctagagcgc

SEQ ID NO: 5812628 - DNA, 25 bp, Homo sapien
atggacagcagcctcgggaagactt

SEQ ID NO: 5812629 - DNA, 25 bp, Homo sapien
ggggtggtcctcctccgtggtgaag

SEQ ID NO: 5812630 - DNA, 25 bp, Homo sapien
gcttttccagttctcctcggtgggg

SEQ ID NO: 5812631 - DNA, 25 bp, Homo sapien
cttgcgtggcgctgaactcgggtgc

SEQ ID NO: 5812632 - DNA, 25 bp, Homo sapien
ttcacagcaaaggggtggtcctcct

SEQ ID NO: 5812633 - DNA, 25 bp, Homo sapien
gtgtcacctctaaagggcattttgg

SEQ ID NO: 5812634 - DNA, 25 bp, Homo sapien
ttctgctcactctgaccctgagtga

SEQ ID NO: 5812635 - DNA, 25 bp, Homo sapien
gatttctttcttacagagcgcaagc

SEQ ID NO: 5812636 - DNA, 25 bp, Homo sapien
cacgctggtacctccatgctgccac

SEQ ID NO: 5812637 - DNA, 25 bp, Homo sapien
cgactccgtcaagccgcccagggac

SEQ ID NO: 5812638 - DNA, 25 bp, Homo sapien
ggacaccctctcattcagaaggttg

SEQ ID NO: 5812639 - DNA, 25 bp, Homo sapien
cccagctctgccagcgccagacatc

SEQ ID NO: 5812640 - DNA, 25 bp, Homo sapien
catttgtgttcaagtgaaggcagag

SEQ ID NO: 5812641 - DNA, 25 bp, Homo sapien
ctggcaaatcctcgcaatggccttc

SEQ ID NO: 5812642 - DNA, 25 bp, Homo sapien
gcagcgcccgggtctccgcgctctc

SEQ ID NO: 5812643 - DNA, 25 bp, Homo sapien
ccagcgccagacatcccccatgcca

SEQ ID NO: 5812644 - DNA, 25 bp, Homo sapien
gtaggtgggcagcccaaggagctgg

SEQ ID NO: 5812645 - DNA, 25 bp, Homo sapien
tgggacgtcgtcatcttcgtcgtca

SEQ ID NO: 5812646 - DNA, 25 bp, Homo sapien
ggcctgggtacgcccagaaggtcac

SEQ ID NO: 5812647 - DNA, 25 bp, Homo sapien
ctgaagctgcccagggcctgcgggt

SEQ ID NO: 5812648 - DNA, 25 bp, Homo sapien
aggccctgcactgcctgctcgtcca

SEQ ID NO: 5812649 - DNA, 25 bp, Homo sapien
gccagagcaaaagcatgtagcgggt

SEQ ID NO: 5812650 - DNA, 25 bp, Homo sapien
cgtgggtgagcacgtggtccagcgt

SEQ ID NO: 5812651 - DNA, 25 bp, Homo sapien
ggaggaacgggccagattgcacagg

SEQ ID NO: 5812652 - DNA, 25 bp, Homo sapien
tcagaaggaagcctggaagggcgcc

SEQ ID NO: 5812653 - DNA, 25 bp, Homo sapien
gggatgggagggctgtcaaagtgca

SEQ ID NO: 5812654 - DNA, 25 bp, Homo sapien
ttacagagcgcaagcaacttcacag

SEQ ID NO: 5812655 - DNA, 25 bp, Homo sapien
atagcctcgaaccttggtgatgatg

SEQ ID NO: 5812656 - DNA, 25 bp, Homo sapien
gagtcatttatcagccattgccaac

SEQ ID NO: 5812657 - DNA, 25 bp, Homo sapien
atcatccattcaaggtgcgggtcca

SEQ ID NO: 5812658 - DNA, 25 bp, Homo sapien
tgggtggagtgccggatcgtcgact

SEQ ID NO: 5812659 - DNA, 25 bp, Homo sapien
tacggtgtcacctctaaagggcatt

SEQ ID NO: 5812660 - DNA, 25 bp, Homo sapien
aggactctgctatttggagaatacg

SEQ ID NO: 5812661 - DNA, 25 bp, Homo sapien
aacctgctggagccggcctttcaga

SEQ ID NO: 5812662 - DNA, 25 bp, Homo sapien
tatgggcctcgatcagctcaggctg

SEQ ID NO: 5812663 - DNA, 25 bp, Homo sapien
ggaggccacatcggacctgggaaac

SEQ ID NO: 5812664 - DNA, 25 bp, Homo sapien
ggaatgtcagccccagtcgctgcac

SEQ ID NO: 5812665 - DNA, 25 bp, Homo sapien
tgctggtgaatctgcttcaggccct

SEQ ID NO: 5812666 - DNA, 25 bp, Homo sapien
gctcttctgcagtttatgtctcggt

SEQ ID NO: 5812667 - DNA, 25 bp, Homo sapien
tgccaaccatcaattacggtgtcac

SEQ ID NO: 5812668 - DNA, 25 bp, Homo sapien
ctggggcctgggtacgcccagaagg

SEQ ID NO: 5812669 - DNA, 25 bp, Homo sapien
atgggctccaggactggcttcagca

SEQ ID NO: 5812670 - DNA, 25 bp, Homo sapien
caaatcctcgcaatggccttcaagc

SEQ ID NO: 5812671 - DNA, 25 bp, Homo sapien
ctaccgatgcccttggctgcagacc

SEQ ID NO: 5812672 - DNA, 25 bp, Homo sapien
atgtctcgtacacctggctggccgt

SEQ ID NO: 5812673 - DNA, 25 bp, Homo sapien
ctcgtccagcacatccgcgcccacg

SEQ ID NO: 5812674 - DNA, 25 bp, Homo sapien
aggtgcactccagttcacggaggcc

SEQ ID NO: 5812675 - DNA, 25 bp, Homo sapien
gtcctcccagacccctgtataactg

SEQ ID NO: 5812676 - DNA, 25 bp, Homo sapien
ggcctttcagaaggaagcctggaag

SEQ ID NO: 5812677 - DNA, 25 bp, Homo sapien
ctggggctcctgctttcacaccaac

SEQ ID NO: 5812678 - DNA, 25 bp, Homo sapien
ggcaacttcatgaggaaataaacga

SEQ ID NO: 5812679 - DNA, 25 bp, Homo sapien
tcatcttcgtcgtcatcttcggtca

SEQ ID NO: 5812680 - DNA, 25 bp, Homo sapien
catagagctgctggtgaatctgctt

SEQ ID NO: 5812681 - DNA, 25 bp, Homo sapien
aacatccacgagtcgagacggcagc

SEQ ID NO: 5812682 - DNA, 25 bp, Homo sapien
gcacatgatgcgctcacaggtatgg

SEQ ID NO: 5812683 - DNA, 25 bp, Homo sapien
tggtccttgggattctgaattgtga

SEQ ID NO: 5812684 - DNA, 25 bp, Homo sapien
ggaaccgctccagggccacctcgcg

SEQ ID NO: 5812685 - DNA, 25 bp, Homo sapien
tcgacccatgcctcatgtgaagatc

SEQ ID NO: 5812686 - DNA, 25 bp, Homo sapien
cagatcccactccgctagagcgcga

SEQ ID NO: 5812687 - DNA, 25 bp, Homo sapien
gattttataggaagcacatttgtgt

SEQ ID NO: 5812688 - DNA, 25 bp, Homo sapien
tcccgcagaacactgcgatgcctga

SEQ ID NO: 5812689 - DNA, 25 bp, Homo sapien
acccctgtataactgacgatcatag

SEQ ID NO: 5812690 - DNA, 25 bp, Homo sapien
tcctcctcggggccacccgcggccg

SEQ ID NO: 5812691 - DNA, 25 bp, Homo sapien
tgcgggtcgctctgaatgcccttca

SEQ ID NO: 5812692 - DNA, 25 bp, Homo sapien
ggtatgggcctcgatcagctcaggc

SEQ ID NO: 5812693 - DNA, 25 bp, Homo sapien
tggggcacgtgggggatgggagggc

SEQ ID NO: 5812694 - DNA, 25 bp, Homo sapien
tgctgggccaggttgtgcagcgccc

SEQ ID NO: 5812695 - DNA, 25 bp, Homo sapien
gctctgggtggagtgccggatcgtc

SEQ ID NO: 5812696 - DNA, 25 bp, Homo sapien
acgggcctgttctcttgggctgcaa

SEQ ID NO: 5812697 - DNA, 25 bp, Homo sapien
gtccattattacgcggaaccgctcc

SEQ ID NO: 5812698 - DNA, 25 bp, Homo sapien
cagcacatccgcgcccacgacgtca

SEQ ID NO: 5812699 - DNA, 25 bp, Homo sapien
tcttgggctgcaagtttgtacaagg

SEQ ID NO: 5812700 - DNA, 25 bp, Homo sapien
cacattctcctggaaggcggcagag

SEQ ID NO: 5812701 - DNA, 25 bp, Homo sapien
cagggctctgggaagcctgccagcc

SEQ ID NO: 5812702 - DNA, 25 bp, Homo sapien
gcacggaaacggtcaatcttctcac

SEQ ID NO: 5812703 - DNA, 25 bp, Homo sapien
gatcgtcgactccgtcaagccgccc

SEQ ID NO: 5812704 - DNA, 25 bp, Homo sapien
gcaggcaccccgcttctcgtcgtag

SEQ ID NO: 5812705 - DNA, 25 bp, Homo sapien
ggttcgtcgctcagggccatctcgg

SEQ ID NO: 5812706 - DNA, 25 bp, Homo sapien
gtccttcagcccgaccagcagctgc

SEQ ID NO: 5812707 - DNA, 25 bp, Homo sapien
gatcacggcgacaacatccacgagt

SEQ ID NO: 5812708 - DNA, 25 bp, Homo sapien
ttctcctggaaggcggcagaggctg

SEQ ID NO: 5812709 - DNA, 25 bp, Homo sapien
ttcgcagatcccactccgctagagc

SEQ ID NO: 5812710 - DNA, 25 bp, Homo sapien
agtgtcatggacagcagcctcggga

SEQ ID NO: 5812711 - DNA, 25 bp, Homo sapien
agcgcacagtaaatctgggaaacat

SEQ ID NO: 5812712 - DNA, 25 bp, Homo sapien
agctgcccagggcctgcgggtcgct

SEQ ID NO: 5812713 - DNA, 25 bp, Homo sapien
gagcacggaaacggtcaatcttctc

SEQ ID NO: 5812714 - DNA, 25 bp, Homo sapien
atgtagcgggtttcccaagcttcat

SEQ ID NO: 5812715 - DNA, 25 bp, Homo sapien
acacaaggacagcagctgcatctcg

SEQ ID NO: 5812716 - DNA, 25 bp, Homo sapien
ggccatctcggcagcctggggaccg

SEQ ID NO: 5812717 - DNA, 25 bp, Homo sapien
tgcgtggcgctgaactcgggtgcct

SEQ ID NO: 5812718 - DNA, 25 bp, Homo sapien
ctgctgtccgtggtgtagtcgtcca

SEQ ID NO: 5812719 - DNA, 25 bp, Homo sapien
gaggacagtggcagcatagggcaaa

SEQ ID NO: 5812720 - DNA, 25 bp, Homo sapien
aatcaagtaggactctgctatttgg

SEQ ID NO: 5812721 - DNA, 25 bp, Homo sapien
cggcttcaggaatgtcagccccagt

SEQ ID NO: 5812722 - DNA, 25 bp, Homo sapien
ggctggggcaccagctggggcctgg

SEQ ID NO: 5812723 - DNA, 25 bp, Homo sapien
cgtggtagcggtaggtgggcagccc

SEQ ID NO: 5812724 - DNA, 25 bp, Homo sapien
ctggaagggcgcccaaggccaacga

SEQ ID NO: 5812725 - DNA, 25 bp, Homo sapien
taaagggcattttggaaagtgacaa

SEQ ID NO: 5812726 - DNA, 25 bp, Homo sapien
cacgttttccatgtttaaatatttg

SEQ ID NO: 5812727 - DNA, 25 bp, Homo sapien
ctggaggcaccactgtgcgaggctt

SEQ ID NO: 5812728 - DNA, 25 bp, Homo sapien
cacgtggtccagcgtcttcagcagc

SEQ ID NO: 5812729 - DNA, 25 bp, Homo sapien
tacctccatgctgccaccttcggct

SEQ ID NO: 5812730 - DNA, 25 bp, Homo sapien
gttcacggaggccacatcggacctg

SEQ ID NO: 5812731 - DNA, 25 bp, Homo sapien
agatctgcagaagggtcccgctgaa

SEQ ID NO: 5812732 - DNA, 25 bp, Homo sapien
gcgtgtactcaggaaagccggcaat

SEQ ID NO: 5812733 - DNA, 25 bp, Homo sapien
tgtttaaatatttgtgccagggcct

SEQ ID NO: 5812734 - DNA, 25 bp, Homo sapien
tccagttcacggaggccacatcgga

SEQ ID NO: 5812735 - DNA, 25 bp, Homo sapien
aacaacaagttcatcatccattcaa

SEQ ID NO: 5812736 - DNA, 25 bp, Homo sapien
gtcccgctgaagctgcccagggcct

SEQ ID NO: 5812737 - DNA, 25 bp, Homo sapien
gaaaaatcaaaagggatcaggcagg

SEQ ID NO: 5812738 - DNA, 25 bp, Homo sapien
gtctatcattggctgcgtgtactca

SEQ ID NO: 5812739 - DNA, 25 bp, Homo sapien
tcaccactgcaagctccgcgtccca

SEQ ID NO: 5812740 - DNA, 25 bp, Homo sapien
ctgaagcagtccagcacagacccga

SEQ ID NO: 5812741 - DNA, 25 bp, Homo sapien
aagctggagatgtctgatcttgcac

SEQ ID NO: 5812742 - DNA, 25 bp, Homo sapien
gacttgcgtggcgctgaactcgggt

SEQ ID NO: 5812743 - DNA, 25 bp, Homo sapien
accactgtgcgaggctttccacacc

SEQ ID NO: 5812744 - DNA, 25 bp, Homo sapien
cctgctgggccaggttgtgcagcgc

SEQ ID NO: 5812745 - DNA, 25 bp, Homo sapien
aggctgggtgaggaggttcccgtca

SEQ ID NO: 5812746 - DNA, 25 bp, Homo sapien
ctggacacaaggacagcagctgcat

SEQ ID NO: 5812747 - DNA, 25 bp, Homo sapien
ctgtcaaagtgcaggagcgtcagga

SEQ ID NO: 5812748 - DNA, 25 bp, Homo sapien
agcgcaggtgcagagaggaaaagct

SEQ ID NO: 5812749 - DNA, 25 bp, Homo sapien
ctcggatgaccccatcccagtggct

SEQ ID NO: 5812750 - DNA, 25 bp, Homo sapien
gggcctgttctcttgggctgcaagt

SEQ ID NO: 5812751 - DNA, 25 bp, Homo sapien
gaggttcccgtcaaggcgagaaaaa

SEQ ID NO: 5812752 - DNA, 25 bp, Homo sapien
ccagggcctgcgggtcgctctgaat

SEQ ID NO: 5812753 - DNA, 25 bp, Homo sapien
agcagctgctctatcacacgctcca

SEQ ID NO: 5812754 - DNA, 25 bp, Homo sapien
tgtgggtaactgctcttaaacctgt

SEQ ID NO: 5812755 - DNA, 25 bp, Homo sapien
ggggcctgggtacgcccagaaggtc

SEQ ID NO: 5812756 - DNA, 25 bp, Homo sapien
ttgtgcagcgccctcgcagccaact

SEQ ID NO: 5812757 - DNA, 25 bp, Homo sapien
gggaaacattctctccgcacacagc

SEQ ID NO: 5812758 - DNA, 25 bp, Homo sapien
agtcgtccatgcagcccagcagcgc

SEQ ID NO: 5812759 - DNA, 25 bp, Homo sapien
gccacgctggtacctccatgctgcc

SEQ ID NO: 5812760 - DNA, 25 bp, Homo sapien
tgcctcatgtgaagatctggactca

SEQ ID NO: 5812761 - DNA, 25 bp, Homo sapien
tgcgctgctctctcaccactgcaag

SEQ ID NO: 5812762 - DNA, 25 bp, Homo sapien
cattctcctggaaggcggcagaggc

SEQ ID NO: 5812763 - DNA, 25 bp, Homo sapien
cttgtcactgacaatcaagtaggac

SEQ ID NO: 5812764 - DNA, 25 bp, Homo sapien
tccattatggacattcgtgcttgcc

SEQ ID NO: 5812765 - DNA, 25 bp, Homo sapien
gctgcaagtttgtacaaggcgtaag

SEQ ID NO: 5812766 - DNA, 25 bp, Homo sapien
gtcaaggcgagaaaaatcaaaaggg

SEQ ID NO: 5812767 - DNA, 25 bp, Homo sapien
ccactccgctagagcgcgaaagcca

SEQ ID NO: 5812768 - DNA, 25 bp, Homo sapien
ggggtgaggtatgggctccaggact

SEQ ID NO: 5812769 - DNA, 25 bp, Homo sapien
gcggaaccgctccagggccacctcg

SEQ ID NO: 5812770 - DNA, 25 bp, Homo sapien
accccgcttctcgtcgtaggtcagc

SEQ ID NO: 5812771 - DNA, 25 bp, Homo sapien
acagcagcctcgggaagacttgcgt

SEQ ID NO: 5812772 - DNA, 25 bp, Homo sapien
agcagtccagcacagacccgaccac

SEQ ID NO: 5812773 - DNA, 25 bp, Homo sapien
atggtaaccaggtggtctatcattg

SEQ ID NO: 5812774 - DNA, 25 bp, Homo sapien
acgtcgccggggaactgcaccatcc

SEQ ID NO: 5812775 - DNA, 25 bp, Homo sapien
acttcatgaggaaataaacgaagaa

SEQ ID NO: 5812776 - DNA, 25 bp, Homo sapien
tgcatctcgggccttgtcactgaca

SEQ ID NO: 5812777 - DNA, 25 bp, Homo sapien
ttcaggaatgtcagccccagtcgct

SEQ ID NO: 5812778 - DNA, 25 bp, Homo sapien
gctgcatctcgggccttgtcactga

SEQ ID NO: 5812779 - DNA, 25 bp, Homo sapien
cgcacagtaaatctgggaaacattc

SEQ ID NO: 5812780 - DNA, 25 bp, Homo sapien
actcaggaaagccggcaataaacac

SEQ ID NO: 5812781 - DNA, 25 bp, Homo sapien
tcggacctgggaaacagcttttcca

SEQ ID NO: 5812782 - DNA, 25 bp, Homo sapien
tagtcagctgtggtcaaaatatcaa

SEQ ID NO: 5812783 - DNA, 25 bp, Homo sapien
tcacccccagcttccgcagcagggt

SEQ ID NO: 5812784 - DNA, 25 bp, Homo sapien
tccaggactggcttcagcaggcacc

SEQ ID NO: 5812785 - DNA, 25 bp, Homo sapien
gcagggtctggttgctctcagggag

SEQ ID NO: 5812786 - DNA, 25 bp, Homo sapien
gtccagcgtcttcagcagcggcacg

SEQ ID NO: 5812787 - DNA, 25 bp, Homo sapien
tccgcgccgccgccgtgcacctccc

SEQ ID NO: 5812788 - DNA, 25 bp, Homo sapien
ctcgggtgcctgctgggccaggttg

SEQ ID NO: 5812789 - DNA, 25 bp, Homo sapien
acggaaacggtcaatcttctcactg

SEQ ID NO: 5812790 - DNA, 25 bp, Homo sapien
gtaaatctgggaaacattctctccg

SEQ ID NO: 5812791 - DNA, 25 bp, Homo sapien
gggagtctgcagccatcgaggcacc

SEQ ID NO: 5812792 - DNA, 25 bp, Homo sapien
cacctcccgcaggcggcccagcagc

SEQ ID NO: 5812793 - DNA, 25 bp, Homo sapien
cctgtgagaacctgctggagccggc

SEQ ID NO: 5812794 - DNA, 25 bp, Homo sapien
ttgtcagtctcctggaaactgaagc

SEQ ID NO: 5812795 - DNA, 25 bp, Homo sapien
cagtaaatctgggaaacattctctc

SEQ ID NO: 5812796 - DNA, 25 bp, Homo sapien
cagcaaaacttacgtcctcggggga

SEQ ID NO: 5812797 - DNA, 25 bp, Homo sapien
gtactcaaagaggctctgggtggag

SEQ ID NO: 5812798 - DNA, 25 bp, Homo sapien
gccgcccagggacacgactagcccc

SEQ ID NO: 5812799 - DNA, 25 bp, Homo sapien
acatcctcaccaggcaggggtgagg

SEQ ID NO: 5812800 - DNA, 25 bp, Homo sapien
agcagccgtgggtgagcacgtggtc

SEQ ID NO: 5812801 - DNA, 25 bp, Homo sapien
tcactgagcacagtcaccacctcgt

SEQ ID NO: 5812802 - DNA, 25 bp, Homo sapien
ggcaaatcctcgcaatggccttcaa

SEQ ID NO: 5812803 - DNA, 25 bp, Homo sapien
catccacgagtcgagacggcagcaa

SEQ ID NO: 5812804 - DNA, 25 bp, Homo sapien
tgtcagccccagtcgctgcacaagc

SEQ ID NO: 5812805 - DNA, 25 bp, Homo sapien
ttttttcttggtacatgattttata

SEQ ID NO: 5812806 - DNA, 25 bp, Homo sapien
tcgtccatgcagcccagcagcgcac

SEQ ID NO: 5812807 - DNA, 25 bp, Homo sapien
taggtgagcaatgtctcgtacacct

SEQ ID NO: 5812808 - DNA, 25 bp, Homo sapien
ataggaagcacatttgtgttcaagt

SEQ ID NO: 5812809 - DNA, 25 bp, Homo sapien
ctcgtacacctggctggccgtggtc

SEQ ID NO: 5812810 - DNA, 25 bp, Homo sapien
gcgccaaaggccagtgtctcgtcct

SEQ ID NO: 5812811 - DNA, 25 bp, Homo sapien
tattacgcggaaccgctccagggcc

SEQ ID NO: 5812812 - DNA, 25 bp, Homo sapien
tgcccttcatgtactcaaagaggct

SEQ ID NO: 5812813 - DNA, 25 bp, Homo sapien
ggcttcagctcctgaggctcatagg

SEQ ID NO: 5812814 - DNA, 25 bp, Homo sapien
tctgggaagcctgccagccatccta

SEQ ID NO: 5812815 - DNA, 25 bp, Homo sapien
cttcggtcaggatgagtggcttctg

SEQ ID NO: 5812816 - DNA, 25 bp, Homo sapien
gagtgccggatcgtcgactccgtca

SEQ ID NO: 5812817 - DNA, 25 bp, Homo sapien
tcgtgcttgcccaggctgggtgagg

SEQ ID NO: 5812818 - DNA, 25 bp, Homo sapien
ggcgtccaccccaagtcaccagagc

SEQ ID NO: 5812819 - DNA, 25 bp, Homo sapien
ccaacagtctggcaaatcctcgcaa

SEQ ID NO: 5812820 - DNA, 25 bp, Homo sapien
caagcaacttcacagcaaaggggtg

SEQ ID NO: 5812821 - DNA, 25 bp, Homo sapien
gcacaggctccagtccaggaactca

SEQ ID NO: 5812822 - DNA, 25 bp, Homo sapien
tcccagtggctgatcttcatggtaa

SEQ ID NO: 5812823 - DNA, 25 bp, Homo sapien
ggtcaaacaccgcagcaatcaccag

SEQ ID NO: 5812824 - DNA, 25 bp, Homo sapien
cccagcagcgcccgggtctccgcgc

SEQ ID NO: 5812825 - DNA, 25 bp, Homo sapien
ccgtggtgaagatgtcgaagcagcc

SEQ ID NO: 5812826 - DNA, 25 bp, Homo sapien
aggccacatcggacctgggaaacag

SEQ ID NO: 5812827 - DNA, 25 bp, Homo sapien
ctgcagccatcgaggcacctgagga

SEQ ID NO: 5812828 - DNA, 25 bp, Homo sapien
tgccagcctccaagggccagcgcta

SEQ ID NO: 5812829 - DNA, 25 bp, Homo sapien
agggaagctggagatgtctgatctt

SEQ ID NO: 5812830 - DNA, 25 bp, Homo sapien
ttttcttggtacatgattttatagg

SEQ ID NO: 5812831 - DNA, 25 bp, Homo sapien
catgtttaaatatttgtgccagggc

SEQ ID NO: 5812832 - DNA, 25 bp, Homo sapien
gctgaactcgggtgcctgctgggcc

SEQ ID NO: 5812833 - DNA, 25 bp, Homo sapien
tggtgtagtcgtccatgcagcccag

SEQ ID NO: 5812834 - DNA, 25 bp, Homo sapien
acagtcttcacgttttccatgttta

SEQ ID NO: 5812835 - DNA, 25 bp, Homo sapien
ttgcacaggctccagtccaggaact

SEQ ID NO: 5812836 - DNA, 25 bp, Homo sapien
agggctgtcaaagtgcaggagcgtc

SEQ ID NO: 5812837 - DNA, 25 bp, Homo sapien
ttcacaccaacagtctggcaaatcc

SEQ ID NO: 5812838 - DNA, 25 bp, Homo sapien
tccagggccacctcgcgctccgcgc

SEQ ID NO: 5812839 - DNA, 25 bp, Homo sapien
gaaacagcttttccagttctcctcg

SEQ ID NO: 5812840 - DNA, 25 bp, Homo sapien
acttttctattaaaacacacactgc

SEQ ID NO: 5812841 - DNA, 25 bp, Homo sapien
cactggcctgctgggccacacagca

SEQ ID NO: 5812842 - DNA, 25 bp, Homo sapien
ctctgctatttggagaatacggtcc

SEQ ID NO: 5812843 - DNA, 25 bp, Homo sapien
ctctcctggactcagcaaaacttac

SEQ ID NO: 5812844 - DNA, 25 bp, Homo sapien
cacagcacatgatgcgctcacaggt

SEQ ID NO: 5812845 - DNA, 25 bp, Homo sapien
tgaccccatcccagtggctgatctt

SEQ ID NO: 5812846 - DNA, 25 bp, Homo sapien
cgctacccttcaacagctggaggca

SEQ ID NO: 5812847 - DNA, 25 bp, Homo sapien
gtgcccacgtcccctctgctgtccg

SEQ ID NO: 5812848 - DNA, 25 bp, Homo sapien
tccgtggtgtagtcgtccatgcagc

SEQ ID NO: 5812849 - DNA, 25 bp, Homo sapien
tgtctgatcttgcactatgtccaac

SEQ ID NO: 5812850 - DNA, 25 bp, Homo sapien
gcccaggctgggtgaggaggttccc

SEQ ID NO: 5812851 - DNA, 25 bp, Homo sapien
accttggtgatgatgtaaagaaatt

SEQ ID NO: 5812852 - DNA, 25 bp, Homo sapien
cgtgcacctcccgcaggcggcccag

SEQ ID NO: 5812853 - DNA, 25 bp, Homo sapien
gggcgcccaaggccaacgagaagcc

SEQ ID NO: 5812854 - DNA, 25 bp, Homo sapien
cctctaaagggcattttggaaagtg

SEQ ID NO: 5812855 - DNA, 25 bp, Homo sapien
aaacaccgcagcaatcaccagtgca

SEQ ID NO: 5812856 - DNA, 25 bp, Homo sapien
tcagctcaggctggctccgagccag

SEQ ID NO: 5812857 - DNA, 25 bp, Homo sapien
gcgaaggcccagcacacgtagcagg

SEQ ID NO: 5812858 - DNA, 25 bp, Homo sapien
actcaaagaggctctgggtggagtg

SEQ ID NO: 5812859 - DNA, 25 bp, Homo sapien
tctgaatgcccttcatgtactcaaa

SEQ ID NO: 5812860 - DNA, 25 bp, Homo sapien
ggcagaggctgctcttctgcagttt

SEQ ID NO: 5812861 - DNA, 25 bp, Homo sapien
agcgccctcgcagccaactctcgga

SEQ ID NO: 5812862 - DNA, 25 bp, Homo sapien
attcttgatttctttcttacagagc

SEQ ID NO: 5812863 - DNA, 25 bp, Homo sapien
gcttgcccaggctgggtgaggaggt

SEQ ID NO: 5812864 - DNA, 25 bp, Homo sapien
caagtttgtacaaggcgtaagcaac

SEQ ID NO: 5812865 - DNA, 25 bp, Homo sapien
caagccgtctctcctggactcagca

SEQ ID NO: 5812866 - DNA, 25 bp, Homo sapien
tcgagattgcagtcacaaagggctt

SEQ ID NO: 5812867 - DNA, 25 bp, Homo sapien
tttgcagccaaagatcggcagccac

SEQ ID NO: 5812868 - DNA, 25 bp, Homo sapien
tttggagaatacggtccattatgga

SEQ ID NO: 5812869 - DNA, 25 bp, Homo sapien
cgctgcaggcaccccgcttctcgtc

SEQ ID NO: 5812870 - DNA, 25 bp, Homo sapien
ctccctcaggaacaagacatcctca

SEQ ID NO: 5812871 - DNA, 25 bp, Homo sapien
tgggtgatgcgtgggaaggcctggg

SEQ ID NO: 5812872 - DNA, 25 bp, Homo sapien
taactgctcttaaacctgtgagaac

SEQ ID NO: 5812873 - DNA, 25 bp, Homo sapien
gccacacagcacatgatgcgctcac

SEQ ID NO: 5812874 - DNA, 25 bp, Homo sapien
gccacagcgagtcatttatcagcca

SEQ ID NO: 5812875 - DNA, 25 bp, Homo sapien
cccacgctgcaggcaccccgcttct

SEQ ID NO: 5812876 - DNA, 25 bp, Homo sapien
ctggtgaatctgcttcaggccctgc

SEQ ID NO: 5812877 - DNA, 25 bp, Homo sapien
ggacgtcgtcatcttcgtcgtcatc

SEQ ID NO: 5812878 - DNA, 25 bp, Homo sapien
tcgcgctccgcgccgccgccgtgca

SEQ ID NO: 5812879 - DNA, 25 bp, Homo sapien
ctgcagaagggtcccgctgaagctg

SEQ ID NO: 5812880 - DNA, 25 bp, Homo sapien
tgaggaggttcccgtcaaggcgaga

SEQ ID NO: 5812881 - DNA, 25 bp, Homo sapien
ccagctggggcctgggtacgcccag

SEQ ID NO: 5812882 - DNA, 25 bp, Homo sapien
tgatcttcatggtaaccaggtggtc

SEQ ID NO: 5812883 - DNA, 25 bp, Homo sapien
gacgtggtagcggtaggtgggcagc

SEQ ID NO: 5812884 - DNA, 25 bp, Homo sapien
tgaggctcataggcacgcgcgaagg

SEQ ID NO: 5812885 - DNA, 25 bp, Homo sapien
gcagcatagggcaaacagtcttcac

SEQ ID NO: 5812886 - DNA, 25 bp, Homo sapien
aactgacgatcatagagctgctggt

SEQ ID NO: 5812887 - DNA, 25 bp, Homo sapien
tcactgtaggtgagcaatgtctcgt

SEQ ID NO: 5812888 - DNA, 25 bp, Homo sapien
ttctcactggcctgctgggccacac

SEQ ID NO: 5812889 - DNA, 25 bp, Homo sapien
ccagggcctgcagcgtcccatccat

SEQ ID NO: 5812890 - DNA, 25 bp, Homo sapien
ctggatatcttttgaattcttgatt

SEQ ID NO: 5812891 - DNA, 25 bp, Homo sapien
tgctggagccggcctttcagaagga

SEQ ID NO: 5812892 - DNA, 25 bp, Homo sapien
tttatgtctcggtcaaacaccgcag

SEQ ID NO: 5812893 - DNA, 25 bp, Homo sapien
gccacgccttgtcagtctcctggaa

SEQ ID NO: 5812894 - DNA, 25 bp, Homo sapien
ctttgcttgacatcaggacgtgtga

SEQ ID NO: 5812895 - DNA, 25 bp, Homo sapien
agtttgtacaaggcgtaagcaactt

SEQ ID NO: 5812896 - DNA, 25 bp, Homo sapien
aggaaagccggcaataaacacactt

SEQ ID NO: 5812897 - DNA, 25 bp, Homo sapien
aataaacgaagaaatgttttatagc

SEQ ID NO: 5812898 - DNA, 25 bp, Homo sapien
cctcggtggggcacgtgggggatgg

SEQ ID NO: 5812899 - DNA, 25 bp, Homo sapien
agcacgtggtccagcgtcttcagca

SEQ ID NO: 5812900 - DNA, 25 bp, Homo sapien
ttggatctgttaccgacggcaaaat

SEQ ID NO: 5812901 - DNA, 25 bp, Homo sapien
tctgccagcgccagacatcccccat

SEQ ID NO: 5812902 - DNA, 25 bp, Homo sapien
agcgcaagcaacttcacagcaaagg

SEQ ID NO: 5812903 - DNA, 25 bp, Homo sapien
acaggctctacatcggcaacttcat

SEQ ID NO: 5812904 - DNA, 25 bp, Homo sapien
cgatcatagagctgctggtgaatct

SEQ ID NO: 5812905 - DNA, 25 bp, Homo sapien
tcaaagatctgcagaagggtcccgc

SEQ ID NO: 5812906 - DNA, 25 bp, Homo sapien
cgcaatggccttcaagccgtctctc

SEQ ID NO: 5812907 - DNA, 25 bp, Homo sapien
gtgcgaggctttccacaccggcctc

SEQ ID NO: 5812908 - DNA, 25 bp, Homo sapien
gaaggcggcagaggctgctcttctg

SEQ ID NO: 5812909 - DNA, 25 bp, Homo sapien
ccgacggcaaaatagtcagctgtgg

SEQ ID NO: 5812910 - DNA, 25 bp, Homo sapien
ggggcaccagctggggcctgggtac

SEQ ID NO: 5812911 - DNA, 25 bp, Homo sapien
tcgtcgtcatcttcggtcaggatga

SEQ ID NO: 5812912 - DNA, 25 bp, Homo sapien
taaccaggaaacagttggatctgtt

SEQ ID NO: 5812913 - DNA, 25 bp, Homo sapien
gaaggcccagcacacgtagcaggcg

SEQ ID NO: 5812914 - DNA, 25 bp, Homo sapien
tctccccacattctcctggaaggcg

SEQ ID NO: 5812915 - DNA, 25 bp, Homo sapien
aagtcaccagagcgcaggtgcagag

SEQ ID NO: 5812916 - DNA, 25 bp, Homo sapien
aagaaatgttttatagcctcgaacc

SEQ ID NO: 5812917 - DNA, 25 bp, Homo sapien
gagggcctgcctcctcacgtcgccg

SEQ ID NO: 5812918 - DNA, 25 bp, Homo sapien
tcaggaaagccggcaataaacacac

SEQ ID NO: 5812919 - DNA, 25 bp, Homo sapien
gatgaccccctgcatggtctggaag

SEQ ID NO: 5812920 - DNA, 25 bp, Homo sapien
gcaggcggcccagcagcgcccgggt

SEQ ID NO: 5812921 - DNA, 25 bp, Homo sapien
gggcaaacagtcttcacgttttcca

SEQ ID NO: 5812922 - DNA, 25 bp, Homo sapien
ggagccggcctttcagaaggaagcc

SEQ ID NO: 5812923 - DNA, 25 bp, Homo sapien
cgggtctccgcgctctcgccgaacg

SEQ ID NO: 5812924 - DNA, 25 bp, Homo sapien
ttctcctcggtggggcacgtggggg

SEQ ID NO: 5812925 - DNA, 25 bp, Homo sapien
ggaaacggtggcagaggagcagaca

SEQ ID NO: 5812926 - DNA, 25 bp, Homo sapien
gaattgtgaccaaatctaaaacagg

SEQ ID NO: 5812927 - DNA, 25 bp, Homo sapien
cgtcccacgcagtgtcactgagcac

SEQ ID NO: 5812928 - DNA, 25 bp, Homo sapien
tgacaggagcttctggatatctttt

SEQ ID NO: 5812929 - DNA, 25 bp, Homo sapien
tgtctcgtcctccgcctcctcctcg

SEQ ID NO: 5812930 - DNA, 25 bp, Homo sapien
gcctcctcacgtcgccggggaactg

SEQ ID NO: 5812931 - DNA, 25 bp, Homo sapien
tgatgtaaagaaatttaaaagccag

SEQ ID NO: 5812932 - DNA, 25 bp, Homo sapien
gtcgccggggaactgcaccatcccg

SEQ ID NO: 5812933 - DNA, 25 bp, Homo sapien
attgccaaccatcaattacggtgtc

SEQ ID NO: 5812934 - DNA, 25 bp, Homo sapien
tcttcacgttttccatgtttaaata

SEQ ID NO: 5812935 - DNA, 25 bp, Homo sapien
gggaaggtgcactccagttcacgga

SEQ ID NO: 5812936 - DNA, 25 bp, Homo sapien
actggcttcagcaggcaccaggctg

SEQ ID NO: 5812937 - DNA, 25 bp, Homo sapien
ggcctgctgggccacacagcacatg

SEQ ID NO: 5812938 - DNA, 25 bp, Homo sapien
tcggcagccacgctggtacctccat

SEQ ID NO: 5812939 - DNA, 25 bp, Homo sapien
atacggtccattatggacattcgtg

SEQ ID NO: 5812940 - DNA, 25 bp, Homo sapien
tgcagatttgcagccaaagatcggc

SEQ ID NO: 5812941 - DNA, 25 bp, Homo sapien
ggaacaagacatcctcaccaggcag

SEQ ID NO: 5812942 - DNA, 25 bp, Homo sapien
tcagggccatctcggcagcctgggg

SEQ ID NO: 5812943 - DNA, 25 bp, Homo sapien
aactgaagcagtccagcacagaccc

SEQ ID NO: 5812944 - DNA, 25 bp, Homo sapien
gcgtgagcacggaaacggtcaatct

SEQ ID NO: 5812945 - DNA, 25 bp, Homo sapien
tttcagaaggaagcctggaagggcg

SEQ ID NO: 5812946 - DNA, 25 bp, Homo sapien
attattacgcggaaccgctccaggg

SEQ ID NO: 5812947 - DNA, 25 bp, Homo sapien
tgaatctgcttcaggccctgcactg

SEQ ID NO: 5812948 - DNA, 25 bp, Homo sapien
cgccctcgcagccaactctcggatg

SEQ ID NO: 5812949 - DNA, 25 bp, Homo sapien
aggcgtaagcaacttctgcgcaggc

SEQ ID NO: 5812950 - DNA, 25 bp, Homo sapien
cacgctggcggcgtgagcacggaaa

SEQ ID NO: 5812951 - DNA, 25 bp, Homo sapien
agcatagggcaaacagtcttcacgt

SEQ ID NO: 5812952 - DNA, 25 bp, Homo sapien
ccagatggtccgtgacgggcctgtt

SEQ ID NO: 5812953 - DNA, 25 bp, Homo sapien
cgggtttcccaagcttcatggtcct

SEQ ID NO: 5812954 - DNA, 25 bp, Homo sapien
agcgcccgggtctccgcgctctcgc

SEQ ID NO: 5812955 - DNA, 25 bp, Homo sapien
acgcagtgtcactgagcacagtcac

SEQ ID NO: 5812956 - DNA, 25 bp, Homo sapien
agagcgcaagcaacttcacagcaaa

SEQ ID NO: 5812957 - DNA, 25 bp, Homo sapien
gcctcacgtgttcgcagatcccact

SEQ ID NO: 5812958 - DNA, 25 bp, Homo sapien
cgtccaccccaagtcaccagagcgc

SEQ ID NO: 5812959 - DNA, 25 bp, Homo sapien
aaacagtcttcacgttttccatgtt

SEQ ID NO: 5812960 - DNA, 25 bp, Homo sapien
tggtgcccacgctgcaggcaccccg

SEQ ID NO: 5812961 - DNA, 25 bp, Homo sapien
aacattctctccgcacacagcttcg

SEQ ID NO: 5812962 - DNA, 25 bp, Homo sapien
cagttcacggaggccacatcggacc

SEQ ID NO: 5812963 - DNA, 25 bp, Homo sapien
ccagcacacgtagcaggcggcgtcc

SEQ ID NO: 5812964 - DNA, 25 bp, Homo sapien
gcagcaacaggcctctcctgcccag

SEQ ID NO: 5812965 - DNA, 25 bp, Homo sapien
gtagtcgtccatgcagcccagcagc

SEQ ID NO: 5812966 - DNA, 25 bp, Homo sapien
ccaacgagaagccacagcgagtcat

SEQ ID NO: 5812967 - DNA, 25 bp, Homo sapien
gtatgggctccaggactggcttcag

SEQ ID NO: 5812968 - DNA, 25 bp, Homo sapien
agaagtgtcagatccatcagactgg

SEQ ID NO: 5812969 - DNA, 25 bp, Homo sapien
agcaatgtctcgtacacctggctgg

SEQ ID NO: 5812970 - DNA, 25 bp, Homo sapien
gttgcgctgctctctcaccactgca

SEQ ID NO: 5812971 - DNA, 25 bp, Homo sapien
ttcagcagcggcacggacaccctct

SEQ ID NO: 5812972 - DNA, 25 bp, Homo sapien
tccagtccaggaactcagccatctt

SEQ ID NO: 5812973 - DNA, 25 bp, Homo sapien
gtcgtcatcttcggtcaggatgagt

SEQ ID NO: 5812974 - DNA, 25 bp, Homo sapien
aggtatgggctccaggactggcttc

SEQ ID NO: 5812975 - DNA, 25 bp, Homo sapien
cgctgctctctcaccactgcaagct

SEQ ID NO: 5812976 - DNA, 25 bp, Homo sapien
ctgggccaggttgtgcagcgccctc

SEQ ID NO: 5812977 - DNA, 25 bp, Homo sapien
actccgctagagcgcgaaagccagg

SEQ ID NO: 5812978 - DNA, 25 bp, Homo sapien
cagcgtcccatccatggtgatgacc

SEQ ID NO: 5812979 - DNA, 25 bp, Homo sapien
ttgcttgacatcaggacgtgtgata

SEQ ID NO: 5812980 - DNA, 25 bp, Homo sapien
gtcgtcatcttcgtcgtcatcttcg

SEQ ID NO: 5812981 - DNA, 25 bp, Homo sapien
gtccagatggtccgtgacgggcctg

SEQ ID NO: 5812982 - DNA, 25 bp, Homo sapien
ccctgtataactgacgatcatagag

SEQ ID NO: 5812983 - DNA, 25 bp, Homo sapien
aagggatcaggcaggtcacggagag

SEQ ID NO: 5812984 - DNA, 25 bp, Homo sapien
gcattttggaaagtgacaacttttc

SEQ ID NO: 5812985 - DNA, 25 bp, Homo sapien
cctcctccgtggtgaagatgtcgaa

SEQ ID NO: 5812986 - DNA, 25 bp, Homo sapien
tcagactggtcatggcggccttgcg

SEQ ID NO: 5812987 - DNA, 25 bp, Homo sapien
tctccgcgctctcgccgaacgcttc

SEQ ID NO: 5812988 - DNA, 25 bp, Homo sapien
ctgcaagctccgcgtcccacgcagt

SEQ ID NO: 5812989 - DNA, 25 bp, Homo sapien
acagcttcgtctggggctcctgctt

SEQ ID NO: 5812990 - DNA, 25 bp, Homo sapien
tcactctgaccctgagtgaggagct

SEQ ID NO: 5812991 - DNA, 25 bp, Homo sapien
ccagcgctacccttcaacagctgga

SEQ ID NO: 5812992 - DNA, 25 bp, Homo sapien
accctgagtgaggagctgcagattt

SEQ ID NO: 5812993 - DNA, 25 bp, Homo sapien
ggccaacgagaagccacagcgagtc

SEQ ID NO: 5812994 - DNA, 25 bp, Homo sapien
ttataggaagcacatttgtgttcaa

SEQ ID NO: 5812995 - DNA, 25 bp, Homo sapien
ccacgcagtgtcactgagcacagtc

SEQ ID NO: 5812996 - DNA, 25 bp, Homo sapien
tcttctgcagtttatgtctcggtca

SEQ ID NO: 5812997 - DNA, 25 bp, Homo sapien
agaacactgcgatgcctgacaggag

SEQ ID NO: 5812998 - DNA, 25 bp, Homo sapien
tgtgagaacctgctggagccggcct

SEQ ID NO: 5812999 - DNA, 25 bp, Homo sapien
gagaatacggtccattatggacatt

SEQ ID NO: 5813000 - DNA, 25 bp, Homo sapien
aaaatcaaaagggatcaggcaggtc

SEQ ID NO: 5813001 - DNA, 25 bp, Homo sapien
cgtgacgggcctgttctcttgggct

SEQ ID NO: 5813002 - DNA, 25 bp, Homo sapien
agtggcagcatagggcaaacagtct

SEQ ID NO: 5813003 - DNA, 25 bp, Homo sapien
ggacagcagctgcatctcgggcctt

SEQ ID NO: 5813004 - DNA, 25 bp, Homo sapien
ctggtacctccatgctgccaccttc

SEQ ID NO: 5813005 - DNA, 25 bp, Homo sapien
actggtcatggcggccttgcggacc

SEQ ID NO: 5813006 - DNA, 25 bp, Homo sapien
gcaaaagcatgtagcgggtttccca

SEQ ID NO: 5813007 - DNA, 25 bp, Homo sapien
tctcgtcctccgcctcctcctcggg

SEQ ID NO: 5813008 - DNA, 25 bp, Homo sapien
tacatcggcaacttcatgaggaaat

SEQ ID NO: 5813009 - DNA, 25 bp, Homo sapien
actcagtgtcatggacagcagcctc

SEQ ID NO: 5813010 - DNA, 25 bp, Homo sapien
gctccgcgtcccacgcagtgtcact

SEQ ID NO: 5813011 - DNA, 25 bp, Homo sapien
atgtaaagaaatttaaaagccagat

SEQ ID NO: 5813012 - DNA, 25 bp, Homo sapien
gcttccagcgccgcgccaaaggcca

SEQ ID NO: 5813013 - DNA, 25 bp, Homo sapien
cagatttgcagccaaagatcggcag

SEQ ID NO: 5813014 - DNA, 25 bp, Homo sapien
cttaaacctgtgagaacctgctgga

SEQ ID NO: 5813015 - DNA, 25 bp, Homo sapien
ccgaccagcagctgctctatcacac

SEQ ID NO: 5813016 - DNA, 25 bp, Homo sapien
gtcacggagagccagagcaaaagca

SEQ ID NO: 5813017 - DNA, 25 bp, Homo sapien
cgcgtcccacgcagtgtcactgagc

SEQ ID NO: 5813018 - DNA, 25 bp, Homo sapien
gcctgttctcttgggctgcaagttt

SEQ ID NO: 5813019 - DNA, 25 bp, Homo sapien
ggaaacagttggatctgttaccgac

SEQ ID NO: 5813020 - DNA, 25 bp, Homo sapien
cccaaggagctgggtgatgcgtggg

SEQ ID NO: 5813021 - DNA, 25 bp, Homo sapien
cactatgtccaacaacaagttcatc

SEQ ID NO: 5813022 - DNA, 25 bp, Homo sapien
cctcgaaccttggtgatgatgtaaa

SEQ ID NO: 5813023 - DNA, 25 bp, Homo sapien
ccacccgcggccggttcgtcgctca

SEQ ID NO: 5813024 - DNA, 25 bp, Homo sapien
aggctctacatcggcaacttcatga

SEQ ID NO: 5813025 - DNA, 25 bp, Homo sapien
tgaggaaataaacgaagaaatgttt

SEQ ID NO: 5813026 - DNA, 25 bp, Homo sapien
tggagtgccggatcgtcgactccgt

SEQ ID NO: 5813027 - DNA, 25 bp, Homo sapien
cgtcccctctgctgtccgtggtgta

SEQ ID NO: 5813028 - DNA, 25 bp, Homo sapien
gtgaagatctggactcagtgtcatg

SEQ ID NO: 5813029 - DNA, 25 bp, Homo sapien
tggtacatgattttataggaagcac

SEQ ID NO: 5813030 - DNA, 25 bp, Homo sapien
tgcctgctgggccaggttgtgcagc

SEQ ID NO: 5813031 - DNA, 25 bp, Homo sapien
accctctcattcagaaggttgtcct

SEQ ID NO: 5813032 - DNA, 25 bp, Homo sapien
cagccaaagatcggcagccacgctg

SEQ ID NO: 5813033 - DNA, 25 bp, Homo sapien
ttttctattaaaacacacactgctt

SEQ ID NO: 5813034 - DNA, 25 bp, Homo sapien
cacaggtatgggcctcgatcagctc

SEQ ID NO: 5813035 - DNA, 25 bp, Homo sapien
ctggcggcgtgagcacggaaacggt

SEQ ID NO: 5813036 - DNA, 25 bp, Homo sapien
gcactccagttcacggaggccacat

SEQ ID NO: 5813037 - DNA, 25 bp, Homo sapien
cctggaaggcggcagaggctgctct

SEQ ID NO: 5813038 - DNA, 25 bp, Homo sapien
aaggccagtgtctcgtcctccgcct

SEQ ID NO: 5813039 - DNA, 25 bp, Homo sapien
gcccagggcctgcgggtcgctctga

SEQ ID NO: 5813040 - DNA, 25 bp, Homo sapien
ctggagccggcctttcagaaggaag

SEQ ID NO: 5813041 - DNA, 25 bp, Homo sapien
cctgagtgaggagctgcagatttgc

SEQ ID NO: 5813042 - DNA, 25 bp, Homo sapien
tcagaaggttgtcctcaaagatctg

SEQ ID NO: 5813043 - DNA, 25 bp, Homo sapien
cagatccatcagactggtcatggcg

SEQ ID NO: 5813044 - DNA, 25 bp, Homo sapien
gtgcactccagttcacggaggccac

SEQ ID NO: 5813045 - DNA, 25 bp, Homo sapien
gcagtgtcactgagcacagtcacca

SEQ ID NO: 5813046 - DNA, 25 bp, Homo sapien
tatttggagaatacggtccattatg

SEQ ID NO: 5813047 - DNA, 25 bp, Homo sapien
gtcaggaacacgctggcggcgtgag

SEQ ID NO: 5813048 - DNA, 25 bp, Homo sapien
ccaaggccaacgagaagccacagcg

SEQ ID NO: 5813049 - DNA, 25 bp, Homo sapien
tcggtggggcacgtgggggatggga

SEQ ID NO: 5813050 - DNA, 25 bp, Homo sapien
cagcagcggcacggacaccctctca

SEQ ID NO: 5813051 - DNA, 25 bp, Homo sapien
ccatcttgctttgcttgacatcagg

SEQ ID NO: 5813052 - DNA, 25 bp, Homo sapien
aacgagaagccacagcgagtcattt

SEQ ID NO: 5813053 - DNA, 25 bp, Homo sapien
ccattgccaaccatcaattacggtg

SEQ ID NO: 5813054 - DNA, 25 bp, Homo sapien
cagggccacctcgcgctccgcgccg

SEQ ID NO: 5813055 - DNA, 25 bp, Homo sapien
cacagacggttgcgctgctctctca

SEQ ID NO: 5813056 - DNA, 25 bp, Homo sapien
catcagactggtcatggcggccttg

SEQ ID NO: 5813057 - DNA, 25 bp, Homo sapien
cgctagagcgcgaaagccagggatg

SEQ ID NO: 5813058 - DNA, 25 bp, Homo sapien
tgcagagaggaaaagctgtcagcta

SEQ ID NO: 5813059 - DNA, 25 bp, Homo sapien
gtgcactcgagattgcagtcacaaa

SEQ ID NO: 5813060 - DNA, 25 bp, Homo sapien
ggaagacttgcgtggcgctgaactc

SEQ ID NO: 5813061 - DNA, 25 bp, Homo sapien
gcaggagcgtcaggaacacgctggc

SEQ ID NO: 5813062 - DNA, 25 bp, Homo sapien
tcaaaagggatcaggcaggtcacgg

SEQ ID NO: 5813063 - DNA, 25 bp, Homo sapien
cgactagccccagcaggacgtggta

SEQ ID NO: 5813064 - DNA, 25 bp, Homo sapien
cgagtcgagacggcagcaacaggcc

SEQ ID NO: 5813065 - DNA, 25 bp, Homo sapien
gcttcatggtccttgggattctgaa

SEQ ID NO: 5813066 - DNA, 25 bp, Homo sapien
ttgatttctttcttacagagcgcaa

SEQ ID NO: 5813067 - DNA, 25 bp, Homo sapien
cgtgtgataaatctggacacaagga

SEQ ID NO: 5813068 - DNA, 25 bp, Homo sapien
gtctggaaggaggaacgggccagat

SEQ ID NO: 5813069 - DNA, 25 bp, Homo sapien
tggtgatgaccccctgcatggtctg

SEQ ID NO: 5813070 - DNA, 25 bp, Homo sapien
gcgagaaaaatcaaaagggatcagg

SEQ ID NO: 5813071 - DNA, 25 bp, Homo sapien
tccctgacgttggtgcccacgctgc

SEQ ID NO: 5813072 - DNA, 25 bp, Homo sapien
ggggctcctgctttcacaccaacag

SEQ ID NO: 5813073 - DNA, 25 bp, Homo sapien
ttgggctgcaagtttgtacaaggcg

SEQ ID NO: 5813074 - DNA, 25 bp, Homo sapien
agcggcacggacaccctctcattca

SEQ ID NO: 5813075 - DNA, 25 bp, Homo sapien
agaaggttgtcctcaaagatctgca

SEQ ID NO: 5813076 - DNA, 25 bp, Homo sapien
ttgtccattattacgcggaaccgct

SEQ ID NO: 5813077 - DNA, 25 bp, Homo sapien
cctcacgtcgccggggaactgcacc

SEQ ID NO: 5813078 - DNA, 25 bp, Homo sapien
acagagcgcaagcaacttcacagca

SEQ ID NO: 5813079 - DNA, 25 bp, Homo sapien
catcccagtggctgatcttcatggt

SEQ ID NO: 5813080 - DNA, 25 bp, Homo sapien
tcaggccctgcactgcctgctcgtc

SEQ ID NO: 5813081 - DNA, 25 bp, Homo sapien
tgggagggctgtcaaagtgcaggag

SEQ ID NO: 5813082 - DNA, 25 bp, Homo sapien
gcctggaagggcgcccaaggccaac

SEQ ID NO: 5813083 - DNA, 25 bp, Homo sapien
cctctcattcagaaggttgtcctca

SEQ ID NO: 5813084 - DNA, 25 bp, Homo sapien
tgagggaaagtgccctgtctcccca

SEQ ID NO: 5813085 - DNA, 25 bp, Homo sapien
ggtggtcctcctccgtggtgaagat

SEQ ID NO: 5813086 - DNA, 25 bp, Homo sapien
atgatgcgctcacaggtatgggcct

SEQ ID NO: 5813087 - DNA, 25 bp, Homo sapien
tggtcctcctccgtggtgaagatgt

SEQ ID NO: 5813088 - DNA, 25 bp, Homo sapien
ccagcgccgcgccaaaggccagtgt

SEQ ID NO: 5813089 - DNA, 25 bp, Homo sapien
gggtcccgctgaagctgcccagggc

SEQ ID NO: 5813090 - DNA, 25 bp, Homo sapien
aggagcttctggatatcttttgaat

SEQ ID NO: 5813091 - DNA, 25 bp, Homo sapien
catgcctcatgtgaagatctggact

SEQ ID NO: 5813092 - DNA, 25 bp, Homo sapien
aggcggcgtccctgacgttggtgcc

SEQ ID NO: 5813093 - DNA, 25 bp, Homo sapien
agccggcctttcagaaggaagcctg

SEQ ID NO: 5813094 - DNA, 25 bp, Homo sapien
aggcacctgaggacagtggcagcat

SEQ ID NO: 5813095 - DNA, 25 bp, Homo sapien
cgggaaacggtggcagaggagcaga

SEQ ID NO: 5813096 - DNA, 25 bp, Homo sapien
accccctgcatggtctggaaggagg

SEQ ID NO: 5813097 - DNA, 25 bp, Homo sapien
aaatttaaaagccagatgtacaagg

SEQ ID NO: 5813098 - DNA, 25 bp, Homo sapien
aggacgtgtgataaatctggacaca

SEQ ID NO: 5813099 - DNA, 25 bp, Homo sapien
cctgcatggtctggaaggaggaacg

SEQ ID NO: 5813100 - DNA, 25 bp, Homo sapien
cagagcaaaagcatgtagcgggttt

SEQ ID NO: 5813101 - DNA, 25 bp, Homo sapien
ttgcagtcacaaagggcttcagctc

SEQ ID NO: 5813102 - DNA, 25 bp, Homo sapien
ttcgtcgctcagggccatctcggca

SEQ ID NO: 5813103 - DNA, 25 bp, Homo sapien
ctatcattggctgcgtgtactcagg

SEQ ID NO: 5813104 - DNA, 25 bp, Homo sapien
tggttgctctcagggagtctgcagc

SEQ ID NO: 5813105 - DNA, 25 bp, Homo sapien
ccacaccggcctccctcaggaacaa

SEQ ID NO: 5813106 - DNA, 25 bp, Homo sapien
accaggcaggggtgaggtatgggct

SEQ ID NO: 5813107 - DNA, 25 bp, Homo sapien
gaagctgcccagggcctgcgggtcg

SEQ ID NO: 5813108 - DNA, 25 bp, Homo sapien
cttggtacatgattttataggaagc

SEQ ID NO: 5813109 - DNA, 25 bp, Homo sapien
cctccatgctgccaccttcggcttc

SEQ ID NO: 5813110 - DNA, 25 bp, Homo sapien
cagtctcctggaaactgaagcagtc

SEQ ID NO: 5813111 - DNA, 25 bp, Homo sapien
cagacggttgcgctgctctctcacc

SEQ ID NO: 5813112 - DNA, 25 bp, Homo sapien
aacacacttataaccaggaaacagt

SEQ ID NO: 5813113 - DNA, 25 bp, Homo sapien
ctcctcacgtcgccggggaactgca

SEQ ID NO: 5813114 - DNA, 25 bp, Homo sapien
catgctgccaccttcggcttcagga

SEQ ID NO: 5813115 - DNA, 25 bp, Homo sapien
gcttctgctcactctgaccctgagt

SEQ ID NO: 5813116 - DNA, 25 bp, Homo sapien
agacccctgtataactgacgatcat

SEQ ID NO: 5813117 - DNA, 25 bp, Homo sapien
tggcttcagcaggcaccaggctggg

SEQ ID NO: 5813118 - DNA, 25 bp, Homo sapien
ggctttccacaccggcctccctcag

SEQ ID NO: 5813119 - DNA, 25 bp, Homo sapien
ccaggtgcccacgtcccctctgctg

SEQ ID NO: 5813120 - DNA, 25 bp, Homo sapien
ccaagcttcatggtccttgggattc

SEQ ID NO: 5813121 - DNA, 25 bp, Homo sapien
cgccttgtcagtctcctggaaactg

SEQ ID NO: 5813122 - DNA, 25 bp, Homo sapien
agaaggaagcctggaagggcgccca

SEQ ID NO: 5813123 - DNA, 25 bp, Homo sapien
tcaatcttctcactggcctgctggg

SEQ ID NO: 5813124 - DNA, 25 bp, Homo sapien
accactgcaagctccgcgtcccacg

SEQ ID NO: 5813125 - DNA, 25 bp, Homo sapien
ggccttgcggacccaggtgcccacg

SEQ ID NO: 5813126 - DNA, 25 bp, Homo sapien
cttccggatcagcgggaaacggtgg

SEQ ID NO: 5813127 - DNA, 25 bp, Homo sapien
ggcgtccctgacgttggtgcccacg

SEQ ID NO: 5813128 - DNA, 25 bp, Homo sapien
tctgaccctgagtgaggagctgcag

SEQ ID NO: 5813129 - DNA, 25 bp, Homo sapien
gggctccaggactggcttcagcagg

SEQ ID NO: 5813130 - DNA, 25 bp, Homo sapien
cagctgcatctcgggccttgtcact

SEQ ID NO: 5813131 - DNA, 25 bp, Homo sapien
gacggcaaaatagtcagctgtggtc

SEQ ID NO: 5813132 - DNA, 25 bp, Homo sapien
ctcactggcctgctgggccacacag

SEQ ID NO: 5813133 - DNA, 25 bp, Homo sapien
agctagtgccagcctccaagggcca

SEQ ID NO: 5813134 - DNA, 25 bp, Homo sapien
tgaccctgagtgaggagctgcagat

SEQ ID NO: 5813135 - DNA, 25 bp, Homo sapien
ccgcaggcggcccagcagcgcccgg

SEQ ID NO: 5813136 - DNA, 25 bp, Homo sapien
gggccacctcgcgctccgcgccgcc

SEQ ID NO: 5813137 - DNA, 25 bp, Homo sapien
tgtcactgagcacagtcaccacctc

SEQ ID NO: 5813138 - DNA, 25 bp, Homo sapien
aagtaggactctgctatttggagaa

SEQ ID NO: 5813139 - DNA, 25 bp, Homo sapien
agtgtgggtaactgctcttaaacct

SEQ ID NO: 5813140 - DNA, 25 bp, Homo sapien
tcagctcctgaggctcataggcacg

SEQ ID NO: 5813141 - DNA, 25 bp, Homo sapien
agcaacaggcctctcctgcccagct

SEQ ID NO: 5813142 - DNA, 25 bp, Homo sapien
ccaggctgggtgaggaggttcccgt

SEQ ID NO: 5813143 - DNA, 25 bp, Homo sapien
agcggtaggtgggcagcccaaggag

SEQ ID NO: 5813144 - DNA, 25 bp, Homo sapien
aagatgtcgaagcagccgtgggtga

SEQ ID NO: 5813145 - DNA, 25 bp, Homo sapien
caaaatatcaataccatgagggaaa

SEQ ID NO: 5813146 - DNA, 25 bp, Homo sapien
acggtggcagaggagcagacacagc

SEQ ID NO: 5813147 - DNA, 25 bp, Homo sapien
cactgcctgctcgtccagatggtcc

SEQ ID NO: 5813148 - DNA, 25 bp, Homo sapien
tcgtcgactccgtcaagccgcccag

SEQ ID NO: 5813149 - DNA, 25 bp, Homo sapien
ttctgcagtttatgtctcggtcaaa

SEQ ID NO: 5813150 - DNA, 25 bp, Homo sapien
ggtggcagaggagcagacacagctg

SEQ ID NO: 5813151 - DNA, 25 bp, Homo sapien
gtgtagtcgtccatgcagcccagca

SEQ ID NO: 5813152 - DNA, 25 bp, Homo sapien
tcaaacaccgcagcaatcaccagtg

SEQ ID NO: 5813153 - DNA, 25 bp, Homo sapien
tgtcatggacagcagcctcgggaag

SEQ ID NO: 5813154 - DNA, 25 bp, Homo sapien
ctgcagtttatgtctcggtcaaaca

SEQ ID NO: 5813155 - DNA, 25 bp, Homo sapien
tcaccaggcaggggtgaggtatggg

SEQ ID NO: 5813156 - DNA, 25 bp, Homo sapien
ctctcgccgaacgcttccagcgccg

SEQ ID NO: 5813157 - DNA, 25 bp, Homo sapien
caacttcacagcaaaggggtggtcc

SEQ ID NO: 5813158 - DNA, 25 bp, Homo sapien
gatgaggctgctcctggtatttgtc

SEQ ID NO: 5813159 - DNA, 25 bp, Homo sapien
cagatgtacaagggaagctggagat

SEQ ID NO: 5813160 - DNA, 25 bp, Homo sapien
atctgggaaacattctctccgcaca

SEQ ID NO: 5813161 - DNA, 25 bp, Homo sapien
ggacacaaggacagcagctgcatct

SEQ ID NO: 5813162 - DNA, 25 bp, Homo sapien
ctgcagaccaccgcacgaccgtgtc

SEQ ID NO: 5813163 - DNA, 25 bp, Homo sapien
tccggatcagcgggaaacggtggca

SEQ ID NO: 5813164 - DNA, 25 bp, Homo sapien
tgagcaatgtctcgtacacctggct

SEQ ID NO: 5813165 - DNA, 25 bp, Homo sapien
gggatcaggcaggtcacggagagcc

SEQ ID NO: 5813166 - DNA, 25 bp, Homo sapien
caggctggggcaccagctggggcct

SEQ ID NO: 5813167 - DNA, 25 bp, Homo sapien
tgcacctcccgcaggcggcccagca

SEQ ID NO: 5813168 - DNA, 25 bp, Homo sapien
acccccagcttccgcagcagggtct

SEQ ID NO: 5813169 - DNA, 25 bp, Homo sapien
cagcctcgggaagacttgcgtggcg

SEQ ID NO: 5813170 - DNA, 25 bp, Homo sapien
catcggacctgggaaacagcttttc

SEQ ID NO: 5813171 - DNA, 25 bp, Homo sapien
tggcagaggagcagacacagctgca

SEQ ID NO: 5813172 - DNA, 25 bp, Homo sapien
ggctggctccgagccagcagaagtg

SEQ ID NO: 5813173 - DNA, 25 bp, Homo sapien
ctgcgatgcctgacaggagcttctg

SEQ ID NO: 5813174 - DNA, 25 bp, Homo sapien
ctgtataactgacgatcatagagct

SEQ ID NO: 5813175 - DNA, 25 bp, Homo sapien
ttcatgaggaaataaacgaagaaat

SEQ ID NO: 5813176 - DNA, 25 bp, Homo sapien
cgcaagcaacttcacagcaaagggg

SEQ ID NO: 5813177 - DNA, 25 bp, Homo sapien
aagcctggaagggcgcccaaggcca

SEQ ID NO: 5813178 - DNA, 25 bp, Homo sapien
cctcatgtgaagatctggactcagt

SEQ ID NO: 5813179 - DNA, 25 bp, Homo sapien
ggacagtggcagcatagggcaaaca

SEQ ID NO: 5813180 - DNA, 25 bp, Homo sapien
catggtccttgggattctgaattgt

SEQ ID NO: 5813181 - DNA, 25 bp, Homo sapien
gtgatgaccccctgcatggtctgga

SEQ ID NO: 5813182 - DNA, 25 bp, Homo sapien
gacggttgcgctgctctctcaccac

SEQ ID NO: 5813183 - DNA, 25 bp, Homo sapien
cagacccgaccacatcatccgccag

SEQ ID NO: 5813184 - DNA, 25 bp, Homo sapien
tctcaccactgcaagctccgcgtcc

SEQ ID NO: 5813185 - DNA, 25 bp, Homo sapien
aggcccagcacacgtagcaggcggc

SEQ ID NO: 5813186 - DNA, 25 bp, Homo sapien
tcgagacggcagcaacaggcctctc

SEQ ID NO: 5813187 - DNA, 25 bp, Homo sapien
accagtgcactcgagattgcagtca

SEQ ID NO: 5813188 - DNA, 25 bp, Homo sapien
ctgttctcttgggctgcaagtttgt

SEQ ID NO: 5813189 - DNA, 25 bp, Homo sapien
aaggccaacgagaagccacagcgag

SEQ ID NO: 5813190 - DNA, 25 bp, Homo sapien
ctcctggtatttgtccattattacg

SEQ ID NO: 5813191 - DNA, 25 bp, Homo sapien
gaatacggtccattatggacattcg

SEQ ID NO: 5813192 - DNA, 25 bp, Homo sapien
gattctgaattgtgaccaaatctaa

SEQ ID NO: 5813193 - DNA, 25 bp, Homo sapien
cttataaccaggaaacagttggatc

SEQ ID NO: 5813194 - DNA, 25 bp, Homo sapien
aggcggcagaggctgctcttctgca

SEQ ID NO: 5813195 - DNA, 25 bp, Homo sapien
taaacctgtgagaacctgctggagc

SEQ ID NO: 5813196 - DNA, 25 bp, Homo sapien
cctgacgttggtgcccacgctgcag

SEQ ID NO: 5813197 - DNA, 25 bp, Homo sapien
gtcaccagagcgcaggtgcagagag

SEQ ID NO: 5813198 - DNA, 25 bp, Homo sapien
tgtcagctagtgccagcctccaagg

SEQ ID NO: 5813199 - DNA, 25 bp, Homo sapien
cgaagaaatgttttatagcctcgaa

SEQ ID NO: 5813200 - DNA, 25 bp, Homo sapien
gggcagcccaaggagctgggtgatg

SEQ ID NO: 5813201 - DNA, 25 bp, Homo sapien
aaaatagtcagctgtggtcaaaata

SEQ ID NO: 5813202 - DNA, 25 bp, Homo sapien
gagcagacacagctgcaggagggcc

SEQ ID NO: 5813203 - DNA, 25 bp, Homo sapien
gtcatttatcagccattgccaacca

SEQ ID NO: 5813204 - DNA, 25 bp, Homo sapien
tgttcaagtgaaggcagaggcgtcc

SEQ ID NO: 5813205 - DNA, 25 bp, Homo sapien
ctagtgccagcctccaagggccagc

SEQ ID NO: 5813206 - DNA, 25 bp, Homo sapien
ggtacctccatgctgccaccttcgg

SEQ ID NO: 5813207 - DNA, 25 bp, Homo sapien
caagggccagcgctacccttcaaca

SEQ ID NO: 5813208 - DNA, 25 bp, Homo sapien
tccgcagcagggtctggttgctctc

SEQ ID NO: 5813209 - DNA, 25 bp, Homo sapien
ccgcagaacactgcgatgcctgaca

SEQ ID NO: 5813210 - DNA, 25 bp, Homo sapien
tcatgtactcaaagaggctctgggt

SEQ ID NO: 5813211 - DNA, 25 bp, Homo sapien
catcatccgccagggctctgggaag

SEQ ID NO: 5813212 - DNA, 25 bp, Homo sapien
tacaagggaagctggagatgtctga

SEQ ID NO: 5813213 - DNA, 25 bp, Homo sapien
gcctcgggaagacttgcgtggcgct

SEQ ID NO: 5813214 - DNA, 25 bp, Homo sapien
tccacgagtcgagacggcagcaaca

SEQ ID NO: 5813215 - DNA, 25 bp, Homo sapien
cagaggctgctcttctgcagtttat

SEQ ID NO: 5813216 - DNA, 25 bp, Homo sapien
gggctgcaagtttgtacaaggcgta

SEQ ID NO: 5813217 - DNA, 25 bp, Homo sapien
agaggctctgggtggagtgccggat

SEQ ID NO: 5813218 - DNA, 25 bp, Homo sapien
agaccaccgcacgaccgtgtccttg

SEQ ID NO: 5813219 - DNA, 25 bp, Homo sapien
tgcgcaggcgagaatcgacccatgc

SEQ ID NO: 5813220 - DNA, 25 bp, Homo sapien
tcgtcctccgcctcctcctcggggc

SEQ ID NO: 5813221 - DNA, 25 bp, Homo sapien
tttggaaagtgacaacttttctatt

SEQ ID NO: 5813222 - DNA, 25 bp, Homo sapien
accacatcatccgccagggctctgg

SEQ ID NO: 5813223 - DNA, 25 bp, Homo sapien
ttctattaaaacacacactgcttgt

SEQ ID NO: 5813224 - DNA, 25 bp, Homo sapien
tcacggaggccacatcggacctggg

SEQ ID NO: 5813225 - DNA, 25 bp, Homo sapien
aagggtcccgctgaagctgcccagg

SEQ ID NO: 5813226 - DNA, 25 bp, Homo sapien
gcagcgccctcgcagccaactctcg

SEQ ID NO: 5813227 - DNA, 25 bp, Homo sapien
cagtccaggaactcagccatcttgc

SEQ ID NO: 5813228 - DNA, 25 bp, Homo sapien
tttgtgccagggcctgcagcgtccc

SEQ ID NO: 5813229 - DNA, 25 bp, Homo sapien
ctgaggacagtggcagcatagggca

SEQ ID NO: 5813230 - DNA, 25 bp, Homo sapien
cgcagccaactctcggatgacccca

SEQ ID NO: 5813231 - DNA, 25 bp, Homo sapien
gcggccttgcggacccaggtgccca

SEQ ID NO: 5813232 - DNA, 25 bp, Homo sapien
ccacgacgtcactgtaggtgagcaa

SEQ ID NO: 5813233 - DNA, 25 bp, Homo sapien
gcaggacgtggtagcggtaggtggg

SEQ ID NO: 5813234 - DNA, 25 bp, Homo sapien
ccccagcttccgcagcagggtctgg

SEQ ID NO: 5813235 - DNA, 25 bp, Homo sapien
aagccgcccagggacacgactagcc

SEQ ID NO: 5813236 - DNA, 25 bp, Homo sapien
cttggtgatgatgtaaagaaattta

SEQ ID NO: 5813237 - DNA, 25 bp, Homo sapien
ttgtccttcagcccgaccagcagct

SEQ ID NO: 5813238 - DNA, 25 bp, Homo sapien
gcaccaggctggggcaccagctggg

SEQ ID NO: 5813239 - DNA, 25 bp, Homo sapien
gcacctgaggacagtggcagcatag

SEQ ID NO: 5813240 - DNA, 25 bp, Homo sapien
gatcccactccgctagagcgcgaaa

SEQ ID NO: 5813241 - DNA, 25 bp, Homo sapien
gacccgaccacatcatccgccaggg

SEQ ID NO: 5813242 - DNA, 25 bp, Homo sapien
gggacacgactagccccagcaggac

SEQ ID NO: 5813243 - DNA, 25 bp, Homo sapien
cccctgcatggtctggaaggaggaa

SEQ ID NO: 5813244 - DNA, 25 bp, Homo sapien
aaatctggacacaaggacagcagct

SEQ ID NO: 5813245 - DNA, 25 bp, Homo sapien
catcccccatgccacgccttgtcag

SEQ ID NO: 5813246 - DNA, 25 bp, Homo sapien
gatgtcgaagcagccgtgggtgagc

SEQ ID NO: 5813247 - DNA, 25 bp, Homo sapien
tgccagcgccagacatcccccatgc

SEQ ID NO: 5813248 - DNA, 25 bp, Homo sapien
agacatcctcaccaggcaggggtga

SEQ ID NO: 5813249 - DNA, 25 bp, Homo sapien
cgcaggcgagaatcgacccatgcct

SEQ ID NO: 5813250 - DNA, 25 bp, Homo sapien
tctatcacacgctccaccccctctg

SEQ ID NO: 5813251 - DNA, 25 bp, Homo sapien
gcggcgtccctgacgttggtgccca

SEQ ID NO: 5813252 - DNA, 25 bp, Homo sapien
acggcgacaacatccacgagtcgag

SEQ ID NO: 5813253 - DNA, 25 bp, Homo sapien
ctggctccgagccagcagaagtgtc

SEQ ID NO: 5813254 - DNA, 25 bp, Homo sapien
tgcttgtctcatgagctgtcctccc

SEQ ID NO: 5813255 - DNA, 25 bp, Homo sapien
tcccactccgctagagcgcgaaagc

SEQ ID NO: 5813256 - DNA, 25 bp, Homo sapien
tgacgggcctgttctcttgggctgc

SEQ ID NO: 5813257 - DNA, 25 bp, Homo sapien
ggccttcaagccgtctctcctggac

SEQ ID NO: 5813258 - DNA, 25 bp, Homo sapien
cctgcactgcctgctcgtccagatg

SEQ ID NO: 5813259 - DNA, 25 bp, Homo sapien
ggtttcccaagcttcatggtccttg

SEQ ID NO: 5813260 - DNA, 25 bp, Homo sapien
gccaaaggccagtgtctcgtcctcc

SEQ ID NO: 5813261 - DNA, 25 bp, Homo sapien
gctgggtgatgcgtgggaaggcctg

SEQ ID NO: 5813262 - DNA, 25 bp, Homo sapien
cagtctggcaaatcctcgcaatggc

SEQ ID NO: 5813263 - DNA, 25 bp, Homo sapien
gtgggcagcccaaggagctgggtga

SEQ ID NO: 5813264 - DNA, 25 bp, Homo sapien
aggaactcagccatcttgctttgct

SEQ ID NO: 5813265 - DNA, 25 bp, Homo sapien
atcttgcactatgtccaacaacaag

SEQ ID NO: 5813266 - DNA, 25 bp, Homo sapien
ccatctcggcagcctggggaccgcg

SEQ ID NO: 5813267 - DNA, 25 bp, Homo sapien
caacagctggaggcaccactgtgcg

SEQ ID NO: 5813268 - DNA, 25 bp, Homo sapien
tcagccccagtcgctgcacaagctt

SEQ ID NO: 5813269 - DNA, 25 bp, Homo sapien
gaaggtcacacagacggttgcgctg

SEQ ID NO: 5813270 - DNA, 25 bp, Homo sapien
gacgatcatagagctgctggtgaat

SEQ ID NO: 5813271 - DNA, 25 bp, Homo sapien
agtcttcacgttttccatgtttaaa

SEQ ID NO: 5813272 - DNA, 25 bp, Homo sapien
aagacttgcgtggcgctgaactcgg

SEQ ID NO: 5813273 - DNA, 25 bp, Homo sapien
cccgaccacatcatccgccagggct

SEQ ID NO: 5813274 - DNA, 25 bp, Homo sapien
gagccagcagaagtgtcagatccat

SEQ ID NO: 5813275 - DNA, 25 bp, Homo sapien
ggctccgagccagcagaagtgtcag

SEQ ID NO: 5813276 - DNA, 25 bp, Homo sapien
gctgatcttcatggtaaccaggtgg

SEQ ID NO: 5813277 - DNA, 25 bp, Homo sapien
ctgggccacacagcacatgatgcgc

SEQ ID NO: 5813278 - DNA, 25 bp, Homo sapien
tcgggccttgtcactgacaatcaag

SEQ ID NO: 5813279 - DNA, 25 bp, Homo sapien
tggactcagcaaaacttacgtcctc

SEQ ID NO: 5813280 - DNA, 25 bp, Homo sapien
gcaaacagtcttcacgttttccatg

SEQ ID NO: 5813281 - DNA, 25 bp, Homo sapien
tgcactatgtccaacaacaagttca

SEQ ID NO: 5813282 - DNA, 25 bp, Homo sapien
tgtgccagggcctgcagcgtcccat

SEQ ID NO: 5813283 - DNA, 25 bp, Homo sapien
gcactcgagattgcagtcacaaagg

SEQ ID NO: 5813284 - DNA, 25 bp, Homo sapien
agacacagctgcaggagggcctgcc

SEQ ID NO: 5813285 - DNA, 25 bp, Homo sapien
tccccacattctcctggaaggcggc

SEQ ID NO: 5813286 - DNA, 25 bp, Homo sapien
agggccagcgctacccttcaacagc

SEQ ID NO: 5813287 - DNA, 25 bp, Homo sapien
gtgtccttgtccttcagcccgacca

SEQ ID NO: 5813288 - DNA, 25 bp, Homo sapien
ctgggaaacattctctccgcacaca

SEQ ID NO: 5813289 - DNA, 25 bp, Homo sapien
tgaccccctgcatggtctggaagga

SEQ ID NO: 5813290 - DNA, 25 bp, Homo sapien
aaacaggctctacatcggcaacttc

SEQ ID NO: 5813291 - DNA, 25 bp, Homo sapien
cagctctgccagcgccagacatccc

SEQ ID NO: 5813292 - DNA, 25 bp, Homo sapien
tctggttgctctcagggagtctgca

SEQ ID NO: 5813293 - DNA, 25 bp, Homo sapien
tcccccatgccacgccttgtcagtc

SEQ ID NO: 5813294 - DNA, 25 bp, Homo sapien
ctgacgatcatagagctgctggtga

SEQ ID NO: 5813295 - DNA, 25 bp, Homo sapien
gggcctgcctcctcacgtcgccggg

SEQ ID NO: 5813296 - DNA, 25 bp, Homo sapien
aataaacacacttataaccaggaaa

SEQ ID NO: 5813297 - DNA, 25 bp, Homo sapien
acgcggaaccgctccagggccacct

SEQ ID NO: 5813298 - DNA, 25 bp, Homo sapien
ccgcgccaaaggccagtgtctcgtc

SEQ ID NO: 5813299 - DNA, 25 bp, Homo sapien
tcaccagtgcactcgagattgcagt

SEQ ID NO: 5813300 - DNA, 25 bp, Homo sapien
ctctcagggagtctgcagccatcga

SEQ ID NO: 5813301 - DNA, 25 bp, Homo sapien
cagcgagtcatttatcagccattgc

SEQ ID NO: 5813302 - DNA, 25 bp, Homo sapien
gtcccatccatggtgatgaccccct

SEQ ID NO: 5813303 - DNA, 25 bp, Homo sapien
gctgtccgtggtgtagtcgtccatg

SEQ ID NO: 5813304 - DNA, 25 bp, Homo sapien
gggcattttggaaagtgacaacttt

SEQ ID NO: 5813305 - DNA, 25 bp, Homo sapien
tccaagggccagcgctacccttcaa

SEQ ID NO: 5813306 - DNA, 25 bp, Homo sapien
ggccacccgcggccggttcgtcgct

SEQ ID NO: 5813307 - DNA, 25 bp, Homo sapien
ggtaaccaggtggtctatcattggc

SEQ ID NO: 5813308 - DNA, 25 bp, Homo sapien
aacactgcgatgcctgacaggagct

SEQ ID NO: 5813309 - DNA, 25 bp, Homo sapien
gcaataaacacacttataaccagga

SEQ ID NO: 5813310 - DNA, 25 bp, Homo sapien
aggcctctcctgcccagctctgcca

SEQ ID NO: 5813311 - DNA, 25 bp, Homo sapien
agcccagcagcgcacagtaaatctg

SEQ ID NO: 5813312 - DNA, 25 bp, Homo sapien
ggacagcagcctcgggaagacttgc

SEQ ID NO: 5813313 - DNA, 25 bp, Homo sapien
tcatggacagcagcctcgggaagac

SEQ ID NO: 5813314 - DNA, 25 bp, Homo sapien
aaagggcttcagctcctgaggctca

SEQ ID NO: 5813315 - DNA, 25 bp, Homo sapien
cacctggctggccgtggtcttccgg

SEQ ID NO: 5813316 - DNA, 25 bp, Homo sapien
aatgcccttcatgtactcaaagagg

SEQ ID NO: 5813317 - DNA, 25 bp, Homo sapien
atctggactcagtgtcatggacagc

SEQ ID NO: 5813318 - DNA, 25 bp, Homo sapien
cccagaaggtcacacagacggttgc

SEQ ID NO: 5813319 - DNA, 25 bp, Homo sapien
caggggtgaggtatgggctccagga

SEQ ID NO: 5813320 - DNA, 25 bp, Homo sapien
tgaagatgtcgaagcagccgtgggt

SEQ ID NO: 5813321 - DNA, 25 bp, Homo sapien
ggtcaatcttctcactggcctgctg

SEQ ID NO: 5813322 - DNA, 25 bp, Homo sapien
gacatcaggacgtgtgataaatctg

SEQ ID NO: 5813323 - DNA, 25 bp, Homo sapien
ctgctcttctgcagtttatgtctcg

SEQ ID NO: 5813324 - DNA, 25 bp, Homo sapien
agggcctgcgggtcgctctgaatgc

SEQ ID NO: 5813325 - DNA, 25 bp, Homo sapien
atcttcggtcaggatgagtggcttc

SEQ ID NO: 5813326 - DNA, 25 bp, Homo sapien
actgagcacagtcaccacctcgtcc

SEQ ID NO: 5813327 - DNA, 25 bp, Homo sapien
cgcccgggtctccgcgctctcgccg

SEQ ID NO: 5813328 - DNA, 25 bp, Homo sapien
gatccatcagactggtcatggcggc

SEQ ID NO: 5813329 - DNA, 25 bp, Homo sapien
gctgtggtcaaaatatcaataccat

SEQ ID NO: 5813330 - DNA, 25 bp, Homo sapien
ggctgctcttctgcagtttatgtct

SEQ ID NO: 5813331 - DNA, 25 bp, Homo sapien
taaatatttgtgccagggcctgcag

SEQ ID NO: 5813332 - DNA, 25 bp, Homo sapien
gcttcagcaggcaccaggctggggc

SEQ ID NO: 5813333 - DNA, 25 bp, Homo sapien
acaggctccagtccaggaactcagc

SEQ ID NO: 5813334 - DNA, 25 bp, Homo sapien
cgtccagcacatccgcgcccacgac

SEQ ID NO: 5813335 - DNA, 25 bp, Homo sapien
attcgtgcttgcccaggctgggtga

SEQ ID NO: 5813336 - DNA, 25 bp, Homo sapien
tgataaatctggacacaaggacagc

SEQ ID NO: 5813337 - DNA, 25 bp, Homo sapien
ggctgcagaccaccgcacgaccgtg

SEQ ID NO: 5813338 - DNA, 25 bp, Homo sapien
tggtccagcgtcttcagcagcggca

SEQ ID NO: 5813339 - DNA, 25 bp, Homo sapien
aggtgcgggtccaacagatgaggct

SEQ ID NO: 5813340 - DNA, 25 bp, Homo sapien
cctccgcctcctcctcggggccacc

SEQ ID NO: 5813341 - DNA, 25 bp, Homo sapien
tggccgtggtcttccggatcagcgg

SEQ ID NO: 5813342 - DNA, 25 bp, Homo sapien
gcggcagaggctgctcttctgcagt

SEQ ID NO: 5813343 - DNA, 25 bp, Homo sapien
agtgaaggcagaggcgtccacccca

SEQ ID NO: 5813344 - DNA, 25 bp, Homo sapien
ccgcgcccacgacgtcactgtaggt

SEQ ID NO: 5813345 - DNA, 25 bp, Homo sapien
tagggcaaacagtcttcacgttttc

SEQ ID NO: 5813346 - DNA, 25 bp, Homo sapien
attacggtgtcacctctaaagggca

SEQ ID NO: 5813347 - DNA, 25 bp, Homo sapien
gccagacatcccccatgccacgcct

SEQ ID NO: 5813348 - DNA, 25 bp, Homo sapien
cgtcgctcagggccatctcggcagc

SEQ ID NO: 5813349 - DNA, 25 bp, Homo sapien
atctcggcagcctggggaccgcgcc

SEQ ID NO: 5813350 - DNA, 25 bp, Homo sapien
tgatcttgcactatgtccaacaaca

SEQ ID NO: 5813351 - DNA, 25 bp, Homo sapien
gcgatgcctgacaggagcttctgga

SEQ ID NO: 5813352 - DNA, 25 bp, Homo sapien
ttcggcttcaggaatgtcagcccca

SEQ ID NO: 5813353 - DNA, 25 bp, Homo sapien
gcggacccaggtgcccacgtcccct

SEQ ID NO: 5813354 - DNA, 25 bp, Homo sapien
ggatatcttttgaattcttgatttc

SEQ ID NO: 5813355 - DNA, 25 bp, Homo sapien
ctccgagccagcagaagtgtcagat

SEQ ID NO: 5813356 - DNA, 25 bp, Homo sapien
cctgacaggagcttctggatatctt

SEQ ID NO: 5813357 - DNA, 25 bp, Homo sapien
gtgcttgcccaggctgggtgaggag

SEQ ID NO: 5813358 - DNA, 25 bp, Homo sapien
gcgctgaactcgggtgcctgctggg

SEQ ID NO: 5813359 - DNA, 25 bp, Homo sapien
cagcagggtctggttgctctcaggg

SEQ ID NO: 5813360 - DNA, 25 bp, Homo sapien
tcatcatccattcaaggtgcgggtc

SEQ ID NO: 5813361 - DNA, 25 bp, Homo sapien
gcctgccagccatcctaccgatgcc

SEQ ID NO: 5813362 - DNA, 25 bp, Homo sapien
gtaagcaacttctgcgcaggcgaga

SEQ ID NO: 5813363 - DNA, 25 bp, Homo sapien
cacgtagcaggcggcgtccctgacg

SEQ ID NO: 5813364 - DNA, 25 bp, Homo sapien
gatcagcgggaaacggtggcagagg

SEQ ID NO: 5813365 - DNA, 25 bp, Homo sapien
ttcaagtgaaggcagaggcgtccac

SEQ ID NO: 5813366 - DNA, 25 bp, Homo sapien
ttctctccgcacacagcttcgtctg

SEQ ID NO: 5813367 - DNA, 25 bp, Homo sapien
caaggcgtaagcaacttctgcgcag

SEQ ID NO: 5813368 - DNA, 25 bp, Homo sapien
agcccaaggagctgggtgatgcgtg

SEQ ID NO: 5813369 - DNA, 25 bp, Homo sapien
cgcccagaaggtcacacagacggtt

SEQ ID NO: 5813370 - DNA, 25 bp, Homo sapien
gcgcgaaggcccagcacacgtagca

SEQ ID NO: 5813371 - DNA, 25 bp, Homo sapien
gggccaggttgtgcagcgccctcgc

SEQ ID NO: 5813372 - DNA, 25 bp, Homo sapien
aggagctgcagatttgcagccaaag

SEQ ID NO: 5813373 - DNA, 25 bp, Homo sapien
cggatcgtcgactccgtcaagccgc

SEQ ID NO: 5813374 - DNA, 25 bp, Homo sapien
tcggcaacttcatgaggaaataaac

SEQ ID NO: 5813375 - DNA, 25 bp, Homo sapien
caagggaagctggagatgtctgatc

SEQ ID NO: 5813376 - DNA, 25 bp, Homo sapien
gattgcacaggctccagtccaggaa

SEQ ID NO: 5813377 - DNA, 25 bp, Homo sapien
cctgaggctcataggcacgcgcgaa

SEQ ID NO: 5813378 - DNA, 25 bp, Homo sapien
gacgtgtgataaatctggacacaag

SEQ ID NO: 5813379 - DNA, 25 bp, Homo sapien
acaggagcttctggatatcttttga

SEQ ID NO: 5813380 - DNA, 25 bp, Homo sapien
ctgcaggcaccccgcttctcgtcgt

SEQ ID NO: 5813381 - DNA, 25 bp, Homo sapien
cacatttgtgttcaagtgaaggcag

SEQ ID NO: 5813382 - DNA, 25 bp, Homo sapien
tcgtccagatggtccgtgacgggcc

SEQ ID NO: 5813383 - DNA, 25 bp, Homo sapien
atcttcgtcgtcatcttcggtcagg

SEQ ID NO: 5813384 - DNA, 25 bp, Homo sapien
gaaccttggtgatgatgtaaagaaa

SEQ ID NO: 5813385 - DNA, 25 bp, Homo sapien
acggacaccctctcattcagaaggt

SEQ ID NO: 5813386 - DNA, 25 bp, Homo sapien
gctgctggtgaatctgcttcaggcc

SEQ ID NO: 5813387 - DNA, 25 bp, Homo sapien
agctcaggctggctccgagccagca

SEQ ID NO: 5813388 - DNA, 25 bp, Homo sapien
gaagcacatttgtgttcaagtgaag

SEQ ID NO: 5813389 - DNA, 25 bp, Homo sapien
catcaggacgtgtgataaatctgga

SEQ ID NO: 5813390 - DNA, 25 bp, Homo sapien
tgaccaaatctaaaacaggctctac

SEQ ID NO: 5813391 - DNA, 25 bp, Homo sapien
ctcttaaacctgtgagaacctgctg

SEQ ID NO: 5813392 - DNA, 25 bp, Homo sapien
actgcttgtctcatgagctgtcctc

SEQ ID NO: 5813393 - DNA, 25 bp, Homo sapien
aagtgcaggagcgtcaggaacacgc

SEQ ID NO: 5813394 - DNA, 25 bp, Homo sapien
accgatgcccttggctgcagaccac

SEQ ID NO: 5813395 - DNA, 25 bp, Homo sapien
gactctgctatttggagaatacggt

SEQ ID NO: 5813396 - DNA, 25 bp, Homo sapien
gcagaagtgtcagatccatcagact

SEQ ID NO: 5813397 - DNA, 25 bp, Homo sapien
tacaaggcgtaagcaacttctgcgc

SEQ ID NO: 5813398 - DNA, 25 bp, Homo sapien
cgtccctgacgttggtgcccacgct

SEQ ID NO: 5813399 - DNA, 25 bp, Homo sapien
gaagtgtgggtaactgctcttaaac

SEQ ID NO: 5813400 - DNA, 25 bp, Homo sapien
tggcagcatagggcaaacagtcttc

SEQ ID NO: 5813401 - DNA, 25 bp, Homo sapien
tctgggacgtcgtcatcttcgtcgt

SEQ ID NO: 5813402 - DNA, 25 bp, Homo sapien
agccatcgaggcacctgaggacagt

SEQ ID NO: 5813403 - DNA, 25 bp, Homo sapien
aaagaggctctgggtggagtgccgg

SEQ ID NO: 5813404 - DNA, 25 bp, Homo sapien
caagtgaaggcagaggcgtccaccc

SEQ ID NO: 5813405 - DNA, 25 bp, Homo sapien
gcaggcggcgtccctgacgttggtg

SEQ ID NO: 5813406 - DNA, 25 bp, Homo sapien
ccgtcaaggcgagaaaaatcaaaag

SEQ ID NO: 5813407 - DNA, 25 bp, Homo sapien
ttgcccaggctgggtgaggaggttc

SEQ ID NO: 5813408 - DNA, 25 bp, Homo sapien
gcctgggaaggtgcactccagttca

SEQ ID NO: 5813409 - DNA, 25 bp, Homo sapien
acaaagggcttcagctcctgaggct

SEQ ID NO: 5813410 - DNA, 25 bp, Homo sapien
cacacttataaccaggaaacagttg

SEQ ID NO: 5813411 - DNA, 25 bp, Homo sapien
cagcagcgcacagtaaatctgggaa

SEQ ID NO: 5813412 - DNA, 25 bp, Homo sapien
aacttctgcgcaggcgagaatcgac

SEQ ID NO: 5813413 - DNA, 25 bp, Homo sapien
gtctctcctggactcagcaaaactt

SEQ ID NO: 5813414 - DNA, 25 bp, Homo sapien
agcacagtcaccacctcgtccagca

SEQ ID NO: 5813415 - DNA, 25 bp, Homo sapien
gagaggaaaagctgtcagctagtgc

SEQ ID NO: 5813416 - DNA, 25 bp, Homo sapien
agcctccaagggccagcgctaccct

SEQ ID NO: 5813417 - DNA, 25 bp, Homo sapien
tgctctcagggagtctgcagccatc

SEQ ID NO: 5813418 - DNA, 25 bp, Homo sapien
tgggtaactgctcttaaacctgtga

SEQ ID NO: 5813419 - DNA, 25 bp, Homo sapien
cccagggacacgactagccccagca

SEQ ID NO: 5813420 - DNA, 25 bp, Homo sapien
aacctgtgagaacctgctggagccg

SEQ ID NO: 5813421 - DNA, 25 bp, Homo sapien
gaagcagtccagcacagacccgacc

SEQ ID NO: 5813422 - DNA, 25 bp, Homo sapien
tccatggtgatgaccccctgcatgg

SEQ ID NO: 5813423 - DNA, 25 bp, Homo sapien
cttcgtctggggctcctgctttcac

SEQ ID NO: 5813424 - DNA, 25 bp, Homo sapien
cttcatgtactcaaagaggctctgg

SEQ ID NO: 5813425 - DNA, 25 bp, Homo sapien
ggacctgggaaacagcttttccagt

SEQ ID NO: 5813426 - DNA, 25 bp, Homo sapien
ggaagcctgccagccatcctaccga

SEQ ID NO: 5813427 - DNA, 25 bp, Homo sapien
tcagccatcttgctttgcttgacat

SEQ ID NO: 5813428 - DNA, 25 bp, Homo sapien
gagcttctggatatcttttgaattc

SEQ ID NO: 5813429 - DNA, 25 bp, Homo sapien
cttcgtcgtcatcttcggtcaggat

SEQ ID NO: 5813430 - DNA, 25 bp, Homo sapien
tgtgttcaagtgaaggcagaggcgt

SEQ ID NO: 5813431 - DNA, 25 bp, Homo sapien
ccaggaactcagccatcttgctttg

SEQ ID NO: 5813432 - DNA, 25 bp, Homo sapien
tgagtgaggagctgcagatttgcag

SEQ ID NO: 5813433 - DNA, 25 bp, Homo sapien
tcgggggaagtgtgggtaactgctc

SEQ ID NO: 5813434 - DNA, 25 bp, Homo sapien
tgtcactgacaatcaagtaggactc

SEQ ID NO: 5813435 - DNA, 25 bp, Homo sapien
gtgcgggtccaacagatgaggctgc

SEQ ID NO: 5813436 - DNA, 25 bp, Homo sapien
taaacgaagaaatgttttatagcct

SEQ ID NO: 5813437 - DNA, 25 bp, Homo sapien
agagcgcgaaagccagggatgaagg

SEQ ID NO: 5813438 - DNA, 25 bp, Homo sapien
aaatatcaataccatgagggaaagt

SEQ ID NO: 5813439 - DNA, 25 bp, Homo sapien
gtccaacaacaagttcatcatccat

SEQ ID NO: 5813440 - DNA, 25 bp, Homo sapien
ctgccaccttcggcttcaggaatgt

SEQ ID NO: 5813441 - DNA, 25 bp, Homo sapien
gaggctttccacaccggcctccctc

SEQ ID NO: 5813442 - DNA, 25 bp, Homo sapien
tcgaaccttggtgatgatgtaaaga

SEQ ID NO: 5813443 - DNA, 25 bp, Homo sapien
ggtgagcaatgtctcgtacacctgg

SEQ ID NO: 5813444 - DNA, 25 bp, Homo sapien
atcaattacggtgtcacctctaaag

SEQ ID NO: 5813445 - DNA, 25 bp, Homo sapien
cagcacatgatgcgctcacaggtat

SEQ ID NO: 5813446 - DNA, 25 bp, Homo sapien
ggacattcgtgcttgcccaggctgg

SEQ ID NO: 5813447 - DNA, 25 bp, Homo sapien
gatcggcagccacgctggtacctcc

SEQ ID NO: 5813448 - DNA, 25 bp, Homo sapien
cttgctttgcttgacatcaggacgt

SEQ ID NO: 5813449 - DNA, 25 bp, Homo sapien
aatagtcagctgtggtcaaaatatc

SEQ ID NO: 5813450 - DNA, 25 bp, Homo sapien
cgaggcacctgaggacagtggcagc

SEQ ID NO: 5813451 - DNA, 25 bp, Homo sapien
accaccgcacgaccgtgtccttgtc

SEQ ID NO: 5813452 - DNA, 25 bp, Homo sapien
gtccagcacagacccgaccacatca

SEQ ID NO: 5813453 - DNA, 25 bp, Homo sapien
gcacgcgcgaaggcccagcacacgt

SEQ ID NO: 5813454 - DNA, 25 bp, Homo sapien
atgtgaagatctggactcagtgtca

SEQ ID NO: 5813455 - DNA, 25 bp, Homo sapien
tcagcgggaaacggtggcagaggag

SEQ ID NO: 5813456 - DNA, 25 bp, Homo sapien
ccttggctgcagaccaccgcacgac

SEQ ID NO: 5813457 - DNA, 25 bp, Homo sapien
cggatcagcgggaaacggtggcaga

SEQ ID NO: 5813458 - DNA, 25 bp, Homo sapien
cctcgggggaagtgtgggtaactgc

SEQ ID NO: 5813459 - DNA, 25 bp, Homo sapien
acggtcaatcttctcactggcctgc

SEQ ID NO: 5813460 - DNA, 25 bp, Homo sapien
ccatcaattacggtgtcacctctaa

SEQ ID NO: 5813461 - DNA, 25 bp, Homo sapien
tcaggcaggtcacggagagccagag

SEQ ID NO: 5813462 - DNA, 25 bp, Homo sapien
ttccacaccggcctccctcaggaac

SEQ ID NO: 5813463 - DNA, 25 bp, Homo sapien
tatttgtgccagggcctgcagcgtc

SEQ ID NO: 5813464 - DNA, 25 bp, Homo sapien
cacagcaaaggggtggtcctcctcc

SEQ ID NO: 5813465 - DNA, 25 bp, Homo sapien
ttcagcaggcaccaggctggggcac

SEQ ID NO: 5813466 - DNA, 25 bp, Homo sapien
tttcccaagcttcatggtccttggg

SEQ ID NO: 5813467 - DNA, 25 bp, Homo sapien
ggtaactgctcttaaacctgtgaga

SEQ ID NO: 5813468 - DNA, 25 bp, Homo sapien
acgcttccagcgccgcgccaaaggc

SEQ ID NO: 5813469 - DNA, 25 bp, Homo sapien
ctctgctgtccgtggtgtagtcgtc

SEQ ID NO: 5813470 - DNA, 25 bp, Homo sapien
tacacctggctggccgtggtcttcc

SEQ ID NO: 5813471 - DNA, 25 bp, Homo sapien
ccagcctccaagggccagcgctacc

SEQ ID NO: 5813472 - DNA, 25 bp, Homo sapien
gggccacacagcacatgatgcgctc

SEQ ID NO: 5813473 - DNA, 25 bp, Homo sapien
acgtgggggatgggagggctgtcaa

SEQ ID NO: 5813474 - DNA, 25 bp, Homo sapien
ttccagttctcctcggtggggcacg

SEQ ID NO: 5813475 - DNA, 25 bp, Homo sapien
aaagaaatttaaaagccagatgtac

SEQ ID NO: 5813476 - DNA, 25 bp, Homo sapien
gctggccgtggtcttccggatcagc

SEQ ID NO: 5813477 - DNA, 25 bp, Homo sapien
ccctcaggaacaagacatcctcacc

SEQ ID NO: 5813478 - DNA, 25 bp, Homo sapien
cgtcgtaggtcagcgccttcaggat

SEQ ID NO: 5813479 - DNA, 25 bp, Homo sapien
tcccagacccctgtataactgacga

SEQ ID NO: 5813480 - DNA, 25 bp, Homo sapien
gctgctctatcacacgctccacccc

SEQ ID NO: 5813481 - DNA, 25 bp, Homo sapien
ggtacgcccagaaggtcacacagac

SEQ ID NO: 5813482 - DNA, 25 bp, Homo sapien
gtcagatccatcagactggtcatgg

SEQ ID NO: 5813483 - DNA, 25 bp, Homo sapien
tctcatgagctgtcctcccagaccc

SEQ ID NO: 5813484 - DNA, 25 bp, Homo sapien
gcacacagcttcgtctggggctcct

SEQ ID NO: 5813485 - DNA, 25 bp, Homo sapien
aagttcatcatccattcaaggtgcg

SEQ ID NO: 5813486 - DNA, 25 bp, Homo sapien
ttatagcctcgaaccttggtgatga

SEQ ID NO: 5813487 - DNA, 25 bp, Homo sapien
tcaagccgcccagggacacgactag

SEQ ID NO: 5813488 - DNA, 25 bp, Homo sapien
cgtggtcttccggatcagcgggaaa

SEQ ID NO: 5813489 - DNA, 25 bp, Homo sapien
cagcaaaggggtggtcctcctccgt

SEQ ID NO: 5813490 - DNA, 25 bp, Homo sapien
aggctcataggcacgcgcgaaggcc

SEQ ID NO: 5813491 - DNA, 25 bp, Homo sapien
aaacggtggcagaggagcagacaca

SEQ ID NO: 5813492 - DNA, 25 bp, Homo sapien
caggctggctccgagccagcagaag

SEQ ID NO: 5813493 - DNA, 25 bp, Homo sapien
ctgggaaacagcttttccagttctc

SEQ ID NO: 5813494 - DNA, 25 bp, Homo sapien
ccggttcgtcgctcagggccatctc

SEQ ID NO: 5813495 - DNA, 25 bp, Homo sapien
caggaacacgctggcggcgtgagca

SEQ ID NO: 5813496 - DNA, 25 bp, Homo sapien
tcatcttcggtcaggatgagtggct

SEQ ID NO: 5813497 - DNA, 25 bp, Homo sapien
aagcctgccagccatcctaccgatg

SEQ ID NO: 5813498 - DNA, 25 bp, Homo sapien
gggtccaacagatgaggctgctcct

SEQ ID NO: 5813499 - DNA, 25 bp, Homo sapien
gggattctgaattgtgaccaaatct

SEQ ID NO: 5813500 - DNA, 25 bp, Homo sapien
ctccgcacacagcttcgtctggggc

SEQ ID NO: 5813501 - DNA, 25 bp, Homo sapien
aaccatcaattacggtgtcacctct

SEQ ID NO: 5813502 - DNA, 25 bp, Homo sapien
catggcggccttgcggacccaggtg

SEQ ID NO: 5813503 - DNA, 25 bp, Homo sapien
ggaagggcgcccaaggccaacgaga

SEQ ID NO: 5813504 - DNA, 25 bp, Homo sapien
gaggaaaagctgtcagctagtgcca

SEQ ID NO: 5813505 - DNA, 25 bp, Homo sapien
cccatgcctcatgtgaagatctgga

SEQ ID NO: 5813506 - DNA, 25 bp, Homo sapien
gcccagcacacgtagcaggcggcgt

SEQ ID NO: 5813507 - DNA, 25 bp, Homo sapien
gcgtgggaaggcctgggaaggtgca

SEQ ID NO: 5813508 - DNA, 25 bp, Homo sapien
gcacgaccgtgtccttgtccttcag

SEQ ID NO: 5813509 - DNA, 25 bp, Homo sapien
accatgagggaaagtgccctgtctc

SEQ ID NO: 5813510 - DNA, 25 bp, Homo sapien
ggcctgcgggtcgctctgaatgccc

SEQ ID NO: 5813511 - DNA, 25 bp, Homo sapien
ctcacgtgttcgcagatcccactcc

SEQ ID NO: 5813512 - DNA, 25 bp, Homo sapien
tcactgacaatcaagtaggactctg

SEQ ID NO: 5813513 - DNA, 25 bp, Homo sapien
gagcaaaagcatgtagcgggtttcc

SEQ ID NO: 5813514 - DNA, 25 bp, Homo sapien
tctcgggccttgtcactgacaatca

SEQ ID NO: 5813515 - DNA, 25 bp, Homo sapien
cttcaggccctgcactgcctgctcg

SEQ ID NO: 5813516 - DNA, 25 bp, Homo sapien
gccctgcactgcctgctcgtccaga

SEQ ID NO: 5813517 - DNA, 25 bp, Homo sapien
atgagctgtcctcccagacccctgt

SEQ ID NO: 5813518 - DNA, 25 bp, Homo sapien
aagcatgtagcgggtttcccaagct

SEQ ID NO: 5813519 - DNA, 25 bp, Homo sapien
ggaagcctggaagggcgcccaaggc

SEQ ID NO: 5813520 - DNA, 25 bp, Homo sapien
cagcccgaccagcagctgctctatc

SEQ ID NO: 5813521 - DNA, 25 bp, Homo sapien
atcattggctgcgtgtactcaggaa

SEQ ID NO: 5813522 - DNA, 25 bp, Homo sapien
gccaccttcggcttcaggaatgtca

SEQ ID NO: 5813523 - DNA, 25 bp, Homo sapien
gagctgggtgatgcgtgggaaggcc

SEQ ID NO: 5813524 - DNA, 25 bp, Homo sapien
gcagaggagcagacacagctgcagg

SEQ ID NO: 5813525 - DNA, 25 bp, Homo sapien
agtttatgtctcggtcaaacaccgc

SEQ ID NO: 5813526 - DNA, 25 bp, Homo sapien
cgtacacctggctggccgtggtctt

SEQ ID NO: 5813527 - DNA, 25 bp, Homo sapien
gcgagtcatttatcagccattgcca

SEQ ID NO: 5813528 - DNA, 25 bp, Homo sapien
agcctggggaccgcgcccccgcctc

SEQ ID NO: 5813529 - DNA, 25 bp, Homo sapien
tctacatcggcaacttcatgaggaa

SEQ ID NO: 5813530 - DNA, 25 bp, Homo sapien
cgtggtccagcgtcttcagcagcgg

SEQ ID NO: 5813531 - DNA, 25 bp, Homo sapien
ccagcagctgctctatcacacgctc

SEQ ID NO: 5813532 - DNA, 25 bp, Homo sapien
gctccaggactggcttcagcaggca

SEQ ID NO: 5813533 - DNA, 25 bp, Homo sapien
aacacgctggcggcgtgagcacgga

SEQ ID NO: 5813534 - DNA, 25 bp, Homo sapien
gcgagggccgcctggggcgctgcat

SEQ ID NO: 5813535 - DNA, 25 bp, Homo sapien
ggaggaggaggagcaggtaagagcc

SEQ ID NO: 5813536 - DNA, 25 bp, Homo sapien
gtgggaactttgcgcgctgcagcct

SEQ ID NO: 5813537 - DNA, 25 bp, Homo sapien
tcctcccgcagcgccaggccatcaa

SEQ ID NO: 5813538 - DNA, 25 bp, Homo sapien
ggctgtcagcccgaggaccgccgcc

SEQ ID NO: 5813539 - DNA, 25 bp, Homo sapien
tcaagtactcgctgccctggaccac

SEQ ID NO: 5813540 - DNA, 25 bp, Homo sapien
ggggctgcctggcaaggtgttcgcc

SEQ ID NO: 5813541 - DNA, 25 bp, Homo sapien
ccgaagtttggcggcggctccggga

SEQ ID NO: 5813542 - DNA, 25 bp, Homo sapien
ttgacttggttgccaacaataaaag

SEQ ID NO: 5813543 - DNA, 25 bp, Homo sapien
agggaagggactctgagcattgtca

SEQ ID NO: 5813544 - DNA, 25 bp, Homo sapien
tggggcatcgcggaggaccacctgg

SEQ ID NO: 5813545 - DNA, 25 bp, Homo sapien
cgggagtcaccgctggtgcgtggcg

SEQ ID NO: 5813546 - DNA, 25 bp, Homo sapien
accgccgccgtcggatcatcatcaa

SEQ ID NO: 5813547 - DNA, 25 bp, Homo sapien
ggtccacgcctgtgcctgtcctggc

SEQ ID NO: 5813548 - DNA, 25 bp, Homo sapien
gcctggccctgagcgaagcacatta

SEQ ID NO: 5813549 - DNA, 25 bp, Homo sapien
ctgcctaatgaaggagccaggcttg

SEQ ID NO: 5813550 - DNA, 25 bp, Homo sapien
cgcgctggacagcgagggccgcgac

SEQ ID NO: 5813551 - DNA, 25 bp, Homo sapien
ctgaccttcctgcgcgcgggcaagc

SEQ ID NO: 5813552 - DNA, 25 bp, Homo sapien
cggtgctcttcgtgaccgtcaccgc

SEQ ID NO: 5813553 - DNA, 25 bp, Homo sapien
ggaccacgctggacgagttcccgct

SEQ ID NO: 5813554 - DNA, 25 bp, Homo sapien
tatggttcccacgtggcagcttggg

SEQ ID NO: 5813555 - DNA, 25 bp, Homo sapien
aaatttatctcaaccattcggtcct

SEQ ID NO: 5813556 - DNA, 25 bp, Homo sapien
aatgaaggagccaggcttgcacaca

SEQ ID NO: 5813557 - DNA, 25 bp, Homo sapien
gcccgagagggatgtgaaggcccaa

SEQ ID NO: 5813558 - DNA, 25 bp, Homo sapien
atttatctcaaccattcggtccttt

SEQ ID NO: 5813559 - DNA, 25 bp, Homo sapien
cctcaacgtgtgcgatgactacgac

SEQ ID NO: 5813560 - DNA, 25 bp, Homo sapien
acatcaggaatgtttgtgtgcatgg

SEQ ID NO: 5813561 - DNA, 25 bp, Homo sapien
caggcactcaaccactatttgttga

SEQ ID NO: 5813562 - DNA, 25 bp, Homo sapien
ctggggcgctgcatgcggcgactgc

SEQ ID NO: 5813563 - DNA, 25 bp, Homo sapien
cactgccctcccccttgccagtgtt

SEQ ID NO: 5813564 - DNA, 25 bp, Homo sapien
ccgtggccctgaactccctgcgggg

SEQ ID NO: 5813565 - DNA, 25 bp, Homo sapien
gctgctgcaagcgccgctacctgca

SEQ ID NO: 5813566 - DNA, 25 bp, Homo sapien
aggcagagcgggctccccgggcgac

SEQ ID NO: 5813567 - DNA, 25 bp, Homo sapien
cttcctcccgcagcgccaggccatc

SEQ ID NO: 5813568 - DNA, 25 bp, Homo sapien
ggctgaatagcatccctggtccctc

SEQ ID NO: 5813569 - DNA, 25 bp, Homo sapien
accttgcccagcctgagggaggagg

SEQ ID NO: 5813570 - DNA, 25 bp, Homo sapien
ggccgggccaactccgaggcgggga

SEQ ID NO: 5813571 - DNA, 25 bp, Homo sapien
cgctggtgcgtggcggcgtggagcg

SEQ ID NO: 5813572 - DNA, 25 bp, Homo sapien
caactccgaggcggggacgccgcga

SEQ ID NO: 5813573 - DNA, 25 bp, Homo sapien
gagcccacgccccgcggggaaacgc

SEQ ID NO: 5813574 - DNA, 25 bp, Homo sapien
cccgggcgacttccaggcccctctc

SEQ ID NO: 5813575 - DNA, 25 bp, Homo sapien
gagctgcacctcggacgcctccttc

SEQ ID NO: 5813576 - DNA, 25 bp, Homo sapien
ggcagcttggggacctaatatagcc

SEQ ID NO: 5813577 - DNA, 25 bp, Homo sapien
agcccagacacattttctgggtcct

SEQ ID NO: 5813578 - DNA, 25 bp, Homo sapien
ggtacatgtgtgtctacaaatggtg

SEQ ID NO: 5813579 - DNA, 25 bp, Homo sapien
tgcgcgacatggtggagaggccgca

SEQ ID NO: 5813580 - DNA, 25 bp, Homo sapien
tggagcgcgcttgttacggccaagg

SEQ ID NO: 5813581 - DNA, 25 bp, Homo sapien
ataatttttattgataggtacatgt

SEQ ID NO: 5813582 - DNA, 25 bp, Homo sapien
atctccccagggaatgctccagcaa

SEQ ID NO: 5813583 - DNA, 25 bp, Homo sapien
ccgcctggggcgctgcatgcggcga

SEQ ID NO: 5813584 - DNA, 25 bp, Homo sapien
tcaaggcctgcaccaacttcgacga

SEQ ID NO: 5813585 - DNA, 25 bp, Homo sapien
ccaaccccaggtctaagtccagtct

SEQ ID NO: 5813586 - DNA, 25 bp, Homo sapien
ctgggagttcacgggagccggagct

SEQ ID NO: 5813587 - DNA, 25 bp, Homo sapien
gctgagccgggccccgggaccgaag

SEQ ID NO: 5813588 - DNA, 25 bp, Homo sapien
gtccagtctgtctttgtaagcatgg

SEQ ID NO: 5813589 - DNA, 25 bp, Homo sapien
cccagacacattttctgggtcctga

SEQ ID NO: 5813590 - DNA, 25 bp, Homo sapien
acgtgcctggccctgagcgaagcac

SEQ ID NO: 5813591 - DNA, 25 bp, Homo sapien
atgactacgacgtcacctgcaacga

SEQ ID NO: 5813592 - DNA, 25 bp, Homo sapien
cgacatggtggagaggccgcactcg

SEQ ID NO: 5813593 - DNA, 25 bp, Homo sapien
actcgggctcgggggcggctgcacg

SEQ ID NO: 5813594 - DNA, 25 bp, Homo sapien
ttatctccccagggaatgctccagc

SEQ ID NO: 5813595 - DNA, 25 bp, Homo sapien
ggcatcaagtactcgctgccctgga

SEQ ID NO: 5813596 - DNA, 25 bp, Homo sapien
cacattacatatatcatcaaattta

SEQ ID NO: 5813597 - DNA, 25 bp, Homo sapien
gcctgacacggggtgtgtgctacag

SEQ ID NO: 5813598 - DNA, 25 bp, Homo sapien
cgacttccaggcccctctcgcgtcc

SEQ ID NO: 5813599 - DNA, 25 bp, Homo sapien
tgtctacaaatggtgagcatttctt

SEQ ID NO: 5813600 - DNA, 25 bp, Homo sapien
cgcggccgggccaactccgaggcgg

SEQ ID NO: 5813601 - DNA, 25 bp, Homo sapien
aaactcgggctcgggggcggctgca

SEQ ID NO: 5813602 - DNA, 25 bp, Homo sapien
gctgctgtactggggcatcgcggag

SEQ ID NO: 5813603 - DNA, 25 bp, Homo sapien
cacgcctgtgcctgtcctggcctcc

SEQ ID NO: 5813604 - DNA, 25 bp, Homo sapien
gctgtccttccaggaggagctgctg

SEQ ID NO: 5813605 - DNA, 25 bp, Homo sapien
actggggcatcgcggaggaccacct

SEQ ID NO: 5813606 - DNA, 25 bp, Homo sapien
gggagccggagctgggctgcatgtg

SEQ ID NO: 5813607 - DNA, 25 bp, Homo sapien
gggatgtgaaggcccaaaatgaccc

SEQ ID NO: 5813608 - DNA, 25 bp, Homo sapien
cgttctaccgccgggcgcagcggct

SEQ ID NO: 5813609 - DNA, 25 bp, Homo sapien
cactgcccaaccccaggtctaagtc

SEQ ID NO: 5813610 - DNA, 25 bp, Homo sapien
gagttcccgctgacgcgcctgggcc

SEQ ID NO: 5813611 - DNA, 25 bp, Homo sapien
ggctgctgcgcgagatgtgcgcgct

SEQ ID NO: 5813612 - DNA, 25 bp, Homo sapien
gaccttcctgcgcgcgggcaagctg

SEQ ID NO: 5813613 - DNA, 25 bp, Homo sapien
aaggagccaggcttgcacacagaca

SEQ ID NO: 5813614 - DNA, 25 bp, Homo sapien
gacactgcccaaccccaggtctaag

SEQ ID NO: 5813615 - DNA, 25 bp, Homo sapien
cttcgacgacatcctcaacgtgtgc

SEQ ID NO: 5813616 - DNA, 25 bp, Homo sapien
aacttcgacgacatcctcaacgtgt

SEQ ID NO: 5813617 - DNA, 25 bp, Homo sapien
tcccactcatctgggagttcacggg

SEQ ID NO: 5813618 - DNA, 25 bp, Homo sapien
caactacgtcttatctccccaggga

SEQ ID NO: 5813619 - DNA, 25 bp, Homo sapien
ggcaagctgcggctgctgcgcgaga

SEQ ID NO: 5813620 - DNA, 25 bp, Homo sapien
gcccaaaatgaccctcttaccggga

SEQ ID NO: 5813621 - DNA, 25 bp, Homo sapien
accccgagcctgcaaactcgggctc

SEQ ID NO: 5813622 - DNA, 25 bp, Homo sapien
gaactccctgcgggggcctcgaaac

SEQ ID NO: 5813623 - DNA, 25 bp, Homo sapien
cgcgcgggcaagctgcggctgctgc

SEQ ID NO: 5813624 - DNA, 25 bp, Homo sapien
tggagcgggaggaagaggacgacgc

SEQ ID NO: 5813625 - DNA, 25 bp, Homo sapien
acaattctgactacgactacagcgc

SEQ ID NO: 5813626 - DNA, 25 bp, Homo sapien
ccaggtctaagtccagtctgtcttt

SEQ ID NO: 5813627 - DNA, 25 bp, Homo sapien
cgtggagcgcgcttgttacggccaa

SEQ ID NO: 5813628 - DNA, 25 bp, Homo sapien
aaaatgaccctcttaccgggagaca

SEQ ID NO: 5813629 - DNA, 25 bp, Homo sapien
aggactcgggagtcaccgctggtgc

SEQ ID NO: 5813630 - DNA, 25 bp, Homo sapien
gtgtttagaacagtgtccagcacaa

SEQ ID NO: 5813631 - DNA, 25 bp, Homo sapien
tccctgcgggggcctcgaaacccgc

SEQ ID NO: 5813632 - DNA, 25 bp, Homo sapien
aagggactctgagcattgtcacctc

SEQ ID NO: 5813633 - DNA, 25 bp, Homo sapien
acccactaggtatttgaggacactg

SEQ ID NO: 5813634 - DNA, 25 bp, Homo sapien
aggcggcatcaagtactcgctgccc

SEQ ID NO: 5813635 - DNA, 25 bp, Homo sapien
ctgcctggcaaggtgttcgcctgcc

SEQ ID NO: 5813636 - DNA, 25 bp, Homo sapien
caaccattcggtcctttctcaacgt

SEQ ID NO: 5813637 - DNA, 25 bp, Homo sapien
cagcccgaggaccgccgccgtcgga

SEQ ID NO: 5813638 - DNA, 25 bp, Homo sapien
gaaagtttatttactccagggcctg

SEQ ID NO: 5813639 - DNA, 25 bp, Homo sapien
gtcagcccgaggaccgccgccgtcg

SEQ ID NO: 5813640 - DNA, 25 bp, Homo sapien
ggaagccgcggccgggccaactccg

SEQ ID NO: 5813641 - DNA, 25 bp, Homo sapien
agggaatgctccagcaaccctgtgg

SEQ ID NO: 5813642 - DNA, 25 bp, Homo sapien
cattacatatatcatcaaatttatc

SEQ ID NO: 5813643 - DNA, 25 bp, Homo sapien
cctgtgcctgtcctggcctccactg

SEQ ID NO: 5813644 - DNA, 25 bp, Homo sapien
gcggcgtggagcgcgcttgttacgg

SEQ ID NO: 5813645 - DNA, 25 bp, Homo sapien
aactggtggcccgagagggatgtga

SEQ ID NO: 5813646 - DNA, 25 bp, Homo sapien
gcatcatgggggtccacgcctgtgc

SEQ ID NO: 5813647 - DNA, 25 bp, Homo sapien
gcctcctctgattgcacactggctg

SEQ ID NO: 5813648 - DNA, 25 bp, Homo sapien
tggtctgcctccctgttaatatgtg

SEQ ID NO: 5813649 - DNA, 25 bp, Homo sapien
tgcgtggcggcgtggagcgcgcttg

SEQ ID NO: 5813650 - DNA, 25 bp, Homo sapien
ctgctgcgcgagatgtgcgcgctgt

SEQ ID NO: 5813651 - DNA, 25 bp, Homo sapien
actcgctgccctggaccacgctgga

SEQ ID NO: 5813652 - DNA, 25 bp, Homo sapien
acttccaggcccctctcgcgtcctc

SEQ ID NO: 5813653 - DNA, 25 bp, Homo sapien
gcggggacgccgcgacgggaacttg

SEQ ID NO: 5813654 - DNA, 25 bp, Homo sapien
gttaatatgtgagcatcatgggggt

SEQ ID NO: 5813655 - DNA, 25 bp, Homo sapien
acgagttcccgctgacgcgcctggg

SEQ ID NO: 5813656 - DNA, 25 bp, Homo sapien
ttcgtgaccgtcaccgccgtcaacc

SEQ ID NO: 5813657 - DNA, 25 bp, Homo sapien
gccttcctcccgcagcgccaggcca

SEQ ID NO: 5813658 - DNA, 25 bp, Homo sapien
cttggttgccaacaataaaagtgaa

SEQ ID NO: 5813659 - DNA, 25 bp, Homo sapien
accacctggacggctgctgcaagcg

SEQ ID NO: 5813660 - DNA, 25 bp, Homo sapien
gctgggctgcatgtgccaactacgt

SEQ ID NO: 5813661 - DNA, 25 bp, Homo sapien
acacagacaattctagaactggtgg

SEQ ID NO: 5813662 - DNA, 25 bp, Homo sapien
gggaactttgcgcgctgcagcctcg

SEQ ID NO: 5813663 - DNA, 25 bp, Homo sapien
cgggaccgaagtttggcggcggctc

SEQ ID NO: 5813664 - DNA, 25 bp, Homo sapien
tcttcttcgaccgcaacccgggggc

SEQ ID NO: 5813665 - DNA, 25 bp, Homo sapien
ccttcctgcgcgcgggcaagctgcg

SEQ ID NO: 5813666 - DNA, 25 bp, Homo sapien
atttctttttgttacataagagaat

SEQ ID NO: 5813667 - DNA, 25 bp, Homo sapien
gcgcagcggctgcggccgcaggatg

SEQ ID NO: 5813668 - DNA, 25 bp, Homo sapien
ctgagcattgtcacctcctccagaa

SEQ ID NO: 5813669 - DNA, 25 bp, Homo sapien
ctgagggaggaggaggagcaggtaa

SEQ ID NO: 5813670 - DNA, 25 bp, Homo sapien
acacccactaggtatttgaggacac

SEQ ID NO: 5813671 - DNA, 25 bp, Homo sapien
gacacattttctgggtcctgaagat

SEQ ID NO: 5813672 - DNA, 25 bp, Homo sapien
tgattggcccacacaaggtttccca

SEQ ID NO: 5813673 - DNA, 25 bp, Homo sapien
ctccctgttaatatgtgagcatcat

SEQ ID NO: 5813674 - DNA, 25 bp, Homo sapien
cggtcctttctcaacgttcctaatc

SEQ ID NO: 5813675 - DNA, 25 bp, Homo sapien
aagtccagtctgtctttgtaagcat

SEQ ID NO: 5813676 - DNA, 25 bp, Homo sapien
aacgagttcttcttcgaccgcaacc

SEQ ID NO: 5813677 - DNA, 25 bp, Homo sapien
aatgctccagcaaccctgtggggga

SEQ ID NO: 5813678 - DNA, 25 bp, Homo sapien
gcattgtcacctcctccagaaagcc

SEQ ID NO: 5813679 - DNA, 25 bp, Homo sapien
ctgggtcctgaagataatttttatt

SEQ ID NO: 5813680 - DNA, 25 bp, Homo sapien
gagcatcatgggggtccacgcctgt

SEQ ID NO: 5813681 - DNA, 25 bp, Homo sapien
cctgcaccaacttcgacgacatcct

SEQ ID NO: 5813682 - DNA, 25 bp, Homo sapien
tgaacaaatgagtgaataaatgggt

SEQ ID NO: 5813683 - DNA, 25 bp, Homo sapien
agttcgcggagatggtggagcggga

SEQ ID NO: 5813684 - DNA, 25 bp, Homo sapien
gcatgcggcgactgcgcgacatggt

SEQ ID NO: 5813685 - DNA, 25 bp, Homo sapien
tggttcccacgtggcagcttgggga

SEQ ID NO: 5813686 - DNA, 25 bp, Homo sapien
gccgggcgcagcggctgcggccgca

SEQ ID NO: 5813687 - DNA, 25 bp, Homo sapien
ccgagagggatgtgaaggcccaaaa

SEQ ID NO: 5813688 - DNA, 25 bp, Homo sapien
ctgacacggggtgtgtgctacagtc

SEQ ID NO: 5813689 - DNA, 25 bp, Homo sapien
tcgctgccctggaccacgctggacg

SEQ ID NO: 5813690 - DNA, 25 bp, Homo sapien
gctccgggaggcagagcgggctccc

SEQ ID NO: 5813691 - DNA, 25 bp, Homo sapien
gacgtcacctgcaacgagttcttct

SEQ ID NO: 5813692 - DNA, 25 bp, Homo sapien
tgcatggtctgcctccctgttaata

SEQ ID NO: 5813693 - DNA, 25 bp, Homo sapien
acctcctccagaaagcctcctctga

SEQ ID NO: 5813694 - DNA, 25 bp, Homo sapien
gagggcgagggccgcctggggcgct

SEQ ID NO: 5813695 - DNA, 25 bp, Homo sapien
gcttggggacctaatatagccccac

SEQ ID NO: 5813696 - DNA, 25 bp, Homo sapien
gaggcggggacgccgcgacgggaac

SEQ ID NO: 5813697 - DNA, 25 bp, Homo sapien
gggtgtgtgctacagtctaagggct

SEQ ID NO: 5813698 - DNA, 25 bp, Homo sapien
gagcattgtcacctcctccagaaag

SEQ ID NO: 5813699 - DNA, 25 bp, Homo sapien
catgggggtccacgcctgtgcctgt

SEQ ID NO: 5813700 - DNA, 25 bp, Homo sapien
tcctaatcctttgcatcatagtagc

SEQ ID NO: 5813701 - DNA, 25 bp, Homo sapien
agcatggaaatatggttcccacgtg

SEQ ID NO: 5813702 - DNA, 25 bp, Homo sapien
tcccccttgccagtgtttagaacag

SEQ ID NO: 5813703 - DNA, 25 bp, Homo sapien
gagctgggctgcatgtgccaactac

SEQ ID NO: 5813704 - DNA, 25 bp, Homo sapien
gccccgccagggctgtcagcccgag

SEQ ID NO: 5813705 - DNA, 25 bp, Homo sapien
caagggagcaggctgcctaatgaag

SEQ ID NO: 5813706 - DNA, 25 bp, Homo sapien
cacccggccttcctcccgcagcgcc

SEQ ID NO: 5813707 - DNA, 25 bp, Homo sapien
gggaaacgcgccaccacgagggaag

SEQ ID NO: 5813708 - DNA, 25 bp, Homo sapien
ctgcctccctgttaatatgtgagca

SEQ ID NO: 5813709 - DNA, 25 bp, Homo sapien
ccacgtggcagcttggggacctaat

SEQ ID NO: 5813710 - DNA, 25 bp, Homo sapien
ggctgcctaatgaaggagccaggct

SEQ ID NO: 5813711 - DNA, 25 bp, Homo sapien
gctgcacctcggacgcctccttcca

SEQ ID NO: 5813712 - DNA, 25 bp, Homo sapien
gaggaggagcaggtaagagcccacg

SEQ ID NO: 5813713 - DNA, 25 bp, Homo sapien
gcccaaccccaggtctaagtccagt

SEQ ID NO: 5813714 - DNA, 25 bp, Homo sapien
cgggaacttgaggtgggaactttgc

SEQ ID NO: 5813715 - DNA, 25 bp, Homo sapien
ctcccgcagcgccaggccatcaagg

SEQ ID NO: 5813716 - DNA, 25 bp, Homo sapien
cagcctgagggaggaggaggagcag

SEQ ID NO: 5813717 - DNA, 25 bp, Homo sapien
cacctcggacgcctccttccacccg

SEQ ID NO: 5813718 - DNA, 25 bp, Homo sapien
ttcggtcctttctcaacgttcctaa

SEQ ID NO: 5813719 - DNA, 25 bp, Homo sapien
gcgcttgttacggccaagggagcag

SEQ ID NO: 5813720 - DNA, 25 bp, Homo sapien
gaaacgcgccaccacgagggaaggg

SEQ ID NO: 5813721 - DNA, 25 bp, Homo sapien
tgccctggaccacgctggacgagtt

SEQ ID NO: 5813722 - DNA, 25 bp, Homo sapien
acgttcctaatcctttgcatcatag

SEQ ID NO: 5813723 - DNA, 25 bp, Homo sapien
ccctctcgcgtcctcgccccggacc

SEQ ID NO: 5813724 - DNA, 25 bp, Homo sapien
ctcctccagaaagcctcctctgatt

SEQ ID NO: 5813725 - DNA, 25 bp, Homo sapien
gaagtttggcggcggctccgggagg

SEQ ID NO: 5813726 - DNA, 25 bp, Homo sapien
tggttgccaacaataaaagtgaagt

SEQ ID NO: 5813727 - DNA, 25 bp, Homo sapien
cgggagacaattctgactacgacta

SEQ ID NO: 5813728 - DNA, 25 bp, Homo sapien
tgctgtactggggcatcgcggagga

SEQ ID NO: 5813729 - DNA, 25 bp, Homo sapien
cggctgctgcaagcgccgctacctg

SEQ ID NO: 5813730 - DNA, 25 bp, Homo sapien
ctacgacgtcacctgcaacgagttc

SEQ ID NO: 5813731 - DNA, 25 bp, Homo sapien
cgccccgcggggaaacgcgccacca

SEQ ID NO: 5813732 - DNA, 25 bp, Homo sapien
ccgcactcggggctgcctggcaagg

SEQ ID NO: 5813733 - DNA, 25 bp, Homo sapien
ctctgagcattgtcacctcctccag

SEQ ID NO: 5813734 - DNA, 25 bp, Homo sapien
ctccgagggcgggagctgagccggg

SEQ ID NO: 5813735 - DNA, 25 bp, Homo sapien
gacggctgctgcaagcgccgctacc

SEQ ID NO: 5813736 - DNA, 25 bp, Homo sapien
ctgggccagctcaaggcctgcacca

SEQ ID NO: 5813737 - DNA, 25 bp, Homo sapien
acatcctcaacgtgtgcgatgacta

SEQ ID NO: 5813738 - DNA, 25 bp, Homo sapien
gagggccgcgacagcgagggcccgg

SEQ ID NO: 5813739 - DNA, 25 bp, Homo sapien
ggtgcgtggcggcgtggagcgcgct

SEQ ID NO: 5813740 - DNA, 25 bp, Homo sapien
tgtgtgtctacaaatggtgagcatt

SEQ ID NO: 5813741 - DNA, 25 bp, Homo sapien
gctgcggccgcaggatgagccccgc

SEQ ID NO: 5813742 - DNA, 25 bp, Homo sapien
ggcgactgcgcgacatggtggagag

SEQ ID NO: 5813743 - DNA, 25 bp, Homo sapien
atcatagtagcccagacacattttc

SEQ ID NO: 5813744 - DNA, 25 bp, Homo sapien
ccgaagcgcgaaccggaccccgagc

SEQ ID NO: 5813745 - DNA, 25 bp, Homo sapien
accctgtgggggaagtgttttcaca

SEQ ID NO: 5813746 - DNA, 25 bp, Homo sapien
cgcaacccgggggccttcggcacta

SEQ ID NO: 5813747 - DNA, 25 bp, Homo sapien
catcaagtactcgctgccctggacc

SEQ ID NO: 5813748 - DNA, 25 bp, Homo sapien
tcaaatttatctcaaccattcggtc

SEQ ID NO: 5813749 - DNA, 25 bp, Homo sapien
ggagtcaccgctggtgcgtggcggc

SEQ ID NO: 5813750 - DNA, 25 bp, Homo sapien
aatatggttcccacgtggcagcttg

SEQ ID NO: 5813751 - DNA, 25 bp, Homo sapien
gccagtgtttagaacagtgtccagc

SEQ ID NO: 5813752 - DNA, 25 bp, Homo sapien
gaggccgcactcggggctgcctggc

SEQ ID NO: 5813753 - DNA, 25 bp, Homo sapien
agagcgggctccccgggcgacttcc

SEQ ID NO: 5813754 - DNA, 25 bp, Homo sapien
ggccttcggcactatcctgaccttc

SEQ ID NO: 5813755 - DNA, 25 bp, Homo sapien
gtgctcttcgtgaccgtcaccgccg

SEQ ID NO: 5813756 - DNA, 25 bp, Homo sapien
cgggcgccaccgaagcgcgaaccgg

SEQ ID NO: 5813757 - DNA, 25 bp, Homo sapien
caccgaagcgcgaaccggaccccga

SEQ ID NO: 5813758 - DNA, 25 bp, Homo sapien
ggcgacagaggactcgggagtcacc

SEQ ID NO: 5813759 - DNA, 25 bp, Homo sapien
cccacaggactatgtgattggccca

SEQ ID NO: 5813760 - DNA, 25 bp, Homo sapien
tgaaggcccaaaatgaccctcttac

SEQ ID NO: 5813761 - DNA, 25 bp, Homo sapien
ggggaagtgttttcacacccactag

SEQ ID NO: 5813762 - DNA, 25 bp, Homo sapien
gggactctgagcattgtcacctcct

SEQ ID NO: 5813763 - DNA, 25 bp, Homo sapien
gggccagctcaaggcctgcaccaac

SEQ ID NO: 5813764 - DNA, 25 bp, Homo sapien
ttctttttgttacataagagaatga

SEQ ID NO: 5813765 - DNA, 25 bp, Homo sapien
tacagtctaagggctcccactcatc

SEQ ID NO: 5813766 - DNA, 25 bp, Homo sapien
caacgtaggcggcatcaagtactcg

SEQ ID NO: 5813767 - DNA, 25 bp, Homo sapien
ggcgccaccgaagcgcgaaccggac

SEQ ID NO: 5813768 - DNA, 25 bp, Homo sapien
catccctggtccctcctgacatcag

SEQ ID NO: 5813769 - DNA, 25 bp, Homo sapien
gactacagcgcgctgagctgcacct

SEQ ID NO: 5813770 - DNA, 25 bp, Homo sapien
ggaccgaagtttggcggcggctccg

SEQ ID NO: 5813771 - DNA, 25 bp, Homo sapien
cgagggaagggactctgagcattgt

SEQ ID NO: 5813772 - DNA, 25 bp, Homo sapien
tggcccacacaaggtttcccaaaaa

SEQ ID NO: 5813773 - DNA, 25 bp, Homo sapien
aaccggaccccgagcctgcaaactc

SEQ ID NO: 5813774 - DNA, 25 bp, Homo sapien
cgccgtcaacctctccgtcagcacc

SEQ ID NO: 5813775 - DNA, 25 bp, Homo sapien
atcaacgtaggcggcatcaagtact

SEQ ID NO: 5813776 - DNA, 25 bp, Homo sapien
gcactatcctgaccttcctgcgcgc

SEQ ID NO: 5813777 - DNA, 25 bp, Homo sapien
gcacacagacaattctagaactggt

SEQ ID NO: 5813778 - DNA, 25 bp, Homo sapien
gcggcgactgcgcgacatggtggag

SEQ ID NO: 5813779 - DNA, 25 bp, Homo sapien
accacgctggacgagttcccgctga

SEQ ID NO: 5813780 - DNA, 25 bp, Homo sapien
cggagctgggctgcatgtgccaact

SEQ ID NO: 5813781 - DNA, 25 bp, Homo sapien
tgccaacaataaaagtgaagttttt

SEQ ID NO: 5813782 - DNA, 25 bp, Homo sapien
ccatcaagggcgcgttctaccgccg

SEQ ID NO: 5813783 - DNA, 25 bp, Homo sapien
agacaattctagaactggtggcccg

SEQ ID NO: 5813784 - DNA, 25 bp, Homo sapien
ctgcgggggcctcgaaacccgcctg

SEQ ID NO: 5813785 - DNA, 25 bp, Homo sapien
tgggggaagtgttttcacacccact

SEQ ID NO: 5813786 - DNA, 25 bp, Homo sapien
ctggctgaatagcatccctggtccc

SEQ ID NO: 5813787 - DNA, 25 bp, Homo sapien
tccccgggcgacttccaggcccctc

SEQ ID NO: 5813788 - DNA, 25 bp, Homo sapien
accactgccctcccccttgccagtg

SEQ ID NO: 5813789 - DNA, 25 bp, Homo sapien
atggaaagtttatttactccagggc

SEQ ID NO: 5813790 - DNA, 25 bp, Homo sapien
gcttgttacggccaagggagcaggc

SEQ ID NO: 5813791 - DNA, 25 bp, Homo sapien
atgagccccgccagggctgtcagcc

SEQ ID NO: 5813792 - DNA, 25 bp, Homo sapien
ggggccttcggcactatcctgacct

SEQ ID NO: 5813793 - DNA, 25 bp, Homo sapien
ggggacgccgcgacgggaacttgag

SEQ ID NO: 5813794 - DNA, 25 bp, Homo sapien
cggctccgggaggcagagcgggctc

SEQ ID NO: 5813795 - DNA, 25 bp, Homo sapien
gatttttgacgtgcctggccctgag

SEQ ID NO: 5813796 - DNA, 25 bp, Homo sapien
cggagatggtggagcgggaggaaga

SEQ ID NO: 5813797 - DNA, 25 bp, Homo sapien
tacatgtgtgtctacaaatggtgag

SEQ ID NO: 5813798 - DNA, 25 bp, Homo sapien
cattcggtcctttctcaacgttcct

SEQ ID NO: 5813799 - DNA, 25 bp, Homo sapien
gcctgtcggtgctcttcgtgaccgt

SEQ ID NO: 5813800 - DNA, 25 bp, Homo sapien
ccagggaatgctccagcaaccctgt

SEQ ID NO: 5813801 - DNA, 25 bp, Homo sapien
gggcggctgcacgtggccgtggccc

SEQ ID NO: 5813802 - DNA, 25 bp, Homo sapien
ccaccactgccctcccccttgccag

SEQ ID NO: 5813803 - DNA, 25 bp, Homo sapien
gctcaaggcctgcaccaacttcgac

SEQ ID NO: 5813804 - DNA, 25 bp, Homo sapien
atatcatcaaatttatctcaaccat

SEQ ID NO: 5813805 - DNA, 25 bp, Homo sapien
tagccccacaggactatgtgattgg

SEQ ID NO: 5813806 - DNA, 25 bp, Homo sapien
gaggccagggcgacagaggactcgg

SEQ ID NO: 5813807 - DNA, 25 bp, Homo sapien
gatgtgaaggcccaaaatgaccctc

SEQ ID NO: 5813808 - DNA, 25 bp, Homo sapien
gaactttgcgcgctgcagcctcgcc

SEQ ID NO: 5813809 - DNA, 25 bp, Homo sapien
ggcgcgttctaccgccgggcgcagc

SEQ ID NO: 5813810 - DNA, 25 bp, Homo sapien
ctccccagggaatgctccagcaacc

SEQ ID NO: 5813811 - DNA, 25 bp, Homo sapien
ccccaggtctaagtccagtctgtct

SEQ ID NO: 5813812 - DNA, 25 bp, Homo sapien
aggagcaggtaagagcccacgcccc

SEQ ID NO: 5813813 - DNA, 25 bp, Homo sapien
ctggacgagttcccgctgacgcgcc

SEQ ID NO: 5813814 - DNA, 25 bp, Homo sapien
cacactggctgaatagcatccctgg

SEQ ID NO: 5813815 - DNA, 25 bp, Homo sapien
gcggcggctccgggaggcagagcgg

SEQ ID NO: 5813816 - DNA, 25 bp, Homo sapien
cgcgctgcagcctcgccgggcgcca

SEQ ID NO: 5813817 - DNA, 25 bp, Homo sapien
gggaggaagaggacgacgcgctgga

SEQ ID NO: 5813818 - DNA, 25 bp, Homo sapien
aattctagaactggtggcccgagag

SEQ ID NO: 5813819 - DNA, 25 bp, Homo sapien
gtgccaactacgtcttatctcccca

SEQ ID NO: 5813820 - DNA, 25 bp, Homo sapien
gagctgctgtactggggcatcgcgg

SEQ ID NO: 5813821 - DNA, 25 bp, Homo sapien
gtggctccgagggcgggagctgagc

SEQ ID NO: 5813822 - DNA, 25 bp, Homo sapien
ccactcatctgggagttcacgggag

SEQ ID NO: 5813823 - DNA, 25 bp, Homo sapien
atcatcatcaacgtaggcggcatca

SEQ ID NO: 5813824 - DNA, 25 bp, Homo sapien
tgtgcctgtcctggcctccactgtg

SEQ ID NO: 5813825 - DNA, 25 bp, Homo sapien
ccttgccagtgtttagaacagtgtc

SEQ ID NO: 5813826 - DNA, 25 bp, Homo sapien
gctacagtctaagggctcccactca

SEQ ID NO: 5813827 - DNA, 25 bp, Homo sapien
cgtcaccgccgtcaacctctccgtc

SEQ ID NO: 5813828 - DNA, 25 bp, Homo sapien
ccactaggtatttgaggacactgcc

SEQ ID NO: 5813829 - DNA, 25 bp, Homo sapien
caacgttcctaatcctttgcatcat

SEQ ID NO: 5813830 - DNA, 25 bp, Homo sapien
acagcgcgctgagctgcacctcgga

SEQ ID NO: 5813831 - DNA, 25 bp, Homo sapien
atagcatccctggtccctcctgaca

SEQ ID NO: 5813832 - DNA, 25 bp, Homo sapien
aacagtgtccagcacaaacaggcac

SEQ ID NO: 5813833 - DNA, 25 bp, Homo sapien
cccgggggccttcggcactatcctg

SEQ ID NO: 5813834 - DNA, 25 bp, Homo sapien
gtactggggcatcgcggaggaccac

SEQ ID NO: 5813835 - DNA, 25 bp, Homo sapien
agtgaataaatgggtggtgtgattt

SEQ ID NO: 5813836 - DNA, 25 bp, Homo sapien
gcccctctcgcgtcctcgccccgga

SEQ ID NO: 5813837 - DNA, 25 bp, Homo sapien
atcaagggcgcgttctaccgccggg

SEQ ID NO: 5813838 - DNA, 25 bp, Homo sapien
ccaaaaatttgacttggttgccaac

SEQ ID NO: 5813839 - DNA, 25 bp, Homo sapien
aagccgcggccgggccaactccgag

SEQ ID NO: 5813840 - DNA, 25 bp, Homo sapien
acctctccgtcagcaccttgcccag

SEQ ID NO: 5813841 - DNA, 25 bp, Homo sapien
ggggcgctgcatgcggcgactgcgc

SEQ ID NO: 5813842 - DNA, 25 bp, Homo sapien
ggcgctgcatgcggcgactgcgcga

SEQ ID NO: 5813843 - DNA, 25 bp, Homo sapien
gagcgaagcacattacatatatcat

SEQ ID NO: 5813844 - DNA, 25 bp, Homo sapien
ttgttacggccaagggagcaggctg

SEQ ID NO: 5813845 - DNA, 25 bp, Homo sapien
agcggctgcggccgcaggatgagcc

SEQ ID NO: 5813846 - DNA, 25 bp, Homo sapien
ttgcacacagacaattctagaactg

SEQ ID NO: 5813847 - DNA, 25 bp, Homo sapien
gttcccgctgacgcgcctgggccag

SEQ ID NO: 5813848 - DNA, 25 bp, Homo sapien
gtgctacagtctaagggctcccact

SEQ ID NO: 5813849 - DNA, 25 bp, Homo sapien
tcggacgcctccttccacccggcct

SEQ ID NO: 5813850 - DNA, 25 bp, Homo sapien
gagaggccgcactcggggctgcctg

SEQ ID NO: 5813851 - DNA, 25 bp, Homo sapien
ggtggagaggccgcactcggggctg

SEQ ID NO: 5813852 - DNA, 25 bp, Homo sapien
aaccccaggtctaagtccagtctgt

SEQ ID NO: 5813853 - DNA, 25 bp, Homo sapien
gcgctgtccttccaggaggagctgc

SEQ ID NO: 5813854 - DNA, 25 bp, Homo sapien
ttctgggtcctgaagataattttta

SEQ ID NO: 5813855 - DNA, 25 bp, Homo sapien
gaggaccgccgccgtcggatcatca

SEQ ID NO: 5813856 - DNA, 25 bp, Homo sapien
acgactacagcgcgctgagctgcac

SEQ ID NO: 5813857 - DNA, 25 bp, Homo sapien
cgggccaactccgaggcggggacgc

SEQ ID NO: 5813858 - DNA, 25 bp, Homo sapien
tgtccttccaggaggagctgctgta

SEQ ID NO: 5813859 - DNA, 25 bp, Homo sapien
gtgttcgcctgcctgtcggtgctct

SEQ ID NO: 5813860 - DNA, 25 bp, Homo sapien
acaattctagaactggtggcccgag

SEQ ID NO: 5813861 - DNA, 25 bp, Homo sapien
caacaataaaagtgaagttttttca

SEQ ID NO: 5813862 - DNA, 25 bp, Homo sapien
cgaaccggaccccgagcctgcaaac

SEQ ID NO: 5813863 - DNA, 25 bp, Homo sapien
ctaatcctttgcatcatagtagccc

SEQ ID NO: 5813864 - DNA, 25 bp, Homo sapien
cgggaggcagagcgggctccccggg

SEQ ID NO: 5813865 - DNA, 25 bp, Homo sapien
taagcatggaaatatggttcccacg

SEQ ID NO: 5813866 - DNA, 25 bp, Homo sapien
tggacggctgctgcaagcgccgcta

SEQ ID NO: 5813867 - DNA, 25 bp, Homo sapien
cgccgccgtcggatcatcatcaacg

SEQ ID NO: 5813868 - DNA, 25 bp, Homo sapien
gggcctgacacggggtgtgtgctac

SEQ ID NO: 5813869 - DNA, 25 bp, Homo sapien
ctaatgaaggagccaggcttgcaca

SEQ ID NO: 5813870 - DNA, 25 bp, Homo sapien
ctacagcgcgctgagctgcacctcg

SEQ ID NO: 5813871 - DNA, 25 bp, Homo sapien
taaatgggtggtgtgatttttgacg

SEQ ID NO: 5813872 - DNA, 25 bp, Homo sapien
aggcccctctcgcgtcctcgccccg

SEQ ID NO: 5813873 - DNA, 25 bp, Homo sapien
ctaagggctcccactcatctgggag

SEQ ID NO: 5813874 - DNA, 25 bp, Homo sapien
tttttattgataggtacatgtgtgt

SEQ ID NO: 5813875 - DNA, 25 bp, Homo sapien
cgcctccttccacccggccttcctc

SEQ ID NO: 5813876 - DNA, 25 bp, Homo sapien
aagtactcgctgccctggaccacgc

SEQ ID NO: 5813877 - DNA, 25 bp, Homo sapien
caaatggtgagcatttctttttgtt

SEQ ID NO: 5813878 - DNA, 25 bp, Homo sapien
tcgccccggacccgtgggcagccgg

SEQ ID NO: 5813879 - DNA, 25 bp, Homo sapien
aacccgcctgcggggaggccagggc

SEQ ID NO: 5813880 - DNA, 25 bp, Homo sapien
cgggcaagctgcggctgctgcgcga

SEQ ID NO: 5813881 - DNA, 25 bp, Homo sapien
cggggaaacgcgccaccacgaggga

SEQ ID NO: 5813882 - DNA, 25 bp, Homo sapien
gcggctgcacgtggccgtggccctg

SEQ ID NO: 5813883 - DNA, 25 bp, Homo sapien
acatggtggagaggccgcactcggg

SEQ ID NO: 5813884 - DNA, 25 bp, Homo sapien
ctgcaacgagttcttcttcgaccgc

SEQ ID NO: 5813885 - DNA, 25 bp, Homo sapien
cagcgccaggccatcaagggcgcgt

SEQ ID NO: 5813886 - DNA, 25 bp, Homo sapien
gccggagctgggctgcatgtgccaa

SEQ ID NO: 5813887 - DNA, 25 bp, Homo sapien
tccttccaggaggagctgctgtact

SEQ ID NO: 5813888 - DNA, 25 bp, Homo sapien
cagtctaagggctcccactcatctg

SEQ ID NO: 5813889 - DNA, 25 bp, Homo sapien
ctgcctgtcggtgctcttcgtgacc

SEQ ID NO: 5813890 - DNA, 25 bp, Homo sapien
ccctgaactccctgcgggggcctcg

SEQ ID NO: 5813891 - DNA, 25 bp, Homo sapien
cgccagggctgtcagcccgaggacc

SEQ ID NO: 5813892 - DNA, 25 bp, Homo sapien
tcccgctgacgcgcctgggccagct

SEQ ID NO: 5813893 - DNA, 25 bp, Homo sapien
gctcgggggcggctgcacgtggccg

SEQ ID NO: 5813894 - DNA, 25 bp, Homo sapien
tcaacgtgtgcgatgactacgacgt

SEQ ID NO: 5813895 - DNA, 25 bp, Homo sapien
gctcccactcatctgggagttcacg

SEQ ID NO: 5813896 - DNA, 25 bp, Homo sapien
cgcgacagcgagggcccggccgagg

SEQ ID NO: 5813897 - DNA, 25 bp, Homo sapien
cagacacattttctgggtcctgaag

SEQ ID NO: 5813898 - DNA, 25 bp, Homo sapien
ctgagcgaagcacattacatatatc

SEQ ID NO: 5813899 - DNA, 25 bp, Homo sapien
tgggtggtgtgatttttgacgtgcc

SEQ ID NO: 5813900 - DNA, 25 bp, Homo sapien
tttggcggcggctccgggaggcaga

SEQ ID NO: 5813901 - DNA, 25 bp, Homo sapien
ggccctgaactccctgcgggggcct

SEQ ID NO: 5813902 - DNA, 25 bp, Homo sapien
gttcctaatcctttgcatcatagta

SEQ ID NO: 5813903 - DNA, 25 bp, Homo sapien
gaggacgacgcgctggacagcgagg

SEQ ID NO: 5813904 - DNA, 25 bp, Homo sapien
cgggctccccgggcgacttccaggc

SEQ ID NO: 5813905 - DNA, 25 bp, Homo sapien
taggtatttgaggacactgcccaac

SEQ ID NO: 5813906 - DNA, 25 bp, Homo sapien
gcgcctgggccagctcaaggcctgc

SEQ ID NO: 5813907 - DNA, 25 bp, Homo sapien
gactacgacgtcacctgcaacgagt

SEQ ID NO: 5813908 - DNA, 25 bp, Homo sapien
gtgtgctacagtctaagggctccca

SEQ ID NO: 5813909 - DNA, 25 bp, Homo sapien
gcaaactcgggctcgggggcggctg

SEQ ID NO: 5813910 - DNA, 25 bp, Homo sapien
cagcaccttgcccagcctgagggag

SEQ ID NO: 5813911 - DNA, 25 bp, Homo sapien
agctgcggctgctgcgcgagatgtg

SEQ ID NO: 5813912 - DNA, 25 bp, Homo sapien
attggcccacacaaggtttcccaaa

SEQ ID NO: 5813913 - DNA, 25 bp, Homo sapien
aatttttattgataggtacatgtgt

SEQ ID NO: 5813914 - DNA, 25 bp, Homo sapien
gcacgtggccgtggccctgaactcc

SEQ ID NO: 5813915 - DNA, 25 bp, Homo sapien
tttttgacgtgcctggccctgagcg

SEQ ID NO: 5813916 - DNA, 25 bp, Homo sapien
acgcgcctgggccagctcaaggcct

SEQ ID NO: 5813917 - DNA, 25 bp, Homo sapien
ggaccgccgccgtcggatcatcatc

SEQ ID NO: 5813918 - DNA, 25 bp, Homo sapien
cgctgagctgcacctcggacgcctc

SEQ ID NO: 5813919 - DNA, 25 bp, Homo sapien
actcatctgggagttcacgggagcc

SEQ ID NO: 5813920 - DNA, 25 bp, Homo sapien
gaatagcatccctggtccctcctga

SEQ ID NO: 5813921 - DNA, 25 bp, Homo sapien
tcgccgggcgccaccgaagcgcgaa

SEQ ID NO: 5813922 - DNA, 25 bp, Homo sapien
ccagggcgacagaggactcgggagt

SEQ ID NO: 5813923 - DNA, 25 bp, Homo sapien
ggagcaggctgcctaatgaaggagc

SEQ ID NO: 5813924 - DNA, 25 bp, Homo sapien
tcgggggcggctgcacgtggccgtg

SEQ ID NO: 5813925 - DNA, 25 bp, Homo sapien
cggctgcggccgcaggatgagcccc

SEQ ID NO: 5813926 - DNA, 25 bp, Homo sapien
tggcggcgtggagcgcgcttgttac

SEQ ID NO: 5813927 - DNA, 25 bp, Homo sapien
accgccgtcaacctctccgtcagca

SEQ ID NO: 5813928 - DNA, 25 bp, Homo sapien
agaagattgaggagttcgcggagat

SEQ ID NO: 5813929 - DNA, 25 bp, Homo sapien
ccagcacaaacaggcactcaaccac

SEQ ID NO: 5813930 - DNA, 25 bp, Homo sapien
gcgcgctgtccttccaggaggagct

SEQ ID NO: 5813931 - DNA, 25 bp, Homo sapien
gactcgggagtcaccgctggtgcgt

SEQ ID NO: 5813932 - DNA, 25 bp, Homo sapien
ccgaggaccgccgccgtcggatcat

SEQ ID NO: 5813933 - DNA, 25 bp, Homo sapien
cctcgccccggacccgtgggcagcc

SEQ ID NO: 5813934 - DNA, 25 bp, Homo sapien
gaagcgcgaaccggaccccgagcct

SEQ ID NO: 5813935 - DNA, 25 bp, Homo sapien
gcggcatcaagtactcgctgccctg

SEQ ID NO: 5813936 - DNA, 25 bp, Homo sapien
gttgccaacaataaaagtgaagttt

SEQ ID NO: 5813937 - DNA, 25 bp, Homo sapien
ggaatgctccagcaaccctgtgggg

SEQ ID NO: 5813938 - DNA, 25 bp, Homo sapien
gcagaagattgaggagttcgcggag

SEQ ID NO: 5813939 - DNA, 25 bp, Homo sapien
agggcgacagaggactcgggagtca

SEQ ID NO: 5813940 - DNA, 25 bp, Homo sapien
gagaatgaatggaaagtttatttac

SEQ ID NO: 5813941 - DNA, 25 bp, Homo sapien
cagtgtccagcacaaacaggcactc

SEQ ID NO: 5813942 - DNA, 25 bp, Homo sapien
gccgctacctgcagaagattgagga

SEQ ID NO: 5813943 - DNA, 25 bp, Homo sapien
actgcgcgacatggtggagaggccg

SEQ ID NO: 5813944 - DNA, 25 bp, Homo sapien
ccgtggctccgagggcgggagctga

SEQ ID NO: 5813945 - DNA, 25 bp, Homo sapien
cctccagaaagcctcctctgattgc

SEQ ID NO: 5813946 - DNA, 25 bp, Homo sapien
tcatcaacgtaggcggcatcaagta

SEQ ID NO: 5813947 - DNA, 25 bp, Homo sapien
gccgggcgccaccgaagcgcgaacc

SEQ ID NO: 5813948 - DNA, 25 bp, Homo sapien
ttctaccgccgggcgcagcggctgc

SEQ ID NO: 5813949 - DNA, 25 bp, Homo sapien
acgacgtcacctgcaacgagttctt

SEQ ID NO: 5813950 - DNA, 25 bp, Homo sapien
ctacctgcagaagattgaggagttc

SEQ ID NO: 5813951 - DNA, 25 bp, Homo sapien
gacgcgctggacagcgagggccgcg

SEQ ID NO: 5813952 - DNA, 25 bp, Homo sapien
ttgaggagttcgcggagatggtgga

SEQ ID NO: 5813953 - DNA, 25 bp, Homo sapien
actccagggcctgacacggggtgtg

SEQ ID NO: 5813954 - DNA, 25 bp, Homo sapien
ctgtcagcccgaggaccgccgccgt

SEQ ID NO: 5813955 - DNA, 25 bp, Homo sapien
tcctgaccttcctgcgcgcgggcaa

SEQ ID NO: 5813956 - DNA, 25 bp, Homo sapien
acagcgagggccgcgacagcgaggg

SEQ ID NO: 5813957 - DNA, 25 bp, Homo sapien
atctcaaccattcggtcctttctca

SEQ ID NO: 5813958 - DNA, 25 bp, Homo sapien
catgtgtgtctacaaatggtgagca

SEQ ID NO: 5813959 - DNA, 25 bp, Homo sapien
ctggcaaggtgttcgcctgcctgtc

SEQ ID NO: 5813960 - DNA, 25 bp, Homo sapien
agggctgtcagcccgaggaccgccg

SEQ ID NO: 5813961 - DNA, 25 bp, Homo sapien
gccgcgacagcgagggcccggccga

SEQ ID NO: 5813962 - DNA, 25 bp, Homo sapien
ggaacttgaggtgggaactttgcgc

SEQ ID NO: 5813963 - DNA, 25 bp, Homo sapien
acgtaggcggcatcaagtactcgct

SEQ ID NO: 5813964 - DNA, 25 bp, Homo sapien
caagctgcggctgctgcgcgagatg

SEQ ID NO: 5813965 - DNA, 25 bp, Homo sapien
actaggtatttgaggacactgccca

SEQ ID NO: 5813966 - DNA, 25 bp, Homo sapien
gtcagcaccttgcccagcctgaggg

SEQ ID NO: 5813967 - DNA, 25 bp, Homo sapien
caggatgagccccgccagggctgtc

SEQ ID NO: 5813968 - DNA, 25 bp, Homo sapien
actcggggctgcctggcaaggtgtt

SEQ ID NO: 5813969 - DNA, 25 bp, Homo sapien
ggctgcatgtgccaactacgtctta

SEQ ID NO: 5813970 - DNA, 25 bp, Homo sapien
gccagctcaaggcctgcaccaactt

SEQ ID NO: 5813971 - DNA, 25 bp, Homo sapien
gggctcccactcatctgggagttca

SEQ ID NO: 5813972 - DNA, 25 bp, Homo sapien
atgtgccaactacgtcttatctccc

SEQ ID NO: 5813973 - DNA, 25 bp, Homo sapien
ctaccgccgggcgcagcggctgcgg

SEQ ID NO: 5813974 - DNA, 25 bp, Homo sapien
cggcactatcctgaccttcctgcgc

SEQ ID NO: 5813975 - DNA, 25 bp, Homo sapien
cgcaggatgagccccgccagggctg

SEQ ID NO: 5813976 - DNA, 25 bp, Homo sapien
ggagttcgcggagatggtggagcgg

SEQ ID NO: 5813977 - DNA, 25 bp, Homo sapien
acgggagccggagctgggctgcatg

SEQ ID NO: 5813978 - DNA, 25 bp, Homo sapien
ggaggagctgctgtactggggcatc

SEQ ID NO: 5813979 - DNA, 25 bp, Homo sapien
ggacggaagccgcggccgggccaac

SEQ ID NO: 5813980 - DNA, 25 bp, Homo sapien
cgtcttatctccccagggaatgctc

SEQ ID NO: 5813981 - DNA, 25 bp, Homo sapien
agccaggcttgcacacagacaattc

SEQ ID NO: 5813982 - DNA, 25 bp, Homo sapien
gttcccacgtggcagcttggggacc

SEQ ID NO: 5813983 - DNA, 25 bp, Homo sapien
atgcggcgactgcgcgacatggtgg

SEQ ID NO: 5813984 - DNA, 25 bp, Homo sapien
tttgcgcgctgcagcctcgccgggc

SEQ ID NO: 5813985 - DNA, 25 bp, Homo sapien
ggtggtgtgatttttgacgtgcctg

SEQ ID NO: 5813986 - DNA, 25 bp, Homo sapien
gtttagaacagtgtccagcacaaac

SEQ ID NO: 5813987 - DNA, 25 bp, Homo sapien
agacaattctgactacgactacagc

SEQ ID NO: 5813988 - DNA, 25 bp, Homo sapien
tccttccacccggccttcctcccgc

SEQ ID NO: 5813989 - DNA, 25 bp, Homo sapien
gggtcctgaagataatttttattga

SEQ ID NO: 5813990 - DNA, 25 bp, Homo sapien
gaccgcaacccgggggccttcggca

SEQ ID NO: 5813991 - DNA, 25 bp, Homo sapien
cagggcctgacacggggtgtgtgct

SEQ ID NO: 5813992 - DNA, 25 bp, Homo sapien
atatatcatcaaatttatctcaacc

SEQ ID NO: 5813993 - DNA, 25 bp, Homo sapien
tcacctgcaacgagttcttcttcga

SEQ ID NO: 5813994 - DNA, 25 bp, Homo sapien
actttgcgcgctgcagcctcgccgg

SEQ ID NO: 5813995 - DNA, 25 bp, Homo sapien
caagggcgcgttctaccgccgggcg

SEQ ID NO: 5813996 - DNA, 25 bp, Homo sapien
cgagttcttcttcgaccgcaacccg

SEQ ID NO: 5813997 - DNA, 25 bp, Homo sapien
tcccaaaaatttgacttggttgcca

SEQ ID NO: 5813998 - DNA, 25 bp, Homo sapien
ggccgtggctccgagggcgggagct

SEQ ID NO: 5813999 - DNA, 25 bp, Homo sapien
cactggctgaatagcatccctggtc

SEQ ID NO: 5814000 - DNA, 25 bp, Homo sapien
acagacaattctagaactggtggcc

SEQ ID NO: 5814001 - DNA, 25 bp, Homo sapien
ctgaactccctgcgggggcctcgaa

SEQ ID NO: 5814002 - DNA, 25 bp, Homo sapien
cctggtccctcctgacatcaggaat

SEQ ID NO: 5814003 - DNA, 25 bp, Homo sapien
gtggcagcttggggacctaatatag

SEQ ID NO: 5814004 - DNA, 25 bp, Homo sapien
gggcgcagcggctgcggccgcagga

SEQ ID NO: 5814005 - DNA, 25 bp, Homo sapien
agcgggctccccgggcgacttccag

SEQ ID NO: 5814006 - DNA, 25 bp, Homo sapien
caacctctccgtcagcaccttgccc

SEQ ID NO: 5814007 - DNA, 25 bp, Homo sapien
aacttgaggtgggaactttgcgcgc

SEQ ID NO: 5814008 - DNA, 25 bp, Homo sapien
ctcctgacatcaggaatgtttgtgt

SEQ ID NO: 5814009 - DNA, 25 bp, Homo sapien
ggaggagcaggtaagagcccacgcc

SEQ ID NO: 5814010 - DNA, 25 bp, Homo sapien
gcatcatagtagcccagacacattt

SEQ ID NO: 5814011 - DNA, 25 bp, Homo sapien
ctaatatagccccacaggactatgt

SEQ ID NO: 5814012 - DNA, 25 bp, Homo sapien
cctcccccttgccagtgtttagaac

SEQ ID NO: 5814013 - DNA, 25 bp, Homo sapien
ctgcggctgctgcgcgagatgtgcg

SEQ ID NO: 5814014 - DNA, 25 bp, Homo sapien
tcctggcctccactgtgcccaccac

SEQ ID NO: 5814015 - DNA, 25 bp, Homo sapien
ccccttgccagtgtttagaacagtg

SEQ ID NO: 5814016 - DNA, 25 bp, Homo sapien
tccctggtccctcctgacatcagga

SEQ ID NO: 5814017 - DNA, 25 bp, Homo sapien
tatttgaggacactgcccaacccca

SEQ ID NO: 5814018 - DNA, 25 bp, Homo sapien
gtagcccagacacattttctgggtc

SEQ ID NO: 5814019 - DNA, 25 bp, Homo sapien
aagtgttttcacacccactaggtat

SEQ ID NO: 5814020 - DNA, 25 bp, Homo sapien
ctgcccaaccccaggtctaagtcca

SEQ ID NO: 5814021 - DNA, 25 bp, Homo sapien
accacgagggaagggactctgagca

SEQ ID NO: 5814022 - DNA, 25 bp, Homo sapien
aggtgttcgcctgcctgtcggtgct

SEQ ID NO: 5814023 - DNA, 25 bp, Homo sapien
ggaagtgttttcacacccactaggt

SEQ ID NO: 5814024 - DNA, 25 bp, Homo sapien
ggggacctaatatagccccacagga

SEQ ID NO: 5814025 - DNA, 25 bp, Homo sapien
ccggaccccgagcctgcaaactcgg

SEQ ID NO: 5814026 - DNA, 25 bp, Homo sapien
gcgcgcttgttacggccaagggagc

SEQ ID NO: 5814027 - DNA, 25 bp, Homo sapien
ctgcaagcgccgctacctgcagaag

SEQ ID NO: 5814028 - DNA, 25 bp, Homo sapien
caaatgagtgaataaatgggtggtg

SEQ ID NO: 5814029 - DNA, 25 bp, Homo sapien
tccacccggccttcctcccgcagcg

SEQ ID NO: 5814030 - DNA, 25 bp, Homo sapien
agggcgcgttctaccgccgggcgca

SEQ ID NO: 5814031 - DNA, 25 bp, Homo sapien
taatatgtgagcatcatgggggtcc

SEQ ID NO: 5814032 - DNA, 25 bp, Homo sapien
tttgtgtgcatggtctgcctccctg

SEQ ID NO: 5814033 - DNA, 25 bp, Homo sapien
tgcgcgctgcagcctcgccgggcgc

SEQ ID NO: 5814034 - DNA, 25 bp, Homo sapien
ggcaaggtgttcgcctgcctgtcgg

SEQ ID NO: 5814035 - DNA, 25 bp, Homo sapien
ccagtctgtctttgtaagcatggaa

SEQ ID NO: 5814036 - DNA, 25 bp, Homo sapien
cctgtgggggaagtgttttcacacc

SEQ ID NO: 5814037 - DNA, 25 bp, Homo sapien
aatgagtgaataaatgggtggtgtg

SEQ ID NO: 5814038 - DNA, 25 bp, Homo sapien
ggctgcctggcaaggtgttcgcctg

SEQ ID NO: 5814039 - DNA, 25 bp, Homo sapien
atggtggagcgggaggaagaggacg

SEQ ID NO: 5814040 - DNA, 25 bp, Homo sapien
acgtggcagcttggggacctaatat

SEQ ID NO: 5814041 - DNA, 25 bp, Homo sapien
ctgcatgcggcgactgcgcgacatg

SEQ ID NO: 5814042 - DNA, 25 bp, Homo sapien
cattttctgggtcctgaagataatt

SEQ ID NO: 5814043 - DNA, 25 bp, Homo sapien
atcctcaacgtgtgcgatgactacg

SEQ ID NO: 5814044 - DNA, 25 bp, Homo sapien
gcggctgctgcgcgagatgtgcgcg

SEQ ID NO: 5814045 - DNA, 25 bp, Homo sapien
actatcctgaccttcctgcgcgcgg

SEQ ID NO: 5814046 - DNA, 25 bp, Homo sapien
tgcggccgcaggatgagccccgcca

SEQ ID NO: 5814047 - DNA, 25 bp, Homo sapien
ggtaagagcccacgccccgcgggga

SEQ ID NO: 5814048 - DNA, 25 bp, Homo sapien
gcctccctgttaatatgtgagcatc

SEQ ID NO: 5814049 - DNA, 25 bp, Homo sapien
aatggtgagcatttctttttgttac

SEQ ID NO: 5814050 - DNA, 25 bp, Homo sapien
ggacagcgagggccgcgacagcgag

SEQ ID NO: 5814051 - DNA, 25 bp, Homo sapien
cctcgccgggcgccaccgaagcgcg

SEQ ID NO: 5814052 - DNA, 25 bp, Homo sapien
ggaggcagagcgggctccccgggcg

SEQ ID NO: 5814053 - DNA, 25 bp, Homo sapien
gtgttttcacacccactaggtattt

SEQ ID NO: 5814054 - DNA, 25 bp, Homo sapien
aataaatgggtggtgtgatttttga

SEQ ID NO: 5814055 - DNA, 25 bp, Homo sapien
tggtgagcatttctttttgttacat

SEQ ID NO: 5814056 - DNA, 25 bp, Homo sapien
aaggcctgcaccaacttcgacgaca

SEQ ID NO: 5814057 - DNA, 25 bp, Homo sapien
accgctggtgcgtggcggcgtggag

SEQ ID NO: 5814058 - DNA, 25 bp, Homo sapien
gcctaatgaaggagccaggcttgca

SEQ ID NO: 5814059 - DNA, 25 bp, Homo sapien
gcatgtgccaactacgtcttatctc

SEQ ID NO: 5814060 - DNA, 25 bp, Homo sapien
acgtggccgtggccctgaactccct

SEQ ID NO: 5814061 - DNA, 25 bp, Homo sapien
cctctgattgcacactggctgaata

SEQ ID NO: 5814062 - DNA, 25 bp, Homo sapien
gataggtacatgtgtgtctacaaat

SEQ ID NO: 5814063 - DNA, 25 bp, Homo sapien
tttgacgtgcctggccctgagcgaa

SEQ ID NO: 5814064 - DNA, 25 bp, Homo sapien
cccgccagggctgtcagcccgagga

SEQ ID NO: 5814065 - DNA, 25 bp, Homo sapien
cctgacatcaggaatgtttgtgtgc

SEQ ID NO: 5814066 - DNA, 25 bp, Homo sapien
catcaaatttatctcaaccattcgg

SEQ ID NO: 5814067 - DNA, 25 bp, Homo sapien
tgtcctggcctccactgtgcccacc

SEQ ID NO: 5814068 - DNA, 25 bp, Homo sapien
gagccggagctgggctgcatgtgcc

SEQ ID NO: 5814069 - DNA, 25 bp, Homo sapien
tatagccccacaggactatgtgatt

SEQ ID NO: 5814070 - DNA, 25 bp, Homo sapien
cggggcggccgtggctccgagggcg

SEQ ID NO: 5814071 - DNA, 25 bp, Homo sapien
tcgcctgcctgtcggtgctcttcgt

SEQ ID NO: 5814072 - DNA, 25 bp, Homo sapien
cgcgaaccggaccccgagcctgcaa

SEQ ID NO: 5814073 - DNA, 25 bp, Homo sapien
tagtagcccagacacattttctggg

SEQ ID NO: 5814074 - DNA, 25 bp, Homo sapien
tgtgattggcccacacaaggtttcc

SEQ ID NO: 5814075 - DNA, 25 bp, Homo sapien
gggcgagggccgcctggggcgctgc

SEQ ID NO: 5814076 - DNA, 25 bp, Homo sapien
tatgtgattggcccacacaaggttt

SEQ ID NO: 5814077 - DNA, 25 bp, Homo sapien
cgtcacctgcaacgagttcttcttc

SEQ ID NO: 5814078 - DNA, 25 bp, Homo sapien
gcccgaggaccgccgccgtcggatc

SEQ ID NO: 5814079 - DNA, 25 bp, Homo sapien
gctcttcgtgaccgtcaccgccgtc

SEQ ID NO: 5814080 - DNA, 25 bp, Homo sapien
ggtggcccgagagggatgtgaaggc

SEQ ID NO: 5814081 - DNA, 25 bp, Homo sapien
gagcgggaggaagaggacgacgcgc

SEQ ID NO: 5814082 - DNA, 25 bp, Homo sapien
ggtatttgaggacactgcccaaccc

SEQ ID NO: 5814083 - DNA, 25 bp, Homo sapien
atgtgagcatcatgggggtccacgc

SEQ ID NO: 5814084 - DNA, 25 bp, Homo sapien
cctgtcctggcctccactgtgccca

SEQ ID NO: 5814085 - DNA, 25 bp, Homo sapien
aggtctaagtccagtctgtctttgt

SEQ ID NO: 5814086 - DNA, 25 bp, Homo sapien
agtctgtctttgtaagcatggaaat

SEQ ID NO: 5814087 - DNA, 25 bp, Homo sapien
ctctccgtcagcaccttgcccagcc

SEQ ID NO: 5814088 - DNA, 25 bp, Homo sapien
gcccaccactgccctcccccttgcc

SEQ ID NO: 5814089 - DNA, 25 bp, Homo sapien
ccagggctgtcagcccgaggaccgc

SEQ ID NO: 5814090 - DNA, 25 bp, Homo sapien
tgaggtgggaactttgcgcgctgca

SEQ ID NO: 5814091 - DNA, 25 bp, Homo sapien
cgctggacagcgagggccgcgacag

SEQ ID NO: 5814092 - DNA, 25 bp, Homo sapien
tcctttgcatcatagtagcccagac

SEQ ID NO: 5814093 - DNA, 25 bp, Homo sapien
aacgtgtgcgatgactacgacgtca

SEQ ID NO: 5814094 - DNA, 25 bp, Homo sapien
catggtctgcctccctgttaatatg

SEQ ID NO: 5814095 - DNA, 25 bp, Homo sapien
cgcggaggaccacctggacggctgc

SEQ ID NO: 5814096 - DNA, 25 bp, Homo sapien
gggcggccgtggctccgagggcggg

SEQ ID NO: 5814097 - DNA, 25 bp, Homo sapien
atcatgggggtccacgcctgtgcct

SEQ ID NO: 5814098 - DNA, 25 bp, Homo sapien
ttatctcaaccattcggtcctttct

SEQ ID NO: 5814099 - DNA, 25 bp, Homo sapien
accgggagacaattctgactacgac

SEQ ID NO: 5814100 - DNA, 25 bp, Homo sapien
ctttctcaacgttcctaatcctttg

SEQ ID NO: 5814101 - DNA, 25 bp, Homo sapien
gtcctgaagataatttttattgata

SEQ ID NO: 5814102 - DNA, 25 bp, Homo sapien
tcgaaacccgcctgcggggaggcca

SEQ ID NO: 5814103 - DNA, 25 bp, Homo sapien
cgcgctgagctgcacctcggacgcc

SEQ ID NO: 5814104 - DNA, 25 bp, Homo sapien
caaggtgttcgcctgcctgtcggtg

SEQ ID NO: 5814105 - DNA, 25 bp, Homo sapien
gcaacgagttcttcttcgaccgcaa

SEQ ID NO: 5814106 - DNA, 25 bp, Homo sapien
ctggcctccactgtgcccaccactg

SEQ ID NO: 5814107 - DNA, 25 bp, Homo sapien
gtaggcggcatcaagtactcgctgc

SEQ ID NO: 5814108 - DNA, 25 bp, Homo sapien
cccgcggggaaacgcgccaccacga

SEQ ID NO: 5814109 - DNA, 25 bp, Homo sapien
ggaagggactctgagcattgtcacc

SEQ ID NO: 5814110 - DNA, 25 bp, Homo sapien
gcccggccgagggcgagggccgcct

SEQ ID NO: 5814111 - DNA, 25 bp, Homo sapien
agtttggcggcggctccgggaggca

SEQ ID NO: 5814112 - DNA, 25 bp, Homo sapien
tctacaaatggtgagcatttctttt

SEQ ID NO: 5814113 - DNA, 25 bp, Homo sapien
gccgcggccgggccaactccgaggc

SEQ ID NO: 5814114 - DNA, 25 bp, Homo sapien
ccaggcccctctcgcgtcctcgccc

SEQ ID NO: 5814115 - DNA, 25 bp, Homo sapien
aggacactgcccaaccccaggtcta

SEQ ID NO: 5814116 - DNA, 25 bp, Homo sapien
cgggcgacttccaggcccctctcgc

SEQ ID NO: 5814117 - DNA, 25 bp, Homo sapien
tggtccctcctgacatcaggaatgt

SEQ ID NO: 5814118 - DNA, 25 bp, Homo sapien
atttactccagggcctgacacgggg

SEQ ID NO: 5814119 - DNA, 25 bp, Homo sapien
ttcgcggagatggtggagcgggagg

SEQ ID NO: 5814120 - DNA, 25 bp, Homo sapien
caggccatcaagggcgcgttctacc

SEQ ID NO: 5814121 - DNA, 25 bp, Homo sapien
tgaaggagccaggcttgcacacaga

SEQ ID NO: 5814122 - DNA, 25 bp, Homo sapien
tgtctttgtaagcatggaaatatgg

SEQ ID NO: 5814123 - DNA, 25 bp, Homo sapien
ttaccgggagacaattctgactacg

SEQ ID NO: 5814124 - DNA, 25 bp, Homo sapien
gagcaggtaagagcccacgccccgc

SEQ ID NO: 5814125 - DNA, 25 bp, Homo sapien
tgcccagcctgagggaggaggagga

SEQ ID NO: 5814126 - DNA, 25 bp, Homo sapien
tgctccagcaaccctgtgggggaag

SEQ ID NO: 5814127 - DNA, 25 bp, Homo sapien
cgccaccgaagcgcgaaccggaccc

SEQ ID NO: 5814128 - DNA, 25 bp, Homo sapien
gcaagcgccgctacctgcagaagat

SEQ ID NO: 5814129 - DNA, 25 bp, Homo sapien
ggagacaattctgactacgactaca

SEQ ID NO: 5814130 - DNA, 25 bp, Homo sapien
ttctagaactggtggcccgagaggg

SEQ ID NO: 5814131 - DNA, 25 bp, Homo sapien
atggtggagaggccgcactcggggc

SEQ ID NO: 5814132 - DNA, 25 bp, Homo sapien
ggacctaatatagccccacaggact

SEQ ID NO: 5814133 - DNA, 25 bp, Homo sapien
tgattgcacactggctgaatagcat

SEQ ID NO: 5814134 - DNA, 25 bp, Homo sapien
cacattttctgggtcctgaagataa

SEQ ID NO: 5814135 - DNA, 25 bp, Homo sapien
accactatttgttgaatgaacaaat

SEQ ID NO: 5814136 - DNA, 25 bp, Homo sapien
cggccgcaggatgagccccgccagg

SEQ ID NO: 5814137 - DNA, 25 bp, Homo sapien
caggaggagctgctgtactggggca

SEQ ID NO: 5814138 - DNA, 25 bp, Homo sapien
tggtgtgatttttgacgtgcctggc

SEQ ID NO: 5814139 - DNA, 25 bp, Homo sapien
ggactatgtgattggcccacacaag

SEQ ID NO: 5814140 - DNA, 25 bp, Homo sapien
cgcctgtgcctgtcctggcctccac

SEQ ID NO: 5814141 - DNA, 25 bp, Homo sapien
aggaggaggagcaggtaagagccca

SEQ ID NO: 5814142 - DNA, 25 bp, Homo sapien
tttgtaagcatggaaatatggttcc

SEQ ID NO: 5814143 - DNA, 25 bp, Homo sapien
tttgaggacactgcccaaccccagg

SEQ ID NO: 5814144 - DNA, 25 bp, Homo sapien
gcgggaggaagaggacgacgcgctg

SEQ ID NO: 5814145 - DNA, 25 bp, Homo sapien
tattgataggtacatgtgtgtctac

SEQ ID NO: 5814146 - DNA, 25 bp, Homo sapien
agaacagtgtccagcacaaacaggc

SEQ ID NO: 5814147 - DNA, 25 bp, Homo sapien
gtactcgctgccctggaccacgctg

SEQ ID NO: 5814148 - DNA, 25 bp, Homo sapien
gcaccttgcccagcctgagggagga

SEQ ID NO: 5814149 - DNA, 25 bp, Homo sapien
cacaggactatgtgattggcccaca

SEQ ID NO: 5814150 - DNA, 25 bp, Homo sapien
ctttgcatcatagtagcccagacac

SEQ ID NO: 5814151 - DNA, 25 bp, Homo sapien
gggccgcgacagcgagggcccggcc

SEQ ID NO: 5814152 - DNA, 25 bp, Homo sapien
aaaaatttgacttggttgccaacaa

SEQ ID NO: 5814153 - DNA, 25 bp, Homo sapien
gcagcctcgccgggcgccaccgaag

SEQ ID NO: 5814154 - DNA, 25 bp, Homo sapien
ggacgagttcccgctgacgcgcctg

SEQ ID NO: 5814155 - DNA, 25 bp, Homo sapien
tgaggacactgcccaaccccaggtc

SEQ ID NO: 5814156 - DNA, 25 bp, Homo sapien
cgcgacatggtggagaggccgcact

SEQ ID NO: 5814157 - DNA, 25 bp, Homo sapien
caggctgcctaatgaaggagccagg

SEQ ID NO: 5814158 - DNA, 25 bp, Homo sapien
gtcaacctctccgtcagcaccttgc

SEQ ID NO: 5814159 - DNA, 25 bp, Homo sapien
tgctgcaagcgccgctacctgcaga

SEQ ID NO: 5814160 - DNA, 25 bp, Homo sapien
gcctcgaaacccgcctgcggggagg

SEQ ID NO: 5814161 - DNA, 25 bp, Homo sapien
caggactatgtgattggcccacaca

SEQ ID NO: 5814162 - DNA, 25 bp, Homo sapien
atgtgcgcgctgtccttccaggagg

SEQ ID NO: 5814163 - DNA, 25 bp, Homo sapien
tcccacgtggcagcttggggaccta

SEQ ID NO: 5814164 - DNA, 25 bp, Homo sapien
gcgggagctgagccgggccccggga

SEQ ID NO: 5814165 - DNA, 25 bp, Homo sapien
gccaagggagcaggctgcctaatga

SEQ ID NO: 5814166 - DNA, 25 bp, Homo sapien
caaacaggcactcaaccactatttg

SEQ ID NO: 5814167 - DNA, 25 bp, Homo sapien
catagtagcccagacacattttctg

SEQ ID NO: 5814168 - DNA, 25 bp, Homo sapien
tgacatcaggaatgtttgtgtgcat

SEQ ID NO: 5814169 - DNA, 25 bp, Homo sapien
cacctggacggctgctgcaagcgcc

SEQ ID NO: 5814170 - DNA, 25 bp, Homo sapien
agcgagggccgcgacagcgagggcc

SEQ ID NO: 5814171 - DNA, 25 bp, Homo sapien
tacggccaagggagcaggctgccta

SEQ ID NO: 5814172 - DNA, 25 bp, Homo sapien
agcgcgaaccggaccccgagcctgc

SEQ ID NO: 5814173 - DNA, 25 bp, Homo sapien
gccctcccccttgccagtgtttaga

SEQ ID NO: 5814174 - DNA, 25 bp, Homo sapien
ggcctccactgtgcccaccactgcc

SEQ ID NO: 5814175 - DNA, 25 bp, Homo sapien
gactacgactacagcgcgctgagct

SEQ ID NO: 5814176 - DNA, 25 bp, Homo sapien
aacgcgccaccacgagggaagggac

SEQ ID NO: 5814177 - DNA, 25 bp, Homo sapien
gcccacgccccgcggggaaacgcgc

SEQ ID NO: 5814178 - DNA, 25 bp, Homo sapien
tcggggctgcctggcaaggtgttcg

SEQ ID NO: 5814179 - DNA, 25 bp, Homo sapien
ggctgcacgtggccgtggccctgaa

SEQ ID NO: 5814180 - DNA, 25 bp, Homo sapien
cttccaggaggagctgctgtactgg

SEQ ID NO: 5814181 - DNA, 25 bp, Homo sapien
ccaaaatgaccctcttaccgggaga

SEQ ID NO: 5814182 - DNA, 25 bp, Homo sapien
attgcacactggctgaatagcatcc

SEQ ID NO: 5814183 - DNA, 25 bp, Homo sapien
gctgacgcgcctgggccagctcaag

SEQ ID NO: 5814184 - DNA, 25 bp, Homo sapien
cgcagcgccaggccatcaagggcgc

SEQ ID NO: 5814185 - DNA, 25 bp, Homo sapien
tggagaggccgcactcggggctgcc

SEQ ID NO: 5814186 - DNA, 25 bp, Homo sapien
gactctgagcattgtcacctcctcc

SEQ ID NO: 5814187 - DNA, 25 bp, Homo sapien
gagcctgcaaactcgggctcggggg

SEQ ID NO: 5814188 - DNA, 25 bp, Homo sapien
aagcctcctctgattgcacactggc

SEQ ID NO: 5814189 - DNA, 25 bp, Homo sapien
cgacatcctcaacgtgtgcgatgac

SEQ ID NO: 5814190 - DNA, 25 bp, Homo sapien
gtggccctgaactccctgcgggggc

SEQ ID NO: 5814191 - DNA, 25 bp, Homo sapien
cgctgcagcctcgccgggcgccacc

SEQ ID NO: 5814192 - DNA, 25 bp, Homo sapien
gggagctgagccgggccccgggacc

SEQ ID NO: 5814193 - DNA, 25 bp, Homo sapien
gtgagcatcatgggggtccacgcct

SEQ ID NO: 5814194 - DNA, 25 bp, Homo sapien
tttcacacccactaggtatttgagg

SEQ ID NO: 5814195 - DNA, 25 bp, Homo sapien
gtgcgcgctgtccttccaggaggag

SEQ ID NO: 5814196 - DNA, 25 bp, Homo sapien
cacgctggacgagttcccgctgacg

SEQ ID NO: 5814197 - DNA, 25 bp, Homo sapien
tgtgtctacaaatggtgagcatttc

SEQ ID NO: 5814198 - DNA, 25 bp, Homo sapien
ctgtgcccaccactgccctccccct

SEQ ID NO: 5814199 - DNA, 25 bp, Homo sapien
aacaggcactcaaccactatttgtt

SEQ ID NO: 5814200 - DNA, 25 bp, Homo sapien
gagcatttctttttgttacataaga

SEQ ID NO: 5814201 - DNA, 25 bp, Homo sapien
ccgagggcgggagctgagccgggcc

SEQ ID NO: 5814202 - DNA, 25 bp, Homo sapien
tggcccgagagggatgtgaaggccc

SEQ ID NO: 5814203 - DNA, 25 bp, Homo sapien
ggcactcaaccactatttgttgaat

SEQ ID NO: 5814204 - DNA, 25 bp, Homo sapien
gagggcgggagctgagccgggcccc

SEQ ID NO: 5814205 - DNA, 25 bp, Homo sapien
gcctgggccagctcaaggcctgcac

SEQ ID NO: 5814206 - DNA, 25 bp, Homo sapien
tctttgtaagcatggaaatatggtt

SEQ ID NO: 5814207 - DNA, 25 bp, Homo sapien
gctgcgcgagatgtgcgcgctgtcc

SEQ ID NO: 5814208 - DNA, 25 bp, Homo sapien
agtcaccgctggtgcgtggcggcgt

SEQ ID NO: 5814209 - DNA, 25 bp, Homo sapien
cagcttggggacctaatatagcccc

SEQ ID NO: 5814210 - DNA, 25 bp, Homo sapien
ctcaaccattcggtcctttctcaac

SEQ ID NO: 5814211 - DNA, 25 bp, Homo sapien
aggagctgctgtactggggcatcgc

SEQ ID NO: 5814212 - DNA, 25 bp, Homo sapien
tgggctgcatgtgccaactacgtct

SEQ ID NO: 5814213 - DNA, 25 bp, Homo sapien
cctcggacgcctccttccacccggc

SEQ ID NO: 5814214 - DNA, 25 bp, Homo sapien
gcctgcctgtcggtgctcttcgtga

SEQ ID NO: 5814215 - DNA, 25 bp, Homo sapien
caaccactatttgttgaatgaacaa

SEQ ID NO: 5814216 - DNA, 25 bp, Homo sapien
gtccctcctgacatcaggaatgttt

SEQ ID NO: 5814217 - DNA, 25 bp, Homo sapien
ggggtccacgcctgtgcctgtcctg

SEQ ID NO: 5814218 - DNA, 25 bp, Homo sapien
tgcaccaacttcgacgacatcctca

SEQ ID NO: 5814219 - DNA, 25 bp, Homo sapien
agcacaaacaggcactcaaccacta

SEQ ID NO: 5814220 - DNA, 25 bp, Homo sapien
atcaggaatgtttgtgtgcatggtc

SEQ ID NO: 5814221 - DNA, 25 bp, Homo sapien
cctgcgcgcgggcaagctgcggctg

SEQ ID NO: 5814222 - DNA, 25 bp, Homo sapien
gaatgaatggaaagtttatttactc

SEQ ID NO: 5814223 - DNA, 25 bp, Homo sapien
gcagagcgggctccccgggcgactt

SEQ ID NO: 5814224 - DNA, 25 bp, Homo sapien
gcctgcaaactcgggctcgggggcg

SEQ ID NO: 5814225 - DNA, 25 bp, Homo sapien
gtcctcgccccggacccgtgggcag

SEQ ID NO: 5814226 - DNA, 25 bp, Homo sapien
gggcatcgcggaggaccacctggac

SEQ ID NO: 5814227 - DNA, 25 bp, Homo sapien
atttgacttggttgccaacaataaa

SEQ ID NO: 5814228 - DNA, 25 bp, Homo sapien
gtttatttactccagggcctgacac

SEQ ID NO: 5814229 - DNA, 25 bp, Homo sapien
ctttttgttacataagagaatgaat

SEQ ID NO: 5814230 - DNA, 25 bp, Homo sapien
tccagggcctgacacggggtgtgtg

SEQ ID NO: 5814231 - DNA, 25 bp, Homo sapien
acctgcaacgagttcttcttcgacc

SEQ ID NO: 5814232 - DNA, 25 bp, Homo sapien
acggaagccgcggccgggccaactc

SEQ ID NO: 5814233 - DNA, 25 bp, Homo sapien
accgccgggcgcagcggctgcggcc

SEQ ID NO: 5814234 - DNA, 25 bp, Homo sapien
cggccttcctcccgcagcgccaggc

SEQ ID NO: 5814235 - DNA, 25 bp, Homo sapien
tccacgcctgtgcctgtcctggcct

SEQ ID NO: 5814236 - DNA, 25 bp, Homo sapien
gagcgcgcttgttacggccaaggga

SEQ ID NO: 5814237 - DNA, 25 bp, Homo sapien
gcatcgcggaggaccacctggacgg

SEQ ID NO: 5814238 - DNA, 25 bp, Homo sapien
gacggggcggccgtggctccgaggg

SEQ ID NO: 5814239 - DNA, 25 bp, Homo sapien
tggcggcggctccgggaggcagagc

SEQ ID NO: 5814240 - DNA, 25 bp, Homo sapien
ctgactacgactacagcgcgctgag

SEQ ID NO: 5814241 - DNA, 25 bp, Homo sapien
ggccatcaagggcgcgttctaccgc

SEQ ID NO: 5814242 - DNA, 25 bp, Homo sapien
ctcaacgttcctaatcctttgcatc

SEQ ID NO: 5814243 - DNA, 25 bp, Homo sapien
ccttcggcactatcctgaccttcct

SEQ ID NO: 5814244 - DNA, 25 bp, Homo sapien
cgccaccacgagggaagggactctg

SEQ ID NO: 5814245 - DNA, 25 bp, Homo sapien
aggtgggaactttgcgcgctgcagc

SEQ ID NO: 5814246 - DNA, 25 bp, Homo sapien
gtcggtgctcttcgtgaccgtcacc

SEQ ID NO: 5814247 - DNA, 25 bp, Homo sapien
ctgttaatatgtgagcatcatgggg

SEQ ID NO: 5814248 - DNA, 25 bp, Homo sapien
gtgagcatttctttttgttacataa

SEQ ID NO: 5814249 - DNA, 25 bp, Homo sapien
gggggcggctgcacgtggccgtggc

SEQ ID NO: 5814250 - DNA, 25 bp, Homo sapien
ggcgtggagcgcgcttgttacggcc

SEQ ID NO: 5814251 - DNA, 25 bp, Homo sapien
cgtggcggcgtggagcgcgcttgtt

SEQ ID NO: 5814252 - DNA, 25 bp, Homo sapien
aggcttgcacacagacaattctaga

SEQ ID NO: 5814253 - DNA, 25 bp, Homo sapien
gagggatgtgaaggcccaaaatgac

SEQ ID NO: 5814254 - DNA, 25 bp, Homo sapien
tacaaatggtgagcatttctttttg

SEQ ID NO: 5814255 - DNA, 25 bp, Homo sapien
ctggtgcgtggcggcgtggagcgcg

SEQ ID NO: 5814256 - DNA, 25 bp, Homo sapien
ctcgcgtcctcgccccggacccgtg

SEQ ID NO: 5814257 - DNA, 25 bp, Homo sapien
cgtgaccgtcaccgccgtcaacctc

SEQ ID NO: 5814258 - DNA, 25 bp, Homo sapien
tgtgaaggcccaaaatgaccctctt

SEQ ID NO: 5814259 - DNA, 25 bp, Homo sapien
gcggccgtggctccgagggcgggag

SEQ ID NO: 5814260 - DNA, 25 bp, Homo sapien
ggaagaggacgacgcgctggacagc

SEQ ID NO: 5814261 - DNA, 25 bp, Homo sapien
tgtgcatggtctgcctccctgttaa

SEQ ID NO: 5814262 - DNA, 25 bp, Homo sapien
gagacggggcggccgtggctccgag

SEQ ID NO: 5814263 - DNA, 25 bp, Homo sapien
taggtacatgtgtgtctacaaatgg

SEQ ID NO: 5814264 - DNA, 25 bp, Homo sapien
gcttgcacacagacaattctagaac

SEQ ID NO: 5814265 - DNA, 25 bp, Homo sapien
tgcgcgcgggcaagctgcggctgct

SEQ ID NO: 5814266 - DNA, 25 bp, Homo sapien
ccctgagcgaagcacattacatata

SEQ ID NO: 5814267 - DNA, 25 bp, Homo sapien
gtccagcacaaacaggcactcaacc

SEQ ID NO: 5814268 - DNA, 25 bp, Homo sapien
tttattgataggtacatgtgtgtct

SEQ ID NO: 5814269 - DNA, 25 bp, Homo sapien
cgtcggatcatcatcaacgtaggcg

SEQ ID NO: 5814270 - DNA, 25 bp, Homo sapien
tcttcgtgaccgtcaccgccgtcaa

SEQ ID NO: 5814271 - DNA, 25 bp, Homo sapien
ggcctgcaccaacttcgacgacatc

SEQ ID NO: 5814272 - DNA, 25 bp, Homo sapien
agcatccctggtccctcctgacatc

SEQ ID NO: 5814273 - DNA, 25 bp, Homo sapien
ttagaacagtgtccagcacaaacag

SEQ ID NO: 5814274 - DNA, 25 bp, Homo sapien
ggccaactccgaggcggggacgccg

SEQ ID NO: 5814275 - DNA, 25 bp, Homo sapien
gaaatatggttcccacgtggcagct

SEQ ID NO: 5814276 - DNA, 25 bp, Homo sapien
atctgggagttcacgggagccggag

SEQ ID NO: 5814277 - DNA, 25 bp, Homo sapien
agcctcgccgggcgccaccgaagcg

SEQ ID NO: 5814278 - DNA, 25 bp, Homo sapien
ccgctgacgcgcctgggccagctca

SEQ ID NO: 5814279 - DNA, 25 bp, Homo sapien
ctgcacgtggccgtggccctgaact

SEQ ID NO: 5814280 - DNA, 25 bp, Homo sapien
gttacggccaagggagcaggctgcc

SEQ ID NO: 5814281 - DNA, 25 bp, Homo sapien
gggctcgggggcggctgcacgtggc

SEQ ID NO: 5814282 - DNA, 25 bp, Homo sapien
ccctcctgacatcaggaatgtttgt

SEQ ID NO: 5814283 - DNA, 25 bp, Homo sapien
actatgtgattggcccacacaaggt

SEQ ID NO: 5814284 - DNA, 25 bp, Homo sapien
ttgataggtacatgtgtgtctacaa

SEQ ID NO: 5814285 - DNA, 25 bp, Homo sapien
ggatgagccccgccagggctgtcag

SEQ ID NO: 5814286 - DNA, 25 bp, Homo sapien
gggcgggagctgagccgggccccgg

SEQ ID NO: 5814287 - DNA, 25 bp, Homo sapien
tcacctcctccagaaagcctcctct

SEQ ID NO: 5814288 - DNA, 25 bp, Homo sapien
ctggaccacgctggacgagttcccg

SEQ ID NO: 5814289 - DNA, 25 bp, Homo sapien
ggctccccgggcgacttccaggccc

SEQ ID NO: 5814290 - DNA, 25 bp, Homo sapien
tgaccctcttaccgggagacaattc

SEQ ID NO: 5814291 - DNA, 25 bp, Homo sapien
caggaatgtttgtgtgcatggtctg

SEQ ID NO: 5814292 - DNA, 25 bp, Homo sapien
ctgaatagcatccctggtccctcct

SEQ ID NO: 5814293 - DNA, 25 bp, Homo sapien
ttctcaacgttcctaatcctttgca

SEQ ID NO: 5814294 - DNA, 25 bp, Homo sapien
ccgtcaacctctccgtcagcacctt

SEQ ID NO: 5814295 - DNA, 25 bp, Homo sapien
cttccacccggccttcctcccgcag

SEQ ID NO: 5814296 - DNA, 25 bp, Homo sapien
cctccactgtgcccaccactgccct

SEQ ID NO: 5814297 - DNA, 25 bp, Homo sapien
ggggacggaagccgcggccgggcca

SEQ ID NO: 5814298 - DNA, 25 bp, Homo sapien
gcactcggggctgcctggcaaggtg

SEQ ID NO: 5814299 - DNA, 25 bp, Homo sapien
cgggggccttcggcactatcctgac

SEQ ID NO: 5814300 - DNA, 25 bp, Homo sapien
ccaacttcgacgacatcctcaacgt

SEQ ID NO: 5814301 - DNA, 25 bp, Homo sapien
tcttaccgggagacaattctgacta

SEQ ID NO: 5814302 - DNA, 25 bp, Homo sapien
tgacgcgcctgggccagctcaaggc

SEQ ID NO: 5814303 - DNA, 25 bp, Homo sapien
atatgtgagcatcatgggggtccac

SEQ ID NO: 5814304 - DNA, 25 bp, Homo sapien
cagctcaaggcctgcaccaacttcg

SEQ ID NO: 5814305 - DNA, 25 bp, Homo sapien
ctaagtccagtctgtctttgtaagc

SEQ ID NO: 5814306 - DNA, 25 bp, Homo sapien
ctgtcggtgctcttcgtgaccgtca

SEQ ID NO: 5814307 - DNA, 25 bp, Homo sapien
aatgggtggtgtgatttttgacgtg

SEQ ID NO: 5814308 - DNA, 25 bp, Homo sapien
ctctcgcgtcctcgccccggacccg

SEQ ID NO: 5814309 - DNA, 25 bp, Homo sapien
tgcacactggctgaatagcatccct

SEQ ID NO: 5814310 - DNA, 25 bp, Homo sapien
gttttcacacccactaggtatttga

SEQ ID NO: 5814311 - DNA, 25 bp, Homo sapien
acctgcagaagattgaggagttcgc

SEQ ID NO: 5814312 - DNA, 25 bp, Homo sapien
agggagcaggctgcctaatgaagga

SEQ ID NO: 5814313 - DNA, 25 bp, Homo sapien
tgggggtccacgcctgtgcctgtcc

SEQ ID NO: 5814314 - DNA, 25 bp, Homo sapien
cagagacggggcggccgtggctccg

SEQ ID NO: 5814315 - DNA, 25 bp, Homo sapien
gtcctttctcaacgttcctaatcct

SEQ ID NO: 5814316 - DNA, 25 bp, Homo sapien
gcgccgctacctgcagaagattgag

SEQ ID NO: 5814317 - DNA, 25 bp, Homo sapien
ctggacagcgagggccgcgacagcg

SEQ ID NO: 5814318 - DNA, 25 bp, Homo sapien
agaggactcgggagtcaccgctggt

SEQ ID NO: 5814319 - DNA, 25 bp, Homo sapien
cgacagaggactcgggagtcaccgc

SEQ ID NO: 5814320 - DNA, 25 bp, Homo sapien
agcacattacatatatcatcaaatt

SEQ ID NO: 5814321 - DNA, 25 bp, Homo sapien
acatatatcatcaaatttatctcaa

SEQ ID NO: 5814322 - DNA, 25 bp, Homo sapien
gacacggggtgtgtgctacagtcta

SEQ ID NO: 5814323 - DNA, 25 bp, Homo sapien
gttcacgggagccggagctgggctg

SEQ ID NO: 5814324 - DNA, 25 bp, Homo sapien
gagggaggaggaggagcaggtaaga

SEQ ID NO: 5814325 - DNA, 25 bp, Homo sapien
gcaggtaagagcccacgccccgcgg

SEQ ID NO: 5814326 - DNA, 25 bp, Homo sapien
agataatttttattgataggtacat

SEQ ID NO: 5814327 - DNA, 25 bp, Homo sapien
gcaaccctgtgggggaagtgttttc

SEQ ID NO: 5814328 - DNA, 25 bp, Homo sapien
ctccagcaaccctgtgggggaagtg

SEQ ID NO: 5814329 - DNA, 25 bp, Homo sapien
cggaggaccacctggacggctgctg

SEQ ID NO: 5814330 - DNA, 25 bp, Homo sapien
gacttggttgccaacaataaaagtg

SEQ ID NO: 5814331 - DNA, 25 bp, Homo sapien
atcgcggaggaccacctggacggct

SEQ ID NO: 5814332 - DNA, 25 bp, Homo sapien
ggcgacttccaggcccctctcgcgt

SEQ ID NO: 5814333 - DNA, 25 bp, Homo sapien
aattctgactacgactacagcgcgc

SEQ ID NO: 5814334 - DNA, 25 bp, Homo sapien
tgtgtgcatggtctgcctccctgtt

SEQ ID NO: 5814335 - DNA, 25 bp, Homo sapien
ccagcaaccctgtgggggaagtgtt

SEQ ID NO: 5814336 - DNA, 25 bp, Homo sapien
catggaaatatggttcccacgtggc

SEQ ID NO: 5814337 - DNA, 25 bp, Homo sapien
cccagcctgagggaggaggaggagc

SEQ ID NO: 5814338 - DNA, 25 bp, Homo sapien
acgccgcgacgggaacttgaggtgg

SEQ ID NO: 5814339 - DNA, 25 bp, Homo sapien
tatcctgaccttcctgcgcgcgggc

SEQ ID NO: 5814340 - DNA, 25 bp, Homo sapien
atgaatggaaagtttatttactcca

SEQ ID NO: 5814341 - DNA, 25 bp, Homo sapien
taagagcccacgccccgcggggaaa

SEQ ID NO: 5814342 - DNA, 25 bp, Homo sapien
tcaccgccgtcaacctctccgtcag

SEQ ID NO: 5814343 - DNA, 25 bp, Homo sapien
gccgtcggatcatcatcaacgtagg

SEQ ID NO: 5814344 - DNA, 25 bp, Homo sapien
ctgcagcctcgccgggcgccaccga

SEQ ID NO: 5814345 - DNA, 25 bp, Homo sapien
aagaggacgacgcgctggacagcga

SEQ ID NO: 5814346 - DNA, 25 bp, Homo sapien
ttacatatatcatcaaatttatctc

SEQ ID NO: 5814347 - DNA, 25 bp, Homo sapien
gtggccgtggccctgaactccctgc

SEQ ID NO: 5814348 - DNA, 25 bp, Homo sapien
cgagatgtgcgcgctgtccttccag

SEQ ID NO: 5814349 - DNA, 25 bp, Homo sapien
ctggccctgagcgaagcacattaca

SEQ ID NO: 5814350 - DNA, 25 bp, Homo sapien
gtgtgtgctacagtctaagggctcc

SEQ ID NO: 5814351 - DNA, 25 bp, Homo sapien
tgaataaatgggtggtgtgattttt

SEQ ID NO: 5814352 - DNA, 25 bp, Homo sapien
tcttatctccccagggaatgctcca

SEQ ID NO: 5814353 - DNA, 25 bp, Homo sapien
ctcgggagtcaccgctggtgcgtgg

SEQ ID NO: 5814354 - DNA, 25 bp, Homo sapien
ttcggcactatcctgaccttcctgc

SEQ ID NO: 5814355 - DNA, 25 bp, Homo sapien
gcgggggcctcgaaacccgcctgcg

SEQ ID NO: 5814356 - DNA, 25 bp, Homo sapien
cccgcagcgccaggccatcaagggc

SEQ ID NO: 5814357 - DNA, 25 bp, Homo sapien
tgacgtgcctggccctgagcgaagc

SEQ ID NO: 5814358 - DNA, 25 bp, Homo sapien
ggccctgagcgaagcacattacata

SEQ ID NO: 5814359 - DNA, 25 bp, Homo sapien
aatcctttgcatcatagtagcccag

SEQ ID NO: 5814360 - DNA, 25 bp, Homo sapien
gaagataatttttattgataggtac

SEQ ID NO: 5814361 - DNA, 25 bp, Homo sapien
ccaggcttgcacacagacaattcta

SEQ ID NO: 5814362 - DNA, 25 bp, Homo sapien
tgagtgaataaatgggtggtgtgat

SEQ ID NO: 5814363 - DNA, 25 bp, Homo sapien
ggtggagcgggaggaagaggacgac

SEQ ID NO: 5814364 - DNA, 25 bp, Homo sapien
cctcttaccgggagacaattctgac

SEQ ID NO: 5814365 - DNA, 25 bp, Homo sapien
agatggtggagcgggaggaagagga

SEQ ID NO: 5814366 - DNA, 25 bp, Homo sapien
ggacgacgcgctggacagcgagggc

SEQ ID NO: 5814367 - DNA, 25 bp, Homo sapien
gcctggggcgctgcatgcggcgact

SEQ ID NO: 5814368 - DNA, 25 bp, Homo sapien
tcacgggagccggagctgggctgca

SEQ ID NO: 5814369 - DNA, 25 bp, Homo sapien
gcgaagcacattacatatatcatca

SEQ ID NO: 5814370 - DNA, 25 bp, Homo sapien
cttgaggtgggaactttgcgcgctg

SEQ ID NO: 5814371 - DNA, 25 bp, Homo sapien
tgcgatgactacgacgtcacctgca

SEQ ID NO: 5814372 - DNA, 25 bp, Homo sapien
ctacgactacagcgcgctgagctgc

SEQ ID NO: 5814373 - DNA, 25 bp, Homo sapien
ctagaactggtggcccgagagggat

SEQ ID NO: 5814374 - DNA, 25 bp, Homo sapien
tcgacgacatcctcaacgtgtgcga

SEQ ID NO: 5814375 - DNA, 25 bp, Homo sapien
cgcggggaaacgcgccaccacgagg

SEQ ID NO: 5814376 - DNA, 25 bp, Homo sapien
aacaaatgagtgaataaatgggtgg

SEQ ID NO: 5814377 - DNA, 25 bp, Homo sapien
aagggctcccactcatctgggagtt

SEQ ID NO: 5814378 - DNA, 25 bp, Homo sapien
aaatttgacttggttgccaacaata

SEQ ID NO: 5814379 - DNA, 25 bp, Homo sapien
cgctggacgagttcccgctgacgcg

SEQ ID NO: 5814380 - DNA, 25 bp, Homo sapien
accattcggtcctttctcaacgttc

SEQ ID NO: 5814381 - DNA, 25 bp, Homo sapien
tgcacctcggacgcctccttccacc

SEQ ID NO: 5814382 - DNA, 25 bp, Homo sapien
tgtaagcatggaaatatggttccca

SEQ ID NO: 5814383 - DNA, 25 bp, Homo sapien
cgactgcgcgacatggtggagaggc

SEQ ID NO: 5814384 - DNA, 25 bp, Homo sapien
gtgatttttgacgtgcctggccctg

SEQ ID NO: 5814385 - DNA, 25 bp, Homo sapien
ttcctgcgcgcgggcaagctgcggc

SEQ ID NO: 5814386 - DNA, 25 bp, Homo sapien
gtctaagggctcccactcatctggg

SEQ ID NO: 5814387 - DNA, 25 bp, Homo sapien
ggagccaggcttgcacacagacaat

SEQ ID NO: 5814388 - DNA, 25 bp, Homo sapien
gcgccaggccatcaagggcgcgttc

SEQ ID NO: 5814389 - DNA, 25 bp, Homo sapien
tggaaatatggttcccacgtggcag

SEQ ID NO: 5814390 - DNA, 25 bp, Homo sapien
gccccacaggactatgtgattggcc

SEQ ID NO: 5814391 - DNA, 25 bp, Homo sapien
gagttcacgggagccggagctgggc

SEQ ID NO: 5814392 - DNA, 25 bp, Homo sapien
acgacgcgctggacagcgagggccg

SEQ ID NO: 5814393 - DNA, 25 bp, Homo sapien
ttatttactccagggcctgacacgg

SEQ ID NO: 5814394 - DNA, 25 bp, Homo sapien
cgcgccaccacgagggaagggactc

SEQ ID NO: 5814395 - DNA, 25 bp, Homo sapien
gccgcgacgggaacttgaggtggga

SEQ ID NO: 5814396 - DNA, 25 bp, Homo sapien
cacacaaggtttcccaaaaatttga

SEQ ID NO: 5814397 - DNA, 25 bp, Homo sapien
tacgtcttatctccccagggaatgc

SEQ ID NO: 5814398 - DNA, 25 bp, Homo sapien
agaactggtggcccgagagggatgt

SEQ ID NO: 5814399 - DNA, 25 bp, Homo sapien
ttgcatcatagtagcccagacacat

SEQ ID NO: 5814400 - DNA, 25 bp, Homo sapien
acctaatatagccccacaggactat

SEQ ID NO: 5814401 - DNA, 25 bp, Homo sapien
cctggacggctgctgcaagcgccgc

SEQ ID NO: 5814402 - DNA, 25 bp, Homo sapien
ctgccctcccccttgccagtgttta

SEQ ID NO: 5814403 - DNA, 25 bp, Homo sapien
gccgcaggatgagccccgccagggc

SEQ ID NO: 5814404 - DNA, 25 bp, Homo sapien
gggagttcacgggagccggagctgg

SEQ ID NO: 5814405 - DNA, 25 bp, Homo sapien
accgtcaccgccgtcaacctctccg

SEQ ID NO: 5814406 - DNA, 25 bp, Homo sapien
cgctacctgcagaagattgaggagt

SEQ ID NO: 5814407 - DNA, 25 bp, Homo sapien
aatgtttgtgtgcatggtctgcctc

SEQ ID NO: 5814408 - DNA, 25 bp, Homo sapien
ctcctctgattgcacactggctgaa

SEQ ID NO: 5814409 - DNA, 25 bp, Homo sapien
tgtgggggaagtgttttcacaccca

SEQ ID NO: 5814410 - DNA, 25 bp, Homo sapien
ccgtcagcaccttgcccagcctgag

SEQ ID NO: 5814411 - DNA, 25 bp, Homo sapien
tcaccgctggtgcgtggcggcgtgg

SEQ ID NO: 5814412 - DNA, 25 bp, Homo sapien
tctgattgcacactggctgaatagc

SEQ ID NO: 5814413 - DNA, 25 bp, Homo sapien
actccgaggcggggacgccgcgacg

SEQ ID NO: 5814414 - DNA, 25 bp, Homo sapien
gcgtcctcgccccggacccgtgggc

SEQ ID NO: 5814415 - DNA, 25 bp, Homo sapien
gtgtccagcacaaacaggcactcaa

SEQ ID NO: 5814416 - DNA, 25 bp, Homo sapien
acagcgagggcccggccgagggcga

SEQ ID NO: 5814417 - DNA, 25 bp, Homo sapien
cggggtgtgtgctacagtctaaggg

SEQ ID NO: 5814418 - DNA, 25 bp, Homo sapien
gaggaagaggacgacgcgctggaca

SEQ ID NO: 5814419 - DNA, 25 bp, Homo sapien
gttcgcctgcctgtcggtgctcttc

SEQ ID NO: 5814420 - DNA, 25 bp, Homo sapien
ccccagggaatgctccagcaaccct

SEQ ID NO: 5814421 - DNA, 25 bp, Homo sapien
ggaccccgagcctgcaaactcgggc

SEQ ID NO: 5814422 - DNA, 25 bp, Homo sapien
gcctggcaaggtgttcgcctgcctg

SEQ ID NO: 5814423 - DNA, 25 bp, Homo sapien
gaggagttcgcggagatggtggagc

SEQ ID NO: 5814424 - DNA, 25 bp, Homo sapien
gccaactacgtcttatctccccagg

SEQ ID NO: 5814425 - DNA, 25 bp, Homo sapien
gggaggccagggcgacagaggactc

SEQ ID NO: 5814426 - DNA, 25 bp, Homo sapien
tcgggctcgggggcggctgcacgtg

SEQ ID NO: 5814427 - DNA, 25 bp, Homo sapien
gcatttctttttgttacataagaga

SEQ ID NO: 5814428 - DNA, 25 bp, Homo sapien
cgtgtgcgatgactacgacgtcacc

SEQ ID NO: 5814429 - DNA, 25 bp, Homo sapien
ctgcaaactcgggctcgggggcggc

SEQ ID NO: 5814430 - DNA, 25 bp, Homo sapien
cgacagcgagggcccggccgagggc

SEQ ID NO: 5814431 - DNA, 25 bp, Homo sapien
cccggccttcctcccgcagcgccag

SEQ ID NO: 5814432 - DNA, 25 bp, Homo sapien
cactgtgcccaccactgccctcccc

SEQ ID NO: 5814433 - DNA, 25 bp, Homo sapien
gaggaccacctggacggctgctgca

SEQ ID NO: 5814434 - DNA, 25 bp, Homo sapien
cggccaagggagcaggctgcctaat

SEQ ID NO: 5814435 - DNA, 25 bp, Homo sapien
cagaaagcctcctctgattgcacac

SEQ ID NO: 5814436 - DNA, 25 bp, Homo sapien
ctgcatgtgccaactacgtcttatc

SEQ ID NO: 5814437 - DNA, 25 bp, Homo sapien
ccacgccccgcggggaaacgcgcca

SEQ ID NO: 5814438 - DNA, 25 bp, Homo sapien
ttgccagtgtttagaacagtgtcca

SEQ ID NO: 5814439 - DNA, 25 bp, Homo sapien
gtgtgatttttgacgtgcctggccc

SEQ ID NO: 5814440 - DNA, 25 bp, Homo sapien
gaaagcctcctctgattgcacactg

SEQ ID NO: 5814441 - DNA, 25 bp, Homo sapien
actacgtcttatctccccagggaat

SEQ ID NO: 5814442 - DNA, 25 bp, Homo sapien
ctggtggcccgagagggatgtgaag

SEQ ID NO: 5814443 - DNA, 25 bp, Homo sapien
ggcggctccgggaggcagagcgggc

SEQ ID NO: 5814444 - DNA, 25 bp, Homo sapien
tccgggaggcagagcgggctccccg

SEQ ID NO: 5814445 - DNA, 25 bp, Homo sapien
cgcgggcaagctgcggctgctgcgc

SEQ ID NO: 5814446 - DNA, 25 bp, Homo sapien
ttccaggcccctctcgcgtcctcgc

SEQ ID NO: 5814447 - DNA, 25 bp, Homo sapien
tgtttgtgtgcatggtctgcctccc

SEQ ID NO: 5814448 - DNA, 25 bp, Homo sapien
ttactccagggcctgacacggggtg

SEQ ID NO: 5814449 - DNA, 25 bp, Homo sapien
gaagcacattacatatatcatcaaa

SEQ ID NO: 5814450 - DNA, 25 bp, Homo sapien
tgcgcgagatgtgcgcgctgtcctt

SEQ ID NO: 5814451 - DNA, 25 bp, Homo sapien
aatatagccccacaggactatgtga

SEQ ID NO: 5814452 - DNA, 25 bp, Homo sapien
ccaccacgagggaagggactctgag

SEQ ID NO: 5814453 - DNA, 25 bp, Homo sapien
gggcctcgaaacccgcctgcgggga

SEQ ID NO: 5814454 - DNA, 25 bp, Homo sapien
gattgaggagttcgcggagatggtg

SEQ ID NO: 5814455 - DNA, 25 bp, Homo sapien
ctccgtcagcaccttgcccagcctg

SEQ ID NO: 5814456 - DNA, 25 bp, Homo sapien
tttcccaaaaatttgacttggttgc

SEQ ID NO: 5814457 - DNA, 25 bp, Homo sapien
gagagggatgtgaaggcccaaaatg

SEQ ID NO: 5814458 - DNA, 25 bp, Homo sapien
ctgagctgcacctcggacgcctcct

SEQ ID NO: 5814459 - DNA, 25 bp, Homo sapien
gggccgcctggggcgctgcatgcgg

SEQ ID NO: 5814460 - DNA, 25 bp, Homo sapien
tcacacccactaggtatttgaggac

SEQ ID NO: 5814461 - DNA, 25 bp, Homo sapien
attgtcacctcctccagaaagcctc

SEQ ID NO: 5814462 - DNA, 25 bp, Homo sapien
cacggggtgtgtgctacagtctaag

SEQ ID NO: 5814463 - DNA, 25 bp, Homo sapien
cgcggagatggtggagcgggaggaa

SEQ ID NO: 5814464 - DNA, 25 bp, Homo sapien
ccgccgtcggatcatcatcaacgta

SEQ ID NO: 5814465 - DNA, 25 bp, Homo sapien
aagtttatttactccagggcctgac

SEQ ID NO: 5814466 - DNA, 25 bp, Homo sapien
ggccgtggccctgaactccctgcgg

SEQ ID NO: 5814467 - DNA, 25 bp, Homo sapien
ggacgccgcgacgggaacttgaggt

SEQ ID NO: 5814468 - DNA, 25 bp, Homo sapien
gtctaagtccagtctgtctttgtaa

SEQ ID NO: 5814469 - DNA, 25 bp, Homo sapien
gagccccgccagggctgtcagcccg

SEQ ID NO: 5814470 - DNA, 25 bp, Homo sapien
atcatcaaatttatctcaaccattc

SEQ ID NO: 5814471 - DNA, 25 bp, Homo sapien
ctgtactggggcatcgcggaggacc

SEQ ID NO: 5814472 - DNA, 25 bp, Homo sapien
gagggccgcctggggcgctgcatgc

SEQ ID NO: 5814473 - DNA, 25 bp, Homo sapien
accctcttaccgggagacaattctg

SEQ ID NO: 5814474 - DNA, 25 bp, Homo sapien
ggctccgagggcgggagctgagccg

SEQ ID NO: 5814475 - DNA, 25 bp, Homo sapien
ggaccacctggacggctgctgcaag

SEQ ID NO: 5814476 - DNA, 25 bp, Homo sapien
cacgagggaagggactctgagcatt

SEQ ID NO: 5814477 - DNA, 25 bp, Homo sapien
cgcgttctaccgccgggcgcagcgg

SEQ ID NO: 5814478 - DNA, 25 bp, Homo sapien
tgcctgtcctggcctccactgtgcc

SEQ ID NO: 5814479 - DNA, 25 bp, Homo sapien
cgatgactacgacgtcacctgcaac

SEQ ID NO: 5814480 - DNA, 25 bp, Homo sapien
caacccgggggccttcggcactatc

SEQ ID NO: 5814481 - DNA, 25 bp, Homo sapien
ggccagggcgacagaggactcggga

SEQ ID NO: 5814482 - DNA, 25 bp, Homo sapien
ggccgcactcggggctgcctggcaa

SEQ ID NO: 5814483 - DNA, 25 bp, Homo sapien
agcaggctgcctaatgaaggagcca

SEQ ID NO: 5814484 - DNA, 25 bp, Homo sapien
acagaggactcgggagtcaccgctg

SEQ ID NO: 5814485 - DNA, 25 bp, Homo sapien
aagcgccgctacctgcagaagattg

SEQ ID NO: 5814486 - DNA, 25 bp, Homo sapien
agcgcgctgagctgcacctcggacg

SEQ ID NO: 5814487 - DNA, 25 bp, Homo sapien
ttctgactacgactacagcgcgctg

SEQ ID NO: 5814488 - DNA, 25 bp, Homo sapien
tccagaaagcctcctctgattgcac

SEQ ID NO: 5814489 - DNA, 25 bp, Homo sapien
ctcaaccactatttgttgaatgaac

SEQ ID NO: 5814490 - DNA, 25 bp, Homo sapien
ggatcatcatcaacgtaggcggcat

SEQ ID NO: 5814491 - DNA, 25 bp, Homo sapien
gcagcggctgcggccgcaggatgag

SEQ ID NO: 5814492 - DNA, 25 bp, Homo sapien
cttgcccagcctgagggaggaggag

SEQ ID NO: 5814493 - DNA, 25 bp, Homo sapien
caccaacttcgacgacatcctcaac

SEQ ID NO: 5814494 - DNA, 25 bp, Homo sapien
tctgtctttgtaagcatggaaatat

SEQ ID NO: 5814495 - DNA, 25 bp, Homo sapien
ggaatgtttgtgtgcatggtctgcc

SEQ ID NO: 5814496 - DNA, 25 bp, Homo sapien
gacgacatcctcaacgtgtgcgatg

SEQ ID NO: 5814497 - DNA, 25 bp, Homo sapien
gtctgcctccctgttaatatgtgag

SEQ ID NO: 5814498 - DNA, 25 bp, Homo sapien
ggacgcctccttccacccggccttc

SEQ ID NO: 5814499 - DNA, 25 bp, Homo sapien
aatgaccctcttaccgggagacaat

SEQ ID NO: 5814500 - DNA, 25 bp, Homo sapien
ttttctgggtcctgaagataatttt

SEQ ID NO: 5814501 - DNA, 25 bp, Homo sapien
catcatcaacgtaggcggcatcaag

SEQ ID NO: 5814502 - DNA, 25 bp, Homo sapien
gaatggaaagtttatttactccagg

SEQ ID NO: 5814503 - DNA, 25 bp, Homo sapien
tgtcacctcctccagaaagcctcct

SEQ ID NO: 5814504 - DNA, 25 bp, Homo sapien
cgcgacgggaacttgaggtgggaac

SEQ ID NO: 5814505 - DNA, 25 bp, Homo sapien
ccctgttaatatgtgagcatcatgg

SEQ ID NO: 5814506 - DNA, 25 bp, Homo sapien
gtgcctggccctgagcgaagcacat

SEQ ID NO: 5814507 - DNA, 25 bp, Homo sapien
cagtgtttagaacagtgtccagcac

SEQ ID NO: 5814508 - DNA, 25 bp, Homo sapien
ccctggaccacgctggacgagttcc

SEQ ID NO: 5814509 - DNA, 25 bp, Homo sapien
tcatctgggagttcacgggagccgg

SEQ ID NO: 5814510 - DNA, 25 bp, Homo sapien
aagattgaggagttcgcggagatgg

SEQ ID NO: 5814511 - DNA, 25 bp, Homo sapien
gagctgagccgggccccgggaccga

SEQ ID NO: 5814512 - DNA, 25 bp, Homo sapien
cactcaaccactatttgttgaatga

SEQ ID NO: 5814513 - DNA, 25 bp, Homo sapien
gccaggccatcaagggcgcgttcta

SEQ ID NO: 5814514 - DNA, 25 bp, Homo sapien
tccactgtgcccaccactgccctcc

SEQ ID NO: 5814515 - DNA, 25 bp, Homo sapien
cgctgcatgcggcgactgcgcgaca

SEQ ID NO: 5814516 - DNA, 25 bp, Homo sapien
tcggatcatcatcaacgtaggcggc

SEQ ID NO: 5814517 - DNA, 25 bp, Homo sapien
cacaaacaggcactcaaccactatt

SEQ ID NO: 5814518 - DNA, 25 bp, Homo sapien
gtgcccaccactgccctcccccttg

SEQ ID NO: 5814519 - DNA, 25 bp, Homo sapien
tgaccgtcaccgccgtcaacctctc

SEQ ID NO: 5814520 - DNA, 25 bp, Homo sapien
agcgagggcccggccgagggcgagg

SEQ ID NO: 5814521 - DNA, 25 bp, Homo sapien
agatgtgcgcgctgtccttccagga

SEQ ID NO: 5814522 - DNA, 25 bp, Homo sapien
ttggggacctaatatagccccacag

SEQ ID NO: 5814523 - DNA, 25 bp, Homo sapien
cctgaagataatttttattgatagg

SEQ ID NO: 5814524 - DNA, 25 bp, Homo sapien
cgcgagatgtgcgcgctgtccttcc

SEQ ID NO: 5814525 - DNA, 25 bp, Homo sapien
gctgccctggaccacgctggacgag

SEQ ID NO: 5814526 - DNA, 25 bp, Homo sapien
ctgcagaagattgaggagttcgcgg

SEQ ID NO: 5814527 - DNA, 25 bp, Homo sapien
tgtgcgatgactacgacgtcacctg

SEQ ID NO: 5814528 - DNA, 25 bp, Homo sapien
cccgtgaactcccagatgagtggga

SEQ ID NO: 5814529 - DNA, 25 bp, Homo sapien
ctcgggctgacagccctggcggggc

SEQ ID NO: 5814530 - DNA, 25 bp, Homo sapien
gattaggaacgttgagaaaggaccg

SEQ ID NO: 5814531 - DNA, 25 bp, Homo sapien
tcctcaatcttctgcaggtagcggc

SEQ ID NO: 5814532 - DNA, 25 bp, Homo sapien
ttgagtgcctgtttgtgctggacac

SEQ ID NO: 5814533 - DNA, 25 bp, Homo sapien
ccgtccaggtggtcctccgcgatgc

SEQ ID NO: 5814534 - DNA, 25 bp, Homo sapien
aggacccagaaaatgtgtctgggct

SEQ ID NO: 5814535 - DNA, 25 bp, Homo sapien
gcggtgacggtcacgaagagcaccg

SEQ ID NO: 5814536 - DNA, 25 bp, Homo sapien
tgaggatgtcgtcgaagttggtgca

SEQ ID NO: 5814537 - DNA, 25 bp, Homo sapien
gtggacccccatgatgctcacatat

SEQ ID NO: 5814538 - DNA, 25 bp, Homo sapien
cctatcaataaaaattatcttcagg

SEQ ID NO: 5814539 - DNA, 25 bp, Homo sapien
ttgggccttcacatccctctcgggc

SEQ ID NO: 5814540 - DNA, 25 bp, Homo sapien
cctggagtaaataaactttccattc

SEQ ID NO: 5814541 - DNA, 25 bp, Homo sapien
acaaacattcctgatgtcaggaggg

SEQ ID NO: 5814542 - DNA, 25 bp, Homo sapien
cagcccagctccggctcccgtgaac

SEQ ID NO: 5814543 - DNA, 25 bp, Homo sapien
agtgggagcccttagactgtagcac

SEQ ID NO: 5814544 - DNA, 25 bp, Homo sapien
ggcaagggggagggcagtggtgggc

SEQ ID NO: 5814545 - DNA, 25 bp, Homo sapien
tgccccagtacagcagctcctcctg

SEQ ID NO: 5814546 - DNA, 25 bp, Homo sapien
aaatacctagtgggtgtgaaaacac

SEQ ID NO: 5814547 - DNA, 25 bp, Homo sapien
cgcccggcggtagaacgcgcccttg

SEQ ID NO: 5814548 - DNA, 25 bp, Homo sapien
gccacggccacgtgcagccgccccc

SEQ ID NO: 5814549 - DNA, 25 bp, Homo sapien
tggcggggctcatcctgcggccgca

SEQ ID NO: 5814550 - DNA, 25 bp, Homo sapien
gccttcacatccctctcgggccacc

SEQ ID NO: 5814551 - DNA, 25 bp, Homo sapien
gggccttcacatccctctcgggcca

SEQ ID NO: 5814552 - DNA, 25 bp, Homo sapien
agcctggctccttcattaggcagcc

SEQ ID NO: 5814553 - DNA, 25 bp, Homo sapien
aatcacatagtcctgtggggctata

SEQ ID NO: 5814554 - DNA, 25 bp, Homo sapien
gtgcaggccttgagctggcccaggc

SEQ ID NO: 5814555 - DNA, 25 bp, Homo sapien
aggattaggaacgttgagaaaggac

SEQ ID NO: 5814556 - DNA, 25 bp, Homo sapien
acctagtgggtgtgaaaacacttcc

SEQ ID NO: 5814557 - DNA, 25 bp, Homo sapien
gtccaggtggtcctccgcgatgccc

SEQ ID NO: 5814558 - DNA, 25 bp, Homo sapien
ggcacgtcaaaaatcacaccaccca

SEQ ID NO: 5814559 - DNA, 25 bp, Homo sapien
gctccaccatctccgcgaactcctc

SEQ ID NO: 5814560 - DNA, 25 bp, Homo sapien
caggcgaacaccttgccaggcagcc

SEQ ID NO: 5814561 - DNA, 25 bp, Homo sapien
cttttattgttggcaaccaagtcaa

SEQ ID NO: 5814562 - DNA, 25 bp, Homo sapien
gcaaccaagtcaaatttttgggaaa

SEQ ID NO: 5814563 - DNA, 25 bp, Homo sapien
gaagagcaccgacaggcaggcgaac

SEQ ID NO: 5814564 - DNA, 25 bp, Homo sapien
gtacctatcaataaaaattatcttc

SEQ ID NO: 5814565 - DNA, 25 bp, Homo sapien
tcctcttcctcccgctccaccatct

SEQ ID NO: 5814566 - DNA, 25 bp, Homo sapien
gcctgctcccttggccgtaacaagc

SEQ ID NO: 5814567 - DNA, 25 bp, Homo sapien
gcctggaagtcgcccggggagcccg

SEQ ID NO: 5814568 - DNA, 25 bp, Homo sapien
tgccgaaggcccccgggttgcggtc

SEQ ID NO: 5814569 - DNA, 25 bp, Homo sapien
accagttctagaattgtctgtgtgc

SEQ ID NO: 5814570 - DNA, 25 bp, Homo sapien
tcctgcggccgcagccgctgcgccc

SEQ ID NO: 5814571 - DNA, 25 bp, Homo sapien
gccccgagtgcggcctctccaccat

SEQ ID NO: 5814572 - DNA, 25 bp, Homo sapien
ggttgagataaatttgatgatatat

SEQ ID NO: 5814573 - DNA, 25 bp, Homo sapien
atgtgcttcgctcagggccaggcac

SEQ ID NO: 5814574 - DNA, 25 bp, Homo sapien
tggtggcgcgtttccccgcggggcg

SEQ ID NO: 5814575 - DNA, 25 bp, Homo sapien
ggtcctcgggctgacagccctggcg

SEQ ID NO: 5814576 - DNA, 25 bp, Homo sapien
cgacggcggcggtcctcgggctgac

SEQ ID NO: 5814577 - DNA, 25 bp, Homo sapien
gctccttcattaggcagcctgctcc

SEQ ID NO: 5814578 - DNA, 25 bp, Homo sapien
caggtagcggcgcttgcagcagccg

SEQ ID NO: 5814579 - DNA, 25 bp, Homo sapien
cccggctcagctcccgccctcggag

SEQ ID NO: 5814580 - DNA, 25 bp, Homo sapien
aaaagaaatgctcaccatttgtaga

SEQ ID NO: 5814581 - DNA, 25 bp, Homo sapien
tctgcaggtagcggcgcttgcagca

SEQ ID NO: 5814582 - DNA, 25 bp, Homo sapien
acacgttgaggatgtcgtcgaagtt

SEQ ID NO: 5814583 - DNA, 25 bp, Homo sapien
cacgtcaaaaatcacaccacccatt

SEQ ID NO: 5814584 - DNA, 25 bp, Homo sapien
ggtcacgaagagcaccgacaggcag

SEQ ID NO: 5814585 - DNA, 25 bp, Homo sapien
acacacatgtacctatcaataaaaa

SEQ ID NO: 5814586 - DNA, 25 bp, Homo sapien
atctccgcgaactcctcaatcttct

SEQ ID NO: 5814587 - DNA, 25 bp, Homo sapien
gtcgcccggggagcccgctctgcct

SEQ ID NO: 5814588 - DNA, 25 bp, Homo sapien
cagtggtgggcacagtggaggccag

SEQ ID NO: 5814589 - DNA, 25 bp, Homo sapien
gcgatgccccagtacagcagctcct

SEQ ID NO: 5814590 - DNA, 25 bp, Homo sapien
gaggcagaccatgcacacaaacatt

SEQ ID NO: 5814591 - DNA, 25 bp, Homo sapien
cctcaaatacctagtgggtgtgaaa

SEQ ID NO: 5814592 - DNA, 25 bp, Homo sapien
aggctgcagcgcgcaaagttcccac

SEQ ID NO: 5814593 - DNA, 25 bp, Homo sapien
gatccgacggcggcggtcctcgggc

SEQ ID NO: 5814594 - DNA, 25 bp, Homo sapien
tctcccggtaagagggtcattttgg

SEQ ID NO: 5814595 - DNA, 25 bp, Homo sapien
agggcagtggtgggcacagtggagg

SEQ ID NO: 5814596 - DNA, 25 bp, Homo sapien
gaaaatgtgtctgggctactatgat

SEQ ID NO: 5814597 - DNA, 25 bp, Homo sapien
ggggcgtgggctcttacctgctcct

SEQ ID NO: 5814598 - DNA, 25 bp, Homo sapien
aactcgtccagcgtggtccagggca

SEQ ID NO: 5814599 - DNA, 25 bp, Homo sapien
tgacggtcacgaagagcaccgacag

SEQ ID NO: 5814600 - DNA, 25 bp, Homo sapien
ctgcgggaggaaggccgggtggaag

SEQ ID NO: 5814601 - DNA, 25 bp, Homo sapien
caccacccatttattcactcatttg

SEQ ID NO: 5814602 - DNA, 25 bp, Homo sapien
ctcccgccctcggagccacggccgc

SEQ ID NO: 5814603 - DNA, 25 bp, Homo sapien
tccctcgtggtggcgcgtttccccg

SEQ ID NO: 5814604 - DNA, 25 bp, Homo sapien
ccctctcgggccaccagttctagaa

SEQ ID NO: 5814605 - DNA, 25 bp, Homo sapien
gccgcagcttgcccgcgcgcaggaa

SEQ ID NO: 5814606 - DNA, 25 bp, Homo sapien
cagtgtgcaatcagaggaggctttc

SEQ ID NO: 5814607 - DNA, 25 bp, Homo sapien
agtcgccgcatgcagcgccccaggc

SEQ ID NO: 5814608 - DNA, 25 bp, Homo sapien
ctggcccaggcgcgtcagcgggaac

SEQ ID NO: 5814609 - DNA, 25 bp, Homo sapien
accagcggtgactcccgagtcctct

SEQ ID NO: 5814610 - DNA, 25 bp, Homo sapien
gagggaccagggatgctattcagcc

SEQ ID NO: 5814611 - DNA, 25 bp, Homo sapien
catcctgcggccgcagccgctgcgc

SEQ ID NO: 5814612 - DNA, 25 bp, Homo sapien
gtcgtcctcttcctcccgctccacc

SEQ ID NO: 5814613 - DNA, 25 bp, Homo sapien
caggctgggcaaggtgctgacggag

SEQ ID NO: 5814614 - DNA, 25 bp, Homo sapien
gtgctggacactgttctaaacactg

SEQ ID NO: 5814615 - DNA, 25 bp, Homo sapien
acgaagagcaccgacaggcaggcga

SEQ ID NO: 5814616 - DNA, 25 bp, Homo sapien
ccacccatttattcactcatttgtt

SEQ ID NO: 5814617 - DNA, 25 bp, Homo sapien
ggccgcagccgctgcgcccggcggt

SEQ ID NO: 5814618 - DNA, 25 bp, Homo sapien
taaaaattatcttcaggacccagaa

SEQ ID NO: 5814619 - DNA, 25 bp, Homo sapien
gctgcagcgcgcaaagttcccacct

SEQ ID NO: 5814620 - DNA, 25 bp, Homo sapien
gagttggcccggccgcggcttccgt

SEQ ID NO: 5814621 - DNA, 25 bp, Homo sapien
cgttgatgatgatccgacggcggcg

SEQ ID NO: 5814622 - DNA, 25 bp, Homo sapien
cttcggtggcgcccggcgaggctgc

SEQ ID NO: 5814623 - DNA, 25 bp, Homo sapien
tcgccctcggccgggccctcgctgt

SEQ ID NO: 5814624 - DNA, 25 bp, Homo sapien
tagtgccgaaggcccccgggttgcg

SEQ ID NO: 5814625 - DNA, 25 bp, Homo sapien
ccctcgctgtcgcggccctcgctgt

SEQ ID NO: 5814626 - DNA, 25 bp, Homo sapien
cagcgtggtccagggcagcgagtac

SEQ ID NO: 5814627 - DNA, 25 bp, Homo sapien
cagaattgtctcccggtaagagggt

SEQ ID NO: 5814628 - DNA, 25 bp, Homo sapien
aggaacgttgagaaaggaccgaatg

SEQ ID NO: 5814629 - DNA, 25 bp, Homo sapien
acgcaccagcggtgactcccgagtc

SEQ ID NO: 5814630 - DNA, 25 bp, Homo sapien
aacaaaaagaaatgctcaccatttg

SEQ ID NO: 5814631 - DNA, 25 bp, Homo sapien
ggctgcccacgggtccggggcgagg

SEQ ID NO: 5814632 - DNA, 25 bp, Homo sapien
cgtgcagccgcccccgagcccgagt

SEQ ID NO: 5814633 - DNA, 25 bp, Homo sapien
cagccctggcggggctcatcctgcg

SEQ ID NO: 5814634 - DNA, 25 bp, Homo sapien
cagatgagtgggagcccttagactg

SEQ ID NO: 5814635 - DNA, 25 bp, Homo sapien
acaggcacaggcgtggacccccatg

SEQ ID NO: 5814636 - DNA, 25 bp, Homo sapien
cccttagactgtagcacacaccccg

SEQ ID NO: 5814637 - DNA, 25 bp, Homo sapien
caaaggattaggaacgttgagaaag

SEQ ID NO: 5814638 - DNA, 25 bp, Homo sapien
ttacaaagacagactggacttagac

SEQ ID NO: 5814639 - DNA, 25 bp, Homo sapien
ggcgaacaccttgccaggcagcccc

SEQ ID NO: 5814640 - DNA, 25 bp, Homo sapien
cttgatgccgcctacgttgatgatg

SEQ ID NO: 5814641 - DNA, 25 bp, Homo sapien
ggaggccaggacaggcacaggcgtg

SEQ ID NO: 5814642 - DNA, 25 bp, Homo sapien
tctgtgtgcaagcctggctccttca

SEQ ID NO: 5814643 - DNA, 25 bp, Homo sapien
acaaagacagactggacttagacct

SEQ ID NO: 5814644 - DNA, 25 bp, Homo sapien
ggtcccggggcccggctcagctccc

SEQ ID NO: 5814645 - DNA, 25 bp, Homo sapien
cacaccacccatttattcactcatt

SEQ ID NO: 5814646 - DNA, 25 bp, Homo sapien
cccagatgagtgggagcccttagac

SEQ ID NO: 5814647 - DNA, 25 bp, Homo sapien
gaggttgacggcggtgacggtcacg

SEQ ID NO: 5814648 - DNA, 25 bp, Homo sapien
tcggtggcgcccggcgaggctgcag

SEQ ID NO: 5814649 - DNA, 25 bp, Homo sapien
gcttacaaagacagactggacttag

SEQ ID NO: 5814650 - DNA, 25 bp, Homo sapien
tgggaaaccttgtgtgggccaatca

SEQ ID NO: 5814651 - DNA, 25 bp, Homo sapien
tgtcaggagggaccagggatgctat

SEQ ID NO: 5814652 - DNA, 25 bp, Homo sapien
ggacccccatgatgctcacatatta

SEQ ID NO: 5814653 - DNA, 25 bp, Homo sapien
cctcccggagccgccgccaaacttc

SEQ ID NO: 5814654 - DNA, 25 bp, Homo sapien
tgcggccgcagccgctgcgcccggc

SEQ ID NO: 5814655 - DNA, 25 bp, Homo sapien
gcctcggagttggcccggccgcggc

SEQ ID NO: 5814656 - DNA, 25 bp, Homo sapien
ttgcggtcgaagaagaactcgttgc

SEQ ID NO: 5814657 - DNA, 25 bp, Homo sapien
gacccagaaaatgtgtctgggctac

SEQ ID NO: 5814658 - DNA, 25 bp, Homo sapien
gttcattcaacaaatagtggttgag

SEQ ID NO: 5814659 - DNA, 25 bp, Homo sapien
gcccccgcagggagttcagggccac

SEQ ID NO: 5814660 - DNA, 25 bp, Homo sapien
cgggctgacagccctggcggggctc

SEQ ID NO: 5814661 - DNA, 25 bp, Homo sapien
aaaccttgtgtgggccaatcacata

SEQ ID NO: 5814662 - DNA, 25 bp, Homo sapien
tggggttgggcagtgtcctcaaata

SEQ ID NO: 5814663 - DNA, 25 bp, Homo sapien
tggcaaccaagtcaaatttttggga

SEQ ID NO: 5814664 - DNA, 25 bp, Homo sapien
gaaggccgggtggaaggaggcgtcc

SEQ ID NO: 5814665 - DNA, 25 bp, Homo sapien
attccctggggagataagacgtagt

SEQ ID NO: 5814666 - DNA, 25 bp, Homo sapien
aacaccttgccaggcagccccgagt

SEQ ID NO: 5814667 - DNA, 25 bp, Homo sapien
gcgcagtcgccgcatgcagcgcccc

SEQ ID NO: 5814668 - DNA, 25 bp, Homo sapien
tacagcagctcctcctggaaggaca

SEQ ID NO: 5814669 - DNA, 25 bp, Homo sapien
cttcggtcccggggcccggctcagc

SEQ ID NO: 5814670 - DNA, 25 bp, Homo sapien
gtcgaagttggtgcaggccttgagc

SEQ ID NO: 5814671 - DNA, 25 bp, Homo sapien
ggtgacaatgctcagagtcccttcc

SEQ ID NO: 5814672 - DNA, 25 bp, Homo sapien
cgtcctcttcctcccgctccaccat

SEQ ID NO: 5814673 - DNA, 25 bp, Homo sapien
gcggtcctcgggctgacagccctgg

SEQ ID NO: 5814674 - DNA, 25 bp, Homo sapien
ctccctcaggctgggcaaggtgctg

SEQ ID NO: 5814675 - DNA, 25 bp, Homo sapien
aggaggctttctggaggaggtgaca

SEQ ID NO: 5814676 - DNA, 25 bp, Homo sapien
cgcccccgagcccgagtttgcaggc

SEQ ID NO: 5814677 - DNA, 25 bp, Homo sapien
gcgcgtcgtcctcttcctcccgctc

SEQ ID NO: 5814678 - DNA, 25 bp, Homo sapien
aagttggtgcaggccttgagctggc

SEQ ID NO: 5814679 - DNA, 25 bp, Homo sapien
agctcctcctggaaggacagcgcgc

SEQ ID NO: 5814680 - DNA, 25 bp, Homo sapien
agactggacttagacctggggttgg

SEQ ID NO: 5814681 - DNA, 25 bp, Homo sapien
acctcaagttcccgtcgcggcgtcc

SEQ ID NO: 5814682 - DNA, 25 bp, Homo sapien
atgcacacaaacattcctgatgtca

SEQ ID NO: 5814683 - DNA, 25 bp, Homo sapien
tggggagataagacgtagttggcac

SEQ ID NO: 5814684 - DNA, 25 bp, Homo sapien
cctcccgctccaccatctccgcgaa

SEQ ID NO: 5814685 - DNA, 25 bp, Homo sapien
gtggaggccaggacaggcacaggcg

SEQ ID NO: 5814686 - DNA, 25 bp, Homo sapien
ccgaatggttgagataaatttgatg

SEQ ID NO: 5814687 - DNA, 25 bp, Homo sapien
attcaacaaatagtggttgagtgcc

SEQ ID NO: 5814688 - DNA, 25 bp, Homo sapien
ctcccagatgagtgggagcccttag

SEQ ID NO: 5814689 - DNA, 25 bp, Homo sapien
gcgagaggggcctggaagtcgcccg

SEQ ID NO: 5814690 - DNA, 25 bp, Homo sapien
tccccaagctgccacgtgggaacca

SEQ ID NO: 5814691 - DNA, 25 bp, Homo sapien
ctgtttgtgctggacactgttctaa

SEQ ID NO: 5814692 - DNA, 25 bp, Homo sapien
cccttccctcgtggtggcgcgtttc

SEQ ID NO: 5814693 - DNA, 25 bp, Homo sapien
tgcgcccggcggtagaacgcgccct

SEQ ID NO: 5814694 - DNA, 25 bp, Homo sapien
tggtgcaggccttgagctggcccag

SEQ ID NO: 5814695 - DNA, 25 bp, Homo sapien
gtggggctatattaggtccccaagc

SEQ ID NO: 5814696 - DNA, 25 bp, Homo sapien
gtaaataaactttccattcattctc

SEQ ID NO: 5814697 - DNA, 25 bp, Homo sapien
cagccccgagtgcggcctctccacc

SEQ ID NO: 5814698 - DNA, 25 bp, Homo sapien
gaccgaatggttgagataaatttga

SEQ ID NO: 5814699 - DNA, 25 bp, Homo sapien
taatgtgcttcgctcagggccaggc

SEQ ID NO: 5814700 - DNA, 25 bp, Homo sapien
tactatgatgcaaaggattaggaac

SEQ ID NO: 5814701 - DNA, 25 bp, Homo sapien
ggcagaccatgcacacaaacattcc

SEQ ID NO: 5814702 - DNA, 25 bp, Homo sapien
gcctgtttgtgctggacactgttct

SEQ ID NO: 5814703 - DNA, 25 bp, Homo sapien
ttcagggccacggccacgtgcagcc

SEQ ID NO: 5814704 - DNA, 25 bp, Homo sapien
tgtctcccggtaagagggtcatttt

SEQ ID NO: 5814705 - DNA, 25 bp, Homo sapien
tcaggacccagaaaatgtgtctggg

SEQ ID NO: 5814706 - DNA, 25 bp, Homo sapien
gcgtcgtcctcttcctcccgctcca

SEQ ID NO: 5814707 - DNA, 25 bp, Homo sapien
gccctggagtaaataaactttccat

SEQ ID NO: 5814708 - DNA, 25 bp, Homo sapien
catgtcgcgcagtcgccgcatgcag

SEQ ID NO: 5814709 - DNA, 25 bp, Homo sapien
ccttggccgtaacaagcgcgctcca

SEQ ID NO: 5814710 - DNA, 25 bp, Homo sapien
ctctcgggccaccagttctagaatt

SEQ ID NO: 5814711 - DNA, 25 bp, Homo sapien
gcgggaggaaggccgggtggaagga

SEQ ID NO: 5814712 - DNA, 25 bp, Homo sapien
accatgtcgcgcagtcgccgcatgc

SEQ ID NO: 5814713 - DNA, 25 bp, Homo sapien
ctcctcctggaaggacagcgcgcac

SEQ ID NO: 5814714 - DNA, 25 bp, Homo sapien
gatgcaaaggattaggaacgttgag

SEQ ID NO: 5814715 - DNA, 25 bp, Homo sapien
atttgttcattcaacaaatagtggt

SEQ ID NO: 5814716 - DNA, 25 bp, Homo sapien
ttcacttttattgttggcaaccaag

SEQ ID NO: 5814717 - DNA, 25 bp, Homo sapien
cggcggtagaacgcgcccttgatgg

SEQ ID NO: 5814718 - DNA, 25 bp, Homo sapien
gtcaggccctggagtaaataaactt

SEQ ID NO: 5814719 - DNA, 25 bp, Homo sapien
gagtcctctgtcgccctggcctccc

SEQ ID NO: 5814720 - DNA, 25 bp, Homo sapien
ggtgacgtcgtagtcatcgcacacg

SEQ ID NO: 5814721 - DNA, 25 bp, Homo sapien
tcgtggtggcgcgtttccccgcggg

SEQ ID NO: 5814722 - DNA, 25 bp, Homo sapien
cgggccaccagttctagaattgtct

SEQ ID NO: 5814723 - DNA, 25 bp, Homo sapien
aaatcacaccacccatttattcact

SEQ ID NO: 5814724 - DNA, 25 bp, Homo sapien
gagggtcattttgggccttcacatc

SEQ ID NO: 5814725 - DNA, 25 bp, Homo sapien
cacatctcgcgcagcagccgcagct

SEQ ID NO: 5814726 - DNA, 25 bp, Homo sapien
cttgtgtgggccaatcacatagtcc

SEQ ID NO: 5814727 - DNA, 25 bp, Homo sapien
ctgacagccctggcggggctcatcc

SEQ ID NO: 5814728 - DNA, 25 bp, Homo sapien
gcctggcgctgcgggaggaaggccg

SEQ ID NO: 5814729 - DNA, 25 bp, Homo sapien
ggtgacggtcacgaagagcaccgac

SEQ ID NO: 5814730 - DNA, 25 bp, Homo sapien
tcgaagaagaactcgttgcaggtga

SEQ ID NO: 5814731 - DNA, 25 bp, Homo sapien
cgccacgcaccagcggtgactcccg

SEQ ID NO: 5814732 - DNA, 25 bp, Homo sapien
gccaggcacgtcaaaaatcacacca

SEQ ID NO: 5814733 - DNA, 25 bp, Homo sapien
tgactcccgagtcctctgtcgccct

SEQ ID NO: 5814734 - DNA, 25 bp, Homo sapien
cgcggccctcgctgtccagcgcgtc

SEQ ID NO: 5814735 - DNA, 25 bp, Homo sapien
acggcggcggtcctcgggctgacag

SEQ ID NO: 5814736 - DNA, 25 bp, Homo sapien
gagtgcctgtttgtgctggacactg

SEQ ID NO: 5814737 - DNA, 25 bp, Homo sapien
tttgggaaaccttgtgtgggccaat

SEQ ID NO: 5814738 - DNA, 25 bp, Homo sapien
tgtcgtcgaagttggtgcaggcctt

SEQ ID NO: 5814739 - DNA, 25 bp, Homo sapien
caagcgcgctccacgccgccacgca

SEQ ID NO: 5814740 - DNA, 25 bp, Homo sapien
gagaggttgacggcggtgacggtca

SEQ ID NO: 5814741 - DNA, 25 bp, Homo sapien
gggagcccgctctgcctcccggagc

SEQ ID NO: 5814742 - DNA, 25 bp, Homo sapien
ccccacagggttgctggagcattcc

SEQ ID NO: 5814743 - DNA, 25 bp, Homo sapien
gaggtgacaatgctcagagtccctt

SEQ ID NO: 5814744 - DNA, 25 bp, Homo sapien
cggagttggcccggccgcggcttcc

SEQ ID NO: 5814745 - DNA, 25 bp, Homo sapien
cgcagcttgcccgcgcgcaggaagg

SEQ ID NO: 5814746 - DNA, 25 bp, Homo sapien
acccccatgatgctcacatattaac

SEQ ID NO: 5814747 - DNA, 25 bp, Homo sapien
caggtgacgtcgtagtcatcgcaca

SEQ ID NO: 5814748 - DNA, 25 bp, Homo sapien
gcggcgcttgcagcagccgtccagg

SEQ ID NO: 5814749 - DNA, 25 bp, Homo sapien
ttcgctcagggccaggcacgtcaaa

SEQ ID NO: 5814750 - DNA, 25 bp, Homo sapien
cttcccccacagggttgctggagca

SEQ ID NO: 5814751 - DNA, 25 bp, Homo sapien
caaatagtggttgagtgcctgtttg

SEQ ID NO: 5814752 - DNA, 25 bp, Homo sapien
agttggcacatgcagcccagctccg

SEQ ID NO: 5814753 - DNA, 25 bp, Homo sapien
gtggttgagtgcctgtttgtgctgg

SEQ ID NO: 5814754 - DNA, 25 bp, Homo sapien
cctccccgcaggcgggtttcgaggc

SEQ ID NO: 5814755 - DNA, 25 bp, Homo sapien
cacttttattgttggcaaccaagtc

SEQ ID NO: 5814756 - DNA, 25 bp, Homo sapien
cctcctggaaggacagcgcgcacat

SEQ ID NO: 5814757 - DNA, 25 bp, Homo sapien
cacatattaacagggaggcagacca

SEQ ID NO: 5814758 - DNA, 25 bp, Homo sapien
aggccttgagctggcccaggcgcgt

SEQ ID NO: 5814759 - DNA, 25 bp, Homo sapien
tcgctgtccagcgcgtcgtcctctt

SEQ ID NO: 5814760 - DNA, 25 bp, Homo sapien
cgggaactcgtccagcgtggtccag

SEQ ID NO: 5814761 - DNA, 25 bp, Homo sapien
tctagaattgtctgtgtgcaagcct

SEQ ID NO: 5814762 - DNA, 25 bp, Homo sapien
tgagtgggagcccttagactgtagc

SEQ ID NO: 5814763 - DNA, 25 bp, Homo sapien
tcaataaaaattatcttcaggaccc

SEQ ID NO: 5814764 - DNA, 25 bp, Homo sapien
aaggtgctgacggagaggttgacgg

SEQ ID NO: 5814765 - DNA, 25 bp, Homo sapien
tgctgacggagaggttgacggcggt

SEQ ID NO: 5814766 - DNA, 25 bp, Homo sapien
gcgtggtccagggcagcgagtactt

SEQ ID NO: 5814767 - DNA, 25 bp, Homo sapien
ccggctgcccacgggtccggggcga

SEQ ID NO: 5814768 - DNA, 25 bp, Homo sapien
tgaaaaaacttcacttttattgttg

SEQ ID NO: 5814769 - DNA, 25 bp, Homo sapien
cgagtgcggcctctccaccatgtcg

SEQ ID NO: 5814770 - DNA, 25 bp, Homo sapien
acggtcacgaagagcaccgacaggc

SEQ ID NO: 5814771 - DNA, 25 bp, Homo sapien
aaacattcctgatgtcaggagggac

SEQ ID NO: 5814772 - DNA, 25 bp, Homo sapien
cgcgctccacgccgccacgcaccag

SEQ ID NO: 5814773 - DNA, 25 bp, Homo sapien
tggaaggaggcgtccgaggtgcagc

SEQ ID NO: 5814774 - DNA, 25 bp, Homo sapien
aatagtggttgagtgcctgtttgtg

SEQ ID NO: 5814775 - DNA, 25 bp, Homo sapien
ctgggcaaggtgctgacggagaggt

SEQ ID NO: 5814776 - DNA, 25 bp, Homo sapien
atattaggtccccaagctgccacgt

SEQ ID NO: 5814777 - DNA, 25 bp, Homo sapien
gggtcattttgggccttcacatccc

SEQ ID NO: 5814778 - DNA, 25 bp, Homo sapien
tagaattgtctgtgtgcaagcctgg

SEQ ID NO: 5814779 - DNA, 25 bp, Homo sapien
tcattcaacaaatagtggttgagtg

SEQ ID NO: 5814780 - DNA, 25 bp, Homo sapien
agtgggtgtgaaaacacttccccca

SEQ ID NO: 5814781 - DNA, 25 bp, Homo sapien
ccgagtcctctgtcgccctggcctc

SEQ ID NO: 5814782 - DNA, 25 bp, Homo sapien
cgaggctgcagcgcgcaaagttccc

SEQ ID NO: 5814783 - DNA, 25 bp, Homo sapien
gataagacgtagttggcacatgcag

SEQ ID NO: 5814784 - DNA, 25 bp, Homo sapien
ctcaggctgggcaaggtgctgacgg

SEQ ID NO: 5814785 - DNA, 25 bp, Homo sapien
cagcttgcccgcgcgcaggaaggtc

SEQ ID NO: 5814786 - DNA, 25 bp, Homo sapien
cggcctctccaccatgtcgcgcagt

SEQ ID NO: 5814787 - DNA, 25 bp, Homo sapien
tgtgtgggccaatcacatagtcctg

SEQ ID NO: 5814788 - DNA, 25 bp, Homo sapien
ccacgcaccagcggtgactcccgag

SEQ ID NO: 5814789 - DNA, 25 bp, Homo sapien
ttgatggcctggcgctgcgggagga

SEQ ID NO: 5814790 - DNA, 25 bp, Homo sapien
gaccatgcacacaaacattcctgat

SEQ ID NO: 5814791 - DNA, 25 bp, Homo sapien
tcctccctcaggctgggcaaggtgc

SEQ ID NO: 5814792 - DNA, 25 bp, Homo sapien
agcaccgacaggcaggcgaacacct

SEQ ID NO: 5814793 - DNA, 25 bp, Homo sapien
tattcagccagtgtgcaatcagagg

SEQ ID NO: 5814794 - DNA, 25 bp, Homo sapien
gtcaggatagtgccgaaggcccccg

SEQ ID NO: 5814795 - DNA, 25 bp, Homo sapien
cacaccccgtgtcaggccctggagt

SEQ ID NO: 5814796 - DNA, 25 bp, Homo sapien
ccggttcgcgcttcggtggcgcccg

SEQ ID NO: 5814797 - DNA, 25 bp, Homo sapien
caggcaggcgaacaccttgccaggc

SEQ ID NO: 5814798 - DNA, 25 bp, Homo sapien
cagcctgctcccttggccgtaacaa

SEQ ID NO: 5814799 - DNA, 25 bp, Homo sapien
gctgtagtcgtagtcagaattgtct

SEQ ID NO: 5814800 - DNA, 25 bp, Homo sapien
gcgaactcctcaatcttctgcaggt

SEQ ID NO: 5814801 - DNA, 25 bp, Homo sapien
cagccgcagcttgcccgcgcgcagg

SEQ ID NO: 5814802 - DNA, 25 bp, Homo sapien
acattcctgatgtcaggagggacca

SEQ ID NO: 5814803 - DNA, 25 bp, Homo sapien
ttgttggcaaccaagtcaaattttt

SEQ ID NO: 5814804 - DNA, 25 bp, Homo sapien
ccatttgtagacacacatgtaccta

SEQ ID NO: 5814805 - DNA, 25 bp, Homo sapien
gcagctcagcgcgctgtagtcgtag

SEQ ID NO: 5814806 - DNA, 25 bp, Homo sapien
cactggcaagggggagggcagtggt

SEQ ID NO: 5814807 - DNA, 25 bp, Homo sapien
gcggtagaacgcgcccttgatggcc

SEQ ID NO: 5814808 - DNA, 25 bp, Homo sapien
tattaacagggaggcagaccatgca

SEQ ID NO: 5814809 - DNA, 25 bp, Homo sapien
cgcgcacatctcgcgcagcagccgc

SEQ ID NO: 5814810 - DNA, 25 bp, Homo sapien
ggtgggcacagtggaggccaggaca

SEQ ID NO: 5814811 - DNA, 25 bp, Homo sapien
aaaaatcacaccacccatttattca

SEQ ID NO: 5814812 - DNA, 25 bp, Homo sapien
tgcagccgcccccgagcccgagttt

SEQ ID NO: 5814813 - DNA, 25 bp, Homo sapien
gtaacaaaaagaaatgctcaccatt

SEQ ID NO: 5814814 - DNA, 25 bp, Homo sapien
cttagactgtagcacacaccccgtg

SEQ ID NO: 5814815 - DNA, 25 bp, Homo sapien
gcgcaaagttcccacctcaagttcc

SEQ ID NO: 5814816 - DNA, 25 bp, Homo sapien
ggctgggcaaggtgctgacggagag

SEQ ID NO: 5814817 - DNA, 25 bp, Homo sapien
tcctgtggggctatattaggtcccc

SEQ ID NO: 5814818 - DNA, 25 bp, Homo sapien
agctcagcgcgctgtagtcgtagtc

SEQ ID NO: 5814819 - DNA, 25 bp, Homo sapien
tgatgatccgacggcggcggtcctc

SEQ ID NO: 5814820 - DNA, 25 bp, Homo sapien
ggctcatcctgcggccgcagccgct

SEQ ID NO: 5814821 - DNA, 25 bp, Homo sapien
tcggtcccggggcccggctcagctc

SEQ ID NO: 5814822 - DNA, 25 bp, Homo sapien
cacagtggaggccaggacaggcaca

SEQ ID NO: 5814823 - DNA, 25 bp, Homo sapien
tccttcattaggcagcctgctccct

SEQ ID NO: 5814824 - DNA, 25 bp, Homo sapien
caccatctccgcgaactcctcaatc

SEQ ID NO: 5814825 - DNA, 25 bp, Homo sapien
tcccttggccgtaacaagcgcgctc

SEQ ID NO: 5814826 - DNA, 25 bp, Homo sapien
cttgagctggcccaggcgcgtcagc

SEQ ID NO: 5814827 - DNA, 25 bp, Homo sapien
tcccgagtcctctgtcgccctggcc

SEQ ID NO: 5814828 - DNA, 25 bp, Homo sapien
atacctagtgggtgtgaaaacactt

SEQ ID NO: 5814829 - DNA, 25 bp, Homo sapien
gggcctggaagtcgcccggggagcc

SEQ ID NO: 5814830 - DNA, 25 bp, Homo sapien
agaggaggctttctggaggaggtga

SEQ ID NO: 5814831 - DNA, 25 bp, Homo sapien
ttacctgctcctcctcctccctcag

SEQ ID NO: 5814832 - DNA, 25 bp, Homo sapien
tagacctggggttgggcagtgtcct

SEQ ID NO: 5814833 - DNA, 25 bp, Homo sapien
gttgagaaaggaccgaatggttgag

SEQ ID NO: 5814834 - DNA, 25 bp, Homo sapien
gggctactatgatgcaaaggattag

SEQ ID NO: 5814835 - DNA, 25 bp, Homo sapien
cgtgaactcccagatgagtgggagc

SEQ ID NO: 5814836 - DNA, 25 bp, Homo sapien
tagcggcgcttgcagcagccgtcca

SEQ ID NO: 5814837 - DNA, 25 bp, Homo sapien
ccgcagggagttcagggccacggcc

SEQ ID NO: 5814838 - DNA, 25 bp, Homo sapien
gcggtgactcccgagtcctctgtcg

SEQ ID NO: 5814839 - DNA, 25 bp, Homo sapien
ctcagcgcgctgtagtcgtagtcag

SEQ ID NO: 5814840 - DNA, 25 bp, Homo sapien
caagctgccacgtgggaaccatatt

SEQ ID NO: 5814841 - DNA, 25 bp, Homo sapien
taagacgtagttggcacatgcagcc

SEQ ID NO: 5814842 - DNA, 25 bp, Homo sapien
caggatagtgccgaaggcccccggg

SEQ ID NO: 5814843 - DNA, 25 bp, Homo sapien
tgcagcccagctccggctcccgtga

SEQ ID NO: 5814844 - DNA, 25 bp, Homo sapien
tcccggagccgccgccaaacttcgg

SEQ ID NO: 5814845 - DNA, 25 bp, Homo sapien
tgtctgtgtgcaagcctggctcctt

SEQ ID NO: 5814846 - DNA, 25 bp, Homo sapien
gacactgttctaaacactggcaagg

SEQ ID NO: 5814847 - DNA, 25 bp, Homo sapien
ctcaagttcccgtcgcggcgtcccc

SEQ ID NO: 5814848 - DNA, 25 bp, Homo sapien
ctatattaggtccccaagctgccac

SEQ ID NO: 5814849 - DNA, 25 bp, Homo sapien
gttgggcagtgtcctcaaataccta

SEQ ID NO: 5814850 - DNA, 25 bp, Homo sapien
gaggcgtccgaggtgcagctcagcg

SEQ ID NO: 5814851 - DNA, 25 bp, Homo sapien
tgagctggcccaggcgcgtcagcgg

SEQ ID NO: 5814852 - DNA, 25 bp, Homo sapien
tcattaggcagcctgctcccttggc

SEQ ID NO: 5814853 - DNA, 25 bp, Homo sapien
atggttgagataaatttgatgatat

SEQ ID NO: 5814854 - DNA, 25 bp, Homo sapien
tccccgcaggcgggtttcgaggccc

SEQ ID NO: 5814855 - DNA, 25 bp, Homo sapien
ggaaccatatttccatgcttacaaa

SEQ ID NO: 5814856 - DNA, 25 bp, Homo sapien
caggacaggcacaggcgtggacccc

SEQ ID NO: 5814857 - DNA, 25 bp, Homo sapien
ttcgcgcttcggtggcgcccggcga

SEQ ID NO: 5814858 - DNA, 25 bp, Homo sapien
gctcggggtccggttcgcgcttcgg

SEQ ID NO: 5814859 - DNA, 25 bp, Homo sapien
gtttcgaggcccccgcagggagttc

SEQ ID NO: 5814860 - DNA, 25 bp, Homo sapien
ggcgcgtcagcgggaactcgtccag

SEQ ID NO: 5814861 - DNA, 25 bp, Homo sapien
tccgacggcggcggtcctcgggctg

SEQ ID NO: 5814862 - DNA, 25 bp, Homo sapien
gaattgtctcccggtaagagggtca

SEQ ID NO: 5814863 - DNA, 25 bp, Homo sapien
tcagaggaggctttctggaggaggt

SEQ ID NO: 5814864 - DNA, 25 bp, Homo sapien
tggcccggccgcggcttccgtcccc

SEQ ID NO: 5814865 - DNA, 25 bp, Homo sapien
gctcccttggccgtaacaagcgcgc

SEQ ID NO: 5814866 - DNA, 25 bp, Homo sapien
tattgttggcaaccaagtcaaattt

SEQ ID NO: 5814867 - DNA, 25 bp, Homo sapien
tgcagcgcgcaaagttcccacctca

SEQ ID NO: 5814868 - DNA, 25 bp, Homo sapien
gcgtggacccccatgatgctcacat

SEQ ID NO: 5814869 - DNA, 25 bp, Homo sapien
gctggagcattccctggggagataa

SEQ ID NO: 5814870 - DNA, 25 bp, Homo sapien
gggagataagacgtagttggcacat

SEQ ID NO: 5814871 - DNA, 25 bp, Homo sapien
ccgcagccgctgcgcccggcggtag

SEQ ID NO: 5814872 - DNA, 25 bp, Homo sapien
gatgctcacatattaacagggaggc

SEQ ID NO: 5814873 - DNA, 25 bp, Homo sapien
gcctctccaccatgtcgcgcagtcg

SEQ ID NO: 5814874 - DNA, 25 bp, Homo sapien
aaaggaccgaatggttgagataaat

SEQ ID NO: 5814875 - DNA, 25 bp, Homo sapien
cgggttgcggtcgaagaagaactcg

SEQ ID NO: 5814876 - DNA, 25 bp, Homo sapien
cccccgagcccgagtttgcaggctc

SEQ ID NO: 5814877 - DNA, 25 bp, Homo sapien
aatttgatgatatatgtaatgtgct

SEQ ID NO: 5814878 - DNA, 25 bp, Homo sapien
ggctcccgtgaactcccagatgagt

SEQ ID NO: 5814879 - DNA, 25 bp, Homo sapien
ggtggcgcccggcgaggctgcagcg

SEQ ID NO: 5814880 - DNA, 25 bp, Homo sapien
tccgaggtgcagctcagcgcgctgt

SEQ ID NO: 5814881 - DNA, 25 bp, Homo sapien
cctggcggggctcatcctgcggccg

SEQ ID NO: 5814882 - DNA, 25 bp, Homo sapien
cgcgcttcggtggcgcccggcgagg

SEQ ID NO: 5814883 - DNA, 25 bp, Homo sapien
ggttgcggtcgaagaagaactcgtt

SEQ ID NO: 5814884 - DNA, 25 bp, Homo sapien
ccctcaggctgggcaaggtgctgac

SEQ ID NO: 5814885 - DNA, 25 bp, Homo sapien
gtccggttcgcgcttcggtggcgcc

SEQ ID NO: 5814886 - DNA, 25 bp, Homo sapien
ggttgacggcggtgacggtcacgaa

SEQ ID NO: 5814887 - DNA, 25 bp, Homo sapien
tgggagcccttagactgtagcacac

SEQ ID NO: 5814888 - DNA, 25 bp, Homo sapien
gctgcgcccggcggtagaacgcgcc

SEQ ID NO: 5814889 - DNA, 25 bp, Homo sapien
tttattgttggcaaccaagtcaaat

SEQ ID NO: 5814890 - DNA, 25 bp, Homo sapien
acgtcgtagtcatcgcacacgttga

SEQ ID NO: 5814891 - DNA, 25 bp, Homo sapien
ttcagccagtgtgcaatcagaggag

SEQ ID NO: 5814892 - DNA, 25 bp, Homo sapien
ggcgctgcgggaggaaggccgggtg

SEQ ID NO: 5814893 - DNA, 25 bp, Homo sapien
tgcaagcctggctccttcattaggc

SEQ ID NO: 5814894 - DNA, 25 bp, Homo sapien
gcgcgcaggaaggtcaggatagtgc

SEQ ID NO: 5814895 - DNA, 25 bp, Homo sapien
agctcccgccctcggagccacggcc

SEQ ID NO: 5814896 - DNA, 25 bp, Homo sapien
ggtggaaggaggcgtccgaggtgca

SEQ ID NO: 5814897 - DNA, 25 bp, Homo sapien
gcgctgtagtcgtagtcagaattgt

SEQ ID NO: 5814898 - DNA, 25 bp, Homo sapien
tgtgggccaatcacatagtcctgtg

SEQ ID NO: 5814899 - DNA, 25 bp, Homo sapien
aatgctcaccatttgtagacacaca

SEQ ID NO: 5814900 - DNA, 25 bp, Homo sapien
cccggggagcccgctctgcctcccg

SEQ ID NO: 5814901 - DNA, 25 bp, Homo sapien
agccgtccaggtggtcctccgcgat

SEQ ID NO: 5814902 - DNA, 25 bp, Homo sapien
ggacgcgagaggggcctggaagtcg

SEQ ID NO: 5814903 - DNA, 25 bp, Homo sapien
agcgccccaggcggccctcgccctc

SEQ ID NO: 5814904 - DNA, 25 bp, Homo sapien
gcccagctccggctcccgtgaactc

SEQ ID NO: 5814905 - DNA, 25 bp, Homo sapien
caagggggagggcagtggtgggcac

SEQ ID NO: 5814906 - DNA, 25 bp, Homo sapien
gtagacacacatgtacctatcaata

SEQ ID NO: 5814907 - DNA, 25 bp, Homo sapien
tcaggagggaccagggatgctattc

SEQ ID NO: 5814908 - DNA, 25 bp, Homo sapien
cgcaggcgggtttcgaggcccccgc

SEQ ID NO: 5814909 - DNA, 25 bp, Homo sapien
taggcagcctgctcccttggccgta

SEQ ID NO: 5814910 - DNA, 25 bp, Homo sapien
ttgttcattcaacaaatagtggttg

SEQ ID NO: 5814911 - DNA, 25 bp, Homo sapien
cagaccatgcacacaaacattcctg

SEQ ID NO: 5814912 - DNA, 25 bp, Homo sapien
gctggacactgttctaaacactggc

SEQ ID NO: 5814913 - DNA, 25 bp, Homo sapien
cacttcccccacagggttgctggag

SEQ ID NO: 5814914 - DNA, 25 bp, Homo sapien
gttcccacctcaagttcccgtcgcg

SEQ ID NO: 5814915 - DNA, 25 bp, Homo sapien
tgtgtgcaagcctggctccttcatt

SEQ ID NO: 5814916 - DNA, 25 bp, Homo sapien
tagtcatcgcacacgttgaggatgt

SEQ ID NO: 5814917 - DNA, 25 bp, Homo sapien
tggagcattccctggggagataaga

SEQ ID NO: 5814918 - DNA, 25 bp, Homo sapien
tggagtaaataaactttccattcat

SEQ ID NO: 5814919 - DNA, 25 bp, Homo sapien
tcacgaagagcaccgacaggcaggc

SEQ ID NO: 5814920 - DNA, 25 bp, Homo sapien
ttctggaggaggtgacaatgctcag

SEQ ID NO: 5814921 - DNA, 25 bp, Homo sapien
gcagcgccccaggcggccctcgccc

SEQ ID NO: 5814922 - DNA, 25 bp, Homo sapien
gtcgtagtcagaattgtctcccggt

SEQ ID NO: 5814923 - DNA, 25 bp, Homo sapien
gagataagacgtagttggcacatgc

SEQ ID NO: 5814924 - DNA, 25 bp, Homo sapien
ccaggtggtcctccgcgatgcccca

SEQ ID NO: 5814925 - DNA, 25 bp, Homo sapien
ggcgtccgaggtgcagctcagcgcg

SEQ ID NO: 5814926 - DNA, 25 bp, Homo sapien
gtaacaagcgcgctccacgccgcca

SEQ ID NO: 5814927 - DNA, 25 bp, Homo sapien
ccaatcacatagtcctgtggggcta

SEQ ID NO: 5814928 - DNA, 25 bp, Homo sapien
tttccccgcggggcgtgggctctta

SEQ ID NO: 5814929 - DNA, 25 bp, Homo sapien
cgtccagcgtggtccagggcagcga

SEQ ID NO: 5814930 - DNA, 25 bp, Homo sapien
caggcacgtcaaaaatcacaccacc

SEQ ID NO: 5814931 - DNA, 25 bp, Homo sapien
cagggcagcgagtacttgatgccgc

SEQ ID NO: 5814932 - DNA, 25 bp, Homo sapien
tacttgatgccgcctacgttgatga

SEQ ID NO: 5814933 - DNA, 25 bp, Homo sapien
catattaacagggaggcagaccatg

SEQ ID NO: 5814934 - DNA, 25 bp, Homo sapien
cgcttcggtggcgcccggcgaggct

SEQ ID NO: 5814935 - DNA, 25 bp, Homo sapien
gcccccgggttgcggtcgaagaaga

SEQ ID NO: 5814936 - DNA, 25 bp, Homo sapien
gcgcaggaaggtcaggatagtgccg

SEQ ID NO: 5814937 - DNA, 25 bp, Homo sapien
tgtaatgtgcttcgctcagggccag

SEQ ID NO: 5814938 - DNA, 25 bp, Homo sapien
ggccgtaacaagcgcgctccacgcc

SEQ ID NO: 5814939 - DNA, 25 bp, Homo sapien
tccggggcgaggacgcgagaggggc

SEQ ID NO: 5814940 - DNA, 25 bp, Homo sapien
gcgaggacgcgagaggggcctggaa

SEQ ID NO: 5814941 - DNA, 25 bp, Homo sapien
acgtagttggcacatgcagcccagc

SEQ ID NO: 5814942 - DNA, 25 bp, Homo sapien
tccccgcctcggagttggcccggcc

SEQ ID NO: 5814943 - DNA, 25 bp, Homo sapien
ttaggaacgttgagaaaggaccgaa

SEQ ID NO: 5814944 - DNA, 25 bp, Homo sapien
ccgcggggcgtgggctcttacctgc

SEQ ID NO: 5814945 - DNA, 25 bp, Homo sapien
atgctattcagccagtgtgcaatca

SEQ ID NO: 5814946 - DNA, 25 bp, Homo sapien
ggaaggacagcgcgcacatctcgcg

SEQ ID NO: 5814947 - DNA, 25 bp, Homo sapien
tgtccagcgcgtcgtcctcttcctc

SEQ ID NO: 5814948 - DNA, 25 bp, Homo sapien
attgtctcccggtaagagggtcatt

SEQ ID NO: 5814949 - DNA, 25 bp, Homo sapien
aaacttcacttttattgttggcaac

SEQ ID NO: 5814950 - DNA, 25 bp, Homo sapien
gccctggcggggctcatcctgcggc

SEQ ID NO: 5814951 - DNA, 25 bp, Homo sapien
ggcgaggctgcagcgcgcaaagttc

SEQ ID NO: 5814952 - DNA, 25 bp, Homo sapien
ctatgatgcaaaggattaggaacgt

SEQ ID NO: 5814953 - DNA, 25 bp, Homo sapien
cagaaaatgtgtctgggctactatg

SEQ ID NO: 5814954 - DNA, 25 bp, Homo sapien
cgtcgcggcgtccccgcctcggagt

SEQ ID NO: 5814955 - DNA, 25 bp, Homo sapien
aatcagaggaggctttctggaggag

SEQ ID NO: 5814956 - DNA, 25 bp, Homo sapien
tccccgcggggcgtgggctcttacc

SEQ ID NO: 5814957 - DNA, 25 bp, Homo sapien
tcaaatacctagtgggtgtgaaaac

SEQ ID NO: 5814958 - DNA, 25 bp, Homo sapien
cggctcagctcccgccctcggagcc

SEQ ID NO: 5814959 - DNA, 25 bp, Homo sapien
cctggggttgggcagtgtcctcaaa

SEQ ID NO: 5814960 - DNA, 25 bp, Homo sapien
tacgttgatgatgatccgacggcgg

SEQ ID NO: 5814961 - DNA, 25 bp, Homo sapien
agctggcccaggcgcgtcagcggga

SEQ ID NO: 5814962 - DNA, 25 bp, Homo sapien
actcctcaatcttctgcaggtagcg

SEQ ID NO: 5814963 - DNA, 25 bp, Homo sapien
ctggcaagggggagggcagtggtgg

SEQ ID NO: 5814964 - DNA, 25 bp, Homo sapien
ccgcgaactcctcaatcttctgcag

SEQ ID NO: 5814965 - DNA, 25 bp, Homo sapien
cgcctacgttgatgatgatccgacg

SEQ ID NO: 5814966 - DNA, 25 bp, Homo sapien
cttcaggacccagaaaatgtgtctg

SEQ ID NO: 5814967 - DNA, 25 bp, Homo sapien
tcgtcgaagttggtgcaggccttga

SEQ ID NO: 5814968 - DNA, 25 bp, Homo sapien
agtacttgatgccgcctacgttgat

SEQ ID NO: 5814969 - DNA, 25 bp, Homo sapien
ctgccacgtgggaaccatatttcca

SEQ ID NO: 5814970 - DNA, 25 bp, Homo sapien
cacggccacgtgcagccgcccccga

SEQ ID NO: 5814971 - DNA, 25 bp, Homo sapien
ttaacagggaggcagaccatgcaca

SEQ ID NO: 5814972 - DNA, 25 bp, Homo sapien
ggtagaacgcgcccttgatggcctg

SEQ ID NO: 5814973 - DNA, 25 bp, Homo sapien
gcgcagcagccgcagcttgcccgcg

SEQ ID NO: 5814974 - DNA, 25 bp, Homo sapien
agcgcgctccacgccgccacgcacc

SEQ ID NO: 5814975 - DNA, 25 bp, Homo sapien
gagtaaataaactttccattcattc

SEQ ID NO: 5814976 - DNA, 25 bp, Homo sapien
cccgagtgcggcctctccaccatgt

SEQ ID NO: 5814977 - DNA, 25 bp, Homo sapien
tggcctccccgcaggcgggtttcga

SEQ ID NO: 5814978 - DNA, 25 bp, Homo sapien
tgggctcttacctgctcctcctcct

SEQ ID NO: 5814979 - DNA, 25 bp, Homo sapien
cgaggtgcagctcagcgcgctgtag

SEQ ID NO: 5814980 - DNA, 25 bp, Homo sapien
aagaactcgttgcaggtgacgtcgt

SEQ ID NO: 5814981 - DNA, 25 bp, Homo sapien
ccgctgcgcccggcggtagaacgcg

SEQ ID NO: 5814982 - DNA, 25 bp, Homo sapien
cttctgcaggtagcggcgcttgcag

SEQ ID NO: 5814983 - DNA, 25 bp, Homo sapien
gttgcaggtgacgtcgtagtcatcg

SEQ ID NO: 5814984 - DNA, 25 bp, Homo sapien
gcccttgatggcctggcgctgcggg

SEQ ID NO: 5814985 - DNA, 25 bp, Homo sapien
cagccagtgtgcaatcagaggaggc

SEQ ID NO: 5814986 - DNA, 25 bp, Homo sapien
ggctgacagccctggcggggctcat

SEQ ID NO: 5814987 - DNA, 25 bp, Homo sapien
aggatgtcgtcgaagttggtgcagg

SEQ ID NO: 5814988 - DNA, 25 bp, Homo sapien
ccacagggttgctggagcattccct

SEQ ID NO: 5814989 - DNA, 25 bp, Homo sapien
gcaggctcggggtccggttcgcgct

SEQ ID NO: 5814990 - DNA, 25 bp, Homo sapien
cctcctccctcaggctgggcaaggt

SEQ ID NO: 5814991 - DNA, 25 bp, Homo sapien
cgtagtcagaattgtctcccggtaa

SEQ ID NO: 5814992 - DNA, 25 bp, Homo sapien
agggatgctattcagccagtgtgca

SEQ ID NO: 5814993 - DNA, 25 bp, Homo sapien
acgttgagaaaggaccgaatggttg

SEQ ID NO: 5814994 - DNA, 25 bp, Homo sapien
cccgccctcggagccacggccgccc

SEQ ID NO: 5814995 - DNA, 25 bp, Homo sapien
tggctccttcattaggcagcctgct

SEQ ID NO: 5814996 - DNA, 25 bp, Homo sapien
tagtcagaattgtctcccggtaaga

SEQ ID NO: 5814997 - DNA, 25 bp, Homo sapien
cttcacatccctctcgggccaccag

SEQ ID NO: 5814998 - DNA, 25 bp, Homo sapien
tcaacaaatagtggttgagtgcctg

SEQ ID NO: 5814999 - DNA, 25 bp, Homo sapien
caggccctggagtaaataaactttc

SEQ ID NO: 5815000 - DNA, 25 bp, Homo sapien
cgaggcccccgcagggagttcaggg

SEQ ID NO: 5815001 - DNA, 25 bp, Homo sapien
ctccggctcccgtgaactcccagat

SEQ ID NO: 5815002 - DNA, 25 bp, Homo sapien
acatccctctcgggccaccagttct

SEQ ID NO: 5815003 - DNA, 25 bp, Homo sapien
caaaaagaaatgctcaccatttgta

SEQ ID NO: 5815004 - DNA, 25 bp, Homo sapien
cagggaggcagaccatgcacacaaa

SEQ ID NO: 5815005 - DNA, 25 bp, Homo sapien
ggagcccttagactgtagcacacac

SEQ ID NO: 5815006 - DNA, 25 bp, Homo sapien
gatatatgtaatgtgcttcgctcag

SEQ ID NO: 5815007 - DNA, 25 bp, Homo sapien
gagcccgagtttgcaggctcggggt

SEQ ID NO: 5815008 - DNA, 25 bp, Homo sapien
gagaggggcctggaagtcgcccggg

SEQ ID NO: 5815009 - DNA, 25 bp, Homo sapien
ctagtgggtgtgaaaacacttcccc

SEQ ID NO: 5815010 - DNA, 25 bp, Homo sapien
cgaagttggtgcaggccttgagctg

SEQ ID NO: 5815011 - DNA, 25 bp, Homo sapien
ggcagccccgagtgcggcctctcca

SEQ ID NO: 5815012 - DNA, 25 bp, Homo sapien
ctccgcgaactcctcaatcttctgc

SEQ ID NO: 5815013 - DNA, 25 bp, Homo sapien
tgacaatgctcagagtcccttccct

SEQ ID NO: 5815014 - DNA, 25 bp, Homo sapien
ggccctcgctgtcgcggccctcgct

SEQ ID NO: 5815015 - DNA, 25 bp, Homo sapien
cctggctccttcattaggcagcctg

SEQ ID NO: 5815016 - DNA, 25 bp, Homo sapien
aataaaaattatcttcaggacccag

SEQ ID NO: 5815017 - DNA, 25 bp, Homo sapien
tgcaaaggattaggaacgttgagaa

SEQ ID NO: 5815018 - DNA, 25 bp, Homo sapien
catctcgcgcagcagccgcagcttg

SEQ ID NO: 5815019 - DNA, 25 bp, Homo sapien
aggccgggtggaaggaggcgtccga

SEQ ID NO: 5815020 - DNA, 25 bp, Homo sapien
tgctcacatattaacagggaggcag

SEQ ID NO: 5815021 - DNA, 25 bp, Homo sapien
tagtcgtagtcagaattgtctcccg

SEQ ID NO: 5815022 - DNA, 25 bp, Homo sapien
attgtctgtgtgcaagcctggctcc

SEQ ID NO: 5815023 - DNA, 25 bp, Homo sapien
cgtgggctcttacctgctcctcctc

SEQ ID NO: 5815024 - DNA, 25 bp, Homo sapien
cagtgtcctcaaatacctagtgggt

SEQ ID NO: 5815025 - DNA, 25 bp, Homo sapien
ctcggagccacggccgccccgtctc

SEQ ID NO: 5815026 - DNA, 25 bp, Homo sapien
ctcaccatttgtagacacacatgta

SEQ ID NO: 5815027 - DNA, 25 bp, Homo sapien
ctcatcctgcggccgcagccgctgc

SEQ ID NO: 5815028 - DNA, 25 bp, Homo sapien
gccgggtggaaggaggcgtccgagg

SEQ ID NO: 5815029 - DNA, 25 bp, Homo sapien
ccggggcccggctcagctcccgccc

SEQ ID NO: 5815030 - DNA, 25 bp, Homo sapien
agacacacatgtacctatcaataaa

SEQ ID NO: 5815031 - DNA, 25 bp, Homo sapien
tccagcgtggtccagggcagcgagt

SEQ ID NO: 5815032 - DNA, 25 bp, Homo sapien
gccctcggccgggccctcgctgtcg

SEQ ID NO: 5815033 - DNA, 25 bp, Homo sapien
gcaatcagaggaggctttctggagg

SEQ ID NO: 5815034 - DNA, 25 bp, Homo sapien
ctcgctgtcgcggccctcgctgtcc

SEQ ID NO: 5815035 - DNA, 25 bp, Homo sapien
gcggggcgtgggctcttacctgctc

SEQ ID NO: 5815036 - DNA, 25 bp, Homo sapien
cgcttgcagcagccgtccaggtggt

SEQ ID NO: 5815037 - DNA, 25 bp, Homo sapien
tgctcagagtcccttccctcgtggt

SEQ ID NO: 5815038 - DNA, 25 bp, Homo sapien
gtctgggctactatgatgcaaagga

SEQ ID NO: 5815039 - DNA, 25 bp, Homo sapien
aacaagcgcgctccacgccgccacg

SEQ ID NO: 5815040 - DNA, 25 bp, Homo sapien
gcgcgcaaagttcccacctcaagtt

SEQ ID NO: 5815041 - DNA, 25 bp, Homo sapien
gaggggcctggaagtcgcccgggga

SEQ ID NO: 5815042 - DNA, 25 bp, Homo sapien
agtgcggcctctccaccatgtcgcg

SEQ ID NO: 5815043 - DNA, 25 bp, Homo sapien
tcagcgggaactcgtccagcgtggt

SEQ ID NO: 5815044 - DNA, 25 bp, Homo sapien
caggcgggtttcgaggcccccgcag

SEQ ID NO: 5815045 - DNA, 25 bp, Homo sapien
ttatgtaacaaaaagaaatgctcac

SEQ ID NO: 5815046 - DNA, 25 bp, Homo sapien
agaaaggaccgaatggttgagataa

SEQ ID NO: 5815047 - DNA, 25 bp, Homo sapien
cttagacctggggttgggcagtgtc

SEQ ID NO: 5815048 - DNA, 25 bp, Homo sapien
ccccgtgtcaggccctggagtaaat

SEQ ID NO: 5815049 - DNA, 25 bp, Homo sapien
gtcgcggccctcgctgtccagcgcg

SEQ ID NO: 5815050 - DNA, 25 bp, Homo sapien
gtgcagctcagcgcgctgtagtcgt

SEQ ID NO: 5815051 - DNA, 25 bp, Homo sapien
aggtgcagctcagcgcgctgtagtc

SEQ ID NO: 5815052 - DNA, 25 bp, Homo sapien
gctattcagccagtgtgcaatcaga

SEQ ID NO: 5815053 - DNA, 25 bp, Homo sapien
tcacatccctctcgggccaccagtt

SEQ ID NO: 5815054 - DNA, 25 bp, Homo sapien
tcggggtccggttcgcgcttcggtg

SEQ ID NO: 5815055 - DNA, 25 bp, Homo sapien
attcattctcttatgtaacaaaaag

SEQ ID NO: 5815056 - DNA, 25 bp, Homo sapien
ggccgggccctcgctgtcgcggccc

SEQ ID NO: 5815057 - DNA, 25 bp, Homo sapien
aggcccccgcagggagttcagggcc

SEQ ID NO: 5815058 - DNA, 25 bp, Homo sapien
gggcaaggtgctgacggagaggttg

SEQ ID NO: 5815059 - DNA, 25 bp, Homo sapien
aggaaggtcaggatagtgccgaagg

SEQ ID NO: 5815060 - DNA, 25 bp, Homo sapien
gactgtagcacacaccccgtgtcag

SEQ ID NO: 5815061 - DNA, 25 bp, Homo sapien
agccgctgcgcccggcggtagaacg

SEQ ID NO: 5815062 - DNA, 25 bp, Homo sapien
accttgtgtgggccaatcacatagt

SEQ ID NO: 5815063 - DNA, 25 bp, Homo sapien
gcagctcctcctggaaggacagcgc

SEQ ID NO: 5815064 - DNA, 25 bp, Homo sapien
tgatgatatatgtaatgtgcttcgc

SEQ ID NO: 5815065 - DNA, 25 bp, Homo sapien
ttgccaggcagccccgagtgcggcc

SEQ ID NO: 5815066 - DNA, 25 bp, Homo sapien
aggcggccctcgccctcggccgggc

SEQ ID NO: 5815067 - DNA, 25 bp, Homo sapien
cagccgcccccgagcccgagtttgc

SEQ ID NO: 5815068 - DNA, 25 bp, Homo sapien
ccggctcccgtgaactcccagatga

SEQ ID NO: 5815069 - DNA, 25 bp, Homo sapien
caccgacaggcaggcgaacaccttg

SEQ ID NO: 5815070 - DNA, 25 bp, Homo sapien
tggacactgttctaaacactggcaa

SEQ ID NO: 5815071 - DNA, 25 bp, Homo sapien
gcccggcgaggctgcagcgcgcaaa

SEQ ID NO: 5815072 - DNA, 25 bp, Homo sapien
gggccacggccacgtgcagccgccc

SEQ ID NO: 5815073 - DNA, 25 bp, Homo sapien
tccaccatctccgcgaactcctcaa

SEQ ID NO: 5815074 - DNA, 25 bp, Homo sapien
tgggcagtgtcctcaaatacctagt

SEQ ID NO: 5815075 - DNA, 25 bp, Homo sapien
gcagcagccgcagcttgcccgcgcg

SEQ ID NO: 5815076 - DNA, 25 bp, Homo sapien
ctggaagtcgcccggggagcccgct

SEQ ID NO: 5815077 - DNA, 25 bp, Homo sapien
tcaaatttttgggaaaccttgtgtg

SEQ ID NO: 5815078 - DNA, 25 bp, Homo sapien
cttccctcgtggtggcgcgtttccc

SEQ ID NO: 5815079 - DNA, 25 bp, Homo sapien
cacgggtccggggcgaggacgcgag

SEQ ID NO: 5815080 - DNA, 25 bp, Homo sapien
gggcgaggacgcgagaggggcctgg

SEQ ID NO: 5815081 - DNA, 25 bp, Homo sapien
gcgtccccgcctcggagttggcccg

SEQ ID NO: 5815082 - DNA, 25 bp, Homo sapien
gccagtgtgcaatcagaggaggctt

SEQ ID NO: 5815083 - DNA, 25 bp, Homo sapien
tgcctcccggagccgccgccaaact

SEQ ID NO: 5815084 - DNA, 25 bp, Homo sapien
ctgtggggctatattaggtccccaa

SEQ ID NO: 5815085 - DNA, 25 bp, Homo sapien
gacctggggttgggcagtgtcctca

SEQ ID NO: 5815086 - DNA, 25 bp, Homo sapien
gtcctcaaatacctagtgggtgtga

SEQ ID NO: 5815087 - DNA, 25 bp, Homo sapien
ccaccagttctagaattgtctgtgt

SEQ ID NO: 5815088 - DNA, 25 bp, Homo sapien
ccgacaggcaggcgaacaccttgcc

SEQ ID NO: 5815089 - DNA, 25 bp, Homo sapien
tggacttagacctggggttgggcag

SEQ ID NO: 5815090 - DNA, 25 bp, Homo sapien
ccccatgatgctcacatattaacag

SEQ ID NO: 5815091 - DNA, 25 bp, Homo sapien
ggagggcagtggtgggcacagtgga

SEQ ID NO: 5815092 - DNA, 25 bp, Homo sapien
gtggtccagggcagcgagtacttga

SEQ ID NO: 5815093 - DNA, 25 bp, Homo sapien
ctccgcgatgccccagtacagcagc

SEQ ID NO: 5815094 - DNA, 25 bp, Homo sapien
tgggccaatcacatagtcctgtggg

SEQ ID NO: 5815095 - DNA, 25 bp, Homo sapien
gcattccctggggagataagacgta

SEQ ID NO: 5815096 - DNA, 25 bp, Homo sapien
ctgttctaaacactggcaaggggga

SEQ ID NO: 5815097 - DNA, 25 bp, Homo sapien
cagtggaggccaggacaggcacagg

SEQ ID NO: 5815098 - DNA, 25 bp, Homo sapien
tgtcgcgcagtcgccgcatgcagcg

SEQ ID NO: 5815099 - DNA, 25 bp, Homo sapien
agggagttcagggccacggccacgt

SEQ ID NO: 5815100 - DNA, 25 bp, Homo sapien
ttgagataaatttgatgatatatgt

SEQ ID NO: 5815101 - DNA, 25 bp, Homo sapien
ctcctcctccctcaggctgggcaag

SEQ ID NO: 5815102 - DNA, 25 bp, Homo sapien
ccaccatgtcgcgcagtcgccgcat

SEQ ID NO: 5815103 - DNA, 25 bp, Homo sapien
ttatcttcaggacccagaaaatgtg

SEQ ID NO: 5815104 - DNA, 25 bp, Homo sapien
ggaggaggtgacaatgctcagagtc

SEQ ID NO: 5815105 - DNA, 25 bp, Homo sapien
aaggacagcgcgcacatctcgcgca

SEQ ID NO: 5815106 - DNA, 25 bp, Homo sapien
atgatgctcacatattaacagggag

SEQ ID NO: 5815107 - DNA, 25 bp, Homo sapien
atatttccatgcttacaaagacaga

SEQ ID NO: 5815108 - DNA, 25 bp, Homo sapien
ggtccccaagctgccacgtgggaac

SEQ ID NO: 5815109 - DNA, 25 bp, Homo sapien
tatcaataaaaattatcttcaggac

SEQ ID NO: 5815110 - DNA, 25 bp, Homo sapien
gtcccttccctcgtggtggcgcgtt

SEQ ID NO: 5815111 - DNA, 25 bp, Homo sapien
gaaaacacttcccccacagggttgc

SEQ ID NO: 5815112 - DNA, 25 bp, Homo sapien
ttggccgtaacaagcgcgctccacg

SEQ ID NO: 5815113 - DNA, 25 bp, Homo sapien
ccgctctgcctcccggagccgccgc

SEQ ID NO: 5815114 - DNA, 25 bp, Homo sapien
gggccaggcacgtcaaaaatcacac

SEQ ID NO: 5815115 - DNA, 25 bp, Homo sapien
gttctagaattgtctgtgtgcaagc

SEQ ID NO: 5815116 - DNA, 25 bp, Homo sapien
tagaacgcgcccttgatggcctggc

SEQ ID NO: 5815117 - DNA, 25 bp, Homo sapien
tgggaaccatatttccatgcttaca

SEQ ID NO: 5815118 - DNA, 25 bp, Homo sapien
tgcggcctctccaccatgtcgcgca

SEQ ID NO: 5815119 - DNA, 25 bp, Homo sapien
ccttgatggcctggcgctgcgggag

SEQ ID NO: 5815120 - DNA, 25 bp, Homo sapien
agagcaccgacaggcaggcgaacac

SEQ ID NO: 5815121 - DNA, 25 bp, Homo sapien
cttcattaggcagcctgctcccttg

SEQ ID NO: 5815122 - DNA, 25 bp, Homo sapien
cctcgtggtggcgcgtttccccgcg

SEQ ID NO: 5815123 - DNA, 25 bp, Homo sapien
tcctgatgtcaggagggaccaggga

SEQ ID NO: 5815124 - DNA, 25 bp, Homo sapien
gccaggacaggcacaggcgtggacc

SEQ ID NO: 5815125 - DNA, 25 bp, Homo sapien
gaaggaggcgtccgaggtgcagctc

SEQ ID NO: 5815126 - DNA, 25 bp, Homo sapien
tctcgcgcagcagccgcagcttgcc

SEQ ID NO: 5815127 - DNA, 25 bp, Homo sapien
tgggcacagtggaggccaggacagg

SEQ ID NO: 5815128 - DNA, 25 bp, Homo sapien
gcagggagttcagggccacggccac

SEQ ID NO: 5815129 - DNA, 25 bp, Homo sapien
ggcgtgggctcttacctgctcctcc

SEQ ID NO: 5815130 - DNA, 25 bp, Homo sapien
cacgtgcagccgcccccgagcccga

SEQ ID NO: 5815131 - DNA, 25 bp, Homo sapien
tgtgcaagcctggctccttcattag

SEQ ID NO: 5815132 - DNA, 25 bp, Homo sapien
tcaaaaatcacaccacccatttatt

SEQ ID NO: 5815133 - DNA, 25 bp, Homo sapien
gcagcgagtacttgatgccgcctac

SEQ ID NO: 5815134 - DNA, 25 bp, Homo sapien
ccgctccaccatctccgcgaactcc

SEQ ID NO: 5815135 - DNA, 25 bp, Homo sapien
tcgttgcaggtgacgtcgtagtcat

SEQ ID NO: 5815136 - DNA, 25 bp, Homo sapien
gtgtgcaatcagaggaggctttctg

SEQ ID NO: 5815137 - DNA, 25 bp, Homo sapien
tcttcctcccgctccaccatctccg

SEQ ID NO: 5815138 - DNA, 25 bp, Homo sapien
attaggtccccaagctgccacgtgg

SEQ ID NO: 5815139 - DNA, 25 bp, Homo sapien
ctgctcctcctcctccctcaggctg

SEQ ID NO: 5815140 - DNA, 25 bp, Homo sapien
aggtggtcctccgcgatgccccagt

SEQ ID NO: 5815141 - DNA, 25 bp, Homo sapien
gtcagaattgtctcccggtaagagg

SEQ ID NO: 5815142 - DNA, 25 bp, Homo sapien
agtcctgtggggctatattaggtcc

SEQ ID NO: 5815143 - DNA, 25 bp, Homo sapien
cgcgtcagcgggaactcgtccagcg

SEQ ID NO: 5815144 - DNA, 25 bp, Homo sapien
gctcagctcccgccctcggagccac

SEQ ID NO: 5815145 - DNA, 25 bp, Homo sapien
agtacagcagctcctcctggaagga

SEQ ID NO: 5815146 - DNA, 25 bp, Homo sapien
gatagtgccgaaggcccccgggttg

SEQ ID NO: 5815147 - DNA, 25 bp, Homo sapien
aggccaggacaggcacaggcgtgga

SEQ ID NO: 5815148 - DNA, 25 bp, Homo sapien
ctgtcgcggccctcgctgtccagcg

SEQ ID NO: 5815149 - DNA, 25 bp, Homo sapien
ccgcgcgcaggaaggtcaggatagt

SEQ ID NO: 5815150 - DNA, 25 bp, Homo sapien
ggatgctattcagccagtgtgcaat

SEQ ID NO: 5815151 - DNA, 25 bp, Homo sapien
cgtgggaaccatatttccatgctta

SEQ ID NO: 5815152 - DNA, 25 bp, Homo sapien
ggcccaggcgcgtcagcgggaactc

SEQ ID NO: 5815153 - DNA, 25 bp, Homo sapien
tccagcgcgtcgtcctcttcctccc

SEQ ID NO: 5815154 - DNA, 25 bp, Homo sapien
tgtagtcgtagtcagaattgtctcc

SEQ ID NO: 5815155 - DNA, 25 bp, Homo sapien
acgttgaggatgtcgtcgaagttgg

SEQ ID NO: 5815156 - DNA, 25 bp, Homo sapien
cggccacgtgcagccgcccccgagc

SEQ ID NO: 5815157 - DNA, 25 bp, Homo sapien
cagcggtgactcccgagtcctctgt

SEQ ID NO: 5815158 - DNA, 25 bp, Homo sapien
ctcacatattaacagggaggcagac

SEQ ID NO: 5815159 - DNA, 25 bp, Homo sapien
cggcggtcctcgggctgacagccct

SEQ ID NO: 5815160 - DNA, 25 bp, Homo sapien
caggcgcgtcagcgggaactcgtcc

SEQ ID NO: 5815161 - DNA, 25 bp, Homo sapien
cgctgcgggaggaaggccgggtgga

SEQ ID NO: 5815162 - DNA, 25 bp, Homo sapien
cggggcgaggacgcgagaggggcct

SEQ ID NO: 5815163 - DNA, 25 bp, Homo sapien
cccaggcgcgtcagcgggaactcgt

SEQ ID NO: 5815164 - DNA, 25 bp, Homo sapien
agcgagtacttgatgccgcctacgt

SEQ ID NO: 5815165 - DNA, 25 bp, Homo sapien
tctaaacactggcaagggggagggc

SEQ ID NO: 5815166 - DNA, 25 bp, Homo sapien
caatcttctgcaggtagcggcgctt

SEQ ID NO: 5815167 - DNA, 25 bp, Homo sapien
gatgccccagtacagcagctcctcc

SEQ ID NO: 5815168 - DNA, 25 bp, Homo sapien
ggcagcctgctcccttggccgtaac

SEQ ID NO: 5815169 - DNA, 25 bp, Homo sapien
ggctatattaggtccccaagctgcc

SEQ ID NO: 5815170 - DNA, 25 bp, Homo sapien
gccgcccccgagcccgagtttgcag

SEQ ID NO: 5815171 - DNA, 25 bp, Homo sapien
aattatcttcaggacccagaaaatg

SEQ ID NO: 5815172 - DNA, 25 bp, Homo sapien
ggcgcttgcagcagccgtccaggtg

SEQ ID NO: 5815173 - DNA, 25 bp, Homo sapien
atgcttacaaagacagactggactt

SEQ ID NO: 5815174 - DNA, 25 bp, Homo sapien
tcccccacagggttgctggagcatt

SEQ ID NO: 5815175 - DNA, 25 bp, Homo sapien
acatgtacctatcaataaaaattat

SEQ ID NO: 5815176 - DNA, 25 bp, Homo sapien
cggagaggttgacggcggtgacggt

SEQ ID NO: 5815177 - DNA, 25 bp, Homo sapien
aacactggcaagggggagggcagtg

SEQ ID NO: 5815178 - DNA, 25 bp, Homo sapien
cctcggccgggccctcgctgtcgcg

SEQ ID NO: 5815179 - DNA, 25 bp, Homo sapien
gttcccgtcgcggcgtccccgcctc

SEQ ID NO: 5815180 - DNA, 25 bp, Homo sapien
gtgtctgggctactatgatgcaaag

SEQ ID NO: 5815181 - DNA, 25 bp, Homo sapien
ttgatgatgatccgacggcggcggt

SEQ ID NO: 5815182 - DNA, 25 bp, Homo sapien
ccatgcacacaaacattcctgatgt

SEQ ID NO: 5815183 - DNA, 25 bp, Homo sapien
gcggtcgaagaagaactcgttgcag

SEQ ID NO: 5815184 - DNA, 25 bp, Homo sapien
ggaaaccttgtgtgggccaatcaca

SEQ ID NO: 5815185 - DNA, 25 bp, Homo sapien
ttgtgctggacactgttctaaacac

SEQ ID NO: 5815186 - DNA, 25 bp, Homo sapien
ggtccagggcagcgagtacttgatg

SEQ ID NO: 5815187 - DNA, 25 bp, Homo sapien
gacttagacctggggttgggcagtg

SEQ ID NO: 5815188 - DNA, 25 bp, Homo sapien
atttccatgcttacaaagacagact

SEQ ID NO: 5815189 - DNA, 25 bp, Homo sapien
acaatgctcagagtcccttccctcg

SEQ ID NO: 5815190 - DNA, 25 bp, Homo sapien
agaagaactcgttgcaggtgacgtc

SEQ ID NO: 5815191 - DNA, 25 bp, Homo sapien
ccacgccgccacgcaccagcggtga

SEQ ID NO: 5815192 - DNA, 25 bp, Homo sapien
taaatttgatgatatatgtaatgtg

SEQ ID NO: 5815193 - DNA, 25 bp, Homo sapien
cctcgccctcggccgggccctcgct

SEQ ID NO: 5815194 - DNA, 25 bp, Homo sapien
ggcaggcgaacaccttgccaggcag

SEQ ID NO: 5815195 - DNA, 25 bp, Homo sapien
ctcggagttggcccggccgcggctt

SEQ ID NO: 5815196 - DNA, 25 bp, Homo sapien
ccgcctcggagttggcccggccgcg

SEQ ID NO: 5815197 - DNA, 25 bp, Homo sapien
ctgacggagaggttgacggcggtga

SEQ ID NO: 5815198 - DNA, 25 bp, Homo sapien
ctcagagtcccttccctcgtggtgg

SEQ ID NO: 5815199 - DNA, 25 bp, Homo sapien
ttccatgcttacaaagacagactgg

SEQ ID NO: 5815200 - DNA, 25 bp, Homo sapien
atcttcaggacccagaaaatgtgtc

SEQ ID NO: 5815201 - DNA, 25 bp, Homo sapien
cgggtggaaggaggcgtccgaggtg

SEQ ID NO: 5815202 - DNA, 25 bp, Homo sapien
gaggaaggccgggtggaaggaggcg

SEQ ID NO: 5815203 - DNA, 25 bp, Homo sapien
cgaacaccttgccaggcagccccga

SEQ ID NO: 5815204 - DNA, 25 bp, Homo sapien
ctcgggccaccagttctagaattgt

SEQ ID NO: 5815205 - DNA, 25 bp, Homo sapien
cagagtcccttccctcgtggtggcg

SEQ ID NO: 5815206 - DNA, 25 bp, Homo sapien
tcctccgcgatgccccagtacagca

SEQ ID NO: 5815207 - DNA, 25 bp, Homo sapien
tgcaggtgacgtcgtagtcatcgca

SEQ ID NO: 5815208 - DNA, 25 bp, Homo sapien
aactcccagatgagtgggagccctt

SEQ ID NO: 5815209 - DNA, 25 bp, Homo sapien
ccatgcttacaaagacagactggac

SEQ ID NO: 5815210 - DNA, 25 bp, Homo sapien
ccagtacagcagctcctcctggaag

SEQ ID NO: 5815211 - DNA, 25 bp, Homo sapien
agttcagggccacggccacgtgcag

SEQ ID NO: 5815212 - DNA, 25 bp, Homo sapien
tcccgctccaccatctccgcgaact

SEQ ID NO: 5815213 - DNA, 25 bp, Homo sapien
acagcgcgcacatctcgcgcagcag

SEQ ID NO: 5815214 - DNA, 25 bp, Homo sapien
tgacgtcgtagtcatcgcacacgtt

SEQ ID NO: 5815215 - DNA, 25 bp, Homo sapien
aatgctcagagtcccttccctcgtg

SEQ ID NO: 5815216 - DNA, 25 bp, Homo sapien
gtcgtagtcatcgcacacgttgagg

SEQ ID NO: 5815217 - DNA, 25 bp, Homo sapien
gtcatcgcacacgttgaggatgtcg

SEQ ID NO: 5815218 - DNA, 25 bp, Homo sapien
gtaagagggtcattttgggccttca

SEQ ID NO: 5815219 - DNA, 25 bp, Homo sapien
gaatggttgagataaatttgatgat

SEQ ID NO: 5815220 - DNA, 25 bp, Homo sapien
tgagaaaggaccgaatggttgagat

SEQ ID NO: 5815221 - DNA, 25 bp, Homo sapien
ccatctccgcgaactcctcaatctt

SEQ ID NO: 5815222 - DNA, 25 bp, Homo sapien
ggagttcagggccacggccacgtgc

SEQ ID NO: 5815223 - DNA, 25 bp, Homo sapien
actcccgagtcctctgtcgccctgg

SEQ ID NO: 5815224 - DNA, 25 bp, Homo sapien
gaacgcgcccttgatggcctggcgc

SEQ ID NO: 5815225 - DNA, 25 bp, Homo sapien
cccagaaaatgtgtctgggctacta

SEQ ID NO: 5815226 - DNA, 25 bp, Homo sapien
aacacttcccccacagggttgctgg

SEQ ID NO: 5815227 - DNA, 25 bp, Homo sapien
ctcccgtgaactcccagatgagtgg

SEQ ID NO: 5815228 - DNA, 25 bp, Homo sapien
tgaactcccagatgagtgggagccc

SEQ ID NO: 5815229 - DNA, 25 bp, Homo sapien
ccttgccaggcagccccgagtgcgg

SEQ ID NO: 5815230 - DNA, 25 bp, Homo sapien
gcaccagcggtgactcccgagtcct

SEQ ID NO: 5815231 - DNA, 25 bp, Homo sapien
agggttgctggagcattccctgggg

SEQ ID NO: 5815232 - DNA, 25 bp, Homo sapien
ccccgcagggagttcagggccacgg

SEQ ID NO: 5815233 - DNA, 25 bp, Homo sapien
tcctcctcctccctcaggctgggca

SEQ ID NO: 5815234 - DNA, 25 bp, Homo sapien
gcggggctcatcctgcggccgcagc

SEQ ID NO: 5815235 - DNA, 25 bp, Homo sapien
gatgtcaggagggaccagggatgct

SEQ ID NO: 5815236 - DNA, 25 bp, Homo sapien
tggcctggcgctgcgggaggaaggc

SEQ ID NO: 5815237 - DNA, 25 bp, Homo sapien
atttgtagacacacatgtacctatc

SEQ ID NO: 5815238 - DNA, 25 bp, Homo sapien
gtagttggcacatgcagcccagctc

SEQ ID NO: 5815239 - DNA, 25 bp, Homo sapien
tcgcgcagcagccgcagcttgcccg

SEQ ID NO: 5815240 - DNA, 25 bp, Homo sapien
aacagggaggcagaccatgcacaca

SEQ ID NO: 5815241 - DNA, 25 bp, Homo sapien
ccgagtttgcaggctcggggtccgg

SEQ ID NO: 5815242 - DNA, 25 bp, Homo sapien
gaggctttctggaggaggtgacaat

SEQ ID NO: 5815243 - DNA, 25 bp, Homo sapien
cgcccggggagcccgctctgcctcc

SEQ ID NO: 5815244 - DNA, 25 bp, Homo sapien
acgcgagaggggcctggaagtcgcc

SEQ ID NO: 5815245 - DNA, 25 bp, Homo sapien
tgggtgtgaaaacacttcccccaca

SEQ ID NO: 5815246 - DNA, 25 bp, Homo sapien
ctccaccatgtcgcgcagtcgccgc

SEQ ID NO: 5815247 - DNA, 25 bp, Homo sapien
cccggcggtagaacgcgcccttgat

SEQ ID NO: 5815248 - DNA, 25 bp, Homo sapien
gccctggcctccccgcaggcgggtt

SEQ ID NO: 5815249 - DNA, 25 bp, Homo sapien
gccacgtgcagccgcccccgagccc

SEQ ID NO: 5815250 - DNA, 25 bp, Homo sapien
ggtcgaagaagaactcgttgcaggt

SEQ ID NO: 5815251 - DNA, 25 bp, Homo sapien
ggtagcggcgcttgcagcagccgtc

SEQ ID NO: 5815252 - DNA, 25 bp, Homo sapien
gcgcgctgtagtcgtagtcagaatt

SEQ ID NO: 5815253 - DNA, 25 bp, Homo sapien
ctgggctactatgatgcaaaggatt

SEQ ID NO: 5815254 - DNA, 25 bp, Homo sapien
gatggcctggcgctgcgggaggaag

SEQ ID NO: 5815255 - DNA, 25 bp, Homo sapien
gtttgcaggctcggggtccggttcg

SEQ ID NO: 5815256 - DNA, 25 bp, Homo sapien
acttcacttttattgttggcaacca

SEQ ID NO: 5815257 - DNA, 25 bp, Homo sapien
gcatgcagcgccccaggcggccctc

SEQ ID NO: 5815258 - DNA, 25 bp, Homo sapien
gggaggcagaccatgcacacaaaca

SEQ ID NO: 5815259 - DNA, 25 bp, Homo sapien
gaactcctcaatcttctgcaggtag

SEQ ID NO: 5815260 - DNA, 25 bp, Homo sapien
cagcgcgtcgtcctcttcctcccgc

SEQ ID NO: 5815261 - DNA, 25 bp, Homo sapien
tcagctcccgccctcggagccacgg

SEQ ID NO: 5815262 - DNA, 25 bp, Homo sapien
gtggtcctccgcgatgccccagtac

SEQ ID NO: 5815263 - DNA, 25 bp, Homo sapien
actcgttgcaggtgacgtcgtagtc

SEQ ID NO: 5815264 - DNA, 25 bp, Homo sapien
aaccatatttccatgcttacaaaga

SEQ ID NO: 5815265 - DNA, 25 bp, Homo sapien
ctgatgtcaggagggaccagggatg

SEQ ID NO: 5815266 - DNA, 25 bp, Homo sapien
acgccgccacgcaccagcggtgact

SEQ ID NO: 5815267 - DNA, 25 bp, Homo sapien
caccccgtgtcaggccctggagtaa

SEQ ID NO: 5815268 - DNA, 25 bp, Homo sapien
acagggttgctggagcattccctgg

SEQ ID NO: 5815269 - DNA, 25 bp, Homo sapien
atgatgcaaaggattaggaacgttg

SEQ ID NO: 5815270 - DNA, 25 bp, Homo sapien
taaacactggcaagggggagggcag

SEQ ID NO: 5815271 - DNA, 25 bp, Homo sapien
ctcagggccaggcacgtcaaaaatc

SEQ ID NO: 5815272 - DNA, 25 bp, Homo sapien
cttgcagcagccgtccaggtggtcc

SEQ ID NO: 5815273 - DNA, 25 bp, Homo sapien
agcagccgcagcttgcccgcgcgca

SEQ ID NO: 5815274 - DNA, 25 bp, Homo sapien
ccggcgaggctgcagcgcgcaaagt

SEQ ID NO: 5815275 - DNA, 25 bp, Homo sapien
acatagtcctgtggggctatattag

SEQ ID NO: 5815276 - DNA, 25 bp, Homo sapien
ttcgaggcccccgcagggagttcag

SEQ ID NO: 5815277 - DNA, 25 bp, Homo sapien
tggcgcgtttccccgcggggcgtgg

SEQ ID NO: 5815278 - DNA, 25 bp, Homo sapien
ggttgctggagcattccctggggag

SEQ ID NO: 5815279 - DNA, 25 bp, Homo sapien
ttgctggagcattccctggggagat

SEQ ID NO: 5815280 - DNA, 25 bp, Homo sapien
agcgcgcacatctcgcgcagcagcc

SEQ ID NO: 5815281 - DNA, 25 bp, Homo sapien
gacggagaggttgacggcggtgacg

SEQ ID NO: 5815282 - DNA, 25 bp, Homo sapien
gagtcccttccctcgtggtggcgcg

SEQ ID NO: 5815283 - DNA, 25 bp, Homo sapien
ggaactcgtccagcgtggtccaggg

SEQ ID NO: 5815284 - DNA, 25 bp, Homo sapien
ggcggcggtcctcgggctgacagcc

SEQ ID NO: 5815285 - DNA, 25 bp, Homo sapien
gtttgtgctggacactgttctaaac

SEQ ID NO: 5815286 - DNA, 25 bp, Homo sapien
gccttgagctggcccaggcgcgtca

SEQ ID NO: 5815287 - DNA, 25 bp, Homo sapien
gcgcccggcgaggctgcagcgcgca

SEQ ID NO: 5815288 - DNA, 25 bp, Homo sapien
aagaaatgctcaccatttgtagaca

SEQ ID NO: 5815289 - DNA, 25 bp, Homo sapien
gggaccagggatgctattcagccag

SEQ ID NO: 5815290 - DNA, 25 bp, Homo sapien
gacggcggtgacggtcacgaagagc

SEQ ID NO: 5815291 - DNA, 25 bp, Homo sapien
cgctcagggccaggcacgtcaaaaa

SEQ ID NO: 5815292 - DNA, 25 bp, Homo sapien
ccgtaacaagcgcgctccacgccgc

SEQ ID NO: 5815293 - DNA, 25 bp, Homo sapien
ggaagtcgcccggggagcccgctct

SEQ ID NO: 5815294 - DNA, 25 bp, Homo sapien
ccacctcaagttcccgtcgcggcgt

SEQ ID NO: 5815295 - DNA, 25 bp, Homo sapien
acacaaacattcctgatgtcaggag

SEQ ID NO: 5815296 - DNA, 25 bp, Homo sapien
ggctttctggaggaggtgacaatgc

SEQ ID NO: 5815297 - DNA, 25 bp, Homo sapien
cgtagtcatcgcacacgttgaggat

SEQ ID NO: 5815298 - DNA, 25 bp, Homo sapien
cagcagccgtccaggtggtcctccg

SEQ ID NO: 5815299 - DNA, 25 bp, Homo sapien
caagttcccgtcgcggcgtccccgc

SEQ ID NO: 5815300 - DNA, 25 bp, Homo sapien
gcagtcgccgcatgcagcgccccag

SEQ ID NO: 5815301 - DNA, 25 bp, Homo sapien
ttttgggccttcacatccctctcgg

SEQ ID NO: 5815302 - DNA, 25 bp, Homo sapien
gttggcaaccaagtcaaatttttgg

SEQ ID NO: 5815303 - DNA, 25 bp, Homo sapien
gaattgtctgtgtgcaagcctggct

SEQ ID NO: 5815304 - DNA, 25 bp, Homo sapien
ttgcccgcgcgcaggaaggtcagga

SEQ ID NO: 5815305 - DNA, 25 bp, Homo sapien
ggcagtggtgggcacagtggaggcc

SEQ ID NO: 5815306 - DNA, 25 bp, Homo sapien
ttgcaggctcggggtccggttcgcg

SEQ ID NO: 5815307 - DNA, 25 bp, Homo sapien
aggcacaggcgtggacccccatgat

SEQ ID NO: 5815308 - DNA, 25 bp, Homo sapien
tcccacctcaagttcccgtcgcggc

SEQ ID NO: 5815309 - DNA, 25 bp, Homo sapien
agcgggaactcgtccagcgtggtcc

SEQ ID NO: 5815310 - DNA, 25 bp, Homo sapien
acagactggacttagacctggggtt

SEQ ID NO: 5815311 - DNA, 25 bp, Homo sapien
cggcgtccccgcctcggagttggcc

SEQ ID NO: 5815312 - DNA, 25 bp, Homo sapien
acgcgcccttgatggcctggcgctg

SEQ ID NO: 5815313 - DNA, 25 bp, Homo sapien
tgctcaccatttgtagacacacatg

SEQ ID NO: 5815314 - DNA, 25 bp, Homo sapien
ggccaccagttctagaattgtctgt

SEQ ID NO: 5815315 - DNA, 25 bp, Homo sapien
agggggagggcagtggtgggcacag

SEQ ID NO: 5815316 - DNA, 25 bp, Homo sapien
tccctggggagataagacgtagttg

SEQ ID NO: 5815317 - DNA, 25 bp, Homo sapien
gagccgccgccaaacttcggtcccg

SEQ ID NO: 5815318 - DNA, 25 bp, Homo sapien
cgtcaaaaatcacaccacccattta

SEQ ID NO: 5815319 - DNA, 25 bp, Homo sapien
aaaattatcttcaggacccagaaaa

SEQ ID NO: 5815320 - DNA, 25 bp, Homo sapien
tcggccgggccctcgctgtcgcggc

SEQ ID NO: 5815321 - DNA, 25 bp, Homo sapien
aagagggtcattttgggccttcaca

SEQ ID NO: 5815322 - DNA, 25 bp, Homo sapien
ccgtgtcaggccctggagtaaataa

SEQ ID NO: 5815323 - DNA, 25 bp, Homo sapien
gcgggtttcgaggcccccgcaggga

SEQ ID NO: 5815324 - DNA, 25 bp, Homo sapien
tcttacctgctcctcctcctccctc

SEQ ID NO: 5815325 - DNA, 25 bp, Homo sapien
cgagtacttgatgccgcctacgttg

SEQ ID NO: 5815326 - DNA, 25 bp, Homo sapien
tcccggggcccggctcagctcccgc

SEQ ID NO: 5815327 - DNA, 25 bp, Homo sapien
gaacgttgagaaaggaccgaatggt

SEQ ID NO: 5815328 - DNA, 25 bp, Homo sapien
aggaccgaatggttgagataaattt

SEQ ID NO: 5815329 - DNA, 25 bp, Homo sapien
ttcctcccgctccaccatctccgcg

SEQ ID NO: 5815330 - DNA, 25 bp, Homo sapien
aaaaacttcacttttattgttggca

SEQ ID NO: 5815331 - DNA, 25 bp, Homo sapien
gggttgggcagtgtcctcaaatacc

SEQ ID NO: 5815332 - DNA, 25 bp, Homo sapien
ggcagtgtcctcaaatacctagtgg

SEQ ID NO: 5815333 - DNA, 25 bp, Homo sapien
gtcattttgggccttcacatccctc

SEQ ID NO: 5815334 - DNA, 25 bp, Homo sapien
ccatatttccatgcttacaaagaca

SEQ ID NO: 5815335 - DNA, 25 bp, Homo sapien
atcacaccacccatttattcactca

SEQ ID NO: 5815336 - DNA, 25 bp, Homo sapien
aagtcgcccggggagcccgctctgc

SEQ ID NO: 5815337 - DNA, 25 bp, Homo sapien
gtggtgggcacagtggaggccagga

SEQ ID NO: 5815338 - DNA, 25 bp, Homo sapien
tagactgtagcacacaccccgtgtc

SEQ ID NO: 5815339 - DNA, 25 bp, Homo sapien
tcgccgcatgcagcgccccaggcgg

SEQ ID NO: 5815340 - DNA, 25 bp, Homo sapien
gccaggcagccccgagtgcggcctc

SEQ ID NO: 5815341 - DNA, 25 bp, Homo sapien
gagcattccctggggagataagacg

SEQ ID NO: 5815342 - DNA, 25 bp, Homo sapien
cacgtgggaaccatatttccatgct

SEQ ID NO: 5815343 - DNA, 25 bp, Homo sapien
ctggaaggacagcgcgcacatctcg

SEQ ID NO: 5815344 - DNA, 25 bp, Homo sapien
gcagccgtccaggtggtcctccgcg

SEQ ID NO: 5815345 - DNA, 25 bp, Homo sapien
agcccttagactgtagcacacaccc

SEQ ID NO: 5815346 - DNA, 25 bp, Homo sapien
gcttcgctcagggccaggcacgtca

SEQ ID NO: 5815347 - DNA, 25 bp, Homo sapien
cgctgtcgcggccctcgctgtccag

SEQ ID NO: 5815348 - DNA, 25 bp, Homo sapien
aggcgtggacccccatgatgctcac

SEQ ID NO: 5815349 - DNA, 25 bp, Homo sapien
gctctgcctcccggagccgccgcca

SEQ ID NO: 5815350 - DNA, 25 bp, Homo sapien
ctgtagcacacaccccgtgtcaggc

SEQ ID NO: 5815351 - DNA, 25 bp, Homo sapien
atgcagcgccccaggcggccctcgc

SEQ ID NO: 5815352 - DNA, 25 bp, Homo sapien
cctcgctgtccagcgcgtcgtcctc

SEQ ID NO: 5815353 - DNA, 25 bp, Homo sapien
gtgtcaggccctggagtaaataaac

SEQ ID NO: 5815354 - DNA, 25 bp, Homo sapien
ctctccaccatgtcgcgcagtcgcc

SEQ ID NO: 5815355 - DNA, 25 bp, Homo sapien
ctcgtccagcgtggtccagggcagc

SEQ ID NO: 5815356 - DNA, 25 bp, Homo sapien
ctgctcccttggccgtaacaagcgc

SEQ ID NO: 5815357 - DNA, 25 bp, Homo sapien
ctggaggaggtgacaatgctcagag

SEQ ID NO: 5815358 - DNA, 25 bp, Homo sapien
atgtaacaaaaagaaatgctcacca

SEQ ID NO: 5815359 - DNA, 25 bp, Homo sapien
gcgtttccccgcggggcgtgggctc

SEQ ID NO: 5815360 - DNA, 25 bp, Homo sapien
ccgggccctcgctgtcgcggccctc

SEQ ID NO: 5815361 - DNA, 25 bp, Homo sapien
aggtcaggatagtgccgaaggcccc

SEQ ID NO: 5815362 - DNA, 25 bp, Homo sapien
gcttgcccgcgcgcaggaaggtcag

SEQ ID NO: 5815363 - DNA, 25 bp, Homo sapien
ccagctccggctcccgtgaactccc

SEQ ID NO: 5815364 - DNA, 25 bp, Homo sapien
gtgcctgtttgtgctggacactgtt

SEQ ID NO: 5815365 - DNA, 25 bp, Homo sapien
ggcccggctcagctcccgccctcgg

SEQ ID NO: 5815366 - DNA, 25 bp, Homo sapien
cattttgggccttcacatccctctc

SEQ ID NO: 5815367 - DNA, 25 bp, Homo sapien
atccctctcgggccaccagttctag

SEQ ID NO: 5815368 - DNA, 25 bp, Homo sapien
cctggggagataagacgtagttggc

SEQ ID NO: 5815369 - DNA, 25 bp, Homo sapien
tatgtaatgtgcttcgctcagggcc

SEQ ID NO: 5815370 - DNA, 25 bp, Homo sapien
tcctggaaggacagcgcgcacatct

SEQ ID NO: 5815371 - DNA, 25 bp, Homo sapien
cggagccgccgccaaacttcggtcc

SEQ ID NO: 5815372 - DNA, 25 bp, Homo sapien
gcgcgtttccccgcggggcgtgggc

SEQ ID NO: 5815373 - DNA, 25 bp, Homo sapien
gttggcccggccgcggcttccgtcc

SEQ ID NO: 5815374 - DNA, 25 bp, Homo sapien
cccaagctgccacgtgggaaccata

SEQ ID NO: 5815375 - DNA, 25 bp, Homo sapien
gcacacaaacattcctgatgtcagg

SEQ ID NO: 5815376 - DNA, 25 bp, Homo sapien
gaccagggatgctattcagccagtg

SEQ ID NO: 5815377 - DNA, 25 bp, Homo sapien
tcattctcttatgtaacaaaaagaa

SEQ ID NO: 5815378 - DNA, 25 bp, Homo sapien
cgtccgaggtgcagctcagcgcgct

SEQ ID NO: 5815379 - DNA, 25 bp, Homo sapien
gtgcttcgctcagggccaggcacgt

SEQ ID NO: 5815380 - DNA, 25 bp, Homo sapien
gccacgtgggaaccatatttccatg

SEQ ID NO: 5815381 - DNA, 25 bp, Homo sapien
atgtgtctgggctactatgatgcaa

SEQ ID NO: 5815382 - DNA, 25 bp, Homo sapien
atgtacctatcaataaaaattatct

SEQ ID NO: 5815383 - DNA, 25 bp, Homo sapien
ggggctcatcctgcggccgcagccg

SEQ ID NO: 5815384 - DNA, 25 bp, Homo sapien
tcttatgtaacaaaaagaaatgctc

SEQ ID NO: 5815385 - DNA, 25 bp, Homo sapien
tctcttatgtaacaaaaagaaatgc

SEQ ID NO: 5815386 - DNA, 25 bp, Homo sapien
tctgcctcccggagccgccgccaaa

SEQ ID NO: 5815387 - DNA, 25 bp, Homo sapien
agcacacaccccgtgtcaggccctg

SEQ ID NO: 5815388 - DNA, 25 bp, Homo sapien
caagcctggctccttcattaggcag

SEQ ID NO: 5815389 - DNA, 25 bp, Homo sapien
ggggctatattaggtccccaagctg

SEQ ID NO: 5815390 - DNA, 25 bp, Homo sapien
ggtcctccgcgatgccccagtacag

SEQ ID NO: 5815391 - DNA, 25 bp, Homo sapien
gagataaatttgatgatatatgtaa

SEQ ID NO: 5815392 - DNA, 25 bp, Homo sapien
ccagggatgctattcagccagtgtg

SEQ ID NO: 5815393 - DNA, 25 bp, Homo sapien
ggccaatcacatagtcctgtggggc

SEQ ID NO: 5815394 - DNA, 25 bp, Homo sapien
tcgcacacgttgaggatgtcgtcga

SEQ ID NO: 5815395 - DNA, 25 bp, Homo sapien
attctcttatgtaacaaaaagaaat

SEQ ID NO: 5815396 - DNA, 25 bp, Homo sapien
gcccacgggtccggggcgaggacgc

SEQ ID NO: 5815397 - DNA, 25 bp, Homo sapien
gccgcctacgttgatgatgatccga

SEQ ID NO: 5815398 - DNA, 25 bp, Homo sapien
attcctgatgtcaggagggaccagg

SEQ ID NO: 5815399 - DNA, 25 bp, Homo sapien
catcgcacacgttgaggatgtcgtc

SEQ ID NO: 5815400 - DNA, 25 bp, Homo sapien
gcaaagttcccacctcaagttcccg

SEQ ID NO: 5815401 - DNA, 25 bp, Homo sapien
gatgagtgggagcccttagactgta

SEQ ID NO: 5815402 - DNA, 25 bp, Homo sapien
aggctcggggtccggttcgcgcttc

SEQ ID NO: 5815403 - DNA, 25 bp, Homo sapien
ggggcccggctcagctcccgccctc

SEQ ID NO: 5815404 - DNA, 25 bp, Homo sapien
tatatgtaatgtgcttcgctcaggg

SEQ ID NO: 5815405 - DNA, 25 bp, Homo sapien
tgcaggtagcggcgcttgcagcagc

SEQ ID NO: 5815406 - DNA, 25 bp, Homo sapien
gcagccgctgcgcccggcggtagaa

SEQ ID NO: 5815407 - DNA, 25 bp, Homo sapien
agacgtagttggcacatgcagccca

SEQ ID NO: 5815408 - DNA, 25 bp, Homo sapien
gcccgctctgcctcccggagccgcc

SEQ ID NO: 5815409 - DNA, 25 bp, Homo sapien
ctttctggaggaggtgacaatgctc

SEQ ID NO: 5815410 - DNA, 25 bp, Homo sapien
gccgccacgcaccagcggtgactcc

SEQ ID NO: 5815411 - DNA, 25 bp, Homo sapien
tccagggcagcgagtacttgatgcc

SEQ ID NO: 5815412 - DNA, 25 bp, Homo sapien
atgatccgacggcggcggtcctcgg

SEQ ID NO: 5815413 - DNA, 25 bp, Homo sapien
gggtccggttcgcgcttcggtggcg

SEQ ID NO: 5815414 - DNA, 25 bp, Homo sapien
aggagggaccagggatgctattcag

SEQ ID NO: 5815415 - DNA, 25 bp, Homo sapien
agctccggctcccgtgaactcccag

SEQ ID NO: 5815416 - DNA, 25 bp, Homo sapien
tgcagcagccgtccaggtggtcctc

SEQ ID NO: 5815417 - DNA, 25 bp, Homo sapien
gcaggccttgagctggcccaggcgc

SEQ ID NO: 5815418 - DNA, 25 bp, Homo sapien
gaaatgctcaccatttgtagacaca

SEQ ID NO: 5815419 - DNA, 25 bp, Homo sapien
cagcagctcctcctggaaggacagc

SEQ ID NO: 5815420 - DNA, 25 bp, Homo sapien
ggcacagtggaggccaggacaggca

SEQ ID NO: 5815421 - DNA, 25 bp, Homo sapien
gcacacgttgaggatgtcgtcgaag

SEQ ID NO: 5815422 - DNA, 25 bp, Homo sapien
cggggagcccgctctgcctcccgga

SEQ ID NO: 5815423 - DNA, 25 bp, Homo sapien
tcctcgggctgacagccctggcggg

SEQ ID NO: 5815424 - DNA, 25 bp, Homo sapien
gttggtgcaggccttgagctggccc

SEQ ID NO: 5815425 - DNA, 25 bp, Homo sapien
gatgatgatccgacggcggcggtcc

SEQ ID NO: 5815426 - DNA, 25 bp, Homo sapien
gtagcacacaccccgtgtcaggccc

SEQ ID NO: 5815427 - DNA, 25 bp, Homo sapien
gtgcaatcagaggaggctttctgga

SEQ ID NO: 5815428 - DNA, 25 bp, Homo sapien
gaaggtcaggatagtgccgaaggcc

SEQ ID NO: 5815429 - DNA, 25 bp, Homo sapien
aaagacagactggacttagacctgg

SEQ ID NO: 5815430 - DNA, 25 bp, Homo sapien
acccatttattcactcatttgttca

SEQ ID NO: 5815431 - DNA, 25 bp, Homo sapien
cacatgcagcccagctccggctccc

SEQ ID NO: 5815432 - DNA, 25 bp, Homo sapien
ttgtagacacacatgtacctatcaa

SEQ ID NO: 5815433 - DNA, 25 bp, Homo sapien
tcccggtaagagggtcattttgggc

SEQ ID NO: 5815434 - DNA, 25 bp, Homo sapien
gctactatgatgcaaaggattagga

SEQ ID NO: 5815435 - DNA, 25 bp, Homo sapien
gtgtcctcaaatacctagtgggtgt

SEQ ID NO: 5815436 - DNA, 25 bp, Homo sapien
cgcacatctcgcgcagcagccgcag

SEQ ID NO: 5815437 - DNA, 25 bp, Homo sapien
cagggccacggccacgtgcagccgc

SEQ ID NO: 5815438 - DNA, 25 bp, Homo sapien
gctcctcctcctccctcaggctggg

SEQ ID NO: 5815439 - DNA, 25 bp, Homo sapien
aggaggtgacaatgctcagagtccc

SEQ ID NO: 5815440 - DNA, 25 bp, Homo sapien
aacaaatagtggttgagtgcctgtt

SEQ ID NO: 5815441 - DNA, 25 bp, Homo sapien
gcgcccttgatggcctggcgctgcg

SEQ ID NO: 5815442 - DNA, 25 bp, Homo sapien
cagttctagaattgtctgtgtgcaa

SEQ ID NO: 5815443 - DNA, 25 bp, Homo sapien
gggcagcgagtacttgatgccgcct

SEQ ID NO: 5815444 - DNA, 25 bp, Homo sapien
cgctccacgccgccacgcaccagcg

SEQ ID NO: 5815445 - DNA, 25 bp, Homo sapien
ctcaatcttctgcaggtagcggcgc

SEQ ID NO: 5815446 - DNA, 25 bp, Homo sapien
acacatgtacctatcaataaaaatt

SEQ ID NO: 5815447 - DNA, 25 bp, Homo sapien
ccctcggagccacggccgccccgtc

SEQ ID NO: 5815448 - DNA, 25 bp, Homo sapien
ctggcgctgcgggaggaaggccggg

SEQ ID NO: 5815449 - DNA, 25 bp, Homo sapien
ggtgtgaaaacacttcccccacagg

SEQ ID NO: 5815450 - DNA, 25 bp, Homo sapien
gcaggaaggtcaggatagtgccgaa

SEQ ID NO: 5815451 - DNA, 25 bp, Homo sapien
tcacatagtcctgtggggctatatt

SEQ ID NO: 5815452 - DNA, 25 bp, Homo sapien
ggttgagtgcctgtttgtgctggac

SEQ ID NO: 5815453 - DNA, 25 bp, Homo sapien
gttgaggatgtcgtcgaagttggtg

SEQ ID NO: 5815454 - DNA, 25 bp, Homo sapien
actggacttagacctggggttgggc

SEQ ID NO: 5815455 - DNA, 25 bp, Homo sapien
gagtttgcaggctcggggtccggtt

SEQ ID NO: 5815456 - DNA, 25 bp, Homo sapien
gacaggcaggcgaacaccttgccag

SEQ ID NO: 5815457 - DNA, 25 bp, Homo sapien
gcccgagtttgcaggctcggggtcc

SEQ ID NO: 5815458 - DNA, 25 bp, Homo sapien
taggtccccaagctgccacgtggga

SEQ ID NO: 5815459 - DNA, 25 bp, Homo sapien
caccatttgtagacacacatgtacc

SEQ ID NO: 5815460 - DNA, 25 bp, Homo sapien
ctgcccacgggtccggggcgaggac

SEQ ID NO: 5815461 - DNA, 25 bp, Homo sapien
ggtgactcccgagtcctctgtcgcc

SEQ ID NO: 5815462 - DNA, 25 bp, Homo sapien
ggacaggcacaggcgtggaccccca

SEQ ID NO: 5815463 - DNA, 25 bp, Homo sapien
ggcacatgcagcccagctccggctc

SEQ ID NO: 5815464 - DNA, 25 bp, Homo sapien
gaactcgttgcaggtgacgtcgtag

SEQ ID NO: 5815465 - DNA, 25 bp, Homo sapien
gcaaggtgctgacggagaggttgac

SEQ ID NO: 5815466 - DNA, 25 bp, Homo sapien
aggaggcgtccgaggtgcagctcag

SEQ ID NO: 5815467 - DNA, 25 bp, Homo sapien
cggcggtgacggtcacgaagagcac

SEQ ID NO: 5815468 - DNA, 25 bp, Homo sapien
cagggccaggcacgtcaaaaatcac

SEQ ID NO: 5815469 - DNA, 25 bp, Homo sapien
cggccctcgctgtccagcgcgtcgt

SEQ ID NO: 5815470 - DNA, 25 bp, Homo sapien
ttgacggcggtgacggtcacgaaga

SEQ ID NO: 5815471 - DNA, 25 bp, Homo sapien
cgggtccggggcgaggacgcgagag

SEQ ID NO: 5815472 - DNA, 25 bp, Homo sapien
gataaatttgatgatatatgtaatg

SEQ ID NO: 5815473 - DNA, 25 bp, Homo sapien
ccatgatgctcacatattaacaggg

SEQ ID NO: 5815474 - DNA, 25 bp, Homo sapien
acaggcgtggacccccatgatgctc

SEQ ID NO: 5815475 - DNA, 25 bp, Homo sapien
gaggacgcgagaggggcctggaagt

SEQ ID NO: 5815476 - DNA, 25 bp, Homo sapien
ggctcttacctgctcctcctcctcc

SEQ ID NO: 5815477 - DNA, 25 bp, Homo sapien
ttggcacatgcagcccagctccggc

SEQ ID NO: 5815478 - DNA, 25 bp, Homo sapien
cactgttctaaacactggcaagggg

SEQ ID NO: 5815479 - DNA, 25 bp, Homo sapien
cagcgcgctgtagtcgtagtcagaa

SEQ ID NO: 5815480 - DNA, 25 bp, Homo sapien
tggcgcccggcgaggctgcagcgcg

SEQ ID NO: 5815481 - DNA, 25 bp, Homo sapien
gatgtcgtcgaagttggtgcaggcc

SEQ ID NO: 5815482 - DNA, 25 bp, Homo sapien
gagcccgctctgcctcccggagccg

SEQ ID NO: 5815483 - DNA, 25 bp, Homo sapien
ctccacgccgccacgcaccagcggt

SEQ ID NO: 5815484 - DNA, 25 bp, Homo sapien
agacagactggacttagacctgggg

SEQ ID NO: 5815485 - DNA, 25 bp, Homo sapien
gccctcgctgtccagcgcgtcgtcc

SEQ ID NO: 5815486 - DNA, 25 bp, Homo sapien
tagtggttgagtgcctgtttgtgct

SEQ ID NO: 5815487 - DNA, 25 bp, Homo sapien
cagcgcgcaaagttcccacctcaag

SEQ ID NO: 5815488 - DNA, 25 bp, Homo sapien
gcacaggcgtggacccccatgatgc

SEQ ID NO: 5815489 - DNA, 25 bp, Homo sapien
gacagccctggcggggctcatcctg

SEQ ID NO: 5815490 - DNA, 25 bp, Homo sapien
ccgcatgcagcgccccaggcggccc

SEQ ID NO: 5815491 - DNA, 25 bp, Homo sapien
ggacagcgcgcacatctcgcgcagc

SEQ ID NO: 5815492 - DNA, 25 bp, Homo sapien
ggttcgcgcttcggtggcgcccggc

SEQ ID NO: 5815493 - DNA, 25 bp, Homo sapien
gcccgcgcgcaggaaggtcaggata

SEQ ID NO: 5815494 - DNA, 25 bp, Homo sapien
attaggcagcctgctcccttggccg

SEQ ID NO: 5815495 - DNA, 25 bp, Homo sapien
atcttctgcaggtagcggcgcttgc

SEQ ID NO: 5815496 - DNA, 25 bp, Homo sapien
tcgcgcagtcgccgcatgcagcgcc

SEQ ID NO: 5815497 - DNA, 25 bp, Homo sapien
ggggagggcagtggtgggcacagtg

SEQ ID NO: 5815498 - DNA, 25 bp, Homo sapien
tttttgggaaaccttgtgtgggcca

SEQ ID NO: 5815499 - DNA, 25 bp, Homo sapien
gaagaagaactcgttgcaggtgacg

SEQ ID NO: 5815500 - DNA, 25 bp, Homo sapien
caggcagccccgagtgcggcctctc

SEQ ID NO: 5815501 - DNA, 25 bp, Homo sapien
tcgcggcgtccccgcctcggagttg

SEQ ID NO: 5815502 - DNA, 25 bp, Homo sapien
gctgtccagcgcgtcgtcctcttcc

SEQ ID NO: 5815503 - DNA, 25 bp, Homo sapien
ggtccggggcgaggacgcgagaggg

SEQ ID NO: 5815504 - DNA, 25 bp, Homo sapien
ccgcgatgccccagtacagcagctc

SEQ ID NO: 5815505 - DNA, 25 bp, Homo sapien
cctacgttgatgatgatccgacggc

SEQ ID NO: 5815506 - DNA, 25 bp, Homo sapien
caccttgccaggcagccccgagtgc

SEQ ID NO: 5815507 - DNA, 25 bp, Homo sapien
cacacaccccgtgtcaggccctgga

SEQ ID NO: 5815508 - DNA, 25 bp, Homo sapien
atgatatatgtaatgtgcttcgctc

SEQ ID NO: 5815509 - DNA, 25 bp, Homo sapien
agctgccacgtgggaaccatatttc

SEQ ID NO: 5815510 - DNA, 25 bp, Homo sapien
ggtgctgacggagaggttgacggcg

SEQ ID NO: 5815511 - DNA, 25 bp, Homo sapien
aaatgtgtctgggctactatgatgc

SEQ ID NO: 5815512 - DNA, 25 bp, Homo sapien
tgatgccgcctacgttgatgatgat

SEQ ID NO: 5815513 - DNA, 25 bp, Homo sapien
cgtcagcgggaactcgtccagcgtg

SEQ ID NO: 5815514 - DNA, 25 bp, Homo sapien
cggagccacggccgccccgtctctg

SEQ ID NO: 5815515 - DNA, 25 bp, Homo sapien
atgccgcctacgttgatgatgatcc

SEQ ID NO: 5815516 - DNA, 25 bp, Homo sapien
catgcagcccagctccggctcccgt

SEQ ID NO: 5815517 - DNA, 25 bp, Homo sapien
gttctaaacactggcaagggggagg

SEQ ID NO: 5815518 - DNA, 25 bp, Homo sapien
atagtcctgtggggctatattaggt

SEQ ID NO: 5815519 - DNA, 25 bp, Homo sapien
tttgatgatatatgtaatgtgcttc

SEQ ID NO: 5815520 - DNA, 25 bp, Homo sapien
tgtgaaaacacttcccccacagggt

SEQ ID NO: 5815521 - DNA, 25 bp, Homo sapien
cgccctcggagccacggccgccccg

SEQ ID NO: 5815522 - DNA, 25 bp, Homo sapien
tgaggtagggcagtgagcacactac

SEQ ID NO: 5815523 - DNA, 25 bp, Homo sapien
gtagtgtgctcactgccctacctca

SEQ ID NO: 5815524 - DNA, 25 bp, Homo sapien
agccgccccggccagcacgagctga

SEQ ID NO: 5815525 - DNA, 25 bp, Homo sapien
gggctggccgtgtggacttcattct

SEQ ID NO: 5815526 - DNA, 25 bp, Homo sapien
ccctggcttctgttctgtaggaggg

SEQ ID NO: 5815527 - DNA, 25 bp, Homo sapien
tagctgttgtcctggtcctcccctg

SEQ ID NO: 5815528 - DNA, 25 bp, Homo sapien
tcagtcaaaggcattcgccacgaca

SEQ ID NO: 5815529 - DNA, 25 bp, Homo sapien
tgccgcctacaaccacaccaccttc

SEQ ID NO: 5815530 - DNA, 25 bp, Homo sapien
ggtgccggctacaacgggtggacga

SEQ ID NO: 5815531 - DNA, 25 bp, Homo sapien
cacaggccacgctggctgctcaagt

SEQ ID NO: 5815532 - DNA, 25 bp, Homo sapien
tgctcaagtactagccccggcccca

SEQ ID NO: 5815533 - DNA, 25 bp, Homo sapien
cgggtggacgagcgggaggcagaac

SEQ ID NO: 5815534 - DNA, 25 bp, Homo sapien
cagccacctgcgtggacctgcagct

SEQ ID NO: 5815535 - DNA, 25 bp, Homo sapien
tgccctcagggctgccgcccacctt

SEQ ID NO: 5815536 - DNA, 25 bp, Homo sapien
acgagaagatgttcaagctgctgtc

SEQ ID NO: 5815537 - DNA, 25 bp, Homo sapien
tgagcacccacaggccacgctggct

SEQ ID NO: 5815538 - DNA, 25 bp, Homo sapien
attgacatggcctggccctacttcc

SEQ ID NO: 5815539 - DNA, 25 bp, Homo sapien
cgcgcggcccgagtgccacatcact

SEQ ID NO: 5815540 - DNA, 25 bp, Homo sapien
catcactgcgctggccgtccaaggt

SEQ ID NO: 5815541 - DNA, 25 bp, Homo sapien
ggctgggtgcgcagaccctgccggc

SEQ ID NO: 5815542 - DNA, 25 bp, Homo sapien
gtctgccagcccgccttcgacgcca

SEQ ID NO: 5815543 - DNA, 25 bp, Homo sapien
caaaggcaatcatgaagtggatgca

SEQ ID NO: 5815544 - DNA, 25 bp, Homo sapien
gagcccgacccgctccgggcgcgca

SEQ ID NO: 5815545 - DNA, 25 bp, Homo sapien
cagtacctgtgctctgagtacctgc

SEQ ID NO: 5815546 - DNA, 25 bp, Homo sapien
ggggcggactggtacagcttcacgg

SEQ ID NO: 5815547 - DNA, 25 bp, Homo sapien
gacctgcggctgctgggctgtgctg

SEQ ID NO: 5815548 - DNA, 25 bp, Homo sapien
cacgacatcaccacagccccagatg

SEQ ID NO: 5815549 - DNA, 25 bp, Homo sapien
ttcccccccgaggaggccctgtaca

SEQ ID NO: 5815550 - DNA, 25 bp, Homo sapien
ggacaggtcggagaataggtgtgga

SEQ ID NO: 5815551 - DNA, 25 bp, Homo sapien
cgcagcttcgacggcagggagctgc

SEQ ID NO: 5815552 - DNA, 25 bp, Homo sapien
cttccccaacctgcttcagcaccgg

SEQ ID NO: 5815553 - DNA, 25 bp, Homo sapien
gaggcctggaggctgacgaggcact

SEQ ID NO: 5815554 - DNA, 25 bp, Homo sapien
gtgtgaagttcccccccgaggaggc

SEQ ID NO: 5815555 - DNA, 25 bp, Homo sapien
ggagaagcttcggggaggcctggag

SEQ ID NO: 5815556 - DNA, 25 bp, Homo sapien
aacgggtggacgagcgggaggcaga

SEQ ID NO: 5815557 - DNA, 25 bp, Homo sapien
cccacaaagccgctgccattttatt

SEQ ID NO: 5815558 - DNA, 25 bp, Homo sapien
actctggcagcacaacaaggagtca

SEQ ID NO: 5815559 - DNA, 25 bp, Homo sapien
tccttgactgccaccgctacttcac

SEQ ID NO: 5815560 - DNA, 25 bp, Homo sapien
agttctccagccgccccggccagca

SEQ ID NO: 5815561 - DNA, 25 bp, Homo sapien
tcatcaacggggcggactggtacag

SEQ ID NO: 5815562 - DNA, 25 bp, Homo sapien
atggcaacgaggtggcgggccggga

SEQ ID NO: 5815563 - DNA, 25 bp, Homo sapien
actcctacgcccagatggtgcgtgt

SEQ ID NO: 5815564 - DNA, 25 bp, Homo sapien
tgcttggtaacccccgcatccagcg

SEQ ID NO: 5815565 - DNA, 25 bp, Homo sapien
ccccaggtatccacattgtcattgc

SEQ ID NO: 5815566 - DNA, 25 bp, Homo sapien
tgggggaggccacggagcccgaccc

SEQ ID NO: 5815567 - DNA, 25 bp, Homo sapien
tcaggacctgcagcgatgccgccta

SEQ ID NO: 5815568 - DNA, 25 bp, Homo sapien
gctcctggctcttgattttgtcggc

SEQ ID NO: 5815569 - DNA, 25 bp, Homo sapien
atcctgctgagcgttctacaccagc

SEQ ID NO: 5815570 - DNA, 25 bp, Homo sapien
ggaggtggtggaggccagctccgag

SEQ ID NO: 5815571 - DNA, 25 bp, Homo sapien
gcactgccctcagggctgccgccca

SEQ ID NO: 5815572 - DNA, 25 bp, Homo sapien
gcggctgggtgcgcagaccctgccg

SEQ ID NO: 5815573 - DNA, 25 bp, Homo sapien
ggtcgtcgccgctgcccggccgggg

SEQ ID NO: 5815574 - DNA, 25 bp, Homo sapien
acatcctgctgagcgttctacacca

SEQ ID NO: 5815575 - DNA, 25 bp, Homo sapien
gaaggccagtgcaacccggacctgc

SEQ ID NO: 5815576 - DNA, 25 bp, Homo sapien
agaaagtcatcatccccgcccggat

SEQ ID NO: 5815577 - DNA, 25 bp, Homo sapien
cttggtaacccccgcatccagcgcc

SEQ ID NO: 5815578 - DNA, 25 bp, Homo sapien
gccaccactcctacgcccagatggt

SEQ ID NO: 5815579 - DNA, 25 bp, Homo sapien
cgacctggtggtgtcctaccccttc

SEQ ID NO: 5815580 - DNA, 25 bp, Homo sapien
tctttgggggaggccacggagcccg

SEQ ID NO: 5815581 - DNA, 25 bp, Homo sapien
ccgctgggaggtgccagctctttgg

SEQ ID NO: 5815582 - DNA, 25 bp, Homo sapien
ctgaggcggatggcctcccgctgcg

SEQ ID NO: 5815583 - DNA, 25 bp, Homo sapien
actactggagactgctgcccccagg

SEQ ID NO: 5815584 - DNA, 25 bp, Homo sapien
tgggctgtgtgaagttcccccccga

SEQ ID NO: 5815585 - DNA, 25 bp, Homo sapien
atgaggtggcagctgccgagggtgc

SEQ ID NO: 5815586 - DNA, 25 bp, Homo sapien
aacaccacccgcatccacctgctgc

SEQ ID NO: 5815587 - DNA, 25 bp, Homo sapien
gagtactaccggctggcggagaccc

SEQ ID NO: 5815588 - DNA, 25 bp, Homo sapien
gctcaggacctgcagcgatgccgcc

SEQ ID NO: 5815589 - DNA, 25 bp, Homo sapien
ctggctcttgattttgtcggccaca

SEQ ID NO: 5815590 - DNA, 25 bp, Homo sapien
gtttgagcggaaccccgccggtgaa

SEQ ID NO: 5815591 - DNA, 25 bp, Homo sapien
gtgtggaggcaatttcctgaagagg

SEQ ID NO: 5815592 - DNA, 25 bp, Homo sapien
ctttaggcagctgaatccgtgattt

SEQ ID NO: 5815593 - DNA, 25 bp, Homo sapien
accgctacttcacgagagaggacga

SEQ ID NO: 5815594 - DNA, 25 bp, Homo sapien
gctgcccggccggggtgcgagtttg

SEQ ID NO: 5815595 - DNA, 25 bp, Homo sapien
ggtggcagctgccgagggtgccggc

SEQ ID NO: 5815596 - DNA, 25 bp, Homo sapien
gaagagggggagcatcatcaacggg

SEQ ID NO: 5815597 - DNA, 25 bp, Homo sapien
cgcccggatgaagagggctggccgt

SEQ ID NO: 5815598 - DNA, 25 bp, Homo sapien
actttattcatgggctgcggaggac

SEQ ID NO: 5815599 - DNA, 25 bp, Homo sapien
cttgactgccaccgctacttcacga

SEQ ID NO: 5815600 - DNA, 25 bp, Homo sapien
tgacatggcctggccctacttcctt

SEQ ID NO: 5815601 - DNA, 25 bp, Homo sapien
ctggtcgtcgccgctgcccggccgg

SEQ ID NO: 5815602 - DNA, 25 bp, Homo sapien
gtaacccccgcatccagcgcctgct

SEQ ID NO: 5815603 - DNA, 25 bp, Homo sapien
gcccacgtggccaggacctacagca

SEQ ID NO: 5815604 - DNA, 25 bp, Homo sapien
gccccaccatgccgcccccgccgcc

SEQ ID NO: 5815605 - DNA, 25 bp, Homo sapien
ctggtcatcgagttctccagccgcc

SEQ ID NO: 5815606 - DNA, 25 bp, Homo sapien
gctacgccaaagtcatcaagaaagt

SEQ ID NO: 5815607 - DNA, 25 bp, Homo sapien
cgggagggactgacctgccgaccct

SEQ ID NO: 5815608 - DNA, 25 bp, Homo sapien
agccttcatgggggcgacctggtgg

SEQ ID NO: 5815609 - DNA, 25 bp, Homo sapien
ggccgtccaaggtccgccgccccac

SEQ ID NO: 5815610 - DNA, 25 bp, Homo sapien
gtgcccctccctgcaggccctggcc

SEQ ID NO: 5815611 - DNA, 25 bp, Homo sapien
gctgatggagcccgaggtgaagctc

SEQ ID NO: 5815612 - DNA, 25 bp, Homo sapien
cgccgccccaccatgccgcccccgc

SEQ ID NO: 5815613 - DNA, 25 bp, Homo sapien
acactgtcagagcactttaggcagc

SEQ ID NO: 5815614 - DNA, 25 bp, Homo sapien
gcaatttcctgaagagggggagcat

SEQ ID NO: 5815615 - DNA, 25 bp, Homo sapien
catgggggcgacctggtggtgtcct

SEQ ID NO: 5815616 - DNA, 25 bp, Homo sapien
tgggctgcggaggactgggccccac

SEQ ID NO: 5815617 - DNA, 25 bp, Homo sapien
gcgttctacaccagctcctggaagg

SEQ ID NO: 5815618 - DNA, 25 bp, Homo sapien
actcctgaatttcgtggagacggtg

SEQ ID NO: 5815619 - DNA, 25 bp, Homo sapien
cgctccgggcgcgcaggcagccctc

SEQ ID NO: 5815620 - DNA, 25 bp, Homo sapien
gcaagccagtcaaaaacgcccggat

SEQ ID NO: 5815621 - DNA, 25 bp, Homo sapien
ccgagtgccacatcactgcgctggc

SEQ ID NO: 5815622 - DNA, 25 bp, Homo sapien
cccccccgaggaggccctgtacaca

SEQ ID NO: 5815623 - DNA, 25 bp, Homo sapien
gggctcctggctcttgattttgtcg

SEQ ID NO: 5815624 - DNA, 25 bp, Homo sapien
ctgtccagagcctacgctgacgtcc

SEQ ID NO: 5815625 - DNA, 25 bp, Homo sapien
tttcagaagctctgattcctgcaca

SEQ ID NO: 5815626 - DNA, 25 bp, Homo sapien
cccggccggggtgcgagtttgagcg

SEQ ID NO: 5815627 - DNA, 25 bp, Homo sapien
caacaaggagtcactcctgaatttc

SEQ ID NO: 5815628 - DNA, 25 bp, Homo sapien
cctggccctgcgtggggtcccctac

SEQ ID NO: 5815629 - DNA, 25 bp, Homo sapien
aggcagaacgcgcagaacctggatc

SEQ ID NO: 5815630 - DNA, 25 bp, Homo sapien
cgtcacggtcagggccactgcggga

SEQ ID NO: 5815631 - DNA, 25 bp, Homo sapien
cacatctgcgagggcctgcgggagg

SEQ ID NO: 5815632 - DNA, 25 bp, Homo sapien
atcaccacagccccagatggtgact

SEQ ID NO: 5815633 - DNA, 25 bp, Homo sapien
ctccgggcgcgcaggcagccctcgg

SEQ ID NO: 5815634 - DNA, 25 bp, Homo sapien
cggatctcagtcaaaggcattcgcc

SEQ ID NO: 5815635 - DNA, 25 bp, Homo sapien
ataggtgtggaggcaatttcctgaa

SEQ ID NO: 5815636 - DNA, 25 bp, Homo sapien
ttcggcaagccagtcaaaaacgccc

SEQ ID NO: 5815637 - DNA, 25 bp, Homo sapien
cacgggaggcatgtccgacttcaac

SEQ ID NO: 5815638 - DNA, 25 bp, Homo sapien
caccatgccgcccccgccgccgctg

SEQ ID NO: 5815639 - DNA, 25 bp, Homo sapien
gctgccgcccaccttcatccgcttc

SEQ ID NO: 5815640 - DNA, 25 bp, Homo sapien
gtgagggcggctgggtgcgcagacc

SEQ ID NO: 5815641 - DNA, 25 bp, Homo sapien
gagacccgcggcgcacgcagcgacc

SEQ ID NO: 5815642 - DNA, 25 bp, Homo sapien
tgggaggtggtggaggccagctccg

SEQ ID NO: 5815643 - DNA, 25 bp, Homo sapien
aggcaatttcctgaagagggggagc

SEQ ID NO: 5815644 - DNA, 25 bp, Homo sapien
tcctgcacagtagctgttgtcctgg

SEQ ID NO: 5815645 - DNA, 25 bp, Homo sapien
ccacgctggctgctcaagtactagc

SEQ ID NO: 5815646 - DNA, 25 bp, Homo sapien
gcgggccgggagatgctcatctacc

SEQ ID NO: 5815647 - DNA, 25 bp, Homo sapien
gcctcccgctgcgcccacgtggcca

SEQ ID NO: 5815648 - DNA, 25 bp, Homo sapien
tccagcgcctgctcaacaccacccg

SEQ ID NO: 5815649 - DNA, 25 bp, Homo sapien
accacatccccatcccccagcacta

SEQ ID NO: 5815650 - DNA, 25 bp, Homo sapien
cctgcttggtaacccccgcatccag

SEQ ID NO: 5815651 - DNA, 25 bp, Homo sapien
gggccccacgacccgctgggaggtg

SEQ ID NO: 5815652 - DNA, 25 bp, Homo sapien
cgacatcaccacagccccagatggt

SEQ ID NO: 5815653 - DNA, 25 bp, Homo sapien
acccgctgggaggtgccagctcttt

SEQ ID NO: 5815654 - DNA, 25 bp, Homo sapien
tgcctccccagccacctgcgtggac

SEQ ID NO: 5815655 - DNA, 25 bp, Homo sapien
ggcaatcatgaagtggatgcagacc

SEQ ID NO: 5815656 - DNA, 25 bp, Homo sapien
cccgccgccgctgctgctccttaca

SEQ ID NO: 5815657 - DNA, 25 bp, Homo sapien
gcttcagcaccggtcgtgggaggtg

SEQ ID NO: 5815658 - DNA, 25 bp, Homo sapien
caactgctttgagatcacggtagag

SEQ ID NO: 5815659 - DNA, 25 bp, Homo sapien
gtgtcctaccccttcgacttctcca

SEQ ID NO: 5815660 - DNA, 25 bp, Homo sapien
acctgtgctctgagtacctgcttgg

SEQ ID NO: 5815661 - DNA, 25 bp, Homo sapien
tgcgggagggactgacctgccgacc

SEQ ID NO: 5815662 - DNA, 25 bp, Homo sapien
agggggagcatcatcaacggggcgg

SEQ ID NO: 5815663 - DNA, 25 bp, Homo sapien
gatttcagaagctctgattcctgca

SEQ ID NO: 5815664 - DNA, 25 bp, Homo sapien
ggaggcaatttcctgaagaggggga

SEQ ID NO: 5815665 - DNA, 25 bp, Homo sapien
tggcagctgccgagggtgccggcta

SEQ ID NO: 5815666 - DNA, 25 bp, Homo sapien
gtgacagataaattcggcaagccag

SEQ ID NO: 5815667 - DNA, 25 bp, Homo sapien
gctatgacccgctggagaagcttcg

SEQ ID NO: 5815668 - DNA, 25 bp, Homo sapien
cccccggtgtgagggcggctgggtg

SEQ ID NO: 5815669 - DNA, 25 bp, Homo sapien
accgggacctccctggcttctgttc

SEQ ID NO: 5815670 - DNA, 25 bp, Homo sapien
ccctgtacacactctggcagcacaa

SEQ ID NO: 5815671 - DNA, 25 bp, Homo sapien
ccctgccagaccgtgggtgcccctc

SEQ ID NO: 5815672 - DNA, 25 bp, Homo sapien
ccacctgctgccctccatgaaccct

SEQ ID NO: 5815673 - DNA, 25 bp, Homo sapien
gcaacccggacctgcggctgctggg

SEQ ID NO: 5815674 - DNA, 25 bp, Homo sapien
gccctacttccttgactgccaccgc

SEQ ID NO: 5815675 - DNA, 25 bp, Homo sapien
acgagctgatggagcccgaggtgaa

SEQ ID NO: 5815676 - DNA, 25 bp, Homo sapien
ctgaatttcgtggagacggtgcacc

SEQ ID NO: 5815677 - DNA, 25 bp, Homo sapien
gagcgttctacaccagctcctggaa

SEQ ID NO: 5815678 - DNA, 25 bp, Homo sapien
catcgctgagcacccacaggccacg

SEQ ID NO: 5815679 - DNA, 25 bp, Homo sapien
gtggtcctacttcacatcgctgagc

SEQ ID NO: 5815680 - DNA, 25 bp, Homo sapien
gacagcggtacagtaccgggacctc

SEQ ID NO: 5815681 - DNA, 25 bp, Homo sapien
cggtgcaccggggcatcaaaggtgt

SEQ ID NO: 5815682 - DNA, 25 bp, Homo sapien
aagaactttattcatgggctgcgga

SEQ ID NO: 5815683 - DNA, 25 bp, Homo sapien
agacatcccacaaagccgctgccat

SEQ ID NO: 5815684 - DNA, 25 bp, Homo sapien
cgctgcgcccacgtggccaggacct

SEQ ID NO: 5815685 - DNA, 25 bp, Homo sapien
gcggtacagtaccgggacctccctg

SEQ ID NO: 5815686 - DNA, 25 bp, Homo sapien
cccaacctgcttcagcaccggtcgt

SEQ ID NO: 5815687 - DNA, 25 bp, Homo sapien
cggacctgacgtccgagtactaccg

SEQ ID NO: 5815688 - DNA, 25 bp, Homo sapien
agcccgaggtgaagctcatcggcaa

SEQ ID NO: 5815689 - DNA, 25 bp, Homo sapien
ccgacgggagtaagccctggtggtg

SEQ ID NO: 5815690 - DNA, 25 bp, Homo sapien
gccattttattaaagtgttttgatc

SEQ ID NO: 5815691 - DNA, 25 bp, Homo sapien
gtggaggcaatttcctgaagagggg

SEQ ID NO: 5815692 - DNA, 25 bp, Homo sapien
acggctatgaggtggcagctgccga

SEQ ID NO: 5815693 - DNA, 25 bp, Homo sapien
ccccgccggtgaatgccacaggcca

SEQ ID NO: 5815694 - DNA, 25 bp, Homo sapien
ccaggacctacagcatcgggcgcag

SEQ ID NO: 5815695 - DNA, 25 bp, Homo sapien
gacgcgtcacggtcagggccactgc

SEQ ID NO: 5815696 - DNA, 25 bp, Homo sapien
gctgccctccatgaaccctgacggc

SEQ ID NO: 5815697 - DNA, 25 bp, Homo sapien
acgtaaatgtctgacgcgtcacggt

SEQ ID NO: 5815698 - DNA, 25 bp, Homo sapien
tcactcctgaatttcgtggagacgg

SEQ ID NO: 5815699 - DNA, 25 bp, Homo sapien
ccgccccggccagcacgagctgatg

SEQ ID NO: 5815700 - DNA, 25 bp, Homo sapien
cctggctacgccaaagtcatcaaga

SEQ ID NO: 5815701 - DNA, 25 bp, Homo sapien
cagaacctggatctgaaccgaaatt

SEQ ID NO: 5815702 - DNA, 25 bp, Homo sapien
ttcgacggcagggagctgctggtca

SEQ ID NO: 5815703 - DNA, 25 bp, Homo sapien
tgctgaggcggatggcctcccgctg

SEQ ID NO: 5815704 - DNA, 25 bp, Homo sapien
cccccgccgccgctgctgctcctta

SEQ ID NO: 5815705 - DNA, 25 bp, Homo sapien
atggtgactactggagactgctgcc

SEQ ID NO: 5815706 - DNA, 25 bp, Homo sapien
atgtccgacttcaactacctgcaca

SEQ ID NO: 5815707 - DNA, 25 bp, Homo sapien
ggccagctccgagtacatcctgctg

SEQ ID NO: 5815708 - DNA, 25 bp, Homo sapien
cggagacaaaggcaatcatgaagtg

SEQ ID NO: 5815709 - DNA, 25 bp, Homo sapien
gagctgatggagcccgaggtgaagc

SEQ ID NO: 5815710 - DNA, 25 bp, Homo sapien
taccctttgtgctctcagccagcct

SEQ ID NO: 5815711 - DNA, 25 bp, Homo sapien
ccccttcgacttctccaagcacccc

SEQ ID NO: 5815712 - DNA, 25 bp, Homo sapien
cccagtacctgtgctctgagtacct

SEQ ID NO: 5815713 - DNA, 25 bp, Homo sapien
accagctgcagacagcggtacagta

SEQ ID NO: 5815714 - DNA, 25 bp, Homo sapien
cggatgaagagggctggccgtgtgg

SEQ ID NO: 5815715 - DNA, 25 bp, Homo sapien
tgggaggtgccagctctttggggga

SEQ ID NO: 5815716 - DNA, 25 bp, Homo sapien
cgtccaccccatgatgatggacagg

SEQ ID NO: 5815717 - DNA, 25 bp, Homo sapien
gacgtccaccccatgatgatggaca

SEQ ID NO: 5815718 - DNA, 25 bp, Homo sapien
ggagtcactcctgaatttcgtggag

SEQ ID NO: 5815719 - DNA, 25 bp, Homo sapien
actgtcagagcactttaggcagctg

SEQ ID NO: 5815720 - DNA, 25 bp, Homo sapien
gctgcagcccccacactgtcagagc

SEQ ID NO: 5815721 - DNA, 25 bp, Homo sapien
aaggcaatcatgaagtggatgcaga

SEQ ID NO: 5815722 - DNA, 25 bp, Homo sapien
atcatccccgcccggatgaagaggg

SEQ ID NO: 5815723 - DNA, 25 bp, Homo sapien
tttgtcggccacagacatcccacaa

SEQ ID NO: 5815724 - DNA, 25 bp, Homo sapien
gaatccgtgatttcagaagctctga

SEQ ID NO: 5815725 - DNA, 25 bp, Homo sapien
ctgccagaccgtgggtgcccctccc

SEQ ID NO: 5815726 - DNA, 25 bp, Homo sapien
atgatgatggacaggtcggagaata

SEQ ID NO: 5815727 - DNA, 25 bp, Homo sapien
ttctccaagcacccccaggaggaga

SEQ ID NO: 5815728 - DNA, 25 bp, Homo sapien
tatgacccgctggagaagcttcggg

SEQ ID NO: 5815729 - DNA, 25 bp, Homo sapien
gtgctctcagccagccttcatgggg

SEQ ID NO: 5815730 - DNA, 25 bp, Homo sapien
ggggcgacctggtggtgtcctaccc

SEQ ID NO: 5815731 - DNA, 25 bp, Homo sapien
gcagccctcggccgacgggagtaag

SEQ ID NO: 5815732 - DNA, 25 bp, Homo sapien
cacaccaccttccccaacctgcttc

SEQ ID NO: 5815733 - DNA, 25 bp, Homo sapien
ccgagtacatcctgctgagcgttct

SEQ ID NO: 5815734 - DNA, 25 bp, Homo sapien
ggtacagcttcacgggaggcatgtc

SEQ ID NO: 5815735 - DNA, 25 bp, Homo sapien
aagcacccccaggaggagaagatgt

SEQ ID NO: 5815736 - DNA, 25 bp, Homo sapien
ggtggcgggccgggagatgctcatc

SEQ ID NO: 5815737 - DNA, 25 bp, Homo sapien
accaactgctttgagatcacggtag

SEQ ID NO: 5815738 - DNA, 25 bp, Homo sapien
gaaccctgacggctatgaggtggca

SEQ ID NO: 5815739 - DNA, 25 bp, Homo sapien
tcattctgcaacctctggggatggg

SEQ ID NO: 5815740 - DNA, 25 bp, Homo sapien
cccgcatccagcgcctgctcaacac

SEQ ID NO: 5815741 - DNA, 25 bp, Homo sapien
cgggaggtctgccagcccgccttcg

SEQ ID NO: 5815742 - DNA, 25 bp, Homo sapien
tggcctcccgctgcgcccacgtggc

SEQ ID NO: 5815743 - DNA, 25 bp, Homo sapien
ggctacaacgggtggacgagcggga

SEQ ID NO: 5815744 - DNA, 25 bp, Homo sapien
ggagcccgaggtgaagctcatcggc

SEQ ID NO: 5815745 - DNA, 25 bp, Homo sapien
gctctcagccagccttcatgggggc

SEQ ID NO: 5815746 - DNA, 25 bp, Homo sapien
gagaagatgttcaagctgctgtcca

SEQ ID NO: 5815747 - DNA, 25 bp, Homo sapien
ccgaggcccgtctccgcatcccggg

SEQ ID NO: 5815748 - DNA, 25 bp, Homo sapien
ggcccgtctccgcatcccgggctcc

SEQ ID NO: 5815749 - DNA, 25 bp, Homo sapien
ccgggcgcgcaggcagccctcggcc

SEQ ID NO: 5815750 - DNA, 25 bp, Homo sapien
acctgcttcagcaccggtcgtggga

SEQ ID NO: 5815751 - DNA, 25 bp, Homo sapien
gcaggcagccctcggccgacgggag

SEQ ID NO: 5815752 - DNA, 25 bp, Homo sapien
atttcgtggagacggtgcaccgggg

SEQ ID NO: 5815753 - DNA, 25 bp, Homo sapien
gtggatgcagaccataccctttgtg

SEQ ID NO: 5815754 - DNA, 25 bp, Homo sapien
taaagtgttttgatccacttaaaaa

SEQ ID NO: 5815755 - DNA, 25 bp, Homo sapien
tgctgagcgttctacaccagctcct

SEQ ID NO: 5815756 - DNA, 25 bp, Homo sapien
caaccacaccaccttccccaacctg

SEQ ID NO: 5815757 - DNA, 25 bp, Homo sapien
caccagctcctggaaggccagtgca

SEQ ID NO: 5815758 - DNA, 25 bp, Homo sapien
cccggacctgcggctgctgggctgt

SEQ ID NO: 5815759 - DNA, 25 bp, Homo sapien
cagctcaggacctgcagcgatgccg

SEQ ID NO: 5815760 - DNA, 25 bp, Homo sapien
tgctgtgctggccccccggtgtgag

SEQ ID NO: 5815761 - DNA, 25 bp, Homo sapien
aggtgaagctcatcggcaacattca

SEQ ID NO: 5815762 - DNA, 25 bp, Homo sapien
accggggcatcaaaggtgtggtgac

SEQ ID NO: 5815763 - DNA, 25 bp, Homo sapien
gagtttgagcggaaccccgccggtg

SEQ ID NO: 5815764 - DNA, 25 bp, Homo sapien
gccgctgccattttattaaagtgtt

SEQ ID NO: 5815765 - DNA, 25 bp, Homo sapien
cacaaagccgctgccattttattaa

SEQ ID NO: 5815766 - DNA, 25 bp, Homo sapien
gttcaagctgctgtccagagcctac

SEQ ID NO: 5815767 - DNA, 25 bp, Homo sapien
gcatccacctgctgccctccatgaa

SEQ ID NO: 5815768 - DNA, 25 bp, Homo sapien
tccccgcccggatgaagagggctgg

SEQ ID NO: 5815769 - DNA, 25 bp, Homo sapien
gatgccgcctacaaccacaccacct

SEQ ID NO: 5815770 - DNA, 25 bp, Homo sapien
gtgcaacccggacctgcggctgctg

SEQ ID NO: 5815771 - DNA, 25 bp, Homo sapien
gcccgccttcgacgccattgacatg

SEQ ID NO: 5815772 - DNA, 25 bp, Homo sapien
ggtggtggtcctacttcacatcgct

SEQ ID NO: 5815773 - DNA, 25 bp, Homo sapien
ccagctccgagtacatcctgctgag

SEQ ID NO: 5815774 - DNA, 25 bp, Homo sapien
cggtcgtgggaggtggtggaggcca

SEQ ID NO: 5815775 - DNA, 25 bp, Homo sapien
cccaccatgccgcccccgccgccgc

SEQ ID NO: 5815776 - DNA, 25 bp, Homo sapien
gcagcgaccacatccccatccccca

SEQ ID NO: 5815777 - DNA, 25 bp, Homo sapien
ggccctgtacacactctggcagcac

SEQ ID NO: 5815778 - DNA, 25 bp, Homo sapien
gacctgacgtccgagtactaccggc

SEQ ID NO: 5815779 - DNA, 25 bp, Homo sapien
cccccgaggaggccctgtacacact

SEQ ID NO: 5815780 - DNA, 25 bp, Homo sapien
ggtggacgagcgggaggcagaacgc

SEQ ID NO: 5815781 - DNA, 25 bp, Homo sapien
gtgctggccccccggtgtgagggcg

SEQ ID NO: 5815782 - DNA, 25 bp, Homo sapien
acgcagcgaccacatccccatcccc

SEQ ID NO: 5815783 - DNA, 25 bp, Homo sapien
tgcagcgatgccgcctacaaccaca

SEQ ID NO: 5815784 - DNA, 25 bp, Homo sapien
ggcgcagcttcgacggcagggagct

SEQ ID NO: 5815785 - DNA, 25 bp, Homo sapien
tcccctacgtaaatgtctgacgcgt

SEQ ID NO: 5815786 - DNA, 25 bp, Homo sapien
gcctacaaccacaccaccttcccca

SEQ ID NO: 5815787 - DNA, 25 bp, Homo sapien
tctacaccagctcctggaaggccag

SEQ ID NO: 5815788 - DNA, 25 bp, Homo sapien
aaaacgcccggatctcagtcaaagg

SEQ ID NO: 5815789 - DNA, 25 bp, Homo sapien
tcggccgacgggagtaagccctggt

SEQ ID NO: 5815790 - DNA, 25 bp, Homo sapien
cgaggaggccctgtacacactctgg

SEQ ID NO: 5815791 - DNA, 25 bp, Homo sapien
ggcctggaggctgacgaggcactgc

SEQ ID NO: 5815792 - DNA, 25 bp, Homo sapien
cacggagcccgacccgctccgggcg

SEQ ID NO: 5815793 - DNA, 25 bp, Homo sapien
cgcgcagaacctggatctgaaccga

SEQ ID NO: 5815794 - DNA, 25 bp, Homo sapien
cctaccccttcgacttctccaagca

SEQ ID NO: 5815795 - DNA, 25 bp, Homo sapien
cctgctgagcgttctacaccagctc

SEQ ID NO: 5815796 - DNA, 25 bp, Homo sapien
agaagcttcggggaggcctggaggc

SEQ ID NO: 5815797 - DNA, 25 bp, Homo sapien
tggacgagcgggaggcagaacgcgc

SEQ ID NO: 5815798 - DNA, 25 bp, Homo sapien
acatcaccacagccccagatggtga

SEQ ID NO: 5815799 - DNA, 25 bp, Homo sapien
gatctcagtcaaaggcattcgccac

SEQ ID NO: 5815800 - DNA, 25 bp, Homo sapien
tcgccacgacatcaccacagcccca

SEQ ID NO: 5815801 - DNA, 25 bp, Homo sapien
gactgggccccacgacccgctggga

SEQ ID NO: 5815802 - DNA, 25 bp, Homo sapien
ctcagggctgccgcccaccttcatc

SEQ ID NO: 5815803 - DNA, 25 bp, Homo sapien
gaccgtgggtgcccctccctgcagg

SEQ ID NO: 5815804 - DNA, 25 bp, Homo sapien
agaggacgagggctgctatgacccg

SEQ ID NO: 5815805 - DNA, 25 bp, Homo sapien
accctgccggcacatctgcgagggc

SEQ ID NO: 5815806 - DNA, 25 bp, Homo sapien
cgaggcactgccctcagggctgccg

SEQ ID NO: 5815807 - DNA, 25 bp, Homo sapien
gcgagtttgagcggaaccccgccgg

SEQ ID NO: 5815808 - DNA, 25 bp, Homo sapien
gggtgcgagtttgagcggaaccccg

SEQ ID NO: 5815809 - DNA, 25 bp, Homo sapien
agccctcggccgacgggagtaagcc

SEQ ID NO: 5815810 - DNA, 25 bp, Homo sapien
tgcgtggacctgcagctcaggacct

SEQ ID NO: 5815811 - DNA, 25 bp, Homo sapien
gcacaccaactgctttgagatcacg

SEQ ID NO: 5815812 - DNA, 25 bp, Homo sapien
ccattgacatggcctggccctactt

SEQ ID NO: 5815813 - DNA, 25 bp, Homo sapien
gactggtacagcttcacgggaggca

SEQ ID NO: 5815814 - DNA, 25 bp, Homo sapien
tggccccggagacaaaggcaatcat

SEQ ID NO: 5815815 - DNA, 25 bp, Homo sapien
ggtcccctacgtaaatgtctgacgc

SEQ ID NO: 5815816 - DNA, 25 bp, Homo sapien
acaaggagtcactcctgaatttcgt

SEQ ID NO: 5815817 - DNA, 25 bp, Homo sapien
tcagggccactgcgggagggactga

SEQ ID NO: 5815818 - DNA, 25 bp, Homo sapien
acgctggctgctcaagtactagccc

SEQ ID NO: 5815819 - DNA, 25 bp, Homo sapien
cctcggccgacgggagtaagccctg

SEQ ID NO: 5815820 - DNA, 25 bp, Homo sapien
ccgtgatttcagaagctctgattcc

SEQ ID NO: 5815821 - DNA, 25 bp, Homo sapien
gcctgctcaacaccacccgcatcca

SEQ ID NO: 5815822 - DNA, 25 bp, Homo sapien
ctacgtaaatgtctgacgcgtcacg

SEQ ID NO: 5815823 - DNA, 25 bp, Homo sapien
caccacccgcatccacctgctgccc

SEQ ID NO: 5815824 - DNA, 25 bp, Homo sapien
ctggcggagacccgcggcgcacgca

SEQ ID NO: 5815825 - DNA, 25 bp, Homo sapien
gaacctggatctgaaccgaaatttc

SEQ ID NO: 5815826 - DNA, 25 bp, Homo sapien
aggactgggccccacgacccgctgg

SEQ ID NO: 5815827 - DNA, 25 bp, Homo sapien
ccatgatgatggacaggtcggagaa

SEQ ID NO: 5815828 - DNA, 25 bp, Homo sapien
ctatgaggtggcagctgccgagggt

SEQ ID NO: 5815829 - DNA, 25 bp, Homo sapien
cactttaggcagctgaatccgtgat

SEQ ID NO: 5815830 - DNA, 25 bp, Homo sapien
cctggaggctgacgaggcactgccc

SEQ ID NO: 5815831 - DNA, 25 bp, Homo sapien
gagaccgaggcccgtctccgcatcc

SEQ ID NO: 5815832 - DNA, 25 bp, Homo sapien
actgctgcccccaggtatccacatt

SEQ ID NO: 5815833 - DNA, 25 bp, Homo sapien
gcccaccttcatccgcttcagccac

SEQ ID NO: 5815834 - DNA, 25 bp, Homo sapien
gttctacaccagctcctggaaggcc

SEQ ID NO: 5815835 - DNA, 25 bp, Homo sapien
ttgtgctctcagccagccttcatgg

SEQ ID NO: 5815836 - DNA, 25 bp, Homo sapien
cgaggtgaagctcatcggcaacatt

SEQ ID NO: 5815837 - DNA, 25 bp, Homo sapien
gctgggctgtgtgaagttccccccc

SEQ ID NO: 5815838 - DNA, 25 bp, Homo sapien
cccgccaggatgtggagaccgaggc

SEQ ID NO: 5815839 - DNA, 25 bp, Homo sapien
gtacctgtgctctgagtacctgctt

SEQ ID NO: 5815840 - DNA, 25 bp, Homo sapien
agtcactcctgaatttcgtggagac

SEQ ID NO: 5815841 - DNA, 25 bp, Homo sapien
gtgatttcagaagctctgattcctg

SEQ ID NO: 5815842 - DNA, 25 bp, Homo sapien
ccgcctacaaccacaccaccttccc

SEQ ID NO: 5815843 - DNA, 25 bp, Homo sapien
caccacagccccagatggtgactac

SEQ ID NO: 5815844 - DNA, 25 bp, Homo sapien
tgatggagcccgaggtgaagctcat

SEQ ID NO: 5815845 - DNA, 25 bp, Homo sapien
ctgcccccaggtatccacattgtca

SEQ ID NO: 5815846 - DNA, 25 bp, Homo sapien
cccacgacccgctgggaggtgccag

SEQ ID NO: 5815847 - DNA, 25 bp, Homo sapien
tcctgaagagggggagcatcatcaa

SEQ ID NO: 5815848 - DNA, 25 bp, Homo sapien
tacctgcttggtaacccccgcatcc

SEQ ID NO: 5815849 - DNA, 25 bp, Homo sapien
gaggcggatggcctcccgctgcgcc

SEQ ID NO: 5815850 - DNA, 25 bp, Homo sapien
cggggtgcgagtttgagcggaaccc

SEQ ID NO: 5815851 - DNA, 25 bp, Homo sapien
ccaagaactttattcatgggctgcg

SEQ ID NO: 5815852 - DNA, 25 bp, Homo sapien
tcggccacagacatcccacaaagcc

SEQ ID NO: 5815853 - DNA, 25 bp, Homo sapien
tcccctgccagaccgtgggtgcccc

SEQ ID NO: 5815854 - DNA, 25 bp, Homo sapien
tggtcctcccctgccagaccgtggg

SEQ ID NO: 5815855 - DNA, 25 bp, Homo sapien
tcatcgagttctccagccgccccgg

SEQ ID NO: 5815856 - DNA, 25 bp, Homo sapien
ccgcccaccttcatccgcttcagcc

SEQ ID NO: 5815857 - DNA, 25 bp, Homo sapien
agccccagatggtgactactggaga

SEQ ID NO: 5815858 - DNA, 25 bp, Homo sapien
acccgcatccacctgctgccctcca

SEQ ID NO: 5815859 - DNA, 25 bp, Homo sapien
tgggacccaagaactttattcatgg

SEQ ID NO: 5815860 - DNA, 25 bp, Homo sapien
ctacctgcacaccaactgctttgag

SEQ ID NO: 5815861 - DNA, 25 bp, Homo sapien
ttcacgggaggcatgtccgacttca

SEQ ID NO: 5815862 - DNA, 25 bp, Homo sapien
ttgagatcacggtagagctgggctg

SEQ ID NO: 5815863 - DNA, 25 bp, Homo sapien
agaagatgttttctcccacgcccga

SEQ ID NO: 5815864 - DNA, 25 bp, Homo sapien
agcacaacaaggagtcactcctgaa

SEQ ID NO: 5815865 - DNA, 25 bp, Homo sapien
gtggccaggacctacagcatcgggc

SEQ ID NO: 5815866 - DNA, 25 bp, Homo sapien
cccgaggtgaagctcatcggcaaca

SEQ ID NO: 5815867 - DNA, 25 bp, Homo sapien
ccagctcctggaaggccagtgcaac

SEQ ID NO: 5815868 - DNA, 25 bp, Homo sapien
gcatgtccgacttcaactacctgca

SEQ ID NO: 5815869 - DNA, 25 bp, Homo sapien
cttcatccgcttcagccaccactcc

SEQ ID NO: 5815870 - DNA, 25 bp, Homo sapien
agggcctgcgggaggtctgccagcc

SEQ ID NO: 5815871 - DNA, 25 bp, Homo sapien
cccgctgcgcccacgtggccaggac

SEQ ID NO: 5815872 - DNA, 25 bp, Homo sapien
cgccaaagtcatcaagaaagtcatc

SEQ ID NO: 5815873 - DNA, 25 bp, Homo sapien
cggacctgcggctgctgggctgtgc

SEQ ID NO: 5815874 - DNA, 25 bp, Homo sapien
tgctggtcatcgagttctccagccg

SEQ ID NO: 5815875 - DNA, 25 bp, Homo sapien
caacctgcttcagcaccggtcgtgg

SEQ ID NO: 5815876 - DNA, 25 bp, Homo sapien
agaccataccctttgtgctctcagc

SEQ ID NO: 5815877 - DNA, 25 bp, Homo sapien
cccggagacaaaggcaatcatgaag

SEQ ID NO: 5815878 - DNA, 25 bp, Homo sapien
tgtggtgacagataaattcggcaag

SEQ ID NO: 5815879 - DNA, 25 bp, Homo sapien
ctgggctgtgctgtgctggcccccc

SEQ ID NO: 5815880 - DNA, 25 bp, Homo sapien
tggtggtcctacttcacatcgctga

SEQ ID NO: 5815881 - DNA, 25 bp, Homo sapien
ggcggatggcctcccgctgcgccca

SEQ ID NO: 5815882 - DNA, 25 bp, Homo sapien
gggtgcccctccctgcaggccctgg

SEQ ID NO: 5815883 - DNA, 25 bp, Homo sapien
cggactggtacagcttcacgggagg

SEQ ID NO: 5815884 - DNA, 25 bp, Homo sapien
tacgccaaagtcatcaagaaagtca

SEQ ID NO: 5815885 - DNA, 25 bp, Homo sapien
cgcatcccgggctcctggctcttga

SEQ ID NO: 5815886 - DNA, 25 bp, Homo sapien
agatggtgcgtgtgctgaggcggat

SEQ ID NO: 5815887 - DNA, 25 bp, Homo sapien
ggaggactgggccccacgacccgct

SEQ ID NO: 5815888 - DNA, 25 bp, Homo sapien
cgagggctgctatgacccgctggag

SEQ ID NO: 5815889 - DNA, 25 bp, Homo sapien
cggagaataggtgtggaggcaattt

SEQ ID NO: 5815890 - DNA, 25 bp, Homo sapien
cgggacctccctggcttctgttctg

SEQ ID NO: 5815891 - DNA, 25 bp, Homo sapien
aagcttcggggaggcctggaggctg

SEQ ID NO: 5815892 - DNA, 25 bp, Homo sapien
tggtgtcctaccccttcgacttctc

SEQ ID NO: 5815893 - DNA, 25 bp, Homo sapien
gatggcctcccgctgcgcccacgtg

SEQ ID NO: 5815894 - DNA, 25 bp, Homo sapien
acccaagaactttattcatgggctg

SEQ ID NO: 5815895 - DNA, 25 bp, Homo sapien
gcggaaccccgccggtgaatgccac

SEQ ID NO: 5815896 - DNA, 25 bp, Homo sapien
aacgcccggatctcagtcaaaggca

SEQ ID NO: 5815897 - DNA, 25 bp, Homo sapien
gtgcgcagaccctgccggcacatct

SEQ ID NO: 5815898 - DNA, 25 bp, Homo sapien
tgttctgtaggagggctgcagcccc

SEQ ID NO: 5815899 - DNA, 25 bp, Homo sapien
ctgaatccgtgatttcagaagctct

SEQ ID NO: 5815900 - DNA, 25 bp, Homo sapien
gggctgtgctgtgctggccccccgg

SEQ ID NO: 5815901 - DNA, 25 bp, Homo sapien
ccttcatgggggcgacctggtggtg

SEQ ID NO: 5815902 - DNA, 25 bp, Homo sapien
agccccggccccagcacccgccagg

SEQ ID NO: 5815903 - DNA, 25 bp, Homo sapien
gatgggacccaagaactttattcat

SEQ ID NO: 5815904 - DNA, 25 bp, Homo sapien
ggatgcagaccataccctttgtgct

SEQ ID NO: 5815905 - DNA, 25 bp, Homo sapien
ctacgcccagatggtgcgtgtgctg

SEQ ID NO: 5815906 - DNA, 25 bp, Homo sapien
ttcgacttctccaagcacccccagg

SEQ ID NO: 5815907 - DNA, 25 bp, Homo sapien
ctccagccgccccggccagcacgag

SEQ ID NO: 5815908 - DNA, 25 bp, Homo sapien
tgcagacagcggtacagtaccggga

SEQ ID NO: 5815909 - DNA, 25 bp, Homo sapien
gccgagggtgccggctacaacgggt

SEQ ID NO: 5815910 - DNA, 25 bp, Homo sapien
agcccctggctacgccaaagtcatc

SEQ ID NO: 5815911 - DNA, 25 bp, Homo sapien
tccccaacctgcttcagcaccggtc

SEQ ID NO: 5815912 - DNA, 25 bp, Homo sapien
acatcccacaaagccgctgccattt

SEQ ID NO: 5815913 - DNA, 25 bp, Homo sapien
agggctgctatgacccgctggagaa

SEQ ID NO: 5815914 - DNA, 25 bp, Homo sapien
gacgagggctgctatgacccgctgg

SEQ ID NO: 5815915 - DNA, 25 bp, Homo sapien
ggagactgctgcccccaggtatcca

SEQ ID NO: 5815916 - DNA, 25 bp, Homo sapien
agggtgccggctacaacgggtggac

SEQ ID NO: 5815917 - DNA, 25 bp, Homo sapien
gcagctgccgagggtgccggctaca

SEQ ID NO: 5815918 - DNA, 25 bp, Homo sapien
gcacgcagcgaccacatccccatcc

SEQ ID NO: 5815919 - DNA, 25 bp, Homo sapien
ctggtggtgtcctaccccttcgact

SEQ ID NO: 5815920 - DNA, 25 bp, Homo sapien
ggagatgctcatctacctagcccag

SEQ ID NO: 5815921 - DNA, 25 bp, Homo sapien
attaaagtgttttgatccacttaaa

SEQ ID NO: 5815922 - DNA, 25 bp, Homo sapien
acagccccagatggtgactactgga

SEQ ID NO: 5815923 - DNA, 25 bp, Homo sapien
gagtgccacatcactgcgctggccg

SEQ ID NO: 5815924 - DNA, 25 bp, Homo sapien
gaactttattcatgggctgcggagg

SEQ ID NO: 5815925 - DNA, 25 bp, Homo sapien
cttcgacgccattgacatggcctgg

SEQ ID NO: 5815926 - DNA, 25 bp, Homo sapien
tctgaaccgaaatttcccggacctg

SEQ ID NO: 5815927 - DNA, 25 bp, Homo sapien
gtcctggtcctcccctgccagaccg

SEQ ID NO: 5815928 - DNA, 25 bp, Homo sapien
cccccgcatccagcgcctgctcaac

SEQ ID NO: 5815929 - DNA, 25 bp, Homo sapien
gccacctgcgtggacctgcagctca

SEQ ID NO: 5815930 - DNA, 25 bp, Homo sapien
ggaaccccgccggtgaatgccacag

SEQ ID NO: 5815931 - DNA, 25 bp, Homo sapien
tttattcatgggctgcggaggactg

SEQ ID NO: 5815932 - DNA, 25 bp, Homo sapien
tgagtacctgcttggtaacccccgc

SEQ ID NO: 5815933 - DNA, 25 bp, Homo sapien
caacattcatggcaacgaggtggcg

SEQ ID NO: 5815934 - DNA, 25 bp, Homo sapien
agctcctggaaggccagtgcaaccc

SEQ ID NO: 5815935 - DNA, 25 bp, Homo sapien
cgagagaggacgagggctgctatga

SEQ ID NO: 5815936 - DNA, 25 bp, Homo sapien
ccccacactgtcagagcactttagg

SEQ ID NO: 5815937 - DNA, 25 bp, Homo sapien
acattgtcattgcccaagcccctgg

SEQ ID NO: 5815938 - DNA, 25 bp, Homo sapien
cagctgcagacagcggtacagtacc

SEQ ID NO: 5815939 - DNA, 25 bp, Homo sapien
ggccactgcgggagggactgacctg

SEQ ID NO: 5815940 - DNA, 25 bp, Homo sapien
cccggacctgacgtccgagtactac

SEQ ID NO: 5815941 - DNA, 25 bp, Homo sapien
gtcggagaataggtgtggaggcaat

SEQ ID NO: 5815942 - DNA, 25 bp, Homo sapien
gctgctcaagtactagccccggccc

SEQ ID NO: 5815943 - DNA, 25 bp, Homo sapien
ctccctgcaggccctggccctgcgt

SEQ ID NO: 5815944 - DNA, 25 bp, Homo sapien
cgcccccgccgccgctgctgctcct

SEQ ID NO: 5815945 - DNA, 25 bp, Homo sapien
aggcagctgaatccgtgatttcaga

SEQ ID NO: 5815946 - DNA, 25 bp, Homo sapien
ctggtacagcttcacgggaggcatg

SEQ ID NO: 5815947 - DNA, 25 bp, Homo sapien
gccccggccagcacgagctgatgga

SEQ ID NO: 5815948 - DNA, 25 bp, Homo sapien
gctgctggtcatcgagttctccagc

SEQ ID NO: 5815949 - DNA, 25 bp, Homo sapien
cccgacgagaagatgttcaagctgc

SEQ ID NO: 5815950 - DNA, 25 bp, Homo sapien
acggtagagctgggctgtgtgaagt

SEQ ID NO: 5815951 - DNA, 25 bp, Homo sapien
agatgttcaagctgctgtccagagc

SEQ ID NO: 5815952 - DNA, 25 bp, Homo sapien
tccgcatcccgggctcctggctctt

SEQ ID NO: 5815953 - DNA, 25 bp, Homo sapien
acgtggccaggacctacagcatcgg

SEQ ID NO: 5815954 - DNA, 25 bp, Homo sapien
atccgtgatttcagaagctctgatt

SEQ ID NO: 5815955 - DNA, 25 bp, Homo sapien
acctccctggcttctgttctgtagg

SEQ ID NO: 5815956 - DNA, 25 bp, Homo sapien
tgaaccgaaatttcccggacctgac

SEQ ID NO: 5815957 - DNA, 25 bp, Homo sapien
ctggggatgggacccaagaacttta

SEQ ID NO: 5815958 - DNA, 25 bp, Homo sapien
ccgccccaccatgccgcccccgccg

SEQ ID NO: 5815959 - DNA, 25 bp, Homo sapien
ggcagggagctgctggtcatcgagt

SEQ ID NO: 5815960 - DNA, 25 bp, Homo sapien
gctgagcacccacaggccacgctgg

SEQ ID NO: 5815961 - DNA, 25 bp, Homo sapien
ctacctagcccagtacctgtgctct

SEQ ID NO: 5815962 - DNA, 25 bp, Homo sapien
agctgaatccgtgatttcagaagct

SEQ ID NO: 5815963 - DNA, 25 bp, Homo sapien
cccgcggcgcacgcagcgaccacat

SEQ ID NO: 5815964 - DNA, 25 bp, Homo sapien
tggacctgcagctcaggacctgcag

SEQ ID NO: 5815965 - DNA, 25 bp, Homo sapien
agtcaaaggcattcgccacgacatc

SEQ ID NO: 5815966 - DNA, 25 bp, Homo sapien
ctccatgaaccctgacggctatgag

SEQ ID NO: 5815967 - DNA, 25 bp, Homo sapien
ggggaggccacggagcccgacccgc

SEQ ID NO: 5815968 - DNA, 25 bp, Homo sapien
ctacaaccacaccaccttccccaac

SEQ ID NO: 5815969 - DNA, 25 bp, Homo sapien
gtcgtgggaggtggtggaggccagc

SEQ ID NO: 5815970 - DNA, 25 bp, Homo sapien
acctctggggatgggacccaagaac

SEQ ID NO: 5815971 - DNA, 25 bp, Homo sapien
tactggagactgctgcccccaggta

SEQ ID NO: 5815972 - DNA, 25 bp, Homo sapien
acggcagggagctgctggtcatcga

SEQ ID NO: 5815973 - DNA, 25 bp, Homo sapien
agatgctcatctacctagcccagta

SEQ ID NO: 5815974 - DNA, 25 bp, Homo sapien
gcccccacactgtcagagcacttta

SEQ ID NO: 5815975 - DNA, 25 bp, Homo sapien
tcaagctgctgtccagagcctacgc

SEQ ID NO: 5815976 - DNA, 25 bp, Homo sapien
gtgaagctcatcggcaacattcatg

SEQ ID NO: 5815977 - DNA, 25 bp, Homo sapien
ccgagtactaccggctggcggagac

SEQ ID NO: 5815978 - DNA, 25 bp, Homo sapien
tgacgtccgagtactaccggctggc

SEQ ID NO: 5815979 - DNA, 25 bp, Homo sapien
catcccccagcactactggtggggt

SEQ ID NO: 5815980 - DNA, 25 bp, Homo sapien
cgggagtaagccctggtggtggtcc

SEQ ID NO: 5815981 - DNA, 25 bp, Homo sapien
gcgcctgctcaacaccacccgcatc

SEQ ID NO: 5815982 - DNA, 25 bp, Homo sapien
agaacgcgcagaacctggatctgaa

SEQ ID NO: 5815983 - DNA, 25 bp, Homo sapien
ctacttcacgagagaggacgagggc

SEQ ID NO: 5815984 - DNA, 25 bp, Homo sapien
agccctggtggtggtcctacttcac

SEQ ID NO: 5815985 - DNA, 25 bp, Homo sapien
tcctggctcttgattttgtcggcca

SEQ ID NO: 5815986 - DNA, 25 bp, Homo sapien
ccaggatgtggagaccgaggcccgt

SEQ ID NO: 5815987 - DNA, 25 bp, Homo sapien
catccccgcccggatgaagagggct

SEQ ID NO: 5815988 - DNA, 25 bp, Homo sapien
tgccggctacaacgggtggacgagc

SEQ ID NO: 5815989 - DNA, 25 bp, Homo sapien
gcacagtagctgttgtcctggtcct

SEQ ID NO: 5815990 - DNA, 25 bp, Homo sapien
attctgcaacctctggggatgggac

SEQ ID NO: 5815991 - DNA, 25 bp, Homo sapien
ggcgacctggtggtgtcctacccct

SEQ ID NO: 5815992 - DNA, 25 bp, Homo sapien
tgtcggccacagacatcccacaaag

SEQ ID NO: 5815993 - DNA, 25 bp, Homo sapien
tattcatgggctgcggaggactggg

SEQ ID NO: 5815994 - DNA, 25 bp, Homo sapien
tgacctgccgaccctgcctccccag

SEQ ID NO: 5815995 - DNA, 25 bp, Homo sapien
gtatccacattgtcattgcccaagc

SEQ ID NO: 5815996 - DNA, 25 bp, Homo sapien
aggaggccctgtacacactctggca

SEQ ID NO: 5815997 - DNA, 25 bp, Homo sapien
agaccctgccggcacatctgcgagg

SEQ ID NO: 5815998 - DNA, 25 bp, Homo sapien
tccccatcccccagcactactggtg

SEQ ID NO: 5815999 - DNA, 25 bp, Homo sapien
tccgccgccccaccatgccgccccc

SEQ ID NO: 5816000 - DNA, 25 bp, Homo sapien
gccggtgaatgccacaggccaccag

SEQ ID NO: 5816001 - DNA, 25 bp, Homo sapien
cacgacccgctgggaggtgccagct

SEQ ID NO: 5816002 - DNA, 25 bp, Homo sapien
cgacccgctgggaggtgccagctct

SEQ ID NO: 5816003 - DNA, 25 bp, Homo sapien
aactacctgcacaccaactgctttg

SEQ ID NO: 5816004 - DNA, 25 bp, Homo sapien
agcccagtacctgtgctctgagtac

SEQ ID NO: 5816005 - DNA, 25 bp, Homo sapien
tgcgctggccgtccaaggtccgccg

SEQ ID NO: 5816006 - DNA, 25 bp, Homo sapien
tcggcaacattcatggcaacgaggt

SEQ ID NO: 5816007 - DNA, 25 bp, Homo sapien
acgtccgagtactaccggctggcgg

SEQ ID NO: 5816008 - DNA, 25 bp, Homo sapien
gccagaccgtgggtgcccctccctg

SEQ ID NO: 5816009 - DNA, 25 bp, Homo sapien
gatgttttctcccacgcccgacgag

SEQ ID NO: 5816010 - DNA, 25 bp, Homo sapien
tgactgccaccgctacttcacgaga

SEQ ID NO: 5816011 - DNA, 25 bp, Homo sapien
agctcatcggcaacattcatggcaa

SEQ ID NO: 5816012 - DNA, 25 bp, Homo sapien
ctgcggaggactgggccccacgacc

SEQ ID NO: 5816013 - DNA, 25 bp, Homo sapien
gtgccacatcactgcgctggccgtc

SEQ ID NO: 5816014 - DNA, 25 bp, Homo sapien
cctgacgtccgagtactaccggctg

SEQ ID NO: 5816015 - DNA, 25 bp, Homo sapien
aaaggcattcgccacgacatcacca

SEQ ID NO: 5816016 - DNA, 25 bp, Homo sapien
tctgattcctgcacagtagctgttg

SEQ ID NO: 5816017 - DNA, 25 bp, Homo sapien
ccgccttcgacgccattgacatggc

SEQ ID NO: 5816018 - DNA, 25 bp, Homo sapien
gcaggccctggccctgcgtggggtc

SEQ ID NO: 5816019 - DNA, 25 bp, Homo sapien
tgtcagagcactttaggcagctgaa

SEQ ID NO: 5816020 - DNA, 25 bp, Homo sapien
cgcccgacgagaagatgttcaagct

SEQ ID NO: 5816021 - DNA, 25 bp, Homo sapien
tctgcaacctctggggatgggaccc

SEQ ID NO: 5816022 - DNA, 25 bp, Homo sapien
caagtactagccccggccccagcac

SEQ ID NO: 5816023 - DNA, 25 bp, Homo sapien
atcaagaaagtcatcatccccgccc

SEQ ID NO: 5816024 - DNA, 25 bp, Homo sapien
aggtctgccagcccgccttcgacgc

SEQ ID NO: 5816025 - DNA, 25 bp, Homo sapien
gaggtggcgggccgggagatgctca

SEQ ID NO: 5816026 - DNA, 25 bp, Homo sapien
aattcggcaagccagtcaaaaacgc

SEQ ID NO: 5816027 - DNA, 25 bp, Homo sapien
tcgacgccattgacatggcctggcc

SEQ ID NO: 5816028 - DNA, 25 bp, Homo sapien
catccagcgcctgctcaacaccacc

SEQ ID NO: 5816029 - DNA, 25 bp, Homo sapien
cggcaagccagtcaaaaacgcccgg

SEQ ID NO: 5816030 - DNA, 25 bp, Homo sapien
tactagccccggccccagcacccgc

SEQ ID NO: 5816031 - DNA, 25 bp, Homo sapien
gagacaaaggcaatcatgaagtgga

SEQ ID NO: 5816032 - DNA, 25 bp, Homo sapien
cccgcccggatgaagagggctggcc

SEQ ID NO: 5816033 - DNA, 25 bp, Homo sapien
tgcagcccccacactgtcagagcac

SEQ ID NO: 5816034 - DNA, 25 bp, Homo sapien
ctgtaggagggctgcagcccccaca

SEQ ID NO: 5816035 - DNA, 25 bp, Homo sapien
cccgtctccgcatcccgggctcctg

SEQ ID NO: 5816036 - DNA, 25 bp, Homo sapien
atcatgaagtggatgcagaccatac

SEQ ID NO: 5816037 - DNA, 25 bp, Homo sapien
gacgagcgggaggcagaacgcgcag

SEQ ID NO: 5816038 - DNA, 25 bp, Homo sapien
tgcgggaggtctgccagcccgcctt

SEQ ID NO: 5816039 - DNA, 25 bp, Homo sapien
gacttcaactacctgcacaccaact

SEQ ID NO: 5816040 - DNA, 25 bp, Homo sapien
ccctgcaggccctggccctgcgtgg

SEQ ID NO: 5816041 - DNA, 25 bp, Homo sapien
catctgcgagggcctgcgggaggtc

SEQ ID NO: 5816042 - DNA, 25 bp, Homo sapien
gctggccccccggtgtgagggcggc

SEQ ID NO: 5816043 - DNA, 25 bp, Homo sapien
agggactgacctgccgaccctgcct

SEQ ID NO: 5816044 - DNA, 25 bp, Homo sapien
ccgccgctgctgctccttacagtcc

SEQ ID NO: 5816045 - DNA, 25 bp, Homo sapien
gtgtgagggcggctgggtgcgcaga

SEQ ID NO: 5816046 - DNA, 25 bp, Homo sapien
acacactctggcagcacaacaagga

SEQ ID NO: 5816047 - DNA, 25 bp, Homo sapien
ccgggctcctggctcttgattttgt

SEQ ID NO: 5816048 - DNA, 25 bp, Homo sapien
cacctgcgtggacctgcagctcagg

SEQ ID NO: 5816049 - DNA, 25 bp, Homo sapien
gaatgccacaggccaccagctgcag

SEQ ID NO: 5816050 - DNA, 25 bp, Homo sapien
catgggctgcggaggactgggcccc

SEQ ID NO: 5816051 - DNA, 25 bp, Homo sapien
acctgccgaccctgcctccccagcc

SEQ ID NO: 5816052 - DNA, 25 bp, Homo sapien
ccagcacccgccaggatgtggagac

SEQ ID NO: 5816053 - DNA, 25 bp, Homo sapien
cgggaggcagaacgcgcagaacctg

SEQ ID NO: 5816054 - DNA, 25 bp, Homo sapien
gcggaggactgggccccacgacccg

SEQ ID NO: 5816055 - DNA, 25 bp, Homo sapien
gctgcagacagcggtacagtaccgg

SEQ ID NO: 5816056 - DNA, 25 bp, Homo sapien
ggcttctgttctgtaggagggctgc

SEQ ID NO: 5816057 - DNA, 25 bp, Homo sapien
gatgaagagggctggccgtgtggac

SEQ ID NO: 5816058 - DNA, 25 bp, Homo sapien
tacgctgacgtccaccccatgatga

SEQ ID NO: 5816059 - DNA, 25 bp, Homo sapien
agcactttaggcagctgaatccgtg

SEQ ID NO: 5816060 - DNA, 25 bp, Homo sapien
tcccgggctcctggctcttgatttt

SEQ ID NO: 5816061 - DNA, 25 bp, Homo sapien
gcgcaggcagccctcggccgacggg

SEQ ID NO: 5816062 - DNA, 25 bp, Homo sapien
cattttattaaagtgttttgatcca

SEQ ID NO: 5816063 - DNA, 25 bp, Homo sapien
cggcgcacgcagcgaccacatcccc

SEQ ID NO: 5816064 - DNA, 25 bp, Homo sapien
gagggctgcagcccccacactgtca

SEQ ID NO: 5816065 - DNA, 25 bp, Homo sapien
tgctgcccccaggtatccacattgt

SEQ ID NO: 5816066 - DNA, 25 bp, Homo sapien
catcccgggctcctggctcttgatt

SEQ ID NO: 5816067 - DNA, 25 bp, Homo sapien
cccgctccgggcgcgcaggcagccc

SEQ ID NO: 5816068 - DNA, 25 bp, Homo sapien
ccggccccagcacccgccaggatgt

SEQ ID NO: 5816069 - DNA, 25 bp, Homo sapien
gccttcgacgccattgacatggcct

SEQ ID NO: 5816070 - DNA, 25 bp, Homo sapien
ctgctgctccttacagtcctggtcg

SEQ ID NO: 5816071 - DNA, 25 bp, Homo sapien
ctctggggatgggacccaagaactt

SEQ ID NO: 5816072 - DNA, 25 bp, Homo sapien
gccagcccgccttcgacgccattga

SEQ ID NO: 5816073 - DNA, 25 bp, Homo sapien
cagcccgccttcgacgccattgaca

SEQ ID NO: 5816074 - DNA, 25 bp, Homo sapien
ttctccagccgccccggccagcacg

SEQ ID NO: 5816075 - DNA, 25 bp, Homo sapien
gggcgcgcaggcagccctcggccga

SEQ ID NO: 5816076 - DNA, 25 bp, Homo sapien
acattcatggcaacgaggtggcggg

SEQ ID NO: 5816077 - DNA, 25 bp, Homo sapien
gtgctctgagtacctgcttggtaac

SEQ ID NO: 5816078 - DNA, 25 bp, Homo sapien
caagcccctggctacgccaaagtca

SEQ ID NO: 5816079 - DNA, 25 bp, Homo sapien
gtacatcctgctgagcgttctacac

SEQ ID NO: 5816080 - DNA, 25 bp, Homo sapien
gggctgcagcccccacactgtcaga

SEQ ID NO: 5816081 - DNA, 25 bp, Homo sapien
accctgcctccccagccacctgcgt

SEQ ID NO: 5816082 - DNA, 25 bp, Homo sapien
cgagcgggaggcagaacgcgcagaa

SEQ ID NO: 5816083 - DNA, 25 bp, Homo sapien
atctacctagcccagtacctgtgct

SEQ ID NO: 5816084 - DNA, 25 bp, Homo sapien
gaccgaggcccgtctccgcatcccg

SEQ ID NO: 5816085 - DNA, 25 bp, Homo sapien
aagtggatgcagaccataccctttg

SEQ ID NO: 5816086 - DNA, 25 bp, Homo sapien
ccaggaggagaagatgttttctccc

SEQ ID NO: 5816087 - DNA, 25 bp, Homo sapien
gcattcgccacgacatcaccacagc

SEQ ID NO: 5816088 - DNA, 25 bp, Homo sapien
gtaccgggacctccctggcttctgt

SEQ ID NO: 5816089 - DNA, 25 bp, Homo sapien
actgctttgagatcacggtagagct

SEQ ID NO: 5816090 - DNA, 25 bp, Homo sapien
atcaaaggtgtggtgacagataaat

SEQ ID NO: 5816091 - DNA, 25 bp, Homo sapien
agtactagccccggccccagcaccc

SEQ ID NO: 5816092 - DNA, 25 bp, Homo sapien
ggggtcccctacgtaaatgtctgac

SEQ ID NO: 5816093 - DNA, 25 bp, Homo sapien
caggccacgctggctgctcaagtac

SEQ ID NO: 5816094 - DNA, 25 bp, Homo sapien
agcgagcgcagagccccggccccgc

SEQ ID NO: 5816095 - DNA, 25 bp, Homo sapien
ggcacatctgcgagggcctgcggga

SEQ ID NO: 5816096 - DNA, 25 bp, Homo sapien
ggcaacgaggtggcgggccgggaga

SEQ ID NO: 5816097 - DNA, 25 bp, Homo sapien
ctccctggcttctgttctgtaggag

SEQ ID NO: 5816098 - DNA, 25 bp, Homo sapien
ggcggactggtacagcttcacggga

SEQ ID NO: 5816099 - DNA, 25 bp, Homo sapien
caacggggcggactggtacagcttc

SEQ ID NO: 5816100 - DNA, 25 bp, Homo sapien
tggcgggccgggagatgctcatcta

SEQ ID NO: 5816101 - DNA, 25 bp, Homo sapien
gcagcacaacaaggagtcactcctg

SEQ ID NO: 5816102 - DNA, 25 bp, Homo sapien
attgcccaagcccctggctacgcca

SEQ ID NO: 5816103 - DNA, 25 bp, Homo sapien
cagccaccactcctacgcccagatg

SEQ ID NO: 5816104 - DNA, 25 bp, Homo sapien
gaggtggcagctgccgagggtgccg

SEQ ID NO: 5816105 - DNA, 25 bp, Homo sapien
aagccagtcaaaaacgcccggatct

SEQ ID NO: 5816106 - DNA, 25 bp, Homo sapien
tgcgtgtgctgaggcggatggcctc

SEQ ID NO: 5816107 - DNA, 25 bp, Homo sapien
gctgctgtccagagcctacgctgac

SEQ ID NO: 5816108 - DNA, 25 bp, Homo sapien
atcccacaaagccgctgccatttta

SEQ ID NO: 5816109 - DNA, 25 bp, Homo sapien
tcacggtcagggccactgcgggagg

SEQ ID NO: 5816110 - DNA, 25 bp, Homo sapien
tacttccttgactgccaccgctact

SEQ ID NO: 5816111 - DNA, 25 bp, Homo sapien
cctgcggctgctgggctgtgctgtg

SEQ ID NO: 5816112 - DNA, 25 bp, Homo sapien
ggccgacgggagtaagccctggtgg

SEQ ID NO: 5816113 - DNA, 25 bp, Homo sapien
ctgtgctctgagtacctgcttggta

SEQ ID NO: 5816114 - DNA, 25 bp, Homo sapien
cctggccctacttccttgactgcca

SEQ ID NO: 5816115 - DNA, 25 bp, Homo sapien
cagtcaaaaacgcccggatctcagt

SEQ ID NO: 5816116 - DNA, 25 bp, Homo sapien
tcaacaccacccgcatccacctgct

SEQ ID NO: 5816117 - DNA, 25 bp, Homo sapien
gcagaacgcgcagaacctggatctg

SEQ ID NO: 5816118 - DNA, 25 bp, Homo sapien
agtaagccctggtggtggtcctact

SEQ ID NO: 5816119 - DNA, 25 bp, Homo sapien
tgcagctcaggacctgcagcgatgc

SEQ ID NO: 5816120 - DNA, 25 bp, Homo sapien
ggtagagctgggctgtgtgaagttc

SEQ ID NO: 5816121 - DNA, 25 bp, Homo sapien
gctggctgctcaagtactagccccg

SEQ ID NO: 5816122 - DNA, 25 bp, Homo sapien
tgggggcgacctggtggtgtcctac

SEQ ID NO: 5816123 - DNA, 25 bp, Homo sapien
ctgcacagtagctgttgtcctggtc

SEQ ID NO: 5816124 - DNA, 25 bp, Homo sapien
accttcatccgcttcagccaccact

SEQ ID NO: 5816125 - DNA, 25 bp, Homo sapien
cggcccgagtgccacatcactgcgc

SEQ ID NO: 5816126 - DNA, 25 bp, Homo sapien
attgtcattgcccaagcccctggct

SEQ ID NO: 5816127 - DNA, 25 bp, Homo sapien
ctcccgctgcgcccacgtggccagg

SEQ ID NO: 5816128 - DNA, 25 bp, Homo sapien
acaggtcggagaataggtgtggagg

SEQ ID NO: 5816129 - DNA, 25 bp, Homo sapien
ccactgcgggagggactgacctgcc

SEQ ID NO: 5816130 - DNA, 25 bp, Homo sapien
ctgtacacactctggcagcacaaca

SEQ ID NO: 5816131 - DNA, 25 bp, Homo sapien
tacagtaccgggacctccctggctt

SEQ ID NO: 5816132 - DNA, 25 bp, Homo sapien
cctggaaggccagtgcaacccggac

SEQ ID NO: 5816133 - DNA, 25 bp, Homo sapien
gaaatttcccggacctgacgtccga

SEQ ID NO: 5816134 - DNA, 25 bp, Homo sapien
tcctggtcgtcgccgctgcccggcc

SEQ ID NO: 5816135 - DNA, 25 bp, Homo sapien
atgcagaccataccctttgtgctct

SEQ ID NO: 5816136 - DNA, 25 bp, Homo sapien
ccctccctgcaggccctggccctgc

SEQ ID NO: 5816137 - DNA, 25 bp, Homo sapien
ctttgtgctctcagccagccttcat

SEQ ID NO: 5816138 - DNA, 25 bp, Homo sapien
gccgcccccgccgccgctgctgctc

SEQ ID NO: 5816139 - DNA, 25 bp, Homo sapien
gagacggtgcaccggggcatcaaag

SEQ ID NO: 5816140 - DNA, 25 bp, Homo sapien
ccagccgccccggccagcacgagct

SEQ ID NO: 5816141 - DNA, 25 bp, Homo sapien
taccccttcgacttctccaagcacc

SEQ ID NO: 5816142 - DNA, 25 bp, Homo sapien
agcacccacaggccacgctggctgc

SEQ ID NO: 5816143 - DNA, 25 bp, Homo sapien
ggacctccctggcttctgttctgta

SEQ ID NO: 5816144 - DNA, 25 bp, Homo sapien
acaccaactgctttgagatcacggt

SEQ ID NO: 5816145 - DNA, 25 bp, Homo sapien
gtaggagggctgcagcccccacact

SEQ ID NO: 5816146 - DNA, 25 bp, Homo sapien
tctcagccagccttcatgggggcga

SEQ ID NO: 5816147 - DNA, 25 bp, Homo sapien
cccgaggaggccctgtacacactct

SEQ ID NO: 5816148 - DNA, 25 bp, Homo sapien
gccacgacatcaccacagccccaga

SEQ ID NO: 5816149 - DNA, 25 bp, Homo sapien
acactctggcagcacaacaaggagt

SEQ ID NO: 5816150 - DNA, 25 bp, Homo sapien
cagataaattcggcaagccagtcaa

SEQ ID NO: 5816151 - DNA, 25 bp, Homo sapien
tggccctgcgtggggtcccctacgt

SEQ ID NO: 5816152 - DNA, 25 bp, Homo sapien
aaggtggccccggagacaaaggcaa

SEQ ID NO: 5816153 - DNA, 25 bp, Homo sapien
gcccctccctgcaggccctggccct

SEQ ID NO: 5816154 - DNA, 25 bp, Homo sapien
tgcccggccggggtgcgagtttgag

SEQ ID NO: 5816155 - DNA, 25 bp, Homo sapien
cggccggggtgcgagtttgagcgga

SEQ ID NO: 5816156 - DNA, 25 bp, Homo sapien
ccatgccgcccccgccgccgctgct

SEQ ID NO: 5816157 - DNA, 25 bp, Homo sapien
taagccctggtggtggtcctacttc

SEQ ID NO: 5816158 - DNA, 25 bp, Homo sapien
ccactcctacgcccagatggtgcgt

SEQ ID NO: 5816159 - DNA, 25 bp, Homo sapien
ggcggagacccgcggcgcacgcagc

SEQ ID NO: 5816160 - DNA, 25 bp, Homo sapien
tctggcagcacaacaaggagtcact

SEQ ID NO: 5816161 - DNA, 25 bp, Homo sapien
tgttttctcccacgcccgacgagaa

SEQ ID NO: 5816162 - DNA, 25 bp, Homo sapien
actgacctgccgaccctgcctcccc

SEQ ID NO: 5816163 - DNA, 25 bp, Homo sapien
ggtgtggtgacagataaattcggca

SEQ ID NO: 5816164 - DNA, 25 bp, Homo sapien
caccccatgatgatggacaggtcgg

SEQ ID NO: 5816165 - DNA, 25 bp, Homo sapien
cgagcgcagagccccggccccgcgc

SEQ ID NO: 5816166 - DNA, 25 bp, Homo sapien
cggccagcacgagctgatggagccc

SEQ ID NO: 5816167 - DNA, 25 bp, Homo sapien
accggtcgtgggaggtggtggaggc

SEQ ID NO: 5816168 - DNA, 25 bp, Homo sapien
agtagctgttgtcctggtcctcccc

SEQ ID NO: 5816169 - DNA, 25 bp, Homo sapien
acttcacatcgctgagcacccacag

SEQ ID NO: 5816170 - DNA, 25 bp, Homo sapien
gtcctcccctgccagaccgtgggtg

SEQ ID NO: 5816171 - DNA, 25 bp, Homo sapien
ctcctggaaggccagtgcaacccgg

SEQ ID NO: 5816172 - DNA, 25 bp, Homo sapien
acggggcggactggtacagcttcac

SEQ ID NO: 5816173 - DNA, 25 bp, Homo sapien
cggggcatcaaaggtgtggtgacag

SEQ ID NO: 5816174 - DNA, 25 bp, Homo sapien
aacccggacctgcggctgctgggct

SEQ ID NO: 5816175 - DNA, 25 bp, Homo sapien
ctccttacagtcctggtcgtcgccg

SEQ ID NO: 5816176 - DNA, 25 bp, Homo sapien
tcagaagctctgattcctgcacagt

SEQ ID NO: 5816177 - DNA, 25 bp, Homo sapien
acctgctgccctccatgaaccctga

SEQ ID NO: 5816178 - DNA, 25 bp, Homo sapien
cccgcgcggcccgagtgccacatca

SEQ ID NO: 5816179 - DNA, 25 bp, Homo sapien
aggaggagaagatgttttctcccac

SEQ ID NO: 5816180 - DNA, 25 bp, Homo sapien
gcacccccaggaggagaagatgttt

SEQ ID NO: 5816181 - DNA, 25 bp, Homo sapien
tagagctgggctgtgtgaagttccc

SEQ ID NO: 5816182 - DNA, 25 bp, Homo sapien
ccctcagggctgccgcccaccttca

SEQ ID NO: 5816183 - DNA, 25 bp, Homo sapien
tcatccgcttcagccaccactccta

SEQ ID NO: 5816184 - DNA, 25 bp, Homo sapien
ctgagcgttctacaccagctcctgg

SEQ ID NO: 5816185 - DNA, 25 bp, Homo sapien
cgagggtgccggctacaacgggtgg

SEQ ID NO: 5816186 - DNA, 25 bp, Homo sapien
ggccaccagctgcagacagcggtac

SEQ ID NO: 5816187 - DNA, 25 bp, Homo sapien
ggagtaagccctggtggtggtccta

SEQ ID NO: 5816188 - DNA, 25 bp, Homo sapien
acgaggtggcgggccgggagatgct

SEQ ID NO: 5816189 - DNA, 25 bp, Homo sapien
ggctggcggagacccgcggcgcacg

SEQ ID NO: 5816190 - DNA, 25 bp, Homo sapien
ccggctggcggagacccgcggcgca

SEQ ID NO: 5816191 - DNA, 25 bp, Homo sapien
aggccctggccctgcgtggggtccc

SEQ ID NO: 5816192 - DNA, 25 bp, Homo sapien
ttacagtcctggtcgtcgccgctgc

SEQ ID NO: 5816193 - DNA, 25 bp, Homo sapien
ggagggactgacctgccgaccctgc

SEQ ID NO: 5816194 - DNA, 25 bp, Homo sapien
cccggatctcagtcaaaggcattcg

SEQ ID NO: 5816195 - DNA, 25 bp, Homo sapien
cgggaggcatgtccgacttcaacta

SEQ ID NO: 5816196 - DNA, 25 bp, Homo sapien
aaagtcatcaagaaagtcatcatcc

SEQ ID NO: 5816197 - DNA, 25 bp, Homo sapien
cgctgctgctccttacagtcctggt

SEQ ID NO: 5816198 - DNA, 25 bp, Homo sapien
tggacttcattctgcaacctctggg

SEQ ID NO: 5816199 - DNA, 25 bp, Homo sapien
gacgccattgacatggcctggccct

SEQ ID NO: 5816200 - DNA, 25 bp, Homo sapien
atggcctggccctacttccttgact

SEQ ID NO: 5816201 - DNA, 25 bp, Homo sapien
tgtgctgtgctggccccccggtgtg

SEQ ID NO: 5816202 - DNA, 25 bp, Homo sapien
ccgctgcccggccggggtgcgagtt

SEQ ID NO: 5816203 - DNA, 25 bp, Homo sapien
tggtaacccccgcatccagcgcctg

SEQ ID NO: 5816204 - DNA, 25 bp, Homo sapien
tgcggctgctgggctgtgctgtgct

SEQ ID NO: 5816205 - DNA, 25 bp, Homo sapien
cagcatcgggcgcagcttcgacggc

SEQ ID NO: 5816206 - DNA, 25 bp, Homo sapien
cacccgccaggatgtggagaccgag

SEQ ID NO: 5816207 - DNA, 25 bp, Homo sapien
ccttcgacttctccaagcaccccca

SEQ ID NO: 5816208 - DNA, 25 bp, Homo sapien
ctgcaggccctggccctgcgtgggg

SEQ ID NO: 5816209 - DNA, 25 bp, Homo sapien
agagggggagcatcatcaacggggc

SEQ ID NO: 5816210 - DNA, 25 bp, Homo sapien
cctgcgtggacctgcagctcaggac

SEQ ID NO: 5816211 - DNA, 25 bp, Homo sapien
ctgccagcccgccttcgacgccatt

SEQ ID NO: 5816212 - DNA, 25 bp, Homo sapien
agccagccttcatgggggcgacctg

SEQ ID NO: 5816213 - DNA, 25 bp, Homo sapien
cagcccccacactgtcagagcactt

SEQ ID NO: 5816214 - DNA, 25 bp, Homo sapien
gccacaggccaccagctgcagacag

SEQ ID NO: 5816215 - DNA, 25 bp, Homo sapien
tggagaccgaggcccgtctccgcat

SEQ ID NO: 5816216 - DNA, 25 bp, Homo sapien
ttcggggaggcctggaggctgacga

SEQ ID NO: 5816217 - DNA, 25 bp, Homo sapien
gacctgcagctcaggacctgcagcg

SEQ ID NO: 5816218 - DNA, 25 bp, Homo sapien
aggtcggagaataggtgtggaggca

SEQ ID NO: 5816219 - DNA, 25 bp, Homo sapien
aagctgctgtccagagcctacgctg

SEQ ID NO: 5816220 - DNA, 25 bp, Homo sapien
ctagcccagtacctgtgctctgagt

SEQ ID NO: 5816221 - DNA, 25 bp, Homo sapien
aggtggtggaggccagctccgagta

SEQ ID NO: 5816222 - DNA, 25 bp, Homo sapien
gcaccggtcgtgggaggtggtggag

SEQ ID NO: 5816223 - DNA, 25 bp, Homo sapien
agtcatcaagaaagtcatcatcccc

SEQ ID NO: 5816224 - DNA, 25 bp, Homo sapien
accctgacggctatgaggtggcagc

SEQ ID NO: 5816225 - DNA, 25 bp, Homo sapien
accttccccaacctgcttcagcacc

SEQ ID NO: 5816226 - DNA, 25 bp, Homo sapien
atgaaccctgacggctatgaggtgg

SEQ ID NO: 5816227 - DNA, 25 bp, Homo sapien
cctcccctgccagaccgtgggtgcc

SEQ ID NO: 5816228 - DNA, 25 bp, Homo sapien
tgctttgagatcacggtagagctgg

SEQ ID NO: 5816229 - DNA, 25 bp, Homo sapien
cccaagcccctggctacgccaaagt

SEQ ID NO: 5816230 - DNA, 25 bp, Homo sapien
gccccccggtgtgagggcggctggg

SEQ ID NO: 5816231 - DNA, 25 bp, Homo sapien
gcttcacgggaggcatgtccgactt

SEQ ID NO: 5816232 - DNA, 25 bp, Homo sapien
cgggcgcagcttcgacggcagggag

SEQ ID NO: 5816233 - DNA, 25 bp, Homo sapien
tggccgtgtggacttcattctgcaa

SEQ ID NO: 5816234 - DNA, 25 bp, Homo sapien
gctgggaggtgccagctctttgggg

SEQ ID NO: 5816235 - DNA, 25 bp, Homo sapien
ggtgcgtgtgctgaggcggatggcc

SEQ ID NO: 5816236 - DNA, 25 bp, Homo sapien
ttcagccaccactcctacgcccaga

SEQ ID NO: 5816237 - DNA, 25 bp, Homo sapien
cgccgccgctgctgctccttacagt

SEQ ID NO: 5816238 - DNA, 25 bp, Homo sapien
ttcacatcgctgagcacccacaggc

SEQ ID NO: 5816239 - DNA, 25 bp, Homo sapien
actaccggctggcggagacccgcgg

SEQ ID NO: 5816240 - DNA, 25 bp, Homo sapien
cgaccctgcctccccagccacctgc

SEQ ID NO: 5816241 - DNA, 25 bp, Homo sapien
gaatttcgtggagacggtgcaccgg

SEQ ID NO: 5816242 - DNA, 25 bp, Homo sapien
ctggccgtccaaggtccgccgcccc

SEQ ID NO: 5816243 - DNA, 25 bp, Homo sapien
ctcttgattttgtcggccacagaca

SEQ ID NO: 5816244 - DNA, 25 bp, Homo sapien
aatttcctgaagagggggagcatca

SEQ ID NO: 5816245 - DNA, 25 bp, Homo sapien
tgtcattgcccaagcccctggctac

SEQ ID NO: 5816246 - DNA, 25 bp, Homo sapien
ctgccgagggtgccggctacaacgg

SEQ ID NO: 5816247 - DNA, 25 bp, Homo sapien
agagaggacgagggctgctatgacc

SEQ ID NO: 5816248 - DNA, 25 bp, Homo sapien
gccgaccctgcctccccagccacct

SEQ ID NO: 5816249 - DNA, 25 bp, Homo sapien
ccctttgtgctctcagccagccttc

SEQ ID NO: 5816250 - DNA, 25 bp, Homo sapien
ctgctcaacaccacccgcatccacc

SEQ ID NO: 5816251 - DNA, 25 bp, Homo sapien
gccacatcactgcgctggccgtcca

SEQ ID NO: 5816252 - DNA, 25 bp, Homo sapien
gtactaccggctggcggagacccgc

SEQ ID NO: 5816253 - DNA, 25 bp, Homo sapien
ccatgaaccctgacggctatgaggt

SEQ ID NO: 5816254 - DNA, 25 bp, Homo sapien
tctccgcatcccgggctcctggctc

SEQ ID NO: 5816255 - DNA, 25 bp, Homo sapien
acgcccagatggtgcgtgtgctgag

SEQ ID NO: 5816256 - DNA, 25 bp, Homo sapien
tggaggctgacgaggcactgccctc

SEQ ID NO: 5816257 - DNA, 25 bp, Homo sapien
gtccgagtactaccggctggcggag

SEQ ID NO: 5816258 - DNA, 25 bp, Homo sapien
tgcaacctctggggatgggacccaa

SEQ ID NO: 5816259 - DNA, 25 bp, Homo sapien
cagcgcctgctcaacaccacccgca

SEQ ID NO: 5816260 - DNA, 25 bp, Homo sapien
ggagaagatgttttctcccacgccc

SEQ ID NO: 5816261 - DNA, 25 bp, Homo sapien
gaggccctgtacacactctggcagc

SEQ ID NO: 5816262 - DNA, 25 bp, Homo sapien
gtacacactctggcagcacaacaag

SEQ ID NO: 5816263 - DNA, 25 bp, Homo sapien
cgcagaacctggatctgaaccgaaa

SEQ ID NO: 5816264 - DNA, 25 bp, Homo sapien
aggagggctgcagcccccacactgt

SEQ ID NO: 5816265 - DNA, 25 bp, Homo sapien
ggagcatcatcaacggggcggactg

SEQ ID NO: 5816266 - DNA, 25 bp, Homo sapien
tcatctacctagcccagtacctgtg

SEQ ID NO: 5816267 - DNA, 25 bp, Homo sapien
gacctgcagcgatgccgcctacaac

SEQ ID NO: 5816268 - DNA, 25 bp, Homo sapien
atcaacggggcggactggtacagct

SEQ ID NO: 5816269 - DNA, 25 bp, Homo sapien
ggtccgccgccccaccatgccgccc

SEQ ID NO: 5816270 - DNA, 25 bp, Homo sapien
caaaaacgcccggatctcagtcaaa

SEQ ID NO: 5816271 - DNA, 25 bp, Homo sapien
aggtgtggaggcaatttcctgaaga

SEQ ID NO: 5816272 - DNA, 25 bp, Homo sapien
ggaggcagaacgcgcagaacctgga

SEQ ID NO: 5816273 - DNA, 25 bp, Homo sapien
gctcatctacctagcccagtacctg

SEQ ID NO: 5816274 - DNA, 25 bp, Homo sapien
aaatgtctgacgcgtcacggtcagg

SEQ ID NO: 5816275 - DNA, 25 bp, Homo sapien
ttcccggacctgacgtccgagtact

SEQ ID NO: 5816276 - DNA, 25 bp, Homo sapien
ggccacgctggctgctcaagtacta

SEQ ID NO: 5816277 - DNA, 25 bp, Homo sapien
ggtcagggccactgcgggagggact

SEQ ID NO: 5816278 - DNA, 25 bp, Homo sapien
gcagaccataccctttgtgctctca

SEQ ID NO: 5816279 - DNA, 25 bp, Homo sapien
caaagccgctgccattttattaaag

SEQ ID NO: 5816280 - DNA, 25 bp, Homo sapien
gggcggctgggtgcgcagaccctgc

SEQ ID NO: 5816281 - DNA, 25 bp, Homo sapien
gaagctcatcggcaacattcatggc

SEQ ID NO: 5816282 - DNA, 25 bp, Homo sapien
ctgctatgacccgctggagaagctt

SEQ ID NO: 5816283 - DNA, 25 bp, Homo sapien
ctgccattttattaaagtgttttga

SEQ ID NO: 5816284 - DNA, 25 bp, Homo sapien
atgtctgacgcgtcacggtcagggc

SEQ ID NO: 5816285 - DNA, 25 bp, Homo sapien
agctccgagtacatcctgctgagcg

SEQ ID NO: 5816286 - DNA, 25 bp, Homo sapien
tggcagcacaacaaggagtcactcc

SEQ ID NO: 5816287 - DNA, 25 bp, Homo sapien
ccacagacatcccacaaagccgctg

SEQ ID NO: 5816288 - DNA, 25 bp, Homo sapien
ccgtgggtgcccctccctgcaggcc

SEQ ID NO: 5816289 - DNA, 25 bp, Homo sapien
ccacattgtcattgcccaagcccct

SEQ ID NO: 5816290 - DNA, 25 bp, Homo sapien
ggctgctatgacccgctggagaagc

SEQ ID NO: 5816291 - DNA, 25 bp, Homo sapien
ccggctacaacgggtggacgagcgg

SEQ ID NO: 5816292 - DNA, 25 bp, Homo sapien
accacaccaccttccccaacctgct

SEQ ID NO: 5816293 - DNA, 25 bp, Homo sapien
ggatctgaaccgaaatttcccggac

SEQ ID NO: 5816294 - DNA, 25 bp, Homo sapien
cttctgttctgtaggagggctgcag

SEQ ID NO: 5816295 - DNA, 25 bp, Homo sapien
ggggagcatcatcaacggggcggac

SEQ ID NO: 5816296 - DNA, 25 bp, Homo sapien
agctgccgagggtgccggctacaac

SEQ ID NO: 5816297 - DNA, 25 bp, Homo sapien
gcccccaggtatccacattgtcatt

SEQ ID NO: 5816298 - DNA, 25 bp, Homo sapien
cagcgatgccgcctacaaccacacc

SEQ ID NO: 5816299 - DNA, 25 bp, Homo sapien
acttcacgagagaggacgagggctg

SEQ ID NO: 5816300 - DNA, 25 bp, Homo sapien
ccaccgctacttcacgagagaggac

SEQ ID NO: 5816301 - DNA, 25 bp, Homo sapien
cttcaactacctgcacaccaactgc

SEQ ID NO: 5816302 - DNA, 25 bp, Homo sapien
aggcattcgccacgacatcaccaca

SEQ ID NO: 5816303 - DNA, 25 bp, Homo sapien
tcgctgagcacccacaggccacgct

SEQ ID NO: 5816304 - DNA, 25 bp, Homo sapien
attcctgcacagtagctgttgtcct

SEQ ID NO: 5816305 - DNA, 25 bp, Homo sapien
gatcacggtagagctgggctgtgtg

SEQ ID NO: 5816306 - DNA, 25 bp, Homo sapien
cctacgctgacgtccaccccatgat

SEQ ID NO: 5816307 - DNA, 25 bp, Homo sapien
cataccctttgtgctctcagccagc

SEQ ID NO: 5816308 - DNA, 25 bp, Homo sapien
ctacttcacatcgctgagcacccac

SEQ ID NO: 5816309 - DNA, 25 bp, Homo sapien
gatgatggacaggtcggagaatagg

SEQ ID NO: 5816310 - DNA, 25 bp, Homo sapien
aagatgttttctcccacgcccgacg

SEQ ID NO: 5816311 - DNA, 25 bp, Homo sapien
agcgcagagccccggccccgcgcgg

SEQ ID NO: 5816312 - DNA, 25 bp, Homo sapien
ctgacgaggcactgccctcagggct

SEQ ID NO: 5816313 - DNA, 25 bp, Homo sapien
cgccattgacatggcctggccctac

SEQ ID NO: 5816314 - DNA, 25 bp, Homo sapien
ggccacagacatcccacaaagccgc

SEQ ID NO: 5816315 - DNA, 25 bp, Homo sapien
caccactcctacgcccagatggtgc

SEQ ID NO: 5816316 - DNA, 25 bp, Homo sapien
gccagtcaaaaacgcccggatctca

SEQ ID NO: 5816317 - DNA, 25 bp, Homo sapien
tgattcctgcacagtagctgttgtc

SEQ ID NO: 5816318 - DNA, 25 bp, Homo sapien
gacgaggcactgccctcagggctgc

SEQ ID NO: 5816319 - DNA, 25 bp, Homo sapien
cacatcgctgagcacccacaggcca

SEQ ID NO: 5816320 - DNA, 25 bp, Homo sapien
tcactgcgctggccgtccaaggtcc

SEQ ID NO: 5816321 - DNA, 25 bp, Homo sapien
gccgggagatgctcatctacctagc

SEQ ID NO: 5816322 - DNA, 25 bp, Homo sapien
tggaaggccagtgcaacccggacct

SEQ ID NO: 5816323 - DNA, 25 bp, Homo sapien
ccttacagtcctggtcgtcgccgct

SEQ ID NO: 5816324 - DNA, 25 bp, Homo sapien
tcctacttcacatcgctgagcaccc

SEQ ID NO: 5816325 - DNA, 25 bp, Homo sapien
cttccttgactgccaccgctacttc

SEQ ID NO: 5816326 - DNA, 25 bp, Homo sapien
cgtgtggacttcattctgcaacctc

SEQ ID NO: 5816327 - DNA, 25 bp, Homo sapien
cagtaccgggacctccctggcttct

SEQ ID NO: 5816328 - DNA, 25 bp, Homo sapien
gggagctgctggtcatcgagttctc

SEQ ID NO: 5816329 - DNA, 25 bp, Homo sapien
ctcccacgcccgacgagaagatgtt

SEQ ID NO: 5816330 - DNA, 25 bp, Homo sapien
gacctacagcatcgggcgcagcttc

SEQ ID NO: 5816331 - DNA, 25 bp, Homo sapien
tacagcatcgggcgcagcttcgacg

SEQ ID NO: 5816332 - DNA, 25 bp, Homo sapien
ggacccaagaactttattcatgggc

SEQ ID NO: 5816333 - DNA, 25 bp, Homo sapien
gagcggaaccccgccggtgaatgcc

SEQ ID NO: 5816334 - DNA, 25 bp, Homo sapien
aggcactgccctcagggctgccgcc

SEQ ID NO: 5816335 - DNA, 25 bp, Homo sapien
cggccccgcgcggcccgagtgccac

SEQ ID NO: 5816336 - DNA, 25 bp, Homo sapien
cggagacccgcggcgcacgcagcga

SEQ ID NO: 5816337 - DNA, 25 bp, Homo sapien
acctagcccagtacctgtgctctga

SEQ ID NO: 5816338 - DNA, 25 bp, Homo sapien
tctgttctgtaggagggctgcagcc

SEQ ID NO: 5816339 - DNA, 25 bp, Homo sapien
cctgcgggaggtctgccagcccgcc

SEQ ID NO: 5816340 - DNA, 25 bp, Homo sapien
gtggggtcccctacgtaaatgtctg

SEQ ID NO: 5816341 - DNA, 25 bp, Homo sapien
ggtggaggccagctccgagtacatc

SEQ ID NO: 5816342 - DNA, 25 bp, Homo sapien
ccgcatccacctgctgccctccatg

SEQ ID NO: 5816343 - DNA, 25 bp, Homo sapien
gtggggtaaggtggccccggagaca

SEQ ID NO: 5816344 - DNA, 25 bp, Homo sapien
atgctcatctacctagcccagtacc

SEQ ID NO: 5816345 - DNA, 25 bp, Homo sapien
ctggcttctgttctgtaggagggct

SEQ ID NO: 5816346 - DNA, 25 bp, Homo sapien
aggccacggagcccgacccgctccg

SEQ ID NO: 5816347 - DNA, 25 bp, Homo sapien
cccggccccgcgcggcccgagtgcc

SEQ ID NO: 5816348 - DNA, 25 bp, Homo sapien
gccctggccctgcgtggggtcccct

SEQ ID NO: 5816349 - DNA, 25 bp, Homo sapien
gggatgggacccaagaactttattc

SEQ ID NO: 5816350 - DNA, 25 bp, Homo sapien
gagggctggccgtgtggacttcatt

SEQ ID NO: 5816351 - DNA, 25 bp, Homo sapien
agggccactgcgggagggactgacc

SEQ ID NO: 5816352 - DNA, 25 bp, Homo sapien
ggaggccacggagcccgacccgctc

SEQ ID NO: 5816353 - DNA, 25 bp, Homo sapien
ccgacttcaactacctgcacaccaa

SEQ ID NO: 5816354 - DNA, 25 bp, Homo sapien
tcatcatccccgcccggatgaagag

SEQ ID NO: 5816355 - DNA, 25 bp, Homo sapien
cgtgtgctgaggcggatggcctccc

SEQ ID NO: 5816356 - DNA, 25 bp, Homo sapien
atccacattgtcattgcccaagccc

SEQ ID NO: 5816357 - DNA, 25 bp, Homo sapien
gaggagaagatgttttctcccacgc

SEQ ID NO: 5816358 - DNA, 25 bp, Homo sapien
ccgccggtgaatgccacaggccacc

SEQ ID NO: 5816359 - DNA, 25 bp, Homo sapien
gcatcaaaggtgtggtgacagataa

SEQ ID NO: 5816360 - DNA, 25 bp, Homo sapien
tccccagccacctgcgtggacctgc

SEQ ID NO: 5816361 - DNA, 25 bp, Homo sapien
cgacttctccaagcacccccaggag

SEQ ID NO: 5816362 - DNA, 25 bp, Homo sapien
gcgcacgcagcgaccacatccccat

SEQ ID NO: 5816363 - DNA, 25 bp, Homo sapien
ccaagcacccccaggaggagaagat

SEQ ID NO: 5816364 - DNA, 25 bp, Homo sapien
gaggcccgtctccgcatcccgggct

SEQ ID NO: 5816365 - DNA, 25 bp, Homo sapien
tgctgggctgtgctgtgctggcccc

SEQ ID NO: 5816366 - DNA, 25 bp, Homo sapien
ccagagcctacgctgacgtccaccc

SEQ ID NO: 5816367 - DNA, 25 bp, Homo sapien
ccagatggtgactactggagactgc

SEQ ID NO: 5816368 - DNA, 25 bp, Homo sapien
caatcatgaagtggatgcagaccat

SEQ ID NO: 5816369 - DNA, 25 bp, Homo sapien
ggctgcggaggactgggccccacga

SEQ ID NO: 5816370 - DNA, 25 bp, Homo sapien
acaacgggtggacgagcgggaggca

SEQ ID NO: 5816371 - DNA, 25 bp, Homo sapien
tcagagcactttaggcagctgaatc

SEQ ID NO: 5816372 - DNA, 25 bp, Homo sapien
tgaagtggatgcagaccataccctt

SEQ ID NO: 5816373 - DNA, 25 bp, Homo sapien
accataccctttgtgctctcagcca

SEQ ID NO: 5816374 - DNA, 25 bp, Homo sapien
ccccaggaggagaagatgttttctc

SEQ ID NO: 5816375 - DNA, 25 bp, Homo sapien
cgcggcccgagtgccacatcactgc

SEQ ID NO: 5816376 - DNA, 25 bp, Homo sapien
gagctgctggtcatcgagttctcca

SEQ ID NO: 5816377 - DNA, 25 bp, Homo sapien
ctggtggtggtcctacttcacatcg

SEQ ID NO: 5816378 - DNA, 25 bp, Homo sapien
ggtcatcgagttctccagccgcccc

SEQ ID NO: 5816379 - DNA, 25 bp, Homo sapien
ccgcttcagccaccactcctacgcc

SEQ ID NO: 5816380 - DNA, 25 bp, Homo sapien
cgctacttcacgagagaggacgagg

SEQ ID NO: 5816381 - DNA, 25 bp, Homo sapien
ccaccttccccaacctgcttcagca

SEQ ID NO: 5816382 - DNA, 25 bp, Homo sapien
cgtggagacggtgcaccggggcatc

SEQ ID NO: 5816383 - DNA, 25 bp, Homo sapien
cctgacggctatgaggtggcagctg

SEQ ID NO: 5816384 - DNA, 25 bp, Homo sapien
acggtcagggccactgcgggaggga

SEQ ID NO: 5816385 - DNA, 25 bp, Homo sapien
ctccgagtacatcctgctgagcgtt

SEQ ID NO: 5816386 - DNA, 25 bp, Homo sapien
ttcatgggctgcggaggactgggcc

SEQ ID NO: 5816387 - DNA, 25 bp, Homo sapien
ccacagccccagatggtgactactg

SEQ ID NO: 5816388 - DNA, 25 bp, Homo sapien
agcgaccacatccccatcccccagc

SEQ ID NO: 5816389 - DNA, 25 bp, Homo sapien
gccccggagacaaaggcaatcatga

SEQ ID NO: 5816390 - DNA, 25 bp, Homo sapien
cgcgtcacggtcagggccactgcgg

SEQ ID NO: 5816391 - DNA, 25 bp, Homo sapien
ttcgtggagacggtgcaccggggca

SEQ ID NO: 5816392 - DNA, 25 bp, Homo sapien
ccaccttcatccgcttcagccacca

SEQ ID NO: 5816393 - DNA, 25 bp, Homo sapien
cctccccagccacctgcgtggacct

SEQ ID NO: 5816394 - DNA, 25 bp, Homo sapien
cttgattttgtcggccacagacatc

SEQ ID NO: 5816395 - DNA, 25 bp, Homo sapien
tgactactggagactgctgccccca

SEQ ID NO: 5816396 - DNA, 25 bp, Homo sapien
tgccgcccaccttcatccgcttcag

SEQ ID NO: 5816397 - DNA, 25 bp, Homo sapien
cgctggccgtccaaggtccgccgcc

SEQ ID NO: 5816398 - DNA, 25 bp, Homo sapien
cccggccagcacgagctgatggagc

SEQ ID NO: 5816399 - DNA, 25 bp, Homo sapien
aggacctacagcatcgggcgcagct

SEQ ID NO: 5816400 - DNA, 25 bp, Homo sapien
actgccctcagggctgccgcccacc

SEQ ID NO: 5816401 - DNA, 25 bp, Homo sapien
acttctccaagcacccccaggagga

SEQ ID NO: 5816402 - DNA, 25 bp, Homo sapien
taaattcggcaagccagtcaaaaac

SEQ ID NO: 5816403 - DNA, 25 bp, Homo sapien
cctacagcatcgggcgcagcttcga

SEQ ID NO: 5816404 - DNA, 25 bp, Homo sapien
tgctccttacagtcctggtcgtcgc

SEQ ID NO: 5816405 - DNA, 25 bp, Homo sapien
gccagctctttgggggaggccacgg

SEQ ID NO: 5816406 - DNA, 25 bp, Homo sapien
gaataggtgtggaggcaatttcctg

SEQ ID NO: 5816407 - DNA, 25 bp, Homo sapien
ctgcacaccaactgctttgagatca

SEQ ID NO: 5816408 - DNA, 25 bp, Homo sapien
cgcagagccccggccccgcgcggcc

SEQ ID NO: 5816409 - DNA, 25 bp, Homo sapien
cgggagatgctcatctacctagccc

SEQ ID NO: 5816410 - DNA, 25 bp, Homo sapien
ctgggccccacgacccgctgggagg

SEQ ID NO: 5816411 - DNA, 25 bp, Homo sapien
ggaggcatgtccgacttcaactacc

SEQ ID NO: 5816412 - DNA, 25 bp, Homo sapien
ggccccagcacccgccaggatgtgg

SEQ ID NO: 5816413 - DNA, 25 bp, Homo sapien
attcgccacgacatcaccacagccc

SEQ ID NO: 5816414 - DNA, 25 bp, Homo sapien
ctggatctgaaccgaaatttcccgg

SEQ ID NO: 5816415 - DNA, 25 bp, Homo sapien
gagtacatcctgctgagcgttctac

SEQ ID NO: 5816416 - DNA, 25 bp, Homo sapien
tcctgaatttcgtggagacggtgca

SEQ ID NO: 5816417 - DNA, 25 bp, Homo sapien
ccggcacatctgcgagggcctgcgg

SEQ ID NO: 5816418 - DNA, 25 bp, Homo sapien
tgctgtccagagcctacgctgacgt

SEQ ID NO: 5816419 - DNA, 25 bp, Homo sapien
ggtgactactggagactgctgcccc

SEQ ID NO: 5816420 - DNA, 25 bp, Homo sapien
cagagccccggccccgcgcggcccg

SEQ ID NO: 5816421 - DNA, 25 bp, Homo sapien
gccccgcgcggcccgagtgccacat

SEQ ID NO: 5816422 - DNA, 25 bp, Homo sapien
ttctcccacgcccgacgagaagatg

SEQ ID NO: 5816423 - DNA, 25 bp, Homo sapien
cctggtcctcccctgccagaccgtg

SEQ ID NO: 5816424 - DNA, 25 bp, Homo sapien
gcttcgacggcagggagctgctggt

SEQ ID NO: 5816425 - DNA, 25 bp, Homo sapien
cctgcctccccagccacctgcgtgg

SEQ ID NO: 5816426 - DNA, 25 bp, Homo sapien
tgtgctgaggcggatggcctcccgc

SEQ ID NO: 5816427 - DNA, 25 bp, Homo sapien
ccaaggtccgccgccccaccatgcc

SEQ ID NO: 5816428 - DNA, 25 bp, Homo sapien
cagcacgagctgatggagcccgagg

SEQ ID NO: 5816429 - DNA, 25 bp, Homo sapien
cgaccacatccccatcccccagcac

SEQ ID NO: 5816430 - DNA, 25 bp, Homo sapien
ctgcgtggggtcccctacgtaaatg

SEQ ID NO: 5816431 - DNA, 25 bp, Homo sapien
tggtgacagataaattcggcaagcc

SEQ ID NO: 5816432 - DNA, 25 bp, Homo sapien
ggcaacattcatggcaacgaggtgg

SEQ ID NO: 5816433 - DNA, 25 bp, Homo sapien
tcattgcccaagcccctggctacgc

SEQ ID NO: 5816434 - DNA, 25 bp, Homo sapien
attcatggcaacgaggtggcgggcc

SEQ ID NO: 5816435 - DNA, 25 bp, Homo sapien
ggtggccccggagacaaaggcaatc

SEQ ID NO: 5816436 - DNA, 25 bp, Homo sapien
gtccagagcctacgctgacgtccac

SEQ ID NO: 5816437 - DNA, 25 bp, Homo sapien
ggctatgaggtggcagctgccgagg

SEQ ID NO: 5816438 - DNA, 25 bp, Homo sapien
tcaaaggcattcgccacgacatcac

SEQ ID NO: 5816439 - DNA, 25 bp, Homo sapien
attttgtcggccacagacatcccac

SEQ ID NO: 5816440 - DNA, 25 bp, Homo sapien
cgagggcctgcgggaggtctgccag

SEQ ID NO: 5816441 - DNA, 25 bp, Homo sapien
tgccctccatgaaccctgacggcta

SEQ ID NO: 5816442 - DNA, 25 bp, Homo sapien
ttttattaaagtgttttgatccact

SEQ ID NO: 5816443 - DNA, 25 bp, Homo sapien
agcctacgctgacgtccaccccatg

SEQ ID NO: 5816444 - DNA, 25 bp, Homo sapien
gcccgacccgctccgggcgcgcagg

SEQ ID NO: 5816445 - DNA, 25 bp, Homo sapien
atggtgcgtgtgctgaggcggatgg

SEQ ID NO: 5816446 - DNA, 25 bp, Homo sapien
tggagacggtgcaccggggcatcaa

SEQ ID NO: 5816447 - DNA, 25 bp, Homo sapien
cacccacaggccacgctggctgctc

SEQ ID NO: 5816448 - DNA, 25 bp, Homo sapien
ccccatgatgatggacaggtcggag

SEQ ID NO: 5816449 - DNA, 25 bp, Homo sapien
gtgaatgccacaggccaccagctgc

SEQ ID NO: 5816450 - DNA, 25 bp, Homo sapien
cctgcagcgatgccgcctacaacca

SEQ ID NO: 5816451 - DNA, 25 bp, Homo sapien
gacagataaattcggcaagccagtc

SEQ ID NO: 5816452 - DNA, 25 bp, Homo sapien
gcccgagtgccacatcactgcgctg

SEQ ID NO: 5816453 - DNA, 25 bp, Homo sapien
agtcctggtcgtcgccgctgcccgg

SEQ ID NO: 5816454 - DNA, 25 bp, Homo sapien
cgtgggaggtggtggaggccagctc

SEQ ID NO: 5816455 - DNA, 25 bp, Homo sapien
tgattttgtcggccacagacatccc

SEQ ID NO: 5816456 - DNA, 25 bp, Homo sapien
gccagcacgagctgatggagcccga

SEQ ID NO: 5816457 - DNA, 25 bp, Homo sapien
gagctgggctgtgtgaagttccccc

SEQ ID NO: 5816458 - DNA, 25 bp, Homo sapien
ctcaagtactagccccggccccagc

SEQ ID NO: 5816459 - DNA, 25 bp, Homo sapien
acctggatctgaaccgaaatttccc

SEQ ID NO: 5816460 - DNA, 25 bp, Homo sapien
caacgaggtggcgggccgggagatg

SEQ ID NO: 5816461 - DNA, 25 bp, Homo sapien
aggacgagggctgctatgacccgct

SEQ ID NO: 5816462 - DNA, 25 bp, Homo sapien
gcttcggggaggcctggaggctgac

SEQ ID NO: 5816463 - DNA, 25 bp, Homo sapien
aagctctgattcctgcacagtagct

SEQ ID NO: 5816464 - DNA, 25 bp, Homo sapien
cccggtgtgagggcggctgggtgcg

SEQ ID NO: 5816465 - DNA, 25 bp, Homo sapien
aagagggctggccgtgtggacttca

SEQ ID NO: 5816466 - DNA, 25 bp, Homo sapien
tgttgtcctggtcctcccctgccag

SEQ ID NO: 5816467 - DNA, 25 bp, Homo sapien
gtgccagctctttgggggaggccac

SEQ ID NO: 5816468 - DNA, 25 bp, Homo sapien
ttcatgggggcgacctggtggtgtc

SEQ ID NO: 5816469 - DNA, 25 bp, Homo sapien
ggtggtgtcctaccccttcgacttc

SEQ ID NO: 5816470 - DNA, 25 bp, Homo sapien
aacgcgcagaacctggatctgaacc

SEQ ID NO: 5816471 - DNA, 25 bp, Homo sapien
gccctgcgtggggtcccctacgtaa

SEQ ID NO: 5816472 - DNA, 25 bp, Homo sapien
gcgatgccgcctacaaccacaccac

SEQ ID NO: 5816473 - DNA, 25 bp, Homo sapien
ccgacccgctccgggcgcgcaggca

SEQ ID NO: 5816474 - DNA, 25 bp, Homo sapien
tgaagagggctggccgtgtggactt

SEQ ID NO: 5816475 - DNA, 25 bp, Homo sapien
aaggtgtggtgacagataaattcgg

SEQ ID NO: 5816476 - DNA, 25 bp, Homo sapien
catgaagtggatgcagaccataccc

SEQ ID NO: 5816477 - DNA, 25 bp, Homo sapien
gtcgccgctgcccggccggggtgcg

SEQ ID NO: 5816478 - DNA, 25 bp, Homo sapien
ggcctgcgggaggtctgccagcccg

SEQ ID NO: 5816479 - DNA, 25 bp, Homo sapien
ctgacgtccaccccatgatgatgga

SEQ ID NO: 5816480 - DNA, 25 bp, Homo sapien
atttcccggacctgacgtccgagta

SEQ ID NO: 5816481 - DNA, 25 bp, Homo sapien
ccaaagtcatcaagaaagtcatcat

SEQ ID NO: 5816482 - DNA, 25 bp, Homo sapien
tctgcgagggcctgcgggaggtctg

SEQ ID NO: 5816483 - DNA, 25 bp, Homo sapien
cagctctttgggggaggccacggag

SEQ ID NO: 5816484 - DNA, 25 bp, Homo sapien
gctctttgggggaggccacggagcc

SEQ ID NO: 5816485 - DNA, 25 bp, Homo sapien
cgacgagaagatgttcaagctgctg

SEQ ID NO: 5816486 - DNA, 25 bp, Homo sapien
atccacctgctgccctccatgaacc

SEQ ID NO: 5816487 - DNA, 25 bp, Homo sapien
cggagcccgacccgctccgggcgcg

SEQ ID NO: 5816488 - DNA, 25 bp, Homo sapien
gacggtgcaccggggcatcaaaggt

SEQ ID NO: 5816489 - DNA, 25 bp, Homo sapien
ccccagatggtgactactggagact

SEQ ID NO: 5816490 - DNA, 25 bp, Homo sapien
cacgcccgacgagaagatgttcaag

SEQ ID NO: 5816491 - DNA, 25 bp, Homo sapien
tgatggacaggtcggagaataggtg

SEQ ID NO: 5816492 - DNA, 25 bp, Homo sapien
cccacgcccgacgagaagatgttca

SEQ ID NO: 5816493 - DNA, 25 bp, Homo sapien
ccacgtggccaggacctacagcatc

SEQ ID NO: 5816494 - DNA, 25 bp, Homo sapien
atcgggcgcagcttcgacggcaggg

SEQ ID NO: 5816495 - DNA, 25 bp, Homo sapien
ctgacgcgtcacggtcagggccact

SEQ ID NO: 5816496 - DNA, 25 bp, Homo sapien
gctgctccttacagtcctggtcgtc

SEQ ID NO: 5816497 - DNA, 25 bp, Homo sapien
cgtggacctgcagctcaggacctgc

SEQ ID NO: 5816498 - DNA, 25 bp, Homo sapien
ctgtgtgaagttcccccccgaggag

SEQ ID NO: 5816499 - DNA, 25 bp, Homo sapien
caccaccttccccaacctgcttcag

SEQ ID NO: 5816500 - DNA, 25 bp, Homo sapien
gctgctgggctgtgctgtgctggcc

SEQ ID NO: 5816501 - DNA, 25 bp, Homo sapien
ggactgacctgccgaccctgcctcc

SEQ ID NO: 5816502 - DNA, 25 bp, Homo sapien
ggctgtgtgaagttcccccccgagg

SEQ ID NO: 5816503 - DNA, 25 bp, Homo sapien
cgcatccagcgcctgctcaacacca

SEQ ID NO: 5816504 - DNA, 25 bp, Homo sapien
ggcctggccctacttccttgactgc

SEQ ID NO: 5816505 - DNA, 25 bp, Homo sapien
actgcgctggccgtccaaggtccgc

SEQ ID NO: 5816506 - DNA, 25 bp, Homo sapien
cccacaggccacgctggctgctcaa

SEQ ID NO: 5816507 - DNA, 25 bp, Homo sapien
cggtgaatgccacaggccaccagct

SEQ ID NO: 5816508 - DNA, 25 bp, Homo sapien
caacctctggggatgggacccaaga

SEQ ID NO: 5816509 - DNA, 25 bp, Homo sapien
ccctggtggtggtcctacttcacat

SEQ ID NO: 5816510 - DNA, 25 bp, Homo sapien
actgcgggagggactgacctgccga

SEQ ID NO: 5816511 - DNA, 25 bp, Homo sapien
aacccccgcatccagcgcctgctca

SEQ ID NO: 5816512 - DNA, 25 bp, Homo sapien
atggacaggtcggagaataggtgtg

SEQ ID NO: 5816513 - DNA, 25 bp, Homo sapien
caggccaccagctgcagacagcggt

SEQ ID NO: 5816514 - DNA, 25 bp, Homo sapien
caagaaagtcatcatccccgcccgg

SEQ ID NO: 5816515 - DNA, 25 bp, Homo sapien
acagtcctggtcgtcgccgctgccc

SEQ ID NO: 5816516 - DNA, 25 bp, Homo sapien
agagcactttaggcagctgaatccg

SEQ ID NO: 5816517 - DNA, 25 bp, Homo sapien
gcgcccacgtggccaggacctacag

SEQ ID NO: 5816518 - DNA, 25 bp, Homo sapien
cgccgctgcccggccggggtgcgag

SEQ ID NO: 5816519 - DNA, 25 bp, Homo sapien
gcgcagaccctgccggcacatctgc

SEQ ID NO: 5816520 - DNA, 25 bp, Homo sapien
ctgtgctggccccccggtgtgaggg

SEQ ID NO: 5816521 - DNA, 25 bp, Homo sapien
tacaccagctcctggaaggccagtg

SEQ ID NO: 5816522 - DNA, 25 bp, Homo sapien
ggctcttgattttgtcggccacaga

SEQ ID NO: 5816523 - DNA, 25 bp, Homo sapien
atgccacaggccaccagctgcagac

SEQ ID NO: 5816524 - DNA, 25 bp, Homo sapien
ggccaggacctacagcatcgggcgc

SEQ ID NO: 5816525 - DNA, 25 bp, Homo sapien
tggccccccggtgtgagggcggctg

SEQ ID NO: 5816526 - DNA, 25 bp, Homo sapien
agtcatcatccccgcccggatgaag

SEQ ID NO: 5816527 - DNA, 25 bp, Homo sapien
tgtggagaccgaggcccgtctccgc

SEQ ID NO: 5816528 - DNA, 25 bp, Homo sapien
gggtgcgcagaccctgccggcacat

SEQ ID NO: 5816529 - DNA, 25 bp, Homo sapien
acatggcctggccctacttccttga

SEQ ID NO: 5816530 - DNA, 25 bp, Homo sapien
gctctgattcctgcacagtagctgt

SEQ ID NO: 5816531 - DNA, 25 bp, Homo sapien
cccatcccccagcactactggtggg

SEQ ID NO: 5816532 - DNA, 25 bp, Homo sapien
cgctgacgtccaccccatgatgatg

SEQ ID NO: 5816533 - DNA, 25 bp, Homo sapien
aggacctgcagcgatgccgcctaca

SEQ ID NO: 5816534 - DNA, 25 bp, Homo sapien
ctgcgcccacgtggccaggacctac

SEQ ID NO: 5816535 - DNA, 25 bp, Homo sapien
cccctggctacgccaaagtcatcaa

SEQ ID NO: 5816536 - DNA, 25 bp, Homo sapien
ccccagcacccgccaggatgtggag

SEQ ID NO: 5816537 - DNA, 25 bp, Homo sapien
ccgtccaaggtccgccgccccacca

SEQ ID NO: 5816538 - DNA, 25 bp, Homo sapien
gtgggtgcccctccctgcaggccct

SEQ ID NO: 5816539 - DNA, 25 bp, Homo sapien
aaagtcatcatccccgcccggatga

SEQ ID NO: 5816540 - DNA, 25 bp, Homo sapien
atggagcccgaggtgaagctcatcg

SEQ ID NO: 5816541 - DNA, 25 bp, Homo sapien
caaaggtgtggtgacagataaattc

SEQ ID NO: 5816542 - DNA, 25 bp, Homo sapien
agtacctgcttggtaacccccgcat

SEQ ID NO: 5816543 - DNA, 25 bp, Homo sapien
catcatcaacggggcggactggtac

SEQ ID NO: 5816544 - DNA, 25 bp, Homo sapien
gtccgacttcaactacctgcacacc

SEQ ID NO: 5816545 - DNA, 25 bp, Homo sapien
agaagctctgattcctgcacagtag

SEQ ID NO: 5816546 - DNA, 25 bp, Homo sapien
acagtagctgttgtcctggtcctcc

SEQ ID NO: 5816547 - DNA, 25 bp, Homo sapien
ccccggccccagcacccgccaggat

SEQ ID NO: 5816548 - DNA, 25 bp, Homo sapien
gccggggtgcgagtttgagcggaac

SEQ ID NO: 5816549 - DNA, 25 bp, Homo sapien
gggaggcctggaggctgacgaggca

SEQ ID NO: 5816550 - DNA, 25 bp, Homo sapien
cgctggagaagcttcggggaggcct

SEQ ID NO: 5816551 - DNA, 25 bp, Homo sapien
tggctacgccaaagtcatcaagaaa

SEQ ID NO: 5816552 - DNA, 25 bp, Homo sapien
gccccacgacccgctgggaggtgcc

SEQ ID NO: 5816553 - DNA, 25 bp, Homo sapien
gacccgcggcgcacgcagcgaccac

SEQ ID NO: 5816554 - DNA, 25 bp, Homo sapien
gagaataggtgtggaggcaatttcc

SEQ ID NO: 5816555 - DNA, 25 bp, Homo sapien
cagacagcggtacagtaccgggacc

SEQ ID NO: 5816556 - DNA, 25 bp, Homo sapien
gacttcattctgcaacctctgggga

SEQ ID NO: 5816557 - DNA, 25 bp, Homo sapien
ccacactgtcagagcactttaggca

SEQ ID NO: 5816558 - DNA, 25 bp, Homo sapien
cacgagagaggacgagggctgctat

SEQ ID NO: 5816559 - DNA, 25 bp, Homo sapien
aaggagtcactcctgaatttcgtgg

SEQ ID NO: 5816560 - DNA, 25 bp, Homo sapien
gccagtgcaacccggacctgcggct

SEQ ID NO: 5816561 - DNA, 25 bp, Homo sapien
cttcattctgcaacctctggggatg

SEQ ID NO: 5816562 - DNA, 25 bp, Homo sapien
ttctgtaggagggctgcagccccca

SEQ ID NO: 5816563 - DNA, 25 bp, Homo sapien
ggtcctacttcacatcgctgagcac

SEQ ID NO: 5816564 - DNA, 25 bp, Homo sapien
gcacgagctgatggagcccgaggtg

SEQ ID NO: 5816565 - DNA, 25 bp, Homo sapien
aggatgtggagaccgaggcccgtct

SEQ ID NO: 5816566 - DNA, 25 bp, Homo sapien
cgacggcagggagctgctggtcatc

SEQ ID NO: 5816567 - DNA, 25 bp, Homo sapien
ttgagcggaaccccgccggtgaatg

SEQ ID NO: 5816568 - DNA, 25 bp, Homo sapien
ccaggtatccacattgtcattgccc

SEQ ID NO: 5816569 - DNA, 25 bp, Homo sapien
acctggtggtgtcctaccccttcga

SEQ ID NO: 5816570 - DNA, 25 bp, Homo sapien
gacccgctccgggcgcgcaggcagc

SEQ ID NO: 5816571 - DNA, 25 bp, Homo sapien
cagcttcacgggaggcatgtccgac

SEQ ID NO: 5816572 - DNA, 25 bp, Homo sapien
ggaggtgccagctctttgggggagg

SEQ ID NO: 5816573 - DNA, 25 bp, Homo sapien
tcccccagcactactggtggggtaa

SEQ ID NO: 5816574 - DNA, 25 bp, Homo sapien
gcagctgaatccgtgatttcagaag

SEQ ID NO: 5816575 - DNA, 25 bp, Homo sapien
ggaggtctgccagcccgccttcgac

SEQ ID NO: 5816576 - DNA, 25 bp, Homo sapien
ctgccgaccctgcctccccagccac

SEQ ID NO: 5816577 - DNA, 25 bp, Homo sapien
cgctgccattttattaaagtgtttt

SEQ ID NO: 5816578 - DNA, 25 bp, Homo sapien
tggaggccagctccgagtacatcct

SEQ ID NO: 5816579 - DNA, 25 bp, Homo sapien
cagcttcgacggcagggagctgctg

SEQ ID NO: 5816580 - DNA, 25 bp, Homo sapien
cacatcactgcgctggccgtccaag

SEQ ID NO: 5816581 - DNA, 25 bp, Homo sapien
gtggtggaggccagctccgagtaca

SEQ ID NO: 5816582 - DNA, 25 bp, Homo sapien
cgcggcgcacgcagcgaccacatcc

SEQ ID NO: 5816583 - DNA, 25 bp, Homo sapien
agactgctgcccccaggtatccaca

SEQ ID NO: 5816584 - DNA, 25 bp, Homo sapien
tccaccccatgatgatggacaggtc

SEQ ID NO: 5816585 - DNA, 25 bp, Homo sapien
gccccggccccgcgcggcccgagtg

SEQ ID NO: 5816586 - DNA, 25 bp, Homo sapien
cgagttctccagccgccccggccag

SEQ ID NO: 5816587 - DNA, 25 bp, Homo sapien
ctgaagagggggagcatcatcaacg

SEQ ID NO: 5816588 - DNA, 25 bp, Homo sapien
ccctccatgaaccctgacggctatg

SEQ ID NO: 5816589 - DNA, 25 bp, Homo sapien
gtaaggtggccccggagacaaaggc

SEQ ID NO: 5816590 - DNA, 25 bp, Homo sapien
gcgtggggtcccctacgtaaatgtc

SEQ ID NO: 5816591 - DNA, 25 bp, Homo sapien
gacaaaggcaatcatgaagtggatg

SEQ ID NO: 5816592 - DNA, 25 bp, Homo sapien
ccctacgtaaatgtctgacgcgtca

SEQ ID NO: 5816593 - DNA, 25 bp, Homo sapien
atccgcttcagccaccactcctacg

SEQ ID NO: 5816594 - DNA, 25 bp, Homo sapien
tcacggtagagctgggctgtgtgaa

SEQ ID NO: 5816595 - DNA, 25 bp, Homo sapien
aaccccgccggtgaatgccacaggc

SEQ ID NO: 5816596 - DNA, 25 bp, Homo sapien
gaggccagctccgagtacatcctgc

SEQ ID NO: 5816597 - DNA, 25 bp, Homo sapien
cctacttccttgactgccaccgcta

SEQ ID NO: 5816598 - DNA, 25 bp, Homo sapien
cccggatgaagagggctggccgtgt

SEQ ID NO: 5816599 - DNA, 25 bp, Homo sapien
ctagccccggccccagcacccgcca

SEQ ID NO: 5816600 - DNA, 25 bp, Homo sapien
aggcatgtccgacttcaactacctg

SEQ ID NO: 5816601 - DNA, 25 bp, Homo sapien
tgacggctatgaggtggcagctgcc

SEQ ID NO: 5816602 - DNA, 25 bp, Homo sapien
aggtatccacattgtcattgcccaa

SEQ ID NO: 5816603 - DNA, 25 bp, Homo sapien
gctgttgtcctggtcctcccctgcc

SEQ ID NO: 5816604 - DNA, 25 bp, Homo sapien
ctggagactgctgcccccaggtatc

SEQ ID NO: 5816605 - DNA, 25 bp, Homo sapien
tacagcttcacgggaggcatgtccg

SEQ ID NO: 5816606 - DNA, 25 bp, Homo sapien
cacaggccaccagctgcagacagcg

SEQ ID NO: 5816607 - DNA, 25 bp, Homo sapien
ttcagcaccggtcgtgggaggtggt

SEQ ID NO: 5816608 - DNA, 25 bp, Homo sapien
tggccctacttccttgactgccacc

SEQ ID NO: 5816609 - DNA, 25 bp, Homo sapien
ctgggtgcgcagaccctgccggcac

SEQ ID NO: 5816610 - DNA, 25 bp, Homo sapien
catcggcaacattcatggcaacgag

SEQ ID NO: 5816611 - DNA, 25 bp, Homo sapien
gataaattcggcaagccagtcaaaa

SEQ ID NO: 5816612 - DNA, 25 bp, Homo sapien
gcatcgggcgcagcttcgacggcag

SEQ ID NO: 5816613 - DNA, 25 bp, Homo sapien
gggctgccgcccaccttcatccgct

SEQ ID NO: 5816614 - DNA, 25 bp, Homo sapien
tgccaccgctacttcacgagagagg

SEQ ID NO: 5816615 - DNA, 25 bp, Homo sapien
agatggtgactactggagactgctg

SEQ ID NO: 5816616 - DNA, 25 bp, Homo sapien
atgttcaagctgctgtccagagcct

SEQ ID NO: 5816617 - DNA, 25 bp, Homo sapien
ctgcttcagcaccggtcgtgggagg

SEQ ID NO: 5816618 - DNA, 25 bp, Homo sapien
atgccgcccccgccgccgctgctgc

SEQ ID NO: 5816619 - DNA, 25 bp, Homo sapien
aaggtccgccgccccaccatgccgc

SEQ ID NO: 5816620 - DNA, 25 bp, Homo sapien
ccagccttcatgggggcgacctggt

SEQ ID NO: 5816621 - DNA, 25 bp, Homo sapien
gagatcacggtagagctgggctgtg

SEQ ID NO: 5816622 - DNA, 25 bp, Homo sapien
ttcacgagagaggacgagggctgct

SEQ ID NO: 5816623 - DNA, 25 bp, Homo sapien
gatgtggagaccgaggcccgtctcc

SEQ ID NO: 5816624 - DNA, 25 bp, Homo sapien
tgcccaagcccctggctacgccaaa

SEQ ID NO: 5816625 - DNA, 25 bp, Homo sapien
tttgggggaggccacggagcccgac

SEQ ID NO: 5816626 - DNA, 25 bp, Homo sapien
gctcaacaccacccgcatccacctg

SEQ ID NO: 5816627 - DNA, 25 bp, Homo sapien
cggtgtgagggcggctgggtgcgca

SEQ ID NO: 5816628 - DNA, 25 bp, Homo sapien
gagggcggctgggtgcgcagaccct

SEQ ID NO: 5816629 - DNA, 25 bp, Homo sapien
gggccgggagatgctcatctaccta

SEQ ID NO: 5816630 - DNA, 25 bp, Homo sapien
ttttctcccacgcccgacgagaaga

SEQ ID NO: 5816631 - DNA, 25 bp, Homo sapien
ccagatggtgcgtgtgctgaggcgg

SEQ ID NO: 5816632 - DNA, 25 bp, Homo sapien
tttcctgaagagggggagcatcatc

SEQ ID NO: 5816633 - DNA, 25 bp, Homo sapien
tgtggacttcattctgcaacctctg

SEQ ID NO: 5816634 - DNA, 25 bp, Homo sapien
acccccaggaggagaagatgttttc

SEQ ID NO: 5816635 - DNA, 25 bp, Homo sapien
taccggctggcggagacccgcggcg

SEQ ID NO: 5816636 - DNA, 25 bp, Homo sapien
gctctgagtacctgcttggtaaccc

SEQ ID NO: 5816637 - DNA, 25 bp, Homo sapien
gtgcaccggggcatcaaaggtgtgg

SEQ ID NO: 5816638 - DNA, 25 bp, Homo sapien
tgacccgctggagaagcttcgggga

SEQ ID NO: 5816639 - DNA, 25 bp, Homo sapien
acctgcacaccaactgctttgagat

SEQ ID NO: 5816640 - DNA, 25 bp, Homo sapien
tcctacgcccagatggtgcgtgtgc

SEQ ID NO: 5816641 - DNA, 25 bp, Homo sapien
tctcagtcaaaggcattcgccacga

SEQ ID NO: 5816642 - DNA, 25 bp, Homo sapien
gcttcagccaccactcctacgccca

SEQ ID NO: 5816643 - DNA, 25 bp, Homo sapien
gaagatgttcaagctgctgtccaga

SEQ ID NO: 5816644 - DNA, 25 bp, Homo sapien
cagggctgccgcccaccttcatccg

SEQ ID NO: 5816645 - DNA, 25 bp, Homo sapien
tggctgctcaagtactagccccggc

SEQ ID NO: 5816646 - DNA, 25 bp, Homo sapien
ctccaagcacccccaggaggagaag

SEQ ID NO: 5816647 - DNA, 25 bp, Homo sapien
acagacatcccacaaagccgctgcc

SEQ ID NO: 5816648 - DNA, 25 bp, Homo sapien
gctgtgctgtgctggccccccggtg

SEQ ID NO: 5816649 - DNA, 25 bp, Homo sapien
ttaggcagctgaatccgtgatttca

SEQ ID NO: 5816650 - DNA, 25 bp, Homo sapien
agcacccgccaggatgtggagaccg

SEQ ID NO: 5816651 - DNA, 25 bp, Homo sapien
cgtctccgcatcccgggctcctggc

SEQ ID NO: 5816652 - DNA, 25 bp, Homo sapien
ccacccgcatccacctgctgccctc

SEQ ID NO: 5816653 - DNA, 25 bp, Homo sapien
ttgtcctggtcctcccctgccagac

SEQ ID NO: 5816654 - DNA, 25 bp, Homo sapien
gtctgacgcgtcacggtcagggcca

SEQ ID NO: 5816655 - DNA, 25 bp, Homo sapien
ctttgagatcacggtagagctgggc

SEQ ID NO: 5816656 - DNA, 25 bp, Homo sapien
aagccgctgccattttattaaagtg

SEQ ID NO: 5816657 - DNA, 25 bp, Homo sapien
tcatcaagaaagtcatcatccccgc

SEQ ID NO: 5816658 - DNA, 25 bp, Homo sapien
gccgctgctgctccttacagtcctg

SEQ ID NO: 5816659 - DNA, 25 bp, Homo sapien
aggtgccagctctttgggggaggcc

SEQ ID NO: 5816660 - DNA, 25 bp, Homo sapien
cggctgctgggctgtgctgtgctgg

SEQ ID NO: 5816661 - DNA, 25 bp, Homo sapien
ctgctgccctccatgaaccctgacg

SEQ ID NO: 5816662 - DNA, 25 bp, Homo sapien
cggatggcctcccgctgcgcccacg

SEQ ID NO: 5816663 - DNA, 25 bp, Homo sapien
gcccagatggtgcgtgtgctgaggc

SEQ ID NO: 5816664 - DNA, 25 bp, Homo sapien
gtaaatgtctgacgcgtcacggtca

SEQ ID NO: 5816665 - DNA, 25 bp, Homo sapien
gcgcgcaggcagccctcggccgacg

SEQ ID NO: 5816666 - DNA, 25 bp, Homo sapien
gccgtgtggacttcattctgcaacc

SEQ ID NO: 5816667 - DNA, 25 bp, Homo sapien
ggctgacgaggcactgccctcaggg

SEQ ID NO: 5816668 - DNA, 25 bp, Homo sapien
actgccaccgctacttcacgagaga

SEQ ID NO: 5816669 - DNA, 25 bp, Homo sapien
atcgagttctccagccgccccggcc

SEQ ID NO: 5816670 - DNA, 25 bp, Homo sapien
gcaccggggcatcaaaggtgtggtg

SEQ ID NO: 5816671 - DNA, 25 bp, Homo sapien
gcagaccctgccggcacatctgcga

SEQ ID NO: 5816672 - DNA, 25 bp, Homo sapien
cagaccgtgggtgcccctccctgca

SEQ ID NO: 5816673 - DNA, 25 bp, Homo sapien
cccagccacctgcgtggacctgcag

SEQ ID NO: 5816674 - DNA, 25 bp, Homo sapien
tgcgagggcctgcgggaggtctgcc

SEQ ID NO: 5816675 - DNA, 25 bp, Homo sapien
gtccaaggtccgccgccccaccatg

SEQ ID NO: 5816676 - DNA, 25 bp, Homo sapien
gtcctaccccttcgacttctccaag

SEQ ID NO: 5816677 - DNA, 25 bp, Homo sapien
gagccccggccccgcgcggcccgag

SEQ ID NO: 5816678 - DNA, 25 bp, Homo sapien
ccaccagctgcagacagcggtacag

SEQ ID NO: 5816679 - DNA, 25 bp, Homo sapien
cgcccggatctcagtcaaaggcatt

SEQ ID NO: 5816680 - DNA, 25 bp, Homo sapien
gtgcgagtttgagcggaaccccgcc

SEQ ID NO: 5816681 - DNA, 25 bp, Homo sapien
aggccagtgcaacccggacctgcgg

SEQ ID NO: 5816682 - DNA, 25 bp, Homo sapien
cgccaggatgtggagaccgaggccc

SEQ ID NO: 5816683 - DNA, 25 bp, Homo sapien
cagcaccggtcgtgggaggtggtgg

SEQ ID NO: 5816684 - DNA, 25 bp, Homo sapien
ctcatcggcaacattcatggcaacg

SEQ ID NO: 5816685 - DNA, 25 bp, Homo sapien
ctacaacgggtggacgagcgggagg

SEQ ID NO: 5816686 - DNA, 25 bp, Homo sapien
ttattaaagtgttttgatccactta

SEQ ID NO: 5816687 - DNA, 25 bp, Homo sapien
agagcctacgctgacgtccacccca

SEQ ID NO: 5816688 - DNA, 25 bp, Homo sapien
cacaacaaggagtcactcctgaatt

SEQ ID NO: 5816689 - DNA, 25 bp, Homo sapien
ccagcactactggtggggtaaggtg

SEQ ID NO: 5816690 - DNA, 25 bp, Homo sapien
tcagccagccttcatgggggcgacc

SEQ ID NO: 5816691 - DNA, 25 bp, Homo sapien
tgccggcacatctgcgagggcctgc

SEQ ID NO: 5816692 - DNA, 25 bp, Homo sapien
agcgggaggcagaacgcgcagaacc

SEQ ID NO: 5816693 - DNA, 25 bp, Homo sapien
tcaactacctgcacaccaactgctt

SEQ ID NO: 5816694 - DNA, 25 bp, Homo sapien
cagtgcaacccggacctgcggctgc

SEQ ID NO: 5816695 - DNA, 25 bp, Homo sapien
gacgggagtaagccctggtggtggt

SEQ ID NO: 5816696 - DNA, 25 bp, Homo sapien
tcgtcgccgctgcccggccggggtg

SEQ ID NO: 5816697 - DNA, 25 bp, Homo sapien
cagcggtacagtaccgggacctccc

SEQ ID NO: 5816698 - DNA, 25 bp, Homo sapien
ggtacagtaccgggacctccctggc

SEQ ID NO: 5816699 - DNA, 25 bp, Homo sapien
agcatcatcaacggggcggactggt

SEQ ID NO: 5816700 - DNA, 25 bp, Homo sapien
catccccatcccccagcactactgg

SEQ ID NO: 5816701 - DNA, 25 bp, Homo sapien
aggcagccctcggccgacgggagta

SEQ ID NO: 5816702 - DNA, 25 bp, Homo sapien
gggcatcaaaggtgtggtgacagat

SEQ ID NO: 5816703 - DNA, 25 bp, Homo sapien
cctgccggcacatctgcgagggcct

SEQ ID NO: 5816704 - DNA, 25 bp, Homo sapien
cagggagctgctggtcatcgagttc

SEQ ID NO: 5816705 - DNA, 25 bp, Homo sapien
tctgagtacctgcttggtaaccccc

SEQ ID NO: 5816706 - DNA, 25 bp, Homo sapien
gccacggagcccgacccgctccggg

SEQ ID NO: 5816707 - DNA, 25 bp, Homo sapien
cacatccccatcccccagcactact

SEQ ID NO: 5816708 - DNA, 25 bp, Homo sapien
gctggccgtgtggacttcattctgc

SEQ ID NO: 5816709 - DNA, 25 bp, Homo sapien
cctgcagctcaggacctgcagcgat

SEQ ID NO: 5816710 - DNA, 25 bp, Homo sapien
gaggctgacgaggcactgccctcag

SEQ ID NO: 5816711 - DNA, 25 bp, Homo sapien
gtcaaaaacgcccggatctcagtca

SEQ ID NO: 5816712 - DNA, 25 bp, Homo sapien
ctggagaagcttcggggaggcctgg

SEQ ID NO: 5816713 - DNA, 25 bp, Homo sapien
tcatggcaacgaggtggcgggccgg

SEQ ID NO: 5816714 - DNA, 25 bp, Homo sapien
gcgcggggccggggctctgcgctcg

SEQ ID NO: 5816715 - DNA, 25 bp, Homo sapien
cagacatttacgtaggggaccccac

SEQ ID NO: 5816716 - DNA, 25 bp, Homo sapien
agctctaccgtgatctcaaagcagt

SEQ ID NO: 5816717 - DNA, 25 bp, Homo sapien
aggctctggacagcagcttgaacat

SEQ ID NO: 5816718 - DNA, 25 bp, Homo sapien
tgggcgcagcgggaggccatccgcc

SEQ ID NO: 5816719 - DNA, 25 bp, Homo sapien
ggggctgcagccctcctacagaaca

SEQ ID NO: 5816720 - DNA, 25 bp, Homo sapien
agccaggggcttgggcaatgacaat

SEQ ID NO: 5816721 - DNA, 25 bp, Homo sapien
gattcagctgcctaaagtgctctga

SEQ ID NO: 5816722 - DNA, 25 bp, Homo sapien
atctgtcaccacacctttgatgccc

SEQ ID NO: 5816723 - DNA, 25 bp, Homo sapien
cctcggcagctgccacctcatagcc

SEQ ID NO: 5816724 - DNA, 25 bp, Homo sapien
agtcgaaggggtaggacaccaccag

SEQ ID NO: 5816725 - DNA, 25 bp, Homo sapien
aaggaagtagggccaggccatgtca

SEQ ID NO: 5816726 - DNA, 25 bp, Homo sapien
ttctccgacctgtccatcatcatgg

SEQ ID NO: 5816727 - DNA, 25 bp, Homo sapien
cgtgcgccgcgggtctccgccagcc

SEQ ID NO: 5816728 - DNA, 25 bp, Homo sapien
gaccggtgctgaagcaggttgggga

SEQ ID NO: 5816729 - DNA, 25 bp, Homo sapien
ctgtaccagtccgccccgttgatga

SEQ ID NO: 5816730 - DNA, 25 bp, Homo sapien
tggtgatgtcgtggcgaatgccttt

SEQ ID NO: 5816731 - DNA, 25 bp, Homo sapien
taaagtgctctgacagtgtgggggc

SEQ ID NO: 5816732 - DNA, 25 bp, Homo sapien
caaagggtatggtctgcatccactt

SEQ ID NO: 5816733 - DNA, 25 bp, Homo sapien
gtggggcccagtcctccgcagccca

SEQ ID NO: 5816734 - DNA, 25 bp, Homo sapien
gatgctgtaggtcctggccacgtgg

SEQ ID NO: 5816735 - DNA, 25 bp, Homo sapien
ctgcagctggtggcctgtggcattc

SEQ ID NO: 5816736 - DNA, 25 bp, Homo sapien
ctcttcatccgggcggggatgatga

SEQ ID NO: 5816737 - DNA, 25 bp, Homo sapien
ccgaatttatctgtcaccacacctt

SEQ ID NO: 5816738 - DNA, 25 bp, Homo sapien
gaaatttcggttcagatccaggttc

SEQ ID NO: 5816739 - DNA, 25 bp, Homo sapien
tgtaggcggcatcgctgcaggtcct

SEQ ID NO: 5816740 - DNA, 25 bp, Homo sapien
agtcaaggaagtagggccaggccat

SEQ ID NO: 5816741 - DNA, 25 bp, Homo sapien
tcccgtgaagctgtaccagtccgcc

SEQ ID NO: 5816742 - DNA, 25 bp, Homo sapien
ctgagggcagtgcctcgtcagcctc

SEQ ID NO: 5816743 - DNA, 25 bp, Homo sapien
gacaacagctactgtgcaggaatca

SEQ ID NO: 5816744 - DNA, 25 bp, Homo sapien
actcagagcacaggtactgggctag

SEQ ID NO: 5816745 - DNA, 25 bp, Homo sapien
catgtcaatggcgtcgaaggcgggc

SEQ ID NO: 5816746 - DNA, 25 bp, Homo sapien
ttcacctcgggctccatcagctcgt

SEQ ID NO: 5816747 - DNA, 25 bp, Homo sapien
tactcggacgtcaggtccgggaaat

SEQ ID NO: 5816748 - DNA, 25 bp, Homo sapien
cctctctcgtgaagtagcggtggca

SEQ ID NO: 5816749 - DNA, 25 bp, Homo sapien
tggggctgtggtgatgtcgtggcga

SEQ ID NO: 5816750 - DNA, 25 bp, Homo sapien
aggagcagcagcggcggcgggggcg

SEQ ID NO: 5816751 - DNA, 25 bp, Homo sapien
cctgaccgtgacgcgtcagacattt

SEQ ID NO: 5816752 - DNA, 25 bp, Homo sapien
gccatgaatgttgccgatgagcttc

SEQ ID NO: 5816753 - DNA, 25 bp, Homo sapien
ggatgcgggggttaccaagcaggta

SEQ ID NO: 5816754 - DNA, 25 bp, Homo sapien
ggtggatgcgggtggtgttgagcag

SEQ ID NO: 5816755 - DNA, 25 bp, Homo sapien
tcagagcacaggtactgggctaggt

SEQ ID NO: 5816756 - DNA, 25 bp, Homo sapien
cacagcccagctctaccgtgatctc

SEQ ID NO: 5816757 - DNA, 25 bp, Homo sapien
gcagttggtgtgcaggtagttgaag

SEQ ID NO: 5816758 - DNA, 25 bp, Homo sapien
cctcccccaaagagctggcacctcc

SEQ ID NO: 5816759 - DNA, 25 bp, Homo sapien
gcgggtctccgccagccggtagtac

SEQ ID NO: 5816760 - DNA, 25 bp, Homo sapien
agttggtgtgcaggtagttgaagtc

SEQ ID NO: 5816761 - DNA, 25 bp, Homo sapien
tttgactgagatccgggcgtttttg

SEQ ID NO: 5816762 - DNA, 25 bp, Homo sapien
gagctggtgtagaacgctcagcagg

SEQ ID NO: 5816763 - DNA, 25 bp, Homo sapien
tcgtccacccgttgtagccggcacc

SEQ ID NO: 5816764 - DNA, 25 bp, Homo sapien
tcgtggcgaatgcctttgactgaga

SEQ ID NO: 5816765 - DNA, 25 bp, Homo sapien
ccacacggccagccctcttcatccg

SEQ ID NO: 5816766 - DNA, 25 bp, Homo sapien
gcggtggcagtcaaggaagtagggc

SEQ ID NO: 5816767 - DNA, 25 bp, Homo sapien
ctggcaggggaggaccaggacaaca

SEQ ID NO: 5816768 - DNA, 25 bp, Homo sapien
gcaggtccacgcaggtggctgggga

SEQ ID NO: 5816769 - DNA, 25 bp, Homo sapien
gaagtcgaaggggtaggacaccacc

SEQ ID NO: 5816770 - DNA, 25 bp, Homo sapien
tcaatggcgtcgaaggcgggctggc

SEQ ID NO: 5816771 - DNA, 25 bp, Homo sapien
tccccagaggttgcagaatgaagtc

SEQ ID NO: 5816772 - DNA, 25 bp, Homo sapien
tgccacctcatagccgtcagggttc

SEQ ID NO: 5816773 - DNA, 25 bp, Homo sapien
gctgcctaaagtgctctgacagtgt

SEQ ID NO: 5816774 - DNA, 25 bp, Homo sapien
gaacttcacacagcccagctctacc

SEQ ID NO: 5816775 - DNA, 25 bp, Homo sapien
atgattgcctttgtctccggggcca

SEQ ID NO: 5816776 - DNA, 25 bp, Homo sapien
gatccaggttctgcgcgttctgcct

SEQ ID NO: 5816777 - DNA, 25 bp, Homo sapien
tctgcctcccgctcgtccacccgtt

SEQ ID NO: 5816778 - DNA, 25 bp, Homo sapien
tcgggctccatcagctcgtgctggc

SEQ ID NO: 5816779 - DNA, 25 bp, Homo sapien
tggagggcagcaggtggatgcgggt

SEQ ID NO: 5816780 - DNA, 25 bp, Homo sapien
agccgcaggtccgggttgcactggc

SEQ ID NO: 5816781 - DNA, 25 bp, Homo sapien
tggcgggtgctggggccggggctag

SEQ ID NO: 5816782 - DNA, 25 bp, Homo sapien
gatgtcgtggcgaatgcctttgact

SEQ ID NO: 5816783 - DNA, 25 bp, Homo sapien
ggtggcagtcaaggaagtagggcca

SEQ ID NO: 5816784 - DNA, 25 bp, Homo sapien
accgtgacgcgtcagacatttacgt

SEQ ID NO: 5816785 - DNA, 25 bp, Homo sapien
actttggcgtagccaggggcttggg

SEQ ID NO: 5816786 - DNA, 25 bp, Homo sapien
aactcgcaccccggccgggcagcgg

SEQ ID NO: 5816787 - DNA, 25 bp, Homo sapien
aggtccacgcaggtggctggggagg

SEQ ID NO: 5816788 - DNA, 25 bp, Homo sapien
agtctccagtagtcaccatctgggg

SEQ ID NO: 5816789 - DNA, 25 bp, Homo sapien
atcatggggtggacgtcagcgtagg

SEQ ID NO: 5816790 - DNA, 25 bp, Homo sapien
atagcagccctcgtcctctctcgtg

SEQ ID NO: 5816791 - DNA, 25 bp, Homo sapien
cttcatccgggcggggatgatgact

SEQ ID NO: 5816792 - DNA, 25 bp, Homo sapien
tcgaaggggtaggacaccaccaggt

SEQ ID NO: 5816793 - DNA, 25 bp, Homo sapien
gccccgttgatgatgctccccctct

SEQ ID NO: 5816794 - DNA, 25 bp, Homo sapien
taggcggcatcgctgcaggtcctga

SEQ ID NO: 5816795 - DNA, 25 bp, Homo sapien
tgggggcagcagtctccagtagtca

SEQ ID NO: 5816796 - DNA, 25 bp, Homo sapien
gtgccggcagggtctgcgcacccag

SEQ ID NO: 5816797 - DNA, 25 bp, Homo sapien
ctccacatcctggcgggtgctgggg

SEQ ID NO: 5816798 - DNA, 25 bp, Homo sapien
tacagaacagaagccagggaggtcc

SEQ ID NO: 5816799 - DNA, 25 bp, Homo sapien
agagcacaaagggtatggtctgcat

SEQ ID NO: 5816800 - DNA, 25 bp, Homo sapien
gcagtgatgtggcactcgggccgcg

SEQ ID NO: 5816801 - DNA, 25 bp, Homo sapien
cacaggtactgggctaggtagatga

SEQ ID NO: 5816802 - DNA, 25 bp, Homo sapien
acgaccggtgctgaagcaggttggg

SEQ ID NO: 5816803 - DNA, 25 bp, Homo sapien
gtcgggctccgtggcctcccccaaa

SEQ ID NO: 5816804 - DNA, 25 bp, Homo sapien
ctcccgtcggccgagggctgcctgc

SEQ ID NO: 5816805 - DNA, 25 bp, Homo sapien
gtcctctctcgtgaagtagcggtgg

SEQ ID NO: 5816806 - DNA, 25 bp, Homo sapien
agccagcgtggcctgtgggtgctca

SEQ ID NO: 5816807 - DNA, 25 bp, Homo sapien
gacctcccgcaggccctcgcagatg

SEQ ID NO: 5816808 - DNA, 25 bp, Homo sapien
tcgtcctctctcgtgaagtagcggt

SEQ ID NO: 5816809 - DNA, 25 bp, Homo sapien
ccggccgggcagcggcgacgaccag

SEQ ID NO: 5816810 - DNA, 25 bp, Homo sapien
gttgagcaggcgctggatgcggggg

SEQ ID NO: 5816811 - DNA, 25 bp, Homo sapien
aagtagggccaggccatgtcaatgg

SEQ ID NO: 5816812 - DNA, 25 bp, Homo sapien
gatgccccggtgcaccgtctccacg

SEQ ID NO: 5816813 - DNA, 25 bp, Homo sapien
gggttaccaagcaggtactcagagc

SEQ ID NO: 5816814 - DNA, 25 bp, Homo sapien
gaagtaggaccaccaccagggctta

SEQ ID NO: 5816815 - DNA, 25 bp, Homo sapien
ccacatcctggcgggtgctggggcc

SEQ ID NO: 5816816 - DNA, 25 bp, Homo sapien
gaagcaggttggggaaggtggtgtg

SEQ ID NO: 5816817 - DNA, 25 bp, Homo sapien
tgcgccgcgggtctccgccagccgg

SEQ ID NO: 5816818 - DNA, 25 bp, Homo sapien
gggaaatttcggttcagatccaggt

SEQ ID NO: 5816819 - DNA, 25 bp, Homo sapien
gggcagcaggtggatgcgggtggtg

SEQ ID NO: 5816820 - DNA, 25 bp, Homo sapien
ggatgtggtcgctgcgtgcgccgcg

SEQ ID NO: 5816821 - DNA, 25 bp, Homo sapien
ggtctgcgcacccagccgccctcac

SEQ ID NO: 5816822 - DNA, 25 bp, Homo sapien
cccaccagtagtgctgggggatggg

SEQ ID NO: 5816823 - DNA, 25 bp, Homo sapien
ggggcagcagtctccagtagtcacc

SEQ ID NO: 5816824 - DNA, 25 bp, Homo sapien
agcatctcccggcccgccacctcgt

SEQ ID NO: 5816825 - DNA, 25 bp, Homo sapien
tcgcccccatgaaggctggctgaga

SEQ ID NO: 5816826 - DNA, 25 bp, Homo sapien
gccctgaccgtgacgcgtcagacat

SEQ ID NO: 5816827 - DNA, 25 bp, Homo sapien
cgatgagcttcacctcgggctccat

SEQ ID NO: 5816828 - DNA, 25 bp, Homo sapien
gggggggaacttcacacagcccagc

SEQ ID NO: 5816829 - DNA, 25 bp, Homo sapien
atcttctcctcctgggggtgcttgg

SEQ ID NO: 5816830 - DNA, 25 bp, Homo sapien
gatgactttcttgatgactttggcg

SEQ ID NO: 5816831 - DNA, 25 bp, Homo sapien
caccccggccgggcagcggcgacga

SEQ ID NO: 5816832 - DNA, 25 bp, Homo sapien
gcaggtcctgagctgcaggtccacg

SEQ ID NO: 5816833 - DNA, 25 bp, Homo sapien
ggcggcagccctgagggcagtgcct

SEQ ID NO: 5816834 - DNA, 25 bp, Homo sapien
gtagtactcggacgtcaggtccggg

SEQ ID NO: 5816835 - DNA, 25 bp, Homo sapien
cgccctcacaccggggggccagcac

SEQ ID NO: 5816836 - DNA, 25 bp, Homo sapien
tcccccaaagagctggcacctccca

SEQ ID NO: 5816837 - DNA, 25 bp, Homo sapien
cttactcccgtcggccgagggctgc

SEQ ID NO: 5816838 - DNA, 25 bp, Homo sapien
gtcgaaggcgggctggcagacctcc

SEQ ID NO: 5816839 - DNA, 25 bp, Homo sapien
cagcaggatgtactcggagctggcc

SEQ ID NO: 5816840 - DNA, 25 bp, Homo sapien
cagaggttgcagaatgaagtccaca

SEQ ID NO: 5816841 - DNA, 25 bp, Homo sapien
agcacagcacagcccagcagccgca

SEQ ID NO: 5816842 - DNA, 25 bp, Homo sapien
atccgggcggggatgatgactttct

SEQ ID NO: 5816843 - DNA, 25 bp, Homo sapien
tcgggcgtgggagaaaacatcttct

SEQ ID NO: 5816844 - DNA, 25 bp, Homo sapien
ccacccgttgtagccggcaccctcg

SEQ ID NO: 5816845 - DNA, 25 bp, Homo sapien
cgcgcccggagcgggtcgggctccg

SEQ ID NO: 5816846 - DNA, 25 bp, Homo sapien
gtaggggaccccacgcagggccagg

SEQ ID NO: 5816847 - DNA, 25 bp, Homo sapien
gctcgtccacccgttgtagccggca

SEQ ID NO: 5816848 - DNA, 25 bp, Homo sapien
ccaccaggtcgcccccatgaaggct

SEQ ID NO: 5816849 - DNA, 25 bp, Homo sapien
tgagagcacaaagggtatggtctgc

SEQ ID NO: 5816850 - DNA, 25 bp, Homo sapien
tgagctgcaggtccacgcaggtggc

SEQ ID NO: 5816851 - DNA, 25 bp, Homo sapien
cacaaagggtatggtctgcatccac

SEQ ID NO: 5816852 - DNA, 25 bp, Homo sapien
gctccatcagctcgtgctggccggg

SEQ ID NO: 5816853 - DNA, 25 bp, Homo sapien
tgttgccgatgagcttcacctcggg

SEQ ID NO: 5816854 - DNA, 25 bp, Homo sapien
ggcagacctcccgcaggccctcgca

SEQ ID NO: 5816855 - DNA, 25 bp, Homo sapien
agcaggtggatgcgggtggtgttga

SEQ ID NO: 5816856 - DNA, 25 bp, Homo sapien
gttgtagccggcaccctcggcagct

SEQ ID NO: 5816857 - DNA, 25 bp, Homo sapien
ccgagggctgcctgcgcgcccggag

SEQ ID NO: 5816858 - DNA, 25 bp, Homo sapien
tgttgtgctgccagagtgtgtacag

SEQ ID NO: 5816859 - DNA, 25 bp, Homo sapien
ggatggggatgtggtcgctgcgtgc

SEQ ID NO: 5816860 - DNA, 25 bp, Homo sapien
cacctcgggctccatcagctcgtgc

SEQ ID NO: 5816861 - DNA, 25 bp, Homo sapien
gggtaggacaccaccaggtcgcccc

SEQ ID NO: 5816862 - DNA, 25 bp, Homo sapien
cgttgatgatgctccccctcttcag

SEQ ID NO: 5816863 - DNA, 25 bp, Homo sapien
ccgtctccacgaaattcaggagtga

SEQ ID NO: 5816864 - DNA, 25 bp, Homo sapien
catctggggctgtggtgatgtcgtg

SEQ ID NO: 5816865 - DNA, 25 bp, Homo sapien
cgctgcaggtcctgagctgcaggtc

SEQ ID NO: 5816866 - DNA, 25 bp, Homo sapien
ggttctgcgcgttctgcctcccgct

SEQ ID NO: 5816867 - DNA, 25 bp, Homo sapien
ggtcgtggggcccagtcctccgcag

SEQ ID NO: 5816868 - DNA, 25 bp, Homo sapien
ggcgctggatgcgggggttaccaag

SEQ ID NO: 5816869 - DNA, 25 bp, Homo sapien
gcccagctctaccgtgatctcaaag

SEQ ID NO: 5816870 - DNA, 25 bp, Homo sapien
agtgatgtggcactcgggccgcgcg

SEQ ID NO: 5816871 - DNA, 25 bp, Homo sapien
ccctgccgtcgaagctgcgcccgat

SEQ ID NO: 5816872 - DNA, 25 bp, Homo sapien
actgtaaggagcagcagcggcggcg

SEQ ID NO: 5816873 - DNA, 25 bp, Homo sapien
ggcgtaggagtggtggctgaagcgg

SEQ ID NO: 5816874 - DNA, 25 bp, Homo sapien
gcagccagcgtggcctgtgggtgct

SEQ ID NO: 5816875 - DNA, 25 bp, Homo sapien
cagcagccgcaggtccgggttgcac

SEQ ID NO: 5816876 - DNA, 25 bp, Homo sapien
ggagacgggcctcggtctccacatc

SEQ ID NO: 5816877 - DNA, 25 bp, Homo sapien
acacggccagccctcttcatccggg

SEQ ID NO: 5816878 - DNA, 25 bp, Homo sapien
gcaccctcggcagctgccacctcat

SEQ ID NO: 5816879 - DNA, 25 bp, Homo sapien
tgcctcccgtgaagctgtaccagtc

SEQ ID NO: 5816880 - DNA, 25 bp, Homo sapien
ggccatccgcctcagcacacgcacc

SEQ ID NO: 5816881 - DNA, 25 bp, Homo sapien
gtaccgctgtctgcagctggtggcc

SEQ ID NO: 5816882 - DNA, 25 bp, Homo sapien
ctgtaggtcctggccacgtgggcgc

SEQ ID NO: 5816883 - DNA, 25 bp, Homo sapien
ggaggcagggtcggcaggtcagtcc

SEQ ID NO: 5816884 - DNA, 25 bp, Homo sapien
gagcttcacctcgggctccatcagc

SEQ ID NO: 5816885 - DNA, 25 bp, Homo sapien
cagcacagcccagcagccgcaggtc

SEQ ID NO: 5816886 - DNA, 25 bp, Homo sapien
caggggaggaccaggacaacagcta

SEQ ID NO: 5816887 - DNA, 25 bp, Homo sapien
accagtccgccccgttgatgatgct

SEQ ID NO: 5816888 - DNA, 25 bp, Homo sapien
gtggctggggaggcagggtcggcag

SEQ ID NO: 5816889 - DNA, 25 bp, Homo sapien
cctaaagtgctctgacagtgtgggg

SEQ ID NO: 5816890 - DNA, 25 bp, Homo sapien
caccttaccccaccagtagtgctgg

SEQ ID NO: 5816891 - DNA, 25 bp, Homo sapien
gatgtctgtggccgacaaaatcaag

SEQ ID NO: 5816892 - DNA, 25 bp, Homo sapien
catggagggcagcaggtggatgcgg

SEQ ID NO: 5816893 - DNA, 25 bp, Homo sapien
ccgcgggtctccgccagccggtagt

SEQ ID NO: 5816894 - DNA, 25 bp, Homo sapien
aagcttctccagcgggtcatagcag

SEQ ID NO: 5816895 - DNA, 25 bp, Homo sapien
gccgatgagcttcacctcgggctcc

SEQ ID NO: 5816896 - DNA, 25 bp, Homo sapien
tcatcatggggtggacgtcagcgta

SEQ ID NO: 5816897 - DNA, 25 bp, Homo sapien
ttgccgatgagcttcacctcgggct

SEQ ID NO: 5816898 - DNA, 25 bp, Homo sapien
tggatacctgggggcagcagtctcc

SEQ ID NO: 5816899 - DNA, 25 bp, Homo sapien
ggttcagatccaggttctgcgcgtt

SEQ ID NO: 5816900 - DNA, 25 bp, Homo sapien
ctgaagcggatgaaggtgggcggca

SEQ ID NO: 5816901 - DNA, 25 bp, Homo sapien
gggtgctggggccggggctagtact

SEQ ID NO: 5816902 - DNA, 25 bp, Homo sapien
cccggagcgggtcgggctccgtggc

SEQ ID NO: 5816903 - DNA, 25 bp, Homo sapien
ctgtctgcagctggtggcctgtggc

SEQ ID NO: 5816904 - DNA, 25 bp, Homo sapien
ggggaggcagggtcggcaggtcagt

SEQ ID NO: 5816905 - DNA, 25 bp, Homo sapien
aagttcttgggtcccatccccagag

SEQ ID NO: 5816906 - DNA, 25 bp, Homo sapien
gtcaggtccgggaaatttcggttca

SEQ ID NO: 5816907 - DNA, 25 bp, Homo sapien
ctcaaagcagttggtgtgcaggtag

SEQ ID NO: 5816908 - DNA, 25 bp, Homo sapien
tagtacttgagcagccagcgtggcc

SEQ ID NO: 5816909 - DNA, 25 bp, Homo sapien
acgcagggccagggcctgcagggag

SEQ ID NO: 5816910 - DNA, 25 bp, Homo sapien
tggggaaggtggtgtggttgtaggc

SEQ ID NO: 5816911 - DNA, 25 bp, Homo sapien
gaggggcacccacggtctggcaggg

SEQ ID NO: 5816912 - DNA, 25 bp, Homo sapien
tgtgcaggtagttgaagtcggacat

SEQ ID NO: 5816913 - DNA, 25 bp, Homo sapien
tcttgatgactttggcgtagccagg

SEQ ID NO: 5816914 - DNA, 25 bp, Homo sapien
ggaccttggacggccagcgcagtga

SEQ ID NO: 5816915 - DNA, 25 bp, Homo sapien
acttcacacagcccagctctaccgt

SEQ ID NO: 5816916 - DNA, 25 bp, Homo sapien
gctccccctcttcaggaaattgcct

SEQ ID NO: 5816917 - DNA, 25 bp, Homo sapien
ctggggaggcagggtcggcaggtca

SEQ ID NO: 5816918 - DNA, 25 bp, Homo sapien
tagtgctgggggatggggatgtggt

SEQ ID NO: 5816919 - DNA, 25 bp, Homo sapien
ccacgaaattcaggagtgactcctt

SEQ ID NO: 5816920 - DNA, 25 bp, Homo sapien
cacggattcagctgcctaaagtgct

SEQ ID NO: 5816921 - DNA, 25 bp, Homo sapien
cccgccacctcgttgccatgaatgt

SEQ ID NO: 5816922 - DNA, 25 bp, Homo sapien
ccgggcggggatgatgactttcttg

SEQ ID NO: 5816923 - DNA, 25 bp, Homo sapien
cctgagctgcaggtccacgcaggtg

SEQ ID NO: 5816924 - DNA, 25 bp, Homo sapien
gcctcagcacacgcaccatctgggc

SEQ ID NO: 5816925 - DNA, 25 bp, Homo sapien
ttcatggagggcagcaggtggatgc

SEQ ID NO: 5816926 - DNA, 25 bp, Homo sapien
ggttcatggagggcagcaggtggat

SEQ ID NO: 5816927 - DNA, 25 bp, Homo sapien
tcgatgaccagcagctccctgccgt

SEQ ID NO: 5816928 - DNA, 25 bp, Homo sapien
gctggctgagagcacaaagggtatg

SEQ ID NO: 5816929 - DNA, 25 bp, Homo sapien
ggacgtcagcgtaggctctggacag

SEQ ID NO: 5816930 - DNA, 25 bp, Homo sapien
aggatgtactcggagctggcctcca

SEQ ID NO: 5816931 - DNA, 25 bp, Homo sapien
gaaggggtaggacaccaccaggtcg

SEQ ID NO: 5816932 - DNA, 25 bp, Homo sapien
ggcaggtcagtccctcccgcagtgg

SEQ ID NO: 5816933 - DNA, 25 bp, Homo sapien
ccctgagggcagtgcctcgtcagcc

SEQ ID NO: 5816934 - DNA, 25 bp, Homo sapien
gatacctgggggcagcagtctccag

SEQ ID NO: 5816935 - DNA, 25 bp, Homo sapien
attgcctccacacctattctccgac

SEQ ID NO: 5816936 - DNA, 25 bp, Homo sapien
cgctggatgcgggggttaccaagca

SEQ ID NO: 5816937 - DNA, 25 bp, Homo sapien
ttgtgggatgtctgtggccgacaaa

SEQ ID NO: 5816938 - DNA, 25 bp, Homo sapien
gtcccatccccagaggttgcagaat

SEQ ID NO: 5816939 - DNA, 25 bp, Homo sapien
gaagctgcgcccgatgctgtaggtc

SEQ ID NO: 5816940 - DNA, 25 bp, Homo sapien
cctcgggctccatcagctcgtgctg

SEQ ID NO: 5816941 - DNA, 25 bp, Homo sapien
tgtggccgacaaaatcaagagccag

SEQ ID NO: 5816942 - DNA, 25 bp, Homo sapien
tgaagtccacacggccagccctctt

SEQ ID NO: 5816943 - DNA, 25 bp, Homo sapien
taaggagcagcagcggcggcggggg

SEQ ID NO: 5816944 - DNA, 25 bp, Homo sapien
gcgggaggccatccgcctcagcaca

SEQ ID NO: 5816945 - DNA, 25 bp, Homo sapien
tcccgctcgtccacccgttgtagcc

SEQ ID NO: 5816946 - DNA, 25 bp, Homo sapien
gggggcggcatggtggggcggcgga

SEQ ID NO: 5816947 - DNA, 25 bp, Homo sapien
ttgccatgaatgttgccgatgagct

SEQ ID NO: 5816948 - DNA, 25 bp, Homo sapien
tcggcagctgccacctcatagccgt

SEQ ID NO: 5816949 - DNA, 25 bp, Homo sapien
cgtcggccgagggctgcctgcgcgc

SEQ ID NO: 5816950 - DNA, 25 bp, Homo sapien
aggtccgggttgcactggccttcca

SEQ ID NO: 5816951 - DNA, 25 bp, Homo sapien
gcagcttgaacatcttctcgtcggg

SEQ ID NO: 5816952 - DNA, 25 bp, Homo sapien
gcgcccgatgctgtaggtcctggcc

SEQ ID NO: 5816953 - DNA, 25 bp, Homo sapien
gcaggatgtactcggagctggcctc

SEQ ID NO: 5816954 - DNA, 25 bp, Homo sapien
tcttctcgtcgggcgtgggagaaaa

SEQ ID NO: 5816955 - DNA, 25 bp, Homo sapien
acagaagccagggaggtcccggtac

SEQ ID NO: 5816956 - DNA, 25 bp, Homo sapien
gggggttaccaagcaggtactcaga

SEQ ID NO: 5816957 - DNA, 25 bp, Homo sapien
gtctccacatcctggcgggtgctgg

SEQ ID NO: 5816958 - DNA, 25 bp, Homo sapien
gagggcagcaggtggatgcgggtgg

SEQ ID NO: 5816959 - DNA, 25 bp, Homo sapien
ccaggcctccccgaagcttctccag

SEQ ID NO: 5816960 - DNA, 25 bp, Homo sapien
gcgggtcgggctccgtggcctcccc

SEQ ID NO: 5816961 - DNA, 25 bp, Homo sapien
gttgtaggcggcatcgctgcaggtc

SEQ ID NO: 5816962 - DNA, 25 bp, Homo sapien
ccaccagggcttactcccgtcggcc

SEQ ID NO: 5816963 - DNA, 25 bp, Homo sapien
agtaggaccaccaccagggcttact

SEQ ID NO: 5816964 - DNA, 25 bp, Homo sapien
ctttgatgccccggtgcaccgtctc

SEQ ID NO: 5816965 - DNA, 25 bp, Homo sapien
gcgttctgcctcccgctcgtccacc

SEQ ID NO: 5816966 - DNA, 25 bp, Homo sapien
actgagatccgggcgtttttgactg

SEQ ID NO: 5816967 - DNA, 25 bp, Homo sapien
tggagaagtcgaaggggtaggacac

SEQ ID NO: 5816968 - DNA, 25 bp, Homo sapien
tgaagtcggacatgcctcccgtgaa

SEQ ID NO: 5816969 - DNA, 25 bp, Homo sapien
ctggccttccaggagctggtgtaga

SEQ ID NO: 5816970 - DNA, 25 bp, Homo sapien
gccgccctcacaccggggggccagc

SEQ ID NO: 5816971 - DNA, 25 bp, Homo sapien
ccgcaggtccgggttgcactggcct

SEQ ID NO: 5816972 - DNA, 25 bp, Homo sapien
acgaaattcaggagtgactccttgt

SEQ ID NO: 5816973 - DNA, 25 bp, Homo sapien
ccgggaaatttcggttcagatccag

SEQ ID NO: 5816974 - DNA, 25 bp, Homo sapien
ggatgatgactttcttgatgacttt

SEQ ID NO: 5816975 - DNA, 25 bp, Homo sapien
gcgtaggctctggacagcagcttga

SEQ ID NO: 5816976 - DNA, 25 bp, Homo sapien
tccgctcaaactcgcaccccggccg

SEQ ID NO: 5816977 - DNA, 25 bp, Homo sapien
cccgttgatgatgctccccctcttc

SEQ ID NO: 5816978 - DNA, 25 bp, Homo sapien
ccgtgaagctgtaccagtccgcccc

SEQ ID NO: 5816979 - DNA, 25 bp, Homo sapien
gagggcagtgcctcgtcagcctcca

SEQ ID NO: 5816980 - DNA, 25 bp, Homo sapien
aattcaggagtgactccttgttgtg

SEQ ID NO: 5816981 - DNA, 25 bp, Homo sapien
cctgggggcagcagtctccagtagt

SEQ ID NO: 5816982 - DNA, 25 bp, Homo sapien
atgctccccctcttcaggaaattgc

SEQ ID NO: 5816983 - DNA, 25 bp, Homo sapien
gtgctctgacagtgtgggggctgca

SEQ ID NO: 5816984 - DNA, 25 bp, Homo sapien
accttggacggccagcgcagtgatg

SEQ ID NO: 5816985 - DNA, 25 bp, Homo sapien
tgtctgtggccgacaaaatcaagag

SEQ ID NO: 5816986 - DNA, 25 bp, Homo sapien
ttgggtcccatccccagaggttgca

SEQ ID NO: 5816987 - DNA, 25 bp, Homo sapien
ctggatgcgggggttaccaagcagg

SEQ ID NO: 5816988 - DNA, 25 bp, Homo sapien
gggcgtttttgactggcttgccgaa

SEQ ID NO: 5816989 - DNA, 25 bp, Homo sapien
gcacagcccagcagccgcaggtccg

SEQ ID NO: 5816990 - DNA, 25 bp, Homo sapien
gtctccacgaaattcaggagtgact

SEQ ID NO: 5816991 - DNA, 25 bp, Homo sapien
accatctggggctgtggtgatgtcg

SEQ ID NO: 5816992 - DNA, 25 bp, Homo sapien
tcagctcgtgctggccggggcggct

SEQ ID NO: 5816993 - DNA, 25 bp, Homo sapien
tgagcaggcgctggatgcgggggtt

SEQ ID NO: 5816994 - DNA, 25 bp, Homo sapien
gagggctgcctgcgcgcccggagcg

SEQ ID NO: 5816995 - DNA, 25 bp, Homo sapien
gcggctttgtgggatgtctgtggcc

SEQ ID NO: 5816996 - DNA, 25 bp, Homo sapien
gcgtcgaaggcgggctggcagacct

SEQ ID NO: 5816997 - DNA, 25 bp, Homo sapien
agcaggttggggaaggtggtgtggt

SEQ ID NO: 5816998 - DNA, 25 bp, Homo sapien
cgcacccagccgccctcacaccggg

SEQ ID NO: 5816999 - DNA, 25 bp, Homo sapien
tattctccgacctgtccatcatcat

SEQ ID NO: 5817000 - DNA, 25 bp, Homo sapien
gtgtagaacgctcagcaggatgtac

SEQ ID NO: 5817001 - DNA, 25 bp, Homo sapien
agatgtgccggcagggtctgcgcac

SEQ ID NO: 5817002 - DNA, 25 bp, Homo sapien
tcgcagatgtgccggcagggtctgc

SEQ ID NO: 5817003 - DNA, 25 bp, Homo sapien
aggtcctgagctgcaggtccacgca

SEQ ID NO: 5817004 - DNA, 25 bp, Homo sapien
atgtggcactcgggccgcgcggggc

SEQ ID NO: 5817005 - DNA, 25 bp, Homo sapien
tcggccgagggctgcctgcgcgccc

SEQ ID NO: 5817006 - DNA, 25 bp, Homo sapien
ggaagtagggccaggccatgtcaat

SEQ ID NO: 5817007 - DNA, 25 bp, Homo sapien
gggcagcggcgacgaccaggactgt

SEQ ID NO: 5817008 - DNA, 25 bp, Homo sapien
ggcggcgggggcggcatggtggggc

SEQ ID NO: 5817009 - DNA, 25 bp, Homo sapien
tttcttgatgactttggcgtagcca

SEQ ID NO: 5817010 - DNA, 25 bp, Homo sapien
aagccagggaggtcccggtactgta

SEQ ID NO: 5817011 - DNA, 25 bp, Homo sapien
gggtatggtctgcatccacttcatg

SEQ ID NO: 5817012 - DNA, 25 bp, Homo sapien
tgcgtgcgccgcgggtctccgccag

SEQ ID NO: 5817013 - DNA, 25 bp, Homo sapien
gggtcgggctccgtggcctccccca

SEQ ID NO: 5817014 - DNA, 25 bp, Homo sapien
gtggcctcccccaaagagctggcac

SEQ ID NO: 5817015 - DNA, 25 bp, Homo sapien
cgctgtctgcagctggtggcctgtg

SEQ ID NO: 5817016 - DNA, 25 bp, Homo sapien
ggggcggctggagaactcgatgacc

SEQ ID NO: 5817017 - DNA, 25 bp, Homo sapien
gcgggggcggcatggtggggcggcg

SEQ ID NO: 5817018 - DNA, 25 bp, Homo sapien
ggtgtgcaggtagttgaagtcggac

SEQ ID NO: 5817019 - DNA, 25 bp, Homo sapien
ccatgaataaagttcttgggtccca

SEQ ID NO: 5817020 - DNA, 25 bp, Homo sapien
tcgctgcgtgcgccgcgggtctccg

SEQ ID NO: 5817021 - DNA, 25 bp, Homo sapien
ggtactgtaccgctgtctgcagctg

SEQ ID NO: 5817022 - DNA, 25 bp, Homo sapien
gggttccgctcaaactcgcaccccg

SEQ ID NO: 5817023 - DNA, 25 bp, Homo sapien
tgcctccacacctattctccgacct

SEQ ID NO: 5817024 - DNA, 25 bp, Homo sapien
acacctttgatgccccggtgcaccg

SEQ ID NO: 5817025 - DNA, 25 bp, Homo sapien
tgggggtgcttggagaagtcgaagg

SEQ ID NO: 5817026 - DNA, 25 bp, Homo sapien
tgggggctgcagccctcctacagaa

SEQ ID NO: 5817027 - DNA, 25 bp, Homo sapien
gaagtagcggtggcagtcaaggaag

SEQ ID NO: 5817028 - DNA, 25 bp, Homo sapien
cagtagtcaccatctggggctgtgg

SEQ ID NO: 5817029 - DNA, 25 bp, Homo sapien
cagcacacgcaccatctgggcgtag

SEQ ID NO: 5817030 - DNA, 25 bp, Homo sapien
gggggaacttcacacagcccagctc

SEQ ID NO: 5817031 - DNA, 25 bp, Homo sapien
caggagtgactccttgttgtgctgc

SEQ ID NO: 5817032 - DNA, 25 bp, Homo sapien
tgcaggaatcagagcttctgaaatc

SEQ ID NO: 5817033 - DNA, 25 bp, Homo sapien
tcagggttcatggagggcagcaggt

SEQ ID NO: 5817034 - DNA, 25 bp, Homo sapien
gcggggccggggctctgcgctcgct

SEQ ID NO: 5817035 - DNA, 25 bp, Homo sapien
agcggcgacgaccaggactgtaagg

SEQ ID NO: 5817036 - DNA, 25 bp, Homo sapien
cctcccacgaccggtgctgaagcag

SEQ ID NO: 5817037 - DNA, 25 bp, Homo sapien
gctgcgtgcgccgcgggtctccgcc

SEQ ID NO: 5817038 - DNA, 25 bp, Homo sapien
tacctgggggcagcagtctccagta

SEQ ID NO: 5817039 - DNA, 25 bp, Homo sapien
aaatggcagcggctttgtgggatgt

SEQ ID NO: 5817040 - DNA, 25 bp, Homo sapien
gcgtttttgactggcttgccgaatt

SEQ ID NO: 5817041 - DNA, 25 bp, Homo sapien
tgggcggcagccctgagggcagtgc

SEQ ID NO: 5817042 - DNA, 25 bp, Homo sapien
caccagtagtgctgggggatgggga

SEQ ID NO: 5817043 - DNA, 25 bp, Homo sapien
ctcctgggggtgcttggagaagtcg

SEQ ID NO: 5817044 - DNA, 25 bp, Homo sapien
ctggtggcctgtggcattcaccggc

SEQ ID NO: 5817045 - DNA, 25 bp, Homo sapien
tggacagcagcttgaacatcttctc

SEQ ID NO: 5817046 - DNA, 25 bp, Homo sapien
gggttgcactggccttccaggagct

SEQ ID NO: 5817047 - DNA, 25 bp, Homo sapien
cctggccacgtgggcgcagcgggag

SEQ ID NO: 5817048 - DNA, 25 bp, Homo sapien
aataaaatggcagcggctttgtggg

SEQ ID NO: 5817049 - DNA, 25 bp, Homo sapien
tgacaatgtggatacctgggggcag

SEQ ID NO: 5817050 - DNA, 25 bp, Homo sapien
gatgtactcggagctggcctccacc

SEQ ID NO: 5817051 - DNA, 25 bp, Homo sapien
ctccaggcctccccgaagcttctcc

SEQ ID NO: 5817052 - DNA, 25 bp, Homo sapien
gcgggggttaccaagcaggtactca

SEQ ID NO: 5817053 - DNA, 25 bp, Homo sapien
gtagggccaggccatgtcaatggcg

SEQ ID NO: 5817054 - DNA, 25 bp, Homo sapien
tcccggcccgccacctcgttgccat

SEQ ID NO: 5817055 - DNA, 25 bp, Homo sapien
accagggcttactcccgtcggccga

SEQ ID NO: 5817056 - DNA, 25 bp, Homo sapien
acagctactgtgcaggaatcagagc

SEQ ID NO: 5817057 - DNA, 25 bp, Homo sapien
atctcaaagcagttggtgtgcaggt

SEQ ID NO: 5817058 - DNA, 25 bp, Homo sapien
ttatctgtcaccacacctttgatgc

SEQ ID NO: 5817059 - DNA, 25 bp, Homo sapien
gtggggcggcggaccttggacggcc

SEQ ID NO: 5817060 - DNA, 25 bp, Homo sapien
cggcggaccttggacggccagcgca

SEQ ID NO: 5817061 - DNA, 25 bp, Homo sapien
gaaggctggctgagagcacaaaggg

SEQ ID NO: 5817062 - DNA, 25 bp, Homo sapien
ccgcaggccctcgcagatgtgccgg

SEQ ID NO: 5817063 - DNA, 25 bp, Homo sapien
ggtcgctgcgtgcgccgcgggtctc

SEQ ID NO: 5817064 - DNA, 25 bp, Homo sapien
tcagtccctcccgcagtggccctga

SEQ ID NO: 5817065 - DNA, 25 bp, Homo sapien
gcctccaccacctcccacgaccggt

SEQ ID NO: 5817066 - DNA, 25 bp, Homo sapien
gcaggtccgggttgcactggccttc

SEQ ID NO: 5817067 - DNA, 25 bp, Homo sapien
gctggcctccaccacctcccacgac

SEQ ID NO: 5817068 - DNA, 25 bp, Homo sapien
gggcgtgggagaaaacatcttctcc

SEQ ID NO: 5817069 - DNA, 25 bp, Homo sapien
gatgaccagcagctccctgccgtcg

SEQ ID NO: 5817070 - DNA, 25 bp, Homo sapien
gatgagcatctcccggcccgccacc

SEQ ID NO: 5817071 - DNA, 25 bp, Homo sapien
cgcagcccatgaataaagttcttgg

SEQ ID NO: 5817072 - DNA, 25 bp, Homo sapien
ggatgcggagacgggcctcggtctc

SEQ ID NO: 5817073 - DNA, 25 bp, Homo sapien
acagtgtgggggctgcagccctcct

SEQ ID NO: 5817074 - DNA, 25 bp, Homo sapien
gcttctccagcgggtcatagcagcc

SEQ ID NO: 5817075 - DNA, 25 bp, Homo sapien
gcctgtgggtgctcagcgatgtgaa

SEQ ID NO: 5817076 - DNA, 25 bp, Homo sapien
catccccagaggttgcagaatgaag

SEQ ID NO: 5817077 - DNA, 25 bp, Homo sapien
ccatgaaggctggctgagagcacaa

SEQ ID NO: 5817078 - DNA, 25 bp, Homo sapien
cgggctccgtggcctcccccaaaga

SEQ ID NO: 5817079 - DNA, 25 bp, Homo sapien
tggcctgtggcattcaccggcgggg

SEQ ID NO: 5817080 - DNA, 25 bp, Homo sapien
agctcgtgctggccggggcggctgg

SEQ ID NO: 5817081 - DNA, 25 bp, Homo sapien
aagggtatggtctgcatccacttca

SEQ ID NO: 5817082 - DNA, 25 bp, Homo sapien
tgcactggccttccaggagctggtg

SEQ ID NO: 5817083 - DNA, 25 bp, Homo sapien
aacatcttctcgtcgggcgtgggag

SEQ ID NO: 5817084 - DNA, 25 bp, Homo sapien
gtcctgagctgcaggtccacgcagg

SEQ ID NO: 5817085 - DNA, 25 bp, Homo sapien
taggagtggtggctgaagcggatga

SEQ ID NO: 5817086 - DNA, 25 bp, Homo sapien
taaaatggcagcggctttgtgggat

SEQ ID NO: 5817087 - DNA, 25 bp, Homo sapien
cctgtccatcatcatggggtggacg

SEQ ID NO: 5817088 - DNA, 25 bp, Homo sapien
aagcagttggtgtgcaggtagttga

SEQ ID NO: 5817089 - DNA, 25 bp, Homo sapien
ccgggttgcactggccttccaggag

SEQ ID NO: 5817090 - DNA, 25 bp, Homo sapien
ccgccagccggtagtactcggacgt

SEQ ID NO: 5817091 - DNA, 25 bp, Homo sapien
cagcagcttgaacatcttctcgtcg

SEQ ID NO: 5817092 - DNA, 25 bp, Homo sapien
gggcttgggcaatgacaatgtggat

SEQ ID NO: 5817093 - DNA, 25 bp, Homo sapien
atcctggcgggtgctggggccgggg

SEQ ID NO: 5817094 - DNA, 25 bp, Homo sapien
gcgacgaccaggactgtaaggagca

SEQ ID NO: 5817095 - DNA, 25 bp, Homo sapien
agggccaggccatgtcaatggcgtc

SEQ ID NO: 5817096 - DNA, 25 bp, Homo sapien
catcatcatggggtggacgtcagcg

SEQ ID NO: 5817097 - DNA, 25 bp, Homo sapien
cttctcctcctgggggtgcttggag

SEQ ID NO: 5817098 - DNA, 25 bp, Homo sapien
gaccaggacaacagctactgtgcag

SEQ ID NO: 5817099 - DNA, 25 bp, Homo sapien
gggcagtgcctcgtcagcctccagg

SEQ ID NO: 5817100 - DNA, 25 bp, Homo sapien
agtccctcccgcagtggccctgacc

SEQ ID NO: 5817101 - DNA, 25 bp, Homo sapien
aggtcctggccacgtgggcgcagcg

SEQ ID NO: 5817102 - DNA, 25 bp, Homo sapien
acgcgtcagacatttacgtagggga

SEQ ID NO: 5817103 - DNA, 25 bp, Homo sapien
gctaggtagatgagcatctcccggc

SEQ ID NO: 5817104 - DNA, 25 bp, Homo sapien
ggttgcagaatgaagtccacacggc

SEQ ID NO: 5817105 - DNA, 25 bp, Homo sapien
ctcatagccgtcagggttcatggag

SEQ ID NO: 5817106 - DNA, 25 bp, Homo sapien
gttgaagtcggacatgcctcccgtg

SEQ ID NO: 5817107 - DNA, 25 bp, Homo sapien
cggtctccacatcctggcgggtgct

SEQ ID NO: 5817108 - DNA, 25 bp, Homo sapien
aatgacaatgtggatacctgggggc

SEQ ID NO: 5817109 - DNA, 25 bp, Homo sapien
tccccgaagcttctccagcgggtca

SEQ ID NO: 5817110 - DNA, 25 bp, Homo sapien
ctgcaggtcctgagctgcaggtcca

SEQ ID NO: 5817111 - DNA, 25 bp, Homo sapien
gagcagccagcgtggcctgtgggtg

SEQ ID NO: 5817112 - DNA, 25 bp, Homo sapien
tctgcgcacccagccgccctcacac

SEQ ID NO: 5817113 - DNA, 25 bp, Homo sapien
gtgctcagcgatgtgaagtaggacc

SEQ ID NO: 5817114 - DNA, 25 bp, Homo sapien
gatgactttggcgtagccaggggct

SEQ ID NO: 5817115 - DNA, 25 bp, Homo sapien
gggaacttcacacagcccagctcta

SEQ ID NO: 5817116 - DNA, 25 bp, Homo sapien
tccatcatcatggggtggacgtcag

SEQ ID NO: 5817117 - DNA, 25 bp, Homo sapien
agtgtgggggctgcagccctcctac

SEQ ID NO: 5817118 - DNA, 25 bp, Homo sapien
cattcaccggcggggttccgctcaa

SEQ ID NO: 5817119 - DNA, 25 bp, Homo sapien
tgcctcgtcagcctccaggcctccc

SEQ ID NO: 5817120 - DNA, 25 bp, Homo sapien
aggcagggtcggcaggtcagtccct

SEQ ID NO: 5817121 - DNA, 25 bp, Homo sapien
ggcatggtggggcggcggaccttgg

SEQ ID NO: 5817122 - DNA, 25 bp, Homo sapien
gtatggtctgcatccacttcatgat

SEQ ID NO: 5817123 - DNA, 25 bp, Homo sapien
tggcctgtgggtgctcagcgatgtg

SEQ ID NO: 5817124 - DNA, 25 bp, Homo sapien
tgacgcgtcagacatttacgtaggg

SEQ ID NO: 5817125 - DNA, 25 bp, Homo sapien
agctgcaggtccacgcaggtggctg

SEQ ID NO: 5817126 - DNA, 25 bp, Homo sapien
ccggtactgtaccgctgtctgcagc

SEQ ID NO: 5817127 - DNA, 25 bp, Homo sapien
gcggggatgatgactttcttgatga

SEQ ID NO: 5817128 - DNA, 25 bp, Homo sapien
catctgggcgtaggagtggtggctg

SEQ ID NO: 5817129 - DNA, 25 bp, Homo sapien
agaagccagggaggtcccggtactg

SEQ ID NO: 5817130 - DNA, 25 bp, Homo sapien
atgagcttcacctcgggctccatca

SEQ ID NO: 5817131 - DNA, 25 bp, Homo sapien
cgtggcctgtgggtgctcagcgatg

SEQ ID NO: 5817132 - DNA, 25 bp, Homo sapien
ggccttccaggagctggtgtagaac

SEQ ID NO: 5817133 - DNA, 25 bp, Homo sapien
gaagcggatgaaggtgggcggcagc

SEQ ID NO: 5817134 - DNA, 25 bp, Homo sapien
gatgatgctccccctcttcaggaaa

SEQ ID NO: 5817135 - DNA, 25 bp, Homo sapien
ccgcgcggggccggggctctgcgct

SEQ ID NO: 5817136 - DNA, 25 bp, Homo sapien
gtgctggggccggggctagtacttg

SEQ ID NO: 5817137 - DNA, 25 bp, Homo sapien
gcagtctccagtagtcaccatctgg

SEQ ID NO: 5817138 - DNA, 25 bp, Homo sapien
ccaaagagctggcacctcccagcgg

SEQ ID NO: 5817139 - DNA, 25 bp, Homo sapien
caccacacctttgatgccccggtgc

SEQ ID NO: 5817140 - DNA, 25 bp, Homo sapien
tgccagagtgtgtacagggcctcct

SEQ ID NO: 5817141 - DNA, 25 bp, Homo sapien
gtaccagtccgccccgttgatgatg

SEQ ID NO: 5817142 - DNA, 25 bp, Homo sapien
gatgaaggtgggcggcagccctgag

SEQ ID NO: 5817143 - DNA, 25 bp, Homo sapien
accagcagctccctgccgtcgaagc

SEQ ID NO: 5817144 - DNA, 25 bp, Homo sapien
gtgctgccagagtgtgtacagggcc

SEQ ID NO: 5817145 - DNA, 25 bp, Homo sapien
gggaggtcccggtactgtaccgctg

SEQ ID NO: 5817146 - DNA, 25 bp, Homo sapien
ccacgcagggccagggcctgcaggg

SEQ ID NO: 5817147 - DNA, 25 bp, Homo sapien
ctccaccacctcccacgaccggtgc

SEQ ID NO: 5817148 - DNA, 25 bp, Homo sapien
tcgtcagcctccaggcctccccgaa

SEQ ID NO: 5817149 - DNA, 25 bp, Homo sapien
gccggcaccctcggcagctgccacc

SEQ ID NO: 5817150 - DNA, 25 bp, Homo sapien
gtaggtcctggccacgtgggcgcag

SEQ ID NO: 5817151 - DNA, 25 bp, Homo sapien
ccccaaagagctggcacctcccagc

SEQ ID NO: 5817152 - DNA, 25 bp, Homo sapien
ggcgggctggcagacctcccgcagg

SEQ ID NO: 5817153 - DNA, 25 bp, Homo sapien
ggggcacccacggtctggcagggga

SEQ ID NO: 5817154 - DNA, 25 bp, Homo sapien
ttgcagaatgaagtccacacggcca

SEQ ID NO: 5817155 - DNA, 25 bp, Homo sapien
tcagcgatgtgaagtaggaccacca

SEQ ID NO: 5817156 - DNA, 25 bp, Homo sapien
tcgtgaagtagcggtggcagtcaag

SEQ ID NO: 5817157 - DNA, 25 bp, Homo sapien
accgtgatctcaaagcagttggtgt

SEQ ID NO: 5817158 - DNA, 25 bp, Homo sapien
tgtactcggagctggcctccaccac

SEQ ID NO: 5817159 - DNA, 25 bp, Homo sapien
gtcaccacacctttgatgccccggt

SEQ ID NO: 5817160 - DNA, 25 bp, Homo sapien
atggtctgcatccacttcatgattg

SEQ ID NO: 5817161 - DNA, 25 bp, Homo sapien
ttccaggagctggtgtagaacgctc

SEQ ID NO: 5817162 - DNA, 25 bp, Homo sapien
agtagtgctgggggatggggatgtg

SEQ ID NO: 5817163 - DNA, 25 bp, Homo sapien
gtgggagaaaacatcttctcctcct

SEQ ID NO: 5817164 - DNA, 25 bp, Homo sapien
cgtcgggcgtgggagaaaacatctt

SEQ ID NO: 5817165 - DNA, 25 bp, Homo sapien
ccccggccgggcagcggcgacgacc

SEQ ID NO: 5817166 - DNA, 25 bp, Homo sapien
aatgaagtccacacggccagccctc

SEQ ID NO: 5817167 - DNA, 25 bp, Homo sapien
gctggtgtagaacgctcagcaggat

SEQ ID NO: 5817168 - DNA, 25 bp, Homo sapien
ctccctgccgtcgaagctgcgcccg

SEQ ID NO: 5817169 - DNA, 25 bp, Homo sapien
tctgggcgtaggagtggtggctgaa

SEQ ID NO: 5817170 - DNA, 25 bp, Homo sapien
cctcgtcctctctcgtgaagtagcg

SEQ ID NO: 5817171 - DNA, 25 bp, Homo sapien
tccacacctattctccgacctgtcc

SEQ ID NO: 5817172 - DNA, 25 bp, Homo sapien
cacacagcccagctctaccgtgatc

SEQ ID NO: 5817173 - DNA, 25 bp, Homo sapien
ccacacctttgatgccccggtgcac

SEQ ID NO: 5817174 - DNA, 25 bp, Homo sapien
ggaaattgcctccacacctattctc

SEQ ID NO: 5817175 - DNA, 25 bp, Homo sapien
tctctcgtgaagtagcggtggcagt

SEQ ID NO: 5817176 - DNA, 25 bp, Homo sapien
ttgatgccccggtgcaccgtctcca

SEQ ID NO: 5817177 - DNA, 25 bp, Homo sapien
ggggatggggatgtggtcgctgcgt

SEQ ID NO: 5817178 - DNA, 25 bp, Homo sapien
tgcaggtagttgaagtcggacatgc

SEQ ID NO: 5817179 - DNA, 25 bp, Homo sapien
ggggcggcggaccttggacggccag

SEQ ID NO: 5817180 - DNA, 25 bp, Homo sapien
agcaggcgctggatgcgggggttac

SEQ ID NO: 5817181 - DNA, 25 bp, Homo sapien
ccggcggggttccgctcaaactcgc

SEQ ID NO: 5817182 - DNA, 25 bp, Homo sapien
ggaggaccaggacaacagctactgt

SEQ ID NO: 5817183 - DNA, 25 bp, Homo sapien
cggagcgggtcgggctccgtggcct

SEQ ID NO: 5817184 - DNA, 25 bp, Homo sapien
aatgttgccgatgagcttcacctcg

SEQ ID NO: 5817185 - DNA, 25 bp, Homo sapien
acgcaccatctgggcgtaggagtgg

SEQ ID NO: 5817186 - DNA, 25 bp, Homo sapien
cgctcagcaggatgtactcggagct

SEQ ID NO: 5817187 - DNA, 25 bp, Homo sapien
ccgcagtggccctgaccgtgacgcg

SEQ ID NO: 5817188 - DNA, 25 bp, Homo sapien
cagcccagctctaccgtgatctcaa

SEQ ID NO: 5817189 - DNA, 25 bp, Homo sapien
agcagccctcgtcctctctcgtgaa

SEQ ID NO: 5817190 - DNA, 25 bp, Homo sapien
ggcggggttccgctcaaactcgcac

SEQ ID NO: 5817191 - DNA, 25 bp, Homo sapien
ctgcgcccgatgctgtaggtcctgg

SEQ ID NO: 5817192 - DNA, 25 bp, Homo sapien
caggcgctggatgcgggggttacca

SEQ ID NO: 5817193 - DNA, 25 bp, Homo sapien
tggtgtagaacgctcagcaggatgt

SEQ ID NO: 5817194 - DNA, 25 bp, Homo sapien
ggcggctggagaactcgatgaccag

SEQ ID NO: 5817195 - DNA, 25 bp, Homo sapien
tgtgggggctgcagccctcctacag

SEQ ID NO: 5817196 - DNA, 25 bp, Homo sapien
gcccccatgaaggctggctgagagc

SEQ ID NO: 5817197 - DNA, 25 bp, Homo sapien
cagatccaggttctgcgcgttctgc

SEQ ID NO: 5817198 - DNA, 25 bp, Homo sapien
cctcgggggggaacttcacacagcc

SEQ ID NO: 5817199 - DNA, 25 bp, Homo sapien
agcgatgtgaagtaggaccaccacc

SEQ ID NO: 5817200 - DNA, 25 bp, Homo sapien
cgaccaggactgtaaggagcagcag

SEQ ID NO: 5817201 - DNA, 25 bp, Homo sapien
gttctgcctcccgctcgtccacccg

SEQ ID NO: 5817202 - DNA, 25 bp, Homo sapien
atgcggagacgggcctcggtctcca

SEQ ID NO: 5817203 - DNA, 25 bp, Homo sapien
cactggccttccaggagctggtgta

SEQ ID NO: 5817204 - DNA, 25 bp, Homo sapien
atcgctgcaggtcctgagctgcagg

SEQ ID NO: 5817205 - DNA, 25 bp, Homo sapien
tgtccatcatcatggggtggacgtc

SEQ ID NO: 5817206 - DNA, 25 bp, Homo sapien
caggaatcagagcttctgaaatcac

SEQ ID NO: 5817207 - DNA, 25 bp, Homo sapien
ggcagcagtctccagtagtcaccat

SEQ ID NO: 5817208 - DNA, 25 bp, Homo sapien
acatcctggcgggtgctggggccgg

SEQ ID NO: 5817209 - DNA, 25 bp, Homo sapien
acttgagcagccagcgtggcctgtg

SEQ ID NO: 5817210 - DNA, 25 bp, Homo sapien
tctccagtagtcaccatctggggct

SEQ ID NO: 5817211 - DNA, 25 bp, Homo sapien
caccaccaggtcgcccccatgaagg

SEQ ID NO: 5817212 - DNA, 25 bp, Homo sapien
gcctcctcgggggggaacttcacac

SEQ ID NO: 5817213 - DNA, 25 bp, Homo sapien
taccaagcaggtactcagagcacag

SEQ ID NO: 5817214 - DNA, 25 bp, Homo sapien
tggcctccaccacctcccacgaccg

SEQ ID NO: 5817215 - DNA, 25 bp, Homo sapien
tgactgagatccgggcgtttttgac

SEQ ID NO: 5817216 - DNA, 25 bp, Homo sapien
tggggtggacgtcagcgtaggctct

SEQ ID NO: 5817217 - DNA, 25 bp, Homo sapien
agtgactccttgttgtgctgccaga

SEQ ID NO: 5817218 - DNA, 25 bp, Homo sapien
aggacaacagctactgtgcaggaat

SEQ ID NO: 5817219 - DNA, 25 bp, Homo sapien
gcagcagcggcggcgggggcggcat

SEQ ID NO: 5817220 - DNA, 25 bp, Homo sapien
caggttggggaaggtggtgtggttg

SEQ ID NO: 5817221 - DNA, 25 bp, Homo sapien
cactcgggccgcgcggggccggggc

SEQ ID NO: 5817222 - DNA, 25 bp, Homo sapien
gtctggcaggggaggaccaggacaa

SEQ ID NO: 5817223 - DNA, 25 bp, Homo sapien
aagtccacacggccagccctcttca

SEQ ID NO: 5817224 - DNA, 25 bp, Homo sapien
tggatgcgggtggtgttgagcaggc

SEQ ID NO: 5817225 - DNA, 25 bp, Homo sapien
aatgcctttgactgagatccgggcg

SEQ ID NO: 5817226 - DNA, 25 bp, Homo sapien
ctcggtctccacatcctggcgggtg

SEQ ID NO: 5817227 - DNA, 25 bp, Homo sapien
cgttgccatgaatgttgccgatgag

SEQ ID NO: 5817228 - DNA, 25 bp, Homo sapien
tgtcgtggcgaatgcctttgactga

SEQ ID NO: 5817229 - DNA, 25 bp, Homo sapien
tgctggccggggcggctggagaact

SEQ ID NO: 5817230 - DNA, 25 bp, Homo sapien
gtccgccccgttgatgatgctcccc

SEQ ID NO: 5817231 - DNA, 25 bp, Homo sapien
gggaggccatccgcctcagcacacg

SEQ ID NO: 5817232 - DNA, 25 bp, Homo sapien
tgaacatcttctcgtcgggcgtggg

SEQ ID NO: 5817233 - DNA, 25 bp, Homo sapien
gcctccaggcctccccgaagcttct

SEQ ID NO: 5817234 - DNA, 25 bp, Homo sapien
atggggatgtggtcgctgcgtgcgc

SEQ ID NO: 5817235 - DNA, 25 bp, Homo sapien
ctccgacctgtccatcatcatgggg

SEQ ID NO: 5817236 - DNA, 25 bp, Homo sapien
cctattctccgacctgtccatcatc

SEQ ID NO: 5817237 - DNA, 25 bp, Homo sapien
gtaggctctggacagcagcttgaac

SEQ ID NO: 5817238 - DNA, 25 bp, Homo sapien
tcccagcgggtcgtggggcccagtc

SEQ ID NO: 5817239 - DNA, 25 bp, Homo sapien
gcaggtactcagagcacaggtactg

SEQ ID NO: 5817240 - DNA, 25 bp, Homo sapien
ttttgactggcttgccgaatttatc

SEQ ID NO: 5817241 - DNA, 25 bp, Homo sapien
agaatgaagtccacacggccagccc

SEQ ID NO: 5817242 - DNA, 25 bp, Homo sapien
ctggcacctcccagcgggtcgtggg

SEQ ID NO: 5817243 - DNA, 25 bp, Homo sapien
tggtgttgagcaggcgctggatgcg

SEQ ID NO: 5817244 - DNA, 25 bp, Homo sapien
gggctagtacttgagcagccagcgt

SEQ ID NO: 5817245 - DNA, 25 bp, Homo sapien
aatgtggatacctgggggcagcagt

SEQ ID NO: 5817246 - DNA, 25 bp, Homo sapien
ttctccagcgggtcatagcagccct

SEQ ID NO: 5817247 - DNA, 25 bp, Homo sapien
gggctccatcagctcgtgctggccg

SEQ ID NO: 5817248 - DNA, 25 bp, Homo sapien
tgcctttgactgagatccgggcgtt

SEQ ID NO: 5817249 - DNA, 25 bp, Homo sapien
gcccatgaataaagttcttgggtcc

SEQ ID NO: 5817250 - DNA, 25 bp, Homo sapien
ctgtgggtgctcagcgatgtgaagt

SEQ ID NO: 5817251 - DNA, 25 bp, Homo sapien
gtgggtgctcagcgatgtgaagtag

SEQ ID NO: 5817252 - DNA, 25 bp, Homo sapien
ggcacctcccagcgggtcgtggggc

SEQ ID NO: 5817253 - DNA, 25 bp, Homo sapien
tcagagcttctgaaatcacggattc

SEQ ID NO: 5817254 - DNA, 25 bp, Homo sapien
gcatcgctgcaggtcctgagctgca

SEQ ID NO: 5817255 - DNA, 25 bp, Homo sapien
caggtcgcccccatgaaggctggct

SEQ ID NO: 5817256 - DNA, 25 bp, Homo sapien
ggcgaatgcctttgactgagatccg

SEQ ID NO: 5817257 - DNA, 25 bp, Homo sapien
ggcccgccacctcgttgccatgaat

SEQ ID NO: 5817258 - DNA, 25 bp, Homo sapien
ggtcgcccccatgaaggctggctga

SEQ ID NO: 5817259 - DNA, 25 bp, Homo sapien
gggctgcctgcgcgcccggagcggg

SEQ ID NO: 5817260 - DNA, 25 bp, Homo sapien
gtacttgagcagccagcgtggcctg

SEQ ID NO: 5817261 - DNA, 25 bp, Homo sapien
gcgcagtgatgtggcactcgggccg

SEQ ID NO: 5817262 - DNA, 25 bp, Homo sapien
tcgaagctgcgcccgatgctgtagg

SEQ ID NO: 5817263 - DNA, 25 bp, Homo sapien
ggggtgcttggagaagtcgaagggg

SEQ ID NO: 5817264 - DNA, 25 bp, Homo sapien
agtagcggtggcagtcaaggaagta

SEQ ID NO: 5817265 - DNA, 25 bp, Homo sapien
cctttgactgagatccgggcgtttt

SEQ ID NO: 5817266 - DNA, 25 bp, Homo sapien
cagtccgccccgttgatgatgctcc

SEQ ID NO: 5817267 - DNA, 25 bp, Homo sapien
gccagcgcagtgatgtggcactcgg

SEQ ID NO: 5817268 - DNA, 25 bp, Homo sapien
gggaggggcacccacggtctggcag

SEQ ID NO: 5817269 - DNA, 25 bp, Homo sapien
gtggcactcgggccgcgcggggccg

SEQ ID NO: 5817270 - DNA, 25 bp, Homo sapien
ccgacctgtccatcatcatggggtg

SEQ ID NO: 5817271 - DNA, 25 bp, Homo sapien
ggctccgtggcctcccccaaagagc

SEQ ID NO: 5817272 - DNA, 25 bp, Homo sapien
gaataaagttcttgggtcccatccc

SEQ ID NO: 5817273 - DNA, 25 bp, Homo sapien
gaaaacatcttctcctcctgggggt

SEQ ID NO: 5817274 - DNA, 25 bp, Homo sapien
acaatgtggatacctgggggcagca

SEQ ID NO: 5817275 - DNA, 25 bp, Homo sapien
aaggcgggctggcagacctcccgca

SEQ ID NO: 5817276 - DNA, 25 bp, Homo sapien
gttgcactggccttccaggagctgg

SEQ ID NO: 5817277 - DNA, 25 bp, Homo sapien
ggtagttgaagtcggacatgcctcc

SEQ ID NO: 5817278 - DNA, 25 bp, Homo sapien
ggtgctgaagcaggttggggaaggt

SEQ ID NO: 5817279 - DNA, 25 bp, Homo sapien
gggcggcatggtggggcggcggacc

SEQ ID NO: 5817280 - DNA, 25 bp, Homo sapien
ggtcggcaggtcagtccctcccgca

SEQ ID NO: 5817281 - DNA, 25 bp, Homo sapien
cacagcacagcccagcagccgcagg

SEQ ID NO: 5817282 - DNA, 25 bp, Homo sapien
cttgccgaatttatctgtcaccaca

SEQ ID NO: 5817283 - DNA, 25 bp, Homo sapien
ccgggcagcggcgacgaccaggact

SEQ ID NO: 5817284 - DNA, 25 bp, Homo sapien
gcggcatggtggggcggcggacctt

SEQ ID NO: 5817285 - DNA, 25 bp, Homo sapien
atgtgaagtaggaccaccaccaggg

SEQ ID NO: 5817286 - DNA, 25 bp, Homo sapien
tgtggttgtaggcggcatcgctgca

SEQ ID NO: 5817287 - DNA, 25 bp, Homo sapien
ggctgcagccctcctacagaacaga

SEQ ID NO: 5817288 - DNA, 25 bp, Homo sapien
atgtggtcgctgcgtgcgccgcggg

SEQ ID NO: 5817289 - DNA, 25 bp, Homo sapien
acctcgttgccatgaatgttgccga

SEQ ID NO: 5817290 - DNA, 25 bp, Homo sapien
aaagagctggcacctcccagcgggt

SEQ ID NO: 5817291 - DNA, 25 bp, Homo sapien
gactggcttgccgaatttatctgtc

SEQ ID NO: 5817292 - DNA, 25 bp, Homo sapien
accctcggcagctgccacctcatag

SEQ ID NO: 5817293 - DNA, 25 bp, Homo sapien
ggactgtaaggagcagcagcggcgg

SEQ ID NO: 5817294 - DNA, 25 bp, Homo sapien
ctgtggcattcaccggcggggttcc

SEQ ID NO: 5817295 - DNA, 25 bp, Homo sapien
ctgccgtcgaagctgcgcccgatgc

SEQ ID NO: 5817296 - DNA, 25 bp, Homo sapien
tgaccgtgacgcgtcagacatttac

SEQ ID NO: 5817297 - DNA, 25 bp, Homo sapien
agcttctgaaatcacggattcagct

SEQ ID NO: 5817298 - DNA, 25 bp, Homo sapien
gggccggggctagtacttgagcagc

SEQ ID NO: 5817299 - DNA, 25 bp, Homo sapien
gtggcgaatgcctttgactgagatc

SEQ ID NO: 5817300 - DNA, 25 bp, Homo sapien
cctcgcagatgtgccggcagggtct

SEQ ID NO: 5817301 - DNA, 25 bp, Homo sapien
ggtagatgagcatctcccggcccgc

SEQ ID NO: 5817302 - DNA, 25 bp, Homo sapien
tccaggttctgcgcgttctgcctcc

SEQ ID NO: 5817303 - DNA, 25 bp, Homo sapien
gtcctggccacgtgggcgcagcggg

SEQ ID NO: 5817304 - DNA, 25 bp, Homo sapien
gcgtcagacatttacgtaggggacc

SEQ ID NO: 5817305 - DNA, 25 bp, Homo sapien
ctctaccgtgatctcaaagcagttg

SEQ ID NO: 5817306 - DNA, 25 bp, Homo sapien
gcttgggcaatgacaatgtggatac

SEQ ID NO: 5817307 - DNA, 25 bp, Homo sapien
gtgttgagcaggcgctggatgcggg

SEQ ID NO: 5817308 - DNA, 25 bp, Homo sapien
tggctgagagcacaaagggtatggt

SEQ ID NO: 5817309 - DNA, 25 bp, Homo sapien
cgatgtgaagtaggaccaccaccag

SEQ ID NO: 5817310 - DNA, 25 bp, Homo sapien
ccggggggccagcacagcacagccc

SEQ ID NO: 5817311 - DNA, 25 bp, Homo sapien
gctgagagcacaaagggtatggtct

SEQ ID NO: 5817312 - DNA, 25 bp, Homo sapien
gcgtagccaggggcttgggcaatga

SEQ ID NO: 5817313 - DNA, 25 bp, Homo sapien
ccaccacctcccacgaccggtgctg

SEQ ID NO: 5817314 - DNA, 25 bp, Homo sapien
tcggacgtcaggtccgggaaatttc

SEQ ID NO: 5817315 - DNA, 25 bp, Homo sapien
caggtccgggaaatttcggttcaga

SEQ ID NO: 5817316 - DNA, 25 bp, Homo sapien
ccgggcgtttttgactggcttgccg

SEQ ID NO: 5817317 - DNA, 25 bp, Homo sapien
cgggatgcggagacgggcctcggtc

SEQ ID NO: 5817318 - DNA, 25 bp, Homo sapien
cagcggctttgtgggatgtctgtgg

SEQ ID NO: 5817319 - DNA, 25 bp, Homo sapien
ctcgtgctggccggggcggctggag

SEQ ID NO: 5817320 - DNA, 25 bp, Homo sapien
gttcttgggtcccatccccagaggt

SEQ ID NO: 5817321 - DNA, 25 bp, Homo sapien
cctcccgctcgtccacccgttgtag

SEQ ID NO: 5817322 - DNA, 25 bp, Homo sapien
cccagccgccctcacaccggggggc

SEQ ID NO: 5817323 - DNA, 25 bp, Homo sapien
tggacggccagcgcagtgatgtggc

SEQ ID NO: 5817324 - DNA, 25 bp, Homo sapien
tcctcctgggggtgcttggagaagt

SEQ ID NO: 5817325 - DNA, 25 bp, Homo sapien
cggcagggtctgcgcacccagccgc

SEQ ID NO: 5817326 - DNA, 25 bp, Homo sapien
gtggtgtggttgtaggcggcatcgc

SEQ ID NO: 5817327 - DNA, 25 bp, Homo sapien
actcgatgaccagcagctccctgcc

SEQ ID NO: 5817328 - DNA, 25 bp, Homo sapien
tcgggggggaacttcacacagccca

SEQ ID NO: 5817329 - DNA, 25 bp, Homo sapien
agagcacaggtactgggctaggtag

SEQ ID NO: 5817330 - DNA, 25 bp, Homo sapien
ccagcacagcacagcccagcagccg

SEQ ID NO: 5817331 - DNA, 25 bp, Homo sapien
catcagctcgtgctggccggggcgg

SEQ ID NO: 5817332 - DNA, 25 bp, Homo sapien
gacgaccaggactgtaaggagcagc

SEQ ID NO: 5817333 - DNA, 25 bp, Homo sapien
gcagtcaaggaagtagggccaggcc

SEQ ID NO: 5817334 - DNA, 25 bp, Homo sapien
cggagctggcctccaccacctccca

SEQ ID NO: 5817335 - DNA, 25 bp, Homo sapien
tgtagccggcaccctcggcagctgc

SEQ ID NO: 5817336 - DNA, 25 bp, Homo sapien
ggcttgccgaatttatctgtcacca

SEQ ID NO: 5817337 - DNA, 25 bp, Homo sapien
gctgggggatggggatgtggtcgct

SEQ ID NO: 5817338 - DNA, 25 bp, Homo sapien
caccaccagggcttactcccgtcgg

SEQ ID NO: 5817339 - DNA, 25 bp, Homo sapien
ccctcttcatccgggcggggatgat

SEQ ID NO: 5817340 - DNA, 25 bp, Homo sapien
cccatccccagaggttgcagaatga

SEQ ID NO: 5817341 - DNA, 25 bp, Homo sapien
tgctgtaggtcctggccacgtgggc

SEQ ID NO: 5817342 - DNA, 25 bp, Homo sapien
tcaaaacactttaataaaatggcag

SEQ ID NO: 5817343 - DNA, 25 bp, Homo sapien
cagcggcggcgggggcggcatggtg

SEQ ID NO: 5817344 - DNA, 25 bp, Homo sapien
gttggggaaggtggtgtggttgtag

SEQ ID NO: 5817345 - DNA, 25 bp, Homo sapien
cgctcaaactcgcaccccggccggg

SEQ ID NO: 5817346 - DNA, 25 bp, Homo sapien
gcagaatgaagtccacacggccagc

SEQ ID NO: 5817347 - DNA, 25 bp, Homo sapien
tggcgtagccaggggcttgggcaat

SEQ ID NO: 5817348 - DNA, 25 bp, Homo sapien
agcccagcagccgcaggtccgggtt

SEQ ID NO: 5817349 - DNA, 25 bp, Homo sapien
tttttaagtggatcaaaacacttta

SEQ ID NO: 5817350 - DNA, 25 bp, Homo sapien
actttcttgatgactttggcgtagc

SEQ ID NO: 5817351 - DNA, 25 bp, Homo sapien
ccgtggcctcccccaaagagctggc

SEQ ID NO: 5817352 - DNA, 25 bp, Homo sapien
cagggcttactcccgtcggccgagg

SEQ ID NO: 5817353 - DNA, 25 bp, Homo sapien
ccagccctcttcatccgggcgggga

SEQ ID NO: 5817354 - DNA, 25 bp, Homo sapien
agcgggtcatagcagccctcgtcct

SEQ ID NO: 5817355 - DNA, 25 bp, Homo sapien
cgcccggagcgggtcgggctccgtg

SEQ ID NO: 5817356 - DNA, 25 bp, Homo sapien
ggcactcgggccgcgcggggccggg

SEQ ID NO: 5817357 - DNA, 25 bp, Homo sapien
ccccacgcagggccagggcctgcag

SEQ ID NO: 5817358 - DNA, 25 bp, Homo sapien
aagtcggacatgcctcccgtgaagc

SEQ ID NO: 5817359 - DNA, 25 bp, Homo sapien
aaacatcttctcctcctgggggtgc

SEQ ID NO: 5817360 - DNA, 25 bp, Homo sapien
caggtcagtccctcccgcagtggcc

SEQ ID NO: 5817361 - DNA, 25 bp, Homo sapien
gctgccacctcatagccgtcagggt

SEQ ID NO: 5817362 - DNA, 25 bp, Homo sapien
gtctgcagctggtggcctgtggcat

SEQ ID NO: 5817363 - DNA, 25 bp, Homo sapien
tgggcgtaggagtggtggctgaagc

SEQ ID NO: 5817364 - DNA, 25 bp, Homo sapien
gcagggtctgcgcacccagccgccc

SEQ ID NO: 5817365 - DNA, 25 bp, Homo sapien
gctctgacagtgtgggggctgcagc

SEQ ID NO: 5817366 - DNA, 25 bp, Homo sapien
tgatgtggcactcgggccgcgcggg

SEQ ID NO: 5817367 - DNA, 25 bp, Homo sapien
ctggcttgccgaatttatctgtcac

SEQ ID NO: 5817368 - DNA, 25 bp, Homo sapien
gcagctggtggcctgtggcattcac

SEQ ID NO: 5817369 - DNA, 25 bp, Homo sapien
catttacgtaggggaccccacgcag

SEQ ID NO: 5817370 - DNA, 25 bp, Homo sapien
ctcctcgggggggaacttcacacag

SEQ ID NO: 5817371 - DNA, 25 bp, Homo sapien
cacctcccagcgggtcgtggggccc

SEQ ID NO: 5817372 - DNA, 25 bp, Homo sapien
gggaaggtggtgtggttgtaggcgg

SEQ ID NO: 5817373 - DNA, 25 bp, Homo sapien
tggccacgtgggcgcagcgggaggc

SEQ ID NO: 5817374 - DNA, 25 bp, Homo sapien
tactcccgtcggccgagggctgcct

SEQ ID NO: 5817375 - DNA, 25 bp, Homo sapien
ccacgcaggtggctggggaggcagg

SEQ ID NO: 5817376 - DNA, 25 bp, Homo sapien
tccttgttgtgctgccagagtgtgt

SEQ ID NO: 5817377 - DNA, 25 bp, Homo sapien
cctcccgcaggccctcgcagatgtg

SEQ ID NO: 5817378 - DNA, 25 bp, Homo sapien
aaaacactttaataaaatggcagcg

SEQ ID NO: 5817379 - DNA, 25 bp, Homo sapien
ctttgtgggatgtctgtggccgaca

SEQ ID NO: 5817380 - DNA, 25 bp, Homo sapien
aagcaggtactcagagcacaggtac

SEQ ID NO: 5817381 - DNA, 25 bp, Homo sapien
tgcaccgtctccacgaaattcagga

SEQ ID NO: 5817382 - DNA, 25 bp, Homo sapien
ccacgaccggtgctgaagcaggttg

SEQ ID NO: 5817383 - DNA, 25 bp, Homo sapien
agcggatgaaggtgggcggcagccc

SEQ ID NO: 5817384 - DNA, 25 bp, Homo sapien
tgactccttgttgtgctgccagagt

SEQ ID NO: 5817385 - DNA, 25 bp, Homo sapien
ccagcgggtcatagcagccctcgtc

SEQ ID NO: 5817386 - DNA, 25 bp, Homo sapien
gttaccaagcaggtactcagagcac

SEQ ID NO: 5817387 - DNA, 25 bp, Homo sapien
agggccagggcctgcagggaggggc

SEQ ID NO: 5817388 - DNA, 25 bp, Homo sapien
agagtgtgtacagggcctcctcggg

SEQ ID NO: 5817389 - DNA, 25 bp, Homo sapien
ggccaggccatgtcaatggcgtcga

SEQ ID NO: 5817390 - DNA, 25 bp, Homo sapien
tgtcaatggcgtcgaaggcgggctg

SEQ ID NO: 5817391 - DNA, 25 bp, Homo sapien
gtggacgtcagcgtaggctctggac

SEQ ID NO: 5817392 - DNA, 25 bp, Homo sapien
gacagcagcttgaacatcttctcgt

SEQ ID NO: 5817393 - DNA, 25 bp, Homo sapien
ctcgtcgggcgtgggagaaaacatc

SEQ ID NO: 5817394 - DNA, 25 bp, Homo sapien
agagcttctgaaatcacggattcag

SEQ ID NO: 5817395 - DNA, 25 bp, Homo sapien
ccccatgaaggctggctgagagcac

SEQ ID NO: 5817396 - DNA, 25 bp, Homo sapien
catgaatgttgccgatgagcttcac

SEQ ID NO: 5817397 - DNA, 25 bp, Homo sapien
agtactcggacgtcaggtccgggaa

SEQ ID NO: 5817398 - DNA, 25 bp, Homo sapien
cacctcccacgaccggtgctgaagc

SEQ ID NO: 5817399 - DNA, 25 bp, Homo sapien
tggatcaaaacactttaataaaatg

SEQ ID NO: 5817400 - DNA, 25 bp, Homo sapien
tcggttcagatccaggttctgcgcg

SEQ ID NO: 5817401 - DNA, 25 bp, Homo sapien
ttcagctgcctaaagtgctctgaca

SEQ ID NO: 5817402 - DNA, 25 bp, Homo sapien
cctcccgtgaagctgtaccagtccg

SEQ ID NO: 5817403 - DNA, 25 bp, Homo sapien
agcagcggcggcgggggcggcatgg

SEQ ID NO: 5817404 - DNA, 25 bp, Homo sapien
tgccgaatttatctgtcaccacacc

SEQ ID NO: 5817405 - DNA, 25 bp, Homo sapien
gcggagacgggcctcggtctccaca

SEQ ID NO: 5817406 - DNA, 25 bp, Homo sapien
ctccacgaaattcaggagtgactcc

SEQ ID NO: 5817407 - DNA, 25 bp, Homo sapien
cgtaggagtggtggctgaagcggat

SEQ ID NO: 5817408 - DNA, 25 bp, Homo sapien
tcttgggtcccatccccagaggttg

SEQ ID NO: 5817409 - DNA, 25 bp, Homo sapien
gccagccggtagtactcggacgtca

SEQ ID NO: 5817410 - DNA, 25 bp, Homo sapien
ccggggcggctggagaactcgatga

SEQ ID NO: 5817411 - DNA, 25 bp, Homo sapien
cctacagaacagaagccagggaggt

SEQ ID NO: 5817412 - DNA, 25 bp, Homo sapien
ctttaataaaatggcagcggctttg

SEQ ID NO: 5817413 - DNA, 25 bp, Homo sapien
cagggaggggcacccacggtctggc

SEQ ID NO: 5817414 - DNA, 25 bp, Homo sapien
gtggcattcaccggcggggttccgc

SEQ ID NO: 5817415 - DNA, 25 bp, Homo sapien
tctcgtgaagtagcggtggcagtca

SEQ ID NO: 5817416 - DNA, 25 bp, Homo sapien
gaaattcaggagtgactccttgttg

SEQ ID NO: 5817417 - DNA, 25 bp, Homo sapien
tgagcatctcccggcccgccacctc

SEQ ID NO: 5817418 - DNA, 25 bp, Homo sapien
gaacagaagccagggaggtcccggt

SEQ ID NO: 5817419 - DNA, 25 bp, Homo sapien
gggcaatgacaatgtggatacctgg

SEQ ID NO: 5817420 - DNA, 25 bp, Homo sapien
gtgaagctgtaccagtccgccccgt

SEQ ID NO: 5817421 - DNA, 25 bp, Homo sapien
cgtgacgcgtcagacatttacgtag

SEQ ID NO: 5817422 - DNA, 25 bp, Homo sapien
ggtggcctgtggcattcaccggcgg

SEQ ID NO: 5817423 - DNA, 25 bp, Homo sapien
ccaggacaacagctactgtgcagga

SEQ ID NO: 5817424 - DNA, 25 bp, Homo sapien
tgaaggtgggcggcagccctgaggg

SEQ ID NO: 5817425 - DNA, 25 bp, Homo sapien
gtctccgccagccggtagtactcgg

SEQ ID NO: 5817426 - DNA, 25 bp, Homo sapien
cggccagcgcagtgatgtggcactc

SEQ ID NO: 5817427 - DNA, 25 bp, Homo sapien
ttaccccaccagtagtgctggggga

SEQ ID NO: 5817428 - DNA, 25 bp, Homo sapien
cagggaggtcccggtactgtaccgc

SEQ ID NO: 5817429 - DNA, 25 bp, Homo sapien
cagcccatgaataaagttcttgggt

SEQ ID NO: 5817430 - DNA, 25 bp, Homo sapien
cctgcagggaggggcacccacggtc

SEQ ID NO: 5817431 - DNA, 25 bp, Homo sapien
aggagctggtgtagaacgctcagca

SEQ ID NO: 5817432 - DNA, 25 bp, Homo sapien
ggtctgcatccacttcatgattgcc

SEQ ID NO: 5817433 - DNA, 25 bp, Homo sapien
tccgcagcccatgaataaagttctt

SEQ ID NO: 5817434 - DNA, 25 bp, Homo sapien
ctcctacagaacagaagccagggag

SEQ ID NO: 5817435 - DNA, 25 bp, Homo sapien
ggcggcatcgctgcaggtcctgagc

SEQ ID NO: 5817436 - DNA, 25 bp, Homo sapien
catggtggggcggcggaccttggac

SEQ ID NO: 5817437 - DNA, 25 bp, Homo sapien
aatcagagcttctgaaatcacggat

SEQ ID NO: 5817438 - DNA, 25 bp, Homo sapien
tgtaaggagcagcagcggcggcggg

SEQ ID NO: 5817439 - DNA, 25 bp, Homo sapien
gcgtgggagaaaacatcttctcctc

SEQ ID NO: 5817440 - DNA, 25 bp, Homo sapien
cttctgaaatcacggattcagctgc

SEQ ID NO: 5817441 - DNA, 25 bp, Homo sapien
agcgtggcctgtgggtgctcagcga

SEQ ID NO: 5817442 - DNA, 25 bp, Homo sapien
agtcaccatctggggctgtggtgat

SEQ ID NO: 5817443 - DNA, 25 bp, Homo sapien
tactgtaccgctgtctgcagctggt

SEQ ID NO: 5817444 - DNA, 25 bp, Homo sapien
tggtggggcggcggaccttggacgg

SEQ ID NO: 5817445 - DNA, 25 bp, Homo sapien
caccggcggggttccgctcaaactc

SEQ ID NO: 5817446 - DNA, 25 bp, Homo sapien
gtgctgggggatggggatgtggtcg

SEQ ID NO: 5817447 - DNA, 25 bp, Homo sapien
accaggactgtaaggagcagcagcg

SEQ ID NO: 5817448 - DNA, 25 bp, Homo sapien
ggagtggtggctgaagcggatgaag

SEQ ID NO: 5817449 - DNA, 25 bp, Homo sapien
gtggtcgctgcgtgcgccgcgggtc

SEQ ID NO: 5817450 - DNA, 25 bp, Homo sapien
cgacaaaatcaagagccaggagccc

SEQ ID NO: 5817451 - DNA, 25 bp, Homo sapien
gggagaaaacatcttctcctcctgg

SEQ ID NO: 5817452 - DNA, 25 bp, Homo sapien
tgaaatcacggattcagctgcctaa

SEQ ID NO: 5817453 - DNA, 25 bp, Homo sapien
gcagcaggtggatgcgggtggtgtt

SEQ ID NO: 5817454 - DNA, 25 bp, Homo sapien
ttacgtaggggaccccacgcagggc

SEQ ID NO: 5817455 - DNA, 25 bp, Homo sapien
tgcctaaagtgctctgacagtgtgg

SEQ ID NO: 5817456 - DNA, 25 bp, Homo sapien
ccacctcgttgccatgaatgttgcc

SEQ ID NO: 5817457 - DNA, 25 bp, Homo sapien
tcatccgggcggggatgatgacttt

SEQ ID NO: 5817458 - DNA, 25 bp, Homo sapien
acgggcctcggtctccacatcctgg

SEQ ID NO: 5817459 - DNA, 25 bp, Homo sapien
gccagggaggtcccggtactgtacc

SEQ ID NO: 5817460 - DNA, 25 bp, Homo sapien
agggtcggcaggtcagtccctcccg

SEQ ID NO: 5817461 - DNA, 25 bp, Homo sapien
agctggtggcctgtggcattcaccg

SEQ ID NO: 5817462 - DNA, 25 bp, Homo sapien
tcgtggggcccagtcctccgcagcc

SEQ ID NO: 5817463 - DNA, 25 bp, Homo sapien
gtaggacaccaccaggtcgccccca

SEQ ID NO: 5817464 - DNA, 25 bp, Homo sapien
taagtggatcaaaacactttaataa

SEQ ID NO: 5817465 - DNA, 25 bp, Homo sapien
ggtggtgttgagcaggcgctggatg

SEQ ID NO: 5817466 - DNA, 25 bp, Homo sapien
ttcaggaaattgcctccacacctat

SEQ ID NO: 5817467 - DNA, 25 bp, Homo sapien
tctggggctgtggtgatgtcgtggc

SEQ ID NO: 5817468 - DNA, 25 bp, Homo sapien
tctcccggcccgccacctcgttgcc

SEQ ID NO: 5817469 - DNA, 25 bp, Homo sapien
tgtacagggcctcctcgggggggaa

SEQ ID NO: 5817470 - DNA, 25 bp, Homo sapien
gctgtggtgatgtcgtggcgaatgc

SEQ ID NO: 5817471 - DNA, 25 bp, Homo sapien
gccctcgcagatgtgccggcagggt

SEQ ID NO: 5817472 - DNA, 25 bp, Homo sapien
cctcccagcgggtcgtggggcccag

SEQ ID NO: 5817473 - DNA, 25 bp, Homo sapien
ggggatgtggtcgctgcgtgcgccg

SEQ ID NO: 5817474 - DNA, 25 bp, Homo sapien
cccgaagcttctccagcgggtcata

SEQ ID NO: 5817475 - DNA, 25 bp, Homo sapien
cttggacggccagcgcagtgatgtg

SEQ ID NO: 5817476 - DNA, 25 bp, Homo sapien
cggcagccctgagggcagtgcctcg

SEQ ID NO: 5817477 - DNA, 25 bp, Homo sapien
ctgcgcgttctgcctcccgctcgtc

SEQ ID NO: 5817478 - DNA, 25 bp, Homo sapien
gggtcccatccccagaggttgcaga

SEQ ID NO: 5817479 - DNA, 25 bp, Homo sapien
tctgacagtgtgggggctgcagccc

SEQ ID NO: 5817480 - DNA, 25 bp, Homo sapien
ggtcatagcagccctcgtcctctct

SEQ ID NO: 5817481 - DNA, 25 bp, Homo sapien
agatccgggcgtttttgactggctt

SEQ ID NO: 5817482 - DNA, 25 bp, Homo sapien
cgggtcgtggggcccagtcctccgc

SEQ ID NO: 5817483 - DNA, 25 bp, Homo sapien
gtgggatgtctgtggccgacaaaat

SEQ ID NO: 5817484 - DNA, 25 bp, Homo sapien
accaggtcgcccccatgaaggctgg

SEQ ID NO: 5817485 - DNA, 25 bp, Homo sapien
taggaccaccaccagggcttactcc

SEQ ID NO: 5817486 - DNA, 25 bp, Homo sapien
gtagaacgctcagcaggatgtactc

SEQ ID NO: 5817487 - DNA, 25 bp, Homo sapien
gtccacgcaggtggctggggaggca

SEQ ID NO: 5817488 - DNA, 25 bp, Homo sapien
ccagagtgtgtacagggcctcctcg

SEQ ID NO: 5817489 - DNA, 25 bp, Homo sapien
ccagggcctgcagggaggggcaccc

SEQ ID NO: 5817490 - DNA, 25 bp, Homo sapien
agcacaggtactgggctaggtagat

SEQ ID NO: 5817491 - DNA, 25 bp, Homo sapien
tcaaggaagtagggccaggccatgt

SEQ ID NO: 5817492 - DNA, 25 bp, Homo sapien
gcagccctcctacagaacagaagcc

SEQ ID NO: 5817493 - DNA, 25 bp, Homo sapien
tgcgggtggtgttgagcaggcgctg

SEQ ID NO: 5817494 - DNA, 25 bp, Homo sapien
ggagcccgggatgcggagacgggcc

SEQ ID NO: 5817495 - DNA, 25 bp, Homo sapien
cggcgggggcggcatggtggggcgg

SEQ ID NO: 5817496 - DNA, 25 bp, Homo sapien
ctgtcaccacacctttgatgccccg

SEQ ID NO: 5817497 - DNA, 25 bp, Homo sapien
tccagtagtcaccatctggggctgt

SEQ ID NO: 5817498 - DNA, 25 bp, Homo sapien
ttctgcgcgttctgcctcccgctcg

SEQ ID NO: 5817499 - DNA, 25 bp, Homo sapien
tcaccatctggggctgtggtgatgt

SEQ ID NO: 5817500 - DNA, 25 bp, Homo sapien
agacgggcctcggtctccacatcct

SEQ ID NO: 5817501 - DNA, 25 bp, Homo sapien
gctggggccggggctagtacttgag

SEQ ID NO: 5817502 - DNA, 25 bp, Homo sapien
ctcagcaggatgtactcggagctgg

SEQ ID NO: 5817503 - DNA, 25 bp, Homo sapien
aggtactcagagcacaggtactggg

SEQ ID NO: 5817504 - DNA, 25 bp, Homo sapien
gcagtgcctcgtcagcctccaggcc

SEQ ID NO: 5817505 - DNA, 25 bp, Homo sapien
tagccggcaccctcggcagctgcca

SEQ ID NO: 5817506 - DNA, 25 bp, Homo sapien
gggatgtctgtggccgacaaaatca

SEQ ID NO: 5817507 - DNA, 25 bp, Homo sapien
ccaagcaggtactcagagcacaggt

SEQ ID NO: 5817508 - DNA, 25 bp, Homo sapien
gacctgtccatcatcatggggtgga

SEQ ID NO: 5817509 - DNA, 25 bp, Homo sapien
ttggtgtgcaggtagttgaagtcgg

SEQ ID NO: 5817510 - DNA, 25 bp, Homo sapien
caccggggggccagcacagcacagc

SEQ ID NO: 5817511 - DNA, 25 bp, Homo sapien
tgcatccacttcatgattgcctttg

SEQ ID NO: 5817512 - DNA, 25 bp, Homo sapien
aaatcacggattcagctgcctaaag

SEQ ID NO: 5817513 - DNA, 25 bp, Homo sapien
gggaccccacgcagggccagggcct

SEQ ID NO: 5817514 - DNA, 25 bp, Homo sapien
gccgtcagggttcatggagggcagc

SEQ ID NO: 5817515 - DNA, 25 bp, Homo sapien
cagtcctccgcagcccatgaataaa

SEQ ID NO: 5817516 - DNA, 25 bp, Homo sapien
agccctcttcatccgggcggggatg

SEQ ID NO: 5817517 - DNA, 25 bp, Homo sapien
agccctcctacagaacagaagccag

SEQ ID NO: 5817518 - DNA, 25 bp, Homo sapien
aatttcggttcagatccaggttctg

SEQ ID NO: 5817519 - DNA, 25 bp, Homo sapien
ttcagatccaggttctgcgcgttct

SEQ ID NO: 5817520 - DNA, 25 bp, Homo sapien
tggcgtcgaaggcgggctggcagac

SEQ ID NO: 5817521 - DNA, 25 bp, Homo sapien
gggtctccgccagccggtagtactc

SEQ ID NO: 5817522 - DNA, 25 bp, Homo sapien
acctcatagccgtcagggttcatgg

SEQ ID NO: 5817523 - DNA, 25 bp, Homo sapien
agtgcctcgtcagcctccaggcctc

SEQ ID NO: 5817524 - DNA, 25 bp, Homo sapien
accccaccagtagtgctgggggatg

SEQ ID NO: 5817525 - DNA, 25 bp, Homo sapien
tccacttcatgattgcctttgtctc

SEQ ID NO: 5817526 - DNA, 25 bp, Homo sapien
ggtgcttggagaagtcgaaggggta

SEQ ID NO: 5817527 - DNA, 25 bp, Homo sapien
caggtactgggctaggtagatgagc

SEQ ID NO: 5817528 - DNA, 25 bp, Homo sapien
tcttcaggaaattgcctccacacct

SEQ ID NO: 5817529 - DNA, 25 bp, Homo sapien
accatctgggcgtaggagtggtggc

SEQ ID NO: 5817530 - DNA, 25 bp, Homo sapien
cagccctcgtcctctctcgtgaagt

SEQ ID NO: 5817531 - DNA, 25 bp, Homo sapien
gtcggacatgcctcccgtgaagctg

SEQ ID NO: 5817532 - DNA, 25 bp, Homo sapien
aggggaccccacgcagggccagggc

SEQ ID NO: 5817533 - DNA, 25 bp, Homo sapien
cacctattctccgacctgtccatca

SEQ ID NO: 5817534 - DNA, 25 bp, Homo sapien
agtggccctgaccgtgacgcgtcag

SEQ ID NO: 5817535 - DNA, 25 bp, Homo sapien
gtcagcgtaggctctggacagcagc

SEQ ID NO: 5817536 - DNA, 25 bp, Homo sapien
cctgggggtgcttggagaagtcgaa

SEQ ID NO: 5817537 - DNA, 25 bp, Homo sapien
ttcaccggcggggttccgctcaaac

SEQ ID NO: 5817538 - DNA, 25 bp, Homo sapien
cggacatgcctcccgtgaagctgta

SEQ ID NO: 5817539 - DNA, 25 bp, Homo sapien
agtggatcaaaacactttaataaaa

SEQ ID NO: 5817540 - DNA, 25 bp, Homo sapien
ttgatgactttggcgtagccagggg

SEQ ID NO: 5817541 - DNA, 25 bp, Homo sapien
cgccacctcgttgccatgaatgttg

SEQ ID NO: 5817542 - DNA, 25 bp, Homo sapien
cagcgtaggctctggacagcagctt

SEQ ID NO: 5817543 - DNA, 25 bp, Homo sapien
ggaccaccaccagggcttactcccg

SEQ ID NO: 5817544 - DNA, 25 bp, Homo sapien
cacgtgggcgcagcgggaggccatc

SEQ ID NO: 5817545 - DNA, 25 bp, Homo sapien
gtccgggttgcactggccttccagg

SEQ ID NO: 5817546 - DNA, 25 bp, Homo sapien
cgtcgaagctgcgcccgatgctgta

SEQ ID NO: 5817547 - DNA, 25 bp, Homo sapien
tcggcaggtcagtccctcccgcagt

SEQ ID NO: 5817548 - DNA, 25 bp, Homo sapien
gtcagcctccaggcctccccgaagc

SEQ ID NO: 5817549 - DNA, 25 bp, Homo sapien
tgccccggtgcaccgtctccacgaa

SEQ ID NO: 5817550 - DNA, 25 bp, Homo sapien
tgcctcccgctcgtccacccgttgt

SEQ ID NO: 5817551 - DNA, 25 bp, Homo sapien
aacgctcagcaggatgtactcggag

SEQ ID NO: 5817552 - DNA, 25 bp, Homo sapien
aagtgctctgacagtgtgggggctg

SEQ ID NO: 5817553 - DNA, 25 bp, Homo sapien
ccagtagtgctgggggatggggatg

SEQ ID NO: 5817554 - DNA, 25 bp, Homo sapien
gaggttgcagaatgaagtccacacg

SEQ ID NO: 5817555 - DNA, 25 bp, Homo sapien
cagaacagaagccagggaggtcccg

SEQ ID NO: 5817556 - DNA, 25 bp, Homo sapien
acctttgatgccccggtgcaccgtc

SEQ ID NO: 5817557 - DNA, 25 bp, Homo sapien
tgcgcacccagccgccctcacaccg

SEQ ID NO: 5817558 - DNA, 25 bp, Homo sapien
ttgagcagccagcgtggcctgtggg

SEQ ID NO: 5817559 - DNA, 25 bp, Homo sapien
gccggtagtactcggacgtcaggtc

SEQ ID NO: 5817560 - DNA, 25 bp, Homo sapien
tgcctgcgcgcccggagcgggtcgg

SEQ ID NO: 5817561 - DNA, 25 bp, Homo sapien
aggccatgtcaatggcgtcgaaggc

SEQ ID NO: 5817562 - DNA, 25 bp, Homo sapien
ctactgtgcaggaatcagagcttct

SEQ ID NO: 5817563 - DNA, 25 bp, Homo sapien
tcccacgaccggtgctgaagcaggt

SEQ ID NO: 5817564 - DNA, 25 bp, Homo sapien
gaggtcccggtactgtaccgctgtc

SEQ ID NO: 5817565 - DNA, 25 bp, Homo sapien
tgtggatacctgggggcagcagtct

SEQ ID NO: 5817566 - DNA, 25 bp, Homo sapien
agccctgagggcagtgcctcgtcag

SEQ ID NO: 5817567 - DNA, 25 bp, Homo sapien
ctccagcgggtcatagcagccctcg

SEQ ID NO: 5817568 - DNA, 25 bp, Homo sapien
cggcgacgaccaggactgtaaggag

SEQ ID NO: 5817569 - DNA, 25 bp, Homo sapien
aaattgcctccacacctattctccg

SEQ ID NO: 5817570 - DNA, 25 bp, Homo sapien
agagctggcacctcccagcgggtcg

SEQ ID NO: 5817571 - DNA, 25 bp, Homo sapien
ggccagccctcttcatccgggcggg

SEQ ID NO: 5817572 - DNA, 25 bp, Homo sapien
acgtcagcgtaggctctggacagca

SEQ ID NO: 5817573 - DNA, 25 bp, Homo sapien
gcagtggccctgaccgtgacgcgtc

SEQ ID NO: 5817574 - DNA, 25 bp, Homo sapien
ccagctctaccgtgatctcaaagca

SEQ ID NO: 5817575 - DNA, 25 bp, Homo sapien
gcagggccagggcctgcagggaggg

SEQ ID NO: 5817576 - DNA, 25 bp, Homo sapien
acacgcaccatctgggcgtaggagt

SEQ ID NO: 5817577 - DNA, 25 bp, Homo sapien
accacctcccacgaccggtgctgaa

SEQ ID NO: 5817578 - DNA, 25 bp, Homo sapien
tcccgcaggccctcgcagatgtgcc

SEQ ID NO: 5817579 - DNA, 25 bp, Homo sapien
ggtcccggtactgtaccgctgtctg

SEQ ID NO: 5817580 - DNA, 25 bp, Homo sapien
ggcctgcagggaggggcacccacgg

SEQ ID NO: 5817581 - DNA, 25 bp, Homo sapien
ctcgggccgcgcggggccggggctc

SEQ ID NO: 5817582 - DNA, 25 bp, Homo sapien
ccagcgggtcgtggggcccagtcct

SEQ ID NO: 5817583 - DNA, 25 bp, Homo sapien
gtccgggaaatttcggttcagatcc

SEQ ID NO: 5817584 - DNA, 25 bp, Homo sapien
tggccctgaccgtgacgcgtcagac

SEQ ID NO: 5817585 - DNA, 25 bp, Homo sapien
caacagctactgtgcaggaatcaga

SEQ ID NO: 5817586 - DNA, 25 bp, Homo sapien
atgatgactttcttgatgactttgg

SEQ ID NO: 5817587 - DNA, 25 bp, Homo sapien
atgaataaagttcttgggtcccatc

SEQ ID NO: 5817588 - DNA, 25 bp, Homo sapien
ctccgtggcctcccccaaagagctg

SEQ ID NO: 5817589 - DNA, 25 bp, Homo sapien
tgacagtgtgggggctgcagccctc

SEQ ID NO: 5817590 - DNA, 25 bp, Homo sapien
ttgggcaatgacaatgtggatacct

SEQ ID NO: 5817591 - DNA, 25 bp, Homo sapien
ggcgcagcgggaggccatccgcctc

SEQ ID NO: 5817592 - DNA, 25 bp, Homo sapien
tctgtggccgacaaaatcaagagcc

SEQ ID NO: 5817593 - DNA, 25 bp, Homo sapien
gcggaccttggacggccagcgcagt

SEQ ID NO: 5817594 - DNA, 25 bp, Homo sapien
catgcctcccgtgaagctgtaccag

SEQ ID NO: 5817595 - DNA, 25 bp, Homo sapien
gccaggagcccgggatgcggagacg

SEQ ID NO: 5817596 - DNA, 25 bp, Homo sapien
ccacctcatagccgtcagggttcat

SEQ ID NO: 5817597 - DNA, 25 bp, Homo sapien
ctcacaccggggggccagcacagca

SEQ ID NO: 5817598 - DNA, 25 bp, Homo sapien
cccctcttcaggaaattgcctccac

SEQ ID NO: 5817599 - DNA, 25 bp, Homo sapien
tcaagagccaggagcccgggatgcg

SEQ ID NO: 5817600 - DNA, 25 bp, Homo sapien
gagcagcagcggcggcgggggcggc

SEQ ID NO: 5817601 - DNA, 25 bp, Homo sapien
ctcggagctggcctccaccacctcc

SEQ ID NO: 5817602 - DNA, 25 bp, Homo sapien
atgaaggctggctgagagcacaaag

SEQ ID NO: 5817603 - DNA, 25 bp, Homo sapien
ggtgggcggcagccctgagggcagt

SEQ ID NO: 5817604 - DNA, 25 bp, Homo sapien
aagagccaggagcccgggatgcgga

SEQ ID NO: 5817605 - DNA, 25 bp, Homo sapien
tccccctcttcaggaaattgcctcc

SEQ ID NO: 5817606 - DNA, 25 bp, Homo sapien
gcttcacctcgggctccatcagctc

SEQ ID NO: 5817607 - DNA, 25 bp, Homo sapien
ggaatcagagcttctgaaatcacgg

SEQ ID NO: 5817608 - DNA, 25 bp, Homo sapien
atgtgccggcagggtctgcgcaccc

SEQ ID NO: 5817609 - DNA, 25 bp, Homo sapien
gggctgtggtgatgtcgtggcgaat

SEQ ID NO: 5817610 - DNA, 25 bp, Homo sapien
atttatctgtcaccacacctttgat

SEQ ID NO: 5817611 - DNA, 25 bp, Homo sapien
gcaccatctgggcgtaggagtggtg

SEQ ID NO: 5817612 - DNA, 25 bp, Homo sapien
gcctgtggcattcaccggcggggtt

SEQ ID NO: 5817613 - DNA, 25 bp, Homo sapien
ggctggcagacctcccgcaggccct

SEQ ID NO: 5817614 - DNA, 25 bp, Homo sapien
ttaataaaatggcagcggctttgtg

SEQ ID NO: 5817615 - DNA, 25 bp, Homo sapien
tttcggttcagatccaggttctgcg

SEQ ID NO: 5817616 - DNA, 25 bp, Homo sapien
gtccacacggccagccctcttcatc

SEQ ID NO: 5817617 - DNA, 25 bp, Homo sapien
aggacaccaccaggtcgcccccatg

SEQ ID NO: 5817618 - DNA, 25 bp, Homo sapien
caggactgtaaggagcagcagcggc

SEQ ID NO: 5817619 - DNA, 25 bp, Homo sapien
gtgatgtcgtggcgaatgcctttga

SEQ ID NO: 5817620 - DNA, 25 bp, Homo sapien
cacccagccgccctcacaccggggg

SEQ ID NO: 5817621 - DNA, 25 bp, Homo sapien
cgaagcttctccagcgggtcatagc

SEQ ID NO: 5817622 - DNA, 25 bp, Homo sapien
tactgggctaggtagatgagcatct

SEQ ID NO: 5817623 - DNA, 25 bp, Homo sapien
gccacgtgggcgcagcgggaggcca

SEQ ID NO: 5817624 - DNA, 25 bp, Homo sapien
caaagcagttggtgtgcaggtagtt

SEQ ID NO: 5817625 - DNA, 25 bp, Homo sapien
ggtactgggctaggtagatgagcat

SEQ ID NO: 5817626 - DNA, 25 bp, Homo sapien
gcccgatgctgtaggtcctggccac

SEQ ID NO: 5817627 - DNA, 25 bp, Homo sapien
agctggcacctcccagcgggtcgtg

SEQ ID NO: 5817628 - DNA, 25 bp, Homo sapien
ctggcagacctcccgcaggccctcg

SEQ ID NO: 5817629 - DNA, 25 bp, Homo sapien
tcccggtactgtaccgctgtctgca

SEQ ID NO: 5817630 - DNA, 25 bp, Homo sapien
atgcgggggttaccaagcaggtact

SEQ ID NO: 5817631 - DNA, 25 bp, Homo sapien
ctcgcaccccggccgggcagcggcg

SEQ ID NO: 5817632 - DNA, 25 bp, Homo sapien
tagatgagcatctcccggcccgcca

SEQ ID NO: 5817633 - DNA, 25 bp, Homo sapien
cacaccggggggccagcacagcaca

SEQ ID NO: 5817634 - DNA, 25 bp, Homo sapien
gagccaggagcccgggatgcggaga

SEQ ID NO: 5817635 - DNA, 25 bp, Homo sapien
ggcagcggctttgtgggatgtctgt

SEQ ID NO: 5817636 - DNA, 25 bp, Homo sapien
ggctggggaggcagggtcggcaggt

SEQ ID NO: 5817637 - DNA, 25 bp, Homo sapien
tgtggtgatgtcgtggcgaatgcct

SEQ ID NO: 5817638 - DNA, 25 bp, Homo sapien
cctcttcaggaaattgcctccacac

SEQ ID NO: 5817639 - DNA, 25 bp, Homo sapien
tgcagggaggggcacccacggtctg

SEQ ID NO: 5817640 - DNA, 25 bp, Homo sapien
aggcctccccgaagcttctccagcg

SEQ ID NO: 5817641 - DNA, 25 bp, Homo sapien
ttgatgatgctccccctcttcagga

SEQ ID NO: 5817642 - DNA, 25 bp, Homo sapien
cgcagcgggaggccatccgcctcag

SEQ ID NO: 5817643 - DNA, 25 bp, Homo sapien
aatggcgtcgaaggcgggctggcag

SEQ ID NO: 5817644 - DNA, 25 bp, Homo sapien
catctcccggcccgccacctcgttg

SEQ ID NO: 5817645 - DNA, 25 bp, Homo sapien
cggtctggcaggggaggaccaggac

SEQ ID NO: 5817646 - DNA, 25 bp, Homo sapien
tttggcgtagccaggggcttgggca

SEQ ID NO: 5817647 - DNA, 25 bp, Homo sapien
gccatgtcaatggcgtcgaaggcgg

SEQ ID NO: 5817648 - DNA, 25 bp, Homo sapien
ggcagctgccacctcatagccgtca

SEQ ID NO: 5817649 - DNA, 25 bp, Homo sapien
cggggttccgctcaaactcgcaccc

SEQ ID NO: 5817650 - DNA, 25 bp, Homo sapien
agtgtgtacagggcctcctcggggg

SEQ ID NO: 5817651 - DNA, 25 bp, Homo sapien
cacttcatgattgcctttgtctccg

SEQ ID NO: 5817652 - DNA, 25 bp, Homo sapien
ggccgagggctgcctgcgcgcccgg

SEQ ID NO: 5817653 - DNA, 25 bp, Homo sapien
catcttctcgtcgggcgtgggagaa

SEQ ID NO: 5817654 - DNA, 25 bp, Homo sapien
caccgtctccacgaaattcaggagt

SEQ ID NO: 5817655 - DNA, 25 bp, Homo sapien
gagctggcctccaccacctcccacg

SEQ ID NO: 5817656 - DNA, 25 bp, Homo sapien
caggaaattgcctccacacctattc

SEQ ID NO: 5817657 - DNA, 25 bp, Homo sapien
ctgtaccgctgtctgcagctggtgg

SEQ ID NO: 5817658 - DNA, 25 bp, Homo sapien
tggcagtcaaggaagtagggccagg

SEQ ID NO: 5817659 - DNA, 25 bp, Homo sapien
agctactgtgcaggaatcagagctt

SEQ ID NO: 5817660 - DNA, 25 bp, Homo sapien
gggcggggatgatgactttcttgat

SEQ ID NO: 5817661 - DNA, 25 bp, Homo sapien
ggggccagcacagcacagcccagca

SEQ ID NO: 5817662 - DNA, 25 bp, Homo sapien
tttaagtggatcaaaacactttaat

SEQ ID NO: 5817663 - DNA, 25 bp, Homo sapien
acggccagccctcttcatccgggcg

SEQ ID NO: 5817664 - DNA, 25 bp, Homo sapien
gagcgggtcgggctccgtggcctcc

SEQ ID NO: 5817665 - DNA, 25 bp, Homo sapien
ggccagggcctgcagggaggggcac

SEQ ID NO: 5817666 - DNA, 25 bp, Homo sapien
ccctcacaccggggggccagcacag

SEQ ID NO: 5817667 - DNA, 25 bp, Homo sapien
gcaggtggctggggaggcagggtcg

SEQ ID NO: 5817668 - DNA, 25 bp, Homo sapien
acagcccagcagccgcaggtccggg

SEQ ID NO: 5817669 - DNA, 25 bp, Homo sapien
ggctttgtgggatgtctgtggccga

SEQ ID NO: 5817670 - DNA, 25 bp, Homo sapien
cgggtcatagcagccctcgtcctct

SEQ ID NO: 5817671 - DNA, 25 bp, Homo sapien
gggtggacgtcagcgtaggctctgg

SEQ ID NO: 5817672 - DNA, 25 bp, Homo sapien
gctgccagagtgtgtacagggcctc

SEQ ID NO: 5817673 - DNA, 25 bp, Homo sapien
gcctttgtctccggggccaccttac

SEQ ID NO: 5817674 - DNA, 25 bp, Homo sapien
cccagaggttgcagaatgaagtcca

SEQ ID NO: 5817675 - DNA, 25 bp, Homo sapien
ttgactggcttgccgaatttatctg

SEQ ID NO: 5817676 - DNA, 25 bp, Homo sapien
cttcatgattgcctttgtctccggg

SEQ ID NO: 5817677 - DNA, 25 bp, Homo sapien
ggggaggaccaggacaacagctact

SEQ ID NO: 5817678 - DNA, 25 bp, Homo sapien
gagaactcgatgaccagcagctccc

SEQ ID NO: 5817679 - DNA, 25 bp, Homo sapien
ggggggccagcacagcacagcccag

SEQ ID NO: 5817680 - DNA, 25 bp, Homo sapien
cagctgcctaaagtgctctgacagt

SEQ ID NO: 5817681 - DNA, 25 bp, Homo sapien
ccggcccgccacctcgttgccatga

SEQ ID NO: 5817682 - DNA, 25 bp, Homo sapien
gcaggccctcgcagatgtgccggca

SEQ ID NO: 5817683 - DNA, 25 bp, Homo sapien
gccgtcgaagctgcgcccgatgctg

SEQ ID NO: 5817684 - DNA, 25 bp, Homo sapien
acgcaggtggctggggaggcagggt

SEQ ID NO: 5817685 - DNA, 25 bp, Homo sapien
gcagccctgagggcagtgcctcgtc

SEQ ID NO: 5817686 - DNA, 25 bp, Homo sapien
tggagaactcgatgaccagcagctc

SEQ ID NO: 5817687 - DNA, 25 bp, Homo sapien
ccatccgcctcagcacacgcaccat

SEQ ID NO: 5817688 - DNA, 25 bp, Homo sapien
tctggacagcagcttgaacatcttc

SEQ ID NO: 5817689 - DNA, 25 bp, Homo sapien
cacacctattctccgacctgtccat

SEQ ID NO: 5817690 - DNA, 25 bp, Homo sapien
ccaggggcttgggcaatgacaatgt

SEQ ID NO: 5817691 - DNA, 25 bp, Homo sapien
tccctcccgcagtggccctgaccgt

SEQ ID NO: 5817692 - DNA, 25 bp, Homo sapien
ccggtgcaccgtctccacgaaattc

SEQ ID NO: 5817693 - DNA, 25 bp, Homo sapien
gcagggtcggcaggtcagtccctcc

SEQ ID NO: 5817694 - DNA, 25 bp, Homo sapien
cagacctcccgcaggccctcgcaga

SEQ ID NO: 5817695 - DNA, 25 bp, Homo sapien
gacggccagcgcagtgatgtggcac

SEQ ID NO: 5817696 - DNA, 25 bp, Homo sapien
catccacttcatgattgcctttgtc

SEQ ID NO: 5817697 - DNA, 25 bp, Homo sapien
cgaatgcctttgactgagatccggg

SEQ ID NO: 5817698 - DNA, 25 bp, Homo sapien
gtgaagtagcggtggcagtcaagga

SEQ ID NO: 5817699 - DNA, 25 bp, Homo sapien
ctcgttgccatgaatgttgccgatg

SEQ ID NO: 5817700 - DNA, 25 bp, Homo sapien
ggctgaagcggatgaaggtgggcgg

SEQ ID NO: 5817701 - DNA, 25 bp, Homo sapien
catagccgtcagggttcatggaggg

SEQ ID NO: 5817702 - DNA, 25 bp, Homo sapien
ggcggcggaccttggacggccagcg

SEQ ID NO: 5817703 - DNA, 25 bp, Homo sapien
gtagtcaccatctggggctgtggtg

SEQ ID NO: 5817704 - DNA, 25 bp, Homo sapien
gacaccaccaggtcgcccccatgaa

SEQ ID NO: 5817705 - DNA, 25 bp, Homo sapien
gaagctgtaccagtccgccccgttg

SEQ ID NO: 5817706 - DNA, 25 bp, Homo sapien
ggccgcgcggggccggggctctgcg

SEQ ID NO: 5817707 - DNA, 25 bp, Homo sapien
ccctcctacagaacagaagccaggg

SEQ ID NO: 5817708 - DNA, 25 bp, Homo sapien
caggagcccgggatgcggagacggg

SEQ ID NO: 5817709 - DNA, 25 bp, Homo sapien
tggggccggggctagtacttgagca

SEQ ID NO: 5817710 - DNA, 25 bp, Homo sapien
agctgtaccagtccgccccgttgat

SEQ ID NO: 5817711 - DNA, 25 bp, Homo sapien
caggtagttgaagtcggacatgcct

SEQ ID NO: 5817712 - DNA, 25 bp, Homo sapien
tgactttcttgatgactttggcgta

SEQ ID NO: 5817713 - DNA, 25 bp, Homo sapien
ggtcagtccctcccgcagtggccct

SEQ ID NO: 5817714 - DNA, 25 bp, Homo sapien
agctgcgcccgatgctgtaggtcct

SEQ ID NO: 5817715 - DNA, 25 bp, Homo sapien
tgaccagcagctccctgccgtcgaa

SEQ ID NO: 5817716 - DNA, 25 bp, Homo sapien
tcatagcagccctcgtcctctctcg

SEQ ID NO: 5817717 - DNA, 25 bp, Homo sapien
tgactttggcgtagccaggggcttg

SEQ ID NO: 5817718 - DNA, 25 bp, Homo sapien
aggccctcgcagatgtgccggcagg

SEQ ID NO: 5817719 - DNA, 25 bp, Homo sapien
gttccgctcaaactcgcaccccggc

SEQ ID NO: 5817720 - DNA, 25 bp, Homo sapien
cggctggagaactcgatgaccagca

SEQ ID NO: 5817721 - DNA, 25 bp, Homo sapien
ctgcaggtccacgcaggtggctggg

SEQ ID NO: 5817722 - DNA, 25 bp, Homo sapien
gccggcagggtctgcgcacccagcc

SEQ ID NO: 5817723 - DNA, 25 bp, Homo sapien
cgtgctggccggggcggctggagaa

SEQ ID NO: 5817724 - DNA, 25 bp, Homo sapien
acatcttctcctcctgggggtgctt

SEQ ID NO: 5817725 - DNA, 25 bp, Homo sapien
gcggcggcgggggcggcatggtggg

SEQ ID NO: 5817726 - DNA, 25 bp, Homo sapien
tctgcatccacttcatgattgcctt

SEQ ID NO: 5817727 - DNA, 25 bp, Homo sapien
ctaccgtgatctcaaagcagttggt

SEQ ID NO: 5817728 - DNA, 25 bp, Homo sapien
cagctgccacctcatagccgtcagg

SEQ ID NO: 5817729 - DNA, 25 bp, Homo sapien
cctggcgggtgctggggccggggct

SEQ ID NO: 5817730 - DNA, 25 bp, Homo sapien
gtgaagtaggaccaccaccagggct

SEQ ID NO: 5817731 - DNA, 25 bp, Homo sapien
gggcctcggtctccacatcctggcg

SEQ ID NO: 5817732 - DNA, 25 bp, Homo sapien
cccagcagccgcaggtccgggttgc

SEQ ID NO: 5817733 - DNA, 25 bp, Homo sapien
cccacggtctggcaggggaggacca

SEQ ID NO: 5817734 - DNA, 25 bp, Homo sapien
gcacacgcaccatctgggcgtagga

SEQ ID NO: 5817735 - DNA, 25 bp, Homo sapien
cgggctggcagacctcccgcaggcc

SEQ ID NO: 5817736 - DNA, 25 bp, Homo sapien
ccgttgtagccggcaccctcggcag

SEQ ID NO: 5817737 - DNA, 25 bp, Homo sapien
aacactttaataaaatggcagcggc

SEQ ID NO: 5817738 - DNA, 25 bp, Homo sapien
ctccgccagccggtagtactcggac

SEQ ID NO: 5817739 - DNA, 25 bp, Homo sapien
ccgcctcagcacacgcaccatctgg

SEQ ID NO: 5817740 - DNA, 25 bp, Homo sapien
cgtcagggttcatggagggcagcag

SEQ ID NO: 5817741 - DNA, 25 bp, Homo sapien
tctgaaatcacggattcagctgcct

SEQ ID NO: 5817742 - DNA, 25 bp, Homo sapien
ggccgggcagcggcgacgaccagga

SEQ ID NO: 5817743 - DNA, 25 bp, Homo sapien
ggggcccagtcctccgcagcccatg

SEQ ID NO: 5817744 - DNA, 25 bp, Homo sapien
gccctcgtcctctctcgtgaagtag

SEQ ID NO: 5817745 - DNA, 25 bp, Homo sapien
agggcctgcagggaggggcacccac

SEQ ID NO: 5817746 - DNA, 25 bp, Homo sapien
ggggatgatgactttcttgatgact

SEQ ID NO: 5817747 - DNA, 25 bp, Homo sapien
gctcagcgatgtgaagtaggaccac

SEQ ID NO: 5817748 - DNA, 25 bp, Homo sapien
gggtgctcagcgatgtgaagtagga

SEQ ID NO: 5817749 - DNA, 25 bp, Homo sapien
agaacgctcagcaggatgtactcgg

SEQ ID NO: 5817750 - DNA, 25 bp, Homo sapien
ggcaggggaggaccaggacaacagc

SEQ ID NO: 5817751 - DNA, 25 bp, Homo sapien
tgtgtacagggcctcctcggggggg

SEQ ID NO: 5817752 - DNA, 25 bp, Homo sapien
acaaaatcaagagccaggagcccgg

SEQ ID NO: 5817753 - DNA, 25 bp, Homo sapien
ggtgcaccgtctccacgaaattcag

SEQ ID NO: 5817754 - DNA, 25 bp, Homo sapien
cccgtcggccgagggctgcctgcgc

SEQ ID NO: 5817755 - DNA, 25 bp, Homo sapien
cttgaacatcttctcgtcgggcgtg

SEQ ID NO: 5817756 - DNA, 25 bp, Homo sapien
gatgcgggtggtgttgagcaggcgc

SEQ ID NO: 5817757 - DNA, 25 bp, Homo sapien
cacggtctggcaggggaggaccagg

SEQ ID NO: 5817758 - DNA, 25 bp, Homo sapien
tgcgcgcccggagcgggtcgggctc

SEQ ID NO: 5817759 - DNA, 25 bp, Homo sapien
cacccacggtctggcaggggaggac

SEQ ID NO: 5817760 - DNA, 25 bp, Homo sapien
aggaccaggacaacagctactgtgc

SEQ ID NO: 5817761 - DNA, 25 bp, Homo sapien
gattgcctttgtctccggggccacc

SEQ ID NO: 5817762 - DNA, 25 bp, Homo sapien
ggcttactcccgtcggccgagggct

SEQ ID NO: 5817763 - DNA, 25 bp, Homo sapien
cgggccgcgcggggccggggctctg

SEQ ID NO: 5817764 - DNA, 25 bp, Homo sapien
ggcattcaccggcggggttccgctc

SEQ ID NO: 5817765 - DNA, 25 bp, Homo sapien
gaaggtggtgtggttgtaggcggca

SEQ ID NO: 5817766 - DNA, 25 bp, Homo sapien
cactttaataaaatggcagcggctt

SEQ ID NO: 5817767 - DNA, 25 bp, Homo sapien
gcctcggtctccacatcctggcggg

SEQ ID NO: 5817768 - DNA, 25 bp, Homo sapien
ggagtgactccttgttgtgctgcca

SEQ ID NO: 5817769 - DNA, 25 bp, Homo sapien
atcacggattcagctgcctaaagtg

SEQ ID NO: 5817770 - DNA, 25 bp, Homo sapien
ccgccccgttgatgatgctccccct

SEQ ID NO: 5817771 - DNA, 25 bp, Homo sapien
tagcggtggcagtcaaggaagtagg

SEQ ID NO: 5817772 - DNA, 25 bp, Homo sapien
gaatttatctgtcaccacacctttg

SEQ ID NO: 5817773 - DNA, 25 bp, Homo sapien
accgctgtctgcagctggtggcctg

SEQ ID NO: 5817774 - DNA, 25 bp, Homo sapien
ccaggccatgtcaatggcgtcgaag

SEQ ID NO: 5817775 - DNA, 25 bp, Homo sapien
ccaggagctggtgtagaacgctcag

SEQ ID NO: 5817776 - DNA, 25 bp, Homo sapien
gcgcgttctgcctcccgctcgtcca

SEQ ID NO: 5817777 - DNA, 25 bp, Homo sapien
ggccagcacagcacagcccagcagc

SEQ ID NO: 5817778 - DNA, 25 bp, Homo sapien
agcgggtcgtggggcccagtcctcc

SEQ ID NO: 5817779 - DNA, 25 bp, Homo sapien
cagcctccaggcctccccgaagctt

SEQ ID NO: 5817780 - DNA, 25 bp, Homo sapien
actgtgcaggaatcagagcttctga

SEQ ID NO: 5817781 - DNA, 25 bp, Homo sapien
tactcggagctggcctccaccacct

SEQ ID NO: 5817782 - DNA, 25 bp, Homo sapien
agtggtggctgaagcggatgaaggt

SEQ ID NO: 5817783 - DNA, 25 bp, Homo sapien
tagttgaagtcggacatgcctcccg

SEQ ID NO: 5817784 - DNA, 25 bp, Homo sapien
tgggggatggggatgtggtcgctgc

SEQ ID NO: 5817785 - DNA, 25 bp, Homo sapien
cagcgggaggccatccgcctcagca

SEQ ID NO: 5817786 - DNA, 25 bp, Homo sapien
caggttctgcgcgttctgcctcccg

SEQ ID NO: 5817787 - DNA, 25 bp, Homo sapien
aggggcttgggcaatgacaatgtgg

SEQ ID NO: 5817788 - DNA, 25 bp, Homo sapien
tggccgacaaaatcaagagccagga

SEQ ID NO: 5817789 - DNA, 25 bp, Homo sapien
tgatctcaaagcagttggtgtgcag

SEQ ID NO: 5817790 - DNA, 25 bp, Homo sapien
tggttgtaggcggcatcgctgcagg

SEQ ID NO: 5817791 - DNA, 25 bp, Homo sapien
atggcagcggctttgtgggatgtct

SEQ ID NO: 5817792 - DNA, 25 bp, Homo sapien
ccgatgctgtaggtcctggccacgt

SEQ ID NO: 5817793 - DNA, 25 bp, Homo sapien
tgctgaagcaggttggggaaggtgg

SEQ ID NO: 5817794 - DNA, 25 bp, Homo sapien
gctctggacagcagcttgaacatct

SEQ ID NO: 5817795 - DNA, 25 bp, Homo sapien
taggtagatgagcatctcccggccc

SEQ ID NO: 5817796 - DNA, 25 bp, Homo sapien
agcacaaagggtatggtctgcatcc

SEQ ID NO: 5817797 - DNA, 25 bp, Homo sapien
tgcttggagaagtcgaaggggtagg

SEQ ID NO: 5817798 - DNA, 25 bp, Homo sapien
gtccacccgttgtagccggcaccct

SEQ ID NO: 5817799 - DNA, 25 bp, Homo sapien
taaagttcttgggtcccatccccag

SEQ ID NO: 5817800 - DNA, 25 bp, Homo sapien
atccgcctcagcacacgcaccatct

SEQ ID NO: 5817801 - DNA, 25 bp, Homo sapien
tcatgattgcctttgtctccggggc

SEQ ID NO: 5817802 - DNA, 25 bp, Homo sapien
gcagatgtgccggcagggtctgcgc

SEQ ID NO: 5817803 - DNA, 25 bp, Homo sapien
gctggagaactcgatgaccagcagc

SEQ ID NO: 5817804 - DNA, 25 bp, Homo sapien
gacatgcctcccgtgaagctgtacc

SEQ ID NO: 5817805 - DNA, 25 bp, Homo sapien
gtcctccgcagcccatgaataaagt

SEQ ID NO: 5817806 - DNA, 25 bp, Homo sapien
actccttgttgtgctgccagagtgt

SEQ ID NO: 5817807 - DNA, 25 bp, Homo sapien
ggccggggcggctggagaactcgat

SEQ ID NO: 5817808 - DNA, 25 bp, Homo sapien
gtcagacatttacgtaggggacccc

SEQ ID NO: 5817809 - DNA, 25 bp, Homo sapien
tggtggctgaagcggatgaaggtgg

SEQ ID NO: 5817810 - DNA, 25 bp, Homo sapien
gcagctccctgccgtcgaagctgcg

SEQ ID NO: 5817811 - DNA, 25 bp, Homo sapien
caaactcgcaccccggccgggcagc

SEQ ID NO: 5817812 - DNA, 25 bp, Homo sapien
atccgggcgtttttgactggcttgc

SEQ ID NO: 5817813 - DNA, 25 bp, Homo sapien
gtactcagagcacaggtactgggct

SEQ ID NO: 5817814 - DNA, 25 bp, Homo sapien
cagccgccctcacaccggggggcca

SEQ ID NO: 5817815 - DNA, 25 bp, Homo sapien
aggctggctgagagcacaaagggta

SEQ ID NO: 5817816 - DNA, 25 bp, Homo sapien
gaactcgatgaccagcagctccctg

SEQ ID NO: 5817817 - DNA, 25 bp, Homo sapien
acccgttgtagccggcaccctcggc

SEQ ID NO: 5817818 - DNA, 25 bp, Homo sapien
aggggtaggacaccaccaggtcgcc

SEQ ID NO: 5817819 - DNA, 25 bp, Homo sapien
tctcctcctgggggtgcttggagaa

SEQ ID NO: 5817820 - DNA, 25 bp, Homo sapien
gatcaaaacactttaataaaatggc

SEQ ID NO: 5817821 - DNA, 25 bp, Homo sapien
ggtgtggttgtaggcggcatcgctg

SEQ ID NO: 5817822 - DNA, 25 bp, Homo sapien
gcagccgcaggtccgggttgcactg

SEQ ID NO: 5817823 - DNA, 25 bp, Homo sapien
ttgtgctgccagagtgtgtacaggg

SEQ ID NO: 5817824 - DNA, 25 bp, Homo sapien
cccagtcctccgcagcccatgaata

SEQ ID NO: 5817825 - DNA, 25 bp, Homo sapien
ggcctcccccaaagagctggcacct

SEQ ID NO: 5817826 - DNA, 25 bp, Homo sapien
cagccggtagtactcggacgtcagg

SEQ ID NO: 5817827 - DNA, 25 bp, Homo sapien
ctcaaactcgcaccccggccgggca

SEQ ID NO: 5817828 - DNA, 25 bp, Homo sapien
ccggtgctgaagcaggttggggaag

SEQ ID NO: 5817829 - DNA, 25 bp, Homo sapien
gacatttacgtaggggaccccacgc

SEQ ID NO: 5817830 - DNA, 25 bp, Homo sapien
cgggtggtgttgagcaggcgctgga

SEQ ID NO: 5817831 - DNA, 25 bp, Homo sapien
cgcaccccggccgggcagcggcgac

SEQ ID NO: 5817832 - DNA, 25 bp, Homo sapien
catggggtggacgtcagcgtaggct

SEQ ID NO: 5817833 - DNA, 25 bp, Homo sapien
ccgctcgtccacccgttgtagccgg

SEQ ID NO: 5817834 - DNA, 25 bp, Homo sapien
gggctaggtagatgagcatctcccg

SEQ ID NO: 5817835 - DNA, 25 bp, Homo sapien
cggcaccctcggcagctgccacctc

SEQ ID NO: 5817836 - DNA, 25 bp, Homo sapien
gagaaaacatcttctcctcctgggg

SEQ ID NO: 5817837 - DNA, 25 bp, Homo sapien
cggattcagctgcctaaagtgctct

SEQ ID NO: 5817838 - DNA, 25 bp, Homo sapien
caggtggatgcgggtggtgttgagc

SEQ ID NO: 5817839 - DNA, 25 bp, Homo sapien
ccagcgtggcctgtgggtgctcagc

SEQ ID NO: 5817840 - DNA, 25 bp, Homo sapien
agctccctgccgtcgaagctgcgcc

SEQ ID NO: 5817841 - DNA, 25 bp, Homo sapien
ttcaggagtgactccttgttgtgct

SEQ ID NO: 5817842 - DNA, 25 bp, Homo sapien
ggcacccacggtctggcaggggagg

SEQ ID NO: 5817843 - DNA, 25 bp, Homo sapien
cgtgatctcaaagcagttggtgtgc

SEQ ID NO: 5817844 - DNA, 25 bp, Homo sapien
cctcccgcagtggccctgaccgtga

SEQ ID NO: 5817845 - DNA, 25 bp, Homo sapien
cggtagtactcggacgtcaggtccg

SEQ ID NO: 5817846 - DNA, 25 bp, Homo sapien
tgtctccggggccaccttaccccac

SEQ ID NO: 5817847 - DNA, 25 bp, Homo sapien
agggtctgcgcacccagccgccctc

SEQ ID NO: 5817848 - DNA, 25 bp, Homo sapien
ctgaagcaggttggggaaggtggtg

SEQ ID NO: 5817849 - DNA, 25 bp, Homo sapien
cgaaggcgggctggcagacctcccg

SEQ ID NO: 5817850 - DNA, 25 bp, Homo sapien
cagcagctccctgccgtcgaagctg

SEQ ID NO: 5817851 - DNA, 25 bp, Homo sapien
gtggctgaagcggatgaaggtgggc

SEQ ID NO: 5817852 - DNA, 25 bp, Homo sapien
gaggccatccgcctcagcacacgca

SEQ ID NO: 5817853 - DNA, 25 bp, Homo sapien
aatcaagagccaggagcccgggatg

SEQ ID NO: 5817854 - DNA, 25 bp, Homo sapien
aggtggtgtggttgtaggcggcatc

SEQ ID NO: 5817855 - DNA, 25 bp, Homo sapien
ttctcgtcgggcgtgggagaaaaca

SEQ ID NO: 5817856 - DNA, 25 bp, Homo sapien
gctagtacttgagcagccagcgtgg

SEQ ID NO: 5817857 - DNA, 25 bp, Homo sapien
gtagccaggggcttgggcaatgaca

SEQ ID NO: 5817858 - DNA, 25 bp, Homo sapien
cggatgaaggtgggcggcagccctg

SEQ ID NO: 5817859 - DNA, 25 bp, Homo sapien
gctgcctgcgcgcccggagcgggtc

SEQ ID NO: 5817860 - DNA, 25 bp, Homo sapien
cgccgcgggtctccgccagccggta

SEQ ID NO: 5817861 - DNA, 25 bp, Homo sapien
acgtaggggaccccacgcagggcca

SEQ ID NO: 5817862 - DNA, 25 bp, Homo sapien
gtttttgactggcttgccgaattta

SEQ ID NO: 5817863 - DNA, 25 bp, Homo sapien
tagccgtcagggttcatggagggca

SEQ ID NO: 5817864 - DNA, 25 bp, Homo sapien
cgtgggcgcagcgggaggccatccg

SEQ ID NO: 5817865 - DNA, 25 bp, Homo sapien
cctccacacctattctccgacctgt

SEQ ID NO: 5817866 - DNA, 25 bp, Homo sapien
tgtgcaggaatcagagcttctgaaa

SEQ ID NO: 5817867 - DNA, 25 bp, Homo sapien
ctggccggggcggctggagaactcg

SEQ ID NO: 5817868 - DNA, 25 bp, Homo sapien
cctccgcagcccatgaataaagttc

SEQ ID NO: 5817869 - DNA, 25 bp, Homo sapien
ctgcagccctcctacagaacagaag

SEQ ID NO: 5817870 - DNA, 25 bp, Homo sapien
ctgggctaggtagatgagcatctcc

SEQ ID NO: 5817871 - DNA, 25 bp, Homo sapien
cccgggatgcggagacgggcctcgg

SEQ ID NO: 5817872 - DNA, 25 bp, Homo sapien
cagcagtctccagtagtcaccatct

SEQ ID NO: 5817873 - DNA, 25 bp, Homo sapien
tgatgctccccctcttcaggaaatt

SEQ ID NO: 5817874 - DNA, 25 bp, Homo sapien
agcccgggatgcggagacgggcctc

SEQ ID NO: 5817875 - DNA, 25 bp, Homo sapien
tccatcagctcgtgctggccggggc

SEQ ID NO: 5817876 - DNA, 25 bp, Homo sapien
cagcgcagtgatgtggcactcgggc

SEQ ID NO: 5817877 - DNA, 25 bp, Homo sapien
cctgcgcgcccggagcgggtcgggc

SEQ ID NO: 5817878 - DNA, 25 bp, Homo sapien
tgaatgttgccgatgagcttcacct

SEQ ID NO: 5817879 - DNA, 25 bp, Homo sapien
gcaatgacaatgtggatacctgggg

SEQ ID NO: 5817880 - DNA, 25 bp, Homo sapien
cttgttgtgctgccagagtgtgtac

SEQ ID NO: 5817881 - DNA, 25 bp, Homo sapien
gccgacaaaatcaagagccaggagc

SEQ ID NO: 5817882 - DNA, 25 bp, Homo sapien
accaccaccagggcttactcccgtc

SEQ ID NO: 5817883 - DNA, 25 bp, Homo sapien
aaaatcaagagccaggagcccggga

SEQ ID NO: 5817884 - DNA, 25 bp, Homo sapien
gagaagtcgaaggggtaggacacca

SEQ ID NO: 5817885 - DNA, 25 bp, Homo sapien
cggggctagtacttgagcagccagc

SEQ ID NO: 5817886 - DNA, 25 bp, Homo sapien
aggtggctggggaggcagggtcggc

SEQ ID NO: 5817887 - DNA, 25 bp, Homo sapien
agcttgaacatcttctcgtcgggcg

SEQ ID NO: 5817888 - DNA, 25 bp, Homo sapien
aaggtgggcggcagccctgagggca

SEQ ID NO: 5817889 - DNA, 25 bp, Homo sapien
gcagcggcgacgaccaggactgtaa

SEQ ID NO: 5817890 - DNA, 25 bp, Homo sapien
cttggagaagtcgaaggggtaggac

SEQ ID NO: 5817891 - DNA, 25 bp, Homo sapien
tcccgcagtggccctgaccgtgacg

SEQ ID NO: 5817892 - DNA, 25 bp, Homo sapien
tgagatccgggcgtttttgactggc

SEQ ID NO: 5817893 - DNA, 25 bp, Homo sapien
gaccccacgcagggccagggcctgc

SEQ ID NO: 5817894 - DNA, 25 bp, Homo sapien
ccttccaggagctggtgtagaacgc

SEQ ID NO: 5817895 - DNA, 25 bp, Homo sapien
ctcagcacacgcaccatctgggcgt

SEQ ID NO: 5817896 - DNA, 25 bp, Homo sapien
ggcccagtcctccgcagcccatgaa

SEQ ID NO: 5817897 - DNA, 25 bp, Homo sapien
gcgggtgctggggccggggctagta

SEQ ID NO: 5817898 - DNA, 25 bp, Homo sapien
agggttcatggagggcagcaggtgg

SEQ ID NO: 5817899 - DNA, 25 bp, Homo sapien
cggcatcgctgcaggtcctgagctg

SEQ ID NO: 5817900 - DNA, 25 bp, Homo sapien
ttgcctttgtctccggggccacctt

SEQ ID NO: 5817901 - DNA, 25 bp, Homo sapien
gccggggctagtacttgagcagcca

SEQ ID NO: 5817902 - DNA, 25 bp, Homo sapien
ttcacacagcccagctctaccgtga

SEQ ID NO: 5817903 - DNA, 25 bp, Homo sapien
ccccggtgcaccgtctccacgaaat

SEQ ID NO: 5817904 - DNA, 25 bp, Homo sapien
ccaaccccagactccggaaggtggc

SEQ ID NO: 5817905 - DNA, 25 bp, Homo sapien
ttagatattctagatttacattaaa

SEQ ID NO: 5817906 - DNA, 25 bp, Homo sapien
ggaggatggcctgagctcaaggaga

SEQ ID NO: 5817907 - DNA, 25 bp, Homo sapien
aacgatgcccagggccgtgggctct

SEQ ID NO: 5817908 - DNA, 25 bp, Homo sapien
caccaatgtgagaacctgtcttgga

SEQ ID NO: 5817909 - DNA, 25 bp, Homo sapien
atcgacctcatgacaaacactccag

SEQ ID NO: 5817910 - DNA, 25 bp, Homo sapien
tagctcgggaggaagccaagccggg

SEQ ID NO: 5817911 - DNA, 25 bp, Homo sapien
atgtgtcccctgacaggggttctcc

SEQ ID NO: 5817912 - DNA, 25 bp, Homo sapien
aagaaagatgtattgctgccagctt

SEQ ID NO: 5817913 - DNA, 25 bp, Homo sapien
tttgtatgtaaaatagcaagtggct

SEQ ID NO: 5817914 - DNA, 25 bp, Homo sapien
tcagaggaagcccgggaccaaattg

SEQ ID NO: 5817915 - DNA, 25 bp, Homo sapien
ttctccctgacaaacctgccccggg

SEQ ID NO: 5817916 - DNA, 25 bp, Homo sapien
cgtggattccccactcctcaagttc

SEQ ID NO: 5817917 - DNA, 25 bp, Homo sapien
tcagttggcagggtcactgtccaca

SEQ ID NO: 5817918 - DNA, 25 bp, Homo sapien
ttagacgctcatctgggccagcacc

SEQ ID NO: 5817919 - DNA, 25 bp, Homo sapien
tcccgaacagcctccgttgcccaca

SEQ ID NO: 5817920 - DNA, 25 bp, Homo sapien
ggaaagattcatacaggagtcaaaa

SEQ ID NO: 5817921 - DNA, 25 bp, Homo sapien
cacggcgtgtgtcagccttgcccac

SEQ ID NO: 5817922 - DNA, 25 bp, Homo sapien
actccagatgctgcaagccagcccc

SEQ ID NO: 5817923 - DNA, 25 bp, Homo sapien
cctgcaaatagctcccggcctctgt

SEQ ID NO: 5817924 - DNA, 25 bp, Homo sapien
gtgtggtagtgcatgcctgtagtcc

SEQ ID NO: 5817925 - DNA, 25 bp, Homo sapien
catccagtgcgtgcacatccccagc

SEQ ID NO: 5817926 - DNA, 25 bp, Homo sapien
caaagcctgctgagcgcacggcgtg

SEQ ID NO: 5817927 - DNA, 25 bp, Homo sapien
gctggtggatgtgtcccctgacagg

SEQ ID NO: 5817928 - DNA, 25 bp, Homo sapien
aaagggagacatactacctgtcaga

SEQ ID NO: 5817929 - DNA, 25 bp, Homo sapien
ccctcattgaccttcctctcatcga

SEQ ID NO: 5817930 - DNA, 25 bp, Homo sapien
atcatgcactgctcatgctgcaagt

SEQ ID NO: 5817931 - DNA, 25 bp, Homo sapien
gctcatgctgcaagtcaggcagcga

SEQ ID NO: 5817932 - DNA, 25 bp, Homo sapien
ccagaagcacacgtggctgtaggat

SEQ ID NO: 5817933 - DNA, 25 bp, Homo sapien
tgaagaccctcggagccagggcgtg

SEQ ID NO: 5817934 - DNA, 25 bp, Homo sapien
gccgcgatgagccttcagcctgccg

SEQ ID NO: 5817935 - DNA, 25 bp, Homo sapien
atgagccttcagcctgccgggcagg

SEQ ID NO: 5817936 - DNA, 25 bp, Homo sapien
cacagaagtagctcgggaggaagcc

SEQ ID NO: 5817937 - DNA, 25 bp, Homo sapien
ctgcttcccgccgccaccctcctcg

SEQ ID NO: 5817938 - DNA, 25 bp, Homo sapien
ctgaaccaacaagggagagcaacag

SEQ ID NO: 5817939 - DNA, 25 bp, Homo sapien
acatactacctgtcagacagcccct

SEQ ID NO: 5817940 - DNA, 25 bp, Homo sapien
tgtattgctgccagcttggaattaa

SEQ ID NO: 5817941 - DNA, 25 bp, Homo sapien
ggccagtggctgaactccagttgcg

SEQ ID NO: 5817942 - DNA, 25 bp, Homo sapien
gcgattctactttctccaaaagtac

SEQ ID NO: 5817943 - DNA, 25 bp, Homo sapien
ttgaatgttttgtatgtaaaatagc

SEQ ID NO: 5817944 - DNA, 25 bp, Homo sapien
agtgcaaatgaagatgatgaagtct

SEQ ID NO: 5817945 - DNA, 25 bp, Homo sapien
ttgagcccaggagttcgggaccagc

SEQ ID NO: 5817946 - DNA, 25 bp, Homo sapien
aagaccctcggagccagggcgtgga

SEQ ID NO: 5817947 - DNA, 25 bp, Homo sapien
gtgaggctcttcttgtagatatcaa

SEQ ID NO: 5817948 - DNA, 25 bp, Homo sapien
gcaatctcgcaaggaagtcctcctc

SEQ ID NO: 5817949 - DNA, 25 bp, Homo sapien
gaccagcctgggaaatatagtgaaa

SEQ ID NO: 5817950 - DNA, 25 bp, Homo sapien
gagctcaaggagatgcaggctgcag

SEQ ID NO: 5817951 - DNA, 25 bp, Homo sapien
agacaaaggttatgcctactcctac

SEQ ID NO: 5817952 - DNA, 25 bp, Homo sapien
tgcaggccctgtgggggcatcctcc

SEQ ID NO: 5817953 - DNA, 25 bp, Homo sapien
gctcccggcctctgtcaaacatcag

SEQ ID NO: 5817954 - DNA, 25 bp, Homo sapien
ccgaacagcctccgttgcccacatc

SEQ ID NO: 5817955 - DNA, 25 bp, Homo sapien
ctggaaccactcgcggtcactccag

SEQ ID NO: 5817956 - DNA, 25 bp, Homo sapien
agagattccagctagtccttccagg

SEQ ID NO: 5817957 - DNA, 25 bp, Homo sapien
tgtgattgtgccactgcactccagc

SEQ ID NO: 5817958 - DNA, 25 bp, Homo sapien
ggggcctccgcactctgctcatgct

SEQ ID NO: 5817959 - DNA, 25 bp, Homo sapien
acgttcctctgagccccgcaagaac

SEQ ID NO: 5817960 - DNA, 25 bp, Homo sapien
ggagatgcaggctgcagtgggctgt

SEQ ID NO: 5817961 - DNA, 25 bp, Homo sapien
gaaacatgttttagtagaagtttta

SEQ ID NO: 5817962 - DNA, 25 bp, Homo sapien
acccccctcagcatcccccacccaa

SEQ ID NO: 5817963 - DNA, 25 bp, Homo sapien
aggcctctgcttcccgccgccaccc

SEQ ID NO: 5817964 - DNA, 25 bp, Homo sapien
gagccttcagcctgccgggcagggg

SEQ ID NO: 5817965 - DNA, 25 bp, Homo sapien
agcaagtggctatttttaaagttaa

SEQ ID NO: 5817966 - DNA, 25 bp, Homo sapien
ccctgcccagctctggtgcccaggc

SEQ ID NO: 5817967 - DNA, 25 bp, Homo sapien
attccaagacaaaggttatgcctac

SEQ ID NO: 5817968 - DNA, 25 bp, Homo sapien
cagcccctcattgaccttcctctca

SEQ ID NO: 5817969 - DNA, 25 bp, Homo sapien
ttgaccttcctctcatcgacttctg

SEQ ID NO: 5817970 - DNA, 25 bp, Homo sapien
tctcccctgtgtgtgccagctcgga

SEQ ID NO: 5817971 - DNA, 25 bp, Homo sapien
aactctgcaatgagaactgaaccaa

SEQ ID NO: 5817972 - DNA, 25 bp, Homo sapien
atacaggagtcaaaattaaaaataa

SEQ ID NO: 5817973 - DNA, 25 bp, Homo sapien
tcctttgccttgaaagaacagccct

SEQ ID NO: 5817974 - DNA, 25 bp, Homo sapien
cctctgatcgacctcatgacaaaca

SEQ ID NO: 5817975 - DNA, 25 bp, Homo sapien
gctcatctgggccagcaccacaaag

SEQ ID NO: 5817976 - DNA, 25 bp, Homo sapien
ataaatatattcccagtgctggaga

SEQ ID NO: 5817977 - DNA, 25 bp, Homo sapien
gtgcgtgcacatccccagcagtggg

SEQ ID NO: 5817978 - DNA, 25 bp, Homo sapien
aagcataaatatattcccagtgctg

SEQ ID NO: 5817979 - DNA, 25 bp, Homo sapien
cccgccatgctgcggccagctctgc

SEQ ID NO: 5817980 - DNA, 25 bp, Homo sapien
agccgggtggagatgcagcccctag

SEQ ID NO: 5817981 - DNA, 25 bp, Homo sapien
tccgttgcccacatctgagagtccc

SEQ ID NO: 5817982 - DNA, 25 bp, Homo sapien
gattctactttctccaaaagtactg

SEQ ID NO: 5817983 - DNA, 25 bp, Homo sapien
atatagtgaaactcctgtccctaca

SEQ ID NO: 5817984 - DNA, 25 bp, Homo sapien
gccagggcaagcgggcgatccctgt

SEQ ID NO: 5817985 - DNA, 25 bp, Homo sapien
gtgtgtcagccttgcccacacccgc

SEQ ID NO: 5817986 - DNA, 25 bp, Homo sapien
aaaggttatgcctactcctacaaat

SEQ ID NO: 5817987 - DNA, 25 bp, Homo sapien
ttaaaagcacccggctctaccagca

SEQ ID NO: 5817988 - DNA, 25 bp, Homo sapien
agtcccagctacttgggaggctgaa

SEQ ID NO: 5817989 - DNA, 25 bp, Homo sapien
ccgggtgctgtcaatgtgccggccg

SEQ ID NO: 5817990 - DNA, 25 bp, Homo sapien
aggatggcctgagctcaaggagatg

SEQ ID NO: 5817991 - DNA, 25 bp, Homo sapien
gtgcatgcctgtagtcccagctact

SEQ ID NO: 5817992 - DNA, 25 bp, Homo sapien
cggccgcagtcgtgcacgtcagttg

SEQ ID NO: 5817993 - DNA, 25 bp, Homo sapien
agggactggggccagcacggaccac

SEQ ID NO: 5817994 - DNA, 25 bp, Homo sapien
agctacttgggaggctgaagtggga

SEQ ID NO: 5817995 - DNA, 25 bp, Homo sapien
cgatctttcattgtcttcttcgagt

SEQ ID NO: 5817996 - DNA, 25 bp, Homo sapien
gaaagatgtattgctgccagcttgg

SEQ ID NO: 5817997 - DNA, 25 bp, Homo sapien
taacttttctccagaggaaagcgat

SEQ ID NO: 5817998 - DNA, 25 bp, Homo sapien
tcccctgtgtgtgccagctcggaga

SEQ ID NO: 5817999 - DNA, 25 bp, Homo sapien
gctctgcctgcaggccctgtggggg

SEQ ID NO: 5818000 - DNA, 25 bp, Homo sapien
ttgggaggctgaagtgggaggatgg

SEQ ID NO: 5818001 - DNA, 25 bp, Homo sapien
tggacttattgaagcataaaaaaaa

SEQ ID NO: 5818002 - DNA, 25 bp, Homo sapien
ccactcctcaagttctaagccgaac

SEQ ID NO: 5818003 - DNA, 25 bp, Homo sapien
gcgggcgatccctgttccaaacaag

SEQ ID NO: 5818004 - DNA, 25 bp, Homo sapien
agcagtgggcaaagctaaatcaagt

SEQ ID NO: 5818005 - DNA, 25 bp, Homo sapien
gaggtgtacaaagaagctcacttac

SEQ ID NO: 5818006 - DNA, 25 bp, Homo sapien
ggcaccaatgtgagaacctgtcttg

SEQ ID NO: 5818007 - DNA, 25 bp, Homo sapien
gtttctgagctggcagcggagcagc

SEQ ID NO: 5818008 - DNA, 25 bp, Homo sapien
gggctctcccctgtgtgtgccagct

SEQ ID NO: 5818009 - DNA, 25 bp, Homo sapien
tcttggcctcctccccggccctgcc

SEQ ID NO: 5818010 - DNA, 25 bp, Homo sapien
tcccgtgtgcctcaggcacttaact

SEQ ID NO: 5818011 - DNA, 25 bp, Homo sapien
ctcaacaccaaagctttcgcgggca

SEQ ID NO: 5818012 - DNA, 25 bp, Homo sapien
atggatgaccctaagaaggaagaca

SEQ ID NO: 5818013 - DNA, 25 bp, Homo sapien
ccctcagcatcccccacccaacccc

SEQ ID NO: 5818014 - DNA, 25 bp, Homo sapien
gggatgttctccctgacaaacctgc

SEQ ID NO: 5818015 - DNA, 25 bp, Homo sapien
tattgctgccagcttggaattaaat

SEQ ID NO: 5818016 - DNA, 25 bp, Homo sapien
acttgagcccaggagttcgggacca

SEQ ID NO: 5818017 - DNA, 25 bp, Homo sapien
caaacaagttggggctgaagaagac

SEQ ID NO: 5818018 - DNA, 25 bp, Homo sapien
gggcaaagctaaatcaagtgaattt

SEQ ID NO: 5818019 - DNA, 25 bp, Homo sapien
aaattcctaagttttctattggtga

SEQ ID NO: 5818020 - DNA, 25 bp, Homo sapien
caggcagaatgggacccgccatgct

SEQ ID NO: 5818021 - DNA, 25 bp, Homo sapien
caggccctgtgggggcatcctcctg

SEQ ID NO: 5818022 - DNA, 25 bp, Homo sapien
gcacacgtggctgtaggatctgaaa

SEQ ID NO: 5818023 - DNA, 25 bp, Homo sapien
gaagtcttcttcggaccctttggac

SEQ ID NO: 5818024 - DNA, 25 bp, Homo sapien
caagacaaaggttatgcctactcct

SEQ ID NO: 5818025 - DNA, 25 bp, Homo sapien
agcctgggcaccaatgtgagaacct

SEQ ID NO: 5818026 - DNA, 25 bp, Homo sapien
cagggtcactgtccacagcaccccg

SEQ ID NO: 5818027 - DNA, 25 bp, Homo sapien
gagccccgcaagaactctgcaatga

SEQ ID NO: 5818028 - DNA, 25 bp, Homo sapien
ctctgttagaggaagaagcatccct

SEQ ID NO: 5818029 - DNA, 25 bp, Homo sapien
gtgagcctcggctcttggcctcctc

SEQ ID NO: 5818030 - DNA, 25 bp, Homo sapien
acacattgagagcagcagccggaac

SEQ ID NO: 5818031 - DNA, 25 bp, Homo sapien
ctcaggcacttaacttttctccaga

SEQ ID NO: 5818032 - DNA, 25 bp, Homo sapien
atgaaaaatttgacttcgatctttc

SEQ ID NO: 5818033 - DNA, 25 bp, Homo sapien
tgaaactcctgtccctacaaaaagt

SEQ ID NO: 5818034 - DNA, 25 bp, Homo sapien
agattcctgtctaaattccaagaca

SEQ ID NO: 5818035 - DNA, 25 bp, Homo sapien
aagtcaggcagaatgggacccgcca

SEQ ID NO: 5818036 - DNA, 25 bp, Homo sapien
gcgatccctgttccaaacaagttgg

SEQ ID NO: 5818037 - DNA, 25 bp, Homo sapien
ccctcctcgctgccattctctgggc

SEQ ID NO: 5818038 - DNA, 25 bp, Homo sapien
gcttcccgccgccaccctcctcgct

SEQ ID NO: 5818039 - DNA, 25 bp, Homo sapien
ggccccctgtgggtgagcctcggct

SEQ ID NO: 5818040 - DNA, 25 bp, Homo sapien
agctcccctctgatccagctgagcc

SEQ ID NO: 5818041 - DNA, 25 bp, Homo sapien
ggccgccggaagccacttgggccag

SEQ ID NO: 5818042 - DNA, 25 bp, Homo sapien
cccaagaaagagattccagctagtc

SEQ ID NO: 5818043 - DNA, 25 bp, Homo sapien
gagttcgggaccagcctgggaaata

SEQ ID NO: 5818044 - DNA, 25 bp, Homo sapien
cattgtcttcttcgagtgcaaatga

SEQ ID NO: 5818045 - DNA, 25 bp, Homo sapien
ctccagttgcgcttggtcagaatct

SEQ ID NO: 5818046 - DNA, 25 bp, Homo sapien
taatccggttcccgaacagcctccg

SEQ ID NO: 5818047 - DNA, 25 bp, Homo sapien
cccctctgatccagctgagccctga

SEQ ID NO: 5818048 - DNA, 25 bp, Homo sapien
actagaagtatcagacggcgagatt

SEQ ID NO: 5818049 - DNA, 25 bp, Homo sapien
cgactcagaggaagcccgggaccaa

SEQ ID NO: 5818050 - DNA, 25 bp, Homo sapien
gacaaaaatcccagctgagaaggaa

SEQ ID NO: 5818051 - DNA, 25 bp, Homo sapien
ggaaccactcgcggtcactccagat

SEQ ID NO: 5818052 - DNA, 25 bp, Homo sapien
gctgcaagtcaggcagcgactcaga

SEQ ID NO: 5818053 - DNA, 25 bp, Homo sapien
agccggaaccaggcagcccaagctg

SEQ ID NO: 5818054 - DNA, 25 bp, Homo sapien
attgagagcagcagccggaaccagg

SEQ ID NO: 5818055 - DNA, 25 bp, Homo sapien
gcctgagctcaaggagatgcaggct

SEQ ID NO: 5818056 - DNA, 25 bp, Homo sapien
cggtggtgggacagctcatagacct

SEQ ID NO: 5818057 - DNA, 25 bp, Homo sapien
gcctcagtcactctaaatgaagaat

SEQ ID NO: 5818058 - DNA, 25 bp, Homo sapien
gaagcccaagaaagagattccagct

SEQ ID NO: 5818059 - DNA, 25 bp, Homo sapien
accccagactccggaaggtggcggc

SEQ ID NO: 5818060 - DNA, 25 bp, Homo sapien
agcggcctctgttagaggaagaagc

SEQ ID NO: 5818061 - DNA, 25 bp, Homo sapien
cttactggctttacacattgagagc

SEQ ID NO: 5818062 - DNA, 25 bp, Homo sapien
acacgtggctgtaggatctgaaagc

SEQ ID NO: 5818063 - DNA, 25 bp, Homo sapien
gcaacagaaagacagattccaggct

SEQ ID NO: 5818064 - DNA, 25 bp, Homo sapien
agccacttgggccagggcaagcggg

SEQ ID NO: 5818065 - DNA, 25 bp, Homo sapien
ttgctgctgcctcgagcggcctctg

SEQ ID NO: 5818066 - DNA, 25 bp, Homo sapien
gacagattccaggctggtggatgtg

SEQ ID NO: 5818067 - DNA, 25 bp, Homo sapien
ccacatctgagagtccctttgcctg

SEQ ID NO: 5818068 - DNA, 25 bp, Homo sapien
ggctgaggtgggcggattacttgag

SEQ ID NO: 5818069 - DNA, 25 bp, Homo sapien
cgccggggcctccgcactctgctca

SEQ ID NO: 5818070 - DNA, 25 bp, Homo sapien
tgacttcgatctttcattgtcttct

SEQ ID NO: 5818071 - DNA, 25 bp, Homo sapien
gccttgaaagaacagccctaaagtg

SEQ ID NO: 5818072 - DNA, 25 bp, Homo sapien
gtcgatgtttctgagctggcagcgg

SEQ ID NO: 5818073 - DNA, 25 bp, Homo sapien
tctaagccgaaccaaatcctttgcc

SEQ ID NO: 5818074 - DNA, 25 bp, Homo sapien
cacacccgccagccggcgctgctct

SEQ ID NO: 5818075 - DNA, 25 bp, Homo sapien
ttcgtggaggtgtacaaagaagctc

SEQ ID NO: 5818076 - DNA, 25 bp, Homo sapien
gacaaacctgccccgggtgctgtca

SEQ ID NO: 5818077 - DNA, 25 bp, Homo sapien
acttcgatctttcattgtcttcttc

SEQ ID NO: 5818078 - DNA, 25 bp, Homo sapien
gcaccacaaagcctgctgagcgcac

SEQ ID NO: 5818079 - DNA, 25 bp, Homo sapien
gaatcccaccgggatgttctccctg

SEQ ID NO: 5818080 - DNA, 25 bp, Homo sapien
attctctgggctggaatgtgaagcc

SEQ ID NO: 5818081 - DNA, 25 bp, Homo sapien
ggcggattacttgagcccaggagtt

SEQ ID NO: 5818082 - DNA, 25 bp, Homo sapien
cattgaccttcctctcatcgacttc

SEQ ID NO: 5818083 - DNA, 25 bp, Homo sapien
gctgtgattgtgccactgcactcca

SEQ ID NO: 5818084 - DNA, 25 bp, Homo sapien
gggccagcacggaccacccaaggcc

SEQ ID NO: 5818085 - DNA, 25 bp, Homo sapien
tgaaagcaggcctctgatcgacctc

SEQ ID NO: 5818086 - DNA, 25 bp, Homo sapien
acatcagcaagtcaggcagaatggg

SEQ ID NO: 5818087 - DNA, 25 bp, Homo sapien
gattccaggctggtggatgtgtccc

SEQ ID NO: 5818088 - DNA, 25 bp, Homo sapien
cccaagctgccaagcctgaagaccc

SEQ ID NO: 5818089 - DNA, 25 bp, Homo sapien
gggaggctgaagtgggaggatggcc

SEQ ID NO: 5818090 - DNA, 25 bp, Homo sapien
cttcccgtgtgcctcaggcacttaa

SEQ ID NO: 5818091 - DNA, 25 bp, Homo sapien
tgcaagtcaggcagcgactcagagg

SEQ ID NO: 5818092 - DNA, 25 bp, Homo sapien
tgcggccagctctgcctgcaggccc

SEQ ID NO: 5818093 - DNA, 25 bp, Homo sapien
caattgaataagactagaagtatca

SEQ ID NO: 5818094 - DNA, 25 bp, Homo sapien
atatattcccagtgctggagagggt

SEQ ID NO: 5818095 - DNA, 25 bp, Homo sapien
atgcaggctgcagtgggctgtgatt

SEQ ID NO: 5818096 - DNA, 25 bp, Homo sapien
ctgcaagccagcccctcattgacct

SEQ ID NO: 5818097 - DNA, 25 bp, Homo sapien
tcttgtagatatcaaactggaacca

SEQ ID NO: 5818098 - DNA, 25 bp, Homo sapien
tccagatgctgcaagccagcccctc

SEQ ID NO: 5818099 - DNA, 25 bp, Homo sapien
tttggagcggggcatccagtgcgtg

SEQ ID NO: 5818100 - DNA, 25 bp, Homo sapien
caaaaatcccagctgagaaggaatc

SEQ ID NO: 5818101 - DNA, 25 bp, Homo sapien
cttgctggggccccctgtgggtgag

SEQ ID NO: 5818102 - DNA, 25 bp, Homo sapien
actcagaggaagcccgggaccaaat

SEQ ID NO: 5818103 - DNA, 25 bp, Homo sapien
agaggaagcccgggaccaaattgct

SEQ ID NO: 5818104 - DNA, 25 bp, Homo sapien
cacccgccagccggcgctgctctgg

SEQ ID NO: 5818105 - DNA, 25 bp, Homo sapien
atcaaactggaaccactcgcggtca

SEQ ID NO: 5818106 - DNA, 25 bp, Homo sapien
cagtgggctgtgattgtgccactgc

SEQ ID NO: 5818107 - DNA, 25 bp, Homo sapien
ctgtaggatctgaaagcaggcctct

SEQ ID NO: 5818108 - DNA, 25 bp, Homo sapien
tggtgactccccggacagctcaaca

SEQ ID NO: 5818109 - DNA, 25 bp, Homo sapien
gcctgctgagcgcacggcgtgtgtc

SEQ ID NO: 5818110 - DNA, 25 bp, Homo sapien
tgaagcctcagtcactctaaatgaa

SEQ ID NO: 5818111 - DNA, 25 bp, Homo sapien
cggcacccccctcagcatcccccac

SEQ ID NO: 5818112 - DNA, 25 bp, Homo sapien
ccttccaggacaaaaatcccagctg

SEQ ID NO: 5818113 - DNA, 25 bp, Homo sapien
tggattccccactcctcaagttcta

SEQ ID NO: 5818114 - DNA, 25 bp, Homo sapien
gtcaggcagaatgggacccgccatg

SEQ ID NO: 5818115 - DNA, 25 bp, Homo sapien
acagctcatagacctgagctcccct

SEQ ID NO: 5818116 - DNA, 25 bp, Homo sapien
caagtgaatttgcaagtattcctgc

SEQ ID NO: 5818117 - DNA, 25 bp, Homo sapien
cactgctcatgctgcaagtcaggca

SEQ ID NO: 5818118 - DNA, 25 bp, Homo sapien
ccggccctgcccagctctggtgccc

SEQ ID NO: 5818119 - DNA, 25 bp, Homo sapien
tttcgcgggcacagcggccgcagtc

SEQ ID NO: 5818120 - DNA, 25 bp, Homo sapien
ggggcctgtttggagcggggcatcc

SEQ ID NO: 5818121 - DNA, 25 bp, Homo sapien
ggagagggtgggctgagggactggg

SEQ ID NO: 5818122 - DNA, 25 bp, Homo sapien
tcgcgggcacagcggccgcagtcgt

SEQ ID NO: 5818123 - DNA, 25 bp, Homo sapien
ttttctattggtgactccccggaca

SEQ ID NO: 5818124 - DNA, 25 bp, Homo sapien
ctgccacagaagtagctcgggagga

SEQ ID NO: 5818125 - DNA, 25 bp, Homo sapien
aagaacagccctaaagtggttttca

SEQ ID NO: 5818126 - DNA, 25 bp, Homo sapien
agctgagaaggaatcccaccgggat

SEQ ID NO: 5818127 - DNA, 25 bp, Homo sapien
caaaagtactgccacagaagtagct

SEQ ID NO: 5818128 - DNA, 25 bp, Homo sapien
gccacagaagtagctcgggaggaag

SEQ ID NO: 5818129 - DNA, 25 bp, Homo sapien
aagacagattccaggctggtggatg

SEQ ID NO: 5818130 - DNA, 25 bp, Homo sapien
atcccaccgggatgttctccctgac

SEQ ID NO: 5818131 - DNA, 25 bp, Homo sapien
aagaaggaagacattcttcttttgg

SEQ ID NO: 5818132 - DNA, 25 bp, Homo sapien
tgtacaaagaagctcacttactggc

SEQ ID NO: 5818133 - DNA, 25 bp, Homo sapien
gaagctcacttactggctttacaca

SEQ ID NO: 5818134 - DNA, 25 bp, Homo sapien
ccgggtgtggtagtgcatgcctgta

SEQ ID NO: 5818135 - DNA, 25 bp, Homo sapien
caacaagggagagcaacagaaagac

SEQ ID NO: 5818136 - DNA, 25 bp, Homo sapien
tgttctccctgacaaacctgccccg

SEQ ID NO: 5818137 - DNA, 25 bp, Homo sapien
ggtgcccaggcccgcctcacccggg

SEQ ID NO: 5818138 - DNA, 25 bp, Homo sapien
tgcctactcctacaaatcaatttaa

SEQ ID NO: 5818139 - DNA, 25 bp, Homo sapien
ctgctcatgctttgcccagggaatc

SEQ ID NO: 5818140 - DNA, 25 bp, Homo sapien
gctagtccttccaggacaaaaatcc

SEQ ID NO: 5818141 - DNA, 25 bp, Homo sapien
agtggcttacacttgtaaccctaga

SEQ ID NO: 5818142 - DNA, 25 bp, Homo sapien
caaagaagctcacttactggcttta

SEQ ID NO: 5818143 - DNA, 25 bp, Homo sapien
gatgatgaagtcttcttcggaccct

SEQ ID NO: 5818144 - DNA, 25 bp, Homo sapien
ttgcccacatctgagagtccctttg

SEQ ID NO: 5818145 - DNA, 25 bp, Homo sapien
ggttagacgctcatctgggccagca

SEQ ID NO: 5818146 - DNA, 25 bp, Homo sapien
tgtatgtaaaatagcaagtggctat

SEQ ID NO: 5818147 - DNA, 25 bp, Homo sapien
tcccagctgagaaggaatcccaccg

SEQ ID NO: 5818148 - DNA, 25 bp, Homo sapien
ttacacattgagagcagcagccgga

SEQ ID NO: 5818149 - DNA, 25 bp, Homo sapien
tcatacaggagtcaaaattaaaaat

SEQ ID NO: 5818150 - DNA, 25 bp, Homo sapien
aggctgacaaggagaacgtggattc

SEQ ID NO: 5818151 - DNA, 25 bp, Homo sapien
gagaagcccaagaaagagattccag

SEQ ID NO: 5818152 - DNA, 25 bp, Homo sapien
tccttcccgtgtgcctcaggcactt

SEQ ID NO: 5818153 - DNA, 25 bp, Homo sapien
gaccttcctctcatcgacttctgcg

SEQ ID NO: 5818154 - DNA, 25 bp, Homo sapien
gtcagccttgcccacacccgccagc

SEQ ID NO: 5818155 - DNA, 25 bp, Homo sapien
aatttgacttcgatctttcattgtc

SEQ ID NO: 5818156 - DNA, 25 bp, Homo sapien
aggatctgaaagcaggcctctgatc

SEQ ID NO: 5818157 - DNA, 25 bp, Homo sapien
tggaattaaataatccggttcccga

SEQ ID NO: 5818158 - DNA, 25 bp, Homo sapien
gggcgatccctgttccaaacaagtt

SEQ ID NO: 5818159 - DNA, 25 bp, Homo sapien
cccgggcgccggggcctccgcactc

SEQ ID NO: 5818160 - DNA, 25 bp, Homo sapien
ccagggccgtgggctctcccctgtg

SEQ ID NO: 5818161 - DNA, 25 bp, Homo sapien
gggctgcggagaagcccaagaaaga

SEQ ID NO: 5818162 - DNA, 25 bp, Homo sapien
caacaccaaagctttcgcgggcaca

SEQ ID NO: 5818163 - DNA, 25 bp, Homo sapien
ggagacatactacctgtcagacagc

SEQ ID NO: 5818164 - DNA, 25 bp, Homo sapien
gcataaatatattcccagtgctgga

SEQ ID NO: 5818165 - DNA, 25 bp, Homo sapien
cgcaagaactctgcaatgagaactg

SEQ ID NO: 5818166 - DNA, 25 bp, Homo sapien
aaggagatgcaggctgcagtgggct

SEQ ID NO: 5818167 - DNA, 25 bp, Homo sapien
agaaacaagctttaggctggtcgca

SEQ ID NO: 5818168 - DNA, 25 bp, Homo sapien
ccctgacaaacctgccccgggtgct

SEQ ID NO: 5818169 - DNA, 25 bp, Homo sapien
agaactctgcaatgagaactgaacc

SEQ ID NO: 5818170 - DNA, 25 bp, Homo sapien
cttttggccgatgaaaaatttgact

SEQ ID NO: 5818171 - DNA, 25 bp, Homo sapien
acttttctccagaggaaagcgattc

SEQ ID NO: 5818172 - DNA, 25 bp, Homo sapien
ctgggccagcaccacaaagcctgct

SEQ ID NO: 5818173 - DNA, 25 bp, Homo sapien
gcagcccctagtgaggctcttcttg

SEQ ID NO: 5818174 - DNA, 25 bp, Homo sapien
tggctgaactccagttgcgcttggt

SEQ ID NO: 5818175 - DNA, 25 bp, Homo sapien
aaagattcatacaggagtcaaaatt

SEQ ID NO: 5818176 - DNA, 25 bp, Homo sapien
tagaacttgggaggctgaggtgggc

SEQ ID NO: 5818177 - DNA, 25 bp, Homo sapien
ggctgaagaagaccctgttaaaagc

SEQ ID NO: 5818178 - DNA, 25 bp, Homo sapien
gccagctctgcctgcaggccctgtg

SEQ ID NO: 5818179 - DNA, 25 bp, Homo sapien
tgaactccagttgcgcttggtcaga

SEQ ID NO: 5818180 - DNA, 25 bp, Homo sapien
cggccgcgatgagccttcagcctgc

SEQ ID NO: 5818181 - DNA, 25 bp, Homo sapien
catgacaaacactccagacatgaat

SEQ ID NO: 5818182 - DNA, 25 bp, Homo sapien
aaatatagtgaaactcctgtcccta

SEQ ID NO: 5818183 - DNA, 25 bp, Homo sapien
cctctcatcgacttctgcgataccc

SEQ ID NO: 5818184 - DNA, 25 bp, Homo sapien
ctcggagccagggcgtggaaagatt

SEQ ID NO: 5818185 - DNA, 25 bp, Homo sapien
cctttggacataaagaaagatgtat

SEQ ID NO: 5818186 - DNA, 25 bp, Homo sapien
ggactggggccagcacggaccaccc

SEQ ID NO: 5818187 - DNA, 25 bp, Homo sapien
ttcctgcaaatagctcccggcctct

SEQ ID NO: 5818188 - DNA, 25 bp, Homo sapien
taaaagggagacatactacctgtca

SEQ ID NO: 5818189 - DNA, 25 bp, Homo sapien
gaagtagctcgggaggaagccaagc

SEQ ID NO: 5818190 - DNA, 25 bp, Homo sapien
tcaaacatcagcaagtcaggcagaa

SEQ ID NO: 5818191 - DNA, 25 bp, Homo sapien
ggtcgcagtggcttacacttgtaac

SEQ ID NO: 5818192 - DNA, 25 bp, Homo sapien
agattcatacaggagtcaaaattaa

SEQ ID NO: 5818193 - DNA, 25 bp, Homo sapien
tctctgggctggaatgtgaagcctc

SEQ ID NO: 5818194 - DNA, 25 bp, Homo sapien
ggatgtgtcccctgacaggggttct

SEQ ID NO: 5818195 - DNA, 25 bp, Homo sapien
tcctctgagccccgcaagaactctg

SEQ ID NO: 5818196 - DNA, 25 bp, Homo sapien
agtggctgaactccagttgcgcttg

SEQ ID NO: 5818197 - DNA, 25 bp, Homo sapien
actcgcggtcactccagatgctgca

SEQ ID NO: 5818198 - DNA, 25 bp, Homo sapien
cgagattcctgtctaaattccaaga

SEQ ID NO: 5818199 - DNA, 25 bp, Homo sapien
ctggaatgtgaagcctcagtcactc

SEQ ID NO: 5818200 - DNA, 25 bp, Homo sapien
gctgctgcctcgagcggcctctgtt

SEQ ID NO: 5818201 - DNA, 25 bp, Homo sapien
tcttcttcggaccctttggacataa

SEQ ID NO: 5818202 - DNA, 25 bp, Homo sapien
cgagcggcctctgttagaggaagaa

SEQ ID NO: 5818203 - DNA, 25 bp, Homo sapien
gtgtgccagctcggagacgttcctc

SEQ ID NO: 5818204 - DNA, 25 bp, Homo sapien
aagcgggtcgatgtttctgagctgg

SEQ ID NO: 5818205 - DNA, 25 bp, Homo sapien
ctcagtcactctaaatgaagaattt

SEQ ID NO: 5818206 - DNA, 25 bp, Homo sapien
ggtagtgcatgcctgtagtcccagc

SEQ ID NO: 5818207 - DNA, 25 bp, Homo sapien
ggccctgcccagctctggtgcccag

SEQ ID NO: 5818208 - DNA, 25 bp, Homo sapien
cggcgtgtgtcagccttgcccacac

SEQ ID NO: 5818209 - DNA, 25 bp, Homo sapien
gcagccggaaccaggcagcccaagc

SEQ ID NO: 5818210 - DNA, 25 bp, Homo sapien
accacccaaggcctctgcttcccgc

SEQ ID NO: 5818211 - DNA, 25 bp, Homo sapien
ctggtcgcagtggcttacacttgta

SEQ ID NO: 5818212 - DNA, 25 bp, Homo sapien
cacttactggctttacacattgaga

SEQ ID NO: 5818213 - DNA, 25 bp, Homo sapien
gacatgaataaaaatgtggccaaac

SEQ ID NO: 5818214 - DNA, 25 bp, Homo sapien
gttagaggaagaagcatccctgggg

SEQ ID NO: 5818215 - DNA, 25 bp, Homo sapien
accaacaagggagagcaacagaaag

SEQ ID NO: 5818216 - DNA, 25 bp, Homo sapien
agcctgaagaccctcggagccaggg

SEQ ID NO: 5818217 - DNA, 25 bp, Homo sapien
agcggccgcagtcgtgcacgtcagt

SEQ ID NO: 5818218 - DNA, 25 bp, Homo sapien
gataccccagaagcacacgtggctg

SEQ ID NO: 5818219 - DNA, 25 bp, Homo sapien
gtgtgtgccagctcggagacgttcc

SEQ ID NO: 5818220 - DNA, 25 bp, Homo sapien
gctcaaggagatgcaggctgcagtg

SEQ ID NO: 5818221 - DNA, 25 bp, Homo sapien
ccccaaaacgatgcccagggccgtg

SEQ ID NO: 5818222 - DNA, 25 bp, Homo sapien
ccccagcagtgggcaaagctaaatc

SEQ ID NO: 5818223 - DNA, 25 bp, Homo sapien
gcagcgactcagaggaagcccggga

SEQ ID NO: 5818224 - DNA, 25 bp, Homo sapien
ccggaaccaggcagcccaagctgcc

SEQ ID NO: 5818225 - DNA, 25 bp, Homo sapien
tgattgtgccactgcactccagcct

SEQ ID NO: 5818226 - DNA, 25 bp, Homo sapien
ctctggtgcccaggcccgcctcacc

SEQ ID NO: 5818227 - DNA, 25 bp, Homo sapien
gccagggcgtggaaagattcataca

SEQ ID NO: 5818228 - DNA, 25 bp, Homo sapien
cgtgcacgtcagttggcagggtcac

SEQ ID NO: 5818229 - DNA, 25 bp, Homo sapien
ggaaggtggcggccagtggctgaac

SEQ ID NO: 5818230 - DNA, 25 bp, Homo sapien
acctcatgacaaacactccagacat

SEQ ID NO: 5818231 - DNA, 25 bp, Homo sapien
caaatcctttgccttgaaagaacag

SEQ ID NO: 5818232 - DNA, 25 bp, Homo sapien
aaacaagctttaggctggtcgcagt

SEQ ID NO: 5818233 - DNA, 25 bp, Homo sapien
gaggtgggcggattacttgagccca

SEQ ID NO: 5818234 - DNA, 25 bp, Homo sapien
gggtgtggtagtgcatgcctgtagt

SEQ ID NO: 5818235 - DNA, 25 bp, Homo sapien
caagttggggctgaagaagaccctg

SEQ ID NO: 5818236 - DNA, 25 bp, Homo sapien
ccctttgcctggagccctctggccg

SEQ ID NO: 5818237 - DNA, 25 bp, Homo sapien
gcttggtcagaatcttctcaattga

SEQ ID NO: 5818238 - DNA, 25 bp, Homo sapien
taagactagaagtatcagacggcga
